United States Patent Application Publication US 2015/0141320 A1 - sequence listing, part 43

SEQ ID NO: 1672014 - DNA, 15 bp, Homo sapiens
ggaaaaatgtctctt

SEQ ID NO: 1672015 - DNA, 15 bp, Homo sapiens
aggaaaaatgtctct

SEQ ID NO: 1672016 - DNA, 15 bp, Homo sapiens
taggaaaaatgtctc

SEQ ID NO: 1672017 - DNA, 15 bp, Homo sapiens
ctaggaaaaatgtct

SEQ ID NO: 1672018 - DNA, 15 bp, Homo sapiens
actaggaaaaatgtc

SEQ ID NO: 1672019 - DNA, 15 bp, Homo sapiens
aactaggaaaaatgt

SEQ ID NO: 1672020 - DNA, 15 bp, Homo sapiens
aaactaggaaaaatg

SEQ ID NO: 1672021 - DNA, 15 bp, Homo sapiens
gaaactaggaaaaat

SEQ ID NO: 1672022 - DNA, 15 bp, Homo sapiens
tgaaactaggaaaaa

SEQ ID NO: 1672023 - DNA, 15 bp, Homo sapiens
ctgaaactaggaaaa

SEQ ID NO: 1672024 - DNA, 15 bp, Homo sapiens
cctgaaactaggaaa

SEQ ID NO: 1672025 - DNA, 15 bp, Homo sapiens
tcctgaaactaggaa

SEQ ID NO: 1672026 - DNA, 15 bp, Homo sapiens
ttcctgaaactagga

SEQ ID NO: 1672027 - DNA, 15 bp, Homo sapiens
attcctgaaactagg

SEQ ID NO: 1672028 - DNA, 15 bp, Homo sapiens
gattcctgaaactag

SEQ ID NO: 1672029 - DNA, 15 bp, Homo sapiens
ggattcctgaaacta

SEQ ID NO: 1672030 - DNA, 15 bp, Homo sapiens
gggattcctgaaact

SEQ ID NO: 1672031 - DNA, 15 bp, Homo sapiens
ggggattcctgaaac

SEQ ID NO: 1672032 - DNA, 15 bp, Homo sapiens
gggggattcctgaaa

SEQ ID NO: 1672033 - DNA, 15 bp, Homo sapiens
tgggggattcctgaa

SEQ ID NO: 1672034 - DNA, 15 bp, Homo sapiens
ttgggggattcctga

SEQ ID NO: 1672035 - DNA, 15 bp, Homo sapiens
tttgggggattcctg

SEQ ID NO: 1672036 - DNA, 15 bp, Homo sapiens
atttgggggattcct

SEQ ID NO: 1672037 - DNA, 15 bp, Homo sapiens
gatttgggggattcc

SEQ ID NO: 1672038 - DNA, 15 bp, Homo sapiens
tgatttgggggattc

SEQ ID NO: 1672039 - DNA, 15 bp, Homo sapiens
gtgatttgggggatt

SEQ ID NO: 1672040 - DNA, 15 bp, Homo sapiens
agtgatttgggggat

SEQ ID NO: 1672041 - DNA, 15 bp, Homo sapiens
aagtgatttggggga

SEQ ID NO: 1672042 - DNA, 15 bp, Homo sapiens
gaagtgatttggggg

SEQ ID NO: 1672043 - DNA, 15 bp, Homo sapiens
ggaagtgatttgggg

SEQ ID NO: 1672044 - DNA, 15 bp, Homo sapiens
aggaagtgatttggg

SEQ ID NO: 1672045 - DNA, 15 bp, Homo sapiens
gaggaagtgatttgg

SEQ ID NO: 1672046 - DNA, 15 bp, Homo sapiens
tgaggaagtgatttg

SEQ ID NO: 1672047 - DNA, 15 bp, Homo sapiens
atgaggaagtgattt

SEQ ID NO: 1672048 - DNA, 15 bp, Homo sapiens
aatgaggaagtgatt

SEQ ID NO: 1672049 - DNA, 15 bp, Homo sapiens
caatgaggaagtgat

SEQ ID NO: 1672050 - DNA, 15 bp, Homo sapiens
ccaatgaggaagtga

SEQ ID NO: 1672051 - DNA, 15 bp, Homo sapiens
gccaatgaggaagtg

SEQ ID NO: 1672052 - DNA, 15 bp, Homo sapiens
agccaatgaggaagt

SEQ ID NO: 1672053 - DNA, 15 bp, Homo sapiens
aagccaatgaggaag

SEQ ID NO: 1672054 - DNA, 15 bp, Homo sapiens
taagccaatgaggaa

SEQ ID NO: 1672055 - DNA, 15 bp, Homo sapiens
ctaagccaatgagga

SEQ ID NO: 1672056 - DNA, 15 bp, Homo sapiens
actaagccaatgagg

SEQ ID NO: 1672057 - DNA, 15 bp, Homo sapiens
aactaagccaatgag

SEQ ID NO: 1672058 - DNA, 15 bp, Homo sapiens
aaactaagccaatga

SEQ ID NO: 1672059 - DNA, 15 bp, Homo sapiens
taaactaagccaatg

SEQ ID NO: 1672060 - DNA, 15 bp, Homo sapiens
ttaaactaagccaat

SEQ ID NO: 1672061 - DNA, 15 bp, Homo sapiens
tttaaactaagccaa

SEQ ID NO: 1672062 - DNA, 15 bp, Homo sapiens
ctttaaactaagcca

SEQ ID NO: 1672063 - DNA, 15 bp, Homo sapiens
gctttaaactaagcc

SEQ ID NO: 1672064 - DNA, 15 bp, Homo sapiens
ggctttaaactaagc

SEQ ID NO: 1672065 - DNA, 15 bp, Homo sapiens
tggctttaaactaag

SEQ ID NO: 1672066 - DNA, 15 bp, Homo sapiens
ctggctttaaactaa

SEQ ID NO: 1672067 - DNA, 15 bp, Homo sapiens
cctggctttaaacta

SEQ ID NO: 1672068 - DNA, 15 bp, Homo sapiens
tcctggctttaaact

SEQ ID NO: 1672069 - DNA, 15 bp, Homo sapiens
ctcctggctttaaac

SEQ ID NO: 1672070 - DNA, 15 bp, Homo sapiens
tctcctggctttaaa

SEQ ID NO: 1672071 - DNA, 15 bp, Homo sapiens
gtctcctggctttaa

SEQ ID NO: 1672072 - DNA, 15 bp, Homo sapiens
agtctcctggcttta

SEQ ID NO: 1672073 - DNA, 15 bp, Homo sapiens
cagtctcctggcttt

SEQ ID NO: 1672074 - DNA, 15 bp, Homo sapiens
tcagtctcctggctt

SEQ ID NO: 1672075 - DNA, 15 bp, Homo sapiens
atcagtctcctggct

SEQ ID NO: 1672076 - DNA, 15 bp, Homo sapiens
tatcagtctcctggc

SEQ ID NO: 1672077 - DNA, 15 bp, Homo sapiens
ttatcagtctcctgg

SEQ ID NO: 1672078 - DNA, 15 bp, Homo sapiens
tttatcagtctcctg

SEQ ID NO: 1672079 - DNA, 15 bp, Homo sapiens
ttttatcagtctcct

SEQ ID NO: 1672080 - DNA, 15 bp, Homo sapiens
cttttatcagtctcc

SEQ ID NO: 1672081 - DNA, 15 bp, Homo sapiens
ccttttatcagtctc

SEQ ID NO: 1672082 - DNA, 15 bp, Homo sapiens
cccttttatcagtct

SEQ ID NO: 1672083 - DNA, 15 bp, Homo sapiens
gcccttttatcagtc

SEQ ID NO: 1672084 - DNA, 15 bp, Homo sapiens
agcccttttatcagt

SEQ ID NO: 1672085 - DNA, 15 bp, Homo sapiens
gagcccttttatcag

SEQ ID NO: 1672086 - DNA, 15 bp, Homo sapiens
tgagcccttttatca

SEQ ID NO: 1672087 - DNA, 15 bp, Homo sapiens
ctgagcccttttatc

SEQ ID NO: 1672088 - DNA, 15 bp, Homo sapiens
cctgagcccttttat

SEQ ID NO: 1672089 - DNA, 15 bp, Homo sapiens
ccctgagccctttta

SEQ ID NO: 1672090 - DNA, 15 bp, Homo sapiens
accctgagccctttt

SEQ ID NO: 1672091 - DNA, 15 bp, Homo sapiens
aaccctgagcccttt

SEQ ID NO: 1672092 - DNA, 15 bp, Homo sapiens
aaaccctgagccctt

SEQ ID NO: 1672093 - DNA, 15 bp, Homo sapiens
caaaccctgagccct

SEQ ID NO: 1672094 - DNA, 15 bp, Homo sapiens
acaaaccctgagccc

SEQ ID NO: 1672095 - DNA, 15 bp, Homo sapiens
aacaaaccctgagcc

SEQ ID NO: 1672096 - DNA, 15 bp, Homo sapiens
gaacaaaccctgagc

SEQ ID NO: 1672097 - DNA, 15 bp, Homo sapiens
agaacaaaccctgag

SEQ ID NO: 1672098 - DNA, 15 bp, Homo sapiens
aagaacaaaccctga

SEQ ID NO: 1672099 - DNA, 15 bp, Homo sapiens
aaagaacaaaccctg

SEQ ID NO: 1672100 - DNA, 15 bp, Homo sapiens
taaagaacaaaccct

SEQ ID NO: 1672101 - DNA, 15 bp, Homo sapiens
ttaaagaacaaaccc

SEQ ID NO: 1672102 - DNA, 15 bp, Homo sapiens
attaaagaacaaacc

SEQ ID NO: 1672103 - DNA, 15 bp, Homo sapiens
aattaaagaacaaac

SEQ ID NO: 1672104 - DNA, 15 bp, Homo sapiens
gaattaaagaacaaa

SEQ ID NO: 1672105 - DNA, 15 bp, Homo sapiens
tgaattaaagaacaa

SEQ ID NO: 1672106 - DNA, 15 bp, Homo sapiens
atgaattaaagaaca

SEQ ID NO: 1672107 - DNA, 15 bp, Homo sapiens
aatgaattaaagaac

SEQ ID NO: 1672108 - DNA, 15 bp, Homo sapiens
taatgaattaaagaa

SEQ ID NO: 1672109 - DNA, 15 bp, Homo sapiens
ttaatgaattaaaga

SEQ ID NO: 1672110 - DNA, 15 bp, Homo sapiens
gttaatgaattaaag

SEQ ID NO: 1672111 - DNA, 15 bp, Homo sapiens
agttaatgaattaaa

SEQ ID NO: 1672112 - DNA, 15 bp, Homo sapiens
tagttaatgaattaa

SEQ ID NO: 1672113 - DNA, 15 bp, Homo sapiens
ttagttaatgaatta

SEQ ID NO: 1672114 - DNA, 15 bp, Homo sapiens
tttagttaatgaatt

SEQ ID NO: 1672115 - DNA, 15 bp, Homo sapiens
gtttagttaatgaat

SEQ ID NO: 1672116 - DNA, 15 bp, Homo sapiens
tgtttagttaatgaa

SEQ ID NO: 1672117 - DNA, 15 bp, Homo sapiens
atgtttagttaatga

SEQ ID NO: 1672118 - DNA, 15 bp, Homo sapiens
aatgtttagttaatg

SEQ ID NO: 1672119 - DNA, 15 bp, Homo sapiens
gaatgtttagttaat

SEQ ID NO: 1672120 - DNA, 15 bp, Homo sapiens
agaatgtttagttaa

SEQ ID NO: 1672121 - DNA, 15 bp, Homo sapiens
cagaatgtttagtta

SEQ ID NO: 1672122 - DNA, 15 bp, Homo sapiens
gcagaatgtttagtt

SEQ ID NO: 1672123 - DNA, 15 bp, Homo sapiens
agcagaatgtttagt

SEQ ID NO: 1672124 - DNA, 15 bp, Homo sapiens
aagcagaatgtttag

SEQ ID NO: 1672125 - DNA, 15 bp, Homo sapiens
aaagcagaatgttta

SEQ ID NO: 1672126 - DNA, 15 bp, Homo sapiens
aaaagcagaatgttt

SEQ ID NO: 1672127 - DNA, 15 bp, Homo sapiens
taaaagcagaatgtt

SEQ ID NO: 1672128 - DNA, 15 bp, Homo sapiens
ataaaagcagaatgt

SEQ ID NO: 1672129 - DNA, 15 bp, Homo sapiens
aataaaagcagaatg

SEQ ID NO: 1672130 - DNA, 15 bp, Homo sapiens
taataaaagcagaat

SEQ ID NO: 1672131 - DNA, 15 bp, Homo sapiens
gtaataaaagcagaa

SEQ ID NO: 1672132 - DNA, 15 bp, Homo sapiens
tgtaataaaagcaga

SEQ ID NO: 1672133 - DNA, 15 bp, Homo sapiens
ctgtaataaaagcag

SEQ ID NO: 1672134 - DNA, 15 bp, Homo sapiens
actgtaataaaagca

SEQ ID NO: 1672135 - DNA, 15 bp, Homo sapiens
aactgtaataaaagc

SEQ ID NO: 1672136 - DNA, 15 bp, Homo sapiens
taactgtaataaaag

SEQ ID NO: 1672137 - DNA, 15 bp, Homo sapiens
ttaactgtaataaaa

SEQ ID NO: 1672138 - DNA, 15 bp, Homo sapiens
tttaactgtaataaa

SEQ ID NO: 1672139 - DNA, 15 bp, Homo sapiens
atttaactgtaataa

SEQ ID NO: 1672140 - DNA, 15 bp, Homo sapiens
catttaactgtaata

SEQ ID NO: 1672141 - DNA, 15 bp, Homo sapiens
ccatttaactgtaat

SEQ ID NO: 1672142 - DNA, 15 bp, Homo sapiens
accatttaactgtaa

SEQ ID NO: 1672143 - DNA, 15 bp, Homo sapiens
aaccatttaactgta

SEQ ID NO: 1672144 - DNA, 15 bp, Homo sapiens
gaaccatttaactgt

SEQ ID NO: 1672145 - DNA, 15 bp, Homo sapiens
tgaaccatttaactg

SEQ ID NO: 1672146 - DNA, 15 bp, Homo sapiens
ttgaaccatttaact

SEQ ID NO: 1672147 - DNA, 15 bp, Homo sapiens
cttgaaccatttaac

SEQ ID NO: 1672148 - DNA, 15 bp, Homo sapiens
tcttgaaccatttaa

SEQ ID NO: 1672149 - DNA, 15 bp, Homo sapiens
atcttgaaccattta

SEQ ID NO: 1672150 - DNA, 15 bp, Homo sapiens
catcttgaaccattt

SEQ ID NO: 1672151 - DNA, 15 bp, Homo sapiens
acatcttgaaccatt

SEQ ID NO: 1672152 - DNA, 15 bp, Homo sapiens
tacatcttgaaccat

SEQ ID NO: 1672153 - DNA, 15 bp, Homo sapiens
ttacatcttgaacca

SEQ ID NO: 1672154 - DNA, 15 bp, Homo sapiens
gttacatcttgaacc

SEQ ID NO: 1672155 - DNA, 15 bp, Homo sapiens
tgttacatcttgaac

SEQ ID NO: 1672156 - DNA, 15 bp, Homo sapiens
ttgttacatcttgaa

SEQ ID NO: 1672157 - DNA, 15 bp, Homo sapiens
gttgttacatcttga

SEQ ID NO: 1672158 - DNA, 15 bp, Homo sapiens
agttgttacatcttg

SEQ ID NO: 1672159 - DNA, 15 bp, Homo sapiens
tagttgttacatctt

SEQ ID NO: 1672160 - DNA, 15 bp, Homo sapiens
ctagttgttacatct

SEQ ID NO: 1672161 - DNA, 15 bp, Homo sapiens
actagttgttacatc

SEQ ID NO: 1672162 - DNA, 15 bp, Homo sapiens
aactagttgttacat

SEQ ID NO: 1672163 - DNA, 15 bp, Homo sapiens
aaactagttgttaca

SEQ ID NO: 1672164 - DNA, 15 bp, Homo sapiens
aaaactagttgttac

SEQ ID NO: 1672165 - DNA, 15 bp, Homo sapiens
taaaactagttgtta

SEQ ID NO: 1672166 - DNA, 15 bp, Homo sapiens
ttaaaactagttgtt

SEQ ID NO: 1672167 - DNA, 15 bp, Homo sapiens
tttaaaactagttgt

SEQ ID NO: 1672168 - DNA, 15 bp, Homo sapiens
ctttaaaactagttg

SEQ ID NO: 1672169 - DNA, 15 bp, Homo sapiens
cctttaaaactagtt

SEQ ID NO: 1672170 - DNA, 15 bp, Homo sapiens
acctttaaaactagt

SEQ ID NO: 1672171 - DNA, 15 bp, Homo sapiens
tacctttaaaactag

SEQ ID NO: 1672172 - DNA, 15 bp, Homo sapiens
atacctttaaaacta

SEQ ID NO: 1672173 - DNA, 15 bp, Homo sapiens
aatacctttaaaact

SEQ ID NO: 1672174 - DNA, 15 bp, Homo sapiens
aaatacctttaaaac

SEQ ID NO: 1672175 - DNA, 15 bp, Homo sapiens
caaatacctttaaaa

SEQ ID NO: 1672176 - DNA, 15 bp, Homo sapiens
gcaaatacctttaaa

SEQ ID NO: 1672177 - DNA, 15 bp, Homo sapiens
agcaaatacctttaa

SEQ ID NO: 1672178 - DNA, 15 bp, Homo sapiens
gagcaaataccttta

SEQ ID NO: 1672179 - DNA, 15 bp, Homo sapiens
tgagcaaataccttt

SEQ ID NO: 1672180 - DNA, 15 bp, Homo sapiens
atgagcaaatacctt

SEQ ID NO: 1672181 - DNA, 15 bp, Homo sapiens
aatgagcaaatacct

SEQ ID NO: 1672182 - DNA, 15 bp, Homo sapiens
caatgagcaaatacc

SEQ ID NO: 1672183 - DNA, 15 bp, Homo sapiens
ccaatgagcaaatac

SEQ ID NO: 1672184 - DNA, 15 bp, Homo sapiens
accaatgagcaaata

SEQ ID NO: 1672185 - DNA, 15 bp, Homo sapiens
gaccaatgagcaaat

SEQ ID NO: 1672186 - DNA, 15 bp, Homo sapiens
agaccaatgagcaaa

SEQ ID NO: 1672187 - DNA, 15 bp, Homo sapiens
cagaccaatgagcaa

SEQ ID NO: 1672188 - DNA, 15 bp, Homo sapiens
ccagaccaatgagca

SEQ ID NO: 1672189 - DNA, 15 bp, Homo sapiens
gccagaccaatgagc

SEQ ID NO: 1672190 - DNA, 15 bp, Homo sapiens
agccagaccaatgag

SEQ ID NO: 1672191 - DNA, 15 bp, Homo sapiens
aagccagaccaatga

SEQ ID NO: 1672192 - DNA, 15 bp, Homo sapiens
taagccagaccaatg

SEQ ID NO: 1672193 - DNA, 15 bp, Homo sapiens
ctaagccagaccaat

SEQ ID NO: 1672194 - DNA, 15 bp, Homo sapiens
tctaagccagaccaa

SEQ ID NO: 1672195 - DNA, 15 bp, Homo sapiens
ctctaagccagacca

SEQ ID NO: 1672196 - DNA, 15 bp, Homo sapiens
tctctaagccagacc

SEQ ID NO: 1672197 - DNA, 15 bp, Homo sapiens
gtctctaagccagac

SEQ ID NO: 1672198 - DNA, 15 bp, Homo sapiens
tgtctctaagccaga

SEQ ID NO: 1672199 - DNA, 15 bp, Homo sapiens
ctgtctctaagccag

SEQ ID NO: 1672200 - DNA, 15 bp, Homo sapiens
cctgtctctaagcca

SEQ ID NO: 1672201 - DNA, 15 bp, Homo sapiens
tcctgtctctaagcc

SEQ ID NO: 1672202 - DNA, 15 bp, Homo sapiens
ttcctgtctctaagc

SEQ ID NO: 1672203 - DNA, 15 bp, Homo sapiens
cttcctgtctctaag

SEQ ID NO: 1672204 - DNA, 15 bp, Homo sapiens
tcttcctgtctctaa

SEQ ID NO: 1672205 - DNA, 15 bp, Homo sapiens
gtcttcctgtctcta

SEQ ID NO: 1672206 - DNA, 15 bp, Homo sapiens
tgtcttcctgtctct

SEQ ID NO: 1672207 - DNA, 15 bp, Homo sapiens
atgtcttcctgtctc

SEQ ID NO: 1672208 - DNA, 15 bp, Homo sapiens
tatgtcttcctgtct

SEQ ID NO: 1672209 - DNA, 15 bp, Homo sapiens
atatgtcttcctgtc

SEQ ID NO: 1672210 - DNA, 15 bp, Homo sapiens
catatgtcttcctgt

SEQ ID NO: 1672211 - DNA, 15 bp, Homo sapiens
tcatatgtcttcctg

SEQ ID NO: 1672212 - DNA, 15 bp, Homo sapiens
ctcatatgtcttcct

SEQ ID NO: 1672213 - DNA, 15 bp, Homo sapiens
gctcatatgtcttcc

SEQ ID NO: 1672214 - DNA, 15 bp, Homo sapiens
tgctcatatgtcttc

SEQ ID NO: 1672215 - DNA, 15 bp, Homo sapiens
ttgctcatatgtctt

SEQ ID NO: 1672216 - DNA, 15 bp, Homo sapiens
attgctcatatgtct

SEQ ID NO: 1672217 - DNA, 15 bp, Homo sapiens
tattgctcatatgtc

SEQ ID NO: 1672218 - DNA, 15 bp, Homo sapiens
ttattgctcatatgt

SEQ ID NO: 1672219 - DNA, 15 bp, Homo sapiens
tttattgctcatatg

SEQ ID NO: 1672220 - DNA, 15 bp, Homo sapiens
ttttattgctcatat

SEQ ID NO: 1672221 - DNA, 15 bp, Homo sapiens
tttttattgctcata

SEQ ID NO: 1672222 - DNA, 15 bp, Homo sapiens
ttttttattgctcat

SEQ ID NO: 1672223 - DNA, 15 bp, Homo sapiens
tttttttattgctca

SEQ ID NO: 1672224 - DNA, 15 bp, Homo sapiens
ttttttttattgctc

SEQ ID NO: 1672225 - DNA, 15 bp, Homo sapiens
cttttttttattgct

SEQ ID NO: 1672226 - DNA, 15 bp, Homo sapiens
tcttttttttattgc

SEQ ID NO: 1672227 - DNA, 15 bp, Homo sapiens
atcttttttttattg

SEQ ID NO: 1672228 - DNA, 15 bp, Homo sapiens
aatcttttttttatt

SEQ ID NO: 1672229 - DNA, 15 bp, Homo sapiens
gaatcttttttttat

SEQ ID NO: 1672230 - DNA, 15 bp, Homo sapiens
agaatctttttttta

SEQ ID NO: 1672231 - DNA, 15 bp, Homo sapiens
aagaatctttttttt

SEQ ID NO: 1672232 - DNA, 15 bp, Homo sapiens
aaagaatcttttttt

SEQ ID NO: 1672233 - DNA, 15 bp, Homo sapiens
aaaagaatctttttt

SEQ ID NO: 1672234 - DNA, 15 bp, Homo sapiens
caaaagaatcttttt

SEQ ID NO: 1672235 - DNA, 15 bp, Homo sapiens
gcaaaagaatctttt

SEQ ID NO: 1672236 - DNA, 15 bp, Homo sapiens
tgcaaaagaatcttt

SEQ ID NO: 1672237 - DNA, 15 bp, Homo sapiens
atgcaaaagaatctt

SEQ ID NO: 1672238 - DNA, 15 bp, Homo sapiens
aatgcaaaagaatct

SEQ ID NO: 1672239 - DNA, 15 bp, Homo sapiens
aaatgcaaaagaatc

SEQ ID NO: 1672240 - DNA, 15 bp, Homo sapiens
taaatgcaaaagaat

SEQ ID NO: 1672241 - DNA, 15 bp, Homo sapiens
gtaaatgcaaaagaa

SEQ ID NO: 1672242 - DNA, 15 bp, Homo sapiens
ggtaaatgcaaaaga

SEQ ID NO: 1672243 - DNA, 15 bp, Homo sapiens
tggtaaatgcaaaag

SEQ ID NO: 1672244 - DNA, 15 bp, Homo sapiens
ttggtaaatgcaaaa

SEQ ID NO: 1672245 - DNA, 15 bp, Homo sapiens
attggtaaatgcaaa

SEQ ID NO: 1672246 - DNA, 15 bp, Homo sapiens
aattggtaaatgcaa

SEQ ID NO: 1672247 - DNA, 15 bp, Homo sapiens
aaattggtaaatgca

SEQ ID NO: 1672248 - DNA, 15 bp, Homo sapiens
taaattggtaaatgc

SEQ ID NO: 1672249 - DNA, 15 bp, Homo sapiens
ctaaattggtaaatg

SEQ ID NO: 1672250 - DNA, 15 bp, Homo sapiens
actaaattggtaaat

SEQ ID NO: 1672251 - DNA, 15 bp, Homo sapiens
tactaaattggtaaa

SEQ ID NO: 1672252 - DNA, 15 bp, Homo sapiens
ttactaaattggtaa

SEQ ID NO: 1672253 - DNA, 15 bp, Homo sapiens
tttactaaattggta

SEQ ID NO: 1672254 - DNA, 15 bp, Homo sapiens
ttttactaaattggt

SEQ ID NO: 1672255 - DNA, 15 bp, Homo sapiens
tttttactaaattgg

SEQ ID NO: 1672256 - DNA, 15 bp, Homo sapiens
atttttactaaattg

SEQ ID NO: 1672257 - DNA, 15 bp, Homo sapiens
aatttttactaaatt

SEQ ID NO: 1672258 - DNA, 15 bp, Homo sapiens
aaatttttactaaat

SEQ ID NO: 1672259 - DNA, 15 bp, Homo sapiens
taaatttttactaaa

SEQ ID NO: 1672260 - DNA, 15 bp, Homo sapiens
ataaatttttactaa

SEQ ID NO: 1672261 - DNA, 15 bp, Homo sapiens
aataaatttttacta

SEQ ID NO: 1672262 - DNA, 15 bp, Homo sapiens
taataaatttttact

SEQ ID NO: 1672263 - DNA, 15 bp, Homo sapiens
ttaataaatttttac

SEQ ID NO: 1672264 - DNA, 15 bp, Homo sapiens
tttaataaattttta

SEQ ID NO: 1672265 - DNA, 15 bp, Homo sapiens
ttttaataaattttt

SEQ ID NO: 1672266 - DNA, 15 bp, Homo sapiens
gttttaataaatttt

SEQ ID NO: 1672267 - DNA, 15 bp, Homo sapiens
agttttaataaattt

SEQ ID NO: 1672268 - DNA, 15 bp, Homo sapiens
cagttttaataaatt

SEQ ID NO: 1672269 - DNA, 15 bp, Homo sapiens
tcagttttaataaat

SEQ ID NO: 1672270 - DNA, 15 bp, Homo sapiens
ttcagttttaataaa

SEQ ID NO: 1672271 - DNA, 15 bp, Homo sapiens
attcagttttaataa

SEQ ID NO: 1672272 - DNA, 15 bp, Homo sapiens
tattcagttttaata

SEQ ID NO: 1672273 - DNA, 15 bp, Homo sapiens
ttattcagttttaat

SEQ ID NO: 1672274 - DNA, 15 bp, Homo sapiens
tttattcagttttaa

SEQ ID NO: 1672275 - DNA, 15 bp, Homo sapiens
ctttattcagtttta

SEQ ID NO: 1672276 - DNA, 15 bp, Homo sapiens
actttattcagtttt

SEQ ID NO: 1672277 - DNA, 15 bp, Homo sapiens
cactttattcagttt

SEQ ID NO: 1672278 - DNA, 15 bp, Homo sapiens
gcactttattcagtt

SEQ ID NO: 1672279 - DNA, 15 bp, Homo sapiens
agcactttattcagt

SEQ ID NO: 1672280 - DNA, 15 bp, Homo sapiens
cagcactttattcag

SEQ ID NO: 1672281 - DNA, 15 bp, Homo sapiens
acagcactttattca

SEQ ID NO: 1672282 - DNA, 15 bp, Homo sapiens
aacagcactttattc

SEQ ID NO: 1672283 - DNA, 15 bp, Homo sapiens
gaacagcactttatt

SEQ ID NO: 1672284 - DNA, 15 bp, Homo sapiens
agaacagcactttat

SEQ ID NO: 1672285 - DNA, 15 bp, Homo sapiens
aagaacagcacttta

SEQ ID NO: 1672286 - DNA, 15 bp, Homo sapiens
taagaacagcacttt

SEQ ID NO: 1672287 - DNA, 15 bp, Homo sapiens
ttaagaacagcactt

SEQ ID NO: 1672288 - DNA, 15 bp, Homo sapiens
cttaagaacagcact

SEQ ID NO: 1672289 - DNA, 15 bp, Homo sapiens
acttaagaacagcac

SEQ ID NO: 1672290 - DNA, 15 bp, Homo sapiens
cacttaagaacagca

SEQ ID NO: 1672291 - DNA, 15 bp, Homo sapiens
gcacttaagaacagc

SEQ ID NO: 1672292 - DNA, 15 bp, Homo sapiens
agcacttaagaacag

SEQ ID NO: 1672293 - DNA, 15 bp, Homo sapiens
aagcacttaagaaca

SEQ ID NO: 1672294 - DNA, 15 bp, Homo sapiens
caagcacttaagaac

SEQ ID NO: 1672295 - DNA, 15 bp, Homo sapiens
tcaagcacttaagaa

SEQ ID NO: 1672296 - DNA, 15 bp, Homo sapiens
ttcaagcacttaaga

SEQ ID NO: 1672297 - DNA, 15 bp, Homo sapiens
tttcaagcacttaag

SEQ ID NO: 1672298 - DNA, 15 bp, Homo sapiens
ctttcaagcacttaa

SEQ ID NO: 1672299 - DNA, 15 bp, Homo sapiens
tctttcaagcactta

SEQ ID NO: 1672300 - DNA, 15 bp, Homo sapiens
gtctttcaagcactt

SEQ ID NO: 1672301 - DNA, 15 bp, Homo sapiens
cgtctttcaagcact

SEQ ID NO: 1672302 - DNA, 15 bp, Homo sapiens
acgtctttcaagcac

SEQ ID NO: 1672303 - DNA, 15 bp, Homo sapiens
tacgtctttcaagca

SEQ ID NO: 1672304 - DNA, 15 bp, Homo sapiens
ttacgtctttcaagc

SEQ ID NO: 1672305 - DNA, 15 bp, Homo sapiens
tttacgtctttcaag

SEQ ID NO: 1672306 - DNA, 15 bp, Homo sapiens
gtttacgtctttcaa

SEQ ID NO: 1672307 - DNA, 15 bp, Homo sapiens
ggtttacgtctttca

SEQ ID NO: 1672308 - DNA, 15 bp, Homo sapiens
tggtttacgtctttc

SEQ ID NO: 1672309 - DNA, 15 bp, Homo sapiens
ttggtttacgtcttt

SEQ ID NO: 1672310 - DNA, 15 bp, Homo sapiens
tttggtttacgtctt

SEQ ID NO: 1672311 - DNA, 15 bp, Homo sapiens
ctttggtttacgtct

SEQ ID NO: 1672312 - DNA, 15 bp, Homo sapiens
actttggtttacgtc

SEQ ID NO: 1672313 - DNA, 15 bp, Homo sapiens
cactttggtttacgt

SEQ ID NO: 1672314 - DNA, 15 bp, Homo sapiens
gcactttggtttacg

SEQ ID NO: 1672315 - DNA, 15 bp, Homo sapiens
tgcactttggtttac

SEQ ID NO: 1672316 - DNA, 15 bp, Homo sapiens
gtgcactttggttta

SEQ ID NO: 1672317 - DNA, 15 bp, Homo sapiens
agtgcactttggttt

SEQ ID NO: 1672318 - DNA, 15 bp, Homo sapiens
aagtgcactttggtt

SEQ ID NO: 1672319 - DNA, 15 bp, Homo sapiens
aaagtgcactttggt

SEQ ID NO: 1672320 - DNA, 15 bp, Homo sapiens
taaagtgcactttgg

SEQ ID NO: 1672321 - DNA, 15 bp, Homo sapiens
ataaagtgcactttg

SEQ ID NO: 1672322 - DNA, 15 bp, Homo sapiens
gataaagtgcacttt

SEQ ID NO: 1672323 - DNA, 15 bp, Homo sapiens
agataaagtgcactt

SEQ ID NO: 1672324 - DNA, 15 bp, Homo sapiens
gagataaagtgcact

SEQ ID NO: 1672325 - DNA, 15 bp, Homo sapiens
tgagataaagtgcac

SEQ ID NO: 1672326 - DNA, 15 bp, Homo sapiens
atgagataaagtgca

SEQ ID NO: 1672327 - DNA, 15 bp, Homo sapiens
aatgagataaagtgc

SEQ ID NO: 1672328 - DNA, 15 bp, Homo sapiens
aaatgagataaagtg

SEQ ID NO: 1672329 - DNA, 15 bp, Homo sapiens
taaatgagataaagt

SEQ ID NO: 1672330 - DNA, 15 bp, Homo sapiens
ataaatgagataaag

SEQ ID NO: 1672331 - DNA, 15 bp, Homo sapiens
gataaatgagataaa

SEQ ID NO: 1672332 - DNA, 15 bp, Homo sapiens
agataaatgagataa

SEQ ID NO: 1672333 - DNA, 15 bp, Homo sapiens
aagataaatgagata

SEQ ID NO: 1672334 - DNA, 15 bp, Homo sapiens
taagataaatgagat

SEQ ID NO: 1672335 - DNA, 15 bp, Homo sapiens
ataagataaatgaga

SEQ ID NO: 1672336 - DNA, 15 bp, Homo sapiens
cataagataaatgag

SEQ ID NO: 1672337 - DNA, 15 bp, Homo sapiens
ccataagataaatga

SEQ ID NO: 1672338 - DNA, 15 bp, Homo sapiens
accataagataaatg

SEQ ID NO: 1672339 - DNA, 15 bp, Homo sapiens
caccataagataaat

SEQ ID NO: 1672340 - DNA, 15 bp, Homo sapiens
ccaccataagataaa

SEQ ID NO: 1672341 - DNA, 15 bp, Homo sapiens
tccaccataagataa

SEQ ID NO: 1672342 - DNA, 15 bp, Homo sapiens
ttccaccataagata

SEQ ID NO: 1672343 - DNA, 15 bp, Homo sapiens
tttccaccataagat

SEQ ID NO: 1672344 - DNA, 15 bp, Homo sapiens
gtttccaccataaga

SEQ ID NO: 1672345 - DNA, 15 bp, Homo sapiens
tgtttccaccataag

SEQ ID NO: 1672346 - DNA, 15 bp, Homo sapiens
gtgtttccaccataa

SEQ ID NO: 1672347 - DNA, 15 bp, Homo sapiens
tgtgtttccaccata

SEQ ID NO: 1672348 - DNA, 15 bp, Homo sapiens
ctgtgtttccaccat

SEQ ID NO: 1672349 - DNA, 15 bp, Homo sapiens
cctgtgtttccacca

SEQ ID NO: 1672350 - DNA, 15 bp, Homo sapiens
tcctgtgtttccacc

SEQ ID NO: 1672351 - DNA, 15 bp, Homo sapiens
ttcctgtgtttccac

SEQ ID NO: 1672352 - DNA, 15 bp, Homo sapiens
gttcctgtgtttcca

SEQ ID NO: 1672353 - DNA, 15 bp, Homo sapiens
tgttcctgtgtttcc

SEQ ID NO: 1672354 - DNA, 15 bp, Homo sapiens
ttgttcctgtgtttc

SEQ ID NO: 1672355 - DNA, 15 bp, Homo sapiens
tttgttcctgtgttt

SEQ ID NO: 1672356 - DNA, 15 bp, Homo sapiens
atttgttcctgtgtt

SEQ ID NO: 1672357 - DNA, 15 bp, Homo sapiens
aatttgttcctgtgt

SEQ ID NO: 1672358 - DNA, 15 bp, Homo sapiens
gaatttgttcctgtg

SEQ ID NO: 1672359 - DNA, 15 bp, Homo sapiens
agaatttgttcctgt

SEQ ID NO: 1672360 - DNA, 15 bp, Homo sapiens
gagaatttgttcctg

SEQ ID NO: 1672361 - DNA, 15 bp, Homo sapiens
agagaatttgttcct

SEQ ID NO: 1672362 - DNA, 15 bp, Homo sapiens
tagagaatttgttcc

SEQ ID NO: 1672363 - DNA, 15 bp, Homo sapiens
ttagagaatttgttc

SEQ ID NO: 1672364 - DNA, 15 bp, Homo sapiens
cttagagaatttgtt

SEQ ID NO: 1672365 - DNA, 15 bp, Homo sapiens
tcttagagaatttgt

SEQ ID NO: 1672366 - DNA, 15 bp, Homo sapiens
ctcttagagaatttg

SEQ ID NO: 1672367 - DNA, 15 bp, Homo sapiens
tctcttagagaattt

SEQ ID NO: 1672368 - DNA, 15 bp, Homo sapiens
gtctcttagagaatt

SEQ ID NO: 1672369 - DNA, 15 bp, Homo sapiens
agtctcttagagaat

SEQ ID NO: 1672370 - DNA, 15 bp, Homo sapiens
cagtctcttagagaa

SEQ ID NO: 1672371 - DNA, 15 bp, Homo sapiens
acagtctcttagaga

SEQ ID NO: 1672372 - DNA, 15 bp, Homo sapiens
cacagtctcttagag

SEQ ID NO: 1672373 - DNA, 15 bp, Homo sapiens
acacagtctcttaga

SEQ ID NO: 1672374 - DNA, 15 bp, Homo sapiens
aacacagtctcttag

SEQ ID NO: 1672375 - DNA, 15 bp, Homo sapiens
aaacacagtctctta

SEQ ID NO: 1672376 - DNA, 15 bp, Homo sapiens
gaaacacagtctctt

SEQ ID NO: 1672377 - DNA, 15 bp, Homo sapiens
agaaacacagtctct

SEQ ID NO: 1672378 - DNA, 15 bp, Homo sapiens
aagaaacacagtctc

SEQ ID NO: 1672379 - DNA, 15 bp, Homo sapiens
aaagaaacacagtct

SEQ ID NO: 1672380 - DNA, 15 bp, Homo sapiens
taaagaaacacagtc

SEQ ID NO: 1672381 - DNA, 15 bp, Homo sapiens
ctaaagaaacacagt

SEQ ID NO: 1672382 - DNA, 15 bp, Homo sapiens
actaaagaaacacag

SEQ ID NO: 1672383 - DNA, 15 bp, Homo sapiens
aactaaagaaacaca

SEQ ID NO: 1672384 - DNA, 15 bp, Homo sapiens
caactaaagaaacac

SEQ ID NO: 1672385 - DNA, 15 bp, Homo sapiens
tcaactaaagaaaca

SEQ ID NO: 1672386 - DNA, 15 bp, Homo sapiens
ctcaactaaagaaac

SEQ ID NO: 1672387 - DNA, 15 bp, Homo sapiens
tctcaactaaagaaa

SEQ ID NO: 1672388 - DNA, 15 bp, Homo sapiens
ttctcaactaaagaa

SEQ ID NO: 1672389 - DNA, 15 bp, Homo sapiens
cttctcaactaaaga

SEQ ID NO: 1672390 - DNA, 15 bp, Homo sapiens
tcttctcaactaaag

SEQ ID NO: 1672391 - DNA, 15 bp, Homo sapiens
ttcttctcaactaaa

SEQ ID NO: 1672392 - DNA, 15 bp, Homo sapiens
tttcttctcaactaa

SEQ ID NO: 1672393 - DNA, 15 bp, Homo sapiens
gtttcttctcaacta

SEQ ID NO: 1672394 - DNA, 15 bp, Homo sapiens
agtttcttctcaact

SEQ ID NO: 1672395 - DNA, 15 bp, Homo sapiens
aagtttcttctcaac

SEQ ID NO: 1672396 - DNA, 15 bp, Homo sapiens
gaagtttcttctcaa

SEQ ID NO: 1672397 - DNA, 15 bp, Homo sapiens
tgaagtttcttctca

SEQ ID NO: 1672398 - DNA, 15 bp, Homo sapiens
atgaagtttcttctc

SEQ ID NO: 1672399 - DNA, 15 bp, Homo sapiens
aatgaagtttcttct

SEQ ID NO: 1672400 - DNA, 15 bp, Homo sapiens
caatgaagtttcttc

SEQ ID NO: 1672401 - DNA, 15 bp, Homo sapiens
tcaatgaagtttctt

SEQ ID NO: 1672402 - DNA, 15 bp, Homo sapiens
ctcaatgaagtttct

SEQ ID NO: 1672403 - DNA, 15 bp, Homo sapiens
actcaatgaagtttc

SEQ ID NO: 1672404 - DNA, 15 bp, Homo sapiens
tactcaatgaagttt

SEQ ID NO: 1672405 - DNA, 15 bp, Homo sapiens
ctactcaatgaagtt

SEQ ID NO: 1672406 - DNA, 15 bp, Homo sapiens
gctactcaatgaagt

SEQ ID NO: 1672407 - DNA, 15 bp, Homo sapiens
agctactcaatgaag

SEQ ID NO: 1672408 - DNA, 15 bp, Homo sapiens
cagctactcaatgaa

SEQ ID NO: 1672409 - DNA, 15 bp, Homo sapiens
acagctactcaatga

SEQ ID NO: 1672410 - DNA, 15 bp, Homo sapiens
cacagctactcaatg

SEQ ID NO: 1672411 - DNA, 15 bp, Homo sapiens
tcacagctactcaat

SEQ ID NO: 1672412 - DNA, 15 bp, Homo sapiens
atcacagctactcaa

SEQ ID NO: 1672413 - DNA, 15 bp, Homo sapiens
tatcacagctactca

SEQ ID NO: 1672414 - DNA, 15 bp, Homo sapiens
atatcacagctactc

SEQ ID NO: 1672415 - DNA, 15 bp, Homo sapiens
catatcacagctact

SEQ ID NO: 1672416 - DNA, 15 bp, Homo sapiens
acatatcacagctac

SEQ ID NO: 1672417 - DNA, 15 bp, Homo sapiens
aacatatcacagcta

SEQ ID NO: 1672418 - DNA, 15 bp, Homo sapiens
gaacatatcacagct

SEQ ID NO: 1672419 - DNA, 15 bp, Homo sapiens
cgaacatatcacagc

SEQ ID NO: 1672420 - DNA, 15 bp, Homo sapiens
tcgaacatatcacag

SEQ ID NO: 1672421 - DNA, 15 bp, Homo sapiens
atcgaacatatcaca

SEQ ID NO: 1672422 - DNA, 15 bp, Homo sapiens
tatcgaacatatcac

SEQ ID NO: 1672423 - DNA, 15 bp, Homo sapiens
gtatcgaacatatca

SEQ ID NO: 1672424 - DNA, 15 bp, Homo sapiens
aacgcatgtcaaagg

SEQ ID NO: 1672425 - DNA, 15 bp, Homo sapiens
caacgcatgtcaaag

SEQ ID NO: 1672426 - DNA, 15 bp, Homo sapiens
acaacgcatgtcaaa

SEQ ID NO: 1672427 - DNA, 15 bp, Homo sapiens
tacaacgcatgtcaa

SEQ ID NO: 1672428 - DNA, 15 bp, Homo sapiens
ctacaacgcatgtca

SEQ ID NO: 1672429 - DNA, 15 bp, Homo sapiens
tctacaacgcatgtc

SEQ ID NO: 1672430 - DNA, 15 bp, Homo sapiens
ctctacaacgcatgt

SEQ ID NO: 1672431 - DNA, 15 bp, Homo sapiens
actctacaacgcatg

SEQ ID NO: 1672432 - DNA, 15 bp, Homo sapiens
cactctacaacgcat

SEQ ID NO: 1672433 - DNA, 15 bp, Homo sapiens
ccactctacaacgca

SEQ ID NO: 1672434 - DNA, 15 bp, Homo sapiens
cccactctacaacgc

SEQ ID NO: 1672435 - DNA, 15 bp, Homo sapiens
tcccactctacaacg

SEQ ID NO: 1672436 - DNA, 15 bp, Homo sapiens
ttcccactctacaac

SEQ ID NO: 1672437 - DNA, 15 bp, Homo sapiens
attcccactctacaa

SEQ ID NO: 1672438 - DNA, 15 bp, Homo sapiens
tattcccactctaca

SEQ ID NO: 1672439 - DNA, 15 bp, Homo sapiens
ttattcccactctac

SEQ ID NO: 1672440 - DNA, 15 bp, Homo sapiens
cttattcccactcta

SEQ ID NO: 1672441 - DNA, 15 bp, Homo sapiens
tcttattcccactct

SEQ ID NO: 1672442 - DNA, 15 bp, Homo sapiens
ctcttattcccactc

SEQ ID NO: 1672443 - DNA, 15 bp, Homo sapiens
tctcttattcccact

SEQ ID NO: 1672444 - DNA, 15 bp, Homo sapiens
ctctcttattcccac

SEQ ID NO: 1672445 - DNA, 15 bp, Homo sapiens
cctctcttattccca

SEQ ID NO: 1672446 - DNA, 15 bp, Homo sapiens
ccctctcttattccc

SEQ ID NO: 1672447 - DNA, 15 bp, Homo sapiens
gccctctcttattcc

SEQ ID NO: 1672448 - DNA, 15 bp, Homo sapiens
agccctctcttattc

SEQ ID NO: 1672449 - DNA, 15 bp, Homo sapiens
aagccctctcttatt

SEQ ID NO: 1672450 - DNA, 15 bp, Homo sapiens
aaagccctctcttat

SEQ ID NO: 1672451 - DNA, 15 bp, Homo sapiens
aaaagccctctctta

SEQ ID NO: 1672452 - DNA, 15 bp, Homo sapiens
aaaaagccctctctt

SEQ ID NO: 1672453 - DNA, 15 bp, Homo sapiens
taaaaagccctctct

SEQ ID NO: 1672454 - DNA, 15 bp, Homo sapiens
ataaaaagccctctc

SEQ ID NO: 1672455 - DNA, 15 bp, Homo sapiens
aataaaaagccctct

SEQ ID NO: 1672456 - DNA, 15 bp, Homo sapiens
aaataaaaagccctc

SEQ ID NO: 1672457 - DNA, 15 bp, Homo sapiens
aaaataaaaagccct

SEQ ID NO: 1672458 - DNA, 15 bp, Homo sapiens
aaaaataaaaagccc

SEQ ID NO: 1672459 - DNA, 15 bp, Homo sapiens
aaaaaataaaaagcc

SEQ ID NO: 1672460 - DNA, 15 bp, Homo sapiens
gaaaaaataaaaagc

SEQ ID NO: 1672461 - DNA, 15 bp, Homo sapiens
cgaaaaaataaaaag

SEQ ID NO: 1672462 - DNA, 15 bp, Homo sapiens
acgaaaaaataaaaa

SEQ ID NO: 1672463 - DNA, 15 bp, Homo sapiens
aacgaaaaaataaaa

SEQ ID NO: 1672464 - DNA, 15 bp, Homo sapiens
gaacgaaaaaataaa

SEQ ID NO: 1672465 - DNA, 15 bp, Homo sapiens
tgaacgaaaaaataa

SEQ ID NO: 1672466 - DNA, 15 bp, Homo sapiens
atgaacgaaaaaata

SEQ ID NO: 1672467 - DNA, 15 bp, Homo sapiens
tatgaacgaaaaaat

SEQ ID NO: 1672468 - DNA, 15 bp, Homo sapiens
gtatgaacgaaaaaa

SEQ ID NO: 1672469 - DNA, 15 bp, Homo sapiens
cgtatgaacgaaaaa

SEQ ID NO: 1672470 - DNA, 15 bp, Homo sapiens
tcgtatgaacgaaaa

SEQ ID NO: 1672471 - DNA, 15 bp, Homo sapiens
ctcgtatgaacgaaa

SEQ ID NO: 1672472 - DNA, 15 bp, Homo sapiens
actcgtatgaacgaa

SEQ ID NO: 1672473 - DNA, 15 bp, Homo sapiens
tactcgtatgaacga

SEQ ID NO: 1672474 - DNA, 15 bp, Homo sapiens
atactcgtatgaacg

SEQ ID NO: 1672475 - DNA, 15 bp, Homo sapiens
aatactcgtatgaac

SEQ ID NO: 1672476 - DNA, 15 bp, Homo sapiens
caatactcgtatgaa

SEQ ID NO: 1672477 - DNA, 15 bp, Homo sapiens
tcaatactcgtatga

SEQ ID NO: 1672478 - DNA, 15 bp, Homo sapiens
atcaatactcgtatg

SEQ ID NO: 1672479 - DNA, 15 bp, Homo sapiens
catcaatactcgtat

SEQ ID NO: 1672480 - DNA, 15 bp, Homo sapiens
tcatcaatactcgta

SEQ ID NO: 1672481 - DNA, 15 bp, Homo sapiens
ttcatcaatactcgt

SEQ ID NO: 1672482 - DNA, 15 bp, Homo sapiens
cttcatcaatactcg

SEQ ID NO: 1672483 - DNA, 15 bp, Homo sapiens
tcttcatcaatactc

SEQ ID NO: 1672484 - DNA, 15 bp, Homo sapiens
atcttcatcaatact

SEQ ID NO: 1672485 - DNA, 15 bp, Homo sapiens
catcttcatcaatac

SEQ ID NO: 1672486 - DNA, 15 bp, Homo sapiens
tcatcttcatcaata

SEQ ID NO: 1672487 - DNA, 15 bp, Homo sapiens
atcatcttcatcaat

SEQ ID NO: 1672488 - DNA, 15 bp, Homo sapiens
tatcatcttcatcaa

SEQ ID NO: 1672489 - DNA, 15 bp, Homo sapiens
gtatcatcttcatca

SEQ ID NO: 1672490 - DNA, 15 bp, Homo sapiens
agtatcatcttcatc

SEQ ID NO: 1672491 - DNA, 15 bp, Homo sapiens
tagtatcatcttcat

SEQ ID NO: 1672492 - DNA, 15 bp, Homo sapiens
ttagtatcatcttca

SEQ ID NO: 1672493 - DNA, 15 bp, Homo sapiens
tttagtatcatcttc

SEQ ID NO: 1672494 - DNA, 15 bp, Homo sapiens
atttagtatcatctt

SEQ ID NO: 1672495 - DNA, 15 bp, Homo sapiens
catttagtatcatct

SEQ ID NO: 1672496 - DNA, 15 bp, Homo sapiens
gcatttagtatcatc

SEQ ID NO: 1672497 - DNA, 15 bp, Homo sapiens
agcatttagtatcat

SEQ ID NO: 1672498 - DNA, 15 bp, Homo sapiens
tagcatttagtatca

SEQ ID NO: 1672499 - DNA, 15 bp, Homo sapiens
ttagcatttagtatc

SEQ ID NO: 1672500 - DNA, 15 bp, Homo sapiens
tttagcatttagtat

SEQ ID NO: 1672501 - DNA, 15 bp, Homo sapiens
atttagcatttagta

SEQ ID NO: 1672502 - DNA, 15 bp, Homo sapiens
catttagcatttagt

SEQ ID NO: 1672503 - DNA, 15 bp, Homo sapiens
tcatttagcatttag

SEQ ID NO: 1672504 - DNA, 15 bp, Homo sapiens
ttcatttagcattta

SEQ ID NO: 1672505 - DNA, 15 bp, Homo sapiens
tttcatttagcattt

SEQ ID NO: 1672506 - DNA, 15 bp, Homo sapiens
atttcatttagcatt

SEQ ID NO: 1672507 - DNA, 15 bp, Homo sapiens
tatttcatttagcat

SEQ ID NO: 1672508 - DNA, 15 bp, Homo sapiens
atatttcatttagca

SEQ ID NO: 1672509 - DNA, 15 bp, Homo sapiens
tatatttcatttagc

SEQ ID NO: 1672510 - DNA, 15 bp, Homo sapiens
atatatttcatttag

SEQ ID NO: 1672511 - DNA, 15 bp, Homo sapiens
gatatatttcattta

SEQ ID NO: 1672512 - DNA, 15 bp, Homo sapiens
agatatatttcattt

SEQ ID NO: 1672513 - DNA, 15 bp, Homo sapiens
cagatatatttcatt

SEQ ID NO: 1672514 - DNA, 15 bp, Homo sapiens
gcagatatatttcat

SEQ ID NO: 1672515 - DNA, 15 bp, Homo sapiens
agcagatatatttca

SEQ ID NO: 1672516 - DNA, 15 bp, Homo sapiens
gagcagatatatttc

SEQ ID NO: 1672517 - DNA, 15 bp, Homo sapiens
ggagcagatatattt

SEQ ID NO: 1672518 - DNA, 15 bp, Homo sapiens
tggagcagatatatt

SEQ ID NO: 1672519 - DNA, 15 bp, Homo sapiens
ttggagcagatatat

SEQ ID NO: 1672520 - DNA, 15 bp, Homo sapiens
tttggagcagatata

SEQ ID NO: 1672521 - DNA, 15 bp, Homo sapiens
ttttggagcagatat

SEQ ID NO: 1672522 - DNA, 15 bp, Homo sapiens
cttttggagcagata

SEQ ID NO: 1672523 - DNA, 15 bp, Homo sapiens
ccttttggagcagat

SEQ ID NO: 1672524 - DNA, 15 bp, Homo sapiens
gccttttggagcaga

SEQ ID NO: 1672525 - DNA, 15 bp, Homo sapiens
tgccttttggagcag

SEQ ID NO: 1672526 - DNA, 15 bp, Homo sapiens
atgccttttggagca

SEQ ID NO: 1672527 - DNA, 15 bp, Homo sapiens
aatgccttttggagc

SEQ ID NO: 1672528 - DNA, 15 bp, Homo sapiens
aaatgccttttggag

SEQ ID NO: 1672529 - DNA, 15 bp, Homo sapiens
taaatgccttttgga

SEQ ID NO: 1672530 - DNA, 15 bp, Homo sapiens
ataaatgccttttgg

SEQ ID NO: 1672531 - DNA, 15 bp, Homo sapiens
aataaatgccttttg

SEQ ID NO: 1672532 - DNA, 15 bp, Homo sapiens
gaataaatgcctttt

SEQ ID NO: 1672533 - DNA, 15 bp, Homo sapiens
agaataaatgccttt

SEQ ID NO: 1672534 - DNA, 15 bp, Homo sapiens
cagaataaatgcctt

SEQ ID NO: 1672535 - DNA, 15 bp, Homo sapiens
tcagaataaatgcct

SEQ ID NO: 1672536 - DNA, 15 bp, Homo sapiens
gtcagaataaatgcc

SEQ ID NO: 1672537 - DNA, 15 bp, Homo sapiens
agtcagaataaatgc

SEQ ID NO: 1672538 - DNA, 15 bp, Homo sapiens
aagtcagaataaatg

SEQ ID NO: 1672539 - DNA, 15 bp, Homo sapiens
caagtcagaataaat

SEQ ID NO: 1672540 - DNA, 15 bp, Homo sapiens
ccaagtcagaataaa

SEQ ID NO: 1672541 - DNA, 15 bp, Homo sapiens
tccaagtcagaataa

SEQ ID NO: 1672542 - DNA, 15 bp, Homo sapiens
ctccaagtcagaata

SEQ ID NO: 1672543 - DNA, 15 bp, Homo sapiens
tctccaagtcagaat

SEQ ID NO: 1672544 - DNA, 15 bp, Homo sapiens
atctccaagtcagaa

SEQ ID NO: 1672545 - DNA, 15 bp, Homo sapiens
catctccaagtcaga

SEQ ID NO: 1672546 - DNA, 15 bp, Homo sapiens
gcatctccaagtcag

SEQ ID NO: 1672547 - DNA, 15 bp, Homo sapiens
tgcatctccaagtca

SEQ ID NO: 1672548 - DNA, 15 bp, Homo sapiens
ttgcatctccaagtc

SEQ ID NO: 1672549 - DNA, 15 bp, Homo sapiens
gttgcatctccaagt

SEQ ID NO: 1672550 - DNA, 15 bp, Homo sapiens
tgttgcatctccaag

SEQ ID NO: 1672551 - DNA, 15 bp, Homo sapiens
ttgttgcatctccaa

SEQ ID NO: 1672552 - DNA, 15 bp, Homo sapiens
tttgttgcatctcca

SEQ ID NO: 1672553 - DNA, 15 bp, Homo sapiens
ttttgttgcatctcc

SEQ ID NO: 1672554 - DNA, 15 bp, Homo sapiens
tttttgttgcatctc

SEQ ID NO: 1672555 - DNA, 15 bp, Homo sapiens
gtttttgttgcatct

SEQ ID NO: 1672556 - DNA, 15 bp, Homo sapiens
tgtttttgttgcatc

SEQ ID NO: 1672557 - DNA, 15 bp, Homo sapiens
gtgtttttgttgcat

SEQ ID NO: 1672558 - DNA, 15 bp, Homo sapiens
tgtgtttttgttgca

SEQ ID NO: 1672559 - DNA, 15 bp, Homo sapiens
ttgtgtttttgttgc

SEQ ID NO: 1672560 - DNA, 15 bp, Homo sapiens
tttgtgtttttgttg

SEQ ID NO: 1672561 - DNA, 15 bp, Homo sapiens
ttttgtgtttttgtt

SEQ ID NO: 1672562 - DNA, 15 bp, Homo sapiens
catttttgtgttttt

SEQ ID NO: 1672563 - DNA, 15 bp, Homo sapiens
ccatttttgtgtttt

SEQ ID NO: 1672564 - DNA, 15 bp, Homo sapiens
tccatttttgtgttt

SEQ ID NO: 1672565 - DNA, 15 bp, Homo sapiens
ttccatttttgtgtt

SEQ ID NO: 1672566 - DNA, 15 bp, Homo sapiens
attccatttttgtgt

SEQ ID NO: 1672567 - DNA, 15 bp, Homo sapiens
cattccatttttgtg

SEQ ID NO: 1672568 - DNA, 15 bp, Homo sapiens
tcattccatttttgt

SEQ ID NO: 1672569 - DNA, 15 bp, Homo sapiens
ttcattccatttttg

SEQ ID NO: 1672570 - DNA, 15 bp, Homo sapiens
cttcattccattttt

SEQ ID NO: 1672571 - DNA, 15 bp, Homo sapiens
acttcattccatttt

SEQ ID NO: 1672572 - DNA, 15 bp, Homo sapiens
cacttcattccattt

SEQ ID NO: 1672573 - DNA, 15 bp, Homo sapiens
tcacttcattccatt

SEQ ID NO: 1672574 - DNA, 15 bp, Homo sapiens
atcacttcattccat

SEQ ID NO: 1672575 - DNA, 15 bp, Homo sapiens
tatcacttcattcca

SEQ ID NO: 1672576 - DNA, 15 bp, Homo sapiens
gtatcacttcattcc

SEQ ID NO: 1672577 - DNA, 15 bp, Homo sapiens
agtatcacttcattc

SEQ ID NO: 1672578 - DNA, 15 bp, Homo sapiens
gagtatcacttcatt

SEQ ID NO: 1672579 - DNA, 15 bp, Homo sapiens
agagtatcacttcat

SEQ ID NO: 1672580 - DNA, 15 bp, Homo sapiens
aagagtatcacttca

SEQ ID NO: 1672581 - DNA, 15 bp, Homo sapiens
gaagagtatcacttc

SEQ ID NO: 1672582 - DNA, 15 bp, Homo sapiens
tgaagagtatcactt

SEQ ID NO: 1672583 - DNA, 15 bp, Homo sapiens
atgaagagtatcact

SEQ ID NO: 1672584 - DNA, 15 bp, Homo sapiens
gatgaagagtatcac

SEQ ID NO: 1672585 - DNA, 15 bp, Homo sapiens
tgatgaagagtatca

SEQ ID NO: 1672586 - DNA, 15 bp, Homo sapiens
ttgatgaagagtatc

SEQ ID NO: 1672587 - DNA, 15 bp, Homo sapiens
tttgatgaagagtat

SEQ ID NO: 1672588 - DNA, 15 bp, Homo sapiens
gtttgatgaagagta

SEQ ID NO: 1672589 - DNA, 15 bp, Homo sapiens
tgtttgatgaagagt

SEQ ID NO: 1672590 - DNA, 15 bp, Homo sapiens
ctgtttgatgaagag

SEQ ID NO: 1672591 - DNA, 15 bp, Homo sapiens
tctgtttgatgaaga

SEQ ID NO: 1672592 - DNA, 15 bp, Homo sapiens
ttctgtttgatgaag

SEQ ID NO: 1672593 - DNA, 15 bp, Homo sapiens
cttctgtttgatgaa

SEQ ID NO: 1672594 - DNA, 15 bp, Homo sapiens
acttctgtttgatga

SEQ ID NO: 1672595 - DNA, 15 bp, Homo sapiens
cacttctgtttgatg

SEQ ID NO: 1672596 - DNA, 15 bp, Homo sapiens
tcacttctgtttgat

SEQ ID NO: 1672597 - DNA, 15 bp, Homo sapiens
gtcacttctgtttga

SEQ ID NO: 1672598 - DNA, 15 bp, Homo sapiens
agtcacttctgtttg

SEQ ID NO: 1672599 - DNA, 15 bp, Homo sapiens
cagtcacttctgttt

SEQ ID NO: 1672600 - DNA, 15 bp, Homo sapiens
acagtcacttctgtt

SEQ ID NO: 1672601 - DNA, 15 bp, Homo sapiens
aacagtcacttctgt

SEQ ID NO: 1672602 - DNA, 15 bp, Homo sapiens
taacagtcacttctg

SEQ ID NO: 1672603 - DNA, 15 bp, Homo sapiens
ataacagtcacttct

SEQ ID NO: 1672604 - DNA, 15 bp, Homo sapiens
gataacagtcacttc

SEQ ID NO: 1672605 - DNA, 15 bp, Homo sapiens
agataacagtcactt

SEQ ID NO: 1672606 - DNA, 15 bp, Homo sapiens
gagataacagtcact

SEQ ID NO: 1672607 - DNA, 15 bp, Homo sapiens
tgagataacagtcac

SEQ ID NO: 1672608 - DNA, 15 bp, Homo sapiens
ttgagataacagtca

SEQ ID NO: 1672609 - DNA, 15 bp, Homo sapiens
gttgagataacagtc

SEQ ID NO: 1672610 - DNA, 15 bp, Homo sapiens
ggttgagataacagt

SEQ ID NO: 1672611 - DNA, 15 bp, Homo sapiens
tggttgagataacag

SEQ ID NO: 1672612 - DNA, 15 bp, Homo sapiens
atggttgagataaca

SEQ ID NO: 1672613 - DNA, 15 bp, Homo sapiens
aatggttgagataac

SEQ ID NO: 1672614 - DNA, 15 bp, Homo sapiens
aaatggttgagataa

SEQ ID NO: 1672615 - DNA, 15 bp, Homo sapiens
aaaatggttgagata

SEQ ID NO: 1672616 - DNA, 15 bp, Homo sapiens
agtattaggcattct

SEQ ID NO: 1672617 - DNA, 15 bp, Homo sapiens
aagtattaggcattc

SEQ ID NO: 1672618 - DNA, 15 bp, Homo sapiens
aaagtattaggcatt

SEQ ID NO: 1672619 - DNA, 15 bp, Homo sapiens
gaaagtattaggcat

SEQ ID NO: 1672620 - DNA, 15 bp, Homo sapiens
ggaaagtattaggca

SEQ ID NO: 1672621 - DNA, 15 bp, Homo sapiens
aggaaagtattaggc

SEQ ID NO: 1672622 - DNA, 15 bp, Homo sapiens
aaggaaagtattagg

SEQ ID NO: 1672623 - DNA, 15 bp, Homo sapiens
aaaggaaagtattag

SEQ ID NO: 1672624 - DNA, 15 bp, Homo sapiens
aaaaggaaagtatta

SEQ ID NO: 1672625 - DNA, 15 bp, Homo sapiens
caaaaggaaagtatt

SEQ ID NO: 1672626 - DNA, 15 bp, Homo sapiens
ccaaaaggaaagtat

SEQ ID NO: 1672627 - DNA, 15 bp, Homo sapiens
gccaaaaggaaagta

SEQ ID NO: 1672628 - DNA, 15 bp, Homo sapiens
agccaaaaggaaagt

SEQ ID NO: 1672629 - DNA, 15 bp, Homo sapiens
aagccaaaaggaaag

SEQ ID NO: 1672630 - DNA, 15 bp, Homo sapiens
caagccaaaaggaaa

SEQ ID NO: 1672631 - DNA, 15 bp, Homo sapiens
acaagccaaaaggaa

SEQ ID NO: 1672632 - DNA, 15 bp, Homo sapiens
aacaagccaaaagga

SEQ ID NO: 1672633 - DNA, 15 bp, Homo sapiens
aaacaagccaaaagg

SEQ ID NO: 1672634 - DNA, 15 bp, Homo sapiens
aaaacaagccaaaag

SEQ ID NO: 1672635 - DNA, 15 bp, Homo sapiens
gaaaacaagccaaaa

SEQ ID NO: 1672636 - DNA, 15 bp, Homo sapiens
agaaaacaagccaaa

SEQ ID NO: 1672637 - DNA, 15 bp, Homo sapiens
aagaaaacaagccaa

SEQ ID NO: 1672638 - DNA, 15 bp, Homo sapiens
caagaaaacaagcca

SEQ ID NO: 1672639 - DNA, 15 bp, Homo sapiens
acaagaaaacaagcc

SEQ ID NO: 1672640 - DNA, 15 bp, Homo sapiens
aacaagaaaacaagc

SEQ ID NO: 1672641 - DNA, 15 bp, Homo sapiens
taacaagaaaacaag

SEQ ID NO: 1672642 - DNA, 15 bp, Homo sapiens
ctaacaagaaaacaa

SEQ ID NO: 1672643 - DNA, 15 bp, Homo sapiens
cctaacaagaaaaca

SEQ ID NO: 1672644 - DNA, 15 bp, Homo sapiens
ccctaacaagaaaac

SEQ ID NO: 1672645 - DNA, 15 bp, Homo sapiens
cccctaacaagaaaa

SEQ ID NO: 1672646 - DNA, 15 bp, Homo sapiens
gcccctaacaagaaa

SEQ ID NO: 1672647 - DNA, 15 bp, Homo sapiens
tgcccctaacaagaa

SEQ ID NO: 1672648 - DNA, 15 bp, Homo sapiens
atgcccctaacaaga

SEQ ID NO: 1672649 - DNA, 15 bp, Homo sapiens
catgcccctaacaag

SEQ ID NO: 1672650 - DNA, 15 bp, Homo sapiens
ccatgcccctaacaa

SEQ ID NO: 1672651 - DNA, 15 bp, Homo sapiens
gccatgcccctaaca

SEQ ID NO: 1672652 - DNA, 15 bp, Homo sapiens
agccatgcccctaac

SEQ ID NO: 1672653 - DNA, 15 bp, Homo sapiens
aagccatgcccctaa

SEQ ID NO: 1672654 - DNA, 15 bp, Homo sapiens
taagccatgccccta

SEQ ID NO: 1672655 - DNA, 15 bp, Homo sapiens
ctaagccatgcccct

SEQ ID NO: 1672656 - DNA, 15 bp, Homo sapiens
actaagccatgcccc

SEQ ID NO: 1672657 - DNA, 15 bp, Homo sapiens
gactaagccatgccc

SEQ ID NO: 1672658 - DNA, 15 bp, Homo sapiens
ggactaagccatgcc

SEQ ID NO: 1672659 - DNA, 15 bp, Homo sapiens
gggactaagccatgc

SEQ ID NO: 1672660 - DNA, 15 bp, Homo sapiens
agggactaagccatg

SEQ ID NO: 1672661 - DNA, 15 bp, Homo sapiens
tagggactaagccat

SEQ ID NO: 1672662 - DNA, 15 bp, Homo sapiens
ttagggactaagcca

SEQ ID NO: 1672663 - DNA, 15 bp, Homo sapiens
tttagggactaagcc

SEQ ID NO: 1672664 - DNA, 15 bp, Homo sapiens
atttagggactaagc

SEQ ID NO: 1672665 - DNA, 15 bp, Homo sapiens
tatttagggactaag

SEQ ID NO: 1672666 - DNA, 15 bp, Homo sapiens
ttatttagggactaa

SEQ ID NO: 1672667 - DNA, 15 bp, Homo sapiens
gttatttagggacta

SEQ ID NO: 1672668 - DNA, 15 bp, Homo sapiens
tgttatttagggact

SEQ ID NO: 1672669 - DNA, 15 bp, Homo sapiens
atgttatttagggac

SEQ ID NO: 1672670 - DNA, 15 bp, Homo sapiens
aatgttatttaggga

SEQ ID NO: 1672671 - DNA, 15 bp, Homo sapiens
caatgttatttaggg

SEQ ID NO: 1672672 - DNA, 15 bp, Homo sapiens
acaatgttatttagg

SEQ ID NO: 1672673 - DNA, 15 bp, Homo sapiens
cacaatgttatttag

SEQ ID NO: 1672674 - DNA, 15 bp, Homo sapiens
acacaatgttattta

SEQ ID NO: 1672675 - DNA, 15 bp, Homo sapiens
cacacaatgttattt

SEQ ID NO: 1672676 - DNA, 15 bp, Homo sapiens
ccacacaatgttatt

SEQ ID NO: 1672677 - DNA, 15 bp, Homo sapiens
accacacaatgttat

SEQ ID NO: 1672678 - DNA, 15 bp, Homo sapiens
aaccacacaatgtta

SEQ ID NO: 1672679 - DNA, 15 bp, Homo sapiens
aaaccacacaatgtt

SEQ ID NO: 1672680 - DNA, 15 bp, Homo sapiens
taaaccacacaatgt

SEQ ID NO: 1672681 - DNA, 15 bp, Homo sapiens
ttaaaccacacaatg

SEQ ID NO: 1672682 - DNA, 15 bp, Homo sapiens
attaaaccacacaat

SEQ ID NO: 1672683 - DNA, 15 bp, Homo sapiens
aattaaaccacacaa

SEQ ID NO: 1672684 - DNA, 15 bp, Homo sapiens
gaattaaaccacaca

SEQ ID NO: 1672685 - DNA, 15 bp, Homo sapiens
ggaattaaaccacac

SEQ ID NO: 1672686 - DNA, 15 bp, Homo sapiens
aggaattaaaccaca

SEQ ID NO: 1672687 - DNA, 15 bp, Homo sapiens
taggaattaaaccac

SEQ ID NO: 1672688 - DNA, 15 bp, Homo sapiens
gtaggaattaaacca

SEQ ID NO: 1672689 - DNA, 15 bp, Homo sapiens
agtaggaattaaacc

SEQ ID NO: 1672690 - DNA, 15 bp, Homo sapiens
gagtaggaattaaac

SEQ ID NO: 1672691 - DNA, 15 bp, Homo sapiens
ggagtaggaattaaa

SEQ ID NO: 1672692 - DNA, 15 bp, Homo sapiens
cggagtaggaattaa

SEQ ID NO: 1672693 - DNA, 15 bp, Homo sapiens
acggagtaggaatta

SEQ ID NO: 1672694 - DNA, 15 bp, Homo sapiens
tacggagtaggaatt

SEQ ID NO: 1672695 - DNA, 15 bp, Homo sapiens
atacggagtaggaat

SEQ ID NO: 1672696 - DNA, 15 bp, Homo sapiens
gatacggagtaggaa

SEQ ID NO: 1672697 - DNA, 15 bp, Homo sapiens
agatacggagtagga

SEQ ID NO: 1672698 - DNA, 15 bp, Homo sapiens
gagatacggagtagg

SEQ ID NO: 1672699 - DNA, 15 bp, Homo sapiens
agagatacggagtag

SEQ ID NO: 1672700 - DNA, 15 bp, Homo sapiens
aagagatacggagta

SEQ ID NO: 1672701 - DNA, 15 bp, Homo sapiens
gaagagatacggagt

SEQ ID NO: 1672702 - DNA, 15 bp, Homo sapiens
agaagagatacggag

SEQ ID NO: 1672703 - DNA, 15 bp, Homo sapiens
tagaagagatacgga

SEQ ID NO: 1672704 - DNA, 15 bp, Homo sapiens
gtagaagagatacgg

SEQ ID NO: 1672705 - DNA, 15 bp, Homo sapiens
ggtagaagagatacg

SEQ ID NO: 1672706 - DNA, 15 bp, Homo sapiens
tggtagaagagatac

SEQ ID NO: 1672707 - DNA, 15 bp, Homo sapiens
gtggtagaagagata

SEQ ID NO: 1672708 - DNA, 15 bp, Homo sapiens
agtggtagaagagat

SEQ ID NO: 1672709 - DNA, 15 bp, Homo sapiens
gagtggtagaagaga

SEQ ID NO: 1672710 - DNA, 15 bp, Homo sapiens
agagtggtagaagag

SEQ ID NO: 1672711 - DNA, 15 bp, Homo sapiens
cagagtggtagaaga

SEQ ID NO: 1672712 - DNA, 15 bp, Homo sapiens
ccagagtggtagaag

SEQ ID NO: 1672713 - DNA, 15 bp, Homo sapiens
gccagagtggtagaa

SEQ ID NO: 1672714 - DNA, 15 bp, Homo sapiens
ggccagagtggtaga

SEQ ID NO: 1672715 - DNA, 15 bp, Homo sapiens
tggccagagtggtag

SEQ ID NO: 1672716 - DNA, 15 bp, Homo sapiens
gtggccagagtggta

SEQ ID NO: 1672717 - DNA, 15 bp, Homo sapiens
agtggccagagtggt

SEQ ID NO: 1672718 - DNA, 15 bp, Homo sapiens
tagtggccagagtgg

SEQ ID NO: 1672719 - DNA, 15 bp, Homo sapiens
gtagtggccagagtg

SEQ ID NO: 1672720 - DNA, 15 bp, Homo sapiens
cgtagtggccagagt

SEQ ID NO: 1672721 - DNA, 15 bp, Homo sapiens
tcgtagtggccagag

SEQ ID NO: 1672722 - DNA, 15 bp, Homo sapiens
atcgtagtggccaga

SEQ ID NO: 1672723 - DNA, 15 bp, Homo sapiens
tatcgtagtggccag

SEQ ID NO: 1672724 - DNA, 15 bp, Homo sapiens
ttatcgtagtggcca

SEQ ID NO: 1672725 - DNA, 15 bp, Homo sapiens
cttatcgtagtggcc

SEQ ID NO: 1672726 - DNA, 15 bp, Homo sapiens
gcttatcgtagtggc

SEQ ID NO: 1672727 - DNA, 15 bp, Homo sapiens
tgcttatcgtagtgg

SEQ ID NO: 1672728 - DNA, 15 bp, Homo sapiens
ctgcttatcgtagtg

SEQ ID NO: 1672729 - DNA, 15 bp, Homo sapiens
cctgcttatcgtagt

SEQ ID NO: 1672730 - DNA, 15 bp, Homo sapiens
acctgcttatcgtag

SEQ ID NO: 1672731 - DNA, 15 bp, Homo sapiens
tacctgcttatcgta

SEQ ID NO: 1672732 - DNA, 15 bp, Homo sapiens
ctacctgcttatcgt

SEQ ID NO: 1672733 - DNA, 15 bp, Homo sapiens
gctacctgcttatcg

SEQ ID NO: 1672734 - DNA, 15 bp, Homo sapiens
agctacctgcttatc

SEQ ID NO: 1672735 - DNA, 15 bp, Homo sapiens
cagctacctgcttat

SEQ ID NO: 1672736 - DNA, 15 bp, Homo sapiens
ccagctacctgctta

SEQ ID NO: 1672737 - DNA, 15 bp, Homo sapiens
gaattagttggtcat

SEQ ID NO: 1672738 - DNA, 15 bp, Homo sapiens
ggaattagttggtca

SEQ ID NO: 1672739 - DNA, 15 bp, Homo sapiens
gggaattagttggtc

SEQ ID NO: 1672740 - DNA, 15 bp, Homo sapiens
tgggaattagttggt

SEQ ID NO: 1672741 - DNA, 15 bp, Homo sapiens
ttgggaattagttgg

SEQ ID NO: 1672742 - DNA, 15 bp, Homo sapiens
tttgggaattagttg

SEQ ID NO: 1672743 - DNA, 15 bp, Homo sapiens
gtttgggaattagtt

SEQ ID NO: 1672744 - DNA, 15 bp, Homo sapiens
ggtttgggaattagt

SEQ ID NO: 1672745 - DNA, 15 bp, Homo sapiens
gggtttgggaattag

SEQ ID NO: 1672746 - DNA, 15 bp, Homo sapiens
ggggtttgggaatta

SEQ ID NO: 1672747 - DNA, 15 bp, Homo sapiens
tggggtttgggaatt

SEQ ID NO: 1672748 - DNA, 15 bp, Homo sapiens
ctggggtttgggaat

SEQ ID NO: 1672749 - DNA, 15 bp, Homo sapiens
actggggtttgggaa

SEQ ID NO: 1672750 - DNA, 15 bp, Homo sapiens
gactggggtttggga

SEQ ID NO: 1672751 - DNA, 15 bp, Homo sapiens
agactggggtttggg

SEQ ID NO: 1672752 - DNA, 15 bp, Homo sapiens
gagactggggtttgg

SEQ ID NO: 1672753 - DNA, 15 bp, Homo sapiens
tgagactggggtttg

SEQ ID NO: 1672754 - DNA, 15 bp, Homo sapiens
atgagactggggttt

SEQ ID NO: 1672755 - DNA, 15 bp, Homo sapiens
aatgagactggggtt

SEQ ID NO: 1672756 - DNA, 15 bp, Homo sapiens
caatgagactggggt

SEQ ID NO: 1672757 - DNA, 15 bp, Homo sapiens
ccaatgagactgggg

SEQ ID NO: 1672758 - DNA, 15 bp, Homo sapiens
accaatgagactggg

SEQ ID NO: 1672759 - DNA, 15 bp, Homo sapiens
taccaatgagactgg

SEQ ID NO: 1672760 - DNA, 15 bp, Homo sapiens
gtaccaatgagactg

SEQ ID NO: 1672761 - DNA, 15 bp, Homo sapiens
ggtaccaatgagact

SEQ ID NO: 1672762 - DNA, 15 bp, Homo sapiens
tggtaccaatgagac

SEQ ID NO: 1672763 - DNA, 15 bp, Homo sapiens
ctggtaccaatgaga

SEQ ID NO: 1672764 - DNA, 15 bp, Homo sapiens
gctggtaccaatgag

SEQ ID NO: 1672765 - DNA, 15 bp, Homo sapiens
ggctggtaccaatga

SEQ ID NO: 1672766 - DNA, 15 bp, Homo sapiens
aggctggtaccaatg

SEQ ID NO: 1672767 - DNA, 15 bp, Homo sapiens
aaggctggtaccaat

SEQ ID NO: 1672768 - DNA, 15 bp, Homo sapiens
caaggctggtaccaa

SEQ ID NO: 1672769 - DNA, 15 bp, Homo sapiens
ccaaggctggtacca

SEQ ID NO: 1672770 - DNA, 15 bp, Homo sapiens
cccaaggctggtacc

SEQ ID NO: 1672771 - DNA, 15 bp, Homo sapiens
ccccaaggctggtac

SEQ ID NO: 1672772 - DNA, 15 bp, Homo sapiens
tccccaaggctggta

SEQ ID NO: 1672773 - DNA, 15 bp, Homo sapiens
ttccccaaggctggt

SEQ ID NO: 1672774 - DNA, 15 bp, Homo sapiens
gttccccaaggctgg

SEQ ID NO: 1672775 - DNA, 15 bp, Homo sapiens
ggttccccaaggctg

SEQ ID NO: 1672776 - DNA, 15 bp, Homo sapiens
tggttccccaaggct

SEQ ID NO: 1672777 - DNA, 15 bp, Homo sapiens
gtggttccccaaggc

SEQ ID NO: 1672778 - DNA, 15 bp, Homo sapiens
ggtggttccccaagg

SEQ ID NO: 1672779 - DNA, 15 bp, Homo sapiens
aggtggttccccaag

SEQ ID NO: 1672780 - DNA, 15 bp, Homo sapiens
taggtggttccccaa

SEQ ID NO: 1672781 - DNA, 15 bp, Homo sapiens
gtaggtggttcccca

SEQ ID NO: 1672782 - DNA, 15 bp, Homo sapiens
tgtaggtggttcccc

SEQ ID NO: 1672783 - DNA, 15 bp, Homo sapiens
gtgtaggtggttccc

SEQ ID NO: 1672784 - DNA, 15 bp, Homo sapiens
agtgtaggtggttcc

SEQ ID NO: 1672785 - DNA, 15 bp, Homo sapiens
aagtgtaggtggttc

SEQ ID NO: 1672786 - DNA, 15 bp, Homo sapiens
caagtgtaggtggtt

SEQ ID NO: 1672787 - DNA, 15 bp, Homo sapiens
tcaagtgtaggtggt

SEQ ID NO: 1672788 - DNA, 15 bp, Homo sapiens
ctcaagtgtaggtgg

SEQ ID NO: 1672789 - DNA, 15 bp, Homo sapiens
gctcaagtgtaggtg

SEQ ID NO: 1672790 - DNA, 15 bp, Homo sapiens
ggctcaagtgtaggt

SEQ ID NO: 1672791 - DNA, 15 bp, Homo sapiens
tggctcaagtgtagg

SEQ ID NO: 1672792 - DNA, 15 bp, Homo sapiens
gtggctcaagtgtag

SEQ ID NO: 1672793 - DNA, 15 bp, Homo sapiens
tgtggctcaagtgta

SEQ ID NO: 1672794 - DNA, 15 bp, Homo sapiens
ttgtggctcaagtgt

SEQ ID NO: 1672795 - DNA, 15 bp, Homo sapiens
attgtggctcaagtg

SEQ ID NO: 1672796 - DNA, 15 bp, Homo sapiens
aattgtggctcaagt

SEQ ID NO: 1672797 - DNA, 15 bp, Homo sapiens
caattgtggctcaag

SEQ ID NO: 1672798 - DNA, 15 bp, Homo sapiens
ccaattgtggctcaa

SEQ ID NO: 1672799 - DNA, 15 bp, Homo sapiens
accaattgtggctca

SEQ ID NO: 1672800 - DNA, 15 bp, Homo sapiens
aaccaattgtggctc

SEQ ID NO: 1672801 - DNA, 15 bp, Homo sapiens
aaaccaattgtggct

SEQ ID NO: 1672802 - DNA, 15 bp, Homo sapiens
aaaaccaattgtggc

SEQ ID NO: 1672803 - DNA, 15 bp, Homo sapiens
caaaaccaattgtgg

SEQ ID NO: 1672804 - DNA, 15 bp, Homo sapiens
tcaaaaccaattgtg

SEQ ID NO: 1672805 - DNA, 15 bp, Homo sapiens
ttcaaaaccaattgt

SEQ ID NO: 1672806 - DNA, 15 bp, Homo sapiens
cttcaaaaccaattg

SEQ ID NO: 1672807 - DNA, 15 bp, Homo sapiens
acttcaaaaccaatt

SEQ ID NO: 1672808 - DNA, 15 bp, Homo sapiens
cacttcaaaaccaat

SEQ ID NO: 1672809 - DNA, 15 bp, Homo sapiens
gcacttcaaaaccaa

SEQ ID NO: 1672810 - DNA, 15 bp, Homo sapiens
tgcacttcaaaacca

SEQ ID NO: 1672811 - DNA, 15 bp, Homo sapiens
atgcacttcaaaacc

SEQ ID NO: 1672812 - DNA, 15 bp, Homo sapiens
aatgcacttcaaaac

SEQ ID NO: 1672813 - DNA, 15 bp, Homo sapiens
aaatgcacttcaaaa

SEQ ID NO: 1672814 - DNA, 15 bp, Homo sapiens
taaatgcacttcaaa

SEQ ID NO: 1672815 - DNA, 15 bp, Homo sapiens
gtaaatgcacttcaa

SEQ ID NO: 1672816 - DNA, 15 bp, Homo sapiens
tgtaaatgcacttca

SEQ ID NO: 1672817 - DNA, 15 bp, Homo sapiens
ttgtaaatgcacttc

SEQ ID NO: 1672818 - DNA, 15 bp, Homo sapiens
cttgtaaatgcactt

SEQ ID NO: 1672819 - DNA, 15 bp, Homo sapiens
ccttgtaaatgcact

SEQ ID NO: 1672820 - DNA, 15 bp, Homo sapiens
accttgtaaatgcac

SEQ ID NO: 1672821 - DNA, 15 bp, Homo sapiens
aaccttgtaaatgca

SEQ ID NO: 1672822 - DNA, 15 bp, Homo sapiens
aaaccttgtaaatgc

SEQ ID NO: 1672823 - DNA, 15 bp, Homo sapiens
caaaccttgtaaatg

SEQ ID NO: 1672824 - DNA, 15 bp, Homo sapiens
acaaaccttgtaaat

SEQ ID NO: 1672825 - DNA, 15 bp, Homo sapiens
gacaaaccttgtaaa

SEQ ID NO: 1672826 - DNA, 15 bp, Homo sapiens
agacaaaccttgtaa

SEQ ID NO: 1672827 - DNA, 15 bp, Homo sapiens
tagacaaaccttgta

SEQ ID NO: 1672828 - DNA, 15 bp, Homo sapiens
atagacaaaccttgt

SEQ ID NO: 1672829 - DNA, 15 bp, Homo sapiens
aatagacaaaccttg

SEQ ID NO: 1672830 - DNA, 15 bp, Homo sapiens
aaatagacaaacctt

SEQ ID NO: 1672831 - DNA, 15 bp, Homo sapiens
tgaaaatagacaaac

SEQ ID NO: 1672832 - DNA, 15 bp, Homo sapiens
ctgaaaatagacaaa

SEQ ID NO: 1672833 - DNA, 15 bp, Homo sapiens
actgaaaatagacaa

SEQ ID NO: 1672834 - DNA, 15 bp, Homo sapiens
aactgaaaatagaca

SEQ ID NO: 1672835 - DNA, 15 bp, Homo sapiens
gaactgaaaatagac

SEQ ID NO: 1672836 - DNA, 15 bp, Homo sapiens
agaactgaaaataga

SEQ ID NO: 1672837 - DNA, 15 bp, Homo sapiens
aagaactgaaaatag

SEQ ID NO: 1672838 - DNA, 15 bp, Homo sapiens
aaagaactgaaaata

SEQ ID NO: 1672839 - DNA, 15 bp, Homo sapiens
taaagaactgaaaat

SEQ ID NO: 1672840 - DNA, 15 bp, Homo sapiens
gtaaagaactgaaaa

SEQ ID NO: 1672841 - DNA, 15 bp, Homo sapiens
agtaaagaactgaaa

SEQ ID NO: 1672842 - DNA, 15 bp, Homo sapiens
aagtaaagaactgaa

SEQ ID NO: 1672843 - DNA, 15 bp, Homo sapiens
aaagtaaagaactga

SEQ ID NO: 1672844 - DNA, 15 bp, Homo sapiens
aaaagtaaagaactg

SEQ ID NO: 1672845 - DNA, 15 bp, Homo sapiens
aaaaagtaaagaact

SEQ ID NO: 1672846 - DNA, 15 bp, Homo sapiens
taaaaagtaaagaac

SEQ ID NO: 1672847 - DNA, 15 bp, Homo sapiens
gtaaaaagtaaagaa

SEQ ID NO: 1672848 - DNA, 15 bp, Homo sapiens
tgtaaaaagtaaaga

SEQ ID NO: 1672849 - DNA, 15 bp, Homo sapiens
atgtaaaaagtaaag

SEQ ID NO: 1672850 - DNA, 15 bp, Homo sapiens
catgtaaaaagtaaa

SEQ ID NO: 1672851 - DNA, 15 bp, Homo sapiens
gcatgtaaaaagtaa

SEQ ID NO: 1672852 - DNA, 15 bp, Homo sapiens
agcatgtaaaaagta

SEQ ID NO: 1672853 - DNA, 15 bp, Homo sapiens
cagcatgtaaaaagt

SEQ ID NO: 1672854 - DNA, 15 bp, Homo sapiens
tcagcatgtaaaaag

SEQ ID NO: 1672855 - DNA, 15 bp, Homo sapiens
gtcagcatgtaaaaa

SEQ ID NO: 1672856 - DNA, 15 bp, Homo sapiens
tgtcagcatgtaaaa

SEQ ID NO: 1672857 - DNA, 15 bp, Homo sapiens
gtgtcagcatgtaaa

SEQ ID NO: 1672858 - DNA, 15 bp, Homo sapiens
tgtgtcagcatgtaa

SEQ ID NO: 1672859 - DNA, 15 bp, Homo sapiens
atgtgtcagcatgta

SEQ ID NO: 1672860 - DNA, 15 bp, Homo sapiens
tatgtgtcagcatgt

SEQ ID NO: 1672861 - DNA, 15 bp, Homo sapiens
gtatgtgtcagcatg

SEQ ID NO: 1672862 - DNA, 15 bp, Homo sapiens
tgtatgtgtcagcat

SEQ ID NO: 1672863 - DNA, 15 bp, Homo sapiens
atgtatgtgtcagca

SEQ ID NO: 1672864 - DNA, 15 bp, Homo sapiens
tatgtatgtgtcagc

SEQ ID NO: 1672865 - DNA, 15 bp, Homo sapiens
gtatgtatgtgtcag

SEQ ID NO: 1672866 - DNA, 15 bp, Homo sapiens
tgtatgtatgtgtca

SEQ ID NO: 1672867 - DNA, 15 bp, Homo sapiens
gtgtatgtatgtgtc

SEQ ID NO: 1672868 - DNA, 15 bp, Homo sapiens
agtgtatgtatgtgt

SEQ ID NO: 1672869 - DNA, 15 bp, Homo sapiens
cagtgtatgtatgtg

SEQ ID NO: 1672870 - DNA, 15 bp, Homo sapiens
gcagtgtatgtatgt

SEQ ID NO: 1672871 - DNA, 15 bp, Homo sapiens
ggcagtgtatgtatg

SEQ ID NO: 1672872 - DNA, 15 bp, Homo sapiens
aggcagtgtatgtat

SEQ ID NO: 1672873 - DNA, 15 bp, Homo sapiens
taggcagtgtatgta

SEQ ID NO: 1672874 - DNA, 15 bp, Homo sapiens
ttaggcagtgtatgt

SEQ ID NO: 1672875 - DNA, 15 bp, Homo sapiens
tttaggcagtgtatg

SEQ ID NO: 1672876 - DNA, 15 bp, Homo sapiens
atttaggcagtgtat

SEQ ID NO: 1672877 - DNA, 15 bp, Homo sapiens
tatttaggcagtgta

SEQ ID NO: 1672878 - DNA, 15 bp, Homo sapiens
ctatttaggcagtgt

SEQ ID NO: 1672879 - DNA, 15 bp, Homo sapiens
tctatttaggcagtg

SEQ ID NO: 1672880 - DNA, 15 bp, Homo sapiens
atctatttaggcagt

SEQ ID NO: 1672881 - DNA, 15 bp, Homo sapiens
gatctatttaggcag

SEQ ID NO: 1672882 - DNA, 15 bp, Homo sapiens
agatctatttaggca

SEQ ID NO: 1672883 - DNA, 15 bp, Homo sapiens
gagatctatttaggc

SEQ ID NO: 1672884 - DNA, 15 bp, Homo sapiens
agagatctatttagg

SEQ ID NO: 1672885 - DNA, 15 bp, Homo sapiens
aagagatctatttag

SEQ ID NO: 1672886 - DNA, 15 bp, Homo sapiens
aaagagatctattta

SEQ ID NO: 1672887 - DNA, 15 bp, Homo sapiens
gaaagagatctattt

SEQ ID NO: 1672888 - DNA, 15 bp, Homo sapiens
tgaaagagatctatt

SEQ ID NO: 1672889 - DNA, 15 bp, Homo sapiens
ctgaaagagatctat

SEQ ID NO: 1672890 - DNA, 15 bp, Homo sapiens
tctgaaagagatcta

SEQ ID NO: 1672891 - DNA, 15 bp, Homo sapiens
ttctgaaagagatct

SEQ ID NO: 1672892 - DNA, 15 bp, Homo sapiens
tttctgaaagagatc

SEQ ID NO: 1672893 - DNA, 15 bp, Homo sapiens
gtttctgaaagagat

SEQ ID NO: 1672894 - DNA, 15 bp, Homo sapiens
tgtttctgaaagaga

SEQ ID NO: 1672895 - DNA, 15 bp, Homo sapiens
ttgtttctgaaagag

SEQ ID NO: 1672896 - DNA, 15 bp, Homo sapiens
attgtttctgaaaga

SEQ ID NO: 1672897 - DNA, 15 bp, Homo sapiens
gattgtttctgaaag

SEQ ID NO: 1672898 - DNA, 15 bp, Homo sapiens
ggattgtttctgaaa

SEQ ID NO: 1672899 - DNA, 15 bp, Homo sapiens
aggattgtttctgaa

SEQ ID NO: 1672900 - DNA, 15 bp, Homo sapiens
gaggattgtttctga

SEQ ID NO: 1672901 - DNA, 15 bp, Homo sapiens
tgaggattgtttctg

SEQ ID NO: 1672902 - DNA, 15 bp, Homo sapiens
ctgaggattgtttct

SEQ ID NO: 1672903 - DNA, 15 bp, Homo sapiens
tctgaggattgtttc

SEQ ID NO: 1672904 - DNA, 15 bp, Homo sapiens
atctgaggattgttt

SEQ ID NO: 1672905 - DNA, 15 bp, Homo sapiens
tatctgaggattgtt

SEQ ID NO: 1672906 - DNA, 15 bp, Homo sapiens
ttatctgaggattgt

SEQ ID NO: 1672907 - DNA, 15 bp, Homo sapiens
gttatctgaggattg

SEQ ID NO: 1672908 - DNA, 15 bp, Homo sapiens
cgttatctgaggatt

SEQ ID NO: 1672909 - DNA, 15 bp, Homo sapiens
gcgttatctgaggat

SEQ ID NO: 1672910 - DNA, 15 bp, Homo sapiens
tgcgttatctgagga

SEQ ID NO: 1672911 - DNA, 15 bp, Homo sapiens
atgcgttatctgagg

SEQ ID NO: 1672912 - DNA, 15 bp, Homo sapiens
tatgcgttatctgag

SEQ ID NO: 1672913 - DNA, 15 bp, Homo sapiens
ctatgcgttatctga

SEQ ID NO: 1672914 - DNA, 15 bp, Homo sapiens
gctatgcgttatctg

SEQ ID NO: 1672915 - DNA, 15 bp, Homo sapiens
tgctatgcgttatct

SEQ ID NO: 1672916 - DNA, 15 bp, Homo sapiens
ttgctatgcgttatc

SEQ ID NO: 1672917 - DNA, 15 bp, Homo sapiens
tttgctatgcgttat

SEQ ID NO: 1672918 - DNA, 15 bp, Homo sapiens
ttttgctatgcgtta

SEQ ID NO: 1672919 - DNA, 15 bp, Homo sapiens
attttgctatgcgtt

SEQ ID NO: 1672920 - DNA, 15 bp, Homo sapiens
cattttgctatgcgt

SEQ ID NO: 1672921 - DNA, 15 bp, Homo sapiens
ccattttgctatgcg

SEQ ID NO: 1672922 - DNA, 15 bp, Homo sapiens
tccattttgctatgc

SEQ ID NO: 1672923 - DNA, 15 bp, Homo sapiens
ctccattttgctatg

SEQ ID NO: 1672924 - DNA, 15 bp, Homo sapiens
tctccattttgctat

SEQ ID NO: 1672925 - DNA, 15 bp, Homo sapiens
atctccattttgcta

SEQ ID NO: 1672926 - DNA, 15 bp, Homo sapiens
catctccattttgct

SEQ ID NO: 1672927 - DNA, 15 bp, Homo sapiens
ccatctccattttgc

SEQ ID NO: 1672928 - DNA, 15 bp, Homo sapiens
tccatctccattttg

SEQ ID NO: 1672929 - DNA, 15 bp, Homo sapiens
ctccatctccatttt

SEQ ID NO: 1672930 - DNA, 15 bp, Homo sapiens
tctccatctccattt

SEQ ID NO: 1672931 - DNA, 15 bp, Homo sapiens
gtctccatctccatt

SEQ ID NO: 1672932 - DNA, 15 bp, Homo sapiens
tgtctccatctccat

SEQ ID NO: 1672933 - DNA, 15 bp, Homo sapiens
atgtctccatctcca

SEQ ID NO: 1672934 - DNA, 15 bp, Homo sapiens
catgtctccatctcc

SEQ ID NO: 1672935 - DNA, 15 bp, Homo sapiens
tcatgtctccatctc

SEQ ID NO: 1672936 - DNA, 15 bp, Homo sapiens
atcatgtctccatct

SEQ ID NO: 1672937 - DNA, 15 bp, Homo sapiens
aatcatgtctccatc

SEQ ID NO: 1672938 - DNA, 15 bp, Homo sapiens
aaatcatgtctccat

SEQ ID NO: 1672939 - DNA, 15 bp, Homo sapiens
gaaatcatgtctcca

SEQ ID NO: 1672940 - DNA, 15 bp, Homo sapiens
agaaatcatgtctcc

SEQ ID NO: 1672941 - DNA, 15 bp, Homo sapiens
gagaaatcatgtctc

SEQ ID NO: 1672942 - DNA, 15 bp, Homo sapiens
tgagaaatcatgtct

SEQ ID NO: 1672943 - DNA, 15 bp, Homo sapiens
atgagaaatcatgtc

SEQ ID NO: 1672944 - DNA, 15 bp, Homo sapiens
catgagaaatcatgt

SEQ ID NO: 1672945 - DNA, 15 bp, Homo sapiens
gcatgagaaatcatg

SEQ ID NO: 1672946 - DNA, 15 bp, Homo sapiens
tgcatgagaaatcat

SEQ ID NO: 1672947 - DNA, 15 bp, Homo sapiens
ttgcatgagaaatca

SEQ ID NO: 1672948 - DNA, 15 bp, Homo sapiens
gttgcatgagaaatc

SEQ ID NO: 1672949 - DNA, 15 bp, Homo sapiens
tgttgcatgagaaat

SEQ ID NO: 1672950 - DNA, 15 bp, Homo sapiens
ctgttgcatgagaaa

SEQ ID NO: 1672951 - DNA, 15 bp, Homo sapiens
gctgttgcatgagaa

SEQ ID NO: 1672952 - DNA, 15 bp, Homo sapiens
agctgttgcatgaga

SEQ ID NO: 1672953 - DNA, 15 bp, Homo sapiens
aagctgttgcatgag

SEQ ID NO: 1672954 - DNA, 15 bp, Homo sapiens
gaagctgttgcatga

SEQ ID NO: 1672955 - DNA, 15 bp, Homo sapiens
agaagctgttgcatg

SEQ ID NO: 1672956 - DNA, 15 bp, Homo sapiens
gagaagctgttgcat

SEQ ID NO: 1672957 - DNA, 15 bp, Homo sapiens
agagaagctgttgca

SEQ ID NO: 1672958 - DNA, 15 bp, Homo sapiens
tagagaagctgttgc

SEQ ID NO: 1672959 - DNA, 15 bp, Homo sapiens
ttagagaagctgttg

SEQ ID NO: 1672960 - DNA, 15 bp, Homo sapiens
attagagaagctgtt

SEQ ID NO: 1672961 - DNA, 15 bp, Homo sapiens
aattagagaagctgt

SEQ ID NO: 1672962 - DNA, 15 bp, Homo sapiens
taattagagaagctg

SEQ ID NO: 1672963 - DNA, 15 bp, Homo sapiens
ataattagagaagct

SEQ ID NO: 1672964 - DNA, 15 bp, Homo sapiens
tataattagagaagc

SEQ ID NO: 1672965 - DNA, 15 bp, Homo sapiens
gtataattagagaag

SEQ ID NO: 1672966 - DNA, 15 bp, Homo sapiens
ggtataattagagaa

SEQ ID NO: 1672967 - DNA, 15 bp, Homo sapiens
aggtataattagaga

SEQ ID NO: 1672968 - DNA, 15 bp, Homo sapiens
aaggtataattagag

SEQ ID NO: 1672969 - DNA, 15 bp, Homo sapiens
ttgcccttaaaacag

SEQ ID NO: 1672970 - DNA, 15 bp, Homo sapiens
gttgcccttaaaaca

SEQ ID NO: 1672971 - DNA, 15 bp, Homo sapiens
ggttgcccttaaaac

SEQ ID NO: 1672972 - DNA, 15 bp, Homo sapiens
aggttgcccttaaaa

SEQ ID NO: 1672973 - DNA, 15 bp, Homo sapiens
caggttgcccttaaa

SEQ ID NO: 1672974 - DNA, 15 bp, Homo sapiens
gcaggttgcccttaa

SEQ ID NO: 1672975 - DNA, 15 bp, Homo sapiens
ggcaggttgccctta

SEQ ID NO: 1672976 - DNA, 15 bp, Homo sapiens
aggcaggttgccctt

SEQ ID NO: 1672977 - DNA, 15 bp, Homo sapiens
aaggcaggttgccct

SEQ ID NO: 1672978 - DNA, 15 bp, Homo sapiens
aaaggcaggttgccc

SEQ ID NO: 1672979 - DNA, 15 bp, Homo sapiens
caaaggcaggttgcc

SEQ ID NO: 1672980 - DNA, 15 bp, Homo sapiens
acaaaggcaggttgc

SEQ ID NO: 1672981 - DNA, 15 bp, Homo sapiens
aacaaaggcaggttg

SEQ ID NO: 1672982 - DNA, 15 bp, Homo sapiens
gaacaaaggcaggtt

SEQ ID NO: 1672983 - DNA, 15 bp, Homo sapiens
agaacaaaggcaggt

SEQ ID NO: 1672984 - DNA, 15 bp, Homo sapiens
cagaacaaaggcagg

SEQ ID NO: 1672985 - DNA, 15 bp, Homo sapiens
tcagaacaaaggcag

SEQ ID NO: 1672986 - DNA, 15 bp, Homo sapiens
ttcagaacaaaggca

SEQ ID NO: 1672987 - DNA, 15 bp, Homo sapiens
attcagaacaaaggc

SEQ ID NO: 1672988 - DNA, 15 bp, Homo sapiens
aattcagaacaaagg

SEQ ID NO: 1672989 - DNA, 15 bp, Homo sapiens
caattcagaacaaag

SEQ ID NO: 1672990 - DNA, 15 bp, Homo sapiens
ccaattcagaacaaa

SEQ ID NO: 1672991 - DNA, 15 bp, Homo sapiens
accaattcagaacaa

SEQ ID NO: 1672992 - DNA, 15 bp, Homo sapiens
gaccaattcagaaca

SEQ ID NO: 1672993 - DNA, 15 bp, Homo sapiens
agaccaattcagaac

SEQ ID NO: 1672994 - DNA, 15 bp, Homo sapiens
aagaccaattcagaa

SEQ ID NO: 1672995 - DNA, 15 bp, Homo sapiens
taagaccaattcaga

SEQ ID NO: 1672996 - DNA, 15 bp, Homo sapiens
ttaagaccaattcag

SEQ ID NO: 1672997 - DNA, 15 bp, Homo sapiens
cttaagaccaattca

SEQ ID NO: 1672998 - DNA, 15 bp, Homo sapiens
tcttaagaccaattc

SEQ ID NO: 1672999 - DNA, 15 bp, Homo sapiens
ttcttaagaccaatt

SEQ ID NO: 1673000 - DNA, 15 bp, Homo sapiens
gttcttaagaccaat

SEQ ID NO: 1673001 - DNA, 15 bp, Homo sapiens
tgttcttaagaccaa

SEQ ID NO: 1673002 - DNA, 15 bp, Homo sapiens
atgttcttaagacca

SEQ ID NO: 1673003 - DNA, 15 bp, Homo sapiens
aatgttcttaagacc

SEQ ID NO: 1673004 - DNA, 15 bp, Homo sapiens
taatgttcttaagac

SEQ ID NO: 1673005 - DNA, 15 bp, Homo sapiens
gtaatgttcttaaga

SEQ ID NO: 1673006 - DNA, 15 bp, Homo sapiens
ggtaatgttcttaag

SEQ ID NO: 1673007 - DNA, 15 bp, Homo sapiens
tggtaatgttcttaa

SEQ ID NO: 1673008 - DNA, 15 bp, Homo sapiens
ctggtaatgttctta

SEQ ID NO: 1673009 - DNA, 15 bp, Homo sapiens
gctggtaatgttctt

SEQ ID NO: 1673010 - DNA, 15 bp, Homo sapiens
agctggtaatgttct

SEQ ID NO: 1673011 - DNA, 15 bp, Homo sapiens
gagctggtaatgttc

SEQ ID NO: 1673012 - DNA, 15 bp, Homo sapiens
ggagctggtaatgtt

SEQ ID NO: 1673013 - DNA, 15 bp, Homo sapiens
tggagctggtaatgt

SEQ ID NO: 1673014 - DNA, 15 bp, Homo sapiens
ctggagctggtaatg

SEQ ID NO: 1673015 - DNA, 15 bp, Homo sapiens
cctggagctggtaat

SEQ ID NO: 1673016 - DNA, 15 bp, Homo sapiens
acctggagctggtaa

SEQ ID NO: 1673017 - DNA, 15 bp, Homo sapiens
aacctggagctggta

SEQ ID NO: 1673018 - DNA, 15 bp, Homo sapiens
aaacctggagctggt

SEQ ID NO: 1673019 - DNA, 15 bp, Homo sapiens
taaacctggagctgg

SEQ ID NO: 1673020 - DNA, 15 bp, Homo sapiens
ttaaacctggagctg

SEQ ID NO: 1673021 - DNA, 15 bp, Homo sapiens
tttaaacctggagct

SEQ ID NO: 1673022 - DNA, 15 bp, Homo sapiens
atttaaacctggagc

SEQ ID NO: 1673023 - DNA, 15 bp, Homo sapiens
aatttaaacctggag

SEQ ID NO: 1673024 - DNA, 15 bp, Homo sapiens
caatttaaacctgga

SEQ ID NO: 1673025 - DNA, 15 bp, Homo sapiens
acaatttaaacctgg

SEQ ID NO: 1673026 - DNA, 15 bp, Homo sapiens
aacaatttaaacctg

SEQ ID NO: 1673027 - DNA, 15 bp, Homo sapiens
gaacaatttaaacct

SEQ ID NO: 1673028 - DNA, 15 bp, Homo sapiens
tgaacaatttaaacc

SEQ ID NO: 1673029 - DNA, 15 bp, Homo sapiens
ctgaacaatttaaac

SEQ ID NO: 1673030 - DNA, 15 bp, Homo sapiens
actgaacaatttaaa

SEQ ID NO: 1673031 - DNA, 15 bp, Homo sapiens
aactgaacaatttaa

SEQ ID NO: 1673032 - DNA, 15 bp, Homo sapiens
aaactgaacaattta

SEQ ID NO: 1673033 - DNA, 15 bp, Homo sapiens
gaaactgaacaattt

SEQ ID NO: 1673034 - DNA, 15 bp, Homo sapiens
tgaaactgaacaatt

SEQ ID NO: 1673035 - DNA, 15 bp, Homo sapiens
atgaaactgaacaat

SEQ ID NO: 1673036 - DNA, 15 bp, Homo sapiens
catgaaactgaacaa

SEQ ID NO: 1673037 - DNA, 15 bp, Homo sapiens
gcatgaaactgaaca

SEQ ID NO: 1673038 - DNA, 15 bp, Homo sapiens
tgcatgaaactgaac

SEQ ID NO: 1673039 - DNA, 15 bp, Homo sapiens
ctgcatgaaactgaa

SEQ ID NO: 1673040 - DNA, 15 bp, Homo sapiens
actgcatgaaactga

SEQ ID NO: 1673041 - DNA, 15 bp, Homo sapiens
aactgcatgaaactg

SEQ ID NO: 1673042 - DNA, 15 bp, Homo sapiens
gaactgcatgaaact

SEQ ID NO: 1673043 - DNA, 15 bp, Homo sapiens
ggaactgcatgaaac

SEQ ID NO: 1673044 - DNA, 15 bp, Homo sapiens
tggaactgcatgaaa

SEQ ID NO: 1673045 - DNA, 15 bp, Homo sapiens
ttggaactgcatgaa

SEQ ID NO: 1673046 - DNA, 15 bp, Homo sapiens
attggaactgcatga

SEQ ID NO: 1673047 - DNA, 15 bp, Homo sapiens
tattggaactgcatg

SEQ ID NO: 1673048 - DNA, 15 bp, Homo sapiens
ctattggaactgcat

SEQ ID NO: 1673049 - DNA, 15 bp, Homo sapiens
gctattggaactgca

SEQ ID NO: 1673050 - DNA, 15 bp, Homo sapiens
agctattggaactgc

SEQ ID NO: 1673051 - DNA, 15 bp, Homo sapiens
cagctattggaactg

SEQ ID NO: 1673052 - DNA, 15 bp, Homo sapiens
tcagctattggaact

SEQ ID NO: 1673053 - DNA, 15 bp, Homo sapiens
atcagctattggaac

SEQ ID NO: 1673054 - DNA, 15 bp, Homo sapiens
gatcagctattggaa

SEQ ID NO: 1673055 - DNA, 15 bp, Homo sapiens
tgatcagctattgga

SEQ ID NO: 1673056 - DNA, 15 bp, Homo sapiens
atgatcagctattgg

SEQ ID NO: 1673057 - DNA, 15 bp, Homo sapiens
aatgatcagctattg

SEQ ID NO: 1673058 - DNA, 15 bp, Homo sapiens
caatgatcagctatt

SEQ ID NO: 1673059 - DNA, 15 bp, Homo sapiens
acaatgatcagctat

SEQ ID NO: 1673060 - DNA, 15 bp, Homo sapiens
aacaatgatcagcta

SEQ ID NO: 1673061 - DNA, 15 bp, Homo sapiens
caacaatgatcagct

SEQ ID NO: 1673062 - DNA, 15 bp, Homo sapiens
tcaacaatgatcagc

SEQ ID NO: 1673063 - DNA, 15 bp, Homo sapiens
ctcaacaatgatcag

SEQ ID NO: 1673064 - DNA, 15 bp, Homo sapiens
tctcaacaatgatca

SEQ ID NO: 1673065 - DNA, 15 bp, Homo sapiens
atctcaacaatgatc

SEQ ID NO: 1673066 - DNA, 15 bp, Homo sapiens
catctcaacaatgat

SEQ ID NO: 1673067 - DNA, 15 bp, Homo sapiens
tcatctcaacaatga

SEQ ID NO: 1673068 - DNA, 15 bp, Homo sapiens
ctcatctcaacaatg

SEQ ID NO: 1673069 - DNA, 15 bp, Homo sapiens
cctcatctcaacaat

SEQ ID NO: 1673070 - DNA, 15 bp, Homo sapiens
tcctcatctcaacaa

SEQ ID NO: 1673071 - DNA, 15 bp, Homo sapiens
gtcctcatctcaaca

SEQ ID NO: 1673072 - DNA, 15 bp, Homo sapiens
tgtcctcatctcaac

SEQ ID NO: 1673073 - DNA, 15 bp, Homo sapiens
ttgtcctcatctcaa

SEQ ID NO: 1673074 - DNA, 15 bp, Homo sapiens
tttgtcctcatctca

SEQ ID NO: 1673075 - DNA, 15 bp, Homo sapiens
ttttgtcctcatctc

SEQ ID NO: 1673076 - DNA, 15 bp, Homo sapiens
attttgtcctcatct

SEQ ID NO: 1673077 - DNA, 15 bp, Homo sapiens
gattttgtcctcatc

SEQ ID NO: 1673078 - DNA, 15 bp, Homo sapiens
ggattttgtcctcat

SEQ ID NO: 1673079 - DNA, 15 bp, Homo sapiens
aggattttgtcctca

SEQ ID NO: 1673080 - DNA, 15 bp, Homo sapiens
aaggattttgtcctc

SEQ ID NO: 1673081 - DNA, 15 bp, Homo sapiens
aaaggattttgtcct

SEQ ID NO: 1673082 - DNA, 15 bp, Homo sapiens
caaaggattttgtcc

SEQ ID NO: 1673083 - DNA, 15 bp, Homo sapiens
acaaaggattttgtc

SEQ ID NO: 1673084 - DNA, 15 bp, Homo sapiens
gacaaaggattttgt

SEQ ID NO: 1673085 - DNA, 15 bp, Homo sapiens
ggacaaaggattttg

SEQ ID NO: 1673086 - DNA, 15 bp, Homo sapiens
aggacaaaggatttt

SEQ ID NO: 1673087 - DNA, 15 bp, Homo sapiens
gaggacaaaggattt

SEQ ID NO: 1673088 - DNA, 15 bp, Homo sapiens
gtgaggacaaaggat

SEQ ID NO: 1673089 - DNA, 15 bp, Homo sapiens
agtgaggacaaagga

SEQ ID NO: 1673090 - DNA, 15 bp, Homo sapiens
tagtgaggacaaagg

SEQ ID NO: 1673091 - DNA, 15 bp, Homo sapiens
ctagtgaggacaaag

SEQ ID NO: 1673092 - DNA, 15 bp, Homo sapiens
actagtgaggacaaa

SEQ ID NO: 1673093 - DNA, 15 bp, Homo sapiens
aactagtgaggacaa

SEQ ID NO: 1673094 - DNA, 15 bp, Homo sapiens
aaactagtgaggaca

SEQ ID NO: 1673095 - DNA, 15 bp, Homo sapiens
caaactagtgaggac

SEQ ID NO: 1673096 - DNA, 15 bp, Homo sapiens
gcaaactagtgagga

SEQ ID NO: 1673097 - DNA, 15 bp, Homo sapiens
agcaaactagtgagg

SEQ ID NO: 1673098 - DNA, 15 bp, Homo sapiens
aagcaaactagtgag

SEQ ID NO: 1673099 - DNA, 15 bp, Homo sapiens
aaagcaaactagtga

SEQ ID NO: 1673100 - DNA, 15 bp, Homo sapiens
taaagcaaactagtg

SEQ ID NO: 1673101 - DNA, 15 bp, Homo sapiens
gtaaagcaaactagt

SEQ ID NO: 1673102 - DNA, 15 bp, Homo sapiens
tgtaaagcaaactag

SEQ ID NO: 1673103 - DNA, 15 bp, Homo sapiens
atgtaaagcaaacta

SEQ ID NO: 1673104 - DNA, 15 bp, Homo sapiens
aatgtaaagcaaact

SEQ ID NO: 1673105 - DNA, 15 bp, Homo sapiens
aaatgtaaagcaaac

SEQ ID NO: 1673106 - DNA, 15 bp, Homo sapiens
aaaatgtaaagcaaa

SEQ ID NO: 1673107 - DNA, 15 bp, Homo sapiens
aaaaatgtaaagcaa

SEQ ID NO: 1673108 - DNA, 15 bp, Homo sapiens
caaaaatgtaaagca

SEQ ID NO: 1673109 - DNA, 15 bp, Homo sapiens
tcaaaaatgtaaagc

SEQ ID NO: 1673110 - DNA, 15 bp, Homo sapiens
ttcaaaaatgtaaag

SEQ ID NO: 1673111 - DNA, 15 bp, Homo sapiens
tttcaaaaatgtaaa

SEQ ID NO: 1673112 - DNA, 15 bp, Homo sapiens
ttttcaaaaatgtaa

SEQ ID NO: 1673113 - DNA, 15 bp, Homo sapiens
cttttcaaaaatgta

SEQ ID NO: 1673114 - DNA, 15 bp, Homo sapiens
acttttcaaaaatgt

SEQ ID NO: 1673115 - DNA, 15 bp, Homo sapiens
tacttttcaaaaatg

SEQ ID NO: 1673116 - DNA, 15 bp, Homo sapiens
atacttttcaaaaat

SEQ ID NO: 1673117 - DNA, 15 bp, Homo sapiens
aatacttttcaaaaa

SEQ ID NO: 1673118 - DNA, 15 bp, Homo sapiens
taatacttttcaaaa

SEQ ID NO: 1673119 - DNA, 15 bp, Homo sapiens
ataatacttttcaaa

SEQ ID NO: 1673120 - DNA, 15 bp, Homo sapiens
aaaataatacttttc

SEQ ID NO: 1673121 - DNA, 15 bp, Homo sapiens
aaaaataatactttt

SEQ ID NO: 1673122 - DNA, 15 bp, Homo sapiens
caaaaataatacttt

SEQ ID NO: 1673123 - DNA, 15 bp, Homo sapiens
acaaaaataatactt

SEQ ID NO: 1673124 - DNA, 15 bp, Homo sapiens
gacaaaaataatact

SEQ ID NO: 1673125 - DNA, 15 bp, Homo sapiens
ggacaaaaataatac

SEQ ID NO: 1673126 - DNA, 15 bp, Homo sapiens
tggacaaaaataata

SEQ ID NO: 1673127 - DNA, 15 bp, Homo sapiens
ttggacaaaaataat

SEQ ID NO: 1673128 - DNA, 15 bp, Homo sapiens
cttggacaaaaataa

SEQ ID NO: 1673129 - DNA, 15 bp, Homo sapiens
acttggacaaaaata

SEQ ID NO: 1673130 - DNA, 15 bp, Homo sapiens
cacttggacaaaaat

SEQ ID NO: 1673131 - DNA, 15 bp, Homo sapiens
gcacttggacaaaaa

SEQ ID NO: 1673132 - DNA, 15 bp, Homo sapiens
agcacttggacaaaa

SEQ ID NO: 1673133 - DNA, 15 bp, Homo sapiens
aagcacttggacaaa

SEQ ID NO: 1673134 - DNA, 15 bp, Homo sapiens
taagcacttggacaa

SEQ ID NO: 1673135 - DNA, 15 bp, Homo sapiens
ataagcacttggaca

SEQ ID NO: 1673136 - DNA, 15 bp, Homo sapiens
gataagcacttggac

SEQ ID NO: 1673137 - DNA, 15 bp, Homo sapiens
tgataagcacttgga

SEQ ID NO: 1673138 - DNA, 15 bp, Homo sapiens
ttgataagcacttgg

SEQ ID NO: 1673139 - DNA, 15 bp, Homo sapiens
gttgataagcacttg

SEQ ID NO: 1673140 - DNA, 15 bp, Homo sapiens
agttgataagcactt

SEQ ID NO: 1673141 - DNA, 15 bp, Homo sapiens
tagttgataagcact

SEQ ID NO: 1673142 - DNA, 15 bp, Homo sapiens
ttagttgataagcac

SEQ ID NO: 1673143 - DNA, 15 bp, Homo sapiens
tttagttgataagca

SEQ ID NO: 1673144 - DNA, 15 bp, Homo sapiens
gtttagttgataagc

SEQ ID NO: 1673145 - DNA, 15 bp, Homo sapiens
ggtttagttgataag

SEQ ID NO: 1673146 - DNA, 15 bp, Homo sapiens
aggtttagttgataa

SEQ ID NO: 1673147 - DNA, 15 bp, Homo sapiens
aaggtttagttgata

SEQ ID NO: 1673148 - DNA, 15 bp, Homo sapiens
caaggtttagttgat

SEQ ID NO: 1673149 - DNA, 15 bp, Homo sapiens
acaaggtttagttga

SEQ ID NO: 1673150 - DNA, 15 bp, Homo sapiens
cacaaggtttagttg

SEQ ID NO: 1673151 - DNA, 15 bp, Homo sapiens
acacaaggtttagtt

SEQ ID NO: 1673152 - DNA, 15 bp, Homo sapiens
aacacaaggtttagt

SEQ ID NO: 1673153 - DNA, 15 bp, Homo sapiens
taacacaaggtttag

SEQ ID NO: 1673154 - DNA, 15 bp, Homo sapiens
ctaacacaaggttta

SEQ ID NO: 1673155 - DNA, 15 bp, Homo sapiens
cctaacacaaggttt

SEQ ID NO: 1673156 - DNA, 15 bp, Homo sapiens
acctaacacaaggtt

SEQ ID NO: 1673157 - DNA, 15 bp, Homo sapiens
tacctaacacaaggt

SEQ ID NO: 1673158 - DNA, 15 bp, Homo sapiens
ttacctaacacaagg

SEQ ID NO: 1673159 - DNA, 15 bp, Homo sapiens
cttacctaacacaag

SEQ ID NO: 1673160 - DNA, 15 bp, Homo sapiens
tcttacctaacacaa

SEQ ID NO: 1673161 - DNA, 15 bp, Homo sapiens
ttcttacctaacaca

SEQ ID NO: 1673162 - DNA, 15 bp, Homo sapiens
attcttacctaacac

SEQ ID NO: 1673163 - DNA, 15 bp, Homo sapiens
cattcttacctaaca

SEQ ID NO: 1673164 - DNA, 15 bp, Homo sapiens
ccattcttacctaac

SEQ ID NO: 1673165 - DNA, 15 bp, Homo sapiens
tccattcttacctaa

SEQ ID NO: 1673166 - DNA, 15 bp, Homo sapiens
ttccattcttaccta

SEQ ID NO: 1673167 - DNA, 15 bp, Homo sapiens
attccattcttacct

SEQ ID NO: 1673168 - DNA, 15 bp, Homo sapiens
aattccattcttacc

SEQ ID NO: 1673169 - DNA, 15 bp, Homo sapiens
aaattccattcttac

SEQ ID NO: 1673170 - DNA, 15 bp, Homo sapiens
taaattccattctta

SEQ ID NO: 1673171 - DNA, 15 bp, Homo sapiens
ataaattccattctt

SEQ ID NO: 1673172 - DNA, 15 bp, Homo sapiens
aataaattccattct

SEQ ID NO: 1673173 - DNA, 15 bp, Homo sapiens
taataaattccattc

SEQ ID NO: 1673174 - DNA, 15 bp, Homo sapiens
ttaataaattccatt

SEQ ID NO: 1673175 - DNA, 15 bp, Homo sapiens
cttaataaattccat

SEQ ID NO: 1673176 - DNA, 15 bp, Homo sapiens
acttaataaattcca

SEQ ID NO: 1673177 - DNA, 15 bp, Homo sapiens
cacttaataaattcc

SEQ ID NO: 1673178 - DNA, 15 bp, Homo sapiens
tcacttaataaattc

SEQ ID NO: 1673179 - DNA, 15 bp, Homo sapiens
ttcacttaataaatt

SEQ ID NO: 1673180 - DNA, 15 bp, Homo sapiens
attcacttaataaat

SEQ ID NO: 1673181 - DNA, 15 bp, Homo sapiens
gattcacttaataaa

SEQ ID NO: 1673182 - DNA, 15 bp, Homo sapiens
tgattcacttaataa

SEQ ID NO: 1673183 - DNA, 15 bp, Homo sapiens
ctgattcacttaata

SEQ ID NO: 1673184 - DNA, 15 bp, Homo sapiens
actgattcacttaat

SEQ ID NO: 1673185 - DNA, 15 bp, Homo sapiens
cactgattcacttaa

SEQ ID NO: 1673186 - DNA, 15 bp, Homo sapiens
acactgattcactta

SEQ ID NO: 1673187 - DNA, 15 bp, Homo sapiens
cacactgattcactt

SEQ ID NO: 1673188 - DNA, 15 bp, Homo sapiens
tcacactgattcact

SEQ ID NO: 1673189 - DNA, 15 bp, Homo sapiens
gtcacactgattcac

SEQ ID NO: 1673190 - DNA, 15 bp, Homo sapiens
ggtcacactgattca

SEQ ID NO: 1673191 - DNA, 15 bp, Homo sapiens
gggtcacactgattc

SEQ ID NO: 1673192 - DNA, 15 bp, Homo sapiens
agggtcacactgatt

SEQ ID NO: 1673193 - DNA, 15 bp, Homo sapiens
aagggtcacactgat

SEQ ID NO: 1673194 - DNA, 15 bp, Homo sapiens
gaagggtcacactga

SEQ ID NO: 1673195 - DNA, 15 bp, Homo sapiens
agaagggtcacactg

SEQ ID NO: 1673196 - DNA, 15 bp, Homo sapiens
aagaagggtcacact

SEQ ID NO: 1673197 - DNA, 15 bp, Homo sapiens
caagaagggtcacac

SEQ ID NO: 1673198 - DNA, 15 bp, Homo sapiens
acaagaagggtcaca

SEQ ID NO: 1673199 - DNA, 15 bp, Homo sapiens
gacaagaagggtcac

SEQ ID NO: 1673200 - DNA, 15 bp, Homo sapiens
tgacaagaagggtca

SEQ ID NO: 1673201 - DNA, 15 bp, Homo sapiens
atgacaagaagggtc

SEQ ID NO: 1673202 - DNA, 15 bp, Homo sapiens
tatgacaagaagggt

SEQ ID NO: 1673203 - DNA, 15 bp, Homo sapiens
ttatgacaagaaggg

SEQ ID NO: 1673204 - DNA, 15 bp, Homo sapiens
cttatgacaagaagg

SEQ ID NO: 1673205 - DNA, 15 bp, Homo sapiens
tcttatgacaagaag

SEQ ID NO: 1673206 - DNA, 15 bp, Homo sapiens
atcttatgacaagaa

SEQ ID NO: 1673207 - DNA, 15 bp, Homo sapiens
aatcttatgacaaga

SEQ ID NO: 1673208 - DNA, 15 bp, Homo sapiens
taatcttatgacaag

SEQ ID NO: 1673209 - DNA, 15 bp, Homo sapiens
ataatcttatgacaa

SEQ ID NO: 1673210 - DNA, 15 bp, Homo sapiens
gataatcttatgaca

SEQ ID NO: 1673211 - DNA, 15 bp, Homo sapiens
agataatcttatgac

SEQ ID NO: 1673212 - DNA, 15 bp, Homo sapiens
aagataatcttatga

SEQ ID NO: 1673213 - DNA, 15 bp, Homo sapiens
taagataatcttatg

SEQ ID NO: 1673214 - DNA, 15 bp, Homo sapiens
gtctaactaaaaatg

SEQ ID NO: 1673215 - DNA, 15 bp, Homo sapiens
tgtctaactaaaaat

SEQ ID NO: 1673216 - DNA, 15 bp, Homo sapiens
atgtctaactaaaaa

SEQ ID NO: 1673217 - DNA, 15 bp, Homo sapiens
gatgtctaactaaaa

SEQ ID NO: 1673218 - DNA, 15 bp, Homo sapiens
tgatgtctaactaaa

SEQ ID NO: 1673219 - DNA, 15 bp, Homo sapiens
ctgatgtctaactaa

SEQ ID NO: 1673220 - DNA, 15 bp, Homo sapiens
tctgatgtctaacta

SEQ ID NO: 1673221 - DNA, 15 bp, Homo sapiens
atctgatgtctaact

SEQ ID NO: 1673222 - DNA, 15 bp, Homo sapiens
aatctgatgtctaac

SEQ ID NO: 1673223 - DNA, 15 bp, Homo sapiens
aaatctgatgtctaa

SEQ ID NO: 1673224 - DNA, 15 bp, Homo sapiens
caaatctgatgtcta

SEQ ID NO: 1673225 - DNA, 15 bp, Homo sapiens
tcaaatctgatgtct

SEQ ID NO: 1673226 - DNA, 15 bp, Homo sapiens
ttcaaatctgatgtc

SEQ ID NO: 1673227 - DNA, 15 bp, Homo sapiens
tttcaaatctgatgt

SEQ ID NO: 1673228 - DNA, 15 bp, Homo sapiens
atttcaaatctgatg

SEQ ID NO: 1673229 - DNA, 15 bp, Homo sapiens
tatttcaaatctgat

SEQ ID NO: 1673230 - DNA, 15 bp, Homo sapiens
atatttcaaatctga

SEQ ID NO: 1673231 - DNA, 15 bp, Homo sapiens
aatatttcaaatctg

SEQ ID NO: 1673232 - DNA, 15 bp, Homo sapiens
taatatttcaaatct

SEQ ID NO: 1673233 - DNA, 15 bp, Homo sapiens
ttaatatttcaaatc

SEQ ID NO: 1673234 - DNA, 15 bp, Homo sapiens
attaatatttcaaat

SEQ ID NO: 1673235 - DNA, 15 bp, Homo sapiens
cattaatatttcaaa

SEQ ID NO: 1673236 - DNA, 15 bp, Homo sapiens
acattaatatttcaa

SEQ ID NO: 1673237 - DNA, 15 bp, Homo sapiens
aacattaatatttca

SEQ ID NO: 1673238 - DNA, 15 bp, Homo sapiens
aaacattaatatttc

SEQ ID NO: 1673239 - DNA, 15 bp, Homo sapiens
taaacattaatattt

SEQ ID NO: 1673240 - DNA, 15 bp, Homo sapiens
gtaaacattaatatt

SEQ ID NO: 1673241 - DNA, 15 bp, Homo sapiens
ggtaaacattaatat

SEQ ID NO: 1673242 - DNA, 15 bp, Homo sapiens
aggtaaacattaata

SEQ ID NO: 1673243 - DNA, 15 bp, Homo sapiens
aaggtaaacattaat

SEQ ID NO: 1673244 - DNA, 15 bp, Homo sapiens
aaaggtaaacattaa

SEQ ID NO: 1673245 - DNA, 15 bp, Homo sapiens
gaaaggtaaacatta

SEQ ID NO: 1673246 - DNA, 15 bp, Homo sapiens
tgaaaggtaaacatt

SEQ ID NO: 1673247 - DNA, 15 bp, Homo sapiens
ttgaaaggtaaacat

SEQ ID NO: 1673248 - DNA, 15 bp, Homo sapiens
attgaaaggtaaaca

SEQ ID NO: 1673249 - DNA, 15 bp, Homo sapiens
cattgaaaggtaaac

SEQ ID NO: 1673250 - DNA, 15 bp, Homo sapiens
acattgaaaggtaaa

SEQ ID NO: 1673251 - DNA, 15 bp, Homo sapiens
cacattgaaaggtaa

SEQ ID NO: 1673252 - DNA, 15 bp, Homo sapiens
acacattgaaaggta

SEQ ID NO: 1673253 - DNA, 15 bp, Homo sapiens
cacacattgaaaggt

SEQ ID NO: 1673254 - DNA, 15 bp, Homo sapiens
ccacacattgaaagg

SEQ ID NO: 1673255 - DNA, 15 bp, Homo sapiens
accacacattgaaag

SEQ ID NO: 1673256 - DNA, 15 bp, Homo sapiens
taccacacattgaaa

SEQ ID NO: 1673257 - DNA, 15 bp, Homo sapiens
ataccacacattgaa

SEQ ID NO: 1673258 - DNA, 15 bp, Homo sapiens
gataccacacattga

SEQ ID NO: 1673259 - DNA, 15 bp, Homo sapiens
tgataccacacattg

SEQ ID NO: 1673260 - DNA, 15 bp, Homo sapiens
ctgataccacacatt

SEQ ID NO: 1673261 - DNA, 15 bp, Homo sapiens
gctgataccacacat

SEQ ID NO: 1673262 - DNA, 15 bp, Homo sapiens
agctgataccacaca

SEQ ID NO: 1673263 - DNA, 15 bp, Homo sapiens
cagctgataccacac

SEQ ID NO: 1673264 - DNA, 15 bp, Homo sapiens
ccagctgataccaca

SEQ ID NO: 1673265 - DNA, 15 bp, Homo sapiens
tccagctgataccac

SEQ ID NO: 1673266 - DNA, 15 bp, Homo sapiens
gtccagctgatacca

SEQ ID NO: 1673267 - DNA, 15 bp, Homo sapiens
agtccagctgatacc

SEQ ID NO: 1673268 - DNA, 15 bp, Homo sapiens
gagtccagctgatac

SEQ ID NO: 1673269 - DNA, 15 bp, Homo sapiens
tgagtccagctgata

SEQ ID NO: 1673270 - DNA, 15 bp, Homo sapiens
ctgagtccagctgat

SEQ ID NO: 1673271 - DNA, 15 bp, Homo sapiens
actgagtccagctga

SEQ ID NO: 1673272 - DNA, 15 bp, Homo sapiens
tactgagtccagctg

SEQ ID NO: 1673273 - DNA, 15 bp, Homo sapiens
ttactgagtccagct

SEQ ID NO: 1673274 - DNA, 15 bp, Homo sapiens
gttactgagtccagc

SEQ ID NO: 1673275 - DNA, 15 bp, Homo sapiens
tgttactgagtccag

SEQ ID NO: 1673276 - DNA, 15 bp, Homo sapiens
gtgttactgagtcca

SEQ ID NO: 1673277 - DNA, 15 bp, Homo sapiens
ggtgttactgagtcc

SEQ ID NO: 1673278 - DNA, 15 bp, Homo sapiens
gggtgttactgagtc

SEQ ID NO: 1673279 - DNA, 15 bp, Homo sapiens
ggggtgttactgagt

SEQ ID NO: 1673280 - DNA, 15 bp, Homo sapiens
aggggtgttactgag

SEQ ID NO: 1673281 - DNA, 15 bp, Homo sapiens
aaggggtgttactga

SEQ ID NO: 1673282 - DNA, 15 bp, Homo sapiens
aaaggggtgttactg

SEQ ID NO: 1673283 - DNA, 15 bp, Homo sapiens
gaaaggggtgttact

SEQ ID NO: 1673284 - DNA, 15 bp, Homo sapiens
agaaaggggtgttac

SEQ ID NO: 1673285 - DNA, 15 bp, Homo sapiens
aagaaaggggtgtta

SEQ ID NO: 1673286 - DNA, 15 bp, Homo sapiens
gaagaaaggggtgtt

SEQ ID NO: 1673287 - DNA, 15 bp, Homo sapiens
tgaagaaaggggtgt

SEQ ID NO: 1673288 - DNA, 15 bp, Homo sapiens
ctgaagaaaggggtg

SEQ ID NO: 1673289 - DNA, 15 bp, Homo sapiens
gctgaagaaaggggt

SEQ ID NO: 1673290 - DNA, 15 bp, Homo sapiens
agctgaagaaagggg

SEQ ID NO: 1673291 - DNA, 15 bp, Homo sapiens
cagctgaagaaaggg

SEQ ID NO: 1673292 - DNA, 15 bp, Homo sapiens
ccagctgaagaaagg

SEQ ID NO: 1673293 - DNA, 15 bp, Homo sapiens
cccagctgaagaaag

SEQ ID NO: 1673294 - DNA, 15 bp, Homo sapiens
ccccagctgaagaaa

SEQ ID NO: 1673295 - DNA, 15 bp, Homo sapiens
tccccagctgaagaa

SEQ ID NO: 1673296 - DNA, 15 bp, Homo sapiens
atccccagctgaaga

SEQ ID NO: 1673297 - DNA, 15 bp, Homo sapiens
catccccagctgaag

SEQ ID NO: 1673298 - DNA, 15 bp, Homo sapiens
ccatccccagctgaa

SEQ ID NO: 1673299 - DNA, 15 bp, Homo sapiens
cccatccccagctga

SEQ ID NO: 1673300 - DNA, 15 bp, Homo sapiens
ccccatccccagctg

SEQ ID NO: 1673301 - DNA, 15 bp, Homo sapiens
tccccatccccagct

SEQ ID NO: 1673302 - DNA, 15 bp, Homo sapiens
ttccccatccccagc

SEQ ID NO: 1673303 - DNA, 15 bp, Homo sapiens
attccccatccccag

SEQ ID NO: 1673304 - DNA, 15 bp, Homo sapiens
cattccccatcccca

SEQ ID NO: 1673305 - DNA, 15 bp, Homo sapiens
ccattccccatcccc

SEQ ID NO: 1673306 - DNA, 15 bp, Homo sapiens
tccattccccatccc

SEQ ID NO: 1673307 - DNA, 15 bp, Homo sapiens
atccattccccatcc

SEQ ID NO: 1673308 - DNA, 15 bp, Homo sapiens
aatccattccccatc

SEQ ID NO: 1673309 - DNA, 15 bp, Homo sapiens
taatccattccccat

SEQ ID NO: 1673310 - DNA, 15 bp, Homo sapiens
ataatccattcccca

SEQ ID NO: 1673311 - DNA, 15 bp, Homo sapiens
aataatccattcccc

SEQ ID NO: 1673312 - DNA, 15 bp, Homo sapiens
caataatccattccc

SEQ ID NO: 1673313 - DNA, 15 bp, Homo sapiens
ccaataatccattcc

SEQ ID NO: 1673314 - DNA, 15 bp, Homo sapiens
tccaataatccattc

SEQ ID NO: 1673315 - DNA, 15 bp, Homo sapiens
ttccaataatccatt

SEQ ID NO: 1673316 - DNA, 15 bp, Homo sapiens
tttccaataatccat

SEQ ID NO: 1673317 - DNA, 15 bp, Homo sapiens
ttttccaataatcca

SEQ ID NO: 1673318 - DNA, 15 bp, Homo sapiens
attttccaataatcc

SEQ ID NO: 1673319 - DNA, 15 bp, Homo sapiens
cattttccaataatc

SEQ ID NO: 1673320 - DNA, 15 bp, Homo sapiens
ccattttccaataat

SEQ ID NO: 1673321 - DNA, 15 bp, Homo sapiens
tccattttccaataa

SEQ ID NO: 1673322 - DNA, 15 bp, Homo sapiens
ttccattttccaata

SEQ ID NO: 1673323 - DNA, 15 bp, Homo sapiens
tttccattttccaat

SEQ ID NO: 1673324 - DNA, 15 bp, Homo sapiens
ctttccattttccaa

SEQ ID NO: 1673325 - DNA, 15 bp, Homo sapiens
tctttccattttcca

SEQ ID NO: 1673326 - DNA, 15 bp, Homo sapiens
ttctttccattttcc

SEQ ID NO: 1673327 - DNA, 15 bp, Homo sapiens
cttctttccattttc

SEQ ID NO: 1673328 - DNA, 15 bp, Homo sapiens
tcttctttccatttt

SEQ ID NO: 1673329 - DNA, 15 bp, Homo sapiens
ttcttctttccattt

SEQ ID NO: 1673330 - DNA, 15 bp, Homo sapiens
tttcttctttccatt

SEQ ID NO: 1673331 - DNA, 15 bp, Homo sapiens
ctttcttctttccat

SEQ ID NO: 1673332 - DNA, 15 bp, Homo sapiens
actttcttctttcca

SEQ ID NO: 1673333 - DNA, 15 bp, Homo sapiens
tactttcttctttcc

SEQ ID NO: 1673334 - DNA, 15 bp, Homo sapiens
ttactttcttctttc

SEQ ID NO: 1673335 - DNA, 15 bp, Homo sapiens
gttactttcttcttt

SEQ ID NO: 1673336 - DNA, 15 bp, Homo sapiens
agttactttcttctt

SEQ ID NO: 1673337 - DNA, 15 bp, Homo sapiens
tagttactttcttct

SEQ ID NO: 1673338 - DNA, 15 bp, Homo sapiens
ttagttactttcttc

SEQ ID NO: 1673339 - DNA, 15 bp, Homo sapiens
tttagttactttctt

SEQ ID NO: 1673340 - DNA, 15 bp, Homo sapiens
ttttagttactttct

SEQ ID NO: 1673341 - DNA, 15 bp, Homo sapiens
cttttagttactttc

SEQ ID NO: 1673342 - DNA, 15 bp, Homo sapiens
gcttttagttacttt

SEQ ID NO: 1673343 - DNA, 15 bp, Homo sapiens
ggcttttagttactt

SEQ ID NO: 1673344 - DNA, 15 bp, Homo sapiens
aggcttttagttact

SEQ ID NO: 1673345 - DNA, 15 bp, Homo sapiens
aaggcttttagttac

SEQ ID NO: 1673346 - DNA, 15 bp, Homo sapiens
gaaggcttttagtta

SEQ ID NO: 1673347 - DNA, 15 bp, Homo sapiens
ggaaggcttttagtt

SEQ ID NO: 1673348 - DNA, 15 bp, Homo sapiens
aggaaggcttttagt

SEQ ID NO: 1673349 - DNA, 15 bp, Homo sapiens
aaggaaggcttttag

SEQ ID NO: 1673350 - DNA, 15 bp, Homo sapiens
aaaggaaggctttta

SEQ ID NO: 1673351 - DNA, 15 bp, Homo sapiens
gaaaggaaggctttt

SEQ ID NO: 1673352 - DNA, 15 bp, Homo sapiens
tgaaaggaaggcttt

SEQ ID NO: 1673353 - DNA, 15 bp, Homo sapiens
gtgaaaggaaggctt

SEQ ID NO: 1673354 - DNA, 15 bp, Homo sapiens
tgtgaaaggaaggct

SEQ ID NO: 1673355 - DNA, 15 bp, Homo sapiens
ctgtgaaaggaaggc

SEQ ID NO: 1673356 - DNA, 15 bp, Homo sapiens
actgtgaaaggaagg

SEQ ID NO: 1673357 - DNA, 15 bp, Homo sapiens
aactgtgaaaggaag

SEQ ID NO: 1673358 - DNA, 15 bp, Homo sapiens
aaactgtgaaaggaa

SEQ ID NO: 1673359 - DNA, 15 bp, Homo sapiens
gaaactgtgaaagga

SEQ ID NO: 1673360 - DNA, 15 bp, Homo sapiens
agaaactgtgaaagg

SEQ ID NO: 1673361 - DNA, 15 bp, Homo sapiens
cagaaactgtgaaag

SEQ ID NO: 1673362 - DNA, 15 bp, Homo sapiens
ccagaaactgtgaaa

SEQ ID NO: 1673363 - DNA, 15 bp, Homo sapiens
gccagaaactgtgaa

SEQ ID NO: 1673364 - DNA, 15 bp, Homo sapiens
tgccagaaactgtga

SEQ ID NO: 1673365 - DNA, 15 bp, Homo sapiens
atgccagaaactgtg

SEQ ID NO: 1673366 - DNA, 15 bp, Homo sapiens
gatgccagaaactgt

SEQ ID NO: 1673367 - DNA, 15 bp, Homo sapiens
tgatgccagaaactg

SEQ ID NO: 1673368 - DNA, 15 bp, Homo sapiens
gtgatgccagaaact

SEQ ID NO: 1673369 - DNA, 15 bp, Homo sapiens
agtgatgccagaaac

SEQ ID NO: 1673370 - DNA, 15 bp, Homo sapiens
tagtgatgccagaaa

SEQ ID NO: 1673371 - DNA, 15 bp, Homo sapiens
gtagtgatgccagaa

SEQ ID NO: 1673372 - DNA, 15 bp, Homo sapiens
ggtagtgatgccaga

SEQ ID NO: 1673373 - DNA, 15 bp, Homo sapiens
tggtagtgatgccag

SEQ ID NO: 1673374 - DNA, 15 bp, Homo sapiens
gtggtagtgatgcca

SEQ ID NO: 1673375 - DNA, 15 bp, Homo sapiens
agtggtagtgatgcc

SEQ ID NO: 1673376 - DNA, 15 bp, Homo sapiens
tagtggtagtgatgc

SEQ ID NO: 1673377 - DNA, 15 bp, Homo sapiens
gtagtggtagtgatg

SEQ ID NO: 1673378 - DNA, 15 bp, Homo sapiens
agtagtggtagtgat

SEQ ID NO: 1673379 - DNA, 15 bp, Homo sapiens
cagtagtggtagtga

SEQ ID NO: 1673380 - DNA, 15 bp, Homo sapiens
tcagtagtggtagtg

SEQ ID NO: 1673381 - DNA, 15 bp, Homo sapiens
atcagtagtggtagt

SEQ ID NO: 1673382 - DNA, 15 bp, Homo sapiens
aatcagtagtggtag

SEQ ID NO: 1673383 - DNA, 15 bp, Homo sapiens
taatcagtagtggta

SEQ ID NO: 1673384 - DNA, 15 bp, Homo sapiens
ttaatcagtagtggt

SEQ ID NO: 1673385 - DNA, 15 bp, Homo sapiens
tttaatcagtagtgg

SEQ ID NO: 1673386 - DNA, 15 bp, Homo sapiens
gtttaatcagtagtg

SEQ ID NO: 1673387 - DNA, 15 bp, Homo sapiens
tgtttaatcagtagt

SEQ ID NO: 1673388 - DNA, 15 bp, Homo sapiens
ttgtttaatcagtag

SEQ ID NO: 1673389 - DNA, 15 bp, Homo sapiens
cttgtttaatcagta

SEQ ID NO: 1673390 - DNA, 15 bp, Homo sapiens
tcttgtttaatcagt

SEQ ID NO: 1673391 - DNA, 15 bp, Homo sapiens
ttcttgtttaatcag

SEQ ID NO: 1673392 - DNA, 15 bp, Homo sapiens
attcttgtttaatca

SEQ ID NO: 1673393 - DNA, 15 bp, Homo sapiens
tattcttgtttaatc

SEQ ID NO: 1673394 - DNA, 15 bp, Homo sapiens
ttattcttgtttaat

SEQ ID NO: 1673395 - DNA, 15 bp, Homo sapiens
cttattcttgtttaa

SEQ ID NO: 1673396 - DNA, 15 bp, Homo sapiens
tcttattcttgttta

SEQ ID NO: 1673397 - DNA, 15 bp, Homo sapiens
ctcttattcttgttt

SEQ ID NO: 1673398 - DNA, 15 bp, Homo sapiens
tctcttattcttgtt

SEQ ID NO: 1673399 - DNA, 15 bp, Homo sapiens
ttctcttattcttgt

SEQ ID NO: 1673400 - DNA, 15 bp, Homo sapiens
gttctcttattcttg

SEQ ID NO: 1673401 - DNA, 15 bp, Homo sapiens
tgttctcttattctt

SEQ ID NO: 1673402 - DNA, 15 bp, Homo sapiens
atgttctcttattct

SEQ ID NO: 1673403 - DNA, 15 bp, Homo sapiens
aatgttctcttattc

SEQ ID NO: 1673404 - DNA, 15 bp, Homo sapiens
aaatgttctcttatt

SEQ ID NO: 1673405 - DNA, 15 bp, Homo sapiens
aaaatgttctcttat

SEQ ID NO: 1673406 - DNA, 15 bp, Homo sapiens
taaaatgttctctta

SEQ ID NO: 1673407 - DNA, 15 bp, Homo sapiens
ataaaatgttctctt

SEQ ID NO: 1673408 - DNA, 15 bp, Homo sapiens
gataaaatgttctct

SEQ ID NO: 1673409 - DNA, 15 bp, Homo sapiens
tgataaaatgttctc

SEQ ID NO: 1673410 - DNA, 15 bp, Homo sapiens
atgataaaatgttct

SEQ ID NO: 1673411 - DNA, 15 bp, Homo sapiens
gatgataaaatgttc

SEQ ID NO: 1673412 - DNA, 15 bp, Homo sapiens
tgatgataaaatgtt

SEQ ID NO: 1673413 - DNA, 15 bp, Homo sapiens
atgatgataaaatgt

SEQ ID NO: 1673414 - DNA, 15 bp, Homo sapiens
gatgatgataaaatg

SEQ ID NO: 1673415 - DNA, 15 bp, Homo sapiens
agatgatgataaaat

SEQ ID NO: 1673416 - DNA, 15 bp, Homo sapiens
cagatgatgataaaa

SEQ ID NO: 1673417 - DNA, 15 bp, Homo sapiens
gcagatgatgataaa

SEQ ID NO: 1673418 - DNA, 15 bp, Homo sapiens
agcagatgatgataa

SEQ ID NO: 1673419 - DNA, 15 bp, Homo sapiens
aagcagatgatgata

SEQ ID NO: 1673420 - DNA, 15 bp, Homo sapiens
aaagcagatgatgat

SEQ ID NO: 1673421 - DNA, 15 bp, Homo sapiens
taaagcagatgatga

SEQ ID NO: 1673422 - DNA, 15 bp, Homo sapiens
ataaagcagatgatg

SEQ ID NO: 1673423 - DNA, 15 bp, Homo sapiens
aataaagcagatgat

SEQ ID NO: 1673424 - DNA, 15 bp, Homo sapiens
gaataaagcagatga

SEQ ID NO: 1673425 - DNA, 15 bp, Homo sapiens
tgaataaagcagatg

SEQ ID NO: 1673426 - DNA, 15 bp, Homo sapiens
gtgaataaagcagat

SEQ ID NO: 1673427 - DNA, 15 bp, Homo sapiens
tgtgaataaagcaga

SEQ ID NO: 1673428 - DNA, 15 bp, Homo sapiens
atgtgaataaagcag

SEQ ID NO: 1673429 - DNA, 15 bp, Homo sapiens
tatgtgaataaagca

SEQ ID NO: 1673430 - DNA, 15 bp, Homo sapiens
ttatgtgaataaagc

SEQ ID NO: 1673431 - DNA, 15 bp, Homo sapiens
tttatgtgaataaag

SEQ ID NO: 1673432 - DNA, 15 bp, Homo sapiens
atttatgtgaataaa

SEQ ID NO: 1673433 - DNA, 15 bp, Homo sapiens
catttatgtgaataa

SEQ ID NO: 1673434 - DNA, 15 bp, Homo sapiens
tcatttatgtgaata

SEQ ID NO: 1673435 - DNA, 15 bp, Homo sapiens
ttcatttatgtgaat

SEQ ID NO: 1673436 - DNA, 15 bp, Homo sapiens
cttcatttatgtgaa

SEQ ID NO: 1673437 - DNA, 15 bp, Homo sapiens
acttcatttatgtga

SEQ ID NO: 1673438 - DNA, 15 bp, Homo sapiens
aacttcatttatgtg

SEQ ID NO: 1673439 - DNA, 15 bp, Homo sapiens
caacttcatttatgt

SEQ ID NO: 1673440 - DNA, 15 bp, Homo sapiens
acaacttcatttatg

SEQ ID NO: 1673441 - DNA, 15 bp, Homo sapiens
cacaacttcatttat

SEQ ID NO: 1673442 - DNA, 15 bp, Homo sapiens
tcacaacttcattta

SEQ ID NO: 1673443 - DNA, 15 bp, Homo sapiens
atcacaacttcattt

SEQ ID NO: 1673444 - DNA, 15 bp, Homo sapiens
catcacaacttcatt

SEQ ID NO: 1673445 - DNA, 15 bp, Homo sapiens
tcatcacaacttcat

SEQ ID NO: 1673446 - DNA, 15 bp, Homo sapiens
ttcatcacaacttca

SEQ ID NO: 1673447 - DNA, 15 bp, Homo sapiens
attcatcacaacttc

SEQ ID NO: 1673448 - DNA, 15 bp, Homo sapiens
tattcatcacaactt

SEQ ID NO: 1673449 - DNA, 15 bp, Homo sapiens
ttattcatcacaact

SEQ ID NO: 1673450 - DNA, 15 bp, Homo sapiens
tttattcatcacaac

SEQ ID NO: 1673451 - DNA, 15 bp, Homo sapiens
atttattcatcacaa

SEQ ID NO: 1673452 - DNA, 15 bp, Homo sapiens
gatttattcatcaca

SEQ ID NO: 1673453 - DNA, 15 bp, Homo sapiens
agatttattcatcac

SEQ ID NO: 1673454 - DNA, 15 bp, Homo sapiens
cagatttattcatca

SEQ ID NO: 1673455 - DNA, 15 bp, Homo sapiens
gcagatttattcatc

SEQ ID NO: 1673456 - DNA, 15 bp, Homo sapiens
agcagatttattcat

SEQ ID NO: 1673457 - DNA, 15 bp, Homo sapiens
aagcagatttattca

SEQ ID NO: 1673458 - DNA, 15 bp, Homo sapiens
aaagcagatttattc

SEQ ID NO: 1673459 - DNA, 15 bp, Homo sapiens
aaaagcagatttatt

SEQ ID NO: 1673460 - DNA, 15 bp, Homo sapiens
taaaagcagatttat

SEQ ID NO: 1673461 - DNA, 15 bp, Homo sapiens
ataaaagcagattta

SEQ ID NO: 1673462 - DNA, 15 bp, Homo sapiens
cataaaagcagattt

SEQ ID NO: 1673463 - DNA, 15 bp, Homo sapiens
gcataaaagcagatt

SEQ ID NO: 1673464 - DNA, 15 bp, Homo sapiens
tgcataaaagcagat

SEQ ID NO: 1673465 - DNA, 15 bp, Homo sapiens
ctgcataaaagcaga

SEQ ID NO: 1673466 - DNA, 15 bp, Homo sapiens
tctgcataaaagcag

SEQ ID NO: 1673467 - DNA, 15 bp, Homo sapiens
gtctgcataaaagca

SEQ ID NO: 1673468 - DNA, 15 bp, Homo sapiens
tgtctgcataaaagc

SEQ ID NO: 1673469 - DNA, 15 bp, Homo sapiens
gtgtctgcataaaag

SEQ ID NO: 1673470 - DNA, 15 bp, Homo sapiens
tgtgtctgcataaaa

SEQ ID NO: 1673471 - DNA, 15 bp, Homo sapiens
ttgtgtctgcataaa

SEQ ID NO: 1673472 - DNA, 15 bp, Homo sapiens
cttgtgtctgcataa

SEQ ID NO: 1673473 - DNA, 15 bp, Homo sapiens
taattccttgtgtct

SEQ ID NO: 1673474 - DNA, 15 bp, Homo sapiens
ttaattccttgtgtc

SEQ ID NO: 1673475 - DNA, 15 bp, Homo sapiens
cttaattccttgtgt

SEQ ID NO: 1673476 - DNA, 15 bp, Homo sapiens
acttaattccttgtg

SEQ ID NO: 1673477 - DNA, 15 bp, Homo sapiens
cacttaattccttgt

SEQ ID NO: 1673478 - DNA, 15 bp, Homo sapiens
ccacttaattccttg

SEQ ID NO: 1673479 - DNA, 15 bp, Homo sapiens
gccacttaattcctt

SEQ ID NO: 1673480 - DNA, 15 bp, Homo sapiens
agccacttaattcct

SEQ ID NO: 1673481 - DNA, 15 bp, Homo sapiens
aagccacttaattcc

SEQ ID NO: 1673482 - DNA, 15 bp, Homo sapiens
gaagccacttaattc

SEQ ID NO: 1673483 - DNA, 15 bp, Homo sapiens
cgaagccacttaatt

SEQ ID NO: 1673484 - DNA, 15 bp, Homo sapiens
acgaagccacttaat

SEQ ID NO: 1673485 - DNA, 15 bp, Homo sapiens
gacgaagccacttaa

SEQ ID NO: 1673486 - DNA, 15 bp, Homo sapiens
tgacgaagccactta

SEQ ID NO: 1673487 - DNA, 15 bp, Homo sapiens
atgacgaagccactt

SEQ ID NO: 1673488 - DNA, 15 bp, Homo sapiens
aatgacgaagccact

SEQ ID NO: 1673489 - DNA, 15 bp, Homo sapiens
caatgacgaagccac

SEQ ID NO: 1673490 - DNA, 15 bp, Homo sapiens
acaatgacgaagcca

SEQ ID NO: 1673491 - DNA, 15 bp, Homo sapiens
gacaatgacgaagcc

SEQ ID NO: 1673492 - DNA, 15 bp, Homo sapiens
ggacaatgacgaagc

SEQ ID NO: 1673493 - DNA, 15 bp, Homo sapiens
aggacaatgacgaag

SEQ ID NO: 1673494 - DNA, 15 bp, Homo sapiens
aaggacaatgacgaa

SEQ ID NO: 1673495 - DNA, 15 bp, Homo sapiens
gaaggacaatgacga

SEQ ID NO: 1673496 - DNA, 15 bp, Homo sapiens
agaaggacaatgacg

SEQ ID NO: 1673497 - DNA, 15 bp, Homo sapiens
tagaaggacaatgac

SEQ ID NO: 1673498 - DNA, 15 bp, Homo sapiens
gtagaaggacaatga

SEQ ID NO: 1673499 - DNA, 15 bp, Homo sapiens
ggtagaaggacaatg

SEQ ID NO: 1673500 - DNA, 15 bp, Homo sapiens
aggtagaaggacaat

SEQ ID NO: 1673501 - DNA, 15 bp, Homo sapiens
gaggtagaaggacaa

SEQ ID NO: 1673502 - DNA, 15 bp, Homo sapiens
tgaggtagaaggaca

SEQ ID NO: 1673503 - DNA, 15 bp, Homo sapiens
ttgaggtagaaggac

SEQ ID NO: 1673504 - DNA, 15 bp, Homo sapiens
tttgaggtagaagga

SEQ ID NO: 1673505 - DNA, 15 bp, Homo sapiens
ctttgaggtagaagg

SEQ ID NO: 1673506 - DNA, 15 bp, Homo sapiens
tctttgaggtagaag

SEQ ID NO: 1673507 - DNA, 15 bp, Homo sapiens
atctttgaggtagaa

SEQ ID NO: 1673508 - DNA, 15 bp, Homo sapiens
tatctttgaggtaga

SEQ ID NO: 1673509 - DNA, 15 bp, Homo sapiens
ttatctttgaggtag

SEQ ID NO: 1673510 - DNA, 15 bp, Homo sapiens
attatctttgaggta

SEQ ID NO: 1673511 - DNA, 15 bp, Homo sapiens
aattatctttgaggt

SEQ ID NO: 1673512 - DNA, 15 bp, Homo sapiens
aaattatctttgagg

SEQ ID NO: 1673513 - DNA, 15 bp, Homo sapiens
taaattatctttgag

SEQ ID NO: 1673514 - DNA, 15 bp, Homo sapiens
ataaattatctttga

SEQ ID NO: 1673515 - DNA, 15 bp, Homo sapiens
aataaattatctttg

SEQ ID NO: 1673516 - DNA, 15 bp, Homo sapiens
gaataaattatcttt

SEQ ID NO: 1673517 - DNA, 15 bp, Homo sapiens
ggaataaattatctt

SEQ ID NO: 1673518 - DNA, 15 bp, Homo sapiens
tggaataaattatct

SEQ ID NO: 1673519 - DNA, 15 bp, Homo sapiens
ttggaataaattatc

SEQ ID NO: 1673520 - DNA, 15 bp, Homo sapiens
tttggaataaattat

SEQ ID NO: 1673521 - DNA, 15 bp, Homo sapiens
ttttggaataaatta

SEQ ID NO: 1673522 - DNA, 15 bp, Homo sapiens
cttttggaataaatt

SEQ ID NO: 1673523 - DNA, 15 bp, Homo sapiens
gcttttggaataaat

SEQ ID NO: 1673524 - DNA, 15 bp, Homo sapiens
agcttttggaataaa

SEQ ID NO: 1673525 - DNA, 15 bp, Homo sapiens
tagcttttggaataa

SEQ ID NO: 1673526 - DNA, 15 bp, Homo sapiens
ttagcttttggaata

SEQ ID NO: 1673527 - DNA, 15 bp, Homo sapiens
cttagcttttggaat

SEQ ID NO: 1673528 - DNA, 15 bp, Homo sapiens
tcttagcttttggaa

SEQ ID NO: 1673529 - DNA, 15 bp, Homo sapiens
atcttagcttttgga

SEQ ID NO: 1673530 - DNA, 15 bp, Homo sapiens
tatcttagcttttgg

SEQ ID NO: 1673531 - DNA, 15 bp, Homo sapiens
ttatcttagcttttg

SEQ ID NO: 1673532 - DNA, 15 bp, Homo sapiens
tttatcttagctttt

SEQ ID NO: 1673533 - DNA, 15 bp, Homo sapiens
atttatcttagcttt

SEQ ID NO: 1673534 - DNA, 15 bp, Homo sapiens
catttatcttagctt

SEQ ID NO: 1673535 - DNA, 15 bp, Homo sapiens
ccatttatcttagct

SEQ ID NO: 1673536 - DNA, 15 bp, Homo sapiens
tccatttatcttagc

SEQ ID NO: 1673537 - DNA, 15 bp, Homo sapiens
ttccatttatcttag

SEQ ID NO: 1673538 - DNA, 15 bp, Homo sapiens
cttccatttatctta

SEQ ID NO: 1673539 - DNA, 15 bp, Homo sapiens
tcttccatttatctt

SEQ ID NO: 1673540 - DNA, 15 bp, Homo sapiens
gtcttccatttatct

SEQ ID NO: 1673541 - DNA, 15 bp, Homo sapiens
agtcttccatttatc

SEQ ID NO: 1673542 - DNA, 15 bp, Homo sapiens
gagtcttccatttat

SEQ ID NO: 1673543 - DNA, 15 bp, Homo sapiens
agagtcttccattta

SEQ ID NO: 1673544 - DNA, 15 bp, Homo sapiens
aagagtcttccattt

SEQ ID NO: 1673545 - DNA, 15 bp, Homo sapiens
caagagtcttccatt

SEQ ID NO: 1673546 - DNA, 15 bp, Homo sapiens
tcaagagtcttccat

SEQ ID NO: 1673547 - DNA, 15 bp, Homo sapiens
ttcaagagtcttcca

SEQ ID NO: 1673548 - DNA, 15 bp, Homo sapiens
gttcaagagtcttcc

SEQ ID NO: 1673549 - DNA, 15 bp, Homo sapiens
agttcaagagtcttc

SEQ ID NO: 1673550 - DNA, 15 bp, Homo sapiens
aagttcaagagtctt

SEQ ID NO: 1673551 - DNA, 15 bp, Homo sapiens
caagttcaagagtct

SEQ ID NO: 1673552 - DNA, 15 bp, Homo sapiens
acaagttcaagagtc

SEQ ID NO: 1673553 - DNA, 15 bp, Homo sapiens
cacaagttcaagagt

SEQ ID NO: 1673554 - DNA, 15 bp, Homo sapiens
tcacaagttcaagag

SEQ ID NO: 1673555 - DNA, 15 bp, Homo sapiens
ttcacaagttcaaga

SEQ ID NO: 1673556 - DNA, 15 bp, Homo sapiens
gttcacaagttcaag

SEQ ID NO: 1673557 - DNA, 15 bp, Homo sapiens
agttcacaagttcaa

SEQ ID NO: 1673558 - DNA, 15 bp, Homo sapiens
cagttcacaagttca

SEQ ID NO: 1673559 - DNA, 15 bp, Homo sapiens
tcagttcacaagttc

SEQ ID NO: 1673560 - DNA, 15 bp, Homo sapiens
atcagttcacaagtt

SEQ ID NO: 1673561 - DNA, 15 bp, Homo sapiens
catcagttcacaagt

SEQ ID NO: 1673562 - DNA, 15 bp, Homo sapiens
acatcagttcacaag

SEQ ID NO: 1673563 - DNA, 15 bp, Homo sapiens
cacatcagttcacaa

SEQ ID NO: 1673564 - DNA, 15 bp, Homo sapiens
tcacatcagttcaca

SEQ ID NO: 1673565 - DNA, 15 bp, Homo sapiens
ttcacatcagttcac

SEQ ID NO: 1673566 - DNA, 15 bp, Homo sapiens
tttcacatcagttca

SEQ ID NO: 1673567 - DNA, 15 bp, Homo sapiens
atttcacatcagttc

SEQ ID NO: 1673568 - DNA, 15 bp, Homo sapiens
catttcacatcagtt

SEQ ID NO: 1673569 - DNA, 15 bp, Homo sapiens
gcatttcacatcagt

SEQ ID NO: 1673570 - DNA, 15 bp, Homo sapiens
tgcatttcacatcag

SEQ ID NO: 1673571 - DNA, 15 bp, Homo sapiens
ctgcatttcacatca

SEQ ID NO: 1673572 - DNA, 15 bp, Homo sapiens
tctgcatttcacatc

SEQ ID NO: 1673573 - DNA, 15 bp, Homo sapiens
ttctgcatttcacat

SEQ ID NO: 1673574 - DNA, 15 bp, Homo sapiens
attctgcatttcaca

SEQ ID NO: 1673575 - DNA, 15 bp, Homo sapiens
gattctgcatttcac

SEQ ID NO: 1673576 - DNA, 15 bp, Homo sapiens
agattctgcatttca

SEQ ID NO: 1673577 - DNA, 15 bp, Homo sapiens
gagattctgcatttc

SEQ ID NO: 1673578 - DNA, 15 bp, Homo sapiens
agagattctgcattt

SEQ ID NO: 1673579 - DNA, 15 bp, Homo sapiens
aagagattctgcatt

SEQ ID NO: 1673580 - DNA, 15 bp, Homo sapiens
aaagagattctgcat

SEQ ID NO: 1673581 - DNA, 15 bp, Homo sapiens
aaaagagattctgca

SEQ ID NO: 1673582 - DNA, 15 bp, Homo sapiens
caaaagagattctgc

SEQ ID NO: 1673583 - DNA, 15 bp, Homo sapiens
tcaaaagagattctg

SEQ ID NO: 1673584 - DNA, 15 bp, Homo sapiens
ctcaaaagagattct

SEQ ID NO: 1673585 - DNA, 15 bp, Homo sapiens
actcaaaagagattc

SEQ ID NO: 1673586 - DNA, 15 bp, Homo sapiens
gactcaaaagagatt

SEQ ID NO: 1673587 - DNA, 15 bp, Homo sapiens
agactcaaaagagat

SEQ ID NO: 1673588 - DNA, 15 bp, Homo sapiens
aagactcaaaagaga

SEQ ID NO: 1673589 - DNA, 15 bp, Homo sapiens
aaagactcaaaagag

SEQ ID NO: 1673590 - DNA, 15 bp, Homo sapiens
caaagactcaaaaga

SEQ ID NO: 1673591 - DNA, 15 bp, Homo sapiens
gcaaagactcaaaag

SEQ ID NO: 1673592 - DNA, 15 bp, Homo sapiens
agcaaagactcaaaa

SEQ ID NO: 1673593 - DNA, 15 bp, Homo sapiens
cagcaaagactcaaa

SEQ ID NO: 1673594 - DNA, 15 bp, Homo sapiens
acagcaaagactcaa

SEQ ID NO: 1673595 - DNA, 15 bp, Homo sapiens
aacagcaaagactca

SEQ ID NO: 1673596 - DNA, 15 bp, Homo sapiens
aaacagcaaagactc

SEQ ID NO: 1673597 - DNA, 15 bp, Homo sapiens
caaacagcaaagact

SEQ ID NO: 1673598 - DNA, 15 bp, Homo sapiens
ccaaacagcaaagac

SEQ ID NO: 1673599 - DNA, 15 bp, Homo sapiens
tccaaacagcaaaga

SEQ ID NO: 1673600 - DNA, 15 bp, Homo sapiens
ttccaaacagcaaag

SEQ ID NO: 1673601 - DNA, 15 bp, Homo sapiens
cttccaaacagcaaa

SEQ ID NO: 1673602 - DNA, 15 bp, Homo sapiens
tcttccaaacagcaa

SEQ ID NO: 1673603 - DNA, 15 bp, Homo sapiens
atcttccaaacagca

SEQ ID NO: 1673604 - DNA, 15 bp, Homo sapiens
aatcttccaaacagc

SEQ ID NO: 1673605 - DNA, 15 bp, Homo sapiens
caatcttccaaacag

SEQ ID NO: 1673606 - DNA, 15 bp, Homo sapiens
tcaatcttccaaaca

SEQ ID NO: 1673607 - DNA, 15 bp, Homo sapiens
ttcaatcttccaaac

SEQ ID NO: 1673608 - DNA, 15 bp, Homo sapiens
tttcaatcttccaaa

SEQ ID NO: 1673609 - DNA, 15 bp, Homo sapiens
ttttcaatcttccaa

SEQ ID NO: 1673610 - DNA, 15 bp, Homo sapiens
tttttcaatcttcca

SEQ ID NO: 1673611 - DNA, 15 bp, Homo sapiens
atttttcaatcttcc

SEQ ID NO: 1673612 - DNA, 15 bp, Homo sapiens
tatttttcaatcttc

SEQ ID NO: 1673613 - DNA, 15 bp, Homo sapiens
atatttttcaatctt

SEQ ID NO: 1673614 - DNA, 15 bp, Homo sapiens
aatatttttcaatct

SEQ ID NO: 1673615 - DNA, 15 bp, Homo sapiens
caatatttttcaatc

SEQ ID NO: 1673616 - DNA, 15 bp, Homo sapiens
acaatatttttcaat

SEQ ID NO: 1673617 - DNA, 15 bp, Homo sapiens
aacaatatttttcaa

SEQ ID NO: 1673618 - DNA, 15 bp, Homo sapiens
gaacaatatttttca

SEQ ID NO: 1673619 - DNA, 15 bp, Homo sapiens
tgaacaatatttttc

SEQ ID NO: 1673620 - DNA, 15 bp, Homo sapiens
ctgaacaatattttt

SEQ ID NO: 1673621 - DNA, 15 bp, Homo sapiens
gctgaacaatatttt

SEQ ID NO: 1673622 - DNA, 15 bp, Homo sapiens
tgctgaacaatattt

SEQ ID NO: 1673623 - DNA, 15 bp, Homo sapiens
atgctgaacaatatt

SEQ ID NO: 1673624 - DNA, 15 bp, Homo sapiens
catgctgaacaatat

SEQ ID NO: 1673625 - DNA, 15 bp, Homo sapiens
ccatgctgaacaata

SEQ ID NO: 1673626 - DNA, 15 bp, Homo sapiens
cccatgctgaacaat

SEQ ID NO: 1673627 - DNA, 15 bp, Homo sapiens
acccatgctgaacaa

SEQ ID NO: 1673628 - DNA, 15 bp, Homo sapiens
cacccatgctgaaca

SEQ ID NO: 1673629 - DNA, 15 bp, Homo sapiens
tcacccatgctgaac

SEQ ID NO: 1673630 - DNA, 15 bp, Homo sapiens
gtcacccatgctgaa

SEQ ID NO: 1673631 - DNA, 15 bp, Homo sapiens
ggtcacccatgctga

SEQ ID NO: 1673632 - DNA, 15 bp, Homo sapiens
tggtcacccatgctg

SEQ ID NO: 1673633 - DNA, 15 bp, Homo sapiens
gtggtcacccatgct

SEQ ID NO: 1673634 - DNA, 15 bp, Homo sapiens
ggtggtcacccatgc

SEQ ID NO: 1673635 - DNA, 15 bp, Homo sapiens
tggtggtcacccatg

SEQ ID NO: 1673636 - DNA, 15 bp, Homo sapiens
ctggtggtcacccat

SEQ ID NO: 1673637 - DNA, 15 bp, Homo sapiens
tctggtggtcaccca

SEQ ID NO: 1673638 - DNA, 15 bp, Homo sapiens
ttctggtggtcaccc

SEQ ID NO: 1673639 - DNA, 15 bp, Homo sapiens
tttctggtggtcacc

SEQ ID NO: 1673640 - DNA, 15 bp, Homo sapiens
ctttctggtggtcac

SEQ ID NO: 1673641 - DNA, 15 bp, Homo sapiens
actttctggtggtca

SEQ ID NO: 1673642 - DNA, 15 bp, Homo sapiens
tactttctggtggtc

SEQ ID NO: 1673643 - DNA, 15 bp, Homo sapiens
ttactttctggtggt

SEQ ID NO: 1673644 - DNA, 15 bp, Homo sapiens
attactttctggtgg

SEQ ID NO: 1673645 - DNA, 15 bp, Homo sapiens
gattactttctggtg

SEQ ID NO: 1673646 - DNA, 15 bp, Homo sapiens
agattactttctggt

SEQ ID NO: 1673647 - DNA, 15 bp, Homo sapiens
aagattactttctgg

SEQ ID NO: 1673648 - DNA, 15 bp, Homo sapiens
taagattactttctg

SEQ ID NO: 1673649 - DNA, 15 bp, Homo sapiens
ttaagattactttct

SEQ ID NO: 1673650 - DNA, 15 bp, Homo sapiens
cttaagattactttc

SEQ ID NO: 1673651 - DNA, 15 bp, Homo sapiens
gcttaagattacttt

SEQ ID NO: 1673652 - DNA, 15 bp, Homo sapiens
ggcttaagattactt

SEQ ID NO: 1673653 - DNA, 15 bp, Homo sapiens
tggcttaagattact

SEQ ID NO: 1673654 - DNA, 15 bp, Homo sapiens
atggcttaagattac

SEQ ID NO: 1673655 - DNA, 15 bp, Homo sapiens
gatggcttaagatta

SEQ ID NO: 1673656 - DNA, 15 bp, Homo sapiens
agatggcttaagatt

SEQ ID NO: 1673657 - DNA, 15 bp, Homo sapiens
tagatggcttaagat

SEQ ID NO: 1673658 - DNA, 15 bp, Homo sapiens
ctagatggcttaaga

SEQ ID NO: 1673659 - DNA, 15 bp, Homo sapiens
tctagatggcttaag

SEQ ID NO: 1673660 - DNA, 15 bp, Homo sapiens
atctagatggcttaa

SEQ ID NO: 1673661 - DNA, 15 bp, Homo sapiens
catctagatggctta

SEQ ID NO: 1673662 - DNA, 15 bp, Homo sapiens
acatctagatggctt

SEQ ID NO: 1673663 - DNA, 15 bp, Homo sapiens
gacatctagatggct

SEQ ID NO: 1673664 - DNA, 15 bp, Homo sapiens
tgacatctagatggc

SEQ ID NO: 1673665 - DNA, 15 bp, Homo sapiens
gtgacatctagatgg

SEQ ID NO: 1673666 - DNA, 15 bp, Homo sapiens
tgtgacatctagatg

SEQ ID NO: 1673667 - DNA, 15 bp, Homo sapiens
ttgtgacatctagat

SEQ ID NO: 1673668 - DNA, 15 bp, Homo sapiens
attgtgacatctaga

SEQ ID NO: 1673669 - DNA, 15 bp, Homo sapiens
aattgtgacatctag

SEQ ID NO: 1673670 - DNA, 15 bp, Homo sapiens
caattgtgacatcta

SEQ ID NO: 1673671 - DNA, 15 bp, Homo sapiens
tcaattgtgacatct

SEQ ID NO: 1673672 - DNA, 15 bp, Homo sapiens
ttcaattgtgacatc

SEQ ID NO: 1673673 - DNA, 15 bp, Homo sapiens
tttcaattgtgacat

SEQ ID NO: 1673674 - DNA, 15 bp, Homo sapiens
gtttcaattgtgaca

SEQ ID NO: 1673675 - DNA, 15 bp, Homo sapiens
tgtttcaattgtgac

SEQ ID NO: 1673676 - DNA, 15 bp, Homo sapiens
ttgtttcaattgtga

SEQ ID NO: 1673677 - DNA, 15 bp, Homo sapiens
tttgtttcaattgtg

SEQ ID NO: 1673678 - DNA, 15 bp, Homo sapiens
gtttgtttcaattgt

SEQ ID NO: 1673679 - DNA, 15 bp, Homo sapiens
agtttgtttcaattg

SEQ ID NO: 1673680 - DNA, 15 bp, Homo sapiens
cagtttgtttcaatt

SEQ ID NO: 1673681 - DNA, 15 bp, Homo sapiens
ccagtttgtttcaat

SEQ ID NO: 1673682 - DNA, 15 bp, Homo sapiens
cccagtttgtttcaa

SEQ ID NO: 1673683 - DNA, 15 bp, Homo sapiens
ccccagtttgtttca

SEQ ID NO: 1673684 - DNA, 15 bp, Homo sapiens
tccccagtttgtttc

SEQ ID NO: 1673685 - DNA, 15 bp, Homo sapiens
ctccccagtttgttt

SEQ ID NO: 1673686 - DNA, 15 bp, Homo sapiens
actccccagtttgtt

SEQ ID NO: 1673687 - DNA, 15 bp, Homo sapiens
aactccccagtttgt

SEQ ID NO: 1673688 - DNA, 15 bp, Homo sapiens
caactccccagtttg

SEQ ID NO: 1673689 - DNA, 15 bp, Homo sapiens
ccaactccccagttt

SEQ ID NO: 1673690 - DNA, 15 bp, Homo sapiens
accaactccccagtt

SEQ ID NO: 1673691 - DNA, 15 bp, Homo sapiens
aaccaactccccagt

SEQ ID NO: 1673692 - DNA, 15 bp, Homo sapiens
caaccaactccccag

SEQ ID NO: 1673693 - DNA, 15 bp, Homo sapiens
gcaaccaactcccca

SEQ ID NO: 1673694 - DNA, 15 bp, Homo sapiens
agcaaccaactcccc

SEQ ID NO: 1673695 - DNA, 15 bp, Homo sapiens
tagcaaccaactccc

SEQ ID NO: 1673696 - DNA, 15 bp, Homo sapiens
atagcaaccaactcc

SEQ ID NO: 1673697 - DNA, 15 bp, Homo sapiens
aatagcaaccaactc

SEQ ID NO: 1673698 - DNA, 15 bp, Homo sapiens
caatagcaaccaact

SEQ ID NO: 1673699 - DNA, 15 bp, Homo sapiens
acaatagcaaccaac

SEQ ID NO: 1673700 - DNA, 15 bp, Homo sapiens
tacaatagcaaccaa

SEQ ID NO: 1673701 - DNA, 15 bp, Homo sapiens
ttacaatagcaacca

SEQ ID NO: 1673702 - DNA, 15 bp, Homo sapiens
tttacaatagcaacc

SEQ ID NO: 1673703 - DNA, 15 bp, Homo sapiens
ttttacaatagcaac

SEQ ID NO: 1673704 - DNA, 15 bp, Homo sapiens
attttacaatagcaa

SEQ ID NO: 1673705 - DNA, 15 bp, Homo sapiens
tattttacaatagca

SEQ ID NO: 1673706 - DNA, 15 bp, Homo sapiens
ttattttacaatagc

SEQ ID NO: 1673707 - DNA, 15 bp, Homo sapiens
tttattttacaatag

SEQ ID NO: 1673708 - DNA, 15 bp, Homo sapiens
ttttattttacaata

SEQ ID NO: 1673709 - DNA, 15 bp, Homo sapiens
attttattttacaat

SEQ ID NO: 1673710 - DNA, 15 bp, Homo sapiens
tattttattttacaa

SEQ ID NO: 1673711 - DNA, 15 bp, Homo sapiens
atattttattttaca

SEQ ID NO: 1673712 - DNA, 15 bp, Homo sapiens
tatattttattttac

SEQ ID NO: 1673713 - DNA, 15 bp, Homo sapiens
gtatattttatttta

SEQ ID NO: 1673714 - DNA, 15 bp, Homo sapiens
agtatattttatttt

SEQ ID NO: 1673715 - DNA, 15 bp, Homo sapiens
cagtatattttattt

SEQ ID NO: 1673716 - DNA, 15 bp, Homo sapiens
acagtatattttatt

SEQ ID NO: 1673717 - DNA, 15 bp, Homo sapiens
aacagtatattttat

SEQ ID NO: 1673718 - DNA, 15 bp, Homo sapiens
aaacagtatatttta

SEQ ID NO: 1673719 - DNA, 15 bp, Homo sapiens
aaaacagtatatttt

SEQ ID NO: 1673720 - DNA, 15 bp, Homo sapiens
caaaacagtatattt

SEQ ID NO: 1673721 - DNA, 15 bp, Homo sapiens
tcaaaacagtatatt

SEQ ID NO: 1673722 - DNA, 15 bp, Homo sapiens
ttcaaaacagtatat

SEQ ID NO: 1673723 - DNA, 15 bp, Homo sapiens
tttcaaaacagtata

SEQ ID NO: 1673724 - DNA, 15 bp, Homo sapiens
ttttcaaaacagtat

SEQ ID NO: 1673725 - DNA, 15 bp, Homo sapiens
gttttcaaaacagta

SEQ ID NO: 1673726 - DNA, 15 bp, Homo sapiens
agttttcaaaacagt

SEQ ID NO: 1673727 - DNA, 15 bp, Homo sapiens
aagttttcaaaacag

SEQ ID NO: 1673728 - DNA, 15 bp, Homo sapiens
aaagttttcaaaaca

SEQ ID NO: 1673729 - DNA, 15 bp, Homo sapiens
caaagttttcaaaac

SEQ ID NO: 1673730 - DNA, 15 bp, Homo sapiens
acaaagttttcaaaa

SEQ ID NO: 1673731 - DNA, 15 bp, Homo sapiens
tacaaagttttcaaa

SEQ ID NO: 1673732 - DNA, 15 bp, Homo sapiens
atacaaagttttcaa

SEQ ID NO: 1673733 - DNA, 15 bp, Homo sapiens
aatacaaagttttca

SEQ ID NO: 1673734 - DNA, 15 bp, Homo sapiens
aaatacaaagttttc

SEQ ID NO: 1673735 - DNA, 15 bp, Homo sapiens
aaaatacaaagtttt

SEQ ID NO: 1673736 - DNA, 15 bp, Homo sapiens
caaaatacaaagttt

SEQ ID NO: 1673737 - DNA, 15 bp, Homo sapiens
tcaaaatacaaagtt

SEQ ID NO: 1673738 - DNA, 15 bp, Homo sapiens
atcaaaatacaaagt

SEQ ID NO: 1673739 - DNA, 15 bp, Homo sapiens
catcaaaatacaaag

SEQ ID NO: 1673740 - DNA, 15 bp, Homo sapiens
acatcaaaatacaaa

SEQ ID NO: 1673741 - DNA, 15 bp, Homo sapiens
cacatcaaaatacaa

SEQ ID NO: 1673742 - DNA, 15 bp, Homo sapiens
tcacatcaaaataca

SEQ ID NO: 1673743 - DNA, 15 bp, Homo sapiens
gtcacatcaaaatac

SEQ ID NO: 1673744 - DNA, 15 bp, Homo sapiens
tgtcacatcaaaata

SEQ ID NO: 1673745 - DNA, 15 bp, Homo sapiens
ttgtcacatcaaaat

SEQ ID NO: 1673746 - DNA, 15 bp, Homo sapiens
attgtcacatcaaaa

SEQ ID NO: 1673747 - DNA, 15 bp, Homo sapiens
aattgtcacatcaaa

SEQ ID NO: 1673748 - DNA, 15 bp, Homo sapiens
aaattgtcacatcaa

SEQ ID NO: 1673749 - DNA, 15 bp, Homo sapiens
gaaattgtcacatca

SEQ ID NO: 1673750 - DNA, 15 bp, Homo sapiens
agaaattgtcacatc

SEQ ID NO: 1673751 - DNA, 15 bp, Homo sapiens
tagaaattgtcacat

SEQ ID NO: 1673752 - DNA, 15 bp, Homo sapiens
ttagaaattgtcaca

SEQ ID NO: 1673753 - DNA, 15 bp, Homo sapiens
gttagaaattgtcac

SEQ ID NO: 1673754 - DNA, 15 bp, Homo sapiens
agttagaaattgtca

SEQ ID NO: 1673755 - DNA, 15 bp, Homo sapiens
gagttagaaattgtc

SEQ ID NO: 1673756 - DNA, 15 bp, Homo sapiens
tgagttagaaattgt

SEQ ID NO: 1673757 - DNA, 15 bp, Homo sapiens
gtgagttagaaattg

SEQ ID NO: 1673758 - DNA, 15 bp, Homo sapiens
agtgagttagaaatt

SEQ ID NO: 1673759 - DNA, 15 bp, Homo sapiens
cagtgagttagaaat

SEQ ID NO: 1673760 - DNA, 15 bp, Homo sapiens
acagtgagttagaaa

SEQ ID NO: 1673761 - DNA, 15 bp, Homo sapiens
gacagtgagttagaa

SEQ ID NO: 1673762 - DNA, 15 bp, Homo sapiens
ggacagtgagttaga

SEQ ID NO: 1673763 - DNA, 15 bp, Homo sapiens
gggacagtgagttag

SEQ ID NO: 1673764 - DNA, 15 bp, Homo sapiens
agggacagtgagtta

SEQ ID NO: 1673765 - DNA, 15 bp, Homo sapiens
tagggacagtgagtt

SEQ ID NO: 1673766 - DNA, 15 bp, Homo sapiens
ttagggacagtgagt

SEQ ID NO: 1673767 - DNA, 15 bp, Homo sapiens
gttagggacagtgag

SEQ ID NO: 1673768 - DNA, 15 bp, Homo sapiens
ggttagggacagtga

SEQ ID NO: 1673769 - DNA, 15 bp, Homo sapiens
tggttagggacagtg

SEQ ID NO: 1673770 - DNA, 15 bp, Homo sapiens
gtggttagggacagt

SEQ ID NO: 1673771 - DNA, 15 bp, Homo sapiens
tgtggttagggacag

SEQ ID NO: 1673772 - DNA, 15 bp, Homo sapiens
gtgtggttagggaca

SEQ ID NO: 1673773 - DNA, 15 bp, Homo sapiens
agtgtggttagggac

SEQ ID NO: 1673774 - DNA, 15 bp, Homo sapiens
tagtgtggttaggga

SEQ ID NO: 1673775 - DNA, 15 bp, Homo sapiens
ttagtgtggttaggg

SEQ ID NO: 1673776 - DNA, 15 bp, Homo sapiens
attagtgtggttagg

SEQ ID NO: 1673777 - DNA, 15 bp, Homo sapiens
aattagtgtggttag

SEQ ID NO: 1673778 - DNA, 15 bp, Homo sapiens
taattagtgtggtta

SEQ ID NO: 1673779 - DNA, 15 bp, Homo sapiens
gtaattagtgtggtt

SEQ ID NO: 1673780 - DNA, 15 bp, Homo sapiens
ggtaattagtgtggt

SEQ ID NO: 1673781 - DNA, 15 bp, Homo sapiens
cggtaattagtgtgg

SEQ ID NO: 1673782 - DNA, 15 bp, Homo sapiens
acggtaattagtgtg

SEQ ID NO: 1673783 - DNA, 15 bp, Homo sapiens
tacggtaattagtgt

SEQ ID NO: 1673784 - DNA, 15 bp, Homo sapiens
ttacggtaattagtg

SEQ ID NO: 1673785 - DNA, 15 bp, Homo sapiens
cttacggtaattagt

SEQ ID NO: 1673786 - DNA, 15 bp, Homo sapiens
acttacggtaattag

SEQ ID NO: 1673787 - DNA, 15 bp, Homo sapiens
aacttacggtaatta

SEQ ID NO: 1673788 - DNA, 15 bp, Homo sapiens
gaacttacggtaatt

SEQ ID NO: 1673789 - DNA, 15 bp, Homo sapiens
agaacttacggtaat

SEQ ID NO: 1673790 - DNA, 15 bp, Homo sapiens
aagaacttacggtaa

SEQ ID NO: 1673791 - DNA, 15 bp, Homo sapiens
gaagaacttacggta

SEQ ID NO: 1673792 - DNA, 15 bp, Homo sapiens
tgaagaacttacggt

SEQ ID NO: 1673793 - DNA, 15 bp, Homo sapiens
atgaagaacttacgg

SEQ ID NO: 1673794 - DNA, 15 bp, Homo sapiens
aatgaagaacttacg

SEQ ID NO: 1673795 - DNA, 15 bp, Homo sapiens
aaatgaagaacttac

SEQ ID NO: 1673796 - DNA, 15 bp, Homo sapiens
gaaatgaagaactta

SEQ ID NO: 1673797 - DNA, 15 bp, Homo sapiens
agaaatgaagaactt

SEQ ID NO: 1673798 - DNA, 15 bp, Homo sapiens
aagaaatgaagaact

SEQ ID NO: 1673799 - DNA, 15 bp, Homo sapiens
aaagaaatgaagaac

SEQ ID NO: 1673800 - DNA, 15 bp, Homo sapiens
aaaagaaatgaagaa

SEQ ID NO: 1673801 - DNA, 15 bp, Homo sapiens
aaaaagaaatgaaga

SEQ ID NO: 1673802 - DNA, 15 bp, Homo sapiens
aaaaaagaaatgaag

SEQ ID NO: 1673803 - DNA, 15 bp, Homo sapiens
gaaaaaagaaatgaa

SEQ ID NO: 1673804 - DNA, 15 bp, Homo sapiens
agaaaaaagaaatga

SEQ ID NO: 1673805 - DNA, 15 bp, Homo sapiens
aagaaaaaagaaatg

SEQ ID NO: 1673806 - DNA, 15 bp, Homo sapiens
gaaaaagaaaaaaga

SEQ ID NO: 1673807 - DNA, 15 bp, Homo sapiens
agaaaaagaaaaaag

SEQ ID NO: 1673808 - DNA, 15 bp, Homo sapiens
aagaaaaagaaaaaa

SEQ ID NO: 1673809 - DNA, 15 bp, Homo sapiens
aaagaaaaagaaaaa

SEQ ID NO: 1673810 - DNA, 15 bp, Homo sapiens
taatttaaaaagaaa

SEQ ID NO: 1673811 - DNA, 15 bp, Homo sapiens
ttaatttaaaaagaa

SEQ ID NO: 1673812 - DNA, 15 bp, Homo sapiens
attaatttaaaaaga

SEQ ID NO: 1673813 - DNA, 15 bp, Homo sapiens
tattaatttaaaaag

SEQ ID NO: 1673814 - DNA, 15 bp, Homo sapiens
ttattaatttaaaaa

SEQ ID NO: 1673815 - DNA, 15 bp, Homo sapiens
tttattaatttaaaa

SEQ ID NO: 1673816 - DNA, 15 bp, Homo sapiens
atttattaatttaaa

SEQ ID NO: 1673817 - DNA, 15 bp, Homo sapiens
aatttattaatttaa

SEQ ID NO: 1673818 - DNA, 15 bp, Homo sapiens
taatttattaattta

SEQ ID NO: 1673819 - DNA, 15 bp, Homo sapiens
ttaatttattaattt

SEQ ID NO: 1673820 - DNA, 15 bp, Homo sapiens
attaatttattaatt

SEQ ID NO: 1673821 - DNA, 15 bp, Homo sapiens
aattaatttattaat

SEQ ID NO: 1673822 - DNA, 15 bp, Homo sapiens
aaattaatttattaa

SEQ ID NO: 1673823 - DNA, 15 bp, Homo sapiens
taaattaatttatta

SEQ ID NO: 1673824 - DNA, 15 bp, Homo sapiens
aaataaattaattta

SEQ ID NO: 1673825 - DNA, 15 bp, Homo sapiens
aaaataaattaattt

SEQ ID NO: 1673826 - DNA, 15 bp, Homo sapiens
aaaaataaattaatt

SEQ ID NO: 1673827 - DNA, 15 bp, Homo sapiens
aaaaaataaattaat

SEQ ID NO: 1673828 - DNA, 15 bp, Homo sapiens
caaaaaataaattaa

SEQ ID NO: 1673829 - DNA, 15 bp, Homo sapiens
ccaaaaaataaatta

SEQ ID NO: 1673830 - DNA, 15 bp, Homo sapiens
tccaaaaaataaatt

SEQ ID NO: 1673831 - DNA, 15 bp, Homo sapiens
ctccaaaaaataaat

SEQ ID NO: 1673832 - DNA, 15 bp, Homo sapiens
tctccaaaaaataaa

SEQ ID NO: 1673833 - DNA, 15 bp, Homo sapiens
atctccaaaaaataa

SEQ ID NO: 1673834 - DNA, 15 bp, Homo sapiens
catctccaaaaaata

SEQ ID NO: 1673835 - DNA, 15 bp, Homo sapiens
ccatctccaaaaaat

SEQ ID NO: 1673836 - DNA, 15 bp, Homo sapiens
cgagactccatctcc

SEQ ID NO: 1673837 - DNA, 15 bp, Homo sapiens
aagcgagactccatc

SEQ ID NO: 1673838 - DNA, 15 bp, Homo sapiens
aaagcgagactccat

SEQ ID NO: 1673839 - DNA, 15 bp, Homo sapiens
aacaaagcgagactc

SEQ ID NO: 1673840 - DNA, 15 bp, Homo sapiens
caacaaagcgagact

SEQ ID NO: 1673841 - DNA, 15 bp, Homo sapiens
gcaacaaagcgagac

SEQ ID NO: 1673842 - DNA, 15 bp, Homo sapiens
gggcaacaaagcgag

SEQ ID NO: 1673843 - DNA, 15 bp, Homo sapiens
tgggcaacaaagcga

SEQ ID NO: 1673844 - DNA, 15 bp, Homo sapiens
ctgggcaacaaagcg

SEQ ID NO: 1673845 - DNA, 15 bp, Homo sapiens
cctgggcaacaaagc

SEQ ID NO: 1673846 - DNA, 15 bp, Homo sapiens
gcctgggcaacaaag

SEQ ID NO: 1673847 - DNA, 15 bp, Homo sapiens
agcctgggcaacaaa

SEQ ID NO: 1673848 - DNA, 15 bp, Homo sapiens
ggcaccactgcactc

SEQ ID NO: 1673849 - DNA, 15 bp, Homo sapiens
tggcaccactgcact

SEQ ID NO: 1673850 - DNA, 15 bp, Homo sapiens
atggcaccactgcac

SEQ ID NO: 1673851 - DNA, 15 bp, Homo sapiens
acagtgagccaagat

SEQ ID NO: 1673852 - DNA, 15 bp, Homo sapiens
tacagtgagccaaga

SEQ ID NO: 1673853 - DNA, 15 bp, Homo sapiens
ttacagtgagccaag

SEQ ID NO: 1673854 - DNA, 15 bp, Homo sapiens
gttacagtgagccaa

SEQ ID NO: 1673855 - DNA, 15 bp, Homo sapiens
ggttacagtgagcca

SEQ ID NO: 1673856 - DNA, 15 bp, Homo sapiens
aggaggcagaggtta

SEQ ID NO: 1673857 - DNA, 15 bp, Homo sapiens
gtgaggctgaggcag

SEQ ID NO: 1673858 - DNA, 15 bp, Homo sapiens
ggtgaggctgaggca

SEQ ID NO: 1673859 - DNA, 15 bp, Homo sapiens
tggtgaggctgaggc

SEQ ID NO: 1673860 - DNA, 15 bp, Homo sapiens
ctggtgaggctgagg

SEQ ID NO: 1673861 - DNA, 15 bp, Homo sapiens
actggtgaggctgag

SEQ ID NO: 1673862 - DNA, 15 bp, Homo sapiens
tactggtgaggctga

SEQ ID NO: 1673863 - DNA, 15 bp, Homo sapiens
ctactggtgaggctg

SEQ ID NO: 1673864 - DNA, 15 bp, Homo sapiens
gctactggtgaggct

SEQ ID NO: 1673865 - DNA, 15 bp, Homo sapiens
agctactggtgaggc

SEQ ID NO: 1673866 - DNA, 15 bp, Homo sapiens
cagctactggtgagg

SEQ ID NO: 1673867 - DNA, 15 bp, Homo sapiens
ccagctactggtgag

SEQ ID NO: 1673868 - DNA, 15 bp, Homo sapiens
cccagctactggtga

SEQ ID NO: 1673869 - DNA, 15 bp, Homo sapiens
tcccagctactggtg

SEQ ID NO: 1673870 - DNA, 15 bp, Homo sapiens
atcccagctactggt

SEQ ID NO: 1673871 - DNA, 15 bp, Homo sapiens
aatcccagctactgg

SEQ ID NO: 1673872 - DNA, 15 bp, Homo sapiens
tcatgactgtaatcc

SEQ ID NO: 1673873 - DNA, 15 bp, Homo sapiens
ctcatgactgtaatc

SEQ ID NO: 1673874 - DNA, 15 bp, Homo sapiens
gctcatgactgtaat

SEQ ID NO: 1673875 - DNA, 15 bp, Homo sapiens
ggctcatgactgtaa

SEQ ID NO: 1673876 - DNA, 15 bp, Homo sapiens
tggctcatgactgta

SEQ ID NO: 1673877 - DNA, 15 bp, Homo sapiens
gtggctcatgactgt

SEQ ID NO: 1673878 - DNA, 15 bp, Homo sapiens
ggtggctcatgactg

SEQ ID NO: 1673879 - DNA, 15 bp, Homo sapiens
tggtggctcatgact

SEQ ID NO: 1673880 - DNA, 15 bp, Homo sapiens
atggtggctcatgac

SEQ ID NO: 1673881 - DNA, 15 bp, Homo sapiens
catggtggctcatga

SEQ ID NO: 1673882 - DNA, 15 bp, Homo sapiens
ccattagccaggcat

SEQ ID NO: 1673883 - DNA, 15 bp, Homo sapiens
accattagccaggca

SEQ ID NO: 1673884 - DNA, 15 bp, Homo sapiens
aaccattagccaggc

SEQ ID NO: 1673885 - DNA, 15 bp, Homo sapiens
caaccattagccagg

SEQ ID NO: 1673886 - DNA, 15 bp, Homo sapiens
acaaccattagccag

SEQ ID NO: 1673887 - DNA, 15 bp, Homo sapiens
tacaaccattagcca

SEQ ID NO: 1673888 - DNA, 15 bp, Homo sapiens
atacaaccattagcc

SEQ ID NO: 1673889 - DNA, 15 bp, Homo sapiens
aatacaaccattagc

SEQ ID NO: 1673890 - DNA, 15 bp, Homo sapiens
aaatacaaccattag

SEQ ID NO: 1673891 - DNA, 15 bp, Homo sapiens
aaaatacaaccatta

SEQ ID NO: 1673892 - DNA, 15 bp, Homo sapiens
aaaaatacaaccatt

SEQ ID NO: 1673893 - DNA, 15 bp, Homo sapiens
taaaaatacaaccat

SEQ ID NO: 1673894 - DNA, 15 bp, Homo sapiens
ctaaaaatacaacca

SEQ ID NO: 1673895 - DNA, 15 bp, Homo sapiens
actaaaaatacaacc

SEQ ID NO: 1673896 - DNA, 15 bp, Homo sapiens
caaaaccccgtctct

SEQ ID NO: 1673897 - DNA, 15 bp, Homo sapiens
gcaaaaccccgtctc

SEQ ID NO: 1673898 - DNA, 15 bp, Homo sapiens
ggcaaaaccccgtct

SEQ ID NO: 1673899 - DNA, 15 bp, Homo sapiens
tggcaaaaccccgtc

SEQ ID NO: 1673900 - DNA, 15 bp, Homo sapiens
atggcaaaaccccgt

SEQ ID NO: 1673901 - DNA, 15 bp, Homo sapiens
catggcaaaaccccg

SEQ ID NO: 1673902 - DNA, 15 bp, Homo sapiens
agtcaggagttcgtg

SEQ ID NO: 1673903 - DNA, 15 bp, Homo sapiens
aagtcaggagttcgt

SEQ ID NO: 1673904 - DNA, 15 bp, Homo sapiens
taagtcaggagttcg

SEQ ID NO: 1673905 - DNA, 15 bp, Homo sapiens
ttaagtcaggagttc

SEQ ID NO: 1673906 - DNA, 15 bp, Homo sapiens
tttaagtcaggagtt

SEQ ID NO: 1673907 - DNA, 15 bp, Homo sapiens
ctttaagtcaggagt

SEQ ID NO: 1673908 - DNA, 15 bp, Homo sapiens
actttaagtcaggag

SEQ ID NO: 1673909 - DNA, 15 bp, Homo sapiens
cactttaagtcagga

SEQ ID NO: 1673910 - DNA, 15 bp, Homo sapiens
tcactttaagtcagg

SEQ ID NO: 1673911 - DNA, 15 bp, Homo sapiens
ttcactttaagtcag

SEQ ID NO: 1673912 - DNA, 15 bp, Homo sapiens
tttcactttaagtca

SEQ ID NO: 1673913 - DNA, 15 bp, Homo sapiens
gtttcactttaagtc

SEQ ID NO: 1673914 - DNA, 15 bp, Homo sapiens
tgtttcactttaagt

SEQ ID NO: 1673915 - DNA, 15 bp, Homo sapiens
gtgtttcactttaag

SEQ ID NO: 1673916 - DNA, 15 bp, Homo sapiens
ggtgtttcactttaa

SEQ ID NO: 1673917 - DNA, 15 bp, Homo sapiens
aggtgtttcacttta

SEQ ID NO: 1673918 - DNA, 15 bp, Homo sapiens
caggtgtttcacttt

SEQ ID NO: 1673919 - DNA, 15 bp, Homo sapiens
gcaggtgtttcactt

SEQ ID NO: 1673920 - DNA, 15 bp, Homo sapiens
ggcaggtgtttcact

SEQ ID NO: 1673921 - DNA, 15 bp, Homo sapiens
aggcaggtgtttcac

SEQ ID NO: 1673922 - DNA, 15 bp, Homo sapiens
gaggcaggtgtttca

SEQ ID NO: 1673923 - DNA, 15 bp, Homo sapiens
cgaggcaggtgtttc

SEQ ID NO: 1673924 - DNA, 15 bp, Homo sapiens
ccgaggcaggtgttt

SEQ ID NO: 1673925 - DNA, 15 bp, Homo sapiens
gccgaggcaggtgtt

SEQ ID NO: 1673926 - DNA, 15 bp, Homo sapiens
ggccgaggcaggtgt

SEQ ID NO: 1673927 - DNA, 15 bp, Homo sapiens
gaggccgaggcaggt

SEQ ID NO: 1673928 - DNA, 15 bp, Homo sapiens
tggctcccgcctgta

SEQ ID NO: 1673929 - DNA, 15 bp, Homo sapiens
gtggctcccgcctgt

SEQ ID NO: 1673930 - DNA, 15 bp, Homo sapiens
ggtggctcccgcctg

SEQ ID NO: 1673931 - DNA, 15 bp, Homo sapiens
cggtggctcccgcct

SEQ ID NO: 1673932 - DNA, 15 bp, Homo sapiens
acggtggctcccgcc

SEQ ID NO: 1673933 - DNA, 15 bp, Homo sapiens
cacggtggctcccgc

SEQ ID NO: 1673934 - DNA, 15 bp, Homo sapiens
gcacggtggctcccg

SEQ ID NO: 1673935 - DNA, 15 bp, Homo sapiens
ggcacggtggctccc

SEQ ID NO: 1673936 - DNA, 15 bp, Homo sapiens
aggcacggtggctcc

SEQ ID NO: 1673937 - DNA, 15 bp, Homo sapiens
tgaggccaggcacgg

SEQ ID NO: 1673938 - DNA, 15 bp, Homo sapiens
atgaggccaggcacg

SEQ ID NO: 1673939 - DNA, 15 bp, Homo sapiens
aatgaggccaggcac

SEQ ID NO: 1673940 - DNA, 15 bp, Homo sapiens
aaatgaggccaggca

SEQ ID NO: 1673941 - DNA, 15 bp, Homo sapiens
gaaatgaggccaggc

SEQ ID NO: 1673942 - DNA, 15 bp, Homo sapiens
agaaatgaggccagg

SEQ ID NO: 1673943 - DNA, 15 bp, Homo sapiens
aagaaatgaggccag

SEQ ID NO: 1673944 - DNA, 15 bp, Homo sapiens
aaagaaatgaggcca

SEQ ID NO: 1673945 - DNA, 15 bp, Homo sapiens
aaaagaaatgaggcc

SEQ ID NO: 1673946 - DNA, 15 bp, Homo sapiens
aaaaagaaatgaggc

SEQ ID NO: 1673947 - DNA, 15 bp, Homo sapiens
aaaaaagaaatgagg

SEQ ID NO: 1673948 - DNA, 15 bp, Homo sapiens
aaaaaaagaaatgag

SEQ ID NO: 1673949 - DNA, 15 bp, Homo sapiens
taaaaaaagaaatga

SEQ ID NO: 1673950 - DNA, 15 bp, Homo sapiens
ttaaaaaaagaaatg

SEQ ID NO: 1673951 - DNA, 15 bp, Homo sapiens
gtttaaaaaaagaaa

SEQ ID NO: 1673952 - DNA, 15 bp, Homo sapiens
agtttaaaaaaagaa

SEQ ID NO: 1673953 - DNA, 15 bp, Homo sapiens
tagtttaaaaaaaga

SEQ ID NO: 1673954 - DNA, 15 bp, Homo sapiens
gtagtttaaaaaaag

SEQ ID NO: 1673955 - DNA, 15 bp, Homo sapiens
ggtagtttaaaaaaa

SEQ ID NO: 1673956 - DNA, 15 bp, Homo sapiens
aggtagtttaaaaaa

SEQ ID NO: 1673957 - DNA, 15 bp, Homo sapiens
aaggtagtttaaaaa

SEQ ID NO: 1673958 - DNA, 15 bp, Homo sapiens
taaggtagtttaaaa

SEQ ID NO: 1673959 - DNA, 15 bp, Homo sapiens
ttaaggtagtttaaa

SEQ ID NO: 1673960 - DNA, 15 bp, Homo sapiens
attaaggtagtttaa

SEQ ID NO: 1673961 - DNA, 15 bp, Homo sapiens
gattaaggtagttta

SEQ ID NO: 1673962 - DNA, 15 bp, Homo sapiens
tgattaaggtagttt

SEQ ID NO: 1673963 - DNA, 15 bp, Homo sapiens
gtgattaaggtagtt

SEQ ID NO: 1673964 - DNA, 15 bp, Homo sapiens
ggtgattaaggtagt

SEQ ID NO: 1673965 - DNA, 15 bp, Homo sapiens
gggtgattaaggtag

SEQ ID NO: 1673966 - DNA, 15 bp, Homo sapiens
tgggtgattaaggta

SEQ ID NO: 1673967 - DNA, 15 bp, Homo sapiens
ctgggtgattaaggt

SEQ ID NO: 1673968 - DNA, 15 bp, Homo sapiens
actgggtgattaagg

SEQ ID NO: 1673969 - DNA, 15 bp, Homo sapiens
cactgggtgattaag

SEQ ID NO: 1673970 - DNA, 15 bp, Homo sapiens
acactgggtgattaa

SEQ ID NO: 1673971 - DNA, 15 bp, Homo sapiens
cacactgggtgatta

SEQ ID NO: 1673972 - DNA, 15 bp, Homo sapiens
ccacactgggtgatt

SEQ ID NO: 1673973 - DNA, 15 bp, Homo sapiens
cccacactgggtgat

SEQ ID NO: 1673974 - DNA, 15 bp, Homo sapiens
acccacactgggtga

SEQ ID NO: 1673975 - DNA, 15 bp, Homo sapiens
tacccacactgggtg

SEQ ID NO: 1673976 - DNA, 15 bp, Homo sapiens
ttacccacactgggt

SEQ ID NO: 1673977 - DNA, 15 bp, Homo sapiens
tttacccacactggg

SEQ ID NO: 1673978 - DNA, 15 bp, Homo sapiens
atttacccacactgg

SEQ ID NO: 1673979 - DNA, 15 bp, Homo sapiens
catttacccacactg

SEQ ID NO: 1673980 - DNA, 15 bp, Homo sapiens
ccatttacccacact

SEQ ID NO: 1673981 - DNA, 15 bp, Homo sapiens
accatttacccacac

SEQ ID NO: 1673982 - DNA, 15 bp, Homo sapiens
aaccatttacccaca

SEQ ID NO: 1673983 - DNA, 15 bp, Homo sapiens
aaaccatttacccac

SEQ ID NO: 1673984 - DNA, 15 bp, Homo sapiens
caaaccatttaccca

SEQ ID NO: 1673985 - DNA, 15 bp, Homo sapiens
tcaaaccatttaccc

SEQ ID NO: 1673986 - DNA, 15 bp, Homo sapiens
ttcaaaccatttacc

SEQ ID NO: 1673987 - DNA, 15 bp, Homo sapiens
cttcaaaccatttac

SEQ ID NO: 1673988 - DNA, 15 bp, Homo sapiens
acttcaaaccattta

SEQ ID NO: 1673989 - DNA, 15 bp, Homo sapiens
gacttcaaaccattt

SEQ ID NO: 1673990 - DNA, 15 bp, Homo sapiens
agacttcaaaccatt

SEQ ID NO: 1673991 - DNA, 15 bp, Homo sapiens
gagacttcaaaccat

SEQ ID NO: 1673992 - DNA, 15 bp, Homo sapiens
tgagacttcaaacca

SEQ ID NO: 1673993 - DNA, 15 bp, Homo sapiens
atgagacttcaaacc

SEQ ID NO: 1673994 - DNA, 15 bp, Homo sapiens
aatgagacttcaaac

SEQ ID NO: 1673995 - DNA, 15 bp, Homo sapiens
aaatgagacttcaaa

SEQ ID NO: 1673996 - DNA, 15 bp, Homo sapiens
gaaatgagacttcaa

SEQ ID NO: 1673997 - DNA, 15 bp, Homo sapiens
agaaatgagacttca

SEQ ID NO: 1673998 - DNA, 15 bp, Homo sapiens
aagaaatgagacttc

SEQ ID NO: 1673999 - DNA, 15 bp, Homo sapiens
taagaaatgagactt

SEQ ID NO: 1674000 - DNA, 15 bp, Homo sapiens
gtaagaaatgagact

SEQ ID NO: 1674001 - DNA, 15 bp, Homo sapiens
tgtaagaaatgagac

SEQ ID NO: 1674002 - DNA, 15 bp, Homo sapiens
ctgtaagaaatgaga

SEQ ID NO: 1674003 - DNA, 15 bp, Homo sapiens
gctgtaagaaatgag

SEQ ID NO: 1674004 - DNA, 15 bp, Homo sapiens
tgctgtaagaaatga

SEQ ID NO: 1674005 - DNA, 15 bp, Homo sapiens
atgctgtaagaaatg

SEQ ID NO: 1674006 - DNA, 15 bp, Homo sapiens
gatgctgtaagaaat

SEQ ID NO: 1674007 - DNA, 15 bp, Homo sapiens
tgatgctgtaagaaa

SEQ ID NO: 1674008 - DNA, 15 bp, Homo sapiens
ctgatgctgtaagaa

SEQ ID NO: 1674009 - DNA, 15 bp, Homo sapiens
actgatgctgtaaga

SEQ ID NO: 1674010 - DNA, 15 bp, Homo sapiens
aactgatgctgtaag

SEQ ID NO: 1674011 - DNA, 15 bp, Homo sapiens
caactgatgctgtaa

SEQ ID NO: 1674012 - DNA, 15 bp, Homo sapiens
gcaactgatgctgta

SEQ ID NO: 1674013 - DNA, 15 bp, Homo sapiens
agcaactgatgctgt

SEQ ID NO: 1674014 - DNA, 15 bp, Homo sapiens
aagcaactgatgctg

SEQ ID NO: 1674015 - DNA, 15 bp, Homo sapiens
aaagcaactgatgct

SEQ ID NO: 1674016 - DNA, 15 bp, Homo sapiens
caaagcaactgatgc

SEQ ID NO: 1674017 - DNA, 15 bp, Homo sapiens
ccaaagcaactgatg

SEQ ID NO: 1674018 - DNA, 15 bp, Homo sapiens
accaaagcaactgat

SEQ ID NO: 1674019 - DNA, 15 bp, Homo sapiens
gaccaaagcaactga

SEQ ID NO: 1674020 - DNA, 15 bp, Homo sapiens
tgaccaaagcaactg

SEQ ID NO: 1674021 - DNA, 15 bp, Homo sapiens
ttgaccaaagcaact

SEQ ID NO: 1674022 - DNA, 15 bp, Homo sapiens
cttgaccaaagcaac

SEQ ID NO: 1674023 - DNA, 15 bp, Homo sapiens
ccttgaccaaagcaa

SEQ ID NO: 1674024 - DNA, 15 bp, Homo sapiens
tccttgaccaaagca

SEQ ID NO: 1674025 - DNA, 15 bp, Homo sapiens
atccttgaccaaagc

SEQ ID NO: 1674026 - DNA, 15 bp, Homo sapiens
tatccttgaccaaag

SEQ ID NO: 1674027 - DNA, 15 bp, Homo sapiens
gtatccttgaccaaa

SEQ ID NO: 1674028 - DNA, 15 bp, Homo sapiens
agtatccttgaccaa

SEQ ID NO: 1674029 - DNA, 15 bp, Homo sapiens
cagtatccttgacca

SEQ ID NO: 1674030 - DNA, 15 bp, Homo sapiens
tcagtatccttgacc

SEQ ID NO: 1674031 - DNA, 15 bp, Homo sapiens
ctcagtatccttgac

SEQ ID NO: 1674032 - DNA, 15 bp, Homo sapiens
tctcagtatccttga

SEQ ID NO: 1674033 - DNA, 15 bp, Homo sapiens
ttctcagtatccttg

SEQ ID NO: 1674034 - DNA, 15 bp, Homo sapiens
cttctcagtatcctt

SEQ ID NO: 1674035 - DNA, 15 bp, Homo sapiens
gcttctcagtatcct

SEQ ID NO: 1674036 - DNA, 15 bp, Homo sapiens
tgcttctcagtatcc

SEQ ID NO: 1674037 - DNA, 15 bp, Homo sapiens
gtgcttctcagtatc

SEQ ID NO: 1674038 - DNA, 15 bp, Homo sapiens
tgtgcttctcagtat

SEQ ID NO: 1674039 - DNA, 15 bp, Homo sapiens
ttgtgcttctcagta

SEQ ID NO: 1674040 - DNA, 15 bp, Homo sapiens
tttgtgcttctcagt

SEQ ID NO: 1674041 - DNA, 15 bp, Homo sapiens
gtttgtgcttctcag

SEQ ID NO: 1674042 - DNA, 15 bp, Homo sapiens
ggtttgtgcttctca

SEQ ID NO: 1674043 - DNA, 15 bp, Homo sapiens
gggtttgtgcttctc

SEQ ID NO: 1674044 - DNA, 15 bp, Homo sapiens
tgggtttgtgcttct

SEQ ID NO: 1674045 - DNA, 15 bp, Homo sapiens
ctgggtttgtgcttc

SEQ ID NO: 1674046 - DNA, 15 bp, Homo sapiens
actgggtttgtgctt

SEQ ID NO: 1674047 - DNA, 15 bp, Homo sapiens
tactgggtttgtgct

SEQ ID NO: 1674048 - DNA, 15 bp, Homo sapiens
ttactgggtttgtgc

SEQ ID NO: 1674049 - DNA, 15 bp, Homo sapiens
tttactgggtttgtg

SEQ ID NO: 1674050 - DNA, 15 bp, Homo sapiens
ttttactgggtttgt

SEQ ID NO: 1674051 - DNA, 15 bp, Homo sapiens
tttttactgggtttg

SEQ ID NO: 1674052 - DNA, 15 bp, Homo sapiens
ttttttactgggttt

SEQ ID NO: 1674053 - DNA, 15 bp, Homo sapiens
attttttactgggtt

SEQ ID NO: 1674054 - DNA, 15 bp, Homo sapiens
cattttttactgggt

SEQ ID NO: 1674055 - DNA, 15 bp, Homo sapiens
acattttttactggg

SEQ ID NO: 1674056 - DNA, 15 bp, Homo sapiens
cacattttttactgg

SEQ ID NO: 1674057 - DNA, 15 bp, Homo sapiens
tcacattttttactg

SEQ ID NO: 1674058 - DNA, 15 bp, Homo sapiens
ctcacattttttact

SEQ ID NO: 1674059 - DNA, 15 bp, Homo sapiens
tctcacattttttac

SEQ ID NO: 1674060 - DNA, 15 bp, Homo sapiens
ttctcacatttttta

SEQ ID NO: 1674061 - DNA, 15 bp, Homo sapiens
cttctcacatttttt

SEQ ID NO: 1674062 - DNA, 15 bp, Homo sapiens
gcttctcacattttt

SEQ ID NO: 1674063 - DNA, 15 bp, Homo sapiens
tgcttctcacatttt

SEQ ID NO: 1674064 - DNA, 15 bp, Homo sapiens
ttgcttctcacattt

SEQ ID NO: 1674065 - DNA, 15 bp, Homo sapiens
tttgcttctcacatt

SEQ ID NO: 1674066 - DNA, 15 bp, Homo sapiens
ttttgcttctcacat

SEQ ID NO: 1674067 - DNA, 15 bp, Homo sapiens
tttttgcttctcaca

SEQ ID NO: 1674068 - DNA, 15 bp, Homo sapiens
ttttttgcttctcac

SEQ ID NO: 1674069 - DNA, 15 bp, Homo sapiens
gttttttgcttctca

SEQ ID NO: 1674070 - DNA, 15 bp, Homo sapiens
agttttttgcttctc

SEQ ID NO: 1674071 - DNA, 15 bp, Homo sapiens
aagttttttgcttct

SEQ ID NO: 1674072 - DNA, 15 bp, Homo sapiens
caagttttttgcttc

SEQ ID NO: 1674073 - DNA, 15 bp, Homo sapiens
tcaagttttttgctt

SEQ ID NO: 1674074 - DNA, 15 bp, Homo sapiens
ctcaagttttttgct

SEQ ID NO: 1674075 - DNA, 15 bp, Homo sapiens
cctcaagttttttgc

SEQ ID NO: 1674076 - DNA, 15 bp, Homo sapiens
tcctcaagttttttg

SEQ ID NO: 1674077 - DNA, 15 bp, Homo sapiens
atcctcaagtttttt

SEQ ID NO: 1674078 - DNA, 15 bp, Homo sapiens
gatcctcaagttttt

SEQ ID NO: 1674079 - DNA, 15 bp, Homo sapiens
tgatcctcaagtttt

SEQ ID NO: 1674080 - DNA, 15 bp, Homo sapiens
ttgatcctcaagttt

SEQ ID NO: 1674081 - DNA, 15 bp, Homo sapiens
tttgatcctcaagtt

SEQ ID NO: 1674082 - DNA, 15 bp, Homo sapiens
ttttgatcctcaagt

SEQ ID NO: 1674083 - DNA, 15 bp, Homo sapiens
cttttgatcctcaag

SEQ ID NO: 1674084 - DNA, 15 bp, Homo sapiens
acttttgatcctcaa

SEQ ID NO: 1674085 - DNA, 15 bp, Homo sapiens
cacttttgatcctca

SEQ ID NO: 1674086 - DNA, 15 bp, Homo sapiens
ccacttttgatcctc

SEQ ID NO: 1674087 - DNA, 15 bp, Homo sapiens
tcccacttttgatcc

SEQ ID NO: 1674088 - DNA, 15 bp, Homo sapiens
ctcccacttttgatc

SEQ ID NO: 1674089 - DNA, 15 bp, Homo sapiens
tctcccacttttgat

SEQ ID NO: 1674090 - DNA, 15 bp, Homo sapiens
ctctcccacttttga

SEQ ID NO: 1674091 - DNA, 15 bp, Homo sapiens
cctctcccacttttg

SEQ ID NO: 1674092 - DNA, 15 bp, Homo sapiens
tcctctcccactttt

SEQ ID NO: 1674093 - DNA, 15 bp, Homo sapiens
ctcctctcccacttt

SEQ ID NO: 1674094 - DNA, 15 bp, Homo sapiens
tctcctctcccactt

SEQ ID NO: 1674095 - DNA, 15 bp, Homo sapiens
ttctcctctcccact

SEQ ID NO: 1674096 - DNA, 15 bp, Homo sapiens
cttctcctctcccac

SEQ ID NO: 1674097 - DNA, 15 bp, Homo sapiens
ccttctcctctccca

SEQ ID NO: 1674098 - DNA, 15 bp, Homo sapiens
cccttctcctctccc

SEQ ID NO: 1674099 - DNA, 15 bp, Homo sapiens
tacccttctcctctc

SEQ ID NO: 1674100 - DNA, 15 bp, Homo sapiens
atacccttctcctct

SEQ ID NO: 1674101 - DNA, 15 bp, Homo sapiens
tatacccttctcctc

SEQ ID NO: 1674102 - DNA, 15 bp, Homo sapiens
ttatacccttctcct

SEQ ID NO: 1674103 - DNA, 15 bp, Homo sapiens
tttatacccttctcc

SEQ ID NO: 1674104 - DNA, 15 bp, Homo sapiens
gtttatacccttctc

SEQ ID NO: 1674105 - DNA, 15 bp, Homo sapiens
agtttatacccttct

SEQ ID NO: 1674106 - DNA, 15 bp, Homo sapiens
cagtttatacccttc

SEQ ID NO: 1674107 - DNA, 15 bp, Homo sapiens
acagtttataccctt

SEQ ID NO: 1674108 - DNA, 15 bp, Homo sapiens
tacagtttataccct

SEQ ID NO: 1674109 - DNA, 15 bp, Homo sapiens
ttacagtttataccc

SEQ ID NO: 1674110 - DNA, 15 bp, Homo sapiens
cttacagtttatacc

SEQ ID NO: 1674111 - DNA, 15 bp, Homo sapiens
ccttacagtttatac

SEQ ID NO: 1674112 - DNA, 15 bp, Homo sapiens
gccttacagtttata

SEQ ID NO: 1674113 - DNA, 15 bp, Homo sapiens
agccttacagtttat

SEQ ID NO: 1674114 - DNA, 15 bp, Homo sapiens
cagccttacagttta

SEQ ID NO: 1674115 - DNA, 15 bp, Homo sapiens
acagccttacagttt

SEQ ID NO: 1674116 - DNA, 15 bp, Homo sapiens
cacagccttacagtt

SEQ ID NO: 1674117 - DNA, 15 bp, Homo sapiens
ccacagccttacagt

SEQ ID NO: 1674118 - DNA, 15 bp, Homo sapiens
cccacagccttacag

SEQ ID NO: 1674119 - DNA, 15 bp, Homo sapiens
tcccacagccttaca

SEQ ID NO: 1674120 - DNA, 15 bp, Homo sapiens
ttcccacagccttac

SEQ ID NO: 1674121 - DNA, 15 bp, Homo sapiens
attcccacagcctta

SEQ ID NO: 1674122 - DNA, 15 bp, Homo sapiens
aattcccacagcctt

SEQ ID NO: 1674123 - DNA, 15 bp, Homo sapiens
taattcccacagcct

SEQ ID NO: 1674124 - DNA, 15 bp, Homo sapiens
ttaattcccacagcc

SEQ ID NO: 1674125 - DNA, 15 bp, Homo sapiens
cttaattcccacagc

SEQ ID NO: 1674126 - DNA, 15 bp, Homo sapiens
gcttaattcccacag

SEQ ID NO: 1674127 - DNA, 15 bp, Homo sapiens
tgcttaattcccaca

SEQ ID NO: 1674128 - DNA, 15 bp, Homo sapiens
atgcttaattcccac

SEQ ID NO: 1674129 - DNA, 15 bp, Homo sapiens
aatgcttaattccca

SEQ ID NO: 1674130 - DNA, 15 bp, Homo sapiens
gaatgcttaattccc

SEQ ID NO: 1674131 - DNA, 15 bp, Homo sapiens
tgaatgcttaattcc

SEQ ID NO: 1674132 - DNA, 15 bp, Homo sapiens
atgaatgcttaattc

SEQ ID NO: 1674133 - DNA, 15 bp, Homo sapiens
catgaatgcttaatt

SEQ ID NO: 1674134 - DNA, 15 bp, Homo sapiens
tcatgaatgcttaat

SEQ ID NO: 1674135 - DNA, 15 bp, Homo sapiens
ttcatgaatgcttaa

SEQ ID NO: 1674136 - DNA, 15 bp, Homo sapiens
tttcatgaatgctta

SEQ ID NO: 1674137 - DNA, 15 bp, Homo sapiens
ctttcatgaatgctt

SEQ ID NO: 1674138 - DNA, 15 bp, Homo sapiens
tctttcatgaatgct

SEQ ID NO: 1674139 - DNA, 15 bp, Homo sapiens
ctctttcatgaatgc

SEQ ID NO: 1674140 - DNA, 15 bp, Homo sapiens
cctctttcatgaatg

SEQ ID NO: 1674141 - DNA, 15 bp, Homo sapiens
gcctctttcatgaat

SEQ ID NO: 1674142 - DNA, 15 bp, Homo sapiens
ggcctctttcatgaa

SEQ ID NO: 1674143 - DNA, 15 bp, Homo sapiens
gggcctctttcatga

SEQ ID NO: 1674144 - DNA, 15 bp, Homo sapiens
tgggcctctttcatg

SEQ ID NO: 1674145 - DNA, 15 bp, Homo sapiens
ctgggcctctttcat

SEQ ID NO: 1674146 - DNA, 15 bp, Homo sapiens
tctgggcctctttca

SEQ ID NO: 1674147 - DNA, 15 bp, Homo sapiens
gtctgggcctctttc

SEQ ID NO: 1674148 - DNA, 15 bp, Homo sapiens
ggtctgggcctcttt

SEQ ID NO: 1674149 - DNA, 15 bp, Homo sapiens
gggtctgggcctctt

SEQ ID NO: 1674150 - DNA, 15 bp, Homo sapiens
agggtctgggcctct

SEQ ID NO: 1674151 - DNA, 15 bp, Homo sapiens
cagggtctgggcctc

SEQ ID NO: 1674152 - DNA, 15 bp, Homo sapiens
tcagggtctgggcct

SEQ ID NO: 1674153 - DNA, 15 bp, Homo sapiens
ctcagggtctgggcc

SEQ ID NO: 1674154 - DNA, 15 bp, Homo sapiens
actcagggtctgggc

SEQ ID NO: 1674155 - DNA, 15 bp, Homo sapiens
tactcagggtctggg

SEQ ID NO: 1674156 - DNA, 15 bp, Homo sapiens
ctactcagggtctgg

SEQ ID NO: 1674157 - DNA, 15 bp, Homo sapiens
cctactcagggtctg

SEQ ID NO: 1674158 - DNA, 15 bp, Homo sapiens
acctactcagggtct

SEQ ID NO: 1674159 - DNA, 15 bp, Homo sapiens
cacctactcagggtc

SEQ ID NO: 1674160 - DNA, 15 bp, Homo sapiens
tcacctactcagggt

SEQ ID NO: 1674161 - DNA, 15 bp, Homo sapiens
ttcacctactcaggg

SEQ ID NO: 1674162 - DNA, 15 bp, Homo sapiens
cttcacctactcagg

SEQ ID NO: 1674163 - DNA, 15 bp, Homo sapiens
ccttcacctactcag

SEQ ID NO: 1674164 - DNA, 15 bp, Homo sapiens
cccttcacctactca

SEQ ID NO: 1674165 - DNA, 15 bp, Homo sapiens
tcccttcacctactc

SEQ ID NO: 1674166 - DNA, 15 bp, Homo sapiens
atcccttcacctact

SEQ ID NO: 1674167 - DNA, 15 bp, Homo sapiens
gatcccttcacctac

SEQ ID NO: 1674168 - DNA, 15 bp, Homo sapiens
agatcccttcaccta

SEQ ID NO: 1674169 - DNA, 15 bp, Homo sapiens
aagatcccttcacct

SEQ ID NO: 1674170 - DNA, 15 bp, Homo sapiens
gaagatcccttcacc

SEQ ID NO: 1674171 - DNA, 15 bp, Homo sapiens
tgaagatcccttcac

SEQ ID NO: 1674172 - DNA, 15 bp, Homo sapiens
ctgaagatcccttca

SEQ ID NO: 1674173 - DNA, 15 bp, Homo sapiens
actgaagatcccttc

SEQ ID NO: 1674174 - DNA, 15 bp, Homo sapiens
cactgaagatccctt

SEQ ID NO: 1674175 - DNA, 15 bp, Homo sapiens
acactgaagatccct

SEQ ID NO: 1674176 - DNA, 15 bp, Homo sapiens
aacactgaagatccc

SEQ ID NO: 1674177 - DNA, 15 bp, Homo sapiens
aaacactgaagatcc

SEQ ID NO: 1674178 - DNA, 15 bp, Homo sapiens
gaaacactgaagatc

SEQ ID NO: 1674179 - DNA, 15 bp, Homo sapiens
agaaacactgaagat

SEQ ID NO: 1674180 - DNA, 15 bp, Homo sapiens
tagaaacactgaaga

SEQ ID NO: 1674181 - DNA, 15 bp, Homo sapiens
ctagaaacactgaag

SEQ ID NO: 1674182 - DNA, 15 bp, Homo sapiens
tctagaaacactgaa

SEQ ID NO: 1674183 - DNA, 15 bp, Homo sapiens
ttctagaaacactga

SEQ ID NO: 1674184 - DNA, 15 bp, Homo sapiens
attctagaaacactg

SEQ ID NO: 1674185 - DNA, 15 bp, Homo sapiens
aattctagaaacact

SEQ ID NO: 1674186 - DNA, 15 bp, Homo sapiens
gaattctagaaacac

SEQ ID NO: 1674187 - DNA, 15 bp, Homo sapiens
agaattctagaaaca

SEQ ID NO: 1674188 - DNA, 15 bp, Homo sapiens
cagaattctagaaac

SEQ ID NO: 1674189 - DNA, 15 bp, Homo sapiens
tcagaattctagaaa

SEQ ID NO: 1674190 - DNA, 15 bp, Homo sapiens
ttcagaattctagaa

SEQ ID NO: 1674191 - DNA, 15 bp, Homo sapiens
attcagaattctaga

SEQ ID NO: 1674192 - DNA, 15 bp, Homo sapiens
cattcagaattctag

SEQ ID NO: 1674193 - DNA, 15 bp, Homo sapiens
tcattcagaattcta

SEQ ID NO: 1674194 - DNA, 15 bp, Homo sapiens
atcattcagaattct

SEQ ID NO: 1674195 - DNA, 15 bp, Homo sapiens
gatcattcagaattc

SEQ ID NO: 1674196 - DNA, 15 bp, Homo sapiens
tgatcattcagaatt

SEQ ID NO: 1674197 - DNA, 15 bp, Homo sapiens
ttgatcattcagaat

SEQ ID NO: 1674198 - DNA, 15 bp, Homo sapiens
tttgatcattcagaa

SEQ ID NO: 1674199 - DNA, 15 bp, Homo sapiens
atttgatcattcaga

SEQ ID NO: 1674200 - DNA, 15 bp, Homo sapiens
tatttgatcattcag

SEQ ID NO: 1674201 - DNA, 15 bp, Homo sapiens
gtatttgatcattca

SEQ ID NO: 1674202 - DNA, 15 bp, Homo sapiens
ggtatttgatcattc

SEQ ID NO: 1674203 - DNA, 15 bp, Homo sapiens
gggtatttgatcatt

SEQ ID NO: 1674204 - DNA, 15 bp, Homo sapiens
tgggtatttgatcat

SEQ ID NO: 1674205 - DNA, 15 bp, Homo sapiens
ttgggtatttgatca

SEQ ID NO: 1674206 - DNA, 15 bp, Homo sapiens
tttgggtatttgatc

SEQ ID NO: 1674207 - DNA, 15 bp, Homo sapiens
gtttgggtatttgat

SEQ ID NO: 1674208 - DNA, 15 bp, Homo sapiens
tgtttgggtatttga

SEQ ID NO: 1674209 - DNA, 15 bp, Homo sapiens
atgtttgggtatttg

SEQ ID NO: 1674210 - DNA, 15 bp, Homo sapiens
aatgtttgggtattt

SEQ ID NO: 1674211 - DNA, 15 bp, Homo sapiens
taatgtttgggtatt

SEQ ID NO: 1674212 - DNA, 15 bp, Homo sapiens
ctaatgtttgggtat

SEQ ID NO: 1674213 - DNA, 15 bp, Homo sapiens
tctaatgtttgggta

SEQ ID NO: 1674214 - DNA, 15 bp, Homo sapiens
atctaatgtttgggt

SEQ ID NO: 1674215 - DNA, 15 bp, Homo sapiens
aatctaatgtttggg

SEQ ID NO: 1674216 - DNA, 15 bp, Homo sapiens
caatctaatgtttgg

SEQ ID NO: 1674217 - DNA, 15 bp, Homo sapiens
ccaatctaatgtttg

SEQ ID NO: 1674218 - DNA, 15 bp, Homo sapiens
accaatctaatgttt

SEQ ID NO: 1674219 - DNA, 15 bp, Homo sapiens
caccaatctaatgtt

SEQ ID NO: 1674220 - DNA, 15 bp, Homo sapiens
tcaccaatctaatgt

SEQ ID NO: 1674221 - DNA, 15 bp, Homo sapiens
gtcaccaatctaatg

SEQ ID NO: 1674222 - DNA, 15 bp, Homo sapiens
agtcaccaatctaat

SEQ ID NO: 1674223 - DNA, 15 bp, Homo sapiens
aagtcaccaatctaa

SEQ ID NO: 1674224 - DNA, 15 bp, Homo sapiens
aaagtcaccaatcta

SEQ ID NO: 1674225 - DNA, 15 bp, Homo sapiens
taaagtcaccaatct

SEQ ID NO: 1674226 - DNA, 15 bp, Homo sapiens
ataaagtcaccaatc

SEQ ID NO: 1674227 - DNA, 15 bp, Homo sapiens
tataaagtcaccaat

SEQ ID NO: 1674228 - DNA, 15 bp, Homo sapiens
ctataaagtcaccaa

SEQ ID NO: 1674229 - DNA, 15 bp, Homo sapiens
cctataaagtcacca

SEQ ID NO: 1674230 - DNA, 15 bp, Homo sapiens
gcctataaagtcacc

SEQ ID NO: 1674231 - DNA, 15 bp, Homo sapiens
tgcctataaagtcac

SEQ ID NO: 1674232 - DNA, 15 bp, Homo sapiens
ttgcctataaagtca

SEQ ID NO: 1674233 - DNA, 15 bp, Homo sapiens
tttgcctataaagtc

SEQ ID NO: 1674234 - DNA, 15 bp, Homo sapiens
atttgcctataaagt

SEQ ID NO: 1674235 - DNA, 15 bp, Homo sapiens
catttgcctataaag

SEQ ID NO: 1674236 - DNA, 15 bp, Homo sapiens
tcatttgcctataaa

SEQ ID NO: 1674237 - DNA, 15 bp, Homo sapiens
ttcatttgcctataa

SEQ ID NO: 1674238 - DNA, 15 bp, Homo sapiens
gttcatttgcctata

SEQ ID NO: 1674239 - DNA, 15 bp, Homo sapiens
ggttcatttgcctat

SEQ ID NO: 1674240 - DNA, 15 bp, Homo sapiens
tggttcatttgccta

SEQ ID NO: 1674241 - DNA, 15 bp, Homo sapiens
ctggttcatttgcct

SEQ ID NO: 1674242 - DNA, 15 bp, Homo sapiens
gctggttcatttgcc

SEQ ID NO: 1674243 - DNA, 15 bp, Homo sapiens
tgctggttcatttgc

SEQ ID NO: 1674244 - DNA, 15 bp, Homo sapiens
gtgctggttcatttg

SEQ ID NO: 1674245 - DNA, 15 bp, Homo sapiens
tgtgctggttcattt

SEQ ID NO: 1674246 - DNA, 15 bp, Homo sapiens
ctgtgctggttcatt

SEQ ID NO: 1674247 - DNA, 15 bp, Homo sapiens
actgtgctggttcat

SEQ ID NO: 1674248 - DNA, 15 bp, Homo sapiens
tactgtgctggttca

SEQ ID NO: 1674249 - DNA, 15 bp, Homo sapiens
atactgtgctggttc

SEQ ID NO: 1674250 - DNA, 15 bp, Homo sapiens
aatactgtgctggtt

SEQ ID NO: 1674251 - DNA, 15 bp, Homo sapiens
aaatactgtgctggt

SEQ ID NO: 1674252 - DNA, 15 bp, Homo sapiens
aaaatactgtgctgg

SEQ ID NO: 1674253 - DNA, 15 bp, Homo sapiens
aaaaatactgtgctg

SEQ ID NO: 1674254 - DNA, 15 bp, Homo sapiens
aaaaaatactgtgct

SEQ ID NO: 1674255 - DNA, 15 bp, Homo sapiens
aaaaaaatactgtgc

SEQ ID NO: 1674256 - DNA, 15 bp, Homo sapiens
aaaaaaaatactgtg

SEQ ID NO: 1674257 - DNA, 15 bp, Homo sapiens
aaaaaaaaatactgt

SEQ ID NO: 1674258 - DNA, 15 bp, Homo sapiens
aaaaaaaaaatactg

SEQ ID NO: 1674259 - DNA, 15 bp, Homo sapiens
aaaaaaaaaaatact

SEQ ID NO: 1674260 - DNA, 15 bp, Homo sapiens
agacagagcgagact

SEQ ID NO: 1674261 - DNA, 15 bp, Homo sapiens
gagacagagcgagac

SEQ ID NO: 1674262 - DNA, 15 bp, Homo sapiens
ggagacagagcgaga

SEQ ID NO: 1674263 - DNA, 15 bp, Homo sapiens
tggagacagagcgag

SEQ ID NO: 1674264 - DNA, 15 bp, Homo sapiens
ctggagacagagcga

SEQ ID NO: 1674265 - DNA, 15 bp, Homo sapiens
cctggagacagagcg

SEQ ID NO: 1674266 - DNA, 15 bp, Homo sapiens
gcctggagacagagc

SEQ ID NO: 1674267 - DNA, 15 bp, Homo sapiens
agcctggagacagag

SEQ ID NO: 1674268 - DNA, 15 bp, Homo sapiens
cagcctggagacaga

SEQ ID NO: 1674269 - DNA, 15 bp, Homo sapiens
ccagcctggagacag

SEQ ID NO: 1674270 - DNA, 15 bp, Homo sapiens
tccagcctggagaca

SEQ ID NO: 1674271 - DNA, 15 bp, Homo sapiens
ctccagcctggagac

SEQ ID NO: 1674272 - DNA, 15 bp, Homo sapiens
actccagcctggaga

SEQ ID NO: 1674273 - DNA, 15 bp, Homo sapiens
cactccagcctggag

SEQ ID NO: 1674274 - DNA, 15 bp, Homo sapiens
accaccgcactccag

SEQ ID NO: 1674275 - DNA, 15 bp, Homo sapiens
caccaccgcactcca

SEQ ID NO: 1674276 - DNA, 15 bp, Homo sapiens
acaccaccgcactcc

SEQ ID NO: 1674277 - DNA, 15 bp, Homo sapiens
cacaccaccgcactc

SEQ ID NO: 1674278 - DNA, 15 bp, Homo sapiens
tcacaccaccgcact

SEQ ID NO: 1674279 - DNA, 15 bp, Homo sapiens
atcacaccaccgcac

SEQ ID NO: 1674280 - DNA, 15 bp, Homo sapiens
gatcacaccaccgca

SEQ ID NO: 1674281 - DNA, 15 bp, Homo sapiens
cgatcacaccaccgc

SEQ ID NO: 1674282 - DNA, 15 bp, Homo sapiens
ccgatcacaccaccg

SEQ ID NO: 1674283 - DNA, 15 bp, Homo sapiens
gccgatcacaccacc

SEQ ID NO: 1674284 - DNA, 15 bp, Homo sapiens
agccgatcacaccac

SEQ ID NO: 1674285 - DNA, 15 bp, Homo sapiens
gagccgatcacacca

SEQ ID NO: 1674286 - DNA, 15 bp, Homo sapiens
tgagccgatcacacc

SEQ ID NO: 1674287 - DNA, 15 bp, Homo sapiens
gtgagccgatcacac

SEQ ID NO: 1674288 - DNA, 15 bp, Homo sapiens
agtgagccgatcaca

SEQ ID NO: 1674289 - DNA, 15 bp, Homo sapiens
cagtgagccgatcac

SEQ ID NO: 1674290 - DNA, 15 bp, Homo sapiens
gcagtgagccgatca

SEQ ID NO: 1674291 - DNA, 15 bp, Homo sapiens
tgcagtgagccgatc

SEQ ID NO: 1674292 - DNA, 15 bp, Homo sapiens
ttgcagtgagccgat

SEQ ID NO: 1674293 - DNA, 15 bp, Homo sapiens
gggtggcagaggttg

SEQ ID NO: 1674294 - DNA, 15 bp, Homo sapiens
tgggtggcagaggtt

SEQ ID NO: 1674295 - DNA, 15 bp, Homo sapiens
ctgggtggcagaggt

SEQ ID NO: 1674296 - DNA, 15 bp, Homo sapiens
cctgggtggcagagg

SEQ ID NO: 1674297 - DNA, 15 bp, Homo sapiens
acctgggtggcagag

SEQ ID NO: 1674298 - DNA, 15 bp, Homo sapiens
aacctgggtggcaga

SEQ ID NO: 1674299 - DNA, 15 bp, Homo sapiens
gaacctgggtggcag

SEQ ID NO: 1674300 - DNA, 15 bp, Homo sapiens
tgaacctgggtggca

SEQ ID NO: 1674301 - DNA, 15 bp, Homo sapiens
ttgaacctgggtggc

SEQ ID NO: 1674302 - DNA, 15 bp, Homo sapiens
cttgaacctgggtgg

SEQ ID NO: 1674303 - DNA, 15 bp, Homo sapiens
gcttgaacctgggtg

SEQ ID NO: 1674304 - DNA, 15 bp, Homo sapiens
tgcttgaacctgggt

SEQ ID NO: 1674305 - DNA, 15 bp, Homo sapiens
ttgcttgaacctggg

SEQ ID NO: 1674306 - DNA, 15 bp, Homo sapiens
attgcttgaacctgg

SEQ ID NO: 1674307 - DNA, 15 bp, Homo sapiens
aattgcttgaacctg

SEQ ID NO: 1674308 - DNA, 15 bp, Homo sapiens
caattgcttgaacct

SEQ ID NO: 1674309 - DNA, 15 bp, Homo sapiens
acaattgcttgaacc

SEQ ID NO: 1674310 - DNA, 15 bp, Homo sapiens
cacaattgcttgaac

SEQ ID NO: 1674311 - DNA, 15 bp, Homo sapiens
gcacaattgcttgaa

SEQ ID NO: 1674312 - DNA, 15 bp, Homo sapiens
ggcacaattgcttga

SEQ ID NO: 1674313 - DNA, 15 bp, Homo sapiens
aggcacaattgcttg

SEQ ID NO: 1674314 - DNA, 15 bp, Homo sapiens
gaggcacaattgctt

SEQ ID NO: 1674315 - DNA, 15 bp, Homo sapiens
tgaggcacaattgct

SEQ ID NO: 1674316 - DNA, 15 bp, Homo sapiens
ctgaggcacaattgc

SEQ ID NO: 1674317 - DNA, 15 bp, Homo sapiens
gctgaggcacaattg

SEQ ID NO: 1674318 - DNA, 15 bp, Homo sapiens
ggctgaggcacaatt

SEQ ID NO: 1674319 - DNA, 15 bp, Homo sapiens
aggctgaggcacaat

SEQ ID NO: 1674320 - DNA, 15 bp, Homo sapiens
gggaggctgaggcac

SEQ ID NO: 1674321 - DNA, 15 bp, Homo sapiens
ttcgggaggctgagg

SEQ ID NO: 1674322 - DNA, 15 bp, Homo sapiens
attcgggaggctgag

SEQ ID NO: 1674323 - DNA, 15 bp, Homo sapiens
tattcgggaggctga

SEQ ID NO: 1674324 - DNA, 15 bp, Homo sapiens
ctattcgggaggctg

SEQ ID NO: 1674325 - DNA, 15 bp, Homo sapiens
gctattcgggaggct

SEQ ID NO: 1674326 - DNA, 15 bp, Homo sapiens
agctattcgggaggc

SEQ ID NO: 1674327 - DNA, 15 bp, Homo sapiens
cagctattcgggagg

SEQ ID NO: 1674328 - DNA, 15 bp, Homo sapiens
ccagctattcgggag

SEQ ID NO: 1674329 - DNA, 15 bp, Homo sapiens
cccagctattcggga

SEQ ID NO: 1674330 - DNA, 15 bp, Homo sapiens
tcccagctattcggg

SEQ ID NO: 1674331 - DNA, 15 bp, Homo sapiens
atcccagctattcgg

SEQ ID NO: 1674332 - DNA, 15 bp, Homo sapiens
aatcccagctattcg

SEQ ID NO: 1674333 - DNA, 15 bp, Homo sapiens
ttaatcccagctatt

SEQ ID NO: 1674334 - DNA, 15 bp, Homo sapiens
tttaatcccagctat

SEQ ID NO: 1674335 - DNA, 15 bp, Homo sapiens
ctttaatcccagcta

SEQ ID NO: 1674336 - DNA, 15 bp, Homo sapiens
cctttaatcccagct

SEQ ID NO: 1674337 - DNA, 15 bp, Homo sapiens
gcctttaatcccagc

SEQ ID NO: 1674338 - DNA, 15 bp, Homo sapiens
cgcctttaatcccag

SEQ ID NO: 1674339 - DNA, 15 bp, Homo sapiens
acgcctttaatccca

SEQ ID NO: 1674340 - DNA, 15 bp, Homo sapiens
cacgcctttaatccc

SEQ ID NO: 1674341 - DNA, 15 bp, Homo sapiens
acacgcctttaatcc

SEQ ID NO: 1674342 - DNA, 15 bp, Homo sapiens
tacacgcctttaatc

SEQ ID NO: 1674343 - DNA, 15 bp, Homo sapiens
ctacacgcctttaat

SEQ ID NO: 1674344 - DNA, 15 bp, Homo sapiens
actacacgcctttaa

SEQ ID NO: 1674345 - DNA, 15 bp, Homo sapiens
tactacacgccttta

SEQ ID NO: 1674346 - DNA, 15 bp, Homo sapiens
gtactacacgccttt

SEQ ID NO: 1674347 - DNA, 15 bp, Homo sapiens
cgtactacacgcctt

SEQ ID NO: 1674348 - DNA, 15 bp, Homo sapiens
tcgtactacacgcct

SEQ ID NO: 1674349 - DNA, 15 bp, Homo sapiens
gtcgtactacacgcc

SEQ ID NO: 1674350 - DNA, 15 bp, Homo sapiens
tgtcgtactacacgc

SEQ ID NO: 1674351 - DNA, 15 bp, Homo sapiens
ctgtcgtactacacg

SEQ ID NO: 1674352 - DNA, 15 bp, Homo sapiens
gctgtcgtactacac

SEQ ID NO: 1674353 - DNA, 15 bp, Homo sapiens
tgctgtcgtactaca

SEQ ID NO: 1674354 - DNA, 15 bp, Homo sapiens
ctgctgtcgtactac

SEQ ID NO: 1674355 - DNA, 15 bp, Homo sapiens
cctgctgtcgtacta

SEQ ID NO: 1674356 - DNA, 15 bp, Homo sapiens
gcctgctgtcgtact

SEQ ID NO: 1674357 - DNA, 15 bp, Homo sapiens
agcctgctgtcgtac

SEQ ID NO: 1674358 - DNA, 15 bp, Homo sapiens
tagcctgctgtcgta

SEQ ID NO: 1674359 - DNA, 15 bp, Homo sapiens
ttagcctgctgtcgt

SEQ ID NO: 1674360 - DNA, 15 bp, Homo sapiens
attagcctgctgtcg

SEQ ID NO: 1674361 - DNA, 15 bp, Homo sapiens
aattagcctgctgtc

SEQ ID NO: 1674362 - DNA, 15 bp, Homo sapiens
aaattagcctgctgt

SEQ ID NO: 1674363 - DNA, 15 bp, Homo sapiens
aaaattagcctgctg

SEQ ID NO: 1674364 - DNA, 15 bp, Homo sapiens
aaaaattagcctgct

SEQ ID NO: 1674365 - DNA, 15 bp, Homo sapiens
caaaaattagcctgc

SEQ ID NO: 1674366 - DNA, 15 bp, Homo sapiens
acaaaaattagcctg

SEQ ID NO: 1674367 - DNA, 15 bp, Homo sapiens
tacaaaaattagcct

SEQ ID NO: 1674368 - DNA, 15 bp, Homo sapiens
ttaaatacaaaaatt

SEQ ID NO: 1674369 - DNA, 15 bp, Homo sapiens
attaaatacaaaaat

SEQ ID NO: 1674370 - DNA, 15 bp, Homo sapiens
aattaaatacaaaaa

SEQ ID NO: 1674371 - DNA, 15 bp, Homo sapiens
aaattaaatacaaaa

SEQ ID NO: 1674372 - DNA, 15 bp, Homo sapiens
taaattaaatacaaa

SEQ ID NO: 1674373 - DNA, 15 bp, Homo sapiens
ctaaattaaatacaa

SEQ ID NO: 1674374 - DNA, 15 bp, Homo sapiens
actaaattaaataca

SEQ ID NO: 1674375 - DNA, 15 bp, Homo sapiens
tactaaattaaatac

SEQ ID NO: 1674376 - DNA, 15 bp, Homo sapiens
ctactaaattaaata

SEQ ID NO: 1674377 - DNA, 15 bp, Homo sapiens
tctactaaattaaat

SEQ ID NO: 1674378 - DNA, 15 bp, Homo sapiens
ctctactaaattaaa

SEQ ID NO: 1674379 - DNA, 15 bp, Homo sapiens
tctctactaaattaa

SEQ ID NO: 1674380 - DNA, 15 bp, Homo sapiens
ctctctactaaatta

SEQ ID NO: 1674381 - DNA, 15 bp, Homo sapiens
tctctctactaaatt

SEQ ID NO: 1674382 - DNA, 15 bp, Homo sapiens
ctctctctactaaat

SEQ ID NO: 1674383 - DNA, 15 bp, Homo sapiens
cctctctctactaaa

SEQ ID NO: 1674384 - DNA, 15 bp, Homo sapiens
ccctctctctactaa

SEQ ID NO: 1674385 - DNA, 15 bp, Homo sapiens
accctctctctacta

SEQ ID NO: 1674386 - DNA, 15 bp, Homo sapiens
aaccctctctctact

SEQ ID NO: 1674387 - DNA, 15 bp, Homo sapiens
aaaccctctctctac

SEQ ID NO: 1674388 - DNA, 15 bp, Homo sapiens
gaaaccctctctcta

SEQ ID NO: 1674389 - DNA, 15 bp, Homo sapiens
tgaaaccctctctct

SEQ ID NO: 1674390 - DNA, 15 bp, Homo sapiens
gtgaaaccctctctc

SEQ ID NO: 1674391 - DNA, 15 bp, Homo sapiens
ggtgaaaccctctct

SEQ ID NO: 1674392 - DNA, 15 bp, Homo sapiens
tggtgaaaccctctc

SEQ ID NO: 1674393 - DNA, 15 bp, Homo sapiens
atggtgaaaccctct

SEQ ID NO: 1674394 - DNA, 15 bp, Homo sapiens
aatggtgaaaccctc

SEQ ID NO: 1674395 - DNA, 15 bp, Homo sapiens
aaatggtgaaaccct

SEQ ID NO: 1674396 - DNA, 15 bp, Homo sapiens
caaaatggtgaaacc

SEQ ID NO: 1674397 - DNA, 15 bp, Homo sapiens
ccaaaatggtgaaac

SEQ ID NO: 1674398 - DNA, 15 bp, Homo sapiens
gccaaaatggtgaaa

SEQ ID NO: 1674399 - DNA, 15 bp, Homo sapiens
ggccaaaatggtgaa

SEQ ID NO: 1674400 - DNA, 15 bp, Homo sapiens
tggccaaaatggtga

SEQ ID NO: 1674401 - DNA, 15 bp, Homo sapiens
ctggccaaaatggtg

SEQ ID NO: 1674402 - DNA, 15 bp, Homo sapiens
cctggccaaaatggt

SEQ ID NO: 1674403 - DNA, 15 bp, Homo sapiens
gcctggccaaaatgg

SEQ ID NO: 1674404 - DNA, 15 bp, Homo sapiens
agcctggccaaaatg

SEQ ID NO: 1674405 - DNA, 15 bp, Homo sapiens
tagcctggccaaaat

SEQ ID NO: 1674406 - DNA, 15 bp, Homo sapiens
ctagcctggccaaaa

SEQ ID NO: 1674407 - DNA, 15 bp, Homo sapiens
actagcctggccaaa

SEQ ID NO: 1674408 - DNA, 15 bp, Homo sapiens
agagactagcctggc

SEQ ID NO: 1674409 - DNA, 15 bp, Homo sapiens
aagagactagcctgg

SEQ ID NO: 1674410 - DNA, 15 bp, Homo sapiens
taagagactagcctg

SEQ ID NO: 1674411 - DNA, 15 bp, Homo sapiens
ttaagagactagcct

SEQ ID NO: 1674412 - DNA, 15 bp, Homo sapiens
gttaagagactagcc

SEQ ID NO: 1674413 - DNA, 15 bp, Homo sapiens
agttaagagactagc

SEQ ID NO: 1674414 - DNA, 15 bp, Homo sapiens
gagttaagagactag

SEQ ID NO: 1674415 - DNA, 15 bp, Homo sapiens
ggagttaagagacta

SEQ ID NO: 1674416 - DNA, 15 bp, Homo sapiens
aggagttaagagact

SEQ ID NO: 1674417 - DNA, 15 bp, Homo sapiens
caggagttaagagac

SEQ ID NO: 1674418 - DNA, 15 bp, Homo sapiens
tcaggagttaagaga

SEQ ID NO: 1674419 - DNA, 15 bp, Homo sapiens
gtcaggagttaagag

SEQ ID NO: 1674420 - DNA, 15 bp, Homo sapiens
ggtcaggagttaaga

SEQ ID NO: 1674421 - DNA, 15 bp, Homo sapiens
aggtcaggagttaag

SEQ ID NO: 1674422 - DNA, 15 bp, Homo sapiens
gaggtcaggagttaa

SEQ ID NO: 1674423 - DNA, 15 bp, Homo sapiens
tgcccgtaatcccag

SEQ ID NO: 1674424 - DNA, 15 bp, Homo sapiens
atgcccgtaatccca

SEQ ID NO: 1674425 - DNA, 15 bp, Homo sapiens
tatgcccgtaatccc

SEQ ID NO: 1674426 - DNA, 15 bp, Homo sapiens
ttatgcccgtaatcc

SEQ ID NO: 1674427 - DNA, 15 bp, Homo sapiens
cttatgcccgtaatc

SEQ ID NO: 1674428 - DNA, 15 bp, Homo sapiens
acttatgcccgtaat

SEQ ID NO: 1674429 - DNA, 15 bp, Homo sapiens
gacttatgcccgtaa

SEQ ID NO: 1674430 - DNA, 15 bp, Homo sapiens
cgacttatgcccgta

SEQ ID NO: 1674431 - DNA, 15 bp, Homo sapiens
gcgacttatgcccgt

SEQ ID NO: 1674432 - DNA, 15 bp, Homo sapiens
ggcgacttatgcccg

SEQ ID NO: 1674433 - DNA, 15 bp, Homo sapiens
cggcgacttatgccc

SEQ ID NO: 1674434 - DNA, 15 bp, Homo sapiens
acggcgacttatgcc

SEQ ID NO: 1674435 - DNA, 15 bp, Homo sapiens
cacggcgacttatgc

SEQ ID NO: 1674436 - DNA, 15 bp, Homo sapiens
gcacggcgacttatg

SEQ ID NO: 1674437 - DNA, 15 bp, Homo sapiens
ggcacggcgacttat

SEQ ID NO: 1674438 - DNA, 15 bp, Homo sapiens
gggcacggcgactta

SEQ ID NO: 1674439 - DNA, 15 bp, Homo sapiens
tgggcacggcgactt

SEQ ID NO: 1674440 - DNA, 15 bp, Homo sapiens
ctgggcacggcgact

SEQ ID NO: 1674441 - DNA, 15 bp, Homo sapiens
gctgggcacggcgac

SEQ ID NO: 1674442 - DNA, 15 bp, Homo sapiens
ggctgggcacggcga

SEQ ID NO: 1674443 - DNA, 15 bp, Homo sapiens
gggctgggcacggcg

SEQ ID NO: 1674444 - DNA, 15 bp, Homo sapiens
ggggctgggcacggc

SEQ ID NO: 1674445 - DNA, 15 bp, Homo sapiens
gggggctgggcacgg

SEQ ID NO: 1674446 - DNA, 15 bp, Homo sapiens
tgggggctgggcacg

SEQ ID NO: 1674447 - DNA, 15 bp, Homo sapiens
ctgggggctgggcac

SEQ ID NO: 1674448 - DNA, 15 bp, Homo sapiens
gctgggggctgggca

SEQ ID NO: 1674449 - DNA, 15 bp, Homo sapiens
tgctgggggctgggc

SEQ ID NO: 1674450 - DNA, 15 bp, Homo sapiens
gtgctgggggctggg

SEQ ID NO: 1674451 - DNA, 15 bp, Homo sapiens
tgtgctgggggctgg

SEQ ID NO: 1674452 - DNA, 15 bp, Homo sapiens
ctgtgctgggggctg

SEQ ID NO: 1674453 - DNA, 15 bp, Homo sapiens
actgtgctgggggct

SEQ ID NO: 1674454 - DNA, 15 bp, Homo sapiens
tactgtgctgggggc

SEQ ID NO: 1674455 - DNA, 15 bp, Homo sapiens
atactgtgctggggg

SEQ ID NO: 1674456 - DNA, 15 bp, Homo sapiens
aatactgtgctgggg

SEQ ID NO: 1674457 - DNA, 15 bp, Homo sapiens
gaatactgtgctggg

SEQ ID NO: 1674458 - DNA, 15 bp, Homo sapiens
agaatactgtgctgg

SEQ ID NO: 1674459 - DNA, 15 bp, Homo sapiens
tagaatactgtgctg

SEQ ID NO: 1674460 - DNA, 15 bp, Homo sapiens
atagaatactgtgct

SEQ ID NO: 1674461 - DNA, 15 bp, Homo sapiens
tatagaatactgtgc

SEQ ID NO: 1674462 - DNA, 15 bp, Homo sapiens
ctatagaatactgtg

SEQ ID NO: 1674463 - DNA, 15 bp, Homo sapiens
cctatagaatactgt

SEQ ID NO: 1674464 - DNA, 15 bp, Homo sapiens
gcctatagaatactg

SEQ ID NO: 1674465 - DNA, 15 bp, Homo sapiens
tgcctatagaatact

SEQ ID NO: 1674466 - DNA, 15 bp, Homo sapiens
ttgcctatagaatac

SEQ ID NO: 1674467 - DNA, 15 bp, Homo sapiens
cttgcctatagaata

SEQ ID NO: 1674468 - DNA, 15 bp, Homo sapiens
tcttgcctatagaat

SEQ ID NO: 1674469 - DNA, 15 bp, Homo sapiens
ctcttgcctatagaa

SEQ ID NO: 1674470 - DNA, 15 bp, Homo sapiens
actcttgcctataga

SEQ ID NO: 1674471 - DNA, 15 bp, Homo sapiens
aactcttgcctatag

SEQ ID NO: 1674472 - DNA, 15 bp, Homo sapiens
gaactcttgcctata

SEQ ID NO: 1674473 - DNA, 15 bp, Homo sapiens
ggaactcttgcctat

SEQ ID NO: 1674474 - DNA, 15 bp, Homo sapiens
aggaactcttgccta

SEQ ID NO: 1674475 - DNA, 15 bp, Homo sapiens
taggaactcttgcct

SEQ ID NO: 1674476 - DNA, 15 bp, Homo sapiens
gtaggaactcttgcc

SEQ ID NO: 1674477 - DNA, 15 bp, Homo sapiens
agtaggaactcttgc

SEQ ID NO: 1674478 - DNA, 15 bp, Homo sapiens
cagtaggaactcttg

SEQ ID NO: 1674479 - DNA, 15 bp, Homo sapiens
gcagtaggaactctt

SEQ ID NO: 1674480 - DNA, 15 bp, Homo sapiens
agcagtaggaactct

SEQ ID NO: 1674481 - DNA, 15 bp, Homo sapiens
aagcagtaggaactc

SEQ ID NO: 1674482 - DNA, 15 bp, Homo sapiens
aaagcagtaggaact

SEQ ID NO: 1674483 - DNA, 15 bp, Homo sapiens
caaagcagtaggaac

SEQ ID NO: 1674484 - DNA, 15 bp, Homo sapiens
acaaagcagtaggaa

SEQ ID NO: 1674485 - DNA, 15 bp, Homo sapiens
aacaaagcagtagga

SEQ ID NO: 1674486 - DNA, 15 bp, Homo sapiens
caacaaagcagtagg

SEQ ID NO: 1674487 - DNA, 15 bp, Homo sapiens
ccaacaaagcagtag

SEQ ID NO: 1674488 - DNA, 15 bp, Homo sapiens
tccaacaaagcagta

SEQ ID NO: 1674489 - DNA, 15 bp, Homo sapiens
ttccaacaaagcagt

SEQ ID NO: 1674490 - DNA, 15 bp, Homo sapiens
tttccaacaaagcag

SEQ ID NO: 1674491 - DNA, 15 bp, Homo sapiens
atttccaacaaagca

SEQ ID NO: 1674492 - DNA, 15 bp, Homo sapiens
aatttccaacaaagc

SEQ ID NO: 1674493 - DNA, 15 bp, Homo sapiens
taatttccaacaaag

SEQ ID NO: 1674494 - DNA, 15 bp, Homo sapiens
ttaatttccaacaaa

SEQ ID NO: 1674495 - DNA, 15 bp, Homo sapiens
tttaatttccaacaa

SEQ ID NO: 1674496 - DNA, 15 bp, Homo sapiens
gtttaatttccaaca

SEQ ID NO: 1674497 - DNA, 15 bp, Homo sapiens
agtttaatttccaac

SEQ ID NO: 1674498 - DNA, 15 bp, Homo sapiens
cagtttaatttccaa

SEQ ID NO: 1674499 - DNA, 15 bp, Homo sapiens
ccagtttaatttcca

SEQ ID NO: 1674500 - DNA, 15 bp, Homo sapiens
tccagtttaatttcc

SEQ ID NO: 1674501 - DNA, 15 bp, Homo sapiens
ttccagtttaatttc

SEQ ID NO: 1674502 - DNA, 15 bp, Homo sapiens
tttccagtttaattt

SEQ ID NO: 1674503 - DNA, 15 bp, Homo sapiens
gtttccagtttaatt

SEQ ID NO: 1674504 - DNA, 15 bp, Homo sapiens
agtttccagtttaat

SEQ ID NO: 1674505 - DNA, 15 bp, Homo sapiens
cagtttccagtttaa

SEQ ID NO: 1674506 - DNA, 15 bp, Homo sapiens
ccagtttccagttta

SEQ ID NO: 1674507 - DNA, 15 bp, Homo sapiens
accagtttccagttt

SEQ ID NO: 1674508 - DNA, 15 bp, Homo sapiens
aaccagtttccagtt

SEQ ID NO: 1674509 - DNA, 15 bp, Homo sapiens
aaaccagtttccagt

SEQ ID NO: 1674510 - DNA, 15 bp, Homo sapiens
aaaaccagtttccag

SEQ ID NO: 1674511 - DNA, 15 bp, Homo sapiens
aaaaaccagtttcca

SEQ ID NO: 1674512 - DNA, 15 bp, Homo sapiens
aaaaaaccagtttcc

SEQ ID NO: 1674513 - DNA, 15 bp, Homo sapiens
aaaaaaaccagtttc

SEQ ID NO: 1674514 - DNA, 15 bp, Homo sapiens
aaaaaaaaccagttt

SEQ ID NO: 1674515 - DNA, 15 bp, Homo sapiens
aaaaaaaaaccagtt

SEQ ID NO: 1674516 - DNA, 15 bp, Homo sapiens
aaaaaaaaaaccagt

SEQ ID NO: 1674517 - DNA, 15 bp, Homo sapiens
aaaaaaaaaaaccag

SEQ ID NO: 1674518 - DNA, 15 bp, Homo sapiens
aaaaaaaaaaaacca

SEQ ID NO: 1674519 - DNA, 15 bp, Homo sapiens
gaaaaaaaaaaaaac

SEQ ID NO: 1674520 - DNA, 15 bp, Homo sapiens
gagaaaaaaaaaaaa

SEQ ID NO: 1674521 - DNA, 15 bp, Homo sapiens
ggagaaaaaaaaaaa

SEQ ID NO: 1674522 - DNA, 15 bp, Homo sapiens
tggagaaaaaaaaaa

SEQ ID NO: 1674523 - DNA, 15 bp, Homo sapiens
ctggagaaaaaaaaa

SEQ ID NO: 1674524 - DNA, 15 bp, Homo sapiens
tctggagaaaaaaaa

SEQ ID NO: 1674525 - DNA, 15 bp, Homo sapiens
ttctggagaaaaaaa

SEQ ID NO: 1674526 - DNA, 15 bp, Homo sapiens
tttctggagaaaaaa

SEQ ID NO: 1674527 - DNA, 15 bp, Homo sapiens
ctttctggagaaaaa

SEQ ID NO: 1674528 - DNA, 15 bp, Homo sapiens
actttctggagaaaa

SEQ ID NO: 1674529 - DNA, 15 bp, Homo sapiens
gactttctggagaaa

SEQ ID NO: 1674530 - DNA, 15 bp, Homo sapiens
agactttctggagaa

SEQ ID NO: 1674531 - DNA, 15 bp, Homo sapiens
aagactttctggaga

SEQ ID NO: 1674532 - DNA, 15 bp, Homo sapiens
taagactttctggag

SEQ ID NO: 1674533 - DNA, 15 bp, Homo sapiens
ttaagactttctgga

SEQ ID NO: 1674534 - DNA, 15 bp, Homo sapiens
cttaagactttctgg

SEQ ID NO: 1674535 - DNA, 15 bp, Homo sapiens
gcttaagactttctg

SEQ ID NO: 1674536 - DNA, 15 bp, Homo sapiens
agcttaagactttct

SEQ ID NO: 1674537 - DNA, 15 bp, Homo sapiens
cagcttaagactttc

SEQ ID NO: 1674538 - DNA, 15 bp, Homo sapiens
acagcttaagacttt

SEQ ID NO: 1674539 - DNA, 15 bp, Homo sapiens
aacagcttaagactt

SEQ ID NO: 1674540 - DNA, 15 bp, Homo sapiens
taacagcttaagact

SEQ ID NO: 1674541 - DNA, 15 bp, Homo sapiens
ataacagcttaagac

SEQ ID NO: 1674542 - DNA, 15 bp, Homo sapiens
cataacagcttaaga

SEQ ID NO: 1674543 - DNA, 15 bp, Homo sapiens
ccataacagcttaag

SEQ ID NO: 1674544 - DNA, 15 bp, Homo sapiens
cccataacagcttaa

SEQ ID NO: 1674545 - DNA, 15 bp, Homo sapiens
gcccataacagctta

SEQ ID NO: 1674546 - DNA, 15 bp, Homo sapiens
ggcccataacagctt

SEQ ID NO: 1674547 - DNA, 15 bp, Homo sapiens
gggcccataacagct

SEQ ID NO: 1674548 - DNA, 15 bp, Homo sapiens
tgggcccataacagc

SEQ ID NO: 1674549 - DNA, 15 bp, Homo sapiens
ctgggcccataacag

SEQ ID NO: 1674550 - DNA, 15 bp, Homo sapiens
tctgggcccataaca

SEQ ID NO: 1674551 - DNA, 15 bp, Homo sapiens
atctgggcccataac

SEQ ID NO: 1674552 - DNA, 15 bp, Homo sapiens
catctgggcccataa

SEQ ID NO: 1674553 - DNA, 15 bp, Homo sapiens
ccatctgggcccata

SEQ ID NO: 1674554 - DNA, 15 bp, Homo sapiens
accatctgggcccat

SEQ ID NO: 1674555 - DNA, 15 bp, Homo sapiens
aaccatctgggccca

SEQ ID NO: 1674556 - DNA, 15 bp, Homo sapiens
taaccatctgggccc

SEQ ID NO: 1674557 - DNA, 15 bp, Homo sapiens
ataaccatctgggcc

SEQ ID NO: 1674558 - DNA, 15 bp, Homo sapiens
aataaccatctgggc

SEQ ID NO: 1674559 - DNA, 15 bp, Homo sapiens
gaataaccatctggg

SEQ ID NO: 1674560 - DNA, 15 bp, Homo sapiens
tgaataaccatctgg

SEQ ID NO: 1674561 - DNA, 15 bp, Homo sapiens
ctgaataaccatctg

SEQ ID NO: 1674562 - DNA, 15 bp, Homo sapiens
actgaataaccatct

SEQ ID NO: 1674563 - DNA, 15 bp, Homo sapiens
tactgaataaccatc

SEQ ID NO: 1674564 - DNA, 15 bp, Homo sapiens
atactgaataaccat

SEQ ID NO: 1674565 - DNA, 15 bp, Homo sapiens
tatactgaataacca

SEQ ID NO: 1674566 - DNA, 15 bp, Homo sapiens
atatactgaataacc

SEQ ID NO: 1674567 - DNA, 15 bp, Homo sapiens
catatactgaataac

SEQ ID NO: 1674568 - DNA, 15 bp, Homo sapiens
tcatatactgaataa

SEQ ID NO: 1674569 - DNA, 15 bp, Homo sapiens
ttcatatactgaata

SEQ ID NO: 1674570 - DNA, 15 bp, Homo sapiens
gttcatatactgaat

SEQ ID NO: 1674571 - DNA, 15 bp, Homo sapiens
agttcatatactgaa

SEQ ID NO: 1674572 - DNA, 15 bp, Homo sapiens
aagttcatatactga

SEQ ID NO: 1674573 - DNA, 15 bp, Homo sapiens
aaagttcatatactg

SEQ ID NO: 1674574 - DNA, 15 bp, Homo sapiens
aaaagttcatatact

SEQ ID NO: 1674575 - DNA, 15 bp, Homo sapiens
aaaaagttcatatac

SEQ ID NO: 1674576 - DNA, 15 bp, Homo sapiens
aaaaaagttcatata

SEQ ID NO: 1674577 - DNA, 15 bp, Homo sapiens
aaaaaaagttcatat

SEQ ID NO: 1674578 - DNA, 15 bp, Homo sapiens
aaaaaaaagttcata

SEQ ID NO: 1674579 - DNA, 15 bp, Homo sapiens
aaaaaaaaagttcat

SEQ ID NO: 1674580 - DNA, 15 bp, Homo sapiens
tgtctaaaaaaaaaa

SEQ ID NO: 1674581 - DNA, 15 bp, Homo sapiens
ctgtctaaaaaaaaa

SEQ ID NO: 1674582 - DNA, 15 bp, Homo sapiens
actgtctaaaaaaaa

SEQ ID NO: 1674583 - DNA, 15 bp, Homo sapiens
cactgtctaaaaaaa

SEQ ID NO: 1674584 - DNA, 15 bp, Homo sapiens
acactgtctaaaaaa

SEQ ID NO: 1674585 - DNA, 15 bp, Homo sapiens
gacactgtctaaaaa

SEQ ID NO: 1674586 - DNA, 15 bp, Homo sapiens
agacactgtctaaaa

SEQ ID NO: 1674587 - DNA, 15 bp, Homo sapiens
aagacactgtctaaa

SEQ ID NO: 1674588 - DNA, 15 bp, Homo sapiens
caagacactgtctaa

SEQ ID NO: 1674589 - DNA, 15 bp, Homo sapiens
gcaagacactgtcta

SEQ ID NO: 1674590 - DNA, 15 bp, Homo sapiens
agcaagacactgtct

SEQ ID NO: 1674591 - DNA, 15 bp, Homo sapiens
gagcaagacactgtc

SEQ ID NO: 1674592 - DNA, 15 bp, Homo sapiens
tgagcaagacactgt

SEQ ID NO: 1674593 - DNA, 15 bp, Homo sapiens
ctgagcaagacactg

SEQ ID NO: 1674594 - DNA, 15 bp, Homo sapiens
gctgagcaagacact

SEQ ID NO: 1674595 - DNA, 15 bp, Homo sapiens
ggctgagcaagacac

SEQ ID NO: 1674596 - DNA, 15 bp, Homo sapiens
tggctgagcaagaca

SEQ ID NO: 1674597 - DNA, 15 bp, Homo sapiens
gtggctgagcaagac

SEQ ID NO: 1674598 - DNA, 15 bp, Homo sapiens
ggtggctgagcaaga

SEQ ID NO: 1674599 - DNA, 15 bp, Homo sapiens
gggtggctgagcaag

SEQ ID NO: 1674600 - DNA, 15 bp, Homo sapiens
tgggtggctgagcaa

SEQ ID NO: 1674601 - DNA, 15 bp, Homo sapiens
ctgggtggctgagca

SEQ ID NO: 1674602 - DNA, 15 bp, Homo sapiens
cctgggtggctgagc

SEQ ID NO: 1674603 - DNA, 15 bp, Homo sapiens
gcctgggtggctgag

SEQ ID NO: 1674604 - DNA, 15 bp, Homo sapiens
agcctgggtggctga

SEQ ID NO: 1674605 - DNA, 15 bp, Homo sapiens
cagcctgggtggctg

SEQ ID NO: 1674606 - DNA, 15 bp, Homo sapiens
ccagcctgggtggct

SEQ ID NO: 1674607 - DNA, 15 bp, Homo sapiens
tccagcctgggtggc

SEQ ID NO: 1674608 - DNA, 15 bp, Homo sapiens
ctccagcctgggtgg

SEQ ID NO: 1674609 - DNA, 15 bp, Homo sapiens
ctgcagtgagccgag

SEQ ID NO: 1674610 - DNA, 15 bp, Homo sapiens
gctgcagtgagccga

SEQ ID NO: 1674611 - DNA, 15 bp, Homo sapiens
tggctgcagtgagcc

SEQ ID NO: 1674612 - DNA, 15 bp, Homo sapiens
gtggctgcagtgagc

SEQ ID NO: 1674613 - DNA, 15 bp, Homo sapiens
agtggctgcagtgag

SEQ ID NO: 1674614 - DNA, 15 bp, Homo sapiens
cagtggctgcagtga

SEQ ID NO: 1674615 - DNA, 15 bp, Homo sapiens
gacagtggctgcagt

SEQ ID NO: 1674616 - DNA, 15 bp, Homo sapiens
agacagtggctgcag

SEQ ID NO: 1674617 - DNA, 15 bp, Homo sapiens
gagacagtggctgca

SEQ ID NO: 1674618 - DNA, 15 bp, Homo sapiens
ggagacagtggctgc

SEQ ID NO: 1674619 - DNA, 15 bp, Homo sapiens
gggagacagtggctg

SEQ ID NO: 1674620 - DNA, 15 bp, Homo sapiens
tgggagacagtggct

SEQ ID NO: 1674621 - DNA, 15 bp, Homo sapiens
ctgggagacagtggc

SEQ ID NO: 1674622 - DNA, 15 bp, Homo sapiens
cctgggagacagtgg

SEQ ID NO: 1674623 - DNA, 15 bp, Homo sapiens
acctgggagacagtg

SEQ ID NO: 1674624 - DNA, 15 bp, Homo sapiens
aacctgggagacagt

SEQ ID NO: 1674625 - DNA, 15 bp, Homo sapiens
gaacctgggagacag

SEQ ID NO: 1674626 - DNA, 15 bp, Homo sapiens
tgaacctgggagaca

SEQ ID NO: 1674627 - DNA, 15 bp, Homo sapiens
ttgaacctgggagac

SEQ ID NO: 1674628 - DNA, 15 bp, Homo sapiens
cttgaacctgggaga

SEQ ID NO: 1674629 - DNA, 15 bp, Homo sapiens
cgggagaatcacttg

SEQ ID NO: 1674630 - DNA, 15 bp, Homo sapiens
acgggagaatcactt

SEQ ID NO: 1674631 - DNA, 15 bp, Homo sapiens
gacgggagaatcact

SEQ ID NO: 1674632 - DNA, 15 bp, Homo sapiens
ggacgggagaatcac

SEQ ID NO: 1674633 - DNA, 15 bp, Homo sapiens
gggacgggagaatca

SEQ ID NO: 1674634 - DNA, 15 bp, Homo sapiens
tgggacgggagaatc

SEQ ID NO: 1674635 - DNA, 15 bp, Homo sapiens
ctgggacgggagaat

SEQ ID NO: 1674636 - DNA, 15 bp, Homo sapiens
gctgggacgggagaa

SEQ ID NO: 1674637 - DNA, 15 bp, Homo sapiens
ggctgggacgggaga

SEQ ID NO: 1674638 - DNA, 15 bp, Homo sapiens
aggctgggacgggag

SEQ ID NO: 1674639 - DNA, 15 bp, Homo sapiens
gaggctgggacggga

SEQ ID NO: 1674640 - DNA, 15 bp, Homo sapiens
ggaggctgggacggg

SEQ ID NO: 1674641 - DNA, 15 bp, Homo sapiens
tggaggctgggacgg

SEQ ID NO: 1674642 - DNA, 15 bp, Homo sapiens
ctggaggctgggacg

SEQ ID NO: 1674643 - DNA, 15 bp, Homo sapiens
tctggaggctgggac

SEQ ID NO: 1674644 - DNA, 15 bp, Homo sapiens
ttctggaggctggga

SEQ ID NO: 1674645 - DNA, 15 bp, Homo sapiens
gttctggaggctggg

SEQ ID NO: 1674646 - DNA, 15 bp, Homo sapiens
tgttctggaggctgg

SEQ ID NO: 1674647 - DNA, 15 bp, Homo sapiens
ctgttctggaggctg

SEQ ID NO: 1674648 - DNA, 15 bp, Homo sapiens
gctgttctggaggct

SEQ ID NO: 1674649 - DNA, 15 bp, Homo sapiens
agctgttctggaggc

SEQ ID NO: 1674650 - DNA, 15 bp, Homo sapiens
cagctgttctggagg

SEQ ID NO: 1674651 - DNA, 15 bp, Homo sapiens
ccagctgttctggag

SEQ ID NO: 1674652 - DNA, 15 bp, Homo sapiens
gccagctgttctgga

SEQ ID NO: 1674653 - DNA, 15 bp, Homo sapiens
tgccagctgttctgg

SEQ ID NO: 1674654 - DNA, 15 bp, Homo sapiens
atgccagctgttctg

SEQ ID NO: 1674655 - DNA, 15 bp, Homo sapiens
aatgccagctgttct

SEQ ID NO: 1674656 - DNA, 15 bp, Homo sapiens
taatgccagctgttc

SEQ ID NO: 1674657 - DNA, 15 bp, Homo sapiens
gtaatgccagctgtt

SEQ ID NO: 1674658 - DNA, 15 bp, Homo sapiens
tgtaatgccagctgt

SEQ ID NO: 1674659 - DNA, 15 bp, Homo sapiens
ctgtaatgccagctg

SEQ ID NO: 1674660 - DNA, 15 bp, Homo sapiens
cctgtaatgccagct

SEQ ID NO: 1674661 - DNA, 15 bp, Homo sapiens
tgcctgtaatgccag

SEQ ID NO: 1674662 - DNA, 15 bp, Homo sapiens
gtgcctgtaatgcca

SEQ ID NO: 1674663 - DNA, 15 bp, Homo sapiens
ggtgcctgtaatgcc

SEQ ID NO: 1674664 - DNA, 15 bp, Homo sapiens
gggtgcctgtaatgc

SEQ ID NO: 1674665 - DNA, 15 bp, Homo sapiens
cgggtgcctgtaatg

SEQ ID NO: 1674666 - DNA, 15 bp, Homo sapiens
tggcgggtgcctgta

SEQ ID NO: 1674667 - DNA, 15 bp, Homo sapiens
atggcgggtgcctgt

SEQ ID NO: 1674668 - DNA, 15 bp, Homo sapiens
gatggcgggtgcctg

SEQ ID NO: 1674669 - DNA, 15 bp, Homo sapiens
tgatggcgggtgcct

SEQ ID NO: 1674670 - DNA, 15 bp, Homo sapiens
atgatggcgggtgcc

SEQ ID NO: 1674671 - DNA, 15 bp, Homo sapiens
catgatggcgggtgc

SEQ ID NO: 1674672 - DNA, 15 bp, Homo sapiens
gcatgatggcgggtg

SEQ ID NO: 1674673 - DNA, 15 bp, Homo sapiens
ggcatgatggcgggt

SEQ ID NO: 1674674 - DNA, 15 bp, Homo sapiens
gggcatgatggcggg

SEQ ID NO: 1674675 - DNA, 15 bp, Homo sapiens
cgggcatgatggcgg

SEQ ID NO: 1674676 - DNA, 15 bp, Homo sapiens
ccgggcatgatggcg

SEQ ID NO: 1674677 - DNA, 15 bp, Homo sapiens
gccgggcatgatggc

SEQ ID NO: 1674678 - DNA, 15 bp, Homo sapiens
agccgggcatgatgg

SEQ ID NO: 1674679 - DNA, 15 bp, Homo sapiens
tagccgggcatgatg

SEQ ID NO: 1674680 - DNA, 15 bp, Homo sapiens
ttagccgggcatgat

SEQ ID NO: 1674681 - DNA, 15 bp, Homo sapiens
gttagccgggcatga

SEQ ID NO: 1674682 - DNA, 15 bp, Homo sapiens
agttagccgggcatg

SEQ ID NO: 1674683 - DNA, 15 bp, Homo sapiens
aagttagccgggcat

SEQ ID NO: 1674684 - DNA, 15 bp, Homo sapiens
aaagttagccgggca

SEQ ID NO: 1674685 - DNA, 15 bp, Homo sapiens
aaaagttagccgggc

SEQ ID NO: 1674686 - DNA, 15 bp, Homo sapiens
caaaagttagccggg

SEQ ID NO: 1674687 - DNA, 15 bp, Homo sapiens
acaaaagttagccgg

SEQ ID NO: 1674688 - DNA, 15 bp, Homo sapiens
tacaaaagttagccg

SEQ ID NO: 1674689 - DNA, 15 bp, Homo sapiens
atacaaaagttagcc

SEQ ID NO: 1674690 - DNA, 15 bp, Homo sapiens
aatacaaaagttagc

SEQ ID NO: 1674691 - DNA, 15 bp, Homo sapiens
aaatacaaaagttag

SEQ ID NO: 1674692 - DNA, 15 bp, Homo sapiens
aaaatacaaaagtta

SEQ ID NO: 1674693 - DNA, 15 bp, Homo sapiens
taaaatacaaaagtt

SEQ ID NO: 1674694 - DNA, 15 bp, Homo sapiens
ctaaaatacaaaagt

SEQ ID NO: 1674695 - DNA, 15 bp, Homo sapiens
actaaaatacaaaag

SEQ ID NO: 1674696 - DNA, 15 bp, Homo sapiens
tactaaaatacaaaa

SEQ ID NO: 1674697 - DNA, 15 bp, Homo sapiens
ctactaaaatacaaa

SEQ ID NO: 1674698 - DNA, 15 bp, Homo sapiens
tctactaaaatacaa

SEQ ID NO: 1674699 - DNA, 15 bp, Homo sapiens
ctctactaaaataca

SEQ ID NO: 1674700 - DNA, 15 bp, Homo sapiens
tctctactaaaatac

SEQ ID NO: 1674701 - DNA, 15 bp, Homo sapiens
gtctctactaaaata

SEQ ID NO: 1674702 - DNA, 15 bp, Homo sapiens
agtctctactaaaat

SEQ ID NO: 1674703 - DNA, 15 bp, Homo sapiens
cagtctctactaaaa

SEQ ID NO: 1674704 - DNA, 15 bp, Homo sapiens
ccagtctctactaaa

SEQ ID NO: 1674705 - DNA, 15 bp, Homo sapiens
cccagtctctactaa

SEQ ID NO: 1674706 - DNA, 15 bp, Homo sapiens
acccagtctctacta

SEQ ID NO: 1674707 - DNA, 15 bp, Homo sapiens
aacccagtctctact

SEQ ID NO: 1674708 - DNA, 15 bp, Homo sapiens
catggtgaaacccag

SEQ ID NO: 1674709 - DNA, 15 bp, Homo sapiens
acatggtgaaaccca

SEQ ID NO: 1674710 - DNA, 15 bp, Homo sapiens
tagcctggccaacat

SEQ ID NO: 1674711 - DNA, 15 bp, Homo sapiens
aagactagcctggcc

SEQ ID NO: 1674712 - DNA, 15 bp, Homo sapiens
caagactagcctggc

SEQ ID NO: 1674713 - DNA, 15 bp, Homo sapiens
tggtggatcacctga

SEQ ID NO: 1674714 - DNA, 15 bp, Homo sapiens
ctggtggatcacctg

SEQ ID NO: 1674715 - DNA, 15 bp, Homo sapiens
gctggtggatcacct

SEQ ID NO: 1674716 - DNA, 15 bp, Homo sapiens
ggctggtggatcacc

SEQ ID NO: 1674717 - DNA, 15 bp, Homo sapiens
aaggctggtggatca

SEQ ID NO: 1674718 - DNA, 15 bp, Homo sapiens
caaggctggtggatc

SEQ ID NO: 1674719 - DNA, 15 bp, Homo sapiens
ccaaggctggtggat

SEQ ID NO: 1674720 - DNA, 15 bp, Homo sapiens
gccaaggctggtgga

SEQ ID NO: 1674721 - DNA, 15 bp, Homo sapiens
ggccaaggctggtgg

SEQ ID NO: 1674722 - DNA, 15 bp, Homo sapiens
aggccaaggctggtg

SEQ ID NO: 1674723 - DNA, 15 bp, Homo sapiens
gaggccaaggctggt

SEQ ID NO: 1674724 - DNA, 15 bp, Homo sapiens
ggaggccaaggctgg

SEQ ID NO: 1674725 - DNA, 15 bp, Homo sapiens
gggaggccaaggctg

SEQ ID NO: 1674726 - DNA, 15 bp, Homo sapiens
tgggaggccaaggct

SEQ ID NO: 1674727 - DNA, 15 bp, Homo sapiens
ccttgggaggccaag

SEQ ID NO: 1674728 - DNA, 15 bp, Homo sapiens
accttgggaggccaa

SEQ ID NO: 1674729 - DNA, 15 bp, Homo sapiens
caccttgggaggcca

SEQ ID NO: 1674730 - DNA, 15 bp, Homo sapiens
gcaccttgggaggcc

SEQ ID NO: 1674731 - DNA, 15 bp, Homo sapiens
tagcaccttgggagg

SEQ ID NO: 1674732 - DNA, 15 bp, Homo sapiens
ctagcaccttgggag

SEQ ID NO: 1674733 - DNA, 15 bp, Homo sapiens
cctagcaccttggga

SEQ ID NO: 1674734 - DNA, 15 bp, Homo sapiens
tcctagcaccttggg

SEQ ID NO: 1674735 - DNA, 15 bp, Homo sapiens
atcctagcaccttgg

SEQ ID NO: 1674736 - DNA, 15 bp, Homo sapiens
aatcctagcaccttg

SEQ ID NO: 1674737 - DNA, 15 bp, Homo sapiens
taatcctagcacctt

SEQ ID NO: 1674738 - DNA, 15 bp, Homo sapiens
gtaatcctagcacct

SEQ ID NO: 1674739 - DNA, 15 bp, Homo sapiens
tgtaatcctagcacc

SEQ ID NO: 1674740 - DNA, 15 bp, Homo sapiens
acctgtaatcctagc

SEQ ID NO: 1674741 - DNA, 15 bp, Homo sapiens
cacctgtaatcctag

SEQ ID NO: 1674742 - DNA, 15 bp, Homo sapiens
cggctcacacctgta

SEQ ID NO: 1674743 - DNA, 15 bp, Homo sapiens
gcggctcacacctgt

SEQ ID NO: 1674744 - DNA, 15 bp, Homo sapiens
ggcggctcacacctg

SEQ ID NO: 1674745 - DNA, 15 bp, Homo sapiens
cggcggctcacacct

SEQ ID NO: 1674746 - DNA, 15 bp, Homo sapiens
gcggcggctcacacc

SEQ ID NO: 1674747 - DNA, 15 bp, Homo sapiens
tgcggcggctcacac

SEQ ID NO: 1674748 - DNA, 15 bp, Homo sapiens
gtgcggcggctcaca

SEQ ID NO: 1674749 - DNA, 15 bp, Homo sapiens
ggtgcggcggctcac

SEQ ID NO: 1674750 - DNA, 15 bp, Homo sapiens
gggtgcggcggctca

SEQ ID NO: 1674751 - DNA, 15 bp, Homo sapiens
cgggtgcggcggctc

SEQ ID NO: 1674752 - DNA, 15 bp, Homo sapiens
acgggtgcggcggct

SEQ ID NO: 1674753 - DNA, 15 bp, Homo sapiens
gacgggtgcggcggc

SEQ ID NO: 1674754 - DNA, 15 bp, Homo sapiens
ggacgggtgcggcgg

SEQ ID NO: 1674755 - DNA, 15 bp, Homo sapiens
gggacgggtgcggcg

SEQ ID NO: 1674756 - DNA, 15 bp, Homo sapiens
tgggacgggtgcggc

SEQ ID NO: 1674757 - DNA, 15 bp, Homo sapiens
ctgggacgggtgcgg

SEQ ID NO: 1674758 - DNA, 15 bp, Homo sapiens
actgggacgggtgcg

SEQ ID NO: 1674759 - DNA, 15 bp, Homo sapiens
tactgggacgggtgc

SEQ ID NO: 1674760 - DNA, 15 bp, Homo sapiens
gcaggatgtttagca

SEQ ID NO: 1674761 - DNA, 15 bp, Homo sapiens
caggatgtttagcag

SEQ ID NO: 1674762 - DNA, 15 bp, Homo sapiens
aggatgtttagcagc

SEQ ID NO: 1674763 - DNA, 15 bp, Homo sapiens
ggatgtttagcagca

SEQ ID NO: 1674764 - DNA, 15 bp, Homo sapiens
gatgtttagcagcat

SEQ ID NO: 1674765 - DNA, 15 bp, Homo sapiens
atgtttagcagcatc

SEQ ID NO: 1674766 - DNA, 15 bp, Homo sapiens
tgtttagcagcatct

SEQ ID NO: 1674767 - DNA, 15 bp, Homo sapiens
gtttagcagcatctc

SEQ ID NO: 1674768 - DNA, 15 bp, Homo sapiens
tttagcagcatctct

SEQ ID NO: 1674769 - DNA, 15 bp, Homo sapiens
ttagcagcatctctg

SEQ ID NO: 1674770 - DNA, 15 bp, Homo sapiens
tagcagcatctctgg

SEQ ID NO: 1674771 - DNA, 15 bp, Homo sapiens
agcagcatctctggc

SEQ ID NO: 1674772 - DNA, 15 bp, Homo sapiens
gcagcatctctggcc

SEQ ID NO: 1674773 - DNA, 15 bp, Homo sapiens
cagcatctctggcct

SEQ ID NO: 1674774 - DNA, 15 bp, Homo sapiens
agcatctctggcctc

SEQ ID NO: 1674775 - DNA, 15 bp, Homo sapiens
gcatctctggcctct

SEQ ID NO: 1674776 - DNA, 15 bp, Homo sapiens
catctctggcctcta

SEQ ID NO: 1674777 - DNA, 15 bp, Homo sapiens
atctctggcctctac

SEQ ID NO: 1674778 - DNA, 15 bp, Homo sapiens
tctctggcctctacc

SEQ ID NO: 1674779 - DNA, 15 bp, Homo sapiens
ctctggcctctaccc

SEQ ID NO: 1674780 - DNA, 15 bp, Homo sapiens
tctggcctctaccca

SEQ ID NO: 1674781 - DNA, 15 bp, Homo sapiens
ctggcctctacccac

SEQ ID NO: 1674782 - DNA, 15 bp, Homo sapiens
tggcctctacccacc

SEQ ID NO: 1674783 - DNA, 15 bp, Homo sapiens
ggcctctacccacca

SEQ ID NO: 1674784 - DNA, 15 bp, Homo sapiens
gcctctacccaccag

SEQ ID NO: 1674785 - DNA, 15 bp, Homo sapiens
cctctacccaccagc

SEQ ID NO: 1674786 - DNA, 15 bp, Homo sapiens
ctctacccaccagca

SEQ ID NO: 1674787 - DNA, 15 bp, Homo sapiens
tctacccaccagcac

SEQ ID NO: 1674788 - DNA, 15 bp, Homo sapiens
ctacccaccagcacc

SEQ ID NO: 1674789 - DNA, 15 bp, Homo sapiens
tacccaccagcacct

SEQ ID NO: 1674790 - DNA, 15 bp, Homo sapiens
acccaccagcacctc

SEQ ID NO: 1674791 - DNA, 15 bp, Homo sapiens
cccaccagcacctcc

SEQ ID NO: 1674792 - DNA, 15 bp, Homo sapiens
ccaccagcacctccc

SEQ ID NO: 1674793 - DNA, 15 bp, Homo sapiens
caccagcacctcccc

SEQ ID NO: 1674794 - DNA, 15 bp, Homo sapiens
accagcacctcccca

SEQ ID NO: 1674795 - DNA, 15 bp, Homo sapiens
ccagcacctccccag

SEQ ID NO: 1674796 - DNA, 15 bp, Homo sapiens
cagcacctccccagt

SEQ ID NO: 1674797 - DNA, 15 bp, Homo sapiens
agcacctccccagtt

SEQ ID NO: 1674798 - DNA, 15 bp, Homo sapiens
gcacctccccagttg

SEQ ID NO: 1674799 - DNA, 15 bp, Homo sapiens
cacctccccagttgt

SEQ ID NO: 1674800 - DNA, 15 bp, Homo sapiens
acctccccagttgtg

SEQ ID NO: 1674801 - DNA, 15 bp, Homo sapiens
cctccccagttgtga

SEQ ID NO: 1674802 - DNA, 15 bp, Homo sapiens
ctccccagttgtgac

SEQ ID NO: 1674803 - DNA, 15 bp, Homo sapiens
tccccagttgtgaca

SEQ ID NO: 1674804 - DNA, 15 bp, Homo sapiens
ccccagttgtgacac

SEQ ID NO: 1674805 - DNA, 15 bp, Homo sapiens
cccagttgtgacacc

SEQ ID NO: 1674806 - DNA, 15 bp, Homo sapiens
ccagttgtgacaccc

SEQ ID NO: 1674807 - DNA, 15 bp, Homo sapiens
cagttgtgacaccca

SEQ ID NO: 1674808 - DNA, 15 bp, Homo sapiens
agttgtgacacccag

SEQ ID NO: 1674809 - DNA, 15 bp, Homo sapiens
gttgtgacacccaga

SEQ ID NO: 1674810 - DNA, 15 bp, Homo sapiens
ttgtgacacccagaa

SEQ ID NO: 1674811 - DNA, 15 bp, Homo sapiens
tgtgacacccagaaa

SEQ ID NO: 1674812 - DNA, 15 bp, Homo sapiens
gtgacacccagaaat

SEQ ID NO: 1674813 - DNA, 15 bp, Homo sapiens
tgacacccagaaatg

SEQ ID NO: 1674814 - DNA, 15 bp, Homo sapiens
gacacccagaaatgt

SEQ ID NO: 1674815 - DNA, 15 bp, Homo sapiens
acacccagaaatgtc

SEQ ID NO: 1674816 - DNA, 15 bp, Homo sapiens
cacccagaaatgtct

SEQ ID NO: 1674817 - DNA, 15 bp, Homo sapiens
acccagaaatgtctt

SEQ ID NO: 1674818 - DNA, 15 bp, Homo sapiens
cccagaaatgtcttt

SEQ ID NO: 1674819 - DNA, 15 bp, Homo sapiens
ccagaaatgtcttta

SEQ ID NO: 1674820 - DNA, 15 bp, Homo sapiens
cagaaatgtctttag

SEQ ID NO: 1674821 - DNA, 15 bp, Homo sapiens
agaaatgtctttaga

SEQ ID NO: 1674822 - DNA, 15 bp, Homo sapiens
gaaatgtctttagat

SEQ ID NO: 1674823 - DNA, 15 bp, Homo sapiens
aaatgtctttagatc

SEQ ID NO: 1674824 - DNA, 15 bp, Homo sapiens
aatgtctttagatct

SEQ ID NO: 1674825 - DNA, 15 bp, Homo sapiens
atgtctttagatctt

SEQ ID NO: 1674826 - DNA, 15 bp, Homo sapiens
tgtctttagatcttg

SEQ ID NO: 1674827 - DNA, 15 bp, Homo sapiens
gtctttagatcttgc

SEQ ID NO: 1674828 - DNA, 15 bp, Homo sapiens
tctttagatcttgcc

SEQ ID NO: 1674829 - DNA, 15 bp, Homo sapiens
ctttagatcttgcca

SEQ ID NO: 1674830 - DNA, 15 bp, Homo sapiens
tttagatcttgccaa

SEQ ID NO: 1674831 - DNA, 15 bp, Homo sapiens
ttagatcttgccaaa

SEQ ID NO: 1674832 - DNA, 15 bp, Homo sapiens
tagatcttgccaaat

SEQ ID NO: 1674833 - DNA, 15 bp, Homo sapiens
agatcttgccaaata

SEQ ID NO: 1674834 - DNA, 15 bp, Homo sapiens
gatcttgccaaatat

SEQ ID NO: 1674835 - DNA, 15 bp, Homo sapiens
atcttgccaaatatt

SEQ ID NO: 1674836 - DNA, 15 bp, Homo sapiens
tcttgccaaatattt

SEQ ID NO: 1674837 - DNA, 15 bp, Homo sapiens
cttgccaaatatttc

SEQ ID NO: 1674838 - DNA, 15 bp, Homo sapiens
ttgccaaatatttcc

SEQ ID NO: 1674839 - DNA, 15 bp, Homo sapiens
tgccaaatatttcca

SEQ ID NO: 1674840 - DNA, 15 bp, Homo sapiens
gccaaatatttccag

SEQ ID NO: 1674841 - DNA, 15 bp, Homo sapiens
ccaaatatttccagg

SEQ ID NO: 1674842 - DNA, 15 bp, Homo sapiens
caaatatttccagga

SEQ ID NO: 1674843 - DNA, 15 bp, Homo sapiens
atcgaaagtgtccac

SEQ ID NO: 1674844 - DNA, 15 bp, Homo sapiens
tcgaaagtgtccaca

SEQ ID NO: 1674845 - DNA, 15 bp, Homo sapiens
cgaaagtgtccacac

SEQ ID NO: 1674846 - DNA, 15 bp, Homo sapiens
gaaagtgtccacacc

SEQ ID NO: 1674847 - DNA, 15 bp, Homo sapiens
aaagtgtccacaccg

SEQ ID NO: 1674848 - DNA, 15 bp, Homo sapiens
aagtgtccacaccga

SEQ ID NO: 1674849 - DNA, 15 bp, Homo sapiens
agtgtccacaccgac

SEQ ID NO: 1674850 - DNA, 15 bp, Homo sapiens
gtgtccacaccgact

SEQ ID NO: 1674851 - DNA, 15 bp, Homo sapiens
tgtccacaccgactc

SEQ ID NO: 1674852 - DNA, 15 bp, Homo sapiens
gtccacaccgactca

SEQ ID NO: 1674853 - DNA, 15 bp, Homo sapiens
tccacaccgactcat

SEQ ID NO: 1674854 - DNA, 15 bp, Homo sapiens
ccacaccgactcatg

SEQ ID NO: 1674855 - DNA, 15 bp, Homo sapiens
cacaccgactcatgg

SEQ ID NO: 1674856 - DNA, 15 bp, Homo sapiens
acaccgactcatggt

SEQ ID NO: 1674857 - DNA, 15 bp, Homo sapiens
caccgactcatggtc

SEQ ID NO: 1674858 - DNA, 15 bp, Homo sapiens
accgactcatggtca

SEQ ID NO: 1674859 - DNA, 15 bp, Homo sapiens
ccgactcatggtcag

SEQ ID NO: 1674860 - DNA, 15 bp, Homo sapiens
cgactcatggtcagc

SEQ ID NO: 1674861 - DNA, 15 bp, Homo sapiens
gactcatggtcagct

SEQ ID NO: 1674862 - DNA, 15 bp, Homo sapiens
actcatggtcagctg

SEQ ID NO: 1674863 - DNA, 15 bp, Homo sapiens
ctcatggtcagctgt

SEQ ID NO: 1674864 - DNA, 15 bp, Homo sapiens
tcatggtcagctgta

SEQ ID NO: 1674865 - DNA, 15 bp, Homo sapiens
catggtcagctgtaa

SEQ ID NO: 1674866 - DNA, 15 bp, Homo sapiens
atggtcagctgtaac

SEQ ID NO: 1674867 - DNA, 15 bp, Homo sapiens
tggtcagctgtaacc

SEQ ID NO: 1674868 - DNA, 15 bp, Homo sapiens
ggtcagctgtaacct

SEQ ID NO: 1674869 - DNA, 15 bp, Homo sapiens
gtcagctgtaacctg

SEQ ID NO: 1674870 - DNA, 15 bp, Homo sapiens
tcagctgtaacctgt

SEQ ID NO: 1674871 - DNA, 15 bp, Homo sapiens
cagctgtaacctgtg

SEQ ID NO: 1674872 - DNA, 15 bp, Homo sapiens
agctgtaacctgtgc

SEQ ID NO: 1674873 - DNA, 15 bp, Homo sapiens
gctgtaacctgtgcc

SEQ ID NO: 1674874 - DNA, 15 bp, Homo sapiens
ctgtaacctgtgcct

SEQ ID NO: 1674875 - DNA, 15 bp, Homo sapiens
tgtaacctgtgcctc

SEQ ID NO: 1674876 - DNA, 15 bp, Homo sapiens
gtaacctgtgcctcg

SEQ ID NO: 1674877 - DNA, 15 bp, Homo sapiens
taacctgtgcctcgt

SEQ ID NO: 1674878 - DNA, 15 bp, Homo sapiens
aacctgtgcctcgtg

SEQ ID NO: 1674879 - DNA, 15 bp, Homo sapiens
acctgtgcctcgtgt

SEQ ID NO: 1674880 - DNA, 15 bp, Homo sapiens
cctgtgcctcgtgtg

SEQ ID NO: 1674881 - DNA, 15 bp, Homo sapiens
ctgtgcctcgtgtgg

SEQ ID NO: 1674882 - DNA, 15 bp, Homo sapiens
tgtgcctcgtgtggg

SEQ ID NO: 1674883 - DNA, 15 bp, Homo sapiens
gtgcctcgtgtgggg

SEQ ID NO: 1674884 - DNA, 15 bp, Homo sapiens
tgcctcgtgtgggga

SEQ ID NO: 1674885 - DNA, 15 bp, Homo sapiens
gcctcgtgtggggac

SEQ ID NO: 1674886 - DNA, 15 bp, Homo sapiens
cctcgtgtggggacc

SEQ ID NO: 1674887 - DNA, 15 bp, Homo sapiens
ctcgtgtggggacca

SEQ ID NO: 1674888 - DNA, 15 bp, Homo sapiens
tcgtgtggggaccag

SEQ ID NO: 1674889 - DNA, 15 bp, Homo sapiens
cgtgtggggaccagg

SEQ ID NO: 1674890 - DNA, 15 bp, Homo sapiens
gtgtggggaccaggc

SEQ ID NO: 1674891 - DNA, 15 bp, Homo sapiens
tgtggggaccaggct

SEQ ID NO: 1674892 - DNA, 15 bp, Homo sapiens
gtggggaccaggctg

SEQ ID NO: 1674893 - DNA, 15 bp, Homo sapiens
ggggaccaggctgcc

SEQ ID NO: 1674894 - DNA, 15 bp, Homo sapiens
gggaccaggctgcca

SEQ ID NO: 1674895 - DNA, 15 bp, Homo sapiens
ggaccaggctgccat

SEQ ID NO: 1674896 - DNA, 15 bp, Homo sapiens
gaccaggctgccatg

SEQ ID NO: 1674897 - DNA, 15 bp, Homo sapiens
accaggctgccatgt

SEQ ID NO: 1674898 - DNA, 15 bp, Homo sapiens
ccaggctgccatgtg

SEQ ID NO: 1674899 - DNA, 15 bp, Homo sapiens
caggctgccatgtgt

SEQ ID NO: 1674900 - DNA, 15 bp, Homo sapiens
aggctgccatgtgta

SEQ ID NO: 1674901 - DNA, 15 bp, Homo sapiens
ggctgccatgtgtag

SEQ ID NO: 1674902 - DNA, 15 bp, Homo sapiens
gctgccatgtgtagt

SEQ ID NO: 1674903 - DNA, 15 bp, Homo sapiens
ctgccatgtgtagtc

SEQ ID NO: 1674904 - DNA, 15 bp, Homo sapiens
tgccatgtgtagtct

SEQ ID NO: 1674905 - DNA, 15 bp, Homo sapiens
gccatgtgtagtctg

SEQ ID NO: 1674906 - DNA, 15 bp, Homo sapiens
ccatgtgtagtctgg

SEQ ID NO: 1674907 - DNA, 15 bp, Homo sapiens
catgtgtagtctgga

SEQ ID NO: 1674908 - DNA, 15 bp, Homo sapiens
atgtgtagtctggac

SEQ ID NO: 1674909 - DNA, 15 bp, Homo sapiens
tgtgtagtctggaca

SEQ ID NO: 1674910 - DNA, 15 bp, Homo sapiens
gtgtagtctggacag

SEQ ID NO: 1674911 - DNA, 15 bp, Homo sapiens
tgtagtctggacagt

SEQ ID NO: 1674912 - DNA, 15 bp, Homo sapiens
gtagtctggacagtg

SEQ ID NO: 1674913 - DNA, 15 bp, Homo sapiens
tagtctggacagtgt

SEQ ID NO: 1674914 - DNA, 15 bp, Homo sapiens
agtctggacagtgta

SEQ ID NO: 1674915 - DNA, 15 bp, Homo sapiens
gtctggacagtgtag

SEQ ID NO: 1674916 - DNA, 15 bp, Homo sapiens
tctggacagtgtagg

SEQ ID NO: 1674917 - DNA, 15 bp, Homo sapiens
ctggacagtgtagga

SEQ ID NO: 1674918 - DNA, 15 bp, Homo sapiens
tggacagtgtaggag

SEQ ID NO: 1674919 - DNA, 15 bp, Homo sapiens
ggacagtgtaggagg

SEQ ID NO: 1674920 - DNA, 15 bp, Homo sapiens
gacagtgtaggaggt

SEQ ID NO: 1674921 - DNA, 15 bp, Homo sapiens
acagtgtaggaggtg

SEQ ID NO: 1674922 - DNA, 15 bp, Homo sapiens
cagtgtaggaggtgg

SEQ ID NO: 1674923 - DNA, 15 bp, Homo sapiens
agtgtaggaggtggc

SEQ ID NO: 1674924 - DNA, 15 bp, Homo sapiens
gtgtaggaggtggca

SEQ ID NO: 1674925 - DNA, 15 bp, Homo sapiens
tgtaggaggtggcag

SEQ ID NO: 1674926 - DNA, 15 bp, Homo sapiens
gtaggaggtggcaga

SEQ ID NO: 1674927 - DNA, 15 bp, Homo sapiens
taggaggtggcagag

SEQ ID NO: 1674928 - DNA, 15 bp, Homo sapiens
aggaggtggcagagc

SEQ ID NO: 1674929 - DNA, 15 bp, Homo sapiens
ggaggtggcagagct

SEQ ID NO: 1674930 - DNA, 15 bp, Homo sapiens
gaggtggcagagctc

SEQ ID NO: 1674931 - DNA, 15 bp, Homo sapiens
aggtggcagagctca

SEQ ID NO: 1674932 - DNA, 15 bp, Homo sapiens
ggtggcagagctcag

SEQ ID NO: 1674933 - DNA, 15 bp, Homo sapiens
gtggcagagctcagg

SEQ ID NO: 1674934 - DNA, 15 bp, Homo sapiens
tggcagagctcaggc

SEQ ID NO: 1674935 - DNA, 15 bp, Homo sapiens
ggcagagctcaggcc

SEQ ID NO: 1674936 - DNA, 15 bp, Homo sapiens
gcagagctcaggcct

SEQ ID NO: 1674937 - DNA, 15 bp, Homo sapiens
cagagctcaggcctg

SEQ ID NO: 1674938 - DNA, 15 bp, Homo sapiens
agagctcaggcctgt

SEQ ID NO: 1674939 - DNA, 15 bp, Homo sapiens
gagctcaggcctgtt

SEQ ID NO: 1674940 - DNA, 15 bp, Homo sapiens
agctcaggcctgttc

SEQ ID NO: 1674941 - DNA, 15 bp, Homo sapiens
gctcaggcctgttct

SEQ ID NO: 1674942 - DNA, 15 bp, Homo sapiens
ctcaggcctgttctg

SEQ ID NO: 1674943 - DNA, 15 bp, Homo sapiens
tcaggcctgttctgc

SEQ ID NO: 1674944 - DNA, 15 bp, Homo sapiens
caggcctgttctgcc

SEQ ID NO: 1674945 - DNA, 15 bp, Homo sapiens
aggcctgttctgccc

SEQ ID NO: 1674946 - DNA, 15 bp, Homo sapiens
ggcctgttctgccct

SEQ ID NO: 1674947 - DNA, 15 bp, Homo sapiens
gcctgttctgccctc

SEQ ID NO: 1674948 - DNA, 15 bp, Homo sapiens
cctgttctgccctcc

SEQ ID NO: 1674949 - DNA, 15 bp, Homo sapiens
ctgttctgccctcca

SEQ ID NO: 1674950 - DNA, 15 bp, Homo sapiens
tgttctgccctccag

SEQ ID NO: 1674951 - DNA, 15 bp, Homo sapiens
gttctgccctccagc

SEQ ID NO: 1674952 - DNA, 15 bp, Homo sapiens
ttctgccctccagcc

SEQ ID NO: 1674953 - DNA, 15 bp, Homo sapiens
tctgccctccagccc

SEQ ID NO: 1674954 - DNA, 15 bp, Homo sapiens
ctgccctccagccca

SEQ ID NO: 1674955 - DNA, 15 bp, Homo sapiens
tgccctccagcccag

SEQ ID NO: 1674956 - DNA, 15 bp, Homo sapiens
gccctccagcccaga

SEQ ID NO: 1674957 - DNA, 15 bp, Homo sapiens
ccctccagcccagag

SEQ ID NO: 1674958 - DNA, 15 bp, Homo sapiens
cctccagcccagaga

SEQ ID NO: 1674959 - DNA, 15 bp, Homo sapiens
ctccagcccagagag

SEQ ID NO: 1674960 - DNA, 15 bp, Homo sapiens
tccagcccagagagc

SEQ ID NO: 1674961 - DNA, 15 bp, Homo sapiens
ccagcccagagagcc

SEQ ID NO: 1674962 - DNA, 15 bp, Homo sapiens
cagcccagagagcca

SEQ ID NO: 1674963 - DNA, 15 bp, Homo sapiens
agcccagagagccac

SEQ ID NO: 1674964 - DNA, 15 bp, Homo sapiens
gcccagagagccacg

SEQ ID NO: 1674965 - DNA, 15 bp, Homo sapiens
cccagagagccacgt

SEQ ID NO: 1674966 - DNA, 15 bp, Homo sapiens
ccagagagccacgtc

SEQ ID NO: 1674967 - DNA, 15 bp, Homo sapiens
cagagagccacgtcg

SEQ ID NO: 1674968 - DNA, 15 bp, Homo sapiens
agagagccacgtcgt

SEQ ID NO: 1674969 - DNA, 15 bp, Homo sapiens
gagagccacgtcgtt

SEQ ID NO: 1674970 - DNA, 15 bp, Homo sapiens
agagccacgtcgtta

SEQ ID NO: 1674971 - DNA, 15 bp, Homo sapiens
gagccacgtcgttag

SEQ ID NO: 1674972 - DNA, 15 bp, Homo sapiens
agccacgtcgttaga

SEQ ID NO: 1674973 - DNA, 15 bp, Homo sapiens
gccacgtcgttagat

SEQ ID NO: 1674974 - DNA, 15 bp, Homo sapiens
ccacgtcgttagatg

SEQ ID NO: 1674975 - DNA, 15 bp, Homo sapiens
cacgtcgttagatgt

SEQ ID NO: 1674976 - DNA, 15 bp, Homo sapiens
acgtcgttagatgtc

SEQ ID NO: 1674977 - DNA, 15 bp, Homo sapiens
cgtcgttagatgtca

SEQ ID NO: 1674978 - DNA, 15 bp, Homo sapiens
gtcgttagatgtcat

SEQ ID NO: 1674979 - DNA, 15 bp, Homo sapiens
tcgttagatgtcatg

SEQ ID NO: 1674980 - DNA, 15 bp, Homo sapiens
cgttagatgtcatgg

SEQ ID NO: 1674981 - DNA, 15 bp, Homo sapiens
gttagatgtcatggg

SEQ ID NO: 1674982 - DNA, 15 bp, Homo sapiens
ttagatgtcatggga

SEQ ID NO: 1674983 - DNA, 15 bp, Homo sapiens
tagatgtcatgggag

SEQ ID NO: 1674984 - DNA, 15 bp, Homo sapiens
agatgtcatgggaga

SEQ ID NO: 1674985 - DNA, 15 bp, Homo sapiens
gatgtcatgggagac

SEQ ID NO: 1674986 - DNA, 15 bp, Homo sapiens
atgtcatgggagact

SEQ ID NO: 1674987 - DNA, 15 bp, Homo sapiens
tgtcatgggagactg

SEQ ID NO: 1674988 - DNA, 15 bp, Homo sapiens
gtcatgggagactgt

SEQ ID NO: 1674989 - DNA, 15 bp, Homo sapiens
tcatgggagactgtg

SEQ ID NO: 1674990 - DNA, 15 bp, Homo sapiens
catgggagactgtgg

SEQ ID NO: 1674991 - DNA, 15 bp, Homo sapiens
atgggagactgtggt

SEQ ID NO: 1674992 - DNA, 15 bp, Homo sapiens
tgggagactgtggtg

SEQ ID NO: 1674993 - DNA, 15 bp, Homo sapiens
gggagactgtggtgc

SEQ ID NO: 1674994 - DNA, 15 bp, Homo sapiens
ggagactgtggtgcc

SEQ ID NO: 1674995 - DNA, 15 bp, Homo sapiens
gagactgtggtgccc

SEQ ID NO: 1674996 - DNA, 15 bp, Homo sapiens
agactgtggtgcccc

SEQ ID NO: 1674997 - DNA, 15 bp, Homo sapiens
gactgtggtgccccg

SEQ ID NO: 1674998 - DNA, 15 bp, Homo sapiens
actgtggtgccccgg

SEQ ID NO: 1674999 - DNA, 15 bp, Homo sapiens
ctgtggtgccccggg

SEQ ID NO: 1675000 - DNA, 15 bp, Homo sapiens
tgtggtgccccggga

SEQ ID NO: 1675001 - DNA, 15 bp, Homo sapiens
gtggtgccccgggaa

SEQ ID NO: 1675002 - DNA, 15 bp, Homo sapiens
tggtgccccgggaat

SEQ ID NO: 1675003 - DNA, 15 bp, Homo sapiens
ggtgccccgggaatc

SEQ ID NO: 1675004 - DNA, 15 bp, Homo sapiens
gtgccccgggaatct

SEQ ID NO: 1675005 - DNA, 15 bp, Homo sapiens
tgccccgggaatctc

SEQ ID NO: 1675006 - DNA, 15 bp, Homo sapiens
gccccgggaatctca

SEQ ID NO: 1675007 - DNA, 15 bp, Homo sapiens
ccccgggaatctcac

SEQ ID NO: 1675008 - DNA, 15 bp, Homo sapiens
cccgggaatctcacg

SEQ ID NO: 1675009 - DNA, 15 bp, Homo sapiens
ccgggaatctcacga

SEQ ID NO: 1675010 - DNA, 15 bp, Homo sapiens
cgggaatctcacgaa

SEQ ID NO: 1675011 - DNA, 15 bp, Homo sapiens
gggaatctcacgaat

SEQ ID NO: 1675012 - DNA, 15 bp, Homo sapiens
ggaatctcacgaatt

SEQ ID NO: 1675013 - DNA, 15 bp, Homo sapiens
gaatctcacgaattt

SEQ ID NO: 1675014 - DNA, 15 bp, Homo sapiens
aatctcacgaatttg

SEQ ID NO: 1675015 - DNA, 15 bp, Homo sapiens
atctcacgaatttgc

SEQ ID NO: 1675016 - DNA, 15 bp, Homo sapiens
tctcacgaatttgcc

SEQ ID NO: 1675017 - DNA, 15 bp, Homo sapiens
ctcacgaatttgccc

SEQ ID NO: 1675018 - DNA, 15 bp, Homo sapiens
tcacgaatttgccca

SEQ ID NO: 1675019 - DNA, 15 bp, Homo sapiens
cacgaatttgcccac

SEQ ID NO: 1675020 - DNA, 15 bp, Homo sapiens
acgaatttgcccacg

SEQ ID NO: 1675021 - DNA, 15 bp, Homo sapiens
cgaatttgcccacgg

SEQ ID NO: 1675022 - DNA, 15 bp, Homo sapiens
gaatttgcccacggt

SEQ ID NO: 1675023 - DNA, 15 bp, Homo sapiens
aatttgcccacggta

SEQ ID NO: 1675024 - DNA, 15 bp, Homo sapiens
atttgcccacggtac

SEQ ID NO: 1675025 - DNA, 15 bp, Homo sapiens
tttgcccacggtact

SEQ ID NO: 1675026 - DNA, 15 bp, Homo sapiens
ttgcccacggtactc

SEQ ID NO: 1675027 - DNA, 15 bp, Homo sapiens
tgcccacggtactca

SEQ ID NO: 1675028 - DNA, 15 bp, Homo sapiens
gcccacggtactcag

SEQ ID NO: 1675029 - DNA, 15 bp, Homo sapiens
cccacggtactcagt

SEQ ID NO: 1675030 - DNA, 15 bp, Homo sapiens
ccacggtactcagtg

SEQ ID NO: 1675031 - DNA, 15 bp, Homo sapiens
cacggtactcagtgt

SEQ ID NO: 1675032 - DNA, 15 bp, Homo sapiens
acggtactcagtgtc

SEQ ID NO: 1675033 - DNA, 15 bp, Homo sapiens
cggtactcagtgtct

SEQ ID NO: 1675034 - DNA, 15 bp, Homo sapiens
ggtactcagtgtctg

SEQ ID NO: 1675035 - DNA, 15 bp, Homo sapiens
gtactcagtgtctgt

SEQ ID NO: 1675036 - DNA, 15 bp, Homo sapiens
tactcagtgtctgtc

SEQ ID NO: 1675037 - DNA, 15 bp, Homo sapiens
actcagtgtctgtcc

SEQ ID NO: 1675038 - DNA, 15 bp, Homo sapiens
ctcagtgtctgtcca

SEQ ID NO: 1675039 - DNA, 15 bp, Homo sapiens
tcagtgtctgtccaa

SEQ ID NO: 1675040 - DNA, 15 bp, Homo sapiens
cagtgtctgtccaat

SEQ ID NO: 1675041 - DNA, 15 bp, Homo sapiens
agtgtctgtccaatg

SEQ ID NO: 1675042 - DNA, 15 bp, Homo sapiens
gtgtctgtccaatgc

SEQ ID NO: 1675043 - DNA, 15 bp, Homo sapiens
tgtctgtccaatgct

SEQ ID NO: 1675044 - DNA, 15 bp, Homo sapiens
gtctgtccaatgcta

SEQ ID NO: 1675045 - DNA, 15 bp, Homo sapiens
tctgtccaatgctat

SEQ ID NO: 1675046 - DNA, 15 bp, Homo sapiens
ctgtccaatgctatg

SEQ ID NO: 1675047 - DNA, 15 bp, Homo sapiens
tgtccaatgctatgg

SEQ ID NO: 1675048 - DNA, 15 bp, Homo sapiens
gtccaatgctatggg

SEQ ID NO: 1675049 - DNA, 15 bp, Homo sapiens
tccaatgctatggga

SEQ ID NO: 1675050 - DNA, 15 bp, Homo sapiens
ccaatgctatgggag

SEQ ID NO: 1675051 - DNA, 15 bp, Homo sapiens
caatgctatgggagt

SEQ ID NO: 1675052 - DNA, 15 bp, Homo sapiens
aatgctatgggagtc

SEQ ID NO: 1675053 - DNA, 15 bp, Homo sapiens
atgctatgggagtcc

SEQ ID NO: 1675054 - DNA, 15 bp, Homo sapiens
tgctatgggagtcca

SEQ ID NO: 1675055 - DNA, 15 bp, Homo sapiens
gctatgggagtccag

SEQ ID NO: 1675056 - DNA, 15 bp, Homo sapiens
ctatgggagtccagg

SEQ ID NO: 1675057 - DNA, 15 bp, Homo sapiens
tatgggagtccagga

SEQ ID NO: 1675058 - DNA, 15 bp, Homo sapiens
atgggagtccaggac

SEQ ID NO: 1675059 - DNA, 15 bp, Homo sapiens
tgggagtccaggact

SEQ ID NO: 1675060 - DNA, 15 bp, Homo sapiens
gggagtccaggactc

SEQ ID NO: 1675061 - DNA, 15 bp, Homo sapiens
ggagtccaggactct

SEQ ID NO: 1675062 - DNA, 15 bp, Homo sapiens
gagtccaggactcta

SEQ ID NO: 1675063 - DNA, 15 bp, Homo sapiens
agtccaggactctag

SEQ ID NO: 1675064 - DNA, 15 bp, Homo sapiens
gtccaggactctagg

SEQ ID NO: 1675065 - DNA, 15 bp, Homo sapiens
tccaggactctagga

SEQ ID NO: 1675066 - DNA, 15 bp, Homo sapiens
ccaggactctaggag

SEQ ID NO: 1675067 - DNA, 15 bp, Homo sapiens
caggactctaggagc

SEQ ID NO: 1675068 - DNA, 15 bp, Homo sapiens
aggactctaggagcc

SEQ ID NO: 1675069 - DNA, 15 bp, Homo sapiens
ggactctaggagcca

SEQ ID NO: 1675070 - DNA, 15 bp, Homo sapiens
gactctaggagccag

SEQ ID NO: 1675071 - DNA, 15 bp, Homo sapiens
actctaggagccagt

SEQ ID NO: 1675072 - DNA, 15 bp, Homo sapiens
ctctaggagccagtt

SEQ ID NO: 1675073 - DNA, 15 bp, Homo sapiens
tctaggagccagtta

SEQ ID NO: 1675074 - DNA, 15 bp, Homo sapiens
ctaggagccagttaa

SEQ ID NO: 1675075 - DNA, 15 bp, Homo sapiens
taggagccagttaag

SEQ ID NO: 1675076 - DNA, 15 bp, Homo sapiens
aggagccagttaagg

SEQ ID NO: 1675077 - DNA, 15 bp, Homo sapiens
ggagccagttaaggt

SEQ ID NO: 1675078 - DNA, 15 bp, Homo sapiens
gagccagttaaggtg

SEQ ID NO: 1675079 - DNA, 15 bp, Homo sapiens
agccagttaaggtgc

SEQ ID NO: 1675080 - DNA, 15 bp, Homo sapiens
gccagttaaggtgct

SEQ ID NO: 1675081 - DNA, 15 bp, Homo sapiens
cagttaaggtgctgg

SEQ ID NO: 1675082 - DNA, 15 bp, Homo sapiens
agttaaggtgctggg

SEQ ID NO: 1675083 - DNA, 15 bp, Homo sapiens
gttaaggtgctgggt

SEQ ID NO: 1675084 - DNA, 15 bp, Homo sapiens
ttaaggtgctgggtg

SEQ ID NO: 1675085 - DNA, 15 bp, Homo sapiens
taaggtgctgggtgg

SEQ ID NO: 1675086 - DNA, 15 bp, Homo sapiens
aaggtgctgggtggc

SEQ ID NO: 1675087 - DNA, 15 bp, Homo sapiens
aggtgctgggtggcc

SEQ ID NO: 1675088 - DNA, 15 bp, Homo sapiens
ggtgctgggtggcca

SEQ ID NO: 1675089 - DNA, 15 bp, Homo sapiens
gtgctgggtggccac

SEQ ID NO: 1675090 - DNA, 15 bp, Homo sapiens
tgctgggtggccaca

SEQ ID NO: 1675091 - DNA, 15 bp, Homo sapiens
gctgggtggccacag

SEQ ID NO: 1675092 - DNA, 15 bp, Homo sapiens
ctgggtggccacagg

SEQ ID NO: 1675093 - DNA, 15 bp, Homo sapiens
tgggtggccacaggt

SEQ ID NO: 1675094 - DNA, 15 bp, Homo sapiens
gggtggccacaggtc

SEQ ID NO: 1675095 - DNA, 15 bp, Homo sapiens
ggtggccacaggtcc

SEQ ID NO: 1675096 - DNA, 15 bp, Homo sapiens
gtggccacaggtccc

SEQ ID NO: 1675097 - DNA, 15 bp, Homo sapiens
tggccacaggtccct

SEQ ID NO: 1675098 - DNA, 15 bp, Homo sapiens
ggccacaggtccctg

SEQ ID NO: 1675099 - DNA, 15 bp, Homo sapiens
gccacaggtccctgg

SEQ ID NO: 1675100 - DNA, 15 bp, Homo sapiens
ccacaggtccctggc

SEQ ID NO: 1675101 - DNA, 15 bp, Homo sapiens
cacaggtccctggcc

SEQ ID NO: 1675102 - DNA, 15 bp, Homo sapiens
acaggtccctggcca

SEQ ID NO: 1675103 - DNA, 15 bp, Homo sapiens
caggtccctggccaa

SEQ ID NO: 1675104 - DNA, 15 bp, Homo sapiens
aggtccctggccaag

SEQ ID NO: 1675105 - DNA, 15 bp, Homo sapiens
ggtccctggccaagg

SEQ ID NO: 1675106 - DNA, 15 bp, Homo sapiens
gtccctggccaaggt

SEQ ID NO: 1675107 - DNA, 15 bp, Homo sapiens
tccctggccaaggtc

SEQ ID NO: 1675108 - DNA, 15 bp, Homo sapiens
ccctggccaaggtcc

SEQ ID NO: 1675109 - DNA, 15 bp, Homo sapiens
cctggccaaggtcca

SEQ ID NO: 1675110 - DNA, 15 bp, Homo sapiens
ctggccaaggtccag

SEQ ID NO: 1675111 - DNA, 15 bp, Homo sapiens
tggccaaggtccagg

SEQ ID NO: 1675112 - DNA, 15 bp, Homo sapiens
ggccaaggtccaggc

SEQ ID NO: 1675113 - DNA, 15 bp, Homo sapiens
gccaaggtccaggcc

SEQ ID NO: 1675114 - DNA, 15 bp, Homo sapiens
ccaaggtccaggcct

SEQ ID NO: 1675115 - DNA, 15 bp, Homo sapiens
caaggtccaggcctc

SEQ ID NO: 1675116 - DNA, 15 bp, Homo sapiens
aaggtccaggcctct

SEQ ID NO: 1675117 - DNA, 15 bp, Homo sapiens
aggtccaggcctctc

SEQ ID NO: 1675118 - DNA, 15 bp, Homo sapiens
ggtccaggcctctcc

SEQ ID NO: 1675119 - DNA, 15 bp, Homo sapiens
gtccaggcctctccc

SEQ ID NO: 1675120 - DNA, 15 bp, Homo sapiens
tccaggcctctcccc

SEQ ID NO: 1675121 - DNA, 15 bp, Homo sapiens
ccaggcctctcccct

SEQ ID NO: 1675122 - DNA, 15 bp, Homo sapiens
caggcctctcccctg

SEQ ID NO: 1675123 - DNA, 15 bp, Homo sapiens
aggcctctcccctgc

SEQ ID NO: 1675124 - DNA, 15 bp, Homo sapiens
ggcctctcccctgcc

SEQ ID NO: 1675125 - DNA, 15 bp, Homo sapiens
gcctctcccctgcca

SEQ ID NO: 1675126 - DNA, 15 bp, Homo sapiens
cctctcccctgccac

SEQ ID NO: 1675127 - DNA, 15 bp, Homo sapiens
ctctcccctgccacc

SEQ ID NO: 1675128 - DNA, 15 bp, Homo sapiens
tctcccctgccacct

SEQ ID NO: 1675129 - DNA, 15 bp, Homo sapiens
ctcccctgccacctg

SEQ ID NO: 1675130 - DNA, 15 bp, Homo sapiens
tcccctgccacctga

SEQ ID NO: 1675131 - DNA, 15 bp, Homo sapiens
cccctgccacctgat

SEQ ID NO: 1675132 - DNA, 15 bp, Homo sapiens
ccctgccacctgatc

SEQ ID NO: 1675133 - DNA, 15 bp, Homo sapiens
cctgccacctgatcc

SEQ ID NO: 1675134 - DNA, 15 bp, Homo sapiens
ctgccacctgatcct

SEQ ID NO: 1675135 - DNA, 15 bp, Homo sapiens
tgccacctgatcctc

SEQ ID NO: 1675136 - DNA, 15 bp, Homo sapiens
gccacctgatcctcg

SEQ ID NO: 1675137 - DNA, 15 bp, Homo sapiens
ccacctgatcctcga

SEQ ID NO: 1675138 - DNA, 15 bp, Homo sapiens
cacctgatcctcgag

SEQ ID NO: 1675139 - DNA, 15 bp, Homo sapiens
acctgatcctcgaga

SEQ ID NO: 1675140 - DNA, 15 bp, Homo sapiens
cctgatcctcgagag

SEQ ID NO: 1675141 - DNA, 15 bp, Homo sapiens
ctgatcctcgagagg

SEQ ID NO: 1675142 - DNA, 15 bp, Homo sapiens
tgatcctcgagaggc

SEQ ID NO: 1675143 - DNA, 15 bp, Homo sapiens
gatcctcgagaggcc

SEQ ID NO: 1675144 - DNA, 15 bp, Homo sapiens
atcctcgagaggcca

SEQ ID NO: 1675145 - DNA, 15 bp, Homo sapiens
tcctcgagaggccat

SEQ ID NO: 1675146 - DNA, 15 bp, Homo sapiens
cctcgagaggccatc

SEQ ID NO: 1675147 - DNA, 15 bp, Homo sapiens
ctcgagaggccatca

SEQ ID NO: 1675148 - DNA, 15 bp, Homo sapiens
tcgagaggccatcac

SEQ ID NO: 1675149 - DNA, 15 bp, Homo sapiens
cgagaggccatcacg

SEQ ID NO: 1675150 - DNA, 15 bp, Homo sapiens
aaacatatatcgagg

SEQ ID NO: 1675151 - DNA, 15 bp, Homo sapiens
aacatatatcgaggc

SEQ ID NO: 1675152 - DNA, 15 bp, Homo sapiens
acatatatcgaggcc

SEQ ID NO: 1675153 - DNA, 15 bp, Homo sapiens
catatatcgaggccc

SEQ ID NO: 1675154 - DNA, 15 bp, Homo sapiens
atatatcgaggccct

SEQ ID NO: 1675155 - DNA, 15 bp, Homo sapiens
tatatcgaggcccta

SEQ ID NO: 1675156 - DNA, 15 bp, Homo sapiens
atatcgaggccctat

SEQ ID NO: 1675157 - DNA, 15 bp, Homo sapiens
tatcgaggccctatc

SEQ ID NO: 1675158 - DNA, 15 bp, Homo sapiens
atcgaggccctatca

SEQ ID NO: 1675159 - DNA, 15 bp, Homo sapiens
tcgaggccctatcat

SEQ ID NO: 1675160 - DNA, 15 bp, Homo sapiens
cgaggccctatcatg

SEQ ID NO: 1675161 - DNA, 15 bp, Homo sapiens
gaggccctatcatga

SEQ ID NO: 1675162 - DNA, 15 bp, Homo sapiens
aggccctatcatgac

SEQ ID NO: 1675163 - DNA, 15 bp, Homo sapiens
ggccctatcatgaca

SEQ ID NO: 1675164 - DNA, 15 bp, Homo sapiens
gccctatcatgacaa

SEQ ID NO: 1675165 - DNA, 15 bp, Homo sapiens
ccctatcatgacaaa

SEQ ID NO: 1675166 - DNA, 15 bp, Homo sapiens
cctatcatgacaaaa

SEQ ID NO: 1675167 - DNA, 15 bp, Homo sapiens
ctatcatgacaaaat

SEQ ID NO: 1675168 - DNA, 15 bp, Homo sapiens
tatcatgacaaaatg

SEQ ID NO: 1675169 - DNA, 15 bp, Homo sapiens
atcatgacaaaatgc

SEQ ID NO: 1675170 - DNA, 15 bp, Homo sapiens
tcatgacaaaatgct

SEQ ID NO: 1675171 - DNA, 15 bp, Homo sapiens
catgacaaaatgcta

SEQ ID NO: 1675172 - DNA, 15 bp, Homo sapiens
atgacaaaatgctat

SEQ ID NO: 1675173 - DNA, 15 bp, Homo sapiens
tgacaaaatgctatt

SEQ ID NO: 1675174 - DNA, 15 bp, Homo sapiens
gacaaaatgctattc

SEQ ID NO: 1675175 - DNA, 15 bp, Homo sapiens
acaaaatgctattct

SEQ ID NO: 1675176 - DNA, 15 bp, Homo sapiens
caaaatgctattcta

SEQ ID NO: 1675177 - DNA, 15 bp, Homo sapiens
aaaatgctattctag

SEQ ID NO: 1675178 - DNA, 15 bp, Homo sapiens
aaatgctattctaga

SEQ ID NO: 1675179 - DNA, 15 bp, Homo sapiens
aatgctattctagag

SEQ ID NO: 1675180 - DNA, 15 bp, Homo sapiens
atgctattctagaga

SEQ ID NO: 1675181 - DNA, 15 bp, Homo sapiens
tgctattctagagac

SEQ ID NO: 1675182 - DNA, 15 bp, Homo sapiens
gctattctagagacc

SEQ ID NO: 1675183 - DNA, 15 bp, Homo sapiens
ctattctagagacca

SEQ ID NO: 1675184 - DNA, 15 bp, Homo sapiens
tattctagagaccac

SEQ ID NO: 1675185 - DNA, 15 bp, Homo sapiens
attctagagaccacg

SEQ ID NO: 1675186 - DNA, 15 bp, Homo sapiens
ttctagagaccacgg

SEQ ID NO: 1675187 - DNA, 15 bp, Homo sapiens
tctagagaccacggc

SEQ ID NO: 1675188 - DNA, 15 bp, Homo sapiens
ctagagaccacggcg

SEQ ID NO: 1675189 - DNA, 15 bp, Homo sapiens
tagagaccacggcga

SEQ ID NO: 1675190 - DNA, 15 bp, Homo sapiens
agagaccacggcgaa

SEQ ID NO: 1675191 - DNA, 15 bp, Homo sapiens
gagaccacggcgaac

SEQ ID NO: 1675192 - DNA, 15 bp, Homo sapiens
agaccacggcgaaca

SEQ ID NO: 1675193 - DNA, 15 bp, Homo sapiens
gaccacggcgaacaa

SEQ ID NO: 1675194 - DNA, 15 bp, Homo sapiens
accacggcgaacaag

SEQ ID NO: 1675195 - DNA, 15 bp, Homo sapiens
ccacggcgaacaagc

SEQ ID NO: 1675196 - DNA, 15 bp, Homo sapiens
cacggcgaacaagcc

SEQ ID NO: 1675197 - DNA, 15 bp, Homo sapiens
acggcgaacaagcca

SEQ ID NO: 1675198 - DNA, 15 bp, Homo sapiens
cggcgaacaagccac

SEQ ID NO: 1675199 - DNA, 15 bp, Homo sapiens
ggcgaacaagccacg

SEQ ID NO: 1675200 - DNA, 15 bp, Homo sapiens
gcgaacaagccacgg

SEQ ID NO: 1675201 - DNA, 15 bp, Homo sapiens
cgaacaagccacggc

SEQ ID NO: 1675202 - DNA, 15 bp, Homo sapiens
gaacaagccacggcc

SEQ ID NO: 1675203 - DNA, 15 bp, Homo sapiens
aacaagccacggccc

SEQ ID NO: 1675204 - DNA, 15 bp, Homo sapiens
acaagccacggcccc

SEQ ID NO: 1675205 - DNA, 15 bp, Homo sapiens
caagccacggcccca

SEQ ID NO: 1675206 - DNA, 15 bp, Homo sapiens
aagccacggccccag

SEQ ID NO: 1675207 - DNA, 15 bp, Homo sapiens
agccacggccccagc

SEQ ID NO: 1675208 - DNA, 15 bp, Homo sapiens
gccacggccccagcc

SEQ ID NO: 1675209 - DNA, 15 bp, Homo sapiens
ccacggccccagcct

SEQ ID NO: 1675210 - DNA, 15 bp, Homo sapiens
cacggccccagcctc

SEQ ID NO: 1675211 - DNA, 15 bp, Homo sapiens
acggccccagcctca

SEQ ID NO: 1675212 - DNA, 15 bp, Homo sapiens
cggccccagcctcaa

SEQ ID NO: 1675213 - DNA, 15 bp, Homo sapiens
ggccccagcctcaaa

SEQ ID NO: 1675214 - DNA, 15 bp, Homo sapiens
gccccagcctcaaag

SEQ ID NO: 1675215 - DNA, 15 bp, Homo sapiens
ccccagcctcaaaga

SEQ ID NO: 1675216 - DNA, 15 bp, Homo sapiens
cccagcctcaaagaa

SEQ ID NO: 1675217 - DNA, 15 bp, Homo sapiens
ccagcctcaaagaat

SEQ ID NO: 1675218 - DNA, 15 bp, Homo sapiens
cagcctcaaagaatg

SEQ ID NO: 1675219 - DNA, 15 bp, Homo sapiens
agcctcaaagaatgt

SEQ ID NO: 1675220 - DNA, 15 bp, Homo sapiens
gcctcaaagaatgta

SEQ ID NO: 1675221 - DNA, 15 bp, Homo sapiens
cctcaaagaatgtac

SEQ ID NO: 1675222 - DNA, 15 bp, Homo sapiens
ctcaaagaatgtact

SEQ ID NO: 1675223 - DNA, 15 bp, Homo sapiens
tcaaagaatgtacta

SEQ ID NO: 1675224 - DNA, 15 bp, Homo sapiens
caaagaatgtactat

SEQ ID NO: 1675225 - DNA, 15 bp, Homo sapiens
aaagaatgtactatc

SEQ ID NO: 1675226 - DNA, 15 bp, Homo sapiens
aagaatgtactatct

SEQ ID NO: 1675227 - DNA, 15 bp, Homo sapiens
agaatgtactatctt

SEQ ID NO: 1675228 - DNA, 15 bp, Homo sapiens
gaatgtactatcttt

SEQ ID NO: 1675229 - DNA, 15 bp, Homo sapiens
aatgtactatctttg

SEQ ID NO: 1675230 - DNA, 15 bp, Homo sapiens
atgtactatctttgg

SEQ ID NO: 1675231 - DNA, 15 bp, Homo sapiens
tgtactatctttgga

SEQ ID NO: 1675232 - DNA, 15 bp, Homo sapiens
gtactatctttggaa

SEQ ID NO: 1675233 - DNA, 15 bp, Homo sapiens
tactatctttggaac

SEQ ID NO: 1675234 - DNA, 15 bp, Homo sapiens
actatctttggaact

SEQ ID NO: 1675235 - DNA, 15 bp, Homo sapiens
ctatctttggaactg

SEQ ID NO: 1675236 - DNA, 15 bp, Homo sapiens
tatctttggaactgt

SEQ ID NO: 1675237 - DNA, 15 bp, Homo sapiens
atctttggaactgtg

SEQ ID NO: 1675238 - DNA, 15 bp, Homo sapiens
tctttggaactgtgc

SEQ ID NO: 1675239 - DNA, 15 bp, Homo sapiens
ctttggaactgtgct

SEQ ID NO: 1675240 - DNA, 15 bp, Homo sapiens
tttggaactgtgctg

SEQ ID NO: 1675241 - DNA, 15 bp, Homo sapiens
ttggaactgtgctgg

SEQ ID NO: 1675242 - DNA, 15 bp, Homo sapiens
tggaactgtgctggc

SEQ ID NO: 1675243 - DNA, 15 bp, Homo sapiens
ggaactgtgctggcc

SEQ ID NO: 1675244 - DNA, 15 bp, Homo sapiens
gaactgtgctggcca

SEQ ID NO: 1675245 - DNA, 15 bp, Homo sapiens
aactgtgctggccaa

SEQ ID NO: 1675246 - DNA, 15 bp, Homo sapiens
actgtgctggccaat

SEQ ID NO: 1675247 - DNA, 15 bp, Homo sapiens
ctgtgctggccaata

SEQ ID NO: 1675248 - DNA, 15 bp, Homo sapiens
tgtgctggccaatac

SEQ ID NO: 1675249 - DNA, 15 bp, Homo sapiens
gtgctggccaataca

SEQ ID NO: 1675250 - DNA, 15 bp, Homo sapiens
tgctggccaatacag

SEQ ID NO: 1675251 - DNA, 15 bp, Homo sapiens
gctggccaatacagt

SEQ ID NO: 1675252 - DNA, 15 bp, Homo sapiens
ctggccaatacagta

SEQ ID NO: 1675253 - DNA, 15 bp, Homo sapiens
tggccaatacagtaa

SEQ ID NO: 1675254 - DNA, 15 bp, Homo sapiens
ggccaatacagtaac

SEQ ID NO: 1675255 - DNA, 15 bp, Homo sapiens
gccaatacagtaacc

SEQ ID NO: 1675256 - DNA, 15 bp, Homo sapiens
ccaatacagtaacca

SEQ ID NO: 1675257 - DNA, 15 bp, Homo sapiens
caatacagtaaccag

SEQ ID NO: 1675258 - DNA, 15 bp, Homo sapiens
aatacagtaaccagc

SEQ ID NO: 1675259 - DNA, 15 bp, Homo sapiens
atacagtaaccagca

SEQ ID NO: 1675260 - DNA, 15 bp, Homo sapiens
tacagtaaccagcag

SEQ ID NO: 1675261 - DNA, 15 bp, Homo sapiens
acagtaaccagcagc

SEQ ID NO: 1675262 - DNA, 15 bp, Homo sapiens
cagtaaccagcagcc

SEQ ID NO: 1675263 - DNA, 15 bp, Homo sapiens
agtaaccagcagcca

SEQ ID NO: 1675264 - DNA, 15 bp, Homo sapiens
gtaaccagcagccac

SEQ ID NO: 1675265 - DNA, 15 bp, Homo sapiens
taaccagcagccacg

SEQ ID NO: 1675266 - DNA, 15 bp, Homo sapiens
aaccagcagccacgc

SEQ ID NO: 1675267 - DNA, 15 bp, Homo sapiens
accagcagccacgca

SEQ ID NO: 1675268 - DNA, 15 bp, Homo sapiens
ccagcagccacgcag

SEQ ID NO: 1675269 - DNA, 15 bp, Homo sapiens
cagcagccacgcagg

SEQ ID NO: 1675270 - DNA, 15 bp, Homo sapiens
agcagccacgcaggg

SEQ ID NO: 1675271 - DNA, 15 bp, Homo sapiens
gcagccacgcagggc

SEQ ID NO: 1675272 - DNA, 15 bp, Homo sapiens
cagccacgcagggct

SEQ ID NO: 1675273 - DNA, 15 bp, Homo sapiens
agccacgcagggcta

SEQ ID NO: 1675274 - DNA, 15 bp, Homo sapiens
gccacgcagggctat

SEQ ID NO: 1675275 - DNA, 15 bp, Homo sapiens
ccacgcagggctatt

SEQ ID NO: 1675276 - DNA, 15 bp, Homo sapiens
cacgcagggctattt

SEQ ID NO: 1675277 - DNA, 15 bp, Homo sapiens
acgcagggctattta

SEQ ID NO: 1675278 - DNA, 15 bp, Homo sapiens
cgcagggctatttaa

SEQ ID NO: 1675279 - DNA, 15 bp, Homo sapiens
gcagggctatttaaa

SEQ ID NO: 1675280 - DNA, 15 bp, Homo sapiens
cagggctatttaaat

SEQ ID NO: 1675281 - DNA, 15 bp, Homo sapiens
agggctatttaaatt

SEQ ID NO: 1675282 - DNA, 15 bp, Homo sapiens
gggctatttaaattt

SEQ ID NO: 1675283 - DNA, 15 bp, Homo sapiens
ggctatttaaattta

SEQ ID NO: 1675284 - DNA, 15 bp, Homo sapiens
gctatttaaatttaa

SEQ ID NO: 1675285 - DNA, 15 bp, Homo sapiens
ctatttaaatttaaa

SEQ ID NO: 1675286 - DNA, 15 bp, Homo sapiens
tatttaaatttaaat

SEQ ID NO: 1675287 - DNA, 15 bp, Homo sapiens
atttaaatttaaatt

SEQ ID NO: 1675288 - DNA, 15 bp, Homo sapiens
tttaaatttaaatta

SEQ ID NO: 1675289 - DNA, 15 bp, Homo sapiens
ttaaatttaaattaa

SEQ ID NO: 1675290 - DNA, 15 bp, Homo sapiens
taaatttaaattaat

SEQ ID NO: 1675291 - DNA, 15 bp, Homo sapiens
aaatttaaattaatt

SEQ ID NO: 1675292 - DNA, 15 bp, Homo sapiens
aatttaaattaatta

SEQ ID NO: 1675293 - DNA, 15 bp, Homo sapiens
atttaaattaattaa

SEQ ID NO: 1675294 - DNA, 15 bp, Homo sapiens
tttaaattaattaaa

SEQ ID NO: 1675295 - DNA, 15 bp, Homo sapiens
ttaaattaattaaaa

SEQ ID NO: 1675296 - DNA, 15 bp, Homo sapiens
taaattaattaaaag

SEQ ID NO: 1675297 - DNA, 15 bp, Homo sapiens
aaattaattaaaagt

SEQ ID NO: 1675298 - DNA, 15 bp, Homo sapiens
aattaattaaaagta

SEQ ID NO: 1675299 - DNA, 15 bp, Homo sapiens
attaattaaaagtaa

SEQ ID NO: 1675300 - DNA, 15 bp, Homo sapiens
ttaattaaaagtaaa

SEQ ID NO: 1675301 - DNA, 15 bp, Homo sapiens
taattaaaagtaaaa

SEQ ID NO: 1675302 - DNA, 15 bp, Homo sapiens
aattaaaagtaaaaa

SEQ ID NO: 1675303 - DNA, 15 bp, Homo sapiens
attaaaagtaaaaac

SEQ ID NO: 1675304 - DNA, 15 bp, Homo sapiens
ttaaaagtaaaaaca

SEQ ID NO: 1675305 - DNA, 15 bp, Homo sapiens
taaaagtaaaaacac

SEQ ID NO: 1675306 - DNA, 15 bp, Homo sapiens
aaaagtaaaaacaca

SEQ ID NO: 1675307 - DNA, 15 bp, Homo sapiens
aaagtaaaaacacaa

SEQ ID NO: 1675308 - DNA, 15 bp, Homo sapiens
aagtaaaaacacaat

SEQ ID NO: 1675309 - DNA, 15 bp, Homo sapiens
agtaaaaacacaatg

SEQ ID NO: 1675310 - DNA, 15 bp, Homo sapiens
gtaaaaacacaatgc

SEQ ID NO: 1675311 - DNA, 15 bp, Homo sapiens
taaaaacacaatgcc

SEQ ID NO: 1675312 - DNA, 15 bp, Homo sapiens
aaaaacacaatgcct

SEQ ID NO: 1675313 - DNA, 15 bp, Homo sapiens
aaaacacaatgcctc

SEQ ID NO: 1675314 - DNA, 15 bp, Homo sapiens
aaacacaatgcctca

SEQ ID NO: 1675315 - DNA, 15 bp, Homo sapiens
aacacaatgcctcag

SEQ ID NO: 1675316 - DNA, 15 bp, Homo sapiens
acacaatgcctcaga

SEQ ID NO: 1675317 - DNA, 15 bp, Homo sapiens
cacaatgcctcagat

SEQ ID NO: 1675318 - DNA, 15 bp, Homo sapiens
acaatgcctcagatg

SEQ ID NO: 1675319 - DNA, 15 bp, Homo sapiens
caatgcctcagatgc

SEQ ID NO: 1675320 - DNA, 15 bp, Homo sapiens
aatgcctcagatgca

SEQ ID NO: 1675321 - DNA, 15 bp, Homo sapiens
atgcctcagatgcat

SEQ ID NO: 1675322 - DNA, 15 bp, Homo sapiens
tgcctcagatgcatt

SEQ ID NO: 1675323 - DNA, 15 bp, Homo sapiens
gcctcagatgcatta

SEQ ID NO: 1675324 - DNA, 15 bp, Homo sapiens
cctcagatgcattag

SEQ ID NO: 1675325 - DNA, 15 bp, Homo sapiens
ctcagatgcattagc

SEQ ID NO: 1675326 - DNA, 15 bp, Homo sapiens
tcagatgcattagcc

SEQ ID NO: 1675327 - DNA, 15 bp, Homo sapiens
cagatgcattagcca

SEQ ID NO: 1675328 - DNA, 15 bp, Homo sapiens
agatgcattagccac

SEQ ID NO: 1675329 - DNA, 15 bp, Homo sapiens
gatgcattagccaca

SEQ ID NO: 1675330 - DNA, 15 bp, Homo sapiens
atgcattagccacat

SEQ ID NO: 1675331 - DNA, 15 bp, Homo sapiens
tgcattagccacatt

SEQ ID NO: 1675332 - DNA, 15 bp, Homo sapiens
gcattagccacattt

SEQ ID NO: 1675333 - DNA, 15 bp, Homo sapiens
cattagccacatttt

SEQ ID NO: 1675334 - DNA, 15 bp, Homo sapiens
attagccacatttta

SEQ ID NO: 1675335 - DNA, 15 bp, Homo sapiens
ttagccacattttaa

SEQ ID NO: 1675336 - DNA, 15 bp, Homo sapiens
tagccacattttaag

SEQ ID NO: 1675337 - DNA, 15 bp, Homo sapiens
agccacattttaagt

SEQ ID NO: 1675338 - DNA, 15 bp, Homo sapiens
gccacattttaagtg

SEQ ID NO: 1675339 - DNA, 15 bp, Homo sapiens
ccacattttaagtgt

SEQ ID NO: 1675340 - DNA, 15 bp, Homo sapiens
cacattttaagtgtt

SEQ ID NO: 1675341 - DNA, 15 bp, Homo sapiens
acattttaagtgttc

SEQ ID NO: 1675342 - DNA, 15 bp, Homo sapiens
cattttaagtgttca

SEQ ID NO: 1675343 - DNA, 15 bp, Homo sapiens
attttaagtgttcaa

SEQ ID NO: 1675344 - DNA, 15 bp, Homo sapiens
ttttaagtgttcaat

SEQ ID NO: 1675345 - DNA, 15 bp, Homo sapiens
tttaagtgttcaata

SEQ ID NO: 1675346 - DNA, 15 bp, Homo sapiens
ttaagtgttcaatag

SEQ ID NO: 1675347 - DNA, 15 bp, Homo sapiens
taagtgttcaataga

SEQ ID NO: 1675348 - DNA, 15 bp, Homo sapiens
aagtgttcaatagat

SEQ ID NO: 1675349 - DNA, 15 bp, Homo sapiens
agtgttcaatagata

SEQ ID NO: 1675350 - DNA, 15 bp, Homo sapiens
gtgttcaatagatat

SEQ ID NO: 1675351 - DNA, 15 bp, Homo sapiens
tgttcaatagatatt

SEQ ID NO: 1675352 - DNA, 15 bp, Homo sapiens
gttcaatagatattt

SEQ ID NO: 1675353 - DNA, 15 bp, Homo sapiens
ttcaatagatatttg

SEQ ID NO: 1675354 - DNA, 15 bp, Homo sapiens
tcaatagatatttgt

SEQ ID NO: 1675355 - DNA, 15 bp, Homo sapiens
caatagatatttgtg

SEQ ID NO: 1675356 - DNA, 15 bp, Homo sapiens
aatagatatttgtgg

SEQ ID NO: 1675357 - DNA, 15 bp, Homo sapiens
atagatatttgtggc

SEQ ID NO: 1675358 - DNA, 15 bp, Homo sapiens
tagatatttgtggct

SEQ ID NO: 1675359 - DNA, 15 bp, Homo sapiens
agatatttgtggctc

SEQ ID NO: 1675360 - DNA, 15 bp, Homo sapiens
gatatttgtggctcc

SEQ ID NO: 1675361 - DNA, 15 bp, Homo sapiens
atatttgtggctcct

SEQ ID NO: 1675362 - DNA, 15 bp, Homo sapiens
tatttgtggctcctg

SEQ ID NO: 1675363 - DNA, 15 bp, Homo sapiens
atttgtggctcctgc

SEQ ID NO: 1675364 - DNA, 15 bp, Homo sapiens
tttgtggctcctgcc

SEQ ID NO: 1675365 - DNA, 15 bp, Homo sapiens
ttgtggctcctgcct

SEQ ID NO: 1675366 - DNA, 15 bp, Homo sapiens
tgtggctcctgcctg

SEQ ID NO: 1675367 - DNA, 15 bp, Homo sapiens
gtggctcctgcctgc

SEQ ID NO: 1675368 - DNA, 15 bp, Homo sapiens
tggctcctgcctgcc

SEQ ID NO: 1675369 - DNA, 15 bp, Homo sapiens
ggctcctgcctgcca

SEQ ID NO: 1675370 - DNA, 15 bp, Homo sapiens
gctcctgcctgccat

SEQ ID NO: 1675371 - DNA, 15 bp, Homo sapiens
ctcctgcctgccata

SEQ ID NO: 1675372 - DNA, 15 bp, Homo sapiens
tcctgcctgccatat

SEQ ID NO: 1675373 - DNA, 15 bp, Homo sapiens
cctgcctgccatatt

SEQ ID NO: 1675374 - DNA, 15 bp, Homo sapiens
ctgcctgccatattg

SEQ ID NO: 1675375 - DNA, 15 bp, Homo sapiens
tgcctgccatattgg

SEQ ID NO: 1675376 - DNA, 15 bp, Homo sapiens
gcctgccatattgga

SEQ ID NO: 1675377 - DNA, 15 bp, Homo sapiens
cctgccatattggac

SEQ ID NO: 1675378 - DNA, 15 bp, Homo sapiens
ctgccatattggaca

SEQ ID NO: 1675379 - DNA, 15 bp, Homo sapiens
tgccatattggacag

SEQ ID NO: 1675380 - DNA, 15 bp, Homo sapiens
gccatattggacagg

SEQ ID NO: 1675381 - DNA, 15 bp, Homo sapiens
ccatattggacaggg

SEQ ID NO: 1675382 - DNA, 15 bp, Homo sapiens
catattggacagggc

SEQ ID NO: 1675383 - DNA, 15 bp, Homo sapiens
atattggacagggca

SEQ ID NO: 1675384 - DNA, 15 bp, Homo sapiens
tattggacagggcag

SEQ ID NO: 1675385 - DNA, 15 bp, Homo sapiens
attggacagggcaga

SEQ ID NO: 1675386 - DNA, 15 bp, Homo sapiens
ttggacagggcagat

SEQ ID NO: 1675387 - DNA, 15 bp, Homo sapiens
tggacagggcagata

SEQ ID NO: 1675388 - DNA, 15 bp, Homo sapiens
ggacagggcagatat

SEQ ID NO: 1675389 - DNA, 15 bp, Homo sapiens
gacagggcagatata

SEQ ID NO: 1675390 - DNA, 15 bp, Homo sapiens
acagggcagatatag

SEQ ID NO: 1675391 - DNA, 15 bp, Homo sapiens
cagggcagatataga

SEQ ID NO: 1675392 - DNA, 15 bp, Homo sapiens
agggcagatatagaa

SEQ ID NO: 1675393 - DNA, 15 bp, Homo sapiens
gggcagatatagaac

SEQ ID NO: 1675394 - DNA, 15 bp, Homo sapiens
ggcagatatagaaca

SEQ ID NO: 1675395 - DNA, 15 bp, Homo sapiens
gcagatatagaacaa

SEQ ID NO: 1675396 - DNA, 15 bp, Homo sapiens
cagatatagaacaat

SEQ ID NO: 1675397 - DNA, 15 bp, Homo sapiens
agatatagaacaatt

SEQ ID NO: 1675398 - DNA, 15 bp, Homo sapiens
gatatagaacaattc

SEQ ID NO: 1675399 - DNA, 15 bp, Homo sapiens
atatagaacaattcc

SEQ ID NO: 1675400 - DNA, 15 bp, Homo sapiens
tatagaacaattcca

SEQ ID NO: 1675401 - DNA, 15 bp, Homo sapiens
atagaacaattccat

SEQ ID NO: 1675402 - DNA, 15 bp, Homo sapiens
tagaacaattccatc

SEQ ID NO: 1675403 - DNA, 15 bp, Homo sapiens
agaacaattccatca

SEQ ID NO: 1675404 - DNA, 15 bp, Homo sapiens
gaacaattccatcac

SEQ ID NO: 1675405 - DNA, 15 bp, Homo sapiens
aacaattccatcact

SEQ ID NO: 1675406 - DNA, 15 bp, Homo sapiens
acaattccatcactg

SEQ ID NO: 1675407 - DNA, 15 bp, Homo sapiens
caattccatcactgc

SEQ ID NO: 1675408 - DNA, 15 bp, Homo sapiens
aattccatcactgca

SEQ ID NO: 1675409 - DNA, 15 bp, Homo sapiens
attccatcactgcag

SEQ ID NO: 1675410 - DNA, 15 bp, Homo sapiens
ttccatcactgcaga

SEQ ID NO: 1675411 - DNA, 15 bp, Homo sapiens
tccatcactgcagaa

SEQ ID NO: 1675412 - DNA, 15 bp, Homo sapiens
ccatcactgcagaaa

SEQ ID NO: 1675413 - DNA, 15 bp, Homo sapiens
catcactgcagaaag

SEQ ID NO: 1675414 - DNA, 15 bp, Homo sapiens
atcactgcagaaagt

SEQ ID NO: 1675415 - DNA, 15 bp, Homo sapiens
tcactgcagaaagtt

SEQ ID NO: 1675416 - DNA, 15 bp, Homo sapiens
cactgcagaaagttc

SEQ ID NO: 1675417 - DNA, 15 bp, Homo sapiens
actgcagaaagttct

SEQ ID NO: 1675418 - DNA, 15 bp, Homo sapiens
ctgcagaaagttcta

SEQ ID NO: 1675419 - DNA, 15 bp, Homo sapiens
tgcagaaagttctac

SEQ ID NO: 1675420 - DNA, 15 bp, Homo sapiens
gcagaaagttctact

SEQ ID NO: 1675421 - DNA, 15 bp, Homo sapiens
cagaaagttctactg

SEQ ID NO: 1675422 - DNA, 15 bp, Homo sapiens
agaaagttctactga

SEQ ID NO: 1675423 - DNA, 15 bp, Homo sapiens
gaaagttctactgaa

SEQ ID NO: 1675424 - DNA, 15 bp, Homo sapiens
aaagttctactgaac

SEQ ID NO: 1675425 - DNA, 15 bp, Homo sapiens
aagttctactgaaca

SEQ ID NO: 1675426 - DNA, 15 bp, Homo sapiens
agttctactgaacaa

SEQ ID NO: 1675427 - DNA, 15 bp, Homo sapiens
gttctactgaacaat

SEQ ID NO: 1675428 - DNA, 15 bp, Homo sapiens
ttctactgaacaatg

SEQ ID NO: 1675429 - DNA, 15 bp, Homo sapiens
tctactgaacaatgc

SEQ ID NO: 1675430 - DNA, 15 bp, Homo sapiens
ctactgaacaatgct

SEQ ID NO: 1675431 - DNA, 15 bp, Homo sapiens
tactgaacaatgctg

SEQ ID NO: 1675432 - DNA, 15 bp, Homo sapiens
actgaacaatgctgc

SEQ ID NO: 1675433 - DNA, 15 bp, Homo sapiens
ctgaacaatgctgct

SEQ ID NO: 1675434 - DNA, 15 bp, Homo sapiens
tgaacaatgctgctc

SEQ ID NO: 1675435 - DNA, 15 bp, Homo sapiens
gaacaatgctgctct

SEQ ID NO: 1675436 - DNA, 15 bp, Homo sapiens
aacaatgctgctctg

SEQ ID NO: 1675437 - DNA, 15 bp, Homo sapiens
acaatgctgctctgg

SEQ ID NO: 1675438 - DNA, 15 bp, Homo sapiens
caatgctgctctgga

SEQ ID NO: 1675439 - DNA, 15 bp, Homo sapiens
aatgctgctctggag

SEQ ID NO: 1675440 - DNA, 15 bp, Homo sapiens
atgctgctctggagc

SEQ ID NO: 1675441 - DNA, 15 bp, Homo sapiens
tgctgctctggagca

SEQ ID NO: 1675442 - DNA, 15 bp, Homo sapiens
gctgctctggagcag

SEQ ID NO: 1675443 - DNA, 15 bp, Homo sapiens
ctgctctggagcaga

SEQ ID NO: 1675444 - DNA, 15 bp, Homo sapiens
tgctctggagcagaa

SEQ ID NO: 1675445 - DNA, 15 bp, Homo sapiens
gctctggagcagaag

SEQ ID NO: 1675446 - DNA, 15 bp, Homo sapiens
ctctggagcagaaga

SEQ ID NO: 1675447 - DNA, 15 bp, Homo sapiens
tctggagcagaagat

SEQ ID NO: 1675448 - DNA, 15 bp, Homo sapiens
ctggagcagaagatc

SEQ ID NO: 1675449 - DNA, 15 bp, Homo sapiens
tggagcagaagatct

SEQ ID NO: 1675450 - DNA, 15 bp, Homo sapiens
ggagcagaagatctt

SEQ ID NO: 1675451 - DNA, 15 bp, Homo sapiens
gagcagaagatcttc

SEQ ID NO: 1675452 - DNA, 15 bp, Homo sapiens
agcagaagatcttct

SEQ ID NO: 1675453 - DNA, 15 bp, Homo sapiens
gcagaagatcttctt

SEQ ID NO: 1675454 - DNA, 15 bp, Homo sapiens
cagaagatcttcttg

SEQ ID NO: 1675455 - DNA, 15 bp, Homo sapiens
agaagatcttcttgt

SEQ ID NO: 1675456 - DNA, 15 bp, Homo sapiens
gaagatcttcttgtt

SEQ ID NO: 1675457 - DNA, 15 bp, Homo sapiens
aagatcttcttgttc

SEQ ID NO: 1675458 - DNA, 15 bp, Homo sapiens
agatcttcttgttca

SEQ ID NO: 1675459 - DNA, 15 bp, Homo sapiens
gatcttcttgttcag

SEQ ID NO: 1675460 - DNA, 15 bp, Homo sapiens
atcttcttgttcagg

SEQ ID NO: 1675461 - DNA, 15 bp, Homo sapiens
tcttcttgttcaggg

SEQ ID NO: 1675462 - DNA, 15 bp, Homo sapiens
cttcttgttcaggga

SEQ ID NO: 1675463 - DNA, 15 bp, Homo sapiens
ttcttgttcagggat

SEQ ID NO: 1675464 - DNA, 15 bp, Homo sapiens
tcttgttcagggatg

SEQ ID NO: 1675465 - DNA, 15 bp, Homo sapiens
cttgttcagggatgt

SEQ ID NO: 1675466 - DNA, 15 bp, Homo sapiens
ttgttcagggatgtt

SEQ ID NO: 1675467 - DNA, 15 bp, Homo sapiens
tgttcagggatgtta

SEQ ID NO: 1675468 - DNA, 15 bp, Homo sapiens
gttcagggatgttac

SEQ ID NO: 1675469 - DNA, 15 bp, Homo sapiens
ttcagggatgttaca

SEQ ID NO: 1675470 - DNA, 15 bp, Homo sapiens
tcagggatgttacac

SEQ ID NO: 1675471 - DNA, 15 bp, Homo sapiens
cagggatgttacacc

SEQ ID NO: 1675472 - DNA, 15 bp, Homo sapiens
agggatgttacaccc

SEQ ID NO: 1675473 - DNA, 15 bp, Homo sapiens
gggatgttacacccc

SEQ ID NO: 1675474 - DNA, 15 bp, Homo sapiens
ggatgttacaccccc

SEQ ID NO: 1675475 - DNA, 15 bp, Homo sapiens
gatgttacacccccg

SEQ ID NO: 1675476 - DNA, 15 bp, Homo sapiens
atgttacacccccgc

SEQ ID NO: 1675477 - DNA, 15 bp, Homo sapiens
tgttacacccccgct

SEQ ID NO: 1675478 - DNA, 15 bp, Homo sapiens
gttacacccccgctt

SEQ ID NO: 1675479 - DNA, 15 bp, Homo sapiens
ttacacccccgcttg

SEQ ID NO: 1675480 - DNA, 15 bp, Homo sapiens
tacacccccgcttgt

SEQ ID NO: 1675481 - DNA, 15 bp, Homo sapiens
acacccccgcttgtg

SEQ ID NO: 1675482 - DNA, 15 bp, Homo sapiens
cacccccgcttgtgg

SEQ ID NO: 1675483 - DNA, 15 bp, Homo sapiens
acccccgcttgtggc

SEQ ID NO: 1675484 - DNA, 15 bp, Homo sapiens
cccccgcttgtggct

SEQ ID NO: 1675485 - DNA, 15 bp, Homo sapiens
ccccgcttgtggcta

SEQ ID NO: 1675486 - DNA, 15 bp, Homo sapiens
cccgcttgtggctag

SEQ ID NO: 1675487 - DNA, 15 bp, Homo sapiens
ccgcttgtggctaga

SEQ ID NO: 1675488 - DNA, 15 bp, Homo sapiens
cgcttgtggctagag

SEQ ID NO: 1675489 - DNA, 15 bp, Homo sapiens
gcttgtggctagagt

SEQ ID NO: 1675490 - DNA, 15 bp, Homo sapiens
cttgtggctagagtg

SEQ ID NO: 1675491 - DNA, 15 bp, Homo sapiens
ttgtggctagagtgt

SEQ ID NO: 1675492 - DNA, 15 bp, Homo sapiens
tgtggctagagtgtg

SEQ ID NO: 1675493 - DNA, 15 bp, Homo sapiens
gtggctagagtgtgg

SEQ ID NO: 1675494 - DNA, 15 bp, Homo sapiens
tggctagagtgtggc

SEQ ID NO: 1675495 - DNA, 15 bp, Homo sapiens
ggctagagtgtggct

SEQ ID NO: 1675496 - DNA, 15 bp, Homo sapiens
gctagagtgtggctt

SEQ ID NO: 1675497 - DNA, 15 bp, Homo sapiens
ctagagtgtggctta

SEQ ID NO: 1675498 - DNA, 15 bp, Homo sapiens
tagagtgtggcttat

SEQ ID NO: 1675499 - DNA, 15 bp, Homo sapiens
agagtgtggcttatc

SEQ ID NO: 1675500 - DNA, 15 bp, Homo sapiens
gagtgtggcttatcc

SEQ ID NO: 1675501 - DNA, 15 bp, Homo sapiens
agtgtggcttatcct

SEQ ID NO: 1675502 - DNA, 15 bp, Homo sapiens
gtgtggcttatcctc

SEQ ID NO: 1675503 - DNA, 15 bp, Homo sapiens
tgtggcttatcctca

SEQ ID NO: 1675504 - DNA, 15 bp, Homo sapiens
gtggcttatcctcag

SEQ ID NO: 1675505 - DNA, 15 bp, Homo sapiens
tggcttatcctcaga

SEQ ID NO: 1675506 - DNA, 15 bp, Homo sapiens
ggcttatcctcagag

SEQ ID NO: 1675507 - DNA, 15 bp, Homo sapiens
gcttatcctcagagc

SEQ ID NO: 1675508 - DNA, 15 bp, Homo sapiens
cttatcctcagagca

SEQ ID NO: 1675509 - DNA, 15 bp, Homo sapiens
ttatcctcagagcaa

SEQ ID NO: 1675510 - DNA, 15 bp, Homo sapiens
tatcctcagagcaag

SEQ ID NO: 1675511 - DNA, 15 bp, Homo sapiens
atcctcagagcaagg

SEQ ID NO: 1675512 - DNA, 15 bp, Homo sapiens
tcctcagagcaagga

SEQ ID NO: 1675513 - DNA, 15 bp, Homo sapiens
cctcagagcaaggat

SEQ ID NO: 1675514 - DNA, 15 bp, Homo sapiens
ctcagagcaaggata

SEQ ID NO: 1675515 - DNA, 15 bp, Homo sapiens
tcagagcaaggatag

SEQ ID NO: 1675516 - DNA, 15 bp, Homo sapiens
cagagcaaggatagg

SEQ ID NO: 1675517 - DNA, 15 bp, Homo sapiens
agagcaaggataggg

SEQ ID NO: 1675518 - DNA, 15 bp, Homo sapiens
gagcaaggatagggg

SEQ ID NO: 1675519 - DNA, 15 bp, Homo sapiens
agcaaggatagggga

SEQ ID NO: 1675520 - DNA, 15 bp, Homo sapiens
gcaaggataggggaa

SEQ ID NO: 1675521 - DNA, 15 bp, Homo sapiens
caaggataggggaac

SEQ ID NO: 1675522 - DNA, 15 bp, Homo sapiens
aaggataggggaacc

SEQ ID NO: 1675523 - DNA, 15 bp, Homo sapiens
aggataggggaacca

SEQ ID NO: 1675524 - DNA, 15 bp, Homo sapiens
ggataggggaaccat

SEQ ID NO: 1675525 - DNA, 15 bp, Homo sapiens
gataggggaaccatg

SEQ ID NO: 1675526 - DNA, 15 bp, Homo sapiens
ataggggaaccatgg

SEQ ID NO: 1675527 - DNA, 15 bp, Homo sapiens
taggggaaccatggc

SEQ ID NO: 1675528 - DNA, 15 bp, Homo sapiens
aggggaaccatggca

SEQ ID NO: 1675529 - DNA, 15 bp, Homo sapiens
ggggaaccatggcac

SEQ ID NO: 1675530 - DNA, 15 bp, Homo sapiens
gggaaccatggcact

SEQ ID NO: 1675531 - DNA, 15 bp, Homo sapiens
ggaaccatggcactc

SEQ ID NO: 1675532 - DNA, 15 bp, Homo sapiens
gaaccatggcactct

SEQ ID NO: 1675533 - DNA, 15 bp, Homo sapiens
aaccatggcactctg

SEQ ID NO: 1675534 - DNA, 15 bp, Homo sapiens
accatggcactctgc

SEQ ID NO: 1675535 - DNA, 15 bp, Homo sapiens
ccatggcactctgca

SEQ ID NO: 1675536 - DNA, 15 bp, Homo sapiens
catggcactctgcag

SEQ ID NO: 1675537 - DNA, 15 bp, Homo sapiens
atggcactctgcagg

SEQ ID NO: 1675538 - DNA, 15 bp, Homo sapiens
tggcactctgcaggc

SEQ ID NO: 1675539 - DNA, 15 bp, Homo sapiens
ggcactctgcaggct

SEQ ID NO: 1675540 - DNA, 15 bp, Homo sapiens
gcactctgcaggctc

SEQ ID NO: 1675541 - DNA, 15 bp, Homo sapiens
cactctgcaggctca

SEQ ID NO: 1675542 - DNA, 15 bp, Homo sapiens
actctgcaggctcag

SEQ ID NO: 1675543 - DNA, 15 bp, Homo sapiens
ctctgcaggctcagc

SEQ ID NO: 1675544 - DNA, 15 bp, Homo sapiens
tctgcaggctcagca

SEQ ID NO: 1675545 - DNA, 15 bp, Homo sapiens
ctgcaggctcagcac

SEQ ID NO: 1675546 - DNA, 15 bp, Homo sapiens
tgcaggctcagcact

SEQ ID NO: 1675547 - DNA, 15 bp, Homo sapiens
gcaggctcagcactg

SEQ ID NO: 1675548 - DNA, 15 bp, Homo sapiens
caggctcagcactga

SEQ ID NO: 1675549 - DNA, 15 bp, Homo sapiens
aggctcagcactgaa

SEQ ID NO: 1675550 - DNA, 15 bp, Homo sapiens
ggctcagcactgaag

SEQ ID NO: 1675551 - DNA, 15 bp, Homo sapiens
gctcagcactgaaga

SEQ ID NO: 1675552 - DNA, 15 bp, Homo sapiens
ctcagcactgaagac

SEQ ID NO: 1675553 - DNA, 15 bp, Homo sapiens
tcagcactgaagaca

SEQ ID NO: 1675554 - DNA, 15 bp, Homo sapiens
cagcactgaagacac

SEQ ID NO: 1675555 - DNA, 15 bp, Homo sapiens
agcactgaagacacg

SEQ ID NO: 1675556 - DNA, 15 bp, Homo sapiens
gcactgaagacacgg

SEQ ID NO: 1675557 - DNA, 15 bp, Homo sapiens
cactgaagacacgga

SEQ ID NO: 1675558 - DNA, 15 bp, Homo sapiens
actgaagacacggat

SEQ ID NO: 1675559 - DNA, 15 bp, Homo sapiens
ctgaagacacggatg

SEQ ID NO: 1675560 - DNA, 15 bp, Homo sapiens
tgaagacacggatgc

SEQ ID NO: 1675561 - DNA, 15 bp, Homo sapiens
gaagacacggatgca

SEQ ID NO: 1675562 - DNA, 15 bp, Homo sapiens
aagacacggatgcag

SEQ ID NO: 1675563 - DNA, 15 bp, Homo sapiens
agacacggatgcagg

SEQ ID NO: 1675564 - DNA, 15 bp, Homo sapiens
gacacggatgcaggc

SEQ ID NO: 1675565 - DNA, 15 bp, Homo sapiens
acacggatgcaggct

SEQ ID NO: 1675566 - DNA, 15 bp, Homo sapiens
cacggatgcaggctc

SEQ ID NO: 1675567 - DNA, 15 bp, Homo sapiens
acggatgcaggctct

SEQ ID NO: 1675568 - DNA, 15 bp, Homo sapiens
cggatgcaggctctg

SEQ ID NO: 1675569 - DNA, 15 bp, Homo sapiens
ggatgcaggctctgc

SEQ ID NO: 1675570 - DNA, 15 bp, Homo sapiens
gatgcaggctctgct

SEQ ID NO: 1675571 - DNA, 15 bp, Homo sapiens
atgcaggctctgctt

SEQ ID NO: 1675572 - DNA, 15 bp, Homo sapiens
tgcaggctctgcttc

SEQ ID NO: 1675573 - DNA, 15 bp, Homo sapiens
gcaggctctgcttct

SEQ ID NO: 1675574 - DNA, 15 bp, Homo sapiens
caggctctgcttctg

SEQ ID NO: 1675575 - DNA, 15 bp, Homo sapiens
aggctctgcttctga

SEQ ID NO: 1675576 - DNA, 15 bp, Homo sapiens
ggctctgcttctgac

SEQ ID NO: 1675577 - DNA, 15 bp, Homo sapiens
gctctgcttctgacc

SEQ ID NO: 1675578 - DNA, 15 bp, Homo sapiens
ctctgcttctgacct

SEQ ID NO: 1675579 - DNA, 15 bp, Homo sapiens
tctgcttctgaccta

SEQ ID NO: 1675580 - DNA, 15 bp, Homo sapiens
ctgcttctgacctag

SEQ ID NO: 1675581 - DNA, 15 bp, Homo sapiens
tgcttctgacctaga

SEQ ID NO: 1675582 - DNA, 15 bp, Homo sapiens
gcttctgacctagat

SEQ ID NO: 1675583 - DNA, 15 bp, Homo sapiens
cttctgacctagatt

SEQ ID NO: 1675584 - DNA, 15 bp, Homo sapiens
ttctgacctagattg

SEQ ID NO: 1675585 - DNA, 15 bp, Homo sapiens
tctgacctagattga

SEQ ID NO: 1675586 - DNA, 15 bp, Homo sapiens
ctgacctagattgac

SEQ ID NO: 1675587 - DNA, 15 bp, Homo sapiens
tgacctagattgacc

SEQ ID NO: 1675588 - DNA, 15 bp, Homo sapiens
gacctagattgacct

SEQ ID NO: 1675589 - DNA, 15 bp, Homo sapiens
acctagattgacctt

SEQ ID NO: 1675590 - DNA, 15 bp, Homo sapiens
cctagattgaccttg

SEQ ID NO: 1675591 - DNA, 15 bp, Homo sapiens
ctagattgaccttgg

SEQ ID NO: 1675592 - DNA, 15 bp, Homo sapiens
tagattgaccttggg

SEQ ID NO: 1675593 - DNA, 15 bp, Homo sapiens
agattgaccttgggc

SEQ ID NO: 1675594 - DNA, 15 bp, Homo sapiens
gattgaccttgggca

SEQ ID NO: 1675595 - DNA, 15 bp, Homo sapiens
attgaccttgggcaa

SEQ ID NO: 1675596 - DNA, 15 bp, Homo sapiens
ttgaccttgggcaag

SEQ ID NO: 1675597 - DNA, 15 bp, Homo sapiens
tgaccttgggcaagg

SEQ ID NO: 1675598 - DNA, 15 bp, Homo sapiens
gaccttgggcaaggc

SEQ ID NO: 1675599 - DNA, 15 bp, Homo sapiens
accttgggcaaggcc

SEQ ID NO: 1675600 - DNA, 15 bp, Homo sapiens
ccttgggcaaggccc

SEQ ID NO: 1675601 - DNA, 15 bp, Homo sapiens
cttgggcaaggccct

SEQ ID NO: 1675602 - DNA, 15 bp, Homo sapiens
ttgggcaaggccctt

SEQ ID NO: 1675603 - DNA, 15 bp, Homo sapiens
tgggcaaggcccttt

SEQ ID NO: 1675604 - DNA, 15 bp, Homo sapiens
gggcaaggccctttg

SEQ ID NO: 1675605 - DNA, 15 bp, Homo sapiens
ggcaaggccctttgc

SEQ ID NO: 1675606 - DNA, 15 bp, Homo sapiens
gcaaggccctttgct

SEQ ID NO: 1675607 - DNA, 15 bp, Homo sapiens
caaggccctttgctc

SEQ ID NO: 1675608 - DNA, 15 bp, Homo sapiens
aaggccctttgctcc

SEQ ID NO: 1675609 - DNA, 15 bp, Homo sapiens
aggccctttgctcct

SEQ ID NO: 1675610 - DNA, 15 bp, Homo sapiens
ggccctttgctcctc

SEQ ID NO: 1675611 - DNA, 15 bp, Homo sapiens
gccctttgctcctct

SEQ ID NO: 1675612 - DNA, 15 bp, Homo sapiens
ccctttgctcctctg

SEQ ID NO: 1675613 - DNA, 15 bp, Homo sapiens
cctttgctcctctga

SEQ ID NO: 1675614 - DNA, 15 bp, Homo sapiens
ctttgctcctctgat

SEQ ID NO: 1675615 - DNA, 15 bp, Homo sapiens
tttgctcctctgatc

SEQ ID NO: 1675616 - DNA, 15 bp, Homo sapiens
ttgctcctctgatcc

SEQ ID NO: 1675617 - DNA, 15 bp, Homo sapiens
tgctcctctgatccc

SEQ ID NO: 1675618 - DNA, 15 bp, Homo sapiens
gctcctctgatccca

SEQ ID NO: 1675619 - DNA, 15 bp, Homo sapiens
ctcctctgatcccaa

SEQ ID NO: 1675620 - DNA, 15 bp, Homo sapiens
tcctctgatcccaat

SEQ ID NO: 1675621 - DNA, 15 bp, Homo sapiens
cctctgatcccaatt

SEQ ID NO: 1675622 - DNA, 15 bp, Homo sapiens
ctctgatcccaattt

SEQ ID NO: 1675623 - DNA, 15 bp, Homo sapiens
tctgatcccaatttc

SEQ ID NO: 1675624 - DNA, 15 bp, Homo sapiens
ctgatcccaatttct

SEQ ID NO: 1675625 - DNA, 15 bp, Homo sapiens
tgatcccaatttctt

SEQ ID NO: 1675626 - DNA, 15 bp, Homo sapiens
gatcccaatttcttc

SEQ ID NO: 1675627 - DNA, 15 bp, Homo sapiens
atcccaatttcttca

SEQ ID NO: 1675628 - DNA, 15 bp, Homo sapiens
tcccaatttcttcac

SEQ ID NO: 1675629 - DNA, 15 bp, Homo sapiens
cccaatttcttcacc

SEQ ID NO: 1675630 - DNA, 15 bp, Homo sapiens
ccaatttcttcacca

SEQ ID NO: 1675631 - DNA, 15 bp, Homo sapiens
caatttcttcaccag

SEQ ID NO: 1675632 - DNA, 15 bp, Homo sapiens
aatttcttcaccagc

SEQ ID NO: 1675633 - DNA, 15 bp, Homo sapiens
atttcttcaccagcc

SEQ ID NO: 1675634 - DNA, 15 bp, Homo sapiens
tttcttcaccagcca

SEQ ID NO: 1675635 - DNA, 15 bp, Homo sapiens
ttcttcaccagccaa

SEQ ID NO: 1675636 - DNA, 15 bp, Homo sapiens
tcttcaccagccaag

SEQ ID NO: 1675637 - DNA, 15 bp, Homo sapiens
cttcaccagccaagt

SEQ ID NO: 1675638 - DNA, 15 bp, Homo sapiens
ttcaccagccaagta

SEQ ID NO: 1675639 - DNA, 15 bp, Homo sapiens
tcaccagccaagtaa

SEQ ID NO: 1675640 - DNA, 15 bp, Homo sapiens
caccagccaagtaag

SEQ ID NO: 1675641 - DNA, 15 bp, Homo sapiens
accagccaagtaaga

SEQ ID NO: 1675642 - DNA, 15 bp, Homo sapiens
ccagccaagtaagaa

SEQ ID NO: 1675643 - DNA, 15 bp, Homo sapiens
cagccaagtaagaac

SEQ ID NO: 1675644 - DNA, 15 bp, Homo sapiens
agccaagtaagaaca

SEQ ID NO: 1675645 - DNA, 15 bp, Homo sapiens
gccaagtaagaacat

SEQ ID NO: 1675646 - DNA, 15 bp, Homo sapiens
ccaagtaagaacatc

SEQ ID NO: 1675647 - DNA, 15 bp, Homo sapiens
caagtaagaacatca

SEQ ID NO: 1675648 - DNA, 15 bp, Homo sapiens
aagtaagaacatcag

SEQ ID NO: 1675649 - DNA, 15 bp, Homo sapiens
agtaagaacatcaga

SEQ ID NO: 1675650 - DNA, 15 bp, Homo sapiens
gtaagaacatcagac

SEQ ID NO: 1675651 - DNA, 15 bp, Homo sapiens
taagaacatcagacc

SEQ ID NO: 1675652 - DNA, 15 bp, Homo sapiens
aagaacatcagacca

SEQ ID NO: 1675653 - DNA, 15 bp, Homo sapiens
agaacatcagaccac

SEQ ID NO: 1675654 - DNA, 15 bp, Homo sapiens
gaacatcagaccaca

SEQ ID NO: 1675655 - DNA, 15 bp, Homo sapiens
aacatcagaccacaa

SEQ ID NO: 1675656 - DNA, 15 bp, Homo sapiens
acatcagaccacaag

SEQ ID NO: 1675657 - DNA, 15 bp, Homo sapiens
catcagaccacaagc

SEQ ID NO: 1675658 - DNA, 15 bp, Homo sapiens
atcagaccacaagcc

SEQ ID NO: 1675659 - DNA, 15 bp, Homo sapiens
tcagaccacaagccc

SEQ ID NO: 1675660 - DNA, 15 bp, Homo sapiens
cagaccacaagccct

SEQ ID NO: 1675661 - DNA, 15 bp, Homo sapiens
agaccacaagccctc

SEQ ID NO: 1675662 - DNA, 15 bp, Homo sapiens
gaccacaagccctct

SEQ ID NO: 1675663 - DNA, 15 bp, Homo sapiens
accacaagccctcta

SEQ ID NO: 1675664 - DNA, 15 bp, Homo sapiens
ccacaagccctctag

SEQ ID NO: 1675665 - DNA, 15 bp, Homo sapiens
cacaagccctctagg

SEQ ID NO: 1675666 - DNA, 15 bp, Homo sapiens
acaagccctctaggg

SEQ ID NO: 1675667 - DNA, 15 bp, Homo sapiens
caagccctctagggc

SEQ ID NO: 1675668 - DNA, 15 bp, Homo sapiens
aagccctctagggct

SEQ ID NO: 1675669 - DNA, 15 bp, Homo sapiens
agccctctagggctc

SEQ ID NO: 1675670 - DNA, 15 bp, Homo sapiens
gccctctagggctct

SEQ ID NO: 1675671 - DNA, 15 bp, Homo sapiens
ccctctagggctctg

SEQ ID NO: 1675672 - DNA, 15 bp, Homo sapiens
cctctagggctctgt

SEQ ID NO: 1675673 - DNA, 15 bp, Homo sapiens
ctctagggctctgtc

SEQ ID NO: 1675674 - DNA, 15 bp, Homo sapiens
tctagggctctgtcc

SEQ ID NO: 1675675 - DNA, 15 bp, Homo sapiens
ctagggctctgtcca

SEQ ID NO: 1675676 - DNA, 15 bp, Homo sapiens
tagggctctgtccaa

SEQ ID NO: 1675677 - DNA, 15 bp, Homo sapiens
agggctctgtccaaa

SEQ ID NO: 1675678 - DNA, 15 bp, Homo sapiens
gggctctgtccaaat

SEQ ID NO: 1675679 - DNA, 15 bp, Homo sapiens
ggctctgtccaaatg

SEQ ID NO: 1675680 - DNA, 15 bp, Homo sapiens
gctctgtccaaatgc

SEQ ID NO: 1675681 - DNA, 15 bp, Homo sapiens
ctctgtccaaatgcc

SEQ ID NO: 1675682 - DNA, 15 bp, Homo sapiens
tctgtccaaatgccc

SEQ ID NO: 1675683 - DNA, 15 bp, Homo sapiens
ctgtccaaatgcccc

SEQ ID NO: 1675684 - DNA, 15 bp, Homo sapiens
tgtccaaatgcccca

SEQ ID NO: 1675685 - DNA, 15 bp, Homo sapiens
gtccaaatgccccat

SEQ ID NO: 1675686 - DNA, 15 bp, Homo sapiens
tccaaatgccccatg

SEQ ID NO: 1675687 - DNA, 15 bp, Homo sapiens
ccaaatgccccatga

SEQ ID NO: 1675688 - DNA, 15 bp, Homo sapiens
caaatgccccatgac

SEQ ID NO: 1675689 - DNA, 15 bp, Homo sapiens
aaatgccccatgact

SEQ ID NO: 1675690 - DNA, 15 bp, Homo sapiens
aatgccccatgactg

SEQ ID NO: 1675691 - DNA, 15 bp, Homo sapiens
atgccccatgactga

SEQ ID NO: 1675692 - DNA, 15 bp, Homo sapiens
tgccccatgactgag

SEQ ID NO: 1675693 - DNA, 15 bp, Homo sapiens
gccccatgactgagt

SEQ ID NO: 1675694 - DNA, 15 bp, Homo sapiens
ccccatgactgagtg

SEQ ID NO: 1675695 - DNA, 15 bp, Homo sapiens
cccatgactgagtga

SEQ ID NO: 1675696 - DNA, 15 bp, Homo sapiens
ccatgactgagtgaa

SEQ ID NO: 1675697 - DNA, 15 bp, Homo sapiens
catgactgagtgaac

SEQ ID NO: 1675698 - DNA, 15 bp, Homo sapiens
atgactgagtgaact

SEQ ID NO: 1675699 - DNA, 15 bp, Homo sapiens
tgactgagtgaactg

SEQ ID NO: 1675700 - DNA, 15 bp, Homo sapiens
gactgagtgaactgg

SEQ ID NO: 1675701 - DNA, 15 bp, Homo sapiens
actgagtgaactggt

SEQ ID NO: 1675702 - DNA, 15 bp, Homo sapiens
ctgagtgaactggta

SEQ ID NO: 1675703 - DNA, 15 bp, Homo sapiens
tgagtgaactggtag

SEQ ID NO: 1675704 - DNA, 15 bp, Homo sapiens
gagtgaactggtaga

SEQ ID NO: 1675705 - DNA, 15 bp, Homo sapiens
agtgaactggtagaa

SEQ ID NO: 1675706 - DNA, 15 bp, Homo sapiens
gtgaactggtagaac

SEQ ID NO: 1675707 - DNA, 15 bp, Homo sapiens
tgaactggtagaaca

SEQ ID NO: 1675708 - DNA, 15 bp, Homo sapiens
gaactggtagaacat

SEQ ID NO: 1675709 - DNA, 15 bp, Homo sapiens
aactggtagaacatt

SEQ ID NO: 1675710 - DNA, 15 bp, Homo sapiens
actggtagaacattc

SEQ ID NO: 1675711 - DNA, 15 bp, Homo sapiens
ctggtagaacattct

SEQ ID NO: 1675712 - DNA, 15 bp, Homo sapiens
tggtagaacattcta

SEQ ID NO: 1675713 - DNA, 15 bp, Homo sapiens
ggtagaacattctat

SEQ ID NO: 1675714 - DNA, 15 bp, Homo sapiens
gtagaacattctatg

SEQ ID NO: 1675715 - DNA, 15 bp, Homo sapiens
tagaacattctatgt

SEQ ID NO: 1675716 - DNA, 15 bp, Homo sapiens
agaacattctatgtg

SEQ ID NO: 1675717 - DNA, 15 bp, Homo sapiens
gaacattctatgtgt

SEQ ID NO: 1675718 - DNA, 15 bp, Homo sapiens
aacattctatgtgtg

SEQ ID NO: 1675719 - DNA, 15 bp, Homo sapiens
acattctatgtgtgt

SEQ ID NO: 1675720 - DNA, 15 bp, Homo sapiens
cattctatgtgtgtg

SEQ ID NO: 1675721 - DNA, 15 bp, Homo sapiens
attctatgtgtgtgt

SEQ ID NO: 1675722 - DNA, 15 bp, Homo sapiens
ttctatgtgtgtgtc

SEQ ID NO: 1675723 - DNA, 15 bp, Homo sapiens
tctatgtgtgtgtca

SEQ ID NO: 1675724 - DNA, 15 bp, Homo sapiens
ctatgtgtgtgtcac

SEQ ID NO: 1675725 - DNA, 15 bp, Homo sapiens
tatgtgtgtgtcaca

SEQ ID NO: 1675726 - DNA, 15 bp, Homo sapiens
atgtgtgtgtcacaa

SEQ ID NO: 1675727 - DNA, 15 bp, Homo sapiens
tgtgtgtgtcacaac

SEQ ID NO: 1675728 - DNA, 15 bp, Homo sapiens
gtgtgtgtcacaaca

SEQ ID NO: 1675729 - DNA, 15 bp, Homo sapiens
tgtgtgtcacaacat

SEQ ID NO: 1675730 - DNA, 15 bp, Homo sapiens
gtgtgtcacaacatg

SEQ ID NO: 1675731 - DNA, 15 bp, Homo sapiens
tgtgtcacaacatga

SEQ ID NO: 1675732 - DNA, 15 bp, Homo sapiens
gtgtcacaacatgaa

SEQ ID NO: 1675733 - DNA, 15 bp, Homo sapiens
tgtcacaacatgaag

SEQ ID NO: 1675734 - DNA, 15 bp, Homo sapiens
gtcacaacatgaaga

SEQ ID NO: 1675735 - DNA, 15 bp, Homo sapiens
tcacaacatgaagag

SEQ ID NO: 1675736 - DNA, 15 bp, Homo sapiens
cacaacatgaagagc

SEQ ID NO: 1675737 - DNA, 15 bp, Homo sapiens
acaacatgaagagca

SEQ ID NO: 1675738 - DNA, 15 bp, Homo sapiens
caacatgaagagcaa

SEQ ID NO: 1675739 - DNA, 15 bp, Homo sapiens
aacatgaagagcaaa

SEQ ID NO: 1675740 - DNA, 15 bp, Homo sapiens
acatgaagagcaaag

SEQ ID NO: 1675741 - DNA, 15 bp, Homo sapiens
catgaagagcaaaga

SEQ ID NO: 1675742 - DNA, 15 bp, Homo sapiens
atgaagagcaaagac

SEQ ID NO: 1675743 - DNA, 15 bp, Homo sapiens
tgaagagcaaagact

SEQ ID NO: 1675744 - DNA, 15 bp, Homo sapiens
gaagagcaaagactt

SEQ ID NO: 1675745 - DNA, 15 bp, Homo sapiens
aagagcaaagacttt

SEQ ID NO: 1675746 - DNA, 15 bp, Homo sapiens
agagcaaagactttc

SEQ ID NO: 1675747 - DNA, 15 bp, Homo sapiens
gagcaaagactttca

SEQ ID NO: 1675748 - DNA, 15 bp, Homo sapiens
agcaaagactttcat

SEQ ID NO: 1675749 - DNA, 15 bp, Homo sapiens
gcaaagactttcatc

SEQ ID NO: 1675750 - DNA, 15 bp, Homo sapiens
caaagactttcatct

SEQ ID NO: 1675751 - DNA, 15 bp, Homo sapiens
aaagactttcatctc

SEQ ID NO: 1675752 - DNA, 15 bp, Homo sapiens
aagactttcatctcc

SEQ ID NO: 1675753 - DNA, 15 bp, Homo sapiens
agactttcatctccc

SEQ ID NO: 1675754 - DNA, 15 bp, Homo sapiens
gactttcatctcccc

SEQ ID NO: 1675755 - DNA, 15 bp, Homo sapiens
actttcatctcccca

SEQ ID NO: 1675756 - DNA, 15 bp, Homo sapiens
ctttcatctccccaa

SEQ ID NO: 1675757 - DNA, 15 bp, Homo sapiens
tttcatctccccaaa

SEQ ID NO: 1675758 - DNA, 15 bp, Homo sapiens
ttcatctccccaaat

SEQ ID NO: 1675759 - DNA, 15 bp, Homo sapiens
tcatctccccaaata

SEQ ID NO: 1675760 - DNA, 15 bp, Homo sapiens
catctccccaaataa

SEQ ID NO: 1675761 - DNA, 15 bp, Homo sapiens
atctccccaaataat

SEQ ID NO: 1675762 - DNA, 15 bp, Homo sapiens
tctccccaaataatt

SEQ ID NO: 1675763 - DNA, 15 bp, Homo sapiens
ctccccaaataattt

SEQ ID NO: 1675764 - DNA, 15 bp, Homo sapiens
tccccaaataatttt

SEQ ID NO: 1675765 - DNA, 15 bp, Homo sapiens
ccccaaataattttg

SEQ ID NO: 1675766 - DNA, 15 bp, Homo sapiens
cccaaataattttgt

SEQ ID NO: 1675767 - DNA, 15 bp, Homo sapiens
ccaaataattttgtt

SEQ ID NO: 1675768 - DNA, 15 bp, Homo sapiens
caaataattttgttt

SEQ ID NO: 1675769 - DNA, 15 bp, Homo sapiens
aaataattttgtttt

SEQ ID NO: 1675770 - DNA, 15 bp, Homo sapiens
aataattttgttttt

SEQ ID NO: 1675771 - DNA, 15 bp, Homo sapiens
ataattttgtttttc

SEQ ID NO: 1675772 - DNA, 15 bp, Homo sapiens
taattttgtttttcg

SEQ ID NO: 1675773 - DNA, 15 bp, Homo sapiens
aattttgtttttcgt

SEQ ID NO: 1675774 - DNA, 15 bp, Homo sapiens
attttgtttttcgtt

SEQ ID NO: 1675775 - DNA, 15 bp, Homo sapiens
ttgtttttcgtttta

SEQ ID NO: 1675776 - DNA, 15 bp, Homo sapiens
tgtttttcgttttag

SEQ ID NO: 1675777 - DNA, 15 bp, Homo sapiens
gtttttcgttttagg

SEQ ID NO: 1675778 - DNA, 15 bp, Homo sapiens
tttttcgttttagga

SEQ ID NO: 1675779 - DNA, 15 bp, Homo sapiens
ttttcgttttaggaa

SEQ ID NO: 1675780 - DNA, 15 bp, Homo sapiens
tttcgttttaggaat

SEQ ID NO: 1675781 - DNA, 15 bp, Homo sapiens
ttcgttttaggaatt

SEQ ID NO: 1675782 - DNA, 15 bp, Homo sapiens
tcgttttaggaatta

SEQ ID NO: 1675783 - DNA, 15 bp, Homo sapiens
cgttttaggaattaa

SEQ ID NO: 1675784 - DNA, 15 bp, Homo sapiens
gttttaggaattaaa

SEQ ID NO: 1675785 - DNA, 15 bp, Homo sapiens
ttttaggaattaaat

SEQ ID NO: 1675786 - DNA, 15 bp, Homo sapiens
tttaggaattaaatt

SEQ ID NO: 1675787 - DNA, 15 bp, Homo sapiens
ttaggaattaaattt

SEQ ID NO: 1675788 - DNA, 15 bp, Homo sapiens
taggaattaaatttc

SEQ ID NO: 1675789 - DNA, 15 bp, Homo sapiens
aggaattaaatttca

SEQ ID NO: 1675790 - DNA, 15 bp, Homo sapiens
ggaattaaatttcag

SEQ ID NO: 1675791 - DNA, 15 bp, Homo sapiens
gaattaaatttcaga

SEQ ID NO: 1675792 - DNA, 15 bp, Homo sapiens
aattaaatttcagat

SEQ ID NO: 1675793 - DNA, 15 bp, Homo sapiens
attaaatttcagatt

SEQ ID NO: 1675794 - DNA, 15 bp, Homo sapiens
ttaaatttcagattc

SEQ ID NO: 1675795 - DNA, 15 bp, Homo sapiens
taaatttcagattca

SEQ ID NO: 1675796 - DNA, 15 bp, Homo sapiens
aaatttcagattcac

SEQ ID NO: 1675797 - DNA, 15 bp, Homo sapiens
aatttcagattcact

SEQ ID NO: 1675798 - DNA, 15 bp, Homo sapiens
atttcagattcactc

SEQ ID NO: 1675799 - DNA, 15 bp, Homo sapiens
tttcagattcactct

SEQ ID NO: 1675800 - DNA, 15 bp, Homo sapiens
ttcagattcactcta

SEQ ID NO: 1675801 - DNA, 15 bp, Homo sapiens
tcagattcactctaa

SEQ ID NO: 1675802 - DNA, 15 bp, Homo sapiens
cagattcactctaat

SEQ ID NO: 1675803 - DNA, 15 bp, Homo sapiens
agattcactctaatt

SEQ ID NO: 1675804 - DNA, 15 bp, Homo sapiens
gattcactctaattg

SEQ ID NO: 1675805 - DNA, 15 bp, Homo sapiens
attcactctaattgc

SEQ ID NO: 1675806 - DNA, 15 bp, Homo sapiens
ttcactctaattgcc

SEQ ID NO: 1675807 - DNA, 15 bp, Homo sapiens
tcactctaattgcca

SEQ ID NO: 1675808 - DNA, 15 bp, Homo sapiens
cactctaattgccaa

SEQ ID NO: 1675809 - DNA, 15 bp, Homo sapiens
actctaattgccaat

SEQ ID NO: 1675810 - DNA, 15 bp, Homo sapiens
ctctaattgccaata

SEQ ID NO: 1675811 - DNA, 15 bp, Homo sapiens
tctaattgccaatac

SEQ ID NO: 1675812 - DNA, 15 bp, Homo sapiens
ctaattgccaatact

SEQ ID NO: 1675813 - DNA, 15 bp, Homo sapiens
taattgccaatacta

SEQ ID NO: 1675814 - DNA, 15 bp, Homo sapiens
aattgccaatactaa

SEQ ID NO: 1675815 - DNA, 15 bp, Homo sapiens
attgccaatactaaa

SEQ ID NO: 1675816 - DNA, 15 bp, Homo sapiens
ttgccaatactaaaa

SEQ ID NO: 1675817 - DNA, 15 bp, Homo sapiens
tgccaatactaaaat

SEQ ID NO: 1675818 - DNA, 15 bp, Homo sapiens
gccaatactaaaatt

SEQ ID NO: 1675819 - DNA, 15 bp, Homo sapiens
ccaatactaaaattc

SEQ ID NO: 1675820 - DNA, 15 bp, Homo sapiens
caatactaaaattct

SEQ ID NO: 1675821 - DNA, 15 bp, Homo sapiens
aatactaaaattctc

SEQ ID NO: 1675822 - DNA, 15 bp, Homo sapiens
atactaaaattctct

SEQ ID NO: 1675823 - DNA, 15 bp, Homo sapiens
tactaaaattctcta

SEQ ID NO: 1675824 - DNA, 15 bp, Homo sapiens
actaaaattctctat

SEQ ID NO: 1675825 - DNA, 15 bp, Homo sapiens
ctaaaattctctata

SEQ ID NO: 1675826 - DNA, 15 bp, Homo sapiens
taaaattctctatat

SEQ ID NO: 1675827 - DNA, 15 bp, Homo sapiens
aaaattctctatatg

SEQ ID NO: 1675828 - DNA, 15 bp, Homo sapiens
aaattctctatatgc

SEQ ID NO: 1675829 - DNA, 15 bp, Homo sapiens
aattctctatatgca

SEQ ID NO: 1675830 - DNA, 15 bp, Homo sapiens
attctctatatgcag

SEQ ID NO: 1675831 - DNA, 15 bp, Homo sapiens
ttctctatatgcagt

SEQ ID NO: 1675832 - DNA, 15 bp, Homo sapiens
tctctatatgcagtt

SEQ ID NO: 1675833 - DNA, 15 bp, Homo sapiens
ctctatatgcagttc

SEQ ID NO: 1675834 - DNA, 15 bp, Homo sapiens
tctatatgcagttct

SEQ ID NO: 1675835 - DNA, 15 bp, Homo sapiens
ctatatgcagttcta

SEQ ID NO: 1675836 - DNA, 15 bp, Homo sapiens
tatatgcagttctaa

SEQ ID NO: 1675837 - DNA, 15 bp, Homo sapiens
atatgcagttctaaa

SEQ ID NO: 1675838 - DNA, 15 bp, Homo sapiens
tatgcagttctaaac

SEQ ID NO: 1675839 - DNA, 15 bp, Homo sapiens
atgcagttctaaact

SEQ ID NO: 1675840 - DNA, 15 bp, Homo sapiens
tgcagttctaaactt

SEQ ID NO: 1675841 - DNA, 15 bp, Homo sapiens
gcagttctaaacttg

SEQ ID NO: 1675842 - DNA, 15 bp, Homo sapiens
cagttctaaacttga

SEQ ID NO: 1675843 - DNA, 15 bp, Homo sapiens
agttctaaacttgac

SEQ ID NO: 1675844 - DNA, 15 bp, Homo sapiens
gttctaaacttgaca

SEQ ID NO: 1675845 - DNA, 15 bp, Homo sapiens
ttctaaacttgacaa

SEQ ID NO: 1675846 - DNA, 15 bp, Homo sapiens
tctaaacttgacaaa

SEQ ID NO: 1675847 - DNA, 15 bp, Homo sapiens
ctaaacttgacaaac

SEQ ID NO: 1675848 - DNA, 15 bp, Homo sapiens
taaacttgacaaacc

SEQ ID NO: 1675849 - DNA, 15 bp, Homo sapiens
aaacttgacaaacca

SEQ ID NO: 1675850 - DNA, 15 bp, Homo sapiens
aacttgacaaaccaa

SEQ ID NO: 1675851 - DNA, 15 bp, Homo sapiens
acttgacaaaccaat

SEQ ID NO: 1675852 - DNA, 15 bp, Homo sapiens
cttgacaaaccaata

SEQ ID NO: 1675853 - DNA, 15 bp, Homo sapiens
ttgacaaaccaataa

SEQ ID NO: 1675854 - DNA, 15 bp, Homo sapiens
tgacaaaccaataaa

SEQ ID NO: 1675855 - DNA, 15 bp, Homo sapiens
gacaaaccaataaaa

SEQ ID NO: 1675856 - DNA, 15 bp, Homo sapiens
acaaaccaataaaaa

SEQ ID NO: 1675857 - DNA, 15 bp, Homo sapiens
caaaccaataaaaaa

SEQ ID NO: 1675858 - DNA, 15 bp, Homo sapiens
aaaccaataaaaaaa

SEQ ID NO: 1675859 - DNA, 15 bp, Homo sapiens
aaccaataaaaaaag

SEQ ID NO: 1675860 - DNA, 15 bp, Homo sapiens
accaataaaaaaaga

SEQ ID NO: 1675861 - DNA, 15 bp, Homo sapiens
ccaataaaaaaagat

SEQ ID NO: 1675862 - DNA, 15 bp, Homo sapiens
caataaaaaaagatt

SEQ ID NO: 1675863 - DNA, 15 bp, Homo sapiens
aataaaaaaagatta

SEQ ID NO: 1675864 - DNA, 15 bp, Homo sapiens
ataaaaaaagattat

SEQ ID NO: 1675865 - DNA, 15 bp, Homo sapiens
taaaaaaagattatt

SEQ ID NO: 1675866 - DNA, 15 bp, Homo sapiens
aaaaaagattatttg

SEQ ID NO: 1675867 - DNA, 15 bp, Homo sapiens
aaaaagattatttga

SEQ ID NO: 1675868 - DNA, 15 bp, Homo sapiens
aaaagattatttgac

SEQ ID NO: 1675869 - DNA, 15 bp, Homo sapiens
aaagattatttgact

SEQ ID NO: 1675870 - DNA, 15 bp, Homo sapiens
aagattatttgacta

SEQ ID NO: 1675871 - DNA, 15 bp, Homo sapiens
agattatttgactac

SEQ ID NO: 1675872 - DNA, 15 bp, Homo sapiens
gattatttgactact

SEQ ID NO: 1675873 - DNA, 15 bp, Homo sapiens
attatttgactactt

SEQ ID NO: 1675874 - DNA, 15 bp, Homo sapiens
ttatttgactactta

SEQ ID NO: 1675875 - DNA, 15 bp, Homo sapiens
tatttgactacttat

SEQ ID NO: 1675876 - DNA, 15 bp, Homo sapiens
atttgactacttatc

SEQ ID NO: 1675877 - DNA, 15 bp, Homo sapiens
tttgactacttatct

SEQ ID NO: 1675878 - DNA, 15 bp, Homo sapiens
ttgactacttatctt

SEQ ID NO: 1675879 - DNA, 15 bp, Homo sapiens
tgactacttatcttt

SEQ ID NO: 1675880 - DNA, 15 bp, Homo sapiens
gactacttatctttg

SEQ ID NO: 1675881 - DNA, 15 bp, Homo sapiens
actacttatctttgt

SEQ ID NO: 1675882 - DNA, 15 bp, Homo sapiens
ctacttatctttgta

SEQ ID NO: 1675883 - DNA, 15 bp, Homo sapiens
tacttatctttgtac

SEQ ID NO: 1675884 - DNA, 15 bp, Homo sapiens
acttatctttgtaca

SEQ ID NO: 1675885 - DNA, 15 bp, Homo sapiens
cttatctttgtacaa

SEQ ID NO: 1675886 - DNA, 15 bp, Homo sapiens
ttatctttgtacaac

SEQ ID NO: 1675887 - DNA, 15 bp, Homo sapiens
tatctttgtacaaca

SEQ ID NO: 1675888 - DNA, 15 bp, Homo sapiens
atctttgtacaacat

SEQ ID NO: 1675889 - DNA, 15 bp, Homo sapiens
tctttgtacaacatt

SEQ ID NO: 1675890 - DNA, 15 bp, Homo sapiens
ctttgtacaacattg

SEQ ID NO: 1675891 - DNA, 15 bp, Homo sapiens
tttgtacaacattga

SEQ ID NO: 1675892 - DNA, 15 bp, Homo sapiens
ttgtacaacattgag

SEQ ID NO: 1675893 - DNA, 15 bp, Homo sapiens
tgtacaacattgagg

SEQ ID NO: 1675894 - DNA, 15 bp, Homo sapiens
gtacaacattgaggt

SEQ ID NO: 1675895 - DNA, 15 bp, Homo sapiens
tacaacattgaggtc

SEQ ID NO: 1675896 - DNA, 15 bp, Homo sapiens
acaacattgaggtct

SEQ ID NO: 1675897 - DNA, 15 bp, Homo sapiens
caacattgaggtctc

SEQ ID NO: 1675898 - DNA, 15 bp, Homo sapiens
aacattgaggtctcc

SEQ ID NO: 1675899 - DNA, 15 bp, Homo sapiens
acattgaggtctccc

SEQ ID NO: 1675900 - DNA, 15 bp, Homo sapiens
cattgaggtctccct

SEQ ID NO: 1675901 - DNA, 15 bp, Homo sapiens
attgaggtctcccta

SEQ ID NO: 1675902 - DNA, 15 bp, Homo sapiens
ttgaggtctccctaa

SEQ ID NO: 1675903 - DNA, 15 bp, Homo sapiens
tgaggtctccctaaa

SEQ ID NO: 1675904 - DNA, 15 bp, Homo sapiens
gaggtctccctaaag

SEQ ID NO: 1675905 - DNA, 15 bp, Homo sapiens
aggtctccctaaagc

SEQ ID NO: 1675906 - DNA, 15 bp, Homo sapiens
ggtctccctaaagca

SEQ ID NO: 1675907 - DNA, 15 bp, Homo sapiens
gtctccctaaagcaa

SEQ ID NO: 1675908 - DNA, 15 bp, Homo sapiens
tctccctaaagcaaa

SEQ ID NO: 1675909 - DNA, 15 bp, Homo sapiens
ctccctaaagcaaat

SEQ ID NO: 1675910 - DNA, 15 bp, Homo sapiens
tccctaaagcaaatt

SEQ ID NO: 1675911 - DNA, 15 bp, Homo sapiens
ccctaaagcaaattt

SEQ ID NO: 1675912 - DNA, 15 bp, Homo sapiens
cctaaagcaaattta

SEQ ID NO: 1675913 - DNA, 15 bp, Homo sapiens
ctaaagcaaatttaa

SEQ ID NO: 1675914 - DNA, 15 bp, Homo sapiens
taaagcaaatttaaa

SEQ ID NO: 1675915 - DNA, 15 bp, Homo sapiens
aaagcaaatttaaat

SEQ ID NO: 1675916 - DNA, 15 bp, Homo sapiens
aagcaaatttaaatg

SEQ ID NO: 1675917 - DNA, 15 bp, Homo sapiens
agcaaatttaaatgc

SEQ ID NO: 1675918 - DNA, 15 bp, Homo sapiens
gcaaatttaaatgca

SEQ ID NO: 1675919 - DNA, 15 bp, Homo sapiens
caaatttaaatgcat

SEQ ID NO: 1675920 - DNA, 15 bp, Homo sapiens
aaatttaaatgcata

SEQ ID NO: 1675921 - DNA, 15 bp, Homo sapiens
aatttaaatgcatat

SEQ ID NO: 1675922 - DNA, 15 bp, Homo sapiens
atttaaatgcatatt

SEQ ID NO: 1675923 - DNA, 15 bp, Homo sapiens
tttaaatgcatattt

SEQ ID NO: 1675924 - DNA, 15 bp, Homo sapiens
ttaaatgcatatttt

SEQ ID NO: 1675925 - DNA, 15 bp, Homo sapiens
taaatgcatatttta

SEQ ID NO: 1675926 - DNA, 15 bp, Homo sapiens
aatgcatattttaaa

SEQ ID NO: 1675927 - DNA, 15 bp, Homo sapiens
atgcatattttaaaa

SEQ ID NO: 1675928 - DNA, 15 bp, Homo sapiens
tgcatattttaaaaa

SEQ ID NO: 1675929 - DNA, 15 bp, Homo sapiens
gcatattttaaaaat

SEQ ID NO: 1675930 - DNA, 15 bp, Homo sapiens
catattttaaaaatg

SEQ ID NO: 1675931 - DNA, 15 bp, Homo sapiens
atattttaaaaatgt

SEQ ID NO: 1675932 - DNA, 15 bp, Homo sapiens
tattttaaaaatgta

SEQ ID NO: 1675933 - DNA, 15 bp, Homo sapiens
attttaaaaatgtat

SEQ ID NO: 1675934 - DNA, 15 bp, Homo sapiens
ttttaaaaatgtatt

SEQ ID NO: 1675935 - DNA, 15 bp, Homo sapiens
tttaaaaatgtattc

SEQ ID NO: 1675936 - DNA, 15 bp, Homo sapiens
ttaaaaatgtattct

SEQ ID NO: 1675937 - DNA, 15 bp, Homo sapiens
taaaaatgtattcta

SEQ ID NO: 1675938 - DNA, 15 bp, Homo sapiens
aaaaatgtattctag

SEQ ID NO: 1675939 - DNA, 15 bp, Homo sapiens
aaaatgtattctagc

SEQ ID NO: 1675940 - DNA, 15 bp, Homo sapiens
aaatgtattctagca

SEQ ID NO: 1675941 - DNA, 15 bp, Homo sapiens
aatgtattctagcag

SEQ ID NO: 1675942 - DNA, 15 bp, Homo sapiens
atgtattctagcagt

SEQ ID NO: 1675943 - DNA, 15 bp, Homo sapiens
tgtattctagcagtt

SEQ ID NO: 1675944 - DNA, 15 bp, Homo sapiens
gtattctagcagttc

SEQ ID NO: 1675945 - DNA, 15 bp, Homo sapiens
tattctagcagttca

SEQ ID NO: 1675946 - DNA, 15 bp, Homo sapiens
attctagcagttcag

SEQ ID NO: 1675947 - DNA, 15 bp, Homo sapiens
ttctagcagttcagt

SEQ ID NO: 1675948 - DNA, 15 bp, Homo sapiens
tctagcagttcagtt

SEQ ID NO: 1675949 - DNA, 15 bp, Homo sapiens
ctagcagttcagttc

SEQ ID NO: 1675950 - DNA, 15 bp, Homo sapiens
tagcagttcagttca

SEQ ID NO: 1675951 - DNA, 15 bp, Homo sapiens
agcagttcagttcag

SEQ ID NO: 1675952 - DNA, 15 bp, Homo sapiens
gcagttcagttcaga

SEQ ID NO: 1675953 - DNA, 15 bp, Homo sapiens
cagttcagttcagaa

SEQ ID NO: 1675954 - DNA, 15 bp, Homo sapiens
agttcagttcagaag

SEQ ID NO: 1675955 - DNA, 15 bp, Homo sapiens
gttcagttcagaagc

SEQ ID NO: 1675956 - DNA, 15 bp, Homo sapiens
ttcagttcagaagcc

SEQ ID NO: 1675957 - DNA, 15 bp, Homo sapiens
tcagttcagaagccc

SEQ ID NO: 1675958 - DNA, 15 bp, Homo sapiens
cagttcagaagcccc

SEQ ID NO: 1675959 - DNA, 15 bp, Homo sapiens
agttcagaagccccc

SEQ ID NO: 1675960 - DNA, 15 bp, Homo sapiens
gttcagaagccccct

SEQ ID NO: 1675961 - DNA, 15 bp, Homo sapiens
ttcagaagccccctg

SEQ ID NO: 1675962 - DNA, 15 bp, Homo sapiens
tcagaagccccctgg

SEQ ID NO: 1675963 - DNA, 15 bp, Homo sapiens
cagaagccccctggc

SEQ ID NO: 1675964 - DNA, 15 bp, Homo sapiens
agaagccccctggcc

SEQ ID NO: 1675965 - DNA, 15 bp, Homo sapiens
gaagccccctggccc

SEQ ID NO: 1675966 - DNA, 15 bp, Homo sapiens
aagccccctggccca

SEQ ID NO: 1675967 - DNA, 15 bp, Homo sapiens
agccccctggcccaa

SEQ ID NO: 1675968 - DNA, 15 bp, Homo sapiens
gccccctggcccaag

SEQ ID NO: 1675969 - DNA, 15 bp, Homo sapiens
ccccctggcccaagc

SEQ ID NO: 1675970 - DNA, 15 bp, Homo sapiens
cccctggcccaagca

SEQ ID NO: 1675971 - DNA, 15 bp, Homo sapiens
ccctggcccaagcat

SEQ ID NO: 1675972 - DNA, 15 bp, Homo sapiens
cctggcccaagcatc

SEQ ID NO: 1675973 - DNA, 15 bp, Homo sapiens
ctggcccaagcatca

SEQ ID NO: 1675974 - DNA, 15 bp, Homo sapiens
tggcccaagcatcac

SEQ ID NO: 1675975 - DNA, 15 bp, Homo sapiens
ggcccaagcatcaca

SEQ ID NO: 1675976 - DNA, 15 bp, Homo sapiens
gcccaagcatcacac

SEQ ID NO: 1675977 - DNA, 15 bp, Homo sapiens
cccaagcatcacact

SEQ ID NO: 1675978 - DNA, 15 bp, Homo sapiens
ccaagcatcacactg

SEQ ID NO: 1675979 - DNA, 15 bp, Homo sapiens
caagcatcacactgt

SEQ ID NO: 1675980 - DNA, 15 bp, Homo sapiens
aagcatcacactgtc

SEQ ID NO: 1675981 - DNA, 15 bp, Homo sapiens
agcatcacactgtca

SEQ ID NO: 1675982 - DNA, 15 bp, Homo sapiens
gcatcacactgtcaa

SEQ ID NO: 1675983 - DNA, 15 bp, Homo sapiens
catcacactgtcaat

SEQ ID NO: 1675984 - DNA, 15 bp, Homo sapiens
atcacactgtcaatc

SEQ ID NO: 1675985 - DNA, 15 bp, Homo sapiens
tcacactgtcaatcc

SEQ ID NO: 1675986 - DNA, 15 bp, Homo sapiens
cacactgtcaatcct

SEQ ID NO: 1675987 - DNA, 15 bp, Homo sapiens
acactgtcaatcctt

SEQ ID NO: 1675988 - DNA, 15 bp, Homo sapiens
cactgtcaatccttt

SEQ ID NO: 1675989 - DNA, 15 bp, Homo sapiens
actgtcaatcctttg

SEQ ID NO: 1675990 - DNA, 15 bp, Homo sapiens
ctgtcaatcctttgt

SEQ ID NO: 1675991 - DNA, 15 bp, Homo sapiens
tgtcaatcctttgtc

SEQ ID NO: 1675992 - DNA, 15 bp, Homo sapiens
gtcaatcctttgtcc

SEQ ID NO: 1675993 - DNA, 15 bp, Homo sapiens
tcaatcctttgtcct

SEQ ID NO: 1675994 - DNA, 15 bp, Homo sapiens
caatcctttgtcctc

SEQ ID NO: 1675995 - DNA, 15 bp, Homo sapiens
atcctttgtcctcaa

SEQ ID NO: 1675996 - DNA, 15 bp, Homo sapiens
tcctttgtcctcaag

SEQ ID NO: 1675997 - DNA, 15 bp, Homo sapiens
cctttgtcctcaagc

SEQ ID NO: 1675998 - DNA, 15 bp, Homo sapiens
ctttgtcctcaagca

SEQ ID NO: 1675999 - DNA, 15 bp, Homo sapiens
tttgtcctcaagcag

SEQ ID NO: 1676000 - DNA, 15 bp, Homo sapiens
ttgtcctcaagcagc

SEQ ID NO: 1676001 - DNA, 15 bp, Homo sapiens
tgtcctcaagcagca

SEQ ID NO: 1676002 - DNA, 15 bp, Homo sapiens
gtcctcaagcagcat

SEQ ID NO: 1676003 - DNA, 15 bp, Homo sapiens
tcctcaagcagcatg

SEQ ID NO: 1676004 - DNA, 15 bp, Homo sapiens
cctcaagcagcatgg

SEQ ID NO: 1676005 - DNA, 15 bp, Homo sapiens
ctcaagcagcatggt

SEQ ID NO: 1676006 - DNA, 15 bp, Homo sapiens
tcaagcagcatggtt

SEQ ID NO: 1676007 - DNA, 15 bp, Homo sapiens
caagcagcatggttg

SEQ ID NO: 1676008 - DNA, 15 bp, Homo sapiens
aagcagcatggttgg

SEQ ID NO: 1676009 - DNA, 15 bp, Homo sapiens
agcagcatggttggg

SEQ ID NO: 1676010 - DNA, 15 bp, Homo sapiens
gcagcatggttgggt

SEQ ID NO: 1676011 - DNA, 15 bp, Homo sapiens
cagcatggttgggtg

SEQ ID NO: 1676012 - DNA, 15 bp, Homo sapiens
agcatggttgggtgg

SEQ ID NO: 1676013 - DNA, 15 bp, Homo sapiens
gcatggttgggtggg

SEQ ID NO: 1676014 - DNA, 15 bp, Homo sapiens
catggttgggtgggt

SEQ ID NO: 1676015 - DNA, 15 bp, Homo sapiens
atggttgggtgggtt

SEQ ID NO: 1676016 - DNA, 15 bp, Homo sapiens
tggttgggtgggtta

SEQ ID NO: 1676017 - DNA, 15 bp, Homo sapiens
ggttgggtgggttaa

SEQ ID NO: 1676018 - DNA, 15 bp, Homo sapiens
gttgggtgggttaag

SEQ ID NO: 1676019 - DNA, 15 bp, Homo sapiens
ttgggtgggttaagt

SEQ ID NO: 1676020 - DNA, 15 bp, Homo sapiens
tgggtgggttaagta

SEQ ID NO: 1676021 - DNA, 15 bp, Homo sapiens
gggtgggttaagtac

SEQ ID NO: 1676022 - DNA, 15 bp, Homo sapiens
ggtgggttaagtact

SEQ ID NO: 1676023 - DNA, 15 bp, Homo sapiens
gtgggttaagtactg

SEQ ID NO: 1676024 - DNA, 15 bp, Homo sapiens
tgggttaagtactga

SEQ ID NO: 1676025 - DNA, 15 bp, Homo sapiens
gggttaagtactgac

SEQ ID NO: 1676026 - DNA, 15 bp, Homo sapiens
ggttaagtactgaca

SEQ ID NO: 1676027 - DNA, 15 bp, Homo sapiens
gttaagtactgacaa

SEQ ID NO: 1676028 - DNA, 15 bp, Homo sapiens
ttaagtactgacaaa

SEQ ID NO: 1676029 - DNA, 15 bp, Homo sapiens
taagtactgacaaac

SEQ ID NO: 1676030 - DNA, 15 bp, Homo sapiens
aagtactgacaaaca

SEQ ID NO: 1676031 - DNA, 15 bp, Homo sapiens
agtactgacaaacac

SEQ ID NO: 1676032 - DNA, 15 bp, Homo sapiens
gtactgacaaacact

SEQ ID NO: 1676033 - DNA, 15 bp, Homo sapiens
tactgacaaacactg

SEQ ID NO: 1676034 - DNA, 15 bp, Homo sapiens
actgacaaacactgg

SEQ ID NO: 1676035 - DNA, 15 bp, Homo sapiens
ctgacaaacactggg

SEQ ID NO: 1676036 - DNA, 15 bp, Homo sapiens
tgacaaacactgggt

SEQ ID NO: 1676037 - DNA, 15 bp, Homo sapiens
gacaaacactgggtg

SEQ ID NO: 1676038 - DNA, 15 bp, Homo sapiens
acaaacactgggtgt

SEQ ID NO: 1676039 - DNA, 15 bp, Homo sapiens
caaacactgggtgtc

SEQ ID NO: 1676040 - DNA, 15 bp, Homo sapiens
aaacactgggtgtca

SEQ ID NO: 1676041 - DNA, 15 bp, Homo sapiens
aacactgggtgtcag

SEQ ID NO: 1676042 - DNA, 15 bp, Homo sapiens
acactgggtgtcagg

SEQ ID NO: 1676043 - DNA, 15 bp, Homo sapiens
cactgggtgtcaggc

SEQ ID NO: 1676044 - DNA, 15 bp, Homo sapiens
actgggtgtcaggcc

SEQ ID NO: 1676045 - DNA, 15 bp, Homo sapiens
ctgggtgtcaggccc

SEQ ID NO: 1676046 - DNA, 15 bp, Homo sapiens
tgggtgtcaggccca

SEQ ID NO: 1676047 - DNA, 15 bp, Homo sapiens
gggtgtcaggcccat

SEQ ID NO: 1676048 - DNA, 15 bp, Homo sapiens
ggtgtcaggcccatg

SEQ ID NO: 1676049 - DNA, 15 bp, Homo sapiens
gtgtcaggcccatgg

SEQ ID NO: 1676050 - DNA, 15 bp, Homo sapiens
tgtcaggcccatggt

SEQ ID NO: 1676051 - DNA, 15 bp, Homo sapiens
gtcaggcccatggtc

SEQ ID NO: 1676052 - DNA, 15 bp, Homo sapiens
tcaggcccatggtca

SEQ ID NO: 1676053 - DNA, 15 bp, Homo sapiens
caggcccatggtcag

SEQ ID NO: 1676054 - DNA, 15 bp, Homo sapiens
aggcccatggtcagg

SEQ ID NO: 1676055 - DNA, 15 bp, Homo sapiens
ggcccatggtcaggg

SEQ ID NO: 1676056 - DNA, 15 bp, Homo sapiens
gcccatggtcaggga

SEQ ID NO: 1676057 - DNA, 15 bp, Homo sapiens
cccatggtcagggac

SEQ ID NO: 1676058 - DNA, 15 bp, Homo sapiens
ccatggtcagggact

SEQ ID NO: 1676059 - DNA, 15 bp, Homo sapiens
catggtcagggactg

SEQ ID NO: 1676060 - DNA, 15 bp, Homo sapiens
atggtcagggactgt

SEQ ID NO: 1676061 - DNA, 15 bp, Homo sapiens
tggtcagggactgtg

SEQ ID NO: 1676062 - DNA, 15 bp, Homo sapiens
ggtcagggactgtgc

SEQ ID NO: 1676063 - DNA, 15 bp, Homo sapiens
gtcagggactgtgct

SEQ ID NO: 1676064 - DNA, 15 bp, Homo sapiens
tcagggactgtgcta

SEQ ID NO: 1676065 - DNA, 15 bp, Homo sapiens
cagggactgtgctaa

SEQ ID NO: 1676066 - DNA, 15 bp, Homo sapiens
agggactgtgctaac

SEQ ID NO: 1676067 - DNA, 15 bp, Homo sapiens
gggactgtgctaaca

SEQ ID NO: 1676068 - DNA, 15 bp, Homo sapiens
ggactgtgctaacag

SEQ ID NO: 1676069 - DNA, 15 bp, Homo sapiens
gactgtgctaacagt

SEQ ID NO: 1676070 - DNA, 15 bp, Homo sapiens
actgtgctaacagtc

SEQ ID NO: 1676071 - DNA, 15 bp, Homo sapiens
ctgtgctaacagtct

SEQ ID NO: 1676072 - DNA, 15 bp, Homo sapiens
tgtgctaacagtcta

SEQ ID NO: 1676073 - DNA, 15 bp, Homo sapiens
gtgctaacagtctac

SEQ ID NO: 1676074 - DNA, 15 bp, Homo sapiens
tgctaacagtctaca

SEQ ID NO: 1676075 - DNA, 15 bp, Homo sapiens
gctaacagtctacat

SEQ ID NO: 1676076 - DNA, 15 bp, Homo sapiens
ctaacagtctacata

SEQ ID NO: 1676077 - DNA, 15 bp, Homo sapiens
taacagtctacatat

SEQ ID NO: 1676078 - DNA, 15 bp, Homo sapiens
aacagtctacatatt

SEQ ID NO: 1676079 - DNA, 15 bp, Homo sapiens
acagtctacatatta

SEQ ID NO: 1676080 - DNA, 15 bp, Homo sapiens
cagtctacatattag

SEQ ID NO: 1676081 - DNA, 15 bp, Homo sapiens
agtctacatattaga

SEQ ID NO: 1676082 - DNA, 15 bp, Homo sapiens
gtctacatattagat

SEQ ID NO: 1676083 - DNA, 15 bp, Homo sapiens
tctacatattagatg

SEQ ID NO: 1676084 - DNA, 15 bp, Homo sapiens
ctacatattagatgc

SEQ ID NO: 1676085 - DNA, 15 bp, Homo sapiens
tacatattagatgcc

SEQ ID NO: 1676086 - DNA, 15 bp, Homo sapiens
acatattagatgcca

SEQ ID NO: 1676087 - DNA, 15 bp, Homo sapiens
catattagatgccac

SEQ ID NO: 1676088 - DNA, 15 bp, Homo sapiens
atattagatgccacc

SEQ ID NO: 1676089 - DNA, 15 bp, Homo sapiens
tattagatgccacct

SEQ ID NO: 1676090 - DNA, 15 bp, Homo sapiens
attagatgccaccta

SEQ ID NO: 1676091 - DNA, 15 bp, Homo sapiens
ttagatgccacctac

SEQ ID NO: 1676092 - DNA, 15 bp, Homo sapiens
tagatgccacctacc

SEQ ID NO: 1676093 - DNA, 15 bp, Homo sapiens
agatgccacctaccc

SEQ ID NO: 1676094 - DNA, 15 bp, Homo sapiens
gatgccacctacccc

SEQ ID NO: 1676095 - DNA, 15 bp, Homo sapiens
atgccacctaccccc

SEQ ID NO: 1676096 - DNA, 15 bp, Homo sapiens
tgccacctaccccca

SEQ ID NO: 1676097 - DNA, 15 bp, Homo sapiens
gccacctacccccac

SEQ ID NO: 1676098 - DNA, 15 bp, Homo sapiens
ccacctacccccacc

SEQ ID NO: 1676099 - DNA, 15 bp, Homo sapiens
cacctacccccaccc

SEQ ID NO: 1676100 - DNA, 15 bp, Homo sapiens
acctacccccaccct

SEQ ID NO: 1676101 - DNA, 15 bp, Homo sapiens
cctacccccaccctc

SEQ ID NO: 1676102 - DNA, 15 bp, Homo sapiens
ctacccccaccctca

SEQ ID NO: 1676103 - DNA, 15 bp, Homo sapiens
tacccccaccctcaa

SEQ ID NO: 1676104 - DNA, 15 bp, Homo sapiens
acccccaccctcaac

SEQ ID NO: 1676105 - DNA, 15 bp, Homo sapiens
cccccaccctcaaca

SEQ ID NO: 1676106 - DNA, 15 bp, Homo sapiens
ccccaccctcaacag

SEQ ID NO: 1676107 - DNA, 15 bp, Homo sapiens
cccaccctcaacaga

SEQ ID NO: 1676108 - DNA, 15 bp, Homo sapiens
ccaccctcaacagac

SEQ ID NO: 1676109 - DNA, 15 bp, Homo sapiens
caccctcaacagacc

SEQ ID NO: 1676110 - DNA, 15 bp, Homo sapiens
accctcaacagaccc

SEQ ID NO: 1676111 - DNA, 15 bp, Homo sapiens
ccctcaacagaccca

SEQ ID NO: 1676112 - DNA, 15 bp, Homo sapiens
cctcaacagacccaa

SEQ ID NO: 1676113 - DNA, 15 bp, Homo sapiens
ctcaacagacccaaa

SEQ ID NO: 1676114 - DNA, 15 bp, Homo sapiens
tcaacagacccaaac

SEQ ID NO: 1676115 - DNA, 15 bp, Homo sapiens
caacagacccaaact

SEQ ID NO: 1676116 - DNA, 15 bp, Homo sapiens
aacagacccaaacta

SEQ ID NO: 1676117 - DNA, 15 bp, Homo sapiens
acagacccaaactat

SEQ ID NO: 1676118 - DNA, 15 bp, Homo sapiens
cagacccaaactatt

SEQ ID NO: 1676119 - DNA, 15 bp, Homo sapiens
agacccaaactattt

SEQ ID NO: 1676120 - DNA, 15 bp, Homo sapiens
gacccaaactattta

SEQ ID NO: 1676121 - DNA, 15 bp, Homo sapiens
acccaaactatttat

SEQ ID NO: 1676122 - DNA, 15 bp, Homo sapiens
cccaaactatttatc

SEQ ID NO: 1676123 - DNA, 15 bp, Homo sapiens
ccaaactatttatcc

SEQ ID NO: 1676124 - DNA, 15 bp, Homo sapiens
caaactatttatcca

SEQ ID NO: 1676125 - DNA, 15 bp, Homo sapiens
aaactatttatccaa

SEQ ID NO: 1676126 - DNA, 15 bp, Homo sapiens
aactatttatccaat

SEQ ID NO: 1676127 - DNA, 15 bp, Homo sapiens
actatttatccaata

SEQ ID NO: 1676128 - DNA, 15 bp, Homo sapiens
ctatttatccaatag

SEQ ID NO: 1676129 - DNA, 15 bp, Homo sapiens
tatttatccaatagc

SEQ ID NO: 1676130 - DNA, 15 bp, Homo sapiens
atttatccaatagca

SEQ ID NO: 1676131 - DNA, 15 bp, Homo sapiens
tttatccaatagcaa

SEQ ID NO: 1676132 - DNA, 15 bp, Homo sapiens
ttatccaatagcaaa

SEQ ID NO: 1676133 - DNA, 15 bp, Homo sapiens
tatccaatagcaaac

SEQ ID NO: 1676134 - DNA, 15 bp, Homo sapiens
atccaatagcaaacc

SEQ ID NO: 1676135 - DNA, 15 bp, Homo sapiens
tccaatagcaaacct

SEQ ID NO: 1676136 - DNA, 15 bp, Homo sapiens
ccaatagcaaacctt

SEQ ID NO: 1676137 - DNA, 15 bp, Homo sapiens
caatagcaaaccttg

SEQ ID NO: 1676138 - DNA, 15 bp, Homo sapiens
aatagcaaaccttgc

SEQ ID NO: 1676139 - DNA, 15 bp, Homo sapiens
atagcaaaccttgca

SEQ ID NO: 1676140 - DNA, 15 bp, Homo sapiens
tagcaaaccttgcat

SEQ ID NO: 1676141 - DNA, 15 bp, Homo sapiens
agcaaaccttgcatt

SEQ ID NO: 1676142 - DNA, 15 bp, Homo sapiens
gcaaaccttgcatta

SEQ ID NO: 1676143 - DNA, 15 bp, Homo sapiens
caaaccttgcattat

SEQ ID NO: 1676144 - DNA, 15 bp, Homo sapiens
aaaccttgcattatt

SEQ ID NO: 1676145 - DNA, 15 bp, Homo sapiens
aaccttgcattattt

SEQ ID NO: 1676146 - DNA, 15 bp, Homo sapiens
accttgcattatttc

SEQ ID NO: 1676147 - DNA, 15 bp, Homo sapiens
ccttgcattatttct

SEQ ID NO: 1676148 - DNA, 15 bp, Homo sapiens
cttgcattatttctg

SEQ ID NO: 1676149 - DNA, 15 bp, Homo sapiens
ttgcattatttctgt

SEQ ID NO: 1676150 - DNA, 15 bp, Homo sapiens
tgcattatttctgtc

SEQ ID NO: 1676151 - DNA, 15 bp, Homo sapiens
gcattatttctgtcc

SEQ ID NO: 1676152 - DNA, 15 bp, Homo sapiens
cattatttctgtcca

SEQ ID NO: 1676153 - DNA, 15 bp, Homo sapiens
attatttctgtccag

SEQ ID NO: 1676154 - DNA, 15 bp, Homo sapiens
ttatttctgtccaga

SEQ ID NO: 1676155 - DNA, 15 bp, Homo sapiens
tatttctgtccagaa

SEQ ID NO: 1676156 - DNA, 15 bp, Homo sapiens
atttctgtccagaag

SEQ ID NO: 1676157 - DNA, 15 bp, Homo sapiens
tttctgtccagaaga

SEQ ID NO: 1676158 - DNA, 15 bp, Homo sapiens
ttctgtccagaagaa

SEQ ID NO: 1676159 - DNA, 15 bp, Homo sapiens
tctgtccagaagaaa

SEQ ID NO: 1676160 - DNA, 15 bp, Homo sapiens
gtccagaagaaacaa

SEQ ID NO: 1676161 - DNA, 15 bp, Homo sapiens
tccagaagaaacaaa

SEQ ID NO: 1676162 - DNA, 15 bp, Homo sapiens
ccagaagaaacaaac

SEQ ID NO: 1676163 - DNA, 15 bp, Homo sapiens
cagaagaaacaaaca

SEQ ID NO: 1676164 - DNA, 15 bp, Homo sapiens
agaagaaacaaacat

SEQ ID NO: 1676165 - DNA, 15 bp, Homo sapiens
gaagaaacaaacatt

SEQ ID NO: 1676166 - DNA, 15 bp, Homo sapiens
aagaaacaaacattt

SEQ ID NO: 1676167 - DNA, 15 bp, Homo sapiens
agaaacaaacattta

SEQ ID NO: 1676168 - DNA, 15 bp, Homo sapiens
gaaacaaacatttat

SEQ ID NO: 1676169 - DNA, 15 bp, Homo sapiens
aaacaaacatttatt

SEQ ID NO: 1676170 - DNA, 15 bp, Homo sapiens
caaacatttattgac

SEQ ID NO: 1676171 - DNA, 15 bp, Homo sapiens
aaacatttattgaca

SEQ ID NO: 1676172 - DNA, 15 bp, Homo sapiens
aacatttattgacaa

SEQ ID NO: 1676173 - DNA, 15 bp, Homo sapiens
acatttattgacaac

SEQ ID NO: 1676174 - DNA, 15 bp, Homo sapiens
catttattgacaact

SEQ ID NO: 1676175 - DNA, 15 bp, Homo sapiens
atttattgacaactt

SEQ ID NO: 1676176 - DNA, 15 bp, Homo sapiens
tttattgacaacttt

SEQ ID NO: 1676177 - DNA, 15 bp, Homo sapiens
ttattgacaactttt

SEQ ID NO: 1676178 - DNA, 15 bp, Homo sapiens
tattgacaacttttg

SEQ ID NO: 1676179 - DNA, 15 bp, Homo sapiens
attgacaacttttgg

SEQ ID NO: 1676180 - DNA, 15 bp, Homo sapiens
ttgacaacttttggt

SEQ ID NO: 1676181 - DNA, 15 bp, Homo sapiens
tgacaacttttggtg

SEQ ID NO: 1676182 - DNA, 15 bp, Homo sapiens
gacaacttttggtgt

SEQ ID NO: 1676183 - DNA, 15 bp, Homo sapiens
acaacttttggtgtg

SEQ ID NO: 1676184 - DNA, 15 bp, Homo sapiens
caacttttggtgtgt

SEQ ID NO: 1676185 - DNA, 15 bp, Homo sapiens
aacttttggtgtgtg

SEQ ID NO: 1676186 - DNA, 15 bp, Homo sapiens
acttttggtgtgtga

SEQ ID NO: 1676187 - DNA, 15 bp, Homo sapiens
cttttggtgtgtgac

SEQ ID NO: 1676188 - DNA, 15 bp, Homo sapiens
ttttggtgtgtgacc

SEQ ID NO: 1676189 - DNA, 15 bp, Homo sapiens
tttggtgtgtgacct

SEQ ID NO: 1676190 - DNA, 15 bp, Homo sapiens
ttggtgtgtgacctg

SEQ ID NO: 1676191 - DNA, 15 bp, Homo sapiens
tggtgtgtgacctgt

SEQ ID NO: 1676192 - DNA, 15 bp, Homo sapiens
ggtgtgtgacctgtt

SEQ ID NO: 1676193 - DNA, 15 bp, Homo sapiens
gtgtgtgacctgttt

SEQ ID NO: 1676194 - DNA, 15 bp, Homo sapiens
tgtgtgacctgttta

SEQ ID NO: 1676195 - DNA, 15 bp, Homo sapiens
gtgtgacctgtttaa

SEQ ID NO: 1676196 - DNA, 15 bp, Homo sapiens
tgtgacctgtttaag

SEQ ID NO: 1676197 - DNA, 15 bp, Homo sapiens
gtgacctgtttaagt

SEQ ID NO: 1676198 - DNA, 15 bp, Homo sapiens
tgacctgtttaagtc

SEQ ID NO: 1676199 - DNA, 15 bp, Homo sapiens
gacctgtttaagtcc

SEQ ID NO: 1676200 - DNA, 15 bp, Homo sapiens
acctgtttaagtcct

SEQ ID NO: 1676201 - DNA, 15 bp, Homo sapiens
cctgtttaagtccta

SEQ ID NO: 1676202 - DNA, 15 bp, Homo sapiens
ctgtttaagtcctac

SEQ ID NO: 1676203 - DNA, 15 bp, Homo sapiens
tgtttaagtcctaca

SEQ ID NO: 1676204 - DNA, 15 bp, Homo sapiens
gtttaagtcctacat

SEQ ID NO: 1676205 - DNA, 15 bp, Homo sapiens
tttaagtcctacatc

SEQ ID NO: 1676206 - DNA, 15 bp, Homo sapiens
ttaagtcctacatct

SEQ ID NO: 1676207 - DNA, 15 bp, Homo sapiens
taagtcctacatctc

SEQ ID NO: 1676208 - DNA, 15 bp, Homo sapiens
aagtcctacatctca

SEQ ID NO: 1676209 - DNA, 15 bp, Homo sapiens
agtcctacatctcat

SEQ ID NO: 1676210 - DNA, 15 bp, Homo sapiens
gtcctacatctcatt

SEQ ID NO: 1676211 - DNA, 15 bp, Homo sapiens
tcctacatctcattt

SEQ ID NO: 1676212 - DNA, 15 bp, Homo sapiens
cctacatctcattta

SEQ ID NO: 1676213 - DNA, 15 bp, Homo sapiens
ctacatctcatttaa

SEQ ID NO: 1676214 - DNA, 15 bp, Homo sapiens
tacatctcatttaag

SEQ ID NO: 1676215 - DNA, 15 bp, Homo sapiens
acatctcatttaagg

SEQ ID NO: 1676216 - DNA, 15 bp, Homo sapiens
catctcatttaagga

SEQ ID NO: 1676217 - DNA, 15 bp, Homo sapiens
atctcatttaaggac

SEQ ID NO: 1676218 - DNA, 15 bp, Homo sapiens
tctcatttaaggact

SEQ ID NO: 1676219 - DNA, 15 bp, Homo sapiens
ctcatttaaggactg

SEQ ID NO: 1676220 - DNA, 15 bp, Homo sapiens
tcatttaaggactgg

SEQ ID NO: 1676221 - DNA, 15 bp, Homo sapiens
catttaaggactggt

SEQ ID NO: 1676222 - DNA, 15 bp, Homo sapiens
atttaaggactggtc

SEQ ID NO: 1676223 - DNA, 15 bp, Homo sapiens
tttaaggactggtca

SEQ ID NO: 1676224 - DNA, 15 bp, Homo sapiens
ttaaggactggtcaa

SEQ ID NO: 1676225 - DNA, 15 bp, Homo sapiens
taaggactggtcaat

SEQ ID NO: 1676226 - DNA, 15 bp, Homo sapiens
aaggactggtcaatg

SEQ ID NO: 1676227 - DNA, 15 bp, Homo sapiens
aggactggtcaatgt

SEQ ID NO: 1676228 - DNA, 15 bp, Homo sapiens
ggactggtcaatgtt

SEQ ID NO: 1676229 - DNA, 15 bp, Homo sapiens
gactggtcaatgtta

SEQ ID NO: 1676230 - DNA, 15 bp, Homo sapiens
actggtcaatgttag

SEQ ID NO: 1676231 - DNA, 15 bp, Homo sapiens
ctggtcaatgttagg

SEQ ID NO: 1676232 - DNA, 15 bp, Homo sapiens
tggtcaatgttaggc

SEQ ID NO: 1676233 - DNA, 15 bp, Homo sapiens
ggtcaatgttaggct

SEQ ID NO: 1676234 - DNA, 15 bp, Homo sapiens
gtcaatgttaggcta

SEQ ID NO: 1676235 - DNA, 15 bp, Homo sapiens
tcaatgttaggctag

SEQ ID NO: 1676236 - DNA, 15 bp, Homo sapiens
caatgttaggctagg

SEQ ID NO: 1676237 - DNA, 15 bp, Homo sapiens
aatgttaggctaggc

SEQ ID NO: 1676238 - DNA, 15 bp, Homo sapiens
atgttaggctaggca

SEQ ID NO: 1676239 - DNA, 15 bp, Homo sapiens
tgttaggctaggcaa

SEQ ID NO: 1676240 - DNA, 15 bp, Homo sapiens
gttaggctaggcaat

SEQ ID NO: 1676241 - DNA, 15 bp, Homo sapiens
ttaggctaggcaatg

SEQ ID NO: 1676242 - DNA, 15 bp, Homo sapiens
taggctaggcaatgc

SEQ ID NO: 1676243 - DNA, 15 bp, Homo sapiens
aggctaggcaatgcc

SEQ ID NO: 1676244 - DNA, 15 bp, Homo sapiens
ggctaggcaatgcct

SEQ ID NO: 1676245 - DNA, 15 bp, Homo sapiens
gctaggcaatgcctg

SEQ ID NO: 1676246 - DNA, 15 bp, Homo sapiens
ctaggcaatgcctgt

SEQ ID NO: 1676247 - DNA, 15 bp, Homo sapiens
taggcaatgcctgtt

SEQ ID NO: 1676248 - DNA, 15 bp, Homo sapiens
aggcaatgcctgttt

SEQ ID NO: 1676249 - DNA, 15 bp, Homo sapiens
ggcaatgcctgtttg

SEQ ID NO: 1676250 - DNA, 15 bp, Homo sapiens
gcaatgcctgtttgt

SEQ ID NO: 1676251 - DNA, 15 bp, Homo sapiens
caatgcctgtttgtg

SEQ ID NO: 1676252 - DNA, 15 bp, Homo sapiens
aatgcctgtttgtga

SEQ ID NO: 1676253 - DNA, 15 bp, Homo sapiens
atgcctgtttgtgag

SEQ ID NO: 1676254 - DNA, 15 bp, Homo sapiens
tgcctgtttgtgaga

SEQ ID NO: 1676255 - DNA, 15 bp, Homo sapiens
gcctgtttgtgagag

SEQ ID NO: 1676256 - DNA, 15 bp, Homo sapiens
cctgtttgtgagaga

SEQ ID NO: 1676257 - DNA, 15 bp, Homo sapiens
ctgtttgtgagagaa

SEQ ID NO: 1676258 - DNA, 15 bp, Homo sapiens
tgtttgtgagagaat

SEQ ID NO: 1676259 - DNA, 15 bp, Homo sapiens
gtttgtgagagaatc

SEQ ID NO: 1676260 - DNA, 15 bp, Homo sapiens
tttgtgagagaatca

SEQ ID NO: 1676261 - DNA, 15 bp, Homo sapiens
ttgtgagagaatcac

SEQ ID NO: 1676262 - DNA, 15 bp, Homo sapiens
tgtgagagaatcact

SEQ ID NO: 1676263 - DNA, 15 bp, Homo sapiens
gtgagagaatcactg

SEQ ID NO: 1676264 - DNA, 15 bp, Homo sapiens
tgagagaatcactgc

SEQ ID NO: 1676265 - DNA, 15 bp, Homo sapiens
gagagaatcactgcc

SEQ ID NO: 1676266 - DNA, 15 bp, Homo sapiens
agagaatcactgcct

SEQ ID NO: 1676267 - DNA, 15 bp, Homo sapiens
gagaatcactgccta

SEQ ID NO: 1676268 - DNA, 15 bp, Homo sapiens
agaatcactgcctaa

SEQ ID NO: 1676269 - DNA, 15 bp, Homo sapiens
gaatcactgcctaaa

SEQ ID NO: 1676270 - DNA, 15 bp, Homo sapiens
aatcactgcctaaag

SEQ ID NO: 1676271 - DNA, 15 bp, Homo sapiens
atcactgcctaaaga

SEQ ID NO: 1676272 - DNA, 15 bp, Homo sapiens
tcactgcctaaagaa

SEQ ID NO: 1676273 - DNA, 15 bp, Homo sapiens
cactgcctaaagaaa

SEQ ID NO: 1676274 - DNA, 15 bp, Homo sapiens
actgcctaaagaaaa

SEQ ID NO: 1676275 - DNA, 15 bp, Homo sapiens
ctgcctaaagaaaat

SEQ ID NO: 1676276 - DNA, 15 bp, Homo sapiens
tgcctaaagaaaatt

SEQ ID NO: 1676277 - DNA, 15 bp, Homo sapiens
gcctaaagaaaattc

SEQ ID NO: 1676278 - DNA, 15 bp, Homo sapiens
cctaaagaaaattct

SEQ ID NO: 1676279 - DNA, 15 bp, Homo sapiens
ctaaagaaaattctc

SEQ ID NO: 1676280 - DNA, 15 bp, Homo sapiens
taaagaaaattctcc

SEQ ID NO: 1676281 - DNA, 15 bp, Homo sapiens
aaagaaaattctcca

SEQ ID NO: 1676282 - DNA, 15 bp, Homo sapiens
aagaaaattctccat

SEQ ID NO: 1676283 - DNA, 15 bp, Homo sapiens
agaaaattctccatt

SEQ ID NO: 1676284 - DNA, 15 bp, Homo sapiens
gaaaattctccattt

SEQ ID NO: 1676285 - DNA, 15 bp, Homo sapiens
aaaattctccatttc

SEQ ID NO: 1676286 - DNA, 15 bp, Homo sapiens
aaattctccatttcc

SEQ ID NO: 1676287 - DNA, 15 bp, Homo sapiens
aattctccatttccc

SEQ ID NO: 1676288 - DNA, 15 bp, Homo sapiens
attctccatttccct

SEQ ID NO: 1676289 - DNA, 15 bp, Homo sapiens
ttctccatttccctt

SEQ ID NO: 1676290 - DNA, 15 bp, Homo sapiens
tctccatttccctta

SEQ ID NO: 1676291 - DNA, 15 bp, Homo sapiens
ctccatttcccttag

SEQ ID NO: 1676292 - DNA, 15 bp, Homo sapiens
tccatttcccttagc

SEQ ID NO: 1676293 - DNA, 15 bp, Homo sapiens
ccatttcccttagct

SEQ ID NO: 1676294 - DNA, 15 bp, Homo sapiens
catttcccttagctc

SEQ ID NO: 1676295 - DNA, 15 bp, Homo sapiens
atttcccttagctct

SEQ ID NO: 1676296 - DNA, 15 bp, Homo sapiens
tttcccttagctcta

SEQ ID NO: 1676297 - DNA, 15 bp, Homo sapiens
ttcccttagctctat

SEQ ID NO: 1676298 - DNA, 15 bp, Homo sapiens
tcccttagctctatg

SEQ ID NO: 1676299 - DNA, 15 bp, Homo sapiens
cccttagctctatgg

SEQ ID NO: 1676300 - DNA, 15 bp, Homo sapiens
ccttagctctatggt

SEQ ID NO: 1676301 - DNA, 15 bp, Homo sapiens
cttagctctatggtg

SEQ ID NO: 1676302 - DNA, 15 bp, Homo sapiens
ttagctctatggtgg

SEQ ID NO: 1676303 - DNA, 15 bp, Homo sapiens
tagctctatggtggg

SEQ ID NO: 1676304 - DNA, 15 bp, Homo sapiens
agctctatggtgggt

SEQ ID NO: 1676305 - DNA, 15 bp, Homo sapiens
gctctatggtgggtg

SEQ ID NO: 1676306 - DNA, 15 bp, Homo sapiens
ctctatggtgggtga

SEQ ID NO: 1676307 - DNA, 15 bp, Homo sapiens
tctatggtgggtgac

SEQ ID NO: 1676308 - DNA, 15 bp, Homo sapiens
ctatggtgggtgact

SEQ ID NO: 1676309 - DNA, 15 bp, Homo sapiens
tatggtgggtgacta

SEQ ID NO: 1676310 - DNA, 15 bp, Homo sapiens
atggtgggtgactac

SEQ ID NO: 1676311 - DNA, 15 bp, Homo sapiens
tggtgggtgactaca

SEQ ID NO: 1676312 - DNA, 15 bp, Homo sapiens
ggtgggtgactacac

SEQ ID NO: 1676313 - DNA, 15 bp, Homo sapiens
gtgggtgactacaca

SEQ ID NO: 1676314 - DNA, 15 bp, Homo sapiens
tgggtgactacacat

SEQ ID NO: 1676315 - DNA, 15 bp, Homo sapiens
gggtgactacacata

SEQ ID NO: 1676316 - DNA, 15 bp, Homo sapiens
ggtgactacacatac

SEQ ID NO: 1676317 - DNA, 15 bp, Homo sapiens
gtgactacacatact

SEQ ID NO: 1676318 - DNA, 15 bp, Homo sapiens
tgactacacatactg

SEQ ID NO: 1676319 - DNA, 15 bp, Homo sapiens
gactacacatactgg

SEQ ID NO: 1676320 - DNA, 15 bp, Homo sapiens
actacacatactggt

SEQ ID NO: 1676321 - DNA, 15 bp, Homo sapiens
ctacacatactggta

SEQ ID NO: 1676322 - DNA, 15 bp, Homo sapiens
tacacatactggtat

SEQ ID NO: 1676323 - DNA, 15 bp, Homo sapiens
acacatactggtatt

SEQ ID NO: 1676324 - DNA, 15 bp, Homo sapiens
cacatactggtattt

SEQ ID NO: 1676325 - DNA, 15 bp, Homo sapiens
acatactggtatttc

SEQ ID NO: 1676326 - DNA, 15 bp, Homo sapiens
catactggtatttct

SEQ ID NO: 1676327 - DNA, 15 bp, Homo sapiens
atactggtatttctt

SEQ ID NO: 1676328 - DNA, 15 bp, Homo sapiens
tactggtatttctta

SEQ ID NO: 1676329 - DNA, 15 bp, Homo sapiens
actggtatttcttaa

SEQ ID NO: 1676330 - DNA, 15 bp, Homo sapiens
ctggtatttcttaaa

SEQ ID NO: 1676331 - DNA, 15 bp, Homo sapiens
tggtatttcttaaag

SEQ ID NO: 1676332 - DNA, 15 bp, Homo sapiens
ggtatttcttaaaga

SEQ ID NO: 1676333 - DNA, 15 bp, Homo sapiens
gtatttcttaaagaa

SEQ ID NO: 1676334 - DNA, 15 bp, Homo sapiens
tatttcttaaagaaa

SEQ ID NO: 1676335 - DNA, 15 bp, Homo sapiens
atttcttaaagaaat

SEQ ID NO: 1676336 - DNA, 15 bp, Homo sapiens
tttcttaaagaaata

SEQ ID NO: 1676337 - DNA, 15 bp, Homo sapiens
ttcttaaagaaatac

SEQ ID NO: 1676338 - DNA, 15 bp, Homo sapiens
tcttaaagaaatacc

SEQ ID NO: 1676339 - DNA, 15 bp, Homo sapiens
cttaaagaaatacca

SEQ ID NO: 1676340 - DNA, 15 bp, Homo sapiens
ttaaagaaataccaa

SEQ ID NO: 1676341 - DNA, 15 bp, Homo sapiens
taaagaaataccaat

SEQ ID NO: 1676342 - DNA, 15 bp, Homo sapiens
aaagaaataccaatt

SEQ ID NO: 1676343 - DNA, 15 bp, Homo sapiens
aagaaataccaattc

SEQ ID NO: 1676344 - DNA, 15 bp, Homo sapiens
agaaataccaattcc

SEQ ID NO: 1676345 - DNA, 15 bp, Homo sapiens
gaaataccaattcca

SEQ ID NO: 1676346 - DNA, 15 bp, Homo sapiens
aaataccaattccat

SEQ ID NO: 1676347 - DNA, 15 bp, Homo sapiens
aataccaattccatt

SEQ ID NO: 1676348 - DNA, 15 bp, Homo sapiens
ataccaattccattt

SEQ ID NO: 1676349 - DNA, 15 bp, Homo sapiens
taccaattccatttc

SEQ ID NO: 1676350 - DNA, 15 bp, Homo sapiens
accaattccatttcc

SEQ ID NO: 1676351 - DNA, 15 bp, Homo sapiens
ccaattccatttcct

SEQ ID NO: 1676352 - DNA, 15 bp, Homo sapiens
caattccatttcctt

SEQ ID NO: 1676353 - DNA, 15 bp, Homo sapiens
aattccatttccttt

SEQ ID NO: 1676354 - DNA, 15 bp, Homo sapiens
attccatttcctttt

SEQ ID NO: 1676355 - DNA, 15 bp, Homo sapiens
ttccatttcctttta

SEQ ID NO: 1676356 - DNA, 15 bp, Homo sapiens
tccatttccttttaa

SEQ ID NO: 1676357 - DNA, 15 bp, Homo sapiens
ccatttccttttaac

SEQ ID NO: 1676358 - DNA, 15 bp, Homo sapiens
catttccttttaaca

SEQ ID NO: 1676359 - DNA, 15 bp, Homo sapiens
atttccttttaacat

SEQ ID NO: 1676360 - DNA, 15 bp, Homo sapiens
tttccttttaacata

SEQ ID NO: 1676361 - DNA, 15 bp, Homo sapiens
ttccttttaacataa

SEQ ID NO: 1676362 - DNA, 15 bp, Homo sapiens
tccttttaacataat

SEQ ID NO: 1676363 - DNA, 15 bp, Homo sapiens
ccttttaacataatt

SEQ ID NO: 1676364 - DNA, 15 bp, Homo sapiens
cttttaacataatta

SEQ ID NO: 1676365 - DNA, 15 bp, Homo sapiens
ttttaacataattat

SEQ ID NO: 1676366 - DNA, 15 bp, Homo sapiens
tttaacataattatt

SEQ ID NO: 1676367 - DNA, 15 bp, Homo sapiens
ttaacataattatta

SEQ ID NO: 1676368 - DNA, 15 bp, Homo sapiens
taacataattattaa

SEQ ID NO: 1676369 - DNA, 15 bp, Homo sapiens
aacataattattaat

SEQ ID NO: 1676370 - DNA, 15 bp, Homo sapiens
acataattattaata

SEQ ID NO: 1676371 - DNA, 15 bp, Homo sapiens
cataattattaatat

SEQ ID NO: 1676372 - DNA, 15 bp, Homo sapiens
ataattattaatatc

SEQ ID NO: 1676373 - DNA, 15 bp, Homo sapiens
taattattaatatct

SEQ ID NO: 1676374 - DNA, 15 bp, Homo sapiens
aattattaatatctc

SEQ ID NO: 1676375 - DNA, 15 bp, Homo sapiens
attattaatatctca

SEQ ID NO: 1676376 - DNA, 15 bp, Homo sapiens
ttattaatatctcat

SEQ ID NO: 1676377 - DNA, 15 bp, Homo sapiens
tattaatatctcatt

SEQ ID NO: 1676378 - DNA, 15 bp, Homo sapiens
attaatatctcatta

SEQ ID NO: 1676379 - DNA, 15 bp, Homo sapiens
ttaatatctcattag

SEQ ID NO: 1676380 - DNA, 15 bp, Homo sapiens
taatatctcattagc

SEQ ID NO: 1676381 - DNA, 15 bp, Homo sapiens
aatatctcattagca

SEQ ID NO: 1676382 - DNA, 15 bp, Homo sapiens
atatctcattagcat

SEQ ID NO: 1676383 - DNA, 15 bp, Homo sapiens
tatctcattagcatg

SEQ ID NO: 1676384 - DNA, 15 bp, Homo sapiens
atctcattagcatgg

SEQ ID NO: 1676385 - DNA, 15 bp, Homo sapiens
tctcattagcatggt

SEQ ID NO: 1676386 - DNA, 15 bp, Homo sapiens
ctcattagcatggtg

SEQ ID NO: 1676387 - DNA, 15 bp, Homo sapiens
tcattagcatggtgt

SEQ ID NO: 1676388 - DNA, 15 bp, Homo sapiens
cattagcatggtgtc

SEQ ID NO: 1676389 - DNA, 15 bp, Homo sapiens
attagcatggtgtca

SEQ ID NO: 1676390 - DNA, 15 bp, Homo sapiens
ttagcatggtgtcac

SEQ ID NO: 1676391 - DNA, 15 bp, Homo sapiens
tagcatggtgtcact

SEQ ID NO: 1676392 - DNA, 15 bp, Homo sapiens
agcatggtgtcactg

SEQ ID NO: 1676393 - DNA, 15 bp, Homo sapiens
gcatggtgtcactga

SEQ ID NO: 1676394 - DNA, 15 bp, Homo sapiens
catggtgtcactgaa

SEQ ID NO: 1676395 - DNA, 15 bp, Homo sapiens
atggtgtcactgaag

SEQ ID NO: 1676396 - DNA, 15 bp, Homo sapiens
tggtgtcactgaagc

SEQ ID NO: 1676397 - DNA, 15 bp, Homo sapiens
ggtgtcactgaagcc

SEQ ID NO: 1676398 - DNA, 15 bp, Homo sapiens
gtgtcactgaagcct

SEQ ID NO: 1676399 - DNA, 15 bp, Homo sapiens
tgtcactgaagcctg

SEQ ID NO: 1676400 - DNA, 15 bp, Homo sapiens
gtcactgaagcctgg

SEQ ID NO: 1676401 - DNA, 15 bp, Homo sapiens
tcactgaagcctggg

SEQ ID NO: 1676402 - DNA, 15 bp, Homo sapiens
cactgaagcctgggc

SEQ ID NO: 1676403 - DNA, 15 bp, Homo sapiens
actgaagcctgggcc

SEQ ID NO: 1676404 - DNA, 15 bp, Homo sapiens
ctgaagcctgggccc

SEQ ID NO: 1676405 - DNA, 15 bp, Homo sapiens
tgaagcctgggccca

SEQ ID NO: 1676406 - DNA, 15 bp, Homo sapiens
gaagcctgggcccaa

SEQ ID NO: 1676407 - DNA, 15 bp, Homo sapiens
aagcctgggcccaaa

SEQ ID NO: 1676408 - DNA, 15 bp, Homo sapiens
agcctgggcccaaag

SEQ ID NO: 1676409 - DNA, 15 bp, Homo sapiens
gcctgggcccaaaga

SEQ ID NO: 1676410 - DNA, 15 bp, Homo sapiens
cctgggcccaaagaa

SEQ ID NO: 1676411 - DNA, 15 bp, Homo sapiens
ctgggcccaaagaaa

SEQ ID NO: 1676412 - DNA, 15 bp, Homo sapiens
tgggcccaaagaaat

SEQ ID NO: 1676413 - DNA, 15 bp, Homo sapiens
gggcccaaagaaata

SEQ ID NO: 1676414 - DNA, 15 bp, Homo sapiens
ggcccaaagaaatac

SEQ ID NO: 1676415 - DNA, 15 bp, Homo sapiens
gcccaaagaaatacc

SEQ ID NO: 1676416 - DNA, 15 bp, Homo sapiens
cccaaagaaatacca

SEQ ID NO: 1676417 - DNA, 15 bp, Homo sapiens
ccaaagaaataccaa

SEQ ID NO: 1676418 - DNA, 15 bp, Homo sapiens
caaagaaataccaat

SEQ ID NO: 1676419 - DNA, 15 bp, Homo sapiens
aataccaattccata

SEQ ID NO: 1676420 - DNA, 15 bp, Homo sapiens
ataccaattccatat

SEQ ID NO: 1676421 - DNA, 15 bp, Homo sapiens
taccaattccatatc

SEQ ID NO: 1676422 - DNA, 15 bp, Homo sapiens
accaattccatatca

SEQ ID NO: 1676423 - DNA, 15 bp, Homo sapiens
ccaattccatatcat

SEQ ID NO: 1676424 - DNA, 15 bp, Homo sapiens
caattccatatcatt

SEQ ID NO: 1676425 - DNA, 15 bp, Homo sapiens
aattccatatcattt

SEQ ID NO: 1676426 - DNA, 15 bp, Homo sapiens
attccatatcatttt

SEQ ID NO: 1676427 - DNA, 15 bp, Homo sapiens
ttccatatcatttta

SEQ ID NO: 1676428 - DNA, 15 bp, Homo sapiens
tccatatcattttaa

SEQ ID NO: 1676429 - DNA, 15 bp, Homo sapiens
ccatatcattttaag

SEQ ID NO: 1676430 - DNA, 15 bp, Homo sapiens
catatcattttaaga

SEQ ID NO: 1676431 - DNA, 15 bp, Homo sapiens
atatcattttaagat

SEQ ID NO: 1676432 - DNA, 15 bp, Homo sapiens
tatcattttaagatc

SEQ ID NO: 1676433 - DNA, 15 bp, Homo sapiens
atcattttaagatca

SEQ ID NO: 1676434 - DNA, 15 bp, Homo sapiens
tcattttaagatcat

SEQ ID NO: 1676435 - DNA, 15 bp, Homo sapiens
cattttaagatcatt

SEQ ID NO: 1676436 - DNA, 15 bp, Homo sapiens
attttaagatcatta

SEQ ID NO: 1676437 - DNA, 15 bp, Homo sapiens
ttttaagatcattat

SEQ ID NO: 1676438 - DNA, 15 bp, Homo sapiens
tttaagatcattatt

SEQ ID NO: 1676439 - DNA, 15 bp, Homo sapiens
ttaagatcattatta

SEQ ID NO: 1676440 - DNA, 15 bp, Homo sapiens
taagatcattattaa

SEQ ID NO: 1676441 - DNA, 15 bp, Homo sapiens
aagatcattattaat

SEQ ID NO: 1676442 - DNA, 15 bp, Homo sapiens
agatcattattaata

SEQ ID NO: 1676443 - DNA, 15 bp, Homo sapiens
gatcattattaatat

SEQ ID NO: 1676444 - DNA, 15 bp, Homo sapiens
atcattattaatatc

SEQ ID NO: 1676445 - DNA, 15 bp, Homo sapiens
tcattattaatatct

SEQ ID NO: 1676446 - DNA, 15 bp, Homo sapiens
cattattaatatctc

SEQ ID NO: 1676447 - DNA, 15 bp, Homo sapiens
tattaatatctcatc

SEQ ID NO: 1676448 - DNA, 15 bp, Homo sapiens
attaatatctcatca

SEQ ID NO: 1676449 - DNA, 15 bp, Homo sapiens
ttaatatctcatcag

SEQ ID NO: 1676450 - DNA, 15 bp, Homo sapiens
taatatctcatcagc

SEQ ID NO: 1676451 - DNA, 15 bp, Homo sapiens
aatatctcatcagcg

SEQ ID NO: 1676452 - DNA, 15 bp, Homo sapiens
atatctcatcagcgt

SEQ ID NO: 1676453 - DNA, 15 bp, Homo sapiens
tatctcatcagcgtg

SEQ ID NO: 1676454 - DNA, 15 bp, Homo sapiens
atctcatcagcgtgg

SEQ ID NO: 1676455 - DNA, 15 bp, Homo sapiens
tctcatcagcgtggt

SEQ ID NO: 1676456 - DNA, 15 bp, Homo sapiens
ctcatcagcgtggtg

SEQ ID NO: 1676457 - DNA, 15 bp, Homo sapiens
tcatcagcgtggtgt

SEQ ID NO: 1676458 - DNA, 15 bp, Homo sapiens
catcagcgtggtgtc

SEQ ID NO: 1676459 - DNA, 15 bp, Homo sapiens
atcagcgtggtgtca

SEQ ID NO: 1676460 - DNA, 15 bp, Homo sapiens
tcagcgtggtgtcac

SEQ ID NO: 1676461 - DNA, 15 bp, Homo sapiens
cagcgtggtgtcact

SEQ ID NO: 1676462 - DNA, 15 bp, Homo sapiens
agcgtggtgtcactt

SEQ ID NO: 1676463 - DNA, 15 bp, Homo sapiens
gcgtggtgtcactta

SEQ ID NO: 1676464 - DNA, 15 bp, Homo sapiens
cgtggtgtcacttaa

SEQ ID NO: 1676465 - DNA, 15 bp, Homo sapiens
gtggtgtcacttaag

SEQ ID NO: 1676466 - DNA, 15 bp, Homo sapiens
tggtgtcacttaagc

SEQ ID NO: 1676467 - DNA, 15 bp, Homo sapiens
ggtgtcacttaagcc

SEQ ID NO: 1676468 - DNA, 15 bp, Homo sapiens
gtgtcacttaagcct

SEQ ID NO: 1676469 - DNA, 15 bp, Homo sapiens
tgtcacttaagcctg

SEQ ID NO: 1676470 - DNA, 15 bp, Homo sapiens
gtcacttaagcctgg

SEQ ID NO: 1676471 - DNA, 15 bp, Homo sapiens
tcacttaagcctggg

SEQ ID NO: 1676472 - DNA, 15 bp, Homo sapiens
cacttaagcctgggc

SEQ ID NO: 1676473 - DNA, 15 bp, Homo sapiens
acttaagcctgggcc

SEQ ID NO: 1676474 - DNA, 15 bp, Homo sapiens
cttaagcctgggccc

SEQ ID NO: 1676475 - DNA, 15 bp, Homo sapiens
ttaagcctgggccct

SEQ ID NO: 1676476 - DNA, 15 bp, Homo sapiens
taagcctgggccctt

SEQ ID NO: 1676477 - DNA, 15 bp, Homo sapiens
aagcctgggcccttt

SEQ ID NO: 1676478 - DNA, 15 bp, Homo sapiens
agcctgggcccttta

SEQ ID NO: 1676479 - DNA, 15 bp, Homo sapiens
gcctgggccctttag

SEQ ID NO: 1676480 - DNA, 15 bp, Homo sapiens
cctgggccctttaga

SEQ ID NO: 1676481 - DNA, 15 bp, Homo sapiens
ctgggccctttagaa

SEQ ID NO: 1676482 - DNA, 15 bp, Homo sapiens
tgggccctttagaat

SEQ ID NO: 1676483 - DNA, 15 bp, Homo sapiens
gggccctttagaatt

SEQ ID NO: 1676484 - DNA, 15 bp, Homo sapiens
ggccctttagaattt

SEQ ID NO: 1676485 - DNA, 15 bp, Homo sapiens
gccctttagaatttt

SEQ ID NO: 1676486 - DNA, 15 bp, Homo sapiens
ccctttagaattttt

SEQ ID NO: 1676487 - DNA, 15 bp, Homo sapiens
cctttagaatttttc

SEQ ID NO: 1676488 - DNA, 15 bp, Homo sapiens
ctttagaatttttca

SEQ ID NO: 1676489 - DNA, 15 bp, Homo sapiens
tttagaatttttcat

SEQ ID NO: 1676490 - DNA, 15 bp, Homo sapiens
ttagaatttttcatg

SEQ ID NO: 1676491 - DNA, 15 bp, Homo sapiens
tagaatttttcatgt

SEQ ID NO: 1676492 - DNA, 15 bp, Homo sapiens
agaatttttcatgta

SEQ ID NO: 1676493 - DNA, 15 bp, Homo sapiens
gaatttttcatgtac

SEQ ID NO: 1676494 - DNA, 15 bp, Homo sapiens
aatttttcatgtacc

SEQ ID NO: 1676495 - DNA, 15 bp, Homo sapiens
atttttcatgtacct

SEQ ID NO: 1676496 - DNA, 15 bp, Homo sapiens
tttttcatgtacctg

SEQ ID NO: 1676497 - DNA, 15 bp, Homo sapiens
ttttcatgtacctgt

SEQ ID NO: 1676498 - DNA, 15 bp, Homo sapiens
tttcatgtacctgtg

SEQ ID NO: 1676499 - DNA, 15 bp, Homo sapiens
ttcatgtacctgtgt

SEQ ID NO: 1676500 - DNA, 15 bp, Homo sapiens
tcatgtacctgtgtt

SEQ ID NO: 1676501 - DNA, 15 bp, Homo sapiens
catgtacctgtgttc

SEQ ID NO: 1676502 - DNA, 15 bp, Homo sapiens
atgtacctgtgttcc

SEQ ID NO: 1676503 - DNA, 15 bp, Homo sapiens
tgtacctgtgttcct

SEQ ID NO: 1676504 - DNA, 15 bp, Homo sapiens
gtacctgtgttcctc

SEQ ID NO: 1676505 - DNA, 15 bp, Homo sapiens
tacctgtgttcctct

SEQ ID NO: 1676506 - DNA, 15 bp, Homo sapiens
acctgtgttcctctg

SEQ ID NO: 1676507 - DNA, 15 bp, Homo sapiens
cctgtgttcctctgc

SEQ ID NO: 1676508 - DNA, 15 bp, Homo sapiens
ctgtgttcctctgcc

SEQ ID NO: 1676509 - DNA, 15 bp, Homo sapiens
tgtgttcctctgccc

SEQ ID NO: 1676510 - DNA, 15 bp, Homo sapiens
gtgttcctctgccca

SEQ ID NO: 1676511 - DNA, 15 bp, Homo sapiens
tgttcctctgcccat

SEQ ID NO: 1676512 - DNA, 15 bp, Homo sapiens
gttcctctgcccata

SEQ ID NO: 1676513 - DNA, 15 bp, Homo sapiens
ttcctctgcccatat

SEQ ID NO: 1676514 - DNA, 15 bp, Homo sapiens
tcctctgcccatatc

SEQ ID NO: 1676515 - DNA, 15 bp, Homo sapiens
cctctgcccatatca

SEQ ID NO: 1676516 - DNA, 15 bp, Homo sapiens
ctctgcccatatcag

SEQ ID NO: 1676517 - DNA, 15 bp, Homo sapiens
tctgcccatatcagc

SEQ ID NO: 1676518 - DNA, 15 bp, Homo sapiens
ctgcccatatcagct

SEQ ID NO: 1676519 - DNA, 15 bp, Homo sapiens
tgcccatatcagctg

SEQ ID NO: 1676520 - DNA, 15 bp, Homo sapiens
gcccatatcagctgg

SEQ ID NO: 1676521 - DNA, 15 bp, Homo sapiens
cccatatcagctgga

SEQ ID NO: 1676522 - DNA, 15 bp, Homo sapiens
ccatatcagctggaa

SEQ ID NO: 1676523 - DNA, 15 bp, Homo sapiens
catatcagctggaac

SEQ ID NO: 1676524 - DNA, 15 bp, Homo sapiens
atatcagctggaaca

SEQ ID NO: 1676525 - DNA, 15 bp, Homo sapiens
tatcagctggaacac

SEQ ID NO: 1676526 - DNA, 15 bp, Homo sapiens
atcagctggaacact

SEQ ID NO: 1676527 - DNA, 15 bp, Homo sapiens
tcagctggaacacta

SEQ ID NO: 1676528 - DNA, 15 bp, Homo sapiens
cagctggaacactaa

SEQ ID NO: 1676529 - DNA, 15 bp, Homo sapiens
agctggaacactaat

SEQ ID NO: 1676530 - DNA, 15 bp, Homo sapiens
gctggaacactaata

SEQ ID NO: 1676531 - DNA, 15 bp, Homo sapiens
ctggaacactaatag

SEQ ID NO: 1676532 - DNA, 15 bp, Homo sapiens
tggaacactaatagt

SEQ ID NO: 1676533 - DNA, 15 bp, Homo sapiens
ggaacactaatagtt

SEQ ID NO: 1676534 - DNA, 15 bp, Homo sapiens
gaacactaatagttt

SEQ ID NO: 1676535 - DNA, 15 bp, Homo sapiens
aacactaatagtttt

SEQ ID NO: 1676536 - DNA, 15 bp, Homo sapiens
acactaatagttttc

SEQ ID NO: 1676537 - DNA, 15 bp, Homo sapiens
cactaatagttttct

SEQ ID NO: 1676538 - DNA, 15 bp, Homo sapiens
actaatagttttctt

SEQ ID NO: 1676539 - DNA, 15 bp, Homo sapiens
ctaatagttttcttc

SEQ ID NO: 1676540 - DNA, 15 bp, Homo sapiens
taatagttttcttcc

SEQ ID NO: 1676541 - DNA, 15 bp, Homo sapiens
aatagttttcttcct

SEQ ID NO: 1676542 - DNA, 15 bp, Homo sapiens
atagttttcttcctt

SEQ ID NO: 1676543 - DNA, 15 bp, Homo sapiens
tagttttcttccttt

SEQ ID NO: 1676544 - DNA, 15 bp, Homo sapiens
agttttcttcctttt

SEQ ID NO: 1676545 - DNA, 15 bp, Homo sapiens
gttttcttccttttt

SEQ ID NO: 1676546 - DNA, 15 bp, Homo sapiens
ttttcttccttttta

SEQ ID NO: 1676547 - DNA, 15 bp, Homo sapiens
tttcttcctttttat

SEQ ID NO: 1676548 - DNA, 15 bp, Homo sapiens
ttcttcctttttatc

SEQ ID NO: 1676549 - DNA, 15 bp, Homo sapiens
tcttcctttttatct

SEQ ID NO: 1676550 - DNA, 15 bp, Homo sapiens
cttcctttttatcta

SEQ ID NO: 1676551 - DNA, 15 bp, Homo sapiens
ttcctttttatctag

SEQ ID NO: 1676552 - DNA, 15 bp, Homo sapiens
tcctttttatctaga

SEQ ID NO: 1676553 - DNA, 15 bp, Homo sapiens
cctttttatctagaa

SEQ ID NO: 1676554 - DNA, 15 bp, Homo sapiens
ctttttatctagaag

SEQ ID NO: 1676555 - DNA, 15 bp, Homo sapiens
tttttatctagaaga

SEQ ID NO: 1676556 - DNA, 15 bp, Homo sapiens
ttttatctagaagac

SEQ ID NO: 1676557 - DNA, 15 bp, Homo sapiens
tttatctagaagact

SEQ ID NO: 1676558 - DNA, 15 bp, Homo sapiens
ttatctagaagactg

SEQ ID NO: 1676559 - DNA, 15 bp, Homo sapiens
tatctagaagactga

SEQ ID NO: 1676560 - DNA, 15 bp, Homo sapiens
atctagaagactgag

SEQ ID NO: 1676561 - DNA, 15 bp, Homo sapiens
tctagaagactgaga

SEQ ID NO: 1676562 - DNA, 15 bp, Homo sapiens
ctagaagactgagaa

SEQ ID NO: 1676563 - DNA, 15 bp, Homo sapiens
tagaagactgagaac

SEQ ID NO: 1676564 - DNA, 15 bp, Homo sapiens
agaagactgagaaca

SEQ ID NO: 1676565 - DNA, 15 bp, Homo sapiens
gaagactgagaacat

SEQ ID NO: 1676566 - DNA, 15 bp, Homo sapiens
aagactgagaacatt

SEQ ID NO: 1676567 - DNA, 15 bp, Homo sapiens
agactgagaacatta

SEQ ID NO: 1676568 - DNA, 15 bp, Homo sapiens
gactgagaacattac

SEQ ID NO: 1676569 - DNA, 15 bp, Homo sapiens
actgagaacattaca

SEQ ID NO: 1676570 - DNA, 15 bp, Homo sapiens
ctgagaacattacat

SEQ ID NO: 1676571 - DNA, 15 bp, Homo sapiens
tgagaacattacatg

SEQ ID NO: 1676572 - DNA, 15 bp, Homo sapiens
gagaacattacatgg

SEQ ID NO: 1676573 - DNA, 15 bp, Homo sapiens
agaacattacatggg

SEQ ID NO: 1676574 - DNA, 15 bp, Homo sapiens
gaacattacatggga

SEQ ID NO: 1676575 - DNA, 15 bp, Homo sapiens
aacattacatgggac

SEQ ID NO: 1676576 - DNA, 15 bp, Homo sapiens
acattacatgggacc

SEQ ID NO: 1676577 - DNA, 15 bp, Homo sapiens
cattacatgggacct

SEQ ID NO: 1676578 - DNA, 15 bp, Homo sapiens
attacatgggacctg

SEQ ID NO: 1676579 - DNA, 15 bp, Homo sapiens
ttacatgggacctgc

SEQ ID NO: 1676580 - DNA, 15 bp, Homo sapiens
tacatgggacctgcc

SEQ ID NO: 1676581 - DNA, 15 bp, Homo sapiens
acatgggacctgccc

SEQ ID NO: 1676582 - DNA, 15 bp, Homo sapiens
catgggacctgcccc

SEQ ID NO: 1676583 - DNA, 15 bp, Homo sapiens
atgggacctgccccc

SEQ ID NO: 1676584 - DNA, 15 bp, Homo sapiens
tgggacctgccccca

SEQ ID NO: 1676585 - DNA, 15 bp, Homo sapiens
gggacctgcccccag

SEQ ID NO: 1676586 - DNA, 15 bp, Homo sapiens
ggacctgcccccagg

SEQ ID NO: 1676587 - DNA, 15 bp, Homo sapiens
gacctgcccccaggg

SEQ ID NO: 1676588 - DNA, 15 bp, Homo sapiens
acctgcccccagggc

SEQ ID NO: 1676589 - DNA, 15 bp, Homo sapiens
cctgcccccagggca

SEQ ID NO: 1676590 - DNA, 15 bp, Homo sapiens
ctgcccccagggcat

SEQ ID NO: 1676591 - DNA, 15 bp, Homo sapiens
tgcccccagggcatg

SEQ ID NO: 1676592 - DNA, 15 bp, Homo sapiens
gcccccagggcatgg

SEQ ID NO: 1676593 - DNA, 15 bp, Homo sapiens
cccccagggcatgga

SEQ ID NO: 1676594 - DNA, 15 bp, Homo sapiens
ccccagggcatggag

SEQ ID NO: 1676595 - DNA, 15 bp, Homo sapiens
cccagggcatggagg

SEQ ID NO: 1676596 - DNA, 15 bp, Homo sapiens
ccagggcatggaggc

SEQ ID NO: 1676597 - DNA, 15 bp, Homo sapiens
cagggcatggaggct

SEQ ID NO: 1676598 - DNA, 15 bp, Homo sapiens
agggcatggaggctg

SEQ ID NO: 1676599 - DNA, 15 bp, Homo sapiens
gggcatggaggctga

SEQ ID NO: 1676600 - DNA, 15 bp, Homo sapiens
ggcatggaggctgag

SEQ ID NO: 1676601 - DNA, 15 bp, Homo sapiens
gcatggaggctgagg

SEQ ID NO: 1676602 - DNA, 15 bp, Homo sapiens
catggaggctgaggt

SEQ ID NO: 1676603 - DNA, 15 bp, Homo sapiens
atggaggctgaggtg

SEQ ID NO: 1676604 - DNA, 15 bp, Homo sapiens
tggaggctgaggtgg

SEQ ID NO: 1676605 - DNA, 15 bp, Homo sapiens
aggctgaggtgggac

SEQ ID NO: 1676606 - DNA, 15 bp, Homo sapiens
ggctgaggtgggaca

SEQ ID NO: 1676607 - DNA, 15 bp, Homo sapiens
gctgaggtgggacag

SEQ ID NO: 1676608 - DNA, 15 bp, Homo sapiens
ctgaggtgggacagt

SEQ ID NO: 1676609 - DNA, 15 bp, Homo sapiens
tgaggtgggacagtt

SEQ ID NO: 1676610 - DNA, 15 bp, Homo sapiens
gaggtgggacagttt

SEQ ID NO: 1676611 - DNA, 15 bp, Homo sapiens
aggtgggacagttta

SEQ ID NO: 1676612 - DNA, 15 bp, Homo sapiens
ggtgggacagtttag

SEQ ID NO: 1676613 - DNA, 15 bp, Homo sapiens
gtgggacagtttagt

SEQ ID NO: 1676614 - DNA, 15 bp, Homo sapiens
tgggacagtttagtt

SEQ ID NO: 1676615 - DNA, 15 bp, Homo sapiens
gggacagtttagttc

SEQ ID NO: 1676616 - DNA, 15 bp, Homo sapiens
ggacagtttagttca

SEQ ID NO: 1676617 - DNA, 15 bp, Homo sapiens
gacagtttagttcag

SEQ ID NO: 1676618 - DNA, 15 bp, Homo sapiens
acagtttagttcagg

SEQ ID NO: 1676619 - DNA, 15 bp, Homo sapiens
cagtttagttcagga

SEQ ID NO: 1676620 - DNA, 15 bp, Homo sapiens
agtttagttcaggag

SEQ ID NO: 1676621 - DNA, 15 bp, Homo sapiens
gtttagttcaggagg

SEQ ID NO: 1676622 - DNA, 15 bp, Homo sapiens
tttagttcaggaggc

SEQ ID NO: 1676623 - DNA, 15 bp, Homo sapiens
ttagttcaggaggcc

SEQ ID NO: 1676624 - DNA, 15 bp, Homo sapiens
tagttcaggaggccc

SEQ ID NO: 1676625 - DNA, 15 bp, Homo sapiens
agttcaggaggccca

SEQ ID NO: 1676626 - DNA, 15 bp, Homo sapiens
gttcaggaggcccaa

SEQ ID NO: 1676627 - DNA, 15 bp, Homo sapiens
ttcaggaggcccaag

SEQ ID NO: 1676628 - DNA, 15 bp, Homo sapiens
tcaggaggcccaaga

SEQ ID NO: 1676629 - DNA, 15 bp, Homo sapiens
caggaggcccaagaa

SEQ ID NO: 1676630 - DNA, 15 bp, Homo sapiens
aggaggcccaagaag

SEQ ID NO: 1676631 - DNA, 15 bp, Homo sapiens
ggaggcccaagaagt

SEQ ID NO: 1676632 - DNA, 15 bp, Homo sapiens
gaggcccaagaagtg

SEQ ID NO: 1676633 - DNA, 15 bp, Homo sapiens
aggcccaagaagtgt

SEQ ID NO: 1676634 - DNA, 15 bp, Homo sapiens
ggcccaagaagtgtt

SEQ ID NO: 1676635 - DNA, 15 bp, Homo sapiens
gcccaagaagtgttg

SEQ ID NO: 1676636 - DNA, 15 bp, Homo sapiens
cccaagaagtgttgg

SEQ ID NO: 1676637 - DNA, 15 bp, Homo sapiens
ccaagaagtgttggg

SEQ ID NO: 1676638 - DNA, 15 bp, Homo sapiens
caagaagtgttgggt

SEQ ID NO: 1676639 - DNA, 15 bp, Homo sapiens
aagaagtgttgggtg

SEQ ID NO: 1676640 - DNA, 15 bp, Homo sapiens
agaagtgttgggtgt

SEQ ID NO: 1676641 - DNA, 15 bp, Homo sapiens
gaagtgttgggtgtg

SEQ ID NO: 1676642 - DNA, 15 bp, Homo sapiens
aagtgttgggtgtgc

SEQ ID NO: 1676643 - DNA, 15 bp, Homo sapiens
agtgttgggtgtgca

SEQ ID NO: 1676644 - DNA, 15 bp, Homo sapiens
gtgttgggtgtgcag

SEQ ID NO: 1676645 - DNA, 15 bp, Homo sapiens
tgttgggtgtgcagc

SEQ ID NO: 1676646 - DNA, 15 bp, Homo sapiens
gttgggtgtgcagcc

SEQ ID NO: 1676647 - DNA, 15 bp, Homo sapiens
ttgggtgtgcagccc

SEQ ID NO: 1676648 - DNA, 15 bp, Homo sapiens
tgggtgtgcagcccc

SEQ ID NO: 1676649 - DNA, 15 bp, Homo sapiens
gggtgtgcagcccct

SEQ ID NO: 1676650 - DNA, 15 bp, Homo sapiens
ggtgtgcagcccctt

SEQ ID NO: 1676651 - DNA, 15 bp, Homo sapiens
gtgtgcagccccttg

SEQ ID NO: 1676652 - DNA, 15 bp, Homo sapiens
tgtgcagccccttgt

SEQ ID NO: 1676653 - DNA, 15 bp, Homo sapiens
gtgcagccccttgtt

SEQ ID NO: 1676654 - DNA, 15 bp, Homo sapiens
tgcagccccttgttc

SEQ ID NO: 1676655 - DNA, 15 bp, Homo sapiens
gcagccccttgttca

SEQ ID NO: 1676656 - DNA, 15 bp, Homo sapiens
cagccccttgttcaa

SEQ ID NO: 1676657 - DNA, 15 bp, Homo sapiens
agccccttgttcaaa

SEQ ID NO: 1676658 - DNA, 15 bp, Homo sapiens
gccccttgttcaaac

SEQ ID NO: 1676659 - DNA, 15 bp, Homo sapiens
ccccttgttcaaaca

SEQ ID NO: 1676660 - DNA, 15 bp, Homo sapiens
cccttgttcaaacac

SEQ ID NO: 1676661 - DNA, 15 bp, Homo sapiens
ccttgttcaaacaca

SEQ ID NO: 1676662 - DNA, 15 bp, Homo sapiens
cttgttcaaacacag

SEQ ID NO: 1676663 - DNA, 15 bp, Homo sapiens
ttgttcaaacacagc

SEQ ID NO: 1676664 - DNA, 15 bp, Homo sapiens
tgttcaaacacagcc

SEQ ID NO: 1676665 - DNA, 15 bp, Homo sapiens
gttcaaacacagcct

SEQ ID NO: 1676666 - DNA, 15 bp, Homo sapiens
ttcaaacacagcctc

SEQ ID NO: 1676667 - DNA, 15 bp, Homo sapiens
tcaaacacagcctct

SEQ ID NO: 1676668 - DNA, 15 bp, Homo sapiens
caaacacagcctctg

SEQ ID NO: 1676669 - DNA, 15 bp, Homo sapiens
aaacacagcctctga

SEQ ID NO: 1676670 - DNA, 15 bp, Homo sapiens
aacacagcctctgaa

SEQ ID NO: 1676671 - DNA, 15 bp, Homo sapiens
acacagcctctgaat

SEQ ID NO: 1676672 - DNA, 15 bp, Homo sapiens
cacagcctctgaatc

SEQ ID NO: 1676673 - DNA, 15 bp, Homo sapiens
acagcctctgaatcg

SEQ ID NO: 1676674 - DNA, 15 bp, Homo sapiens
cagcctctgaatcgc

SEQ ID NO: 1676675 - DNA, 15 bp, Homo sapiens
agcctctgaatcgcc

SEQ ID NO: 1676676 - DNA, 15 bp, Homo sapiens
gcctctgaatcgcca

SEQ ID NO: 1676677 - DNA, 15 bp, Homo sapiens
cctctgaatcgccag

SEQ ID NO: 1676678 - DNA, 15 bp, Homo sapiens
ctctgaatcgccaga

SEQ ID NO: 1676679 - DNA, 15 bp, Homo sapiens
tctgaatcgccagag

SEQ ID NO: 1676680 - DNA, 15 bp, Homo sapiens
ctgaatcgccagagg

SEQ ID NO: 1676681 - DNA, 15 bp, Homo sapiens
tgaatcgccagaggc

SEQ ID NO: 1676682 - DNA, 15 bp, Homo sapiens
gaatcgccagaggct

SEQ ID NO: 1676683 - DNA, 15 bp, Homo sapiens
aatcgccagaggctt

SEQ ID NO: 1676684 - DNA, 15 bp, Homo sapiens
atcgccagaggcttc

SEQ ID NO: 1676685 - DNA, 15 bp, Homo sapiens
tcgccagaggcttcc

SEQ ID NO: 1676686 - DNA, 15 bp, Homo sapiens
cgccagaggcttccg

SEQ ID NO: 1676687 - DNA, 15 bp, Homo sapiens
gccagaggcttccgg

SEQ ID NO: 1676688 - DNA, 15 bp, Homo sapiens
ccagaggcttccggt

SEQ ID NO: 1676689 - DNA, 15 bp, Homo sapiens
cagaggcttccggtg

SEQ ID NO: 1676690 - DNA, 15 bp, Homo sapiens
agaggcttccggtgc

SEQ ID NO: 1676691 - DNA, 15 bp, Homo sapiens
gaggcttccggtgca

SEQ ID NO: 1676692 - DNA, 15 bp, Homo sapiens
aggcttccggtgcat

SEQ ID NO: 1676693 - DNA, 15 bp, Homo sapiens
ggcttccggtgcata

SEQ ID NO: 1676694 - DNA, 15 bp, Homo sapiens
gcttccggtgcatac

SEQ ID NO: 1676695 - DNA, 15 bp, Homo sapiens
cttccggtgcatact

SEQ ID NO: 1676696 - DNA, 15 bp, Homo sapiens
ttccggtgcatactc

SEQ ID NO: 1676697 - DNA, 15 bp, Homo sapiens
tccggtgcatactct

SEQ ID NO: 1676698 - DNA, 15 bp, Homo sapiens
ccggtgcatactctg

SEQ ID NO: 1676699 - DNA, 15 bp, Homo sapiens
cggtgcatactctga

SEQ ID NO: 1676700 - DNA, 15 bp, Homo sapiens
ggtgcatactctgag

SEQ ID NO: 1676701 - DNA, 15 bp, Homo sapiens
gtgcatactctgagg

SEQ ID NO: 1676702 - DNA, 15 bp, Homo sapiens
tgcatactctgaggc

SEQ ID NO: 1676703 - DNA, 15 bp, Homo sapiens
gcatactctgaggcg

SEQ ID NO: 1676704 - DNA, 15 bp, Homo sapiens
catactctgaggcgc

SEQ ID NO: 1676705 - DNA, 15 bp, Homo sapiens
atactctgaggcgca

SEQ ID NO: 1676706 - DNA, 15 bp, Homo sapiens
tactctgaggcgcag

SEQ ID NO: 1676707 - DNA, 15 bp, Homo sapiens
actctgaggcgcagg

SEQ ID NO: 1676708 - DNA, 15 bp, Homo sapiens
ctctgaggcgcaggt

SEQ ID NO: 1676709 - DNA, 15 bp, Homo sapiens
tctgaggcgcaggtg

SEQ ID NO: 1676710 - DNA, 15 bp, Homo sapiens
ctgaggcgcaggtgg

SEQ ID NO: 1676711 - DNA, 15 bp, Homo sapiens
tgaggcgcaggtggg

SEQ ID NO: 1676712 - DNA, 15 bp, Homo sapiens
gaggcgcaggtggga

SEQ ID NO: 1676713 - DNA, 15 bp, Homo sapiens
aggcgcaggtgggac

SEQ ID NO: 1676714 - DNA, 15 bp, Homo sapiens
ggcgcaggtgggact

SEQ ID NO: 1676715 - DNA, 15 bp, Homo sapiens
gcgcaggtgggactc

SEQ ID NO: 1676716 - DNA, 15 bp, Homo sapiens
cgcaggtgggactcg

SEQ ID NO: 1676717 - DNA, 15 bp, Homo sapiens
gcaggtgggactcgg

SEQ ID NO: 1676718 - DNA, 15 bp, Homo sapiens
caggtgggactcggg

SEQ ID NO: 1676719 - DNA, 15 bp, Homo sapiens
aggtgggactcggga

SEQ ID NO: 1676720 - DNA, 15 bp, Homo sapiens
ggtgggactcgggag

SEQ ID NO: 1676721 - DNA, 15 bp, Homo sapiens
gtgggactcgggagt

SEQ ID NO: 1676722 - DNA, 15 bp, Homo sapiens
tgggactcgggagtg

SEQ ID NO: 1676723 - DNA, 15 bp, Homo sapiens
gggactcgggagtga

SEQ ID NO: 1676724 - DNA, 15 bp, Homo sapiens
ggactcgggagtgag

SEQ ID NO: 1676725 - DNA, 15 bp, Homo sapiens
gactcgggagtgaga

SEQ ID NO: 1676726 - DNA, 15 bp, Homo sapiens
actcgggagtgagag

SEQ ID NO: 1676727 - DNA, 15 bp, Homo sapiens
ctcgggagtgagagg

SEQ ID NO: 1676728 - DNA, 15 bp, Homo sapiens
tcgggagtgagaggt

SEQ ID NO: 1676729 - DNA, 15 bp, Homo sapiens
cgggagtgagaggtt

SEQ ID NO: 1676730 - DNA, 15 bp, Homo sapiens
gggagtgagaggttt

SEQ ID NO: 1676731 - DNA, 15 bp, Homo sapiens
ggagtgagaggtttc

SEQ ID NO: 1676732 - DNA, 15 bp, Homo sapiens
gagtgagaggtttcg

SEQ ID NO: 1676733 - DNA, 15 bp, Homo sapiens
agtgagaggtttcgg

SEQ ID NO: 1676734 - DNA, 15 bp, Homo sapiens
gtgagaggtttcggc

SEQ ID NO: 1676735 - DNA, 15 bp, Homo sapiens
tgagaggtttcggcg

SEQ ID NO: 1676736 - DNA, 15 bp, Homo sapiens
gagaggtttcggcga

SEQ ID NO: 1676737 - DNA, 15 bp, Homo sapiens
agaggtttcggcgaa

SEQ ID NO: 1676738 - DNA, 15 bp, Homo sapiens
gaggtttcggcgaat

SEQ ID NO: 1676739 - DNA, 15 bp, Homo sapiens
aggtttcggcgaatg

SEQ ID NO: 1676740 - DNA, 15 bp, Homo sapiens
ggtttcggcgaatga

SEQ ID NO: 1676741 - DNA, 15 bp, Homo sapiens
gtttcggcgaatgaa

SEQ ID NO: 1676742 - DNA, 15 bp, Homo sapiens
tttcggcgaatgaat

SEQ ID NO: 1676743 - DNA, 15 bp, Homo sapiens
ttcggcgaatgaatt

SEQ ID NO: 1676744 - DNA, 15 bp, Homo sapiens
tcggcgaatgaattg

SEQ ID NO: 1676745 - DNA, 15 bp, Homo sapiens
cggcgaatgaattgg

SEQ ID NO: 1676746 - DNA, 15 bp, Homo sapiens
ggcgaatgaattggg

SEQ ID NO: 1676747 - DNA, 15 bp, Homo sapiens
gcgaatgaattggga

SEQ ID NO: 1676748 - DNA, 15 bp, Homo sapiens
cgaatgaattgggat

SEQ ID NO: 1676749 - DNA, 15 bp, Homo sapiens
gaatgaattgggatt

SEQ ID NO: 1676750 - DNA, 15 bp, Homo sapiens
aatgaattgggattg

SEQ ID NO: 1676751 - DNA, 15 bp, Homo sapiens
atgaattgggattgc

SEQ ID NO: 1676752 - DNA, 15 bp, Homo sapiens
tgaattgggattgcc

SEQ ID NO: 1676753 - DNA, 15 bp, Homo sapiens
gaattgggattgcct

SEQ ID NO: 1676754 - DNA, 15 bp, Homo sapiens
aattgggattgccta

SEQ ID NO: 1676755 - DNA, 15 bp, Homo sapiens
attgggattgcctac

SEQ ID NO: 1676756 - DNA, 15 bp, Homo sapiens
ttgggattgcctact

SEQ ID NO: 1676757 - DNA, 15 bp, Homo sapiens
tgggattgcctactt

SEQ ID NO: 1676758 - DNA, 15 bp, Homo sapiens
gggattgcctacttc

SEQ ID NO: 1676759 - DNA, 15 bp, Homo sapiens
ggattgcctacttct

SEQ ID NO: 1676760 - DNA, 15 bp, Homo sapiens
gattgcctacttctt

SEQ ID NO: 1676761 - DNA, 15 bp, Homo sapiens
attgcctacttcttc

SEQ ID NO: 1676762 - DNA, 15 bp, Homo sapiens
ttgcctacttcttcc

SEQ ID NO: 1676763 - DNA, 15 bp, Homo sapiens
tgcctacttcttccc

SEQ ID NO: 1676764 - DNA, 15 bp, Homo sapiens
gcctacttcttccca

SEQ ID NO: 1676765 - DNA, 15 bp, Homo sapiens
cctacttcttcccag

SEQ ID NO: 1676766 - DNA, 15 bp, Homo sapiens
ctacttcttcccagt

SEQ ID NO: 1676767 - DNA, 15 bp, Homo sapiens
tacttcttcccagtg

SEQ ID NO: 1676768 - DNA, 15 bp, Homo sapiens
acttcttcccagtgc

SEQ ID NO: 1676769 - DNA, 15 bp, Homo sapiens
cttcttcccagtgca

SEQ ID NO: 1676770 - DNA, 15 bp, Homo sapiens
ttcttcccagtgcag

SEQ ID NO: 1676771 - DNA, 15 bp, Homo sapiens
tcttcccagtgcagt

SEQ ID NO: 1676772 - DNA, 15 bp, Homo sapiens
cttcccagtgcagtg

SEQ ID NO: 1676773 - DNA, 15 bp, Homo sapiens
ttcccagtgcagtgg

SEQ ID NO: 1676774 - DNA, 15 bp, Homo sapiens
tcccagtgcagtgga

SEQ ID NO: 1676775 - DNA, 15 bp, Homo sapiens
cccagtgcagtggag

SEQ ID NO: 1676776 - DNA, 15 bp, Homo sapiens
ccagtgcagtggagc

SEQ ID NO: 1676777 - DNA, 15 bp, Homo sapiens
cagtgcagtggagct

SEQ ID NO: 1676778 - DNA, 15 bp, Homo sapiens
agtgcagtggagctt

SEQ ID NO: 1676779 - DNA, 15 bp, Homo sapiens
gtgcagtggagcttg

SEQ ID NO: 1676780 - DNA, 15 bp, Homo sapiens
tgcagtggagcttgg

SEQ ID NO: 1676781 - DNA, 15 bp, Homo sapiens
gcagtggagcttggt

SEQ ID NO: 1676782 - DNA, 15 bp, Homo sapiens
cagtggagcttggtt

SEQ ID NO: 1676783 - DNA, 15 bp, Homo sapiens
agtggagcttggttc

SEQ ID NO: 1676784 - DNA, 15 bp, Homo sapiens
gtggagcttggttct

SEQ ID NO: 1676785 - DNA, 15 bp, Homo sapiens
tggagcttggttctg

SEQ ID NO: 1676786 - DNA, 15 bp, Homo sapiens
ggagcttggttctgt

SEQ ID NO: 1676787 - DNA, 15 bp, Homo sapiens
gagcttggttctgtg

SEQ ID NO: 1676788 - DNA, 15 bp, Homo sapiens
agcttggttctgtgg

SEQ ID NO: 1676789 - DNA, 15 bp, Homo sapiens
gcttggttctgtggt

SEQ ID NO: 1676790 - DNA, 15 bp, Homo sapiens
cttggttctgtggtc

SEQ ID NO: 1676791 - DNA, 15 bp, Homo sapiens
ttggttctgtggtca

SEQ ID NO: 1676792 - DNA, 15 bp, Homo sapiens
tggttctgtggtcag

SEQ ID NO: 1676793 - DNA, 15 bp, Homo sapiens
ggttctgtggtcagg

SEQ ID NO: 1676794 - DNA, 15 bp, Homo sapiens
gttctgtggtcaggt

SEQ ID NO: 1676795 - DNA, 15 bp, Homo sapiens
ttctgtggtcaggtc

SEQ ID NO: 1676796 - DNA, 15 bp, Homo sapiens
tctgtggtcaggtcc

SEQ ID NO: 1676797 - DNA, 15 bp, Homo sapiens
ctgtggtcaggtcct

SEQ ID NO: 1676798 - DNA, 15 bp, Homo sapiens
tgtggtcaggtcctt

SEQ ID NO: 1676799 - DNA, 15 bp, Homo sapiens
gtggtcaggtcctta

SEQ ID NO: 1676800 - DNA, 15 bp, Homo sapiens
tggtcaggtccttac

SEQ ID NO: 1676801 - DNA, 15 bp, Homo sapiens
ggtcaggtccttacg

SEQ ID NO: 1676802 - DNA, 15 bp, Homo sapiens
gtcaggtccttacgc

SEQ ID NO: 1676803 - DNA, 15 bp, Homo sapiens
tcaggtccttacgcc

SEQ ID NO: 1676804 - DNA, 15 bp, Homo sapiens
caggtccttacgccc

SEQ ID NO: 1676805 - DNA, 15 bp, Homo sapiens
aggtccttacgccct

SEQ ID NO: 1676806 - DNA, 15 bp, Homo sapiens
ggtccttacgccctg

SEQ ID NO: 1676807 - DNA, 15 bp, Homo sapiens
gtccttacgccctgt

SEQ ID NO: 1676808 - DNA, 15 bp, Homo sapiens
tccttacgccctgtc

SEQ ID NO: 1676809 - DNA, 15 bp, Homo sapiens
ccttacgccctgtct

SEQ ID NO: 1676810 - DNA, 15 bp, Homo sapiens
cttacgccctgtctg

SEQ ID NO: 1676811 - DNA, 15 bp, Homo sapiens
ttacgccctgtctgc

SEQ ID NO: 1676812 - DNA, 15 bp, Homo sapiens
tacgccctgtctgcc

SEQ ID NO: 1676813 - DNA, 15 bp, Homo sapiens
acgccctgtctgcct

SEQ ID NO: 1676814 - DNA, 15 bp, Homo sapiens
cgccctgtctgcctt

SEQ ID NO: 1676815 - DNA, 15 bp, Homo sapiens
gccctgtctgccttt

SEQ ID NO: 1676816 - DNA, 15 bp, Homo sapiens
ccctgtctgcctttc

SEQ ID NO: 1676817 - DNA, 15 bp, Homo sapiens
cctgtctgcctttct

SEQ ID NO: 1676818 - DNA, 15 bp, Homo sapiens
ctgtctgcctttctc

SEQ ID NO: 1676819 - DNA, 15 bp, Homo sapiens
tgtctgcctttctcg

SEQ ID NO: 1676820 - DNA, 15 bp, Homo sapiens
gtctgcctttctcgt

SEQ ID NO: 1676821 - DNA, 15 bp, Homo sapiens
tctgcctttctcgtt

SEQ ID NO: 1676822 - DNA, 15 bp, Homo sapiens
ctgcctttctcgttt

SEQ ID NO: 1676823 - DNA, 15 bp, Homo sapiens
tgcctttctcgtttc

SEQ ID NO: 1676824 - DNA, 15 bp, Homo sapiens
gcctttctcgtttct

SEQ ID NO: 1676825 - DNA, 15 bp, Homo sapiens
cctttctcgtttctt

SEQ ID NO: 1676826 - DNA, 15 bp, Homo sapiens
ctttctcgtttcttt

SEQ ID NO: 1676827 - DNA, 15 bp, Homo sapiens
tttctcgtttcttta

SEQ ID NO: 1676828 - DNA, 15 bp, Homo sapiens
ttctcgtttctttat

SEQ ID NO: 1676829 - DNA, 15 bp, Homo sapiens
tctcgtttctttatt

SEQ ID NO: 1676830 - DNA, 15 bp, Homo sapiens
ctcgtttctttattt

SEQ ID NO: 1676831 - DNA, 15 bp, Homo sapiens
tcgtttctttatttc

SEQ ID NO: 1676832 - DNA, 15 bp, Homo sapiens
cgtttctttatttct

SEQ ID NO: 1676833 - DNA, 15 bp, Homo sapiens
gtttctttatttctc

SEQ ID NO: 1676834 - DNA, 15 bp, Homo sapiens
tttctttatttctcg

SEQ ID NO: 1676835 - DNA, 15 bp, Homo sapiens
ttctttatttctcgg

SEQ ID NO: 1676836 - DNA, 15 bp, Homo sapiens
tctttatttctcggg

SEQ ID NO: 1676837 - DNA, 15 bp, Homo sapiens
ctttatttctcgggt

SEQ ID NO: 1676838 - DNA, 15 bp, Homo sapiens
tttatttctcgggta

SEQ ID NO: 1676839 - DNA, 15 bp, Homo sapiens
ttatttctcgggtag

SEQ ID NO: 1676840 - DNA, 15 bp, Homo sapiens
tatttctcgggtagt

SEQ ID NO: 1676841 - DNA, 15 bp, Homo sapiens
atttctcgggtagta

SEQ ID NO: 1676842 - DNA, 15 bp, Homo sapiens
tttctcgggtagtag

SEQ ID NO: 1676843 - DNA, 15 bp, Homo sapiens
ttctcgggtagtagt

SEQ ID NO: 1676844 - DNA, 15 bp, Homo sapiens
tctcgggtagtagtt

SEQ ID NO: 1676845 - DNA, 15 bp, Homo sapiens
ctcgggtagtagttg

SEQ ID NO: 1676846 - DNA, 15 bp, Homo sapiens
tcgggtagtagttgt

SEQ ID NO: 1676847 - DNA, 15 bp, Homo sapiens
cgggtagtagttgtg

SEQ ID NO: 1676848 - DNA, 15 bp, Homo sapiens
gggtagtagttgtgg

SEQ ID NO: 1676849 - DNA, 15 bp, Homo sapiens
ggtagtagttgtgga

SEQ ID NO: 1676850 - DNA, 15 bp, Homo sapiens
gtagtagttgtggaa

SEQ ID NO: 1676851 - DNA, 15 bp, Homo sapiens
tagtagttgtggaat

SEQ ID NO: 1676852 - DNA, 15 bp, Homo sapiens
agtagttgtggaatc

SEQ ID NO: 1676853 - DNA, 15 bp, Homo sapiens
gtagttgtggaatca

SEQ ID NO: 1676854 - DNA, 15 bp, Homo sapiens
tagttgtggaatcaa

SEQ ID NO: 1676855 - DNA, 15 bp, Homo sapiens
agttgtggaatcaaa

SEQ ID NO: 1676856 - DNA, 15 bp, Homo sapiens
gttgtggaatcaaat

SEQ ID NO: 1676857 - DNA, 15 bp, Homo sapiens
ttgtggaatcaaatg

SEQ ID NO: 1676858 - DNA, 15 bp, Homo sapiens
tgtggaatcaaatga

SEQ ID NO: 1676859 - DNA, 15 bp, Homo sapiens
gtggaatcaaatgac

SEQ ID NO: 1676860 - DNA, 15 bp, Homo sapiens
tggaatcaaatgacc

SEQ ID NO: 1676861 - DNA, 15 bp, Homo sapiens
ggaatcaaatgacct

SEQ ID NO: 1676862 - DNA, 15 bp, Homo sapiens
gaatcaaatgacctg

SEQ ID NO: 1676863 - DNA, 15 bp, Homo sapiens
aatcaaatgacctgg

SEQ ID NO: 1676864 - DNA, 15 bp, Homo sapiens
atcaaatgacctggg

SEQ ID NO: 1676865 - DNA, 15 bp, Homo sapiens
tcaaatgacctgggg

SEQ ID NO: 1676866 - DNA, 15 bp, Homo sapiens
caaatgacctggggt

SEQ ID NO: 1676867 - DNA, 15 bp, Homo sapiens
aaatgacctggggtt

SEQ ID NO: 1676868 - DNA, 15 bp, Homo sapiens
aatgacctggggttt

SEQ ID NO: 1676869 - DNA, 15 bp, Homo sapiens
atgacctggggtttg

SEQ ID NO: 1676870 - DNA, 15 bp, Homo sapiens
tgacctggggtttga

SEQ ID NO: 1676871 - DNA, 15 bp, Homo sapiens
gacctggggtttgat

SEQ ID NO: 1676872 - DNA, 15 bp, Homo sapiens
acctggggtttgata

SEQ ID NO: 1676873 - DNA, 15 bp, Homo sapiens
cctggggtttgatac

SEQ ID NO: 1676874 - DNA, 15 bp, Homo sapiens
ctggggtttgatacc

SEQ ID NO: 1676875 - DNA, 15 bp, Homo sapiens
tggggtttgatacct

SEQ ID NO: 1676876 - DNA, 15 bp, Homo sapiens
ggggtttgataccta

SEQ ID NO: 1676877 - DNA, 15 bp, Homo sapiens
gggtttgatacctac

SEQ ID NO: 1676878 - DNA, 15 bp, Homo sapiens
ggtttgatacctact

SEQ ID NO: 1676879 - DNA, 15 bp, Homo sapiens
gtttgatacctactc

SEQ ID NO: 1676880 - DNA, 15 bp, Homo sapiens
tttgatacctactct

SEQ ID NO: 1676881 - DNA, 15 bp, Homo sapiens
ttgatacctactcta

SEQ ID NO: 1676882 - DNA, 15 bp, Homo sapiens
tgatacctactctac

SEQ ID NO: 1676883 - DNA, 15 bp, Homo sapiens
gatacctactctacc

SEQ ID NO: 1676884 - DNA, 15 bp, Homo sapiens
atacctactctacca

SEQ ID NO: 1676885 - DNA, 15 bp, Homo sapiens
tacctactctaccac

SEQ ID NO: 1676886 - DNA, 15 bp, Homo sapiens
acctactctaccacg

SEQ ID NO: 1676887 - DNA, 15 bp, Homo sapiens
cctactctaccacgc

SEQ ID NO: 1676888 - DNA, 15 bp, Homo sapiens
ctactctaccacgcc

SEQ ID NO: 1676889 - DNA, 15 bp, Homo sapiens
tactctaccacgcct

SEQ ID NO: 1676890 - DNA, 15 bp, Homo sapiens
actctaccacgcctc

SEQ ID NO: 1676891 - DNA, 15 bp, Homo sapiens
ctctaccacgcctct

SEQ ID NO: 1676892 - DNA, 15 bp, Homo sapiens
tctaccacgcctctg

SEQ ID NO: 1676893 - DNA, 15 bp, Homo sapiens
ctaccacgcctctgg

SEQ ID NO: 1676894 - DNA, 15 bp, Homo sapiens
taccacgcctctggg

SEQ ID NO: 1676895 - DNA, 15 bp, Homo sapiens
accacgcctctgggg

SEQ ID NO: 1676896 - DNA, 15 bp, Homo sapiens
ccacgcctctggggg

SEQ ID NO: 1676897 - DNA, 15 bp, Homo sapiens
cacgcctctggggga

SEQ ID NO: 1676898 - DNA, 15 bp, Homo sapiens
acgcctctgggggag

SEQ ID NO: 1676899 - DNA, 15 bp, Homo sapiens
cgcctctgggggagt

SEQ ID NO: 1676900 - DNA, 15 bp, Homo sapiens
gcctctgggggagtc

SEQ ID NO: 1676901 - DNA, 15 bp, Homo sapiens
cctctgggggagtca

SEQ ID NO: 1676902 - DNA, 15 bp, Homo sapiens
ctctgggggagtcac

SEQ ID NO: 1676903 - DNA, 15 bp, Homo sapiens
tctgggggagtcact

SEQ ID NO: 1676904 - DNA, 15 bp, Homo sapiens
ctgggggagtcactc

SEQ ID NO: 1676905 - DNA, 15 bp, Homo sapiens
tgggggagtcactca

SEQ ID NO: 1676906 - DNA, 15 bp, Homo sapiens
gggggagtcactcag

SEQ ID NO: 1676907 - DNA, 15 bp, Homo sapiens
ggggagtcactcaga

SEQ ID NO: 1676908 - DNA, 15 bp, Homo sapiens
gggagtcactcagac

SEQ ID NO: 1676909 - DNA, 15 bp, Homo sapiens
ggagtcactcagact

SEQ ID NO: 1676910 - DNA, 15 bp, Homo sapiens
gagtcactcagactc

SEQ ID NO: 1676911 - DNA, 15 bp, Homo sapiens
agtcactcagactcg

SEQ ID NO: 1676912 - DNA, 15 bp, Homo sapiens
gtcactcagactcgt

SEQ ID NO: 1676913 - DNA, 15 bp, Homo sapiens
tcactcagactcgtt

SEQ ID NO: 1676914 - DNA, 15 bp, Homo sapiens
cactcagactcgttg

SEQ ID NO: 1676915 - DNA, 15 bp, Homo sapiens
actcagactcgttga

SEQ ID NO: 1676916 - DNA, 15 bp, Homo sapiens
ctcagactcgttgaa

SEQ ID NO: 1676917 - DNA, 15 bp, Homo sapiens
tcagactcgttgaac

SEQ ID NO: 1676918 - DNA, 15 bp, Homo sapiens
cagactcgttgaacc

SEQ ID NO: 1676919 - DNA, 15 bp, Homo sapiens
agactcgttgaacct

SEQ ID NO: 1676920 - DNA, 15 bp, Homo sapiens
gactcgttgaaccta

SEQ ID NO: 1676921 - DNA, 15 bp, Homo sapiens
actcgttgaacctaa

SEQ ID NO: 1676922 - DNA, 15 bp, Homo sapiens
ctcgttgaacctaag

SEQ ID NO: 1676923 - DNA, 15 bp, Homo sapiens
tcgttgaacctaagt

SEQ ID NO: 1676924 - DNA, 15 bp, Homo sapiens
cgttgaacctaagtt

SEQ ID NO: 1676925 - DNA, 15 bp, Homo sapiens
gttgaacctaagttc

SEQ ID NO: 1676926 - DNA, 15 bp, Homo sapiens
ttgaacctaagttcc

SEQ ID NO: 1676927 - DNA, 15 bp, Homo sapiens
tgaacctaagttccg

SEQ ID NO: 1676928 - DNA, 15 bp, Homo sapiens
gaacctaagttccgg

SEQ ID NO: 1676929 - DNA, 15 bp, Homo sapiens
aacctaagttccggg

SEQ ID NO: 1676930 - DNA, 15 bp, Homo sapiens
acctaagttccgggg

SEQ ID NO: 1676931 - DNA, 15 bp, Homo sapiens
cctaagttccggggc

SEQ ID NO: 1676932 - DNA, 15 bp, Homo sapiens
ctaagttccggggct

SEQ ID NO: 1676933 - DNA, 15 bp, Homo sapiens
taagttccggggctg

SEQ ID NO: 1676934 - DNA, 15 bp, Homo sapiens
aagttccggggctgc

SEQ ID NO: 1676935 - DNA, 15 bp, Homo sapiens
agttccggggctgcc

SEQ ID NO: 1676936 - DNA, 15 bp, Homo sapiens
gttccggggctgcca

SEQ ID NO: 1676937 - DNA, 15 bp, Homo sapiens
ttccggggctgccaa

SEQ ID NO: 1676938 - DNA, 15 bp, Homo sapiens
tccggggctgccaag

SEQ ID NO: 1676939 - DNA, 15 bp, Homo sapiens
ccggggctgccaagt

SEQ ID NO: 1676940 - DNA, 15 bp, Homo sapiens
cggggctgccaagtg

SEQ ID NO: 1676941 - DNA, 15 bp, Homo sapiens
ggggctgccaagtga

SEQ ID NO: 1676942 - DNA, 15 bp, Homo sapiens
gggctgccaagtgag

SEQ ID NO: 1676943 - DNA, 15 bp, Homo sapiens
ggctgccaagtgagg

SEQ ID NO: 1676944 - DNA, 15 bp, Homo sapiens
gctgccaagtgagga

SEQ ID NO: 1676945 - DNA, 15 bp, Homo sapiens
ctgccaagtgaggat

SEQ ID NO: 1676946 - DNA, 15 bp, Homo sapiens
tgccaagtgaggata

SEQ ID NO: 1676947 - DNA, 15 bp, Homo sapiens
gccaagtgaggataa

SEQ ID NO: 1676948 - DNA, 15 bp, Homo sapiens
ccaagtgaggataag

SEQ ID NO: 1676949 - DNA, 15 bp, Homo sapiens
caagtgaggataagt

SEQ ID NO: 1676950 - DNA, 15 bp, Homo sapiens
aagtgaggataagta

SEQ ID NO: 1676951 - DNA, 15 bp, Homo sapiens
agtgaggataagtag

SEQ ID NO: 1676952 - DNA, 15 bp, Homo sapiens
gtgaggataagtagt

SEQ ID NO: 1676953 - DNA, 15 bp, Homo sapiens
tgaggataagtagta

SEQ ID NO: 1676954 - DNA, 15 bp, Homo sapiens
gaggataagtagtaa

SEQ ID NO: 1676955 - DNA, 15 bp, Homo sapiens
aggataagtagtaat

SEQ ID NO: 1676956 - DNA, 15 bp, Homo sapiens
ggataagtagtaatt

SEQ ID NO: 1676957 - DNA, 15 bp, Homo sapiens
gataagtagtaattg

SEQ ID NO: 1676958 - DNA, 15 bp, Homo sapiens
ataagtagtaattgc

SEQ ID NO: 1676959 - DNA, 15 bp, Homo sapiens
taagtagtaattgct

SEQ ID NO: 1676960 - DNA, 15 bp, Homo sapiens
aagtagtaattgctg

SEQ ID NO: 1676961 - DNA, 15 bp, Homo sapiens
agtagtaattgctga

SEQ ID NO: 1676962 - DNA, 15 bp, Homo sapiens
gtagtaattgctgat

SEQ ID NO: 1676963 - DNA, 15 bp, Homo sapiens
tagtaattgctgatc

SEQ ID NO: 1676964 - DNA, 15 bp, Homo sapiens
agtaattgctgatcc

SEQ ID NO: 1676965 - DNA, 15 bp, Homo sapiens
gtaattgctgatcca

SEQ ID NO: 1676966 - DNA, 15 bp, Homo sapiens
taattgctgatccac

SEQ ID NO: 1676967 - DNA, 15 bp, Homo sapiens
aattgctgatccacc

SEQ ID NO: 1676968 - DNA, 15 bp, Homo sapiens
attgctgatccacct

SEQ ID NO: 1676969 - DNA, 15 bp, Homo sapiens
ttgctgatccaccta

SEQ ID NO: 1676970 - DNA, 15 bp, Homo sapiens
tgctgatccacctac

SEQ ID NO: 1676971 - DNA, 15 bp, Homo sapiens
gctgatccacctact

SEQ ID NO: 1676972 - DNA, 15 bp, Homo sapiens
ctgatccacctactt

SEQ ID NO: 1676973 - DNA, 15 bp, Homo sapiens
tgatccacctacttg

SEQ ID NO: 1676974 - DNA, 15 bp, Homo sapiens
gatccacctacttga

SEQ ID NO: 1676975 - DNA, 15 bp, Homo sapiens
atccacctacttgac

SEQ ID NO: 1676976 - DNA, 15 bp, Homo sapiens
tccacctacttgaca

SEQ ID NO: 1676977 - DNA, 15 bp, Homo sapiens
ccacctacttgacaa

SEQ ID NO: 1676978 - DNA, 15 bp, Homo sapiens
cacctacttgacaag

SEQ ID NO: 1676979 - DNA, 15 bp, Homo sapiens
acctacttgacaaga

SEQ ID NO: 1676980 - DNA, 15 bp, Homo sapiens
cctacttgacaagat

SEQ ID NO: 1676981 - DNA, 15 bp, Homo sapiens
ctacttgacaagata

SEQ ID NO: 1676982 - DNA, 15 bp, Homo sapiens
tacttgacaagatag

SEQ ID NO: 1676983 - DNA, 15 bp, Homo sapiens
acttgacaagatagt

SEQ ID NO: 1676984 - DNA, 15 bp, Homo sapiens
cttgacaagatagta

SEQ ID NO: 1676985 - DNA, 15 bp, Homo sapiens
ttgacaagatagtag

SEQ ID NO: 1676986 - DNA, 15 bp, Homo sapiens
tgacaagatagtagt

SEQ ID NO: 1676987 - DNA, 15 bp, Homo sapiens
gacaagatagtagtg

SEQ ID NO: 1676988 - DNA, 15 bp, Homo sapiens
acaagatagtagtga

SEQ ID NO: 1676989 - DNA, 15 bp, Homo sapiens
caagatagtagtgag

SEQ ID NO: 1676990 - DNA, 15 bp, Homo sapiens
aagatagtagtgagg

SEQ ID NO: 1676991 - DNA, 15 bp, Homo sapiens
agatagtagtgaggg

SEQ ID NO: 1676992 - DNA, 15 bp, Homo sapiens
gatagtagtgagggc

SEQ ID NO: 1676993 - DNA, 15 bp, Homo sapiens
atagtagtgagggcc

SEQ ID NO: 1676994 - DNA, 15 bp, Homo sapiens
tagtagtgagggccc

SEQ ID NO: 1676995 - DNA, 15 bp, Homo sapiens
agtagtgagggccct

SEQ ID NO: 1676996 - DNA, 15 bp, Homo sapiens
gtagtgagggccctg

SEQ ID NO: 1676997 - DNA, 15 bp, Homo sapiens
tagtgagggccctga

SEQ ID NO: 1676998 - DNA, 15 bp, Homo sapiens
agtgagggccctgag

SEQ ID NO: 1676999 - DNA, 15 bp, Homo sapiens
gtgagggccctgagc

SEQ ID NO: 1677000 - DNA, 15 bp, Homo sapiens
tgagggccctgagcg

SEQ ID NO: 1677001 - DNA, 15 bp, Homo sapiens
gagggccctgagcgc

SEQ ID NO: 1677002 - DNA, 15 bp, Homo sapiens
agggccctgagcgcc

SEQ ID NO: 1677003 - DNA, 15 bp, Homo sapiens
gggccctgagcgcca

SEQ ID NO: 1677004 - DNA, 15 bp, Homo sapiens
ggccctgagcgccag

SEQ ID NO: 1677005 - DNA, 15 bp, Homo sapiens
gccctgagcgccagg

SEQ ID NO: 1677006 - DNA, 15 bp, Homo sapiens
ccctgagcgccaggc

SEQ ID NO: 1677007 - DNA, 15 bp, Homo sapiens
cctgagcgccaggct

SEQ ID NO: 1677008 - DNA, 15 bp, Homo sapiens
ctgagcgccaggctg

SEQ ID NO: 1677009 - DNA, 15 bp, Homo sapiens
tgagcgccaggctgt

SEQ ID NO: 1677010 - DNA, 15 bp, Homo sapiens
gagcgccaggctgtg

SEQ ID NO: 1677011 - DNA, 15 bp, Homo sapiens
agcgccaggctgtgg

SEQ ID NO: 1677012 - DNA, 15 bp, Homo sapiens
gcgccaggctgtgga

SEQ ID NO: 1677013 - DNA, 15 bp, Homo sapiens
cgccaggctgtggat

SEQ ID NO: 1677014 - DNA, 15 bp, Homo sapiens
gccaggctgtggatc

SEQ ID NO: 1677015 - DNA, 15 bp, Homo sapiens
ccaggctgtggatcc

SEQ ID NO: 1677016 - DNA, 15 bp, Homo sapiens
caggctgtggatcca

SEQ ID NO: 1677017 - DNA, 15 bp, Homo sapiens
aggctgtggatccag

SEQ ID NO: 1677018 - DNA, 15 bp, Homo sapiens
ggctgtggatccagc

SEQ ID NO: 1677019 - DNA, 15 bp, Homo sapiens
gctgtggatccagcc

SEQ ID NO: 1677020 - DNA, 15 bp, Homo sapiens
ctgtggatccagcct

SEQ ID NO: 1677021 - DNA, 15 bp, Homo sapiens
tgtggatccagcctt

SEQ ID NO: 1677022 - DNA, 15 bp, Homo sapiens
gtggatccagccttt

SEQ ID NO: 1677023 - DNA, 15 bp, Homo sapiens
tggatccagcctttc

SEQ ID NO: 1677024 - DNA, 15 bp, Homo sapiens
ggatccagcctttcc

SEQ ID NO: 1677025 - DNA, 15 bp, Homo sapiens
gatccagcctttccc

SEQ ID NO: 1677026 - DNA, 15 bp, Homo sapiens
atccagcctttccca

SEQ ID NO: 1677027 - DNA, 15 bp, Homo sapiens
tccagcctttcccac

SEQ ID NO: 1677028 - DNA, 15 bp, Homo sapiens
ccagcctttcccacg

SEQ ID NO: 1677029 - DNA, 15 bp, Homo sapiens
cagcctttcccacgg

SEQ ID NO: 1677030 - DNA, 15 bp, Homo sapiens
agcctttcccacggt

SEQ ID NO: 1677031 - DNA, 15 bp, Homo sapiens
gcctttcccacggtt

SEQ ID NO: 1677032 - DNA, 15 bp, Homo sapiens
cctttcccacggttc

SEQ ID NO: 1677033 - DNA, 15 bp, Homo sapiens
ctttcccacggttcc

SEQ ID NO: 1677034 - DNA, 15 bp, Homo sapiens
tttcccacggttcct

SEQ ID NO: 1677035 - DNA, 15 bp, Homo sapiens
ttcccacggttcctg

SEQ ID NO: 1677036 - DNA, 15 bp, Homo sapiens
tcccacggttcctgg

SEQ ID NO: 1677037 - DNA, 15 bp, Homo sapiens
cccacggttcctggt

SEQ ID NO: 1677038 - DNA, 15 bp, Homo sapiens
ccacggttcctggtg

SEQ ID NO: 1677039 - DNA, 15 bp, Homo sapiens
cacggttcctggtgt

SEQ ID NO: 1677040 - DNA, 15 bp, Homo sapiens
acggttcctggtgtg

SEQ ID NO: 1677041 - DNA, 15 bp, Homo sapiens
cggttcctggtgtgg

SEQ ID NO: 1677042 - DNA, 15 bp, Homo sapiens
ggttcctggtgtggc

SEQ ID NO: 1677043 - DNA, 15 bp, Homo sapiens
gttcctggtgtggca

SEQ ID NO: 1677044 - DNA, 15 bp, Homo sapiens
ttcctggtgtggcag

SEQ ID NO: 1677045 - DNA, 15 bp, Homo sapiens
tcctggtgtggcagg

SEQ ID NO: 1677046 - DNA, 15 bp, Homo sapiens
cctggtgtggcagga

SEQ ID NO: 1677047 - DNA, 15 bp, Homo sapiens
ctggtgtggcaggaa

SEQ ID NO: 1677048 - DNA, 15 bp, Homo sapiens
tggtgtggcaggaag

SEQ ID NO: 1677049 - DNA, 15 bp, Homo sapiens
ggtgtggcaggaaga

SEQ ID NO: 1677050 - DNA, 15 bp, Homo sapiens
gtgtggcaggaagaa

SEQ ID NO: 1677051 - DNA, 15 bp, Homo sapiens
tgtggcaggaagaac

SEQ ID NO: 1677052 - DNA, 15 bp, Homo sapiens
gtggcaggaagaact

SEQ ID NO: 1677053 - DNA, 15 bp, Homo sapiens
tggcaggaagaactc

SEQ ID NO: 1677054 - DNA, 15 bp, Homo sapiens
ggcaggaagaactct

SEQ ID NO: 1677055 - DNA, 15 bp, Homo sapiens
gcaggaagaactcta

SEQ ID NO: 1677056 - DNA, 15 bp, Homo sapiens
caggaagaactctag

SEQ ID NO: 1677057 - DNA, 15 bp, Homo sapiens
aggaagaactctagg

SEQ ID NO: 1677058 - DNA, 15 bp, Homo sapiens
ggaagaactctaggc

SEQ ID NO: 1677059 - DNA, 15 bp, Homo sapiens
gaagaactctaggcc

SEQ ID NO: 1677060 - DNA, 15 bp, Homo sapiens
aagaactctaggcct

SEQ ID NO: 1677061 - DNA, 15 bp, Homo sapiens
agaactctaggcctg

SEQ ID NO: 1677062 - DNA, 15 bp, Homo sapiens
gaactctaggcctga

SEQ ID NO: 1677063 - DNA, 15 bp, Homo sapiens
aactctaggcctgaa

SEQ ID NO: 1677064 - DNA, 15 bp, Homo sapiens
actctaggcctgaag

SEQ ID NO: 1677065 - DNA, 15 bp, Homo sapiens
ctctaggcctgaagg

SEQ ID NO: 1677066 - DNA, 15 bp, Homo sapiens
tctaggcctgaaggt

SEQ ID NO: 1677067 - DNA, 15 bp, Homo sapiens
ctaggcctgaaggtg

SEQ ID NO: 1677068 - DNA, 15 bp, Homo sapiens
taggcctgaaggtga

SEQ ID NO: 1677069 - DNA, 15 bp, Homo sapiens
aggcctgaaggtgaa

SEQ ID NO: 1677070 - DNA, 15 bp, Homo sapiens
ggcctgaaggtgaaa

SEQ ID NO: 1677071 - DNA, 15 bp, Homo sapiens
gcctgaaggtgaaat

SEQ ID NO: 1677072 - DNA, 15 bp, Homo sapiens
cctgaaggtgaaatt

SEQ ID NO: 1677073 - DNA, 15 bp, Homo sapiens
ctgaaggtgaaattg

SEQ ID NO: 1677074 - DNA, 15 bp, Homo sapiens
tgaaggtgaaattgg

SEQ ID NO: 1677075 - DNA, 15 bp, Homo sapiens
gaaggtgaaattggg

SEQ ID NO: 1677076 - DNA, 15 bp, Homo sapiens
aaggtgaaattgggg

SEQ ID NO: 1677077 - DNA, 15 bp, Homo sapiens
aggtgaaattgggga

SEQ ID NO: 1677078 - DNA, 15 bp, Homo sapiens
ggtgaaattggggag

SEQ ID NO: 1677079 - DNA, 15 bp, Homo sapiens
gtgaaattggggagg

SEQ ID NO: 1677080 - DNA, 15 bp, Homo sapiens
tgaaattggggaggg

SEQ ID NO: 1677081 - DNA, 15 bp, Homo sapiens
gaaattggggaggga

SEQ ID NO: 1677082 - DNA, 15 bp, Homo sapiens
aaattggggagggag

SEQ ID NO: 1677083 - DNA, 15 bp, Homo sapiens
aattggggagggagt

SEQ ID NO: 1677084 - DNA, 15 bp, Homo sapiens
attggggagggagtc

SEQ ID NO: 1677085 - DNA, 15 bp, Homo sapiens
ttggggagggagtcc

SEQ ID NO: 1677086 - DNA, 15 bp, Homo sapiens
tggggagggagtccc

SEQ ID NO: 1677087 - DNA, 15 bp, Homo sapiens
ggggagggagtccca

SEQ ID NO: 1677088 - DNA, 15 bp, Homo sapiens
gggagggagtcccag

SEQ ID NO: 1677089 - DNA, 15 bp, Homo sapiens
ggagggagtcccagc

SEQ ID NO: 1677090 - DNA, 15 bp, Homo sapiens
gagggagtcccagct

SEQ ID NO: 1677091 - DNA, 15 bp, Homo sapiens
agggagtcccagctc

SEQ ID NO: 1677092 - DNA, 15 bp, Homo sapiens
gggagtcccagctct

SEQ ID NO: 1677093 - DNA, 15 bp, Homo sapiens
ggagtcccagctctg

SEQ ID NO: 1677094 - DNA, 15 bp, Homo sapiens
gagtcccagctctgc

SEQ ID NO: 1677095 - DNA, 15 bp, Homo sapiens
agtcccagctctgcc

SEQ ID NO: 1677096 - DNA, 15 bp, Homo sapiens
gtcccagctctgcca

SEQ ID NO: 1677097 - DNA, 15 bp, Homo sapiens
tcccagctctgccac

SEQ ID NO: 1677098 - DNA, 15 bp, Homo sapiens
cccagctctgccact

SEQ ID NO: 1677099 - DNA, 15 bp, Homo sapiens
ccagctctgccactg

SEQ ID NO: 1677100 - DNA, 15 bp, Homo sapiens
cagctctgccactgt

SEQ ID NO: 1677101 - DNA, 15 bp, Homo sapiens
agctctgccactgtc

SEQ ID NO: 1677102 - DNA, 15 bp, Homo sapiens
gctctgccactgtct

SEQ ID NO: 1677103 - DNA, 15 bp, Homo sapiens
ctctgccactgtctc

SEQ ID NO: 1677104 - DNA, 15 bp, Homo sapiens
ttgtctttttaatgt

SEQ ID NO: 1677105 - DNA, 15 bp, Homo sapiens
tgtctttttaatgtt

SEQ ID NO: 1677106 - DNA, 15 bp, Homo sapiens
gtctttttaatgttg

SEQ ID NO: 1677107 - DNA, 15 bp, Homo sapiens
tctttttaatgttgc

SEQ ID NO: 1677108 - DNA, 15 bp, Homo sapiens
ctttttaatgttgct

SEQ ID NO: 1677109 - DNA, 15 bp, Homo sapiens
tttttaatgttgctc

SEQ ID NO: 1677110 - DNA, 15 bp, Homo sapiens
ttttaatgttgctcc

SEQ ID NO: 1677111 - DNA, 15 bp, Homo sapiens
tttaatgttgctcca

SEQ ID NO: 1677112 - DNA, 15 bp, Homo sapiens
ttaatgttgctccat

SEQ ID NO: 1677113 - DNA, 15 bp, Homo sapiens
taatgttgctccatg

SEQ ID NO: 1677114 - DNA, 15 bp, Homo sapiens
aatgttgctccatga

SEQ ID NO: 1677115 - DNA, 15 bp, Homo sapiens
atgttgctccatgat

SEQ ID NO: 1677116 - DNA, 15 bp, Homo sapiens
tgttgctccatgatc

SEQ ID NO: 1677117 - DNA, 15 bp, Homo sapiens
gttgctccatgatcc

SEQ ID NO: 1677118 - DNA, 15 bp, Homo sapiens
ttgctccatgatcca

SEQ ID NO: 1677119 - DNA, 15 bp, Homo sapiens
tgctccatgatccag

SEQ ID NO: 1677120 - DNA, 15 bp, Homo sapiens
gctccatgatccagt

SEQ ID NO: 1677121 - DNA, 15 bp, Homo sapiens
ctccatgatccagtg

SEQ ID NO: 1677122 - DNA, 15 bp, Homo sapiens
tccatgatccagtga

SEQ ID NO: 1677123 - DNA, 15 bp, Homo sapiens
ccatgatccagtgat

SEQ ID NO: 1677124 - DNA, 15 bp, Homo sapiens
catgatccagtgatc

SEQ ID NO: 1677125 - DNA, 15 bp, Homo sapiens
atgatccagtgatct

SEQ ID NO: 1677126 - DNA, 15 bp, Homo sapiens
tgatccagtgatctg

SEQ ID NO: 1677127 - DNA, 15 bp, Homo sapiens
gatccagtgatctgt

SEQ ID NO: 1677128 - DNA, 15 bp, Homo sapiens
atccagtgatctgtg

SEQ ID NO: 1677129 - DNA, 15 bp, Homo sapiens
tccagtgatctgtgg

SEQ ID NO: 1677130 - DNA, 15 bp, Homo sapiens
ccagtgatctgtggc

SEQ ID NO: 1677131 - DNA, 15 bp, Homo sapiens
cagtgatctgtggcc

SEQ ID NO: 1677132 - DNA, 15 bp, Homo sapiens
agtgatctgtggcct

SEQ ID NO: 1677133 - DNA, 15 bp, Homo sapiens
gtgatctgtggcctt

SEQ ID NO: 1677134 - DNA, 15 bp, Homo sapiens
tgatctgtggccttg

SEQ ID NO: 1677135 - DNA, 15 bp, Homo sapiens
gatctgtggccttgg

SEQ ID NO: 1677136 - DNA, 15 bp, Homo sapiens
atctgtggccttggt

SEQ ID NO: 1677137 - DNA, 15 bp, Homo sapiens
tctgtggccttggtt

SEQ ID NO: 1677138 - DNA, 15 bp, Homo sapiens
ctgtggccttggtta

SEQ ID NO: 1677139 - DNA, 15 bp, Homo sapiens
tgtggccttggttat

SEQ ID NO: 1677140 - DNA, 15 bp, Homo sapiens
gtggccttggttatg

SEQ ID NO: 1677141 - DNA, 15 bp, Homo sapiens
tggccttggttatgc

SEQ ID NO: 1677142 - DNA, 15 bp, Homo sapiens
ggccttggttatgct

SEQ ID NO: 1677143 - DNA, 15 bp, Homo sapiens
gccttggttatgctc

SEQ ID NO: 1677144 - DNA, 15 bp, Homo sapiens
ccttggttatgctct

SEQ ID NO: 1677145 - DNA, 15 bp, Homo sapiens
cttggttatgctctg

SEQ ID NO: 1677146 - DNA, 15 bp, Homo sapiens
ttggttatgctctgt

SEQ ID NO: 1677147 - DNA, 15 bp, Homo sapiens
tggttatgctctgtg

SEQ ID NO: 1677148 - DNA, 15 bp, Homo sapiens
ggttatgctctgtgc

SEQ ID NO: 1677149 - DNA, 15 bp, Homo sapiens
gttatgctctgtgct

SEQ ID NO: 1677150 - DNA, 15 bp, Homo sapiens
ttatgctctgtgcta

SEQ ID NO: 1677151 - DNA, 15 bp, Homo sapiens
tatgctctgtgctag

SEQ ID NO: 1677152 - DNA, 15 bp, Homo sapiens
atgctctgtgctaga

SEQ ID NO: 1677153 - DNA, 15 bp, Homo sapiens
tgctctgtgctagag

SEQ ID NO: 1677154 - DNA, 15 bp, Homo sapiens
gctctgtgctagagt

SEQ ID NO: 1677155 - DNA, 15 bp, Homo sapiens
ctctgtgctagagtc

SEQ ID NO: 1677156 - DNA, 15 bp, Homo sapiens
tctgtgctagagtcc

SEQ ID NO: 1677157 - DNA, 15 bp, Homo sapiens
ctgtgctagagtcct

SEQ ID NO: 1677158 - DNA, 15 bp, Homo sapiens
tgtgctagagtccta

SEQ ID NO: 1677159 - DNA, 15 bp, Homo sapiens
gtgctagagtcctaa

SEQ ID NO: 1677160 - DNA, 15 bp, Homo sapiens
tgctagagtcctaac

SEQ ID NO: 1677161 - DNA, 15 bp, Homo sapiens
gctagagtcctaaca

SEQ ID NO: 1677162 - DNA, 15 bp, Homo sapiens
ctagagtcctaacaa

SEQ ID NO: 1677163 - DNA, 15 bp, Homo sapiens
tagagtcctaacaag

SEQ ID NO: 1677164 - DNA, 15 bp, Homo sapiens
agagtcctaacaaga

SEQ ID NO: 1677165 - DNA, 15 bp, Homo sapiens
gagtcctaacaagac

SEQ ID NO: 1677166 - DNA, 15 bp, Homo sapiens
agtcctaacaagaca

SEQ ID NO: 1677167 - DNA, 15 bp, Homo sapiens
gtcctaacaagacaa

SEQ ID NO: 1677168 - DNA, 15 bp, Homo sapiens
tcctaacaagacaaa

SEQ ID NO: 1677169 - DNA, 15 bp, Homo sapiens
cctaacaagacaaat

SEQ ID NO: 1677170 - DNA, 15 bp, Homo sapiens
ctaacaagacaaatg

SEQ ID NO: 1677171 - DNA, 15 bp, Homo sapiens
taacaagacaaatgc

SEQ ID NO: 1677172 - DNA, 15 bp, Homo sapiens
aacaagacaaatgct

SEQ ID NO: 1677173 - DNA, 15 bp, Homo sapiens
acaagacaaatgcta

SEQ ID NO: 1677174 - DNA, 15 bp, Homo sapiens
caagacaaatgctaa

SEQ ID NO: 1677175 - DNA, 15 bp, Homo sapiens
aagacaaatgctaag

SEQ ID NO: 1677176 - DNA, 15 bp, Homo sapiens
agacaaatgctaagg

SEQ ID NO: 1677177 - DNA, 15 bp, Homo sapiens
gacaaatgctaaggt

SEQ ID NO: 1677178 - DNA, 15 bp, Homo sapiens
acaaatgctaaggta

SEQ ID NO: 1677179 - DNA, 15 bp, Homo sapiens
caaatgctaaggtag

SEQ ID NO: 1677180 - DNA, 15 bp, Homo sapiens
aaatgctaaggtaga

SEQ ID NO: 1677181 - DNA, 15 bp, Homo sapiens
aatgctaaggtagag

SEQ ID NO: 1677182 - DNA, 15 bp, Homo sapiens
atgctaaggtagagg

SEQ ID NO: 1677183 - DNA, 15 bp, Homo sapiens
tgctaaggtagaggt

SEQ ID NO: 1677184 - DNA, 15 bp, Homo sapiens
gctaaggtagaggtc

SEQ ID NO: 1677185 - DNA, 15 bp, Homo sapiens
ctaaggtagaggtca

SEQ ID NO: 1677186 - DNA, 15 bp, Homo sapiens
taaggtagaggtcat

SEQ ID NO: 1677187 - DNA, 15 bp, Homo sapiens
aaggtagaggtcatt

SEQ ID NO: 1677188 - DNA, 15 bp, Homo sapiens
aggtagaggtcattc

SEQ ID NO: 1677189 - DNA, 15 bp, Homo sapiens
ggtagaggtcattct

SEQ ID NO: 1677190 - DNA, 15 bp, Homo sapiens
gtagaggtcattctg

SEQ ID NO: 1677191 - DNA, 15 bp, Homo sapiens
tagaggtcattctgc

SEQ ID NO: 1677192 - DNA, 15 bp, Homo sapiens
agaggtcattctgct

SEQ ID NO: 1677193 - DNA, 15 bp, Homo sapiens
gaggtcattctgctc

SEQ ID NO: 1677194 - DNA, 15 bp, Homo sapiens
aggtcattctgctca

SEQ ID NO: 1677195 - DNA, 15 bp, Homo sapiens
ggtcattctgctcaa

SEQ ID NO: 1677196 - DNA, 15 bp, Homo sapiens
cattctgctcaaaca

SEQ ID NO: 1677197 - DNA, 15 bp, Homo sapiens
attctgctcaaacaa

SEQ ID NO: 1677198 - DNA, 15 bp, Homo sapiens
ttctgctcaaacaac

SEQ ID NO: 1677199 - DNA, 15 bp, Homo sapiens
tctgctcaaacaacc

SEQ ID NO: 1677200 - DNA, 15 bp, Homo sapiens
ctgctcaaacaacct

SEQ ID NO: 1677201 - DNA, 15 bp, Homo sapiens
tgctcaaacaacctg

SEQ ID NO: 1677202 - DNA, 15 bp, Homo sapiens
gctcaaacaacctga

SEQ ID NO: 1677203 - DNA, 15 bp, Homo sapiens
ctcaaacaacctgac

SEQ ID NO: 1677204 - DNA, 15 bp, Homo sapiens
tcaaacaacctgacc

SEQ ID NO: 1677205 - DNA, 15 bp, Homo sapiens
caaacaacctgaccc

SEQ ID NO: 1677206 - DNA, 15 bp, Homo sapiens
aaacaacctgacccc

SEQ ID NO: 1677207 - DNA, 15 bp, Homo sapiens
aacaacctgacccca

SEQ ID NO: 1677208 - DNA, 15 bp, Homo sapiens
acaacctgaccccac

SEQ ID NO: 1677209 - DNA, 15 bp, Homo sapiens
caacctgaccccacc

SEQ ID NO: 1677210 - DNA, 15 bp, Homo sapiens
aacctgaccccacct

SEQ ID NO: 1677211 - DNA, 15 bp, Homo sapiens
acctgaccccacctg

SEQ ID NO: 1677212 - DNA, 15 bp, Homo sapiens
cctgaccccacctgg

SEQ ID NO: 1677213 - DNA, 15 bp, Homo sapiens
ctgaccccacctgga

SEQ ID NO: 1677214 - DNA, 15 bp, Homo sapiens
tgaccccacctggat

SEQ ID NO: 1677215 - DNA, 15 bp, Homo sapiens
gaccccacctggatg

SEQ ID NO: 1677216 - DNA, 15 bp, Homo sapiens
accccacctggatgt

SEQ ID NO: 1677217 - DNA, 15 bp, Homo sapiens
ccccacctggatgtg

SEQ ID NO: 1677218 - DNA, 15 bp, Homo sapiens
cccacctggatgtgg

SEQ ID NO: 1677219 - DNA, 15 bp, Homo sapiens
ccacctggatgtggg

SEQ ID NO: 1677220 - DNA, 15 bp, Homo sapiens
cacctggatgtgggc

SEQ ID NO: 1677221 - DNA, 15 bp, Homo sapiens
acctggatgtgggct

SEQ ID NO: 1677222 - DNA, 15 bp, Homo sapiens
cctggatgtgggctt

SEQ ID NO: 1677223 - DNA, 15 bp, Homo sapiens
ctggatgtgggctta

SEQ ID NO: 1677224 - DNA, 15 bp, Homo sapiens
tggatgtgggcttac

SEQ ID NO: 1677225 - DNA, 15 bp, Homo sapiens
ggatgtgggcttaca

SEQ ID NO: 1677226 - DNA, 15 bp, Homo sapiens
gatgtgggcttacat

SEQ ID NO: 1677227 - DNA, 15 bp, Homo sapiens
atgtgggcttacatt

SEQ ID NO: 1677228 - DNA, 15 bp, Homo sapiens
tgtgggcttacattt

SEQ ID NO: 1677229 - DNA, 15 bp, Homo sapiens
gtgggcttacatttg

SEQ ID NO: 1677230 - DNA, 15 bp, Homo sapiens
tgggcttacatttgc

SEQ ID NO: 1677231 - DNA, 15 bp, Homo sapiens
gggcttacatttgca

SEQ ID NO: 1677232 - DNA, 15 bp, Homo sapiens
ggcttacatttgcaa

SEQ ID NO: 1677233 - DNA, 15 bp, Homo sapiens
gcttacatttgcaaa

SEQ ID NO: 1677234 - DNA, 15 bp, Homo sapiens
cttacatttgcaaag

SEQ ID NO: 1677235 - DNA, 15 bp, Homo sapiens
ttacatttgcaaagg

SEQ ID NO: 1677236 - DNA, 15 bp, Homo sapiens
tacatttgcaaaggg

SEQ ID NO: 1677237 - DNA, 15 bp, Homo sapiens
acatttgcaaagggc

SEQ ID NO: 1677238 - DNA, 15 bp, Homo sapiens
catttgcaaagggca

SEQ ID NO: 1677239 - DNA, 15 bp, Homo sapiens
atttgcaaagggcac

SEQ ID NO: 1677240 - DNA, 15 bp, Homo sapiens
tttgcaaagggcacc

SEQ ID NO: 1677241 - DNA, 15 bp, Homo sapiens
ttgcaaagggcacca

SEQ ID NO: 1677242 - DNA, 15 bp, Homo sapiens
tgcaaagggcaccaa

SEQ ID NO: 1677243 - DNA, 15 bp, Homo sapiens
gcaaagggcaccaaa

SEQ ID NO: 1677244 - DNA, 15 bp, Homo sapiens
caaagggcaccaaag

SEQ ID NO: 1677245 - DNA, 15 bp, Homo sapiens
aaagggcaccaaagt

SEQ ID NO: 1677246 - DNA, 15 bp, Homo sapiens
aagggcaccaaagtt

SEQ ID NO: 1677247 - DNA, 15 bp, Homo sapiens
agggcaccaaagttc

SEQ ID NO: 1677248 - DNA, 15 bp, Homo sapiens
gggcaccaaagttct

SEQ ID NO: 1677249 - DNA, 15 bp, Homo sapiens
ggcaccaaagttcta

SEQ ID NO: 1677250 - DNA, 15 bp, Homo sapiens
gcaccaaagttctaa

SEQ ID NO: 1677251 - DNA, 15 bp, Homo sapiens
caccaaagttctaag

SEQ ID NO: 1677252 - DNA, 15 bp, Homo sapiens
accaaagttctaaga

SEQ ID NO: 1677253 - DNA, 15 bp, Homo sapiens
ccaaagttctaagag

SEQ ID NO: 1677254 - DNA, 15 bp, Homo sapiens
caaagttctaagaga

SEQ ID NO: 1677255 - DNA, 15 bp, Homo sapiens
aaagttctaagagat

SEQ ID NO: 1677256 - DNA, 15 bp, Homo sapiens
aagttctaagagatg

SEQ ID NO: 1677257 - DNA, 15 bp, Homo sapiens
agttctaagagatga

SEQ ID NO: 1677258 - DNA, 15 bp, Homo sapiens
gttctaagagatgag

SEQ ID NO: 1677259 - DNA, 15 bp, Homo sapiens
ttctaagagatgagg

SEQ ID NO: 1677260 - DNA, 15 bp, Homo sapiens
tctaagagatgaggg

SEQ ID NO: 1677261 - DNA, 15 bp, Homo sapiens
ctaagagatgagggg

SEQ ID NO: 1677262 - DNA, 15 bp, Homo sapiens
taagagatgagggga

SEQ ID NO: 1677263 - DNA, 15 bp, Homo sapiens
aagagatgaggggag

SEQ ID NO: 1677264 - DNA, 15 bp, Homo sapiens
agagatgaggggagg

SEQ ID NO: 1677265 - DNA, 15 bp, Homo sapiens
gagatgaggggagga

SEQ ID NO: 1677266 - DNA, 15 bp, Homo sapiens
agatgaggggaggag

SEQ ID NO: 1677267 - DNA, 15 bp, Homo sapiens
gatgaggggaggagc

SEQ ID NO: 1677268 - DNA, 15 bp, Homo sapiens
atgaggggaggagct

SEQ ID NO: 1677269 - DNA, 15 bp, Homo sapiens
tgaggggaggagctg

SEQ ID NO: 1677270 - DNA, 15 bp, Homo sapiens
gaggggaggagctga

SEQ ID NO: 1677271 - DNA, 15 bp, Homo sapiens
aggggaggagctgag

SEQ ID NO: 1677272 - DNA, 15 bp, Homo sapiens
ggggaggagctgagc

SEQ ID NO: 1677273 - DNA, 15 bp, Homo sapiens
gggaggagctgagcc

SEQ ID NO: 1677274 - DNA, 15 bp, Homo sapiens
ggaggagctgagccc

SEQ ID NO: 1677275 - DNA, 15 bp, Homo sapiens
gaggagctgagcccc

SEQ ID NO: 1677276 - DNA, 15 bp, Homo sapiens
aggagctgagcccct

SEQ ID NO: 1677277 - DNA, 15 bp, Homo sapiens
ggagctgagcccctt

SEQ ID NO: 1677278 - DNA, 15 bp, Homo sapiens
gagctgagccccttg

SEQ ID NO: 1677279 - DNA, 15 bp, Homo sapiens
agctgagccccttgt

SEQ ID NO: 1677280 - DNA, 15 bp, Homo sapiens
gctgagccccttgtc

SEQ ID NO: 1677281 - DNA, 15 bp, Homo sapiens
ctgagccccttgtcc

SEQ ID NO: 1677282 - DNA, 15 bp, Homo sapiens
tgagccccttgtcct

SEQ ID NO: 1677283 - DNA, 15 bp, Homo sapiens
gagccccttgtcctt

SEQ ID NO: 1677284 - DNA, 15 bp, Homo sapiens
agccccttgtcctta

SEQ ID NO: 1677285 - DNA, 15 bp, Homo sapiens
gccccttgtccttat

SEQ ID NO: 1677286 - DNA, 15 bp, Homo sapiens
ccccttgtccttatc

SEQ ID NO: 1677287 - DNA, 15 bp, Homo sapiens
cccttgtccttatct

SEQ ID NO: 1677288 - DNA, 15 bp, Homo sapiens
ccttgtccttatcta

SEQ ID NO: 1677289 - DNA, 15 bp, Homo sapiens
cttgtccttatctag

SEQ ID NO: 1677290 - DNA, 15 bp, Homo sapiens
ttgtccttatctagg

SEQ ID NO: 1677291 - DNA, 15 bp, Homo sapiens
tgtccttatctaggt

SEQ ID NO: 1677292 - DNA, 15 bp, Homo sapiens
gtccttatctaggtt

SEQ ID NO: 1677293 - DNA, 15 bp, Homo sapiens
tccttatctaggttt

SEQ ID NO: 1677294 - DNA, 15 bp, Homo sapiens
ccttatctaggtttc

SEQ ID NO: 1677295 - DNA, 15 bp, Homo sapiens
cttatctaggtttcc

SEQ ID NO: 1677296 - DNA, 15 bp, Homo sapiens
ttatctaggtttccc

SEQ ID NO: 1677297 - DNA, 15 bp, Homo sapiens
tatctaggtttccct

SEQ ID NO: 1677298 - DNA, 15 bp, Homo sapiens
atctaggtttccctt

SEQ ID NO: 1677299 - DNA, 15 bp, Homo sapiens
tctaggtttcccttg

SEQ ID NO: 1677300 - DNA, 15 bp, Homo sapiens
ctaggtttcccttgt

SEQ ID NO: 1677301 - DNA, 15 bp, Homo sapiens
taggtttcccttgtt

SEQ ID NO: 1677302 - DNA, 15 bp, Homo sapiens
aggtttcccttgttc

SEQ ID NO: 1677303 - DNA, 15 bp, Homo sapiens
ggtttcccttgttct

SEQ ID NO: 1677304 - DNA, 15 bp, Homo sapiens
gtttcccttgttctt

SEQ ID NO: 1677305 - DNA, 15 bp, Homo sapiens
tttcccttgttcttt

SEQ ID NO: 1677306 - DNA, 15 bp, Homo sapiens
ttcccttgttctttc

SEQ ID NO: 1677307 - DNA, 15 bp, Homo sapiens
tcccttgttctttcc

SEQ ID NO: 1677308 - DNA, 15 bp, Homo sapiens
cccttgttctttccc

SEQ ID NO: 1677309 - DNA, 15 bp, Homo sapiens
ccttgttctttccca

SEQ ID NO: 1677310 - DNA, 15 bp, Homo sapiens
cttgttctttcccat

SEQ ID NO: 1677311 - DNA, 15 bp, Homo sapiens
ttgttctttcccatc

SEQ ID NO: 1677312 - DNA, 15 bp, Homo sapiens
tgttctttcccatcc

SEQ ID NO: 1677313 - DNA, 15 bp, Homo sapiens
gttctttcccatccc

SEQ ID NO: 1677314 - DNA, 15 bp, Homo sapiens
ttctttcccatccct

SEQ ID NO: 1677315 - DNA, 15 bp, Homo sapiens
tctttcccatccctc

SEQ ID NO: 1677316 - DNA, 15 bp, Homo sapiens
ctttcccatccctca

SEQ ID NO: 1677317 - DNA, 15 bp, Homo sapiens
tttcccatccctcag

SEQ ID NO: 1677318 - DNA, 15 bp, Homo sapiens
ttcccatccctcagt

SEQ ID NO: 1677319 - DNA, 15 bp, Homo sapiens
tcccatccctcagtc

SEQ ID NO: 1677320 - DNA, 15 bp, Homo sapiens
cccatccctcagtct

SEQ ID NO: 1677321 - DNA, 15 bp, Homo sapiens
ccatccctcagtctg

SEQ ID NO: 1677322 - DNA, 15 bp, Homo sapiens
catccctcagtctgc

SEQ ID NO: 1677323 - DNA, 15 bp, Homo sapiens
atccctcagtctgct

SEQ ID NO: 1677324 - DNA, 15 bp, Homo sapiens
tccctcagtctgctt

SEQ ID NO: 1677325 - DNA, 15 bp, Homo sapiens
ccctcagtctgcttc

SEQ ID NO: 1677326 - DNA, 15 bp, Homo sapiens
cctcagtctgcttct

SEQ ID NO: 1677327 - DNA, 15 bp, Homo sapiens
ctcagtctgcttctt

SEQ ID NO: 1677328 - DNA, 15 bp, Homo sapiens
tcagtctgcttcttt

SEQ ID NO: 1677329 - DNA, 15 bp, Homo sapiens
cagtctgcttctttt

SEQ ID NO: 1677330 - DNA, 15 bp, Homo sapiens
agtctgcttcttttc

SEQ ID NO: 1677331 - DNA, 15 bp, Homo sapiens
gtctgcttcttttcc

SEQ ID NO: 1677332 - DNA, 15 bp, Homo sapiens
tctgcttcttttccc

SEQ ID NO: 1677333 - DNA, 15 bp, Homo sapiens
ctgcttcttttccca

SEQ ID NO: 1677334 - DNA, 15 bp, Homo sapiens
tgcttcttttcccag

SEQ ID NO: 1677335 - DNA, 15 bp, Homo sapiens
gcttcttttcccagt

SEQ ID NO: 1677336 - DNA, 15 bp, Homo sapiens
cttcttttcccagta

SEQ ID NO: 1677337 - DNA, 15 bp, Homo sapiens
ttcttttcccagtac

SEQ ID NO: 1677338 - DNA, 15 bp, Homo sapiens
tcttttcccagtacc

SEQ ID NO: 1677339 - DNA, 15 bp, Homo sapiens
cttttcccagtacca

SEQ ID NO: 1677340 - DNA, 15 bp, Homo sapiens
ttttcccagtaccaa

SEQ ID NO: 1677341 - DNA, 15 bp, Homo sapiens
tttcccagtaccaac

SEQ ID NO: 1677342 - DNA, 15 bp, Homo sapiens
ttcccagtaccaaca

SEQ ID NO: 1677343 - DNA, 15 bp, Homo sapiens
tcccagtaccaacat

SEQ ID NO: 1677344 - DNA, 15 bp, Homo sapiens
cccagtaccaacatg

SEQ ID NO: 1677345 - DNA, 15 bp, Homo sapiens
ccagtaccaacatgt

SEQ ID NO: 1677346 - DNA, 15 bp, Homo sapiens
cagtaccaacatgtt

SEQ ID NO: 1677347 - DNA, 15 bp, Homo sapiens
agtaccaacatgttt

SEQ ID NO: 1677348 - DNA, 15 bp, Homo sapiens
gtaccaacatgtttg

SEQ ID NO: 1677349 - DNA, 15 bp, Homo sapiens
taccaacatgtttgt

SEQ ID NO: 1677350 - DNA, 15 bp, Homo sapiens
accaacatgtttgtg

SEQ ID NO: 1677351 - DNA, 15 bp, Homo sapiens
ccaacatgtttgtgt

SEQ ID NO: 1677352 - DNA, 15 bp, Homo sapiens
caacatgtttgtgtc

SEQ ID NO: 1677353 - DNA, 15 bp, Homo sapiens
aacatgtttgtgtcc

SEQ ID NO: 1677354 - DNA, 15 bp, Homo sapiens
acatgtttgtgtcct

SEQ ID NO: 1677355 - DNA, 15 bp, Homo sapiens
catgtttgtgtcctc

SEQ ID NO: 1677356 - DNA, 15 bp, Homo sapiens
atgtttgtgtcctca

SEQ ID NO: 1677357 - DNA, 15 bp, Homo sapiens
tgtttgtgtcctcag

SEQ ID NO: 1677358 - DNA, 15 bp, Homo sapiens
gtttgtgtcctcaga

SEQ ID NO: 1677359 - DNA, 15 bp, Homo sapiens
tttgtgtcctcagaa

SEQ ID NO: 1677360 - DNA, 15 bp, Homo sapiens
ttgtgtcctcagaat

SEQ ID NO: 1677361 - DNA, 15 bp, Homo sapiens
tgtgtcctcagaatt

SEQ ID NO: 1677362 - DNA, 15 bp, Homo sapiens
gtgtcctcagaatta

SEQ ID NO: 1677363 - DNA, 15 bp, Homo sapiens
tgtcctcagaattaa

SEQ ID NO: 1677364 - DNA, 15 bp, Homo sapiens
gtcctcagaattaaa

SEQ ID NO: 1677365 - DNA, 15 bp, Homo sapiens
tcctcagaattaaag

SEQ ID NO: 1677366 - DNA, 15 bp, Homo sapiens
cctcagaattaaagg

SEQ ID NO: 1677367 - DNA, 15 bp, Homo sapiens
ctcagaattaaagga

SEQ ID NO: 1677368 - DNA, 15 bp, Homo sapiens
tcagaattaaaggag

SEQ ID NO: 1677369 - DNA, 15 bp, Homo sapiens
cagaattaaaggagt

SEQ ID NO: 1677370 - DNA, 15 bp, Homo sapiens
agaattaaaggagta

SEQ ID NO: 1677371 - DNA, 15 bp, Homo sapiens
gaattaaaggagtaa

SEQ ID NO: 1677372 - DNA, 15 bp, Homo sapiens
aattaaaggagtaaa

SEQ ID NO: 1677373 - DNA, 15 bp, Homo sapiens
attaaaggagtaaaa

SEQ ID NO: 1677374 - DNA, 15 bp, Homo sapiens
ttaaaggagtaaaaa

SEQ ID NO: 1677375 - DNA, 15 bp, Homo sapiens
aaaggagtaaaaatg

SEQ ID NO: 1677376 - DNA, 15 bp, Homo sapiens
aaggagtaaaaatgt

SEQ ID NO: 1677377 - DNA, 15 bp, Homo sapiens
aggagtaaaaatgtg

SEQ ID NO: 1677378 - DNA, 15 bp, Homo sapiens
ggagtaaaaatgtgt

SEQ ID NO: 1677379 - DNA, 15 bp, Homo sapiens
gagtaaaaatgtgta

SEQ ID NO: 1677380 - DNA, 15 bp, Homo sapiens
agtaaaaatgtgtaa

SEQ ID NO: 1677381 - DNA, 15 bp, Homo sapiens
gtaaaaatgtgtaaa

SEQ ID NO: 1677382 - DNA, 15 bp, Homo sapiens
taaaaatgtgtaaac

SEQ ID NO: 1677383 - DNA, 15 bp, Homo sapiens
aaaaatgtgtaaaca

SEQ ID NO: 1677384 - DNA, 15 bp, Homo sapiens
aaaatgtgtaaacat

SEQ ID NO: 1677385 - DNA, 15 bp, Homo sapiens
aaatgtgtaaacatc

SEQ ID NO: 1677386 - DNA, 15 bp, Homo sapiens
aatgtgtaaacatct

SEQ ID NO: 1677387 - DNA, 15 bp, Homo sapiens
atgtgtaaacatctg

SEQ ID NO: 1677388 - DNA, 15 bp, Homo sapiens
tgtgtaaacatctga

SEQ ID NO: 1677389 - DNA, 15 bp, Homo sapiens
gtgtaaacatctgac

SEQ ID NO: 1677390 - DNA, 15 bp, Homo sapiens
tgtaaacatctgact

SEQ ID NO: 1677391 - DNA, 15 bp, Homo sapiens
gtaaacatctgacta

SEQ ID NO: 1677392 - DNA, 15 bp, Homo sapiens
taaacatctgactag

SEQ ID NO: 1677393 - DNA, 15 bp, Homo sapiens
aaacatctgactagc

SEQ ID NO: 1677394 - DNA, 15 bp, Homo sapiens
aacatctgactagca

SEQ ID NO: 1677395 - DNA, 15 bp, Homo sapiens
acatctgactagcaa

SEQ ID NO: 1677396 - DNA, 15 bp, Homo sapiens
catctgactagcaac

SEQ ID NO: 1677397 - DNA, 15 bp, Homo sapiens
atctgactagcaaca

SEQ ID NO: 1677398 - DNA, 15 bp, Homo sapiens
tctgactagcaacag

SEQ ID NO: 1677399 - DNA, 15 bp, Homo sapiens
ctgactagcaacagc

SEQ ID NO: 1677400 - DNA, 15 bp, Homo sapiens
tgactagcaacagcc

SEQ ID NO: 1677401 - DNA, 15 bp, Homo sapiens
gactagcaacagcca

SEQ ID NO: 1677402 - DNA, 15 bp, Homo sapiens
actagcaacagccat

SEQ ID NO: 1677403 - DNA, 15 bp, Homo sapiens
ctagcaacagccatg

SEQ ID NO: 1677404 - DNA, 15 bp, Homo sapiens
tagcaacagccatga

SEQ ID NO: 1677405 - DNA, 15 bp, Homo sapiens
agcaacagccatgag

SEQ ID NO: 1677406 - DNA, 15 bp, Homo sapiens
gcaacagccatgaga

SEQ ID NO: 1677407 - DNA, 15 bp, Homo sapiens
caacagccatgagat

SEQ ID NO: 1677408 - DNA, 15 bp, Homo sapiens
aacagccatgagatt

SEQ ID NO: 1677409 - DNA, 15 bp, Homo sapiens
acagccatgagattt

SEQ ID NO: 1677410 - DNA, 15 bp, Homo sapiens
cagccatgagatttt

SEQ ID NO: 1677411 - DNA, 15 bp, Homo sapiens
agccatgagattttg

SEQ ID NO: 1677412 - DNA, 15 bp, Homo sapiens
gccatgagattttgc

SEQ ID NO: 1677413 - DNA, 15 bp, Homo sapiens
ccatgagattttgcc

SEQ ID NO: 1677414 - DNA, 15 bp, Homo sapiens
catgagattttgcct

SEQ ID NO: 1677415 - DNA, 15 bp, Homo sapiens
atgagattttgcctg

SEQ ID NO: 1677416 - DNA, 15 bp, Homo sapiens
tgagattttgcctgg

SEQ ID NO: 1677417 - DNA, 15 bp, Homo sapiens
gagattttgcctggc

SEQ ID NO: 1677418 - DNA, 15 bp, Homo sapiens
agattttgcctggct

SEQ ID NO: 1677419 - DNA, 15 bp, Homo sapiens
gattttgcctggctt

SEQ ID NO: 1677420 - DNA, 15 bp, Homo sapiens
attttgcctggcttg

SEQ ID NO: 1677421 - DNA, 15 bp, Homo sapiens
ttttgcctggcttgt

SEQ ID NO: 1677422 - DNA, 15 bp, Homo sapiens
tttgcctggcttgtt

SEQ ID NO: 1677423 - DNA, 15 bp, Homo sapiens
ttgcctggcttgttg

SEQ ID NO: 1677424 - DNA, 15 bp, Homo sapiens
tgcctggcttgttga

SEQ ID NO: 1677425 - DNA, 15 bp, Homo sapiens
gcctggcttgttgat

SEQ ID NO: 1677426 - DNA, 15 bp, Homo sapiens
cctggcttgttgata

SEQ ID NO: 1677427 - DNA, 15 bp, Homo sapiens
ctggcttgttgataa

SEQ ID NO: 1677428 - DNA, 15 bp, Homo sapiens
tggcttgttgataag

SEQ ID NO: 1677429 - DNA, 15 bp, Homo sapiens
ggcttgttgataagc

SEQ ID NO: 1677430 - DNA, 15 bp, Homo sapiens
gcttgttgataagca

SEQ ID NO: 1677431 - DNA, 15 bp, Homo sapiens
cttgttgataagcag

SEQ ID NO: 1677432 - DNA, 15 bp, Homo sapiens
ttgttgataagcagc

SEQ ID NO: 1677433 - DNA, 15 bp, Homo sapiens
tgttgataagcagca

SEQ ID NO: 1677434 - DNA, 15 bp, Homo sapiens
gttgataagcagcat

SEQ ID NO: 1677435 - DNA, 15 bp, Homo sapiens
ttgataagcagcatt

SEQ ID NO: 1677436 - DNA, 15 bp, Homo sapiens
tgataagcagcattg

SEQ ID NO: 1677437 - DNA, 15 bp, Homo sapiens
gataagcagcattga

SEQ ID NO: 1677438 - DNA, 15 bp, Homo sapiens
ataagcagcattgag

SEQ ID NO: 1677439 - DNA, 15 bp, Homo sapiens
taagcagcattgaga

SEQ ID NO: 1677440 - DNA, 15 bp, Homo sapiens
aagcagcattgagat

SEQ ID NO: 1677441 - DNA, 15 bp, Homo sapiens
agcagcattgagatc

SEQ ID NO: 1677442 - DNA, 15 bp, Homo sapiens
gcagcattgagatct

SEQ ID NO: 1677443 - DNA, 15 bp, Homo sapiens
cagcattgagatctg

SEQ ID NO: 1677444 - DNA, 15 bp, Homo sapiens
agcattgagatctgc

SEQ ID NO: 1677445 - DNA, 15 bp, Homo sapiens
gcattgagatctgcc

SEQ ID NO: 1677446 - DNA, 15 bp, Homo sapiens
cattgagatctgccc

SEQ ID NO: 1677447 - DNA, 15 bp, Homo sapiens
attgagatctgccct

SEQ ID NO: 1677448 - DNA, 15 bp, Homo sapiens
ttgagatctgccctc

SEQ ID NO: 1677449 - DNA, 15 bp, Homo sapiens
tgagatctgccctcc

SEQ ID NO: 1677450 - DNA, 15 bp, Homo sapiens
gagatctgccctcct

SEQ ID NO: 1677451 - DNA, 15 bp, Homo sapiens
agatctgccctccta

SEQ ID NO: 1677452 - DNA, 15 bp, Homo sapiens
gatctgccctcctaa

SEQ ID NO: 1677453 - DNA, 15 bp, Homo sapiens
atctgccctcctaag

SEQ ID NO: 1677454 - DNA, 15 bp, Homo sapiens
tctgccctcctaaga

SEQ ID NO: 1677455 - DNA, 15 bp, Homo sapiens
ctgccctcctaagaa

SEQ ID NO: 1677456 - DNA, 15 bp, Homo sapiens
tgccctcctaagaat

SEQ ID NO: 1677457 - DNA, 15 bp, Homo sapiens
gccctcctaagaatg

SEQ ID NO: 1677458 - DNA, 15 bp, Homo sapiens
ccctcctaagaatgg

SEQ ID NO: 1677459 - DNA, 15 bp, Homo sapiens
cctcctaagaatggg

SEQ ID NO: 1677460 - DNA, 15 bp, Homo sapiens
ctcctaagaatgggc

SEQ ID NO: 1677461 - DNA, 15 bp, Homo sapiens
tcctaagaatgggcc

SEQ ID NO: 1677462 - DNA, 15 bp, Homo sapiens
cctaagaatgggcca

SEQ ID NO: 1677463 - DNA, 15 bp, Homo sapiens
ctaagaatgggccat

SEQ ID NO: 1677464 - DNA, 15 bp, Homo sapiens
taagaatgggccatt

SEQ ID NO: 1677465 - DNA, 15 bp, Homo sapiens
aagaatgggccatta

SEQ ID NO: 1677466 - DNA, 15 bp, Homo sapiens
agaatgggccattag

SEQ ID NO: 1677467 - DNA, 15 bp, Homo sapiens
gaatgggccattagg

SEQ ID NO: 1677468 - DNA, 15 bp, Homo sapiens
aatgggccattaggt

SEQ ID NO: 1677469 - DNA, 15 bp, Homo sapiens
atgggccattaggtc

SEQ ID NO: 1677470 - DNA, 15 bp, Homo sapiens
tgggccattaggtct

SEQ ID NO: 1677471 - DNA, 15 bp, Homo sapiens
gggccattaggtctt

SEQ ID NO: 1677472 - DNA, 15 bp, Homo sapiens
ggccattaggtcttc

SEQ ID NO: 1677473 - DNA, 15 bp, Homo sapiens
gccattaggtcttca

SEQ ID NO: 1677474 - DNA, 15 bp, Homo sapiens
ccattaggtcttcaa

SEQ ID NO: 1677475 - DNA, 15 bp, Homo sapiens
cattaggtcttcaaa

SEQ ID NO: 1677476 - DNA, 15 bp, Homo sapiens
attaggtcttcaaag

SEQ ID NO: 1677477 - DNA, 15 bp, Homo sapiens
ttaggtcttcaaagc

SEQ ID NO: 1677478 - DNA, 15 bp, Homo sapiens
taggtcttcaaagct

SEQ ID NO: 1677479 - DNA, 15 bp, Homo sapiens
aggtcttcaaagctt

SEQ ID NO: 1677480 - DNA, 15 bp, Homo sapiens
ggtcttcaaagcttt

SEQ ID NO: 1677481 - DNA, 15 bp, Homo sapiens
gtcttcaaagctttt

SEQ ID NO: 1677482 - DNA, 15 bp, Homo sapiens
tcttcaaagctttta

SEQ ID NO: 1677483 - DNA, 15 bp, Homo sapiens
cttcaaagcttttac

SEQ ID NO: 1677484 - DNA, 15 bp, Homo sapiens
ttcaaagcttttacg

SEQ ID NO: 1677485 - DNA, 15 bp, Homo sapiens
tcaaagcttttacga

SEQ ID NO: 1677486 - DNA, 15 bp, Homo sapiens
caaagcttttacgat

SEQ ID NO: 1677487 - DNA, 15 bp, Homo sapiens
aaagcttttacgatg

SEQ ID NO: 1677488 - DNA, 15 bp, Homo sapiens
aagcttttacgatgt

SEQ ID NO: 1677489 - DNA, 15 bp, Homo sapiens
agcttttacgatgtg

SEQ ID NO: 1677490 - DNA, 15 bp, Homo sapiens
gcttttacgatgtga

SEQ ID NO: 1677491 - DNA, 15 bp, Homo sapiens
cttttacgatgtgag

SEQ ID NO: 1677492 - DNA, 15 bp, Homo sapiens
ttttacgatgtgagg

SEQ ID NO: 1677493 - DNA, 15 bp, Homo sapiens
tttacgatgtgaggt

SEQ ID NO: 1677494 - DNA, 15 bp, Homo sapiens
ttacgatgtgaggta

SEQ ID NO: 1677495 - DNA, 15 bp, Homo sapiens
tacgatgtgaggtaa

SEQ ID NO: 1677496 - DNA, 15 bp, Homo sapiens
acgatgtgaggtaaa

SEQ ID NO: 1677497 - DNA, 15 bp, Homo sapiens
cgatgtgaggtaaag

SEQ ID NO: 1677498 - DNA, 15 bp, Homo sapiens
gatgtgaggtaaaga

SEQ ID NO: 1677499 - DNA, 15 bp, Homo sapiens
atgtgaggtaaagaa

SEQ ID NO: 1677500 - DNA, 15 bp, Homo sapiens
tgtgaggtaaagaat

SEQ ID NO: 1677501 - DNA, 15 bp, Homo sapiens
gtgaggtaaagaatg

SEQ ID NO: 1677502 - DNA, 15 bp, Homo sapiens
tgaggtaaagaatgt

SEQ ID NO: 1677503 - DNA, 15 bp, Homo sapiens
gaggtaaagaatgtt

SEQ ID NO: 1677504 - DNA, 15 bp, Homo sapiens
aggtaaagaatgttc

SEQ ID NO: 1677505 - DNA, 15 bp, Homo sapiens
ggtaaagaatgttca

SEQ ID NO: 1677506 - DNA, 15 bp, Homo sapiens
gtaaagaatgttcac

SEQ ID NO: 1677507 - DNA, 15 bp, Homo sapiens
taaagaatgttcacc

SEQ ID NO: 1677508 - DNA, 15 bp, Homo sapiens
aaagaatgttcacca

SEQ ID NO: 1677509 - DNA, 15 bp, Homo sapiens
aagaatgttcaccag

SEQ ID NO: 1677510 - DNA, 15 bp, Homo sapiens
agaatgttcaccagg

SEQ ID NO: 1677511 - DNA, 15 bp, Homo sapiens
gaatgttcaccagga

SEQ ID NO: 1677512 - DNA, 15 bp, Homo sapiens
aatgttcaccaggag

SEQ ID NO: 1677513 - DNA, 15 bp, Homo sapiens
atgttcaccaggagt

SEQ ID NO: 1677514 - DNA, 15 bp, Homo sapiens
tgttcaccaggagtt

SEQ ID NO: 1677515 - DNA, 15 bp, Homo sapiens
gttcaccaggagttt

SEQ ID NO: 1677516 - DNA, 15 bp, Homo sapiens
ttcaccaggagtttc

SEQ ID NO: 1677517 - DNA, 15 bp, Homo sapiens
tcaccaggagtttca

SEQ ID NO: 1677518 - DNA, 15 bp, Homo sapiens
caccaggagtttcat

SEQ ID NO: 1677519 - DNA, 15 bp, Homo sapiens
accaggagtttcatg

SEQ ID NO: 1677520 - DNA, 15 bp, Homo sapiens
ccaggagtttcatgc

SEQ ID NO: 1677521 - DNA, 15 bp, Homo sapiens
caggagtttcatgca

SEQ ID NO: 1677522 - DNA, 15 bp, Homo sapiens
aggagtttcatgcac

SEQ ID NO: 1677523 - DNA, 15 bp, Homo sapiens
ggagtttcatgcaca

SEQ ID NO: 1677524 - DNA, 15 bp, Homo sapiens
gagtttcatgcacaa

SEQ ID NO: 1677525 - DNA, 15 bp, Homo sapiens
agtttcatgcacaaa

SEQ ID NO: 1677526 - DNA, 15 bp, Homo sapiens
gtttcatgcacaaaa

SEQ ID NO: 1677527 - DNA, 15 bp, Homo sapiens
tttcatgcacaaaag

SEQ ID NO: 1677528 - DNA, 15 bp, Homo sapiens
ttcatgcacaaaagg

SEQ ID NO: 1677529 - DNA, 15 bp, Homo sapiens
tcatgcacaaaaggg

SEQ ID NO: 1677530 - DNA, 15 bp, Homo sapiens
catgcacaaaagggt

SEQ ID NO: 1677531 - DNA, 15 bp, Homo sapiens
atgcacaaaagggtt

SEQ ID NO: 1677532 - DNA, 15 bp, Homo sapiens
tgcacaaaagggttt

SEQ ID NO: 1677533 - DNA, 15 bp, Homo sapiens
gcacaaaagggtttc

SEQ ID NO: 1677534 - DNA, 15 bp, Homo sapiens
cacaaaagggtttct

SEQ ID NO: 1677535 - DNA, 15 bp, Homo sapiens
acaaaagggtttctc

SEQ ID NO: 1677536 - DNA, 15 bp, Homo sapiens
caaaagggtttctct

SEQ ID NO: 1677537 - DNA, 15 bp, Homo sapiens
aaaagggtttctctt

SEQ ID NO: 1677538 - DNA, 15 bp, Homo sapiens
aaagggtttctcttt

SEQ ID NO: 1677539 - DNA, 15 bp, Homo sapiens
aagggtttctctttg

SEQ ID NO: 1677540 - DNA, 15 bp, Homo sapiens
agggtttctctttgt

SEQ ID NO: 1677541 - DNA, 15 bp, Homo sapiens
gggtttctctttgtg

SEQ ID NO: 1677542 - DNA, 15 bp, Homo sapiens
ggtttctctttgtgg

SEQ ID NO: 1677543 - DNA, 15 bp, Homo sapiens
gtttctctttgtggg

SEQ ID NO: 1677544 - DNA, 15 bp, Homo sapiens
tttctctttgtggga

SEQ ID NO: 1677545 - DNA, 15 bp, Homo sapiens
ttctctttgtgggaa

SEQ ID NO: 1677546 - DNA, 15 bp, Homo sapiens
tctctttgtgggaac

SEQ ID NO: 1677547 - DNA, 15 bp, Homo sapiens
ctctttgtgggaact

SEQ ID NO: 1677548 - DNA, 15 bp, Homo sapiens
tctttgtgggaacta

SEQ ID NO: 1677549 - DNA, 15 bp, Homo sapiens
ctttgtgggaactag

SEQ ID NO: 1677550 - DNA, 15 bp, Homo sapiens
tttgtgggaactaga

SEQ ID NO: 1677551 - DNA, 15 bp, Homo sapiens
ttgtgggaactagaa

SEQ ID NO: 1677552 - DNA, 15 bp, Homo sapiens
tgtgggaactagaac

SEQ ID NO: 1677553 - DNA, 15 bp, Homo sapiens
gtgggaactagaaca

SEQ ID NO: 1677554 - DNA, 15 bp, Homo sapiens
tgggaactagaacat

SEQ ID NO: 1677555 - DNA, 15 bp, Homo sapiens
gggaactagaacatt

SEQ ID NO: 1677556 - DNA, 15 bp, Homo sapiens
ggaactagaacattg

SEQ ID NO: 1677557 - DNA, 15 bp, Homo sapiens
gaactagaacattgt

SEQ ID NO: 1677558 - DNA, 15 bp, Homo sapiens
aactagaacattgtt

SEQ ID NO: 1677559 - DNA, 15 bp, Homo sapiens
actagaacattgttc

SEQ ID NO: 1677560 - DNA, 15 bp, Homo sapiens
ctagaacattgttcc

SEQ ID NO: 1677561 - DNA, 15 bp, Homo sapiens
tagaacattgttcca

SEQ ID NO: 1677562 - DNA, 15 bp, Homo sapiens
agaacattgttccag

SEQ ID NO: 1677563 - DNA, 15 bp, Homo sapiens
gaacattgttccagt

SEQ ID NO: 1677564 - DNA, 15 bp, Homo sapiens
aacattgttccagtg

SEQ ID NO: 1677565 - DNA, 15 bp, Homo sapiens
acattgttccagtga

SEQ ID NO: 1677566 - DNA, 15 bp, Homo sapiens
cattgttccagtgat

SEQ ID NO: 1677567 - DNA, 15 bp, Homo sapiens
attgttccagtgatg

SEQ ID NO: 1677568 - DNA, 15 bp, Homo sapiens
ttgttccagtgatga

SEQ ID NO: 1677569 - DNA, 15 bp, Homo sapiens
tgttccagtgatgac

SEQ ID NO: 1677570 - DNA, 15 bp, Homo sapiens
gttccagtgatgacg

SEQ ID NO: 1677571 - DNA, 15 bp, Homo sapiens
ttccagtgatgacgg

SEQ ID NO: 1677572 - DNA, 15 bp, Homo sapiens
tccagtgatgacgga

SEQ ID NO: 1677573 - DNA, 15 bp, Homo sapiens
ccagtgatgacggaa

SEQ ID NO: 1677574 - DNA, 15 bp, Homo sapiens
cagtgatgacggaaa

SEQ ID NO: 1677575 - DNA, 15 bp, Homo sapiens
agtgatgacggaaac

SEQ ID NO: 1677576 - DNA, 15 bp, Homo sapiens
gtgatgacggaaaca

SEQ ID NO: 1677577 - DNA, 15 bp, Homo sapiens
tgatgacggaaacag

SEQ ID NO: 1677578 - DNA, 15 bp, Homo sapiens
gatgacggaaacagg

SEQ ID NO: 1677579 - DNA, 15 bp, Homo sapiens
atgacggaaacaggg

SEQ ID NO: 1677580 - DNA, 15 bp, Homo sapiens
tgacggaaacagggc

SEQ ID NO: 1677581 - DNA, 15 bp, Homo sapiens
gacggaaacagggct

SEQ ID NO: 1677582 - DNA, 15 bp, Homo sapiens
acggaaacagggctt

SEQ ID NO: 1677583 - DNA, 15 bp, Homo sapiens
cggaaacagggcttt

SEQ ID NO: 1677584 - DNA, 15 bp, Homo sapiens
ggaaacagggctttc

SEQ ID NO: 1677585 - DNA, 15 bp, Homo sapiens
gaaacagggctttcc

SEQ ID NO: 1677586 - DNA, 15 bp, Homo sapiens
aaacagggctttcca

SEQ ID NO: 1677587 - DNA, 15 bp, Homo sapiens
aacagggctttccat

SEQ ID NO: 1677588 - DNA, 15 bp, Homo sapiens
acagggctttccata

SEQ ID NO: 1677589 - DNA, 15 bp, Homo sapiens
cagggctttccatac

SEQ ID NO: 1677590 - DNA, 15 bp, Homo sapiens
agggctttccatacc

SEQ ID NO: 1677591 - DNA, 15 bp, Homo sapiens
gggctttccatacca

SEQ ID NO: 1677592 - DNA, 15 bp, Homo sapiens
ggctttccataccaa

SEQ ID NO: 1677593 - DNA, 15 bp, Homo sapiens
gctttccataccaaa

SEQ ID NO: 1677594 - DNA, 15 bp, Homo sapiens
ctttccataccaaaa

SEQ ID NO: 1677595 - DNA, 15 bp, Homo sapiens
tttccataccaaaac

SEQ ID NO: 1677596 - DNA, 15 bp, Homo sapiens
ttccataccaaaaca

SEQ ID NO: 1677597 - DNA, 15 bp, Homo sapiens
tccataccaaaacag

SEQ ID NO: 1677598 - DNA, 15 bp, Homo sapiens
ccataccaaaacagg

SEQ ID NO: 1677599 - DNA, 15 bp, Homo sapiens
cataccaaaacaggg

SEQ ID NO: 1677600 - DNA, 15 bp, Homo sapiens
ataccaaaacagggt

SEQ ID NO: 1677601 - DNA, 15 bp, Homo sapiens
taccaaaacagggtt

SEQ ID NO: 1677602 - DNA, 15 bp, Homo sapiens
accaaaacagggttt

SEQ ID NO: 1677603 - DNA, 15 bp, Homo sapiens
ccaaaacagggtttt

SEQ ID NO: 1677604 - DNA, 15 bp, Homo sapiens
caaaacagggttttc

SEQ ID NO: 1677605 - DNA, 15 bp, Homo sapiens
aaaacagggttttcc

SEQ ID NO: 1677606 - DNA, 15 bp, Homo sapiens
aaacagggttttcct

SEQ ID NO: 1677607 - DNA, 15 bp, Homo sapiens
aacagggttttcctt

SEQ ID NO: 1677608 - DNA, 15 bp, Homo sapiens
acagggttttccttt

SEQ ID NO: 1677609 - DNA, 15 bp, Homo sapiens
cagggttttcctttg

SEQ ID NO: 1677610 - DNA, 15 bp, Homo sapiens
agggttttcctttga

SEQ ID NO: 1677611 - DNA, 15 bp, Homo sapiens
gggttttcctttgaa

SEQ ID NO: 1677612 - DNA, 15 bp, Homo sapiens
ggttttcctttgaat

SEQ ID NO: 1677613 - DNA, 15 bp, Homo sapiens
gttttcctttgaatg

SEQ ID NO: 1677614 - DNA, 15 bp, Homo sapiens
ttttcctttgaatga

SEQ ID NO: 1677615 - DNA, 15 bp, Homo sapiens
tttcctttgaatgac

SEQ ID NO: 1677616 - DNA, 15 bp, Homo sapiens
ttcctttgaatgact

SEQ ID NO: 1677617 - DNA, 15 bp, Homo sapiens
tcctttgaatgactc

SEQ ID NO: 1677618 - DNA, 15 bp, Homo sapiens
cctttgaatgactct

SEQ ID NO: 1677619 - DNA, 15 bp, Homo sapiens
ctttgaatgactctc

SEQ ID NO: 1677620 - DNA, 15 bp, Homo sapiens
tttgaatgactctcc

SEQ ID NO: 1677621 - DNA, 15 bp, Homo sapiens
ttgaatgactctccc

SEQ ID NO: 1677622 - DNA, 15 bp, Homo sapiens
tgaatgactctccca

SEQ ID NO: 1677623 - DNA, 15 bp, Homo sapiens
gaatgactctcccac

SEQ ID NO: 1677624 - DNA, 15 bp, Homo sapiens
aatgactctcccacc

SEQ ID NO: 1677625 - DNA, 15 bp, Homo sapiens
atgactctcccacct

SEQ ID NO: 1677626 - DNA, 15 bp, Homo sapiens
tgactctcccacctt

SEQ ID NO: 1677627 - DNA, 15 bp, Homo sapiens
gactctcccaccttt

SEQ ID NO: 1677628 - DNA, 15 bp, Homo sapiens
actctcccacctttc

SEQ ID NO: 1677629 - DNA, 15 bp, Homo sapiens
ctctcccacctttcc

SEQ ID NO: 1677630 - DNA, 15 bp, Homo sapiens
tctcccacctttccc

SEQ ID NO: 1677631 - DNA, 15 bp, Homo sapiens
ctcccacctttccct

SEQ ID NO: 1677632 - DNA, 15 bp, Homo sapiens
tcccacctttccctt

SEQ ID NO: 1677633 - DNA, 15 bp, Homo sapiens
cccacctttcccttg

SEQ ID NO: 1677634 - DNA, 15 bp, Homo sapiens
ccacctttcccttgt

SEQ ID NO: 1677635 - DNA, 15 bp, Homo sapiens
cacctttcccttgtc

SEQ ID NO: 1677636 - DNA, 15 bp, Homo sapiens
acctttcccttgtct

SEQ ID NO: 1677637 - DNA, 15 bp, Homo sapiens
cctttcccttgtctc

SEQ ID NO: 1677638 - DNA, 15 bp, Homo sapiens
ctttcccttgtctct

SEQ ID NO: 1677639 - DNA, 15 bp, Homo sapiens
tttcccttgtctctt

SEQ ID NO: 1677640 - DNA, 15 bp, Homo sapiens
ttcccttgtctcttc

SEQ ID NO: 1677641 - DNA, 15 bp, Homo sapiens
tcccttgtctcttcc

SEQ ID NO: 1677642 - DNA, 15 bp, Homo sapiens
cccttgtctcttcct

SEQ ID NO: 1677643 - DNA, 15 bp, Homo sapiens
ccttgtctcttcctc

SEQ ID NO: 1677644 - DNA, 15 bp, Homo sapiens
cttgtctcttcctcc

SEQ ID NO: 1677645 - DNA, 15 bp, Homo sapiens
ttgtctcttcctccc

SEQ ID NO: 1677646 - DNA, 15 bp, Homo sapiens
tgtctcttcctcccc

SEQ ID NO: 1677647 - DNA, 15 bp, Homo sapiens
gtctcttcctcccca

SEQ ID NO: 1677648 - DNA, 15 bp, Homo sapiens
tctcttcctccccac

SEQ ID NO: 1677649 - DNA, 15 bp, Homo sapiens
ctcttcctccccacc

SEQ ID NO: 1677650 - DNA, 15 bp, Homo sapiens
tcttcctccccacct

SEQ ID NO: 1677651 - DNA, 15 bp, Homo sapiens
cttcctccccacctc

SEQ ID NO: 1677652 - DNA, 15 bp, Homo sapiens
ttcctccccacctca

SEQ ID NO: 1677653 - DNA, 15 bp, Homo sapiens
tcctccccacctcaa

SEQ ID NO: 1677654 - DNA, 15 bp, Homo sapiens
cctccccacctcaac

SEQ ID NO: 1677655 - DNA, 15 bp, Homo sapiens
ctccccacctcaaca

SEQ ID NO: 1677656 - DNA, 15 bp, Homo sapiens
tccccacctcaacaa

SEQ ID NO: 1677657 - DNA, 15 bp, Homo sapiens
ccccacctcaacaac

SEQ ID NO: 1677658 - DNA, 15 bp, Homo sapiens
cccacctcaacaaca

SEQ ID NO: 1677659 - DNA, 15 bp, Homo sapiens
ccacctcaacaacac

SEQ ID NO: 1677660 - DNA, 15 bp, Homo sapiens
cacctcaacaacaca

SEQ ID NO: 1677661 - DNA, 15 bp, Homo sapiens
acctcaacaacacag

SEQ ID NO: 1677662 - DNA, 15 bp, Homo sapiens
cctcaacaacacagg

SEQ ID NO: 1677663 - DNA, 15 bp, Homo sapiens
ctcaacaacacagga

SEQ ID NO: 1677664 - DNA, 15 bp, Homo sapiens
tcaacaacacaggaa

SEQ ID NO: 1677665 - DNA, 15 bp, Homo sapiens
caacaacacaggaaa

SEQ ID NO: 1677666 - DNA, 15 bp, Homo sapiens
aacaacacaggaaag

SEQ ID NO: 1677667 - DNA, 15 bp, Homo sapiens
acaacacaggaaaga

SEQ ID NO: 1677668 - DNA, 15 bp, Homo sapiens
caacacaggaaagaa

SEQ ID NO: 1677669 - DNA, 15 bp, Homo sapiens
aacacaggaaagaag

SEQ ID NO: 1677670 - DNA, 15 bp, Homo sapiens
acacaggaaagaagc

SEQ ID NO: 1677671 - DNA, 15 bp, Homo sapiens
cacaggaaagaagct

SEQ ID NO: 1677672 - DNA, 15 bp, Homo sapiens
acaggaaagaagctg

SEQ ID NO: 1677673 - DNA, 15 bp, Homo sapiens
caggaaagaagctgg

SEQ ID NO: 1677674 - DNA, 15 bp, Homo sapiens
aggaaagaagctgga

SEQ ID NO: 1677675 - DNA, 15 bp, Homo sapiens
ggaaagaagctggaa

SEQ ID NO: 1677676 - DNA, 15 bp, Homo sapiens
gaaagaagctggaag

SEQ ID NO: 1677677 - DNA, 15 bp, Homo sapiens
aaagaagctggaagc

SEQ ID NO: 1677678 - DNA, 15 bp, Homo sapiens
aagaagctggaagca

SEQ ID NO: 1677679 - DNA, 15 bp, Homo sapiens
agaagctggaagcag

SEQ ID NO: 1677680 - DNA, 15 bp, Homo sapiens
gaagctggaagcagg

SEQ ID NO: 1677681 - DNA, 15 bp, Homo sapiens
aagctggaagcaggg

SEQ ID NO: 1677682 - DNA, 15 bp, Homo sapiens
agctggaagcaggga

SEQ ID NO: 1677683 - DNA, 15 bp, Homo sapiens
gctggaagcagggac

SEQ ID NO: 1677684 - DNA, 15 bp, Homo sapiens
ctggaagcagggaca

SEQ ID NO: 1677685 - DNA, 15 bp, Homo sapiens
tggaagcagggacaa

SEQ ID NO: 1677686 - DNA, 15 bp, Homo sapiens
ggaagcagggacaat

SEQ ID NO: 1677687 - DNA, 15 bp, Homo sapiens
gaagcagggacaatg

SEQ ID NO: 1677688 - DNA, 15 bp, Homo sapiens
aagcagggacaatgg

SEQ ID NO: 1677689 - DNA, 15 bp, Homo sapiens
agcagggacaatggg

SEQ ID NO: 1677690 - DNA, 15 bp, Homo sapiens
gcagggacaatggga

SEQ ID NO: 1677691 - DNA, 15 bp, Homo sapiens
cagggacaatgggaa

SEQ ID NO: 1677692 - DNA, 15 bp, Homo sapiens
agggacaatgggaag

SEQ ID NO: 1677693 - DNA, 15 bp, Homo sapiens
gggacaatgggaagg

SEQ ID NO: 1677694 - DNA, 15 bp, Homo sapiens
ggacaatgggaaggt

SEQ ID NO: 1677695 - DNA, 15 bp, Homo sapiens
gacaatgggaaggtc

SEQ ID NO: 1677696 - DNA, 15 bp, Homo sapiens
acaatgggaaggtcc

SEQ ID NO: 1677697 - DNA, 15 bp, Homo sapiens
caatgggaaggtccc

SEQ ID NO: 1677698 - DNA, 15 bp, Homo sapiens
aatgggaaggtccct

SEQ ID NO: 1677699 - DNA, 15 bp, Homo sapiens
atgggaaggtccctt

SEQ ID NO: 1677700 - DNA, 15 bp, Homo sapiens
tgggaaggtcccttt

SEQ ID NO: 1677701 - DNA, 15 bp, Homo sapiens
gggaaggtccctttg

SEQ ID NO: 1677702 - DNA, 15 bp, Homo sapiens
ggaaggtccctttgt

SEQ ID NO: 1677703 - DNA, 15 bp, Homo sapiens
gaaggtccctttgtt

SEQ ID NO: 1677704 - DNA, 15 bp, Homo sapiens
aaggtccctttgtta

SEQ ID NO: 1677705 - DNA, 15 bp, Homo sapiens
aggtccctttgttac

SEQ ID NO: 1677706 - DNA, 15 bp, Homo sapiens
ggtccctttgttact

SEQ ID NO: 1677707 - DNA, 15 bp, Homo sapiens
gtccctttgttactc

SEQ ID NO: 1677708 - DNA, 15 bp, Homo sapiens
tccctttgttactcg

SEQ ID NO: 1677709 - DNA, 15 bp, Homo sapiens
ccctttgttactcga

SEQ ID NO: 1677710 - DNA, 15 bp, Homo sapiens
cctttgttactcgag

SEQ ID NO: 1677711 - DNA, 15 bp, Homo sapiens
ctttgttactcgagc

SEQ ID NO: 1677712 - DNA, 15 bp, Homo sapiens
tttgttactcgagct

SEQ ID NO: 1677713 - DNA, 15 bp, Homo sapiens
ttgttactcgagcta

SEQ ID NO: 1677714 - DNA, 15 bp, Homo sapiens
tgttactcgagctat

SEQ ID NO: 1677715 - DNA, 15 bp, Homo sapiens
gttactcgagctatt

SEQ ID NO: 1677716 - DNA, 15 bp, Homo sapiens
ttactcgagctatta

SEQ ID NO: 1677717 - DNA, 15 bp, Homo sapiens
tactcgagctattag

SEQ ID NO: 1677718 - DNA, 15 bp, Homo sapiens
actcgagctattaga

SEQ ID NO: 1677719 - DNA, 15 bp, Homo sapiens
ctcgagctattagaa

SEQ ID NO: 1677720 - DNA, 15 bp, Homo sapiens
tcgagctattagaaa

SEQ ID NO: 1677721 - DNA, 15 bp, Homo sapiens
cgagctattagaaac

SEQ ID NO: 1677722 - DNA, 15 bp, Homo sapiens
gagctattagaaaca

SEQ ID NO: 1677723 - DNA, 15 bp, Homo sapiens
agctattagaaacaa

SEQ ID NO: 1677724 - DNA, 15 bp, Homo sapiens
gctattagaaacaaa

SEQ ID NO: 1677725 - DNA, 15 bp, Homo sapiens
ctattagaaacaaaa

SEQ ID NO: 1677726 - DNA, 15 bp, Homo sapiens
tattagaaacaaaaa

SEQ ID NO: 1677727 - DNA, 15 bp, Homo sapiens
attagaaacaaaaag

SEQ ID NO: 1677728 - DNA, 15 bp, Homo sapiens
ttagaaacaaaaaga

SEQ ID NO: 1677729 - DNA, 15 bp, Homo sapiens
tagaaacaaaaagaa

SEQ ID NO: 1677730 - DNA, 15 bp, Homo sapiens
agaaacaaaaagaaa

SEQ ID NO: 1677731 - DNA, 15 bp, Homo sapiens
gaaacaaaaagaaaa

SEQ ID NO: 1677732 - DNA, 15 bp, Homo sapiens
aaacaaaaagaaaag

SEQ ID NO: 1677733 - DNA, 15 bp, Homo sapiens
aacaaaaagaaaagt

SEQ ID NO: 1677734 - DNA, 15 bp, Homo sapiens
acaaaaagaaaagtg

SEQ ID NO: 1677735 - DNA, 15 bp, Homo sapiens
caaaaagaaaagtgg

SEQ ID NO: 1677736 - DNA, 15 bp, Homo sapiens
aaaaagaaaagtggc

SEQ ID NO: 1677737 - DNA, 15 bp, Homo sapiens
aaaagaaaagtggcc

SEQ ID NO: 1677738 - DNA, 15 bp, Homo sapiens
aaagaaaagtggcca

SEQ ID NO: 1677739 - DNA, 15 bp, Homo sapiens
aagaaaagtggccat

SEQ ID NO: 1677740 - DNA, 15 bp, Homo sapiens
agaaaagtggccatc

SEQ ID NO: 1677741 - DNA, 15 bp, Homo sapiens
gaaaagtggccatct

SEQ ID NO: 1677742 - DNA, 15 bp, Homo sapiens
aaaagtggccatctg

SEQ ID NO: 1677743 - DNA, 15 bp, Homo sapiens
aagtggccatctgag

SEQ ID NO: 1677744 - DNA, 15 bp, Homo sapiens
agtggccatctgagg

SEQ ID NO: 1677745 - DNA, 15 bp, Homo sapiens
gtggccatctgagga

SEQ ID NO: 1677746 - DNA, 15 bp, Homo sapiens
tggccatctgaggaa

SEQ ID NO: 1677747 - DNA, 15 bp, Homo sapiens
ggccatctgaggaag

SEQ ID NO: 1677748 - DNA, 15 bp, Homo sapiens
gccatctgaggaagc

SEQ ID NO: 1677749 - DNA, 15 bp, Homo sapiens
ccatctgaggaagcc

SEQ ID NO: 1677750 - DNA, 15 bp, Homo sapiens
catctgaggaagcca

SEQ ID NO: 1677751 - DNA, 15 bp, Homo sapiens
atctgaggaagccac

SEQ ID NO: 1677752 - DNA, 15 bp, Homo sapiens
tctgaggaagccaca

SEQ ID NO: 1677753 - DNA, 15 bp, Homo sapiens
ctgaggaagccacag

SEQ ID NO: 1677754 - DNA, 15 bp, Homo sapiens
tgaggaagccacagc

SEQ ID NO: 1677755 - DNA, 15 bp, Homo sapiens
gaggaagccacagct

SEQ ID NO: 1677756 - DNA, 15 bp, Homo sapiens
aggaagccacagctg

SEQ ID NO: 1677757 - DNA, 15 bp, Homo sapiens
ggaagccacagctgg

SEQ ID NO: 1677758 - DNA, 15 bp, Homo sapiens
gaagccacagctggt

SEQ ID NO: 1677759 - DNA, 15 bp, Homo sapiens
aagccacagctggtg

SEQ ID NO: 1677760 - DNA, 15 bp, Homo sapiens
agccacagctggtga

SEQ ID NO: 1677761 - DNA, 15 bp, Homo sapiens
gccacagctggtgaa

SEQ ID NO: 1677762 - DNA, 15 bp, Homo sapiens
ccacagctggtgaaa

SEQ ID NO: 1677763 - DNA, 15 bp, Homo sapiens
cacagctggtgaaac

SEQ ID NO: 1677764 - DNA, 15 bp, Homo sapiens
acagctggtgaaact

SEQ ID NO: 1677765 - DNA, 15 bp, Homo sapiens
cagctggtgaaactg

SEQ ID NO: 1677766 - DNA, 15 bp, Homo sapiens
agctggtgaaactgt

SEQ ID NO: 1677767 - DNA, 15 bp, Homo sapiens
gctggtgaaactgta

SEQ ID NO: 1677768 - DNA, 15 bp, Homo sapiens
ctggtgaaactgtag

SEQ ID NO: 1677769 - DNA, 15 bp, Homo sapiens
tggtgaaactgtagg

SEQ ID NO: 1677770 - DNA, 15 bp, Homo sapiens
ggtgaaactgtaggg

SEQ ID NO: 1677771 - DNA, 15 bp, Homo sapiens
gtgaaactgtagggt

SEQ ID NO: 1677772 - DNA, 15 bp, Homo sapiens
tgaaactgtagggtc

SEQ ID NO: 1677773 - DNA, 15 bp, Homo sapiens
gaaactgtagggtca

SEQ ID NO: 1677774 - DNA, 15 bp, Homo sapiens
aaactgtagggtcac

SEQ ID NO: 1677775 - DNA, 15 bp, Homo sapiens
aactgtagggtcaca

SEQ ID NO: 1677776 - DNA, 15 bp, Homo sapiens
actgtagggtcacag

SEQ ID NO: 1677777 - DNA, 15 bp, Homo sapiens
ctgtagggtcacaga

SEQ ID NO: 1677778 - DNA, 15 bp, Homo sapiens
tgtagggtcacagag

SEQ ID NO: 1677779 - DNA, 15 bp, Homo sapiens
gtagggtcacagagt

SEQ ID NO: 1677780 - DNA, 15 bp, Homo sapiens
tagggtcacagagtg

SEQ ID NO: 1677781 - DNA, 15 bp, Homo sapiens
agggtcacagagtga

SEQ ID NO: 1677782 - DNA, 15 bp, Homo sapiens
gggtcacagagtgaa

SEQ ID NO: 1677783 - DNA, 15 bp, Homo sapiens
ggtcacagagtgaat

SEQ ID NO: 1677784 - DNA, 15 bp, Homo sapiens
gtcacagagtgaatt

SEQ ID NO: 1677785 - DNA, 15 bp, Homo sapiens
tcacagagtgaatta

SEQ ID NO: 1677786 - DNA, 15 bp, Homo sapiens
cacagagtgaattac

SEQ ID NO: 1677787 - DNA, 15 bp, Homo sapiens
acagagtgaattaca

SEQ ID NO: 1677788 - DNA, 15 bp, Homo sapiens
cagagtgaattacac

SEQ ID NO: 1677789 - DNA, 15 bp, Homo sapiens
agagtgaattacacc

SEQ ID NO: 1677790 - DNA, 15 bp, Homo sapiens
gagtgaattacacct

SEQ ID NO: 1677791 - DNA, 15 bp, Homo sapiens
agtgaattacacctc

SEQ ID NO: 1677792 - DNA, 15 bp, Homo sapiens
gtgaattacacctct

SEQ ID NO: 1677793 - DNA, 15 bp, Homo sapiens
tgaattacacctctg

SEQ ID NO: 1677794 - DNA, 15 bp, Homo sapiens
gaattacacctctgg

SEQ ID NO: 1677795 - DNA, 15 bp, Homo sapiens
aattacacctctggc

SEQ ID NO: 1677796 - DNA, 15 bp, Homo sapiens
attacacctctggct

SEQ ID NO: 1677797 - DNA, 15 bp, Homo sapiens
ttacacctctggctt

SEQ ID NO: 1677798 - DNA, 15 bp, Homo sapiens
tacacctctggctta

SEQ ID NO: 1677799 - DNA, 15 bp, Homo sapiens
acacctctggcttaa

SEQ ID NO: 1677800 - DNA, 15 bp, Homo sapiens
cacctctggcttaag

SEQ ID NO: 1677801 - DNA, 15 bp, Homo sapiens
acctctggcttaagt

SEQ ID NO: 1677802 - DNA, 15 bp, Homo sapiens
cctctggcttaagtc

SEQ ID NO: 1677803 - DNA, 15 bp, Homo sapiens
ctctggcttaagtca

SEQ ID NO: 1677804 - DNA, 15 bp, Homo sapiens
tctggcttaagtcag

SEQ ID NO: 1677805 - DNA, 15 bp, Homo sapiens
ctggcttaagtcagt

SEQ ID NO: 1677806 - DNA, 15 bp, Homo sapiens
tggcttaagtcagtg

SEQ ID NO: 1677807 - DNA, 15 bp, Homo sapiens
ggcttaagtcagtga

SEQ ID NO: 1677808 - DNA, 15 bp, Homo sapiens
gcttaagtcagtgaa

SEQ ID NO: 1677809 - DNA, 15 bp, Homo sapiens
cttaagtcagtgaaa

SEQ ID NO: 1677810 - DNA, 15 bp, Homo sapiens
ttaagtcagtgaaaa

SEQ ID NO: 1677811 - DNA, 15 bp, Homo sapiens
taagtcagtgaaaag

SEQ ID NO: 1677812 - DNA, 15 bp, Homo sapiens
aagtcagtgaaaagt

SEQ ID NO: 1677813 - DNA, 15 bp, Homo sapiens
agtcagtgaaaagtc

SEQ ID NO: 1677814 - DNA, 15 bp, Homo sapiens
gtcagtgaaaagtcc

SEQ ID NO: 1677815 - DNA, 15 bp, Homo sapiens
tcagtgaaaagtcct

SEQ ID NO: 1677816 - DNA, 15 bp, Homo sapiens
cagtgaaaagtccta

SEQ ID NO: 1677817 - DNA, 15 bp, Homo sapiens
agtgaaaagtcctag

SEQ ID NO: 1677818 - DNA, 15 bp, Homo sapiens
gtgaaaagtcctaga

SEQ ID NO: 1677819 - DNA, 15 bp, Homo sapiens
tgaaaagtcctagaa

SEQ ID NO: 1677820 - DNA, 15 bp, Homo sapiens
gaaaagtcctagaag

SEQ ID NO: 1677821 - DNA, 15 bp, Homo sapiens
aaaagtcctagaagt

SEQ ID NO: 1677822 - DNA, 15 bp, Homo sapiens
aaagtcctagaagtt

SEQ ID NO: 1677823 - DNA, 15 bp, Homo sapiens
aagtcctagaagttt

SEQ ID NO: 1677824 - DNA, 15 bp, Homo sapiens
agtcctagaagtttg

SEQ ID NO: 1677825 - DNA, 15 bp, Homo sapiens
gtcctagaagtttgt

SEQ ID NO: 1677826 - DNA, 15 bp, Homo sapiens
tcctagaagtttgtg

SEQ ID NO: 1677827 - DNA, 15 bp, Homo sapiens
cctagaagtttgtgg

SEQ ID NO: 1677828 - DNA, 15 bp, Homo sapiens
ctagaagtttgtggt

SEQ ID NO: 1677829 - DNA, 15 bp, Homo sapiens
tagaagtttgtggtc

SEQ ID NO: 1677830 - DNA, 15 bp, Homo sapiens
agaagtttgtggtcc

SEQ ID NO: 1677831 - DNA, 15 bp, Homo sapiens
gaagtttgtggtcct

SEQ ID NO: 1677832 - DNA, 15 bp, Homo sapiens
aagtttgtggtccta

SEQ ID NO: 1677833 - DNA, 15 bp, Homo sapiens
agtttgtggtcctag

SEQ ID NO: 1677834 - DNA, 15 bp, Homo sapiens
gtttgtggtcctaga

SEQ ID NO: 1677835 - DNA, 15 bp, Homo sapiens
tttgtggtcctagaa

SEQ ID NO: 1677836 - DNA, 15 bp, Homo sapiens
ttgtggtcctagaag

SEQ ID NO: 1677837 - DNA, 15 bp, Homo sapiens
tgtggtcctagaagt

SEQ ID NO: 1677838 - DNA, 15 bp, Homo sapiens
gtggtcctagaagtc

SEQ ID NO: 1677839 - DNA, 15 bp, Homo sapiens
tggtcctagaagtcc

SEQ ID NO: 1677840 - DNA, 15 bp, Homo sapiens
ggtcctagaagtcct

SEQ ID NO: 1677841 - DNA, 15 bp, Homo sapiens
gtcctagaagtccta

SEQ ID NO: 1677842 - DNA, 15 bp, Homo sapiens
tcctagaagtcctaa

SEQ ID NO: 1677843 - DNA, 15 bp, Homo sapiens
cctagaagtcctaaa

SEQ ID NO: 1677844 - DNA, 15 bp, Homo sapiens
ctagaagtcctaaaa

SEQ ID NO: 1677845 - DNA, 15 bp, Homo sapiens
tagaagtcctaaaag

SEQ ID NO: 1677846 - DNA, 15 bp, Homo sapiens
agaagtcctaaaagt

SEQ ID NO: 1677847 - DNA, 15 bp, Homo sapiens
gaagtcctaaaagtt

SEQ ID NO: 1677848 - DNA, 15 bp, Homo sapiens
aagtcctaaaagttt

SEQ ID NO: 1677849 - DNA, 15 bp, Homo sapiens
agtcctaaaagttta

SEQ ID NO: 1677850 - DNA, 15 bp, Homo sapiens
gtcctaaaagtttat

SEQ ID NO: 1677851 - DNA, 15 bp, Homo sapiens
tcctaaaagtttatg

SEQ ID NO: 1677852 - DNA, 15 bp, Homo sapiens
cctaaaagtttatgg

SEQ ID NO: 1677853 - DNA, 15 bp, Homo sapiens
ctaaaagtttatggg

SEQ ID NO: 1677854 - DNA, 15 bp, Homo sapiens
taaaagtttatggga

SEQ ID NO: 1677855 - DNA, 15 bp, Homo sapiens
aaaagtttatgggac

SEQ ID NO: 1677856 - DNA, 15 bp, Homo sapiens
aaagtttatgggact

SEQ ID NO: 1677857 - DNA, 15 bp, Homo sapiens
aagtttatgggactt

SEQ ID NO: 1677858 - DNA, 15 bp, Homo sapiens
agtttatgggacttt

SEQ ID NO: 1677859 - DNA, 15 bp, Homo sapiens
gtttatgggactttg

SEQ ID NO: 1677860 - DNA, 15 bp, Homo sapiens
tttatgggactttgt

SEQ ID NO: 1677861 - DNA, 15 bp, Homo sapiens
ttatgggactttgtt

SEQ ID NO: 1677862 - DNA, 15 bp, Homo sapiens
tatgggactttgttt

SEQ ID NO: 1677863 - DNA, 15 bp, Homo sapiens
atgggactttgtttt

SEQ ID NO: 1677864 - DNA, 15 bp, Homo sapiens
tgggactttgttttg

SEQ ID NO: 1677865 - DNA, 15 bp, Homo sapiens
gggactttgttttga

SEQ ID NO: 1677866 - DNA, 15 bp, Homo sapiens
ggactttgttttgag

SEQ ID NO: 1677867 - DNA, 15 bp, Homo sapiens
gactttgttttgagc

SEQ ID NO: 1677868 - DNA, 15 bp, Homo sapiens
actttgttttgagca

SEQ ID NO: 1677869 - DNA, 15 bp, Homo sapiens
ctttgttttgagcaa

SEQ ID NO: 1677870 - DNA, 15 bp, Homo sapiens
tttgttttgagcaag

SEQ ID NO: 1677871 - DNA, 15 bp, Homo sapiens
ttgttttgagcaagg

SEQ ID NO: 1677872 - DNA, 15 bp, Homo sapiens
tgttttgagcaagga

SEQ ID NO: 1677873 - DNA, 15 bp, Homo sapiens
gttttgagcaaggat

SEQ ID NO: 1677874 - DNA, 15 bp, Homo sapiens
ttttgagcaaggata

SEQ ID NO: 1677875 - DNA, 15 bp, Homo sapiens
tttgagcaaggataa

SEQ ID NO: 1677876 - DNA, 15 bp, Homo sapiens
ttgagcaaggataag

SEQ ID NO: 1677877 - DNA, 15 bp, Homo sapiens
tgagcaaggataaga

SEQ ID NO: 1677878 - DNA, 15 bp, Homo sapiens
gagcaaggataagaa

SEQ ID NO: 1677879 - DNA, 15 bp, Homo sapiens
agcaaggataagaaa

SEQ ID NO: 1677880 - DNA, 15 bp, Homo sapiens
gcaaggataagaaat

SEQ ID NO: 1677881 - DNA, 15 bp, Homo sapiens
caaggataagaaatt

SEQ ID NO: 1677882 - DNA, 15 bp, Homo sapiens
aaggataagaaattg

SEQ ID NO: 1677883 - DNA, 15 bp, Homo sapiens
aggataagaaattga

SEQ ID NO: 1677884 - DNA, 15 bp, Homo sapiens
ggataagaaattgat

SEQ ID NO: 1677885 - DNA, 15 bp, Homo sapiens
gataagaaattgatt

SEQ ID NO: 1677886 - DNA, 15 bp, Homo sapiens
ataagaaattgattt

SEQ ID NO: 1677887 - DNA, 15 bp, Homo sapiens
taagaaattgatttc

SEQ ID NO: 1677888 - DNA, 15 bp, Homo sapiens
aagaaattgatttca

SEQ ID NO: 1677889 - DNA, 15 bp, Homo sapiens
agaaattgatttcag

SEQ ID NO: 1677890 - DNA, 15 bp, Homo sapiens
gaaattgatttcagg

SEQ ID NO: 1677891 - DNA, 15 bp, Homo sapiens
aaattgatttcaggc

SEQ ID NO: 1677892 - DNA, 15 bp, Homo sapiens
aattgatttcaggct

SEQ ID NO: 1677893 - DNA, 15 bp, Homo sapiens
attgatttcaggctg

SEQ ID NO: 1677894 - DNA, 15 bp, Homo sapiens
ttgatttcaggctgg

SEQ ID NO: 1677895 - DNA, 15 bp, Homo sapiens
tgatttcaggctggg

SEQ ID NO: 1677896 - DNA, 15 bp, Homo sapiens
gatttcaggctgggc

SEQ ID NO: 1677897 - DNA, 15 bp, Homo sapiens
atttcaggctgggcg

SEQ ID NO: 1677898 - DNA, 15 bp, Homo sapiens
tttcaggctgggcgt

SEQ ID NO: 1677899 - DNA, 15 bp, Homo sapiens
ttcaggctgggcgtg

SEQ ID NO: 1677900 - DNA, 15 bp, Homo sapiens
tcaggctgggcgtgg

SEQ ID NO: 1677901 - DNA, 15 bp, Homo sapiens
caggctgggcgtggt

SEQ ID NO: 1677902 - DNA, 15 bp, Homo sapiens
aggctgggcgtggtg

SEQ ID NO: 1677903 - DNA, 15 bp, Homo sapiens
ggctgggcgtggtgg

SEQ ID NO: 1677904 - DNA, 15 bp, Homo sapiens
ctgggcgtggtggct

SEQ ID NO: 1677905 - DNA, 15 bp, Homo sapiens
tgggcgtggtggctc

SEQ ID NO: 1677906 - DNA, 15 bp, Homo sapiens
gctcacgcctgtaac

SEQ ID NO: 1677907 - DNA, 15 bp, Homo sapiens
ctcacgcctgtaacc

SEQ ID NO: 1677908 - DNA, 15 bp, Homo sapiens
tcacgcctgtaaccc

SEQ ID NO: 1677909 - DNA, 15 bp, Homo sapiens
cacgcctgtaaccct

SEQ ID NO: 1677910 - DNA, 15 bp, Homo sapiens
acgcctgtaacccta

SEQ ID NO: 1677911 - DNA, 15 bp, Homo sapiens
cgcctgtaaccctaa

SEQ ID NO: 1677912 - DNA, 15 bp, Homo sapiens
gcctgtaaccctaat

SEQ ID NO: 1677913 - DNA, 15 bp, Homo sapiens
cctgtaaccctaata

SEQ ID NO: 1677914 - DNA, 15 bp, Homo sapiens
ctgtaaccctaatac

SEQ ID NO: 1677915 - DNA, 15 bp, Homo sapiens
tgtaaccctaatact

SEQ ID NO: 1677916 - DNA, 15 bp, Homo sapiens
gtaaccctaatactt

SEQ ID NO: 1677917 - DNA, 15 bp, Homo sapiens
taaccctaatacttt

SEQ ID NO: 1677918 - DNA, 15 bp, Homo sapiens
aaccctaatactttg

SEQ ID NO: 1677919 - DNA, 15 bp, Homo sapiens
accctaatactttgg

SEQ ID NO: 1677920 - DNA, 15 bp, Homo sapiens
ccctaatactttggg

SEQ ID NO: 1677921 - DNA, 15 bp, Homo sapiens
cctaatactttggga

SEQ ID NO: 1677922 - DNA, 15 bp, Homo sapiens
taatactttgggaga

SEQ ID NO: 1677923 - DNA, 15 bp, Homo sapiens
aatactttgggagac

SEQ ID NO: 1677924 - DNA, 15 bp, Homo sapiens
atactttgggagaca

SEQ ID NO: 1677925 - DNA, 15 bp, Homo sapiens
tactttgggagacag

SEQ ID NO: 1677926 - DNA, 15 bp, Homo sapiens
actttgggagacaga

SEQ ID NO: 1677927 - DNA, 15 bp, Homo sapiens
ctttgggagacagag

SEQ ID NO: 1677928 - DNA, 15 bp, Homo sapiens
tttgggagacagagg

SEQ ID NO: 1677929 - DNA, 15 bp, Homo sapiens
ttgggagacagaggc

SEQ ID NO: 1677930 - DNA, 15 bp, Homo sapiens
tgggagacagaggca

SEQ ID NO: 1677931 - DNA, 15 bp, Homo sapiens
gggagacagaggcag

SEQ ID NO: 1677932 - DNA, 15 bp, Homo sapiens
ggagacagaggcagg

SEQ ID NO: 1677933 - DNA, 15 bp, Homo sapiens
gagacagaggcaggt

SEQ ID NO: 1677934 - DNA, 15 bp, Homo sapiens
agacagaggcaggtg

SEQ ID NO: 1677935 - DNA, 15 bp, Homo sapiens
gacagaggcaggtgg

SEQ ID NO: 1677936 - DNA, 15 bp, Homo sapiens
acagaggcaggtgga

SEQ ID NO: 1677937 - DNA, 15 bp, Homo sapiens
ggcaggtggatcact

SEQ ID NO: 1677938 - DNA, 15 bp, Homo sapiens
gcaggtggatcactt

SEQ ID NO: 1677939 - DNA, 15 bp, Homo sapiens
caggtggatcacttc

SEQ ID NO: 1677940 - DNA, 15 bp, Homo sapiens
aggtggatcacttca

SEQ ID NO: 1677941 - DNA, 15 bp, Homo sapiens
ggtggatcacttcag

SEQ ID NO: 1677942 - DNA, 15 bp, Homo sapiens
gtggatcacttcagg

SEQ ID NO: 1677943 - DNA, 15 bp, Homo sapiens
tggatcacttcaggt

SEQ ID NO: 1677944 - DNA, 15 bp, Homo sapiens
ggatcacttcaggtc

SEQ ID NO: 1677945 - DNA, 15 bp, Homo sapiens
gatcacttcaggtca

SEQ ID NO: 1677946 - DNA, 15 bp, Homo sapiens
atcacttcaggtcag

SEQ ID NO: 1677947 - DNA, 15 bp, Homo sapiens
tcacttcaggtcagg

SEQ ID NO: 1677948 - DNA, 15 bp, Homo sapiens
cacttcaggtcagga

SEQ ID NO: 1677949 - DNA, 15 bp, Homo sapiens
acttcaggtcaggag

SEQ ID NO: 1677950 - DNA, 15 bp, Homo sapiens
cttcaggtcaggagt

SEQ ID NO: 1677951 - DNA, 15 bp, Homo sapiens
ttcaggtcaggagtt

SEQ ID NO: 1677952 - DNA, 15 bp, Homo sapiens
tcaggtcaggagttc

SEQ ID NO: 1677953 - DNA, 15 bp, Homo sapiens
caggtcaggagttcc

SEQ ID NO: 1677954 - DNA, 15 bp, Homo sapiens
tcaggagttccagag

SEQ ID NO: 1677955 - DNA, 15 bp, Homo sapiens
caggagttccagagc

SEQ ID NO: 1677956 - DNA, 15 bp, Homo sapiens
aggagttccagagca

SEQ ID NO: 1677957 - DNA, 15 bp, Homo sapiens
gagttccagagcagt

SEQ ID NO: 1677958 - DNA, 15 bp, Homo sapiens
agttccagagcagtc

SEQ ID NO: 1677959 - DNA, 15 bp, Homo sapiens
gttccagagcagtct

SEQ ID NO: 1677960 - DNA, 15 bp, Homo sapiens
ttccagagcagtctg

SEQ ID NO: 1677961 - DNA, 15 bp, Homo sapiens
tccagagcagtctgg

SEQ ID NO: 1677962 - DNA, 15 bp, Homo sapiens
ccagagcagtctggc

SEQ ID NO: 1677963 - DNA, 15 bp, Homo sapiens
cagagcagtctggcc

SEQ ID NO: 1677964 - DNA, 15 bp, Homo sapiens
agagcagtctggcca

SEQ ID NO: 1677965 - DNA, 15 bp, Homo sapiens
gagcagtctggccaa

SEQ ID NO: 1677966 - DNA, 15 bp, Homo sapiens
agcagtctggccaac

SEQ ID NO: 1677967 - DNA, 15 bp, Homo sapiens
gcagtctggccaaca

SEQ ID NO: 1677968 - DNA, 15 bp, Homo sapiens
tctggccaacatggc

SEQ ID NO: 1677969 - DNA, 15 bp, Homo sapiens
acatggcgaaaccct

SEQ ID NO: 1677970 - DNA, 15 bp, Homo sapiens
catggcgaaaccctg

SEQ ID NO: 1677971 - DNA, 15 bp, Homo sapiens
atggcgaaaccctgc

SEQ ID NO: 1677972 - DNA, 15 bp, Homo sapiens
tggcgaaaccctgcc

SEQ ID NO: 1677973 - DNA, 15 bp, Homo sapiens
ggcgaaaccctgcct

SEQ ID NO: 1677974 - DNA, 15 bp, Homo sapiens
gcgaaaccctgcctc

SEQ ID NO: 1677975 - DNA, 15 bp, Homo sapiens
cgaaaccctgcctct

SEQ ID NO: 1677976 - DNA, 15 bp, Homo sapiens
gaaaccctgcctctc

SEQ ID NO: 1677977 - DNA, 15 bp, Homo sapiens
aaaccctgcctctcc

SEQ ID NO: 1677978 - DNA, 15 bp, Homo sapiens
aaccctgcctctcct

SEQ ID NO: 1677979 - DNA, 15 bp, Homo sapiens
accctgcctctccta

SEQ ID NO: 1677980 - DNA, 15 bp, Homo sapiens
ccctgcctctcctaa

SEQ ID NO: 1677981 - DNA, 15 bp, Homo sapiens
cctgcctctcctaaa

SEQ ID NO: 1677982 - DNA, 15 bp, Homo sapiens
ctgcctctcctaaaa

SEQ ID NO: 1677983 - DNA, 15 bp, Homo sapiens
tgcctctcctaaaaa

SEQ ID NO: 1677984 - DNA, 15 bp, Homo sapiens
gcctctcctaaaaat

SEQ ID NO: 1677985 - DNA, 15 bp, Homo sapiens
cctctcctaaaaata

SEQ ID NO: 1677986 - DNA, 15 bp, Homo sapiens
ctctcctaaaaatac

SEQ ID NO: 1677987 - DNA, 15 bp, Homo sapiens
tctcctaaaaataca

SEQ ID NO: 1677988 - DNA, 15 bp, Homo sapiens
ctcctaaaaatacaa

SEQ ID NO: 1677989 - DNA, 15 bp, Homo sapiens
tcctaaaaatacaaa

SEQ ID NO: 1677990 - DNA, 15 bp, Homo sapiens
cctaaaaatacaaaa

SEQ ID NO: 1677991 - DNA, 15 bp, Homo sapiens
aaattagccaggtgc

SEQ ID NO: 1677992 - DNA, 15 bp, Homo sapiens
aattagccaggtgcg

SEQ ID NO: 1677993 - DNA, 15 bp, Homo sapiens
attagccaggtgcgg

SEQ ID NO: 1677994 - DNA, 15 bp, Homo sapiens
ttagccaggtgcggt

SEQ ID NO: 1677995 - DNA, 15 bp, Homo sapiens
tagccaggtgcggtg

SEQ ID NO: 1677996 - DNA, 15 bp, Homo sapiens
ccaggtgcggtggca

SEQ ID NO: 1677997 - DNA, 15 bp, Homo sapiens
caggtgcggtggcac

SEQ ID NO: 1677998 - DNA, 15 bp, Homo sapiens
aggtgcggtggcaca

SEQ ID NO: 1677999 - DNA, 15 bp, Homo sapiens
ggtgcggtggcacat

SEQ ID NO: 1678000 - DNA, 15 bp, Homo sapiens
gtgcggtggcacatg

SEQ ID NO: 1678001 - DNA, 15 bp, Homo sapiens
tgcggtggcacatgc

SEQ ID NO: 1678002 - DNA, 15 bp, Homo sapiens
gcggtggcacatgcc

SEQ ID NO: 1678003 - DNA, 15 bp, Homo sapiens
cggtggcacatgcct

SEQ ID NO: 1678004 - DNA, 15 bp, Homo sapiens
gtggcacatgcctgt

SEQ ID NO: 1678005 - DNA, 15 bp, Homo sapiens
tggcacatgcctgta

SEQ ID NO: 1678006 - DNA, 15 bp, Homo sapiens
ggcacatgcctgtag

SEQ ID NO: 1678007 - DNA, 15 bp, Homo sapiens
gcacatgcctgtagt

SEQ ID NO: 1678008 - DNA, 15 bp, Homo sapiens
cacatgcctgtagtc

SEQ ID NO: 1678009 - DNA, 15 bp, Homo sapiens
acatgcctgtagtcc

SEQ ID NO: 1678010 - DNA, 15 bp, Homo sapiens
atgcctgtagtcccg

SEQ ID NO: 1678011 - DNA, 15 bp, Homo sapiens
tgcctgtagtcccgg

SEQ ID NO: 1678012 - DNA, 15 bp, Homo sapiens
cggctactcaggaga

SEQ ID NO: 1678013 - DNA, 15 bp, Homo sapiens
ggctactcaggagac

SEQ ID NO: 1678014 - DNA, 15 bp, Homo sapiens
ctcaggagactgagc

SEQ ID NO: 1678015 - DNA, 15 bp, Homo sapiens
tcaggagactgagca

SEQ ID NO: 1678016 - DNA, 15 bp, Homo sapiens
caggagactgagcaa

SEQ ID NO: 1678017 - DNA, 15 bp, Homo sapiens
aggagactgagcaag

SEQ ID NO: 1678018 - DNA, 15 bp, Homo sapiens
ggagactgagcaagg

SEQ ID NO: 1678019 - DNA, 15 bp, Homo sapiens
gagactgagcaagga

SEQ ID NO: 1678020 - DNA, 15 bp, Homo sapiens
agactgagcaaggag

SEQ ID NO: 1678021 - DNA, 15 bp, Homo sapiens
gactgagcaaggaga

SEQ ID NO: 1678022 - DNA, 15 bp, Homo sapiens
actgagcaaggagaa

SEQ ID NO: 1678023 - DNA, 15 bp, Homo sapiens
ctgagcaaggagaat

SEQ ID NO: 1678024 - DNA, 15 bp, Homo sapiens
tgagcaaggagaatc

SEQ ID NO: 1678025 - DNA, 15 bp, Homo sapiens
gagcaaggagaatcc

SEQ ID NO: 1678026 - DNA, 15 bp, Homo sapiens
agcaaggagaatccc

SEQ ID NO: 1678027 - DNA, 15 bp, Homo sapiens
gcaaggagaatccct

SEQ ID NO: 1678028 - DNA, 15 bp, Homo sapiens
caaggagaatccctt

SEQ ID NO: 1678029 - DNA, 15 bp, Homo sapiens
aaggagaatcccttg

SEQ ID NO: 1678030 - DNA, 15 bp, Homo sapiens
agaatcccttgaacc

SEQ ID NO: 1678031 - DNA, 15 bp, Homo sapiens
gaatcccttgaaccc

SEQ ID NO: 1678032 - DNA, 15 bp, Homo sapiens
aatcccttgaaccca

SEQ ID NO: 1678033 - DNA, 15 bp, Homo sapiens
atcccttgaacccag

SEQ ID NO: 1678034 - DNA, 15 bp, Homo sapiens
tcccttgaacccagg

SEQ ID NO: 1678035 - DNA, 15 bp, Homo sapiens
cccttgaacccagga

SEQ ID NO: 1678036 - DNA, 15 bp, Homo sapiens
ccttgaacccaggag

SEQ ID NO: 1678037 - DNA, 15 bp, Homo sapiens
aggaggtggaggtct

SEQ ID NO: 1678038 - DNA, 15 bp, Homo sapiens
ggaggtggaggtctc

SEQ ID NO: 1678039 - DNA, 15 bp, Homo sapiens
gaggtggaggtctca

SEQ ID NO: 1678040 - DNA, 15 bp, Homo sapiens
aggtggaggtctcag

SEQ ID NO: 1678041 - DNA, 15 bp, Homo sapiens
ggtggaggtctcagt

SEQ ID NO: 1678042 - DNA, 15 bp, Homo sapiens
gtggaggtctcagtg

SEQ ID NO: 1678043 - DNA, 15 bp, Homo sapiens
tggaggtctcagtga

SEQ ID NO: 1678044 - DNA, 15 bp, Homo sapiens
ggaggtctcagtgag

SEQ ID NO: 1678045 - DNA, 15 bp, Homo sapiens
gaggtctcagtgagc

SEQ ID NO: 1678046 - DNA, 15 bp, Homo sapiens
aggtctcagtgagct

SEQ ID NO: 1678047 - DNA, 15 bp, Homo sapiens
ggtctcagtgagctg

SEQ ID NO: 1678048 - DNA, 15 bp, Homo sapiens
gtctcagtgagctga

SEQ ID NO: 1678049 - DNA, 15 bp, Homo sapiens
tctcagtgagctgat

SEQ ID NO: 1678050 - DNA, 15 bp, Homo sapiens
ctcagtgagctgata

SEQ ID NO: 1678051 - DNA, 15 bp, Homo sapiens
tcagtgagctgatat

SEQ ID NO: 1678052 - DNA, 15 bp, Homo sapiens
cagtgagctgatatc

SEQ ID NO: 1678053 - DNA, 15 bp, Homo sapiens
agtgagctgatatca

SEQ ID NO: 1678054 - DNA, 15 bp, Homo sapiens
gtgagctgatatcat

SEQ ID NO: 1678055 - DNA, 15 bp, Homo sapiens
tgagctgatatcata

SEQ ID NO: 1678056 - DNA, 15 bp, Homo sapiens
gagctgatatcatat

SEQ ID NO: 1678057 - DNA, 15 bp, Homo sapiens
agctgatatcatatc

SEQ ID NO: 1678058 - DNA, 15 bp, Homo sapiens
gctgatatcatatca

SEQ ID NO: 1678059 - DNA, 15 bp, Homo sapiens
ctgatatcatatcac

SEQ ID NO: 1678060 - DNA, 15 bp, Homo sapiens
tgatatcatatcact

SEQ ID NO: 1678061 - DNA, 15 bp, Homo sapiens
gatatcatatcactg

SEQ ID NO: 1678062 - DNA, 15 bp, Homo sapiens
atatcatatcactgc

SEQ ID NO: 1678063 - DNA, 15 bp, Homo sapiens
tatcatatcactgca

SEQ ID NO: 1678064 - DNA, 15 bp, Homo sapiens
atcatatcactgcac

SEQ ID NO: 1678065 - DNA, 15 bp, Homo sapiens
tcatatcactgcact

SEQ ID NO: 1678066 - DNA, 15 bp, Homo sapiens
catatcactgcactc

SEQ ID NO: 1678067 - DNA, 15 bp, Homo sapiens
atatcactgcactct

SEQ ID NO: 1678068 - DNA, 15 bp, Homo sapiens
tatcactgcactcta

SEQ ID NO: 1678069 - DNA, 15 bp, Homo sapiens
atcactgcactctag

SEQ ID NO: 1678070 - DNA, 15 bp, Homo sapiens
tctgtctaaaaaaat

SEQ ID NO: 1678071 - DNA, 15 bp, Homo sapiens
ctgtctaaaaaaata

SEQ ID NO: 1678072 - DNA, 15 bp, Homo sapiens
tgtctaaaaaaataa

SEQ ID NO: 1678073 - DNA, 15 bp, Homo sapiens
gtctaaaaaaataaa

SEQ ID NO: 1678074 - DNA, 15 bp, Homo sapiens
ataaataaaaaagaa

SEQ ID NO: 1678075 - DNA, 15 bp, Homo sapiens
taaataaaaaagaaa

SEQ ID NO: 1678076 - DNA, 15 bp, Homo sapiens
aaataaaaaagaaat

SEQ ID NO: 1678077 - DNA, 15 bp, Homo sapiens
aataaaaaagaaatt

SEQ ID NO: 1678078 - DNA, 15 bp, Homo sapiens
ataaaaaagaaattg

SEQ ID NO: 1678079 - DNA, 15 bp, Homo sapiens
taaaaaagaaattga

SEQ ID NO: 1678080 - DNA, 15 bp, Homo sapiens
aaaaaagaaattgat

SEQ ID NO: 1678081 - DNA, 15 bp, Homo sapiens
aaaaagaaattgatt

SEQ ID NO: 1678082 - DNA, 15 bp, Homo sapiens
aaaagaaattgattt

SEQ ID NO: 1678083 - DNA, 15 bp, Homo sapiens
aaagaaattgatttc

SEQ ID NO: 1678084 - DNA, 15 bp, Homo sapiens
agaaattgatttcat

SEQ ID NO: 1678085 - DNA, 15 bp, Homo sapiens
gaaattgatttcatt

SEQ ID NO: 1678086 - DNA, 15 bp, Homo sapiens
aaattgatttcattc

SEQ ID NO: 1678087 - DNA, 15 bp, Homo sapiens
aattgatttcattct

SEQ ID NO: 1678088 - DNA, 15 bp, Homo sapiens
attgatttcattctt

SEQ ID NO: 1678089 - DNA, 15 bp, Homo sapiens
ttgatttcattcttc

SEQ ID NO: 1678090 - DNA, 15 bp, Homo sapiens
tgatttcattcttct

SEQ ID NO: 1678091 - DNA, 15 bp, Homo sapiens
gatttcattcttctg

SEQ ID NO: 1678092 - DNA, 15 bp, Homo sapiens
atttcattcttctga

SEQ ID NO: 1678093 - DNA, 15 bp, Homo sapiens
tttcattcttctgag

SEQ ID NO: 1678094 - DNA, 15 bp, Homo sapiens
ttcattcttctgaga

SEQ ID NO: 1678095 - DNA, 15 bp, Homo sapiens
tcattcttctgagaa

SEQ ID NO: 1678096 - DNA, 15 bp, Homo sapiens
cattcttctgagaac

SEQ ID NO: 1678097 - DNA, 15 bp, Homo sapiens
attcttctgagaact

SEQ ID NO: 1678098 - DNA, 15 bp, Homo sapiens
ttcttctgagaactg

SEQ ID NO: 1678099 - DNA, 15 bp, Homo sapiens
tcttctgagaactgc

SEQ ID NO: 1678100 - DNA, 15 bp, Homo sapiens
cttctgagaactgca

SEQ ID NO: 1678101 - DNA, 15 bp, Homo sapiens
ttctgagaactgcaa

SEQ ID NO: 1678102 - DNA, 15 bp, Homo sapiens
tctgagaactgcaac

SEQ ID NO: 1678103 - DNA, 15 bp, Homo sapiens
ctgagaactgcaaca

SEQ ID NO: 1678104 - DNA, 15 bp, Homo sapiens
tgagaactgcaacaa

SEQ ID NO: 1678105 - DNA, 15 bp, Homo sapiens
gagaactgcaacaac

SEQ ID NO: 1678106 - DNA, 15 bp, Homo sapiens
agaactgcaacaact

SEQ ID NO: 1678107 - DNA, 15 bp, Homo sapiens
gaactgcaacaacta

SEQ ID NO: 1678108 - DNA, 15 bp, Homo sapiens
aactgcaacaactac

SEQ ID NO: 1678109 - DNA, 15 bp, Homo sapiens
actgcaacaactacc

SEQ ID NO: 1678110 - DNA, 15 bp, Homo sapiens
ctgcaacaactacct

SEQ ID NO: 1678111 - DNA, 15 bp, Homo sapiens
tgcaacaactacctt

SEQ ID NO: 1678112 - DNA, 15 bp, Homo sapiens
gcaacaactacctta

SEQ ID NO: 1678113 - DNA, 15 bp, Homo sapiens
caacaactaccttaa

SEQ ID NO: 1678114 - DNA, 15 bp, Homo sapiens
aacaactaccttaaa

SEQ ID NO: 1678115 - DNA, 15 bp, Homo sapiens
acaactaccttaaag

SEQ ID NO: 1678116 - DNA, 15 bp, Homo sapiens
caactaccttaaagt

SEQ ID NO: 1678117 - DNA, 15 bp, Homo sapiens
aactaccttaaagtg

SEQ ID NO: 1678118 - DNA, 15 bp, Homo sapiens
actaccttaaagtga

SEQ ID NO: 1678119 - DNA, 15 bp, Homo sapiens
ctaccttaaagtgat

SEQ ID NO: 1678120 - DNA, 15 bp, Homo sapiens
taccttaaagtgatt

SEQ ID NO: 1678121 - DNA, 15 bp, Homo sapiens
accttaaagtgattc

SEQ ID NO: 1678122 - DNA, 15 bp, Homo sapiens
ccttaaagtgattcc

SEQ ID NO: 1678123 - DNA, 15 bp, Homo sapiens
cttaaagtgattcca

SEQ ID NO: 1678124 - DNA, 15 bp, Homo sapiens
ttaaagtgattccat

SEQ ID NO: 1678125 - DNA, 15 bp, Homo sapiens
taaagtgattccatc

SEQ ID NO: 1678126 - DNA, 15 bp, Homo sapiens
aaagtgattccatcc

SEQ ID NO: 1678127 - DNA, 15 bp, Homo sapiens
aagtgattccatcca

SEQ ID NO: 1678128 - DNA, 15 bp, Homo sapiens
agtgattccatccaa

SEQ ID NO: 1678129 - DNA, 15 bp, Homo sapiens
gtgattccatccaaa

SEQ ID NO: 1678130 - DNA, 15 bp, Homo sapiens
tgattccatccaaaa

SEQ ID NO: 1678131 - DNA, 15 bp, Homo sapiens
gattccatccaaaac

SEQ ID NO: 1678132 - DNA, 15 bp, Homo sapiens
attccatccaaaacc

SEQ ID NO: 1678133 - DNA, 15 bp, Homo sapiens
ttccatccaaaaccc

SEQ ID NO: 1678134 - DNA, 15 bp, Homo sapiens
tccatccaaaaccca

SEQ ID NO: 1678135 - DNA, 15 bp, Homo sapiens
ccatccaaaacccac

SEQ ID NO: 1678136 - DNA, 15 bp, Homo sapiens
catccaaaacccaca

SEQ ID NO: 1678137 - DNA, 15 bp, Homo sapiens
atccaaaacccacat

SEQ ID NO: 1678138 - DNA, 15 bp, Homo sapiens
tccaaaacccacatg

SEQ ID NO: 1678139 - DNA, 15 bp, Homo sapiens
ccaaaacccacatgt

SEQ ID NO: 1678140 - DNA, 15 bp, Homo sapiens
caaaacccacatgtt

SEQ ID NO: 1678141 - DNA, 15 bp, Homo sapiens
aaaacccacatgttc

SEQ ID NO: 1678142 - DNA, 15 bp, Homo sapiens
aaacccacatgttca

SEQ ID NO: 1678143 - DNA, 15 bp, Homo sapiens
aacccacatgttcag

SEQ ID NO: 1678144 - DNA, 15 bp, Homo sapiens
acccacatgttcagc

SEQ ID NO: 1678145 - DNA, 15 bp, Homo sapiens
cccacatgttcagcc

SEQ ID NO: 1678146 - DNA, 15 bp, Homo sapiens
ccacatgttcagcca

SEQ ID NO: 1678147 - DNA, 15 bp, Homo sapiens
cacatgttcagccat

SEQ ID NO: 1678148 - DNA, 15 bp, Homo sapiens
acatgttcagccatg

SEQ ID NO: 1678149 - DNA, 15 bp, Homo sapiens
catgttcagccatgg

SEQ ID NO: 1678150 - DNA, 15 bp, Homo sapiens
atgttcagccatgga

SEQ ID NO: 1678151 - DNA, 15 bp, Homo sapiens
tgttcagccatggac

SEQ ID NO: 1678152 - DNA, 15 bp, Homo sapiens
gttcagccatggact

SEQ ID NO: 1678153 - DNA, 15 bp, Homo sapiens
ttcagccatggactt

SEQ ID NO: 1678154 - DNA, 15 bp, Homo sapiens
tcagccatggacttg

SEQ ID NO: 1678155 - DNA, 15 bp, Homo sapiens
cagccatggacttgc

SEQ ID NO: 1678156 - DNA, 15 bp, Homo sapiens
agccatggacttgct

SEQ ID NO: 1678157 - DNA, 15 bp, Homo sapiens
gccatggacttgctt

SEQ ID NO: 1678158 - DNA, 15 bp, Homo sapiens
ccatggacttgcttt

SEQ ID NO: 1678159 - DNA, 15 bp, Homo sapiens
catggacttgctttt

SEQ ID NO: 1678160 - DNA, 15 bp, Homo sapiens
atggacttgctttta

SEQ ID NO: 1678161 - DNA, 15 bp, Homo sapiens
tggacttgcttttat

SEQ ID NO: 1678162 - DNA, 15 bp, Homo sapiens
ggacttgcttttatg

SEQ ID NO: 1678163 - DNA, 15 bp, Homo sapiens
gacttgcttttatgg

SEQ ID NO: 1678164 - DNA, 15 bp, Homo sapiens
acttgcttttatgga

SEQ ID NO: 1678165 - DNA, 15 bp, Homo sapiens
cttgcttttatggag

SEQ ID NO: 1678166 - DNA, 15 bp, Homo sapiens
ttgcttttatggagc

SEQ ID NO: 1678167 - DNA, 15 bp, Homo sapiens
tgcttttatggagct

SEQ ID NO: 1678168 - DNA, 15 bp, Homo sapiens
gcttttatggagctg

SEQ ID NO: 1678169 - DNA, 15 bp, Homo sapiens
cttttatggagctgc

SEQ ID NO: 1678170 - DNA, 15 bp, Homo sapiens
ttttatggagctgcg

SEQ ID NO: 1678171 - DNA, 15 bp, Homo sapiens
tttatggagctgcgt

SEQ ID NO: 1678172 - DNA, 15 bp, Homo sapiens
ttatggagctgcgtg

SEQ ID NO: 1678173 - DNA, 15 bp, Homo sapiens
tatggagctgcgtgt

SEQ ID NO: 1678174 - DNA, 15 bp, Homo sapiens
atggagctgcgtgtg

SEQ ID NO: 1678175 - DNA, 15 bp, Homo sapiens
tggagctgcgtgtgg

SEQ ID NO: 1678176 - DNA, 15 bp, Homo sapiens
ggagctgcgtgtggg

SEQ ID NO: 1678177 - DNA, 15 bp, Homo sapiens
gagctgcgtgtgggt

SEQ ID NO: 1678178 - DNA, 15 bp, Homo sapiens
agctgcgtgtgggtg

SEQ ID NO: 1678179 - DNA, 15 bp, Homo sapiens
gctgcgtgtgggtga

SEQ ID NO: 1678180 - DNA, 15 bp, Homo sapiens
ctgcgtgtgggtgac

SEQ ID NO: 1678181 - DNA, 15 bp, Homo sapiens
tgcgtgtgggtgaca

SEQ ID NO: 1678182 - DNA, 15 bp, Homo sapiens
gcgtgtgggtgacac

SEQ ID NO: 1678183 - DNA, 15 bp, Homo sapiens
cgtgtgggtgacaca

SEQ ID NO: 1678184 - DNA, 15 bp, Homo sapiens
gtgtgggtgacacac

SEQ ID NO: 1678185 - DNA, 15 bp, Homo sapiens
tgtgggtgacacaca

SEQ ID NO: 1678186 - DNA, 15 bp, Homo sapiens
gtgggtgacacacaa

SEQ ID NO: 1678187 - DNA, 15 bp, Homo sapiens
tgggtgacacacaaa

SEQ ID NO: 1678188 - DNA, 15 bp, Homo sapiens
gggtgacacacaaaa

SEQ ID NO: 1678189 - DNA, 15 bp, Homo sapiens
ggtgacacacaaaat

SEQ ID NO: 1678190 - DNA, 15 bp, Homo sapiens
gtgacacacaaaatc

SEQ ID NO: 1678191 - DNA, 15 bp, Homo sapiens
tgacacacaaaatca

SEQ ID NO: 1678192 - DNA, 15 bp, Homo sapiens
gacacacaaaatcag

SEQ ID NO: 1678193 - DNA, 15 bp, Homo sapiens
acacacaaaatcagg

SEQ ID NO: 1678194 - DNA, 15 bp, Homo sapiens
cacacaaaatcagga

SEQ ID NO: 1678195 - DNA, 15 bp, Homo sapiens
acacaaaatcaggag

SEQ ID NO: 1678196 - DNA, 15 bp, Homo sapiens
cacaaaatcaggagc

SEQ ID NO: 1678197 - DNA, 15 bp, Homo sapiens
acaaaatcaggagct

SEQ ID NO: 1678198 - DNA, 15 bp, Homo sapiens
caaaatcaggagctc

SEQ ID NO: 1678199 - DNA, 15 bp, Homo sapiens
aaaatcaggagctct

SEQ ID NO: 1678200 - DNA, 15 bp, Homo sapiens
aaatcaggagctctg

SEQ ID NO: 1678201 - DNA, 15 bp, Homo sapiens
aatcaggagctctga

SEQ ID NO: 1678202 - DNA, 15 bp, Homo sapiens
atcaggagctctgag

SEQ ID NO: 1678203 - DNA, 15 bp, Homo sapiens
tcaggagctctgagt

SEQ ID NO: 1678204 - DNA, 15 bp, Homo sapiens
caggagctctgagtc

SEQ ID NO: 1678205 - DNA, 15 bp, Homo sapiens
aggagctctgagtcc

SEQ ID NO: 1678206 - DNA, 15 bp, Homo sapiens
ggagctctgagtcct

SEQ ID NO: 1678207 - DNA, 15 bp, Homo sapiens
gagctctgagtccta

SEQ ID NO: 1678208 - DNA, 15 bp, Homo sapiens
agctctgagtcctaa

SEQ ID NO: 1678209 - DNA, 15 bp, Homo sapiens
gctctgagtcctaat

SEQ ID NO: 1678210 - DNA, 15 bp, Homo sapiens
ctctgagtcctaatt

SEQ ID NO: 1678211 - DNA, 15 bp, Homo sapiens
tctgagtcctaattt

SEQ ID NO: 1678212 - DNA, 15 bp, Homo sapiens
ctgagtcctaattta

SEQ ID NO: 1678213 - DNA, 15 bp, Homo sapiens
tgagtcctaatttag

SEQ ID NO: 1678214 - DNA, 15 bp, Homo sapiens
gagtcctaatttaga

SEQ ID NO: 1678215 - DNA, 15 bp, Homo sapiens
agtcctaatttagac

SEQ ID NO: 1678216 - DNA, 15 bp, Homo sapiens
gtcctaatttagact

SEQ ID NO: 1678217 - DNA, 15 bp, Homo sapiens
tcctaatttagactt

SEQ ID NO: 1678218 - DNA, 15 bp, Homo sapiens
cctaatttagacttt

SEQ ID NO: 1678219 - DNA, 15 bp, Homo sapiens
ctaatttagactttt

SEQ ID NO: 1678220 - DNA, 15 bp, Homo sapiens
taatttagactttta

SEQ ID NO: 1678221 - DNA, 15 bp, Homo sapiens
aatttagacttttat

SEQ ID NO: 1678222 - DNA, 15 bp, Homo sapiens
atttagacttttatt

SEQ ID NO: 1678223 - DNA, 15 bp, Homo sapiens
tttagacttttattt

SEQ ID NO: 1678224 - DNA, 15 bp, Homo sapiens
ttagacttttattta

SEQ ID NO: 1678225 - DNA, 15 bp, Homo sapiens
tagacttttatttag

SEQ ID NO: 1678226 - DNA, 15 bp, Homo sapiens
agacttttatttaga

SEQ ID NO: 1678227 - DNA, 15 bp, Homo sapiens
gacttttatttagat

SEQ ID NO: 1678228 - DNA, 15 bp, Homo sapiens
acttttatttagatt

SEQ ID NO: 1678229 - DNA, 15 bp, Homo sapiens
cttttatttagattt

SEQ ID NO: 1678230 - DNA, 15 bp, Homo sapiens
ttttatttagatttc

SEQ ID NO: 1678231 - DNA, 15 bp, Homo sapiens
tttatttagatttcc

SEQ ID NO: 1678232 - DNA, 15 bp, Homo sapiens
ttatttagatttcct

SEQ ID NO: 1678233 - DNA, 15 bp, Homo sapiens
tatttagatttcctc

SEQ ID NO: 1678234 - DNA, 15 bp, Homo sapiens
atttagatttcctca

SEQ ID NO: 1678235 - DNA, 15 bp, Homo sapiens
tttagatttcctcaa

SEQ ID NO: 1678236 - DNA, 15 bp, Homo sapiens
ttagatttcctcaaa

SEQ ID NO: 1678237 - DNA, 15 bp, Homo sapiens
tagatttcctcaaat

SEQ ID NO: 1678238 - DNA, 15 bp, Homo sapiens
agatttcctcaaatt

SEQ ID NO: 1678239 - DNA, 15 bp, Homo sapiens
gatttcctcaaattt

SEQ ID NO: 1678240 - DNA, 15 bp, Homo sapiens
atttcctcaaatttg

SEQ ID NO: 1678241 - DNA, 15 bp, Homo sapiens
tttcctcaaatttgg

SEQ ID NO: 1678242 - DNA, 15 bp, Homo sapiens
ttcctcaaatttggg

SEQ ID NO: 1678243 - DNA, 15 bp, Homo sapiens
tcctcaaatttgggt

SEQ ID NO: 1678244 - DNA, 15 bp, Homo sapiens
cctcaaatttgggtt

SEQ ID NO: 1678245 - DNA, 15 bp, Homo sapiens
ctcaaatttgggttc

SEQ ID NO: 1678246 - DNA, 15 bp, Homo sapiens
tcaaatttgggttcc

SEQ ID NO: 1678247 - DNA, 15 bp, Homo sapiens
caaatttgggttcca

SEQ ID NO: 1678248 - DNA, 15 bp, Homo sapiens
aaatttgggttccag

SEQ ID NO: 1678249 - DNA, 15 bp, Homo sapiens
aatttgggttccagt

SEQ ID NO: 1678250 - DNA, 15 bp, Homo sapiens
atttgggttccagtt

SEQ ID NO: 1678251 - DNA, 15 bp, Homo sapiens
tttgggttccagtta

SEQ ID NO: 1678252 - DNA, 15 bp, Homo sapiens
ttgggttccagttaa

SEQ ID NO: 1678253 - DNA, 15 bp, Homo sapiens
tgggttccagttaag

SEQ ID NO: 1678254 - DNA, 15 bp, Homo sapiens
gggttccagttaagc

SEQ ID NO: 1678255 - DNA, 15 bp, Homo sapiens
ggttccagttaagcg

SEQ ID NO: 1678256 - DNA, 15 bp, Homo sapiens
gttccagttaagcgt

SEQ ID NO: 1678257 - DNA, 15 bp, Homo sapiens
ttccagttaagcgtg

SEQ ID NO: 1678258 - DNA, 15 bp, Homo sapiens
tccagttaagcgtgg

SEQ ID NO: 1678259 - DNA, 15 bp, Homo sapiens
ccagttaagcgtggg

SEQ ID NO: 1678260 - DNA, 15 bp, Homo sapiens
cagttaagcgtgggt

SEQ ID NO: 1678261 - DNA, 15 bp, Homo sapiens
agttaagcgtgggtc

SEQ ID NO: 1678262 - DNA, 15 bp, Homo sapiens
gttaagcgtgggtct

SEQ ID NO: 1678263 - DNA, 15 bp, Homo sapiens
ttaagcgtgggtctc

SEQ ID NO: 1678264 - DNA, 15 bp, Homo sapiens
taagcgtgggtctct

SEQ ID NO: 1678265 - DNA, 15 bp, Homo sapiens
aagcgtgggtctctt

SEQ ID NO: 1678266 - DNA, 15 bp, Homo sapiens
agcgtgggtctcttc

SEQ ID NO: 1678267 - DNA, 15 bp, Homo sapiens
gcgtgggtctcttct

SEQ ID NO: 1678268 - DNA, 15 bp, Homo sapiens
cgtgggtctcttctg

SEQ ID NO: 1678269 - DNA, 15 bp, Homo sapiens
gtgggtctcttctgt

SEQ ID NO: 1678270 - DNA, 15 bp, Homo sapiens
tgggtctcttctgtg

SEQ ID NO: 1678271 - DNA, 15 bp, Homo sapiens
gggtctcttctgtgc

SEQ ID NO: 1678272 - DNA, 15 bp, Homo sapiens
ggtctcttctgtgcc

SEQ ID NO: 1678273 - DNA, 15 bp, Homo sapiens
gtctcttctgtgccc

SEQ ID NO: 1678274 - DNA, 15 bp, Homo sapiens
tctcttctgtgcccc

SEQ ID NO: 1678275 - DNA, 15 bp, Homo sapiens
ctcttctgtgccccg

SEQ ID NO: 1678276 - DNA, 15 bp, Homo sapiens
tcttctgtgccccgc

SEQ ID NO: 1678277 - DNA, 15 bp, Homo sapiens
cttctgtgccccgct

SEQ ID NO: 1678278 - DNA, 15 bp, Homo sapiens
ttctgtgccccgctc

SEQ ID NO: 1678279 - DNA, 15 bp, Homo sapiens
tctgtgccccgctcc

SEQ ID NO: 1678280 - DNA, 15 bp, Homo sapiens
ctgtgccccgctccc

SEQ ID NO: 1678281 - DNA, 15 bp, Homo sapiens
tgtgccccgctcccc

SEQ ID NO: 1678282 - DNA, 15 bp, Homo sapiens
gtgccccgctcccct

SEQ ID NO: 1678283 - DNA, 15 bp, Homo sapiens
tgccccgctcccctt

SEQ ID NO: 1678284 - DNA, 15 bp, Homo sapiens
gccccgctccccttt

SEQ ID NO: 1678285 - DNA, 15 bp, Homo sapiens
ccccgctcccctttg

SEQ ID NO: 1678286 - DNA, 15 bp, Homo sapiens
cccgctcccctttgc

SEQ ID NO: 1678287 - DNA, 15 bp, Homo sapiens
ccgctcccctttgcc

SEQ ID NO: 1678288 - DNA, 15 bp, Homo sapiens
cgctcccctttgcca

SEQ ID NO: 1678289 - DNA, 15 bp, Homo sapiens
gctcccctttgccat

SEQ ID NO: 1678290 - DNA, 15 bp, Homo sapiens
ctcccctttgccatt

SEQ ID NO: 1678291 - DNA, 15 bp, Homo sapiens
tcccctttgccattt

SEQ ID NO: 1678292 - DNA, 15 bp, Homo sapiens
cccctttgccatttg

SEQ ID NO: 1678293 - DNA, 15 bp, Homo sapiens
ccctttgccatttgt

SEQ ID NO: 1678294 - DNA, 15 bp, Homo sapiens
cctttgccatttgtt

SEQ ID NO: 1678295 - DNA, 15 bp, Homo sapiens
ctttgccatttgttt

SEQ ID NO: 1678296 - DNA, 15 bp, Homo sapiens
tttgccatttgtttt

SEQ ID NO: 1678297 - DNA, 15 bp, Homo sapiens
ttgccatttgtttta

SEQ ID NO: 1678298 - DNA, 15 bp, Homo sapiens
tgccatttgttttat

SEQ ID NO: 1678299 - DNA, 15 bp, Homo sapiens
gccatttgttttatc

SEQ ID NO: 1678300 - DNA, 15 bp, Homo sapiens
ccatttgttttatct

SEQ ID NO: 1678301 - DNA, 15 bp, Homo sapiens
catttgttttatctg

SEQ ID NO: 1678302 - DNA, 15 bp, Homo sapiens
atttgttttatctgt

SEQ ID NO: 1678303 - DNA, 15 bp, Homo sapiens
tttgttttatctgtt

SEQ ID NO: 1678304 - DNA, 15 bp, Homo sapiens
ttgttttatctgttc

SEQ ID NO: 1678305 - DNA, 15 bp, Homo sapiens
tgttttatctgttct

SEQ ID NO: 1678306 - DNA, 15 bp, Homo sapiens
gttttatctgttctt

SEQ ID NO: 1678307 - DNA, 15 bp, Homo sapiens
ttttatctgttcttc

SEQ ID NO: 1678308 - DNA, 15 bp, Homo sapiens
tttatctgttcttca

SEQ ID NO: 1678309 - DNA, 15 bp, Homo sapiens
ttatctgttcttcag

SEQ ID NO: 1678310 - DNA, 15 bp, Homo sapiens
tatctgttcttcagt

SEQ ID NO: 1678311 - DNA, 15 bp, Homo sapiens
atctgttcttcagtc

SEQ ID NO: 1678312 - DNA, 15 bp, Homo sapiens
tctgttcttcagtct

SEQ ID NO: 1678313 - DNA, 15 bp, Homo sapiens
ctgttcttcagtctg

SEQ ID NO: 1678314 - DNA, 15 bp, Homo sapiens
tgttcttcagtctgt

SEQ ID NO: 1678315 - DNA, 15 bp, Homo sapiens
gttcttcagtctgtt

SEQ ID NO: 1678316 - DNA, 15 bp, Homo sapiens
ttcttcagtctgttc

SEQ ID NO: 1678317 - DNA, 15 bp, Homo sapiens
tcttcagtctgttct

SEQ ID NO: 1678318 - DNA, 15 bp, Homo sapiens
cttcagtctgttctg

SEQ ID NO: 1678319 - DNA, 15 bp, Homo sapiens
ttcagtctgttctgt

SEQ ID NO: 1678320 - DNA, 15 bp, Homo sapiens
tcagtctgttctgtc

SEQ ID NO: 1678321 - DNA, 15 bp, Homo sapiens
cagtctgttctgtca

SEQ ID NO: 1678322 - DNA, 15 bp, Homo sapiens
agtctgttctgtcag

SEQ ID NO: 1678323 - DNA, 15 bp, Homo sapiens
ggctggaatacagcg

SEQ ID NO: 1678324 - DNA, 15 bp, Homo sapiens
gctggaatacagcgg

SEQ ID NO: 1678325 - DNA, 15 bp, Homo sapiens
ctggaatacagcggc

SEQ ID NO: 1678326 - DNA, 15 bp, Homo sapiens
tggaatacagcggct

SEQ ID NO: 1678327 - DNA, 15 bp, Homo sapiens
ggaatacagcggctc

SEQ ID NO: 1678328 - DNA, 15 bp, Homo sapiens
gaatacagcggctcg

SEQ ID NO: 1678329 - DNA, 15 bp, Homo sapiens
aatacagcggctcga

SEQ ID NO: 1678330 - DNA, 15 bp, Homo sapiens
atacagcggctcgat

SEQ ID NO: 1678331 - DNA, 15 bp, Homo sapiens
tacagcggctcgatc

SEQ ID NO: 1678332 - DNA, 15 bp, Homo sapiens
acagcggctcgatca

SEQ ID NO: 1678333 - DNA, 15 bp, Homo sapiens
cagcggctcgatcat

SEQ ID NO: 1678334 - DNA, 15 bp, Homo sapiens
agcggctcgatcata

SEQ ID NO: 1678335 - DNA, 15 bp, Homo sapiens
gcggctcgatcatag

SEQ ID NO: 1678336 - DNA, 15 bp, Homo sapiens
cggctcgatcatagc

SEQ ID NO: 1678337 - DNA, 15 bp, Homo sapiens
ggctcgatcatagct

SEQ ID NO: 1678338 - DNA, 15 bp, Homo sapiens
gctcgatcatagctc

SEQ ID NO: 1678339 - DNA, 15 bp, Homo sapiens
ctcgatcatagctca

SEQ ID NO: 1678340 - DNA, 15 bp, Homo sapiens
tcgatcatagctcac

SEQ ID NO: 1678341 - DNA, 15 bp, Homo sapiens
cgatcatagctcact

SEQ ID NO: 1678342 - DNA, 15 bp, Homo sapiens
cactgcagccttgac

SEQ ID NO: 1678343 - DNA, 15 bp, Homo sapiens
actgcagccttgacc

SEQ ID NO: 1678344 - DNA, 15 bp, Homo sapiens
ctgcagccttgacct

SEQ ID NO: 1678345 - DNA, 15 bp, Homo sapiens
ttgacctcctgggcc

SEQ ID NO: 1678346 - DNA, 15 bp, Homo sapiens
tgacctcctgggccc

SEQ ID NO: 1678347 - DNA, 15 bp, Homo sapiens
gacctcctgggccca

SEQ ID NO: 1678348 - DNA, 15 bp, Homo sapiens
acctcctgggcccaa

SEQ ID NO: 1678349 - DNA, 15 bp, Homo sapiens
cctcctgggcccaag

SEQ ID NO: 1678350 - DNA, 15 bp, Homo sapiens
ctcctgggcccaagg

SEQ ID NO: 1678351 - DNA, 15 bp, Homo sapiens
tcctgggcccaaggg

SEQ ID NO: 1678352 - DNA, 15 bp, Homo sapiens
cctgggcccaagggg

SEQ ID NO: 1678353 - DNA, 15 bp, Homo sapiens
ctgggcccaaggggt

SEQ ID NO: 1678354 - DNA, 15 bp, Homo sapiens
tgggcccaaggggtc

SEQ ID NO: 1678355 - DNA, 15 bp, Homo sapiens
gggcccaaggggtcc

SEQ ID NO: 1678356 - DNA, 15 bp, Homo sapiens
ggcccaaggggtcct

SEQ ID NO: 1678357 - DNA, 15 bp, Homo sapiens
gcccaaggggtcctc

SEQ ID NO: 1678358 - DNA, 15 bp, Homo sapiens
cccaaggggtcctcc

SEQ ID NO: 1678359 - DNA, 15 bp, Homo sapiens
ccaaggggtcctccc

SEQ ID NO: 1678360 - DNA, 15 bp, Homo sapiens
caaggggtcctccca

SEQ ID NO: 1678361 - DNA, 15 bp, Homo sapiens
aaggggtcctcccac

SEQ ID NO: 1678362 - DNA, 15 bp, Homo sapiens
aggggtcctcccacc

SEQ ID NO: 1678363 - DNA, 15 bp, Homo sapiens
ggggtcctcccacct

SEQ ID NO: 1678364 - DNA, 15 bp, Homo sapiens
gggtcctcccacctc

SEQ ID NO: 1678365 - DNA, 15 bp, Homo sapiens
ggtcctcccacctca

SEQ ID NO: 1678366 - DNA, 15 bp, Homo sapiens
gtcctcccacctcag

SEQ ID NO: 1678367 - DNA, 15 bp, Homo sapiens
gactacaggcacacg

SEQ ID NO: 1678368 - DNA, 15 bp, Homo sapiens
actacaggcacacgc

SEQ ID NO: 1678369 - DNA, 15 bp, Homo sapiens
ctacaggcacacgcc

SEQ ID NO: 1678370 - DNA, 15 bp, Homo sapiens
tacaggcacacgcca

SEQ ID NO: 1678371 - DNA, 15 bp, Homo sapiens
acaggcacacgccac

SEQ ID NO: 1678372 - DNA, 15 bp, Homo sapiens
caggcacacgccacc

SEQ ID NO: 1678373 - DNA, 15 bp, Homo sapiens
aggcacacgccaccg

SEQ ID NO: 1678374 - DNA, 15 bp, Homo sapiens
ggcacacgccaccgt

SEQ ID NO: 1678375 - DNA, 15 bp, Homo sapiens
gcacacgccaccgtg

SEQ ID NO: 1678376 - DNA, 15 bp, Homo sapiens
cacacgccaccgtgc

SEQ ID NO: 1678377 - DNA, 15 bp, Homo sapiens
acacgccaccgtgcc

SEQ ID NO: 1678378 - DNA, 15 bp, Homo sapiens
cacgccaccgtgcct

SEQ ID NO: 1678379 - DNA, 15 bp, Homo sapiens
acgccaccgtgcctg

SEQ ID NO: 1678380 - DNA, 15 bp, Homo sapiens
cgccaccgtgcctgg

SEQ ID NO: 1678381 - DNA, 15 bp, Homo sapiens
ccgtgcctggctaat

SEQ ID NO: 1678382 - DNA, 15 bp, Homo sapiens
cgtgcctggctaatt

SEQ ID NO: 1678383 - DNA, 15 bp, Homo sapiens
gtgcctggctaattt

SEQ ID NO: 1678384 - DNA, 15 bp, Homo sapiens
tgcctggctaatttc

SEQ ID NO: 1678385 - DNA, 15 bp, Homo sapiens
gcctggctaatttct

SEQ ID NO: 1678386 - DNA, 15 bp, Homo sapiens
cctggctaatttctt

SEQ ID NO: 1678387 - DNA, 15 bp, Homo sapiens
ctggctaatttcttt

SEQ ID NO: 1678388 - DNA, 15 bp, Homo sapiens
tggctaatttctttt

SEQ ID NO: 1678389 - DNA, 15 bp, Homo sapiens
ggctaatttcttttc

SEQ ID NO: 1678390 - DNA, 15 bp, Homo sapiens
gctaatttcttttct

SEQ ID NO: 1678391 - DNA, 15 bp, Homo sapiens
ctaatttcttttcta

SEQ ID NO: 1678392 - DNA, 15 bp, Homo sapiens
taatttcttttctag

SEQ ID NO: 1678393 - DNA, 15 bp, Homo sapiens
aatttcttttctagt

SEQ ID NO: 1678394 - DNA, 15 bp, Homo sapiens
atttcttttctagtt

SEQ ID NO: 1678395 - DNA, 15 bp, Homo sapiens
tttcttttctagttg

SEQ ID NO: 1678396 - DNA, 15 bp, Homo sapiens
ttcttttctagttgt

SEQ ID NO: 1678397 - DNA, 15 bp, Homo sapiens
tcttttctagttgtt

SEQ ID NO: 1678398 - DNA, 15 bp, Homo sapiens
cttttctagttgttt

SEQ ID NO: 1678399 - DNA, 15 bp, Homo sapiens
ttttctagttgtttg

SEQ ID NO: 1678400 - DNA, 15 bp, Homo sapiens
tttctagttgtttgt

SEQ ID NO: 1678401 - DNA, 15 bp, Homo sapiens
ttctagttgtttgta

SEQ ID NO: 1678402 - DNA, 15 bp, Homo sapiens
tctagttgtttgtag

SEQ ID NO: 1678403 - DNA, 15 bp, Homo sapiens
ctagttgtttgtaga

SEQ ID NO: 1678404 - DNA, 15 bp, Homo sapiens
tagttgtttgtagag

SEQ ID NO: 1678405 - DNA, 15 bp, Homo sapiens
agttgtttgtagaga

SEQ ID NO: 1678406 - DNA, 15 bp, Homo sapiens
gttgtttgtagagac

SEQ ID NO: 1678407 - DNA, 15 bp, Homo sapiens
ttgtttgtagagaca

SEQ ID NO: 1678408 - DNA, 15 bp, Homo sapiens
tgtttgtagagacag

SEQ ID NO: 1678409 - DNA, 15 bp, Homo sapiens
gtttgtagagacagg

SEQ ID NO: 1678410 - DNA, 15 bp, Homo sapiens
gtctccctatgttgt

SEQ ID NO: 1678411 - DNA, 15 bp, Homo sapiens
tctccctatgttgta

SEQ ID NO: 1678412 - DNA, 15 bp, Homo sapiens
ctccctatgttgtac

SEQ ID NO: 1678413 - DNA, 15 bp, Homo sapiens
tccctatgttgtaca

SEQ ID NO: 1678414 - DNA, 15 bp, Homo sapiens
ccctatgttgtacag

SEQ ID NO: 1678415 - DNA, 15 bp, Homo sapiens
cctatgttgtacagg

SEQ ID NO: 1678416 - DNA, 15 bp, Homo sapiens
ctatgttgtacaggc

SEQ ID NO: 1678417 - DNA, 15 bp, Homo sapiens
tatgttgtacaggct

SEQ ID NO: 1678418 - DNA, 15 bp, Homo sapiens
atgttgtacaggctg

SEQ ID NO: 1678419 - DNA, 15 bp, Homo sapiens
tgttgtacaggctga

SEQ ID NO: 1678420 - DNA, 15 bp, Homo sapiens
gttgtacaggctgat

SEQ ID NO: 1678421 - DNA, 15 bp, Homo sapiens
ttgtacaggctgatc

SEQ ID NO: 1678422 - DNA, 15 bp, Homo sapiens
tgtacaggctgatct

SEQ ID NO: 1678423 - DNA, 15 bp, Homo sapiens
gtacaggctgatctg

SEQ ID NO: 1678424 - DNA, 15 bp, Homo sapiens
tacaggctgatctga

SEQ ID NO: 1678425 - DNA, 15 bp, Homo sapiens
acaggctgatctgaa

SEQ ID NO: 1678426 - DNA, 15 bp, Homo sapiens
caggctgatctgaaa

SEQ ID NO: 1678427 - DNA, 15 bp, Homo sapiens
aggctgatctgaaac

SEQ ID NO: 1678428 - DNA, 15 bp, Homo sapiens
ggctgatctgaaact

SEQ ID NO: 1678429 - DNA, 15 bp, Homo sapiens
gctgatctgaaactc

SEQ ID NO: 1678430 - DNA, 15 bp, Homo sapiens
ctgatctgaaactcc

SEQ ID NO: 1678431 - DNA, 15 bp, Homo sapiens
tgatctgaaactcct

SEQ ID NO: 1678432 - DNA, 15 bp, Homo sapiens
gatctgaaactcctg

SEQ ID NO: 1678433 - DNA, 15 bp, Homo sapiens
atctgaaactcctgg

SEQ ID NO: 1678434 - DNA, 15 bp, Homo sapiens
tctgaaactcctggg

SEQ ID NO: 1678435 - DNA, 15 bp, Homo sapiens
ctgaaactcctgggg

SEQ ID NO: 1678436 - DNA, 15 bp, Homo sapiens
tgaaactcctggggt

SEQ ID NO: 1678437 - DNA, 15 bp, Homo sapiens
gaaactcctggggtc

SEQ ID NO: 1678438 - DNA, 15 bp, Homo sapiens
aaactcctggggtca

SEQ ID NO: 1678439 - DNA, 15 bp, Homo sapiens
aactcctggggtcaa

SEQ ID NO: 1678440 - DNA, 15 bp, Homo sapiens
actcctggggtcaat

SEQ ID NO: 1678441 - DNA, 15 bp, Homo sapiens
ctcctggggtcaatc

SEQ ID NO: 1678442 - DNA, 15 bp, Homo sapiens
tcctggggtcaatca

SEQ ID NO: 1678443 - DNA, 15 bp, Homo sapiens
cctggggtcaatcaa

SEQ ID NO: 1678444 - DNA, 15 bp, Homo sapiens
ctggggtcaatcaat

SEQ ID NO: 1678445 - DNA, 15 bp, Homo sapiens
tggggtcaatcaatc

SEQ ID NO: 1678446 - DNA, 15 bp, Homo sapiens
ggggtcaatcaatcc

SEQ ID NO: 1678447 - DNA, 15 bp, Homo sapiens
gggtcaatcaatcct

SEQ ID NO: 1678448 - DNA, 15 bp, Homo sapiens
ggtcaatcaatcctc

SEQ ID NO: 1678449 - DNA, 15 bp, Homo sapiens
gtcaatcaatcctcc

SEQ ID NO: 1678450 - DNA, 15 bp, Homo sapiens
tcaatcaatcctcct

SEQ ID NO: 1678451 - DNA, 15 bp, Homo sapiens
caatcaatcctcctg

SEQ ID NO: 1678452 - DNA, 15 bp, Homo sapiens
aatcaatcctcctgg

SEQ ID NO: 1678453 - DNA, 15 bp, Homo sapiens
atcaatcctcctggc

SEQ ID NO: 1678454 - DNA, 15 bp, Homo sapiens
tcaatcctcctggct

SEQ ID NO: 1678455 - DNA, 15 bp, Homo sapiens
caatcctcctggctt

SEQ ID NO: 1678456 - DNA, 15 bp, Homo sapiens
aatcctcctggcttg

SEQ ID NO: 1678457 - DNA, 15 bp, Homo sapiens
atcctcctggcttgg

SEQ ID NO: 1678458 - DNA, 15 bp, Homo sapiens
tcctcctggcttggc

SEQ ID NO: 1678459 - DNA, 15 bp, Homo sapiens
cctcctggcttggcc

SEQ ID NO: 1678460 - DNA, 15 bp, Homo sapiens
ctcctggcttggcct

SEQ ID NO: 1678461 - DNA, 15 bp, Homo sapiens
tcctggcttggcctc

SEQ ID NO: 1678462 - DNA, 15 bp, Homo sapiens
cctggcttggcctcc

SEQ ID NO: 1678463 - DNA, 15 bp, Homo sapiens
ctggcttggcctccc

SEQ ID NO: 1678464 - DNA, 15 bp, Homo sapiens
tggcttggcctccca

SEQ ID NO: 1678465 - DNA, 15 bp, Homo sapiens
ggcttggcctcccaa

SEQ ID NO: 1678466 - DNA, 15 bp, Homo sapiens
gcttggcctcccaaa

SEQ ID NO: 1678467 - DNA, 15 bp, Homo sapiens
gagccaccatgcctt

SEQ ID NO: 1678468 - DNA, 15 bp, Homo sapiens
agccaccatgccttc

SEQ ID NO: 1678469 - DNA, 15 bp, Homo sapiens
gccaccatgccttca

SEQ ID NO: 1678470 - DNA, 15 bp, Homo sapiens
ccaccatgccttcat

SEQ ID NO: 1678471 - DNA, 15 bp, Homo sapiens
caccatgccttcatt

SEQ ID NO: 1678472 - DNA, 15 bp, Homo sapiens
accatgccttcattt

SEQ ID NO: 1678473 - DNA, 15 bp, Homo sapiens
ccatgccttcatttt

SEQ ID NO: 1678474 - DNA, 15 bp, Homo sapiens
catgccttcatttta

SEQ ID NO: 1678475 - DNA, 15 bp, Homo sapiens
atgccttcattttac

SEQ ID NO: 1678476 - DNA, 15 bp, Homo sapiens
tgccttcattttaca

SEQ ID NO: 1678477 - DNA, 15 bp, Homo sapiens
gccttcattttacag

SEQ ID NO: 1678478 - DNA, 15 bp, Homo sapiens
ccttcattttacaga

SEQ ID NO: 1678479 - DNA, 15 bp, Homo sapiens
cattttacagataag

SEQ ID NO: 1678480 - DNA, 15 bp, Homo sapiens
attttacagataaga

SEQ ID NO: 1678481 - DNA, 15 bp, Homo sapiens
tttacagataagaag

SEQ ID NO: 1678482 - DNA, 15 bp, Homo sapiens
ttacagataagaagt

SEQ ID NO: 1678483 - DNA, 15 bp, Homo sapiens
tacagataagaagtc

SEQ ID NO: 1678484 - DNA, 15 bp, Homo sapiens
acagataagaagtct

SEQ ID NO: 1678485 - DNA, 15 bp, Homo sapiens
cagataagaagtctg

SEQ ID NO: 1678486 - DNA, 15 bp, Homo sapiens
agataagaagtctga

SEQ ID NO: 1678487 - DNA, 15 bp, Homo sapiens
gataagaagtctgag

SEQ ID NO: 1678488 - DNA, 15 bp, Homo sapiens
ataagaagtctgaga

SEQ ID NO: 1678489 - DNA, 15 bp, Homo sapiens
taagaagtctgagaa

SEQ ID NO: 1678490 - DNA, 15 bp, Homo sapiens
aagaagtctgagaaa

SEQ ID NO: 1678491 - DNA, 15 bp, Homo sapiens
agaagtctgagaaaa

SEQ ID NO: 1678492 - DNA, 15 bp, Homo sapiens
gaagtctgagaaaac

SEQ ID NO: 1678493 - DNA, 15 bp, Homo sapiens
aagtctgagaaaact

SEQ ID NO: 1678494 - DNA, 15 bp, Homo sapiens
agtctgagaaaactc

SEQ ID NO: 1678495 - DNA, 15 bp, Homo sapiens
gtctgagaaaactca

SEQ ID NO: 1678496 - DNA, 15 bp, Homo sapiens
tctgagaaaactcag

SEQ ID NO: 1678497 - DNA, 15 bp, Homo sapiens
ctgagaaaactcaga

SEQ ID NO: 1678498 - DNA, 15 bp, Homo sapiens
tgagaaaactcagat

SEQ ID NO: 1678499 - DNA, 15 bp, Homo sapiens
gagaaaactcagatt

SEQ ID NO: 1678500 - DNA, 15 bp, Homo sapiens
agaaaactcagattt

SEQ ID NO: 1678501 - DNA, 15 bp, Homo sapiens
gaaaactcagattta

SEQ ID NO: 1678502 - DNA, 15 bp, Homo sapiens
aaaactcagatttag

SEQ ID NO: 1678503 - DNA, 15 bp, Homo sapiens
aaactcagatttagg

SEQ ID NO: 1678504 - DNA, 15 bp, Homo sapiens
aactcagatttaggc

SEQ ID NO: 1678505 - DNA, 15 bp, Homo sapiens
actcagatttaggca

SEQ ID NO: 1678506 - DNA, 15 bp, Homo sapiens
ctcagatttaggcag

SEQ ID NO: 1678507 - DNA, 15 bp, Homo sapiens
tcagatttaggcaga

SEQ ID NO: 1678508 - DNA, 15 bp, Homo sapiens
cagatttaggcagat

SEQ ID NO: 1678509 - DNA, 15 bp, Homo sapiens
agatttaggcagatt

SEQ ID NO: 1678510 - DNA, 15 bp, Homo sapiens
gatttaggcagattg

SEQ ID NO: 1678511 - DNA, 15 bp, Homo sapiens
atttaggcagattga

SEQ ID NO: 1678512 - DNA, 15 bp, Homo sapiens
tttaggcagattgag

SEQ ID NO: 1678513 - DNA, 15 bp, Homo sapiens
ttaggcagattgagt

SEQ ID NO: 1678514 - DNA, 15 bp, Homo sapiens
taggcagattgagtc

SEQ ID NO: 1678515 - DNA, 15 bp, Homo sapiens
aggcagattgagtca

SEQ ID NO: 1678516 - DNA, 15 bp, Homo sapiens
ggcagattgagtcac

SEQ ID NO: 1678517 - DNA, 15 bp, Homo sapiens
gcagattgagtcact

SEQ ID NO: 1678518 - DNA, 15 bp, Homo sapiens
cagattgagtcactt

SEQ ID NO: 1678519 - DNA, 15 bp, Homo sapiens
agattgagtcacttc

SEQ ID NO: 1678520 - DNA, 15 bp, Homo sapiens
gattgagtcacttcc

SEQ ID NO: 1678521 - DNA, 15 bp, Homo sapiens
attgagtcacttccc

SEQ ID NO: 1678522 - DNA, 15 bp, Homo sapiens
ttgagtcacttcccc

SEQ ID NO: 1678523 - DNA, 15 bp, Homo sapiens
tgagtcacttcccca

SEQ ID NO: 1678524 - DNA, 15 bp, Homo sapiens
gagtcacttccccaa

SEQ ID NO: 1678525 - DNA, 15 bp, Homo sapiens
agtcacttccccaaa

SEQ ID NO: 1678526 - DNA, 15 bp, Homo sapiens
gtcacttccccaaat

SEQ ID NO: 1678527 - DNA, 15 bp, Homo sapiens
tcacttccccaaatt

SEQ ID NO: 1678528 - DNA, 15 bp, Homo sapiens
cacttccccaaattt

SEQ ID NO: 1678529 - DNA, 15 bp, Homo sapiens
acttccccaaattta

SEQ ID NO: 1678530 - DNA, 15 bp, Homo sapiens
cttccccaaatttat

SEQ ID NO: 1678531 - DNA, 15 bp, Homo sapiens
ttccccaaatttatg

SEQ ID NO: 1678532 - DNA, 15 bp, Homo sapiens
tccccaaatttatgt

SEQ ID NO: 1678533 - DNA, 15 bp, Homo sapiens
ccccaaatttatgta

SEQ ID NO: 1678534 - DNA, 15 bp, Homo sapiens
cccaaatttatgtat

SEQ ID NO: 1678535 - DNA, 15 bp, Homo sapiens
ccaaatttatgtatc

SEQ ID NO: 1678536 - DNA, 15 bp, Homo sapiens
caaatttatgtatct

SEQ ID NO: 1678537 - DNA, 15 bp, Homo sapiens
aaatttatgtatctt

SEQ ID NO: 1678538 - DNA, 15 bp, Homo sapiens
aatttatgtatcttg

SEQ ID NO: 1678539 - DNA, 15 bp, Homo sapiens
atttatgtatcttgt

SEQ ID NO: 1678540 - DNA, 15 bp, Homo sapiens
tttatgtatcttgta

SEQ ID NO: 1678541 - DNA, 15 bp, Homo sapiens
ttatgtatcttgtaa

SEQ ID NO: 1678542 - DNA, 15 bp, Homo sapiens
tatgtatcttgtaag

SEQ ID NO: 1678543 - DNA, 15 bp, Homo sapiens
atgtatcttgtaaga

SEQ ID NO: 1678544 - DNA, 15 bp, Homo sapiens
tgtatcttgtaagaa

SEQ ID NO: 1678545 - DNA, 15 bp, Homo sapiens
gtatcttgtaagaat

SEQ ID NO: 1678546 - DNA, 15 bp, Homo sapiens
tatcttgtaagaatc

SEQ ID NO: 1678547 - DNA, 15 bp, Homo sapiens
atcttgtaagaatcc

SEQ ID NO: 1678548 - DNA, 15 bp, Homo sapiens
tcttgtaagaatcca

SEQ ID NO: 1678549 - DNA, 15 bp, Homo sapiens
cttgtaagaatccat

SEQ ID NO: 1678550 - DNA, 15 bp, Homo sapiens
ttgtaagaatccata

SEQ ID NO: 1678551 - DNA, 15 bp, Homo sapiens
tgtaagaatccatat

SEQ ID NO: 1678552 - DNA, 15 bp, Homo sapiens
gtaagaatccatatt

SEQ ID NO: 1678553 - DNA, 15 bp, Homo sapiens
taagaatccatattc

SEQ ID NO: 1678554 - DNA, 15 bp, Homo sapiens
aagaatccatattca

SEQ ID NO: 1678555 - DNA, 15 bp, Homo sapiens
agaatccatattcaa

SEQ ID NO: 1678556 - DNA, 15 bp, Homo sapiens
gaatccatattcaaa

SEQ ID NO: 1678557 - DNA, 15 bp, Homo sapiens
aatccatattcaaac

SEQ ID NO: 1678558 - DNA, 15 bp, Homo sapiens
atccatattcaaacc

SEQ ID NO: 1678559 - DNA, 15 bp, Homo sapiens
tccatattcaaacct

SEQ ID NO: 1678560 - DNA, 15 bp, Homo sapiens
ccatattcaaacctc

SEQ ID NO: 1678561 - DNA, 15 bp, Homo sapiens
catattcaaacctca

SEQ ID NO: 1678562 - DNA, 15 bp, Homo sapiens
atattcaaacctcag

SEQ ID NO: 1678563 - DNA, 15 bp, Homo sapiens
tattcaaacctcagt

SEQ ID NO: 1678564 - DNA, 15 bp, Homo sapiens
attcaaacctcagtc

SEQ ID NO: 1678565 - DNA, 15 bp, Homo sapiens
ttcaaacctcagtcc

SEQ ID NO: 1678566 - DNA, 15 bp, Homo sapiens
tcaaacctcagtccc

SEQ ID NO: 1678567 - DNA, 15 bp, Homo sapiens
caaacctcagtcccc

SEQ ID NO: 1678568 - DNA, 15 bp, Homo sapiens
aaacctcagtcccct

SEQ ID NO: 1678569 - DNA, 15 bp, Homo sapiens
aacctcagtccccta

SEQ ID NO: 1678570 - DNA, 15 bp, Homo sapiens
acctcagtcccctaa

SEQ ID NO: 1678571 - DNA, 15 bp, Homo sapiens
cctcagtcccctaac

SEQ ID NO: 1678572 - DNA, 15 bp, Homo sapiens
ctcagtcccctaact

SEQ ID NO: 1678573 - DNA, 15 bp, Homo sapiens
tcagtcccctaactc

SEQ ID NO: 1678574 - DNA, 15 bp, Homo sapiens
cagtcccctaactct

SEQ ID NO: 1678575 - DNA, 15 bp, Homo sapiens
agtcccctaactctt

SEQ ID NO: 1678576 - DNA, 15 bp, Homo sapiens
gtcccctaactctta

SEQ ID NO: 1678577 - DNA, 15 bp, Homo sapiens
tcccctaactcttag

SEQ ID NO: 1678578 - DNA, 15 bp, Homo sapiens
cccctaactcttagt

SEQ ID NO: 1678579 - DNA, 15 bp, Homo sapiens
ccctaactcttagtt

SEQ ID NO: 1678580 - DNA, 15 bp, Homo sapiens
cctaactcttagttc

SEQ ID NO: 1678581 - DNA, 15 bp, Homo sapiens
ctaactcttagttca

SEQ ID NO: 1678582 - DNA, 15 bp, Homo sapiens
taactcttagttcat

SEQ ID NO: 1678583 - DNA, 15 bp, Homo sapiens
aactcttagttcatt

SEQ ID NO: 1678584 - DNA, 15 bp, Homo sapiens
actcttagttcatta

SEQ ID NO: 1678585 - DNA, 15 bp, Homo sapiens
ctcttagttcattac

SEQ ID NO: 1678586 - DNA, 15 bp, Homo sapiens
tcttagttcattact

SEQ ID NO: 1678587 - DNA, 15 bp, Homo sapiens
cttagttcattactt

SEQ ID NO: 1678588 - DNA, 15 bp, Homo sapiens
ttagttcattacttt

SEQ ID NO: 1678589 - DNA, 15 bp, Homo sapiens
tagttcattactttt

SEQ ID NO: 1678590 - DNA, 15 bp, Homo sapiens
agttcattacttttt

SEQ ID NO: 1678591 - DNA, 15 bp, Homo sapiens
gttcattactttttc

SEQ ID NO: 1678592 - DNA, 15 bp, Homo sapiens
ttcattactttttct

SEQ ID NO: 1678593 - DNA, 15 bp, Homo sapiens
tcattactttttcta

SEQ ID NO: 1678594 - DNA, 15 bp, Homo sapiens
cattactttttctac

SEQ ID NO: 1678595 - DNA, 15 bp, Homo sapiens
attactttttctacc

SEQ ID NO: 1678596 - DNA, 15 bp, Homo sapiens
ttactttttctacca

SEQ ID NO: 1678597 - DNA, 15 bp, Homo sapiens
tactttttctaccac

SEQ ID NO: 1678598 - DNA, 15 bp, Homo sapiens
actttttctaccact

SEQ ID NO: 1678599 - DNA, 15 bp, Homo sapiens
ctttttctaccactt

SEQ ID NO: 1678600 - DNA, 15 bp, Homo sapiens
tttttctaccacttc

SEQ ID NO: 1678601 - DNA, 15 bp, Homo sapiens
ttttctaccacttct

SEQ ID NO: 1678602 - DNA, 15 bp, Homo sapiens
tttctaccacttctc

SEQ ID NO: 1678603 - DNA, 15 bp, Homo sapiens
ttctaccacttctca

SEQ ID NO: 1678604 - DNA, 15 bp, Homo sapiens
tctaccacttctcag

SEQ ID NO: 1678605 - DNA, 15 bp, Homo sapiens
ctaccacttctcagt

SEQ ID NO: 1678606 - DNA, 15 bp, Homo sapiens
tgaatgagaaactct

SEQ ID NO: 1678607 - DNA, 15 bp, Homo sapiens
gaatgagaaactctc

SEQ ID NO: 1678608 - DNA, 15 bp, Homo sapiens
aatgagaaactctca

SEQ ID NO: 1678609 - DNA, 15 bp, Homo sapiens
atgagaaactctcat

SEQ ID NO: 1678610 - DNA, 15 bp, Homo sapiens
tgagaaactctcatg

SEQ ID NO: 1678611 - DNA, 15 bp, Homo sapiens
gagaaactctcatga

SEQ ID NO: 1678612 - DNA, 15 bp, Homo sapiens
agaaactctcatgag

SEQ ID NO: 1678613 - DNA, 15 bp, Homo sapiens
gaaactctcatgagt

SEQ ID NO: 1678614 - DNA, 15 bp, Homo sapiens
aaactctcatgagtg

SEQ ID NO: 1678615 - DNA, 15 bp, Homo sapiens
aactctcatgagtga

SEQ ID NO: 1678616 - DNA, 15 bp, Homo sapiens
actctcatgagtgat

SEQ ID NO: 1678617 - DNA, 15 bp, Homo sapiens
ctctcatgagtgata

SEQ ID NO: 1678618 - DNA, 15 bp, Homo sapiens
tctcatgagtgataa

SEQ ID NO: 1678619 - DNA, 15 bp, Homo sapiens
ctcatgagtgataac

SEQ ID NO: 1678620 - DNA, 15 bp, Homo sapiens
tcatgagtgataaca

SEQ ID NO: 1678621 - DNA, 15 bp, Homo sapiens
catgagtgataacag

SEQ ID NO: 1678622 - DNA, 15 bp, Homo sapiens
atgagtgataacagg

SEQ ID NO: 1678623 - DNA, 15 bp, Homo sapiens
tgagtgataacagga

SEQ ID NO: 1678624 - DNA, 15 bp, Homo sapiens
gagtgataacaggaa

SEQ ID NO: 1678625 - DNA, 15 bp, Homo sapiens
agtgataacaggaaa

SEQ ID NO: 1678626 - DNA, 15 bp, Homo sapiens
gtgataacaggaaaa

SEQ ID NO: 1678627 - DNA, 15 bp, Homo sapiens
tgataacaggaaaaa

SEQ ID NO: 1678628 - DNA, 15 bp, Homo sapiens
gataacaggaaaaaa

SEQ ID NO: 1678629 - DNA, 15 bp, Homo sapiens
ataacaggaaaaaaa

SEQ ID NO: 1678630 - DNA, 15 bp, Homo sapiens
taacaggaaaaaaaa

SEQ ID NO: 1678631 - DNA, 15 bp, Homo sapiens
aacaggaaaaaaaaa

SEQ ID NO: 1678632 - DNA, 15 bp, Homo sapiens
acaggaaaaaaaaat

SEQ ID NO: 1678633 - DNA, 15 bp, Homo sapiens
caggaaaaaaaaatt

SEQ ID NO: 1678634 - DNA, 15 bp, Homo sapiens
aggaaaaaaaaatta

SEQ ID NO: 1678635 - DNA, 15 bp, Homo sapiens
ggaaaaaaaaattaa

SEQ ID NO: 1678636 - DNA, 15 bp, Homo sapiens
gaaaaaaaaattaaa

SEQ ID NO: 1678637 - DNA, 15 bp, Homo sapiens
aaaaaaaattaaaac

SEQ ID NO: 1678638 - DNA, 15 bp, Homo sapiens
aaaaaaattaaaacc

SEQ ID NO: 1678639 - DNA, 15 bp, Homo sapiens
aaaaaattaaaaccg

SEQ ID NO: 1678640 - DNA, 15 bp, Homo sapiens
aaaaattaaaaccgt

SEQ ID NO: 1678641 - DNA, 15 bp, Homo sapiens
aaaattaaaaccgtc

SEQ ID NO: 1678642 - DNA, 15 bp, Homo sapiens
aaattaaaaccgtct

SEQ ID NO: 1678643 - DNA, 15 bp, Homo sapiens
aattaaaaccgtctt

SEQ ID NO: 1678644 - DNA, 15 bp, Homo sapiens
attaaaaccgtcttg

SEQ ID NO: 1678645 - DNA, 15 bp, Homo sapiens
ttaaaaccgtcttgt

SEQ ID NO: 1678646 - DNA, 15 bp, Homo sapiens
taaaaccgtcttgtt

SEQ ID NO: 1678647 - DNA, 15 bp, Homo sapiens
aaaaccgtcttgttt

SEQ ID NO: 1678648 - DNA, 15 bp, Homo sapiens
aaaccgtcttgtttg

SEQ ID NO: 1678649 - DNA, 15 bp, Homo sapiens
aaccgtcttgtttgt

SEQ ID NO: 1678650 - DNA, 15 bp, Homo sapiens
accgtcttgtttgtt

SEQ ID NO: 1678651 - DNA, 15 bp, Homo sapiens
ccgtcttgtttgttt

SEQ ID NO: 1678652 - DNA, 15 bp, Homo sapiens
cgtcttgtttgtttg

SEQ ID NO: 1678653 - DNA, 15 bp, Homo sapiens
gtcttgtttgtttgt

SEQ ID NO: 1678654 - DNA, 15 bp, Homo sapiens
tcttgtttgtttgtt

SEQ ID NO: 1678655 - DNA, 15 bp, Homo sapiens
cttgtttgtttgttt

SEQ ID NO: 1678656 - DNA, 15 bp, Homo sapiens
ttgtttgtttgttta

SEQ ID NO: 1678657 - DNA, 15 bp, Homo sapiens
tgtttgtttgtttac

SEQ ID NO: 1678658 - DNA, 15 bp, Homo sapiens
gtttgtttgtttaca

SEQ ID NO: 1678659 - DNA, 15 bp, Homo sapiens
tttgtttgtttacat

SEQ ID NO: 1678660 - DNA, 15 bp, Homo sapiens
ttgtttgtttacatg

SEQ ID NO: 1678661 - DNA, 15 bp, Homo sapiens
tgtttgtttacatgg

SEQ ID NO: 1678662 - DNA, 15 bp, Homo sapiens
gtttgtttacatggt

SEQ ID NO: 1678663 - DNA, 15 bp, Homo sapiens
tttgtttacatggtt

SEQ ID NO: 1678664 - DNA, 15 bp, Homo sapiens
ttgtttacatggttt

SEQ ID NO: 1678665 - DNA, 15 bp, Homo sapiens
tgtttacatggtttt

SEQ ID NO: 1678666 - DNA, 15 bp, Homo sapiens
gtttacatggttttt

SEQ ID NO: 1678667 - DNA, 15 bp, Homo sapiens
tttacatggttttta

SEQ ID NO: 1678668 - DNA, 15 bp, Homo sapiens
ttacatggtttttag

SEQ ID NO: 1678669 - DNA, 15 bp, Homo sapiens
tacatggtttttagg

SEQ ID NO: 1678670 - DNA, 15 bp, Homo sapiens
acatggtttttaggg

SEQ ID NO: 1678671 - DNA, 15 bp, Homo sapiens
catggtttttagggc

SEQ ID NO: 1678672 - DNA, 15 bp, Homo sapiens
atggtttttagggcc

SEQ ID NO: 1678673 - DNA, 15 bp, Homo sapiens
tggtttttagggccc

SEQ ID NO: 1678674 - DNA, 15 bp, Homo sapiens
ggtttttagggccct

SEQ ID NO: 1678675 - DNA, 15 bp, Homo sapiens
gtttttagggcccta

SEQ ID NO: 1678676 - DNA, 15 bp, Homo sapiens
tttttagggccctat

SEQ ID NO: 1678677 - DNA, 15 bp, Homo sapiens
ttttagggccctatc

SEQ ID NO: 1678678 - DNA, 15 bp, Homo sapiens
tttagggccctatca

SEQ ID NO: 1678679 - DNA, 15 bp, Homo sapiens
ttagggccctatcac

SEQ ID NO: 1678680 - DNA, 15 bp, Homo sapiens
tagggccctatcact

SEQ ID NO: 1678681 - DNA, 15 bp, Homo sapiens
agggccctatcacta

SEQ ID NO: 1678682 - DNA, 15 bp, Homo sapiens
gggccctatcactag

SEQ ID NO: 1678683 - DNA, 15 bp, Homo sapiens
ggccctatcactaga

SEQ ID NO: 1678684 - DNA, 15 bp, Homo sapiens
gccctatcactagag

SEQ ID NO: 1678685 - DNA, 15 bp, Homo sapiens
ccctatcactagaga

SEQ ID NO: 1678686 - DNA, 15 bp, Homo sapiens
cctatcactagagag

SEQ ID NO: 1678687 - DNA, 15 bp, Homo sapiens
ctatcactagagagg

SEQ ID NO: 1678688 - DNA, 15 bp, Homo sapiens
tatcactagagaggc

SEQ ID NO: 1678689 - DNA, 15 bp, Homo sapiens
atcactagagaggcc

SEQ ID NO: 1678690 - DNA, 15 bp, Homo sapiens
tcactagagaggcct

SEQ ID NO: 1678691 - DNA, 15 bp, Homo sapiens
cactagagaggcctc

SEQ ID NO: 1678692 - DNA, 15 bp, Homo sapiens
actagagaggcctct

SEQ ID NO: 1678693 - DNA, 15 bp, Homo sapiens
ctagagaggcctcta

SEQ ID NO: 1678694 - DNA, 15 bp, Homo sapiens
tagagaggcctctaa

SEQ ID NO: 1678695 - DNA, 15 bp, Homo sapiens
agagaggcctctaaa

SEQ ID NO: 1678696 - DNA, 15 bp, Homo sapiens
gagaggcctctaaag

SEQ ID NO: 1678697 - DNA, 15 bp, Homo sapiens
agaggcctctaaaga

SEQ ID NO: 1678698 - DNA, 15 bp, Homo sapiens
gaggcctctaaagaa

SEQ ID NO: 1678699 - DNA, 15 bp, Homo sapiens
aggcctctaaagaaa

SEQ ID NO: 1678700 - DNA, 15 bp, Homo sapiens
ggcctctaaagaaat

SEQ ID NO: 1678701 - DNA, 15 bp, Homo sapiens
gcctctaaagaaata

SEQ ID NO: 1678702 - DNA, 15 bp, Homo sapiens
cctctaaagaaatac

SEQ ID NO: 1678703 - DNA, 15 bp, Homo sapiens
ctctaaagaaatacc

SEQ ID NO: 1678704 - DNA, 15 bp, Homo sapiens
tctaaagaaatacct

SEQ ID NO: 1678705 - DNA, 15 bp, Homo sapiens
ctaaagaaatacctg

SEQ ID NO: 1678706 - DNA, 15 bp, Homo sapiens
aaagaaatacctgat

SEQ ID NO: 1678707 - DNA, 15 bp, Homo sapiens
aagaaatacctgatt

SEQ ID NO: 1678708 - DNA, 15 bp, Homo sapiens
agaaatacctgattt

SEQ ID NO: 1678709 - DNA, 15 bp, Homo sapiens
gaaatacctgatttc

SEQ ID NO: 1678710 - DNA, 15 bp, Homo sapiens
aaatacctgatttcc

SEQ ID NO: 1678711 - DNA, 15 bp, Homo sapiens
aatacctgatttcct

SEQ ID NO: 1678712 - DNA, 15 bp, Homo sapiens
atacctgatttcctt

SEQ ID NO: 1678713 - DNA, 15 bp, Homo sapiens
tacctgatttcctta

SEQ ID NO: 1678714 - DNA, 15 bp, Homo sapiens
acctgatttccttaa

SEQ ID NO: 1678715 - DNA, 15 bp, Homo sapiens
cctgatttccttaaa

SEQ ID NO: 1678716 - DNA, 15 bp, Homo sapiens
ctgatttccttaaac

SEQ ID NO: 1678717 - DNA, 15 bp, Homo sapiens
tgatttccttaaaca

SEQ ID NO: 1678718 - DNA, 15 bp, Homo sapiens
gatttccttaaacat

SEQ ID NO: 1678719 - DNA, 15 bp, Homo sapiens
atttccttaaacatc

SEQ ID NO: 1678720 - DNA, 15 bp, Homo sapiens
tttccttaaacatct

SEQ ID NO: 1678721 - DNA, 15 bp, Homo sapiens
ttccttaaacatcta

SEQ ID NO: 1678722 - DNA, 15 bp, Homo sapiens
tccttaaacatctag

SEQ ID NO: 1678723 - DNA, 15 bp, Homo sapiens
ccttaaacatctaga

SEQ ID NO: 1678724 - DNA, 15 bp, Homo sapiens
cttaaacatctagaa

SEQ ID NO: 1678725 - DNA, 15 bp, Homo sapiens
ttaaacatctagaaa

SEQ ID NO: 1678726 - DNA, 15 bp, Homo sapiens
taaacatctagaaac

SEQ ID NO: 1678727 - DNA, 15 bp, Homo sapiens
aaacatctagaaact

SEQ ID NO: 1678728 - DNA, 15 bp, Homo sapiens
aacatctagaaactg

SEQ ID NO: 1678729 - DNA, 15 bp, Homo sapiens
acatctagaaactga

SEQ ID NO: 1678730 - DNA, 15 bp, Homo sapiens
catctagaaactgaa

SEQ ID NO: 1678731 - DNA, 15 bp, Homo sapiens
atctagaaactgaag

SEQ ID NO: 1678732 - DNA, 15 bp, Homo sapiens
tctagaaactgaaga

SEQ ID NO: 1678733 - DNA, 15 bp, Homo sapiens
ctagaaactgaagac

SEQ ID NO: 1678734 - DNA, 15 bp, Homo sapiens
tagaaactgaagaca

SEQ ID NO: 1678735 - DNA, 15 bp, Homo sapiens
agaaactgaagacaa

SEQ ID NO: 1678736 - DNA, 15 bp, Homo sapiens
gaaactgaagacaac

SEQ ID NO: 1678737 - DNA, 15 bp, Homo sapiens
aaactgaagacaaca

SEQ ID NO: 1678738 - DNA, 15 bp, Homo sapiens
aactgaagacaacat

SEQ ID NO: 1678739 - DNA, 15 bp, Homo sapiens
actgaagacaacatt

SEQ ID NO: 1678740 - DNA, 15 bp, Homo sapiens
ctgaagacaacatta

SEQ ID NO: 1678741 - DNA, 15 bp, Homo sapiens
tgaagacaacattaa

SEQ ID NO: 1678742 - DNA, 15 bp, Homo sapiens
gaagacaacattaag

SEQ ID NO: 1678743 - DNA, 15 bp, Homo sapiens
aagacaacattaagg

SEQ ID NO: 1678744 - DNA, 15 bp, Homo sapiens
agacaacattaaggt

SEQ ID NO: 1678745 - DNA, 15 bp, Homo sapiens
gacaacattaaggta

SEQ ID NO: 1678746 - DNA, 15 bp, Homo sapiens
acaacattaaggtac

SEQ ID NO: 1678747 - DNA, 15 bp, Homo sapiens
caacattaaggtact

SEQ ID NO: 1678748 - DNA, 15 bp, Homo sapiens
aacattaaggtactt

SEQ ID NO: 1678749 - DNA, 15 bp, Homo sapiens
acattaaggtacttg

SEQ ID NO: 1678750 - DNA, 15 bp, Homo sapiens
cattaaggtacttga

SEQ ID NO: 1678751 - DNA, 15 bp, Homo sapiens
attaaggtacttgac

SEQ ID NO: 1678752 - DNA, 15 bp, Homo sapiens
ttaaggtacttgacc

SEQ ID NO: 1678753 - DNA, 15 bp, Homo sapiens
taaggtacttgacct

SEQ ID NO: 1678754 - DNA, 15 bp, Homo sapiens
aaggtacttgaccta

SEQ ID NO: 1678755 - DNA, 15 bp, Homo sapiens
aggtacttgacctat

SEQ ID NO: 1678756 - DNA, 15 bp, Homo sapiens
ggtacttgacctatg

SEQ ID NO: 1678757 - DNA, 15 bp, Homo sapiens
gtacttgacctatgt

SEQ ID NO: 1678758 - DNA, 15 bp, Homo sapiens
tacttgacctatgta

SEQ ID NO: 1678759 - DNA, 15 bp, Homo sapiens
acttgacctatgtat

SEQ ID NO: 1678760 - DNA, 15 bp, Homo sapiens
cttgacctatgtata

SEQ ID NO: 1678761 - DNA, 15 bp, Homo sapiens
ttgacctatgtataa

SEQ ID NO: 1678762 - DNA, 15 bp, Homo sapiens
tgacctatgtataat

SEQ ID NO: 1678763 - DNA, 15 bp, Homo sapiens
gacctatgtataatc

SEQ ID NO: 1678764 - DNA, 15 bp, Homo sapiens
acctatgtataatct

SEQ ID NO: 1678765 - DNA, 15 bp, Homo sapiens
cctatgtataatctg

SEQ ID NO: 1678766 - DNA, 15 bp, Homo sapiens
ctatgtataatctgc

SEQ ID NO: 1678767 - DNA, 15 bp, Homo sapiens
tatgtataatctgct

SEQ ID NO: 1678768 - DNA, 15 bp, Homo sapiens
atgtataatctgctc

SEQ ID NO: 1678769 - DNA, 15 bp, Homo sapiens
tgtataatctgctct

SEQ ID NO: 1678770 - DNA, 15 bp, Homo sapiens
gtataatctgctctg

SEQ ID NO: 1678771 - DNA, 15 bp, Homo sapiens
tataatctgctctgg

SEQ ID NO: 1678772 - DNA, 15 bp, Homo sapiens
ataatctgctctgga

SEQ ID NO: 1678773 - DNA, 15 bp, Homo sapiens
taatctgctctggag

SEQ ID NO: 1678774 - DNA, 15 bp, Homo sapiens
aatctgctctggagc

SEQ ID NO: 1678775 - DNA, 15 bp, Homo sapiens
atctgctctggagct

SEQ ID NO: 1678776 - DNA, 15 bp, Homo sapiens
tctgctctggagcta

SEQ ID NO: 1678777 - DNA, 15 bp, Homo sapiens
ctgctctggagctaa

SEQ ID NO: 1678778 - DNA, 15 bp, Homo sapiens
tgctctggagctaaa

SEQ ID NO: 1678779 - DNA, 15 bp, Homo sapiens
gctctggagctaaaa

SEQ ID NO: 1678780 - DNA, 15 bp, Homo sapiens
ctctggagctaaaaa

SEQ ID NO: 1678781 - DNA, 15 bp, Homo sapiens
tctggagctaaaaat

SEQ ID NO: 1678782 - DNA, 15 bp, Homo sapiens
ctggagctaaaaatt

SEQ ID NO: 1678783 - DNA, 15 bp, Homo sapiens
tggagctaaaaattt

SEQ ID NO: 1678784 - DNA, 15 bp, Homo sapiens
ggagctaaaaattta

SEQ ID NO: 1678785 - DNA, 15 bp, Homo sapiens
gagctaaaaatttac

SEQ ID NO: 1678786 - DNA, 15 bp, Homo sapiens
agctaaaaatttacc

SEQ ID NO: 1678787 - DNA, 15 bp, Homo sapiens
gctaaaaatttacct

SEQ ID NO: 1678788 - DNA, 15 bp, Homo sapiens
ctaaaaatttacctg

SEQ ID NO: 1678789 - DNA, 15 bp, Homo sapiens
taaaaatttacctga

SEQ ID NO: 1678790 - DNA, 15 bp, Homo sapiens
aaaaatttacctgag

SEQ ID NO: 1678791 - DNA, 15 bp, Homo sapiens
aaaatttacctgagc

SEQ ID NO: 1678792 - DNA, 15 bp, Homo sapiens
aaatttacctgagct

SEQ ID NO: 1678793 - DNA, 15 bp, Homo sapiens
aatttacctgagctg

SEQ ID NO: 1678794 - DNA, 15 bp, Homo sapiens
atttacctgagctgg

SEQ ID NO: 1678795 - DNA, 15 bp, Homo sapiens
tttacctgagctggt

SEQ ID NO: 1678796 - DNA, 15 bp, Homo sapiens
ttacctgagctggtt

SEQ ID NO: 1678797 - DNA, 15 bp, Homo sapiens
tacctgagctggtta

SEQ ID NO: 1678798 - DNA, 15 bp, Homo sapiens
acctgagctggttat

SEQ ID NO: 1678799 - DNA, 15 bp, Homo sapiens
cctgagctggttatt

SEQ ID NO: 1678800 - DNA, 15 bp, Homo sapiens
ctgagctggttattt

SEQ ID NO: 1678801 - DNA, 15 bp, Homo sapiens
tgagctggttatttt

SEQ ID NO: 1678802 - DNA, 15 bp, Homo sapiens
gagctggttatttta

SEQ ID NO: 1678803 - DNA, 15 bp, Homo sapiens
agctggttattttat

SEQ ID NO: 1678804 - DNA, 15 bp, Homo sapiens
gctggttattttatt

SEQ ID NO: 1678805 - DNA, 15 bp, Homo sapiens
ctggttattttattt

SEQ ID NO: 1678806 - DNA, 15 bp, Homo sapiens
tggttattttatttt

SEQ ID NO: 1678807 - DNA, 15 bp, Homo sapiens
ggttattttattttt

SEQ ID NO: 1678808 - DNA, 15 bp, Homo sapiens
gttattttattttta

SEQ ID NO: 1678809 - DNA, 15 bp, Homo sapiens
ttattttatttttac

SEQ ID NO: 1678810 - DNA, 15 bp, Homo sapiens
tattttatttttact

SEQ ID NO: 1678811 - DNA, 15 bp, Homo sapiens
attttatttttactt

SEQ ID NO: 1678812 - DNA, 15 bp, Homo sapiens
ttttatttttacttt

SEQ ID NO: 1678813 - DNA, 15 bp, Homo sapiens
tttatttttactttc

SEQ ID NO: 1678814 - DNA, 15 bp, Homo sapiens
ttatttttactttcc

SEQ ID NO: 1678815 - DNA, 15 bp, Homo sapiens
tatttttactttcct

SEQ ID NO: 1678816 - DNA, 15 bp, Homo sapiens
atttttactttccta

SEQ ID NO: 1678817 - DNA, 15 bp, Homo sapiens
tttttactttcctac

SEQ ID NO: 1678818 - DNA, 15 bp, Homo sapiens
ttttactttcctacc

SEQ ID NO: 1678819 - DNA, 15 bp, Homo sapiens
tttactttcctacct

SEQ ID NO: 1678820 - DNA, 15 bp, Homo sapiens
ttactttcctacctt

SEQ ID NO: 1678821 - DNA, 15 bp, Homo sapiens
tactttcctaccttc

SEQ ID NO: 1678822 - DNA, 15 bp, Homo sapiens
actttcctaccttca

SEQ ID NO: 1678823 - DNA, 15 bp, Homo sapiens
ctttcctaccttcat

SEQ ID NO: 1678824 - DNA, 15 bp, Homo sapiens
tttcctaccttcatt

SEQ ID NO: 1678825 - DNA, 15 bp, Homo sapiens
ttcctaccttcatta

SEQ ID NO: 1678826 - DNA, 15 bp, Homo sapiens
tcctaccttcattaa

SEQ ID NO: 1678827 - DNA, 15 bp, Homo sapiens
cctaccttcattaaa

SEQ ID NO: 1678828 - DNA, 15 bp, Homo sapiens
ctaccttcattaaat

SEQ ID NO: 1678829 - DNA, 15 bp, Homo sapiens
taccttcattaaatt

SEQ ID NO: 1678830 - DNA, 15 bp, Homo sapiens
accttcattaaattc

SEQ ID NO: 1678831 - DNA, 15 bp, Homo sapiens
ccttcattaaattcc

SEQ ID NO: 1678832 - DNA, 15 bp, Homo sapiens
cttcattaaattcca

SEQ ID NO: 1678833 - DNA, 15 bp, Homo sapiens
ttcattaaattccat

SEQ ID NO: 1678834 - DNA, 15 bp, Homo sapiens
tcattaaattccatc

SEQ ID NO: 1678835 - DNA, 15 bp, Homo sapiens
cattaaattccatcc

SEQ ID NO: 1678836 - DNA, 15 bp, Homo sapiens
attaaattccatccc

SEQ ID NO: 1678837 - DNA, 15 bp, Homo sapiens
ttaaattccatccct

SEQ ID NO: 1678838 - DNA, 15 bp, Homo sapiens
taaattccatccctc

SEQ ID NO: 1678839 - DNA, 15 bp, Homo sapiens
aaattccatccctcc

SEQ ID NO: 1678840 - DNA, 15 bp, Homo sapiens
aattccatccctcct

SEQ ID NO: 1678841 - DNA, 15 bp, Homo sapiens
attccatccctcctc

SEQ ID NO: 1678842 - DNA, 15 bp, Homo sapiens
ttccatccctcctcc

SEQ ID NO: 1678843 - DNA, 15 bp, Homo sapiens
tccatccctcctcct

SEQ ID NO: 1678844 - DNA, 15 bp, Homo sapiens
ccatccctcctcctg

SEQ ID NO: 1678845 - DNA, 15 bp, Homo sapiens
catccctcctcctgc

SEQ ID NO: 1678846 - DNA, 15 bp, Homo sapiens
atccctcctcctgct

SEQ ID NO: 1678847 - DNA, 15 bp, Homo sapiens
tccctcctcctgctg

SEQ ID NO: 1678848 - DNA, 15 bp, Homo sapiens
ccctcctcctgctga

SEQ ID NO: 1678849 - DNA, 15 bp, Homo sapiens
cctcctcctgctgaa

SEQ ID NO: 1678850 - DNA, 15 bp, Homo sapiens
ctcctcctgctgaaa

SEQ ID NO: 1678851 - DNA, 15 bp, Homo sapiens
tcctcctgctgaaat

SEQ ID NO: 1678852 - DNA, 15 bp, Homo sapiens
cctcctgctgaaatc

SEQ ID NO: 1678853 - DNA, 15 bp, Homo sapiens
ctcctgctgaaatct

SEQ ID NO: 1678854 - DNA, 15 bp, Homo sapiens
tcctgctgaaatcta

SEQ ID NO: 1678855 - DNA, 15 bp, Homo sapiens
cctgctgaaatctag

SEQ ID NO: 1678856 - DNA, 15 bp, Homo sapiens
ctgctgaaatctagc

SEQ ID NO: 1678857 - DNA, 15 bp, Homo sapiens
tgctgaaatctagca

SEQ ID NO: 1678858 - DNA, 15 bp, Homo sapiens
gctgaaatctagcaa

SEQ ID NO: 1678859 - DNA, 15 bp, Homo sapiens
ctgaaatctagcaag

SEQ ID NO: 1678860 - DNA, 15 bp, Homo sapiens
tgaaatctagcaagg

SEQ ID NO: 1678861 - DNA, 15 bp, Homo sapiens
gaaatctagcaagga

SEQ ID NO: 1678862 - DNA, 15 bp, Homo sapiens
aaatctagcaaggaa

SEQ ID NO: 1678863 - DNA, 15 bp, Homo sapiens
aatctagcaaggaat

SEQ ID NO: 1678864 - DNA, 15 bp, Homo sapiens
atctagcaaggaatg

SEQ ID NO: 1678865 - DNA, 15 bp, Homo sapiens
tctagcaaggaatgt

SEQ ID NO: 1678866 - DNA, 15 bp, Homo sapiens
ctagcaaggaatgtc

SEQ ID NO: 1678867 - DNA, 15 bp, Homo sapiens
tagcaaggaatgtct

SEQ ID NO: 1678868 - DNA, 15 bp, Homo sapiens
agcaaggaatgtctt

SEQ ID NO: 1678869 - DNA, 15 bp, Homo sapiens
gcaaggaatgtcttc

SEQ ID NO: 1678870 - DNA, 15 bp, Homo sapiens
caaggaatgtcttcc

SEQ ID NO: 1678871 - DNA, 15 bp, Homo sapiens
aaggaatgtcttcca

SEQ ID NO: 1678872 - DNA, 15 bp, Homo sapiens
aggaatgtcttccag

SEQ ID NO: 1678873 - DNA, 15 bp, Homo sapiens
ggaatgtcttccagc

SEQ ID NO: 1678874 - DNA, 15 bp, Homo sapiens
gaatgtcttccagct

SEQ ID NO: 1678875 - DNA, 15 bp, Homo sapiens
aatgtcttccagcta

SEQ ID NO: 1678876 - DNA, 15 bp, Homo sapiens
atgtcttccagctac

SEQ ID NO: 1678877 - DNA, 15 bp, Homo sapiens
tgtcttccagctacc

SEQ ID NO: 1678878 - DNA, 15 bp, Homo sapiens
gtcttccagctacca

SEQ ID NO: 1678879 - DNA, 15 bp, Homo sapiens
tcttccagctaccaa

SEQ ID NO: 1678880 - DNA, 15 bp, Homo sapiens
cttccagctaccaaa

SEQ ID NO: 1678881 - DNA, 15 bp, Homo sapiens
ttccagctaccaaac

SEQ ID NO: 1678882 - DNA, 15 bp, Homo sapiens
tccagctaccaaacc

SEQ ID NO: 1678883 - DNA, 15 bp, Homo sapiens
ccagctaccaaaccc

SEQ ID NO: 1678884 - DNA, 15 bp, Homo sapiens
cagctaccaaaccct

SEQ ID NO: 1678885 - DNA, 15 bp, Homo sapiens
agctaccaaaccctt

SEQ ID NO: 1678886 - DNA, 15 bp, Homo sapiens
gctaccaaacccttc

SEQ ID NO: 1678887 - DNA, 15 bp, Homo sapiens
ctaccaaacccttcc

SEQ ID NO: 1678888 - DNA, 15 bp, Homo sapiens
taccaaacccttcct

SEQ ID NO: 1678889 - DNA, 15 bp, Homo sapiens
accaaacccttcctg

SEQ ID NO: 1678890 - DNA, 15 bp, Homo sapiens
ccaaacccttcctgc

SEQ ID NO: 1678891 - DNA, 15 bp, Homo sapiens
caaacccttcctgct

SEQ ID NO: 1678892 - DNA, 15 bp, Homo sapiens
aaacccttcctgctt

SEQ ID NO: 1678893 - DNA, 15 bp, Homo sapiens
aacccttcctgcttc

SEQ ID NO: 1678894 - DNA, 15 bp, Homo sapiens
acccttcctgcttct

SEQ ID NO: 1678895 - DNA, 15 bp, Homo sapiens
cccttcctgcttctc

SEQ ID NO: 1678896 - DNA, 15 bp, Homo sapiens
ccttcctgcttctca

SEQ ID NO: 1678897 - DNA, 15 bp, Homo sapiens
cttcctgcttctcaa

SEQ ID NO: 1678898 - DNA, 15 bp, Homo sapiens
ttcctgcttctcaaa

SEQ ID NO: 1678899 - DNA, 15 bp, Homo sapiens
tcctgcttctcaaat

SEQ ID NO: 1678900 - DNA, 15 bp, Homo sapiens
cctgcttctcaaatt

SEQ ID NO: 1678901 - DNA, 15 bp, Homo sapiens
ctgcttctcaaattt

SEQ ID NO: 1678902 - DNA, 15 bp, Homo sapiens
tgcttctcaaatttc

SEQ ID NO: 1678903 - DNA, 15 bp, Homo sapiens
gcttctcaaatttcc

SEQ ID NO: 1678904 - DNA, 15 bp, Homo sapiens
cttctcaaatttcct

SEQ ID NO: 1678905 - DNA, 15 bp, Homo sapiens
ttctcaaatttcctt

SEQ ID NO: 1678906 - DNA, 15 bp, Homo sapiens
tctcaaatttccttt

SEQ ID NO: 1678907 - DNA, 15 bp, Homo sapiens
ctcaaatttcctttc

SEQ ID NO: 1678908 - DNA, 15 bp, Homo sapiens
tcaaatttcctttcc

SEQ ID NO: 1678909 - DNA, 15 bp, Homo sapiens
caaatttcctttcct

SEQ ID NO: 1678910 - DNA, 15 bp, Homo sapiens
aaatttcctttcctt

SEQ ID NO: 1678911 - DNA, 15 bp, Homo sapiens
aatttcctttccttc

SEQ ID NO: 1678912 - DNA, 15 bp, Homo sapiens
atttcctttccttca

SEQ ID NO: 1678913 - DNA, 15 bp, Homo sapiens
tttcctttccttcac

SEQ ID NO: 1678914 - DNA, 15 bp, Homo sapiens
ttcctttccttcact

SEQ ID NO: 1678915 - DNA, 15 bp, Homo sapiens
tcctttccttcactg

SEQ ID NO: 1678916 - DNA, 15 bp, Homo sapiens
cctttccttcactga

SEQ ID NO: 1678917 - DNA, 15 bp, Homo sapiens
ctttccttcactgat

SEQ ID NO: 1678918 - DNA, 15 bp, Homo sapiens
tttccttcactgatt

SEQ ID NO: 1678919 - DNA, 15 bp, Homo sapiens
ttccttcactgattt

SEQ ID NO: 1678920 - DNA, 15 bp, Homo sapiens
tccttcactgatttc

SEQ ID NO: 1678921 - DNA, 15 bp, Homo sapiens
ccttcactgatttct

SEQ ID NO: 1678922 - DNA, 15 bp, Homo sapiens
cttcactgatttctg

SEQ ID NO: 1678923 - DNA, 15 bp, Homo sapiens
ttcactgatttctgc

SEQ ID NO: 1678924 - DNA, 15 bp, Homo sapiens
tcactgatttctgct

SEQ ID NO: 1678925 - DNA, 15 bp, Homo sapiens
cactgatttctgctt

SEQ ID NO: 1678926 - DNA, 15 bp, Homo sapiens
actgatttctgcttt

SEQ ID NO: 1678927 - DNA, 15 bp, Homo sapiens
ctgatttctgcttta

SEQ ID NO: 1678928 - DNA, 15 bp, Homo sapiens
tgatttctgctttaa

SEQ ID NO: 1678929 - DNA, 15 bp, Homo sapiens
gatttctgctttaac

SEQ ID NO: 1678930 - DNA, 15 bp, Homo sapiens
atttctgctttaact

SEQ ID NO: 1678931 - DNA, 15 bp, Homo sapiens
tttctgctttaacta

SEQ ID NO: 1678932 - DNA, 15 bp, Homo sapiens
ttctgctttaactag

SEQ ID NO: 1678933 - DNA, 15 bp, Homo sapiens
tctgctttaactagc

SEQ ID NO: 1678934 - DNA, 15 bp, Homo sapiens
ctgctttaactagct

SEQ ID NO: 1678935 - DNA, 15 bp, Homo sapiens
tgctttaactagctg

SEQ ID NO: 1678936 - DNA, 15 bp, Homo sapiens
gctttaactagctgt

SEQ ID NO: 1678937 - DNA, 15 bp, Homo sapiens
ctttaactagctgtt

SEQ ID NO: 1678938 - DNA, 15 bp, Homo sapiens
tttaactagctgtta

SEQ ID NO: 1678939 - DNA, 15 bp, Homo sapiens
ttaactagctgttag

SEQ ID NO: 1678940 - DNA, 15 bp, Homo sapiens
taactagctgttagt

SEQ ID NO: 1678941 - DNA, 15 bp, Homo sapiens
aactagctgttagtg

SEQ ID NO: 1678942 - DNA, 15 bp, Homo sapiens
actagctgttagtgc

SEQ ID NO: 1678943 - DNA, 15 bp, Homo sapiens
ctagctgttagtgca

SEQ ID NO: 1678944 - DNA, 15 bp, Homo sapiens
tagctgttagtgcag

SEQ ID NO: 1678945 - DNA, 15 bp, Homo sapiens
agctgttagtgcagc

SEQ ID NO: 1678946 - DNA, 15 bp, Homo sapiens
gctgttagtgcagcg

SEQ ID NO: 1678947 - DNA, 15 bp, Homo sapiens
ctgttagtgcagcgt

SEQ ID NO: 1678948 - DNA, 15 bp, Homo sapiens
tgttagtgcagcgtc

SEQ ID NO: 1678949 - DNA, 15 bp, Homo sapiens
gttagtgcagcgtct

SEQ ID NO: 1678950 - DNA, 15 bp, Homo sapiens
ttagtgcagcgtctc

SEQ ID NO: 1678951 - DNA, 15 bp, Homo sapiens
tagtgcagcgtctca

SEQ ID NO: 1678952 - DNA, 15 bp, Homo sapiens
agtgcagcgtctcag

SEQ ID NO: 1678953 - DNA, 15 bp, Homo sapiens
gtgcagcgtctcaga

SEQ ID NO: 1678954 - DNA, 15 bp, Homo sapiens
tgcagcgtctcagat

SEQ ID NO: 1678955 - DNA, 15 bp, Homo sapiens
gcagcgtctcagatg

SEQ ID NO: 1678956 - DNA, 15 bp, Homo sapiens
cagcgtctcagatgt

SEQ ID NO: 1678957 - DNA, 15 bp, Homo sapiens
agcgtctcagatgtc

SEQ ID NO: 1678958 - DNA, 15 bp, Homo sapiens
gcgtctcagatgtcc

SEQ ID NO: 1678959 - DNA, 15 bp, Homo sapiens
cgtctcagatgtcct

SEQ ID NO: 1678960 - DNA, 15 bp, Homo sapiens
gtctcagatgtcctc

SEQ ID NO: 1678961 - DNA, 15 bp, Homo sapiens
tctcagatgtcctct

SEQ ID NO: 1678962 - DNA, 15 bp, Homo sapiens
ctcagatgtcctctc

SEQ ID NO: 1678963 - DNA, 15 bp, Homo sapiens
tcagatgtcctctcc

SEQ ID NO: 1678964 - DNA, 15 bp, Homo sapiens
cagatgtcctctcca

SEQ ID NO: 1678965 - DNA, 15 bp, Homo sapiens
agatgtcctctccac

SEQ ID NO: 1678966 - DNA, 15 bp, Homo sapiens
gatgtcctctccacc

SEQ ID NO: 1678967 - DNA, 15 bp, Homo sapiens
atgtcctctccaccc

SEQ ID NO: 1678968 - DNA, 15 bp, Homo sapiens
tgtcctctccaccct

SEQ ID NO: 1678969 - DNA, 15 bp, Homo sapiens
gtcctctccaccctc

SEQ ID NO: 1678970 - DNA, 15 bp, Homo sapiens
tcctctccaccctct

SEQ ID NO: 1678971 - DNA, 15 bp, Homo sapiens
cctctccaccctcta

SEQ ID NO: 1678972 - DNA, 15 bp, Homo sapiens
ctctccaccctctag

SEQ ID NO: 1678973 - DNA, 15 bp, Homo sapiens
tctccaccctctagg

SEQ ID NO: 1678974 - DNA, 15 bp, Homo sapiens
ctccaccctctaggt

SEQ ID NO: 1678975 - DNA, 15 bp, Homo sapiens
tccaccctctaggtg

SEQ ID NO: 1678976 - DNA, 15 bp, Homo sapiens
ccaccctctaggtgt

SEQ ID NO: 1678977 - DNA, 15 bp, Homo sapiens
caccctctaggtgtg

SEQ ID NO: 1678978 - DNA, 15 bp, Homo sapiens
accctctaggtgtgg

SEQ ID NO: 1678979 - DNA, 15 bp, Homo sapiens
ccctctaggtgtggt

SEQ ID NO: 1678980 - DNA, 15 bp, Homo sapiens
cctctaggtgtggtt

SEQ ID NO: 1678981 - DNA, 15 bp, Homo sapiens
ctctaggtgtggttt

SEQ ID NO: 1678982 - DNA, 15 bp, Homo sapiens
tctaggtgtggttta

SEQ ID NO: 1678983 - DNA, 15 bp, Homo sapiens
ctaggtgtggtttaa

SEQ ID NO: 1678984 - DNA, 15 bp, Homo sapiens
taggtgtggtttaat

SEQ ID NO: 1678985 - DNA, 15 bp, Homo sapiens
aggtgtggtttaata

SEQ ID NO: 1678986 - DNA, 15 bp, Homo sapiens
ggtgtggtttaataa

SEQ ID NO: 1678987 - DNA, 15 bp, Homo sapiens
gtgtggtttaataac

SEQ ID NO: 1678988 - DNA, 15 bp, Homo sapiens
tgtggtttaataaca

SEQ ID NO: 1678989 - DNA, 15 bp, Homo sapiens
gtggtttaataacaa

SEQ ID NO: 1678990 - DNA, 15 bp, Homo sapiens
tggtttaataacaaa

SEQ ID NO: 1678991 - DNA, 15 bp, Homo sapiens
ggtttaataacaaag

SEQ ID NO: 1678992 - DNA, 15 bp, Homo sapiens
gtttaataacaaagg

SEQ ID NO: 1678993 - DNA, 15 bp, Homo sapiens
tttaataacaaaggc

SEQ ID NO: 1678994 - DNA, 15 bp, Homo sapiens
ttaataacaaaggct

SEQ ID NO: 1678995 - DNA, 15 bp, Homo sapiens
taataacaaaggctg

SEQ ID NO: 1678996 - DNA, 15 bp, Homo sapiens
aataacaaaggctgg

SEQ ID NO: 1678997 - DNA, 15 bp, Homo sapiens
ataacaaaggctggc

SEQ ID NO: 1678998 - DNA, 15 bp, Homo sapiens
taacaaaggctggca

SEQ ID NO: 1678999 - DNA, 15 bp, Homo sapiens
aacaaaggctggcat

SEQ ID NO: 1679000 - DNA, 15 bp, Homo sapiens
acaaaggctggcatg

SEQ ID NO: 1679001 - DNA, 15 bp, Homo sapiens
caaaggctggcatgc

SEQ ID NO: 1679002 - DNA, 15 bp, Homo sapiens
aaaggctggcatgcc

SEQ ID NO: 1679003 - DNA, 15 bp, Homo sapiens
aaggctggcatgccc

SEQ ID NO: 1679004 - DNA, 15 bp, Homo sapiens
aggctggcatgccct

SEQ ID NO: 1679005 - DNA, 15 bp, Homo sapiens
ggctggcatgccctg

SEQ ID NO: 1679006 - DNA, 15 bp, Homo sapiens
gctggcatgccctgg

SEQ ID NO: 1679007 - DNA, 15 bp, Homo sapiens
ctggcatgccctggt

SEQ ID NO: 1679008 - DNA, 15 bp, Homo sapiens
tggcatgccctggtc

SEQ ID NO: 1679009 - DNA, 15 bp, Homo sapiens
ggcatgccctggtca

SEQ ID NO: 1679010 - DNA, 15 bp, Homo sapiens
gcatgccctggtcag

SEQ ID NO: 1679011 - DNA, 15 bp, Homo sapiens
catgccctggtcagc

SEQ ID NO: 1679012 - DNA, 15 bp, Homo sapiens
atgccctggtcagct

SEQ ID NO: 1679013 - DNA, 15 bp, Homo sapiens
tgccctggtcagctt

SEQ ID NO: 1679014 - DNA, 15 bp, Homo sapiens
gccctggtcagcttt

SEQ ID NO: 1679015 - DNA, 15 bp, Homo sapiens
ccctggtcagctttc

SEQ ID NO: 1679016 - DNA, 15 bp, Homo sapiens
cctggtcagctttct

SEQ ID NO: 1679017 - DNA, 15 bp, Homo sapiens
ctggtcagctttctc

SEQ ID NO: 1679018 - DNA, 15 bp, Homo sapiens
tggtcagctttctca

SEQ ID NO: 1679019 - DNA, 15 bp, Homo sapiens
ggtcagctttctcaa

SEQ ID NO: 1679020 - DNA, 15 bp, Homo sapiens
gtcagctttctcaat

SEQ ID NO: 1679021 - DNA, 15 bp, Homo sapiens
tcagctttctcaatg

SEQ ID NO: 1679022 - DNA, 15 bp, Homo sapiens
cagctttctcaatgt

SEQ ID NO: 1679023 - DNA, 15 bp, Homo sapiens
agctttctcaatgtg

SEQ ID NO: 1679024 - DNA, 15 bp, Homo sapiens
gctttctcaatgtgg

SEQ ID NO: 1679025 - DNA, 15 bp, Homo sapiens
ctttctcaatgtggc

SEQ ID NO: 1679026 - DNA, 15 bp, Homo sapiens
tttctcaatgtggcc

SEQ ID NO: 1679027 - DNA, 15 bp, Homo sapiens
ttctcaatgtggccc

SEQ ID NO: 1679028 - DNA, 15 bp, Homo sapiens
tctcaatgtggccca

SEQ ID NO: 1679029 - DNA, 15 bp, Homo sapiens
ctcaatgtggcccac

SEQ ID NO: 1679030 - DNA, 15 bp, Homo sapiens
tcaatgtggcccaca

SEQ ID NO: 1679031 - DNA, 15 bp, Homo sapiens
caatgtggcccacaa

SEQ ID NO: 1679032 - DNA, 15 bp, Homo sapiens
aatgtggcccacaac

SEQ ID NO: 1679033 - DNA, 15 bp, Homo sapiens
atgtggcccacaacg

SEQ ID NO: 1679034 - DNA, 15 bp, Homo sapiens
tgtggcccacaacgc

SEQ ID NO: 1679035 - DNA, 15 bp, Homo sapiens
gtggcccacaacgcc

SEQ ID NO: 1679036 - DNA, 15 bp, Homo sapiens
tggcccacaacgcca

SEQ ID NO: 1679037 - DNA, 15 bp, Homo sapiens
ggcccacaacgccat

SEQ ID NO: 1679038 - DNA, 15 bp, Homo sapiens
gcccacaacgccatc

SEQ ID NO: 1679039 - DNA, 15 bp, Homo sapiens
cccacaacgccatct

SEQ ID NO: 1679040 - DNA, 15 bp, Homo sapiens
ccacaacgccatctt

SEQ ID NO: 1679041 - DNA, 15 bp, Homo sapiens
cacaacgccatctta

SEQ ID NO: 1679042 - DNA, 15 bp, Homo sapiens
acaacgccatcttac

SEQ ID NO: 1679043 - DNA, 15 bp, Homo sapiens
caacgccatcttacg

SEQ ID NO: 1679044 - DNA, 15 bp, Homo sapiens
aacgccatcttacgg

SEQ ID NO: 1679045 - DNA, 15 bp, Homo sapiens
acgccatcttacggg

SEQ ID NO: 1679046 - DNA, 15 bp, Homo sapiens
cgccatcttacgggc

SEQ ID NO: 1679047 - DNA, 15 bp, Homo sapiens
gccatcttacgggcc

SEQ ID NO: 1679048 - DNA, 15 bp, Homo sapiens
ccatcttacgggcca

SEQ ID NO: 1679049 - DNA, 15 bp, Homo sapiens
catcttacgggccag

SEQ ID NO: 1679050 - DNA, 15 bp, Homo sapiens
atcttacgggccagc

SEQ ID NO: 1679051 - DNA, 15 bp, Homo sapiens
tcttacgggccagcc

SEQ ID NO: 1679052 - DNA, 15 bp, Homo sapiens
cttacgggccagcct

SEQ ID NO: 1679053 - DNA, 15 bp, Homo sapiens
ttacgggccagcctg

SEQ ID NO: 1679054 - DNA, 15 bp, Homo sapiens
tacgggccagcctgc

SEQ ID NO: 1679055 - DNA, 15 bp, Homo sapiens
acgggccagcctgcc

SEQ ID NO: 1679056 - DNA, 15 bp, Homo sapiens
cgggccagcctgcct

SEQ ID NO: 1679057 - DNA, 15 bp, Homo sapiens
gggccagcctgccta

SEQ ID NO: 1679058 - DNA, 15 bp, Homo sapiens
ggccagcctgcctaa

SEQ ID NO: 1679059 - DNA, 15 bp, Homo sapiens
gccagcctgcctaag

SEQ ID NO: 1679060 - DNA, 15 bp, Homo sapiens
ccagcctgcctaagg

SEQ ID NO: 1679061 - DNA, 15 bp, Homo sapiens
cagcctgcctaagga

SEQ ID NO: 1679062 - DNA, 15 bp, Homo sapiens
agcctgcctaaggac

SEQ ID NO: 1679063 - DNA, 15 bp, Homo sapiens
gcctgcctaaggaca

SEQ ID NO: 1679064 - DNA, 15 bp, Homo sapiens
cctgcctaaggacag

SEQ ID NO: 1679065 - DNA, 15 bp, Homo sapiens
ctgcctaaggacagg

SEQ ID NO: 1679066 - DNA, 15 bp, Homo sapiens
tgcctaaggacagga

SEQ ID NO: 1679067 - DNA, 15 bp, Homo sapiens
gcctaaggacaggag

SEQ ID NO: 1679068 - DNA, 15 bp, Homo sapiens
cctaaggacaggagc

SEQ ID NO: 1679069 - DNA, 15 bp, Homo sapiens
ctaaggacaggagcc

SEQ ID NO: 1679070 - DNA, 15 bp, Homo sapiens
taaggacaggagccc

SEQ ID NO: 1679071 - DNA, 15 bp, Homo sapiens
aaggacaggagcccc

SEQ ID NO: 1679072 - DNA, 15 bp, Homo sapiens
aggacaggagccccg

SEQ ID NO: 1679073 - DNA, 15 bp, Homo sapiens
ggacaggagccccga

SEQ ID NO: 1679074 - DNA, 15 bp, Homo sapiens
gacaggagccccgag

SEQ ID NO: 1679075 - DNA, 15 bp, Homo sapiens
acaggagccccgagg

SEQ ID NO: 1679076 - DNA, 15 bp, Homo sapiens
caggagccccgagga

SEQ ID NO: 1679077 - DNA, 15 bp, Homo sapiens
aggagccccgaggag

SEQ ID NO: 1679078 - DNA, 15 bp, Homo sapiens
ggagccccgaggagt

SEQ ID NO: 1679079 - DNA, 15 bp, Homo sapiens
gagccccgaggagta

SEQ ID NO: 1679080 - DNA, 15 bp, Homo sapiens
agccccgaggagtat

SEQ ID NO: 1679081 - DNA, 15 bp, Homo sapiens
gccccgaggagtatg

SEQ ID NO: 1679082 - DNA, 15 bp, Homo sapiens
ccccgaggagtatgg

SEQ ID NO: 1679083 - DNA, 15 bp, Homo sapiens
cccgaggagtatgga

SEQ ID NO: 1679084 - DNA, 15 bp, Homo sapiens
ccgaggagtatggaa

SEQ ID NO: 1679085 - DNA, 15 bp, Homo sapiens
cgaggagtatggaat

SEQ ID NO: 1679086 - DNA, 15 bp, Homo sapiens
gaggagtatggaatc

SEQ ID NO: 1679087 - DNA, 15 bp, Homo sapiens
aggagtatggaatca

SEQ ID NO: 1679088 - DNA, 15 bp, Homo sapiens
ggagtatggaatcac

SEQ ID NO: 1679089 - DNA, 15 bp, Homo sapiens
gagtatggaatcacc

SEQ ID NO: 1679090 - DNA, 15 bp, Homo sapiens
agtatggaatcaccg

SEQ ID NO: 1679091 - DNA, 15 bp, Homo sapiens
gtatggaatcaccgt

SEQ ID NO: 1679092 - DNA, 15 bp, Homo sapiens
tatggaatcaccgtc

SEQ ID NO: 1679093 - DNA, 15 bp, Homo sapiens
atggaatcaccgtca

SEQ ID NO: 1679094 - DNA, 15 bp, Homo sapiens
tggaatcaccgtcat

SEQ ID NO: 1679095 - DNA, 15 bp, Homo sapiens
ggaatcaccgtcatt

SEQ ID NO: 1679096 - DNA, 15 bp, Homo sapiens
gaatcaccgtcatta

SEQ ID NO: 1679097 - DNA, 15 bp, Homo sapiens
aatcaccgtcattag

SEQ ID NO: 1679098 - DNA, 15 bp, Homo sapiens
atcaccgtcattagc

SEQ ID NO: 1679099 - DNA, 15 bp, Homo sapiens
tcaccgtcattagcc

SEQ ID NO: 1679100 - DNA, 15 bp, Homo sapiens
caccgtcattagcca

SEQ ID NO: 1679101 - DNA, 15 bp, Homo sapiens
accgtcattagccaa

SEQ ID NO: 1679102 - DNA, 15 bp, Homo sapiens
ccgtcattagccaac

SEQ ID NO: 1679103 - DNA, 15 bp, Homo sapiens
cgtcattagccaacc

SEQ ID NO: 1679104 - DNA, 15 bp, Homo sapiens
gtcattagccaaccc

SEQ ID NO: 1679105 - DNA, 15 bp, Homo sapiens
tcattagccaacccc

SEQ ID NO: 1679106 - DNA, 15 bp, Homo sapiens
cattagccaacccct

SEQ ID NO: 1679107 - DNA, 15 bp, Homo sapiens
attagccaacccctg

SEQ ID NO: 1679108 - DNA, 15 bp, Homo sapiens
ttagccaacccctga

SEQ ID NO: 1679109 - DNA, 15 bp, Homo sapiens
tagccaacccctgaa

SEQ ID NO: 1679110 - DNA, 15 bp, Homo sapiens
agccaacccctgaac

SEQ ID NO: 1679111 - DNA, 15 bp, Homo sapiens
gccaacccctgaacc

SEQ ID NO: 1679112 - DNA, 15 bp, Homo sapiens
ccaacccctgaacct

SEQ ID NO: 1679113 - DNA, 15 bp, Homo sapiens
caacccctgaacctg

SEQ ID NO: 1679114 - DNA, 15 bp, Homo sapiens
aacccctgaacctga

SEQ ID NO: 1679115 - DNA, 15 bp, Homo sapiens
acccctgaacctgac

SEQ ID NO: 1679116 - DNA, 15 bp, Homo sapiens
cccctgaacctgacc

SEQ ID NO: 1679117 - DNA, 15 bp, Homo sapiens
ccctgaacctgacca

SEQ ID NO: 1679118 - DNA, 15 bp, Homo sapiens
cctgaacctgaccaa

SEQ ID NO: 1679119 - DNA, 15 bp, Homo sapiens
ctgaacctgaccaag

SEQ ID NO: 1679120 - DNA, 15 bp, Homo sapiens
tgaacctgaccaagg

SEQ ID NO: 1679121 - DNA, 15 bp, Homo sapiens
gaacctgaccaagga

SEQ ID NO: 1679122 - DNA, 15 bp, Homo sapiens
aacctgaccaaggag

SEQ ID NO: 1679123 - DNA, 15 bp, Homo sapiens
acctgaccaaggagc

SEQ ID NO: 1679124 - DNA, 15 bp, Homo sapiens
cctgaccaaggagca

SEQ ID NO: 1679125 - DNA, 15 bp, Homo sapiens
ctgaccaaggagcag

SEQ ID NO: 1679126 - DNA, 15 bp, Homo sapiens
tgaccaaggagcagc

SEQ ID NO: 1679127 - DNA, 15 bp, Homo sapiens
gaccaaggagcagct

SEQ ID NO: 1679128 - DNA, 15 bp, Homo sapiens
accaaggagcagctc

SEQ ID NO: 1679129 - DNA, 15 bp, Homo sapiens
ccaaggagcagctct

SEQ ID NO: 1679130 - DNA, 15 bp, Homo sapiens
aaggagcagctctca

SEQ ID NO: 1679131 - DNA, 15 bp, Homo sapiens
aggagcagctctcag

SEQ ID NO: 1679132 - DNA, 15 bp, Homo sapiens
ggagcagctctcaga

SEQ ID NO: 1679133 - DNA, 15 bp, Homo sapiens
gagcagctctcagag

SEQ ID NO: 1679134 - DNA, 15 bp, Homo sapiens
agcagctctcagaga

SEQ ID NO: 1679135 - DNA, 15 bp, Homo sapiens
gcagctctcagagat

SEQ ID NO: 1679136 - DNA, 15 bp, Homo sapiens
cagctctcagagatt

SEQ ID NO: 1679137 - DNA, 15 bp, Homo sapiens
agctctcagagatta

SEQ ID NO: 1679138 - DNA, 15 bp, Homo sapiens
gctctcagagattac

SEQ ID NO: 1679139 - DNA, 15 bp, Homo sapiens
ctctcagagattaca

SEQ ID NO: 1679140 - DNA, 15 bp, Homo sapiens
tctcagagattacag

SEQ ID NO: 1679141 - DNA, 15 bp, Homo sapiens
ctcagagattacagt

SEQ ID NO: 1679142 - DNA, 15 bp, Homo sapiens
tcagagattacagtg

SEQ ID NO: 1679143 - DNA, 15 bp, Homo sapiens
cagagattacagtgt

SEQ ID NO: 1679144 - DNA, 15 bp, Homo sapiens
agagattacagtgta

SEQ ID NO: 1679145 - DNA, 15 bp, Homo sapiens
gagattacagtgtaa

SEQ ID NO: 1679146 - DNA, 15 bp, Homo sapiens
agattacagtgtaag

SEQ ID NO: 1679147 - DNA, 15 bp, Homo sapiens
gattacagtgtaagc

SEQ ID NO: 1679148 - DNA, 15 bp, Homo sapiens
attacagtgtaagcc

SEQ ID NO: 1679149 - DNA, 15 bp, Homo sapiens
ttacagtgtaagcca

SEQ ID NO: 1679150 - DNA, 15 bp, Homo sapiens
tacagtgtaagccac

SEQ ID NO: 1679151 - DNA, 15 bp, Homo sapiens
acagtgtaagccacc

SEQ ID NO: 1679152 - DNA, 15 bp, Homo sapiens
cagtgtaagccacca

SEQ ID NO: 1679153 - DNA, 15 bp, Homo sapiens
agtgtaagccaccac

SEQ ID NO: 1679154 - DNA, 15 bp, Homo sapiens
gtgtaagccaccaca

SEQ ID NO: 1679155 - DNA, 15 bp, Homo sapiens
tgtaagccaccacag

SEQ ID NO: 1679156 - DNA, 15 bp, Homo sapiens
gtaagccaccacagc

SEQ ID NO: 1679157 - DNA, 15 bp, Homo sapiens
taagccaccacagcc

SEQ ID NO: 1679158 - DNA, 15 bp, Homo sapiens
aagccaccacagccc

SEQ ID NO: 1679159 - DNA, 15 bp, Homo sapiens
agccaccacagcccc

SEQ ID NO: 1679160 - DNA, 15 bp, Homo sapiens
gccaccacagcccca

SEQ ID NO: 1679161 - DNA, 15 bp, Homo sapiens
ccaccacagccccag

SEQ ID NO: 1679162 - DNA, 15 bp, Homo sapiens
caccacagccccagc

SEQ ID NO: 1679163 - DNA, 15 bp, Homo sapiens
accacagccccagcc

SEQ ID NO: 1679164 - DNA, 15 bp, Homo sapiens
ccacagccccagcct

SEQ ID NO: 1679165 - DNA, 15 bp, Homo sapiens
cacagccccagcctc

SEQ ID NO: 1679166 - DNA, 15 bp, Homo sapiens
acagccccagcctca

SEQ ID NO: 1679167 - DNA, 15 bp, Homo sapiens
cagccccagcctcac

SEQ ID NO: 1679168 - DNA, 15 bp, Homo sapiens
agccccagcctcacc

SEQ ID NO: 1679169 - DNA, 15 bp, Homo sapiens
gccccagcctcacca

SEQ ID NO: 1679170 - DNA, 15 bp, Homo sapiens
ccccagcctcaccac

SEQ ID NO: 1679171 - DNA, 15 bp, Homo sapiens
cccagcctcaccact

SEQ ID NO: 1679172 - DNA, 15 bp, Homo sapiens
ccagcctcaccactt

SEQ ID NO: 1679173 - DNA, 15 bp, Homo sapiens
cagcctcaccacttt

SEQ ID NO: 1679174 - DNA, 15 bp, Homo sapiens
agcctcaccactttc

SEQ ID NO: 1679175 - DNA, 15 bp, Homo sapiens
gcctcaccactttct

SEQ ID NO: 1679176 - DNA, 15 bp, Homo sapiens
cctcaccactttctt

SEQ ID NO: 1679177 - DNA, 15 bp, Homo sapiens
ctcaccactttcttg

SEQ ID NO: 1679178 - DNA, 15 bp, Homo sapiens
tcaccactttcttgt

SEQ ID NO: 1679179 - DNA, 15 bp, Homo sapiens
caccactttcttgtc

SEQ ID NO: 1679180 - DNA, 15 bp, Homo sapiens
accactttcttgtca

SEQ ID NO: 1679181 - DNA, 15 bp, Homo sapiens
ccactttcttgtcac

SEQ ID NO: 1679182 - DNA, 15 bp, Homo sapiens
cactttcttgtcacc

SEQ ID NO: 1679183 - DNA, 15 bp, Homo sapiens
actttcttgtcacct

SEQ ID NO: 1679184 - DNA, 15 bp, Homo sapiens
ctttcttgtcacctt

SEQ ID NO: 1679185 - DNA, 15 bp, Homo sapiens
tttcttgtcaccttc

SEQ ID NO: 1679186 - DNA, 15 bp, Homo sapiens
ttcttgtcaccttct

SEQ ID NO: 1679187 - DNA, 15 bp, Homo sapiens
tcttgtcaccttctc

SEQ ID NO: 1679188 - DNA, 15 bp, Homo sapiens
cttgtcaccttctcc

SEQ ID NO: 1679189 - DNA, 15 bp, Homo sapiens
ttgtcaccttctcca

SEQ ID NO: 1679190 - DNA, 15 bp, Homo sapiens
tgtcaccttctccac

SEQ ID NO: 1679191 - DNA, 15 bp, Homo sapiens
gtcaccttctccact

SEQ ID NO: 1679192 - DNA, 15 bp, Homo sapiens
tcaccttctccactc

SEQ ID NO: 1679193 - DNA, 15 bp, Homo sapiens
caccttctccactct

SEQ ID NO: 1679194 - DNA, 15 bp, Homo sapiens
accttctccactctt

SEQ ID NO: 1679195 - DNA, 15 bp, Homo sapiens
ccttctccactcttt

SEQ ID NO: 1679196 - DNA, 15 bp, Homo sapiens
cttctccactctttg

SEQ ID NO: 1679197 - DNA, 15 bp, Homo sapiens
ttctccactctttga

SEQ ID NO: 1679198 - DNA, 15 bp, Homo sapiens
tctccactctttgaa

SEQ ID NO: 1679199 - DNA, 15 bp, Homo sapiens
ctccactctttgaac

SEQ ID NO: 1679200 - DNA, 15 bp, Homo sapiens
tccactctttgaaca

SEQ ID NO: 1679201 - DNA, 15 bp, Homo sapiens
ccactctttgaacat

SEQ ID NO: 1679202 - DNA, 15 bp, Homo sapiens
cactctttgaacatc

SEQ ID NO: 1679203 - DNA, 15 bp, Homo sapiens
actctttgaacatcc

SEQ ID NO: 1679204 - DNA, 15 bp, Homo sapiens
ctctttgaacatcct

SEQ ID NO: 1679205 - DNA, 15 bp, Homo sapiens
tctttgaacatcctg

SEQ ID NO: 1679206 - DNA, 15 bp, Homo sapiens
ctttgaacatcctga

SEQ ID NO: 1679207 - DNA, 15 bp, Homo sapiens
tttgaacatcctgag

SEQ ID NO: 1679208 - DNA, 15 bp, Homo sapiens
ttgaacatcctgaga

SEQ ID NO: 1679209 - DNA, 15 bp, Homo sapiens
tgaacatcctgagag

SEQ ID NO: 1679210 - DNA, 15 bp, Homo sapiens
gaacatcctgagagg

SEQ ID NO: 1679211 - DNA, 15 bp, Homo sapiens
aacatcctgagagga

SEQ ID NO: 1679212 - DNA, 15 bp, Homo sapiens
acatcctgagaggat

SEQ ID NO: 1679213 - DNA, 15 bp, Homo sapiens
catcctgagaggatt

SEQ ID NO: 1679214 - DNA, 15 bp, Homo sapiens
atcctgagaggattc

SEQ ID NO: 1679215 - DNA, 15 bp, Homo sapiens
tcctgagaggattct

SEQ ID NO: 1679216 - DNA, 15 bp, Homo sapiens
cctgagaggattctc

SEQ ID NO: 1679217 - DNA, 15 bp, Homo sapiens
ctgagaggattctca

SEQ ID NO: 1679218 - DNA, 15 bp, Homo sapiens
tgagaggattctcac

SEQ ID NO: 1679219 - DNA, 15 bp, Homo sapiens
gagaggattctcacc

SEQ ID NO: 1679220 - DNA, 15 bp, Homo sapiens
agaggattctcacca

SEQ ID NO: 1679221 - DNA, 15 bp, Homo sapiens
gaggattctcaccac

SEQ ID NO: 1679222 - DNA, 15 bp, Homo sapiens
aggattctcaccacc

SEQ ID NO: 1679223 - DNA, 15 bp, Homo sapiens
ggattctcaccaccg

SEQ ID NO: 1679224 - DNA, 15 bp, Homo sapiens
gattctcaccaccgc

SEQ ID NO: 1679225 - DNA, 15 bp, Homo sapiens
attctcaccaccgcg

SEQ ID NO: 1679226 - DNA, 15 bp, Homo sapiens
ttctcaccaccgcga

SEQ ID NO: 1679227 - DNA, 15 bp, Homo sapiens
tctcaccaccgcgaa

SEQ ID NO: 1679228 - DNA, 15 bp, Homo sapiens
ctcaccaccgcgaag

SEQ ID NO: 1679229 - DNA, 15 bp, Homo sapiens
tcaccaccgcgaagt

SEQ ID NO: 1679230 - DNA, 15 bp, Homo sapiens
caccaccgcgaagtg

SEQ ID NO: 1679231 - DNA, 15 bp, Homo sapiens
accaccgcgaagtgc

SEQ ID NO: 1679232 - DNA, 15 bp, Homo sapiens
ccaccgcgaagtgct

SEQ ID NO: 1679233 - DNA, 15 bp, Homo sapiens
cctgcaagtgaccac

SEQ ID NO: 1679234 - DNA, 15 bp, Homo sapiens
ctgcaagtgaccacg

SEQ ID NO: 1679235 - DNA, 15 bp, Homo sapiens
tgcaagtgaccacgc

SEQ ID NO: 1679236 - DNA, 15 bp, Homo sapiens
gcaagtgaccacgca

SEQ ID NO: 1679237 - DNA, 15 bp, Homo sapiens
caagtgaccacgcag

SEQ ID NO: 1679238 - DNA, 15 bp, Homo sapiens
aagtgaccacgcagg

SEQ ID NO: 1679239 - DNA, 15 bp, Homo sapiens
agtgaccacgcaggt

SEQ ID NO: 1679240 - DNA, 15 bp, Homo sapiens
gtgaccacgcaggtg

SEQ ID NO: 1679241 - DNA, 15 bp, Homo sapiens
tgaccacgcaggtga

SEQ ID NO: 1679242 - DNA, 15 bp, Homo sapiens
gaccacgcaggtgac

SEQ ID NO: 1679243 - DNA, 15 bp, Homo sapiens
accacgcaggtgact

SEQ ID NO: 1679244 - DNA, 15 bp, Homo sapiens
ccacgcaggtgactt

SEQ ID NO: 1679245 - DNA, 15 bp, Homo sapiens
cacgcaggtgacttc

SEQ ID NO: 1679246 - DNA, 15 bp, Homo sapiens
acgcaggtgacttcc

SEQ ID NO: 1679247 - DNA, 15 bp, Homo sapiens
cgcaggtgacttcct

SEQ ID NO: 1679248 - DNA, 15 bp, Homo sapiens
gcaggtgacttcctc

SEQ ID NO: 1679249 - DNA, 15 bp, Homo sapiens
caggtgacttcctca

SEQ ID NO: 1679250 - DNA, 15 bp, Homo sapiens
aggtgacttcctcat

SEQ ID NO: 1679251 - DNA, 15 bp, Homo sapiens
ggtgacttcctcatg

SEQ ID NO: 1679252 - DNA, 15 bp, Homo sapiens
gtgacttcctcatgg

SEQ ID NO: 1679253 - DNA, 15 bp, Homo sapiens
tgacttcctcatggt

SEQ ID NO: 1679254 - DNA, 15 bp, Homo sapiens
gacttcctcatggtg

SEQ ID NO: 1679255 - DNA, 15 bp, Homo sapiens
acttcctcatggtga

SEQ ID NO: 1679256 - DNA, 15 bp, Homo sapiens
cttcctcatggtgac

SEQ ID NO: 1679257 - DNA, 15 bp, Homo sapiens
ttcctcatggtgaca

SEQ ID NO: 1679258 - DNA, 15 bp, Homo sapiens
tcctcatggtgacaa

SEQ ID NO: 1679259 - DNA, 15 bp, Homo sapiens
cctcatggtgacaaa

SEQ ID NO: 1679260 - DNA, 15 bp, Homo sapiens
ctcatggtgacaaaa

SEQ ID NO: 1679261 - DNA, 15 bp, Homo sapiens
tcatggtgacaaaag

SEQ ID NO: 1679262 - DNA, 15 bp, Homo sapiens
catggtgacaaaagg

SEQ ID NO: 1679263 - DNA, 15 bp, Homo sapiens
atggtgacaaaagga

SEQ ID NO: 1679264 - DNA, 15 bp, Homo sapiens
tggtgacaaaaggag

SEQ ID NO: 1679265 - DNA, 15 bp, Homo sapiens
ggtgacaaaaggagt

SEQ ID NO: 1679266 - DNA, 15 bp, Homo sapiens
gtgacaaaaggagtc

SEQ ID NO: 1679267 - DNA, 15 bp, Homo sapiens
tgacaaaaggagtca

SEQ ID NO: 1679268 - DNA, 15 bp, Homo sapiens
gacaaaaggagtcat

SEQ ID NO: 1679269 - DNA, 15 bp, Homo sapiens
acaaaaggagtcatg

SEQ ID NO: 1679270 - DNA, 15 bp, Homo sapiens
caaaaggagtcatgg

SEQ ID NO: 1679271 - DNA, 15 bp, Homo sapiens
aaaaggagtcatggc

SEQ ID NO: 1679272 - DNA, 15 bp, Homo sapiens
aaaggagtcatggca

SEQ ID NO: 1679273 - DNA, 15 bp, Homo sapiens
aaggagtcatggcag

SEQ ID NO: 1679274 - DNA, 15 bp, Homo sapiens
aggagtcatggcagg

SEQ ID NO: 1679275 - DNA, 15 bp, Homo sapiens
ggagtcatggcaggg

SEQ ID NO: 1679276 - DNA, 15 bp, Homo sapiens
gagtcatggcagggt

SEQ ID NO: 1679277 - DNA, 15 bp, Homo sapiens
agtcatggcagggta

SEQ ID NO: 1679278 - DNA, 15 bp, Homo sapiens
gtcatggcagggtag

SEQ ID NO: 1679279 - DNA, 15 bp, Homo sapiens
tcatggcagggtaga

SEQ ID NO: 1679280 - DNA, 15 bp, Homo sapiens
catggcagggtagag

SEQ ID NO: 1679281 - DNA, 15 bp, Homo sapiens
atggcagggtagaga

SEQ ID NO: 1679282 - DNA, 15 bp, Homo sapiens
tggcagggtagagat

SEQ ID NO: 1679283 - DNA, 15 bp, Homo sapiens
ggcagggtagagata

SEQ ID NO: 1679284 - DNA, 15 bp, Homo sapiens
gcagggtagagatat

SEQ ID NO: 1679285 - DNA, 15 bp, Homo sapiens
cagggtagagatatc

SEQ ID NO: 1679286 - DNA, 15 bp, Homo sapiens
agggtagagatatca

SEQ ID NO: 1679287 - DNA, 15 bp, Homo sapiens
gggtagagatatcat

SEQ ID NO: 1679288 - DNA, 15 bp, Homo sapiens
ggtagagatatcata

SEQ ID NO: 1679289 - DNA, 15 bp, Homo sapiens
gtagagatatcatac

SEQ ID NO: 1679290 - DNA, 15 bp, Homo sapiens
tagagatatcatacc

SEQ ID NO: 1679291 - DNA, 15 bp, Homo sapiens
agagatatcatacca

SEQ ID NO: 1679292 - DNA, 15 bp, Homo sapiens
gagatatcataccat

SEQ ID NO: 1679293 - DNA, 15 bp, Homo sapiens
agatatcataccatg

SEQ ID NO: 1679294 - DNA, 15 bp, Homo sapiens
gatatcataccatgg

SEQ ID NO: 1679295 - DNA, 15 bp, Homo sapiens
atatcataccatggc

SEQ ID NO: 1679296 - DNA, 15 bp, Homo sapiens
tatcataccatggca

SEQ ID NO: 1679297 - DNA, 15 bp, Homo sapiens
atcataccatggcag

SEQ ID NO: 1679298 - DNA, 15 bp, Homo sapiens
tcataccatggcagg

SEQ ID NO: 1679299 - DNA, 15 bp, Homo sapiens
cataccatggcaggg

SEQ ID NO: 1679300 - DNA, 15 bp, Homo sapiens
ataccatggcagggg

SEQ ID NO: 1679301 - DNA, 15 bp, Homo sapiens
taccatggcagggga

SEQ ID NO: 1679302 - DNA, 15 bp, Homo sapiens
accatggcaggggaa

SEQ ID NO: 1679303 - DNA, 15 bp, Homo sapiens
ccatggcaggggaaa

SEQ ID NO: 1679304 - DNA, 15 bp, Homo sapiens
catggcaggggaaag

SEQ ID NO: 1679305 - DNA, 15 bp, Homo sapiens
atggcaggggaaaga

SEQ ID NO: 1679306 - DNA, 15 bp, Homo sapiens
tggcaggggaaagat

SEQ ID NO: 1679307 - DNA, 15 bp, Homo sapiens
ggcaggggaaagata

SEQ ID NO: 1679308 - DNA, 15 bp, Homo sapiens
gcaggggaaagatat

SEQ ID NO: 1679309 - DNA, 15 bp, Homo sapiens
caggggaaagatatc

SEQ ID NO: 1679310 - DNA, 15 bp, Homo sapiens
aggggaaagatatca

SEQ ID NO: 1679311 - DNA, 15 bp, Homo sapiens
ggggaaagatatcat

SEQ ID NO: 1679312 - DNA, 15 bp, Homo sapiens
gggaaagatatcata

SEQ ID NO: 1679313 - DNA, 15 bp, Homo sapiens
ggaaagatatcatag

SEQ ID NO: 1679314 - DNA, 15 bp, Homo sapiens
gaaagatatcataga

SEQ ID NO: 1679315 - DNA, 15 bp, Homo sapiens
aaagatatcatagaa

SEQ ID NO: 1679316 - DNA, 15 bp, Homo sapiens
aagatatcatagaat

SEQ ID NO: 1679317 - DNA, 15 bp, Homo sapiens
agatatcatagaatt

SEQ ID NO: 1679318 - DNA, 15 bp, Homo sapiens
gatatcatagaattt

SEQ ID NO: 1679319 - DNA, 15 bp, Homo sapiens
atatcatagaatttt

SEQ ID NO: 1679320 - DNA, 15 bp, Homo sapiens
tatcatagaattttc

SEQ ID NO: 1679321 - DNA, 15 bp, Homo sapiens
atcatagaattttcc

SEQ ID NO: 1679322 - DNA, 15 bp, Homo sapiens
tcatagaattttcca

SEQ ID NO: 1679323 - DNA, 15 bp, Homo sapiens
catagaattttccat

SEQ ID NO: 1679324 - DNA, 15 bp, Homo sapiens
atagaattttccatg

SEQ ID NO: 1679325 - DNA, 15 bp, Homo sapiens
tagaattttccatga

SEQ ID NO: 1679326 - DNA, 15 bp, Homo sapiens
agaattttccatgag

SEQ ID NO: 1679327 - DNA, 15 bp, Homo sapiens
gaattttccatgagc

SEQ ID NO: 1679328 - DNA, 15 bp, Homo sapiens
aattttccatgagca

SEQ ID NO: 1679329 - DNA, 15 bp, Homo sapiens
attttccatgagcac

SEQ ID NO: 1679330 - DNA, 15 bp, Homo sapiens
ttttccatgagcaca

SEQ ID NO: 1679331 - DNA, 15 bp, Homo sapiens
tttccatgagcacat

SEQ ID NO: 1679332 - DNA, 15 bp, Homo sapiens
ttccatgagcacatt

SEQ ID NO: 1679333 - DNA, 15 bp, Homo sapiens
tccatgagcacattt

SEQ ID NO: 1679334 - DNA, 15 bp, Homo sapiens
ccatgagcacattta

SEQ ID NO: 1679335 - DNA, 15 bp, Homo sapiens
catgagcacatttat

SEQ ID NO: 1679336 - DNA, 15 bp, Homo sapiens
atgagcacatttatg

SEQ ID NO: 1679337 - DNA, 15 bp, Homo sapiens
tgagcacatttatga

SEQ ID NO: 1679338 - DNA, 15 bp, Homo sapiens
gagcacatttatgag

SEQ ID NO: 1679339 - DNA, 15 bp, Homo sapiens
agcacatttatgaga

SEQ ID NO: 1679340 - DNA, 15 bp, Homo sapiens
gcacatttatgagac

SEQ ID NO: 1679341 - DNA, 15 bp, Homo sapiens
cacatttatgagaca

SEQ ID NO: 1679342 - DNA, 15 bp, Homo sapiens
acatttatgagacat

SEQ ID NO: 1679343 - DNA, 15 bp, Homo sapiens
catttatgagacatc

SEQ ID NO: 1679344 - DNA, 15 bp, Homo sapiens
atttatgagacatca

SEQ ID NO: 1679345 - DNA, 15 bp, Homo sapiens
tttatgagacatcaa

SEQ ID NO: 1679346 - DNA, 15 bp, Homo sapiens
ttatgagacatcaag

SEQ ID NO: 1679347 - DNA, 15 bp, Homo sapiens
tatgagacatcaagt

SEQ ID NO: 1679348 - DNA, 15 bp, Homo sapiens
atgagacatcaagtt

SEQ ID NO: 1679349 - DNA, 15 bp, Homo sapiens
tgagacatcaagtta

SEQ ID NO: 1679350 - DNA, 15 bp, Homo sapiens
gagacatcaagttac

SEQ ID NO: 1679351 - DNA, 15 bp, Homo sapiens
agacatcaagttaca

SEQ ID NO: 1679352 - DNA, 15 bp, Homo sapiens
gacatcaagttacaa

SEQ ID NO: 1679353 - DNA, 15 bp, Homo sapiens
acatcaagttacaac

SEQ ID NO: 1679354 - DNA, 15 bp, Homo sapiens
catcaagttacaact

SEQ ID NO: 1679355 - DNA, 15 bp, Homo sapiens
atcaagttacaactg

SEQ ID NO: 1679356 - DNA, 15 bp, Homo sapiens
tcaagttacaactgt

SEQ ID NO: 1679357 - DNA, 15 bp, Homo sapiens
caagttacaactgtg

SEQ ID NO: 1679358 - DNA, 15 bp, Homo sapiens
aagttacaactgtgt

SEQ ID NO: 1679359 - DNA, 15 bp, Homo sapiens
agttacaactgtgtc

SEQ ID NO: 1679360 - DNA, 15 bp, Homo sapiens
gttacaactgtgtcc

SEQ ID NO: 1679361 - DNA, 15 bp, Homo sapiens
ttacaactgtgtcca

SEQ ID NO: 1679362 - DNA, 15 bp, Homo sapiens
tacaactgtgtccaa

SEQ ID NO: 1679363 - DNA, 15 bp, Homo sapiens
acaactgtgtccaag

SEQ ID NO: 1679364 - DNA, 15 bp, Homo sapiens
caactgtgtccaagt

SEQ ID NO: 1679365 - DNA, 15 bp, Homo sapiens
aactgtgtccaagtg

SEQ ID NO: 1679366 - DNA, 15 bp, Homo sapiens
actgtgtccaagtga

SEQ ID NO: 1679367 - DNA, 15 bp, Homo sapiens
ctgtgtccaagtgag

SEQ ID NO: 1679368 - DNA, 15 bp, Homo sapiens
tgtgtccaagtgagg

SEQ ID NO: 1679369 - DNA, 15 bp, Homo sapiens
gtgtccaagtgaggc

SEQ ID NO: 1679370 - DNA, 15 bp, Homo sapiens
tgtccaagtgaggca

SEQ ID NO: 1679371 - DNA, 15 bp, Homo sapiens
gtccaagtgaggcac

SEQ ID NO: 1679372 - DNA, 15 bp, Homo sapiens
tccaagtgaggcaca

SEQ ID NO: 1679373 - DNA, 15 bp, Homo sapiens
ccaagtgaggcacag

SEQ ID NO: 1679374 - DNA, 15 bp, Homo sapiens
caagtgaggcacagt

SEQ ID NO: 1679375 - DNA, 15 bp, Homo sapiens
aagtgaggcacagtc

SEQ ID NO: 1679376 - DNA, 15 bp, Homo sapiens
agtgaggcacagtct

SEQ ID NO: 1679377 - DNA, 15 bp, Homo sapiens
gtgaggcacagtctg

SEQ ID NO: 1679378 - DNA, 15 bp, Homo sapiens
tgaggcacagtctga

SEQ ID NO: 1679379 - DNA, 15 bp, Homo sapiens
gaggcacagtctgac

SEQ ID NO: 1679380 - DNA, 15 bp, Homo sapiens
aggcacagtctgaca

SEQ ID NO: 1679381 - DNA, 15 bp, Homo sapiens
ggcacagtctgacat

SEQ ID NO: 1679382 - DNA, 15 bp, Homo sapiens
gcacagtctgacatc

SEQ ID NO: 1679383 - DNA, 15 bp, Homo sapiens
cacagtctgacatcc

SEQ ID NO: 1679384 - DNA, 15 bp, Homo sapiens
acagtctgacatcca

SEQ ID NO: 1679385 - DNA, 15 bp, Homo sapiens
cagtctgacatccag

SEQ ID NO: 1679386 - DNA, 15 bp, Homo sapiens
agtctgacatccaga

SEQ ID NO: 1679387 - DNA, 15 bp, Homo sapiens
gtctgacatccagaa

SEQ ID NO: 1679388 - DNA, 15 bp, Homo sapiens
tctgacatccagaag

SEQ ID NO: 1679389 - DNA, 15 bp, Homo sapiens
ctgacatccagaagg

SEQ ID NO: 1679390 - DNA, 15 bp, Homo sapiens
tgacatccagaaggt

SEQ ID NO: 1679391 - DNA, 15 bp, Homo sapiens
gacatccagaaggta

SEQ ID NO: 1679392 - DNA, 15 bp, Homo sapiens
acatccagaaggtaa

SEQ ID NO: 1679393 - DNA, 15 bp, Homo sapiens
catccagaaggtaaa

SEQ ID NO: 1679394 - DNA, 15 bp, Homo sapiens
atccagaaggtaaaa

SEQ ID NO: 1679395 - DNA, 15 bp, Homo sapiens
tccagaaggtaaaac

SEQ ID NO: 1679396 - DNA, 15 bp, Homo sapiens
ccagaaggtaaaact

SEQ ID NO: 1679397 - DNA, 15 bp, Homo sapiens
cagaaggtaaaactg

SEQ ID NO: 1679398 - DNA, 15 bp, Homo sapiens
agaaggtaaaactga

SEQ ID NO: 1679399 - DNA, 15 bp, Homo sapiens
gaaggtaaaactgag

SEQ ID NO: 1679400 - DNA, 15 bp, Homo sapiens
aaggtaaaactgagc

SEQ ID NO: 1679401 - DNA, 15 bp, Homo sapiens
aggtaaaactgagct

SEQ ID NO: 1679402 - DNA, 15 bp, Homo sapiens
ggtaaaactgagctg

SEQ ID NO: 1679403 - DNA, 15 bp, Homo sapiens
gtaaaactgagctgg

SEQ ID NO: 1679404 - DNA, 15 bp, Homo sapiens
taaaactgagctgga

SEQ ID NO: 1679405 - DNA, 15 bp, Homo sapiens
aaaactgagctggac

SEQ ID NO: 1679406 - DNA, 15 bp, Homo sapiens
aaactgagctggacg

SEQ ID NO: 1679407 - DNA, 15 bp, Homo sapiens
aactgagctggacgc

SEQ ID NO: 1679408 - DNA, 15 bp, Homo sapiens
actgagctggacgct

SEQ ID NO: 1679409 - DNA, 15 bp, Homo sapiens
ctgagctggacgcta

SEQ ID NO: 1679410 - DNA, 15 bp, Homo sapiens
tgagctggacgctag

SEQ ID NO: 1679411 - DNA, 15 bp, Homo sapiens
gagctggacgctaga

SEQ ID NO: 1679412 - DNA, 15 bp, Homo sapiens
agctggacgctagaa

SEQ ID NO: 1679413 - DNA, 15 bp, Homo sapiens
gctggacgctagaaa

SEQ ID NO: 1679414 - DNA, 15 bp, Homo sapiens
ctggacgctagaaag

SEQ ID NO: 1679415 - DNA, 15 bp, Homo sapiens
tggacgctagaaaga

SEQ ID NO: 1679416 - DNA, 15 bp, Homo sapiens
ggacgctagaaagaa

SEQ ID NO: 1679417 - DNA, 15 bp, Homo sapiens
gacgctagaaagaaa

SEQ ID NO: 1679418 - DNA, 15 bp, Homo sapiens
acgctagaaagaaac

SEQ ID NO: 1679419 - DNA, 15 bp, Homo sapiens
cgctagaaagaaact

SEQ ID NO: 1679420 - DNA, 15 bp, Homo sapiens
gctagaaagaaacta

SEQ ID NO: 1679421 - DNA, 15 bp, Homo sapiens
ctagaaagaaactat

SEQ ID NO: 1679422 - DNA, 15 bp, Homo sapiens
tagaaagaaactata

SEQ ID NO: 1679423 - DNA, 15 bp, Homo sapiens
agaaagaaactatag

SEQ ID NO: 1679424 - DNA, 15 bp, Homo sapiens
gaaagaaactatagg

SEQ ID NO: 1679425 - DNA, 15 bp, Homo sapiens
aaagaaactataggc

SEQ ID NO: 1679426 - DNA, 15 bp, Homo sapiens
aagaaactataggct

SEQ ID NO: 1679427 - DNA, 15 bp, Homo sapiens
agaaactataggctt

SEQ ID NO: 1679428 - DNA, 15 bp, Homo sapiens
gaaactataggctta

SEQ ID NO: 1679429 - DNA, 15 bp, Homo sapiens
aaactataggcttaa

SEQ ID NO: 1679430 - DNA, 15 bp, Homo sapiens
aactataggcttaag

SEQ ID NO: 1679431 - DNA, 15 bp, Homo sapiens
actataggcttaaga

SEQ ID NO: 1679432 - DNA, 15 bp, Homo sapiens
ctataggcttaagac

SEQ ID NO: 1679433 - DNA, 15 bp, Homo sapiens
tataggcttaagaca

SEQ ID NO: 1679434 - DNA, 15 bp, Homo sapiens
ataggcttaagacac

SEQ ID NO: 1679435 - DNA, 15 bp, Homo sapiens
taggcttaagacaca

SEQ ID NO: 1679436 - DNA, 15 bp, Homo sapiens
aggcttaagacacag

SEQ ID NO: 1679437 - DNA, 15 bp, Homo sapiens
ggcttaagacacaga

SEQ ID NO: 1679438 - DNA, 15 bp, Homo sapiens
gcttaagacacagaa

SEQ ID NO: 1679439 - DNA, 15 bp, Homo sapiens
cttaagacacagaat

SEQ ID NO: 1679440 - DNA, 15 bp, Homo sapiens
ttaagacacagaatt

SEQ ID NO: 1679441 - DNA, 15 bp, Homo sapiens
taagacacagaattg

SEQ ID NO: 1679442 - DNA, 15 bp, Homo sapiens
aagacacagaattgg

SEQ ID NO: 1679443 - DNA, 15 bp, Homo sapiens
agacacagaattggg

SEQ ID NO: 1679444 - DNA, 15 bp, Homo sapiens
gacacagaattggga

SEQ ID NO: 1679445 - DNA, 15 bp, Homo sapiens
acacagaattgggat

SEQ ID NO: 1679446 - DNA, 15 bp, Homo sapiens
cacagaattgggatt

SEQ ID NO: 1679447 - DNA, 15 bp, Homo sapiens
acagaattgggatta

SEQ ID NO: 1679448 - DNA, 15 bp, Homo sapiens
cagaattgggattat

SEQ ID NO: 1679449 - DNA, 15 bp, Homo sapiens
agaattgggattata

SEQ ID NO: 1679450 - DNA, 15 bp, Homo sapiens
gaattgggattatat

SEQ ID NO: 1679451 - DNA, 15 bp, Homo sapiens
aattgggattatatg

SEQ ID NO: 1679452 - DNA, 15 bp, Homo sapiens
ttgggattatatggt

SEQ ID NO: 1679453 - DNA, 15 bp, Homo sapiens
tgggattatatggta

SEQ ID NO: 1679454 - DNA, 15 bp, Homo sapiens
gggattatatggtag

SEQ ID NO: 1679455 - DNA, 15 bp, Homo sapiens
ggattatatggtagg

SEQ ID NO: 1679456 - DNA, 15 bp, Homo sapiens
gattatatggtaggg

SEQ ID NO: 1679457 - DNA, 15 bp, Homo sapiens
attatatggtagggt

SEQ ID NO: 1679458 - DNA, 15 bp, Homo sapiens
ttatatggtagggta

SEQ ID NO: 1679459 - DNA, 15 bp, Homo sapiens
tatatggtagggtag

SEQ ID NO: 1679460 - DNA, 15 bp, Homo sapiens
atatggtagggtagc

SEQ ID NO: 1679461 - DNA, 15 bp, Homo sapiens
tatggtagggtagct

SEQ ID NO: 1679462 - DNA, 15 bp, Homo sapiens
atggtagggtagctc

SEQ ID NO: 1679463 - DNA, 15 bp, Homo sapiens
tggtagggtagctcc

SEQ ID NO: 1679464 - DNA, 15 bp, Homo sapiens
ggtagggtagctccc

SEQ ID NO: 1679465 - DNA, 15 bp, Homo sapiens
gtagggtagctccca

SEQ ID NO: 1679466 - DNA, 15 bp, Homo sapiens
tagggtagctcccac

SEQ ID NO: 1679467 - DNA, 15 bp, Homo sapiens
agggtagctcccact

SEQ ID NO: 1679468 - DNA, 15 bp, Homo sapiens
gggtagctcccacta

SEQ ID NO: 1679469 - DNA, 15 bp, Homo sapiens
ggtagctcccactaa

SEQ ID NO: 1679470 - DNA, 15 bp, Homo sapiens
gtagctcccactaat

SEQ ID NO: 1679471 - DNA, 15 bp, Homo sapiens
tagctcccactaatt

SEQ ID NO: 1679472 - DNA, 15 bp, Homo sapiens
agctcccactaattt

SEQ ID NO: 1679473 - DNA, 15 bp, Homo sapiens
gctcccactaatttg

SEQ ID NO: 1679474 - DNA, 15 bp, Homo sapiens
ctcccactaatttgg

SEQ ID NO: 1679475 - DNA, 15 bp, Homo sapiens
tcccactaatttgga

SEQ ID NO: 1679476 - DNA, 15 bp, Homo sapiens
cccactaatttggaa

SEQ ID NO: 1679477 - DNA, 15 bp, Homo sapiens
ccactaatttggaaa

SEQ ID NO: 1679478 - DNA, 15 bp, Homo sapiens
cactaatttggaaac

SEQ ID NO: 1679479 - DNA, 15 bp, Homo sapiens
actaatttggaaacg

SEQ ID NO: 1679480 - DNA, 15 bp, Homo sapiens
ctaatttggaaacgt

SEQ ID NO: 1679481 - DNA, 15 bp, Homo sapiens
taatttggaaacgta

SEQ ID NO: 1679482 - DNA, 15 bp, Homo sapiens
aatttggaaacgtac

SEQ ID NO: 1679483 - DNA, 15 bp, Homo sapiens
atttggaaacgtacc

SEQ ID NO: 1679484 - DNA, 15 bp, Homo sapiens
tttggaaacgtaccc

SEQ ID NO: 1679485 - DNA, 15 bp, Homo sapiens
ttggaaacgtaccct

SEQ ID NO: 1679486 - DNA, 15 bp, Homo sapiens
tggaaacgtacccta

SEQ ID NO: 1679487 - DNA, 15 bp, Homo sapiens
ctgatcgcaggaggc

SEQ ID NO: 1679488 - DNA, 15 bp, Homo sapiens
tgatcgcaggaggct

SEQ ID NO: 1679489 - DNA, 15 bp, Homo sapiens
gatcgcaggaggcta

SEQ ID NO: 1679490 - DNA, 15 bp, Homo sapiens
atcgcaggaggctaa

SEQ ID NO: 1679491 - DNA, 15 bp, Homo sapiens
tcgcaggaggctaaa

SEQ ID NO: 1679492 - DNA, 15 bp, Homo sapiens
cgcaggaggctaaac

SEQ ID NO: 1679493 - DNA, 15 bp, Homo sapiens
gcaggaggctaaaca

SEQ ID NO: 1679494 - DNA, 15 bp, Homo sapiens
caggaggctaaacag

SEQ ID NO: 1679495 - DNA, 15 bp, Homo sapiens
aggaggctaaacagg

SEQ ID NO: 1679496 - DNA, 15 bp, Homo sapiens
ggaggctaaacaggc

SEQ ID NO: 1679497 - DNA, 15 bp, Homo sapiens
gaggctaaacaggca

SEQ ID NO: 1679498 - DNA, 15 bp, Homo sapiens
aggctaaacaggcat

SEQ ID NO: 1679499 - DNA, 15 bp, Homo sapiens
ggctaaacaggcata

SEQ ID NO: 1679500 - DNA, 15 bp, Homo sapiens
gctaaacaggcataa

SEQ ID NO: 1679501 - DNA, 15 bp, Homo sapiens
ctaaacaggcataat

SEQ ID NO: 1679502 - DNA, 15 bp, Homo sapiens
taaacaggcataatg

SEQ ID NO: 1679503 - DNA, 15 bp, Homo sapiens
aaacaggcataatga

SEQ ID NO: 1679504 - DNA, 15 bp, Homo sapiens
aacaggcataatgac

SEQ ID NO: 1679505 - DNA, 15 bp, Homo sapiens
acaggcataatgact

SEQ ID NO: 1679506 - DNA, 15 bp, Homo sapiens
caggcataatgactg

SEQ ID NO: 1679507 - DNA, 15 bp, Homo sapiens
aggcataatgactga

SEQ ID NO: 1679508 - DNA, 15 bp, Homo sapiens
ggcataatgactgaa

SEQ ID NO: 1679509 - DNA, 15 bp, Homo sapiens
gcataatgactgaat

SEQ ID NO: 1679510 - DNA, 15 bp, Homo sapiens
cataatgactgaata

SEQ ID NO: 1679511 - DNA, 15 bp, Homo sapiens
ataatgactgaatag

SEQ ID NO: 1679512 - DNA, 15 bp, Homo sapiens
taatgactgaatagc

SEQ ID NO: 1679513 - DNA, 15 bp, Homo sapiens
aatgactgaatagca

SEQ ID NO: 1679514 - DNA, 15 bp, Homo sapiens
atgactgaatagcag

SEQ ID NO: 1679515 - DNA, 15 bp, Homo sapiens
tgactgaatagcaga

SEQ ID NO: 1679516 - DNA, 15 bp, Homo sapiens
gactgaatagcagac

SEQ ID NO: 1679517 - DNA, 15 bp, Homo sapiens
actgaatagcagaca

SEQ ID NO: 1679518 - DNA, 15 bp, Homo sapiens
ctgaatagcagacaa

SEQ ID NO: 1679519 - DNA, 15 bp, Homo sapiens
tgaatagcagacaat

SEQ ID NO: 1679520 - DNA, 15 bp, Homo sapiens
gaatagcagacaata

SEQ ID NO: 1679521 - DNA, 15 bp, Homo sapiens
aatagcagacaatag

SEQ ID NO: 1679522 - DNA, 15 bp, Homo sapiens
atagcagacaataga

SEQ ID NO: 1679523 - DNA, 15 bp, Homo sapiens
tagcagacaatagac

SEQ ID NO: 1679524 - DNA, 15 bp, Homo sapiens
agcagacaatagact

SEQ ID NO: 1679525 - DNA, 15 bp, Homo sapiens
gcagacaatagacta

SEQ ID NO: 1679526 - DNA, 15 bp, Homo sapiens
cagacaatagactac

SEQ ID NO: 1679527 - DNA, 15 bp, Homo sapiens
agacaatagactaca

SEQ ID NO: 1679528 - DNA, 15 bp, Homo sapiens
gacaatagactacat

SEQ ID NO: 1679529 - DNA, 15 bp, Homo sapiens
acaatagactacatc

SEQ ID NO: 1679530 - DNA, 15 bp, Homo sapiens
caatagactacatct

SEQ ID NO: 1679531 - DNA, 15 bp, Homo sapiens
aatagactacatctt

SEQ ID NO: 1679532 - DNA, 15 bp, Homo sapiens
atagactacatcttg

SEQ ID NO: 1679533 - DNA, 15 bp, Homo sapiens
tagactacatcttgt

SEQ ID NO: 1679534 - DNA, 15 bp, Homo sapiens
agactacatcttgtg

SEQ ID NO: 1679535 - DNA, 15 bp, Homo sapiens
gactacatcttgtgc

SEQ ID NO: 1679536 - DNA, 15 bp, Homo sapiens
actacatcttgtgca

SEQ ID NO: 1679537 - DNA, 15 bp, Homo sapiens
ctacatcttgtgcag

SEQ ID NO: 1679538 - DNA, 15 bp, Homo sapiens
tacatcttgtgcaga

SEQ ID NO: 1679539 - DNA, 15 bp, Homo sapiens
acatcttgtgcagaa

SEQ ID NO: 1679540 - DNA, 15 bp, Homo sapiens
catcttgtgcagaag

SEQ ID NO: 1679541 - DNA, 15 bp, Homo sapiens
atcttgtgcagaaga

SEQ ID NO: 1679542 - DNA, 15 bp, Homo sapiens
tcttgtgcagaagag

SEQ ID NO: 1679543 - DNA, 15 bp, Homo sapiens
cttgtgcagaagaga

SEQ ID NO: 1679544 - DNA, 15 bp, Homo sapiens
ttgtgcagaagagaa

SEQ ID NO: 1679545 - DNA, 15 bp, Homo sapiens
tgtgcagaagagaaa

SEQ ID NO: 1679546 - DNA, 15 bp, Homo sapiens
gtgcagaagagaaaa

SEQ ID NO: 1679547 - DNA, 15 bp, Homo sapiens
tgcagaagagaaaaa

SEQ ID NO: 1679548 - DNA, 15 bp, Homo sapiens
gcagaagagaaaaaa

SEQ ID NO: 1679549 - DNA, 15 bp, Homo sapiens
cagaagagaaaaaaa

SEQ ID NO: 1679550 - DNA, 15 bp, Homo sapiens
agaagagaaaaaaaa

SEQ ID NO: 1679551 - DNA, 15 bp, Homo sapiens
gaagagaaaaaaaat

SEQ ID NO: 1679552 - DNA, 15 bp, Homo sapiens
aagagaaaaaaaatg

SEQ ID NO: 1679553 - DNA, 15 bp, Homo sapiens
agagaaaaaaaatga

SEQ ID NO: 1679554 - DNA, 15 bp, Homo sapiens
gagaaaaaaaatgat

SEQ ID NO: 1679555 - DNA, 15 bp, Homo sapiens
agaaaaaaaatgata

SEQ ID NO: 1679556 - DNA, 15 bp, Homo sapiens
gaaaaaaaatgatag

SEQ ID NO: 1679557 - DNA, 15 bp, Homo sapiens
aaaaaaaatgataga

SEQ ID NO: 1679558 - DNA, 15 bp, Homo sapiens
aaaaaaatgatagaa

SEQ ID NO: 1679559 - DNA, 15 bp, Homo sapiens
aaaaaatgatagaag

SEQ ID NO: 1679560 - DNA, 15 bp, Homo sapiens
aaaaatgatagaagg

SEQ ID NO: 1679561 - DNA, 15 bp, Homo sapiens
aaaatgatagaagga

SEQ ID NO: 1679562 - DNA, 15 bp, Homo sapiens
aaatgatagaaggat

SEQ ID NO: 1679563 - DNA, 15 bp, Homo sapiens
aatgatagaaggata

SEQ ID NO: 1679564 - DNA, 15 bp, Homo sapiens
atgatagaaggatat

SEQ ID NO: 1679565 - DNA, 15 bp, Homo sapiens
tgatagaaggatatt

SEQ ID NO: 1679566 - DNA, 15 bp, Homo sapiens
gatagaaggatatta

SEQ ID NO: 1679567 - DNA, 15 bp, Homo sapiens
atagaaggatattat

SEQ ID NO: 1679568 - DNA, 15 bp, Homo sapiens
tagaaggatattatt

SEQ ID NO: 1679569 - DNA, 15 bp, Homo sapiens
agaaggatattattg

SEQ ID NO: 1679570 - DNA, 15 bp, Homo sapiens
gaaggatattattgg

SEQ ID NO: 1679571 - DNA, 15 bp, Homo sapiens
aaggatattattgga

SEQ ID NO: 1679572 - DNA, 15 bp, Homo sapiens
aggatattattggac

SEQ ID NO: 1679573 - DNA, 15 bp, Homo sapiens
ggatattattggacc

SEQ ID NO: 1679574 - DNA, 15 bp, Homo sapiens
gatattattggacca

SEQ ID NO: 1679575 - DNA, 15 bp, Homo sapiens
atattattggaccaa

SEQ ID NO: 1679576 - DNA, 15 bp, Homo sapiens
tattattggaccaac

SEQ ID NO: 1679577 - DNA, 15 bp, Homo sapiens
attattggaccaact

SEQ ID NO: 1679578 - DNA, 15 bp, Homo sapiens
ttattggaccaactg

SEQ ID NO: 1679579 - DNA, 15 bp, Homo sapiens
tattggaccaactga

SEQ ID NO: 1679580 - DNA, 15 bp, Homo sapiens
attggaccaactgac

SEQ ID NO: 1679581 - DNA, 15 bp, Homo sapiens
ttggaccaactgaca

SEQ ID NO: 1679582 - DNA, 15 bp, Homo sapiens
tggaccaactgacaa

SEQ ID NO: 1679583 - DNA, 15 bp, Homo sapiens
ggaccaactgacaaa

SEQ ID NO: 1679584 - DNA, 15 bp, Homo sapiens
gaccaactgacaaaa

SEQ ID NO: 1679585 - DNA, 15 bp, Homo sapiens
accaactgacaaaac

SEQ ID NO: 1679586 - DNA, 15 bp, Homo sapiens
ccaactgacaaaact

SEQ ID NO: 1679587 - DNA, 15 bp, Homo sapiens
caactgacaaaactg

SEQ ID NO: 1679588 - DNA, 15 bp, Homo sapiens
aactgacaaaactga

SEQ ID NO: 1679589 - DNA, 15 bp, Homo sapiens
actgacaaaactgaa

SEQ ID NO: 1679590 - DNA, 15 bp, Homo sapiens
ctgacaaaactgaac

SEQ ID NO: 1679591 - DNA, 15 bp, Homo sapiens
tgacaaaactgaact

SEQ ID NO: 1679592 - DNA, 15 bp, Homo sapiens
gacaaaactgaacta

SEQ ID NO: 1679593 - DNA, 15 bp, Homo sapiens
acaaaactgaactat

SEQ ID NO: 1679594 - DNA, 15 bp, Homo sapiens
caaaactgaactatg

SEQ ID NO: 1679595 - DNA, 15 bp, Homo sapiens
aaaactgaactatga

SEQ ID NO: 1679596 - DNA, 15 bp, Homo sapiens
aaactgaactatgaa

SEQ ID NO: 1679597 - DNA, 15 bp, Homo sapiens
aactgaactatgaac

SEQ ID NO: 1679598 - DNA, 15 bp, Homo sapiens
actgaactatgaaca

SEQ ID NO: 1679599 - DNA, 15 bp, Homo sapiens
ctgaactatgaacag

SEQ ID NO: 1679600 - DNA, 15 bp, Homo sapiens
tgaactatgaacagt

SEQ ID NO: 1679601 - DNA, 15 bp, Homo sapiens
gaactatgaacagta

SEQ ID NO: 1679602 - DNA, 15 bp, Homo sapiens
aactatgaacagtag

SEQ ID NO: 1679603 - DNA, 15 bp, Homo sapiens
actatgaacagtaga

SEQ ID NO: 1679604 - DNA, 15 bp, Homo sapiens
ctatgaacagtagat

SEQ ID NO: 1679605 - DNA, 15 bp, Homo sapiens
tatgaacagtagatt

SEQ ID NO: 1679606 - DNA, 15 bp, Homo sapiens
atgaacagtagatta

SEQ ID NO: 1679607 - DNA, 15 bp, Homo sapiens
tgaacagtagattag

SEQ ID NO: 1679608 - DNA, 15 bp, Homo sapiens
gaacagtagattagg

SEQ ID NO: 1679609 - DNA, 15 bp, Homo sapiens
aacagtagattaggt

SEQ ID NO: 1679610 - DNA, 15 bp, Homo sapiens
acagtagattaggta

SEQ ID NO: 1679611 - DNA, 15 bp, Homo sapiens
cagtagattaggtaa

SEQ ID NO: 1679612 - DNA, 15 bp, Homo sapiens
agtagattaggtaaa

SEQ ID NO: 1679613 - DNA, 15 bp, Homo sapiens
gtagattaggtaaat

SEQ ID NO: 1679614 - DNA, 15 bp, Homo sapiens
tagattaggtaaatg

SEQ ID NO: 1679615 - DNA, 15 bp, Homo sapiens
agattaggtaaatgt

SEQ ID NO: 1679616 - DNA, 15 bp, Homo sapiens
gattaggtaaatgta

SEQ ID NO: 1679617 - DNA, 15 bp, Homo sapiens
attaggtaaatgtat

SEQ ID NO: 1679618 - DNA, 15 bp, Homo sapiens
ttaggtaaatgtatc

SEQ ID NO: 1679619 - DNA, 15 bp, Homo sapiens
taggtaaatgtatca

SEQ ID NO: 1679620 - DNA, 15 bp, Homo sapiens
aggtaaatgtatcat

SEQ ID NO: 1679621 - DNA, 15 bp, Homo sapiens
ggtaaatgtatcata

SEQ ID NO: 1679622 - DNA, 15 bp, Homo sapiens
gtaaatgtatcataa

SEQ ID NO: 1679623 - DNA, 15 bp, Homo sapiens
taaatgtatcataac

SEQ ID NO: 1679624 - DNA, 15 bp, Homo sapiens
aaatgtatcataaca

SEQ ID NO: 1679625 - DNA, 15 bp, Homo sapiens
aatgtatcataacat

SEQ ID NO: 1679626 - DNA, 15 bp, Homo sapiens
atgtatcataacatt

SEQ ID NO: 1679627 - DNA, 15 bp, Homo sapiens
tgtatcataacatta

SEQ ID NO: 1679628 - DNA, 15 bp, Homo sapiens
gtatcataacattaa

SEQ ID NO: 1679629 - DNA, 15 bp, Homo sapiens
tatcataacattaag

SEQ ID NO: 1679630 - DNA, 15 bp, Homo sapiens
atcataacattaagt

SEQ ID NO: 1679631 - DNA, 15 bp, Homo sapiens
tcataacattaagtt

SEQ ID NO: 1679632 - DNA, 15 bp, Homo sapiens
cataacattaagttt

SEQ ID NO: 1679633 - DNA, 15 bp, Homo sapiens
ataacattaagttta

SEQ ID NO: 1679634 - DNA, 15 bp, Homo sapiens
taacattaagtttac

SEQ ID NO: 1679635 - DNA, 15 bp, Homo sapiens
aacattaagtttact

SEQ ID NO: 1679636 - DNA, 15 bp, Homo sapiens
acattaagtttactg

SEQ ID NO: 1679637 - DNA, 15 bp, Homo sapiens
cattaagtttactga

SEQ ID NO: 1679638 - DNA, 15 bp, Homo sapiens
attaagtttactgac

SEQ ID NO: 1679639 - DNA, 15 bp, Homo sapiens
ttaagtttactgaca

SEQ ID NO: 1679640 - DNA, 15 bp, Homo sapiens
taagtttactgacat

SEQ ID NO: 1679641 - DNA, 15 bp, Homo sapiens
aagtttactgacatt

SEQ ID NO: 1679642 - DNA, 15 bp, Homo sapiens
agtttactgacattg

SEQ ID NO: 1679643 - DNA, 15 bp, Homo sapiens
gtttactgacattga

SEQ ID NO: 1679644 - DNA, 15 bp, Homo sapiens
tttactgacattgat

SEQ ID NO: 1679645 - DNA, 15 bp, Homo sapiens
ttactgacattgata

SEQ ID NO: 1679646 - DNA, 15 bp, Homo sapiens
tactgacattgataa

SEQ ID NO: 1679647 - DNA, 15 bp, Homo sapiens
actgacattgataat

SEQ ID NO: 1679648 - DNA, 15 bp, Homo sapiens
ctgacattgataatg

SEQ ID NO: 1679649 - DNA, 15 bp, Homo sapiens
tgacattgataatgt

SEQ ID NO: 1679650 - DNA, 15 bp, Homo sapiens
gacattgataatgta

SEQ ID NO: 1679651 - DNA, 15 bp, Homo sapiens
acattgataatgtac

SEQ ID NO: 1679652 - DNA, 15 bp, Homo sapiens
cattgataatgtact

SEQ ID NO: 1679653 - DNA, 15 bp, Homo sapiens
attgataatgtactg

SEQ ID NO: 1679654 - DNA, 15 bp, Homo sapiens
ttgataatgtactgt

SEQ ID NO: 1679655 - DNA, 15 bp, Homo sapiens
tgataatgtactgtg

SEQ ID NO: 1679656 - DNA, 15 bp, Homo sapiens
gataatgtactgtgg

SEQ ID NO: 1679657 - DNA, 15 bp, Homo sapiens
ataatgtactgtggt

SEQ ID NO: 1679658 - DNA, 15 bp, Homo sapiens
taatgtactgtggtt

SEQ ID NO: 1679659 - DNA, 15 bp, Homo sapiens
aatgtactgtggtta

SEQ ID NO: 1679660 - DNA, 15 bp, Homo sapiens
atgtactgtggttat

SEQ ID NO: 1679661 - DNA, 15 bp, Homo sapiens
tgtactgtggttatg

SEQ ID NO: 1679662 - DNA, 15 bp, Homo sapiens
gtactgtggttatgt

SEQ ID NO: 1679663 - DNA, 15 bp, Homo sapiens
tactgtggttatgta

SEQ ID NO: 1679664 - DNA, 15 bp, Homo sapiens
actgtggttatgtaa

SEQ ID NO: 1679665 - DNA, 15 bp, Homo sapiens
ctgtggttatgtaag

SEQ ID NO: 1679666 - DNA, 15 bp, Homo sapiens
tgtggttatgtaaga

SEQ ID NO: 1679667 - DNA, 15 bp, Homo sapiens
gtggttatgtaagag

SEQ ID NO: 1679668 - DNA, 15 bp, Homo sapiens
tggttatgtaagaga

SEQ ID NO: 1679669 - DNA, 15 bp, Homo sapiens
ggttatgtaagagaa

SEQ ID NO: 1679670 - DNA, 15 bp, Homo sapiens
gttatgtaagagaag

SEQ ID NO: 1679671 - DNA, 15 bp, Homo sapiens
ttatgtaagagaaga

SEQ ID NO: 1679672 - DNA, 15 bp, Homo sapiens
tatgtaagagaagat

SEQ ID NO: 1679673 - DNA, 15 bp, Homo sapiens
atgtaagagaagatc

SEQ ID NO: 1679674 - DNA, 15 bp, Homo sapiens
tgtaagagaagatct

SEQ ID NO: 1679675 - DNA, 15 bp, Homo sapiens
gtaagagaagatctc

SEQ ID NO: 1679676 - DNA, 15 bp, Homo sapiens
taagagaagatctct

SEQ ID NO: 1679677 - DNA, 15 bp, Homo sapiens
aagagaagatctcta

SEQ ID NO: 1679678 - DNA, 15 bp, Homo sapiens
agagaagatctctat

SEQ ID NO: 1679679 - DNA, 15 bp, Homo sapiens
gagaagatctctatt

SEQ ID NO: 1679680 - DNA, 15 bp, Homo sapiens
agaagatctctattc

SEQ ID NO: 1679681 - DNA, 15 bp, Homo sapiens
gaagatctctattct

SEQ ID NO: 1679682 - DNA, 15 bp, Homo sapiens
aagatctctattctt

SEQ ID NO: 1679683 - DNA, 15 bp, Homo sapiens
agatctctattctta

SEQ ID NO: 1679684 - DNA, 15 bp, Homo sapiens
gatctctattcttag

SEQ ID NO: 1679685 - DNA, 15 bp, Homo sapiens
atctctattcttagg

SEQ ID NO: 1679686 - DNA, 15 bp, Homo sapiens
tctctattcttagga

SEQ ID NO: 1679687 - DNA, 15 bp, Homo sapiens
ctctattcttaggaa

SEQ ID NO: 1679688 - DNA, 15 bp, Homo sapiens
tctattcttaggaaa

SEQ ID NO: 1679689 - DNA, 15 bp, Homo sapiens
ctattcttaggaaat

SEQ ID NO: 1679690 - DNA, 15 bp, Homo sapiens
tattcttaggaaata

SEQ ID NO: 1679691 - DNA, 15 bp, Homo sapiens
attcttaggaaatat

SEQ ID NO: 1679692 - DNA, 15 bp, Homo sapiens
ttcttaggaaatatg

SEQ ID NO: 1679693 - DNA, 15 bp, Homo sapiens
tcttaggaaatatgc

SEQ ID NO: 1679694 - DNA, 15 bp, Homo sapiens
cttaggaaatatgcc

SEQ ID NO: 1679695 - DNA, 15 bp, Homo sapiens
ttaggaaatatgccc

SEQ ID NO: 1679696 - DNA, 15 bp, Homo sapiens
taggaaatatgccct

SEQ ID NO: 1679697 - DNA, 15 bp, Homo sapiens
aggaaatatgccctg

SEQ ID NO: 1679698 - DNA, 15 bp, Homo sapiens
ggaaatatgccctga

SEQ ID NO: 1679699 - DNA, 15 bp, Homo sapiens
gaaatatgccctgaa

SEQ ID NO: 1679700 - DNA, 15 bp, Homo sapiens
aaatatgccctgaag

SEQ ID NO: 1679701 - DNA, 15 bp, Homo sapiens
aatatgccctgaagt

SEQ ID NO: 1679702 - DNA, 15 bp, Homo sapiens
atatgccctgaagta

SEQ ID NO: 1679703 - DNA, 15 bp, Homo sapiens
tatgccctgaagtat

SEQ ID NO: 1679704 - DNA, 15 bp, Homo sapiens
atgccctgaagtatt

SEQ ID NO: 1679705 - DNA, 15 bp, Homo sapiens
tgccctgaagtattt

SEQ ID NO: 1679706 - DNA, 15 bp, Homo sapiens
gccctgaagtattta

SEQ ID NO: 1679707 - DNA, 15 bp, Homo sapiens
ccctgaagtatttag

SEQ ID NO: 1679708 - DNA, 15 bp, Homo sapiens
cctgaagtatttagg

SEQ ID NO: 1679709 - DNA, 15 bp, Homo sapiens
ctgaagtatttagga

SEQ ID NO: 1679710 - DNA, 15 bp, Homo sapiens
tgaagtatttaggag

SEQ ID NO: 1679711 - DNA, 15 bp, Homo sapiens
gaagtatttaggagt

SEQ ID NO: 1679712 - DNA, 15 bp, Homo sapiens
aagtatttaggagtg

SEQ ID NO: 1679713 - DNA, 15 bp, Homo sapiens
agtatttaggagtga

SEQ ID NO: 1679714 - DNA, 15 bp, Homo sapiens
gtatttaggagtgaa

SEQ ID NO: 1679715 - DNA, 15 bp, Homo sapiens
tatttaggagtgaag

SEQ ID NO: 1679716 - DNA, 15 bp, Homo sapiens
atttaggagtgaagg

SEQ ID NO: 1679717 - DNA, 15 bp, Homo sapiens
tttaggagtgaaggg

SEQ ID NO: 1679718 - DNA, 15 bp, Homo sapiens
ttaggagtgaagggc

SEQ ID NO: 1679719 - DNA, 15 bp, Homo sapiens
taggagtgaagggct

SEQ ID NO: 1679720 - DNA, 15 bp, Homo sapiens
aggagtgaagggctg

SEQ ID NO: 1679721 - DNA, 15 bp, Homo sapiens
ggagtgaagggctgt

SEQ ID NO: 1679722 - DNA, 15 bp, Homo sapiens
gagtgaagggctgtg

SEQ ID NO: 1679723 - DNA, 15 bp, Homo sapiens
agtgaagggctgtga

SEQ ID NO: 1679724 - DNA, 15 bp, Homo sapiens
gtgaagggctgtgat

SEQ ID NO: 1679725 - DNA, 15 bp, Homo sapiens
tgaagggctgtgatg

SEQ ID NO: 1679726 - DNA, 15 bp, Homo sapiens
gaagggctgtgatga

SEQ ID NO: 1679727 - DNA, 15 bp, Homo sapiens
aagggctgtgatgag

SEQ ID NO: 1679728 - DNA, 15 bp, Homo sapiens
agggctgtgatgagt

SEQ ID NO: 1679729 - DNA, 15 bp, Homo sapiens
gggctgtgatgagta

SEQ ID NO: 1679730 - DNA, 15 bp, Homo sapiens
ggctgtgatgagtaa

SEQ ID NO: 1679731 - DNA, 15 bp, Homo sapiens
gctgtgatgagtaat

SEQ ID NO: 1679732 - DNA, 15 bp, Homo sapiens
ctgtgatgagtaatt

SEQ ID NO: 1679733 - DNA, 15 bp, Homo sapiens
tgtgatgagtaattt

SEQ ID NO: 1679734 - DNA, 15 bp, Homo sapiens
gtgatgagtaattta

SEQ ID NO: 1679735 - DNA, 15 bp, Homo sapiens
tgatgagtaatttac

SEQ ID NO: 1679736 - DNA, 15 bp, Homo sapiens
gatgagtaatttacc

SEQ ID NO: 1679737 - DNA, 15 bp, Homo sapiens
atgagtaatttaccc

SEQ ID NO: 1679738 - DNA, 15 bp, Homo sapiens
tgagtaatttaccct

SEQ ID NO: 1679739 - DNA, 15 bp, Homo sapiens
gagtaatttaccctc

SEQ ID NO: 1679740 - DNA, 15 bp, Homo sapiens
agtaatttaccctca

SEQ ID NO: 1679741 - DNA, 15 bp, Homo sapiens
gtaatttaccctcaa

SEQ ID NO: 1679742 - DNA, 15 bp, Homo sapiens
agtgttgaaaacaga

SEQ ID NO: 1679743 - DNA, 15 bp, Homo sapiens
gtgttgaaaacagaa

SEQ ID NO: 1679744 - DNA, 15 bp, Homo sapiens
tgttgaaaacagaaa

SEQ ID NO: 1679745 - DNA, 15 bp, Homo sapiens
gttgaaaacagaaaa

SEQ ID NO: 1679746 - DNA, 15 bp, Homo sapiens
ttgaaaacagaaaaa

SEQ ID NO: 1679747 - DNA, 15 bp, Homo sapiens
tgaaaacagaaaaaa

SEQ ID NO: 1679748 - DNA, 15 bp, Homo sapiens
gaaaacagaaaaaaa

SEQ ID NO: 1679749 - DNA, 15 bp, Homo sapiens
aaaacagaaaaaaaa

SEQ ID NO: 1679750 - DNA, 15 bp, Homo sapiens
aaacagaaaaaaaaa

SEQ ID NO: 1679751 - DNA, 15 bp, Homo sapiens
aacagaaaaaaaaat

SEQ ID NO: 1679752 - DNA, 15 bp, Homo sapiens
acagaaaaaaaaatc

SEQ ID NO: 1679753 - DNA, 15 bp, Homo sapiens
cagaaaaaaaaatct

SEQ ID NO: 1679754 - DNA, 15 bp, Homo sapiens
agaaaaaaaaatcta

SEQ ID NO: 1679755 - DNA, 15 bp, Homo sapiens
gaaaaaaaaatctaa

SEQ ID NO: 1679756 - DNA, 15 bp, Homo sapiens
aaaaaaaaatctaag

SEQ ID NO: 1679757 - DNA, 15 bp, Homo sapiens
aaaaaaaatctaagg

SEQ ID NO: 1679758 - DNA, 15 bp, Homo sapiens
aaaaaaatctaaggg

SEQ ID NO: 1679759 - DNA, 15 bp, Homo sapiens
aaaaatctaagggca

SEQ ID NO: 1679760 - DNA, 15 bp, Homo sapiens
aaaatctaagggcaa

SEQ ID NO: 1679761 - DNA, 15 bp, Homo sapiens
aaatctaagggcaaa

SEQ ID NO: 1679762 - DNA, 15 bp, Homo sapiens
aatctaagggcaaaa

SEQ ID NO: 1679763 - DNA, 15 bp, Homo sapiens
atctaagggcaaaat

SEQ ID NO: 1679764 - DNA, 15 bp, Homo sapiens
tctaagggcaaaata

SEQ ID NO: 1679765 - DNA, 15 bp, Homo sapiens
ctaagggcaaaataa

SEQ ID NO: 1679766 - DNA, 15 bp, Homo sapiens
taagggcaaaataac

SEQ ID NO: 1679767 - DNA, 15 bp, Homo sapiens
aagggcaaaataact

SEQ ID NO: 1679768 - DNA, 15 bp, Homo sapiens
agggcaaaataactt

SEQ ID NO: 1679769 - DNA, 15 bp, Homo sapiens
gggcaaaataacttc

SEQ ID NO: 1679770 - DNA, 15 bp, Homo sapiens
ggcaaaataacttct

SEQ ID NO: 1679771 - DNA, 15 bp, Homo sapiens
gcaaaataacttctc

SEQ ID NO: 1679772 - DNA, 15 bp, Homo sapiens
caaaataacttctct

SEQ ID NO: 1679773 - DNA, 15 bp, Homo sapiens
aaaataacttctctt

SEQ ID NO: 1679774 - DNA, 15 bp, Homo sapiens
aaataacttctcttg

SEQ ID NO: 1679775 - DNA, 15 bp, Homo sapiens
aataacttctcttgt

SEQ ID NO: 1679776 - DNA, 15 bp, Homo sapiens
ataacttctcttgtt

SEQ ID NO: 1679777 - DNA, 15 bp, Homo sapiens
taacttctcttgtta

SEQ ID NO: 1679778 - DNA, 15 bp, Homo sapiens
aacttctcttgttaa

SEQ ID NO: 1679779 - DNA, 15 bp, Homo sapiens
acttctcttgttaaa

SEQ ID NO: 1679780 - DNA, 15 bp, Homo sapiens
cttctcttgttaaaa

SEQ ID NO: 1679781 - DNA, 15 bp, Homo sapiens
ttctcttgttaaaat

SEQ ID NO: 1679782 - DNA, 15 bp, Homo sapiens
tctcttgttaaaatg

SEQ ID NO: 1679783 - DNA, 15 bp, Homo sapiens
ctcttgttaaaatgc

SEQ ID NO: 1679784 - DNA, 15 bp, Homo sapiens
tcttgttaaaatgcc

SEQ ID NO: 1679785 - DNA, 15 bp, Homo sapiens
cttgttaaaatgcca

SEQ ID NO: 1679786 - DNA, 15 bp, Homo sapiens
ttgttaaaatgccat

SEQ ID NO: 1679787 - DNA, 15 bp, Homo sapiens
tgttaaaatgccatc

SEQ ID NO: 1679788 - DNA, 15 bp, Homo sapiens
gttaaaatgccatct

SEQ ID NO: 1679789 - DNA, 15 bp, Homo sapiens
ttaaaatgccatctt

SEQ ID NO: 1679790 - DNA, 15 bp, Homo sapiens
taaaatgccatcttt

SEQ ID NO: 1679791 - DNA, 15 bp, Homo sapiens
aaaatgccatctttt

SEQ ID NO: 1679792 - DNA, 15 bp, Homo sapiens
aaatgccatcttttc

SEQ ID NO: 1679793 - DNA, 15 bp, Homo sapiens
aatgccatcttttcg

SEQ ID NO: 1679794 - DNA, 15 bp, Homo sapiens
atgccatcttttcgt

SEQ ID NO: 1679795 - DNA, 15 bp, Homo sapiens
tgccatcttttcgtc

SEQ ID NO: 1679796 - DNA, 15 bp, Homo sapiens
gccatcttttcgtca

SEQ ID NO: 1679797 - DNA, 15 bp, Homo sapiens
ccatcttttcgtcag

SEQ ID NO: 1679798 - DNA, 15 bp, Homo sapiens
catcttttcgtcaga

SEQ ID NO: 1679799 - DNA, 15 bp, Homo sapiens
atcttttcgtcagaa

SEQ ID NO: 1679800 - DNA, 15 bp, Homo sapiens
tcttttcgtcagaaa

SEQ ID NO: 1679801 - DNA, 15 bp, Homo sapiens
cttttcgtcagaaaa

SEQ ID NO: 1679802 - DNA, 15 bp, Homo sapiens
ttttcgtcagaaaaa

SEQ ID NO: 1679803 - DNA, 15 bp, Homo sapiens
tttcgtcagaaaaaa

SEQ ID NO: 1679804 - DNA, 15 bp, Homo sapiens
ttcgtcagaaaaaaa

SEQ ID NO: 1679805 - DNA, 15 bp, Homo sapiens
tcgtcagaaaaaaaa

SEQ ID NO: 1679806 - DNA, 15 bp, Homo sapiens
cgtcagaaaaaaaaa

SEQ ID NO: 1679807 - DNA, 15 bp, Homo sapiens
gtcagaaaaaaaaaa

SEQ ID NO: 1679808 - DNA, 15 bp, Homo sapiens
tcagaaaaaaaaaat

SEQ ID NO: 1679809 - DNA, 15 bp, Homo sapiens
cagaaaaaaaaaatt

SEQ ID NO: 1679810 - DNA, 15 bp, Homo sapiens
agaaaaaaaaaattt

SEQ ID NO: 1679811 - DNA, 15 bp, Homo sapiens
gaaaaaaaaaatttc

SEQ ID NO: 1679812 - DNA, 15 bp, Homo sapiens
aaaaaaaaaatttcc

SEQ ID NO: 1679813 - DNA, 15 bp, Homo sapiens
aaaaaaaaatttccc

SEQ ID NO: 1679814 - DNA, 15 bp, Homo sapiens
aaaaaaaatttccca

SEQ ID NO: 1679815 - DNA, 15 bp, Homo sapiens
aaaaaaatttcccag

SEQ ID NO: 1679816 - DNA, 15 bp, Homo sapiens
aaaaaatttcccaga

SEQ ID NO: 1679817 - DNA, 15 bp, Homo sapiens
aaaatttcccagaag

SEQ ID NO: 1679818 - DNA, 15 bp, Homo sapiens
aaatttcccagaagg

SEQ ID NO: 1679819 - DNA, 15 bp, Homo sapiens
aatttcccagaagga

SEQ ID NO: 1679820 - DNA, 15 bp, Homo sapiens
atttcccagaaggat

SEQ ID NO: 1679821 - DNA, 15 bp, Homo sapiens
tttcccagaaggatc

SEQ ID NO: 1679822 - DNA, 15 bp, Homo sapiens
ttcccagaaggatct

SEQ ID NO: 1679823 - DNA, 15 bp, Homo sapiens
tcccagaaggatctc

SEQ ID NO: 1679824 - DNA, 15 bp, Homo sapiens
cccagaaggatctcc

SEQ ID NO: 1679825 - DNA, 15 bp, Homo sapiens
ccagaaggatctcca

SEQ ID NO: 1679826 - DNA, 15 bp, Homo sapiens
cagaaggatctccac

SEQ ID NO: 1679827 - DNA, 15 bp, Homo sapiens
agaaggatctccaca

SEQ ID NO: 1679828 - DNA, 15 bp, Homo sapiens
gaaggatctccacag

SEQ ID NO: 1679829 - DNA, 15 bp, Homo sapiens
aaggatctccacaga

SEQ ID NO: 1679830 - DNA, 15 bp, Homo sapiens
aggatctccacagat

SEQ ID NO: 1679831 - DNA, 15 bp, Homo sapiens
ggatctccacagatt

SEQ ID NO: 1679832 - DNA, 15 bp, Homo sapiens
gatctccacagattt

SEQ ID NO: 1679833 - DNA, 15 bp, Homo sapiens
atctccacagatttt

SEQ ID NO: 1679834 - DNA, 15 bp, Homo sapiens
tctccacagattttc

SEQ ID NO: 1679835 - DNA, 15 bp, Homo sapiens
ctccacagattttct

SEQ ID NO: 1679836 - DNA, 15 bp, Homo sapiens
tccacagattttctt

SEQ ID NO: 1679837 - DNA, 15 bp, Homo sapiens
ccacagattttcttc

SEQ ID NO: 1679838 - DNA, 15 bp, Homo sapiens
cacagattttcttct

SEQ ID NO: 1679839 - DNA, 15 bp, Homo sapiens
acagattttcttctt

SEQ ID NO: 1679840 - DNA, 15 bp, Homo sapiens
cagattttcttctta

SEQ ID NO: 1679841 - DNA, 15 bp, Homo sapiens
agattttcttcttat

SEQ ID NO: 1679842 - DNA, 15 bp, Homo sapiens
gattttcttcttata

SEQ ID NO: 1679843 - DNA, 15 bp, Homo sapiens
attttcttcttatat

SEQ ID NO: 1679844 - DNA, 15 bp, Homo sapiens
ttttcttcttatatt

SEQ ID NO: 1679845 - DNA, 15 bp, Homo sapiens
tttcttcttatattt

SEQ ID NO: 1679846 - DNA, 15 bp, Homo sapiens
ttcttcttatatttc

SEQ ID NO: 1679847 - DNA, 15 bp, Homo sapiens
tcttcttatatttca

SEQ ID NO: 1679848 - DNA, 15 bp, Homo sapiens
cttcttatatttcac

SEQ ID NO: 1679849 - DNA, 15 bp, Homo sapiens
ttcttatatttcact

SEQ ID NO: 1679850 - DNA, 15 bp, Homo sapiens
tcttatatttcactg

SEQ ID NO: 1679851 - DNA, 15 bp, Homo sapiens
cttatatttcactga

SEQ ID NO: 1679852 - DNA, 15 bp, Homo sapiens
ttatatttcactgaa

SEQ ID NO: 1679853 - DNA, 15 bp, Homo sapiens
tatatttcactgaac

SEQ ID NO: 1679854 - DNA, 15 bp, Homo sapiens
atatttcactgaaca

SEQ ID NO: 1679855 - DNA, 15 bp, Homo sapiens
tatttcactgaacag

SEQ ID NO: 1679856 - DNA, 15 bp, Homo sapiens
atttcactgaacaga

SEQ ID NO: 1679857 - DNA, 15 bp, Homo sapiens
tttcactgaacagaa

SEQ ID NO: 1679858 - DNA, 15 bp, Homo sapiens
ttcactgaacagaac

SEQ ID NO: 1679859 - DNA, 15 bp, Homo sapiens
tcactgaacagaact

SEQ ID NO: 1679860 - DNA, 15 bp, Homo sapiens
cactgaacagaactg

SEQ ID NO: 1679861 - DNA, 15 bp, Homo sapiens
actgaacagaactgg

SEQ ID NO: 1679862 - DNA, 15 bp, Homo sapiens
ctgaacagaactggg

SEQ ID NO: 1679863 - DNA, 15 bp, Homo sapiens
tgaacagaactgggt

SEQ ID NO: 1679864 - DNA, 15 bp, Homo sapiens
gaacagaactgggtc

SEQ ID NO: 1679865 - DNA, 15 bp, Homo sapiens
aacagaactgggtca

SEQ ID NO: 1679866 - DNA, 15 bp, Homo sapiens
acagaactgggtcac

SEQ ID NO: 1679867 - DNA, 15 bp, Homo sapiens
cagaactgggtcaca

SEQ ID NO: 1679868 - DNA, 15 bp, Homo sapiens
agaactgggtcacat

SEQ ID NO: 1679869 - DNA, 15 bp, Homo sapiens
gaactgggtcacatg

SEQ ID NO: 1679870 - DNA, 15 bp, Homo sapiens
aactgggtcacatgt

SEQ ID NO: 1679871 - DNA, 15 bp, Homo sapiens
actgggtcacatgtc

SEQ ID NO: 1679872 - DNA, 15 bp, Homo sapiens
ctgggtcacatgtct

SEQ ID NO: 1679873 - DNA, 15 bp, Homo sapiens
tgggtcacatgtctt

SEQ ID NO: 1679874 - DNA, 15 bp, Homo sapiens
gggtcacatgtctta

SEQ ID NO: 1679875 - DNA, 15 bp, Homo sapiens
ggtcacatgtcttaa

SEQ ID NO: 1679876 - DNA, 15 bp, Homo sapiens
gtcacatgtcttaac

SEQ ID NO: 1679877 - DNA, 15 bp, Homo sapiens
tcacatgtcttaact

SEQ ID NO: 1679878 - DNA, 15 bp, Homo sapiens
cacatgtcttaactc

SEQ ID NO: 1679879 - DNA, 15 bp, Homo sapiens
acatgtcttaactcc

SEQ ID NO: 1679880 - DNA, 15 bp, Homo sapiens
catgtcttaactcca

SEQ ID NO: 1679881 - DNA, 15 bp, Homo sapiens
atgtcttaactccat

SEQ ID NO: 1679882 - DNA, 15 bp, Homo sapiens
tgtcttaactccatt

SEQ ID NO: 1679883 - DNA, 15 bp, Homo sapiens
gtcttaactccattc

SEQ ID NO: 1679884 - DNA, 15 bp, Homo sapiens
tcttaactccattct

SEQ ID NO: 1679885 - DNA, 15 bp, Homo sapiens
cttaactccattcta

SEQ ID NO: 1679886 - DNA, 15 bp, Homo sapiens
ttaactccattctat

SEQ ID NO: 1679887 - DNA, 15 bp, Homo sapiens
taactccattctatc

SEQ ID NO: 1679888 - DNA, 15 bp, Homo sapiens
aactccattctatca

SEQ ID NO: 1679889 - DNA, 15 bp, Homo sapiens
actccattctatcaa

SEQ ID NO: 1679890 - DNA, 15 bp, Homo sapiens
ctccattctatcaaa

SEQ ID NO: 1679891 - DNA, 15 bp, Homo sapiens
tccattctatcaaaa

SEQ ID NO: 1679892 - DNA, 15 bp, Homo sapiens
ccattctatcaaaag

SEQ ID NO: 1679893 - DNA, 15 bp, Homo sapiens
cattctatcaaaagg

SEQ ID NO: 1679894 - DNA, 15 bp, Homo sapiens
attctatcaaaagga

SEQ ID NO: 1679895 - DNA, 15 bp, Homo sapiens
ttctatcaaaaggag

SEQ ID NO: 1679896 - DNA, 15 bp, Homo sapiens
tctatcaaaaggagt

SEQ ID NO: 1679897 - DNA, 15 bp, Homo sapiens
ctatcaaaaggagta

SEQ ID NO: 1679898 - DNA, 15 bp, Homo sapiens
tatcaaaaggagtag

SEQ ID NO: 1679899 - DNA, 15 bp, Homo sapiens
atcaaaaggagtagg

SEQ ID NO: 1679900 - DNA, 15 bp, Homo sapiens
tcaaaaggagtaggg

SEQ ID NO: 1679901 - DNA, 15 bp, Homo sapiens
caaaaggagtagggg

SEQ ID NO: 1679902 - DNA, 15 bp, Homo sapiens
aaaaggagtagggga

SEQ ID NO: 1679903 - DNA, 15 bp, Homo sapiens
aaaggagtaggggaa

SEQ ID NO: 1679904 - DNA, 15 bp, Homo sapiens
aaggagtaggggaat

SEQ ID NO: 1679905 - DNA, 15 bp, Homo sapiens
aggagtaggggaatg

SEQ ID NO: 1679906 - DNA, 15 bp, Homo sapiens
ggagtaggggaatgg

SEQ ID NO: 1679907 - DNA, 15 bp, Homo sapiens
gagtaggggaatgga

SEQ ID NO: 1679908 - DNA, 15 bp, Homo sapiens
agtaggggaatggaa

SEQ ID NO: 1679909 - DNA, 15 bp, Homo sapiens
gtaggggaatggaat

SEQ ID NO: 1679910 - DNA, 15 bp, Homo sapiens
taggggaatggaatg

SEQ ID NO: 1679911 - DNA, 15 bp, Homo sapiens
aggggaatggaatga

SEQ ID NO: 1679912 - DNA, 15 bp, Homo sapiens
ggggaatggaatgac

SEQ ID NO: 1679913 - DNA, 15 bp, Homo sapiens
gggaatggaatgacc

SEQ ID NO: 1679914 - DNA, 15 bp, Homo sapiens
ggaatggaatgacca

SEQ ID NO: 1679915 - DNA, 15 bp, Homo sapiens
gaatggaatgaccat

SEQ ID NO: 1679916 - DNA, 15 bp, Homo sapiens
aatggaatgaccatg

SEQ ID NO: 1679917 - DNA, 15 bp, Homo sapiens
atggaatgaccatga

SEQ ID NO: 1679918 - DNA, 15 bp, Homo sapiens
tggaatgaccatgac

SEQ ID NO: 1679919 - DNA, 15 bp, Homo sapiens
ggaatgaccatgact

SEQ ID NO: 1679920 - DNA, 15 bp, Homo sapiens
gaatgaccatgactg

SEQ ID NO: 1679921 - DNA, 15 bp, Homo sapiens
aatgaccatgactga

SEQ ID NO: 1679922 - DNA, 15 bp, Homo sapiens
atgaccatgactgat

SEQ ID NO: 1679923 - DNA, 15 bp, Homo sapiens
tgaccatgactgatt

SEQ ID NO: 1679924 - DNA, 15 bp, Homo sapiens
gaccatgactgattt

SEQ ID NO: 1679925 - DNA, 15 bp, Homo sapiens
accatgactgattta

SEQ ID NO: 1679926 - DNA, 15 bp, Homo sapiens
ccatgactgatttag

SEQ ID NO: 1679927 - DNA, 15 bp, Homo sapiens
catgactgatttaga

SEQ ID NO: 1679928 - DNA, 15 bp, Homo sapiens
atgactgatttagac

SEQ ID NO: 1679929 - DNA, 15 bp, Homo sapiens
tgactgatttagact

SEQ ID NO: 1679930 - DNA, 15 bp, Homo sapiens
gactgatttagactt

SEQ ID NO: 1679931 - DNA, 15 bp, Homo sapiens
actgatttagacttt

SEQ ID NO: 1679932 - DNA, 15 bp, Homo sapiens
ctgatttagactttg

SEQ ID NO: 1679933 - DNA, 15 bp, Homo sapiens
tgatttagactttgg

SEQ ID NO: 1679934 - DNA, 15 bp, Homo sapiens
gatttagactttgga

SEQ ID NO: 1679935 - DNA, 15 bp, Homo sapiens
atttagactttggag

SEQ ID NO: 1679936 - DNA, 15 bp, Homo sapiens
tttagactttggagc

SEQ ID NO: 1679937 - DNA, 15 bp, Homo sapiens
ttagactttggagct

SEQ ID NO: 1679938 - DNA, 15 bp, Homo sapiens
tagactttggagctg

SEQ ID NO: 1679939 - DNA, 15 bp, Homo sapiens
agactttggagctgg

SEQ ID NO: 1679940 - DNA, 15 bp, Homo sapiens
gactttggagctggg

SEQ ID NO: 1679941 - DNA, 15 bp, Homo sapiens
actttggagctgggg

SEQ ID NO: 1679942 - DNA, 15 bp, Homo sapiens
ctttggagctggggc

SEQ ID NO: 1679943 - DNA, 15 bp, Homo sapiens
tttggagctggggct

SEQ ID NO: 1679944 - DNA, 15 bp, Homo sapiens
ttggagctggggcta

SEQ ID NO: 1679945 - DNA, 15 bp, Homo sapiens
tggagctggggctag

SEQ ID NO: 1679946 - DNA, 15 bp, Homo sapiens
ggagctggggctagg

SEQ ID NO: 1679947 - DNA, 15 bp, Homo sapiens
gagctggggctaggc

SEQ ID NO: 1679948 - DNA, 15 bp, Homo sapiens
agctggggctaggcc

SEQ ID NO: 1679949 - DNA, 15 bp, Homo sapiens
gctggggctaggcct

SEQ ID NO: 1679950 - DNA, 15 bp, Homo sapiens
ctggggctaggcctg

SEQ ID NO: 1679951 - DNA, 15 bp, Homo sapiens
tggggctaggcctgg

SEQ ID NO: 1679952 - DNA, 15 bp, Homo sapiens
ggggctaggcctgga

SEQ ID NO: 1679953 - DNA, 15 bp, Homo sapiens
gggctaggcctggag

SEQ ID NO: 1679954 - DNA, 15 bp, Homo sapiens
ggctaggcctggagc

SEQ ID NO: 1679955 - DNA, 15 bp, Homo sapiens
gctaggcctggagcc

SEQ ID NO: 1679956 - DNA, 15 bp, Homo sapiens
ctaggcctggagccc

SEQ ID NO: 1679957 - DNA, 15 bp, Homo sapiens
taggcctggagccca

SEQ ID NO: 1679958 - DNA, 15 bp, Homo sapiens
aggcctggagcccac

SEQ ID NO: 1679959 - DNA, 15 bp, Homo sapiens
ggcctggagcccacc

SEQ ID NO: 1679960 - DNA, 15 bp, Homo sapiens
cctggagcccacctt

SEQ ID NO: 1679961 - DNA, 15 bp, Homo sapiens
ctggagcccaccttc

SEQ ID NO: 1679962 - DNA, 15 bp, Homo sapiens
tggagcccaccttcc

SEQ ID NO: 1679963 - DNA, 15 bp, Homo sapiens
ggagcccaccttccc

SEQ ID NO: 1679964 - DNA, 15 bp, Homo sapiens
gagcccaccttccct

SEQ ID NO: 1679965 - DNA, 15 bp, Homo sapiens
agcccaccttccctg

SEQ ID NO: 1679966 - DNA, 15 bp, Homo sapiens
gcccaccttccctga

SEQ ID NO: 1679967 - DNA, 15 bp, Homo sapiens
cccaccttccctgaa

SEQ ID NO: 1679968 - DNA, 15 bp, Homo sapiens
ccaccttccctgaat

SEQ ID NO: 1679969 - DNA, 15 bp, Homo sapiens
caccttccctgaatg

SEQ ID NO: 1679970 - DNA, 15 bp, Homo sapiens
accttccctgaatgt

SEQ ID NO: 1679971 - DNA, 15 bp, Homo sapiens
ccttccctgaatgtg

SEQ ID NO: 1679972 - DNA, 15 bp, Homo sapiens
cttccctgaatgtgt

SEQ ID NO: 1679973 - DNA, 15 bp, Homo sapiens
ttccctgaatgtgtt

SEQ ID NO: 1679974 - DNA, 15 bp, Homo sapiens
tccctgaatgtgttt

SEQ ID NO: 1679975 - DNA, 15 bp, Homo sapiens
ccctgaatgtgtttc

SEQ ID NO: 1679976 - DNA, 15 bp, Homo sapiens
cctgaatgtgtttct

SEQ ID NO: 1679977 - DNA, 15 bp, Homo sapiens
ctgaatgtgtttctt

SEQ ID NO: 1679978 - DNA, 15 bp, Homo sapiens
tgaatgtgtttcttt

SEQ ID NO: 1679979 - DNA, 15 bp, Homo sapiens
gaatgtgtttctttc

SEQ ID NO: 1679980 - DNA, 15 bp, Homo sapiens
aatgtgtttctttcc

SEQ ID NO: 1679981 - DNA, 15 bp, Homo sapiens
atgtgtttctttcca

SEQ ID NO: 1679982 - DNA, 15 bp, Homo sapiens
tgtgtttctttccaa

SEQ ID NO: 1679983 - DNA, 15 bp, Homo sapiens
gtgtttctttccaaa

SEQ ID NO: 1679984 - DNA, 15 bp, Homo sapiens
tgtttctttccaaac

SEQ ID NO: 1679985 - DNA, 15 bp, Homo sapiens
gtttctttccaaact

SEQ ID NO: 1679986 - DNA, 15 bp, Homo sapiens
tttctttccaaactt

SEQ ID NO: 1679987 - DNA, 15 bp, Homo sapiens
ttctttccaaactta

SEQ ID NO: 1679988 - DNA, 15 bp, Homo sapiens
tctttccaaacttag

SEQ ID NO: 1679989 - DNA, 15 bp, Homo sapiens
ctttccaaacttagg

SEQ ID NO: 1679990 - DNA, 15 bp, Homo sapiens
tttccaaacttaggg

SEQ ID NO: 1679991 - DNA, 15 bp, Homo sapiens
ttccaaacttagggt

SEQ ID NO: 1679992 - DNA, 15 bp, Homo sapiens
tccaaacttagggtt

SEQ ID NO: 1679993 - DNA, 15 bp, Homo sapiens
ccaaacttagggttt

SEQ ID NO: 1679994 - DNA, 15 bp, Homo sapiens
caaacttagggtttt

SEQ ID NO: 1679995 - DNA, 15 bp, Homo sapiens
aaacttagggttttg

SEQ ID NO: 1679996 - DNA, 15 bp, Homo sapiens
aacttagggttttgt

SEQ ID NO: 1679997 - DNA, 15 bp, Homo sapiens
acttagggttttgtt

SEQ ID NO: 1679998 - DNA, 15 bp, Homo sapiens
cttagggttttgtta

SEQ ID NO: 1679999 - DNA, 15 bp, Homo sapiens
ttagggttttgttag

SEQ ID NO: 1680000 - DNA, 15 bp, Homo sapiens
tagggttttgttagt

SEQ ID NO: 1680001 - DNA, 15 bp, Homo sapiens
agggttttgttagta

SEQ ID NO: 1680002 - DNA, 15 bp, Homo sapiens
gggttttgttagtaa

SEQ ID NO: 1680003 - DNA, 15 bp, Homo sapiens
ggttttgttagtaag

SEQ ID NO: 1680004 - DNA, 15 bp, Homo sapiens
gttttgttagtaagg

SEQ ID NO: 1680005 - DNA, 15 bp, Homo sapiens
ttttgttagtaagga

SEQ ID NO: 1680006 - DNA, 15 bp, Homo sapiens
tttgttagtaaggaa

SEQ ID NO: 1680007 - DNA, 15 bp, Homo sapiens
ttgttagtaaggaag

SEQ ID NO: 1680008 - DNA, 15 bp, Homo sapiens
tgttagtaaggaaga

SEQ ID NO: 1680009 - DNA, 15 bp, Homo sapiens
gttagtaaggaagaa

SEQ ID NO: 1680010 - DNA, 15 bp, Homo sapiens
ttagtaaggaagaaa

SEQ ID NO: 1680011 - DNA, 15 bp, Homo sapiens
tagtaaggaagaaag

SEQ ID NO: 1680012 - DNA, 15 bp, Homo sapiens
agtaaggaagaaagt

SEQ ID NO: 1680013 - DNA, 15 bp, Homo sapiens
gtaaggaagaaagta

SEQ ID NO: 1680014 - DNA, 15 bp, Homo sapiens
taaggaagaaagtac

SEQ ID NO: 1680015 - DNA, 15 bp, Homo sapiens
aaggaagaaagtact

SEQ ID NO: 1680016 - DNA, 15 bp, Homo sapiens
aggaagaaagtacta

SEQ ID NO: 1680017 - DNA, 15 bp, Homo sapiens
ggaagaaagtactaa

SEQ ID NO: 1680018 - DNA, 15 bp, Homo sapiens
gaagaaagtactaac

SEQ ID NO: 1680019 - DNA, 15 bp, Homo sapiens
aagaaagtactaaca

SEQ ID NO: 1680020 - DNA, 15 bp, Homo sapiens
agaaagtactaacat

SEQ ID NO: 1680021 - DNA, 15 bp, Homo sapiens
gaaagtactaacatc

SEQ ID NO: 1680022 - DNA, 15 bp, Homo sapiens
aaagtactaacatca

SEQ ID NO: 1680023 - DNA, 15 bp, Homo sapiens
aagtactaacatcaa

SEQ ID NO: 1680024 - DNA, 15 bp, Homo sapiens
agtactaacatcaaa

SEQ ID NO: 1680025 - DNA, 15 bp, Homo sapiens
gtactaacatcaaat

SEQ ID NO: 1680026 - DNA, 15 bp, Homo sapiens
tactaacatcaaata

SEQ ID NO: 1680027 - DNA, 15 bp, Homo sapiens
actaacatcaaatag

SEQ ID NO: 1680028 - DNA, 15 bp, Homo sapiens
ctaacatcaaatagt

SEQ ID NO: 1680029 - DNA, 15 bp, Homo sapiens
taacatcaaatagtg

SEQ ID NO: 1680030 - DNA, 15 bp, Homo sapiens
aacatcaaatagtga

SEQ ID NO: 1680031 - DNA, 15 bp, Homo sapiens
acatcaaatagtgac

SEQ ID NO: 1680032 - DNA, 15 bp, Homo sapiens
catcaaatagtgact

SEQ ID NO: 1680033 - DNA, 15 bp, Homo sapiens
atcaaatagtgactg

SEQ ID NO: 1680034 - DNA, 15 bp, Homo sapiens
tcaaatagtgactgt

SEQ ID NO: 1680035 - DNA, 15 bp, Homo sapiens
caaatagtgactgtc

SEQ ID NO: 1680036 - DNA, 15 bp, Homo sapiens
aaatagtgactgtca

SEQ ID NO: 1680037 - DNA, 15 bp, Homo sapiens
aatagtgactgtcag

SEQ ID NO: 1680038 - DNA, 15 bp, Homo sapiens
atagtgactgtcaga

SEQ ID NO: 1680039 - DNA, 15 bp, Homo sapiens
tagtgactgtcagac

SEQ ID NO: 1680040 - DNA, 15 bp, Homo sapiens
agtgactgtcagaca

SEQ ID NO: 1680041 - DNA, 15 bp, Homo sapiens
gtgactgtcagacaa

SEQ ID NO: 1680042 - DNA, 15 bp, Homo sapiens
tgactgtcagacaag

SEQ ID NO: 1680043 - DNA, 15 bp, Homo sapiens
gactgtcagacaaga

SEQ ID NO: 1680044 - DNA, 15 bp, Homo sapiens
actgtcagacaagat

SEQ ID NO: 1680045 - DNA, 15 bp, Homo sapiens
ctgtcagacaagata

SEQ ID NO: 1680046 - DNA, 15 bp, Homo sapiens
tgtcagacaagatag

SEQ ID NO: 1680047 - DNA, 15 bp, Homo sapiens
gtcagacaagataga

SEQ ID NO: 1680048 - DNA, 15 bp, Homo sapiens
tcagacaagatagag

SEQ ID NO: 1680049 - DNA, 15 bp, Homo sapiens
cagacaagatagagt

SEQ ID NO: 1680050 - DNA, 15 bp, Homo sapiens
agacaagatagagta

SEQ ID NO: 1680051 - DNA, 15 bp, Homo sapiens
gacaagatagagtaa

SEQ ID NO: 1680052 - DNA, 15 bp, Homo sapiens
acaagatagagtaag

SEQ ID NO: 1680053 - DNA, 15 bp, Homo sapiens
caagatagagtaagg

SEQ ID NO: 1680054 - DNA, 15 bp, Homo sapiens
aagatagagtaaggc

SEQ ID NO: 1680055 - DNA, 15 bp, Homo sapiens
agatagagtaaggca

SEQ ID NO: 1680056 - DNA, 15 bp, Homo sapiens
gatagagtaaggcaa

SEQ ID NO: 1680057 - DNA, 15 bp, Homo sapiens
atagagtaaggcaat

SEQ ID NO: 1680058 - DNA, 15 bp, Homo sapiens
tagagtaaggcaatt

SEQ ID NO: 1680059 - DNA, 15 bp, Homo sapiens
agagtaaggcaattg

SEQ ID NO: 1680060 - DNA, 15 bp, Homo sapiens
gagtaaggcaattgg

SEQ ID NO: 1680061 - DNA, 15 bp, Homo sapiens
agtaaggcaattggc

SEQ ID NO: 1680062 - DNA, 15 bp, Homo sapiens
gtaaggcaattggca

SEQ ID NO: 1680063 - DNA, 15 bp, Homo sapiens
taaggcaattggcaa

SEQ ID NO: 1680064 - DNA, 15 bp, Homo sapiens
aaggcaattggcaaa

SEQ ID NO: 1680065 - DNA, 15 bp, Homo sapiens
aggcaattggcaaag

SEQ ID NO: 1680066 - DNA, 15 bp, Homo sapiens
ggcaattggcaaagg

SEQ ID NO: 1680067 - DNA, 15 bp, Homo sapiens
gcaattggcaaaggt

SEQ ID NO: 1680068 - DNA, 15 bp, Homo sapiens
caattggcaaaggtc

SEQ ID NO: 1680069 - DNA, 15 bp, Homo sapiens
aattggcaaaggtct

SEQ ID NO: 1680070 - DNA, 15 bp, Homo sapiens
attggcaaaggtctt

SEQ ID NO: 1680071 - DNA, 15 bp, Homo sapiens
ttggcaaaggtcttt

SEQ ID NO: 1680072 - DNA, 15 bp, Homo sapiens
tggcaaaggtcttta

SEQ ID NO: 1680073 - DNA, 15 bp, Homo sapiens
ggcaaaggtctttaa

SEQ ID NO: 1680074 - DNA, 15 bp, Homo sapiens
gcaaaggtctttaag

SEQ ID NO: 1680075 - DNA, 15 bp, Homo sapiens
caaaggtctttaagg

SEQ ID NO: 1680076 - DNA, 15 bp, Homo sapiens
aaaggtctttaagga

SEQ ID NO: 1680077 - DNA, 15 bp, Homo sapiens
aaggtctttaaggag

SEQ ID NO: 1680078 - DNA, 15 bp, Homo sapiens
aggtctttaaggagc

SEQ ID NO: 1680079 - DNA, 15 bp, Homo sapiens
ggtctttaaggagca

SEQ ID NO: 1680080 - DNA, 15 bp, Homo sapiens
gtctttaaggagcaa

SEQ ID NO: 1680081 - DNA, 15 bp, Homo sapiens
tctttaaggagcaac

SEQ ID NO: 1680082 - DNA, 15 bp, Homo sapiens
ctttaaggagcaact

SEQ ID NO: 1680083 - DNA, 15 bp, Homo sapiens
tttaaggagcaactt

SEQ ID NO: 1680084 - DNA, 15 bp, Homo sapiens
ttaaggagcaacttg

SEQ ID NO: 1680085 - DNA, 15 bp, Homo sapiens
taaggagcaacttgg

SEQ ID NO: 1680086 - DNA, 15 bp, Homo sapiens
aaggagcaacttggc

SEQ ID NO: 1680087 - DNA, 15 bp, Homo sapiens
aggagcaacttggct

SEQ ID NO: 1680088 - DNA, 15 bp, Homo sapiens
ggagcaacttggctt

SEQ ID NO: 1680089 - DNA, 15 bp, Homo sapiens
gagcaacttggcttt

SEQ ID NO: 1680090 - DNA, 15 bp, Homo sapiens
agcaacttggctttg

SEQ ID NO: 1680091 - DNA, 15 bp, Homo sapiens
gcaacttggctttgt

SEQ ID NO: 1680092 - DNA, 15 bp, Homo sapiens
caacttggctttgtg

SEQ ID NO: 1680093 - DNA, 15 bp, Homo sapiens
aacttggctttgtgg

SEQ ID NO: 1680094 - DNA, 15 bp, Homo sapiens
acttggctttgtgga

SEQ ID NO: 1680095 - DNA, 15 bp, Homo sapiens
cttggctttgtggag

SEQ ID NO: 1680096 - DNA, 15 bp, Homo sapiens
ttggctttgtggagg

SEQ ID NO: 1680097 - DNA, 15 bp, Homo sapiens
tggctttgtggaggg

SEQ ID NO: 1680098 - DNA, 15 bp, Homo sapiens
ggctttgtggagggg

SEQ ID NO: 1680099 - DNA, 15 bp, Homo sapiens
gctttgtggaggggg

SEQ ID NO: 1680100 - DNA, 15 bp, Homo sapiens
ctttgtggagggggt

SEQ ID NO: 1680101 - DNA, 15 bp, Homo sapiens
tttgtggagggggta

SEQ ID NO: 1680102 - DNA, 15 bp, Homo sapiens
ttgtggagggggtat

SEQ ID NO: 1680103 - DNA, 15 bp, Homo sapiens
tgtggagggggtata

SEQ ID NO: 1680104 - DNA, 15 bp, Homo sapiens
gtggagggggtatat

SEQ ID NO: 1680105 - DNA, 15 bp, Homo sapiens
tggagggggtatatg

SEQ ID NO: 1680106 - DNA, 15 bp, Homo sapiens
ggagggggtatatgt

SEQ ID NO: 1680107 - DNA, 15 bp, Homo sapiens
gagggggtatatgtt

SEQ ID NO: 1680108 - DNA, 15 bp, Homo sapiens
agggggtatatgttt

SEQ ID NO: 1680109 - DNA, 15 bp, Homo sapiens
gggggtatatgtttg

SEQ ID NO: 1680110 - DNA, 15 bp, Homo sapiens
ggggtatatgtttgg

SEQ ID NO: 1680111 - DNA, 15 bp, Homo sapiens
gggtatatgtttgga

SEQ ID NO: 1680112 - DNA, 15 bp, Homo sapiens
ggtatatgtttggag

SEQ ID NO: 1680113 - DNA, 15 bp, Homo sapiens
gtatatgtttggagc

SEQ ID NO: 1680114 - DNA, 15 bp, Homo sapiens
tatatgtttggagcc

SEQ ID NO: 1680115 - DNA, 15 bp, Homo sapiens
atatgtttggagccc

SEQ ID NO: 1680116 - DNA, 15 bp, Homo sapiens
tatgtttggagccct

SEQ ID NO: 1680117 - DNA, 15 bp, Homo sapiens
atgtttggagccctg

SEQ ID NO: 1680118 - DNA, 15 bp, Homo sapiens
tgtttggagccctgt

SEQ ID NO: 1680119 - DNA, 15 bp, Homo sapiens
gtttggagccctgtg

SEQ ID NO: 1680120 - DNA, 15 bp, Homo sapiens
tttggagccctgtgg

SEQ ID NO: 1680121 - DNA, 15 bp, Homo sapiens
ttggagccctgtggg

SEQ ID NO: 1680122 - DNA, 15 bp, Homo sapiens
tggagccctgtgggc

SEQ ID NO: 1680123 - DNA, 15 bp, Homo sapiens
ggagccctgtgggct

SEQ ID NO: 1680124 - DNA, 15 bp, Homo sapiens
gagccctgtgggctt

SEQ ID NO: 1680125 - DNA, 15 bp, Homo sapiens
agccctgtgggcttg

SEQ ID NO: 1680126 - DNA, 15 bp, Homo sapiens
gccctgtgggcttgg

SEQ ID NO: 1680127 - DNA, 15 bp, Homo sapiens
ccctgtgggcttggg

SEQ ID NO: 1680128 - DNA, 15 bp, Homo sapiens
cctgtgggcttgggc

SEQ ID NO: 1680129 - DNA, 15 bp, Homo sapiens
ctgtgggcttgggct

SEQ ID NO: 1680130 - DNA, 15 bp, Homo sapiens
tgtgggcttgggctt

SEQ ID NO: 1680131 - DNA, 15 bp, Homo sapiens
gtgggcttgggctta

SEQ ID NO: 1680132 - DNA, 15 bp, Homo sapiens
tgggcttgggcttaa

SEQ ID NO: 1680133 - DNA, 15 bp, Homo sapiens
gggcttgggcttaaa

SEQ ID NO: 1680134 - DNA, 15 bp, Homo sapiens
ggcttgggcttaaat

SEQ ID NO: 1680135 - DNA, 15 bp, Homo sapiens
gcttgggcttaaatc

SEQ ID NO: 1680136 - DNA, 15 bp, Homo sapiens
cttgggcttaaatcc

SEQ ID NO: 1680137 - DNA, 15 bp, Homo sapiens
ttgggcttaaatcct

SEQ ID NO: 1680138 - DNA, 15 bp, Homo sapiens
tgggcttaaatccta

SEQ ID NO: 1680139 - DNA, 15 bp, Homo sapiens
gggcttaaatcctac

SEQ ID NO: 1680140 - DNA, 15 bp, Homo sapiens
ggcttaaatcctact

SEQ ID NO: 1680141 - DNA, 15 bp, Homo sapiens
gcttaaatcctactt

SEQ ID NO: 1680142 - DNA, 15 bp, Homo sapiens
cttaaatcctactta

SEQ ID NO: 1680143 - DNA, 15 bp, Homo sapiens
ttaaatcctacttat

SEQ ID NO: 1680144 - DNA, 15 bp, Homo sapiens
taaatcctacttatc

SEQ ID NO: 1680145 - DNA, 15 bp, Homo sapiens
aaatcctacttatca

SEQ ID NO: 1680146 - DNA, 15 bp, Homo sapiens
aatcctacttatcac

SEQ ID NO: 1680147 - DNA, 15 bp, Homo sapiens
atcctacttatcaca

SEQ ID NO: 1680148 - DNA, 15 bp, Homo sapiens
tcctacttatcacac

SEQ ID NO: 1680149 - DNA, 15 bp, Homo sapiens
cctacttatcacacg

SEQ ID NO: 1680150 - DNA, 15 bp, Homo sapiens
ctacttatcacacgt

SEQ ID NO: 1680151 - DNA, 15 bp, Homo sapiens
tacttatcacacgtg

SEQ ID NO: 1680152 - DNA, 15 bp, Homo sapiens
acttatcacacgtgc

SEQ ID NO: 1680153 - DNA, 15 bp, Homo sapiens
cttatcacacgtgca

SEQ ID NO: 1680154 - DNA, 15 bp, Homo sapiens
ttatcacacgtgcat

SEQ ID NO: 1680155 - DNA, 15 bp, Homo sapiens
tatcacacgtgcatc

SEQ ID NO: 1680156 - DNA, 15 bp, Homo sapiens
atcacacgtgcatct

SEQ ID NO: 1680157 - DNA, 15 bp, Homo sapiens
tcacacgtgcatctt

SEQ ID NO: 1680158 - DNA, 15 bp, Homo sapiens
cacacgtgcatcttt

SEQ ID NO: 1680159 - DNA, 15 bp, Homo sapiens
acacgtgcatctttg

SEQ ID NO: 1680160 - DNA, 15 bp, Homo sapiens
cacgtgcatctttgg

SEQ ID NO: 1680161 - DNA, 15 bp, Homo sapiens
acgtgcatctttgga

SEQ ID NO: 1680162 - DNA, 15 bp, Homo sapiens
cgtgcatctttggac

SEQ ID NO: 1680163 - DNA, 15 bp, Homo sapiens
gtgcatctttggaca

SEQ ID NO: 1680164 - DNA, 15 bp, Homo sapiens
tgcatctttggacaa

SEQ ID NO: 1680165 - DNA, 15 bp, Homo sapiens
gcatctttggacaag

SEQ ID NO: 1680166 - DNA, 15 bp, Homo sapiens
catctttggacaagt

SEQ ID NO: 1680167 - DNA, 15 bp, Homo sapiens
atctttggacaagta

SEQ ID NO: 1680168 - DNA, 15 bp, Homo sapiens
tctttggacaagtaa

SEQ ID NO: 1680169 - DNA, 15 bp, Homo sapiens
ctttggacaagtaaa

SEQ ID NO: 1680170 - DNA, 15 bp, Homo sapiens
tttggacaagtaaat

SEQ ID NO: 1680171 - DNA, 15 bp, Homo sapiens
ttggacaagtaaatt

SEQ ID NO: 1680172 - DNA, 15 bp, Homo sapiens
tggacaagtaaatta

SEQ ID NO: 1680173 - DNA, 15 bp, Homo sapiens
ggacaagtaaattat

SEQ ID NO: 1680174 - DNA, 15 bp, Homo sapiens
gacaagtaaattatt

SEQ ID NO: 1680175 - DNA, 15 bp, Homo sapiens
acaagtaaattattt

SEQ ID NO: 1680176 - DNA, 15 bp, Homo sapiens
caagtaaattattta

SEQ ID NO: 1680177 - DNA, 15 bp, Homo sapiens
aagtaaattatttaa

SEQ ID NO: 1680178 - DNA, 15 bp, Homo sapiens
agtaaattatttaac

SEQ ID NO: 1680179 - DNA, 15 bp, Homo sapiens
gtaaattatttaacc

SEQ ID NO: 1680180 - DNA, 15 bp, Homo sapiens
taaattatttaacct

SEQ ID NO: 1680181 - DNA, 15 bp, Homo sapiens
aaattatttaacctc

SEQ ID NO: 1680182 - DNA, 15 bp, Homo sapiens
aattatttaacctct

SEQ ID NO: 1680183 - DNA, 15 bp, Homo sapiens
attatttaacctctg

SEQ ID NO: 1680184 - DNA, 15 bp, Homo sapiens
ttatttaacctctga

SEQ ID NO: 1680185 - DNA, 15 bp, Homo sapiens
tatttaacctctgaa

SEQ ID NO: 1680186 - DNA, 15 bp, Homo sapiens
atttaacctctgaat

SEQ ID NO: 1680187 - DNA, 15 bp, Homo sapiens
tttaacctctgaatc

SEQ ID NO: 1680188 - DNA, 15 bp, Homo sapiens
ttaacctctgaatct

SEQ ID NO: 1680189 - DNA, 15 bp, Homo sapiens
taacctctgaatctc

SEQ ID NO: 1680190 - DNA, 15 bp, Homo sapiens
aacctctgaatctca

SEQ ID NO: 1680191 - DNA, 15 bp, Homo sapiens
acctctgaatctcag

SEQ ID NO: 1680192 - DNA, 15 bp, Homo sapiens
cctctgaatctcagt

SEQ ID NO: 1680193 - DNA, 15 bp, Homo sapiens
ctctgaatctcagtt

SEQ ID NO: 1680194 - DNA, 15 bp, Homo sapiens
tctgaatctcagttt

SEQ ID NO: 1680195 - DNA, 15 bp, Homo sapiens
ctgaatctcagtttt

SEQ ID NO: 1680196 - DNA, 15 bp, Homo sapiens
tgaatctcagttttc

SEQ ID NO: 1680197 - DNA, 15 bp, Homo sapiens
gaatctcagttttct

SEQ ID NO: 1680198 - DNA, 15 bp, Homo sapiens
aatctcagttttctc

SEQ ID NO: 1680199 - DNA, 15 bp, Homo sapiens
atctcagttttctca

SEQ ID NO: 1680200 - DNA, 15 bp, Homo sapiens
tctcagttttctcat

SEQ ID NO: 1680201 - DNA, 15 bp, Homo sapiens
ctcagttttctcatt

SEQ ID NO: 1680202 - DNA, 15 bp, Homo sapiens
tcagttttctcatta

SEQ ID NO: 1680203 - DNA, 15 bp, Homo sapiens
cagttttctcattaa

SEQ ID NO: 1680204 - DNA, 15 bp, Homo sapiens
agttttctcattaac

SEQ ID NO: 1680205 - DNA, 15 bp, Homo sapiens
gttttctcattaacc

SEQ ID NO: 1680206 - DNA, 15 bp, Homo sapiens
ttttctcattaaccg

SEQ ID NO: 1680207 - DNA, 15 bp, Homo sapiens
tttctcattaaccgg

SEQ ID NO: 1680208 - DNA, 15 bp, Homo sapiens
ttctcattaaccgga

SEQ ID NO: 1680209 - DNA, 15 bp, Homo sapiens
tctcattaaccggag

SEQ ID NO: 1680210 - DNA, 15 bp, Homo sapiens
ctcattaaccggaga

SEQ ID NO: 1680211 - DNA, 15 bp, Homo sapiens
tcattaaccggagag

SEQ ID NO: 1680212 - DNA, 15 bp, Homo sapiens
cattaaccggagaga

SEQ ID NO: 1680213 - DNA, 15 bp, Homo sapiens
attaaccggagagat

SEQ ID NO: 1680214 - DNA, 15 bp, Homo sapiens
ttaaccggagagatg

SEQ ID NO: 1680215 - DNA, 15 bp, Homo sapiens
taaccggagagatga

SEQ ID NO: 1680216 - DNA, 15 bp, Homo sapiens
aaccggagagatgag

SEQ ID NO: 1680217 - DNA, 15 bp, Homo sapiens
accggagagatgagt

SEQ ID NO: 1680218 - DNA, 15 bp, Homo sapiens
ccggagagatgagtt

SEQ ID NO: 1680219 - DNA, 15 bp, Homo sapiens
cggagagatgagtta

SEQ ID NO: 1680220 - DNA, 15 bp, Homo sapiens
ggagagatgagttat

SEQ ID NO: 1680221 - DNA, 15 bp, Homo sapiens
gagagatgagttatt

SEQ ID NO: 1680222 - DNA, 15 bp, Homo sapiens
agagatgagttatta

SEQ ID NO: 1680223 - DNA, 15 bp, Homo sapiens
gagatgagttattat

SEQ ID NO: 1680224 - DNA, 15 bp, Homo sapiens
agatgagttattatc

SEQ ID NO: 1680225 - DNA, 15 bp, Homo sapiens
gatgagttattatct

SEQ ID NO: 1680226 - DNA, 15 bp, Homo sapiens
atgagttattatctt

SEQ ID NO: 1680227 - DNA, 15 bp, Homo sapiens
tgagttattatcttg

SEQ ID NO: 1680228 - DNA, 15 bp, Homo sapiens
gagttattatcttga

SEQ ID NO: 1680229 - DNA, 15 bp, Homo sapiens
agttattatcttgaa

SEQ ID NO: 1680230 - DNA, 15 bp, Homo sapiens
gttattatcttgaag

SEQ ID NO: 1680231 - DNA, 15 bp, Homo sapiens
ttattatcttgaaga

SEQ ID NO: 1680232 - DNA, 15 bp, Homo sapiens
tattatcttgaagag

SEQ ID NO: 1680233 - DNA, 15 bp, Homo sapiens
attatcttgaagaga

SEQ ID NO: 1680234 - DNA, 15 bp, Homo sapiens
ttatcttgaagagaa

SEQ ID NO: 1680235 - DNA, 15 bp, Homo sapiens
tatcttgaagagaat

SEQ ID NO: 1680236 - DNA, 15 bp, Homo sapiens
atcttgaagagaata

SEQ ID NO: 1680237 - DNA, 15 bp, Homo sapiens
tcttgaagagaataa

SEQ ID NO: 1680238 - DNA, 15 bp, Homo sapiens
cttgaagagaataaa

SEQ ID NO: 1680239 - DNA, 15 bp, Homo sapiens
ttgaagagaataaat

SEQ ID NO: 1680240 - DNA, 15 bp, Homo sapiens
tgaagagaataaata

SEQ ID NO: 1680241 - DNA, 15 bp, Homo sapiens
gaagagaataaataa

SEQ ID NO: 1680242 - DNA, 15 bp, Homo sapiens
aagagaataaataag

SEQ ID NO: 1680243 - DNA, 15 bp, Homo sapiens
agagaataaataagt

SEQ ID NO: 1680244 - DNA, 15 bp, Homo sapiens
gagaataaataagtt

SEQ ID NO: 1680245 - DNA, 15 bp, Homo sapiens
agaataaataagtta

SEQ ID NO: 1680246 - DNA, 15 bp, Homo sapiens
gaataaataagttac

SEQ ID NO: 1680247 - DNA, 15 bp, Homo sapiens
aataaataagttact

SEQ ID NO: 1680248 - DNA, 15 bp, Homo sapiens
ataaataagttacta

SEQ ID NO: 1680249 - DNA, 15 bp, Homo sapiens
taaataagttactat

SEQ ID NO: 1680250 - DNA, 15 bp, Homo sapiens
aaataagttactatg

SEQ ID NO: 1680251 - DNA, 15 bp, Homo sapiens
aataagttactatgt

SEQ ID NO: 1680252 - DNA, 15 bp, Homo sapiens
ataagttactatgta

SEQ ID NO: 1680253 - DNA, 15 bp, Homo sapiens
taagttactatgtat

SEQ ID NO: 1680254 - DNA, 15 bp, Homo sapiens
aagttactatgtata

SEQ ID NO: 1680255 - DNA, 15 bp, Homo sapiens
agttactatgtataa

SEQ ID NO: 1680256 - DNA, 15 bp, Homo sapiens
gttactatgtataaa

SEQ ID NO: 1680257 - DNA, 15 bp, Homo sapiens
ttactatgtataaag

SEQ ID NO: 1680258 - DNA, 15 bp, Homo sapiens
tactatgtataaagc

SEQ ID NO: 1680259 - DNA, 15 bp, Homo sapiens
actatgtataaagca

SEQ ID NO: 1680260 - DNA, 15 bp, Homo sapiens
ctatgtataaagcac

SEQ ID NO: 1680261 - DNA, 15 bp, Homo sapiens
tatgtataaagcact

SEQ ID NO: 1680262 - DNA, 15 bp, Homo sapiens
atgtataaagcacta

SEQ ID NO: 1680263 - DNA, 15 bp, Homo sapiens
tgtataaagcactag

SEQ ID NO: 1680264 - DNA, 15 bp, Homo sapiens
gtataaagcactagc

SEQ ID NO: 1680265 - DNA, 15 bp, Homo sapiens
tataaagcactagcc

SEQ ID NO: 1680266 - DNA, 15 bp, Homo sapiens
ataaagcactagcct

SEQ ID NO: 1680267 - DNA, 15 bp, Homo sapiens
taaagcactagccta

SEQ ID NO: 1680268 - DNA, 15 bp, Homo sapiens
aaagcactagcctag

SEQ ID NO: 1680269 - DNA, 15 bp, Homo sapiens
aagcactagcctaga

SEQ ID NO: 1680270 - DNA, 15 bp, Homo sapiens
agcactagcctagag

SEQ ID NO: 1680271 - DNA, 15 bp, Homo sapiens
gcactagcctagagc

SEQ ID NO: 1680272 - DNA, 15 bp, Homo sapiens
cactagcctagagcc

SEQ ID NO: 1680273 - DNA, 15 bp, Homo sapiens
actagcctagagcca

SEQ ID NO: 1680274 - DNA, 15 bp, Homo sapiens
ctagcctagagccat

SEQ ID NO: 1680275 - DNA, 15 bp, Homo sapiens
tagcctagagccatt

SEQ ID NO: 1680276 - DNA, 15 bp, Homo sapiens
agcctagagccattt

SEQ ID NO: 1680277 - DNA, 15 bp, Homo sapiens
gcctagagccatttt

SEQ ID NO: 1680278 - DNA, 15 bp, Homo sapiens
cctagagccattttg

SEQ ID NO: 1680279 - DNA, 15 bp, Homo sapiens
ctagagccattttgt

SEQ ID NO: 1680280 - DNA, 15 bp, Homo sapiens
tagagccattttgtc

SEQ ID NO: 1680281 - DNA, 15 bp, Homo sapiens
agagccattttgtcc

SEQ ID NO: 1680282 - DNA, 15 bp, Homo sapiens
gagccattttgtcct

SEQ ID NO: 1680283 - DNA, 15 bp, Homo sapiens
agccattttgtccta

SEQ ID NO: 1680284 - DNA, 15 bp, Homo sapiens
gccattttgtcctac

SEQ ID NO: 1680285 - DNA, 15 bp, Homo sapiens
ccattttgtcctacc

SEQ ID NO: 1680286 - DNA, 15 bp, Homo sapiens
cattttgtcctacct

SEQ ID NO: 1680287 - DNA, 15 bp, Homo sapiens
attttgtcctacctc

SEQ ID NO: 1680288 - DNA, 15 bp, Homo sapiens
ttttgtcctacctca

SEQ ID NO: 1680289 - DNA, 15 bp, Homo sapiens
tttgtcctacctcag

SEQ ID NO: 1680290 - DNA, 15 bp, Homo sapiens
ttgtcctacctcagt

SEQ ID NO: 1680291 - DNA, 15 bp, Homo sapiens
tgtcctacctcagtt

SEQ ID NO: 1680292 - DNA, 15 bp, Homo sapiens
gtcctacctcagttt

SEQ ID NO: 1680293 - DNA, 15 bp, Homo sapiens
tcctacctcagtttg

SEQ ID NO: 1680294 - DNA, 15 bp, Homo sapiens
cctacctcagtttga

SEQ ID NO: 1680295 - DNA, 15 bp, Homo sapiens
ctacctcagtttgag

SEQ ID NO: 1680296 - DNA, 15 bp, Homo sapiens
tacctcagtttgagg

SEQ ID NO: 1680297 - DNA, 15 bp, Homo sapiens
acctcagtttgaggt

SEQ ID NO: 1680298 - DNA, 15 bp, Homo sapiens
cctcagtttgaggtt

SEQ ID NO: 1680299 - DNA, 15 bp, Homo sapiens
ctcagtttgaggttt

SEQ ID NO: 1680300 - DNA, 15 bp, Homo sapiens
tcagtttgaggtttg

SEQ ID NO: 1680301 - DNA, 15 bp, Homo sapiens
cagtttgaggtttgg

SEQ ID NO: 1680302 - DNA, 15 bp, Homo sapiens
agtttgaggtttggt

SEQ ID NO: 1680303 - DNA, 15 bp, Homo sapiens
gtttgaggtttggtg

SEQ ID NO: 1680304 - DNA, 15 bp, Homo sapiens
tttgaggtttggtgc

SEQ ID NO: 1680305 - DNA, 15 bp, Homo sapiens
ttgaggtttggtgcc

SEQ ID NO: 1680306 - DNA, 15 bp, Homo sapiens
tgaggtttggtgccc

SEQ ID NO: 1680307 - DNA, 15 bp, Homo sapiens
gaggtttggtgccca

SEQ ID NO: 1680308 - DNA, 15 bp, Homo sapiens
aggtttggtgcccaa

SEQ ID NO: 1680309 - DNA, 15 bp, Homo sapiens
ggtttggtgcccaaa

SEQ ID NO: 1680310 - DNA, 15 bp, Homo sapiens
gtttggtgcccaaac

SEQ ID NO: 1680311 - DNA, 15 bp, Homo sapiens
tttggtgcccaaact

SEQ ID NO: 1680312 - DNA, 15 bp, Homo sapiens
ttggtgcccaaactc

SEQ ID NO: 1680313 - DNA, 15 bp, Homo sapiens
tggtgcccaaactca

SEQ ID NO: 1680314 - DNA, 15 bp, Homo sapiens
ggtgcccaaactcag

SEQ ID NO: 1680315 - DNA, 15 bp, Homo sapiens
gtgcccaaactcagg

SEQ ID NO: 1680316 - DNA, 15 bp, Homo sapiens
tgcccaaactcaggg

SEQ ID NO: 1680317 - DNA, 15 bp, Homo sapiens
gcccaaactcagggt

SEQ ID NO: 1680318 - DNA, 15 bp, Homo sapiens
cccaaactcagggtc

SEQ ID NO: 1680319 - DNA, 15 bp, Homo sapiens
ccaaactcagggtcc

SEQ ID NO: 1680320 - DNA, 15 bp, Homo sapiens
caaactcagggtccc

SEQ ID NO: 1680321 - DNA, 15 bp, Homo sapiens
aaactcagggtccct

SEQ ID NO: 1680322 - DNA, 15 bp, Homo sapiens
aactcagggtccctg

SEQ ID NO: 1680323 - DNA, 15 bp, Homo sapiens
actcagggtccctgt

SEQ ID NO: 1680324 - DNA, 15 bp, Homo sapiens
ctcagggtccctgta

SEQ ID NO: 1680325 - DNA, 15 bp, Homo sapiens
tcagggtccctgtag

SEQ ID NO: 1680326 - DNA, 15 bp, Homo sapiens
cagggtccctgtagt

SEQ ID NO: 1680327 - DNA, 15 bp, Homo sapiens
agggtccctgtagtt

SEQ ID NO: 1680328 - DNA, 15 bp, Homo sapiens
gggtccctgtagtta

SEQ ID NO: 1680329 - DNA, 15 bp, Homo sapiens
ggtccctgtagttaa

SEQ ID NO: 1680330 - DNA, 15 bp, Homo sapiens
gtccctgtagttaac

SEQ ID NO: 1680331 - DNA, 15 bp, Homo sapiens
tccctgtagttaact

SEQ ID NO: 1680332 - DNA, 15 bp, Homo sapiens
ccctgtagttaactg

SEQ ID NO: 1680333 - DNA, 15 bp, Homo sapiens
cctgtagttaactgt

SEQ ID NO: 1680334 - DNA, 15 bp, Homo sapiens
ctgtagttaactgtt

SEQ ID NO: 1680335 - DNA, 15 bp, Homo sapiens
tgtagttaactgttc

SEQ ID NO: 1680336 - DNA, 15 bp, Homo sapiens
gtagttaactgttct

SEQ ID NO: 1680337 - DNA, 15 bp, Homo sapiens
tagttaactgttctt

SEQ ID NO: 1680338 - DNA, 15 bp, Homo sapiens
agttaactgttctta

SEQ ID NO: 1680339 - DNA, 15 bp, Homo sapiens
gttaactgttcttaa

SEQ ID NO: 1680340 - DNA, 15 bp, Homo sapiens
ttaactgttcttaat

SEQ ID NO: 1680341 - DNA, 15 bp, Homo sapiens
taactgttcttaatc

SEQ ID NO: 1680342 - DNA, 15 bp, Homo sapiens
aactgttcttaatca

SEQ ID NO: 1680343 - DNA, 15 bp, Homo sapiens
actgttcttaatcat

SEQ ID NO: 1680344 - DNA, 15 bp, Homo sapiens
ctgttcttaatcatt

SEQ ID NO: 1680345 - DNA, 15 bp, Homo sapiens
tgttcttaatcattg

SEQ ID NO: 1680346 - DNA, 15 bp, Homo sapiens
gttcttaatcattgt

SEQ ID NO: 1680347 - DNA, 15 bp, Homo sapiens
ttcttaatcattgtt

SEQ ID NO: 1680348 - DNA, 15 bp, Homo sapiens
tcttaatcattgttt

SEQ ID NO: 1680349 - DNA, 15 bp, Homo sapiens
cttaatcattgtttt

SEQ ID NO: 1680350 - DNA, 15 bp, Homo sapiens
ttaatcattgttttt

SEQ ID NO: 1680351 - DNA, 15 bp, Homo sapiens
taatcattgtttttt

SEQ ID NO: 1680352 - DNA, 15 bp, Homo sapiens
aatcattgtttttta

SEQ ID NO: 1680353 - DNA, 15 bp, Homo sapiens
atcattgttttttaa

SEQ ID NO: 1680354 - DNA, 15 bp, Homo sapiens
tcattgttttttaaa

SEQ ID NO: 1680355 - DNA, 15 bp, Homo sapiens
cattgttttttaaaa

SEQ ID NO: 1680356 - DNA, 15 bp, Homo sapiens
attgttttttaaaat

SEQ ID NO: 1680357 - DNA, 15 bp, Homo sapiens
ttgttttttaaaatt

SEQ ID NO: 1680358 - DNA, 15 bp, Homo sapiens
tgttttttaaaattg

SEQ ID NO: 1680359 - DNA, 15 bp, Homo sapiens
gttttttaaaattgt

SEQ ID NO: 1680360 - DNA, 15 bp, Homo sapiens
ttttttaaaattgtc

SEQ ID NO: 1680361 - DNA, 15 bp, Homo sapiens
tttttaaaattgtca

SEQ ID NO: 1680362 - DNA, 15 bp, Homo sapiens
ttttaaaattgtcac

SEQ ID NO: 1680363 - DNA, 15 bp, Homo sapiens
tttaaaattgtcacc

SEQ ID NO: 1680364 - DNA, 15 bp, Homo sapiens
ttaaaattgtcaccc

SEQ ID NO: 1680365 - DNA, 15 bp, Homo sapiens
taaaattgtcacccc

SEQ ID NO: 1680366 - DNA, 15 bp, Homo sapiens
aaaattgtcaccccc

SEQ ID NO: 1680367 - DNA, 15 bp, Homo sapiens
aaattgtcaccccca

SEQ ID NO: 1680368 - DNA, 15 bp, Homo sapiens
aattgtcacccccaa

SEQ ID NO: 1680369 - DNA, 15 bp, Homo sapiens
attgtcacccccaaa

SEQ ID NO: 1680370 - DNA, 15 bp, Homo sapiens
ttgtcacccccaaat

SEQ ID NO: 1680371 - DNA, 15 bp, Homo sapiens
tgtcacccccaaatg

SEQ ID NO: 1680372 - DNA, 15 bp, Homo sapiens
gtcacccccaaatgt

SEQ ID NO: 1680373 - DNA, 15 bp, Homo sapiens
tcacccccaaatgtg

SEQ ID NO: 1680374 - DNA, 15 bp, Homo sapiens
cacccccaaatgtgt

SEQ ID NO: 1680375 - DNA, 15 bp, Homo sapiens
acccccaaatgtgtg

SEQ ID NO: 1680376 - DNA, 15 bp, Homo sapiens
cccccaaatgtgtgc

SEQ ID NO: 1680377 - DNA, 15 bp, Homo sapiens
ccccaaatgtgtgcc

SEQ ID NO: 1680378 - DNA, 15 bp, Homo sapiens
cccaaatgtgtgcct

SEQ ID NO: 1680379 - DNA, 15 bp, Homo sapiens
ccaaatgtgtgccta

SEQ ID NO: 1680380 - DNA, 15 bp, Homo sapiens
caaatgtgtgcctag

SEQ ID NO: 1680381 - DNA, 15 bp, Homo sapiens
aaatgtgtgcctagt

SEQ ID NO: 1680382 - DNA, 15 bp, Homo sapiens
aatgtgtgcctagtc

SEQ ID NO: 1680383 - DNA, 15 bp, Homo sapiens
atgtgtgcctagtca

SEQ ID NO: 1680384 - DNA, 15 bp, Homo sapiens
tgtgtgcctagtcag

SEQ ID NO: 1680385 - DNA, 15 bp, Homo sapiens
gtgtgcctagtcagt

SEQ ID NO: 1680386 - DNA, 15 bp, Homo sapiens
tgtgcctagtcagtg

SEQ ID NO: 1680387 - DNA, 15 bp, Homo sapiens
gtgcctagtcagtga

SEQ ID NO: 1680388 - DNA, 15 bp, Homo sapiens
tgcctagtcagtgag

SEQ ID NO: 1680389 - DNA, 15 bp, Homo sapiens
gcctagtcagtgaga

SEQ ID NO: 1680390 - DNA, 15 bp, Homo sapiens
cctagtcagtgagaa

SEQ ID NO: 1680391 - DNA, 15 bp, Homo sapiens
ctagtcagtgagaag

SEQ ID NO: 1680392 - DNA, 15 bp, Homo sapiens
tagtcagtgagaagc

SEQ ID NO: 1680393 - DNA, 15 bp, Homo sapiens
agtcagtgagaagca

SEQ ID NO: 1680394 - DNA, 15 bp, Homo sapiens
gtcagtgagaagcaa

SEQ ID NO: 1680395 - DNA, 15 bp, Homo sapiens
tcagtgagaagcaat

SEQ ID NO: 1680396 - DNA, 15 bp, Homo sapiens
cagtgagaagcaatg

SEQ ID NO: 1680397 - DNA, 15 bp, Homo sapiens
agtgagaagcaatga

SEQ ID NO: 1680398 - DNA, 15 bp, Homo sapiens
gtgagaagcaatgaa

SEQ ID NO: 1680399 - DNA, 15 bp, Homo sapiens
tgagaagcaatgaat

SEQ ID NO: 1680400 - DNA, 15 bp, Homo sapiens
gagaagcaatgaatt

SEQ ID NO: 1680401 - DNA, 15 bp, Homo sapiens
agaagcaatgaatta

SEQ ID NO: 1680402 - DNA, 15 bp, Homo sapiens
gaagcaatgaattag

SEQ ID NO: 1680403 - DNA, 15 bp, Homo sapiens
aagcaatgaattagt

SEQ ID NO: 1680404 - DNA, 15 bp, Homo sapiens
agcaatgaattagtg

SEQ ID NO: 1680405 - DNA, 15 bp, Homo sapiens
gcaatgaattagtgg

SEQ ID NO: 1680406 - DNA, 15 bp, Homo sapiens
caatgaattagtggc

SEQ ID NO: 1680407 - DNA, 15 bp, Homo sapiens
aatgaattagtggcc

SEQ ID NO: 1680408 - DNA, 15 bp, Homo sapiens
atgaattagtggccc

SEQ ID NO: 1680409 - DNA, 15 bp, Homo sapiens
tgaattagtggccca

SEQ ID NO: 1680410 - DNA, 15 bp, Homo sapiens
gaattagtggcccag

SEQ ID NO: 1680411 - DNA, 15 bp, Homo sapiens
aattagtggcccagg

SEQ ID NO: 1680412 - DNA, 15 bp, Homo sapiens
attagtggcccaggt

SEQ ID NO: 1680413 - DNA, 15 bp, Homo sapiens
ttagtggcccaggtc

SEQ ID NO: 1680414 - DNA, 15 bp, Homo sapiens
tagtggcccaggtct

SEQ ID NO: 1680415 - DNA, 15 bp, Homo sapiens
agtggcccaggtcta

SEQ ID NO: 1680416 - DNA, 15 bp, Homo sapiens
gtggcccaggtctag

SEQ ID NO: 1680417 - DNA, 15 bp, Homo sapiens
tggcccaggtctaga

SEQ ID NO: 1680418 - DNA, 15 bp, Homo sapiens
ggcccaggtctagac

SEQ ID NO: 1680419 - DNA, 15 bp, Homo sapiens
gcccaggtctagaca

SEQ ID NO: 1680420 - DNA, 15 bp, Homo sapiens
cccaggtctagacag

SEQ ID NO: 1680421 - DNA, 15 bp, Homo sapiens
ccaggtctagacagc

SEQ ID NO: 1680422 - DNA, 15 bp, Homo sapiens
caggtctagacagct

SEQ ID NO: 1680423 - DNA, 15 bp, Homo sapiens
aggtctagacagctt

SEQ ID NO: 1680424 - DNA, 15 bp, Homo sapiens
ggtctagacagctta

SEQ ID NO: 1680425 - DNA, 15 bp, Homo sapiens
gtctagacagcttat

SEQ ID NO: 1680426 - DNA, 15 bp, Homo sapiens
tctagacagcttatg

SEQ ID NO: 1680427 - DNA, 15 bp, Homo sapiens
ctagacagcttatgg

SEQ ID NO: 1680428 - DNA, 15 bp, Homo sapiens
tagacagcttatggc

SEQ ID NO: 1680429 - DNA, 15 bp, Homo sapiens
agacagcttatggct

SEQ ID NO: 1680430 - DNA, 15 bp, Homo sapiens
gacagcttatggctt

SEQ ID NO: 1680431 - DNA, 15 bp, Homo sapiens
acagcttatggcttc

SEQ ID NO: 1680432 - DNA, 15 bp, Homo sapiens
cagcttatggcttca

SEQ ID NO: 1680433 - DNA, 15 bp, Homo sapiens
agcttatggcttcag

SEQ ID NO: 1680434 - DNA, 15 bp, Homo sapiens
gcttatggcttcaga

SEQ ID NO: 1680435 - DNA, 15 bp, Homo sapiens
cttatggcttcagag

SEQ ID NO: 1680436 - DNA, 15 bp, Homo sapiens
ttatggcttcagagc

SEQ ID NO: 1680437 - DNA, 15 bp, Homo sapiens
tatggcttcagagca

SEQ ID NO: 1680438 - DNA, 15 bp, Homo sapiens
atggcttcagagcag

SEQ ID NO: 1680439 - DNA, 15 bp, Homo sapiens
tggcttcagagcagt

SEQ ID NO: 1680440 - DNA, 15 bp, Homo sapiens
ggcttcagagcagtg

SEQ ID NO: 1680441 - DNA, 15 bp, Homo sapiens
gcttcagagcagtgt

SEQ ID NO: 1680442 - DNA, 15 bp, Homo sapiens
cttcagagcagtgtt

SEQ ID NO: 1680443 - DNA, 15 bp, Homo sapiens
ttcagagcagtgttt

SEQ ID NO: 1680444 - DNA, 15 bp, Homo sapiens
tcagagcagtgtttc

SEQ ID NO: 1680445 - DNA, 15 bp, Homo sapiens
cagagcagtgtttca

SEQ ID NO: 1680446 - DNA, 15 bp, Homo sapiens
agagcagtgtttcac

SEQ ID NO: 1680447 - DNA, 15 bp, Homo sapiens
gagcagtgtttcaca

SEQ ID NO: 1680448 - DNA, 15 bp, Homo sapiens
agcagtgtttcacaa

SEQ ID NO: 1680449 - DNA, 15 bp, Homo sapiens
gcagtgtttcacaac

SEQ ID NO: 1680450 - DNA, 15 bp, Homo sapiens
cagtgtttcacaacc

SEQ ID NO: 1680451 - DNA, 15 bp, Homo sapiens
agtgtttcacaacct

SEQ ID NO: 1680452 - DNA, 15 bp, Homo sapiens
gtgtttcacaaccta

SEQ ID NO: 1680453 - DNA, 15 bp, Homo sapiens
tgtttcacaacctaa

SEQ ID NO: 1680454 - DNA, 15 bp, Homo sapiens
gtttcacaacctaag

SEQ ID NO: 1680455 - DNA, 15 bp, Homo sapiens
tttcacaacctaagt

SEQ ID NO: 1680456 - DNA, 15 bp, Homo sapiens
ttcacaacctaagtt

SEQ ID NO: 1680457 - DNA, 15 bp, Homo sapiens
tcacaacctaagttt

SEQ ID NO: 1680458 - DNA, 15 bp, Homo sapiens
cacaacctaagtttc

SEQ ID NO: 1680459 - DNA, 15 bp, Homo sapiens
acaacctaagtttcc

SEQ ID NO: 1680460 - DNA, 15 bp, Homo sapiens
caacctaagtttcct

SEQ ID NO: 1680461 - DNA, 15 bp, Homo sapiens
aacctaagtttcctg

SEQ ID NO: 1680462 - DNA, 15 bp, Homo sapiens
acctaagtttcctgg

SEQ ID NO: 1680463 - DNA, 15 bp, Homo sapiens
cctaagtttcctgga

SEQ ID NO: 1680464 - DNA, 15 bp, Homo sapiens
ctaagtttcctggag

SEQ ID NO: 1680465 - DNA, 15 bp, Homo sapiens
taagtttcctggagt

SEQ ID NO: 1680466 - DNA, 15 bp, Homo sapiens
aagtttcctggagtc

SEQ ID NO: 1680467 - DNA, 15 bp, Homo sapiens
agtttcctggagtcg

SEQ ID NO: 1680468 - DNA, 15 bp, Homo sapiens
gtttcctggagtcgt

SEQ ID NO: 1680469 - DNA, 15 bp, Homo sapiens
tttcctggagtcgtg

SEQ ID NO: 1680470 - DNA, 15 bp, Homo sapiens
ttcctggagtcgtga

SEQ ID NO: 1680471 - DNA, 15 bp, Homo sapiens
tcctggagtcgtgag

SEQ ID NO: 1680472 - DNA, 15 bp, Homo sapiens
cctggagtcgtgagg

SEQ ID NO: 1680473 - DNA, 15 bp, Homo sapiens
ctggagtcgtgagga

SEQ ID NO: 1680474 - DNA, 15 bp, Homo sapiens
tggagtcgtgaggag

SEQ ID NO: 1680475 - DNA, 15 bp, Homo sapiens
ggagtcgtgaggagt

SEQ ID NO: 1680476 - DNA, 15 bp, Homo sapiens
gagtcgtgaggagtc

SEQ ID NO: 1680477 - DNA, 15 bp, Homo sapiens
agtcgtgaggagtca

SEQ ID NO: 1680478 - DNA, 15 bp, Homo sapiens
gtcgtgaggagtcac

SEQ ID NO: 1680479 - DNA, 15 bp, Homo sapiens
tcgtgaggagtcacc

SEQ ID NO: 1680480 - DNA, 15 bp, Homo sapiens
cgtgaggagtcaccc

SEQ ID NO: 1680481 - DNA, 15 bp, Homo sapiens
gtgaggagtcaccca

SEQ ID NO: 1680482 - DNA, 15 bp, Homo sapiens
tgaggagtcacccag

SEQ ID NO: 1680483 - DNA, 15 bp, Homo sapiens
gaggagtcacccagg

SEQ ID NO: 1680484 - DNA, 15 bp, Homo sapiens
aggagtcacccaggg

SEQ ID NO: 1680485 - DNA, 15 bp, Homo sapiens
ggagtcacccagggt

SEQ ID NO: 1680486 - DNA, 15 bp, Homo sapiens
gagtcacccagggtt

SEQ ID NO: 1680487 - DNA, 15 bp, Homo sapiens
agtcacccagggtta

SEQ ID NO: 1680488 - DNA, 15 bp, Homo sapiens
gtcacccagggttag

SEQ ID NO: 1680489 - DNA, 15 bp, Homo sapiens
tcacccagggttagt

SEQ ID NO: 1680490 - DNA, 15 bp, Homo sapiens
cacccagggttagta

SEQ ID NO: 1680491 - DNA, 15 bp, Homo sapiens
acccagggttagtaa

SEQ ID NO: 1680492 - DNA, 15 bp, Homo sapiens
cccagggttagtaag

SEQ ID NO: 1680493 - DNA, 15 bp, Homo sapiens
ccagggttagtaagg

SEQ ID NO: 1680494 - DNA, 15 bp, Homo sapiens
cagggttagtaaggg

SEQ ID NO: 1680495 - DNA, 15 bp, Homo sapiens
agggttagtaagggt

SEQ ID NO: 1680496 - DNA, 15 bp, Homo sapiens
gggttagtaagggtg

SEQ ID NO: 1680497 - DNA, 15 bp, Homo sapiens
ggttagtaagggtgg

SEQ ID NO: 1680498 - DNA, 15 bp, Homo sapiens
gttagtaagggtgga

SEQ ID NO: 1680499 - DNA, 15 bp, Homo sapiens
ttagtaagggtggaa

SEQ ID NO: 1680500 - DNA, 15 bp, Homo sapiens
tagtaagggtggaac

SEQ ID NO: 1680501 - DNA, 15 bp, Homo sapiens
agtaagggtggaact

SEQ ID NO: 1680502 - DNA, 15 bp, Homo sapiens
gtaagggtggaactg

SEQ ID NO: 1680503 - DNA, 15 bp, Homo sapiens
taagggtggaactgg

SEQ ID NO: 1680504 - DNA, 15 bp, Homo sapiens
aagggtggaactgga

SEQ ID NO: 1680505 - DNA, 15 bp, Homo sapiens
agggtggaactggaa

SEQ ID NO: 1680506 - DNA, 15 bp, Homo sapiens
gggtggaactggaaa

SEQ ID NO: 1680507 - DNA, 15 bp, Homo sapiens
ggtggaactggaaag

SEQ ID NO: 1680508 - DNA, 15 bp, Homo sapiens
gtggaactggaaagt

SEQ ID NO: 1680509 - DNA, 15 bp, Homo sapiens
tggaactggaaagtt

SEQ ID NO: 1680510 - DNA, 15 bp, Homo sapiens
ggaactggaaagtta

SEQ ID NO: 1680511 - DNA, 15 bp, Homo sapiens
gaactggaaagttat

SEQ ID NO: 1680512 - DNA, 15 bp, Homo sapiens
aactggaaagttatg

SEQ ID NO: 1680513 - DNA, 15 bp, Homo sapiens
actggaaagttatga

SEQ ID NO: 1680514 - DNA, 15 bp, Homo sapiens
ctggaaagttatgaa

SEQ ID NO: 1680515 - DNA, 15 bp, Homo sapiens
tggaaagttatgaac

SEQ ID NO: 1680516 - DNA, 15 bp, Homo sapiens
ggaaagttatgaaca

SEQ ID NO: 1680517 - DNA, 15 bp, Homo sapiens
gaaagttatgaacag

SEQ ID NO: 1680518 - DNA, 15 bp, Homo sapiens
aaagttatgaacagc

SEQ ID NO: 1680519 - DNA, 15 bp, Homo sapiens
aagttatgaacagcc

SEQ ID NO: 1680520 - DNA, 15 bp, Homo sapiens
agttatgaacagcca

SEQ ID NO: 1680521 - DNA, 15 bp, Homo sapiens
gttatgaacagccat

SEQ ID NO: 1680522 - DNA, 15 bp, Homo sapiens
ttatgaacagccata

SEQ ID NO: 1680523 - DNA, 15 bp, Homo sapiens
tatgaacagccatat

SEQ ID NO: 1680524 - DNA, 15 bp, Homo sapiens
atgaacagccatatg

SEQ ID NO: 1680525 - DNA, 15 bp, Homo sapiens
tgaacagccatatga

SEQ ID NO: 1680526 - DNA, 15 bp, Homo sapiens
gaacagccatatgaa

SEQ ID NO: 1680527 - DNA, 15 bp, Homo sapiens
aacagccatatgaaa

SEQ ID NO: 1680528 - DNA, 15 bp, Homo sapiens
acagccatatgaaac

SEQ ID NO: 1680529 - DNA, 15 bp, Homo sapiens
cagccatatgaaaca

SEQ ID NO: 1680530 - DNA, 15 bp, Homo sapiens
agccatatgaaacat

SEQ ID NO: 1680531 - DNA, 15 bp, Homo sapiens
gccatatgaaacata

SEQ ID NO: 1680532 - DNA, 15 bp, Homo sapiens
ccatatgaaacataa

SEQ ID NO: 1680533 - DNA, 15 bp, Homo sapiens
catatgaaacataac

SEQ ID NO: 1680534 - DNA, 15 bp, Homo sapiens
atatgaaacataaca

SEQ ID NO: 1680535 - DNA, 15 bp, Homo sapiens
tatgaaacataacaa

SEQ ID NO: 1680536 - DNA, 15 bp, Homo sapiens
atgaaacataacaat

SEQ ID NO: 1680537 - DNA, 15 bp, Homo sapiens
tgaaacataacaata

SEQ ID NO: 1680538 - DNA, 15 bp, Homo sapiens
gaaacataacaataa

SEQ ID NO: 1680539 - DNA, 15 bp, Homo sapiens
aaacataacaataaa

SEQ ID NO: 1680540 - DNA, 15 bp, Homo sapiens
aacataacaataaaa

SEQ ID NO: 1680541 - DNA, 15 bp, Homo sapiens
acataacaataaaaa

SEQ ID NO: 1680542 - DNA, 15 bp, Homo sapiens
cataacaataaaaat

SEQ ID NO: 1680543 - DNA, 15 bp, Homo sapiens
ataacaataaaaata

SEQ ID NO: 1680544 - DNA, 15 bp, Homo sapiens
taacaataaaaataa

SEQ ID NO: 1680545 - DNA, 15 bp, Homo sapiens
aacaataaaaataat

SEQ ID NO: 1680546 - DNA, 15 bp, Homo sapiens
acaataaaaataata

SEQ ID NO: 1680547 - DNA, 15 bp, Homo sapiens
caataaaaataatat

SEQ ID NO: 1680548 - DNA, 15 bp, Homo sapiens
aataaaaataatatg

SEQ ID NO: 1680549 - DNA, 15 bp, Homo sapiens
ataaaaataatatgt

SEQ ID NO: 1680550 - DNA, 15 bp, Homo sapiens
taaaaataatatgtc

SEQ ID NO: 1680551 - DNA, 15 bp, Homo sapiens
aaaaataatatgtct

SEQ ID NO: 1680552 - DNA, 15 bp, Homo sapiens
aaaataatatgtctg

SEQ ID NO: 1680553 - DNA, 15 bp, Homo sapiens
aaataatatgtctgc

SEQ ID NO: 1680554 - DNA, 15 bp, Homo sapiens
aataatatgtctgcc

SEQ ID NO: 1680555 - DNA, 15 bp, Homo sapiens
ataatatgtctgcct

SEQ ID NO: 1680556 - DNA, 15 bp, Homo sapiens
taatatgtctgcctt

SEQ ID NO: 1680557 - DNA, 15 bp, Homo sapiens
aatatgtctgccttc

SEQ ID NO: 1680558 - DNA, 15 bp, Homo sapiens
atatgtctgccttcc

SEQ ID NO: 1680559 - DNA, 15 bp, Homo sapiens
tatgtctgccttcct

SEQ ID NO: 1680560 - DNA, 15 bp, Homo sapiens
atgtctgccttcctt

SEQ ID NO: 1680561 - DNA, 15 bp, Homo sapiens
tgtctgccttccttt

SEQ ID NO: 1680562 - DNA, 15 bp, Homo sapiens
gtctgccttcctttt

SEQ ID NO: 1680563 - DNA, 15 bp, Homo sapiens
tctgccttccttttt

SEQ ID NO: 1680564 - DNA, 15 bp, Homo sapiens
ctgccttcctttttt

SEQ ID NO: 1680565 - DNA, 15 bp, Homo sapiens
tgccttccttttttc

SEQ ID NO: 1680566 - DNA, 15 bp, Homo sapiens
gccttccttttttcc

SEQ ID NO: 1680567 - DNA, 15 bp, Homo sapiens
ccttccttttttccc

SEQ ID NO: 1680568 - DNA, 15 bp, Homo sapiens
cttccttttttcccc

SEQ ID NO: 1680569 - DNA, 15 bp, Homo sapiens
ttccttttttcccct

SEQ ID NO: 1680570 - DNA, 15 bp, Homo sapiens
tccttttttcccctt

SEQ ID NO: 1680571 - DNA, 15 bp, Homo sapiens
ccttttttccccttc

SEQ ID NO: 1680572 - DNA, 15 bp, Homo sapiens
cttttttccccttca

SEQ ID NO: 1680573 - DNA, 15 bp, Homo sapiens
ttttttccccttcaa

SEQ ID NO: 1680574 - DNA, 15 bp, Homo sapiens
tttttccccttcaaa

SEQ ID NO: 1680575 - DNA, 15 bp, Homo sapiens
ttttccccttcaaag

SEQ ID NO: 1680576 - DNA, 15 bp, Homo sapiens
tttccccttcaaaga

SEQ ID NO: 1680577 - DNA, 15 bp, Homo sapiens
ttccccttcaaagat

SEQ ID NO: 1680578 - DNA, 15 bp, Homo sapiens
tccccttcaaagata

SEQ ID NO: 1680579 - DNA, 15 bp, Homo sapiens
ccccttcaaagataa

SEQ ID NO: 1680580 - DNA, 15 bp, Homo sapiens
cccttcaaagataaa

SEQ ID NO: 1680581 - DNA, 15 bp, Homo sapiens
ccttcaaagataaaa

SEQ ID NO: 1680582 - DNA, 15 bp, Homo sapiens
cttcaaagataaaaa

SEQ ID NO: 1680583 - DNA, 15 bp, Homo sapiens
ttcaaagataaaaat

SEQ ID NO: 1680584 - DNA, 15 bp, Homo sapiens
tcaaagataaaaata

SEQ ID NO: 1680585 - DNA, 15 bp, Homo sapiens
caaagataaaaatat

SEQ ID NO: 1680586 - DNA, 15 bp, Homo sapiens
aaagataaaaatatt

SEQ ID NO: 1680587 - DNA, 15 bp, Homo sapiens
aagataaaaatatta

SEQ ID NO: 1680588 - DNA, 15 bp, Homo sapiens
agataaaaatattag

SEQ ID NO: 1680589 - DNA, 15 bp, Homo sapiens
gataaaaatattagt

SEQ ID NO: 1680590 - DNA, 15 bp, Homo sapiens
ataaaaatattagtt

SEQ ID NO: 1680591 - DNA, 15 bp, Homo sapiens
taaaaatattagttt

SEQ ID NO: 1680592 - DNA, 15 bp, Homo sapiens
aaaaatattagttta

SEQ ID NO: 1680593 - DNA, 15 bp, Homo sapiens
aaaatattagtttaa

SEQ ID NO: 1680594 - DNA, 15 bp, Homo sapiens
aaatattagtttaac

SEQ ID NO: 1680595 - DNA, 15 bp, Homo sapiens
aatattagtttaacg

SEQ ID NO: 1680596 - DNA, 15 bp, Homo sapiens
atattagtttaacga

SEQ ID NO: 1680597 - DNA, 15 bp, Homo sapiens
tattagtttaacgac

SEQ ID NO: 1680598 - DNA, 15 bp, Homo sapiens
attagtttaacgaca

SEQ ID NO: 1680599 - DNA, 15 bp, Homo sapiens
ttagtttaacgacat

SEQ ID NO: 1680600 - DNA, 15 bp, Homo sapiens
tagtttaacgacatt

SEQ ID NO: 1680601 - DNA, 15 bp, Homo sapiens
agtttaacgacattt

SEQ ID NO: 1680602 - DNA, 15 bp, Homo sapiens
gtttaacgacattta

SEQ ID NO: 1680603 - DNA, 15 bp, Homo sapiens
tttaacgacatttat

SEQ ID NO: 1680604 - DNA, 15 bp, Homo sapiens
ttaacgacatttata

SEQ ID NO: 1680605 - DNA, 15 bp, Homo sapiens
taacgacatttataa

SEQ ID NO: 1680606 - DNA, 15 bp, Homo sapiens
aacgacatttataac

SEQ ID NO: 1680607 - DNA, 15 bp, Homo sapiens
acgacatttataaca

SEQ ID NO: 1680608 - DNA, 15 bp, Homo sapiens
cgacatttataacaa

SEQ ID NO: 1680609 - DNA, 15 bp, Homo sapiens
gacatttataacaac

SEQ ID NO: 1680610 - DNA, 15 bp, Homo sapiens
acatttataacaaca

SEQ ID NO: 1680611 - DNA, 15 bp, Homo sapiens
catttataacaacat

SEQ ID NO: 1680612 - DNA, 15 bp, Homo sapiens
atttataacaacatt

SEQ ID NO: 1680613 - DNA, 15 bp, Homo sapiens
tttataacaacattt

SEQ ID NO: 1680614 - DNA, 15 bp, Homo sapiens
ttataacaacattta

SEQ ID NO: 1680615 - DNA, 15 bp, Homo sapiens
tataacaacatttac

SEQ ID NO: 1680616 - DNA, 15 bp, Homo sapiens
ataacaacatttact

SEQ ID NO: 1680617 - DNA, 15 bp, Homo sapiens
taacaacatttactt

SEQ ID NO: 1680618 - DNA, 15 bp, Homo sapiens
aacaacatttactta

SEQ ID NO: 1680619 - DNA, 15 bp, Homo sapiens
acaacatttacttag

SEQ ID NO: 1680620 - DNA, 15 bp, Homo sapiens
caacatttacttaga

SEQ ID NO: 1680621 - DNA, 15 bp, Homo sapiens
aacatttacttagat

SEQ ID NO: 1680622 - DNA, 15 bp, Homo sapiens
acatttacttagatc

SEQ ID NO: 1680623 - DNA, 15 bp, Homo sapiens
catttacttagatcg

SEQ ID NO: 1680624 - DNA, 15 bp, Homo sapiens
atttacttagatcga

SEQ ID NO: 1680625 - DNA, 15 bp, Homo sapiens
tttacttagatcgaa

SEQ ID NO: 1680626 - DNA, 15 bp, Homo sapiens
ttacttagatcgaaa

SEQ ID NO: 1680627 - DNA, 15 bp, Homo sapiens
tacttagatcgaaaa

SEQ ID NO: 1680628 - DNA, 15 bp, Homo sapiens
acttagatcgaaaag

SEQ ID NO: 1680629 - DNA, 15 bp, Homo sapiens
cttagatcgaaaagc

SEQ ID NO: 1680630 - DNA, 15 bp, Homo sapiens
ttagatcgaaaagct

SEQ ID NO: 1680631 - DNA, 15 bp, Homo sapiens
tagatcgaaaagctc

SEQ ID NO: 1680632 - DNA, 15 bp, Homo sapiens
agatcgaaaagctca

SEQ ID NO: 1680633 - DNA, 15 bp, Homo sapiens
gatcgaaaagctcat

SEQ ID NO: 1680634 - DNA, 15 bp, Homo sapiens
atcgaaaagctcata

SEQ ID NO: 1680635 - DNA, 15 bp, Homo sapiens
tcgaaaagctcatat

SEQ ID NO: 1680636 - DNA, 15 bp, Homo sapiens
cgaaaagctcatata

SEQ ID NO: 1680637 - DNA, 15 bp, Homo sapiens
gaaaagctcatatag

SEQ ID NO: 1680638 - DNA, 15 bp, Homo sapiens
aaaagctcatataga

SEQ ID NO: 1680639 - DNA, 15 bp, Homo sapiens
aaagctcatatagag

SEQ ID NO: 1680640 - DNA, 15 bp, Homo sapiens
aagctcatatagaga

SEQ ID NO: 1680641 - DNA, 15 bp, Homo sapiens
agctcatatagagaa

SEQ ID NO: 1680642 - DNA, 15 bp, Homo sapiens
gctcatatagagaac

SEQ ID NO: 1680643 - DNA, 15 bp, Homo sapiens
ctcatatagagaact

SEQ ID NO: 1680644 - DNA, 15 bp, Homo sapiens
tcatatagagaactg

SEQ ID NO: 1680645 - DNA, 15 bp, Homo sapiens
catatagagaactga

SEQ ID NO: 1680646 - DNA, 15 bp, Homo sapiens
atatagagaactgaa

SEQ ID NO: 1680647 - DNA, 15 bp, Homo sapiens
tatagagaactgaat

SEQ ID NO: 1680648 - DNA, 15 bp, Homo sapiens
atagagaactgaatc

SEQ ID NO: 1680649 - DNA, 15 bp, Homo sapiens
tagagaactgaatct

SEQ ID NO: 1680650 - DNA, 15 bp, Homo sapiens
agagaactgaatctt

SEQ ID NO: 1680651 - DNA, 15 bp, Homo sapiens
gagaactgaatcttg

SEQ ID NO: 1680652 - DNA, 15 bp, Homo sapiens
agaactgaatcttga

SEQ ID NO: 1680653 - DNA, 15 bp, Homo sapiens
gaactgaatcttgat

SEQ ID NO: 1680654 - DNA, 15 bp, Homo sapiens
aactgaatcttgatt

SEQ ID NO: 1680655 - DNA, 15 bp, Homo sapiens
actgaatcttgattt

SEQ ID NO: 1680656 - DNA, 15 bp, Homo sapiens
ctgaatcttgatttc

SEQ ID NO: 1680657 - DNA, 15 bp, Homo sapiens
tgaatcttgatttca

SEQ ID NO: 1680658 - DNA, 15 bp, Homo sapiens
gaatcttgatttcat

SEQ ID NO: 1680659 - DNA, 15 bp, Homo sapiens
aatcttgatttcatg

SEQ ID NO: 1680660 - DNA, 15 bp, Homo sapiens
atcttgatttcatga

SEQ ID NO: 1680661 - DNA, 15 bp, Homo sapiens
tcttgatttcatgag

SEQ ID NO: 1680662 - DNA, 15 bp, Homo sapiens
cttgatttcatgagg

SEQ ID NO: 1680663 - DNA, 15 bp, Homo sapiens
ttgatttcatgaggc

SEQ ID NO: 1680664 - DNA, 15 bp, Homo sapiens
tgatttcatgaggca

SEQ ID NO: 1680665 - DNA, 15 bp, Homo sapiens
gatttcatgaggcaa

SEQ ID NO: 1680666 - DNA, 15 bp, Homo sapiens
atttcatgaggcaac

SEQ ID NO: 1680667 - DNA, 15 bp, Homo sapiens
tttcatgaggcaact

SEQ ID NO: 1680668 - DNA, 15 bp, Homo sapiens
ttcatgaggcaacta

SEQ ID NO: 1680669 - DNA, 15 bp, Homo sapiens
tcatgaggcaactag

SEQ ID NO: 1680670 - DNA, 15 bp, Homo sapiens
catgaggcaactaga

SEQ ID NO: 1680671 - DNA, 15 bp, Homo sapiens
atgaggcaactagat

SEQ ID NO: 1680672 - DNA, 15 bp, Homo sapiens
tgaggcaactagatt

SEQ ID NO: 1680673 - DNA, 15 bp, Homo sapiens
gaggcaactagattg

SEQ ID NO: 1680674 - DNA, 15 bp, Homo sapiens
aggcaactagattgc

SEQ ID NO: 1680675 - DNA, 15 bp, Homo sapiens
ggcaactagattgct

SEQ ID NO: 1680676 - DNA, 15 bp, Homo sapiens
gcaactagattgctg

SEQ ID NO: 1680677 - DNA, 15 bp, Homo sapiens
caactagattgctga

SEQ ID NO: 1680678 - DNA, 15 bp, Homo sapiens
aactagattgctgac

SEQ ID NO: 1680679 - DNA, 15 bp, Homo sapiens
actagattgctgacc

SEQ ID NO: 1680680 - DNA, 15 bp, Homo sapiens
ctagattgctgacca

SEQ ID NO: 1680681 - DNA, 15 bp, Homo sapiens
tagattgctgaccaa

SEQ ID NO: 1680682 - DNA, 15 bp, Homo sapiens
agattgctgaccaaa

SEQ ID NO: 1680683 - DNA, 15 bp, Homo sapiens
gattgctgaccaaag

SEQ ID NO: 1680684 - DNA, 15 bp, Homo sapiens
attgctgaccaaaga

SEQ ID NO: 1680685 - DNA, 15 bp, Homo sapiens
ttgctgaccaaagat

SEQ ID NO: 1680686 - DNA, 15 bp, Homo sapiens
tgctgaccaaagatg

SEQ ID NO: 1680687 - DNA, 15 bp, Homo sapiens
gctgaccaaagatgt

SEQ ID NO: 1680688 - DNA, 15 bp, Homo sapiens
ctgaccaaagatgtg

SEQ ID NO: 1680689 - DNA, 15 bp, Homo sapiens
tgaccaaagatgtgt

SEQ ID NO: 1680690 - DNA, 15 bp, Homo sapiens
gaccaaagatgtgtt

SEQ ID NO: 1680691 - DNA, 15 bp, Homo sapiens
accaaagatgtgttg

SEQ ID NO: 1680692 - DNA, 15 bp, Homo sapiens
ccaaagatgtgttga

SEQ ID NO: 1680693 - DNA, 15 bp, Homo sapiens
caaagatgtgttgac

SEQ ID NO: 1680694 - DNA, 15 bp, Homo sapiens
aaagatgtgttgact

SEQ ID NO: 1680695 - DNA, 15 bp, Homo sapiens
aagatgtgttgacta

SEQ ID NO: 1680696 - DNA, 15 bp, Homo sapiens
agatgtgttgactaa

SEQ ID NO: 1680697 - DNA, 15 bp, Homo sapiens
gatgtgttgactaat

SEQ ID NO: 1680698 - DNA, 15 bp, Homo sapiens
atgtgttgactaatt

SEQ ID NO: 1680699 - DNA, 15 bp, Homo sapiens
tgtgttgactaattt

SEQ ID NO: 1680700 - DNA, 15 bp, Homo sapiens
gtgttgactaatttg

SEQ ID NO: 1680701 - DNA, 15 bp, Homo sapiens
tgttgactaatttgg

SEQ ID NO: 1680702 - DNA, 15 bp, Homo sapiens
gttgactaatttggt

SEQ ID NO: 1680703 - DNA, 15 bp, Homo sapiens
ttgactaatttggtg

SEQ ID NO: 1680704 - DNA, 15 bp, Homo sapiens
tgactaatttggtga

SEQ ID NO: 1680705 - DNA, 15 bp, Homo sapiens
gactaatttggtgaa

SEQ ID NO: 1680706 - DNA, 15 bp, Homo sapiens
actaatttggtgaaa

SEQ ID NO: 1680707 - DNA, 15 bp, Homo sapiens
ctaatttggtgaaac

SEQ ID NO: 1680708 - DNA, 15 bp, Homo sapiens
taatttggtgaaact

SEQ ID NO: 1680709 - DNA, 15 bp, Homo sapiens
aatttggtgaaacta

SEQ ID NO: 1680710 - DNA, 15 bp, Homo sapiens
atttggtgaaactag

SEQ ID NO: 1680711 - DNA, 15 bp, Homo sapiens
tttggtgaaactagt

SEQ ID NO: 1680712 - DNA, 15 bp, Homo sapiens
ttggtgaaactagtt

SEQ ID NO: 1680713 - DNA, 15 bp, Homo sapiens
tggtgaaactagttt

SEQ ID NO: 1680714 - DNA, 15 bp, Homo sapiens
ggtgaaactagtttc

SEQ ID NO: 1680715 - DNA, 15 bp, Homo sapiens
gtgaaactagtttct

SEQ ID NO: 1680716 - DNA, 15 bp, Homo sapiens
tgaaactagtttctt

SEQ ID NO: 1680717 - DNA, 15 bp, Homo sapiens
gaaactagtttctta

SEQ ID NO: 1680718 - DNA, 15 bp, Homo sapiens
aaactagtttcttat

SEQ ID NO: 1680719 - DNA, 15 bp, Homo sapiens
aactagtttcttatt

SEQ ID NO: 1680720 - DNA, 15 bp, Homo sapiens
actagtttcttatta

SEQ ID NO: 1680721 - DNA, 15 bp, Homo sapiens
ctagtttcttattac

SEQ ID NO: 1680722 - DNA, 15 bp, Homo sapiens
tagtttcttattacc

SEQ ID NO: 1680723 - DNA, 15 bp, Homo sapiens
agtttcttattacct

SEQ ID NO: 1680724 - DNA, 15 bp, Homo sapiens
gtttcttattaccta

SEQ ID NO: 1680725 - DNA, 15 bp, Homo sapiens
tttcttattacctaa

SEQ ID NO: 1680726 - DNA, 15 bp, Homo sapiens
ttcttattacctaag

SEQ ID NO: 1680727 - DNA, 15 bp, Homo sapiens
tcttattacctaagc

SEQ ID NO: 1680728 - DNA, 15 bp, Homo sapiens
cttattacctaagca

SEQ ID NO: 1680729 - DNA, 15 bp, Homo sapiens
ttattacctaagcat

SEQ ID NO: 1680730 - DNA, 15 bp, Homo sapiens
tattacctaagcatg

SEQ ID NO: 1680731 - DNA, 15 bp, Homo sapiens
attacctaagcatgt

SEQ ID NO: 1680732 - DNA, 15 bp, Homo sapiens
ttacctaagcatgtt

SEQ ID NO: 1680733 - DNA, 15 bp, Homo sapiens
tacctaagcatgttg

SEQ ID NO: 1680734 - DNA, 15 bp, Homo sapiens
acctaagcatgttgc

SEQ ID NO: 1680735 - DNA, 15 bp, Homo sapiens
cctaagcatgttgca

SEQ ID NO: 1680736 - DNA, 15 bp, Homo sapiens
ctaagcatgttgcat

SEQ ID NO: 1680737 - DNA, 15 bp, Homo sapiens
taagcatgttgcatt

SEQ ID NO: 1680738 - DNA, 15 bp, Homo sapiens
aagcatgttgcattg

SEQ ID NO: 1680739 - DNA, 15 bp, Homo sapiens
agcatgttgcattga

SEQ ID NO: 1680740 - DNA, 15 bp, Homo sapiens
gcatgttgcattgag

SEQ ID NO: 1680741 - DNA, 15 bp, Homo sapiens
catgttgcattgagt

SEQ ID NO: 1680742 - DNA, 15 bp, Homo sapiens
atgttgcattgagta

SEQ ID NO: 1680743 - DNA, 15 bp, Homo sapiens
tgttgcattgagtat

SEQ ID NO: 1680744 - DNA, 15 bp, Homo sapiens
gttgcattgagtatg

SEQ ID NO: 1680745 - DNA, 15 bp, Homo sapiens
ttgcattgagtatga

SEQ ID NO: 1680746 - DNA, 15 bp, Homo sapiens
tgcattgagtatgaa

SEQ ID NO: 1680747 - DNA, 15 bp, Homo sapiens
gcattgagtatgaat

SEQ ID NO: 1680748 - DNA, 15 bp, Homo sapiens
cattgagtatgaatt

SEQ ID NO: 1680749 - DNA, 15 bp, Homo sapiens
attgagtatgaattg

SEQ ID NO: 1680750 - DNA, 15 bp, Homo sapiens
ttgagtatgaattgc

SEQ ID NO: 1680751 - DNA, 15 bp, Homo sapiens
tgagtatgaattgcc

SEQ ID NO: 1680752 - DNA, 15 bp, Homo sapiens
gagtatgaattgcct

SEQ ID NO: 1680753 - DNA, 15 bp, Homo sapiens
agtatgaattgcctt

SEQ ID NO: 1680754 - DNA, 15 bp, Homo sapiens
gtatgaattgccttg

SEQ ID NO: 1680755 - DNA, 15 bp, Homo sapiens
tatgaattgccttgc

SEQ ID NO: 1680756 - DNA, 15 bp, Homo sapiens
atgaattgccttgct

SEQ ID NO: 1680757 - DNA, 15 bp, Homo sapiens
tgaattgccttgctt

SEQ ID NO: 1680758 - DNA, 15 bp, Homo sapiens
gaattgccttgcttt

SEQ ID NO: 1680759 - DNA, 15 bp, Homo sapiens
aattgccttgcttta

SEQ ID NO: 1680760 - DNA, 15 bp, Homo sapiens
attgccttgctttaa

SEQ ID NO: 1680761 - DNA, 15 bp, Homo sapiens
ttgccttgctttaag

SEQ ID NO: 1680762 - DNA, 15 bp, Homo sapiens
tgccttgctttaagc

SEQ ID NO: 1680763 - DNA, 15 bp, Homo sapiens
gccttgctttaagct

SEQ ID NO: 1680764 - DNA, 15 bp, Homo sapiens
ccttgctttaagcta

SEQ ID NO: 1680765 - DNA, 15 bp, Homo sapiens
cttgctttaagctag

SEQ ID NO: 1680766 - DNA, 15 bp, Homo sapiens
ttgctttaagctagg

SEQ ID NO: 1680767 - DNA, 15 bp, Homo sapiens
tgctttaagctaggg

SEQ ID NO: 1680768 - DNA, 15 bp, Homo sapiens
gctttaagctaggga

SEQ ID NO: 1680769 - DNA, 15 bp, Homo sapiens
ctttaagctagggag

SEQ ID NO: 1680770 - DNA, 15 bp, Homo sapiens
tttaagctagggagt

SEQ ID NO: 1680771 - DNA, 15 bp, Homo sapiens
ttaagctagggagta

SEQ ID NO: 1680772 - DNA, 15 bp, Homo sapiens
taagctagggagtag

SEQ ID NO: 1680773 - DNA, 15 bp, Homo sapiens
aagctagggagtagt

SEQ ID NO: 1680774 - DNA, 15 bp, Homo sapiens
agctagggagtagta

SEQ ID NO: 1680775 - DNA, 15 bp, Homo sapiens
gctagggagtagtag

SEQ ID NO: 1680776 - DNA, 15 bp, Homo sapiens
ctagggagtagtagg

SEQ ID NO: 1680777 - DNA, 15 bp, Homo sapiens
tagggagtagtaggc

SEQ ID NO: 1680778 - DNA, 15 bp, Homo sapiens
agggagtagtaggca

SEQ ID NO: 1680779 - DNA, 15 bp, Homo sapiens
gggagtagtaggcac

SEQ ID NO: 1680780 - DNA, 15 bp, Homo sapiens
ggagtagtaggcacc

SEQ ID NO: 1680781 - DNA, 15 bp, Homo sapiens
gagtagtaggcacca

SEQ ID NO: 1680782 - DNA, 15 bp, Homo sapiens
agtagtaggcaccac

SEQ ID NO: 1680783 - DNA, 15 bp, Homo sapiens
gtagtaggcaccacc

SEQ ID NO: 1680784 - DNA, 15 bp, Homo sapiens
tagtaggcaccaccc

SEQ ID NO: 1680785 - DNA, 15 bp, Homo sapiens
agtaggcaccaccca

SEQ ID NO: 1680786 - DNA, 15 bp, Homo sapiens
gtaggcaccacccac

SEQ ID NO: 1680787 - DNA, 15 bp, Homo sapiens
taggcaccacccaca

SEQ ID NO: 1680788 - DNA, 15 bp, Homo sapiens
aggcaccacccacag

SEQ ID NO: 1680789 - DNA, 15 bp, Homo sapiens
ggcaccacccacagc

SEQ ID NO: 1680790 - DNA, 15 bp, Homo sapiens
gcaccacccacagct

SEQ ID NO: 1680791 - DNA, 15 bp, Homo sapiens
caccacccacagctt

SEQ ID NO: 1680792 - DNA, 15 bp, Homo sapiens
accacccacagctta

SEQ ID NO: 1680793 - DNA, 15 bp, Homo sapiens
ccacccacagcttac

SEQ ID NO: 1680794 - DNA, 15 bp, Homo sapiens
cacccacagcttact

SEQ ID NO: 1680795 - DNA, 15 bp, Homo sapiens
acccacagcttactt

SEQ ID NO: 1680796 - DNA, 15 bp, Homo sapiens
cccacagcttactta

SEQ ID NO: 1680797 - DNA, 15 bp, Homo sapiens
ccacagcttacttat

SEQ ID NO: 1680798 - DNA, 15 bp, Homo sapiens
cacagcttacttata

SEQ ID NO: 1680799 - DNA, 15 bp, Homo sapiens
acagcttacttataa

SEQ ID NO: 1680800 - DNA, 15 bp, Homo sapiens
cagcttacttataac

SEQ ID NO: 1680801 - DNA, 15 bp, Homo sapiens
agcttacttataacc

SEQ ID NO: 1680802 - DNA, 15 bp, Homo sapiens
gcttacttataacca

SEQ ID NO: 1680803 - DNA, 15 bp, Homo sapiens
cttacttataaccac

SEQ ID NO: 1680804 - DNA, 15 bp, Homo sapiens
ttacttataaccact

SEQ ID NO: 1680805 - DNA, 15 bp, Homo sapiens
tacttataaccactt

SEQ ID NO: 1680806 - DNA, 15 bp, Homo sapiens
acttataaccacttg

SEQ ID NO: 1680807 - DNA, 15 bp, Homo sapiens
cttataaccacttga

SEQ ID NO: 1680808 - DNA, 15 bp, Homo sapiens
ttataaccacttgac

SEQ ID NO: 1680809 - DNA, 15 bp, Homo sapiens
tataaccacttgaca

SEQ ID NO: 1680810 - DNA, 15 bp, Homo sapiens
ataaccacttgacat

SEQ ID NO: 1680811 - DNA, 15 bp, Homo sapiens
taaccacttgacata

SEQ ID NO: 1680812 - DNA, 15 bp, Homo sapiens
aaccacttgacatag

SEQ ID NO: 1680813 - DNA, 15 bp, Homo sapiens
accacttgacataga

SEQ ID NO: 1680814 - DNA, 15 bp, Homo sapiens
ccacttgacatagat

SEQ ID NO: 1680815 - DNA, 15 bp, Homo sapiens
cacttgacatagatc

SEQ ID NO: 1680816 - DNA, 15 bp, Homo sapiens
acttgacatagatca

SEQ ID NO: 1680817 - DNA, 15 bp, Homo sapiens
cttgacatagatcac

SEQ ID NO: 1680818 - DNA, 15 bp, Homo sapiens
ttgacatagatcact

SEQ ID NO: 1680819 - DNA, 15 bp, Homo sapiens
tgacatagatcactg

SEQ ID NO: 1680820 - DNA, 15 bp, Homo sapiens
gacatagatcactgt

SEQ ID NO: 1680821 - DNA, 15 bp, Homo sapiens
acatagatcactgtg

SEQ ID NO: 1680822 - DNA, 15 bp, Homo sapiens
catagatcactgtga

SEQ ID NO: 1680823 - DNA, 15 bp, Homo sapiens
atagatcactgtgac

SEQ ID NO: 1680824 - DNA, 15 bp, Homo sapiens
tagatcactgtgacc

SEQ ID NO: 1680825 - DNA, 15 bp, Homo sapiens
agatcactgtgacct

SEQ ID NO: 1680826 - DNA, 15 bp, Homo sapiens
gatcactgtgaccta

SEQ ID NO: 1680827 - DNA, 15 bp, Homo sapiens
atcactgtgacctat

SEQ ID NO: 1680828 - DNA, 15 bp, Homo sapiens
tcactgtgacctatg

SEQ ID NO: 1680829 - DNA, 15 bp, Homo sapiens
cactgtgacctatgc

SEQ ID NO: 1680830 - DNA, 15 bp, Homo sapiens
actgtgacctatgct

SEQ ID NO: 1680831 - DNA, 15 bp, Homo sapiens
ctgtgacctatgctt

SEQ ID NO: 1680832 - DNA, 15 bp, Homo sapiens
tgtgacctatgcttg

SEQ ID NO: 1680833 - DNA, 15 bp, Homo sapiens
gtgacctatgcttga

SEQ ID NO: 1680834 - DNA, 15 bp, Homo sapiens
tgacctatgcttgac

SEQ ID NO: 1680835 - DNA, 15 bp, Homo sapiens
gacctatgcttgact

SEQ ID NO: 1680836 - DNA, 15 bp, Homo sapiens
acctatgcttgacta

SEQ ID NO: 1680837 - DNA, 15 bp, Homo sapiens
cctatgcttgactat

SEQ ID NO: 1680838 - DNA, 15 bp, Homo sapiens
ctatgcttgactatt

SEQ ID NO: 1680839 - DNA, 15 bp, Homo sapiens
tatgcttgactatta

SEQ ID NO: 1680840 - DNA, 15 bp, Homo sapiens
atgcttgactattaa

SEQ ID NO: 1680841 - DNA, 15 bp, Homo sapiens
tgcttgactattaac

SEQ ID NO: 1680842 - DNA, 15 bp, Homo sapiens
gcttgactattaaca

SEQ ID NO: 1680843 - DNA, 15 bp, Homo sapiens
cttgactattaacaa

SEQ ID NO: 1680844 - DNA, 15 bp, Homo sapiens
ttgactattaacaag

SEQ ID NO: 1680845 - DNA, 15 bp, Homo sapiens
tgactattaacaagc

SEQ ID NO: 1680846 - DNA, 15 bp, Homo sapiens
gactattaacaagca

SEQ ID NO: 1680847 - DNA, 15 bp, Homo sapiens
actattaacaagcac

SEQ ID NO: 1680848 - DNA, 15 bp, Homo sapiens
ctattaacaagcacc

SEQ ID NO: 1680849 - DNA, 15 bp, Homo sapiens
tattaacaagcaccc

SEQ ID NO: 1680850 - DNA, 15 bp, Homo sapiens
attaacaagcaccca

SEQ ID NO: 1680851 - DNA, 15 bp, Homo sapiens
ttaacaagcacccac

SEQ ID NO: 1680852 - DNA, 15 bp, Homo sapiens
taacaagcacccact

SEQ ID NO: 1680853 - DNA, 15 bp, Homo sapiens
aacaagcacccactt

SEQ ID NO: 1680854 - DNA, 15 bp, Homo sapiens
acaagcacccacttc

SEQ ID NO: 1680855 - DNA, 15 bp, Homo sapiens
caagcacccacttct

SEQ ID NO: 1680856 - DNA, 15 bp, Homo sapiens
aagcacccacttctt

SEQ ID NO: 1680857 - DNA, 15 bp, Homo sapiens
agcacccacttctta

SEQ ID NO: 1680858 - DNA, 15 bp, Homo sapiens
gcacccacttcttat

SEQ ID NO: 1680859 - DNA, 15 bp, Homo sapiens
cacccacttcttatc

SEQ ID NO: 1680860 - DNA, 15 bp, Homo sapiens
acccacttcttatca

SEQ ID NO: 1680861 - DNA, 15 bp, Homo sapiens
cccacttcttatcac

SEQ ID NO: 1680862 - DNA, 15 bp, Homo sapiens
ccacttcttatcacc

SEQ ID NO: 1680863 - DNA, 15 bp, Homo sapiens
cacttcttatcacct

SEQ ID NO: 1680864 - DNA, 15 bp, Homo sapiens
acttcttatcacctc

SEQ ID NO: 1680865 - DNA, 15 bp, Homo sapiens
cttcttatcacctcc

SEQ ID NO: 1680866 - DNA, 15 bp, Homo sapiens
ttcttatcacctcct

SEQ ID NO: 1680867 - DNA, 15 bp, Homo sapiens
tcttatcacctcctc

SEQ ID NO: 1680868 - DNA, 15 bp, Homo sapiens
cttatcacctcctct

SEQ ID NO: 1680869 - DNA, 15 bp, Homo sapiens
ttatcacctcctctt

SEQ ID NO: 1680870 - DNA, 15 bp, Homo sapiens
tatcacctcctcttc

SEQ ID NO: 1680871 - DNA, 15 bp, Homo sapiens
atcacctcctcttcc

SEQ ID NO: 1680872 - DNA, 15 bp, Homo sapiens
tcacctcctcttcca

SEQ ID NO: 1680873 - DNA, 15 bp, Homo sapiens
cacctcctcttccac

SEQ ID NO: 1680874 - DNA, 15 bp, Homo sapiens
acctcctcttccacc

SEQ ID NO: 1680875 - DNA, 15 bp, Homo sapiens
cctcctcttccacct

SEQ ID NO: 1680876 - DNA, 15 bp, Homo sapiens
ctcctcttccacctc

SEQ ID NO: 1680877 - DNA, 15 bp, Homo sapiens
tcctcttccacctca

SEQ ID NO: 1680878 - DNA, 15 bp, Homo sapiens
cctcttccacctcaa

SEQ ID NO: 1680879 - DNA, 15 bp, Homo sapiens
ctcttccacctcaac

SEQ ID NO: 1680880 - DNA, 15 bp, Homo sapiens
tcttccacctcaaca

SEQ ID NO: 1680881 - DNA, 15 bp, Homo sapiens
cttccacctcaacaa

SEQ ID NO: 1680882 - DNA, 15 bp, Homo sapiens
ttccacctcaacaaa

SEQ ID NO: 1680883 - DNA, 15 bp, Homo sapiens
tccacctcaacaaag

SEQ ID NO: 1680884 - DNA, 15 bp, Homo sapiens
ccacctcaacaaagg

SEQ ID NO: 1680885 - DNA, 15 bp, Homo sapiens
cacctcaacaaagga

SEQ ID NO: 1680886 - DNA, 15 bp, Homo sapiens
acctcaacaaaggaa

SEQ ID NO: 1680887 - DNA, 15 bp, Homo sapiens
cctcaacaaaggaat

SEQ ID NO: 1680888 - DNA, 15 bp, Homo sapiens
ctcaacaaaggaata

SEQ ID NO: 1680889 - DNA, 15 bp, Homo sapiens
tcaacaaaggaatag

SEQ ID NO: 1680890 - DNA, 15 bp, Homo sapiens
caacaaaggaatagt

SEQ ID NO: 1680891 - DNA, 15 bp, Homo sapiens
aacaaaggaatagtt

SEQ ID NO: 1680892 - DNA, 15 bp, Homo sapiens
acaaaggaatagttt

SEQ ID NO: 1680893 - DNA, 15 bp, Homo sapiens
caaaggaatagtttc

SEQ ID NO: 1680894 - DNA, 15 bp, Homo sapiens
aaaggaatagtttcc

SEQ ID NO: 1680895 - DNA, 15 bp, Homo sapiens
aaggaatagtttcca

SEQ ID NO: 1680896 - DNA, 15 bp, Homo sapiens
aggaatagtttccac

SEQ ID NO: 1680897 - DNA, 15 bp, Homo sapiens
ggaatagtttccacg

SEQ ID NO: 1680898 - DNA, 15 bp, Homo sapiens
gaatagtttccacga

SEQ ID NO: 1680899 - DNA, 15 bp, Homo sapiens
aatagtttccacgac

SEQ ID NO: 1680900 - DNA, 15 bp, Homo sapiens
atagtttccacgact

SEQ ID NO: 1680901 - DNA, 15 bp, Homo sapiens
tagtttccacgactg

SEQ ID NO: 1680902 - DNA, 15 bp, Homo sapiens
agtttccacgactga

SEQ ID NO: 1680903 - DNA, 15 bp, Homo sapiens
gtttccacgactgaa

SEQ ID NO: 1680904 - DNA, 15 bp, Homo sapiens
tttccacgactgaaa

SEQ ID NO: 1680905 - DNA, 15 bp, Homo sapiens
ttccacgactgaaac

SEQ ID NO: 1680906 - DNA, 15 bp, Homo sapiens
tccacgactgaaaca

SEQ ID NO: 1680907 - DNA, 15 bp, Homo sapiens
ccacgactgaaacat

SEQ ID NO: 1680908 - DNA, 15 bp, Homo sapiens
cacgactgaaacatg

SEQ ID NO: 1680909 - DNA, 15 bp, Homo sapiens
acgactgaaacatga

SEQ ID NO: 1680910 - DNA, 15 bp, Homo sapiens
cgactgaaacatgac

SEQ ID NO: 1680911 - DNA, 15 bp, Homo sapiens
gactgaaacatgact

SEQ ID NO: 1680912 - DNA, 15 bp, Homo sapiens
actgaaacatgactt

SEQ ID NO: 1680913 - DNA, 15 bp, Homo sapiens
ctgaaacatgacttt

SEQ ID NO: 1680914 - DNA, 15 bp, Homo sapiens
tgaaacatgacttta

SEQ ID NO: 1680915 - DNA, 15 bp, Homo sapiens
gaaacatgactttaa

SEQ ID NO: 1680916 - DNA, 15 bp, Homo sapiens
aaacatgactttaag

SEQ ID NO: 1680917 - DNA, 15 bp, Homo sapiens
aacatgactttaaga

SEQ ID NO: 1680918 - DNA, 15 bp, Homo sapiens
acatgactttaagaa

SEQ ID NO: 1680919 - DNA, 15 bp, Homo sapiens
catgactttaagaag

SEQ ID NO: 1680920 - DNA, 15 bp, Homo sapiens
atgactttaagaagg

SEQ ID NO: 1680921 - DNA, 15 bp, Homo sapiens
tgactttaagaaggg

SEQ ID NO: 1680922 - DNA, 15 bp, Homo sapiens
gactttaagaaggga

SEQ ID NO: 1680923 - DNA, 15 bp, Homo sapiens
actttaagaagggag

SEQ ID NO: 1680924 - DNA, 15 bp, Homo sapiens
ctttaagaagggagg

SEQ ID NO: 1680925 - DNA, 15 bp, Homo sapiens
tttaagaagggaggt

SEQ ID NO: 1680926 - DNA, 15 bp, Homo sapiens
ttaagaagggaggtg

SEQ ID NO: 1680927 - DNA, 15 bp, Homo sapiens
taagaagggaggtgt

SEQ ID NO: 1680928 - DNA, 15 bp, Homo sapiens
aagaagggaggtgtc

SEQ ID NO: 1680929 - DNA, 15 bp, Homo sapiens
agaagggaggtgtcc

SEQ ID NO: 1680930 - DNA, 15 bp, Homo sapiens
gaagggaggtgtcct

SEQ ID NO: 1680931 - DNA, 15 bp, Homo sapiens
aagggaggtgtcctg

SEQ ID NO: 1680932 - DNA, 15 bp, Homo sapiens
agggaggtgtcctgg

SEQ ID NO: 1680933 - DNA, 15 bp, Homo sapiens
gggaggtgtcctgga

SEQ ID NO: 1680934 - DNA, 15 bp, Homo sapiens
ggaggtgtcctggat

SEQ ID NO: 1680935 - DNA, 15 bp, Homo sapiens
gaggtgtcctggata

SEQ ID NO: 1680936 - DNA, 15 bp, Homo sapiens
aggtgtcctggataa

SEQ ID NO: 1680937 - DNA, 15 bp, Homo sapiens
ggtgtcctggataaa

SEQ ID NO: 1680938 - DNA, 15 bp, Homo sapiens
gtgtcctggataaag

SEQ ID NO: 1680939 - DNA, 15 bp, Homo sapiens
tgtcctggataaagc

SEQ ID NO: 1680940 - DNA, 15 bp, Homo sapiens
gtcctggataaagcc

SEQ ID NO: 1680941 - DNA, 15 bp, Homo sapiens
tcctggataaagcca

SEQ ID NO: 1680942 - DNA, 15 bp, Homo sapiens
cctggataaagccaa

SEQ ID NO: 1680943 - DNA, 15 bp, Homo sapiens
ctggataaagccaag

SEQ ID NO: 1680944 - DNA, 15 bp, Homo sapiens
tggataaagccaaga

SEQ ID NO: 1680945 - DNA, 15 bp, Homo sapiens
ggataaagccaagac

SEQ ID NO: 1680946 - DNA, 15 bp, Homo sapiens
gataaagccaagaca

SEQ ID NO: 1680947 - DNA, 15 bp, Homo sapiens
ataaagccaagacat

SEQ ID NO: 1680948 - DNA, 15 bp, Homo sapiens
taaagccaagacatg

SEQ ID NO: 1680949 - DNA, 15 bp, Homo sapiens
aaagccaagacatga

SEQ ID NO: 1680950 - DNA, 15 bp, Homo sapiens
aagccaagacatgaa

SEQ ID NO: 1680951 - DNA, 15 bp, Homo sapiens
agccaagacatgaaa

SEQ ID NO: 1680952 - DNA, 15 bp, Homo sapiens
gccaagacatgaaaa

SEQ ID NO: 1680953 - DNA, 15 bp, Homo sapiens
ccaagacatgaaaat

SEQ ID NO: 1680954 - DNA, 15 bp, Homo sapiens
caagacatgaaaatc

SEQ ID NO: 1680955 - DNA, 15 bp, Homo sapiens
aagacatgaaaatcc

SEQ ID NO: 1680956 - DNA, 15 bp, Homo sapiens
agacatgaaaatcca

SEQ ID NO: 1680957 - DNA, 15 bp, Homo sapiens
gacatgaaaatccaa

SEQ ID NO: 1680958 - DNA, 15 bp, Homo sapiens
acatgaaaatccaat

SEQ ID NO: 1680959 - DNA, 15 bp, Homo sapiens
catgaaaatccaatc

SEQ ID NO: 1680960 - DNA, 15 bp, Homo sapiens
atgaaaatccaatct

SEQ ID NO: 1680961 - DNA, 15 bp, Homo sapiens
tgaaaatccaatcta

SEQ ID NO: 1680962 - DNA, 15 bp, Homo sapiens
gaaaatccaatctac

SEQ ID NO: 1680963 - DNA, 15 bp, Homo sapiens
aaaatccaatctacc

SEQ ID NO: 1680964 - DNA, 15 bp, Homo sapiens
aaatccaatctaccc

SEQ ID NO: 1680965 - DNA, 15 bp, Homo sapiens
aatccaatctaccca

SEQ ID NO: 1680966 - DNA, 15 bp, Homo sapiens
atccaatctacccat

SEQ ID NO: 1680967 - DNA, 15 bp, Homo sapiens
tccaatctacccata

SEQ ID NO: 1680968 - DNA, 15 bp, Homo sapiens
ccaatctacccatac

SEQ ID NO: 1680969 - DNA, 15 bp, Homo sapiens
caatctacccatacc

SEQ ID NO: 1680970 - DNA, 15 bp, Homo sapiens
aatctacccataccc

SEQ ID NO: 1680971 - DNA, 15 bp, Homo sapiens
atctacccatacccc

SEQ ID NO: 1680972 - DNA, 15 bp, Homo sapiens
tctacccataccccc

SEQ ID NO: 1680973 - DNA, 15 bp, Homo sapiens
ctacccataccccca

SEQ ID NO: 1680974 - DNA, 15 bp, Homo sapiens
tacccatacccccag

SEQ ID NO: 1680975 - DNA, 15 bp, Homo sapiens
acccatacccccagg

SEQ ID NO: 1680976 - DNA, 15 bp, Homo sapiens
cccatacccccaggc

SEQ ID NO: 1680977 - DNA, 15 bp, Homo sapiens
ccatacccccaggca

SEQ ID NO: 1680978 - DNA, 15 bp, Homo sapiens
catacccccaggcag

SEQ ID NO: 1680979 - DNA, 15 bp, Homo sapiens
atacccccaggcaga

SEQ ID NO: 1680980 - DNA, 15 bp, Homo sapiens
tacccccaggcagac

SEQ ID NO: 1680981 - DNA, 15 bp, Homo sapiens
acccccaggcagact

SEQ ID NO: 1680982 - DNA, 15 bp, Homo sapiens
cccccaggcagactt

SEQ ID NO: 1680983 - DNA, 15 bp, Homo sapiens
ccccaggcagacttg

SEQ ID NO: 1680984 - DNA, 15 bp, Homo sapiens
cccaggcagacttgc

SEQ ID NO: 1680985 - DNA, 15 bp, Homo sapiens
ccaggcagacttgcc

SEQ ID NO: 1680986 - DNA, 15 bp, Homo sapiens
caggcagacttgccc

SEQ ID NO: 1680987 - DNA, 15 bp, Homo sapiens
aggcagacttgcccc

SEQ ID NO: 1680988 - DNA, 15 bp, Homo sapiens
ggcagacttgcccct

SEQ ID NO: 1680989 - DNA, 15 bp, Homo sapiens
gcagacttgcccctt

SEQ ID NO: 1680990 - DNA, 15 bp, Homo sapiens
cagacttgccccttg

SEQ ID NO: 1680991 - DNA, 15 bp, Homo sapiens
agacttgccccttgc

SEQ ID NO: 1680992 - DNA, 15 bp, Homo sapiens
gacttgccccttgcg

SEQ ID NO: 1680993 - DNA, 15 bp, Homo sapiens
acttgccccttgcga

SEQ ID NO: 1680994 - DNA, 15 bp, Homo sapiens
cttgccccttgcgag

SEQ ID NO: 1680995 - DNA, 15 bp, Homo sapiens
ttgccccttgcgagt

SEQ ID NO: 1680996 - DNA, 15 bp, Homo sapiens
tgccccttgcgagtg

SEQ ID NO: 1680997 - DNA, 15 bp, Homo sapiens
gccccttgcgagtga

SEQ ID NO: 1680998 - DNA, 15 bp, Homo sapiens
ccccttgcgagtgat

SEQ ID NO: 1680999 - DNA, 15 bp, Homo sapiens
cccttgcgagtgata

SEQ ID NO: 1681000 - DNA, 15 bp, Homo sapiens
ccttgcgagtgataa

SEQ ID NO: 1681001 - DNA, 15 bp, Homo sapiens
cttgcgagtgataaa

SEQ ID NO: 1681002 - DNA, 15 bp, Homo sapiens
ttgcgagtgataaat

SEQ ID NO: 1681003 - DNA, 15 bp, Homo sapiens
tgcgagtgataaatt

SEQ ID NO: 1681004 - DNA, 15 bp, Homo sapiens
gcgagtgataaattc

SEQ ID NO: 1681005 - DNA, 15 bp, Homo sapiens
cgagtgataaattct

SEQ ID NO: 1681006 - DNA, 15 bp, Homo sapiens
gagtgataaattcta

SEQ ID NO: 1681007 - DNA, 15 bp, Homo sapiens
agtgataaattctac

SEQ ID NO: 1681008 - DNA, 15 bp, Homo sapiens
gtgataaattctaca

SEQ ID NO: 1681009 - DNA, 15 bp, Homo sapiens
tgataaattctacag

SEQ ID NO: 1681010 - DNA, 15 bp, Homo sapiens
gataaattctacagt

SEQ ID NO: 1681011 - DNA, 15 bp, Homo sapiens
ataaattctacagtt

SEQ ID NO: 1681012 - DNA, 15 bp, Homo sapiens
taaattctacagttc

SEQ ID NO: 1681013 - DNA, 15 bp, Homo sapiens
aaattctacagttca

SEQ ID NO: 1681014 - DNA, 15 bp, Homo sapiens
aattctacagttcaa

SEQ ID NO: 1681015 - DNA, 15 bp, Homo sapiens
attctacagttcaaa

SEQ ID NO: 1681016 - DNA, 15 bp, Homo sapiens
ttctacagttcaaat

SEQ ID NO: 1681017 - DNA, 15 bp, Homo sapiens
tctacagttcaaatg

SEQ ID NO: 1681018 - DNA, 15 bp, Homo sapiens
ctacagttcaaatga

SEQ ID NO: 1681019 - DNA, 15 bp, Homo sapiens
tacagttcaaatgag

SEQ ID NO: 1681020 - DNA, 15 bp, Homo sapiens
acagttcaaatgagt

SEQ ID NO: 1681021 - DNA, 15 bp, Homo sapiens
cagttcaaatgagta

SEQ ID NO: 1681022 - DNA, 15 bp, Homo sapiens
agttcaaatgagtat

SEQ ID NO: 1681023 - DNA, 15 bp, Homo sapiens
gttcaaatgagtatt

SEQ ID NO: 1681024 - DNA, 15 bp, Homo sapiens
ttcaaatgagtattc

SEQ ID NO: 1681025 - DNA, 15 bp, Homo sapiens
tcaaatgagtattca

SEQ ID NO: 1681026 - DNA, 15 bp, Homo sapiens
caaatgagtattcaa

SEQ ID NO: 1681027 - DNA, 15 bp, Homo sapiens
aaatgagtattcaac

SEQ ID NO: 1681028 - DNA, 15 bp, Homo sapiens
aatgagtattcaaca

SEQ ID NO: 1681029 - DNA, 15 bp, Homo sapiens
atgagtattcaacac

SEQ ID NO: 1681030 - DNA, 15 bp, Homo sapiens
tgagtattcaacact

SEQ ID NO: 1681031 - DNA, 15 bp, Homo sapiens
gagtattcaacactg

SEQ ID NO: 1681032 - DNA, 15 bp, Homo sapiens
agtattcaacactgc

SEQ ID NO: 1681033 - DNA, 15 bp, Homo sapiens
gtattcaacactgca

SEQ ID NO: 1681034 - DNA, 15 bp, Homo sapiens
tattcaacactgcag

SEQ ID NO: 1681035 - DNA, 15 bp, Homo sapiens
attcaacactgcagg

SEQ ID NO: 1681036 - DNA, 15 bp, Homo sapiens
ttcaacactgcaggc

SEQ ID NO: 1681037 - DNA, 15 bp, Homo sapiens
tcaacactgcaggca

SEQ ID NO: 1681038 - DNA, 15 bp, Homo sapiens
caacactgcaggcac

SEQ ID NO: 1681039 - DNA, 15 bp, Homo sapiens
aacactgcaggcaca

SEQ ID NO: 1681040 - DNA, 15 bp, Homo sapiens
acactgcaggcacaa

SEQ ID NO: 1681041 - DNA, 15 bp, Homo sapiens
cactgcaggcacaat

SEQ ID NO: 1681042 - DNA, 15 bp, Homo sapiens
actgcaggcacaatt

SEQ ID NO: 1681043 - DNA, 15 bp, Homo sapiens
ctgcaggcacaatta

SEQ ID NO: 1681044 - DNA, 15 bp, Homo sapiens
tgcaggcacaattac

SEQ ID NO: 1681045 - DNA, 15 bp, Homo sapiens
gcaggcacaattact

SEQ ID NO: 1681046 - DNA, 15 bp, Homo sapiens
caggcacaattactt

SEQ ID NO: 1681047 - DNA, 15 bp, Homo sapiens
aggcacaattactta

SEQ ID NO: 1681048 - DNA, 15 bp, Homo sapiens
ggcacaattacttat

SEQ ID NO: 1681049 - DNA, 15 bp, Homo sapiens
gcacaattacttata

SEQ ID NO: 1681050 - DNA, 15 bp, Homo sapiens
cacaattacttataa

SEQ ID NO: 1681051 - DNA, 15 bp, Homo sapiens
acaattacttataat

SEQ ID NO: 1681052 - DNA, 15 bp, Homo sapiens
caattacttataatt

SEQ ID NO: 1681053 - DNA, 15 bp, Homo sapiens
aattacttataattg

SEQ ID NO: 1681054 - DNA, 15 bp, Homo sapiens
attacttataattga

SEQ ID NO: 1681055 - DNA, 15 bp, Homo sapiens
ttacttataattgac

SEQ ID NO: 1681056 - DNA, 15 bp, Homo sapiens
tacttataattgact

SEQ ID NO: 1681057 - DNA, 15 bp, Homo sapiens
acttataattgactt

SEQ ID NO: 1681058 - DNA, 15 bp, Homo sapiens
cttataattgacttt

SEQ ID NO: 1681059 - DNA, 15 bp, Homo sapiens
ttataattgactttt

SEQ ID NO: 1681060 - DNA, 15 bp, Homo sapiens
tataattgacttttg

SEQ ID NO: 1681061 - DNA, 15 bp, Homo sapiens
ataattgacttttgt

SEQ ID NO: 1681062 - DNA, 15 bp, Homo sapiens
taattgacttttgtt

SEQ ID NO: 1681063 - DNA, 15 bp, Homo sapiens
aattgacttttgttc

SEQ ID NO: 1681064 - DNA, 15 bp, Homo sapiens
attgacttttgttct

SEQ ID NO: 1681065 - DNA, 15 bp, Homo sapiens
ttgacttttgttctg

SEQ ID NO: 1681066 - DNA, 15 bp, Homo sapiens
tgacttttgttctgt

SEQ ID NO: 1681067 - DNA, 15 bp, Homo sapiens
gacttttgttctgta

SEQ ID NO: 1681068 - DNA, 15 bp, Homo sapiens
acttttgttctgtag

SEQ ID NO: 1681069 - DNA, 15 bp, Homo sapiens
cttttgttctgtagc

SEQ ID NO: 1681070 - DNA, 15 bp, Homo sapiens
ttttgttctgtagca

SEQ ID NO: 1681071 - DNA, 15 bp, Homo sapiens
tttgttctgtagcag

SEQ ID NO: 1681072 - DNA, 15 bp, Homo sapiens
ttgttctgtagcaga

SEQ ID NO: 1681073 - DNA, 15 bp, Homo sapiens
tgttctgtagcagaa

SEQ ID NO: 1681074 - DNA, 15 bp, Homo sapiens
gttctgtagcagaat

SEQ ID NO: 1681075 - DNA, 15 bp, Homo sapiens
ttctgtagcagaatt

SEQ ID NO: 1681076 - DNA, 15 bp, Homo sapiens
tctgtagcagaattc

SEQ ID NO: 1681077 - DNA, 15 bp, Homo sapiens
ctgtagcagaattct

SEQ ID NO: 1681078 - DNA, 15 bp, Homo sapiens
tgtagcagaattctc

SEQ ID NO: 1681079 - DNA, 15 bp, Homo sapiens
gtagcagaattctct

SEQ ID NO: 1681080 - DNA, 15 bp, Homo sapiens
tagcagaattctctc

SEQ ID NO: 1681081 - DNA, 15 bp, Homo sapiens
agcagaattctctct

SEQ ID NO: 1681082 - DNA, 15 bp, Homo sapiens
gcagaattctctctg

SEQ ID NO: 1681083 - DNA, 15 bp, Homo sapiens
cagaattctctctga

SEQ ID NO: 1681084 - DNA, 15 bp, Homo sapiens
agaattctctctgat

SEQ ID NO: 1681085 - DNA, 15 bp, Homo sapiens
gaattctctctgatt

SEQ ID NO: 1681086 - DNA, 15 bp, Homo sapiens
aattctctctgattc

SEQ ID NO: 1681087 - DNA, 15 bp, Homo sapiens
attctctctgattcc

SEQ ID NO: 1681088 - DNA, 15 bp, Homo sapiens
ttctctctgattcct

SEQ ID NO: 1681089 - DNA, 15 bp, Homo sapiens
tctctctgattcctc

SEQ ID NO: 1681090 - DNA, 15 bp, Homo sapiens
ctctctgattcctct

SEQ ID NO: 1681091 - DNA, 15 bp, Homo sapiens
tctctgattcctctt

SEQ ID NO: 1681092 - DNA, 15 bp, Homo sapiens
ctctgattcctcttc

SEQ ID NO: 1681093 - DNA, 15 bp, Homo sapiens
tctgattcctcttct

SEQ ID NO: 1681094 - DNA, 15 bp, Homo sapiens
ctgattcctcttctt

SEQ ID NO: 1681095 - DNA, 15 bp, Homo sapiens
tgattcctcttcttt

SEQ ID NO: 1681096 - DNA, 15 bp, Homo sapiens
gattcctcttcttta

SEQ ID NO: 1681097 - DNA, 15 bp, Homo sapiens
attcctcttctttat

SEQ ID NO: 1681098 - DNA, 15 bp, Homo sapiens
ttcctcttctttatt

SEQ ID NO: 1681099 - DNA, 15 bp, Homo sapiens
tcctcttctttattt

SEQ ID NO: 1681100 - DNA, 15 bp, Homo sapiens
cctcttctttattta

SEQ ID NO: 1681101 - DNA, 15 bp, Homo sapiens
ctcttctttatttat

SEQ ID NO: 1681102 - DNA, 15 bp, Homo sapiens
tcttctttatttatt

SEQ ID NO: 1681103 - DNA, 15 bp, Homo sapiens
cttctttatttattt

SEQ ID NO: 1681104 - DNA, 15 bp, Homo sapiens
ttctttatttatttc

SEQ ID NO: 1681105 - DNA, 15 bp, Homo sapiens
tctttatttatttca

SEQ ID NO: 1681106 - DNA, 15 bp, Homo sapiens
ctttatttatttcac

SEQ ID NO: 1681107 - DNA, 15 bp, Homo sapiens
tttatttatttcacc

SEQ ID NO: 1681108 - DNA, 15 bp, Homo sapiens
ttatttatttcacct

SEQ ID NO: 1681109 - DNA, 15 bp, Homo sapiens
tatttatttcaccta

SEQ ID NO: 1681110 - DNA, 15 bp, Homo sapiens
atttatttcacctat

SEQ ID NO: 1681111 - DNA, 15 bp, Homo sapiens
tttatttcacctatt

SEQ ID NO: 1681112 - DNA, 15 bp, Homo sapiens
ttatttcacctattt

SEQ ID NO: 1681113 - DNA, 15 bp, Homo sapiens
tatttcacctatttc

SEQ ID NO: 1681114 - DNA, 15 bp, Homo sapiens
atttcacctatttct

SEQ ID NO: 1681115 - DNA, 15 bp, Homo sapiens
tttcacctatttctt

SEQ ID NO: 1681116 - DNA, 15 bp, Homo sapiens
ttcacctatttcttt

SEQ ID NO: 1681117 - DNA, 15 bp, Homo sapiens
tcacctatttctttt

SEQ ID NO: 1681118 - DNA, 15 bp, Homo sapiens
cacctatttcttttc

SEQ ID NO: 1681119 - DNA, 15 bp, Homo sapiens
acctatttcttttca

SEQ ID NO: 1681120 - DNA, 15 bp, Homo sapiens
cctatttcttttcat

SEQ ID NO: 1681121 - DNA, 15 bp, Homo sapiens
ctatttcttttcatt

SEQ ID NO: 1681122 - DNA, 15 bp, Homo sapiens
tatttcttttcattt

SEQ ID NO: 1681123 - DNA, 15 bp, Homo sapiens
atttcttttcatttg

SEQ ID NO: 1681124 - DNA, 15 bp, Homo sapiens
ttcttttcatttggc

SEQ ID NO: 1681125 - DNA, 15 bp, Homo sapiens
tcttttcatttggca

SEQ ID NO: 1681126 - DNA, 15 bp, Homo sapiens
cttttcatttggcaa

SEQ ID NO: 1681127 - DNA, 15 bp, Homo sapiens
ttttcatttggcaat

SEQ ID NO: 1681128 - DNA, 15 bp, Homo sapiens
tttcatttggcaatt

SEQ ID NO: 1681129 - DNA, 15 bp, Homo sapiens
ttcatttggcaatta

SEQ ID NO: 1681130 - DNA, 15 bp, Homo sapiens
tcatttggcaattat

SEQ ID NO: 1681131 - DNA, 15 bp, Homo sapiens
catttggcaattata

SEQ ID NO: 1681132 - DNA, 15 bp, Homo sapiens
atttggcaattataa

SEQ ID NO: 1681133 - DNA, 15 bp, Homo sapiens
tttggcaattataaa

SEQ ID NO: 1681134 - DNA, 15 bp, Homo sapiens
ttggcaattataaag

SEQ ID NO: 1681135 - DNA, 15 bp, Homo sapiens
tggcaattataaagg

SEQ ID NO: 1681136 - DNA, 15 bp, Homo sapiens
ggcaattataaaggt

SEQ ID NO: 1681137 - DNA, 15 bp, Homo sapiens
gcaattataaaggta

SEQ ID NO: 1681138 - DNA, 15 bp, Homo sapiens
caattataaaggtac

SEQ ID NO: 1681139 - DNA, 15 bp, Homo sapiens
aattataaaggtacc

SEQ ID NO: 1681140 - DNA, 15 bp, Homo sapiens
attataaaggtaccc

SEQ ID NO: 1681141 - DNA, 15 bp, Homo sapiens
ttataaaggtaccct

SEQ ID NO: 1681142 - DNA, 15 bp, Homo sapiens
tataaaggtaccctt

SEQ ID NO: 1681143 - DNA, 15 bp, Homo sapiens
ataaaggtaccctta

SEQ ID NO: 1681144 - DNA, 15 bp, Homo sapiens
taaaggtacccttat

SEQ ID NO: 1681145 - DNA, 15 bp, Homo sapiens
aaaggtacccttata

SEQ ID NO: 1681146 - DNA, 15 bp, Homo sapiens
aaggtacccttataa

SEQ ID NO: 1681147 - DNA, 15 bp, Homo sapiens
aggtacccttataat

SEQ ID NO: 1681148 - DNA, 15 bp, Homo sapiens
ggtacccttataatt

SEQ ID NO: 1681149 - DNA, 15 bp, Homo sapiens
gtacccttataattt

SEQ ID NO: 1681150 - DNA, 15 bp, Homo sapiens
tacccttataatttt

SEQ ID NO: 1681151 - DNA, 15 bp, Homo sapiens
acccttataattttt

SEQ ID NO: 1681152 - DNA, 15 bp, Homo sapiens
cccttataattttta

SEQ ID NO: 1681153 - DNA, 15 bp, Homo sapiens
ccttataatttttat

SEQ ID NO: 1681154 - DNA, 15 bp, Homo sapiens
cttataatttttata

SEQ ID NO: 1681155 - DNA, 15 bp, Homo sapiens
ttataatttttataa

SEQ ID NO: 1681156 - DNA, 15 bp, Homo sapiens
tataatttttataac

SEQ ID NO: 1681157 - DNA, 15 bp, Homo sapiens
ataatttttataact

SEQ ID NO: 1681158 - DNA, 15 bp, Homo sapiens
taatttttataactt

SEQ ID NO: 1681159 - DNA, 15 bp, Homo sapiens
aatttttataacttt

SEQ ID NO: 1681160 - DNA, 15 bp, Homo sapiens
atttttataacttta

SEQ ID NO: 1681161 - DNA, 15 bp, Homo sapiens
tttttataactttat

SEQ ID NO: 1681162 - DNA, 15 bp, Homo sapiens
ttttataactttatg

SEQ ID NO: 1681163 - DNA, 15 bp, Homo sapiens
tttataactttatgc

SEQ ID NO: 1681164 - DNA, 15 bp, Homo sapiens
ttataactttatgca

SEQ ID NO: 1681165 - DNA, 15 bp, Homo sapiens
tataactttatgcac

SEQ ID NO: 1681166 - DNA, 15 bp, Homo sapiens
ataactttatgcaca

SEQ ID NO: 1681167 - DNA, 15 bp, Homo sapiens
taactttatgcacaa

SEQ ID NO: 1681168 - DNA, 15 bp, Homo sapiens
aactttatgcacaat

SEQ ID NO: 1681169 - DNA, 15 bp, Homo sapiens
actttatgcacaata

SEQ ID NO: 1681170 - DNA, 15 bp, Homo sapiens
ctttatgcacaataa

SEQ ID NO: 1681171 - DNA, 15 bp, Homo sapiens
tttatgcacaataat

SEQ ID NO: 1681172 - DNA, 15 bp, Homo sapiens
ttatgcacaataatg

SEQ ID NO: 1681173 - DNA, 15 bp, Homo sapiens
tatgcacaataatga

SEQ ID NO: 1681174 - DNA, 15 bp, Homo sapiens
atgcacaataatgag

SEQ ID NO: 1681175 - DNA, 15 bp, Homo sapiens
tgcacaataatgagc

SEQ ID NO: 1681176 - DNA, 15 bp, Homo sapiens
gcacaataatgagcc

SEQ ID NO: 1681177 - DNA, 15 bp, Homo sapiens
cacaataatgagcct

SEQ ID NO: 1681178 - DNA, 15 bp, Homo sapiens
acaataatgagcctt

SEQ ID NO: 1681179 - DNA, 15 bp, Homo sapiens
caataatgagccttc

SEQ ID NO: 1681180 - DNA, 15 bp, Homo sapiens
aataatgagccttca

SEQ ID NO: 1681181 - DNA, 15 bp, Homo sapiens
ataatgagccttcag

SEQ ID NO: 1681182 - DNA, 15 bp, Homo sapiens
taatgagccttcagg

SEQ ID NO: 1681183 - DNA, 15 bp, Homo sapiens
aatgagccttcaggg

SEQ ID NO: 1681184 - DNA, 15 bp, Homo sapiens
atgagccttcaggga

SEQ ID NO: 1681185 - DNA, 15 bp, Homo sapiens
tgagccttcagggaa

SEQ ID NO: 1681186 - DNA, 15 bp, Homo sapiens
gagccttcagggaaa

SEQ ID NO: 1681187 - DNA, 15 bp, Homo sapiens
agccttcagggaaag

SEQ ID NO: 1681188 - DNA, 15 bp, Homo sapiens
gccttcagggaaaga

SEQ ID NO: 1681189 - DNA, 15 bp, Homo sapiens
ccttcagggaaagac

SEQ ID NO: 1681190 - DNA, 15 bp, Homo sapiens
cttcagggaaagaca

SEQ ID NO: 1681191 - DNA, 15 bp, Homo sapiens
tcagggaaagacaag

SEQ ID NO: 1681192 - DNA, 15 bp, Homo sapiens
cagggaaagacaaga

SEQ ID NO: 1681193 - DNA, 15 bp, Homo sapiens
agggaaagacaagaa

SEQ ID NO: 1681194 - DNA, 15 bp, Homo sapiens
gggaaagacaagaac

SEQ ID NO: 1681195 - DNA, 15 bp, Homo sapiens
ggaaagacaagaact

SEQ ID NO: 1681196 - DNA, 15 bp, Homo sapiens
gaaagacaagaacta

SEQ ID NO: 1681197 - DNA, 15 bp, Homo sapiens
aaagacaagaactac

SEQ ID NO: 1681198 - DNA, 15 bp, Homo sapiens
aagacaagaactacc

SEQ ID NO: 1681199 - DNA, 15 bp, Homo sapiens
agacaagaactaccg

SEQ ID NO: 1681200 - DNA, 15 bp, Homo sapiens
gacaagaactaccgc

SEQ ID NO: 1681201 - DNA, 15 bp, Homo sapiens
acaagaactaccgca

SEQ ID NO: 1681202 - DNA, 15 bp, Homo sapiens
caagaactaccgcac

SEQ ID NO: 1681203 - DNA, 15 bp, Homo sapiens
aagaactaccgcact

SEQ ID NO: 1681204 - DNA, 15 bp, Homo sapiens
agaactaccgcactc

SEQ ID NO: 1681205 - DNA, 15 bp, Homo sapiens
gaactaccgcactca

SEQ ID NO: 1681206 - DNA, 15 bp, Homo sapiens
aactaccgcactcaa

SEQ ID NO: 1681207 - DNA, 15 bp, Homo sapiens
actaccgcactcaaa

SEQ ID NO: 1681208 - DNA, 15 bp, Homo sapiens
ctaccgcactcaaaa

SEQ ID NO: 1681209 - DNA, 15 bp, Homo sapiens
taccgcactcaaaaa

SEQ ID NO: 1681210 - DNA, 15 bp, Homo sapiens
accgcactcaaaaac

SEQ ID NO: 1681211 - DNA, 15 bp, Homo sapiens
ccgcactcaaaaaca

SEQ ID NO: 1681212 - DNA, 15 bp, Homo sapiens
cgcactcaaaaacat

SEQ ID NO: 1681213 - DNA, 15 bp, Homo sapiens
gcactcaaaaacatc

SEQ ID NO: 1681214 - DNA, 15 bp, Homo sapiens
cactcaaaaacatca

SEQ ID NO: 1681215 - DNA, 15 bp, Homo sapiens
actcaaaaacatcag

SEQ ID NO: 1681216 - DNA, 15 bp, Homo sapiens
ctcaaaaacatcaga

SEQ ID NO: 1681217 - DNA, 15 bp, Homo sapiens
tcaaaaacatcagaa

SEQ ID NO: 1681218 - DNA, 15 bp, Homo sapiens
caaaaacatcagaaa

SEQ ID NO: 1681219 - DNA, 15 bp, Homo sapiens
aaaaacatcagaaaa

SEQ ID NO: 1681220 - DNA, 15 bp, Homo sapiens
aaaacatcagaaaag

SEQ ID NO: 1681221 - DNA, 15 bp, Homo sapiens
aaacatcagaaaaga

SEQ ID NO: 1681222 - DNA, 15 bp, Homo sapiens
aacatcagaaaagat

SEQ ID NO: 1681223 - DNA, 15 bp, Homo sapiens
acatcagaaaagatt

SEQ ID NO: 1681224 - DNA, 15 bp, Homo sapiens
catcagaaaagattt

SEQ ID NO: 1681225 - DNA, 15 bp, Homo sapiens
atcagaaaagatttg

SEQ ID NO: 1681226 - DNA, 15 bp, Homo sapiens
tcagaaaagatttgc

SEQ ID NO: 1681227 - DNA, 15 bp, Homo sapiens
cagaaaagatttgct

SEQ ID NO: 1681228 - DNA, 15 bp, Homo sapiens
agaaaagatttgctt

SEQ ID NO: 1681229 - DNA, 15 bp, Homo sapiens
gaaaagatttgctta

SEQ ID NO: 1681230 - DNA, 15 bp, Homo sapiens
aaaagatttgcttat

SEQ ID NO: 1681231 - DNA, 15 bp, Homo sapiens
aaagatttgcttatg

SEQ ID NO: 1681232 - DNA, 15 bp, Homo sapiens
aagatttgcttatga

SEQ ID NO: 1681233 - DNA, 15 bp, Homo sapiens
agatttgcttatgaa

SEQ ID NO: 1681234 - DNA, 15 bp, Homo sapiens
gatttgcttatgaat

SEQ ID NO: 1681235 - DNA, 15 bp, Homo sapiens
atttgcttatgaatg

SEQ ID NO: 1681236 - DNA, 15 bp, Homo sapiens
tttgcttatgaatga

SEQ ID NO: 1681237 - DNA, 15 bp, Homo sapiens
ttgcttatgaatgaa

SEQ ID NO: 1681238 - DNA, 15 bp, Homo sapiens
tgcttatgaatgaag

SEQ ID NO: 1681239 - DNA, 15 bp, Homo sapiens
gcttatgaatgaagt

SEQ ID NO: 1681240 - DNA, 15 bp, Homo sapiens
cttatgaatgaagtc

SEQ ID NO: 1681241 - DNA, 15 bp, Homo sapiens
ttatgaatgaagtcc

SEQ ID NO: 1681242 - DNA, 15 bp, Homo sapiens
tatgaatgaagtcca

SEQ ID NO: 1681243 - DNA, 15 bp, Homo sapiens
atgaatgaagtccat

SEQ ID NO: 1681244 - DNA, 15 bp, Homo sapiens
tgaatgaagtccata

SEQ ID NO: 1681245 - DNA, 15 bp, Homo sapiens
gaatgaagtccatat

SEQ ID NO: 1681246 - DNA, 15 bp, Homo sapiens
aatgaagtccatatt

SEQ ID NO: 1681247 - DNA, 15 bp, Homo sapiens
atgaagtccatattt

SEQ ID NO: 1681248 - DNA, 15 bp, Homo sapiens
tgaagtccatatttt

SEQ ID NO: 1681249 - DNA, 15 bp, Homo sapiens
gaagtccatattttt

SEQ ID NO: 1681250 - DNA, 15 bp, Homo sapiens
aagtccatatttttt

SEQ ID NO: 1681251 - DNA, 15 bp, Homo sapiens
agtccatattttttg

SEQ ID NO: 1681252 - DNA, 15 bp, Homo sapiens
gtccatattttttgt

SEQ ID NO: 1681253 - DNA, 15 bp, Homo sapiens
tccatattttttgtg

SEQ ID NO: 1681254 - DNA, 15 bp, Homo sapiens
ccatattttttgtgc

SEQ ID NO: 1681255 - DNA, 15 bp, Homo sapiens
catattttttgtgct

SEQ ID NO: 1681256 - DNA, 15 bp, Homo sapiens
atattttttgtgctg

SEQ ID NO: 1681257 - DNA, 15 bp, Homo sapiens
tattttttgtgctgg

SEQ ID NO: 1681258 - DNA, 15 bp, Homo sapiens
attttttgtgctggt

SEQ ID NO: 1681259 - DNA, 15 bp, Homo sapiens
ttttttgtgctggtt

SEQ ID NO: 1681260 - DNA, 15 bp, Homo sapiens
tttttgtgctggttt

SEQ ID NO: 1681261 - DNA, 15 bp, Homo sapiens
ttttgtgctggtttt

SEQ ID NO: 1681262 - DNA, 15 bp, Homo sapiens
tttgtgctggttttc

SEQ ID NO: 1681263 - DNA, 15 bp, Homo sapiens
ttgtgctggttttcc

SEQ ID NO: 1681264 - DNA, 15 bp, Homo sapiens
tgtgctggttttcct

SEQ ID NO: 1681265 - DNA, 15 bp, Homo sapiens
gtgctggttttcctc

SEQ ID NO: 1681266 - DNA, 15 bp, Homo sapiens
tgctggttttcctca

SEQ ID NO: 1681267 - DNA, 15 bp, Homo sapiens
gctggttttcctcat

SEQ ID NO: 1681268 - DNA, 15 bp, Homo sapiens
ctggttttcctcatt

SEQ ID NO: 1681269 - DNA, 15 bp, Homo sapiens
tggttttcctcatta

SEQ ID NO: 1681270 - DNA, 15 bp, Homo sapiens
ggttttcctcattag

SEQ ID NO: 1681271 - DNA, 15 bp, Homo sapiens
gttttcctcattaga

SEQ ID NO: 1681272 - DNA, 15 bp, Homo sapiens
ttttcctcattagag

SEQ ID NO: 1681273 - DNA, 15 bp, Homo sapiens
tttcctcattagagg

SEQ ID NO: 1681274 - DNA, 15 bp, Homo sapiens
ttcctcattagaggg

SEQ ID NO: 1681275 - DNA, 15 bp, Homo sapiens
tcctcattagaggga

SEQ ID NO: 1681276 - DNA, 15 bp, Homo sapiens
cctcattagagggag

SEQ ID NO: 1681277 - DNA, 15 bp, Homo sapiens
ctcattagagggaga

SEQ ID NO: 1681278 - DNA, 15 bp, Homo sapiens
tcattagagggagaa

SEQ ID NO: 1681279 - DNA, 15 bp, Homo sapiens
cattagagggagaac

SEQ ID NO: 1681280 - DNA, 15 bp, Homo sapiens
attagagggagaacc

SEQ ID NO: 1681281 - DNA, 15 bp, Homo sapiens
ttagagggagaacca

SEQ ID NO: 1681282 - DNA, 15 bp, Homo sapiens
tagagggagaaccaa

SEQ ID NO: 1681283 - DNA, 15 bp, Homo sapiens
agagggagaaccaaa

SEQ ID NO: 1681284 - DNA, 15 bp, Homo sapiens
gagggagaaccaaaa

SEQ ID NO: 1681285 - DNA, 15 bp, Homo sapiens
agggagaaccaaaaa

SEQ ID NO: 1681286 - DNA, 15 bp, Homo sapiens
gggagaaccaaaaat

SEQ ID NO: 1681287 - DNA, 15 bp, Homo sapiens
ggagaaccaaaaata

SEQ ID NO: 1681288 - DNA, 15 bp, Homo sapiens
gagaaccaaaaatat

SEQ ID NO: 1681289 - DNA, 15 bp, Homo sapiens
agaaccaaaaatata

SEQ ID NO: 1681290 - DNA, 15 bp, Homo sapiens
gaaccaaaaatataa

SEQ ID NO: 1681291 - DNA, 15 bp, Homo sapiens
aaccaaaaatataaa

SEQ ID NO: 1681292 - DNA, 15 bp, Homo sapiens
accaaaaatataaat

SEQ ID NO: 1681293 - DNA, 15 bp, Homo sapiens
ccaaaaatataaatt

SEQ ID NO: 1681294 - DNA, 15 bp, Homo sapiens
caaaaatataaattc

SEQ ID NO: 1681295 - DNA, 15 bp, Homo sapiens
aaaaatataaattct

SEQ ID NO: 1681296 - DNA, 15 bp, Homo sapiens
aaaatataaattcta

SEQ ID NO: 1681297 - DNA, 15 bp, Homo sapiens
aaatataaattctaa

SEQ ID NO: 1681298 - DNA, 15 bp, Homo sapiens
aatataaattctaac

SEQ ID NO: 1681299 - DNA, 15 bp, Homo sapiens
atataaattctaacc

SEQ ID NO: 1681300 - DNA, 15 bp, Homo sapiens
tataaattctaacca

SEQ ID NO: 1681301 - DNA, 15 bp, Homo sapiens
ataaattctaaccaa

SEQ ID NO: 1681302 - DNA, 15 bp, Homo sapiens
taaattctaaccaag

SEQ ID NO: 1681303 - DNA, 15 bp, Homo sapiens
aaattctaaccaagt

SEQ ID NO: 1681304 - DNA, 15 bp, Homo sapiens
aattctaaccaagta

SEQ ID NO: 1681305 - DNA, 15 bp, Homo sapiens
attctaaccaagtac

SEQ ID NO: 1681306 - DNA, 15 bp, Homo sapiens
ttctaaccaagtact

SEQ ID NO: 1681307 - DNA, 15 bp, Homo sapiens
tctaaccaagtactg

SEQ ID NO: 1681308 - DNA, 15 bp, Homo sapiens
ctaaccaagtactga

SEQ ID NO: 1681309 - DNA, 15 bp, Homo sapiens
taaccaagtactgag

SEQ ID NO: 1681310 - DNA, 15 bp, Homo sapiens
aaccaagtactgagt

SEQ ID NO: 1681311 - DNA, 15 bp, Homo sapiens
accaagtactgagtg

SEQ ID NO: 1681312 - DNA, 15 bp, Homo sapiens
ccaagtactgagtgc

SEQ ID NO: 1681313 - DNA, 15 bp, Homo sapiens
caagtactgagtgct

SEQ ID NO: 1681314 - DNA, 15 bp, Homo sapiens
aagtactgagtgctg

SEQ ID NO: 1681315 - DNA, 15 bp, Homo sapiens
agtactgagtgctgt

SEQ ID NO: 1681316 - DNA, 15 bp, Homo sapiens
gtactgagtgctgtg

SEQ ID NO: 1681317 - DNA, 15 bp, Homo sapiens
tactgagtgctgtgg

SEQ ID NO: 1681318 - DNA, 15 bp, Homo sapiens
actgagtgctgtgga

SEQ ID NO: 1681319 - DNA, 15 bp, Homo sapiens
ctgagtgctgtggag

SEQ ID NO: 1681320 - DNA, 15 bp, Homo sapiens
tgagtgctgtggaga

SEQ ID NO: 1681321 - DNA, 15 bp, Homo sapiens
gagtgctgtggagat

SEQ ID NO: 1681322 - DNA, 15 bp, Homo sapiens
agtgctgtggagatc

SEQ ID NO: 1681323 - DNA, 15 bp, Homo sapiens
gtgctgtggagatca

SEQ ID NO: 1681324 - DNA, 15 bp, Homo sapiens
tgctgtggagatcaa

SEQ ID NO: 1681325 - DNA, 15 bp, Homo sapiens
gctgtggagatcaat

SEQ ID NO: 1681326 - DNA, 15 bp, Homo sapiens
ctgtggagatcaatg

SEQ ID NO: 1681327 - DNA, 15 bp, Homo sapiens
tgtggagatcaatgt

SEQ ID NO: 1681328 - DNA, 15 bp, Homo sapiens
gtggagatcaatgta

SEQ ID NO: 1681329 - DNA, 15 bp, Homo sapiens
tggagatcaatgtat

SEQ ID NO: 1681330 - DNA, 15 bp, Homo sapiens
ggagatcaatgtatt

SEQ ID NO: 1681331 - DNA, 15 bp, Homo sapiens
gagatcaatgtattt

SEQ ID NO: 1681332 - DNA, 15 bp, Homo sapiens
agatcaatgtatttc

SEQ ID NO: 1681333 - DNA, 15 bp, Homo sapiens
gatcaatgtatttca

SEQ ID NO: 1681334 - DNA, 15 bp, Homo sapiens
atcaatgtatttcat

SEQ ID NO: 1681335 - DNA, 15 bp, Homo sapiens
tcaatgtatttcatt

SEQ ID NO: 1681336 - DNA, 15 bp, Homo sapiens
caatgtatttcattt

SEQ ID NO: 1681337 - DNA, 15 bp, Homo sapiens
aatgtatttcattta

SEQ ID NO: 1681338 - DNA, 15 bp, Homo sapiens
atgtatttcatttag

SEQ ID NO: 1681339 - DNA, 15 bp, Homo sapiens
tgtatttcatttaga

SEQ ID NO: 1681340 - DNA, 15 bp, Homo sapiens
gtatttcatttagat

SEQ ID NO: 1681341 - DNA, 15 bp, Homo sapiens
tatttcatttagata

SEQ ID NO: 1681342 - DNA, 15 bp, Homo sapiens
atttcatttagataa

SEQ ID NO: 1681343 - DNA, 15 bp, Homo sapiens
tttcatttagataac

SEQ ID NO: 1681344 - DNA, 15 bp, Homo sapiens
ttcatttagataact

SEQ ID NO: 1681345 - DNA, 15 bp, Homo sapiens
tcatttagataacta

SEQ ID NO: 1681346 - DNA, 15 bp, Homo sapiens
catttagataactat

SEQ ID NO: 1681347 - DNA, 15 bp, Homo sapiens
atttagataactata

SEQ ID NO: 1681348 - DNA, 15 bp, Homo sapiens
tttagataactataa

SEQ ID NO: 1681349 - DNA, 15 bp, Homo sapiens
ttagataactataaa

SEQ ID NO: 1681350 - DNA, 15 bp, Homo sapiens
tagataactataaat

SEQ ID NO: 1681351 - DNA, 15 bp, Homo sapiens
agataactataaatg

SEQ ID NO: 1681352 - DNA, 15 bp, Homo sapiens
gataactataaatga

SEQ ID NO: 1681353 - DNA, 15 bp, Homo sapiens
ataactataaatgac

SEQ ID NO: 1681354 - DNA, 15 bp, Homo sapiens
taactataaatgaca

SEQ ID NO: 1681355 - DNA, 15 bp, Homo sapiens
aactataaatgacaa

SEQ ID NO: 1681356 - DNA, 15 bp, Homo sapiens
actataaatgacaac

SEQ ID NO: 1681357 - DNA, 15 bp, Homo sapiens
ctataaatgacaact

SEQ ID NO: 1681358 - DNA, 15 bp, Homo sapiens
tataaatgacaactt

SEQ ID NO: 1681359 - DNA, 15 bp, Homo sapiens
ataaatgacaacttg

SEQ ID NO: 1681360 - DNA, 15 bp, Homo sapiens
taaatgacaacttgc

SEQ ID NO: 1681361 - DNA, 15 bp, Homo sapiens
aaatgacaacttgct

SEQ ID NO: 1681362 - DNA, 15 bp, Homo sapiens
aatgacaacttgcta

SEQ ID NO: 1681363 - DNA, 15 bp, Homo sapiens
atgacaacttgctag

SEQ ID NO: 1681364 - DNA, 15 bp, Homo sapiens
tgacaacttgctagg

SEQ ID NO: 1681365 - DNA, 15 bp, Homo sapiens
gacaacttgctagga

SEQ ID NO: 1681366 - DNA, 15 bp, Homo sapiens
acaacttgctaggat

SEQ ID NO: 1681367 - DNA, 15 bp, Homo sapiens
caacttgctaggatt

SEQ ID NO: 1681368 - DNA, 15 bp, Homo sapiens
aacttgctaggattg

SEQ ID NO: 1681369 - DNA, 15 bp, Homo sapiens
acttgctaggattgt

SEQ ID NO: 1681370 - DNA, 15 bp, Homo sapiens
cttgctaggattgta

SEQ ID NO: 1681371 - DNA, 15 bp, Homo sapiens
ttgctaggattgtaa

SEQ ID NO: 1681372 - DNA, 15 bp, Homo sapiens
tgctaggattgtaat

SEQ ID NO: 1681373 - DNA, 15 bp, Homo sapiens
gctaggattgtaatt

SEQ ID NO: 1681374 - DNA, 15 bp, Homo sapiens
ctaggattgtaatta

SEQ ID NO: 1681375 - DNA, 15 bp, Homo sapiens
taggattgtaattag

SEQ ID NO: 1681376 - DNA, 15 bp, Homo sapiens
aggattgtaattagt

SEQ ID NO: 1681377 - DNA, 15 bp, Homo sapiens
ggattgtaattagtc

SEQ ID NO: 1681378 - DNA, 15 bp, Homo sapiens
gattgtaattagtct

SEQ ID NO: 1681379 - DNA, 15 bp, Homo sapiens
attgtaattagtctt

SEQ ID NO: 1681380 - DNA, 15 bp, Homo sapiens
ttgtaattagtctta

SEQ ID NO: 1681381 - DNA, 15 bp, Homo sapiens
tgtaattagtcttat

SEQ ID NO: 1681382 - DNA, 15 bp, Homo sapiens
gtaattagtcttatt

SEQ ID NO: 1681383 - DNA, 15 bp, Homo sapiens
taattagtcttattt

SEQ ID NO: 1681384 - DNA, 15 bp, Homo sapiens
aattagtcttatttg

SEQ ID NO: 1681385 - DNA, 15 bp, Homo sapiens
attagtcttatttgg

SEQ ID NO: 1681386 - DNA, 15 bp, Homo sapiens
ttagtcttatttggc

SEQ ID NO: 1681387 - DNA, 15 bp, Homo sapiens
tagtcttatttggcg

SEQ ID NO: 1681388 - DNA, 15 bp, Homo sapiens
agtcttatttggcgt

SEQ ID NO: 1681389 - DNA, 15 bp, Homo sapiens
gtcttatttggcgtt

SEQ ID NO: 1681390 - DNA, 15 bp, Homo sapiens
tcttatttggcgtta

SEQ ID NO: 1681391 - DNA, 15 bp, Homo sapiens
cttatttggcgttat

SEQ ID NO: 1681392 - DNA, 15 bp, Homo sapiens
ttatttggcgttatt

SEQ ID NO: 1681393 - DNA, 15 bp, Homo sapiens
tatttggcgttatta

SEQ ID NO: 1681394 - DNA, 15 bp, Homo sapiens
atttggcgttattaa

SEQ ID NO: 1681395 - DNA, 15 bp, Homo sapiens
tttggcgttattaat

SEQ ID NO: 1681396 - DNA, 15 bp, Homo sapiens
ttggcgttattaatt

SEQ ID NO: 1681397 - DNA, 15 bp, Homo sapiens
tggcgttattaattc

SEQ ID NO: 1681398 - DNA, 15 bp, Homo sapiens
ggcgttattaattct

SEQ ID NO: 1681399 - DNA, 15 bp, Homo sapiens
gcgttattaattcta

SEQ ID NO: 1681400 - DNA, 15 bp, Homo sapiens
cgttattaattctac

SEQ ID NO: 1681401 - DNA, 15 bp, Homo sapiens
gttattaattctaca

SEQ ID NO: 1681402 - DNA, 15 bp, Homo sapiens
ttattaattctacag

SEQ ID NO: 1681403 - DNA, 15 bp, Homo sapiens
tattaattctacaga

SEQ ID NO: 1681404 - DNA, 15 bp, Homo sapiens
attaattctacagag

SEQ ID NO: 1681405 - DNA, 15 bp, Homo sapiens
ttaattctacagagg

SEQ ID NO: 1681406 - DNA, 15 bp, Homo sapiens
taattctacagaggg

SEQ ID NO: 1681407 - DNA, 15 bp, Homo sapiens
aattctacagaggga

SEQ ID NO: 1681408 - DNA, 15 bp, Homo sapiens
attctacagagggag

SEQ ID NO: 1681409 - DNA, 15 bp, Homo sapiens
ttctacagagggagc

SEQ ID NO: 1681410 - DNA, 15 bp, Homo sapiens
tctacagagggagca

SEQ ID NO: 1681411 - DNA, 15 bp, Homo sapiens
ctacagagggagcat

SEQ ID NO: 1681412 - DNA, 15 bp, Homo sapiens
tacagagggagcata

SEQ ID NO: 1681413 - DNA, 15 bp, Homo sapiens
acagagggagcataa

SEQ ID NO: 1681414 - DNA, 15 bp, Homo sapiens
cagagggagcataaa

SEQ ID NO: 1681415 - DNA, 15 bp, Homo sapiens
agagggagcataaaa

SEQ ID NO: 1681416 - DNA, 15 bp, Homo sapiens
gagggagcataaaac

SEQ ID NO: 1681417 - DNA, 15 bp, Homo sapiens
agggagcataaaaca

SEQ ID NO: 1681418 - DNA, 15 bp, Homo sapiens
gggagcataaaacat

SEQ ID NO: 1681419 - DNA, 15 bp, Homo sapiens
ggagcataaaacatt

SEQ ID NO: 1681420 - DNA, 15 bp, Homo sapiens
gagcataaaacattt

SEQ ID NO: 1681421 - DNA, 15 bp, Homo sapiens
agcataaaacattta

SEQ ID NO: 1681422 - DNA, 15 bp, Homo sapiens
gcataaaacatttaa

SEQ ID NO: 1681423 - DNA, 15 bp, Homo sapiens
cataaaacatttaat

SEQ ID NO: 1681424 - DNA, 15 bp, Homo sapiens
ataaaacatttaata

SEQ ID NO: 1681425 - DNA, 15 bp, Homo sapiens
taaaacatttaataa

SEQ ID NO: 1681426 - DNA, 15 bp, Homo sapiens
aaaacatttaataat

SEQ ID NO: 1681427 - DNA, 15 bp, Homo sapiens
aaacatttaataata

SEQ ID NO: 1681428 - DNA, 15 bp, Homo sapiens
aacatttaataatac

SEQ ID NO: 1681429 - DNA, 15 bp, Homo sapiens
acatttaataataca

SEQ ID NO: 1681430 - DNA, 15 bp, Homo sapiens
catttaataatacat

SEQ ID NO: 1681431 - DNA, 15 bp, Homo sapiens
atttaataatacatt

SEQ ID NO: 1681432 - DNA, 15 bp, Homo sapiens
tttaataatacattg

SEQ ID NO: 1681433 - DNA, 15 bp, Homo sapiens
ttaataatacattgg

SEQ ID NO: 1681434 - DNA, 15 bp, Homo sapiens
taataatacattgga

SEQ ID NO: 1681435 - DNA, 15 bp, Homo sapiens
aataatacattggac

SEQ ID NO: 1681436 - DNA, 15 bp, Homo sapiens
ataatacattggact

SEQ ID NO: 1681437 - DNA, 15 bp, Homo sapiens
taatacattggactt

SEQ ID NO: 1681438 - DNA, 15 bp, Homo sapiens
aatacattggactta

SEQ ID NO: 1681439 - DNA, 15 bp, Homo sapiens
atacattggacttac

SEQ ID NO: 1681440 - DNA, 15 bp, Homo sapiens
tacattggacttact

SEQ ID NO: 1681441 - DNA, 15 bp, Homo sapiens
acattggacttactc

SEQ ID NO: 1681442 - DNA, 15 bp, Homo sapiens
cattggacttactca

SEQ ID NO: 1681443 - DNA, 15 bp, Homo sapiens
attggacttactcaa

SEQ ID NO: 1681444 - DNA, 15 bp, Homo sapiens
ttggacttactcaac

SEQ ID NO: 1681445 - DNA, 15 bp, Homo sapiens
tggacttactcaact

SEQ ID NO: 1681446 - DNA, 15 bp, Homo sapiens
ggacttactcaactc

SEQ ID NO: 1681447 - DNA, 15 bp, Homo sapiens
gacttactcaactca

SEQ ID NO: 1681448 - DNA, 15 bp, Homo sapiens
acttactcaactcac

SEQ ID NO: 1681449 - DNA, 15 bp, Homo sapiens
cttactcaactcact

SEQ ID NO: 1681450 - DNA, 15 bp, Homo sapiens
ttactcaactcacta

SEQ ID NO: 1681451 - DNA, 15 bp, Homo sapiens
tactcaactcactat

SEQ ID NO: 1681452 - DNA, 15 bp, Homo sapiens
actcaactcactatt

SEQ ID NO: 1681453 - DNA, 15 bp, Homo sapiens
ctcaactcactattt

SEQ ID NO: 1681454 - DNA, 15 bp, Homo sapiens
tcaactcactatttc

SEQ ID NO: 1681455 - DNA, 15 bp, Homo sapiens
caactcactatttct

SEQ ID NO: 1681456 - DNA, 15 bp, Homo sapiens
aactcactatttctt

SEQ ID NO: 1681457 - DNA, 15 bp, Homo sapiens
actcactatttctta

SEQ ID NO: 1681458 - DNA, 15 bp, Homo sapiens
ctcactatttcttac

SEQ ID NO: 1681459 - DNA, 15 bp, Homo sapiens
tcactatttcttact

SEQ ID NO: 1681460 - DNA, 15 bp, Homo sapiens
cactatttcttactt

SEQ ID NO: 1681461 - DNA, 15 bp, Homo sapiens
actatttcttacttt

SEQ ID NO: 1681462 - DNA, 15 bp, Homo sapiens
ctatttcttactttc

SEQ ID NO: 1681463 - DNA, 15 bp, Homo sapiens
tatttcttactttcg

SEQ ID NO: 1681464 - DNA, 15 bp, Homo sapiens
atttcttactttcgt

SEQ ID NO: 1681465 - DNA, 15 bp, Homo sapiens
tttcttactttcgtc

SEQ ID NO: 1681466 - DNA, 15 bp, Homo sapiens
ttcttactttcgtcc

SEQ ID NO: 1681467 - DNA, 15 bp, Homo sapiens
tcttactttcgtcct

SEQ ID NO: 1681468 - DNA, 15 bp, Homo sapiens
cttactttcgtcctt

SEQ ID NO: 1681469 - DNA, 15 bp, Homo sapiens
ttactttcgtcctta

SEQ ID NO: 1681470 - DNA, 15 bp, Homo sapiens
tactttcgtccttaa

SEQ ID NO: 1681471 - DNA, 15 bp, Homo sapiens
actttcgtccttaag

SEQ ID NO: 1681472 - DNA, 15 bp, Homo sapiens
ctttcgtccttaaga

SEQ ID NO: 1681473 - DNA, 15 bp, Homo sapiens
tttcgtccttaagat

SEQ ID NO: 1681474 - DNA, 15 bp, Homo sapiens
ttcgtccttaagatc

SEQ ID NO: 1681475 - DNA, 15 bp, Homo sapiens
tcgtccttaagatca

SEQ ID NO: 1681476 - DNA, 15 bp, Homo sapiens
cgtccttaagatcat

SEQ ID NO: 1681477 - DNA, 15 bp, Homo sapiens
gtccttaagatcatc

SEQ ID NO: 1681478 - DNA, 15 bp, Homo sapiens
tccttaagatcatct

SEQ ID NO: 1681479 - DNA, 15 bp, Homo sapiens
ccttaagatcatctt

SEQ ID NO: 1681480 - DNA, 15 bp, Homo sapiens
cttaagatcatctta

SEQ ID NO: 1681481 - DNA, 15 bp, Homo sapiens
ttaagatcatcttaa

SEQ ID NO: 1681482 - DNA, 15 bp, Homo sapiens
taagatcatcttaaa

SEQ ID NO: 1681483 - DNA, 15 bp, Homo sapiens
aagatcatcttaaag

SEQ ID NO: 1681484 - DNA, 15 bp, Homo sapiens
agatcatcttaaagg

SEQ ID NO: 1681485 - DNA, 15 bp, Homo sapiens
gatcatcttaaagga

SEQ ID NO: 1681486 - DNA, 15 bp, Homo sapiens
atcatcttaaaggaa

SEQ ID NO: 1681487 - DNA, 15 bp, Homo sapiens
tcatcttaaaggaaa

SEQ ID NO: 1681488 - DNA, 15 bp, Homo sapiens
catcttaaaggaaac

SEQ ID NO: 1681489 - DNA, 15 bp, Homo sapiens
atcttaaaggaaaca

SEQ ID NO: 1681490 - DNA, 15 bp, Homo sapiens
tcttaaaggaaacat

SEQ ID NO: 1681491 - DNA, 15 bp, Homo sapiens
cttaaaggaaacatg

SEQ ID NO: 1681492 - DNA, 15 bp, Homo sapiens
ttaaaggaaacatgg

SEQ ID NO: 1681493 - DNA, 15 bp, Homo sapiens
taaaggaaacatggt

SEQ ID NO: 1681494 - DNA, 15 bp, Homo sapiens
aaaggaaacatggtt

SEQ ID NO: 1681495 - DNA, 15 bp, Homo sapiens
aaggaaacatggttt

SEQ ID NO: 1681496 - DNA, 15 bp, Homo sapiens
aggaaacatggtttg

SEQ ID NO: 1681497 - DNA, 15 bp, Homo sapiens
ggaaacatggtttga

SEQ ID NO: 1681498 - DNA, 15 bp, Homo sapiens
gaaacatggtttgaa

SEQ ID NO: 1681499 - DNA, 15 bp, Homo sapiens
aaacatggtttgaag

SEQ ID NO: 1681500 - DNA, 15 bp, Homo sapiens
aacatggtttgaaga

SEQ ID NO: 1681501 - DNA, 15 bp, Homo sapiens
acatggtttgaagac

SEQ ID NO: 1681502 - DNA, 15 bp, Homo sapiens
catggtttgaagacc

SEQ ID NO: 1681503 - DNA, 15 bp, Homo sapiens
atggtttgaagacca

SEQ ID NO: 1681504 - DNA, 15 bp, Homo sapiens
tggtttgaagaccat

SEQ ID NO: 1681505 - DNA, 15 bp, Homo sapiens
ggtttgaagaccata

SEQ ID NO: 1681506 - DNA, 15 bp, Homo sapiens
gtttgaagaccataa

SEQ ID NO: 1681507 - DNA, 15 bp, Homo sapiens
tttgaagaccataat

SEQ ID NO: 1681508 - DNA, 15 bp, Homo sapiens
ttgaagaccataatg

SEQ ID NO: 1681509 - DNA, 15 bp, Homo sapiens
tgaagaccataatga

SEQ ID NO: 1681510 - DNA, 15 bp, Homo sapiens
gaagaccataatgaa

SEQ ID NO: 1681511 - DNA, 15 bp, Homo sapiens
aagaccataatgaag

SEQ ID NO: 1681512 - DNA, 15 bp, Homo sapiens
agaccataatgaagt

SEQ ID NO: 1681513 - DNA, 15 bp, Homo sapiens
gaccataatgaagtg

SEQ ID NO: 1681514 - DNA, 15 bp, Homo sapiens
accataatgaagtgt

SEQ ID NO: 1681515 - DNA, 15 bp, Homo sapiens
ccataatgaagtgtt

SEQ ID NO: 1681516 - DNA, 15 bp, Homo sapiens
cataatgaagtgttg

SEQ ID NO: 1681517 - DNA, 15 bp, Homo sapiens
ataatgaagtgttgt

SEQ ID NO: 1681518 - DNA, 15 bp, Homo sapiens
taatgaagtgttgta

SEQ ID NO: 1681519 - DNA, 15 bp, Homo sapiens
aatgaagtgttgtat

SEQ ID NO: 1681520 - DNA, 15 bp, Homo sapiens
atgaagtgttgtatg

SEQ ID NO: 1681521 - DNA, 15 bp, Homo sapiens
tgaagtgttgtatgt

SEQ ID NO: 1681522 - DNA, 15 bp, Homo sapiens
gaagtgttgtatgtg

SEQ ID NO: 1681523 - DNA, 15 bp, Homo sapiens
aagtgttgtatgtgc

SEQ ID NO: 1681524 - DNA, 15 bp, Homo sapiens
agtgttgtatgtgcc

SEQ ID NO: 1681525 - DNA, 15 bp, Homo sapiens
gtgttgtatgtgccc

SEQ ID NO: 1681526 - DNA, 15 bp, Homo sapiens
tgttgtatgtgccca

SEQ ID NO: 1681527 - DNA, 15 bp, Homo sapiens
gttgtatgtgcccac

SEQ ID NO: 1681528 - DNA, 15 bp, Homo sapiens
ttgtatgtgcccact

SEQ ID NO: 1681529 - DNA, 15 bp, Homo sapiens
tgtatgtgcccacta

SEQ ID NO: 1681530 - DNA, 15 bp, Homo sapiens
gtatgtgcccactat

SEQ ID NO: 1681531 - DNA, 15 bp, Homo sapiens
tatgtgcccactatt

SEQ ID NO: 1681532 - DNA, 15 bp, Homo sapiens
atgtgcccactattt

SEQ ID NO: 1681533 - DNA, 15 bp, Homo sapiens
tgtgcccactatttt

SEQ ID NO: 1681534 - DNA, 15 bp, Homo sapiens
gtgcccactatttta

SEQ ID NO: 1681535 - DNA, 15 bp, Homo sapiens
tgcccactattttac

SEQ ID NO: 1681536 - DNA, 15 bp, Homo sapiens
gcccactattttact

SEQ ID NO: 1681537 - DNA, 15 bp, Homo sapiens
cccactattttactc

SEQ ID NO: 1681538 - DNA, 15 bp, Homo sapiens
ccactattttactct

SEQ ID NO: 1681539 - DNA, 15 bp, Homo sapiens
cactattttactcta

SEQ ID NO: 1681540 - DNA, 15 bp, Homo sapiens
actattttactctaa

SEQ ID NO: 1681541 - DNA, 15 bp, Homo sapiens
ctattttactctaaa

SEQ ID NO: 1681542 - DNA, 15 bp, Homo sapiens
tattttactctaaat

SEQ ID NO: 1681543 - DNA, 15 bp, Homo sapiens
attttactctaaatg

SEQ ID NO: 1681544 - DNA, 15 bp, Homo sapiens
ttttactctaaatgg

SEQ ID NO: 1681545 - DNA, 15 bp, Homo sapiens
tttactctaaatggc

SEQ ID NO: 1681546 - DNA, 15 bp, Homo sapiens
ttactctaaatggcc

SEQ ID NO: 1681547 - DNA, 15 bp, Homo sapiens
tactctaaatggccc

SEQ ID NO: 1681548 - DNA, 15 bp, Homo sapiens
actctaaatggccca

SEQ ID NO: 1681549 - DNA, 15 bp, Homo sapiens
ctctaaatggcccac

SEQ ID NO: 1681550 - DNA, 15 bp, Homo sapiens
tctaaatggcccaca

SEQ ID NO: 1681551 - DNA, 15 bp, Homo sapiens
ctaaatggcccacaa

SEQ ID NO: 1681552 - DNA, 15 bp, Homo sapiens
taaatggcccacaag

SEQ ID NO: 1681553 - DNA, 15 bp, Homo sapiens
aaatggcccacaagt

SEQ ID NO: 1681554 - DNA, 15 bp, Homo sapiens
aatggcccacaagtg

SEQ ID NO: 1681555 - DNA, 15 bp, Homo sapiens
atggcccacaagtga

SEQ ID NO: 1681556 - DNA, 15 bp, Homo sapiens
tggcccacaagtgag

SEQ ID NO: 1681557 - DNA, 15 bp, Homo sapiens
ggcccacaagtgagg

SEQ ID NO: 1681558 - DNA, 15 bp, Homo sapiens
gcccacaagtgaggc

SEQ ID NO: 1681559 - DNA, 15 bp, Homo sapiens
cccacaagtgaggcc

SEQ ID NO: 1681560 - DNA, 15 bp, Homo sapiens
ccacaagtgaggcct

SEQ ID NO: 1681561 - DNA, 15 bp, Homo sapiens
cacaagtgaggcctg

SEQ ID NO: 1681562 - DNA, 15 bp, Homo sapiens
acaagtgaggcctga

SEQ ID NO: 1681563 - DNA, 15 bp, Homo sapiens
caagtgaggcctgaa

SEQ ID NO: 1681564 - DNA, 15 bp, Homo sapiens
aagtgaggcctgaag

SEQ ID NO: 1681565 - DNA, 15 bp, Homo sapiens
agtgaggcctgaagg

SEQ ID NO: 1681566 - DNA, 15 bp, Homo sapiens
gtgaggcctgaagga

SEQ ID NO: 1681567 - DNA, 15 bp, Homo sapiens
tgaggcctgaaggaa

SEQ ID NO: 1681568 - DNA, 15 bp, Homo sapiens
gaggcctgaaggaat

SEQ ID NO: 1681569 - DNA, 15 bp, Homo sapiens
aggcctgaaggaatt

SEQ ID NO: 1681570 - DNA, 15 bp, Homo sapiens
ggcctgaaggaattc

SEQ ID NO: 1681571 - DNA, 15 bp, Homo sapiens
gcctgaaggaattcc

SEQ ID NO: 1681572 - DNA, 15 bp, Homo sapiens
cctgaaggaattcca

SEQ ID NO: 1681573 - DNA, 15 bp, Homo sapiens
ctgaaggaattccag

SEQ ID NO: 1681574 - DNA, 15 bp, Homo sapiens
tgaaggaattccagg

SEQ ID NO: 1681575 - DNA, 15 bp, Homo sapiens
gaaggaattccagga

SEQ ID NO: 1681576 - DNA, 15 bp, Homo sapiens
aaggaattccaggag

SEQ ID NO: 1681577 - DNA, 15 bp, Homo sapiens
aggaattccaggagc

SEQ ID NO: 1681578 - DNA, 15 bp, Homo sapiens
ggaattccaggagcc

SEQ ID NO: 1681579 - DNA, 15 bp, Homo sapiens
gaattccaggagccc

SEQ ID NO: 1681580 - DNA, 15 bp, Homo sapiens
aattccaggagccct

SEQ ID NO: 1681581 - DNA, 15 bp, Homo sapiens
attccaggagcccta

SEQ ID NO: 1681582 - DNA, 15 bp, Homo sapiens
ttccaggagccctac

SEQ ID NO: 1681583 - DNA, 15 bp, Homo sapiens
tccaggagccctacc

SEQ ID NO: 1681584 - DNA, 15 bp, Homo sapiens
ccaggagccctaccc

SEQ ID NO: 1681585 - DNA, 15 bp, Homo sapiens
caggagccctaccca

SEQ ID NO: 1681586 - DNA, 15 bp, Homo sapiens
aggagccctacccag

SEQ ID NO: 1681587 - DNA, 15 bp, Homo sapiens
ggagccctacccaga

SEQ ID NO: 1681588 - DNA, 15 bp, Homo sapiens
gagccctacccagac

SEQ ID NO: 1681589 - DNA, 15 bp, Homo sapiens
agccctacccagaca

SEQ ID NO: 1681590 - DNA, 15 bp, Homo sapiens
gccctacccagacat

SEQ ID NO: 1681591 - DNA, 15 bp, Homo sapiens
ccctacccagacatg

SEQ ID NO: 1681592 - DNA, 15 bp, Homo sapiens
cctacccagacatga

SEQ ID NO: 1681593 - DNA, 15 bp, Homo sapiens
ctacccagacatgat

SEQ ID NO: 1681594 - DNA, 15 bp, Homo sapiens
tacccagacatgatg

SEQ ID NO: 1681595 - DNA, 15 bp, Homo sapiens
acccagacatgatgt

SEQ ID NO: 1681596 - DNA, 15 bp, Homo sapiens
cccagacatgatgtg

SEQ ID NO: 1681597 - DNA, 15 bp, Homo sapiens
ccagacatgatgtgg

SEQ ID NO: 1681598 - DNA, 15 bp, Homo sapiens
cagacatgatgtgga

SEQ ID NO: 1681599 - DNA, 15 bp, Homo sapiens
agacatgatgtggag

SEQ ID NO: 1681600 - DNA, 15 bp, Homo sapiens
gacatgatgtggagg

SEQ ID NO: 1681601 - DNA, 15 bp, Homo sapiens
acatgatgtggaggt

SEQ ID NO: 1681602 - DNA, 15 bp, Homo sapiens
catgatgtggaggtg

SEQ ID NO: 1681603 - DNA, 15 bp, Homo sapiens
atgatgtggaggtgg

SEQ ID NO: 1681604 - DNA, 15 bp, Homo sapiens
tgatgtggaggtgga

SEQ ID NO: 1681605 - DNA, 15 bp, Homo sapiens
gatgtggaggtggag

SEQ ID NO: 1681606 - DNA, 15 bp, Homo sapiens
atgtggaggtggagc

SEQ ID NO: 1681607 - DNA, 15 bp, Homo sapiens
tgtggaggtggagca

SEQ ID NO: 1681608 - DNA, 15 bp, Homo sapiens
gtggaggtggagcaa

SEQ ID NO: 1681609 - DNA, 15 bp, Homo sapiens
tggaggtggagcaaa

SEQ ID NO: 1681610 - DNA, 15 bp, Homo sapiens
ggaggtggagcaaac

SEQ ID NO: 1681611 - DNA, 15 bp, Homo sapiens
gaggtggagcaaact

SEQ ID NO: 1681612 - DNA, 15 bp, Homo sapiens
aggtggagcaaacta

SEQ ID NO: 1681613 - DNA, 15 bp, Homo sapiens
ggtggagcaaactag

SEQ ID NO: 1681614 - DNA, 15 bp, Homo sapiens
gtggagcaaactagg

SEQ ID NO: 1681615 - DNA, 15 bp, Homo sapiens
tggagcaaactaggc

SEQ ID NO: 1681616 - DNA, 15 bp, Homo sapiens
ggagcaaactaggca

SEQ ID NO: 1681617 - DNA, 15 bp, Homo sapiens
gagcaaactaggcac

SEQ ID NO: 1681618 - DNA, 15 bp, Homo sapiens
agcaaactaggcact

SEQ ID NO: 1681619 - DNA, 15 bp, Homo sapiens
gcaaactaggcactg

SEQ ID NO: 1681620 - DNA, 15 bp, Homo sapiens
caaactaggcactga

SEQ ID NO: 1681621 - DNA, 15 bp, Homo sapiens
aaactaggcactgag

SEQ ID NO: 1681622 - DNA, 15 bp, Homo sapiens
aactaggcactgagc

SEQ ID NO: 1681623 - DNA, 15 bp, Homo sapiens
actaggcactgagcc

SEQ ID NO: 1681624 - DNA, 15 bp, Homo sapiens
ctaggcactgagcca

SEQ ID NO: 1681625 - DNA, 15 bp, Homo sapiens
taggcactgagccaa

SEQ ID NO: 1681626 - DNA, 15 bp, Homo sapiens
aggcactgagccaaa

SEQ ID NO: 1681627 - DNA, 15 bp, Homo sapiens
ggcactgagccaaag

SEQ ID NO: 1681628 - DNA, 15 bp, Homo sapiens
gcactgagccaaagg

SEQ ID NO: 1681629 - DNA, 15 bp, Homo sapiens
cactgagccaaaggg

SEQ ID NO: 1681630 - DNA, 15 bp, Homo sapiens
actgagccaaagggg

SEQ ID NO: 1681631 - DNA, 15 bp, Homo sapiens
ctgagccaaagggga

SEQ ID NO: 1681632 - DNA, 15 bp, Homo sapiens
tgagccaaaggggat

SEQ ID NO: 1681633 - DNA, 15 bp, Homo sapiens
gagccaaaggggatc

SEQ ID NO: 1681634 - DNA, 15 bp, Homo sapiens
agccaaaggggatca

SEQ ID NO: 1681635 - DNA, 15 bp, Homo sapiens
gccaaaggggatcag

SEQ ID NO: 1681636 - DNA, 15 bp, Homo sapiens
ccaaaggggatcagt

SEQ ID NO: 1681637 - DNA, 15 bp, Homo sapiens
caaaggggatcagtg

SEQ ID NO: 1681638 - DNA, 15 bp, Homo sapiens
aaaggggatcagtga

SEQ ID NO: 1681639 - DNA, 15 bp, Homo sapiens
aaggggatcagtgat

SEQ ID NO: 1681640 - DNA, 15 bp, Homo sapiens
aggggatcagtgata

SEQ ID NO: 1681641 - DNA, 15 bp, Homo sapiens
ggggatcagtgatag

SEQ ID NO: 1681642 - DNA, 15 bp, Homo sapiens
gggatcagtgatagc

SEQ ID NO: 1681643 - DNA, 15 bp, Homo sapiens
ggatcagtgatagcc

SEQ ID NO: 1681644 - DNA, 15 bp, Homo sapiens
gatcagtgatagcca

SEQ ID NO: 1681645 - DNA, 15 bp, Homo sapiens
atcagtgatagccag

SEQ ID NO: 1681646 - DNA, 15 bp, Homo sapiens
tcagtgatagccagc

SEQ ID NO: 1681647 - DNA, 15 bp, Homo sapiens
cagtgatagccagct

SEQ ID NO: 1681648 - DNA, 15 bp, Homo sapiens
agtgatagccagctt

SEQ ID NO: 1681649 - DNA, 15 bp, Homo sapiens
gtgatagccagcttt

SEQ ID NO: 1681650 - DNA, 15 bp, Homo sapiens
tgatagccagctttt

SEQ ID NO: 1681651 - DNA, 15 bp, Homo sapiens
gatagccagcttttg

SEQ ID NO: 1681652 - DNA, 15 bp, Homo sapiens
atagccagcttttgg

SEQ ID NO: 1681653 - DNA, 15 bp, Homo sapiens
tagccagcttttggg

SEQ ID NO: 1681654 - DNA, 15 bp, Homo sapiens
agccagcttttggga

SEQ ID NO: 1681655 - DNA, 15 bp, Homo sapiens
gccagcttttgggag

SEQ ID NO: 1681656 - DNA, 15 bp, Homo sapiens
ccagcttttgggaga

SEQ ID NO: 1681657 - DNA, 15 bp, Homo sapiens
cagcttttgggagag

SEQ ID NO: 1681658 - DNA, 15 bp, Homo sapiens
agcttttgggagagc

SEQ ID NO: 1681659 - DNA, 15 bp, Homo sapiens
gcttttgggagagcc

SEQ ID NO: 1681660 - DNA, 15 bp, Homo sapiens
cttttgggagagcca

SEQ ID NO: 1681661 - DNA, 15 bp, Homo sapiens
ttttgggagagccag

SEQ ID NO: 1681662 - DNA, 15 bp, Homo sapiens
tttgggagagccaga

SEQ ID NO: 1681663 - DNA, 15 bp, Homo sapiens
ttgggagagccagat

SEQ ID NO: 1681664 - DNA, 15 bp, Homo sapiens
tgggagagccagatg

SEQ ID NO: 1681665 - DNA, 15 bp, Homo sapiens
gggagagccagatga

SEQ ID NO: 1681666 - DNA, 15 bp, Homo sapiens
ggagagccagatgag

SEQ ID NO: 1681667 - DNA, 15 bp, Homo sapiens
gagagccagatgagg

SEQ ID NO: 1681668 - DNA, 15 bp, Homo sapiens
agagccagatgaggc

SEQ ID NO: 1681669 - DNA, 15 bp, Homo sapiens
gagccagatgaggca

SEQ ID NO: 1681670 - DNA, 15 bp, Homo sapiens
agccagatgaggcag

SEQ ID NO: 1681671 - DNA, 15 bp, Homo sapiens
gccagatgaggcaga

SEQ ID NO: 1681672 - DNA, 15 bp, Homo sapiens
ccagatgaggcagag

SEQ ID NO: 1681673 - DNA, 15 bp, Homo sapiens
cagatgaggcagaga

SEQ ID NO: 1681674 - DNA, 15 bp, Homo sapiens
agatgaggcagagag

SEQ ID NO: 1681675 - DNA, 15 bp, Homo sapiens
gatgaggcagagagc

SEQ ID NO: 1681676 - DNA, 15 bp, Homo sapiens
atgaggcagagagct

SEQ ID NO: 1681677 - DNA, 15 bp, Homo sapiens
tgaggcagagagctg

SEQ ID NO: 1681678 - DNA, 15 bp, Homo sapiens
gaggcagagagctgg

SEQ ID NO: 1681679 - DNA, 15 bp, Homo sapiens
aggcagagagctggg

SEQ ID NO: 1681680 - DNA, 15 bp, Homo sapiens
ggcagagagctggga

SEQ ID NO: 1681681 - DNA, 15 bp, Homo sapiens
gcagagagctgggat

SEQ ID NO: 1681682 - DNA, 15 bp, Homo sapiens
cagagagctgggata

SEQ ID NO: 1681683 - DNA, 15 bp, Homo sapiens
agagagctgggatag

SEQ ID NO: 1681684 - DNA, 15 bp, Homo sapiens
gagagctgggatagg

SEQ ID NO: 1681685 - DNA, 15 bp, Homo sapiens
agagctgggataggg

SEQ ID NO: 1681686 - DNA, 15 bp, Homo sapiens
gagctgggatagggt

SEQ ID NO: 1681687 - DNA, 15 bp, Homo sapiens
agctgggatagggtg

SEQ ID NO: 1681688 - DNA, 15 bp, Homo sapiens
gctgggatagggtgg

SEQ ID NO: 1681689 - DNA, 15 bp, Homo sapiens
ctgggatagggtgga

SEQ ID NO: 1681690 - DNA, 15 bp, Homo sapiens
tgggatagggtggat

SEQ ID NO: 1681691 - DNA, 15 bp, Homo sapiens
gggatagggtggatc

SEQ ID NO: 1681692 - DNA, 15 bp, Homo sapiens
ggatagggtggatct

SEQ ID NO: 1681693 - DNA, 15 bp, Homo sapiens
gatagggtggatcta

SEQ ID NO: 1681694 - DNA, 15 bp, Homo sapiens
atagggtggatctac

SEQ ID NO: 1681695 - DNA, 15 bp, Homo sapiens
tagggtggatctacc

SEQ ID NO: 1681696 - DNA, 15 bp, Homo sapiens
agggtggatctacct

SEQ ID NO: 1681697 - DNA, 15 bp, Homo sapiens
gggtggatctacctc

SEQ ID NO: 1681698 - DNA, 15 bp, Homo sapiens
ggtggatctacctcc

SEQ ID NO: 1681699 - DNA, 15 bp, Homo sapiens
gtggatctacctcca

SEQ ID NO: 1681700 - DNA, 15 bp, Homo sapiens
tggatctacctccag

SEQ ID NO: 1681701 - DNA, 15 bp, Homo sapiens
ggatctacctccagg

SEQ ID NO: 1681702 - DNA, 15 bp, Homo sapiens
gatctacctccaggt

SEQ ID NO: 1681703 - DNA, 15 bp, Homo sapiens
atctacctccaggtt

SEQ ID NO: 1681704 - DNA, 15 bp, Homo sapiens
tctacctccaggttc

SEQ ID NO: 1681705 - DNA, 15 bp, Homo sapiens
ctacctccaggttca

SEQ ID NO: 1681706 - DNA, 15 bp, Homo sapiens
tacctccaggttcag

SEQ ID NO: 1681707 - DNA, 15 bp, Homo sapiens
acctccaggttcagg

SEQ ID NO: 1681708 - DNA, 15 bp, Homo sapiens
cctccaggttcagga

SEQ ID NO: 1681709 - DNA, 15 bp, Homo sapiens
ctccaggttcaggac

SEQ ID NO: 1681710 - DNA, 15 bp, Homo sapiens
tccaggttcaggaca

SEQ ID NO: 1681711 - DNA, 15 bp, Homo sapiens
ccaggttcaggacat

SEQ ID NO: 1681712 - DNA, 15 bp, Homo sapiens
caggttcaggacatt

SEQ ID NO: 1681713 - DNA, 15 bp, Homo sapiens
aggttcaggacattc

SEQ ID NO: 1681714 - DNA, 15 bp, Homo sapiens
ggttcaggacattca

SEQ ID NO: 1681715 - DNA, 15 bp, Homo sapiens
gttcaggacattcag

SEQ ID NO: 1681716 - DNA, 15 bp, Homo sapiens
ttcaggacattcagg

SEQ ID NO: 1681717 - DNA, 15 bp, Homo sapiens
tcaggacattcaggg

SEQ ID NO: 1681718 - DNA, 15 bp, Homo sapiens
caggacattcagggc

SEQ ID NO: 1681719 - DNA, 15 bp, Homo sapiens
aggacattcagggca

SEQ ID NO: 1681720 - DNA, 15 bp, Homo sapiens
ggacattcagggcac

SEQ ID NO: 1681721 - DNA, 15 bp, Homo sapiens
gacattcagggcaca

SEQ ID NO: 1681722 - DNA, 15 bp, Homo sapiens
acattcagggcacac

SEQ ID NO: 1681723 - DNA, 15 bp, Homo sapiens
cattcagggcacacc

SEQ ID NO: 1681724 - DNA, 15 bp, Homo sapiens
attcagggcacacca

SEQ ID NO: 1681725 - DNA, 15 bp, Homo sapiens
ttcagggcacaccac

SEQ ID NO: 1681726 - DNA, 15 bp, Homo sapiens
tcagggcacaccact

SEQ ID NO: 1681727 - DNA, 15 bp, Homo sapiens
cagggcacaccactg

SEQ ID NO: 1681728 - DNA, 15 bp, Homo sapiens
agggcacaccactga

SEQ ID NO: 1681729 - DNA, 15 bp, Homo sapiens
gggcacaccactgag

SEQ ID NO: 1681730 - DNA, 15 bp, Homo sapiens
ggcacaccactgagc

SEQ ID NO: 1681731 - DNA, 15 bp, Homo sapiens
gcacaccactgagca

SEQ ID NO: 1681732 - DNA, 15 bp, Homo sapiens
cacaccactgagcag

SEQ ID NO: 1681733 - DNA, 15 bp, Homo sapiens
acaccactgagcagg

SEQ ID NO: 1681734 - DNA, 15 bp, Homo sapiens
caccactgagcagga

SEQ ID NO: 1681735 - DNA, 15 bp, Homo sapiens
accactgagcaggag

SEQ ID NO: 1681736 - DNA, 15 bp, Homo sapiens
ccactgagcaggagc

SEQ ID NO: 1681737 - DNA, 15 bp, Homo sapiens
cactgagcaggagca

SEQ ID NO: 1681738 - DNA, 15 bp, Homo sapiens
actgagcaggagcat

SEQ ID NO: 1681739 - DNA, 15 bp, Homo sapiens
ctgagcaggagcatc

SEQ ID NO: 1681740 - DNA, 15 bp, Homo sapiens
tgagcaggagcatca

SEQ ID NO: 1681741 - DNA, 15 bp, Homo sapiens
gagcaggagcatcag

SEQ ID NO: 1681742 - DNA, 15 bp, Homo sapiens
agcaggagcatcagg

SEQ ID NO: 1681743 - DNA, 15 bp, Homo sapiens
gcaggagcatcaggt

SEQ ID NO: 1681744 - DNA, 15 bp, Homo sapiens
caggagcatcaggta

SEQ ID NO: 1681745 - DNA, 15 bp, Homo sapiens
aggagcatcaggtac

SEQ ID NO: 1681746 - DNA, 15 bp, Homo sapiens
ggagcatcaggtacc

SEQ ID NO: 1681747 - DNA, 15 bp, Homo sapiens
gagcatcaggtacca

SEQ ID NO: 1681748 - DNA, 15 bp, Homo sapiens
agcatcaggtaccat

SEQ ID NO: 1681749 - DNA, 15 bp, Homo sapiens
gcatcaggtaccatg

SEQ ID NO: 1681750 - DNA, 15 bp, Homo sapiens
catcaggtaccatga

SEQ ID NO: 1681751 - DNA, 15 bp, Homo sapiens
atcaggtaccatgac

SEQ ID NO: 1681752 - DNA, 15 bp, Homo sapiens
tcaggtaccatgaca

SEQ ID NO: 1681753 - DNA, 15 bp, Homo sapiens
caggtaccatgacac

SEQ ID NO: 1681754 - DNA, 15 bp, Homo sapiens
aggtaccatgacaca

SEQ ID NO: 1681755 - DNA, 15 bp, Homo sapiens
ggtaccatgacacag

SEQ ID NO: 1681756 - DNA, 15 bp, Homo sapiens
gtaccatgacacagg

SEQ ID NO: 1681757 - DNA, 15 bp, Homo sapiens
taccatgacacaggg

SEQ ID NO: 1681758 - DNA, 15 bp, Homo sapiens
accatgacacagggc

SEQ ID NO: 1681759 - DNA, 15 bp, Homo sapiens
ccatgacacagggct

SEQ ID NO: 1681760 - DNA, 15 bp, Homo sapiens
catgacacagggctg

SEQ ID NO: 1681761 - DNA, 15 bp, Homo sapiens
atgacacagggctgg

SEQ ID NO: 1681762 - DNA, 15 bp, Homo sapiens
tgacacagggctggt

SEQ ID NO: 1681763 - DNA, 15 bp, Homo sapiens
gacacagggctggtc

SEQ ID NO: 1681764 - DNA, 15 bp, Homo sapiens
acacagggctggtct

SEQ ID NO: 1681765 - DNA, 15 bp, Homo sapiens
cacagggctggtctg

SEQ ID NO: 1681766 - DNA, 15 bp, Homo sapiens
acagggctggtctgt

SEQ ID NO: 1681767 - DNA, 15 bp, Homo sapiens
cagggctggtctgtg

SEQ ID NO: 1681768 - DNA, 15 bp, Homo sapiens
agggctggtctgtgt

SEQ ID NO: 1681769 - DNA, 15 bp, Homo sapiens
gggctggtctgtgtt

SEQ ID NO: 1681770 - DNA, 15 bp, Homo sapiens
ggctggtctgtgtta

SEQ ID NO: 1681771 - DNA, 15 bp, Homo sapiens
gctggtctgtgttag

SEQ ID NO: 1681772 - DNA, 15 bp, Homo sapiens
ctggtctgtgttagg

SEQ ID NO: 1681773 - DNA, 15 bp, Homo sapiens
tggtctgtgttagga

SEQ ID NO: 1681774 - DNA, 15 bp, Homo sapiens
ggtctgtgttaggat

SEQ ID NO: 1681775 - DNA, 15 bp, Homo sapiens
gtctgtgttaggata

SEQ ID NO: 1681776 - DNA, 15 bp, Homo sapiens
tctgtgttaggataa

SEQ ID NO: 1681777 - DNA, 15 bp, Homo sapiens
ctgtgttaggataaa

SEQ ID NO: 1681778 - DNA, 15 bp, Homo sapiens
tgtgttaggataaag

SEQ ID NO: 1681779 - DNA, 15 bp, Homo sapiens
gtgttaggataaagc

SEQ ID NO: 1681780 - DNA, 15 bp, Homo sapiens
tgttaggataaagca

SEQ ID NO: 1681781 - DNA, 15 bp, Homo sapiens
gttaggataaagcaa

SEQ ID NO: 1681782 - DNA, 15 bp, Homo sapiens
ttaggataaagcaag

SEQ ID NO: 1681783 - DNA, 15 bp, Homo sapiens
taggataaagcaagt

SEQ ID NO: 1681784 - DNA, 15 bp, Homo sapiens
aggataaagcaagtt

SEQ ID NO: 1681785 - DNA, 15 bp, Homo sapiens
ggataaagcaagttc

SEQ ID NO: 1681786 - DNA, 15 bp, Homo sapiens
gataaagcaagttct

SEQ ID NO: 1681787 - DNA, 15 bp, Homo sapiens
ataaagcaagttctt

SEQ ID NO: 1681788 - DNA, 15 bp, Homo sapiens
taaagcaagttctta

SEQ ID NO: 1681789 - DNA, 15 bp, Homo sapiens
aaagcaagttcttaa

SEQ ID NO: 1681790 - DNA, 15 bp, Homo sapiens
aagcaagttcttaat

SEQ ID NO: 1681791 - DNA, 15 bp, Homo sapiens
agcaagttcttaatg

SEQ ID NO: 1681792 - DNA, 15 bp, Homo sapiens
gcaagttcttaatgg

SEQ ID NO: 1681793 - DNA, 15 bp, Homo sapiens
caagttcttaatggg

SEQ ID NO: 1681794 - DNA, 15 bp, Homo sapiens
aagttcttaatgggc

SEQ ID NO: 1681795 - DNA, 15 bp, Homo sapiens
agttcttaatgggct

SEQ ID NO: 1681796 - DNA, 15 bp, Homo sapiens
gttcttaatgggctt

SEQ ID NO: 1681797 - DNA, 15 bp, Homo sapiens
ttcttaatgggcttt

SEQ ID NO: 1681798 - DNA, 15 bp, Homo sapiens
tcttaatgggctttg

SEQ ID NO: 1681799 - DNA, 15 bp, Homo sapiens
cttaatgggctttga

SEQ ID NO: 1681800 - DNA, 15 bp, Homo sapiens
ttaatgggctttgaa

SEQ ID NO: 1681801 - DNA, 15 bp, Homo sapiens
taatgggctttgaat

SEQ ID NO: 1681802 - DNA, 15 bp, Homo sapiens
aatgggctttgaatc

SEQ ID NO: 1681803 - DNA, 15 bp, Homo sapiens
atgggctttgaatcc

SEQ ID NO: 1681804 - DNA, 15 bp, Homo sapiens
tgggctttgaatcca

SEQ ID NO: 1681805 - DNA, 15 bp, Homo sapiens
gggctttgaatccac

SEQ ID NO: 1681806 - DNA, 15 bp, Homo sapiens
ggctttgaatccaca

SEQ ID NO: 1681807 - DNA, 15 bp, Homo sapiens
gctttgaatccacag

SEQ ID NO: 1681808 - DNA, 15 bp, Homo sapiens
ctttgaatccacaga

SEQ ID NO: 1681809 - DNA, 15 bp, Homo sapiens
tttgaatccacagaa

SEQ ID NO: 1681810 - DNA, 15 bp, Homo sapiens
ttgaatccacagaaa

SEQ ID NO: 1681811 - DNA, 15 bp, Homo sapiens
tgaatccacagaaac

SEQ ID NO: 1681812 - DNA, 15 bp, Homo sapiens
gaatccacagaaact

SEQ ID NO: 1681813 - DNA, 15 bp, Homo sapiens
aatccacagaaactt

SEQ ID NO: 1681814 - DNA, 15 bp, Homo sapiens
atccacagaaacttt

SEQ ID NO: 1681815 - DNA, 15 bp, Homo sapiens
tccacagaaactttg

SEQ ID NO: 1681816 - DNA, 15 bp, Homo sapiens
ccacagaaactttgc

SEQ ID NO: 1681817 - DNA, 15 bp, Homo sapiens
cacagaaactttgct

SEQ ID NO: 1681818 - DNA, 15 bp, Homo sapiens
acagaaactttgctt

SEQ ID NO: 1681819 - DNA, 15 bp, Homo sapiens
cagaaactttgcttg

SEQ ID NO: 1681820 - DNA, 15 bp, Homo sapiens
agaaactttgcttgt

SEQ ID NO: 1681821 - DNA, 15 bp, Homo sapiens
gaaactttgcttgtg

SEQ ID NO: 1681822 - DNA, 15 bp, Homo sapiens
aaactttgcttgtga

SEQ ID NO: 1681823 - DNA, 15 bp, Homo sapiens
aactttgcttgtgat

SEQ ID NO: 1681824 - DNA, 15 bp, Homo sapiens
actttgcttgtgatg

SEQ ID NO: 1681825 - DNA, 15 bp, Homo sapiens
ctttgcttgtgatgt

SEQ ID NO: 1681826 - DNA, 15 bp, Homo sapiens
tttgcttgtgatgtc

SEQ ID NO: 1681827 - DNA, 15 bp, Homo sapiens
ttgcttgtgatgtcc

SEQ ID NO: 1681828 - DNA, 15 bp, Homo sapiens
tgcttgtgatgtcca

SEQ ID NO: 1681829 - DNA, 15 bp, Homo sapiens
gcttgtgatgtccag

SEQ ID NO: 1681830 - DNA, 15 bp, Homo sapiens
cttgtgatgtccaga

SEQ ID NO: 1681831 - DNA, 15 bp, Homo sapiens
ttgtgatgtccagat

SEQ ID NO: 1681832 - DNA, 15 bp, Homo sapiens
tgtgatgtccagatg

SEQ ID NO: 1681833 - DNA, 15 bp, Homo sapiens
gtgatgtccagatga

SEQ ID NO: 1681834 - DNA, 15 bp, Homo sapiens
tgatgtccagatgac

SEQ ID NO: 1681835 - DNA, 15 bp, Homo sapiens
gatgtccagatgacg

SEQ ID NO: 1681836 - DNA, 15 bp, Homo sapiens
atgtccagatgacgg

SEQ ID NO: 1681837 - DNA, 15 bp, Homo sapiens
tgtccagatgacggc

SEQ ID NO: 1681838 - DNA, 15 bp, Homo sapiens
gtccagatgacggcc

SEQ ID NO: 1681839 - DNA, 15 bp, Homo sapiens
tccagatgacggccc

SEQ ID NO: 1681840 - DNA, 15 bp, Homo sapiens
ccagatgacggcccc

SEQ ID NO: 1681841 - DNA, 15 bp, Homo sapiens
cagatgacggcccca

SEQ ID NO: 1681842 - DNA, 15 bp, Homo sapiens
agatgacggccccat

SEQ ID NO: 1681843 - DNA, 15 bp, Homo sapiens
gatgacggccccatc

SEQ ID NO: 1681844 - DNA, 15 bp, Homo sapiens
atgacggccccatcc

SEQ ID NO: 1681845 - DNA, 15 bp, Homo sapiens
tgacggccccatccc

SEQ ID NO: 1681846 - DNA, 15 bp, Homo sapiens
gacggccccatccct

SEQ ID NO: 1681847 - DNA, 15 bp, Homo sapiens
acggccccatccctt

SEQ ID NO: 1681848 - DNA, 15 bp, Homo sapiens
cggccccatcccttc

SEQ ID NO: 1681849 - DNA, 15 bp, Homo sapiens
ggccccatcccttct

SEQ ID NO: 1681850 - DNA, 15 bp, Homo sapiens
gccccatcccttctg

SEQ ID NO: 1681851 - DNA, 15 bp, Homo sapiens
ccccatcccttctgc

SEQ ID NO: 1681852 - DNA, 15 bp, Homo sapiens
cccatcccttctgca

SEQ ID NO: 1681853 - DNA, 15 bp, Homo sapiens
ccatcccttctgcag

SEQ ID NO: 1681854 - DNA, 15 bp, Homo sapiens
catcccttctgcaga

SEQ ID NO: 1681855 - DNA, 15 bp, Homo sapiens
atcccttctgcagaa

SEQ ID NO: 1681856 - DNA, 15 bp, Homo sapiens
tcccttctgcagaag

SEQ ID NO: 1681857 - DNA, 15 bp, Homo sapiens
cccttctgcagaagt

SEQ ID NO: 1681858 - DNA, 15 bp, Homo sapiens
ccttctgcagaagtc

SEQ ID NO: 1681859 - DNA, 15 bp, Homo sapiens
cttctgcagaagtca

SEQ ID NO: 1681860 - DNA, 15 bp, Homo sapiens
ttctgcagaagtcag

SEQ ID NO: 1681861 - DNA, 15 bp, Homo sapiens
tctgcagaagtcaga

SEQ ID NO: 1681862 - DNA, 15 bp, Homo sapiens
ctgcagaagtcagag

SEQ ID NO: 1681863 - DNA, 15 bp, Homo sapiens
tgcagaagtcagagt

SEQ ID NO: 1681864 - DNA, 15 bp, Homo sapiens
gcagaagtcagagtt

SEQ ID NO: 1681865 - DNA, 15 bp, Homo sapiens
cagaagtcagagttt

SEQ ID NO: 1681866 - DNA, 15 bp, Homo sapiens
agaagtcagagtttt

SEQ ID NO: 1681867 - DNA, 15 bp, Homo sapiens
gaagtcagagttttc

SEQ ID NO: 1681868 - DNA, 15 bp, Homo sapiens
aagtcagagttttcc

SEQ ID NO: 1681869 - DNA, 15 bp, Homo sapiens
agtcagagttttccc

SEQ ID NO: 1681870 - DNA, 15 bp, Homo sapiens
gtcagagttttccca

SEQ ID NO: 1681871 - DNA, 15 bp, Homo sapiens
tcagagttttcccag

SEQ ID NO: 1681872 - DNA, 15 bp, Homo sapiens
cagagttttcccaga

SEQ ID NO: 1681873 - DNA, 15 bp, Homo sapiens
agagttttcccagaa

SEQ ID NO: 1681874 - DNA, 15 bp, Homo sapiens
gagttttcccagaaa

SEQ ID NO: 1681875 - DNA, 15 bp, Homo sapiens
agttttcccagaaaa

SEQ ID NO: 1681876 - DNA, 15 bp, Homo sapiens
gttttcccagaaaaa

SEQ ID NO: 1681877 - DNA, 15 bp, Homo sapiens
ttttcccagaaaaaa

SEQ ID NO: 1681878 - DNA, 15 bp, Homo sapiens
tttcccagaaaaaaa

SEQ ID NO: 1681879 - DNA, 15 bp, Homo sapiens
ttcccagaaaaaaag

SEQ ID NO: 1681880 - DNA, 15 bp, Homo sapiens
tcccagaaaaaaagc

SEQ ID NO: 1681881 - DNA, 15 bp, Homo sapiens
cccagaaaaaaagca

SEQ ID NO: 1681882 - DNA, 15 bp, Homo sapiens
ccagaaaaaaagcaa

SEQ ID NO: 1681883 - DNA, 15 bp, Homo sapiens
agaaaaaaagcaatg

SEQ ID NO: 1681884 - DNA, 15 bp, Homo sapiens
gaaaaaaagcaatga

SEQ ID NO: 1681885 - DNA, 15 bp, Homo sapiens
aaaaaaagcaatgac

SEQ ID NO: 1681886 - DNA, 15 bp, Homo sapiens
aaaaaagcaatgact

SEQ ID NO: 1681887 - DNA, 15 bp, Homo sapiens
aaaaagcaatgactg

SEQ ID NO: 1681888 - DNA, 15 bp, Homo sapiens
aaaagcaatgactga

SEQ ID NO: 1681889 - DNA, 15 bp, Homo sapiens
aaagcaatgactgaa

SEQ ID NO: 1681890 - DNA, 15 bp, Homo sapiens
aagcaatgactgaac

SEQ ID NO: 1681891 - DNA, 15 bp, Homo sapiens
agcaatgactgaact

SEQ ID NO: 1681892 - DNA, 15 bp, Homo sapiens
gcaatgactgaacta

SEQ ID NO: 1681893 - DNA, 15 bp, Homo sapiens
caatgactgaactac

SEQ ID NO: 1681894 - DNA, 15 bp, Homo sapiens
aatgactgaactaca

SEQ ID NO: 1681895 - DNA, 15 bp, Homo sapiens
atgactgaactacag

SEQ ID NO: 1681896 - DNA, 15 bp, Homo sapiens
tgactgaactacagc

SEQ ID NO: 1681897 - DNA, 15 bp, Homo sapiens
gactgaactacagct

SEQ ID NO: 1681898 - DNA, 15 bp, Homo sapiens
actgaactacagcta

SEQ ID NO: 1681899 - DNA, 15 bp, Homo sapiens
ctgaactacagctaa

SEQ ID NO: 1681900 - DNA, 15 bp, Homo sapiens
tgaactacagctaat

SEQ ID NO: 1681901 - DNA, 15 bp, Homo sapiens
gaactacagctaata

SEQ ID NO: 1681902 - DNA, 15 bp, Homo sapiens
aactacagctaatat

SEQ ID NO: 1681903 - DNA, 15 bp, Homo sapiens
actacagctaatatt

SEQ ID NO: 1681904 - DNA, 15 bp, Homo sapiens
ctacagctaatattt

SEQ ID NO: 1681905 - DNA, 15 bp, Homo sapiens
tacagctaatatttg

SEQ ID NO: 1681906 - DNA, 15 bp, Homo sapiens
acagctaatatttgg

SEQ ID NO: 1681907 - DNA, 15 bp, Homo sapiens
cagctaatatttgga

SEQ ID NO: 1681908 - DNA, 15 bp, Homo sapiens
agctaatatttggag

SEQ ID NO: 1681909 - DNA, 15 bp, Homo sapiens
gctaatatttggaga

SEQ ID NO: 1681910 - DNA, 15 bp, Homo sapiens
ctaatatttggagaa

SEQ ID NO: 1681911 - DNA, 15 bp, Homo sapiens
taatatttggagaac

SEQ ID NO: 1681912 - DNA, 15 bp, Homo sapiens
aatatttggagaaca

SEQ ID NO: 1681913 - DNA, 15 bp, Homo sapiens
atatttggagaacac

SEQ ID NO: 1681914 - DNA, 15 bp, Homo sapiens
tatttggagaacacc

SEQ ID NO: 1681915 - DNA, 15 bp, Homo sapiens
atttggagaacaccc

SEQ ID NO: 1681916 - DNA, 15 bp, Homo sapiens
tttggagaacaccca

SEQ ID NO: 1681917 - DNA, 15 bp, Homo sapiens
ttggagaacacccac

SEQ ID NO: 1681918 - DNA, 15 bp, Homo sapiens
tggagaacacccaca

SEQ ID NO: 1681919 - DNA, 15 bp, Homo sapiens
ggagaacacccacat

SEQ ID NO: 1681920 - DNA, 15 bp, Homo sapiens
gagaacacccacata

SEQ ID NO: 1681921 - DNA, 15 bp, Homo sapiens
agaacacccacatag

SEQ ID NO: 1681922 - DNA, 15 bp, Homo sapiens
gaacacccacatagt

SEQ ID NO: 1681923 - DNA, 15 bp, Homo sapiens
aacacccacatagtt

SEQ ID NO: 1681924 - DNA, 15 bp, Homo sapiens
acacccacatagttg

SEQ ID NO: 1681925 - DNA, 15 bp, Homo sapiens
cacccacatagttgt

SEQ ID NO: 1681926 - DNA, 15 bp, Homo sapiens
acccacatagttgta

SEQ ID NO: 1681927 - DNA, 15 bp, Homo sapiens
cccacatagttgtac

SEQ ID NO: 1681928 - DNA, 15 bp, Homo sapiens
ccacatagttgtact

SEQ ID NO: 1681929 - DNA, 15 bp, Homo sapiens
cacatagttgtactc

SEQ ID NO: 1681930 - DNA, 15 bp, Homo sapiens
acatagttgtactct

SEQ ID NO: 1681931 - DNA, 15 bp, Homo sapiens
catagttgtactctc

SEQ ID NO: 1681932 - DNA, 15 bp, Homo sapiens
atagttgtactctct

SEQ ID NO: 1681933 - DNA, 15 bp, Homo sapiens
tagttgtactctcta

SEQ ID NO: 1681934 - DNA, 15 bp, Homo sapiens
agttgtactctctat

SEQ ID NO: 1681935 - DNA, 15 bp, Homo sapiens
gttgtactctctatg

SEQ ID NO: 1681936 - DNA, 15 bp, Homo sapiens
ttgtactctctatgt

SEQ ID NO: 1681937 - DNA, 15 bp, Homo sapiens
tgtactctctatgta

SEQ ID NO: 1681938 - DNA, 15 bp, Homo sapiens
gtactctctatgtat

SEQ ID NO: 1681939 - DNA, 15 bp, Homo sapiens
tactctctatgtatt

SEQ ID NO: 1681940 - DNA, 15 bp, Homo sapiens
actctctatgtattt

SEQ ID NO: 1681941 - DNA, 15 bp, Homo sapiens
ctctctatgtatttc

SEQ ID NO: 1681942 - DNA, 15 bp, Homo sapiens
tctctatgtatttct

SEQ ID NO: 1681943 - DNA, 15 bp, Homo sapiens
ctctatgtatttcta

SEQ ID NO: 1681944 - DNA, 15 bp, Homo sapiens
tctatgtatttctaa

SEQ ID NO: 1681945 - DNA, 15 bp, Homo sapiens
ctatgtatttctaaa

SEQ ID NO: 1681946 - DNA, 15 bp, Homo sapiens
tatgtatttctaaaa

SEQ ID NO: 1681947 - DNA, 15 bp, Homo sapiens
atgtatttctaaaaa

SEQ ID NO: 1681948 - DNA, 15 bp, Homo sapiens
tgtatttctaaaaat

SEQ ID NO: 1681949 - DNA, 15 bp, Homo sapiens
gtatttctaaaaatc

SEQ ID NO: 1681950 - DNA, 15 bp, Homo sapiens
tatttctaaaaatca

SEQ ID NO: 1681951 - DNA, 15 bp, Homo sapiens
atttctaaaaatcat

SEQ ID NO: 1681952 - DNA, 15 bp, Homo sapiens
tttctaaaaatcatt

SEQ ID NO: 1681953 - DNA, 15 bp, Homo sapiens
ttctaaaaatcatta

SEQ ID NO: 1681954 - DNA, 15 bp, Homo sapiens
tctaaaaatcattaa

SEQ ID NO: 1681955 - DNA, 15 bp, Homo sapiens
ctaaaaatcattaat

SEQ ID NO: 1681956 - DNA, 15 bp, Homo sapiens
taaaaatcattaata

SEQ ID NO: 1681957 - DNA, 15 bp, Homo sapiens
aaaaatcattaataa

SEQ ID NO: 1681958 - DNA, 15 bp, Homo sapiens
aaaatcattaataaa

SEQ ID NO: 1681959 - DNA, 15 bp, Homo sapiens
aaatcattaataaaa

SEQ ID NO: 1681960 - DNA, 15 bp, Homo sapiens
aatcattaataaaat

SEQ ID NO: 1681961 - DNA, 15 bp, Homo sapiens
atcattaataaaatt

SEQ ID NO: 1681962 - DNA, 15 bp, Homo sapiens
tcattaataaaattt

SEQ ID NO: 1681963 - DNA, 15 bp, Homo sapiens
cattaataaaatttt

SEQ ID NO: 1681964 - DNA, 15 bp, Homo sapiens
attaataaaatttta

SEQ ID NO: 1681965 - DNA, 15 bp, Homo sapiens
ttaataaaattttat

SEQ ID NO: 1681966 - DNA, 15 bp, Homo sapiens
taataaaattttatt

SEQ ID NO: 1681967 - DNA, 15 bp, Homo sapiens
aataaaattttatta

SEQ ID NO: 1681968 - DNA, 15 bp, Homo sapiens
ataaaattttattat

SEQ ID NO: 1681969 - DNA, 15 bp, Homo sapiens
taaaattttattatg

SEQ ID NO: 1681970 - DNA, 15 bp, Homo sapiens
aaaattttattatgc

SEQ ID NO: 1681971 - DNA, 15 bp, Homo sapiens
aaattttattatgca

SEQ ID NO: 1681972 - DNA, 15 bp, Homo sapiens
aattttattatgcat

SEQ ID NO: 1681973 - DNA, 15 bp, Homo sapiens
attttattatgcatt

SEQ ID NO: 1681974 - DNA, 15 bp, Homo sapiens
ttttattatgcatta

SEQ ID NO: 1681975 - DNA, 15 bp, Homo sapiens
tttattatgcattat

SEQ ID NO: 1681976 - DNA, 15 bp, Homo sapiens
ttattatgcattatt

SEQ ID NO: 1681977 - DNA, 15 bp, Homo sapiens
tattatgcattatta

SEQ ID NO: 1681978 - DNA, 15 bp, Homo sapiens
attatgcattattat

SEQ ID NO: 1681979 - DNA, 15 bp, Homo sapiens
ttatgcattattatt

SEQ ID NO: 1681980 - DNA, 15 bp, Homo sapiens
tatgcattattattg

SEQ ID NO: 1681981 - DNA, 15 bp, Homo sapiens
atgcattattattga

SEQ ID NO: 1681982 - DNA, 15 bp, Homo sapiens
tgcattattattgat

SEQ ID NO: 1681983 - DNA, 15 bp, Homo sapiens
gcattattattgata

SEQ ID NO: 1681984 - DNA, 15 bp, Homo sapiens
cattattattgatat

SEQ ID NO: 1681985 - DNA, 15 bp, Homo sapiens
attattattgatatt

SEQ ID NO: 1681986 - DNA, 15 bp, Homo sapiens
ttattattgatattt

SEQ ID NO: 1681987 - DNA, 15 bp, Homo sapiens
tattattgatatttc

SEQ ID NO: 1681988 - DNA, 15 bp, Homo sapiens
attattgatatttcc

SEQ ID NO: 1681989 - DNA, 15 bp, Homo sapiens
ttattgatatttcct

SEQ ID NO: 1681990 - DNA, 15 bp, Homo sapiens
tattgatatttcctt

SEQ ID NO: 1681991 - DNA, 15 bp, Homo sapiens
attgatatttccttt

SEQ ID NO: 1681992 - DNA, 15 bp, Homo sapiens
ttgatatttcctttg

SEQ ID NO: 1681993 - DNA, 15 bp, Homo sapiens
tgatatttcctttgt

SEQ ID NO: 1681994 - DNA, 15 bp, Homo sapiens
gatatttcctttgtc

SEQ ID NO: 1681995 - DNA, 15 bp, Homo sapiens
atatttcctttgtca

SEQ ID NO: 1681996 - DNA, 15 bp, Homo sapiens
tatttcctttgtcat

SEQ ID NO: 1681997 - DNA, 15 bp, Homo sapiens
atttcctttgtcata

SEQ ID NO: 1681998 - DNA, 15 bp, Homo sapiens
tttcctttgtcatat

SEQ ID NO: 1681999 - DNA, 15 bp, Homo sapiens
ttcctttgtcatatt

SEQ ID NO: 1682000 - DNA, 15 bp, Homo sapiens
tcctttgtcatattc

SEQ ID NO: 1682001 - DNA, 15 bp, Homo sapiens
cctttgtcatattca

SEQ ID NO: 1682002 - DNA, 15 bp, Homo sapiens
ctttgtcatattcat

SEQ ID NO: 1682003 - DNA, 15 bp, Homo sapiens
tttgtcatattcatt

SEQ ID NO: 1682004 - DNA, 15 bp, Homo sapiens
ttgtcatattcatta

SEQ ID NO: 1682005 - DNA, 15 bp, Homo sapiens
tgtcatattcattat

SEQ ID NO: 1682006 - DNA, 15 bp, Homo sapiens
gtcatattcattatt

SEQ ID NO: 1682007 - DNA, 15 bp, Homo sapiens
tcatattcattattt

SEQ ID NO: 1682008 - DNA, 15 bp, Homo sapiens
catattcattatttt

SEQ ID NO: 1682009 - DNA, 15 bp, Homo sapiens
atattcattattttc

SEQ ID NO: 1682010 - DNA, 15 bp, Homo sapiens
tattcattattttca

SEQ ID NO: 1682011 - DNA, 15 bp, Homo sapiens
attcattattttcat

SEQ ID NO: 1682012 - DNA, 15 bp, Homo sapiens
ttcattattttcatt

SEQ ID NO: 1682013 - DNA, 15 bp, Homo sapiens
tcattattttcattt

SEQ ID NO: 1682014 - DNA, 15 bp, Homo sapiens
cattattttcattta

SEQ ID NO: 1682015 - DNA, 15 bp, Homo sapiens
attattttcatttaa

SEQ ID NO: 1682016 - DNA, 15 bp, Homo sapiens
ttattttcatttaat

SEQ ID NO: 1682017 - DNA, 15 bp, Homo sapiens
tattttcatttaata

SEQ ID NO: 1682018 - DNA, 15 bp, Homo sapiens
attttcatttaataa

SEQ ID NO: 1682019 - DNA, 15 bp, Homo sapiens
ttttcatttaataac

SEQ ID NO: 1682020 - DNA, 15 bp, Homo sapiens
tttcatttaataact

SEQ ID NO: 1682021 - DNA, 15 bp, Homo sapiens
ttcatttaataactt

SEQ ID NO: 1682022 - DNA, 15 bp, Homo sapiens
tcatttaataactta

SEQ ID NO: 1682023 - DNA, 15 bp, Homo sapiens
catttaataacttat

SEQ ID NO: 1682024 - DNA, 15 bp, Homo sapiens
atttaataacttata

SEQ ID NO: 1682025 - DNA, 15 bp, Homo sapiens
tttaataacttatat

SEQ ID NO: 1682026 - DNA, 15 bp, Homo sapiens
ttaataacttatatg

SEQ ID NO: 1682027 - DNA, 15 bp, Homo sapiens
taataacttatatgt

SEQ ID NO: 1682028 - DNA, 15 bp, Homo sapiens
aataacttatatgtt

SEQ ID NO: 1682029 - DNA, 15 bp, Homo sapiens
ataacttatatgttt

SEQ ID NO: 1682030 - DNA, 15 bp, Homo sapiens
taacttatatgttta

SEQ ID NO: 1682031 - DNA, 15 bp, Homo sapiens
aacttatatgtttaa

SEQ ID NO: 1682032 - DNA, 15 bp, Homo sapiens
acttatatgtttaaa

SEQ ID NO: 1682033 - DNA, 15 bp, Homo sapiens
cttatatgtttaaaa

SEQ ID NO: 1682034 - DNA, 15 bp, Homo sapiens
ttatatgtttaaaaa

SEQ ID NO: 1682035 - DNA, 15 bp, Homo sapiens
tatatgtttaaaaaa

SEQ ID NO: 1682036 - DNA, 15 bp, Homo sapiens
atatgtttaaaaaat

SEQ ID NO: 1682037 - DNA, 15 bp, Homo sapiens
tatgtttaaaaaata

SEQ ID NO: 1682038 - DNA, 15 bp, Homo sapiens
atgtttaaaaaatag

SEQ ID NO: 1682039 - DNA, 15 bp, Homo sapiens
tgtttaaaaaatagt

SEQ ID NO: 1682040 - DNA, 15 bp, Homo sapiens
gtttaaaaaatagtt

SEQ ID NO: 1682041 - DNA, 15 bp, Homo sapiens
tttaaaaaatagttt

SEQ ID NO: 1682042 - DNA, 15 bp, Homo sapiens
ttaaaaaatagttta

SEQ ID NO: 1682043 - DNA, 15 bp, Homo sapiens
taaaaaatagtttac

SEQ ID NO: 1682044 - DNA, 15 bp, Homo sapiens
aaaaaatagtttacc

SEQ ID NO: 1682045 - DNA, 15 bp, Homo sapiens
aaaaatagtttaccc

SEQ ID NO: 1682046 - DNA, 15 bp, Homo sapiens
aaaatagtttaccct

SEQ ID NO: 1682047 - DNA, 15 bp, Homo sapiens
aaatagtttaccctt

SEQ ID NO: 1682048 - DNA, 15 bp, Homo sapiens
aatagtttaccctta

SEQ ID NO: 1682049 - DNA, 15 bp, Homo sapiens
atagtttacccttat

SEQ ID NO: 1682050 - DNA, 15 bp, Homo sapiens
tagtttacccttatt

SEQ ID NO: 1682051 - DNA, 15 bp, Homo sapiens
agtttacccttattg

SEQ ID NO: 1682052 - DNA, 15 bp, Homo sapiens
gtttacccttattgt

SEQ ID NO: 1682053 - DNA, 15 bp, Homo sapiens
tttacccttattgta

SEQ ID NO: 1682054 - DNA, 15 bp, Homo sapiens
ttacccttattgtat

SEQ ID NO: 1682055 - DNA, 15 bp, Homo sapiens
tacccttattgtata

SEQ ID NO: 1682056 - DNA, 15 bp, Homo sapiens
acccttattgtatat

SEQ ID NO: 1682057 - DNA, 15 bp, Homo sapiens
cccttattgtatata

SEQ ID NO: 1682058 - DNA, 15 bp, Homo sapiens
ccttattgtatataa

SEQ ID NO: 1682059 - DNA, 15 bp, Homo sapiens
cttattgtatataat

SEQ ID NO: 1682060 - DNA, 15 bp, Homo sapiens
ttattgtatataatt

SEQ ID NO: 1682061 - DNA, 15 bp, Homo sapiens
tattgtatataattt

SEQ ID NO: 1682062 - DNA, 15 bp, Homo sapiens
attgtatataattta

SEQ ID NO: 1682063 - DNA, 15 bp, Homo sapiens
ttgtatataatttag

SEQ ID NO: 1682064 - DNA, 15 bp, Homo sapiens
tgtatataatttaga

SEQ ID NO: 1682065 - DNA, 15 bp, Homo sapiens
gtatataatttagaa

SEQ ID NO: 1682066 - DNA, 15 bp, Homo sapiens
tatataatttagaag

SEQ ID NO: 1682067 - DNA, 15 bp, Homo sapiens
atataatttagaaga

SEQ ID NO: 1682068 - DNA, 15 bp, Homo sapiens
tataatttagaagat

SEQ ID NO: 1682069 - DNA, 15 bp, Homo sapiens
ataatttagaagatg

SEQ ID NO: 1682070 - DNA, 15 bp, Homo sapiens
taatttagaagatgc

SEQ ID NO: 1682071 - DNA, 15 bp, Homo sapiens
aatttagaagatgca

SEQ ID NO: 1682072 - DNA, 15 bp, Homo sapiens
atttagaagatgcag

SEQ ID NO: 1682073 - DNA, 15 bp, Homo sapiens
tttagaagatgcaga

SEQ ID NO: 1682074 - DNA, 15 bp, Homo sapiens
ttagaagatgcagaa

SEQ ID NO: 1682075 - DNA, 15 bp, Homo sapiens
tagaagatgcagaaa

SEQ ID NO: 1682076 - DNA, 15 bp, Homo sapiens
agaagatgcagaaaa

SEQ ID NO: 1682077 - DNA, 15 bp, Homo sapiens
gaagatgcagaaaag

SEQ ID NO: 1682078 - DNA, 15 bp, Homo sapiens
aagatgcagaaaagc

SEQ ID NO: 1682079 - DNA, 15 bp, Homo sapiens
agatgcagaaaagca

SEQ ID NO: 1682080 - DNA, 15 bp, Homo sapiens
gatgcagaaaagcat

SEQ ID NO: 1682081 - DNA, 15 bp, Homo sapiens
atgcagaaaagcatg

SEQ ID NO: 1682082 - DNA, 15 bp, Homo sapiens
tgcagaaaagcatga

SEQ ID NO: 1682083 - DNA, 15 bp, Homo sapiens
gcagaaaagcatgag

SEQ ID NO: 1682084 - DNA, 15 bp, Homo sapiens
cagaaaagcatgagg

SEQ ID NO: 1682085 - DNA, 15 bp, Homo sapiens
agaaaagcatgagga

SEQ ID NO: 1682086 - DNA, 15 bp, Homo sapiens
gaaaagcatgaggaa

SEQ ID NO: 1682087 - DNA, 15 bp, Homo sapiens
aaaagcatgaggaag

SEQ ID NO: 1682088 - DNA, 15 bp, Homo sapiens
aaagcatgaggaaga

SEQ ID NO: 1682089 - DNA, 15 bp, Homo sapiens
aagcatgaggaagaa

SEQ ID NO: 1682090 - DNA, 15 bp, Homo sapiens
agcatgaggaagaaa

SEQ ID NO: 1682091 - DNA, 15 bp, Homo sapiens
gcatgaggaagaaaa

SEQ ID NO: 1682092 - DNA, 15 bp, Homo sapiens
catgaggaagaaaat

SEQ ID NO: 1682093 - DNA, 15 bp, Homo sapiens
tgaggaagaaaatga

SEQ ID NO: 1682094 - DNA, 15 bp, Homo sapiens
gaggaagaaaatgaa

SEQ ID NO: 1682095 - DNA, 15 bp, Homo sapiens
aggaagaaaatgaaa

SEQ ID NO: 1682096 - DNA, 15 bp, Homo sapiens
ggaagaaaatgaaaa

SEQ ID NO: 1682097 - DNA, 15 bp, Homo sapiens
gaagaaaatgaaaac

SEQ ID NO: 1682098 - DNA, 15 bp, Homo sapiens
aagaaaatgaaaacc

SEQ ID NO: 1682099 - DNA, 15 bp, Homo sapiens
agaaaatgaaaacca

SEQ ID NO: 1682100 - DNA, 15 bp, Homo sapiens
gaaaatgaaaaccac

SEQ ID NO: 1682101 - DNA, 15 bp, Homo sapiens
aaaatgaaaaccacc

SEQ ID NO: 1682102 - DNA, 15 bp, Homo sapiens
aaatgaaaaccaccc

SEQ ID NO: 1682103 - DNA, 15 bp, Homo sapiens
aatgaaaaccaccct

SEQ ID NO: 1682104 - DNA, 15 bp, Homo sapiens
atgaaaaccaccctc

SEQ ID NO: 1682105 - DNA, 15 bp, Homo sapiens
tgaaaaccaccctca

SEQ ID NO: 1682106 - DNA, 15 bp, Homo sapiens
gaaaaccaccctcat

SEQ ID NO: 1682107 - DNA, 15 bp, Homo sapiens
aaaaccaccctcatt

SEQ ID NO: 1682108 - DNA, 15 bp, Homo sapiens
aaaccaccctcattc

SEQ ID NO: 1682109 - DNA, 15 bp, Homo sapiens
aaccaccctcattca

SEQ ID NO: 1682110 - DNA, 15 bp, Homo sapiens
accaccctcattcac

SEQ ID NO: 1682111 - DNA, 15 bp, Homo sapiens
ccaccctcattcaca

SEQ ID NO: 1682112 - DNA, 15 bp, Homo sapiens
caccctcattcacat

SEQ ID NO: 1682113 - DNA, 15 bp, Homo sapiens
accctcattcacatt

SEQ ID NO: 1682114 - DNA, 15 bp, Homo sapiens
ccctcattcacattt

SEQ ID NO: 1682115 - DNA, 15 bp, Homo sapiens
cctcattcacatttg

SEQ ID NO: 1682116 - DNA, 15 bp, Homo sapiens
ctcattcacatttgc

SEQ ID NO: 1682117 - DNA, 15 bp, Homo sapiens
tcattcacatttgca

SEQ ID NO: 1682118 - DNA, 15 bp, Homo sapiens
cattcacatttgcat

SEQ ID NO: 1682119 - DNA, 15 bp, Homo sapiens
attcacatttgcata

SEQ ID NO: 1682120 - DNA, 15 bp, Homo sapiens
ttcacatttgcataa

SEQ ID NO: 1682121 - DNA, 15 bp, Homo sapiens
tcacatttgcataac

SEQ ID NO: 1682122 - DNA, 15 bp, Homo sapiens
cacatttgcataacc

SEQ ID NO: 1682123 - DNA, 15 bp, Homo sapiens
acatttgcataacct

SEQ ID NO: 1682124 - DNA, 15 bp, Homo sapiens
catttgcataaccta

SEQ ID NO: 1682125 - DNA, 15 bp, Homo sapiens
atttgcataacctac

SEQ ID NO: 1682126 - DNA, 15 bp, Homo sapiens
tttgcataacctaca

SEQ ID NO: 1682127 - DNA, 15 bp, Homo sapiens
ttgcataacctacag

SEQ ID NO: 1682128 - DNA, 15 bp, Homo sapiens
tgcataacctacaga

SEQ ID NO: 1682129 - DNA, 15 bp, Homo sapiens
gcataacctacagat

SEQ ID NO: 1682130 - DNA, 15 bp, Homo sapiens
cataacctacagata

SEQ ID NO: 1682131 - DNA, 15 bp, Homo sapiens
ataacctacagataa

SEQ ID NO: 1682132 - DNA, 15 bp, Homo sapiens
taacctacagataag

SEQ ID NO: 1682133 - DNA, 15 bp, Homo sapiens
aacctacagataagc

SEQ ID NO: 1682134 - DNA, 15 bp, Homo sapiens
acctacagataagca

SEQ ID NO: 1682135 - DNA, 15 bp, Homo sapiens
cctacagataagcac

SEQ ID NO: 1682136 - DNA, 15 bp, Homo sapiens
ctacagataagcact

SEQ ID NO: 1682137 - DNA, 15 bp, Homo sapiens
tacagataagcactt

SEQ ID NO: 1682138 - DNA, 15 bp, Homo sapiens
acagataagcacttt

SEQ ID NO: 1682139 - DNA, 15 bp, Homo sapiens
cagataagcactttt

SEQ ID NO: 1682140 - DNA, 15 bp, Homo sapiens
agataagcacttttt

SEQ ID NO: 1682141 - DNA, 15 bp, Homo sapiens
gataagcacttttta

SEQ ID NO: 1682142 - DNA, 15 bp, Homo sapiens
ataagcactttttat

SEQ ID NO: 1682143 - DNA, 15 bp, Homo sapiens
taagcactttttata

SEQ ID NO: 1682144 - DNA, 15 bp, Homo sapiens
aagcactttttatat

SEQ ID NO: 1682145 - DNA, 15 bp, Homo sapiens
agcactttttatatt

SEQ ID NO: 1682146 - DNA, 15 bp, Homo sapiens
gcactttttatattg

SEQ ID NO: 1682147 - DNA, 15 bp, Homo sapiens
cactttttatattgt

SEQ ID NO: 1682148 - DNA, 15 bp, Homo sapiens
actttttatattgta

SEQ ID NO: 1682149 - DNA, 15 bp, Homo sapiens
ctttttatattgtac

SEQ ID NO: 1682150 - DNA, 15 bp, Homo sapiens
tttttatattgtact

SEQ ID NO: 1682151 - DNA, 15 bp, Homo sapiens
ttttatattgtactt

SEQ ID NO: 1682152 - DNA, 15 bp, Homo sapiens
tttatattgtacttc

SEQ ID NO: 1682153 - DNA, 15 bp, Homo sapiens
ttatattgtacttct

SEQ ID NO: 1682154 - DNA, 15 bp, Homo sapiens
tatattgtacttctt

SEQ ID NO: 1682155 - DNA, 15 bp, Homo sapiens
atattgtacttcttc

SEQ ID NO: 1682156 - DNA, 15 bp, Homo sapiens
tattgtacttcttcc

SEQ ID NO: 1682157 - DNA, 15 bp, Homo sapiens
attgtacttcttcca

SEQ ID NO: 1682158 - DNA, 15 bp, Homo sapiens
ttgtacttcttccag

SEQ ID NO: 1682159 - DNA, 15 bp, Homo sapiens
tgtacttcttccagt

SEQ ID NO: 1682160 - DNA, 15 bp, Homo sapiens
gtacttcttccagtc

SEQ ID NO: 1682161 - DNA, 15 bp, Homo sapiens
tacttcttccagtct

SEQ ID NO: 1682162 - DNA, 15 bp, Homo sapiens
acttcttccagtctt

SEQ ID NO: 1682163 - DNA, 15 bp, Homo sapiens
cttcttccagtcttt

SEQ ID NO: 1682164 - DNA, 15 bp, Homo sapiens
ttcttccagtctttt

SEQ ID NO: 1682165 - DNA, 15 bp, Homo sapiens
tcttccagtcttttc

SEQ ID NO: 1682166 - DNA, 15 bp, Homo sapiens
cttccagtcttttct

SEQ ID NO: 1682167 - DNA, 15 bp, Homo sapiens
ttccagtcttttcta

SEQ ID NO: 1682168 - DNA, 15 bp, Homo sapiens
tccagtcttttctac

SEQ ID NO: 1682169 - DNA, 15 bp, Homo sapiens
ccagtcttttctaca

SEQ ID NO: 1682170 - DNA, 15 bp, Homo sapiens
cagtcttttctacat

SEQ ID NO: 1682171 - DNA, 15 bp, Homo sapiens
agtcttttctacatg

SEQ ID NO: 1682172 - DNA, 15 bp, Homo sapiens
gtcttttctacatgt

SEQ ID NO: 1682173 - DNA, 15 bp, Homo sapiens
tcttttctacatgtg

SEQ ID NO: 1682174 - DNA, 15 bp, Homo sapiens
cttttctacatgtgt

SEQ ID NO: 1682175 - DNA, 15 bp, Homo sapiens
ttttctacatgtgta

SEQ ID NO: 1682176 - DNA, 15 bp, Homo sapiens
tttctacatgtgtac

SEQ ID NO: 1682177 - DNA, 15 bp, Homo sapiens
ttctacatgtgtaca

SEQ ID NO: 1682178 - DNA, 15 bp, Homo sapiens
tctacatgtgtacat

SEQ ID NO: 1682179 - DNA, 15 bp, Homo sapiens
ctacatgtgtacatg

SEQ ID NO: 1682180 - DNA, 15 bp, Homo sapiens
tacatgtgtacatga

SEQ ID NO: 1682181 - DNA, 15 bp, Homo sapiens
acatgtgtacatgac

SEQ ID NO: 1682182 - DNA, 15 bp, Homo sapiens
catgtgtacatgaca

SEQ ID NO: 1682183 - DNA, 15 bp, Homo sapiens
atgtgtacatgacaa

SEQ ID NO: 1682184 - DNA, 15 bp, Homo sapiens
tgtgtacatgacaaa

SEQ ID NO: 1682185 - DNA, 15 bp, Homo sapiens
gtgtacatgacaaaa

SEQ ID NO: 1682186 - DNA, 15 bp, Homo sapiens
tgtacatgacaaaat

SEQ ID NO: 1682187 - DNA, 15 bp, Homo sapiens
gtacatgacaaaatt

SEQ ID NO: 1682188 - DNA, 15 bp, Homo sapiens
tacatgacaaaatta

SEQ ID NO: 1682189 - DNA, 15 bp, Homo sapiens
acatgacaaaattag

SEQ ID NO: 1682190 - DNA, 15 bp, Homo sapiens
catgacaaaattagg

SEQ ID NO: 1682191 - DNA, 15 bp, Homo sapiens
atgacaaaattagga

SEQ ID NO: 1682192 - DNA, 15 bp, Homo sapiens
tgacaaaattaggaa

SEQ ID NO: 1682193 - DNA, 15 bp, Homo sapiens
gacaaaattaggaat

SEQ ID NO: 1682194 - DNA, 15 bp, Homo sapiens
acaaaattaggaata

SEQ ID NO: 1682195 - DNA, 15 bp, Homo sapiens
caaaattaggaatac

SEQ ID NO: 1682196 - DNA, 15 bp, Homo sapiens
aaaattaggaataca

SEQ ID NO: 1682197 - DNA, 15 bp, Homo sapiens
aaattaggaatacac

SEQ ID NO: 1682198 - DNA, 15 bp, Homo sapiens
aattaggaatacact

SEQ ID NO: 1682199 - DNA, 15 bp, Homo sapiens
attaggaatacacta

SEQ ID NO: 1682200 - DNA, 15 bp, Homo sapiens
ttaggaatacactaa

SEQ ID NO: 1682201 - DNA, 15 bp, Homo sapiens
taggaatacactaat

SEQ ID NO: 1682202 - DNA, 15 bp, Homo sapiens
aggaatacactaatt

SEQ ID NO: 1682203 - DNA, 15 bp, Homo sapiens
ggaatacactaattt

SEQ ID NO: 1682204 - DNA, 15 bp, Homo sapiens
gaatacactaatttt

SEQ ID NO: 1682205 - DNA, 15 bp, Homo sapiens
aatacactaattttg

SEQ ID NO: 1682206 - DNA, 15 bp, Homo sapiens
atacactaattttgg

SEQ ID NO: 1682207 - DNA, 15 bp, Homo sapiens
tacactaattttggt

SEQ ID NO: 1682208 - DNA, 15 bp, Homo sapiens
acactaattttggta

SEQ ID NO: 1682209 - DNA, 15 bp, Homo sapiens
cactaattttggtag

SEQ ID NO: 1682210 - DNA, 15 bp, Homo sapiens
actaattttggtagg

SEQ ID NO: 1682211 - DNA, 15 bp, Homo sapiens
ctaattttggtaggt

SEQ ID NO: 1682212 - DNA, 15 bp, Homo sapiens
taattttggtaggta

SEQ ID NO: 1682213 - DNA, 15 bp, Homo sapiens
aattttggtaggtaa

SEQ ID NO: 1682214 - DNA, 15 bp, Homo sapiens
attttggtaggtaaa

SEQ ID NO: 1682215 - DNA, 15 bp, Homo sapiens
ttttggtaggtaaaa

SEQ ID NO: 1682216 - DNA, 15 bp, Homo sapiens
tttggtaggtaaaaa

SEQ ID NO: 1682217 - DNA, 15 bp, Homo sapiens
ttggtaggtaaaaaa

SEQ ID NO: 1682218 - DNA, 15 bp, Homo sapiens
tggtaggtaaaaaaa

SEQ ID NO: 1682219 - DNA, 15 bp, Homo sapiens
ggtaggtaaaaaaat

SEQ ID NO: 1682220 - DNA, 15 bp, Homo sapiens
gtaggtaaaaaaata

SEQ ID NO: 1682221 - DNA, 15 bp, Homo sapiens
taggtaaaaaaatat

SEQ ID NO: 1682222 - DNA, 15 bp, Homo sapiens
aggtaaaaaaatata

SEQ ID NO: 1682223 - DNA, 15 bp, Homo sapiens
ggtaaaaaaatatac

SEQ ID NO: 1682224 - DNA, 15 bp, Homo sapiens
gtaaaaaaatataca

SEQ ID NO: 1682225 - DNA, 15 bp, Homo sapiens
taaaaaaatatacac

SEQ ID NO: 1682226 - DNA, 15 bp, Homo sapiens
aaaaaaatatacaca

SEQ ID NO: 1682227 - DNA, 15 bp, Homo sapiens
aaaaaatatacacaa

SEQ ID NO: 1682228 - DNA, 15 bp, Homo sapiens
aaaaatatacacaat

SEQ ID NO: 1682229 - DNA, 15 bp, Homo sapiens
aaaatatacacaatt

SEQ ID NO: 1682230 - DNA, 15 bp, Homo sapiens
aaatatacacaattc

SEQ ID NO: 1682231 - DNA, 15 bp, Homo sapiens
aatatacacaattca

SEQ ID NO: 1682232 - DNA, 15 bp, Homo sapiens
atatacacaattcaa

SEQ ID NO: 1682233 - DNA, 15 bp, Homo sapiens
tatacacaattcaat

SEQ ID NO: 1682234 - DNA, 15 bp, Homo sapiens
atacacaattcaatt

SEQ ID NO: 1682235 - DNA, 15 bp, Homo sapiens
tacacaattcaatta

SEQ ID NO: 1682236 - DNA, 15 bp, Homo sapiens
acacaattcaattaa

SEQ ID NO: 1682237 - DNA, 15 bp, Homo sapiens
cacaattcaattaaa

SEQ ID NO: 1682238 - DNA, 15 bp, Homo sapiens
acaattcaattaaat

SEQ ID NO: 1682239 - DNA, 15 bp, Homo sapiens
caattcaattaaatg

SEQ ID NO: 1682240 - DNA, 15 bp, Homo sapiens
aattcaattaaatgg

SEQ ID NO: 1682241 - DNA, 15 bp, Homo sapiens
attcaattaaatggc

SEQ ID NO: 1682242 - DNA, 15 bp, Homo sapiens
ttcaattaaatggct

SEQ ID NO: 1682243 - DNA, 15 bp, Homo sapiens
tcaattaaatggcta

SEQ ID NO: 1682244 - DNA, 15 bp, Homo sapiens
caattaaatggctac

SEQ ID NO: 1682245 - DNA, 15 bp, Homo sapiens
aattaaatggctact

SEQ ID NO: 1682246 - DNA, 15 bp, Homo sapiens
attaaatggctactt

SEQ ID NO: 1682247 - DNA, 15 bp, Homo sapiens
ttaaatggctacttg

SEQ ID NO: 1682248 - DNA, 15 bp, Homo sapiens
taaatggctacttgg

SEQ ID NO: 1682249 - DNA, 15 bp, Homo sapiens
aaatggctacttggg

SEQ ID NO: 1682250 - DNA, 15 bp, Homo sapiens
aatggctacttgggg

SEQ ID NO: 1682251 - DNA, 15 bp, Homo sapiens
atggctacttggggg

SEQ ID NO: 1682252 - DNA, 15 bp, Homo sapiens
tggctacttggggga

SEQ ID NO: 1682253 - DNA, 15 bp, Homo sapiens
ggctacttgggggag

SEQ ID NO: 1682254 - DNA, 15 bp, Homo sapiens
gctacttgggggagg

SEQ ID NO: 1682255 - DNA, 15 bp, Homo sapiens
ctacttgggggagga

SEQ ID NO: 1682256 - DNA, 15 bp, Homo sapiens
tacttgggggaggaa

SEQ ID NO: 1682257 - DNA, 15 bp, Homo sapiens
acttgggggaggaac

SEQ ID NO: 1682258 - DNA, 15 bp, Homo sapiens
cttgggggaggaact

SEQ ID NO: 1682259 - DNA, 15 bp, Homo sapiens
ttgggggaggaactc

SEQ ID NO: 1682260 - DNA, 15 bp, Homo sapiens
tgggggaggaactcc

SEQ ID NO: 1682261 - DNA, 15 bp, Homo sapiens
gggggaggaactccc

SEQ ID NO: 1682262 - DNA, 15 bp, Homo sapiens
ggggaggaactccca

SEQ ID NO: 1682263 - DNA, 15 bp, Homo sapiens
gggaggaactcccaa

SEQ ID NO: 1682264 - DNA, 15 bp, Homo sapiens
ggaggaactcccaat

SEQ ID NO: 1682265 - DNA, 15 bp, Homo sapiens
gaggaactcccaatc

SEQ ID NO: 1682266 - DNA, 15 bp, Homo sapiens
aggaactcccaatcc

SEQ ID NO: 1682267 - DNA, 15 bp, Homo sapiens
ggaactcccaatcca

SEQ ID NO: 1682268 - DNA, 15 bp, Homo sapiens
gaactcccaatccag

SEQ ID NO: 1682269 - DNA, 15 bp, Homo sapiens
aactcccaatccaga

SEQ ID NO: 1682270 - DNA, 15 bp, Homo sapiens
actcccaatccagaa

SEQ ID NO: 1682271 - DNA, 15 bp, Homo sapiens
ctcccaatccagaat

SEQ ID NO: 1682272 - DNA, 15 bp, Homo sapiens
tcccaatccagaatc

SEQ ID NO: 1682273 - DNA, 15 bp, Homo sapiens
cccaatccagaatct

SEQ ID NO: 1682274 - DNA, 15 bp, Homo sapiens
ccaatccagaatcta

SEQ ID NO: 1682275 - DNA, 15 bp, Homo sapiens
caatccagaatctat

SEQ ID NO: 1682276 - DNA, 15 bp, Homo sapiens
aatccagaatctatg

SEQ ID NO: 1682277 - DNA, 15 bp, Homo sapiens
atccagaatctatgg

SEQ ID NO: 1682278 - DNA, 15 bp, Homo sapiens
tccagaatctatggc

SEQ ID NO: 1682279 - DNA, 15 bp, Homo sapiens
ccagaatctatggca

SEQ ID NO: 1682280 - DNA, 15 bp, Homo sapiens
cagaatctatggcac

SEQ ID NO: 1682281 - DNA, 15 bp, Homo sapiens
agaatctatggcaca

SEQ ID NO: 1682282 - DNA, 15 bp, Homo sapiens
gaatctatggcacag

SEQ ID NO: 1682283 - DNA, 15 bp, Homo sapiens
aatctatggcacagg

SEQ ID NO: 1682284 - DNA, 15 bp, Homo sapiens
atctatggcacaggg

SEQ ID NO: 1682285 - DNA, 15 bp, Homo sapiens
tctatggcacaggga

SEQ ID NO: 1682286 - DNA, 15 bp, Homo sapiens
ctatggcacagggaa

SEQ ID NO: 1682287 - DNA, 15 bp, Homo sapiens
tatggcacagggaag

SEQ ID NO: 1682288 - DNA, 15 bp, Homo sapiens
atggcacagggaagt

SEQ ID NO: 1682289 - DNA, 15 bp, Homo sapiens
tggcacagggaagtt

SEQ ID NO: 1682290 - DNA, 15 bp, Homo sapiens
ggcacagggaagttc

SEQ ID NO: 1682291 - DNA, 15 bp, Homo sapiens
gcacagggaagttca

SEQ ID NO: 1682292 - DNA, 15 bp, Homo sapiens
cacagggaagttcag

SEQ ID NO: 1682293 - DNA, 15 bp, Homo sapiens
acagggaagttcagg

SEQ ID NO: 1682294 - DNA, 15 bp, Homo sapiens
cagggaagttcaggc

SEQ ID NO: 1682295 - DNA, 15 bp, Homo sapiens
agggaagttcaggca

SEQ ID NO: 1682296 - DNA, 15 bp, Homo sapiens
gggaagttcaggcag

SEQ ID NO: 1682297 - DNA, 15 bp, Homo sapiens
ggaagttcaggcagg

SEQ ID NO: 1682298 - DNA, 15 bp, Homo sapiens
gaagttcaggcaggc

SEQ ID NO: 1682299 - DNA, 15 bp, Homo sapiens
aagttcaggcaggcc

SEQ ID NO: 1682300 - DNA, 15 bp, Homo sapiens
agttcaggcaggcct

SEQ ID NO: 1682301 - DNA, 15 bp, Homo sapiens
gttcaggcaggcctc

SEQ ID NO: 1682302 - DNA, 15 bp, Homo sapiens
ttcaggcaggcctca

SEQ ID NO: 1682303 - DNA, 15 bp, Homo sapiens
tcaggcaggcctcat

SEQ ID NO: 1682304 - DNA, 15 bp, Homo sapiens
caggcaggcctcatc

SEQ ID NO: 1682305 - DNA, 15 bp, Homo sapiens
aggcaggcctcatca

SEQ ID NO: 1682306 - DNA, 15 bp, Homo sapiens
ggcaggcctcatcat

SEQ ID NO: 1682307 - DNA, 15 bp, Homo sapiens
gcaggcctcatcatc

SEQ ID NO: 1682308 - DNA, 15 bp, Homo sapiens
caggcctcatcatcc

SEQ ID NO: 1682309 - DNA, 15 bp, Homo sapiens
aggcctcatcatcct

SEQ ID NO: 1682310 - DNA, 15 bp, Homo sapiens
ggcctcatcatcctg

SEQ ID NO: 1682311 - DNA, 15 bp, Homo sapiens
gcctcatcatcctgt

SEQ ID NO: 1682312 - DNA, 15 bp, Homo sapiens
cctcatcatcctgtg

SEQ ID NO: 1682313 - DNA, 15 bp, Homo sapiens
ctcatcatcctgtgc

SEQ ID NO: 1682314 - DNA, 15 bp, Homo sapiens
tcatcatcctgtgca

SEQ ID NO: 1682315 - DNA, 15 bp, Homo sapiens
catcatcctgtgcag

SEQ ID NO: 1682316 - DNA, 15 bp, Homo sapiens
atcatcctgtgcagg

SEQ ID NO: 1682317 - DNA, 15 bp, Homo sapiens
tcatcctgtgcaggt

SEQ ID NO: 1682318 - DNA, 15 bp, Homo sapiens
catcctgtgcaggtg

SEQ ID NO: 1682319 - DNA, 15 bp, Homo sapiens
atcctgtgcaggtgg

SEQ ID NO: 1682320 - DNA, 15 bp, Homo sapiens
tcctgtgcaggtggt

SEQ ID NO: 1682321 - DNA, 15 bp, Homo sapiens
cctgtgcaggtggta

SEQ ID NO: 1682322 - DNA, 15 bp, Homo sapiens
ctgtgcaggtggtat

SEQ ID NO: 1682323 - DNA, 15 bp, Homo sapiens
tgtgcaggtggtatt

SEQ ID NO: 1682324 - DNA, 15 bp, Homo sapiens
gtgcaggtggtattc

SEQ ID NO: 1682325 - DNA, 15 bp, Homo sapiens
tgcaggtggtattct

SEQ ID NO: 1682326 - DNA, 15 bp, Homo sapiens
gcaggtggtattctc

SEQ ID NO: 1682327 - DNA, 15 bp, Homo sapiens
caggtggtattctca

SEQ ID NO: 1682328 - DNA, 15 bp, Homo sapiens
aggtggtattctcac

SEQ ID NO: 1682329 - DNA, 15 bp, Homo sapiens
ggtggtattctcact

SEQ ID NO: 1682330 - DNA, 15 bp, Homo sapiens
gtggtattctcactc

SEQ ID NO: 1682331 - DNA, 15 bp, Homo sapiens
tggtattctcactcc

SEQ ID NO: 1682332 - DNA, 15 bp, Homo sapiens
ggtattctcactccc

SEQ ID NO: 1682333 - DNA, 15 bp, Homo sapiens
gtattctcactccca

SEQ ID NO: 1682334 - DNA, 15 bp, Homo sapiens
tattctcactcccat

SEQ ID NO: 1682335 - DNA, 15 bp, Homo sapiens
attctcactcccatt

SEQ ID NO: 1682336 - DNA, 15 bp, Homo sapiens
ttctcactcccattt

SEQ ID NO: 1682337 - DNA, 15 bp, Homo sapiens
tctcactcccatttt

SEQ ID NO: 1682338 - DNA, 15 bp, Homo sapiens
ctcactcccatttta

SEQ ID NO: 1682339 - DNA, 15 bp, Homo sapiens
tcactcccattttac

SEQ ID NO: 1682340 - DNA, 15 bp, Homo sapiens
cactcccattttaca

SEQ ID NO: 1682341 - DNA, 15 bp, Homo sapiens
actcccattttacag

SEQ ID NO: 1682342 - DNA, 15 bp, Homo sapiens
ctcccattttacaga

SEQ ID NO: 1682343 - DNA, 15 bp, Homo sapiens
tttacagatgaagaa

SEQ ID NO: 1682344 - DNA, 15 bp, Homo sapiens
ttacagatgaagaaa

SEQ ID NO: 1682345 - DNA, 15 bp, Homo sapiens
tacagatgaagaaac

SEQ ID NO: 1682346 - DNA, 15 bp, Homo sapiens
acagatgaagaaact

SEQ ID NO: 1682347 - DNA, 15 bp, Homo sapiens
cagatgaagaaactg

SEQ ID NO: 1682348 - DNA, 15 bp, Homo sapiens
agatgaagaaactga

SEQ ID NO: 1682349 - DNA, 15 bp, Homo sapiens
gatgaagaaactgag

SEQ ID NO: 1682350 - DNA, 15 bp, Homo sapiens
aagaaactgaggcta

SEQ ID NO: 1682351 - DNA, 15 bp, Homo sapiens
agaaactgaggctaa

SEQ ID NO: 1682352 - DNA, 15 bp, Homo sapiens
gaaactgaggctaat

SEQ ID NO: 1682353 - DNA, 15 bp, Homo sapiens
aaactgaggctaatg

SEQ ID NO: 1682354 - DNA, 15 bp, Homo sapiens
aactgaggctaatgg

SEQ ID NO: 1682355 - DNA, 15 bp, Homo sapiens
actgaggctaatgga

SEQ ID NO: 1682356 - DNA, 15 bp, Homo sapiens
ctgaggctaatggag

SEQ ID NO: 1682357 - DNA, 15 bp, Homo sapiens
tgaggctaatggaga

SEQ ID NO: 1682358 - DNA, 15 bp, Homo sapiens
gaggctaatggagat

SEQ ID NO: 1682359 - DNA, 15 bp, Homo sapiens
aggctaatggagatt

SEQ ID NO: 1682360 - DNA, 15 bp, Homo sapiens
ggctaatggagatta

SEQ ID NO: 1682361 - DNA, 15 bp, Homo sapiens
gctaatggagattaa

SEQ ID NO: 1682362 - DNA, 15 bp, Homo sapiens
ctaatggagattaag

SEQ ID NO: 1682363 - DNA, 15 bp, Homo sapiens
taatggagattaagt

SEQ ID NO: 1682364 - DNA, 15 bp, Homo sapiens
aatggagattaagta

SEQ ID NO: 1682365 - DNA, 15 bp, Homo sapiens
atggagattaagtaa

SEQ ID NO: 1682366 - DNA, 15 bp, Homo sapiens
tggagattaagtaac

SEQ ID NO: 1682367 - DNA, 15 bp, Homo sapiens
ggagattaagtaact

SEQ ID NO: 1682368 - DNA, 15 bp, Homo sapiens
gagattaagtaactt

SEQ ID NO: 1682369 - DNA, 15 bp, Homo sapiens
agattaagtaacttg

SEQ ID NO: 1682370 - DNA, 15 bp, Homo sapiens
gattaagtaacttgt

SEQ ID NO: 1682371 - DNA, 15 bp, Homo sapiens
attaagtaacttgtc

SEQ ID NO: 1682372 - DNA, 15 bp, Homo sapiens
ttaagtaacttgtcc

SEQ ID NO: 1682373 - DNA, 15 bp, Homo sapiens
taagtaacttgtcca

SEQ ID NO: 1682374 - DNA, 15 bp, Homo sapiens
aagtaacttgtccaa

SEQ ID NO: 1682375 - DNA, 15 bp, Homo sapiens
agtaacttgtccaaa

SEQ ID NO: 1682376 - DNA, 15 bp, Homo sapiens
gtaacttgtccaaag

SEQ ID NO: 1682377 - DNA, 15 bp, Homo sapiens
taacttgtccaaagt

SEQ ID NO: 1682378 - DNA, 15 bp, Homo sapiens
aacttgtccaaagtt

SEQ ID NO: 1682379 - DNA, 15 bp, Homo sapiens
acttgtccaaagtta

SEQ ID NO: 1682380 - DNA, 15 bp, Homo sapiens
cttgtccaaagttag

SEQ ID NO: 1682381 - DNA, 15 bp, Homo sapiens
ttgtccaaagttaga

SEQ ID NO: 1682382 - DNA, 15 bp, Homo sapiens
tgtccaaagttagat

SEQ ID NO: 1682383 - DNA, 15 bp, Homo sapiens
gtccaaagttagata

SEQ ID NO: 1682384 - DNA, 15 bp, Homo sapiens
tccaaagttagatag

SEQ ID NO: 1682385 - DNA, 15 bp, Homo sapiens
ccaaagttagatagc

SEQ ID NO: 1682386 - DNA, 15 bp, Homo sapiens
caaagttagatagct

SEQ ID NO: 1682387 - DNA, 15 bp, Homo sapiens
aaagttagatagcta

SEQ ID NO: 1682388 - DNA, 15 bp, Homo sapiens
aagttagatagctag

SEQ ID NO: 1682389 - DNA, 15 bp, Homo sapiens
agttagatagctagt

SEQ ID NO: 1682390 - DNA, 15 bp, Homo sapiens
gttagatagctagta

SEQ ID NO: 1682391 - DNA, 15 bp, Homo sapiens
ttagatagctagtaa

SEQ ID NO: 1682392 - DNA, 15 bp, Homo sapiens
tagatagctagtaag

SEQ ID NO: 1682393 - DNA, 15 bp, Homo sapiens
agatagctagtaagt

SEQ ID NO: 1682394 - DNA, 15 bp, Homo sapiens
gatagctagtaagtg

SEQ ID NO: 1682395 - DNA, 15 bp, Homo sapiens
atagctagtaagtga

SEQ ID NO: 1682396 - DNA, 15 bp, Homo sapiens
tagctagtaagtgaa

SEQ ID NO: 1682397 - DNA, 15 bp, Homo sapiens
agctagtaagtgaac

SEQ ID NO: 1682398 - DNA, 15 bp, Homo sapiens
gctagtaagtgaaca

SEQ ID NO: 1682399 - DNA, 15 bp, Homo sapiens
ctagtaagtgaacac

SEQ ID NO: 1682400 - DNA, 15 bp, Homo sapiens
tagtaagtgaacaca

SEQ ID NO: 1682401 - DNA, 15 bp, Homo sapiens
agtaagtgaacacaa

SEQ ID NO: 1682402 - DNA, 15 bp, Homo sapiens
gtaagtgaacacaaa

SEQ ID NO: 1682403 - DNA, 15 bp, Homo sapiens
taagtgaacacaaac

SEQ ID NO: 1682404 - DNA, 15 bp, Homo sapiens
aagtgaacacaaacc

SEQ ID NO: 1682405 - DNA, 15 bp, Homo sapiens
agtgaacacaaacct

SEQ ID NO: 1682406 - DNA, 15 bp, Homo sapiens
gtgaacacaaacctt

SEQ ID NO: 1682407 - DNA, 15 bp, Homo sapiens
tgaacacaaaccttt

SEQ ID NO: 1682408 - DNA, 15 bp, Homo sapiens
gaacacaaacctttg

SEQ ID NO: 1682409 - DNA, 15 bp, Homo sapiens
aacacaaacctttgt

SEQ ID NO: 1682410 - DNA, 15 bp, Homo sapiens
acacaaacctttgtg

SEQ ID NO: 1682411 - DNA, 15 bp, Homo sapiens
cacaaacctttgtga

SEQ ID NO: 1682412 - DNA, 15 bp, Homo sapiens
acaaacctttgtgat

SEQ ID NO: 1682413 - DNA, 15 bp, Homo sapiens
caaacctttgtgatt

SEQ ID NO: 1682414 - DNA, 15 bp, Homo sapiens
aaacctttgtgattt

SEQ ID NO: 1682415 - DNA, 15 bp, Homo sapiens
aacctttgtgatttc

SEQ ID NO: 1682416 - DNA, 15 bp, Homo sapiens
acctttgtgatttca

SEQ ID NO: 1682417 - DNA, 15 bp, Homo sapiens
cctttgtgatttcaa

SEQ ID NO: 1682418 - DNA, 15 bp, Homo sapiens
ctttgtgatttcaaa

SEQ ID NO: 1682419 - DNA, 15 bp, Homo sapiens
tttgtgatttcaaag

SEQ ID NO: 1682420 - DNA, 15 bp, Homo sapiens
ttgtgatttcaaaga

SEQ ID NO: 1682421 - DNA, 15 bp, Homo sapiens
tgtgatttcaaagac

SEQ ID NO: 1682422 - DNA, 15 bp, Homo sapiens
gtgatttcaaagacc

SEQ ID NO: 1682423 - DNA, 15 bp, Homo sapiens
tgatttcaaagacca

SEQ ID NO: 1682424 - DNA, 15 bp, Homo sapiens
gatttcaaagaccat

SEQ ID NO: 1682425 - DNA, 15 bp, Homo sapiens
atttcaaagaccatc

SEQ ID NO: 1682426 - DNA, 15 bp, Homo sapiens
tttcaaagaccatct

SEQ ID NO: 1682427 - DNA, 15 bp, Homo sapiens
ttcaaagaccatctc

SEQ ID NO: 1682428 - DNA, 15 bp, Homo sapiens
tcaaagaccatctct

SEQ ID NO: 1682429 - DNA, 15 bp, Homo sapiens
caaagaccatctctt

SEQ ID NO: 1682430 - DNA, 15 bp, Homo sapiens
aaagaccatctcttg

SEQ ID NO: 1682431 - DNA, 15 bp, Homo sapiens
aagaccatctcttga

SEQ ID NO: 1682432 - DNA, 15 bp, Homo sapiens
agaccatctcttgag

SEQ ID NO: 1682433 - DNA, 15 bp, Homo sapiens
gaccatctcttgaga

SEQ ID NO: 1682434 - DNA, 15 bp, Homo sapiens
accatctcttgagat

SEQ ID NO: 1682435 - DNA, 15 bp, Homo sapiens
ccatctcttgagatt

SEQ ID NO: 1682436 - DNA, 15 bp, Homo sapiens
catctcttgagattg

SEQ ID NO: 1682437 - DNA, 15 bp, Homo sapiens
atctcttgagattgg

SEQ ID NO: 1682438 - DNA, 15 bp, Homo sapiens
tctcttgagattggt

SEQ ID NO: 1682439 - DNA, 15 bp, Homo sapiens
ctcttgagattggtt

SEQ ID NO: 1682440 - DNA, 15 bp, Homo sapiens
tcttgagattggtta

SEQ ID NO: 1682441 - DNA, 15 bp, Homo sapiens
cttgagattggttaa

SEQ ID NO: 1682442 - DNA, 15 bp, Homo sapiens
ttgagattggttaac

SEQ ID NO: 1682443 - DNA, 15 bp, Homo sapiens
tgagattggttaact

SEQ ID NO: 1682444 - DNA, 15 bp, Homo sapiens
gagattggttaactt

SEQ ID NO: 1682445 - DNA, 15 bp, Homo sapiens
agattggttaacttt

SEQ ID NO: 1682446 - DNA, 15 bp, Homo sapiens
gattggttaactttt

SEQ ID NO: 1682447 - DNA, 15 bp, Homo sapiens
attggttaactttta

SEQ ID NO: 1682448 - DNA, 15 bp, Homo sapiens
ttggttaacttttaa

SEQ ID NO: 1682449 - DNA, 15 bp, Homo sapiens
tggttaacttttaac

SEQ ID NO: 1682450 - DNA, 15 bp, Homo sapiens
ggttaacttttaact

SEQ ID NO: 1682451 - DNA, 15 bp, Homo sapiens
gttaacttttaacta

SEQ ID NO: 1682452 - DNA, 15 bp, Homo sapiens
ttaacttttaactaa

SEQ ID NO: 1682453 - DNA, 15 bp, Homo sapiens
taacttttaactaaa

SEQ ID NO: 1682454 - DNA, 15 bp, Homo sapiens
aacttttaactaaac

SEQ ID NO: 1682455 - DNA, 15 bp, Homo sapiens
acttttaactaaacc

SEQ ID NO: 1682456 - DNA, 15 bp, Homo sapiens
cttttaactaaacct

SEQ ID NO: 1682457 - DNA, 15 bp, Homo sapiens
ttttaactaaacctc

SEQ ID NO: 1682458 - DNA, 15 bp, Homo sapiens
tttaactaaacctcc

SEQ ID NO: 1682459 - DNA, 15 bp, Homo sapiens
ttaactaaacctccc

SEQ ID NO: 1682460 - DNA, 15 bp, Homo sapiens
taactaaacctccca

SEQ ID NO: 1682461 - DNA, 15 bp, Homo sapiens
aactaaacctcccag

SEQ ID NO: 1682462 - DNA, 15 bp, Homo sapiens
actaaacctcccaga

SEQ ID NO: 1682463 - DNA, 15 bp, Homo sapiens
ctaaacctcccagac

SEQ ID NO: 1682464 - DNA, 15 bp, Homo sapiens
taaacctcccagaca

SEQ ID NO: 1682465 - DNA, 15 bp, Homo sapiens
aaacctcccagacac

SEQ ID NO: 1682466 - DNA, 15 bp, Homo sapiens
aacctcccagacaca

SEQ ID NO: 1682467 - DNA, 15 bp, Homo sapiens
acctcccagacacac

SEQ ID NO: 1682468 - DNA, 15 bp, Homo sapiens
cctcccagacacaca

SEQ ID NO: 1682469 - DNA, 15 bp, Homo sapiens
ctcccagacacacag

SEQ ID NO: 1682470 - DNA, 15 bp, Homo sapiens
tcccagacacacagc

SEQ ID NO: 1682471 - DNA, 15 bp, Homo sapiens
cccagacacacagcc

SEQ ID NO: 1682472 - DNA, 15 bp, Homo sapiens
ccagacacacagcct

SEQ ID NO: 1682473 - DNA, 15 bp, Homo sapiens
cagacacacagcctg

SEQ ID NO: 1682474 - DNA, 15 bp, Homo sapiens
agacacacagcctga

SEQ ID NO: 1682475 - DNA, 15 bp, Homo sapiens
gacacacagcctgac

SEQ ID NO: 1682476 - DNA, 15 bp, Homo sapiens
acacacagcctgacc

SEQ ID NO: 1682477 - DNA, 15 bp, Homo sapiens
cacacagcctgacct

SEQ ID NO: 1682478 - DNA, 15 bp, Homo sapiens
acacagcctgacctt

SEQ ID NO: 1682479 - DNA, 15 bp, Homo sapiens
cacagcctgacctta

SEQ ID NO: 1682480 - DNA, 15 bp, Homo sapiens
acagcctgaccttat

SEQ ID NO: 1682481 - DNA, 15 bp, Homo sapiens
cagcctgaccttatc

SEQ ID NO: 1682482 - DNA, 15 bp, Homo sapiens
agcctgaccttatct

SEQ ID NO: 1682483 - DNA, 15 bp, Homo sapiens
gcctgaccttatctt

SEQ ID NO: 1682484 - DNA, 15 bp, Homo sapiens
cctgaccttatcttc

SEQ ID NO: 1682485 - DNA, 15 bp, Homo sapiens
ctgaccttatcttcc

SEQ ID NO: 1682486 - DNA, 15 bp, Homo sapiens
tgaccttatcttcca

SEQ ID NO: 1682487 - DNA, 15 bp, Homo sapiens
gaccttatcttccaa

SEQ ID NO: 1682488 - DNA, 15 bp, Homo sapiens
accttatcttccaat

SEQ ID NO: 1682489 - DNA, 15 bp, Homo sapiens
ccttatcttccaatc

SEQ ID NO: 1682490 - DNA, 15 bp, Homo sapiens
cttatcttccaatct

SEQ ID NO: 1682491 - DNA, 15 bp, Homo sapiens
ttatcttccaatctt

SEQ ID NO: 1682492 - DNA, 15 bp, Homo sapiens
tatcttccaatcttt

SEQ ID NO: 1682493 - DNA, 15 bp, Homo sapiens
atcttccaatctttc

SEQ ID NO: 1682494 - DNA, 15 bp, Homo sapiens
tcttccaatctttct

SEQ ID NO: 1682495 - DNA, 15 bp, Homo sapiens
cttccaatctttctt

SEQ ID NO: 1682496 - DNA, 15 bp, Homo sapiens
ttccaatctttcttg

SEQ ID NO: 1682497 - DNA, 15 bp, Homo sapiens
tccaatctttcttgc

SEQ ID NO: 1682498 - DNA, 15 bp, Homo sapiens
ccaatctttcttgca

SEQ ID NO: 1682499 - DNA, 15 bp, Homo sapiens
caatctttcttgcag

SEQ ID NO: 1682500 - DNA, 15 bp, Homo sapiens
aatctttcttgcagt

SEQ ID NO: 1682501 - DNA, 15 bp, Homo sapiens
atctttcttgcagtt

SEQ ID NO: 1682502 - DNA, 15 bp, Homo sapiens
tctttcttgcagtta

SEQ ID NO: 1682503 - DNA, 15 bp, Homo sapiens
ctttcttgcagttag

SEQ ID NO: 1682504 - DNA, 15 bp, Homo sapiens
tttcttgcagttagg

SEQ ID NO: 1682505 - DNA, 15 bp, Homo sapiens
ttcttgcagttaggt

SEQ ID NO: 1682506 - DNA, 15 bp, Homo sapiens
tcttgcagttaggtg

SEQ ID NO: 1682507 - DNA, 15 bp, Homo sapiens
cttgcagttaggtgt

SEQ ID NO: 1682508 - DNA, 15 bp, Homo sapiens
ttgcagttaggtgtg

SEQ ID NO: 1682509 - DNA, 15 bp, Homo sapiens
tgcagttaggtgtgg

SEQ ID NO: 1682510 - DNA, 15 bp, Homo sapiens
gcagttaggtgtggt

SEQ ID NO: 1682511 - DNA, 15 bp, Homo sapiens
cagttaggtgtggtt

SEQ ID NO: 1682512 - DNA, 15 bp, Homo sapiens
agttaggtgtggtta

SEQ ID NO: 1682513 - DNA, 15 bp, Homo sapiens
gttaggtgtggttat

SEQ ID NO: 1682514 - DNA, 15 bp, Homo sapiens
ttaggtgtggttatg

SEQ ID NO: 1682515 - DNA, 15 bp, Homo sapiens
taggtgtggttatgt

SEQ ID NO: 1682516 - DNA, 15 bp, Homo sapiens
aggtgtggttatgtg

SEQ ID NO: 1682517 - DNA, 15 bp, Homo sapiens
ggtgtggttatgtgg

SEQ ID NO: 1682518 - DNA, 15 bp, Homo sapiens
gtgtggttatgtggc

SEQ ID NO: 1682519 - DNA, 15 bp, Homo sapiens
tgtggttatgtggca

SEQ ID NO: 1682520 - DNA, 15 bp, Homo sapiens
gtggttatgtggcac

SEQ ID NO: 1682521 - DNA, 15 bp, Homo sapiens
tggttatgtggcaca

SEQ ID NO: 1682522 - DNA, 15 bp, Homo sapiens
ggttatgtggcacag

SEQ ID NO: 1682523 - DNA, 15 bp, Homo sapiens
gttatgtggcacagt

SEQ ID NO: 1682524 - DNA, 15 bp, Homo sapiens
ttatgtggcacagtc

SEQ ID NO: 1682525 - DNA, 15 bp, Homo sapiens
tatgtggcacagtcc

SEQ ID NO: 1682526 - DNA, 15 bp, Homo sapiens
atgtggcacagtcct

SEQ ID NO: 1682527 - DNA, 15 bp, Homo sapiens
tgtggcacagtcctc

SEQ ID NO: 1682528 - DNA, 15 bp, Homo sapiens
gtggcacagtcctct

SEQ ID NO: 1682529 - DNA, 15 bp, Homo sapiens
tggcacagtcctctc

SEQ ID NO: 1682530 - DNA, 15 bp, Homo sapiens
ggcacagtcctctcc

SEQ ID NO: 1682531 - DNA, 15 bp, Homo sapiens
gcacagtcctctcca

SEQ ID NO: 1682532 - DNA, 15 bp, Homo sapiens
cacagtcctctccag

SEQ ID NO: 1682533 - DNA, 15 bp, Homo sapiens
acagtcctctccagt

SEQ ID NO: 1682534 - DNA, 15 bp, Homo sapiens
cagtcctctccagtg

SEQ ID NO: 1682535 - DNA, 15 bp, Homo sapiens
agtcctctccagtgg

SEQ ID NO: 1682536 - DNA, 15 bp, Homo sapiens
gtcctctccagtgga

SEQ ID NO: 1682537 - DNA, 15 bp, Homo sapiens
tcctctccagtggaa

SEQ ID NO: 1682538 - DNA, 15 bp, Homo sapiens
cctctccagtggaat

SEQ ID NO: 1682539 - DNA, 15 bp, Homo sapiens
ctctccagtggaatc

SEQ ID NO: 1682540 - DNA, 15 bp, Homo sapiens
tctccagtggaatct

SEQ ID NO: 1682541 - DNA, 15 bp, Homo sapiens
ctccagtggaatctg

SEQ ID NO: 1682542 - DNA, 15 bp, Homo sapiens
tccagtggaatctga

SEQ ID NO: 1682543 - DNA, 15 bp, Homo sapiens
ccagtggaatctgag

SEQ ID NO: 1682544 - DNA, 15 bp, Homo sapiens
cagtggaatctgagt

SEQ ID NO: 1682545 - DNA, 15 bp, Homo sapiens
agtggaatctgagta

SEQ ID NO: 1682546 - DNA, 15 bp, Homo sapiens
gtggaatctgagtag

SEQ ID NO: 1682547 - DNA, 15 bp, Homo sapiens
tggaatctgagtaga

SEQ ID NO: 1682548 - DNA, 15 bp, Homo sapiens
ggaatctgagtagaa

SEQ ID NO: 1682549 - DNA, 15 bp, Homo sapiens
gaatctgagtagaag

SEQ ID NO: 1682550 - DNA, 15 bp, Homo sapiens
aatctgagtagaagt

SEQ ID NO: 1682551 - DNA, 15 bp, Homo sapiens
atctgagtagaagta

SEQ ID NO: 1682552 - DNA, 15 bp, Homo sapiens
tctgagtagaagtaa

SEQ ID NO: 1682553 - DNA, 15 bp, Homo sapiens
ctgagtagaagtaat

SEQ ID NO: 1682554 - DNA, 15 bp, Homo sapiens
tgagtagaagtaatg

SEQ ID NO: 1682555 - DNA, 15 bp, Homo sapiens
gagtagaagtaatgg

SEQ ID NO: 1682556 - DNA, 15 bp, Homo sapiens
agtagaagtaatgga

SEQ ID NO: 1682557 - DNA, 15 bp, Homo sapiens
gtagaagtaatggat

SEQ ID NO: 1682558 - DNA, 15 bp, Homo sapiens
tagaagtaatggatg

SEQ ID NO: 1682559 - DNA, 15 bp, Homo sapiens
agaagtaatggatgc

SEQ ID NO: 1682560 - DNA, 15 bp, Homo sapiens
gaagtaatggatgcc

SEQ ID NO: 1682561 - DNA, 15 bp, Homo sapiens
aagtaatggatgcca

SEQ ID NO: 1682562 - DNA, 15 bp, Homo sapiens
agtaatggatgccac

SEQ ID NO: 1682563 - DNA, 15 bp, Homo sapiens
gtaatggatgccact

SEQ ID NO: 1682564 - DNA, 15 bp, Homo sapiens
taatggatgccactt

SEQ ID NO: 1682565 - DNA, 15 bp, Homo sapiens
aatggatgccacttc

SEQ ID NO: 1682566 - DNA, 15 bp, Homo sapiens
atggatgccacttcc

SEQ ID NO: 1682567 - DNA, 15 bp, Homo sapiens
tggatgccacttcca

SEQ ID NO: 1682568 - DNA, 15 bp, Homo sapiens
ggatgccacttccag

SEQ ID NO: 1682569 - DNA, 15 bp, Homo sapiens
gatgccacttccagg

SEQ ID NO: 1682570 - DNA, 15 bp, Homo sapiens
atgccacttccagga

SEQ ID NO: 1682571 - DNA, 15 bp, Homo sapiens
tgccacttccaggat

SEQ ID NO: 1682572 - DNA, 15 bp, Homo sapiens
gccacttccaggatt

SEQ ID NO: 1682573 - DNA, 15 bp, Homo sapiens
ccacttccaggattg

SEQ ID NO: 1682574 - DNA, 15 bp, Homo sapiens
cacttccaggattgg

SEQ ID NO: 1682575 - DNA, 15 bp, Homo sapiens
acttccaggattggc

SEQ ID NO: 1682576 - DNA, 15 bp, Homo sapiens
cttccaggattggcc

SEQ ID NO: 1682577 - DNA, 15 bp, Homo sapiens
ttccaggattggccc

SEQ ID NO: 1682578 - DNA, 15 bp, Homo sapiens
tccaggattggccca

SEQ ID NO: 1682579 - DNA, 15 bp, Homo sapiens
ccaggattggcccac

SEQ ID NO: 1682580 - DNA, 15 bp, Homo sapiens
caggattggcccaca

SEQ ID NO: 1682581 - DNA, 15 bp, Homo sapiens
aggattggcccacag

SEQ ID NO: 1682582 - DNA, 15 bp, Homo sapiens
ggattggcccacagg

SEQ ID NO: 1682583 - DNA, 15 bp, Homo sapiens
gattggcccacagga

SEQ ID NO: 1682584 - DNA, 15 bp, Homo sapiens
attggcccacaggaa

SEQ ID NO: 1682585 - DNA, 15 bp, Homo sapiens
ttggcccacaggaac

SEQ ID NO: 1682586 - DNA, 15 bp, Homo sapiens
tggcccacaggaact

SEQ ID NO: 1682587 - DNA, 15 bp, Homo sapiens
ggcccacaggaactt

SEQ ID NO: 1682588 - DNA, 15 bp, Homo sapiens
gcccacaggaacttt

SEQ ID NO: 1682589 - DNA, 15 bp, Homo sapiens
cccacaggaactttc

SEQ ID NO: 1682590 - DNA, 15 bp, Homo sapiens
ccacaggaactttcc

SEQ ID NO: 1682591 - DNA, 15 bp, Homo sapiens
cacaggaactttcca

SEQ ID NO: 1682592 - DNA, 15 bp, Homo sapiens
acaggaactttccat

SEQ ID NO: 1682593 - DNA, 15 bp, Homo sapiens
caggaactttccata

SEQ ID NO: 1682594 - DNA, 15 bp, Homo sapiens
aggaactttccatac

SEQ ID NO: 1682595 - DNA, 15 bp, Homo sapiens
ggaactttccataca

SEQ ID NO: 1682596 - DNA, 15 bp, Homo sapiens
gaactttccatacaa

SEQ ID NO: 1682597 - DNA, 15 bp, Homo sapiens
aactttccatacaaa

SEQ ID NO: 1682598 - DNA, 15 bp, Homo sapiens
actttccatacaaaa

SEQ ID NO: 1682599 - DNA, 15 bp, Homo sapiens
ctttccatacaaaat

SEQ ID NO: 1682600 - DNA, 15 bp, Homo sapiens
tttccatacaaaatg

SEQ ID NO: 1682601 - DNA, 15 bp, Homo sapiens
ttccatacaaaatgc

SEQ ID NO: 1682602 - DNA, 15 bp, Homo sapiens
tccatacaaaatgct

SEQ ID NO: 1682603 - DNA, 15 bp, Homo sapiens
ccatacaaaatgctc

SEQ ID NO: 1682604 - DNA, 15 bp, Homo sapiens
catacaaaatgctcc

SEQ ID NO: 1682605 - DNA, 15 bp, Homo sapiens
atacaaaatgctcca

SEQ ID NO: 1682606 - DNA, 15 bp, Homo sapiens
tacaaaatgctccat

SEQ ID NO: 1682607 - DNA, 15 bp, Homo sapiens
acaaaatgctccata

SEQ ID NO: 1682608 - DNA, 15 bp, Homo sapiens
caaaatgctccatat

SEQ ID NO: 1682609 - DNA, 15 bp, Homo sapiens
aaaatgctccatatt

SEQ ID NO: 1682610 - DNA, 15 bp, Homo sapiens
aaatgctccatattt

SEQ ID NO: 1682611 - DNA, 15 bp, Homo sapiens
aatgctccatatttt

SEQ ID NO: 1682612 - DNA, 15 bp, Homo sapiens
atgctccatattttc

SEQ ID NO: 1682613 - DNA, 15 bp, Homo sapiens
tgctccatattttct

SEQ ID NO: 1682614 - DNA, 15 bp, Homo sapiens
gctccatattttctc

SEQ ID NO: 1682615 - DNA, 15 bp, Homo sapiens
ctccatattttctct

SEQ ID NO: 1682616 - DNA, 15 bp, Homo sapiens
tccatattttctctt

SEQ ID NO: 1682617 - DNA, 15 bp, Homo sapiens
ccatattttctcttc

SEQ ID NO: 1682618 - DNA, 15 bp, Homo sapiens
catattttctcttcc

SEQ ID NO: 1682619 - DNA, 15 bp, Homo sapiens
atattttctcttccc

SEQ ID NO: 1682620 - DNA, 15 bp, Homo sapiens
tattttctcttccct

SEQ ID NO: 1682621 - DNA, 15 bp, Homo sapiens
attttctcttccctg

SEQ ID NO: 1682622 - DNA, 15 bp, Homo sapiens
ttttctcttccctgt

SEQ ID NO: 1682623 - DNA, 15 bp, Homo sapiens
tttctcttccctgtg

SEQ ID NO: 1682624 - DNA, 15 bp, Homo sapiens
ttctcttccctgtgt

SEQ ID NO: 1682625 - DNA, 15 bp, Homo sapiens
tctcttccctgtgtg

SEQ ID NO: 1682626 - DNA, 15 bp, Homo sapiens
ctcttccctgtgtga

SEQ ID NO: 1682627 - DNA, 15 bp, Homo sapiens
tcttccctgtgtgat

SEQ ID NO: 1682628 - DNA, 15 bp, Homo sapiens
cttccctgtgtgatg

SEQ ID NO: 1682629 - DNA, 15 bp, Homo sapiens
ttccctgtgtgatgg

SEQ ID NO: 1682630 - DNA, 15 bp, Homo sapiens
tccctgtgtgatgga

SEQ ID NO: 1682631 - DNA, 15 bp, Homo sapiens
ccctgtgtgatggat

SEQ ID NO: 1682632 - DNA, 15 bp, Homo sapiens
cctgtgtgatggata

SEQ ID NO: 1682633 - DNA, 15 bp, Homo sapiens
ctgtgtgatggatac

SEQ ID NO: 1682634 - DNA, 15 bp, Homo sapiens
tgtgtgatggataca

SEQ ID NO: 1682635 - DNA, 15 bp, Homo sapiens
gtgtgatggatacat

SEQ ID NO: 1682636 - DNA, 15 bp, Homo sapiens
tgtgatggatacatg

SEQ ID NO: 1682637 - DNA, 15 bp, Homo sapiens
gtgatggatacatgt

SEQ ID NO: 1682638 - DNA, 15 bp, Homo sapiens
tgatggatacatgtc

SEQ ID NO: 1682639 - DNA, 15 bp, Homo sapiens
gatggatacatgtcc

SEQ ID NO: 1682640 - DNA, 15 bp, Homo sapiens
atggatacatgtcca

SEQ ID NO: 1682641 - DNA, 15 bp, Homo sapiens
tggatacatgtccat

SEQ ID NO: 1682642 - DNA, 15 bp, Homo sapiens
ggatacatgtccatg

SEQ ID NO: 1682643 - DNA, 15 bp, Homo sapiens
gatacatgtccatgt

SEQ ID NO: 1682644 - DNA, 15 bp, Homo sapiens
atacatgtccatgtc

SEQ ID NO: 1682645 - DNA, 15 bp, Homo sapiens
tacatgtccatgtcc

SEQ ID NO: 1682646 - DNA, 15 bp, Homo sapiens
acatgtccatgtcca

SEQ ID NO: 1682647 - DNA, 15 bp, Homo sapiens
catgtccatgtccaa

SEQ ID NO: 1682648 - DNA, 15 bp, Homo sapiens
atgtccatgtccaag

SEQ ID NO: 1682649 - DNA, 15 bp, Homo sapiens
tgtccatgtccaagg

SEQ ID NO: 1682650 - DNA, 15 bp, Homo sapiens
gtccatgtccaagga

SEQ ID NO: 1682651 - DNA, 15 bp, Homo sapiens
tccatgtccaaggag

SEQ ID NO: 1682652 - DNA, 15 bp, Homo sapiens
ccatgtccaaggaga

SEQ ID NO: 1682653 - DNA, 15 bp, Homo sapiens
catgtccaaggagac

SEQ ID NO: 1682654 - DNA, 15 bp, Homo sapiens
atgtccaaggagacc

SEQ ID NO: 1682655 - DNA, 15 bp, Homo sapiens
tgtccaaggagacct

SEQ ID NO: 1682656 - DNA, 15 bp, Homo sapiens
gtccaaggagacctt

SEQ ID NO: 1682657 - DNA, 15 bp, Homo sapiens
tccaaggagacctta

SEQ ID NO: 1682658 - DNA, 15 bp, Homo sapiens
ccaaggagaccttaa

SEQ ID NO: 1682659 - DNA, 15 bp, Homo sapiens
caaggagaccttaaa

SEQ ID NO: 1682660 - DNA, 15 bp, Homo sapiens
aaggagaccttaaaa

SEQ ID NO: 1682661 - DNA, 15 bp, Homo sapiens
aggagaccttaaaag

SEQ ID NO: 1682662 - DNA, 15 bp, Homo sapiens
ggagaccttaaaagc

SEQ ID NO: 1682663 - DNA, 15 bp, Homo sapiens
gagaccttaaaagcc

SEQ ID NO: 1682664 - DNA, 15 bp, Homo sapiens
agaccttaaaagcca

SEQ ID NO: 1682665 - DNA, 15 bp, Homo sapiens
gaccttaaaagccac

SEQ ID NO: 1682666 - DNA, 15 bp, Homo sapiens
accttaaaagccaca

SEQ ID NO: 1682667 - DNA, 15 bp, Homo sapiens
ccttaaaagccacat

SEQ ID NO: 1682668 - DNA, 15 bp, Homo sapiens
cttaaaagccacatg

SEQ ID NO: 1682669 - DNA, 15 bp, Homo sapiens
ttaaaagccacatgt

SEQ ID NO: 1682670 - DNA, 15 bp, Homo sapiens
taaaagccacatgtt

SEQ ID NO: 1682671 - DNA, 15 bp, Homo sapiens
aaaagccacatgttg

SEQ ID NO: 1682672 - DNA, 15 bp, Homo sapiens
aaagccacatgttga

SEQ ID NO: 1682673 - DNA, 15 bp, Homo sapiens
aagccacatgttgag

SEQ ID NO: 1682674 - DNA, 15 bp, Homo sapiens
agccacatgttgagg

SEQ ID NO: 1682675 - DNA, 15 bp, Homo sapiens
gccacatgttgagga

SEQ ID NO: 1682676 - DNA, 15 bp, Homo sapiens
ccacatgttgaggat

SEQ ID NO: 1682677 - DNA, 15 bp, Homo sapiens
cacatgttgaggatg

SEQ ID NO: 1682678 - DNA, 15 bp, Homo sapiens
acatgttgaggatgg

SEQ ID NO: 1682679 - DNA, 15 bp, Homo sapiens
catgttgaggatggt

SEQ ID NO: 1682680 - DNA, 15 bp, Homo sapiens
atgttgaggatggta

SEQ ID NO: 1682681 - DNA, 15 bp, Homo sapiens
tgttgaggatggtag

SEQ ID NO: 1682682 - DNA, 15 bp, Homo sapiens
gttgaggatggtaga

SEQ ID NO: 1682683 - DNA, 15 bp, Homo sapiens
ttgaggatggtagag

SEQ ID NO: 1682684 - DNA, 15 bp, Homo sapiens
tgaggatggtagagc

SEQ ID NO: 1682685 - DNA, 15 bp, Homo sapiens
gaggatggtagagct

SEQ ID NO: 1682686 - DNA, 15 bp, Homo sapiens
aggatggtagagctt

SEQ ID NO: 1682687 - DNA, 15 bp, Homo sapiens
ggatggtagagcttc

SEQ ID NO: 1682688 - DNA, 15 bp, Homo sapiens
gatggtagagcttct

SEQ ID NO: 1682689 - DNA, 15 bp, Homo sapiens
atggtagagcttctg

SEQ ID NO: 1682690 - DNA, 15 bp, Homo sapiens
tggtagagcttctgt

SEQ ID NO: 1682691 - DNA, 15 bp, Homo sapiens
ggtagagcttctgtc

SEQ ID NO: 1682692 - DNA, 15 bp, Homo sapiens
gtagagcttctgtca

SEQ ID NO: 1682693 - DNA, 15 bp, Homo sapiens
tagagcttctgtcag

SEQ ID NO: 1682694 - DNA, 15 bp, Homo sapiens
agagcttctgtcagc

SEQ ID NO: 1682695 - DNA, 15 bp, Homo sapiens
gagcttctgtcagcc

SEQ ID NO: 1682696 - DNA, 15 bp, Homo sapiens
agcttctgtcagcct

SEQ ID NO: 1682697 - DNA, 15 bp, Homo sapiens
gcttctgtcagcctg

SEQ ID NO: 1682698 - DNA, 15 bp, Homo sapiens
cttctgtcagcctgg

SEQ ID NO: 1682699 - DNA, 15 bp, Homo sapiens
ttctgtcagcctggg

SEQ ID NO: 1682700 - DNA, 15 bp, Homo sapiens
tctgtcagcctgggt

SEQ ID NO: 1682701 - DNA, 15 bp, Homo sapiens
ctgtcagcctgggtc

SEQ ID NO: 1682702 - DNA, 15 bp, Homo sapiens
tgtcagcctgggtct

SEQ ID NO: 1682703 - DNA, 15 bp, Homo sapiens
gtcagcctgggtctc

SEQ ID NO: 1682704 - DNA, 15 bp, Homo sapiens
tcagcctgggtctct

SEQ ID NO: 1682705 - DNA, 15 bp, Homo sapiens
cagcctgggtctctg

SEQ ID NO: 1682706 - DNA, 15 bp, Homo sapiens
agcctgggtctctga

SEQ ID NO: 1682707 - DNA, 15 bp, Homo sapiens
gcctgggtctctgaa

SEQ ID NO: 1682708 - DNA, 15 bp, Homo sapiens
cctgggtctctgaat

SEQ ID NO: 1682709 - DNA, 15 bp, Homo sapiens
ctgggtctctgaatg

SEQ ID NO: 1682710 - DNA, 15 bp, Homo sapiens
tgggtctctgaatga

SEQ ID NO: 1682711 - DNA, 15 bp, Homo sapiens
gggtctctgaatgac

SEQ ID NO: 1682712 - DNA, 15 bp, Homo sapiens
ggtctctgaatgact

SEQ ID NO: 1682713 - DNA, 15 bp, Homo sapiens
gtctctgaatgactg

SEQ ID NO: 1682714 - DNA, 15 bp, Homo sapiens
tctctgaatgactgc

SEQ ID NO: 1682715 - DNA, 15 bp, Homo sapiens
ctctgaatgactgca

SEQ ID NO: 1682716 - DNA, 15 bp, Homo sapiens
tctgaatgactgcat

SEQ ID NO: 1682717 - DNA, 15 bp, Homo sapiens
ctgaatgactgcatg

SEQ ID NO: 1682718 - DNA, 15 bp, Homo sapiens
tgaatgactgcatgg

SEQ ID NO: 1682719 - DNA, 15 bp, Homo sapiens
gaatgactgcatgga

SEQ ID NO: 1682720 - DNA, 15 bp, Homo sapiens
aatgactgcatggag

SEQ ID NO: 1682721 - DNA, 15 bp, Homo sapiens
atgactgcatggagc

SEQ ID NO: 1682722 - DNA, 15 bp, Homo sapiens
tgactgcatggagca

SEQ ID NO: 1682723 - DNA, 15 bp, Homo sapiens
gactgcatggagcag

SEQ ID NO: 1682724 - DNA, 15 bp, Homo sapiens
actgcatggagcaga

SEQ ID NO: 1682725 - DNA, 15 bp, Homo sapiens
ctgcatggagcagag

SEQ ID NO: 1682726 - DNA, 15 bp, Homo sapiens
tgcatggagcagagc

SEQ ID NO: 1682727 - DNA, 15 bp, Homo sapiens
gcatggagcagagca

SEQ ID NO: 1682728 - DNA, 15 bp, Homo sapiens
catggagcagagcac

SEQ ID NO: 1682729 - DNA, 15 bp, Homo sapiens
atggagcagagcacc

SEQ ID NO: 1682730 - DNA, 15 bp, Homo sapiens
tggagcagagcacct

SEQ ID NO: 1682731 - DNA, 15 bp, Homo sapiens
ggagcagagcacctt

SEQ ID NO: 1682732 - DNA, 15 bp, Homo sapiens
gagcagagcaccttt

SEQ ID NO: 1682733 - DNA, 15 bp, Homo sapiens
agcagagcacctttg

SEQ ID NO: 1682734 - DNA, 15 bp, Homo sapiens
gcagagcacctttgc

SEQ ID NO: 1682735 - DNA, 15 bp, Homo sapiens
cagagcacctttgcc

SEQ ID NO: 1682736 - DNA, 15 bp, Homo sapiens
agagcacctttgccc

SEQ ID NO: 1682737 - DNA, 15 bp, Homo sapiens
gagcacctttgccca

SEQ ID NO: 1682738 - DNA, 15 bp, Homo sapiens
agcacctttgcccaa

SEQ ID NO: 1682739 - DNA, 15 bp, Homo sapiens
gcacctttgcccaac

SEQ ID NO: 1682740 - DNA, 15 bp, Homo sapiens
cacctttgcccaaca

SEQ ID NO: 1682741 - DNA, 15 bp, Homo sapiens
acctttgcccaacac

SEQ ID NO: 1682742 - DNA, 15 bp, Homo sapiens
cctttgcccaacacc

SEQ ID NO: 1682743 - DNA, 15 bp, Homo sapiens
ctttgcccaacaccg

SEQ ID NO: 1682744 - DNA, 15 bp, Homo sapiens
tttgcccaacaccga

SEQ ID NO: 1682745 - DNA, 15 bp, Homo sapiens
ttgcccaacaccgat

SEQ ID NO: 1682746 - DNA, 15 bp, Homo sapiens
tgcccaacaccgatt

SEQ ID NO: 1682747 - DNA, 15 bp, Homo sapiens
gcccaacaccgattt

SEQ ID NO: 1682748 - DNA, 15 bp, Homo sapiens
cccaacaccgatttc

SEQ ID NO: 1682749 - DNA, 15 bp, Homo sapiens
ccaacaccgatttcc

SEQ ID NO: 1682750 - DNA, 15 bp, Homo sapiens
caacaccgatttccc

SEQ ID NO: 1682751 - DNA, 15 bp, Homo sapiens
aacaccgatttcccc

SEQ ID NO: 1682752 - DNA, 15 bp, Homo sapiens
acaccgatttcccct

SEQ ID NO: 1682753 - DNA, 15 bp, Homo sapiens
caccgatttcccctt

SEQ ID NO: 1682754 - DNA, 15 bp, Homo sapiens
accgatttcccctta

SEQ ID NO: 1682755 - DNA, 15 bp, Homo sapiens
ccgatttccccttat

SEQ ID NO: 1682756 - DNA, 15 bp, Homo sapiens
cgatttccccttatt

SEQ ID NO: 1682757 - DNA, 15 bp, Homo sapiens
gatttccccttattc

SEQ ID NO: 1682758 - DNA, 15 bp, Homo sapiens
atttccccttattca

SEQ ID NO: 1682759 - DNA, 15 bp, Homo sapiens
tttccccttattcaa

SEQ ID NO: 1682760 - DNA, 15 bp, Homo sapiens
ttccccttattcaag

SEQ ID NO: 1682761 - DNA, 15 bp, Homo sapiens
tccccttattcaagg

SEQ ID NO: 1682762 - DNA, 15 bp, Homo sapiens
ccccttattcaaggc

SEQ ID NO: 1682763 - DNA, 15 bp, Homo sapiens
cccttattcaaggcc

SEQ ID NO: 1682764 - DNA, 15 bp, Homo sapiens
ccttattcaaggcct

SEQ ID NO: 1682765 - DNA, 15 bp, Homo sapiens
cttattcaaggccta

SEQ ID NO: 1682766 - DNA, 15 bp, Homo sapiens
ttattcaaggcctac

SEQ ID NO: 1682767 - DNA, 15 bp, Homo sapiens
tattcaaggcctact

SEQ ID NO: 1682768 - DNA, 15 bp, Homo sapiens
attcaaggcctactg

SEQ ID NO: 1682769 - DNA, 15 bp, Homo sapiens
ttcaaggcctactgg

SEQ ID NO: 1682770 - DNA, 15 bp, Homo sapiens
tcaaggcctactgga

SEQ ID NO: 1682771 - DNA, 15 bp, Homo sapiens
caaggcctactggac

SEQ ID NO: 1682772 - DNA, 15 bp, Homo sapiens
aaggcctactggact

SEQ ID NO: 1682773 - DNA, 15 bp, Homo sapiens
aggcctactggactt

SEQ ID NO: 1682774 - DNA, 15 bp, Homo sapiens
ggcctactggacttc

SEQ ID NO: 1682775 - DNA, 15 bp, Homo sapiens
gcctactggacttca

SEQ ID NO: 1682776 - DNA, 15 bp, Homo sapiens
cctactggacttcac

SEQ ID NO: 1682777 - DNA, 15 bp, Homo sapiens
ctactggacttcaca

SEQ ID NO: 1682778 - DNA, 15 bp, Homo sapiens
tactggacttcacat

SEQ ID NO: 1682779 - DNA, 15 bp, Homo sapiens
actggacttcacatg

SEQ ID NO: 1682780 - DNA, 15 bp, Homo sapiens
ctggacttcacatga

SEQ ID NO: 1682781 - DNA, 15 bp, Homo sapiens
tggacttcacatgag

SEQ ID NO: 1682782 - DNA, 15 bp, Homo sapiens
ggacttcacatgagg

SEQ ID NO: 1682783 - DNA, 15 bp, Homo sapiens
gacttcacatgaggg

SEQ ID NO: 1682784 - DNA, 15 bp, Homo sapiens
acttcacatgagggg

SEQ ID NO: 1682785 - DNA, 15 bp, Homo sapiens
cttcacatgagggga

SEQ ID NO: 1682786 - DNA, 15 bp, Homo sapiens
ttcacatgaggggaa

SEQ ID NO: 1682787 - DNA, 15 bp, Homo sapiens
tcacatgaggggaaa

SEQ ID NO: 1682788 - DNA, 15 bp, Homo sapiens
cacatgaggggaaat

SEQ ID NO: 1682789 - DNA, 15 bp, Homo sapiens
acatgaggggaaata

SEQ ID NO: 1682790 - DNA, 15 bp, Homo sapiens
catgaggggaaataa

SEQ ID NO: 1682791 - DNA, 15 bp, Homo sapiens
atgaggggaaataat

SEQ ID NO: 1682792 - DNA, 15 bp, Homo sapiens
tgaggggaaataatt

SEQ ID NO: 1682793 - DNA, 15 bp, Homo sapiens
gaggggaaataatta

SEQ ID NO: 1682794 - DNA, 15 bp, Homo sapiens
aggggaaataattag

SEQ ID NO: 1682795 - DNA, 15 bp, Homo sapiens
ggggaaataattagc

SEQ ID NO: 1682796 - DNA, 15 bp, Homo sapiens
gggaaataattagca

SEQ ID NO: 1682797 - DNA, 15 bp, Homo sapiens
ggaaataattagcaa

SEQ ID NO: 1682798 - DNA, 15 bp, Homo sapiens
gaaataattagcaag

SEQ ID NO: 1682799 - DNA, 15 bp, Homo sapiens
aaataattagcaagt

SEQ ID NO: 1682800 - DNA, 15 bp, Homo sapiens
aataattagcaagta

SEQ ID NO: 1682801 - DNA, 15 bp, Homo sapiens
ataattagcaagtat

SEQ ID NO: 1682802 - DNA, 15 bp, Homo sapiens
taattagcaagtatc

SEQ ID NO: 1682803 - DNA, 15 bp, Homo sapiens
aattagcaagtatca

SEQ ID NO: 1682804 - DNA, 15 bp, Homo sapiens
attagcaagtatcac

SEQ ID NO: 1682805 - DNA, 15 bp, Homo sapiens
ttagcaagtatcact

SEQ ID NO: 1682806 - DNA, 15 bp, Homo sapiens
tagcaagtatcacta

SEQ ID NO: 1682807 - DNA, 15 bp, Homo sapiens
agcaagtatcactac

SEQ ID NO: 1682808 - DNA, 15 bp, Homo sapiens
gcaagtatcactacc

SEQ ID NO: 1682809 - DNA, 15 bp, Homo sapiens
caagtatcactacct

SEQ ID NO: 1682810 - DNA, 15 bp, Homo sapiens
aagtatcactacctt

SEQ ID NO: 1682811 - DNA, 15 bp, Homo sapiens
agtatcactacctta

SEQ ID NO: 1682812 - DNA, 15 bp, Homo sapiens
gtatcactaccttaa

SEQ ID NO: 1682813 - DNA, 15 bp, Homo sapiens
tatcactaccttaac

SEQ ID NO: 1682814 - DNA, 15 bp, Homo sapiens
atcactaccttaacc

SEQ ID NO: 1682815 - DNA, 15 bp, Homo sapiens
tcactaccttaacca

SEQ ID NO: 1682816 - DNA, 15 bp, Homo sapiens
cactaccttaaccaa

SEQ ID NO: 1682817 - DNA, 15 bp, Homo sapiens
actaccttaaccaaa

SEQ ID NO: 1682818 - DNA, 15 bp, Homo sapiens
ctaccttaaccaaat

SEQ ID NO: 1682819 - DNA, 15 bp, Homo sapiens
taccttaaccaaatc

SEQ ID NO: 1682820 - DNA, 15 bp, Homo sapiens
accttaaccaaatca

SEQ ID NO: 1682821 - DNA, 15 bp, Homo sapiens
ccttaaccaaatcat

SEQ ID NO: 1682822 - DNA, 15 bp, Homo sapiens
cttaaccaaatcatc

SEQ ID NO: 1682823 - DNA, 15 bp, Homo sapiens
ttaaccaaatcatcc

SEQ ID NO: 1682824 - DNA, 15 bp, Homo sapiens
taaccaaatcatcca

SEQ ID NO: 1682825 - DNA, 15 bp, Homo sapiens
aaccaaatcatccaa

SEQ ID NO: 1682826 - DNA, 15 bp, Homo sapiens
accaaatcatccaac

SEQ ID NO: 1682827 - DNA, 15 bp, Homo sapiens
ccaaatcatccaaca

SEQ ID NO: 1682828 - DNA, 15 bp, Homo sapiens
caaatcatccaacaa

SEQ ID NO: 1682829 - DNA, 15 bp, Homo sapiens
aaatcatccaacaag

SEQ ID NO: 1682830 - DNA, 15 bp, Homo sapiens
aatcatccaacaagt

SEQ ID NO: 1682831 - DNA, 15 bp, Homo sapiens
atcatccaacaagta

SEQ ID NO: 1682832 - DNA, 15 bp, Homo sapiens
tcatccaacaagtaa

SEQ ID NO: 1682833 - DNA, 15 bp, Homo sapiens
catccaacaagtaag

SEQ ID NO: 1682834 - DNA, 15 bp, Homo sapiens
atccaacaagtaagt

SEQ ID NO: 1682835 - DNA, 15 bp, Homo sapiens
tccaacaagtaagtg

SEQ ID NO: 1682836 - DNA, 15 bp, Homo sapiens
ccaacaagtaagtgg

SEQ ID NO: 1682837 - DNA, 15 bp, Homo sapiens
caacaagtaagtggc

SEQ ID NO: 1682838 - DNA, 15 bp, Homo sapiens
aacaagtaagtggca

SEQ ID NO: 1682839 - DNA, 15 bp, Homo sapiens
acaagtaagtggcaa

SEQ ID NO: 1682840 - DNA, 15 bp, Homo sapiens
caagtaagtggcaaa

SEQ ID NO: 1682841 - DNA, 15 bp, Homo sapiens
aagtaagtggcaaaa

SEQ ID NO: 1682842 - DNA, 15 bp, Homo sapiens
aagtggcaaaaccag

SEQ ID NO: 1682843 - DNA, 15 bp, Homo sapiens
agtggcaaaaccagg

SEQ ID NO: 1682844 - DNA, 15 bp, Homo sapiens
gtggcaaaaccagga

SEQ ID NO: 1682845 - DNA, 15 bp, Homo sapiens
tggcaaaaccaggat

SEQ ID NO: 1682846 - DNA, 15 bp, Homo sapiens
ggcaaaaccaggatc

SEQ ID NO: 1682847 - DNA, 15 bp, Homo sapiens
gcaaaaccaggatct

SEQ ID NO: 1682848 - DNA, 15 bp, Homo sapiens
caaaaccaggatcta

SEQ ID NO: 1682849 - DNA, 15 bp, Homo sapiens
aaaaccaggatctaa

SEQ ID NO: 1682850 - DNA, 15 bp, Homo sapiens
aaaccaggatctaaa

SEQ ID NO: 1682851 - DNA, 15 bp, Homo sapiens
aaccaggatctaaag

SEQ ID NO: 1682852 - DNA, 15 bp, Homo sapiens
accaggatctaaagc

SEQ ID NO: 1682853 - DNA, 15 bp, Homo sapiens
ccaggatctaaagcc

SEQ ID NO: 1682854 - DNA, 15 bp, Homo sapiens
caggatctaaagcca

SEQ ID NO: 1682855 - DNA, 15 bp, Homo sapiens
aggatctaaagccag

SEQ ID NO: 1682856 - DNA, 15 bp, Homo sapiens
ggatctaaagccagt

SEQ ID NO: 1682857 - DNA, 15 bp, Homo sapiens
gatctaaagccagtt

SEQ ID NO: 1682858 - DNA, 15 bp, Homo sapiens
atctaaagccagttc

SEQ ID NO: 1682859 - DNA, 15 bp, Homo sapiens
tctaaagccagttct

SEQ ID NO: 1682860 - DNA, 15 bp, Homo sapiens
ctaaagccagttctt

SEQ ID NO: 1682861 - DNA, 15 bp, Homo sapiens
taaagccagttcttt

SEQ ID NO: 1682862 - DNA, 15 bp, Homo sapiens
aaagccagttctttg

SEQ ID NO: 1682863 - DNA, 15 bp, Homo sapiens
aagccagttctttgt

SEQ ID NO: 1682864 - DNA, 15 bp, Homo sapiens
agccagttctttgtg

SEQ ID NO: 1682865 - DNA, 15 bp, Homo sapiens
gccagttctttgtga

SEQ ID NO: 1682866 - DNA, 15 bp, Homo sapiens
ccagttctttgtgac

SEQ ID NO: 1682867 - DNA, 15 bp, Homo sapiens
cagttctttgtgact

SEQ ID NO: 1682868 - DNA, 15 bp, Homo sapiens
agttctttgtgactt

SEQ ID NO: 1682869 - DNA, 15 bp, Homo sapiens
gttctttgtgacttc

SEQ ID NO: 1682870 - DNA, 15 bp, Homo sapiens
ttctttgtgacttca

SEQ ID NO: 1682871 - DNA, 15 bp, Homo sapiens
tctttgtgacttcac

SEQ ID NO: 1682872 - DNA, 15 bp, Homo sapiens
ctttgtgacttcaca

SEQ ID NO: 1682873 - DNA, 15 bp, Homo sapiens
tttgtgacttcacaa

SEQ ID NO: 1682874 - DNA, 15 bp, Homo sapiens
ttgtgacttcacaag

SEQ ID NO: 1682875 - DNA, 15 bp, Homo sapiens
tgtgacttcacaagc

SEQ ID NO: 1682876 - DNA, 15 bp, Homo sapiens
gtgacttcacaagcc

SEQ ID NO: 1682877 - DNA, 15 bp, Homo sapiens
tgacttcacaagcct

SEQ ID NO: 1682878 - DNA, 15 bp, Homo sapiens
gacttcacaagcctg

SEQ ID NO: 1682879 - DNA, 15 bp, Homo sapiens
acttcacaagcctgt

SEQ ID NO: 1682880 - DNA, 15 bp, Homo sapiens
cttcacaagcctgtg

SEQ ID NO: 1682881 - DNA, 15 bp, Homo sapiens
ttcacaagcctgtgc

SEQ ID NO: 1682882 - DNA, 15 bp, Homo sapiens
tcacaagcctgtgct

SEQ ID NO: 1682883 - DNA, 15 bp, Homo sapiens
cacaagcctgtgctc

SEQ ID NO: 1682884 - DNA, 15 bp, Homo sapiens
acaagcctgtgctct

SEQ ID NO: 1682885 - DNA, 15 bp, Homo sapiens
caagcctgtgctctt

SEQ ID NO: 1682886 - DNA, 15 bp, Homo sapiens
aagcctgtgctcttt

SEQ ID NO: 1682887 - DNA, 15 bp, Homo sapiens
agcctgtgctctttt

SEQ ID NO: 1682888 - DNA, 15 bp, Homo sapiens
gcctgtgctcttttc

SEQ ID NO: 1682889 - DNA, 15 bp, Homo sapiens
cctgtgctcttttca

SEQ ID NO: 1682890 - DNA, 15 bp, Homo sapiens
ctgtgctcttttcac

SEQ ID NO: 1682891 - DNA, 15 bp, Homo sapiens
tgtgctcttttcact

SEQ ID NO: 1682892 - DNA, 15 bp, Homo sapiens
gtgctcttttcacta

SEQ ID NO: 1682893 - DNA, 15 bp, Homo sapiens
tgctcttttcactat

SEQ ID NO: 1682894 - DNA, 15 bp, Homo sapiens
gctcttttcactata

SEQ ID NO: 1682895 - DNA, 15 bp, Homo sapiens
ctcttttcactatac

SEQ ID NO: 1682896 - DNA, 15 bp, Homo sapiens
tcttttcactatacc

SEQ ID NO: 1682897 - DNA, 15 bp, Homo sapiens
cttttcactatacca

SEQ ID NO: 1682898 - DNA, 15 bp, Homo sapiens
ttttcactataccat

SEQ ID NO: 1682899 - DNA, 15 bp, Homo sapiens
tttcactataccatt

SEQ ID NO: 1682900 - DNA, 15 bp, Homo sapiens
ttcactataccattc

SEQ ID NO: 1682901 - DNA, 15 bp, Homo sapiens
tcactataccattct

SEQ ID NO: 1682902 - DNA, 15 bp, Homo sapiens
cactataccattctg

SEQ ID NO: 1682903 - DNA, 15 bp, Homo sapiens
actataccattctgc

SEQ ID NO: 1682904 - DNA, 15 bp, Homo sapiens
ctataccattctgcc

SEQ ID NO: 1682905 - DNA, 15 bp, Homo sapiens
tataccattctgcct

SEQ ID NO: 1682906 - DNA, 15 bp, Homo sapiens
ataccattctgcctc

SEQ ID NO: 1682907 - DNA, 15 bp, Homo sapiens
taccattctgcctcc

SEQ ID NO: 1682908 - DNA, 15 bp, Homo sapiens
accattctgcctccc

SEQ ID NO: 1682909 - DNA, 15 bp, Homo sapiens
ccattctgcctccct

SEQ ID NO: 1682910 - DNA, 15 bp, Homo sapiens
cattctgcctccctc

SEQ ID NO: 1682911 - DNA, 15 bp, Homo sapiens
attctgcctccctct

SEQ ID NO: 1682912 - DNA, 15 bp, Homo sapiens
ttctgcctccctctg

SEQ ID NO: 1682913 - DNA, 15 bp, Homo sapiens
tctgcctccctctgc

SEQ ID NO: 1682914 - DNA, 15 bp, Homo sapiens
ctgcctccctctgca

SEQ ID NO: 1682915 - DNA, 15 bp, Homo sapiens
tgcctccctctgcag

SEQ ID NO: 1682916 - DNA, 15 bp, Homo sapiens
gcctccctctgcagt

SEQ ID NO: 1682917 - DNA, 15 bp, Homo sapiens
cctccctctgcagtc

SEQ ID NO: 1682918 - DNA, 15 bp, Homo sapiens
ctccctctgcagtca

SEQ ID NO: 1682919 - DNA, 15 bp, Homo sapiens
tccctctgcagtcaa

SEQ ID NO: 1682920 - DNA, 15 bp, Homo sapiens
ccctctgcagtcaac

SEQ ID NO: 1682921 - DNA, 15 bp, Homo sapiens
cctctgcagtcaact

SEQ ID NO: 1682922 - DNA, 15 bp, Homo sapiens
ctctgcagtcaacta

SEQ ID NO: 1682923 - DNA, 15 bp, Homo sapiens
tctgcagtcaactaa

SEQ ID NO: 1682924 - DNA, 15 bp, Homo sapiens
ctgcagtcaactaaa

SEQ ID NO: 1682925 - DNA, 15 bp, Homo sapiens
tgcagtcaactaaac

SEQ ID NO: 1682926 - DNA, 15 bp, Homo sapiens
gcagtcaactaaact

SEQ ID NO: 1682927 - DNA, 15 bp, Homo sapiens
cagtcaactaaacta

SEQ ID NO: 1682928 - DNA, 15 bp, Homo sapiens
agtcaactaaactac

SEQ ID NO: 1682929 - DNA, 15 bp, Homo sapiens
gtcaactaaactaca

SEQ ID NO: 1682930 - DNA, 15 bp, Homo sapiens
tcaactaaactacag

SEQ ID NO: 1682931 - DNA, 15 bp, Homo sapiens
caactaaactacaga

SEQ ID NO: 1682932 - DNA, 15 bp, Homo sapiens
aactaaactacagaa

SEQ ID NO: 1682933 - DNA, 15 bp, Homo sapiens
actaaactacagaaa

SEQ ID NO: 1682934 - DNA, 15 bp, Homo sapiens
ctaaactacagaaat

SEQ ID NO: 1682935 - DNA, 15 bp, Homo sapiens
taaactacagaaatt

SEQ ID NO: 1682936 - DNA, 15 bp, Homo sapiens
aaactacagaaattg

SEQ ID NO: 1682937 - DNA, 15 bp, Homo sapiens
aactacagaaattgt

SEQ ID NO: 1682938 - DNA, 15 bp, Homo sapiens
actacagaaattgtg

SEQ ID NO: 1682939 - DNA, 15 bp, Homo sapiens
ctacagaaattgtgt

SEQ ID NO: 1682940 - DNA, 15 bp, Homo sapiens
tacagaaattgtgtc

SEQ ID NO: 1682941 - DNA, 15 bp, Homo sapiens
acagaaattgtgtcc

SEQ ID NO: 1682942 - DNA, 15 bp, Homo sapiens
cagaaattgtgtcct

SEQ ID NO: 1682943 - DNA, 15 bp, Homo sapiens
agaaattgtgtcctt

SEQ ID NO: 1682944 - DNA, 15 bp, Homo sapiens
aaattgtgtccttcc

SEQ ID NO: 1682945 - DNA, 15 bp, Homo sapiens
aattgtgtccttcca

SEQ ID NO: 1682946 - DNA, 15 bp, Homo sapiens
attgtgtccttccac

SEQ ID NO: 1682947 - DNA, 15 bp, Homo sapiens
ttgtgtccttccaca

SEQ ID NO: 1682948 - DNA, 15 bp, Homo sapiens
tgtgtccttccacac

SEQ ID NO: 1682949 - DNA, 15 bp, Homo sapiens
gtgtccttccacaca

SEQ ID NO: 1682950 - DNA, 15 bp, Homo sapiens
tgtccttccacacag

SEQ ID NO: 1682951 - DNA, 15 bp, Homo sapiens
gtccttccacacagc

SEQ ID NO: 1682952 - DNA, 15 bp, Homo sapiens
tccttccacacagct

SEQ ID NO: 1682953 - DNA, 15 bp, Homo sapiens
ccttccacacagctt

SEQ ID NO: 1682954 - DNA, 15 bp, Homo sapiens
cttccacacagcttg

SEQ ID NO: 1682955 - DNA, 15 bp, Homo sapiens
ttccacacagcttgc

SEQ ID NO: 1682956 - DNA, 15 bp, Homo sapiens
tccacacagcttgct

SEQ ID NO: 1682957 - DNA, 15 bp, Homo sapiens
ccacacagcttgctt

SEQ ID NO: 1682958 - DNA, 15 bp, Homo sapiens
cacacagcttgcttt

SEQ ID NO: 1682959 - DNA, 15 bp, Homo sapiens
acacagcttgcttta

SEQ ID NO: 1682960 - DNA, 15 bp, Homo sapiens
cacagcttgctttaa

SEQ ID NO: 1682961 - DNA, 15 bp, Homo sapiens
acagcttgctttaaa

SEQ ID NO: 1682962 - DNA, 15 bp, Homo sapiens
cagcttgctttaaaa

SEQ ID NO: 1682963 - DNA, 15 bp, Homo sapiens
agcttgctttaaaaa

SEQ ID NO: 1682964 - DNA, 15 bp, Homo sapiens
gcttgctttaaaaat

SEQ ID NO: 1682965 - DNA, 15 bp, Homo sapiens
cttgctttaaaaata

SEQ ID NO: 1682966 - DNA, 15 bp, Homo sapiens
ttgctttaaaaatac

SEQ ID NO: 1682967 - DNA, 15 bp, Homo sapiens
tgctttaaaaataca

SEQ ID NO: 1682968 - DNA, 15 bp, Homo sapiens
gctttaaaaatacat

SEQ ID NO: 1682969 - DNA, 15 bp, Homo sapiens
ctttaaaaatacata

SEQ ID NO: 1682970 - DNA, 15 bp, Homo sapiens
tttaaaaatacataa

SEQ ID NO: 1682971 - DNA, 15 bp, Homo sapiens
ttaaaaatacataag

SEQ ID NO: 1682972 - DNA, 15 bp, Homo sapiens
taaaaatacataagc

SEQ ID NO: 1682973 - DNA, 15 bp, Homo sapiens
aaaaatacataagct

SEQ ID NO: 1682974 - DNA, 15 bp, Homo sapiens
aaaatacataagcta

SEQ ID NO: 1682975 - DNA, 15 bp, Homo sapiens
aaatacataagctac

SEQ ID NO: 1682976 - DNA, 15 bp, Homo sapiens
aatacataagctacc

SEQ ID NO: 1682977 - DNA, 15 bp, Homo sapiens
atacataagctacct

SEQ ID NO: 1682978 - DNA, 15 bp, Homo sapiens
tacataagctaccta

SEQ ID NO: 1682979 - DNA, 15 bp, Homo sapiens
acataagctacctaa

SEQ ID NO: 1682980 - DNA, 15 bp, Homo sapiens
cataagctacctaag

SEQ ID NO: 1682981 - DNA, 15 bp, Homo sapiens
ataagctacctaaga

SEQ ID NO: 1682982 - DNA, 15 bp, Homo sapiens
taagctacctaagaa

SEQ ID NO: 1682983 - DNA, 15 bp, Homo sapiens
aagctacctaagaaa

SEQ ID NO: 1682984 - DNA, 15 bp, Homo sapiens
agctacctaagaaag

SEQ ID NO: 1682985 - DNA, 15 bp, Homo sapiens
gctacctaagaaagc

SEQ ID NO: 1682986 - DNA, 15 bp, Homo sapiens
ctacctaagaaagct

SEQ ID NO: 1682987 - DNA, 15 bp, Homo sapiens
tacctaagaaagctc

SEQ ID NO: 1682988 - DNA, 15 bp, Homo sapiens
acctaagaaagctct

SEQ ID NO: 1682989 - DNA, 15 bp, Homo sapiens
cctaagaaagctcta

SEQ ID NO: 1682990 - DNA, 15 bp, Homo sapiens
ctaagaaagctctaa

SEQ ID NO: 1682991 - DNA, 15 bp, Homo sapiens
taagaaagctctaat

SEQ ID NO: 1682992 - DNA, 15 bp, Homo sapiens
aagaaagctctaatt

SEQ ID NO: 1682993 - DNA, 15 bp, Homo sapiens
agaaagctctaattt

SEQ ID NO: 1682994 - DNA, 15 bp, Homo sapiens
gaaagctctaattta

SEQ ID NO: 1682995 - DNA, 15 bp, Homo sapiens
aaagctctaatttag

SEQ ID NO: 1682996 - DNA, 15 bp, Homo sapiens
aagctctaatttaga

SEQ ID NO: 1682997 - DNA, 15 bp, Homo sapiens
agctctaatttagac

SEQ ID NO: 1682998 - DNA, 15 bp, Homo sapiens
gctctaatttagaca

SEQ ID NO: 1682999 - DNA, 15 bp, Homo sapiens
ctctaatttagacat

SEQ ID NO: 1683000 - DNA, 15 bp, Homo sapiens
tctaatttagacatt

SEQ ID NO: 1683001 - DNA, 15 bp, Homo sapiens
ctaatttagacattt

SEQ ID NO: 1683002 - DNA, 15 bp, Homo sapiens
taatttagacatttt

SEQ ID NO: 1683003 - DNA, 15 bp, Homo sapiens
aatttagacattttt

SEQ ID NO: 1683004 - DNA, 15 bp, Homo sapiens
atttagacatttttc

SEQ ID NO: 1683005 - DNA, 15 bp, Homo sapiens
tttagacatttttct

SEQ ID NO: 1683006 - DNA, 15 bp, Homo sapiens
ttagacatttttctc

SEQ ID NO: 1683007 - DNA, 15 bp, Homo sapiens
tagacatttttctct

SEQ ID NO: 1683008 - DNA, 15 bp, Homo sapiens
agacatttttctctc

SEQ ID NO: 1683009 - DNA, 15 bp, Homo sapiens
gacatttttctctct

SEQ ID NO: 1683010 - DNA, 15 bp, Homo sapiens
acatttttctctctg

SEQ ID NO: 1683011 - DNA, 15 bp, Homo sapiens
catttttctctctgc

SEQ ID NO: 1683012 - DNA, 15 bp, Homo sapiens
atttttctctctgct

SEQ ID NO: 1683013 - DNA, 15 bp, Homo sapiens
tttttctctctgcta

SEQ ID NO: 1683014 - DNA, 15 bp, Homo sapiens
ttttctctctgctag

SEQ ID NO: 1683015 - DNA, 15 bp, Homo sapiens
tttctctctgctagt

SEQ ID NO: 1683016 - DNA, 15 bp, Homo sapiens
ttctctctgctagtc

SEQ ID NO: 1683017 - DNA, 15 bp, Homo sapiens
tctctctgctagtct

SEQ ID NO: 1683018 - DNA, 15 bp, Homo sapiens
ctctctgctagtctc

SEQ ID NO: 1683019 - DNA, 15 bp, Homo sapiens
tctctgctagtctct

SEQ ID NO: 1683020 - DNA, 15 bp, Homo sapiens
ctctgctagtctcta

SEQ ID NO: 1683021 - DNA, 15 bp, Homo sapiens
tctgctagtctctat

SEQ ID NO: 1683022 - DNA, 15 bp, Homo sapiens
ctgctagtctctatg

SEQ ID NO: 1683023 - DNA, 15 bp, Homo sapiens
tgctagtctctatgc

SEQ ID NO: 1683024 - DNA, 15 bp, Homo sapiens
gctagtctctatgcc

SEQ ID NO: 1683025 - DNA, 15 bp, Homo sapiens
ctagtctctatgcca

SEQ ID NO: 1683026 - DNA, 15 bp, Homo sapiens
tagtctctatgccac

SEQ ID NO: 1683027 - DNA, 15 bp, Homo sapiens
agtctctatgccaca

SEQ ID NO: 1683028 - DNA, 15 bp, Homo sapiens
gtctctatgccacaa

SEQ ID NO: 1683029 - DNA, 15 bp, Homo sapiens
tctctatgccacaaa

SEQ ID NO: 1683030 - DNA, 15 bp, Homo sapiens
ctctatgccacaaaa

SEQ ID NO: 1683031 - DNA, 15 bp, Homo sapiens
tctatgccacaaaaa

SEQ ID NO: 1683032 - DNA, 15 bp, Homo sapiens
ctatgccacaaaaaa

SEQ ID NO: 1683033 - DNA, 15 bp, Homo sapiens
tatgccacaaaaaaa

SEQ ID NO: 1683034 - DNA, 15 bp, Homo sapiens
atgccacaaaaaaac

SEQ ID NO: 1683035 - DNA, 15 bp, Homo sapiens
tgccacaaaaaaaca

SEQ ID NO: 1683036 - DNA, 15 bp, Homo sapiens
gccacaaaaaaacat

SEQ ID NO: 1683037 - DNA, 15 bp, Homo sapiens
ccacaaaaaaacata

SEQ ID NO: 1683038 - DNA, 15 bp, Homo sapiens
cacaaaaaaacatag

SEQ ID NO: 1683039 - DNA, 15 bp, Homo sapiens
acaaaaaaacatagc

SEQ ID NO: 1683040 - DNA, 15 bp, Homo sapiens
caaaaaaacatagcc

SEQ ID NO: 1683041 - DNA, 15 bp, Homo sapiens
aaaaaaacatagcca

SEQ ID NO: 1683042 - DNA, 15 bp, Homo sapiens
aaaaaacatagccaa

SEQ ID NO: 1683043 - DNA, 15 bp, Homo sapiens
aaaaacatagccaat

SEQ ID NO: 1683044 - DNA, 15 bp, Homo sapiens
aaaacatagccaatt

SEQ ID NO: 1683045 - DNA, 15 bp, Homo sapiens
aaacatagccaatta

SEQ ID NO: 1683046 - DNA, 15 bp, Homo sapiens
aacatagccaattat

SEQ ID NO: 1683047 - DNA, 15 bp, Homo sapiens
acatagccaattata

SEQ ID NO: 1683048 - DNA, 15 bp, Homo sapiens
catagccaattatat

SEQ ID NO: 1683049 - DNA, 15 bp, Homo sapiens
atagccaattatatt

SEQ ID NO: 1683050 - DNA, 15 bp, Homo sapiens
tagccaattatattg

SEQ ID NO: 1683051 - DNA, 15 bp, Homo sapiens
agccaattatattgt

SEQ ID NO: 1683052 - DNA, 15 bp, Homo sapiens
gccaattatattgtg

SEQ ID NO: 1683053 - DNA, 15 bp, Homo sapiens
ccaattatattgtgt

SEQ ID NO: 1683054 - DNA, 15 bp, Homo sapiens
caattatattgtgtt

SEQ ID NO: 1683055 - DNA, 15 bp, Homo sapiens
aattatattgtgtta

SEQ ID NO: 1683056 - DNA, 15 bp, Homo sapiens
attatattgtgttaa

SEQ ID NO: 1683057 - DNA, 15 bp, Homo sapiens
ttatattgtgttaac

SEQ ID NO: 1683058 - DNA, 15 bp, Homo sapiens
tatattgtgttaact

SEQ ID NO: 1683059 - DNA, 15 bp, Homo sapiens
atattgtgttaactg

SEQ ID NO: 1683060 - DNA, 15 bp, Homo sapiens
tattgtgttaactga

SEQ ID NO: 1683061 - DNA, 15 bp, Homo sapiens
attgtgttaactgac

SEQ ID NO: 1683062 - DNA, 15 bp, Homo sapiens
ttgtgttaactgact

SEQ ID NO: 1683063 - DNA, 15 bp, Homo sapiens
tgtgttaactgactc

SEQ ID NO: 1683064 - DNA, 15 bp, Homo sapiens
gtgttaactgactca

SEQ ID NO: 1683065 - DNA, 15 bp, Homo sapiens
tgttaactgactcat

SEQ ID NO: 1683066 - DNA, 15 bp, Homo sapiens
gttaactgactcatg

SEQ ID NO: 1683067 - DNA, 15 bp, Homo sapiens
ttaactgactcatgc

SEQ ID NO: 1683068 - DNA, 15 bp, Homo sapiens
taactgactcatgct

SEQ ID NO: 1683069 - DNA, 15 bp, Homo sapiens
aactgactcatgctg

SEQ ID NO: 1683070 - DNA, 15 bp, Homo sapiens
actgactcatgctgg

SEQ ID NO: 1683071 - DNA, 15 bp, Homo sapiens
ctgactcatgctggc

SEQ ID NO: 1683072 - DNA, 15 bp, Homo sapiens
tgactcatgctggct

SEQ ID NO: 1683073 - DNA, 15 bp, Homo sapiens
gactcatgctggctt

SEQ ID NO: 1683074 - DNA, 15 bp, Homo sapiens
actcatgctggcttt

SEQ ID NO: 1683075 - DNA, 15 bp, Homo sapiens
ctcatgctggcttta

SEQ ID NO: 1683076 - DNA, 15 bp, Homo sapiens
tcatgctggctttac

SEQ ID NO: 1683077 - DNA, 15 bp, Homo sapiens
catgctggctttaca

SEQ ID NO: 1683078 - DNA, 15 bp, Homo sapiens
atgctggctttacac

SEQ ID NO: 1683079 - DNA, 15 bp, Homo sapiens
tgctggctttacaca

SEQ ID NO: 1683080 - DNA, 15 bp, Homo sapiens
gctggctttacacaa

SEQ ID NO: 1683081 - DNA, 15 bp, Homo sapiens
ctggctttacacaat

SEQ ID NO: 1683082 - DNA, 15 bp, Homo sapiens
tggctttacacaatt

SEQ ID NO: 1683083 - DNA, 15 bp, Homo sapiens
ggctttacacaattt

SEQ ID NO: 1683084 - DNA, 15 bp, Homo sapiens
gctttacacaattta

SEQ ID NO: 1683085 - DNA, 15 bp, Homo sapiens
ctttacacaatttat

SEQ ID NO: 1683086 - DNA, 15 bp, Homo sapiens
tttacacaatttata

SEQ ID NO: 1683087 - DNA, 15 bp, Homo sapiens
ttacacaatttatat

SEQ ID NO: 1683088 - DNA, 15 bp, Homo sapiens
tacacaatttatatt

SEQ ID NO: 1683089 - DNA, 15 bp, Homo sapiens
acacaatttatattg

SEQ ID NO: 1683090 - DNA, 15 bp, Homo sapiens
cacaatttatattga

SEQ ID NO: 1683091 - DNA, 15 bp, Homo sapiens
acaatttatattgat

SEQ ID NO: 1683092 - DNA, 15 bp, Homo sapiens
caatttatattgatt

SEQ ID NO: 1683093 - DNA, 15 bp, Homo sapiens
aatttatattgattt

SEQ ID NO: 1683094 - DNA, 15 bp, Homo sapiens
atttatattgatttt

SEQ ID NO: 1683095 - DNA, 15 bp, Homo sapiens
tttatattgattttc

SEQ ID NO: 1683096 - DNA, 15 bp, Homo sapiens
ttatattgattttca

SEQ ID NO: 1683097 - DNA, 15 bp, Homo sapiens
tatattgattttcag

SEQ ID NO: 1683098 - DNA, 15 bp, Homo sapiens
atattgattttcagg

SEQ ID NO: 1683099 - DNA, 15 bp, Homo sapiens
tattgattttcaggg

SEQ ID NO: 1683100 - DNA, 15 bp, Homo sapiens
attgattttcagggt

SEQ ID NO: 1683101 - DNA, 15 bp, Homo sapiens
ttgattttcagggtg

SEQ ID NO: 1683102 - DNA, 15 bp, Homo sapiens
tgattttcagggtgg

SEQ ID NO: 1683103 - DNA, 15 bp, Homo sapiens
gattttcagggtggt

SEQ ID NO: 1683104 - DNA, 15 bp, Homo sapiens
attttcagggtggta

SEQ ID NO: 1683105 - DNA, 15 bp, Homo sapiens
ttttcagggtggtaa

SEQ ID NO: 1683106 - DNA, 15 bp, Homo sapiens
tttcagggtggtaat

SEQ ID NO: 1683107 - DNA, 15 bp, Homo sapiens
ttcagggtggtaata

SEQ ID NO: 1683108 - DNA, 15 bp, Homo sapiens
tcagggtggtaataa

SEQ ID NO: 1683109 - DNA, 15 bp, Homo sapiens
cagggtggtaataac

SEQ ID NO: 1683110 - DNA, 15 bp, Homo sapiens
agggtggtaataacc

SEQ ID NO: 1683111 - DNA, 15 bp, Homo sapiens
gggtggtaataacca

SEQ ID NO: 1683112 - DNA, 15 bp, Homo sapiens
ggtggtaataaccag

SEQ ID NO: 1683113 - DNA, 15 bp, Homo sapiens
gtggtaataaccagc

SEQ ID NO: 1683114 - DNA, 15 bp, Homo sapiens
tggtaataaccagct

SEQ ID NO: 1683115 - DNA, 15 bp, Homo sapiens
ggtaataaccagctt

SEQ ID NO: 1683116 - DNA, 15 bp, Homo sapiens
gtaataaccagcttc

SEQ ID NO: 1683117 - DNA, 15 bp, Homo sapiens
taataaccagcttct

SEQ ID NO: 1683118 - DNA, 15 bp, Homo sapiens
aataaccagcttctg

SEQ ID NO: 1683119 - DNA, 15 bp, Homo sapiens
ataaccagcttctgt

SEQ ID NO: 1683120 - DNA, 15 bp, Homo sapiens
taaccagcttctgtg

SEQ ID NO: 1683121 - DNA, 15 bp, Homo sapiens
aaccagcttctgtga

SEQ ID NO: 1683122 - DNA, 15 bp, Homo sapiens
accagcttctgtgat

SEQ ID NO: 1683123 - DNA, 15 bp, Homo sapiens
ccagcttctgtgatt

SEQ ID NO: 1683124 - DNA, 15 bp, Homo sapiens
cagcttctgtgattg

SEQ ID NO: 1683125 - DNA, 15 bp, Homo sapiens
agcttctgtgattgg

SEQ ID NO: 1683126 - DNA, 15 bp, Homo sapiens
gcttctgtgattggt

SEQ ID NO: 1683127 - DNA, 15 bp, Homo sapiens
cttctgtgattggtg

SEQ ID NO: 1683128 - DNA, 15 bp, Homo sapiens
ttctgtgattggtgt

SEQ ID NO: 1683129 - DNA, 15 bp, Homo sapiens
tctgtgattggtgtg

SEQ ID NO: 1683130 - DNA, 15 bp, Homo sapiens
ctgtgattggtgtgc

SEQ ID NO: 1683131 - DNA, 15 bp, Homo sapiens
tgtgattggtgtgca

SEQ ID NO: 1683132 - DNA, 15 bp, Homo sapiens
gtgattggtgtgcat

SEQ ID NO: 1683133 - DNA, 15 bp, Homo sapiens
tgattggtgtgcatg

SEQ ID NO: 1683134 - DNA, 15 bp, Homo sapiens
gattggtgtgcatgt

SEQ ID NO: 1683135 - DNA, 15 bp, Homo sapiens
attggtgtgcatgtg

SEQ ID NO: 1683136 - DNA, 15 bp, Homo sapiens
ttggtgtgcatgtgc

SEQ ID NO: 1683137 - DNA, 15 bp, Homo sapiens
tggtgtgcatgtgca

SEQ ID NO: 1683138 - DNA, 15 bp, Homo sapiens
ggtgtgcatgtgcaa

SEQ ID NO: 1683139 - DNA, 15 bp, Homo sapiens
gtgtgcatgtgcaag

SEQ ID NO: 1683140 - DNA, 15 bp, Homo sapiens
tgtgcatgtgcaaga

SEQ ID NO: 1683141 - DNA, 15 bp, Homo sapiens
gtgcatgtgcaagac

SEQ ID NO: 1683142 - DNA, 15 bp, Homo sapiens
tgcatgtgcaagact

SEQ ID NO: 1683143 - DNA, 15 bp, Homo sapiens
gcatgtgcaagactt

SEQ ID NO: 1683144 - DNA, 15 bp, Homo sapiens
catgtgcaagacttc

SEQ ID NO: 1683145 - DNA, 15 bp, Homo sapiens
atgtgcaagacttcc

SEQ ID NO: 1683146 - DNA, 15 bp, Homo sapiens
tgtgcaagacttcct

SEQ ID NO: 1683147 - DNA, 15 bp, Homo sapiens
gtgcaagacttcctg

SEQ ID NO: 1683148 - DNA, 15 bp, Homo sapiens
tgcaagacttcctgc

SEQ ID NO: 1683149 - DNA, 15 bp, Homo sapiens
gcaagacttcctgcc

SEQ ID NO: 1683150 - DNA, 15 bp, Homo sapiens
caagacttcctgcct

SEQ ID NO: 1683151 - DNA, 15 bp, Homo sapiens
aagacttcctgccta

SEQ ID NO: 1683152 - DNA, 15 bp, Homo sapiens
agacttcctgcctaa

SEQ ID NO: 1683153 - DNA, 15 bp, Homo sapiens
gacttcctgcctaac

SEQ ID NO: 1683154 - DNA, 15 bp, Homo sapiens
acttcctgcctaacc

SEQ ID NO: 1683155 - DNA, 15 bp, Homo sapiens
cttcctgcctaaccc

SEQ ID NO: 1683156 - DNA, 15 bp, Homo sapiens
ttcctgcctaaccca

SEQ ID NO: 1683157 - DNA, 15 bp, Homo sapiens
tcctgcctaacccat

SEQ ID NO: 1683158 - DNA, 15 bp, Homo sapiens
cctgcctaacccatc

SEQ ID NO: 1683159 - DNA, 15 bp, Homo sapiens
ctgcctaacccatcc

SEQ ID NO: 1683160 - DNA, 15 bp, Homo sapiens
tgcctaacccatcct

SEQ ID NO: 1683161 - DNA, 15 bp, Homo sapiens
gcctaacccatcctt

SEQ ID NO: 1683162 - DNA, 15 bp, Homo sapiens
cctaacccatccttc

SEQ ID NO: 1683163 - DNA, 15 bp, Homo sapiens
ctaacccatccttct

SEQ ID NO: 1683164 - DNA, 15 bp, Homo sapiens
taacccatccttctt

SEQ ID NO: 1683165 - DNA, 15 bp, Homo sapiens
aacccatccttcttg

SEQ ID NO: 1683166 - DNA, 15 bp, Homo sapiens
acccatccttcttgt

SEQ ID NO: 1683167 - DNA, 15 bp, Homo sapiens
cccatccttcttgtg

SEQ ID NO: 1683168 - DNA, 15 bp, Homo sapiens
ccatccttcttgtgg

SEQ ID NO: 1683169 - DNA, 15 bp, Homo sapiens
catccttcttgtggc

SEQ ID NO: 1683170 - DNA, 15 bp, Homo sapiens
atccttcttgtggct

SEQ ID NO: 1683171 - DNA, 15 bp, Homo sapiens
tccttcttgtggctc

SEQ ID NO: 1683172 - DNA, 15 bp, Homo sapiens
ccttcttgtggctca

SEQ ID NO: 1683173 - DNA, 15 bp, Homo sapiens
cttcttgtggctcag

SEQ ID NO: 1683174 - DNA, 15 bp, Homo sapiens
ttcttgtggctcagc

SEQ ID NO: 1683175 - DNA, 15 bp, Homo sapiens
tcttgtggctcagct

SEQ ID NO: 1683176 - DNA, 15 bp, Homo sapiens
cttgtggctcagctt

SEQ ID NO: 1683177 - DNA, 15 bp, Homo sapiens
ttgtggctcagcttt

SEQ ID NO: 1683178 - DNA, 15 bp, Homo sapiens
tgtggctcagctttg

SEQ ID NO: 1683179 - DNA, 15 bp, Homo sapiens
gtggctcagctttgt

SEQ ID NO: 1683180 - DNA, 15 bp, Homo sapiens
tggctcagctttgta

SEQ ID NO: 1683181 - DNA, 15 bp, Homo sapiens
ggctcagctttgtaa

SEQ ID NO: 1683182 - DNA, 15 bp, Homo sapiens
gctcagctttgtaaa

SEQ ID NO: 1683183 - DNA, 15 bp, Homo sapiens
ctcagctttgtaaac

SEQ ID NO: 1683184 - DNA, 15 bp, Homo sapiens
tcagctttgtaaaca

SEQ ID NO: 1683185 - DNA, 15 bp, Homo sapiens
cagctttgtaaacac

SEQ ID NO: 1683186 - DNA, 15 bp, Homo sapiens
agctttgtaaacact

SEQ ID NO: 1683187 - DNA, 15 bp, Homo sapiens
gctttgtaaacactg

SEQ ID NO: 1683188 - DNA, 15 bp, Homo sapiens
ctttgtaaacactgg

SEQ ID NO: 1683189 - DNA, 15 bp, Homo sapiens
tttgtaaacactggc

SEQ ID NO: 1683190 - DNA, 15 bp, Homo sapiens
ttgtaaacactggcc

SEQ ID NO: 1683191 - DNA, 15 bp, Homo sapiens
tgtaaacactggccc

SEQ ID NO: 1683192 - DNA, 15 bp, Homo sapiens
gtaaacactggccct

SEQ ID NO: 1683193 - DNA, 15 bp, Homo sapiens
taaacactggccctg

SEQ ID NO: 1683194 - DNA, 15 bp, Homo sapiens
aaacactggccctgg

SEQ ID NO: 1683195 - DNA, 15 bp, Homo sapiens
aacactggccctggg

SEQ ID NO: 1683196 - DNA, 15 bp, Homo sapiens
acactggccctgggt

SEQ ID NO: 1683197 - DNA, 15 bp, Homo sapiens
cactggccctgggtg

SEQ ID NO: 1683198 - DNA, 15 bp, Homo sapiens
actggccctgggtgg

SEQ ID NO: 1683199 - DNA, 15 bp, Homo sapiens
ctggccctgggtggc

SEQ ID NO: 1683200 - DNA, 15 bp, Homo sapiens
tggccctgggtggcc

SEQ ID NO: 1683201 - DNA, 15 bp, Homo sapiens
ggccctgggtggccg

SEQ ID NO: 1683202 - DNA, 15 bp, Homo sapiens
gccctgggtggccgt

SEQ ID NO: 1683203 - DNA, 15 bp, Homo sapiens
ccctgggtggccgtg

SEQ ID NO: 1683204 - DNA, 15 bp, Homo sapiens
cctgggtggccgtga

SEQ ID NO: 1683205 - DNA, 15 bp, Homo sapiens
ctgggtggccgtgaa

SEQ ID NO: 1683206 - DNA, 15 bp, Homo sapiens
tgggtggccgtgaac

SEQ ID NO: 1683207 - DNA, 15 bp, Homo sapiens
gggtggccgtgaaca

SEQ ID NO: 1683208 - DNA, 15 bp, Homo sapiens
ggtggccgtgaacag

SEQ ID NO: 1683209 - DNA, 15 bp, Homo sapiens
gtggccgtgaacaga

SEQ ID NO: 1683210 - DNA, 15 bp, Homo sapiens
tggccgtgaacagaa

SEQ ID NO: 1683211 - DNA, 15 bp, Homo sapiens
ggccgtgaacagaag

SEQ ID NO: 1683212 - DNA, 15 bp, Homo sapiens
gccgtgaacagaagt

SEQ ID NO: 1683213 - DNA, 15 bp, Homo sapiens
ccgtgaacagaagtt

SEQ ID NO: 1683214 - DNA, 15 bp, Homo sapiens
cgtgaacagaagttc

SEQ ID NO: 1683215 - DNA, 15 bp, Homo sapiens
gtgaacagaagttct

SEQ ID NO: 1683216 - DNA, 15 bp, Homo sapiens
tgaacagaagttctt

SEQ ID NO: 1683217 - DNA, 15 bp, Homo sapiens
gaacagaagttctta

SEQ ID NO: 1683218 - DNA, 15 bp, Homo sapiens
aacagaagttcttat

SEQ ID NO: 1683219 - DNA, 15 bp, Homo sapiens
acagaagttcttatc

SEQ ID NO: 1683220 - DNA, 15 bp, Homo sapiens
cagaagttcttatct

SEQ ID NO: 1683221 - DNA, 15 bp, Homo sapiens
agaagttcttatctt

SEQ ID NO: 1683222 - DNA, 15 bp, Homo sapiens
gaagttcttatctta

SEQ ID NO: 1683223 - DNA, 15 bp, Homo sapiens
aagttcttatcttag

SEQ ID NO: 1683224 - DNA, 15 bp, Homo sapiens
agttcttatcttaga

SEQ ID NO: 1683225 - DNA, 15 bp, Homo sapiens
gttcttatcttagac

SEQ ID NO: 1683226 - DNA, 15 bp, Homo sapiens
ttcttatcttagact

SEQ ID NO: 1683227 - DNA, 15 bp, Homo sapiens
tcttatcttagactg

SEQ ID NO: 1683228 - DNA, 15 bp, Homo sapiens
cttatcttagactgc

SEQ ID NO: 1683229 - DNA, 15 bp, Homo sapiens
ttatcttagactgca

SEQ ID NO: 1683230 - DNA, 15 bp, Homo sapiens
tatcttagactgcat

SEQ ID NO: 1683231 - DNA, 15 bp, Homo sapiens
atcttagactgcatg

SEQ ID NO: 1683232 - DNA, 15 bp, Homo sapiens
tcttagactgcatgc

SEQ ID NO: 1683233 - DNA, 15 bp, Homo sapiens
cttagactgcatgca

SEQ ID NO: 1683234 - DNA, 15 bp, Homo sapiens
ttagactgcatgcaa

SEQ ID NO: 1683235 - DNA, 15 bp, Homo sapiens
tagactgcatgcaac

SEQ ID NO: 1683236 - DNA, 15 bp, Homo sapiens
agactgcatgcaact

SEQ ID NO: 1683237 - DNA, 15 bp, Homo sapiens
gactgcatgcaactc

SEQ ID NO: 1683238 - DNA, 15 bp, Homo sapiens
actgcatgcaactca

SEQ ID NO: 1683239 - DNA, 15 bp, Homo sapiens
ctgcatgcaactcat

SEQ ID NO: 1683240 - DNA, 15 bp, Homo sapiens
tgcatgcaactcatc

SEQ ID NO: 1683241 - DNA, 15 bp, Homo sapiens
gcatgcaactcatcc

SEQ ID NO: 1683242 - DNA, 15 bp, Homo sapiens
catgcaactcatcct

SEQ ID NO: 1683243 - DNA, 15 bp, Homo sapiens
atgcaactcatccta

SEQ ID NO: 1683244 - DNA, 15 bp, Homo sapiens
tgcaactcatcctac

SEQ ID NO: 1683245 - DNA, 15 bp, Homo sapiens
gcaactcatcctact

SEQ ID NO: 1683246 - DNA, 15 bp, Homo sapiens
caactcatcctactg

SEQ ID NO: 1683247 - DNA, 15 bp, Homo sapiens
aactcatcctactgg

SEQ ID NO: 1683248 - DNA, 15 bp, Homo sapiens
actcatcctactggc

SEQ ID NO: 1683249 - DNA, 15 bp, Homo sapiens
ctcatcctactggca

SEQ ID NO: 1683250 - DNA, 15 bp, Homo sapiens
tcatcctactggcac

SEQ ID NO: 1683251 - DNA, 15 bp, Homo sapiens
catcctactggcact

SEQ ID NO: 1683252 - DNA, 15 bp, Homo sapiens
atcctactggcactg

SEQ ID NO: 1683253 - DNA, 15 bp, Homo sapiens
tcctactggcactga

SEQ ID NO: 1683254 - DNA, 15 bp, Homo sapiens
cctactggcactgaa

SEQ ID NO: 1683255 - DNA, 15 bp, Homo sapiens
ctactggcactgaaa

SEQ ID NO: 1683256 - DNA, 15 bp, Homo sapiens
tactggcactgaaag

SEQ ID NO: 1683257 - DNA, 15 bp, Homo sapiens
actggcactgaaagc

SEQ ID NO: 1683258 - DNA, 15 bp, Homo sapiens
ctggcactgaaagcc

SEQ ID NO: 1683259 - DNA, 15 bp, Homo sapiens
tggcactgaaagccc

SEQ ID NO: 1683260 - DNA, 15 bp, Homo sapiens
ggcactgaaagccct

SEQ ID NO: 1683261 - DNA, 15 bp, Homo sapiens
gcactgaaagccctt

SEQ ID NO: 1683262 - DNA, 15 bp, Homo sapiens
cactgaaagcccttc

SEQ ID NO: 1683263 - DNA, 15 bp, Homo sapiens
actgaaagcccttct

SEQ ID NO: 1683264 - DNA, 15 bp, Homo sapiens
ctgaaagcccttctt

SEQ ID NO: 1683265 - DNA, 15 bp, Homo sapiens
tgaaagcccttcttt

SEQ ID NO: 1683266 - DNA, 15 bp, Homo sapiens
gaaagcccttctttg

SEQ ID NO: 1683267 - DNA, 15 bp, Homo sapiens
aaagcccttctttgt

SEQ ID NO: 1683268 - DNA, 15 bp, Homo sapiens
aagcccttctttgtc

SEQ ID NO: 1683269 - DNA, 15 bp, Homo sapiens
agcccttctttgtct

SEQ ID NO: 1683270 - DNA, 15 bp, Homo sapiens
gcccttctttgtctt

SEQ ID NO: 1683271 - DNA, 15 bp, Homo sapiens
cccttctttgtcttt

SEQ ID NO: 1683272 - DNA, 15 bp, Homo sapiens
ccttctttgtctttc

SEQ ID NO: 1683273 - DNA, 15 bp, Homo sapiens
cttctttgtctttct

SEQ ID NO: 1683274 - DNA, 15 bp, Homo sapiens
ttctttgtctttctt

SEQ ID NO: 1683275 - DNA, 15 bp, Homo sapiens
tctttgtctttcttc

SEQ ID NO: 1683276 - DNA, 15 bp, Homo sapiens
ctttgtctttcttca

SEQ ID NO: 1683277 - DNA, 15 bp, Homo sapiens
tttgtctttcttcac

SEQ ID NO: 1683278 - DNA, 15 bp, Homo sapiens
ttgtctttcttcacc

SEQ ID NO: 1683279 - DNA, 15 bp, Homo sapiens
tgtctttcttcacct

SEQ ID NO: 1683280 - DNA, 15 bp, Homo sapiens
gtctttcttcaccta

SEQ ID NO: 1683281 - DNA, 15 bp, Homo sapiens
tctttcttcacctac

SEQ ID NO: 1683282 - DNA, 15 bp, Homo sapiens
ctttcttcacctact

SEQ ID NO: 1683283 - DNA, 15 bp, Homo sapiens
tttcttcacctactt

SEQ ID NO: 1683284 - DNA, 15 bp, Homo sapiens
ttcttcacctactta

SEQ ID NO: 1683285 - DNA, 15 bp, Homo sapiens
tcttcacctacttaa

SEQ ID NO: 1683286 - DNA, 15 bp, Homo sapiens
cttcacctacttaag

SEQ ID NO: 1683287 - DNA, 15 bp, Homo sapiens
ttcacctacttaagc

SEQ ID NO: 1683288 - DNA, 15 bp, Homo sapiens
tcacctacttaagca

SEQ ID NO: 1683289 - DNA, 15 bp, Homo sapiens
cacctacttaagcaa

SEQ ID NO: 1683290 - DNA, 15 bp, Homo sapiens
acctacttaagcaaa

SEQ ID NO: 1683291 - DNA, 15 bp, Homo sapiens
cctacttaagcaaat

SEQ ID NO: 1683292 - DNA, 15 bp, Homo sapiens
ctacttaagcaaatt

SEQ ID NO: 1683293 - DNA, 15 bp, Homo sapiens
tacttaagcaaattt

SEQ ID NO: 1683294 - DNA, 15 bp, Homo sapiens
acttaagcaaattta

SEQ ID NO: 1683295 - DNA, 15 bp, Homo sapiens
cttaagcaaatttac

SEQ ID NO: 1683296 - DNA, 15 bp, Homo sapiens
ttaagcaaatttaca

SEQ ID NO: 1683297 - DNA, 15 bp, Homo sapiens
taagcaaatttacaa

SEQ ID NO: 1683298 - DNA, 15 bp, Homo sapiens
aagcaaatttacaag

SEQ ID NO: 1683299 - DNA, 15 bp, Homo sapiens
agcaaatttacaagc

SEQ ID NO: 1683300 - DNA, 15 bp, Homo sapiens
gcaaatttacaagcc

SEQ ID NO: 1683301 - DNA, 15 bp, Homo sapiens
caaatttacaagcca

SEQ ID NO: 1683302 - DNA, 15 bp, Homo sapiens
aaatttacaagccac

SEQ ID NO: 1683303 - DNA, 15 bp, Homo sapiens
aatttacaagccact

SEQ ID NO: 1683304 - DNA, 15 bp, Homo sapiens
atttacaagccactt

SEQ ID NO: 1683305 - DNA, 15 bp, Homo sapiens
tttacaagccacttt

SEQ ID NO: 1683306 - DNA, 15 bp, Homo sapiens
ttacaagccactttt

SEQ ID NO: 1683307 - DNA, 15 bp, Homo sapiens
tacaagccacttttt

SEQ ID NO: 1683308 - DNA, 15 bp, Homo sapiens
acaagccactttttg

SEQ ID NO: 1683309 - DNA, 15 bp, Homo sapiens
caagccactttttgc

SEQ ID NO: 1683310 - DNA, 15 bp, Homo sapiens
aagccactttttgcc

SEQ ID NO: 1683311 - DNA, 15 bp, Homo sapiens
agccactttttgcct

SEQ ID NO: 1683312 - DNA, 15 bp, Homo sapiens
gccactttttgcctc

SEQ ID NO: 1683313 - DNA, 15 bp, Homo sapiens
ccactttttgcctct

SEQ ID NO: 1683314 - DNA, 15 bp, Homo sapiens
cactttttgcctctt

SEQ ID NO: 1683315 - DNA, 15 bp, Homo sapiens
actttttgcctcttc

SEQ ID NO: 1683316 - DNA, 15 bp, Homo sapiens
ctttttgcctcttct

SEQ ID NO: 1683317 - DNA, 15 bp, Homo sapiens
tttttgcctcttctc

SEQ ID NO: 1683318 - DNA, 15 bp, Homo sapiens
ttttgcctcttctct

SEQ ID NO: 1683319 - DNA, 15 bp, Homo sapiens
tttgcctcttctctc

SEQ ID NO: 1683320 - DNA, 15 bp, Homo sapiens
ttgcctcttctctca

SEQ ID NO: 1683321 - DNA, 15 bp, Homo sapiens
tgcctcttctctcag

SEQ ID NO: 1683322 - DNA, 15 bp, Homo sapiens
gcctcttctctcagc

SEQ ID NO: 1683323 - DNA, 15 bp, Homo sapiens
cctcttctctcagca

SEQ ID NO: 1683324 - DNA, 15 bp, Homo sapiens
ctcttctctcagcag

SEQ ID NO: 1683325 - DNA, 15 bp, Homo sapiens
tcttctctcagcagc

SEQ ID NO: 1683326 - DNA, 15 bp, Homo sapiens
cttctctcagcagcc

SEQ ID NO: 1683327 - DNA, 15 bp, Homo sapiens
ttctctcagcagcca

SEQ ID NO: 1683328 - DNA, 15 bp, Homo sapiens
tctctcagcagccat

SEQ ID NO: 1683329 - DNA, 15 bp, Homo sapiens
ctctcagcagccatc

SEQ ID NO: 1683330 - DNA, 15 bp, Homo sapiens
tctcagcagccatct

SEQ ID NO: 1683331 - DNA, 15 bp, Homo sapiens
ctcagcagccatctt

SEQ ID NO: 1683332 - DNA, 15 bp, Homo sapiens
tcagcagccatcttg

SEQ ID NO: 1683333 - DNA, 15 bp, Homo sapiens
cagcagccatcttgg

SEQ ID NO: 1683334 - DNA, 15 bp, Homo sapiens
agcagccatcttggt

SEQ ID NO: 1683335 - DNA, 15 bp, Homo sapiens
gcagccatcttggtc

SEQ ID NO: 1683336 - DNA, 15 bp, Homo sapiens
cagccatcttggtcc

SEQ ID NO: 1683337 - DNA, 15 bp, Homo sapiens
agccatcttggtcct

SEQ ID NO: 1683338 - DNA, 15 bp, Homo sapiens
gccatcttggtcctt

SEQ ID NO: 1683339 - DNA, 15 bp, Homo sapiens
catcttggtcctttc

SEQ ID NO: 1683340 - DNA, 15 bp, Homo sapiens
atcttggtcctttca

SEQ ID NO: 1683341 - DNA, 15 bp, Homo sapiens
tcttggtcctttcaa

SEQ ID NO: 1683342 - DNA, 15 bp, Homo sapiens
cttggtcctttcaat

SEQ ID NO: 1683343 - DNA, 15 bp, Homo sapiens
ttggtcctttcaatg

SEQ ID NO: 1683344 - DNA, 15 bp, Homo sapiens
tggtcctttcaatgt

SEQ ID NO: 1683345 - DNA, 15 bp, Homo sapiens
ggtcctttcaatgtt

SEQ ID NO: 1683346 - DNA, 15 bp, Homo sapiens
gtcctttcaatgttg

SEQ ID NO: 1683347 - DNA, 15 bp, Homo sapiens
tcctttcaatgttgc

SEQ ID NO: 1683348 - DNA, 15 bp, Homo sapiens
cctttcaatgttgcc

SEQ ID NO: 1683349 - DNA, 15 bp, Homo sapiens
ctttcaatgttgcct

SEQ ID NO: 1683350 - DNA, 15 bp, Homo sapiens
tttcaatgttgcctg

SEQ ID NO: 1683351 - DNA, 15 bp, Homo sapiens
ttcaatgttgcctgt

SEQ ID NO: 1683352 - DNA, 15 bp, Homo sapiens
tcaatgttgcctgtg

SEQ ID NO: 1683353 - DNA, 15 bp, Homo sapiens
caatgttgcctgtgt

SEQ ID NO: 1683354 - DNA, 15 bp, Homo sapiens
aatgttgcctgtgtg

SEQ ID NO: 1683355 - DNA, 15 bp, Homo sapiens
atgttgcctgtgtgc

SEQ ID NO: 1683356 - DNA, 15 bp, Homo sapiens
tgttgcctgtgtgca

SEQ ID NO: 1683357 - DNA, 15 bp, Homo sapiens
gttgcctgtgtgcac

SEQ ID NO: 1683358 - DNA, 15 bp, Homo sapiens
ttgcctgtgtgcact

SEQ ID NO: 1683359 - DNA, 15 bp, Homo sapiens
tgcctgtgtgcactc

SEQ ID NO: 1683360 - DNA, 15 bp, Homo sapiens
gcctgtgtgcactca

SEQ ID NO: 1683361 - DNA, 15 bp, Homo sapiens
cctgtgtgcactcat

SEQ ID NO: 1683362 - DNA, 15 bp, Homo sapiens
ctgtgtgcactcatg

SEQ ID NO: 1683363 - DNA, 15 bp, Homo sapiens
tgtgtgcactcatgc

SEQ ID NO: 1683364 - DNA, 15 bp, Homo sapiens
gtgtgcactcatgct

SEQ ID NO: 1683365 - DNA, 15 bp, Homo sapiens
tgtgcactcatgctg

SEQ ID NO: 1683366 - DNA, 15 bp, Homo sapiens
gtgcactcatgctgt

SEQ ID NO: 1683367 - DNA, 15 bp, Homo sapiens
tgcactcatgctgta

SEQ ID NO: 1683368 - DNA, 15 bp, Homo sapiens
gcactcatgctgtat

SEQ ID NO: 1683369 - DNA, 15 bp, Homo sapiens
cactcatgctgtatt

SEQ ID NO: 1683370 - DNA, 15 bp, Homo sapiens
actcatgctgtattt

SEQ ID NO: 1683371 - DNA, 15 bp, Homo sapiens
ctcatgctgtattta

SEQ ID NO: 1683372 - DNA, 15 bp, Homo sapiens
tcatgctgtatttat

SEQ ID NO: 1683373 - DNA, 15 bp, Homo sapiens
catgctgtatttatg

SEQ ID NO: 1683374 - DNA, 15 bp, Homo sapiens
atgctgtatttatga

SEQ ID NO: 1683375 - DNA, 15 bp, Homo sapiens
tgctgtatttatgac

SEQ ID NO: 1683376 - DNA, 15 bp, Homo sapiens
gctgtatttatgacc

SEQ ID NO: 1683377 - DNA, 15 bp, Homo sapiens
ctgtatttatgacct

SEQ ID NO: 1683378 - DNA, 15 bp, Homo sapiens
tgtatttatgacctg

SEQ ID NO: 1683379 - DNA, 15 bp, Homo sapiens
gtatttatgacctgg

SEQ ID NO: 1683380 - DNA, 15 bp, Homo sapiens
tatttatgacctggt

SEQ ID NO: 1683381 - DNA, 15 bp, Homo sapiens
atttatgacctggtc

SEQ ID NO: 1683382 - DNA, 15 bp, Homo sapiens
tttatgacctggtcc

SEQ ID NO: 1683383 - DNA, 15 bp, Homo sapiens
ttatgacctggtccc

SEQ ID NO: 1683384 - DNA, 15 bp, Homo sapiens
tatgacctggtccct

SEQ ID NO: 1683385 - DNA, 15 bp, Homo sapiens
atgacctggtccctc

SEQ ID NO: 1683386 - DNA, 15 bp, Homo sapiens
tgacctggtccctct

SEQ ID NO: 1683387 - DNA, 15 bp, Homo sapiens
gacctggtccctctc

SEQ ID NO: 1683388 - DNA, 15 bp, Homo sapiens
acctggtccctctca

SEQ ID NO: 1683389 - DNA, 15 bp, Homo sapiens
cctggtccctctcat

SEQ ID NO: 1683390 - DNA, 15 bp, Homo sapiens
ctggtccctctcata

SEQ ID NO: 1683391 - DNA, 15 bp, Homo sapiens
tggtccctctcatac

SEQ ID NO: 1683392 - DNA, 15 bp, Homo sapiens
ggtccctctcatact

SEQ ID NO: 1683393 - DNA, 15 bp, Homo sapiens
gtccctctcatactt

SEQ ID NO: 1683394 - DNA, 15 bp, Homo sapiens
tccctctcatacttt

SEQ ID NO: 1683395 - DNA, 15 bp, Homo sapiens
ccctctcatactttg

SEQ ID NO: 1683396 - DNA, 15 bp, Homo sapiens
cctctcatactttga

SEQ ID NO: 1683397 - DNA, 15 bp, Homo sapiens
ctctcatactttgag

SEQ ID NO: 1683398 - DNA, 15 bp, Homo sapiens
tctcatactttgaga

SEQ ID NO: 1683399 - DNA, 15 bp, Homo sapiens
ctcatactttgagat

SEQ ID NO: 1683400 - DNA, 15 bp, Homo sapiens
tcatactttgagata

SEQ ID NO: 1683401 - DNA, 15 bp, Homo sapiens
catactttgagatat

SEQ ID NO: 1683402 - DNA, 15 bp, Homo sapiens
atactttgagatata

SEQ ID NO: 1683403 - DNA, 15 bp, Homo sapiens
tactttgagatataa

SEQ ID NO: 1683404 - DNA, 15 bp, Homo sapiens
actttgagatataac

SEQ ID NO: 1683405 - DNA, 15 bp, Homo sapiens
ctttgagatataact

SEQ ID NO: 1683406 - DNA, 15 bp, Homo sapiens
tttgagatataactc

SEQ ID NO: 1683407 - DNA, 15 bp, Homo sapiens
ttgagatataactca

SEQ ID NO: 1683408 - DNA, 15 bp, Homo sapiens
tgagatataactcaa

SEQ ID NO: 1683409 - DNA, 15 bp, Homo sapiens
gagatataactcaag

SEQ ID NO: 1683410 - DNA, 15 bp, Homo sapiens
agatataactcaagt

SEQ ID NO: 1683411 - DNA, 15 bp, Homo sapiens
gatataactcaagtc

SEQ ID NO: 1683412 - DNA, 15 bp, Homo sapiens
atataactcaagtcc

SEQ ID NO: 1683413 - DNA, 15 bp, Homo sapiens
tataactcaagtcct

SEQ ID NO: 1683414 - DNA, 15 bp, Homo sapiens
ataactcaagtcctt

SEQ ID NO: 1683415 - DNA, 15 bp, Homo sapiens
taactcaagtccttc

SEQ ID NO: 1683416 - DNA, 15 bp, Homo sapiens
aactcaagtccttcc

SEQ ID NO: 1683417 - DNA, 15 bp, Homo sapiens
actcaagtccttcct

SEQ ID NO: 1683418 - DNA, 15 bp, Homo sapiens
ctcaagtccttcctt

SEQ ID NO: 1683419 - DNA, 15 bp, Homo sapiens
tcaagtccttccttc

SEQ ID NO: 1683420 - DNA, 15 bp, Homo sapiens
caagtccttccttct

SEQ ID NO: 1683421 - DNA, 15 bp, Homo sapiens
aagtccttccttctt

SEQ ID NO: 1683422 - DNA, 15 bp, Homo sapiens
agtccttccttcttt

SEQ ID NO: 1683423 - DNA, 15 bp, Homo sapiens
gtccttccttctttg

SEQ ID NO: 1683424 - DNA, 15 bp, Homo sapiens
tccttccttctttga

SEQ ID NO: 1683425 - DNA, 15 bp, Homo sapiens
ccttccttctttgag

SEQ ID NO: 1683426 - DNA, 15 bp, Homo sapiens
cttccttctttgaga

SEQ ID NO: 1683427 - DNA, 15 bp, Homo sapiens
ttccttctttgagaa

SEQ ID NO: 1683428 - DNA, 15 bp, Homo sapiens
tccttctttgagaat

SEQ ID NO: 1683429 - DNA, 15 bp, Homo sapiens
ccttctttgagaatc

SEQ ID NO: 1683430 - DNA, 15 bp, Homo sapiens
cttctttgagaatcc

SEQ ID NO: 1683431 - DNA, 15 bp, Homo sapiens
ttctttgagaatcca

SEQ ID NO: 1683432 - DNA, 15 bp, Homo sapiens
tctttgagaatccat

SEQ ID NO: 1683433 - DNA, 15 bp, Homo sapiens
ctttgagaatccata

SEQ ID NO: 1683434 - DNA, 15 bp, Homo sapiens
tttgagaatccatac

SEQ ID NO: 1683435 - DNA, 15 bp, Homo sapiens
ttgagaatccatact

SEQ ID NO: 1683436 - DNA, 15 bp, Homo sapiens
tgagaatccatactg

SEQ ID NO: 1683437 - DNA, 15 bp, Homo sapiens
gagaatccatactga

SEQ ID NO: 1683438 - DNA, 15 bp, Homo sapiens
agaatccatactgat

SEQ ID NO: 1683439 - DNA, 15 bp, Homo sapiens
gaatccatactgatg

SEQ ID NO: 1683440 - DNA, 15 bp, Homo sapiens
aatccatactgatgg

SEQ ID NO: 1683441 - DNA, 15 bp, Homo sapiens
atccatactgatggg

SEQ ID NO: 1683442 - DNA, 15 bp, Homo sapiens
tccatactgatgggt

SEQ ID NO: 1683443 - DNA, 15 bp, Homo sapiens
ccatactgatgggtc

SEQ ID NO: 1683444 - DNA, 15 bp, Homo sapiens
catactgatgggtca

SEQ ID NO: 1683445 - DNA, 15 bp, Homo sapiens
atactgatgggtcac

SEQ ID NO: 1683446 - DNA, 15 bp, Homo sapiens
tactgatgggtcact

SEQ ID NO: 1683447 - DNA, 15 bp, Homo sapiens
actgatgggtcactt

SEQ ID NO: 1683448 - DNA, 15 bp, Homo sapiens
ctgatgggtcacttt

SEQ ID NO: 1683449 - DNA, 15 bp, Homo sapiens
tgatgggtcactttt

SEQ ID NO: 1683450 - DNA, 15 bp, Homo sapiens
gatgggtcacttttt

SEQ ID NO: 1683451 - DNA, 15 bp, Homo sapiens
atgggtcacttttta

SEQ ID NO: 1683452 - DNA, 15 bp, Homo sapiens
tgggtcactttttaa

SEQ ID NO: 1683453 - DNA, 15 bp, Homo sapiens
gggtcactttttaaa

SEQ ID NO: 1683454 - DNA, 15 bp, Homo sapiens
ggtcactttttaaat

SEQ ID NO: 1683455 - DNA, 15 bp, Homo sapiens
gtcactttttaaata

SEQ ID NO: 1683456 - DNA, 15 bp, Homo sapiens
tcactttttaaatac

SEQ ID NO: 1683457 - DNA, 15 bp, Homo sapiens
cactttttaaatact

SEQ ID NO: 1683458 - DNA, 15 bp, Homo sapiens
actttttaaatactt

SEQ ID NO: 1683459 - DNA, 15 bp, Homo sapiens
ctttttaaatactta

SEQ ID NO: 1683460 - DNA, 15 bp, Homo sapiens
tttttaaatacttaa

SEQ ID NO: 1683461 - DNA, 15 bp, Homo sapiens
ttttaaatacttaag

SEQ ID NO: 1683462 - DNA, 15 bp, Homo sapiens
tttaaatacttaagg

SEQ ID NO: 1683463 - DNA, 15 bp, Homo sapiens
ttaaatacttaaggt

SEQ ID NO: 1683464 - DNA, 15 bp, Homo sapiens
taaatacttaaggtc

SEQ ID NO: 1683465 - DNA, 15 bp, Homo sapiens
aaatacttaaggtct

SEQ ID NO: 1683466 - DNA, 15 bp, Homo sapiens
aatacttaaggtctg

SEQ ID NO: 1683467 - DNA, 15 bp, Homo sapiens
atacttaaggtctgc

SEQ ID NO: 1683468 - DNA, 15 bp, Homo sapiens
tacttaaggtctgca

SEQ ID NO: 1683469 - DNA, 15 bp, Homo sapiens
acttaaggtctgcat

SEQ ID NO: 1683470 - DNA, 15 bp, Homo sapiens
cttaaggtctgcatc

SEQ ID NO: 1683471 - DNA, 15 bp, Homo sapiens
ttaaggtctgcatca

SEQ ID NO: 1683472 - DNA, 15 bp, Homo sapiens
taaggtctgcatcaa

SEQ ID NO: 1683473 - DNA, 15 bp, Homo sapiens
aaggtctgcatcaaa

SEQ ID NO: 1683474 - DNA, 15 bp, Homo sapiens
aggtctgcatcaaac

SEQ ID NO: 1683475 - DNA, 15 bp, Homo sapiens
ggtctgcatcaaaca

SEQ ID NO: 1683476 - DNA, 15 bp, Homo sapiens
gtctgcatcaaacat

SEQ ID NO: 1683477 - DNA, 15 bp, Homo sapiens
tctgcatcaaacatt

SEQ ID NO: 1683478 - DNA, 15 bp, Homo sapiens
ctgcatcaaacatta

SEQ ID NO: 1683479 - DNA, 15 bp, Homo sapiens
tgcatcaaacattat

SEQ ID NO: 1683480 - DNA, 15 bp, Homo sapiens
gcatcaaacattata

SEQ ID NO: 1683481 - DNA, 15 bp, Homo sapiens
catcaaacattataa

SEQ ID NO: 1683482 - DNA, 15 bp, Homo sapiens
atcaaacattataac

SEQ ID NO: 1683483 - DNA, 15 bp, Homo sapiens
tcaaacattataaca

SEQ ID NO: 1683484 - DNA, 15 bp, Homo sapiens
caaacattataacat

SEQ ID NO: 1683485 - DNA, 15 bp, Homo sapiens
aaacattataacatt

SEQ ID NO: 1683486 - DNA, 15 bp, Homo sapiens
aacattataacattt

SEQ ID NO: 1683487 - DNA, 15 bp, Homo sapiens
acattataacatttg

SEQ ID NO: 1683488 - DNA, 15 bp, Homo sapiens
cattataacatttgc

SEQ ID NO: 1683489 - DNA, 15 bp, Homo sapiens
attataacatttgct

SEQ ID NO: 1683490 - DNA, 15 bp, Homo sapiens
ttataacatttgctg

SEQ ID NO: 1683491 - DNA, 15 bp, Homo sapiens
tataacatttgctgt

SEQ ID NO: 1683492 - DNA, 15 bp, Homo sapiens
ataacatttgctgtt

SEQ ID NO: 1683493 - DNA, 15 bp, Homo sapiens
taacatttgctgttc

SEQ ID NO: 1683494 - DNA, 15 bp, Homo sapiens
aacatttgctgttct

SEQ ID NO: 1683495 - DNA, 15 bp, Homo sapiens
acatttgctgttctt

SEQ ID NO: 1683496 - DNA, 15 bp, Homo sapiens
catttgctgttcttc

SEQ ID NO: 1683497 - DNA, 15 bp, Homo sapiens
atttgctgttcttct

SEQ ID NO: 1683498 - DNA, 15 bp, Homo sapiens
tttgctgttcttctt

SEQ ID NO: 1683499 - DNA, 15 bp, Homo sapiens
ttgctgttcttcttt

SEQ ID NO: 1683500 - DNA, 15 bp, Homo sapiens
tgctgttcttctttt

SEQ ID NO: 1683501 - DNA, 15 bp, Homo sapiens
gctgttcttcttttt

SEQ ID NO: 1683502 - DNA, 15 bp, Homo sapiens
ctgttcttctttttt

SEQ ID NO: 1683503 - DNA, 15 bp, Homo sapiens
tgttcttctttttta

SEQ ID NO: 1683504 - DNA, 15 bp, Homo sapiens
gttcttcttttttat

SEQ ID NO: 1683505 - DNA, 15 bp, Homo sapiens
ttcttcttttttatt

SEQ ID NO: 1683506 - DNA, 15 bp, Homo sapiens
tcttcttttttattc

SEQ ID NO: 1683507 - DNA, 15 bp, Homo sapiens
cttcttttttattct

SEQ ID NO: 1683508 - DNA, 15 bp, Homo sapiens
ttcttttttattctt

SEQ ID NO: 1683509 - DNA, 15 bp, Homo sapiens
tcttttttattctta

SEQ ID NO: 1683510 - DNA, 15 bp, Homo sapiens
cttttttattcttac

SEQ ID NO: 1683511 - DNA, 15 bp, Homo sapiens
ttttttattcttact

SEQ ID NO: 1683512 - DNA, 15 bp, Homo sapiens
tttttattcttactt

SEQ ID NO: 1683513 - DNA, 15 bp, Homo sapiens
ttttattcttacttg

SEQ ID NO: 1683514 - DNA, 15 bp, Homo sapiens
tttattcttacttgg

SEQ ID NO: 1683515 - DNA, 15 bp, Homo sapiens
ttattcttacttggt

SEQ ID NO: 1683516 - DNA, 15 bp, Homo sapiens
tattcttacttggtt

SEQ ID NO: 1683517 - DNA, 15 bp, Homo sapiens
attcttacttggttt

SEQ ID NO: 1683518 - DNA, 15 bp, Homo sapiens
ttcttacttggttta

SEQ ID NO: 1683519 - DNA, 15 bp, Homo sapiens
tcttacttggtttat

SEQ ID NO: 1683520 - DNA, 15 bp, Homo sapiens
cttacttggtttata

SEQ ID NO: 1683521 - DNA, 15 bp, Homo sapiens
ttacttggtttatat

SEQ ID NO: 1683522 - DNA, 15 bp, Homo sapiens
tacttggtttatata

SEQ ID NO: 1683523 - DNA, 15 bp, Homo sapiens
acttggtttatatac

SEQ ID NO: 1683524 - DNA, 15 bp, Homo sapiens
cttggtttatatact

SEQ ID NO: 1683525 - DNA, 15 bp, Homo sapiens
ttggtttatatacta

SEQ ID NO: 1683526 - DNA, 15 bp, Homo sapiens
tggtttatatactaa

SEQ ID NO: 1683527 - DNA, 15 bp, Homo sapiens
ggtttatatactaag

SEQ ID NO: 1683528 - DNA, 15 bp, Homo sapiens
gtttatatactaagc

SEQ ID NO: 1683529 - DNA, 15 bp, Homo sapiens
tttatatactaagct

SEQ ID NO: 1683530 - DNA, 15 bp, Homo sapiens
ttatatactaagctt

SEQ ID NO: 1683531 - DNA, 15 bp, Homo sapiens
tatatactaagcttt

SEQ ID NO: 1683532 - DNA, 15 bp, Homo sapiens
atatactaagcttta

SEQ ID NO: 1683533 - DNA, 15 bp, Homo sapiens
tatactaagctttat

SEQ ID NO: 1683534 - DNA, 15 bp, Homo sapiens
atactaagctttatt

SEQ ID NO: 1683535 - DNA, 15 bp, Homo sapiens
tactaagctttatta

SEQ ID NO: 1683536 - DNA, 15 bp, Homo sapiens
actaagctttattat

SEQ ID NO: 1683537 - DNA, 15 bp, Homo sapiens
ctaagctttattatc

SEQ ID NO: 1683538 - DNA, 15 bp, Homo sapiens
taagctttattatcc

SEQ ID NO: 1683539 - DNA, 15 bp, Homo sapiens
aagctttattatcct

SEQ ID NO: 1683540 - DNA, 15 bp, Homo sapiens
agctttattatcctt

SEQ ID NO: 1683541 - DNA, 15 bp, Homo sapiens
gctttattatccttt

SEQ ID NO: 1683542 - DNA, 15 bp, Homo sapiens
ctttattatcctttt

SEQ ID NO: 1683543 - DNA, 15 bp, Homo sapiens
tttattatcctttta

SEQ ID NO: 1683544 - DNA, 15 bp, Homo sapiens
ttattatccttttaa

SEQ ID NO: 1683545 - DNA, 15 bp, Homo sapiens
tattatccttttaag

SEQ ID NO: 1683546 - DNA, 15 bp, Homo sapiens
attatccttttaagg

SEQ ID NO: 1683547 - DNA, 15 bp, Homo sapiens
ttatccttttaaggt

SEQ ID NO: 1683548 - DNA, 15 bp, Homo sapiens
tatccttttaaggtt

SEQ ID NO: 1683549 - DNA, 15 bp, Homo sapiens
atccttttaaggtta

SEQ ID NO: 1683550 - DNA, 15 bp, Homo sapiens
tccttttaaggttaa

SEQ ID NO: 1683551 - DNA, 15 bp, Homo sapiens
ccttttaaggttaaa

SEQ ID NO: 1683552 - DNA, 15 bp, Homo sapiens
cttttaaggttaaaa

SEQ ID NO: 1683553 - DNA, 15 bp, Homo sapiens
ttttaaggttaaaac

SEQ ID NO: 1683554 - DNA, 15 bp, Homo sapiens
tttaaggttaaaact

SEQ ID NO: 1683555 - DNA, 15 bp, Homo sapiens
ttaaggttaaaactt

SEQ ID NO: 1683556 - DNA, 15 bp, Homo sapiens
taaggttaaaacttt

SEQ ID NO: 1683557 - DNA, 15 bp, Homo sapiens
aaggttaaaactttc

SEQ ID NO: 1683558 - DNA, 15 bp, Homo sapiens
aggttaaaactttct

SEQ ID NO: 1683559 - DNA, 15 bp, Homo sapiens
ggttaaaactttctc

SEQ ID NO: 1683560 - DNA, 15 bp, Homo sapiens
gttaaaactttctca

SEQ ID NO: 1683561 - DNA, 15 bp, Homo sapiens
ttaaaactttctcaa

SEQ ID NO: 1683562 - DNA, 15 bp, Homo sapiens
taaaactttctcaag

SEQ ID NO: 1683563 - DNA, 15 bp, Homo sapiens
aaactttctcaagga

SEQ ID NO: 1683564 - DNA, 15 bp, Homo sapiens
aactttctcaaggac

SEQ ID NO: 1683565 - DNA, 15 bp, Homo sapiens
actttctcaaggaca

SEQ ID NO: 1683566 - DNA, 15 bp, Homo sapiens
ctttctcaaggacac

SEQ ID NO: 1683567 - DNA, 15 bp, Homo sapiens
tttctcaaggacact

SEQ ID NO: 1683568 - DNA, 15 bp, Homo sapiens
ttctcaaggacacta

SEQ ID NO: 1683569 - DNA, 15 bp, Homo sapiens
tctcaaggacactaa

SEQ ID NO: 1683570 - DNA, 15 bp, Homo sapiens
ctcaaggacactaac

SEQ ID NO: 1683571 - DNA, 15 bp, Homo sapiens
tcaaggacactaact

SEQ ID NO: 1683572 - DNA, 15 bp, Homo sapiens
caaggacactaactg

SEQ ID NO: 1683573 - DNA, 15 bp, Homo sapiens
aaggacactaactgt

SEQ ID NO: 1683574 - DNA, 15 bp, Homo sapiens
aggacactaactgta

SEQ ID NO: 1683575 - DNA, 15 bp, Homo sapiens
ggacactaactgtaa

SEQ ID NO: 1683576 - DNA, 15 bp, Homo sapiens
gacactaactgtaat

SEQ ID NO: 1683577 - DNA, 15 bp, Homo sapiens
acactaactgtaatg

SEQ ID NO: 1683578 - DNA, 15 bp, Homo sapiens
cactaactgtaatgt

SEQ ID NO: 1683579 - DNA, 15 bp, Homo sapiens
actaactgtaatgtg

SEQ ID NO: 1683580 - DNA, 15 bp, Homo sapiens
ctaactgtaatgtgt

SEQ ID NO: 1683581 - DNA, 15 bp, Homo sapiens
taactgtaatgtgta

SEQ ID NO: 1683582 - DNA, 15 bp, Homo sapiens
aactgtaatgtgtac

SEQ ID NO: 1683583 - DNA, 15 bp, Homo sapiens
actgtaatgtgtaca

SEQ ID NO: 1683584 - DNA, 15 bp, Homo sapiens
ctgtaatgtgtacaa

SEQ ID NO: 1683585 - DNA, 15 bp, Homo sapiens
tgtaatgtgtacaac

SEQ ID NO: 1683586 - DNA, 15 bp, Homo sapiens
gtaatgtgtacaact

SEQ ID NO: 1683587 - DNA, 15 bp, Homo sapiens
taatgtgtacaactt

SEQ ID NO: 1683588 - DNA, 15 bp, Homo sapiens
aatgtgtacaacttg

SEQ ID NO: 1683589 - DNA, 15 bp, Homo sapiens
atgtgtacaacttgg

SEQ ID NO: 1683590 - DNA, 15 bp, Homo sapiens
tgtgtacaacttggt

SEQ ID NO: 1683591 - DNA, 15 bp, Homo sapiens
gtgtacaacttggta

SEQ ID NO: 1683592 - DNA, 15 bp, Homo sapiens
tgtacaacttggtag

SEQ ID NO: 1683593 - DNA, 15 bp, Homo sapiens
gtacaacttggtagc

SEQ ID NO: 1683594 - DNA, 15 bp, Homo sapiens
tacaacttggtagcc

SEQ ID NO: 1683595 - DNA, 15 bp, Homo sapiens
acaacttggtagcca

SEQ ID NO: 1683596 - DNA, 15 bp, Homo sapiens
caacttggtagccag

SEQ ID NO: 1683597 - DNA, 15 bp, Homo sapiens
aacttggtagccagc

SEQ ID NO: 1683598 - DNA, 15 bp, Homo sapiens
acttggtagccagcg

SEQ ID NO: 1683599 - DNA, 15 bp, Homo sapiens
cttggtagccagcgt

SEQ ID NO: 1683600 - DNA, 15 bp, Homo sapiens
ttggtagccagcgta

SEQ ID NO: 1683601 - DNA, 15 bp, Homo sapiens
tggtagccagcgtaa

SEQ ID NO: 1683602 - DNA, 15 bp, Homo sapiens
ggtagccagcgtaac

SEQ ID NO: 1683603 - DNA, 15 bp, Homo sapiens
gtagccagcgtaaca

SEQ ID NO: 1683604 - DNA, 15 bp, Homo sapiens
tagccagcgtaacat

SEQ ID NO: 1683605 - DNA, 15 bp, Homo sapiens
agccagcgtaacatt

SEQ ID NO: 1683606 - DNA, 15 bp, Homo sapiens
gccagcgtaacattt

SEQ ID NO: 1683607 - DNA, 15 bp, Homo sapiens
ccagcgtaacatttg

SEQ ID NO: 1683608 - DNA, 15 bp, Homo sapiens
cagcgtaacatttga

SEQ ID NO: 1683609 - DNA, 15 bp, Homo sapiens
agcgtaacatttgac

SEQ ID NO: 1683610 - DNA, 15 bp, Homo sapiens
gcgtaacatttgaca

SEQ ID NO: 1683611 - DNA, 15 bp, Homo sapiens
cgtaacatttgacat

SEQ ID NO: 1683612 - DNA, 15 bp, Homo sapiens
gtaacatttgacata

SEQ ID NO: 1683613 - DNA, 15 bp, Homo sapiens
taacatttgacatag

SEQ ID NO: 1683614 - DNA, 15 bp, Homo sapiens
aacatttgacatagt

SEQ ID NO: 1683615 - DNA, 15 bp, Homo sapiens
acatttgacatagtg

SEQ ID NO: 1683616 - DNA, 15 bp, Homo sapiens
catttgacatagtgt

SEQ ID NO: 1683617 - DNA, 15 bp, Homo sapiens
atttgacatagtgtc

SEQ ID NO: 1683618 - DNA, 15 bp, Homo sapiens
tttgacatagtgtct

SEQ ID NO: 1683619 - DNA, 15 bp, Homo sapiens
ttgacatagtgtctt

SEQ ID NO: 1683620 - DNA, 15 bp, Homo sapiens
tgacatagtgtcttg

SEQ ID NO: 1683621 - DNA, 15 bp, Homo sapiens
gacatagtgtcttgt

SEQ ID NO: 1683622 - DNA, 15 bp, Homo sapiens
acatagtgtcttgta

SEQ ID NO: 1683623 - DNA, 15 bp, Homo sapiens
catagtgtcttgtaa

SEQ ID NO: 1683624 - DNA, 15 bp, Homo sapiens
atagtgtcttgtaaa

SEQ ID NO: 1683625 - DNA, 15 bp, Homo sapiens
tagtgtcttgtaaaa

SEQ ID NO: 1683626 - DNA, 15 bp, Homo sapiens
agtgtcttgtaaaaa

SEQ ID NO: 1683627 - DNA, 15 bp, Homo sapiens
gtgtcttgtaaaaag

SEQ ID NO: 1683628 - DNA, 15 bp, Homo sapiens
tgtcttgtaaaaaga

SEQ ID NO: 1683629 - DNA, 15 bp, Homo sapiens
gtcttgtaaaaagaa

SEQ ID NO: 1683630 - DNA, 15 bp, Homo sapiens
tcttgtaaaaagaag

SEQ ID NO: 1683631 - DNA, 15 bp, Homo sapiens
cttgtaaaaagaaga

SEQ ID NO: 1683632 - DNA, 15 bp, Homo sapiens
ttgtaaaaagaagat

SEQ ID NO: 1683633 - DNA, 15 bp, Homo sapiens
tgtaaaaagaagata

SEQ ID NO: 1683634 - DNA, 15 bp, Homo sapiens
gtaaaaagaagatac

SEQ ID NO: 1683635 - DNA, 15 bp, Homo sapiens
taaaaagaagatact

SEQ ID NO: 1683636 - DNA, 15 bp, Homo sapiens
aaaaagaagatactc

SEQ ID NO: 1683637 - DNA, 15 bp, Homo sapiens
aaaagaagatactca

SEQ ID NO: 1683638 - DNA, 15 bp, Homo sapiens
aagaagatactcaat

SEQ ID NO: 1683639 - DNA, 15 bp, Homo sapiens
agaagatactcaatc

SEQ ID NO: 1683640 - DNA, 15 bp, Homo sapiens
gaagatactcaatca

SEQ ID NO: 1683641 - DNA, 15 bp, Homo sapiens
aagatactcaatcag

SEQ ID NO: 1683642 - DNA, 15 bp, Homo sapiens
agatactcaatcagt

SEQ ID NO: 1683643 - DNA, 15 bp, Homo sapiens
gatactcaatcagtt

SEQ ID NO: 1683644 - DNA, 15 bp, Homo sapiens
tactcaatcagtttt

SEQ ID NO: 1683645 - DNA, 15 bp, Homo sapiens
actcaatcagttttt

SEQ ID NO: 1683646 - DNA, 15 bp, Homo sapiens
ctcaatcagtttttg

SEQ ID NO: 1683647 - DNA, 15 bp, Homo sapiens
tcaatcagtttttga

SEQ ID NO: 1683648 - DNA, 15 bp, Homo sapiens
caatcagtttttgaa

SEQ ID NO: 1683649 - DNA, 15 bp, Homo sapiens
aatcagtttttgaat

SEQ ID NO: 1683650 - DNA, 15 bp, Homo sapiens
atcagtttttgaatg

SEQ ID NO: 1683651 - DNA, 15 bp, Homo sapiens
tcagtttttgaatga

SEQ ID NO: 1683652 - DNA, 15 bp, Homo sapiens
cagtttttgaatgat

SEQ ID NO: 1683653 - DNA, 15 bp, Homo sapiens
agtttttgaatgatt

SEQ ID NO: 1683654 - DNA, 15 bp, Homo sapiens
gtttttgaatgattc

SEQ ID NO: 1683655 - DNA, 15 bp, Homo sapiens
tttttgaatgattca

SEQ ID NO: 1683656 - DNA, 15 bp, Homo sapiens
ttttgaatgattcaa

SEQ ID NO: 1683657 - DNA, 15 bp, Homo sapiens
tttgaatgattcaaa

SEQ ID NO: 1683658 - DNA, 15 bp, Homo sapiens
ttgaatgattcaaag

SEQ ID NO: 1683659 - DNA, 15 bp, Homo sapiens
tgaatgattcaaaga

SEQ ID NO: 1683660 - DNA, 15 bp, Homo sapiens
gaatgattcaaagag

SEQ ID NO: 1683661 - DNA, 15 bp, Homo sapiens
aatgattcaaagagt

SEQ ID NO: 1683662 - DNA, 15 bp, Homo sapiens
atgattcaaagagta

SEQ ID NO: 1683663 - DNA, 15 bp, Homo sapiens
tgattcaaagagtaa

SEQ ID NO: 1683664 - DNA, 15 bp, Homo sapiens
gattcaaagagtaaa

SEQ ID NO: 1683665 - DNA, 15 bp, Homo sapiens
attcaaagagtaaaa

SEQ ID NO: 1683666 - DNA, 15 bp, Homo sapiens
ttcaaagagtaaaat

SEQ ID NO: 1683667 - DNA, 15 bp, Homo sapiens
tcaaagagtaaaata

SEQ ID NO: 1683668 - DNA, 15 bp, Homo sapiens
caaagagtaaaataa

SEQ ID NO: 1683669 - DNA, 15 bp, Homo sapiens
aaagagtaaaataat

SEQ ID NO: 1683670 - DNA, 15 bp, Homo sapiens
aagagtaaaataatg

SEQ ID NO: 1683671 - DNA, 15 bp, Homo sapiens
agagtaaaataatgg

SEQ ID NO: 1683672 - DNA, 15 bp, Homo sapiens
gagtaaaataatggc

SEQ ID NO: 1683673 - DNA, 15 bp, Homo sapiens
agtaaaataatggca

SEQ ID NO: 1683674 - DNA, 15 bp, Homo sapiens
gtaaaataatggcaa

SEQ ID NO: 1683675 - DNA, 15 bp, Homo sapiens
taaaataatggcaac

SEQ ID NO: 1683676 - DNA, 15 bp, Homo sapiens
aaaataatggcaact

SEQ ID NO: 1683677 - DNA, 15 bp, Homo sapiens
aaataatggcaactt

SEQ ID NO: 1683678 - DNA, 15 bp, Homo sapiens
aataatggcaacttc

SEQ ID NO: 1683679 - DNA, 15 bp, Homo sapiens
ataatggcaacttct

SEQ ID NO: 1683680 - DNA, 15 bp, Homo sapiens
taatggcaacttctt

SEQ ID NO: 1683681 - DNA, 15 bp, Homo sapiens
aatggcaacttcttt

SEQ ID NO: 1683682 - DNA, 15 bp, Homo sapiens
atggcaacttctttt

SEQ ID NO: 1683683 - DNA, 15 bp, Homo sapiens
tggcaacttctttta

SEQ ID NO: 1683684 - DNA, 15 bp, Homo sapiens
ggcaacttcttttat

SEQ ID NO: 1683685 - DNA, 15 bp, Homo sapiens
gcaacttcttttatc

SEQ ID NO: 1683686 - DNA, 15 bp, Homo sapiens
caacttcttttatct

SEQ ID NO: 1683687 - DNA, 15 bp, Homo sapiens
aacttcttttatctc

SEQ ID NO: 1683688 - DNA, 15 bp, Homo sapiens
acttcttttatctct

SEQ ID NO: 1683689 - DNA, 15 bp, Homo sapiens
cttcttttatctctt

SEQ ID NO: 1683690 - DNA, 15 bp, Homo sapiens
ttcttttatctcttc

SEQ ID NO: 1683691 - DNA, 15 bp, Homo sapiens
tcttttatctcttcc

SEQ ID NO: 1683692 - DNA, 15 bp, Homo sapiens
cttttatctcttcca

SEQ ID NO: 1683693 - DNA, 15 bp, Homo sapiens
ttttatctcttccat

SEQ ID NO: 1683694 - DNA, 15 bp, Homo sapiens
tttatctcttccata

SEQ ID NO: 1683695 - DNA, 15 bp, Homo sapiens
ttatctcttccatag

SEQ ID NO: 1683696 - DNA, 15 bp, Homo sapiens
tatctcttccatagt

SEQ ID NO: 1683697 - DNA, 15 bp, Homo sapiens
atctcttccatagtg

SEQ ID NO: 1683698 - DNA, 15 bp, Homo sapiens
tctcttccatagtgc

SEQ ID NO: 1683699 - DNA, 15 bp, Homo sapiens
ctcttccatagtgca

SEQ ID NO: 1683700 - DNA, 15 bp, Homo sapiens
tcttccatagtgcaa

SEQ ID NO: 1683701 - DNA, 15 bp, Homo sapiens
cttccatagtgcaat

SEQ ID NO: 1683702 - DNA, 15 bp, Homo sapiens
ttccatagtgcaatc

SEQ ID NO: 1683703 - DNA, 15 bp, Homo sapiens
tccatagtgcaatct

SEQ ID NO: 1683704 - DNA, 15 bp, Homo sapiens
ccatagtgcaatctt

SEQ ID NO: 1683705 - DNA, 15 bp, Homo sapiens
catagtgcaatcttc

SEQ ID NO: 1683706 - DNA, 15 bp, Homo sapiens
atagtgcaatcttca

SEQ ID NO: 1683707 - DNA, 15 bp, Homo sapiens
tagtgcaatcttcaa

SEQ ID NO: 1683708 - DNA, 15 bp, Homo sapiens
agtgcaatcttcaat

SEQ ID NO: 1683709 - DNA, 15 bp, Homo sapiens
gtgcaatcttcaata

SEQ ID NO: 1683710 - DNA, 15 bp, Homo sapiens
tgcaatcttcaatat

SEQ ID NO: 1683711 - DNA, 15 bp, Homo sapiens
gcaatcttcaatatt

SEQ ID NO: 1683712 - DNA, 15 bp, Homo sapiens
caatcttcaatattt

SEQ ID NO: 1683713 - DNA, 15 bp, Homo sapiens
aatcttcaatatttt

SEQ ID NO: 1683714 - DNA, 15 bp, Homo sapiens
atcttcaatattttt

SEQ ID NO: 1683715 - DNA, 15 bp, Homo sapiens
tcttcaatatttttt

SEQ ID NO: 1683716 - DNA, 15 bp, Homo sapiens
cttcaatatttttta

SEQ ID NO: 1683717 - DNA, 15 bp, Homo sapiens
ttcaatattttttaa

SEQ ID NO: 1683718 - DNA, 15 bp, Homo sapiens
tcaatattttttaaa

SEQ ID NO: 1683719 - DNA, 15 bp, Homo sapiens
caatattttttaaac

SEQ ID NO: 1683720 - DNA, 15 bp, Homo sapiens
aatattttttaaaca

SEQ ID NO: 1683721 - DNA, 15 bp, Homo sapiens
atattttttaaacaa

SEQ ID NO: 1683722 - DNA, 15 bp, Homo sapiens
tattttttaaacaac

SEQ ID NO: 1683723 - DNA, 15 bp, Homo sapiens
attttttaaacaact

SEQ ID NO: 1683724 - DNA, 15 bp, Homo sapiens
ttttttaaacaacta

SEQ ID NO: 1683725 - DNA, 15 bp, Homo sapiens
tttttaaacaactat

SEQ ID NO: 1683726 - DNA, 15 bp, Homo sapiens
ttttaaacaactatt

SEQ ID NO: 1683727 - DNA, 15 bp, Homo sapiens
tttaaacaactattg

SEQ ID NO: 1683728 - DNA, 15 bp, Homo sapiens
ttaaacaactattgg

SEQ ID NO: 1683729 - DNA, 15 bp, Homo sapiens
taaacaactattggc

SEQ ID NO: 1683730 - DNA, 15 bp, Homo sapiens
aaacaactattggct

SEQ ID NO: 1683731 - DNA, 15 bp, Homo sapiens
aacaactattggctg

SEQ ID NO: 1683732 - DNA, 15 bp, Homo sapiens
acaactattggctga

SEQ ID NO: 1683733 - DNA, 15 bp, Homo sapiens
caactattggctgaa

SEQ ID NO: 1683734 - DNA, 15 bp, Homo sapiens
aactattggctgaat

SEQ ID NO: 1683735 - DNA, 15 bp, Homo sapiens
actattggctgaatt

SEQ ID NO: 1683736 - DNA, 15 bp, Homo sapiens
ctattggctgaattc

SEQ ID NO: 1683737 - DNA, 15 bp, Homo sapiens
tattggctgaattct

SEQ ID NO: 1683738 - DNA, 15 bp, Homo sapiens
attggctgaattcta

SEQ ID NO: 1683739 - DNA, 15 bp, Homo sapiens
ttggctgaattctac

SEQ ID NO: 1683740 - DNA, 15 bp, Homo sapiens
tggctgaattctacc

SEQ ID NO: 1683741 - DNA, 15 bp, Homo sapiens
ggctgaattctacca

SEQ ID NO: 1683742 - DNA, 15 bp, Homo sapiens
gctgaattctaccat

SEQ ID NO: 1683743 - DNA, 15 bp, Homo sapiens
ctgaattctaccatt

SEQ ID NO: 1683744 - DNA, 15 bp, Homo sapiens
tgaattctaccattg

SEQ ID NO: 1683745 - DNA, 15 bp, Homo sapiens
gaattctaccattgt

SEQ ID NO: 1683746 - DNA, 15 bp, Homo sapiens
aattctaccattgtg

SEQ ID NO: 1683747 - DNA, 15 bp, Homo sapiens
attctaccattgtgg

SEQ ID NO: 1683748 - DNA, 15 bp, Homo sapiens
ttctaccattgtggt

SEQ ID NO: 1683749 - DNA, 15 bp, Homo sapiens
tctaccattgtggtt

SEQ ID NO: 1683750 - DNA, 15 bp, Homo sapiens
ctaccattgtggttt

SEQ ID NO: 1683751 - DNA, 15 bp, Homo sapiens
taccattgtggttta

SEQ ID NO: 1683752 - DNA, 15 bp, Homo sapiens
accattgtggtttag

SEQ ID NO: 1683753 - DNA, 15 bp, Homo sapiens
ccattgtggtttaga

SEQ ID NO: 1683754 - DNA, 15 bp, Homo sapiens
cattgtggtttagag

SEQ ID NO: 1683755 - DNA, 15 bp, Homo sapiens
attgtggtttagagc

SEQ ID NO: 1683756 - DNA, 15 bp, Homo sapiens
ttgtggtttagagct

SEQ ID NO: 1683757 - DNA, 15 bp, Homo sapiens
tgtggtttagagctt

SEQ ID NO: 1683758 - DNA, 15 bp, Homo sapiens
gtggtttagagcttt

SEQ ID NO: 1683759 - DNA, 15 bp, Homo sapiens
tggtttagagctttc

SEQ ID NO: 1683760 - DNA, 15 bp, Homo sapiens
ggtttagagctttct

SEQ ID NO: 1683761 - DNA, 15 bp, Homo sapiens
gtttagagctttctc

SEQ ID NO: 1683762 - DNA, 15 bp, Homo sapiens
tttagagctttctct

SEQ ID NO: 1683763 - DNA, 15 bp, Homo sapiens
ttagagctttctctg

SEQ ID NO: 1683764 - DNA, 15 bp, Homo sapiens
tagagctttctctga

SEQ ID NO: 1683765 - DNA, 15 bp, Homo sapiens
agagctttctctgag

SEQ ID NO: 1683766 - DNA, 15 bp, Homo sapiens
gagctttctctgaga

SEQ ID NO: 1683767 - DNA, 15 bp, Homo sapiens
agctttctctgagac

SEQ ID NO: 1683768 - DNA, 15 bp, Homo sapiens
gtaagaacacaccaa

SEQ ID NO: 1683769 - DNA, 15 bp, Homo sapiens
taagaacacaccaag

SEQ ID NO: 1683770 - DNA, 15 bp, Homo sapiens
aagaacacaccaagt

SEQ ID NO: 1683771 - DNA, 15 bp, Homo sapiens
agaacacaccaagtg

SEQ ID NO: 1683772 - DNA, 15 bp, Homo sapiens
gaacacaccaagtgt

SEQ ID NO: 1683773 - DNA, 15 bp, Homo sapiens
aacacaccaagtgtg

SEQ ID NO: 1683774 - DNA, 15 bp, Homo sapiens
acacaccaagtgtgt

SEQ ID NO: 1683775 - DNA, 15 bp, Homo sapiens
cacaccaagtgtgtg

SEQ ID NO: 1683776 - DNA, 15 bp, Homo sapiens
acaccaagtgtgtgt

SEQ ID NO: 1683777 - DNA, 15 bp, Homo sapiens
caccaagtgtgtgta

SEQ ID NO: 1683778 - DNA, 15 bp, Homo sapiens
accaagtgtgtgtaa

SEQ ID NO: 1683779 - DNA, 15 bp, Homo sapiens
ccaagtgtgtgtaaa

SEQ ID NO: 1683780 - DNA, 15 bp, Homo sapiens
caagtgtgtgtaaat

SEQ ID NO: 1683781 - DNA, 15 bp, Homo sapiens
aagtgtgtgtaaatg

SEQ ID NO: 1683782 - DNA, 15 bp, Homo sapiens
agtgtgtgtaaatga

SEQ ID NO: 1683783 - DNA, 15 bp, Homo sapiens
gtgtgtgtaaatgaa

SEQ ID NO: 1683784 - DNA, 15 bp, Homo sapiens
tgtgtgtaaatgaaa

SEQ ID NO: 1683785 - DNA, 15 bp, Homo sapiens
gtgtgtaaatgaaag

SEQ ID NO: 1683786 - DNA, 15 bp, Homo sapiens
tgtgtaaatgaaagc

SEQ ID NO: 1683787 - DNA, 15 bp, Homo sapiens
gtgtaaatgaaagca

SEQ ID NO: 1683788 - DNA, 15 bp, Homo sapiens
tgtaaatgaaagcat

SEQ ID NO: 1683789 - DNA, 15 bp, Homo sapiens
gtaaatgaaagcatc

SEQ ID NO: 1683790 - DNA, 15 bp, Homo sapiens
taaatgaaagcatct

SEQ ID NO: 1683791 - DNA, 15 bp, Homo sapiens
aaatgaaagcatctc

SEQ ID NO: 1683792 - DNA, 15 bp, Homo sapiens
aatgaaagcatctct

SEQ ID NO: 1683793 - DNA, 15 bp, Homo sapiens
atgaaagcatctctc

SEQ ID NO: 1683794 - DNA, 15 bp, Homo sapiens
tgaaagcatctctca

SEQ ID NO: 1683795 - DNA, 15 bp, Homo sapiens
gaaagcatctctcac

SEQ ID NO: 1683796 - DNA, 15 bp, Homo sapiens
aaagcatctctcacc

SEQ ID NO: 1683797 - DNA, 15 bp, Homo sapiens
aagcatctctcacca

SEQ ID NO: 1683798 - DNA, 15 bp, Homo sapiens
agcatctctcaccaa

SEQ ID NO: 1683799 - DNA, 15 bp, Homo sapiens
gcatctctcaccaac

SEQ ID NO: 1683800 - DNA, 15 bp, Homo sapiens
catctctcaccaaca

SEQ ID NO: 1683801 - DNA, 15 bp, Homo sapiens
atctctcaccaacac

SEQ ID NO: 1683802 - DNA, 15 bp, Homo sapiens
tctctcaccaacacc

SEQ ID NO: 1683803 - DNA, 15 bp, Homo sapiens
ctctcaccaacacct

SEQ ID NO: 1683804 - DNA, 15 bp, Homo sapiens
tctcaccaacacctt

SEQ ID NO: 1683805 - DNA, 15 bp, Homo sapiens
ctcaccaacaccttt

SEQ ID NO: 1683806 - DNA, 15 bp, Homo sapiens
tcaccaacacctttc

SEQ ID NO: 1683807 - DNA, 15 bp, Homo sapiens
caccaacacctttcc

SEQ ID NO: 1683808 - DNA, 15 bp, Homo sapiens
accaacacctttcct

SEQ ID NO: 1683809 - DNA, 15 bp, Homo sapiens
ccaacacctttccta

SEQ ID NO: 1683810 - DNA, 15 bp, Homo sapiens
caacacctttcctag

SEQ ID NO: 1683811 - DNA, 15 bp, Homo sapiens
aacacctttcctaga

SEQ ID NO: 1683812 - DNA, 15 bp, Homo sapiens
acacctttcctagat

SEQ ID NO: 1683813 - DNA, 15 bp, Homo sapiens
cacctttcctagata

SEQ ID NO: 1683814 - DNA, 15 bp, Homo sapiens
acctttcctagatag

SEQ ID NO: 1683815 - DNA, 15 bp, Homo sapiens
cctttcctagataga

SEQ ID NO: 1683816 - DNA, 15 bp, Homo sapiens
ctttcctagatagag

SEQ ID NO: 1683817 - DNA, 15 bp, Homo sapiens
tttcctagatagagt

SEQ ID NO: 1683818 - DNA, 15 bp, Homo sapiens
ttcctagatagagta

SEQ ID NO: 1683819 - DNA, 15 bp, Homo sapiens
tcctagatagagtag

SEQ ID NO: 1683820 - DNA, 15 bp, Homo sapiens
cctagatagagtagg

SEQ ID NO: 1683821 - DNA, 15 bp, Homo sapiens
ctagatagagtaggg

SEQ ID NO: 1683822 - DNA, 15 bp, Homo sapiens
tagatagagtagggt

SEQ ID NO: 1683823 - DNA, 15 bp, Homo sapiens
agatagagtagggtt

SEQ ID NO: 1683824 - DNA, 15 bp, Homo sapiens
gatagagtagggttg

SEQ ID NO: 1683825 - DNA, 15 bp, Homo sapiens
atagagtagggttgt

SEQ ID NO: 1683826 - DNA, 15 bp, Homo sapiens
tagagtagggttgtt

SEQ ID NO: 1683827 - DNA, 15 bp, Homo sapiens
agagtagggttgttc

SEQ ID NO: 1683828 - DNA, 15 bp, Homo sapiens
gagtagggttgttcc

SEQ ID NO: 1683829 - DNA, 15 bp, Homo sapiens
agtagggttgttcca

SEQ ID NO: 1683830 - DNA, 15 bp, Homo sapiens
gtagggttgttccag

SEQ ID NO: 1683831 - DNA, 15 bp, Homo sapiens
tagggttgttccagt

SEQ ID NO: 1683832 - DNA, 15 bp, Homo sapiens
agggttgttccagtg

SEQ ID NO: 1683833 - DNA, 15 bp, Homo sapiens
gggttgttccagtgg

SEQ ID NO: 1683834 - DNA, 15 bp, Homo sapiens
ggttgttccagtggt

SEQ ID NO: 1683835 - DNA, 15 bp, Homo sapiens
gttgttccagtggtg

SEQ ID NO: 1683836 - DNA, 15 bp, Homo sapiens
ttgttccagtggtgg

SEQ ID NO: 1683837 - DNA, 15 bp, Homo sapiens
tgttccagtggtggc

SEQ ID NO: 1683838 - DNA, 15 bp, Homo sapiens
gttccagtggtggct

SEQ ID NO: 1683839 - DNA, 15 bp, Homo sapiens
ttccagtggtggctg

SEQ ID NO: 1683840 - DNA, 15 bp, Homo sapiens
tccagtggtggctgt

SEQ ID NO: 1683841 - DNA, 15 bp, Homo sapiens
ccagtggtggctgtt

SEQ ID NO: 1683842 - DNA, 15 bp, Homo sapiens
cagtggtggctgtta

SEQ ID NO: 1683843 - DNA, 15 bp, Homo sapiens
agtggtggctgttat

SEQ ID NO: 1683844 - DNA, 15 bp, Homo sapiens
gtggtggctgttatg

SEQ ID NO: 1683845 - DNA, 15 bp, Homo sapiens
tggtggctgttatga

SEQ ID NO: 1683846 - DNA, 15 bp, Homo sapiens
ggtggctgttatgac

SEQ ID NO: 1683847 - DNA, 15 bp, Homo sapiens
gtggctgttatgact

SEQ ID NO: 1683848 - DNA, 15 bp, Homo sapiens
tggctgttatgacta

SEQ ID NO: 1683849 - DNA, 15 bp, Homo sapiens
ggctgttatgactac

SEQ ID NO: 1683850 - DNA, 15 bp, Homo sapiens
gctgttatgactacc

SEQ ID NO: 1683851 - DNA, 15 bp, Homo sapiens
ctgttatgactacct

SEQ ID NO: 1683852 - DNA, 15 bp, Homo sapiens
tgttatgactacctt

SEQ ID NO: 1683853 - DNA, 15 bp, Homo sapiens
gttatgactaccttt

SEQ ID NO: 1683854 - DNA, 15 bp, Homo sapiens
ttatgactaccttta

SEQ ID NO: 1683855 - DNA, 15 bp, Homo sapiens
tatgactacctttag

SEQ ID NO: 1683856 - DNA, 15 bp, Homo sapiens
atgactacctttagt

SEQ ID NO: 1683857 - DNA, 15 bp, Homo sapiens
tgactacctttagtc

SEQ ID NO: 1683858 - DNA, 15 bp, Homo sapiens
gactacctttagtcc

SEQ ID NO: 1683859 - DNA, 15 bp, Homo sapiens
actacctttagtcct

SEQ ID NO: 1683860 - DNA, 15 bp, Homo sapiens
ctacctttagtcctg

SEQ ID NO: 1683861 - DNA, 15 bp, Homo sapiens
tacctttagtcctgt

SEQ ID NO: 1683862 - DNA, 15 bp, Homo sapiens
acctttagtcctgta

SEQ ID NO: 1683863 - DNA, 15 bp, Homo sapiens
cctttagtcctgtat

SEQ ID NO: 1683864 - DNA, 15 bp, Homo sapiens
ctttagtcctgtatt

SEQ ID NO: 1683865 - DNA, 15 bp, Homo sapiens
tttagtcctgtattg

SEQ ID NO: 1683866 - DNA, 15 bp, Homo sapiens
ttagtcctgtattgt

SEQ ID NO: 1683867 - DNA, 15 bp, Homo sapiens
tagtcctgtattgtt

SEQ ID NO: 1683868 - DNA, 15 bp, Homo sapiens
agtcctgtattgtta

SEQ ID NO: 1683869 - DNA, 15 bp, Homo sapiens
gtcctgtattgttat

SEQ ID NO: 1683870 - DNA, 15 bp, Homo sapiens
tcctgtattgttatt

SEQ ID NO: 1683871 - DNA, 15 bp, Homo sapiens
cctgtattgttatta

SEQ ID NO: 1683872 - DNA, 15 bp, Homo sapiens
ctgtattgttattat

SEQ ID NO: 1683873 - DNA, 15 bp, Homo sapiens
tgtattgttattatt

SEQ ID NO: 1683874 - DNA, 15 bp, Homo sapiens
gtattgttattatta

SEQ ID NO: 1683875 - DNA, 15 bp, Homo sapiens
tattgttattattaa

SEQ ID NO: 1683876 - DNA, 15 bp, Homo sapiens
attgttattattaat

SEQ ID NO: 1683877 - DNA, 15 bp, Homo sapiens
ttgttattattaatc

SEQ ID NO: 1683878 - DNA, 15 bp, Homo sapiens
tgttattattaatca

SEQ ID NO: 1683879 - DNA, 15 bp, Homo sapiens
gttattattaatcat

SEQ ID NO: 1683880 - DNA, 15 bp, Homo sapiens
ttattattaatcata

SEQ ID NO: 1683881 - DNA, 15 bp, Homo sapiens
tattattaatcataa

SEQ ID NO: 1683882 - DNA, 15 bp, Homo sapiens
attattaatcataat

SEQ ID NO: 1683883 - DNA, 15 bp, Homo sapiens
ttattaatcataatt

SEQ ID NO: 1683884 - DNA, 15 bp, Homo sapiens
tattaatcataattg

SEQ ID NO: 1683885 - DNA, 15 bp, Homo sapiens
attaatcataattga

SEQ ID NO: 1683886 - DNA, 15 bp, Homo sapiens
ttaatcataattgag

SEQ ID NO: 1683887 - DNA, 15 bp, Homo sapiens
taatcataattgagt

SEQ ID NO: 1683888 - DNA, 15 bp, Homo sapiens
aatcataattgagtg

SEQ ID NO: 1683889 - DNA, 15 bp, Homo sapiens
atcataattgagtga

SEQ ID NO: 1683890 - DNA, 15 bp, Homo sapiens
tcataattgagtgag

SEQ ID NO: 1683891 - DNA, 15 bp, Homo sapiens
cataattgagtgagc

SEQ ID NO: 1683892 - DNA, 15 bp, Homo sapiens
ataattgagtgagcg

SEQ ID NO: 1683893 - DNA, 15 bp, Homo sapiens
taattgagtgagcgc

SEQ ID NO: 1683894 - DNA, 15 bp, Homo sapiens
aattgagtgagcgct

SEQ ID NO: 1683895 - DNA, 15 bp, Homo sapiens
attgagtgagcgctc

SEQ ID NO: 1683896 - DNA, 15 bp, Homo sapiens
ttgagtgagcgctcc

SEQ ID NO: 1683897 - DNA, 15 bp, Homo sapiens
tgagtgagcgctcct

SEQ ID NO: 1683898 - DNA, 15 bp, Homo sapiens
gagtgagcgctcctc

SEQ ID NO: 1683899 - DNA, 15 bp, Homo sapiens
agtgagcgctcctcc

SEQ ID NO: 1683900 - DNA, 15 bp, Homo sapiens
gtgagcgctcctcct

SEQ ID NO: 1683901 - DNA, 15 bp, Homo sapiens
tgagcgctcctcctt

SEQ ID NO: 1683902 - DNA, 15 bp, Homo sapiens
gagcgctcctcctta

SEQ ID NO: 1683903 - DNA, 15 bp, Homo sapiens
agcgctcctccttag

SEQ ID NO: 1683904 - DNA, 15 bp, Homo sapiens
gcgctcctccttagg

SEQ ID NO: 1683905 - DNA, 15 bp, Homo sapiens
cgctcctccttagga

SEQ ID NO: 1683906 - DNA, 15 bp, Homo sapiens
gctcctccttaggaa

SEQ ID NO: 1683907 - DNA, 15 bp, Homo sapiens
ctcctccttaggaag

SEQ ID NO: 1683908 - DNA, 15 bp, Homo sapiens
tcctccttaggaaga

SEQ ID NO: 1683909 - DNA, 15 bp, Homo sapiens
cctccttaggaagaa

SEQ ID NO: 1683910 - DNA, 15 bp, Homo sapiens
ctccttaggaagaac

SEQ ID NO: 1683911 - DNA, 15 bp, Homo sapiens
tccttaggaagaact

SEQ ID NO: 1683912 - DNA, 15 bp, Homo sapiens
ccttaggaagaactg

SEQ ID NO: 1683913 - DNA, 15 bp, Homo sapiens
cttaggaagaactgt

SEQ ID NO: 1683914 - DNA, 15 bp, Homo sapiens
ttaggaagaactgtg

SEQ ID NO: 1683915 - DNA, 15 bp, Homo sapiens
taggaagaactgtgc

SEQ ID NO: 1683916 - DNA, 15 bp, Homo sapiens
aggaagaactgtgcc

SEQ ID NO: 1683917 - DNA, 15 bp, Homo sapiens
ggaagaactgtgccc

SEQ ID NO: 1683918 - DNA, 15 bp, Homo sapiens
gaagaactgtgccca

SEQ ID NO: 1683919 - DNA, 15 bp, Homo sapiens
aagaactgtgcccag

SEQ ID NO: 1683920 - DNA, 15 bp, Homo sapiens
agaactgtgcccaga

SEQ ID NO: 1683921 - DNA, 15 bp, Homo sapiens
gaactgtgcccagac

SEQ ID NO: 1683922 - DNA, 15 bp, Homo sapiens
aactgtgcccagact

SEQ ID NO: 1683923 - DNA, 15 bp, Homo sapiens
actgtgcccagactc

SEQ ID NO: 1683924 - DNA, 15 bp, Homo sapiens
ctgtgcccagactct

SEQ ID NO: 1683925 - DNA, 15 bp, Homo sapiens
tgtgcccagactctg

SEQ ID NO: 1683926 - DNA, 15 bp, Homo sapiens
gtgcccagactctgc

SEQ ID NO: 1683927 - DNA, 15 bp, Homo sapiens
tgcccagactctgca

SEQ ID NO: 1683928 - DNA, 15 bp, Homo sapiens
gcccagactctgcag

SEQ ID NO: 1683929 - DNA, 15 bp, Homo sapiens
cccagactctgcaga

SEQ ID NO: 1683930 - DNA, 15 bp, Homo sapiens
ccagactctgcagac

SEQ ID NO: 1683931 - DNA, 15 bp, Homo sapiens
cagactctgcagacc

SEQ ID NO: 1683932 - DNA, 15 bp, Homo sapiens
agactctgcagacca

SEQ ID NO: 1683933 - DNA, 15 bp, Homo sapiens
gactctgcagaccag

SEQ ID NO: 1683934 - DNA, 15 bp, Homo sapiens
actctgcagaccaga

SEQ ID NO: 1683935 - DNA, 15 bp, Homo sapiens
ctctgcagaccagaa

SEQ ID NO: 1683936 - DNA, 15 bp, Homo sapiens
tctgcagaccagaat

SEQ ID NO: 1683937 - DNA, 15 bp, Homo sapiens
ctgcagaccagaatg

SEQ ID NO: 1683938 - DNA, 15 bp, Homo sapiens
tgcagaccagaatga

SEQ ID NO: 1683939 - DNA, 15 bp, Homo sapiens
gcagaccagaatgag

SEQ ID NO: 1683940 - DNA, 15 bp, Homo sapiens
cagaccagaatgaga

SEQ ID NO: 1683941 - DNA, 15 bp, Homo sapiens
agaccagaatgagat

SEQ ID NO: 1683942 - DNA, 15 bp, Homo sapiens
gaccagaatgagatc

SEQ ID NO: 1683943 - DNA, 15 bp, Homo sapiens
accagaatgagatca

SEQ ID NO: 1683944 - DNA, 15 bp, Homo sapiens
ccagaatgagatcat

SEQ ID NO: 1683945 - DNA, 15 bp, Homo sapiens
cagaatgagatcatg

SEQ ID NO: 1683946 - DNA, 15 bp, Homo sapiens
gaatgagatcatgtg

SEQ ID NO: 1683947 - DNA, 15 bp, Homo sapiens
aatgagatcatgtgg

SEQ ID NO: 1683948 - DNA, 15 bp, Homo sapiens
atgagatcatgtgga

SEQ ID NO: 1683949 - DNA, 15 bp, Homo sapiens
tgagatcatgtggag

SEQ ID NO: 1683950 - DNA, 15 bp, Homo sapiens
gagatcatgtggagg

SEQ ID NO: 1683951 - DNA, 15 bp, Homo sapiens
agatcatgtggaggg

SEQ ID NO: 1683952 - DNA, 15 bp, Homo sapiens
gatcatgtggagggg

SEQ ID NO: 1683953 - DNA, 15 bp, Homo sapiens
atcatgtggaggggg

SEQ ID NO: 1683954 - DNA, 15 bp, Homo sapiens
tcatgtggagggggc

SEQ ID NO: 1683955 - DNA, 15 bp, Homo sapiens
catgtggagggggcc

SEQ ID NO: 1683956 - DNA, 15 bp, Homo sapiens
atgtggagggggcct

SEQ ID NO: 1683957 - DNA, 15 bp, Homo sapiens
tgtggagggggccta

SEQ ID NO: 1683958 - DNA, 15 bp, Homo sapiens
gtggagggggcctat

SEQ ID NO: 1683959 - DNA, 15 bp, Homo sapiens
tggagggggcctata

SEQ ID NO: 1683960 - DNA, 15 bp, Homo sapiens
ggagggggcctatag

SEQ ID NO: 1683961 - DNA, 15 bp, Homo sapiens
gagggggcctatagc

SEQ ID NO: 1683962 - DNA, 15 bp, Homo sapiens
agggggcctatagca

SEQ ID NO: 1683963 - DNA, 15 bp, Homo sapiens
gggggcctatagcac

SEQ ID NO: 1683964 - DNA, 15 bp, Homo sapiens
ggggcctatagcact

SEQ ID NO: 1683965 - DNA, 15 bp, Homo sapiens
gggcctatagcacta

SEQ ID NO: 1683966 - DNA, 15 bp, Homo sapiens
ggcctatagcactag

SEQ ID NO: 1683967 - DNA, 15 bp, Homo sapiens
gcctatagcactagc

SEQ ID NO: 1683968 - DNA, 15 bp, Homo sapiens
cctatagcactagca

SEQ ID NO: 1683969 - DNA, 15 bp, Homo sapiens
ctatagcactagcac

SEQ ID NO: 1683970 - DNA, 15 bp, Homo sapiens
tatagcactagcacc

SEQ ID NO: 1683971 - DNA, 15 bp, Homo sapiens
atagcactagcacct

SEQ ID NO: 1683972 - DNA, 15 bp, Homo sapiens
tagcactagcacctg

SEQ ID NO: 1683973 - DNA, 15 bp, Homo sapiens
agcactagcacctgg

SEQ ID NO: 1683974 - DNA, 15 bp, Homo sapiens
gcactagcacctggg

SEQ ID NO: 1683975 - DNA, 15 bp, Homo sapiens
cactagcacctggga

SEQ ID NO: 1683976 - DNA, 15 bp, Homo sapiens
actagcacctgggat

SEQ ID NO: 1683977 - DNA, 15 bp, Homo sapiens
ctagcacctgggatg

SEQ ID NO: 1683978 - DNA, 15 bp, Homo sapiens
tagcacctgggatgt

SEQ ID NO: 1683979 - DNA, 15 bp, Homo sapiens
agcacctgggatgtc

SEQ ID NO: 1683980 - DNA, 15 bp, Homo sapiens
gcacctgggatgtcc

SEQ ID NO: 1683981 - DNA, 15 bp, Homo sapiens
cacctgggatgtcct

SEQ ID NO: 1683982 - DNA, 15 bp, Homo sapiens
acctgggatgtcctg

SEQ ID NO: 1683983 - DNA, 15 bp, Homo sapiens
cctgggatgtcctgg

SEQ ID NO: 1683984 - DNA, 15 bp, Homo sapiens
ctgggatgtcctggg

SEQ ID NO: 1683985 - DNA, 15 bp, Homo sapiens
tgggatgtcctgggc

SEQ ID NO: 1683986 - DNA, 15 bp, Homo sapiens
gggatgtcctgggct

SEQ ID NO: 1683987 - DNA, 15 bp, Homo sapiens
ggatgtcctgggctc

SEQ ID NO: 1683988 - DNA, 15 bp, Homo sapiens
gatgtcctgggctca

SEQ ID NO: 1683989 - DNA, 15 bp, Homo sapiens
atgtcctgggctcag

SEQ ID NO: 1683990 - DNA, 15 bp, Homo sapiens
tgtcctgggctcaga

SEQ ID NO: 1683991 - DNA, 15 bp, Homo sapiens
gtcctgggctcagat

SEQ ID NO: 1683992 - DNA, 15 bp, Homo sapiens
tcctgggctcagatg

SEQ ID NO: 1683993 - DNA, 15 bp, Homo sapiens
cctgggctcagatgg

SEQ ID NO: 1683994 - DNA, 15 bp, Homo sapiens
ctgggctcagatggt

SEQ ID NO: 1683995 - DNA, 15 bp, Homo sapiens
tgggctcagatggtt

SEQ ID NO: 1683996 - DNA, 15 bp, Homo sapiens
gggctcagatggttc

SEQ ID NO: 1683997 - DNA, 15 bp, Homo sapiens
ggctcagatggttct

SEQ ID NO: 1683998 - DNA, 15 bp, Homo sapiens
gctcagatggttcta

SEQ ID NO: 1683999 - DNA, 15 bp, Homo sapiens
ctcagatggttctaa

SEQ ID NO: 1684000 - DNA, 15 bp, Homo sapiens
tcagatggttctaag

SEQ ID NO: 1684001 - DNA, 15 bp, Homo sapiens
cagatggttctaagc

SEQ ID NO: 1684002 - DNA, 15 bp, Homo sapiens
agatggttctaagct

SEQ ID NO: 1684003 - DNA, 15 bp, Homo sapiens
gatggttctaagcta

SEQ ID NO: 1684004 - DNA, 15 bp, Homo sapiens
atggttctaagctat

SEQ ID NO: 1684005 - DNA, 15 bp, Homo sapiens
tggttctaagctatt

SEQ ID NO: 1684006 - DNA, 15 bp, Homo sapiens
ggttctaagctattg

SEQ ID NO: 1684007 - DNA, 15 bp, Homo sapiens
gttctaagctattgt

SEQ ID NO: 1684008 - DNA, 15 bp, Homo sapiens
ttctaagctattgtt

SEQ ID NO: 1684009 - DNA, 15 bp, Homo sapiens
tctaagctattgttt

SEQ ID NO: 1684010 - DNA, 15 bp, Homo sapiens
ctaagctattgtttt

SEQ ID NO: 1684011 - DNA, 15 bp, Homo sapiens
taagctattgttttc

SEQ ID NO: 1684012 - DNA, 15 bp, Homo sapiens
aagctattgttttct

SEQ ID NO: 1684013 - DNA, 15 bp, Homo sapiens
agctattgttttcta

SEQ ID NO: 1684014 - DNA, 15 bp, Homo sapiens
gctattgttttctaa

SEQ ID NO: 1684015 - DNA, 15 bp, Homo sapiens
ctattgttttctaac

SEQ ID NO: 1684016 - DNA, 15 bp, Homo sapiens
tattgttttctaacc

SEQ ID NO: 1684017 - DNA, 15 bp, Homo sapiens
attgttttctaaccc

SEQ ID NO: 1684018 - DNA, 15 bp, Homo sapiens
ttgttttctaaccct

SEQ ID NO: 1684019 - DNA, 15 bp, Homo sapiens
tgttttctaacccta

SEQ ID NO: 1684020 - DNA, 15 bp, Homo sapiens
gttttctaaccctat

SEQ ID NO: 1684021 - DNA, 15 bp, Homo sapiens
ttttctaaccctatg

SEQ ID NO: 1684022 - DNA, 15 bp, Homo sapiens
tttctaaccctatga

SEQ ID NO: 1684023 - DNA, 15 bp, Homo sapiens
ttctaaccctatgat

SEQ ID NO: 1684024 - DNA, 15 bp, Homo sapiens
tctaaccctatgatt

SEQ ID NO: 1684025 - DNA, 15 bp, Homo sapiens
ctaaccctatgattt

SEQ ID NO: 1684026 - DNA, 15 bp, Homo sapiens
taaccctatgatttt

SEQ ID NO: 1684027 - DNA, 15 bp, Homo sapiens
aaccctatgatttta

SEQ ID NO: 1684028 - DNA, 15 bp, Homo sapiens
accctatgattttac

SEQ ID NO: 1684029 - DNA, 15 bp, Homo sapiens
ccctatgattttaca

SEQ ID NO: 1684030 - DNA, 15 bp, Homo sapiens
cctatgattttacat

SEQ ID NO: 1684031 - DNA, 15 bp, Homo sapiens
ctatgattttacatt

SEQ ID NO: 1684032 - DNA, 15 bp, Homo sapiens
tatgattttacattt

SEQ ID NO: 1684033 - DNA, 15 bp, Homo sapiens
atgattttacatttt

SEQ ID NO: 1684034 - DNA, 15 bp, Homo sapiens
tgattttacatttta

SEQ ID NO: 1684035 - DNA, 15 bp, Homo sapiens
gattttacattttac

SEQ ID NO: 1684036 - DNA, 15 bp, Homo sapiens
attttacattttaca

SEQ ID NO: 1684037 - DNA, 15 bp, Homo sapiens
ttttacattttacag

SEQ ID NO: 1684038 - DNA, 15 bp, Homo sapiens
tttacattttacaga

SEQ ID NO: 1684039 - DNA, 15 bp, Homo sapiens
ttacattttacagat

SEQ ID NO: 1684040 - DNA, 15 bp, Homo sapiens
tacattttacagatg

SEQ ID NO: 1684041 - DNA, 15 bp, Homo sapiens
acattttacagatga

SEQ ID NO: 1684042 - DNA, 15 bp, Homo sapiens
cattttacagatgac

SEQ ID NO: 1684043 - DNA, 15 bp, Homo sapiens
attttacagatgaca

SEQ ID NO: 1684044 - DNA, 15 bp, Homo sapiens
ttttacagatgacaa

SEQ ID NO: 1684045 - DNA, 15 bp, Homo sapiens
tttacagatgacaaa

SEQ ID NO: 1684046 - DNA, 15 bp, Homo sapiens
ttacagatgacaaaa

SEQ ID NO: 1684047 - DNA, 15 bp, Homo sapiens
tacagatgacaaaac

SEQ ID NO: 1684048 - DNA, 15 bp, Homo sapiens
acagatgacaaaact

SEQ ID NO: 1684049 - DNA, 15 bp, Homo sapiens
cagatgacaaaactg

SEQ ID NO: 1684050 - DNA, 15 bp, Homo sapiens
agatgacaaaactga

SEQ ID NO: 1684051 - DNA, 15 bp, Homo sapiens
gatgacaaaactgag

SEQ ID NO: 1684052 - DNA, 15 bp, Homo sapiens
atgacaaaactgaga

SEQ ID NO: 1684053 - DNA, 15 bp, Homo sapiens
tgacaaaactgagac

SEQ ID NO: 1684054 - DNA, 15 bp, Homo sapiens
gacaaaactgagact

SEQ ID NO: 1684055 - DNA, 15 bp, Homo sapiens
acaaaactgagactt

SEQ ID NO: 1684056 - DNA, 15 bp, Homo sapiens
caaaactgagacttg

SEQ ID NO: 1684057 - DNA, 15 bp, Homo sapiens
aaaactgagacttgg

SEQ ID NO: 1684058 - DNA, 15 bp, Homo sapiens
aaactgagacttgga

SEQ ID NO: 1684059 - DNA, 15 bp, Homo sapiens
aactgagacttggat

SEQ ID NO: 1684060 - DNA, 15 bp, Homo sapiens
actgagacttggata

SEQ ID NO: 1684061 - DNA, 15 bp, Homo sapiens
ctgagacttggatat

SEQ ID NO: 1684062 - DNA, 15 bp, Homo sapiens
tgagacttggatatg

SEQ ID NO: 1684063 - DNA, 15 bp, Homo sapiens
gagacttggatatgt

SEQ ID NO: 1684064 - DNA, 15 bp, Homo sapiens
agacttggatatgtt

SEQ ID NO: 1684065 - DNA, 15 bp, Homo sapiens
gacttggatatgttt

SEQ ID NO: 1684066 - DNA, 15 bp, Homo sapiens
acttggatatgtttt

SEQ ID NO: 1684067 - DNA, 15 bp, Homo sapiens
cttggatatgttttt

SEQ ID NO: 1684068 - DNA, 15 bp, Homo sapiens
ttggatatgtttttg

SEQ ID NO: 1684069 - DNA, 15 bp, Homo sapiens
tggatatgtttttga

SEQ ID NO: 1684070 - DNA, 15 bp, Homo sapiens
ggatatgtttttgaa

SEQ ID NO: 1684071 - DNA, 15 bp, Homo sapiens
gatatgtttttgaaa

SEQ ID NO: 1684072 - DNA, 15 bp, Homo sapiens
atatgtttttgaaac

SEQ ID NO: 1684073 - DNA, 15 bp, Homo sapiens
tatgtttttgaaact

SEQ ID NO: 1684074 - DNA, 15 bp, Homo sapiens
atgtttttgaaactt

SEQ ID NO: 1684075 - DNA, 15 bp, Homo sapiens
tgtttttgaaacttg

SEQ ID NO: 1684076 - DNA, 15 bp, Homo sapiens
gtttttgaaacttgg

SEQ ID NO: 1684077 - DNA, 15 bp, Homo sapiens
tttttgaaacttggc

SEQ ID NO: 1684078 - DNA, 15 bp, Homo sapiens
ttttgaaacttggca

SEQ ID NO: 1684079 - DNA, 15 bp, Homo sapiens
tttgaaacttggcaa

SEQ ID NO: 1684080 - DNA, 15 bp, Homo sapiens
ttgaaacttggcaag

SEQ ID NO: 1684081 - DNA, 15 bp, Homo sapiens
tgaaacttggcaagg

SEQ ID NO: 1684082 - DNA, 15 bp, Homo sapiens
gaaacttggcaagga

SEQ ID NO: 1684083 - DNA, 15 bp, Homo sapiens
aaacttggcaaggaa

SEQ ID NO: 1684084 - DNA, 15 bp, Homo sapiens
aacttggcaaggaac

SEQ ID NO: 1684085 - DNA, 15 bp, Homo sapiens
acttggcaaggaact

SEQ ID NO: 1684086 - DNA, 15 bp, Homo sapiens
cttggcaaggaactc

SEQ ID NO: 1684087 - DNA, 15 bp, Homo sapiens
ttggcaaggaactca

SEQ ID NO: 1684088 - DNA, 15 bp, Homo sapiens
tggcaaggaactcat

SEQ ID NO: 1684089 - DNA, 15 bp, Homo sapiens
ggcaaggaactcatg

SEQ ID NO: 1684090 - DNA, 15 bp, Homo sapiens
gcaaggaactcatga

SEQ ID NO: 1684091 - DNA, 15 bp, Homo sapiens
caaggaactcatgag

SEQ ID NO: 1684092 - DNA, 15 bp, Homo sapiens
aaggaactcatgagt

SEQ ID NO: 1684093 - DNA, 15 bp, Homo sapiens
aggaactcatgagta

SEQ ID NO: 1684094 - DNA, 15 bp, Homo sapiens
ggaactcatgagtaa

SEQ ID NO: 1684095 - DNA, 15 bp, Homo sapiens
gaactcatgagtaaa

SEQ ID NO: 1684096 - DNA, 15 bp, Homo sapiens
aactcatgagtaaaa

SEQ ID NO: 1684097 - DNA, 15 bp, Homo sapiens
actcatgagtaaaat

SEQ ID NO: 1684098 - DNA, 15 bp, Homo sapiens
ctcatgagtaaaatt

SEQ ID NO: 1684099 - DNA, 15 bp, Homo sapiens
tcatgagtaaaatta

SEQ ID NO: 1684100 - DNA, 15 bp, Homo sapiens
catgagtaaaattaa

SEQ ID NO: 1684101 - DNA, 15 bp, Homo sapiens
atgagtaaaattaat

SEQ ID NO: 1684102 - DNA, 15 bp, Homo sapiens
tgagtaaaattaatg

SEQ ID NO: 1684103 - DNA, 15 bp, Homo sapiens
gagtaaaattaatgg

SEQ ID NO: 1684104 - DNA, 15 bp, Homo sapiens
agtaaaattaatgga

SEQ ID NO: 1684105 - DNA, 15 bp, Homo sapiens
gtaaaattaatggaa

SEQ ID NO: 1684106 - DNA, 15 bp, Homo sapiens
taaaattaatggaac

SEQ ID NO: 1684107 - DNA, 15 bp, Homo sapiens
aaaattaatggaacc

SEQ ID NO: 1684108 - DNA, 15 bp, Homo sapiens
aaattaatggaacca

SEQ ID NO: 1684109 - DNA, 15 bp, Homo sapiens
aattaatggaaccat

SEQ ID NO: 1684110 - DNA, 15 bp, Homo sapiens
attaatggaaccata

SEQ ID NO: 1684111 - DNA, 15 bp, Homo sapiens
ttaatggaaccataa

SEQ ID NO: 1684112 - DNA, 15 bp, Homo sapiens
taatggaaccataat

SEQ ID NO: 1684113 - DNA, 15 bp, Homo sapiens
aatggaaccataatt

SEQ ID NO: 1684114 - DNA, 15 bp, Homo sapiens
atggaaccataattc

SEQ ID NO: 1684115 - DNA, 15 bp, Homo sapiens
tggaaccataattct

SEQ ID NO: 1684116 - DNA, 15 bp, Homo sapiens
ggaaccataattcta

SEQ ID NO: 1684117 - DNA, 15 bp, Homo sapiens
gaaccataattctaa

SEQ ID NO: 1684118 - DNA, 15 bp, Homo sapiens
aaccataattctaat

SEQ ID NO: 1684119 - DNA, 15 bp, Homo sapiens
accataattctaatc

SEQ ID NO: 1684120 - DNA, 15 bp, Homo sapiens
ccataattctaatcc

SEQ ID NO: 1684121 - DNA, 15 bp, Homo sapiens
cataattctaatcca

SEQ ID NO: 1684122 - DNA, 15 bp, Homo sapiens
ataattctaatccag

SEQ ID NO: 1684123 - DNA, 15 bp, Homo sapiens
taattctaatccagt

SEQ ID NO: 1684124 - DNA, 15 bp, Homo sapiens
aattctaatccagtt

SEQ ID NO: 1684125 - DNA, 15 bp, Homo sapiens
attctaatccagttg

SEQ ID NO: 1684126 - DNA, 15 bp, Homo sapiens
ttctaatccagttgt

SEQ ID NO: 1684127 - DNA, 15 bp, Homo sapiens
tctaatccagttgtg

SEQ ID NO: 1684128 - DNA, 15 bp, Homo sapiens
ctaatccagttgtgt

SEQ ID NO: 1684129 - DNA, 15 bp, Homo sapiens
taatccagttgtgtt

SEQ ID NO: 1684130 - DNA, 15 bp, Homo sapiens
aatccagttgtgttt

SEQ ID NO: 1684131 - DNA, 15 bp, Homo sapiens
atccagttgtgtttg

SEQ ID NO: 1684132 - DNA, 15 bp, Homo sapiens
tccagttgtgtttga

SEQ ID NO: 1684133 - DNA, 15 bp, Homo sapiens
ccagttgtgtttgat

SEQ ID NO: 1684134 - DNA, 15 bp, Homo sapiens
cagttgtgtttgatt

SEQ ID NO: 1684135 - DNA, 15 bp, Homo sapiens
agttgtgtttgattc

SEQ ID NO: 1684136 - DNA, 15 bp, Homo sapiens
gttgtgtttgattcc

SEQ ID NO: 1684137 - DNA, 15 bp, Homo sapiens
ttgtgtttgattccc

SEQ ID NO: 1684138 - DNA, 15 bp, Homo sapiens
tgtgtttgattccca

SEQ ID NO: 1684139 - DNA, 15 bp, Homo sapiens
gtgtttgattcccaa

SEQ ID NO: 1684140 - DNA, 15 bp, Homo sapiens
tgtttgattcccaag

SEQ ID NO: 1684141 - DNA, 15 bp, Homo sapiens
gtttgattcccaagc

SEQ ID NO: 1684142 - DNA, 15 bp, Homo sapiens
tttgattcccaagcc

SEQ ID NO: 1684143 - DNA, 15 bp, Homo sapiens
ttgattcccaagccc

SEQ ID NO: 1684144 - DNA, 15 bp, Homo sapiens
tgattcccaagccca

SEQ ID NO: 1684145 - DNA, 15 bp, Homo sapiens
gattcccaagcccaa

SEQ ID NO: 1684146 - DNA, 15 bp, Homo sapiens
attcccaagcccaag

SEQ ID NO: 1684147 - DNA, 15 bp, Homo sapiens
ttcccaagcccaaga

SEQ ID NO: 1684148 - DNA, 15 bp, Homo sapiens
tcccaagcccaagat

SEQ ID NO: 1684149 - DNA, 15 bp, Homo sapiens
cccaagcccaagata

SEQ ID NO: 1684150 - DNA, 15 bp, Homo sapiens
ccaagcccaagatat

SEQ ID NO: 1684151 - DNA, 15 bp, Homo sapiens
caagcccaagatatt

SEQ ID NO: 1684152 - DNA, 15 bp, Homo sapiens
aagcccaagatattg

SEQ ID NO: 1684153 - DNA, 15 bp, Homo sapiens
agcccaagatattgc

SEQ ID NO: 1684154 - DNA, 15 bp, Homo sapiens
gcccaagatattgcc

SEQ ID NO: 1684155 - DNA, 15 bp, Homo sapiens
cccaagatattgccg

SEQ ID NO: 1684156 - DNA, 15 bp, Homo sapiens
ccaagatattgccgt

SEQ ID NO: 1684157 - DNA, 15 bp, Homo sapiens
caagatattgccgtc

SEQ ID NO: 1684158 - DNA, 15 bp, Homo sapiens
aagatattgccgtct

SEQ ID NO: 1684159 - DNA, 15 bp, Homo sapiens
agatattgccgtctg

SEQ ID NO: 1684160 - DNA, 15 bp, Homo sapiens
gatattgccgtctgt

SEQ ID NO: 1684161 - DNA, 15 bp, Homo sapiens
atattgccgtctgtc

SEQ ID NO: 1684162 - DNA, 15 bp, Homo sapiens
tattgccgtctgtca

SEQ ID NO: 1684163 - DNA, 15 bp, Homo sapiens
attgccgtctgtcaa

SEQ ID NO: 1684164 - DNA, 15 bp, Homo sapiens
ttgccgtctgtcaac

SEQ ID NO: 1684165 - DNA, 15 bp, Homo sapiens
tgccgtctgtcaaca

SEQ ID NO: 1684166 - DNA, 15 bp, Homo sapiens
gccgtctgtcaacat

SEQ ID NO: 1684167 - DNA, 15 bp, Homo sapiens
ccgtctgtcaacatt

SEQ ID NO: 1684168 - DNA, 15 bp, Homo sapiens
cgtctgtcaacatta

SEQ ID NO: 1684169 - DNA, 15 bp, Homo sapiens
gtctgtcaacattat

SEQ ID NO: 1684170 - DNA, 15 bp, Homo sapiens
tctgtcaacattatc

SEQ ID NO: 1684171 - DNA, 15 bp, Homo sapiens
ctgtcaacattatca

SEQ ID NO: 1684172 - DNA, 15 bp, Homo sapiens
tgtcaacattatcat

SEQ ID NO: 1684173 - DNA, 15 bp, Homo sapiens
gtcaacattatcatg

SEQ ID NO: 1684174 - DNA, 15 bp, Homo sapiens
tcaacattatcatgc

SEQ ID NO: 1684175 - DNA, 15 bp, Homo sapiens
caacattatcatgct

SEQ ID NO: 1684176 - DNA, 15 bp, Homo sapiens
aacattatcatgctt

SEQ ID NO: 1684177 - DNA, 15 bp, Homo sapiens
acattatcatgcttc

SEQ ID NO: 1684178 - DNA, 15 bp, Homo sapiens
cattatcatgcttct

SEQ ID NO: 1684179 - DNA, 15 bp, Homo sapiens
attatcatgcttctt

SEQ ID NO: 1684180 - DNA, 15 bp, Homo sapiens
ttatcatgcttcttt

SEQ ID NO: 1684181 - DNA, 15 bp, Homo sapiens
tatcatgcttcttta

SEQ ID NO: 1684182 - DNA, 15 bp, Homo sapiens
atcatgcttctttac

SEQ ID NO: 1684183 - DNA, 15 bp, Homo sapiens
tcatgcttctttact

SEQ ID NO: 1684184 - DNA, 15 bp, Homo sapiens
catgcttctttactt

SEQ ID NO: 1684185 - DNA, 15 bp, Homo sapiens
atgcttctttacttt

SEQ ID NO: 1684186 - DNA, 15 bp, Homo sapiens
tgcttctttacttta

SEQ ID NO: 1684187 - DNA, 15 bp, Homo sapiens
gcttctttactttaa

SEQ ID NO: 1684188 - DNA, 15 bp, Homo sapiens
cttctttactttaat

SEQ ID NO: 1684189 - DNA, 15 bp, Homo sapiens
ttctttactttaata

SEQ ID NO: 1684190 - DNA, 15 bp, Homo sapiens
tctttactttaataa

SEQ ID NO: 1684191 - DNA, 15 bp, Homo sapiens
ctttactttaataag

SEQ ID NO: 1684192 - DNA, 15 bp, Homo sapiens
tttactttaataaga

SEQ ID NO: 1684193 - DNA, 15 bp, Homo sapiens
ttactttaataagag

SEQ ID NO: 1684194 - DNA, 15 bp, Homo sapiens
tactttaataagagt

SEQ ID NO: 1684195 - DNA, 15 bp, Homo sapiens
actttaataagagta

SEQ ID NO: 1684196 - DNA, 15 bp, Homo sapiens
ctttaataagagtaa

SEQ ID NO: 1684197 - DNA, 15 bp, Homo sapiens
tttaataagagtaaa

SEQ ID NO: 1684198 - DNA, 15 bp, Homo sapiens
ttaataagagtaaac

SEQ ID NO: 1684199 - DNA, 15 bp, Homo sapiens
taataagagtaaaca

SEQ ID NO: 1684200 - DNA, 15 bp, Homo sapiens
aataagagtaaacag

SEQ ID NO: 1684201 - DNA, 15 bp, Homo sapiens
ataagagtaaacagg

SEQ ID NO: 1684202 - DNA, 15 bp, Homo sapiens
taagagtaaacaggc

SEQ ID NO: 1684203 - DNA, 15 bp, Homo sapiens
aagagtaaacaggca

SEQ ID NO: 1684204 - DNA, 15 bp, Homo sapiens
agagtaaacaggcat

SEQ ID NO: 1684205 - DNA, 15 bp, Homo sapiens
gagtaaacaggcatg

SEQ ID NO: 1684206 - DNA, 15 bp, Homo sapiens
agtaaacaggcatga

SEQ ID NO: 1684207 - DNA, 15 bp, Homo sapiens
gtaaacaggcatgat

SEQ ID NO: 1684208 - DNA, 15 bp, Homo sapiens
taaacaggcatgata

SEQ ID NO: 1684209 - DNA, 15 bp, Homo sapiens
aaacaggcatgatag

SEQ ID NO: 1684210 - DNA, 15 bp, Homo sapiens
aacaggcatgatagt

SEQ ID NO: 1684211 - DNA, 15 bp, Homo sapiens
acaggcatgatagtg

SEQ ID NO: 1684212 - DNA, 15 bp, Homo sapiens
caggcatgatagtgt

SEQ ID NO: 1684213 - DNA, 15 bp, Homo sapiens
aggcatgatagtgtt

SEQ ID NO: 1684214 - DNA, 15 bp, Homo sapiens
ggcatgatagtgttg

SEQ ID NO: 1684215 - DNA, 15 bp, Homo sapiens
gcatgatagtgttga

SEQ ID NO: 1684216 - DNA, 15 bp, Homo sapiens
catgatagtgttgaa

SEQ ID NO: 1684217 - DNA, 15 bp, Homo sapiens
atgatagtgttgaat

SEQ ID NO: 1684218 - DNA, 15 bp, Homo sapiens
tgatagtgttgaatg

SEQ ID NO: 1684219 - DNA, 15 bp, Homo sapiens
gatagtgttgaatga

SEQ ID NO: 1684220 - DNA, 15 bp, Homo sapiens
atagtgttgaatgac

SEQ ID NO: 1684221 - DNA, 15 bp, Homo sapiens
tagtgttgaatgaca

SEQ ID NO: 1684222 - DNA, 15 bp, Homo sapiens
agtgttgaatgacaa

SEQ ID NO: 1684223 - DNA, 15 bp, Homo sapiens
gtgttgaatgacaaa

SEQ ID NO: 1684224 - DNA, 15 bp, Homo sapiens
tgttgaatgacaaag

SEQ ID NO: 1684225 - DNA, 15 bp, Homo sapiens
gttgaatgacaaagc

SEQ ID NO: 1684226 - DNA, 15 bp, Homo sapiens
ttgaatgacaaagct

SEQ ID NO: 1684227 - DNA, 15 bp, Homo sapiens
tgaatgacaaagctc

SEQ ID NO: 1684228 - DNA, 15 bp, Homo sapiens
gaatgacaaagctcc

SEQ ID NO: 1684229 - DNA, 15 bp, Homo sapiens
aatgacaaagctccc

SEQ ID NO: 1684230 - DNA, 15 bp, Homo sapiens
atgacaaagctccct

SEQ ID NO: 1684231 - DNA, 15 bp, Homo sapiens
tgacaaagctcccta

SEQ ID NO: 1684232 - DNA, 15 bp, Homo sapiens
gacaaagctccctag

SEQ ID NO: 1684233 - DNA, 15 bp, Homo sapiens
acaaagctccctagt

SEQ ID NO: 1684234 - DNA, 15 bp, Homo sapiens
caaagctccctagtg

SEQ ID NO: 1684235 - DNA, 15 bp, Homo sapiens
aaagctccctagtgg

SEQ ID NO: 1684236 - DNA, 15 bp, Homo sapiens
aagctccctagtggc

SEQ ID NO: 1684237 - DNA, 15 bp, Homo sapiens
agctccctagtggct

SEQ ID NO: 1684238 - DNA, 15 bp, Homo sapiens
gctccctagtggctt

SEQ ID NO: 1684239 - DNA, 15 bp, Homo sapiens
ctccctagtggcttc

SEQ ID NO: 1684240 - DNA, 15 bp, Homo sapiens
tccctagtggcttcc

SEQ ID NO: 1684241 - DNA, 15 bp, Homo sapiens
ccctagtggcttcct

SEQ ID NO: 1684242 - DNA, 15 bp, Homo sapiens
cctagtggcttcctt

SEQ ID NO: 1684243 - DNA, 15 bp, Homo sapiens
ctagtggcttcctta

SEQ ID NO: 1684244 - DNA, 15 bp, Homo sapiens
tagtggcttccttac

SEQ ID NO: 1684245 - DNA, 15 bp, Homo sapiens
agtggcttccttaca

SEQ ID NO: 1684246 - DNA, 15 bp, Homo sapiens
gtggcttccttacac

SEQ ID NO: 1684247 - DNA, 15 bp, Homo sapiens
tggcttccttacacc

SEQ ID NO: 1684248 - DNA, 15 bp, Homo sapiens
ggcttccttacaccc

SEQ ID NO: 1684249 - DNA, 15 bp, Homo sapiens
gcttccttacacccc

SEQ ID NO: 1684250 - DNA, 15 bp, Homo sapiens
cttccttacacccct

SEQ ID NO: 1684251 - DNA, 15 bp, Homo sapiens
ttccttacacccctg

SEQ ID NO: 1684252 - DNA, 15 bp, Homo sapiens
tccttacacccctgg

SEQ ID NO: 1684253 - DNA, 15 bp, Homo sapiens
ccttacacccctggc

SEQ ID NO: 1684254 - DNA, 15 bp, Homo sapiens
cttacacccctggct

SEQ ID NO: 1684255 - DNA, 15 bp, Homo sapiens
ttacacccctggcta

SEQ ID NO: 1684256 - DNA, 15 bp, Homo sapiens
tacacccctggctat

SEQ ID NO: 1684257 - DNA, 15 bp, Homo sapiens
acacccctggctata

SEQ ID NO: 1684258 - DNA, 15 bp, Homo sapiens
cacccctggctataa

SEQ ID NO: 1684259 - DNA, 15 bp, Homo sapiens
acccctggctataat

SEQ ID NO: 1684260 - DNA, 15 bp, Homo sapiens
cccctggctataatc

SEQ ID NO: 1684261 - DNA, 15 bp, Homo sapiens
ccctggctataatca

SEQ ID NO: 1684262 - DNA, 15 bp, Homo sapiens
cctggctataatcac

SEQ ID NO: 1684263 - DNA, 15 bp, Homo sapiens
ctggctataatcact

SEQ ID NO: 1684264 - DNA, 15 bp, Homo sapiens
tggctataatcactg

SEQ ID NO: 1684265 - DNA, 15 bp, Homo sapiens
ggctataatcactga

SEQ ID NO: 1684266 - DNA, 15 bp, Homo sapiens
gctataatcactgac

SEQ ID NO: 1684267 - DNA, 15 bp, Homo sapiens
ctataatcactgact

SEQ ID NO: 1684268 - DNA, 15 bp, Homo sapiens
tataatcactgactt

SEQ ID NO: 1684269 - DNA, 15 bp, Homo sapiens
ataatcactgacttt

SEQ ID NO: 1684270 - DNA, 15 bp, Homo sapiens
taatcactgactttc

SEQ ID NO: 1684271 - DNA, 15 bp, Homo sapiens
aatcactgactttca

SEQ ID NO: 1684272 - DNA, 15 bp, Homo sapiens
atcactgactttcac

SEQ ID NO: 1684273 - DNA, 15 bp, Homo sapiens
tcactgactttcacc

SEQ ID NO: 1684274 - DNA, 15 bp, Homo sapiens
cactgactttcacct

SEQ ID NO: 1684275 - DNA, 15 bp, Homo sapiens
actgactttcacctc

SEQ ID NO: 1684276 - DNA, 15 bp, Homo sapiens
ctgactttcacctcc

SEQ ID NO: 1684277 - DNA, 15 bp, Homo sapiens
tgactttcacctcct

SEQ ID NO: 1684278 - DNA, 15 bp, Homo sapiens
gactttcacctcctg

SEQ ID NO: 1684279 - DNA, 15 bp, Homo sapiens
actttcacctcctgc

SEQ ID NO: 1684280 - DNA, 15 bp, Homo sapiens
ctttcacctcctgcc

SEQ ID NO: 1684281 - DNA, 15 bp, Homo sapiens
tttcacctcctgccc

SEQ ID NO: 1684282 - DNA, 15 bp, Homo sapiens
ttcacctcctgccct

SEQ ID NO: 1684283 - DNA, 15 bp, Homo sapiens
tcacctcctgccctg

SEQ ID NO: 1684284 - DNA, 15 bp, Homo sapiens
cacctcctgccctgc

SEQ ID NO: 1684285 - DNA, 15 bp, Homo sapiens
acctcctgccctgca

SEQ ID NO: 1684286 - DNA, 15 bp, Homo sapiens
cctcctgccctgcat

SEQ ID NO: 1684287 - DNA, 15 bp, Homo sapiens
ctcctgccctgcatc

SEQ ID NO: 1684288 - DNA, 15 bp, Homo sapiens
tcctgccctgcatct

SEQ ID NO: 1684289 - DNA, 15 bp, Homo sapiens
cctgccctgcatcta

SEQ ID NO: 1684290 - DNA, 15 bp, Homo sapiens
ctgccctgcatctat

SEQ ID NO: 1684291 - DNA, 15 bp, Homo sapiens
tgccctgcatctatt

SEQ ID NO: 1684292 - DNA, 15 bp, Homo sapiens
gccctgcatctattc

SEQ ID NO: 1684293 - DNA, 15 bp, Homo sapiens
ccctgcatctattct

SEQ ID NO: 1684294 - DNA, 15 bp, Homo sapiens
cctgcatctattctg

SEQ ID NO: 1684295 - DNA, 15 bp, Homo sapiens
ctgcatctattctga

SEQ ID NO: 1684296 - DNA, 15 bp, Homo sapiens
tgcatctattctgac

SEQ ID NO: 1684297 - DNA, 15 bp, Homo sapiens
gcatctattctgacc

SEQ ID NO: 1684298 - DNA, 15 bp, Homo sapiens
catctattctgacct

SEQ ID NO: 1684299 - DNA, 15 bp, Homo sapiens
atctattctgaccta

SEQ ID NO: 1684300 - DNA, 15 bp, Homo sapiens
tctattctgacctac

SEQ ID NO: 1684301 - DNA, 15 bp, Homo sapiens
ctattctgacctaca

SEQ ID NO: 1684302 - DNA, 15 bp, Homo sapiens
tattctgacctacac

SEQ ID NO: 1684303 - DNA, 15 bp, Homo sapiens
attctgacctacact

SEQ ID NO: 1684304 - DNA, 15 bp, Homo sapiens
ttctgacctacactg

SEQ ID NO: 1684305 - DNA, 15 bp, Homo sapiens
tctgacctacactgg

SEQ ID NO: 1684306 - DNA, 15 bp, Homo sapiens
ctgacctacactggg

SEQ ID NO: 1684307 - DNA, 15 bp, Homo sapiens
tgacctacactgggg

SEQ ID NO: 1684308 - DNA, 15 bp, Homo sapiens
gacctacactgggga

SEQ ID NO: 1684309 - DNA, 15 bp, Homo sapiens
acctacactggggaa

SEQ ID NO: 1684310 - DNA, 15 bp, Homo sapiens
cctacactggggaaa

SEQ ID NO: 1684311 - DNA, 15 bp, Homo sapiens
ctacactggggaaaa

SEQ ID NO: 1684312 - DNA, 15 bp, Homo sapiens
tacactggggaaaac

SEQ ID NO: 1684313 - DNA, 15 bp, Homo sapiens
acactggggaaaaca

SEQ ID NO: 1684314 - DNA, 15 bp, Homo sapiens
cactggggaaaacag

SEQ ID NO: 1684315 - DNA, 15 bp, Homo sapiens
actggggaaaacagt

SEQ ID NO: 1684316 - DNA, 15 bp, Homo sapiens
ctggggaaaacagta

SEQ ID NO: 1684317 - DNA, 15 bp, Homo sapiens
tggggaaaacagtat

SEQ ID NO: 1684318 - DNA, 15 bp, Homo sapiens
ggggaaaacagtatg

SEQ ID NO: 1684319 - DNA, 15 bp, Homo sapiens
gggaaaacagtatgt

SEQ ID NO: 1684320 - DNA, 15 bp, Homo sapiens
ggaaaacagtatgtg

SEQ ID NO: 1684321 - DNA, 15 bp, Homo sapiens
gaaaacagtatgtgg

SEQ ID NO: 1684322 - DNA, 15 bp, Homo sapiens
aaaacagtatgtggt

SEQ ID NO: 1684323 - DNA, 15 bp, Homo sapiens
aaacagtatgtggtc

SEQ ID NO: 1684324 - DNA, 15 bp, Homo sapiens
aacagtatgtggtct

SEQ ID NO: 1684325 - DNA, 15 bp, Homo sapiens
acagtatgtggtctc

SEQ ID NO: 1684326 - DNA, 15 bp, Homo sapiens
cagtatgtggtctca

SEQ ID NO: 1684327 - DNA, 15 bp, Homo sapiens
agtatgtggtctcaa

SEQ ID NO: 1684328 - DNA, 15 bp, Homo sapiens
gtatgtggtctcaat

SEQ ID NO: 1684329 - DNA, 15 bp, Homo sapiens
tatgtggtctcaatc

SEQ ID NO: 1684330 - DNA, 15 bp, Homo sapiens
atgtggtctcaatcc

SEQ ID NO: 1684331 - DNA, 15 bp, Homo sapiens
tgtggtctcaatcct

SEQ ID NO: 1684332 - DNA, 15 bp, Homo sapiens
gtggtctcaatccta

SEQ ID NO: 1684333 - DNA, 15 bp, Homo sapiens
tggtctcaatcctat

SEQ ID NO: 1684334 - DNA, 15 bp, Homo sapiens
ggtctcaatcctatg

SEQ ID NO: 1684335 - DNA, 15 bp, Homo sapiens
gtctcaatcctatgg

SEQ ID NO: 1684336 - DNA, 15 bp, Homo sapiens
tctcaatcctatggc

SEQ ID NO: 1684337 - DNA, 15 bp, Homo sapiens
ctcaatcctatggct

SEQ ID NO: 1684338 - DNA, 15 bp, Homo sapiens
tcaatcctatggctt

SEQ ID NO: 1684339 - DNA, 15 bp, Homo sapiens
caatcctatggcttc

SEQ ID NO: 1684340 - DNA, 15 bp, Homo sapiens
aatcctatggcttct

SEQ ID NO: 1684341 - DNA, 15 bp, Homo sapiens
atcctatggcttcta

SEQ ID NO: 1684342 - DNA, 15 bp, Homo sapiens
tcctatggcttctac

SEQ ID NO: 1684343 - DNA, 15 bp, Homo sapiens
cctatggcttctact

SEQ ID NO: 1684344 - DNA, 15 bp, Homo sapiens
ctatggcttctacta

SEQ ID NO: 1684345 - DNA, 15 bp, Homo sapiens
tatggcttctactag

SEQ ID NO: 1684346 - DNA, 15 bp, Homo sapiens
atggcttctactagt

SEQ ID NO: 1684347 - DNA, 15 bp, Homo sapiens
tggcttctactagtg

SEQ ID NO: 1684348 - DNA, 15 bp, Homo sapiens
ggcttctactagtgt

SEQ ID NO: 1684349 - DNA, 15 bp, Homo sapiens
gcttctactagtgta

SEQ ID NO: 1684350 - DNA, 15 bp, Homo sapiens
cttctactagtgtag

SEQ ID NO: 1684351 - DNA, 15 bp, Homo sapiens
ttctactagtgtaga

SEQ ID NO: 1684352 - DNA, 15 bp, Homo sapiens
tctactagtgtagaa

SEQ ID NO: 1684353 - DNA, 15 bp, Homo sapiens
ctactagtgtagaag

SEQ ID NO: 1684354 - DNA, 15 bp, Homo sapiens
tactagtgtagaagt

SEQ ID NO: 1684355 - DNA, 15 bp, Homo sapiens
actagtgtagaagtg

SEQ ID NO: 1684356 - DNA, 15 bp, Homo sapiens
ctagtgtagaagtgt

SEQ ID NO: 1684357 - DNA, 15 bp, Homo sapiens
tagtgtagaagtgtt

SEQ ID NO: 1684358 - DNA, 15 bp, Homo sapiens
agtgtagaagtgtta

SEQ ID NO: 1684359 - DNA, 15 bp, Homo sapiens
gtgtagaagtgttaa

SEQ ID NO: 1684360 - DNA, 15 bp, Homo sapiens
tgtagaagtgttaat

SEQ ID NO: 1684361 - DNA, 15 bp, Homo sapiens
gtagaagtgttaatg

SEQ ID NO: 1684362 - DNA, 15 bp, Homo sapiens
tagaagtgttaatga

SEQ ID NO: 1684363 - DNA, 15 bp, Homo sapiens
agaagtgttaatgac

SEQ ID NO: 1684364 - DNA, 15 bp, Homo sapiens
gaagtgttaatgaca

SEQ ID NO: 1684365 - DNA, 15 bp, Homo sapiens
aagtgttaatgacat

SEQ ID NO: 1684366 - DNA, 15 bp, Homo sapiens
agtgttaatgacatc

SEQ ID NO: 1684367 - DNA, 15 bp, Homo sapiens
gtgttaatgacatct

SEQ ID NO: 1684368 - DNA, 15 bp, Homo sapiens
tgttaatgacatctt

SEQ ID NO: 1684369 - DNA, 15 bp, Homo sapiens
gttaatgacatcttg

SEQ ID NO: 1684370 - DNA, 15 bp, Homo sapiens
ttaatgacatcttgt

SEQ ID NO: 1684371 - DNA, 15 bp, Homo sapiens
taatgacatcttgtt

SEQ ID NO: 1684372 - DNA, 15 bp, Homo sapiens
aatgacatcttgtta

SEQ ID NO: 1684373 - DNA, 15 bp, Homo sapiens
atgacatcttgttat

SEQ ID NO: 1684374 - DNA, 15 bp, Homo sapiens
tgacatcttgttatt

SEQ ID NO: 1684375 - DNA, 15 bp, Homo sapiens
gacatcttgttatta

SEQ ID NO: 1684376 - DNA, 15 bp, Homo sapiens
acatcttgttattaa

SEQ ID NO: 1684377 - DNA, 15 bp, Homo sapiens
catcttgttattaac

SEQ ID NO: 1684378 - DNA, 15 bp, Homo sapiens
atcttgttattaaca

SEQ ID NO: 1684379 - DNA, 15 bp, Homo sapiens
tcttgttattaacat

SEQ ID NO: 1684380 - DNA, 15 bp, Homo sapiens
cttgttattaacatc

SEQ ID NO: 1684381 - DNA, 15 bp, Homo sapiens
ttgttattaacatct

SEQ ID NO: 1684382 - DNA, 15 bp, Homo sapiens
tgttattaacatctt

SEQ ID NO: 1684383 - DNA, 15 bp, Homo sapiens
tattaacatcttatt

SEQ ID NO: 1684384 - DNA, 15 bp, Homo sapiens
attaacatcttattg

SEQ ID NO: 1684385 - DNA, 15 bp, Homo sapiens
ttaacatcttattgt

SEQ ID NO: 1684386 - DNA, 15 bp, Homo sapiens
taacatcttattgtt

SEQ ID NO: 1684387 - DNA, 15 bp, Homo sapiens
aacatcttattgtta

SEQ ID NO: 1684388 - DNA, 15 bp, Homo sapiens
acatcttattgttaa

SEQ ID NO: 1684389 - DNA, 15 bp, Homo sapiens
catcttattgttaat

SEQ ID NO: 1684390 - DNA, 15 bp, Homo sapiens
atcttattgttaatt

SEQ ID NO: 1684391 - DNA, 15 bp, Homo sapiens
tcttattgttaattt

SEQ ID NO: 1684392 - DNA, 15 bp, Homo sapiens
cttattgttaatttg

SEQ ID NO: 1684393 - DNA, 15 bp, Homo sapiens
ttattgttaatttgt

SEQ ID NO: 1684394 - DNA, 15 bp, Homo sapiens
tattgttaatttgtg

SEQ ID NO: 1684395 - DNA, 15 bp, Homo sapiens
attgttaatttgtgg

SEQ ID NO: 1684396 - DNA, 15 bp, Homo sapiens
ttgttaatttgtggt

SEQ ID NO: 1684397 - DNA, 15 bp, Homo sapiens
tgttaatttgtggtc

SEQ ID NO: 1684398 - DNA, 15 bp, Homo sapiens
gttaatttgtggtct

SEQ ID NO: 1684399 - DNA, 15 bp, Homo sapiens
ttaatttgtggtcta

SEQ ID NO: 1684400 - DNA, 15 bp, Homo sapiens
taatttgtggtctat

SEQ ID NO: 1684401 - DNA, 15 bp, Homo sapiens
aatttgtggtctata

SEQ ID NO: 1684402 - DNA, 15 bp, Homo sapiens
atttgtggtctatat

SEQ ID NO: 1684403 - DNA, 15 bp, Homo sapiens
tttgtggtctatatt

SEQ ID NO: 1684404 - DNA, 15 bp, Homo sapiens
ttgtggtctatattt

SEQ ID NO: 1684405 - DNA, 15 bp, Homo sapiens
tgtggtctatatttt

SEQ ID NO: 1684406 - DNA, 15 bp, Homo sapiens
gtggtctatatttta

SEQ ID NO: 1684407 - DNA, 15 bp, Homo sapiens
tggtctatattttaa

SEQ ID NO: 1684408 - DNA, 15 bp, Homo sapiens
ggtctatattttaaa

SEQ ID NO: 1684409 - DNA, 15 bp, Homo sapiens
gtctatattttaaac

SEQ ID NO: 1684410 - DNA, 15 bp, Homo sapiens
tctatattttaaaca

SEQ ID NO: 1684411 - DNA, 15 bp, Homo sapiens
ctatattttaaacag

SEQ ID NO: 1684412 - DNA, 15 bp, Homo sapiens
tatattttaaacaga

SEQ ID NO: 1684413 - DNA, 15 bp, Homo sapiens
atattttaaacagat

SEQ ID NO: 1684414 - DNA, 15 bp, Homo sapiens
tattttaaacagata

SEQ ID NO: 1684415 - DNA, 15 bp, Homo sapiens
attttaaacagataa

SEQ ID NO: 1684416 - DNA, 15 bp, Homo sapiens
ttttaaacagataaa

SEQ ID NO: 1684417 - DNA, 15 bp, Homo sapiens
tttaaacagataaat

SEQ ID NO: 1684418 - DNA, 15 bp, Homo sapiens
ttaaacagataaatt

SEQ ID NO: 1684419 - DNA, 15 bp, Homo sapiens
taaacagataaattc

SEQ ID NO: 1684420 - DNA, 15 bp, Homo sapiens
aaacagataaattct

SEQ ID NO: 1684421 - DNA, 15 bp, Homo sapiens
aacagataaattctg

SEQ ID NO: 1684422 - DNA, 15 bp, Homo sapiens
acagataaattctga

SEQ ID NO: 1684423 - DNA, 15 bp, Homo sapiens
cagataaattctgat

SEQ ID NO: 1684424 - DNA, 15 bp, Homo sapiens
agataaattctgatg

SEQ ID NO: 1684425 - DNA, 15 bp, Homo sapiens
gataaattctgatgc

SEQ ID NO: 1684426 - DNA, 15 bp, Homo sapiens
ataaattctgatgct

SEQ ID NO: 1684427 - DNA, 15 bp, Homo sapiens
taaattctgatgctt

SEQ ID NO: 1684428 - DNA, 15 bp, Homo sapiens
aaattctgatgcttt

SEQ ID NO: 1684429 - DNA, 15 bp, Homo sapiens
aattctgatgctttt

SEQ ID NO: 1684430 - DNA, 15 bp, Homo sapiens
attctgatgctttta

SEQ ID NO: 1684431 - DNA, 15 bp, Homo sapiens
ttctgatgcttttaa

SEQ ID NO: 1684432 - DNA, 15 bp, Homo sapiens
tctgatgcttttaaa

SEQ ID NO: 1684433 - DNA, 15 bp, Homo sapiens
ctgatgcttttaaag

SEQ ID NO: 1684434 - DNA, 15 bp, Homo sapiens
tgatgcttttaaaga

SEQ ID NO: 1684435 - DNA, 15 bp, Homo sapiens
gatgcttttaaagaa

SEQ ID NO: 1684436 - DNA, 15 bp, Homo sapiens
atgcttttaaagaac

SEQ ID NO: 1684437 - DNA, 15 bp, Homo sapiens
tgcttttaaagaacc

SEQ ID NO: 1684438 - DNA, 15 bp, Homo sapiens
gcttttaaagaacca

SEQ ID NO: 1684439 - DNA, 15 bp, Homo sapiens
cttttaaagaaccag

SEQ ID NO: 1684440 - DNA, 15 bp, Homo sapiens
ttttaaagaaccaga

SEQ ID NO: 1684441 - DNA, 15 bp, Homo sapiens
tttaaagaaccagac

SEQ ID NO: 1684442 - DNA, 15 bp, Homo sapiens
ttaaagaaccagaca

SEQ ID NO: 1684443 - DNA, 15 bp, Homo sapiens
taaagaaccagacaa

SEQ ID NO: 1684444 - DNA, 15 bp, Homo sapiens
aaagaaccagacaat

SEQ ID NO: 1684445 - DNA, 15 bp, Homo sapiens
aagaaccagacaata

SEQ ID NO: 1684446 - DNA, 15 bp, Homo sapiens
agaaccagacaataa

SEQ ID NO: 1684447 - DNA, 15 bp, Homo sapiens
gaaccagacaataaa

SEQ ID NO: 1684448 - DNA, 15 bp, Homo sapiens
aaccagacaataaat

SEQ ID NO: 1684449 - DNA, 15 bp, Homo sapiens
accagacaataaata

SEQ ID NO: 1684450 - DNA, 15 bp, Homo sapiens
ccagacaataaataa

SEQ ID NO: 1684451 - DNA, 15 bp, Homo sapiens
cagacaataaataaa

SEQ ID NO: 1684452 - DNA, 15 bp, Homo sapiens
agacaataaataaat

SEQ ID NO: 1684453 - DNA, 15 bp, Homo sapiens
gacaataaataaata

SEQ ID NO: 1684454 - DNA, 15 bp, Homo sapiens
acaataaataaatat

SEQ ID NO: 1684455 - DNA, 15 bp, Homo sapiens
caataaataaatatc

SEQ ID NO: 1684456 - DNA, 15 bp, Homo sapiens
aataaataaatatca

SEQ ID NO: 1684457 - DNA, 15 bp, Homo sapiens
ataaataaatatcaa

SEQ ID NO: 1684458 - DNA, 15 bp, Homo sapiens
taaataaatatcaat

SEQ ID NO: 1684459 - DNA, 15 bp, Homo sapiens
aaataaatatcaatt

SEQ ID NO: 1684460 - DNA, 15 bp, Homo sapiens
aataaatatcaattt

SEQ ID NO: 1684461 - DNA, 15 bp, Homo sapiens
ataaatatcaatttt

SEQ ID NO: 1684462 - DNA, 15 bp, Homo sapiens
taaatatcaatttta

SEQ ID NO: 1684463 - DNA, 15 bp, Homo sapiens
aaatatcaattttat

SEQ ID NO: 1684464 - DNA, 15 bp, Homo sapiens
aatatcaattttatt

SEQ ID NO: 1684465 - DNA, 15 bp, Homo sapiens
atatcaattttattt

SEQ ID NO: 1684466 - DNA, 15 bp, Homo sapiens
tatcaattttatttt

SEQ ID NO: 1684467 - DNA, 15 bp, Homo sapiens
atcaattttattttg

SEQ ID NO: 1684468 - DNA, 15 bp, Homo sapiens
tcaattttattttgt

SEQ ID NO: 1684469 - DNA, 15 bp, Homo sapiens
caattttattttgta

SEQ ID NO: 1684470 - DNA, 15 bp, Homo sapiens
aattttattttgtag

SEQ ID NO: 1684471 - DNA, 15 bp, Homo sapiens
attttattttgtagt

SEQ ID NO: 1684472 - DNA, 15 bp, Homo sapiens
ttttattttgtagtt

SEQ ID NO: 1684473 - DNA, 15 bp, Homo sapiens
tttattttgtagttc

SEQ ID NO: 1684474 - DNA, 15 bp, Homo sapiens
ttattttgtagttca

SEQ ID NO: 1684475 - DNA, 15 bp, Homo sapiens
tattttgtagttcaa

SEQ ID NO: 1684476 - DNA, 15 bp, Homo sapiens
attttgtagttcaaa

SEQ ID NO: 1684477 - DNA, 15 bp, Homo sapiens
ttttgtagttcaaaa

SEQ ID NO: 1684478 - DNA, 15 bp, Homo sapiens
tttgtagttcaaaaa

SEQ ID NO: 1684479 - DNA, 15 bp, Homo sapiens
ttgtagttcaaaaag

SEQ ID NO: 1684480 - DNA, 15 bp, Homo sapiens
tgtagttcaaaaagt

SEQ ID NO: 1684481 - DNA, 15 bp, Homo sapiens
gtagttcaaaaagtt

SEQ ID NO: 1684482 - DNA, 15 bp, Homo sapiens
tagttcaaaaagttg

SEQ ID NO: 1684483 - DNA, 15 bp, Homo sapiens
agttcaaaaagttgc

SEQ ID NO: 1684484 - DNA, 15 bp, Homo sapiens
gttcaaaaagttgct

SEQ ID NO: 1684485 - DNA, 15 bp, Homo sapiens
ttcaaaaagttgctg

SEQ ID NO: 1684486 - DNA, 15 bp, Homo sapiens
tcaaaaagttgctgt

SEQ ID NO: 1684487 - DNA, 15 bp, Homo sapiens
caaaaagttgctgtc

SEQ ID NO: 1684488 - DNA, 15 bp, Homo sapiens
aaaaagttgctgtcc

SEQ ID NO: 1684489 - DNA, 15 bp, Homo sapiens
aaaagttgctgtcca

SEQ ID NO: 1684490 - DNA, 15 bp, Homo sapiens
aaagttgctgtccat

SEQ ID NO: 1684491 - DNA, 15 bp, Homo sapiens
aagttgctgtccatt

SEQ ID NO: 1684492 - DNA, 15 bp, Homo sapiens
agttgctgtccattt

SEQ ID NO: 1684493 - DNA, 15 bp, Homo sapiens
gttgctgtccatttg

SEQ ID NO: 1684494 - DNA, 15 bp, Homo sapiens
ttgctgtccatttga

SEQ ID NO: 1684495 - DNA, 15 bp, Homo sapiens
tgctgtccatttgat

SEQ ID NO: 1684496 - DNA, 15 bp, Homo sapiens
gctgtccatttgata

SEQ ID NO: 1684497 - DNA, 15 bp, Homo sapiens
ctgtccatttgatat

SEQ ID NO: 1684498 - DNA, 15 bp, Homo sapiens
tgtccatttgatatt

SEQ ID NO: 1684499 - DNA, 15 bp, Homo sapiens
gtccatttgatattc

SEQ ID NO: 1684500 - DNA, 15 bp, Homo sapiens
tccatttgatattca

SEQ ID NO: 1684501 - DNA, 15 bp, Homo sapiens
ccatttgatattcag

SEQ ID NO: 1684502 - DNA, 15 bp, Homo sapiens
catttgatattcaga

SEQ ID NO: 1684503 - DNA, 15 bp, Homo sapiens
atttgatattcagat

SEQ ID NO: 1684504 - DNA, 15 bp, Homo sapiens
tttgatattcagatg

SEQ ID NO: 1684505 - DNA, 15 bp, Homo sapiens
ttgatattcagatga

SEQ ID NO: 1684506 - DNA, 15 bp, Homo sapiens
tgatattcagatgat

SEQ ID NO: 1684507 - DNA, 15 bp, Homo sapiens
gatattcagatgatg

SEQ ID NO: 1684508 - DNA, 15 bp, Homo sapiens
atattcagatgatgc

SEQ ID NO: 1684509 - DNA, 15 bp, Homo sapiens
tattcagatgatgca

SEQ ID NO: 1684510 - DNA, 15 bp, Homo sapiens
attcagatgatgcaa

SEQ ID NO: 1684511 - DNA, 15 bp, Homo sapiens
ttcagatgatgcaaa

SEQ ID NO: 1684512 - DNA, 15 bp, Homo sapiens
tcagatgatgcaaat

SEQ ID NO: 1684513 - DNA, 15 bp, Homo sapiens
cagatgatgcaaata

SEQ ID NO: 1684514 - DNA, 15 bp, Homo sapiens
agatgatgcaaatat

SEQ ID NO: 1684515 - DNA, 15 bp, Homo sapiens
gatgatgcaaatatt

SEQ ID NO: 1684516 - DNA, 15 bp, Homo sapiens
atgatgcaaatattt

SEQ ID NO: 1684517 - DNA, 15 bp, Homo sapiens
tgatgcaaatatttc

SEQ ID NO: 1684518 - DNA, 15 bp, Homo sapiens
gatgcaaatatttca

SEQ ID NO: 1684519 - DNA, 15 bp, Homo sapiens
atgcaaatatttcat

SEQ ID NO: 1684520 - DNA, 15 bp, Homo sapiens
tgcaaatatttcatg

SEQ ID NO: 1684521 - DNA, 15 bp, Homo sapiens
gcaaatatttcatgt

SEQ ID NO: 1684522 - DNA, 15 bp, Homo sapiens
caaatatttcatgtc

SEQ ID NO: 1684523 - DNA, 15 bp, Homo sapiens
aaatatttcatgtcc

SEQ ID NO: 1684524 - DNA, 15 bp, Homo sapiens
aatatttcatgtcct

SEQ ID NO: 1684525 - DNA, 15 bp, Homo sapiens
atatttcatgtcctg

SEQ ID NO: 1684526 - DNA, 15 bp, Homo sapiens
tatttcatgtcctga

SEQ ID NO: 1684527 - DNA, 15 bp, Homo sapiens
atttcatgtcctgaa

SEQ ID NO: 1684528 - DNA, 15 bp, Homo sapiens
tttcatgtcctgaag

SEQ ID NO: 1684529 - DNA, 15 bp, Homo sapiens
ttcatgtcctgaaga

SEQ ID NO: 1684530 - DNA, 15 bp, Homo sapiens
tcatgtcctgaagaa

SEQ ID NO: 1684531 - DNA, 15 bp, Homo sapiens
catgtcctgaagaaa

SEQ ID NO: 1684532 - DNA, 15 bp, Homo sapiens
atgtcctgaagaaaa

SEQ ID NO: 1684533 - DNA, 15 bp, Homo sapiens
tgtcctgaagaaaag

SEQ ID NO: 1684534 - DNA, 15 bp, Homo sapiens
gtcctgaagaaaagt

SEQ ID NO: 1684535 - DNA, 15 bp, Homo sapiens
tcctgaagaaaagtc

SEQ ID NO: 1684536 - DNA, 15 bp, Homo sapiens
cctgaagaaaagtcc

SEQ ID NO: 1684537 - DNA, 15 bp, Homo sapiens
ctgaagaaaagtcca

SEQ ID NO: 1684538 - DNA, 15 bp, Homo sapiens
tgaagaaaagtccat

SEQ ID NO: 1684539 - DNA, 15 bp, Homo sapiens
gaagaaaagtccata

SEQ ID NO: 1684540 - DNA, 15 bp, Homo sapiens
aagaaaagtccataa

SEQ ID NO: 1684541 - DNA, 15 bp, Homo sapiens
agaaaagtccataaa

SEQ ID NO: 1684542 - DNA, 15 bp, Homo sapiens
gaaaagtccataaat

SEQ ID NO: 1684543 - DNA, 15 bp, Homo sapiens
aaaagtccataaatg

SEQ ID NO: 1684544 - DNA, 15 bp, Homo sapiens
aaagtccataaatga

SEQ ID NO: 1684545 - DNA, 15 bp, Homo sapiens
aagtccataaatgag

SEQ ID NO: 1684546 - DNA, 15 bp, Homo sapiens
agtccataaatgagt

SEQ ID NO: 1684547 - DNA, 15 bp, Homo sapiens
gtccataaatgagta

SEQ ID NO: 1684548 - DNA, 15 bp, Homo sapiens
tccataaatgagtaa

SEQ ID NO: 1684549 - DNA, 15 bp, Homo sapiens
ccataaatgagtaaa

SEQ ID NO: 1684550 - DNA, 15 bp, Homo sapiens
cataaatgagtaaag

SEQ ID NO: 1684551 - DNA, 15 bp, Homo sapiens
ataaatgagtaaagg

SEQ ID NO: 1684552 - DNA, 15 bp, Homo sapiens
taaatgagtaaaggt

SEQ ID NO: 1684553 - DNA, 15 bp, Homo sapiens
aaatgagtaaaggta

SEQ ID NO: 1684554 - DNA, 15 bp, Homo sapiens
aatgagtaaaggtag

SEQ ID NO: 1684555 - DNA, 15 bp, Homo sapiens
atgagtaaaggtagc

SEQ ID NO: 1684556 - DNA, 15 bp, Homo sapiens
tgagtaaaggtagca

SEQ ID NO: 1684557 - DNA, 15 bp, Homo sapiens
gagtaaaggtagcag

SEQ ID NO: 1684558 - DNA, 15 bp, Homo sapiens
agtaaaggtagcagc

SEQ ID NO: 1684559 - DNA, 15 bp, Homo sapiens
gtaaaggtagcagca

SEQ ID NO: 1684560 - DNA, 15 bp, Homo sapiens
taaaggtagcagcac

SEQ ID NO: 1684561 - DNA, 15 bp, Homo sapiens
aaaggtagcagcact

SEQ ID NO: 1684562 - DNA, 15 bp, Homo sapiens
aaggtagcagcactc

SEQ ID NO: 1684563 - DNA, 15 bp, Homo sapiens
aggtagcagcactcc

SEQ ID NO: 1684564 - DNA, 15 bp, Homo sapiens
ggtagcagcactcct

SEQ ID NO: 1684565 - DNA, 15 bp, Homo sapiens
gtagcagcactcctg

SEQ ID NO: 1684566 - DNA, 15 bp, Homo sapiens
tagcagcactcctgg

SEQ ID NO: 1684567 - DNA, 15 bp, Homo sapiens
agcagcactcctgga

SEQ ID NO: 1684568 - DNA, 15 bp, Homo sapiens
gcagcactcctggac

SEQ ID NO: 1684569 - DNA, 15 bp, Homo sapiens
cagcactcctggacc

SEQ ID NO: 1684570 - DNA, 15 bp, Homo sapiens
agcactcctggaccc

SEQ ID NO: 1684571 - DNA, 15 bp, Homo sapiens
gcactcctggaccct

SEQ ID NO: 1684572 - DNA, 15 bp, Homo sapiens
cactcctggacccta

SEQ ID NO: 1684573 - DNA, 15 bp, Homo sapiens
actcctggaccctaa

SEQ ID NO: 1684574 - DNA, 15 bp, Homo sapiens
ctcctggaccctaaa

SEQ ID NO: 1684575 - DNA, 15 bp, Homo sapiens
tcctggaccctaaac

SEQ ID NO: 1684576 - DNA, 15 bp, Homo sapiens
cctggaccctaaacg

SEQ ID NO: 1684577 - DNA, 15 bp, Homo sapiens
ctggaccctaaacga

SEQ ID NO: 1684578 - DNA, 15 bp, Homo sapiens
tggaccctaaacgag

SEQ ID NO: 1684579 - DNA, 15 bp, Homo sapiens
ggaccctaaacgagt

SEQ ID NO: 1684580 - DNA, 15 bp, Homo sapiens
gaccctaaacgagtg

SEQ ID NO: 1684581 - DNA, 15 bp, Homo sapiens
accctaaacgagtgt

SEQ ID NO: 1684582 - DNA, 15 bp, Homo sapiens
ccctaaacgagtgtc

SEQ ID NO: 1684583 - DNA, 15 bp, Homo sapiens
cctaaacgagtgtct

SEQ ID NO: 1684584 - DNA, 15 bp, Homo sapiens
ctaaacgagtgtctt

SEQ ID NO: 1684585 - DNA, 15 bp, Homo sapiens
taaacgagtgtcttc

SEQ ID NO: 1684586 - DNA, 15 bp, Homo sapiens
aaacgagtgtcttcg

SEQ ID NO: 1684587 - DNA, 15 bp, Homo sapiens
aacgagtgtcttcgt

SEQ ID NO: 1684588 - DNA, 15 bp, Homo sapiens
acgagtgtcttcgtg

SEQ ID NO: 1684589 - DNA, 15 bp, Homo sapiens
cgagtgtcttcgtgt

SEQ ID NO: 1684590 - DNA, 15 bp, Homo sapiens
gagtgtcttcgtgtg

SEQ ID NO: 1684591 - DNA, 15 bp, Homo sapiens
agtgtcttcgtgtgt

SEQ ID NO: 1684592 - DNA, 15 bp, Homo sapiens
gtgtcttcgtgtgtg

SEQ ID NO: 1684593 - DNA, 15 bp, Homo sapiens
tgtcttcgtgtgtgt

SEQ ID NO: 1684594 - DNA, 15 bp, Homo sapiens
gtcttcgtgtgtgtg

SEQ ID NO: 1684595 - DNA, 15 bp, Homo sapiens
tcttcgtgtgtgtgt

SEQ ID NO: 1684596 - DNA, 15 bp, Homo sapiens
tcgtgtgtgtgtgtg

SEQ ID NO: 1684597 - DNA, 15 bp, Homo sapiens
tgtgtgtgtgtgtag

SEQ ID NO: 1684598 - DNA, 15 bp, Homo sapiens
gtgtgtgtgtgtaga

SEQ ID NO: 1684599 - DNA, 15 bp, Homo sapiens
tgtgtgtgtgtagaa

SEQ ID NO: 1684600 - DNA, 15 bp, Homo sapiens
gtgtgtgtgtagaaa

SEQ ID NO: 1684601 - DNA, 15 bp, Homo sapiens
tgtgtgtgtagaaag

SEQ ID NO: 1684602 - DNA, 15 bp, Homo sapiens
gtgtgtgtagaaaga

SEQ ID NO: 1684603 - DNA, 15 bp, Homo sapiens
tgtgtgtagaaagat

SEQ ID NO: 1684604 - DNA, 15 bp, Homo sapiens
gtgtgtagaaagata

SEQ ID NO: 1684605 - DNA, 15 bp, Homo sapiens
tgtgtagaaagatag

SEQ ID NO: 1684606 - DNA, 15 bp, Homo sapiens
gtgtagaaagataga

SEQ ID NO: 1684607 - DNA, 15 bp, Homo sapiens
tgtagaaagatagag

SEQ ID NO: 1684608 - DNA, 15 bp, Homo sapiens
gtagaaagatagaga

SEQ ID NO: 1684609 - DNA, 15 bp, Homo sapiens
tagaaagatagagag

SEQ ID NO: 1684610 - DNA, 15 bp, Homo sapiens
aagatagagagagac

SEQ ID NO: 1684611 - DNA, 15 bp, Homo sapiens
agatagagagagaca

SEQ ID NO: 1684612 - DNA, 15 bp, Homo sapiens
gatagagagagacaa

SEQ ID NO: 1684613 - DNA, 15 bp, Homo sapiens
atagagagagacaat

SEQ ID NO: 1684614 - DNA, 15 bp, Homo sapiens
tagagagagacaata

SEQ ID NO: 1684615 - DNA, 15 bp, Homo sapiens
agagagagacaatat

SEQ ID NO: 1684616 - DNA, 15 bp, Homo sapiens
gagagagacaatatg

SEQ ID NO: 1684617 - DNA, 15 bp, Homo sapiens
agagagacaatatga

SEQ ID NO: 1684618 - DNA, 15 bp, Homo sapiens
gagagacaatatgag

SEQ ID NO: 1684619 - DNA, 15 bp, Homo sapiens
agagacaatatgagc

SEQ ID NO: 1684620 - DNA, 15 bp, Homo sapiens
gagacaatatgagca

SEQ ID NO: 1684621 - DNA, 15 bp, Homo sapiens
agacaatatgagcag

SEQ ID NO: 1684622 - DNA, 15 bp, Homo sapiens
gacaatatgagcagg

SEQ ID NO: 1684623 - DNA, 15 bp, Homo sapiens
acaatatgagcagga

SEQ ID NO: 1684624 - DNA, 15 bp, Homo sapiens
caatatgagcaggaa

SEQ ID NO: 1684625 - DNA, 15 bp, Homo sapiens
aatatgagcaggaag

SEQ ID NO: 1684626 - DNA, 15 bp, Homo sapiens
atatgagcaggaaga

SEQ ID NO: 1684627 - DNA, 15 bp, Homo sapiens
tatgagcaggaagaa

SEQ ID NO: 1684628 - DNA, 15 bp, Homo sapiens
atgagcaggaagaaa

SEQ ID NO: 1684629 - DNA, 15 bp, Homo sapiens
tgagcaggaagaaag

SEQ ID NO: 1684630 - DNA, 15 bp, Homo sapiens
gagcaggaagaaaga

SEQ ID NO: 1684631 - DNA, 15 bp, Homo sapiens
agcaggaagaaagaa

SEQ ID NO: 1684632 - DNA, 15 bp, Homo sapiens
gcaggaagaaagaaa

SEQ ID NO: 1684633 - DNA, 15 bp, Homo sapiens
caggaagaaagaaaa

SEQ ID NO: 1684634 - DNA, 15 bp, Homo sapiens
aggaagaaagaaaag

SEQ ID NO: 1684635 - DNA, 15 bp, Homo sapiens
ggaagaaagaaaagg

SEQ ID NO: 1684636 - DNA, 15 bp, Homo sapiens
gaagaaagaaaaggc

SEQ ID NO: 1684637 - DNA, 15 bp, Homo sapiens
aagaaagaaaaggca

SEQ ID NO: 1684638 - DNA, 15 bp, Homo sapiens
agaaagaaaaggcaa

SEQ ID NO: 1684639 - DNA, 15 bp, Homo sapiens
gaaagaaaaggcaaa

SEQ ID NO: 1684640 - DNA, 15 bp, Homo sapiens
aaagaaaaggcaaat

SEQ ID NO: 1684641 - DNA, 15 bp, Homo sapiens
aagaaaaggcaaata

SEQ ID NO: 1684642 - DNA, 15 bp, Homo sapiens
agaaaaggcaaatag

SEQ ID NO: 1684643 - DNA, 15 bp, Homo sapiens
gaaaaggcaaatagt

SEQ ID NO: 1684644 - DNA, 15 bp, Homo sapiens
aaaaggcaaatagtc

SEQ ID NO: 1684645 - DNA, 15 bp, Homo sapiens
aaaggcaaatagtca

SEQ ID NO: 1684646 - DNA, 15 bp, Homo sapiens
aaggcaaatagtcat

SEQ ID NO: 1684647 - DNA, 15 bp, Homo sapiens
aggcaaatagtcatt

SEQ ID NO: 1684648 - DNA, 15 bp, Homo sapiens
ggcaaatagtcattt

SEQ ID NO: 1684649 - DNA, 15 bp, Homo sapiens
gcaaatagtcatttg

SEQ ID NO: 1684650 - DNA, 15 bp, Homo sapiens
caaatagtcatttgc

SEQ ID NO: 1684651 - DNA, 15 bp, Homo sapiens
aaatagtcatttgct

SEQ ID NO: 1684652 - DNA, 15 bp, Homo sapiens
aatagtcatttgcta

SEQ ID NO: 1684653 - DNA, 15 bp, Homo sapiens
atagtcatttgctaa

SEQ ID NO: 1684654 - DNA, 15 bp, Homo sapiens
tagtcatttgctaat

SEQ ID NO: 1684655 - DNA, 15 bp, Homo sapiens
agtcatttgctaata

SEQ ID NO: 1684656 - DNA, 15 bp, Homo sapiens
gtcatttgctaatat

SEQ ID NO: 1684657 - DNA, 15 bp, Homo sapiens
tcatttgctaatatt

SEQ ID NO: 1684658 - DNA, 15 bp, Homo sapiens
catttgctaatattc

SEQ ID NO: 1684659 - DNA, 15 bp, Homo sapiens
atttgctaatattcc

SEQ ID NO: 1684660 - DNA, 15 bp, Homo sapiens
tttgctaatattcca

SEQ ID NO: 1684661 - DNA, 15 bp, Homo sapiens
ttgctaatattccat

SEQ ID NO: 1684662 - DNA, 15 bp, Homo sapiens
tgctaatattccatg

SEQ ID NO: 1684663 - DNA, 15 bp, Homo sapiens
gctaatattccatga

SEQ ID NO: 1684664 - DNA, 15 bp, Homo sapiens
ctaatattccatgaa

SEQ ID NO: 1684665 - DNA, 15 bp, Homo sapiens
taatattccatgaat

SEQ ID NO: 1684666 - DNA, 15 bp, Homo sapiens
aatattccatgaata

SEQ ID NO: 1684667 - DNA, 15 bp, Homo sapiens
atattccatgaataa

SEQ ID NO: 1684668 - DNA, 15 bp, Homo sapiens
tattccatgaataaa

SEQ ID NO: 1684669 - DNA, 15 bp, Homo sapiens
attccatgaataaag

SEQ ID NO: 1684670 - DNA, 15 bp, Homo sapiens
ttccatgaataaagg

SEQ ID NO: 1684671 - DNA, 15 bp, Homo sapiens
tccatgaataaaggt

SEQ ID NO: 1684672 - DNA, 15 bp, Homo sapiens
ccatgaataaaggta

SEQ ID NO: 1684673 - DNA, 15 bp, Homo sapiens
catgaataaaggtaa

SEQ ID NO: 1684674 - DNA, 15 bp, Homo sapiens
atgaataaaggtaat

SEQ ID NO: 1684675 - DNA, 15 bp, Homo sapiens
tgaataaaggtaatt

SEQ ID NO: 1684676 - DNA, 15 bp, Homo sapiens
gaataaaggtaattt

SEQ ID NO: 1684677 - DNA, 15 bp, Homo sapiens
aataaaggtaattta

SEQ ID NO: 1684678 - DNA, 15 bp, Homo sapiens
ataaaggtaatttat

SEQ ID NO: 1684679 - DNA, 15 bp, Homo sapiens
taaaggtaatttata

SEQ ID NO: 1684680 - DNA, 15 bp, Homo sapiens
aaaggtaatttatag

SEQ ID NO: 1684681 - DNA, 15 bp, Homo sapiens
aaggtaatttatagg

SEQ ID NO: 1684682 - DNA, 15 bp, Homo sapiens
aggtaatttatagga

SEQ ID NO: 1684683 - DNA, 15 bp, Homo sapiens
ggtaatttataggaa

SEQ ID NO: 1684684 - DNA, 15 bp, Homo sapiens
gtaatttataggaat

SEQ ID NO: 1684685 - DNA, 15 bp, Homo sapiens
taatttataggaata

SEQ ID NO: 1684686 - DNA, 15 bp, Homo sapiens
aatttataggaatat

SEQ ID NO: 1684687 - DNA, 15 bp, Homo sapiens
atttataggaatatt

SEQ ID NO: 1684688 - DNA, 15 bp, Homo sapiens
tttataggaatattt

SEQ ID NO: 1684689 - DNA, 15 bp, Homo sapiens
ttataggaatatttt

SEQ ID NO: 1684690 - DNA, 15 bp, Homo sapiens
tataggaatattttt

SEQ ID NO: 1684691 - DNA, 15 bp, Homo sapiens
ataggaatatttttc

SEQ ID NO: 1684692 - DNA, 15 bp, Homo sapiens
taggaatatttttct

SEQ ID NO: 1684693 - DNA, 15 bp, Homo sapiens
aggaatatttttcta

SEQ ID NO: 1684694 - DNA, 15 bp, Homo sapiens
ggaatatttttctag

SEQ ID NO: 1684695 - DNA, 15 bp, Homo sapiens
gaatatttttctaga

SEQ ID NO: 1684696 - DNA, 15 bp, Homo sapiens
aatatttttctagag

SEQ ID NO: 1684697 - DNA, 15 bp, Homo sapiens
atatttttctagagc

SEQ ID NO: 1684698 - DNA, 15 bp, Homo sapiens
tatttttctagagca

SEQ ID NO: 1684699 - DNA, 15 bp, Homo sapiens
atttttctagagcaa

SEQ ID NO: 1684700 - DNA, 15 bp, Homo sapiens
tttttctagagcaaa

SEQ ID NO: 1684701 - DNA, 15 bp, Homo sapiens
ttttctagagcaaat

SEQ ID NO: 1684702 - DNA, 15 bp, Homo sapiens
tttctagagcaaatt

SEQ ID NO: 1684703 - DNA, 15 bp, Homo sapiens
ttctagagcaaattt

SEQ ID NO: 1684704 - DNA, 15 bp, Homo sapiens
tctagagcaaatttc

SEQ ID NO: 1684705 - DNA, 15 bp, Homo sapiens
ctagagcaaatttct

SEQ ID NO: 1684706 - DNA, 15 bp, Homo sapiens
tagagcaaatttctt

SEQ ID NO: 1684707 - DNA, 15 bp, Homo sapiens
agagcaaatttctta

SEQ ID NO: 1684708 - DNA, 15 bp, Homo sapiens
gagcaaatttcttaa

SEQ ID NO: 1684709 - DNA, 15 bp, Homo sapiens
agcaaatttcttaat

SEQ ID NO: 1684710 - DNA, 15 bp, Homo sapiens
gcaaatttcttaatg

SEQ ID NO: 1684711 - DNA, 15 bp, Homo sapiens
caaatttcttaatga

SEQ ID NO: 1684712 - DNA, 15 bp, Homo sapiens
aaatttcttaatgac

SEQ ID NO: 1684713 - DNA, 15 bp, Homo sapiens
aatttcttaatgact

SEQ ID NO: 1684714 - DNA, 15 bp, Homo sapiens
atttcttaatgactg

SEQ ID NO: 1684715 - DNA, 15 bp, Homo sapiens
tttcttaatgactgc

SEQ ID NO: 1684716 - DNA, 15 bp, Homo sapiens
ttcttaatgactgcg

SEQ ID NO: 1684717 - DNA, 15 bp, Homo sapiens
tcttaatgactgcgt

SEQ ID NO: 1684718 - DNA, 15 bp, Homo sapiens
cttaatgactgcgtt

SEQ ID NO: 1684719 - DNA, 15 bp, Homo sapiens
ttaatgactgcgttg

SEQ ID NO: 1684720 - DNA, 15 bp, Homo sapiens
taatgactgcgttgc

SEQ ID NO: 1684721 - DNA, 15 bp, Homo sapiens
aatgactgcgttgca

SEQ ID NO: 1684722 - DNA, 15 bp, Homo sapiens
atgactgcgttgcat

SEQ ID NO: 1684723 - DNA, 15 bp, Homo sapiens
tgactgcgttgcatt

SEQ ID NO: 1684724 - DNA, 15 bp, Homo sapiens
gactgcgttgcattt

SEQ ID NO: 1684725 - DNA, 15 bp, Homo sapiens
actgcgttgcatttt

SEQ ID NO: 1684726 - DNA, 15 bp, Homo sapiens
ctgcgttgcattttg

SEQ ID NO: 1684727 - DNA, 15 bp, Homo sapiens
tgcgttgcattttgt

SEQ ID NO: 1684728 - DNA, 15 bp, Homo sapiens
gcgttgcattttgtc

SEQ ID NO: 1684729 - DNA, 15 bp, Homo sapiens
cgttgcattttgtca

SEQ ID NO: 1684730 - DNA, 15 bp, Homo sapiens
gttgcattttgtcat

SEQ ID NO: 1684731 - DNA, 15 bp, Homo sapiens
ttgcattttgtcatt

SEQ ID NO: 1684732 - DNA, 15 bp, Homo sapiens
tgcattttgtcatta

SEQ ID NO: 1684733 - DNA, 15 bp, Homo sapiens
gcattttgtcattat

SEQ ID NO: 1684734 - DNA, 15 bp, Homo sapiens
cattttgtcattatt

SEQ ID NO: 1684735 - DNA, 15 bp, Homo sapiens
attttgtcattatta

SEQ ID NO: 1684736 - DNA, 15 bp, Homo sapiens
ttttgtcattattat

SEQ ID NO: 1684737 - DNA, 15 bp, Homo sapiens
tttgtcattattatt

SEQ ID NO: 1684738 - DNA, 15 bp, Homo sapiens
ttgtcattattatta

SEQ ID NO: 1684739 - DNA, 15 bp, Homo sapiens
tgtcattattattaa

SEQ ID NO: 1684740 - DNA, 15 bp, Homo sapiens
gtcattattattaac

SEQ ID NO: 1684741 - DNA, 15 bp, Homo sapiens
tcattattattaact

SEQ ID NO: 1684742 - DNA, 15 bp, Homo sapiens
cattattattaactg

SEQ ID NO: 1684743 - DNA, 15 bp, Homo sapiens
attattattaactgc

SEQ ID NO: 1684744 - DNA, 15 bp, Homo sapiens
ttattattaactgct

SEQ ID NO: 1684745 - DNA, 15 bp, Homo sapiens
tattattaactgctt

SEQ ID NO: 1684746 - DNA, 15 bp, Homo sapiens
attattaactgcttt

SEQ ID NO: 1684747 - DNA, 15 bp, Homo sapiens
ttattaactgctttt

SEQ ID NO: 1684748 - DNA, 15 bp, Homo sapiens
tattaactgcttttt

SEQ ID NO: 1684749 - DNA, 15 bp, Homo sapiens
attaactgctttttt

SEQ ID NO: 1684750 - DNA, 15 bp, Homo sapiens
ttaactgcttttttg

SEQ ID NO: 1684751 - DNA, 15 bp, Homo sapiens
taactgcttttttgc

SEQ ID NO: 1684752 - DNA, 15 bp, Homo sapiens
aactgcttttttgcg

SEQ ID NO: 1684753 - DNA, 15 bp, Homo sapiens
actgcttttttgcgt

SEQ ID NO: 1684754 - DNA, 15 bp, Homo sapiens
ctgcttttttgcgtt

SEQ ID NO: 1684755 - DNA, 15 bp, Homo sapiens
tgcttttttgcgttg

SEQ ID NO: 1684756 - DNA, 15 bp, Homo sapiens
gcttttttgcgttga

SEQ ID NO: 1684757 - DNA, 15 bp, Homo sapiens
cttttttgcgttgat

SEQ ID NO: 1684758 - DNA, 15 bp, Homo sapiens
ttttttgcgttgatt

SEQ ID NO: 1684759 - DNA, 15 bp, Homo sapiens
tttttgcgttgattt

SEQ ID NO: 1684760 - DNA, 15 bp, Homo sapiens
ttttgcgttgatttt

SEQ ID NO: 1684761 - DNA, 15 bp, Homo sapiens
tttgcgttgattttt

SEQ ID NO: 1684762 - DNA, 15 bp, Homo sapiens
ttgcgttgatttttt

SEQ ID NO: 1684763 - DNA, 15 bp, Homo sapiens
tgcgttgattttttt

SEQ ID NO: 1684764 - DNA, 15 bp, Homo sapiens
gcgttgatttttttt

SEQ ID NO: 1684765 - DNA, 15 bp, Homo sapiens
cgttgattttttttt

SEQ ID NO: 1684766 - DNA, 15 bp, Homo sapiens
gttgatttttttttc

SEQ ID NO: 1684767 - DNA, 15 bp, Homo sapiens
ttgatttttttttct

SEQ ID NO: 1684768 - DNA, 15 bp, Homo sapiens
tgatttttttttctg

SEQ ID NO: 1684769 - DNA, 15 bp, Homo sapiens
gatttttttttctga

SEQ ID NO: 1684770 - DNA, 15 bp, Homo sapiens
atttttttttctgac

SEQ ID NO: 1684771 - DNA, 15 bp, Homo sapiens
tttttttttctgaca

SEQ ID NO: 1684772 - DNA, 15 bp, Homo sapiens
ttttttttctgacag

SEQ ID NO: 1684773 - DNA, 15 bp, Homo sapiens
tttttttctgacaga

SEQ ID NO: 1684774 - DNA, 15 bp, Homo sapiens
ttttttctgacagat

SEQ ID NO: 1684775 - DNA, 15 bp, Homo sapiens
tttttctgacagata

SEQ ID NO: 1684776 - DNA, 15 bp, Homo sapiens
ttttctgacagataa

SEQ ID NO: 1684777 - DNA, 15 bp, Homo sapiens
tttctgacagataat

SEQ ID NO: 1684778 - DNA, 15 bp, Homo sapiens
ttctgacagataata

SEQ ID NO: 1684779 - DNA, 15 bp, Homo sapiens
tctgacagataataa

SEQ ID NO: 1684780 - DNA, 15 bp, Homo sapiens
ctgacagataataat

SEQ ID NO: 1684781 - DNA, 15 bp, Homo sapiens
tgacagataataatg

SEQ ID NO: 1684782 - DNA, 15 bp, Homo sapiens
gacagataataatga

SEQ ID NO: 1684783 - DNA, 15 bp, Homo sapiens
acagataataatgat

SEQ ID NO: 1684784 - DNA, 15 bp, Homo sapiens
cagataataatgata

SEQ ID NO: 1684785 - DNA, 15 bp, Homo sapiens
agataataatgataa

SEQ ID NO: 1684786 - DNA, 15 bp, Homo sapiens
gataataatgataag

SEQ ID NO: 1684787 - DNA, 15 bp, Homo sapiens
ataataatgataaga

SEQ ID NO: 1684788 - DNA, 15 bp, Homo sapiens
taataatgataagaa

SEQ ID NO: 1684789 - DNA, 15 bp, Homo sapiens
aataatgataagaaa

SEQ ID NO: 1684790 - DNA, 15 bp, Homo sapiens
ataatgataagaaat

SEQ ID NO: 1684791 - DNA, 15 bp, Homo sapiens
taatgataagaaatc

SEQ ID NO: 1684792 - DNA, 15 bp, Homo sapiens
aatgataagaaatca

SEQ ID NO: 1684793 - DNA, 15 bp, Homo sapiens
atgataagaaatcaa

SEQ ID NO: 1684794 - DNA, 15 bp, Homo sapiens
tgataagaaatcaag

SEQ ID NO: 1684795 - DNA, 15 bp, Homo sapiens
gataagaaatcaagg

SEQ ID NO: 1684796 - DNA, 15 bp, Homo sapiens
ataagaaatcaaggt

SEQ ID NO: 1684797 - DNA, 15 bp, Homo sapiens
taagaaatcaaggta

SEQ ID NO: 1684798 - DNA, 15 bp, Homo sapiens
aagaaatcaaggtaa

SEQ ID NO: 1684799 - DNA, 15 bp, Homo sapiens
agaaatcaaggtaag

SEQ ID NO: 1684800 - DNA, 15 bp, Homo sapiens
gaaatcaaggtaagt

SEQ ID NO: 1684801 - DNA, 15 bp, Homo sapiens
aaatcaaggtaagtg

SEQ ID NO: 1684802 - DNA, 15 bp, Homo sapiens
aatcaaggtaagtga

SEQ ID NO: 1684803 - DNA, 15 bp, Homo sapiens
atcaaggtaagtgac

SEQ ID NO: 1684804 - DNA, 15 bp, Homo sapiens
tcaaggtaagtgact

SEQ ID NO: 1684805 - DNA, 15 bp, Homo sapiens
caaggtaagtgactg

SEQ ID NO: 1684806 - DNA, 15 bp, Homo sapiens
aaggtaagtgactga

SEQ ID NO: 1684807 - DNA, 15 bp, Homo sapiens
aggtaagtgactgat

SEQ ID NO: 1684808 - DNA, 15 bp, Homo sapiens
ggtaagtgactgatt

SEQ ID NO: 1684809 - DNA, 15 bp, Homo sapiens
gtaagtgactgattt

SEQ ID NO: 1684810 - DNA, 15 bp, Homo sapiens
taagtgactgatttc

SEQ ID NO: 1684811 - DNA, 15 bp, Homo sapiens
aagtgactgatttca

SEQ ID NO: 1684812 - DNA, 15 bp, Homo sapiens
agtgactgatttcaa

SEQ ID NO: 1684813 - DNA, 15 bp, Homo sapiens
gtgactgatttcaac

SEQ ID NO: 1684814 - DNA, 15 bp, Homo sapiens
tgactgatttcaaca

SEQ ID NO: 1684815 - DNA, 15 bp, Homo sapiens
gactgatttcaacaa

SEQ ID NO: 1684816 - DNA, 15 bp, Homo sapiens
actgatttcaacaat

SEQ ID NO: 1684817 - DNA, 15 bp, Homo sapiens
ctgatttcaacaatg

SEQ ID NO: 1684818 - DNA, 15 bp, Homo sapiens
tgatttcaacaatgc

SEQ ID NO: 1684819 - DNA, 15 bp, Homo sapiens
gatttcaacaatgca

SEQ ID NO: 1684820 - DNA, 15 bp, Homo sapiens
atttcaacaatgcag

SEQ ID NO: 1684821 - DNA, 15 bp, Homo sapiens
tttcaacaatgcagc

SEQ ID NO: 1684822 - DNA, 15 bp, Homo sapiens
ttcaacaatgcagca

SEQ ID NO: 1684823 - DNA, 15 bp, Homo sapiens
tcaacaatgcagcat

SEQ ID NO: 1684824 - DNA, 15 bp, Homo sapiens
caacaatgcagcatc

SEQ ID NO: 1684825 - DNA, 15 bp, Homo sapiens
aacaatgcagcatct

SEQ ID NO: 1684826 - DNA, 15 bp, Homo sapiens
acaatgcagcatctt

SEQ ID NO: 1684827 - DNA, 15 bp, Homo sapiens
caatgcagcatcttt

SEQ ID NO: 1684828 - DNA, 15 bp, Homo sapiens
aatgcagcatctttt

SEQ ID NO: 1684829 - DNA, 15 bp, Homo sapiens
atgcagcatcttttc

SEQ ID NO: 1684830 - DNA, 15 bp, Homo sapiens
tgcagcatcttttct

SEQ ID NO: 1684831 - DNA, 15 bp, Homo sapiens
gcagcatcttttcta

SEQ ID NO: 1684832 - DNA, 15 bp, Homo sapiens
cagcatcttttctag

SEQ ID NO: 1684833 - DNA, 15 bp, Homo sapiens
agcatcttttctaga

SEQ ID NO: 1684834 - DNA, 15 bp, Homo sapiens
gcatcttttctagaa

SEQ ID NO: 1684835 - DNA, 15 bp, Homo sapiens
catcttttctagaat

SEQ ID NO: 1684836 - DNA, 15 bp, Homo sapiens
atcttttctagaata

SEQ ID NO: 1684837 - DNA, 15 bp, Homo sapiens
tcttttctagaataa

SEQ ID NO: 1684838 - DNA, 15 bp, Homo sapiens
cttttctagaataac

SEQ ID NO: 1684839 - DNA, 15 bp, Homo sapiens
ttttctagaataact

SEQ ID NO: 1684840 - DNA, 15 bp, Homo sapiens
tttctagaataactc

SEQ ID NO: 1684841 - DNA, 15 bp, Homo sapiens
ttctagaataactcc

SEQ ID NO: 1684842 - DNA, 15 bp, Homo sapiens
tctagaataactcca

SEQ ID NO: 1684843 - DNA, 15 bp, Homo sapiens
ctagaataactccat

SEQ ID NO: 1684844 - DNA, 15 bp, Homo sapiens
tagaataactccata

SEQ ID NO: 1684845 - DNA, 15 bp, Homo sapiens
agaataactccataa

SEQ ID NO: 1684846 - DNA, 15 bp, Homo sapiens
gaataactccataat

SEQ ID NO: 1684847 - DNA, 15 bp, Homo sapiens
aataactccataata

SEQ ID NO: 1684848 - DNA, 15 bp, Homo sapiens
ataactccataatat

SEQ ID NO: 1684849 - DNA, 15 bp, Homo sapiens
taactccataatatt

SEQ ID NO: 1684850 - DNA, 15 bp, Homo sapiens
aactccataatattc

SEQ ID NO: 1684851 - DNA, 15 bp, Homo sapiens
actccataatattca

SEQ ID NO: 1684852 - DNA, 15 bp, Homo sapiens
ctccataatattcat

SEQ ID NO: 1684853 - DNA, 15 bp, Homo sapiens
tccataatattcata

SEQ ID NO: 1684854 - DNA, 15 bp, Homo sapiens
ccataatattcatat

SEQ ID NO: 1684855 - DNA, 15 bp, Homo sapiens
cataatattcatatc

SEQ ID NO: 1684856 - DNA, 15 bp, Homo sapiens
ataatattcatatca

SEQ ID NO: 1684857 - DNA, 15 bp, Homo sapiens
taatattcatatcaa

SEQ ID NO: 1684858 - DNA, 15 bp, Homo sapiens
aatattcatatcaaa

SEQ ID NO: 1684859 - DNA, 15 bp, Homo sapiens
atattcatatcaaag

SEQ ID NO: 1684860 - DNA, 15 bp, Homo sapiens
tattcatatcaaagg

SEQ ID NO: 1684861 - DNA, 15 bp, Homo sapiens
attcatatcaaaggc

SEQ ID NO: 1684862 - DNA, 15 bp, Homo sapiens
ttcatatcaaaggca

SEQ ID NO: 1684863 - DNA, 15 bp, Homo sapiens
tcatatcaaaggcac

SEQ ID NO: 1684864 - DNA, 15 bp, Homo sapiens
catatcaaaggcaca

SEQ ID NO: 1684865 - DNA, 15 bp, Homo sapiens
atatcaaaggcacaa

SEQ ID NO: 1684866 - DNA, 15 bp, Homo sapiens
tatcaaaggcacaaa

SEQ ID NO: 1684867 - DNA, 15 bp, Homo sapiens
atcaaaggcacaaag

SEQ ID NO: 1684868 - DNA, 15 bp, Homo sapiens
tcaaaggcacaaagc

SEQ ID NO: 1684869 - DNA, 15 bp, Homo sapiens
caaaggcacaaagca

SEQ ID NO: 1684870 - DNA, 15 bp, Homo sapiens
aaaggcacaaagcag

SEQ ID NO: 1684871 - DNA, 15 bp, Homo sapiens
aaggcacaaagcaga

SEQ ID NO: 1684872 - DNA, 15 bp, Homo sapiens
aggcacaaagcagag

SEQ ID NO: 1684873 - DNA, 15 bp, Homo sapiens
ggcacaaagcagaga

SEQ ID NO: 1684874 - DNA, 15 bp, Homo sapiens
gcacaaagcagagaa

SEQ ID NO: 1684875 - DNA, 15 bp, Homo sapiens
cacaaagcagagaat

SEQ ID NO: 1684876 - DNA, 15 bp, Homo sapiens
caaagcagagaatac

SEQ ID NO: 1684877 - DNA, 15 bp, Homo sapiens
aaagcagagaatact

SEQ ID NO: 1684878 - DNA, 15 bp, Homo sapiens
aagcagagaatactt

SEQ ID NO: 1684879 - DNA, 15 bp, Homo sapiens
agcagagaatacttt

SEQ ID NO: 1684880 - DNA, 15 bp, Homo sapiens
gcagagaatactttc

SEQ ID NO: 1684881 - DNA, 15 bp, Homo sapiens
cagagaatactttca

SEQ ID NO: 1684882 - DNA, 15 bp, Homo sapiens
agagaatactttcat

SEQ ID NO: 1684883 - DNA, 15 bp, Homo sapiens
gagaatactttcatg

SEQ ID NO: 1684884 - DNA, 15 bp, Homo sapiens
agaatactttcatgc

SEQ ID NO: 1684885 - DNA, 15 bp, Homo sapiens
gaatactttcatgca

SEQ ID NO: 1684886 - DNA, 15 bp, Homo sapiens
aatactttcatgcac

SEQ ID NO: 1684887 - DNA, 15 bp, Homo sapiens
atactttcatgcaca

SEQ ID NO: 1684888 - DNA, 15 bp, Homo sapiens
tactttcatgcacat

SEQ ID NO: 1684889 - DNA, 15 bp, Homo sapiens
actttcatgcacatt

SEQ ID NO: 1684890 - DNA, 15 bp, Homo sapiens
ctttcatgcacattg

SEQ ID NO: 1684891 - DNA, 15 bp, Homo sapiens
tttcatgcacattgc

SEQ ID NO: 1684892 - DNA, 15 bp, Homo sapiens
ttcatgcacattgca

SEQ ID NO: 1684893 - DNA, 15 bp, Homo sapiens
tcatgcacattgcac

SEQ ID NO: 1684894 - DNA, 15 bp, Homo sapiens
catgcacattgcact

SEQ ID NO: 1684895 - DNA, 15 bp, Homo sapiens
atgcacattgcactt

SEQ ID NO: 1684896 - DNA, 15 bp, Homo sapiens
tgcacattgcacttc

SEQ ID NO: 1684897 - DNA, 15 bp, Homo sapiens
gcacattgcacttca

SEQ ID NO: 1684898 - DNA, 15 bp, Homo sapiens
cacattgcacttcat

SEQ ID NO: 1684899 - DNA, 15 bp, Homo sapiens
acattgcacttcata

SEQ ID NO: 1684900 - DNA, 15 bp, Homo sapiens
cattgcacttcatat

SEQ ID NO: 1684901 - DNA, 15 bp, Homo sapiens
attgcacttcatata

SEQ ID NO: 1684902 - DNA, 15 bp, Homo sapiens
ttgcacttcatataa

SEQ ID NO: 1684903 - DNA, 15 bp, Homo sapiens
tgcacttcatataaa

SEQ ID NO: 1684904 - DNA, 15 bp, Homo sapiens
gcacttcatataaaa

SEQ ID NO: 1684905 - DNA, 15 bp, Homo sapiens
cacttcatataaaat

SEQ ID NO: 1684906 - DNA, 15 bp, Homo sapiens
acttcatataaaata

SEQ ID NO: 1684907 - DNA, 15 bp, Homo sapiens
cttcatataaaataa

SEQ ID NO: 1684908 - DNA, 15 bp, Homo sapiens
ttcatataaaataat

SEQ ID NO: 1684909 - DNA, 15 bp, Homo sapiens
tcatataaaataata

SEQ ID NO: 1684910 - DNA, 15 bp, Homo sapiens
catataaaataatat

SEQ ID NO: 1684911 - DNA, 15 bp, Homo sapiens
atataaaataatata

SEQ ID NO: 1684912 - DNA, 15 bp, Homo sapiens
tataaaataatatat

SEQ ID NO: 1684913 - DNA, 15 bp, Homo sapiens
ataaaataatatata

SEQ ID NO: 1684914 - DNA, 15 bp, Homo sapiens
taaaataatatatac

SEQ ID NO: 1684915 - DNA, 15 bp, Homo sapiens
aaaataatatataca

SEQ ID NO: 1684916 - DNA, 15 bp, Homo sapiens
aaataatatatacaa

SEQ ID NO: 1684917 - DNA, 15 bp, Homo sapiens
aataatatatacaat

SEQ ID NO: 1684918 - DNA, 15 bp, Homo sapiens
ataatatatacaatc

SEQ ID NO: 1684919 - DNA, 15 bp, Homo sapiens
taatatatacaatcc

SEQ ID NO: 1684920 - DNA, 15 bp, Homo sapiens
aatatatacaatcca

SEQ ID NO: 1684921 - DNA, 15 bp, Homo sapiens
atatatacaatccat

SEQ ID NO: 1684922 - DNA, 15 bp, Homo sapiens
tatatacaatccatt

SEQ ID NO: 1684923 - DNA, 15 bp, Homo sapiens
atatacaatccattc

SEQ ID NO: 1684924 - DNA, 15 bp, Homo sapiens
tatacaatccattct

SEQ ID NO: 1684925 - DNA, 15 bp, Homo sapiens
atacaatccattctt

SEQ ID NO: 1684926 - DNA, 15 bp, Homo sapiens
tacaatccattcttt

SEQ ID NO: 1684927 - DNA, 15 bp, Homo sapiens
acaatccattctttt

SEQ ID NO: 1684928 - DNA, 15 bp, Homo sapiens
caatccattcttttt

SEQ ID NO: 1684929 - DNA, 15 bp, Homo sapiens
aatccattctttttc

SEQ ID NO: 1684930 - DNA, 15 bp, Homo sapiens
atccattctttttct

SEQ ID NO: 1684931 - DNA, 15 bp, Homo sapiens
tccattctttttctc

SEQ ID NO: 1684932 - DNA, 15 bp, Homo sapiens
ccattctttttctct

SEQ ID NO: 1684933 - DNA, 15 bp, Homo sapiens
cattctttttctctt

SEQ ID NO: 1684934 - DNA, 15 bp, Homo sapiens
attctttttctcttt

SEQ ID NO: 1684935 - DNA, 15 bp, Homo sapiens
ttctttttctcttta

SEQ ID NO: 1684936 - DNA, 15 bp, Homo sapiens
tctttttctctttaa

SEQ ID NO: 1684937 - DNA, 15 bp, Homo sapiens
ctttttctctttaaa

SEQ ID NO: 1684938 - DNA, 15 bp, Homo sapiens
tttttctctttaaaa

SEQ ID NO: 1684939 - DNA, 15 bp, Homo sapiens
ttttctctttaaaat

SEQ ID NO: 1684940 - DNA, 15 bp, Homo sapiens
tttctctttaaaata

SEQ ID NO: 1684941 - DNA, 15 bp, Homo sapiens
ttctctttaaaatat

SEQ ID NO: 1684942 - DNA, 15 bp, Homo sapiens
tctctttaaaatatt

SEQ ID NO: 1684943 - DNA, 15 bp, Homo sapiens
ctctttaaaatatta

SEQ ID NO: 1684944 - DNA, 15 bp, Homo sapiens
tctttaaaatattac

SEQ ID NO: 1684945 - DNA, 15 bp, Homo sapiens
ctttaaaatattact

SEQ ID NO: 1684946 - DNA, 15 bp, Homo sapiens
tttaaaatattacta

SEQ ID NO: 1684947 - DNA, 15 bp, Homo sapiens
ttaaaatattactat

SEQ ID NO: 1684948 - DNA, 15 bp, Homo sapiens
taaaatattactata

SEQ ID NO: 1684949 - DNA, 15 bp, Homo sapiens
aaaatattactataa

SEQ ID NO: 1684950 - DNA, 15 bp, Homo sapiens
aaatattactataat

SEQ ID NO: 1684951 - DNA, 15 bp, Homo sapiens
aatattactataatt

SEQ ID NO: 1684952 - DNA, 15 bp, Homo sapiens
atattactataattt

SEQ ID NO: 1684953 - DNA, 15 bp, Homo sapiens
tattactataatttg

SEQ ID NO: 1684954 - DNA, 15 bp, Homo sapiens
attactataatttga

SEQ ID NO: 1684955 - DNA, 15 bp, Homo sapiens
ttactataatttgat

SEQ ID NO: 1684956 - DNA, 15 bp, Homo sapiens
tactataatttgatt

SEQ ID NO: 1684957 - DNA, 15 bp, Homo sapiens
actataatttgattt

SEQ ID NO: 1684958 - DNA, 15 bp, Homo sapiens
ctataatttgatttt

SEQ ID NO: 1684959 - DNA, 15 bp, Homo sapiens
tataatttgatttta

SEQ ID NO: 1684960 - DNA, 15 bp, Homo sapiens
ataatttgattttaa

SEQ ID NO: 1684961 - DNA, 15 bp, Homo sapiens
taatttgattttaaa

SEQ ID NO: 1684962 - DNA, 15 bp, Homo sapiens
aatttgattttaaaa

SEQ ID NO: 1684963 - DNA, 15 bp, Homo sapiens
atttgattttaaaaa

SEQ ID NO: 1684964 - DNA, 15 bp, Homo sapiens
tttgattttaaaaac

SEQ ID NO: 1684965 - DNA, 15 bp, Homo sapiens
ttgattttaaaaacc

SEQ ID NO: 1684966 - DNA, 15 bp, Homo sapiens
tgattttaaaaacct

SEQ ID NO: 1684967 - DNA, 15 bp, Homo sapiens
gattttaaaaacctt

SEQ ID NO: 1684968 - DNA, 15 bp, Homo sapiens
attttaaaaaccttt

SEQ ID NO: 1684969 - DNA, 15 bp, Homo sapiens
ttttaaaaacctttt

SEQ ID NO: 1684970 - DNA, 15 bp, Homo sapiens
tttaaaaaccttttg

SEQ ID NO: 1684971 - DNA, 15 bp, Homo sapiens
ttaaaaaccttttgg

SEQ ID NO: 1684972 - DNA, 15 bp, Homo sapiens
taaaaaccttttgga

SEQ ID NO: 1684973 - DNA, 15 bp, Homo sapiens
aaaaaccttttggaa

SEQ ID NO: 1684974 - DNA, 15 bp, Homo sapiens
aaaaccttttggaat

SEQ ID NO: 1684975 - DNA, 15 bp, Homo sapiens
aaaccttttggaata

SEQ ID NO: 1684976 - DNA, 15 bp, Homo sapiens
aaccttttggaatat

SEQ ID NO: 1684977 - DNA, 15 bp, Homo sapiens
accttttggaatatc

SEQ ID NO: 1684978 - DNA, 15 bp, Homo sapiens
ccttttggaatatcc

SEQ ID NO: 1684979 - DNA, 15 bp, Homo sapiens
cttttggaatatccc

SEQ ID NO: 1684980 - DNA, 15 bp, Homo sapiens
ttttggaatatccct

SEQ ID NO: 1684981 - DNA, 15 bp, Homo sapiens
tttggaatatccctt

SEQ ID NO: 1684982 - DNA, 15 bp, Homo sapiens
ttggaatatcccttc

SEQ ID NO: 1684983 - DNA, 15 bp, Homo sapiens
tggaatatcccttct

SEQ ID NO: 1684984 - DNA, 15 bp, Homo sapiens
ggaatatcccttcta

SEQ ID NO: 1684985 - DNA, 15 bp, Homo sapiens
gaatatcccttctag

SEQ ID NO: 1684986 - DNA, 15 bp, Homo sapiens
aatatcccttctagg

SEQ ID NO: 1684987 - DNA, 15 bp, Homo sapiens
atatcccttctaggt

SEQ ID NO: 1684988 - DNA, 15 bp, Homo sapiens
tatcccttctaggtt

SEQ ID NO: 1684989 - DNA, 15 bp, Homo sapiens
atcccttctaggtta

SEQ ID NO: 1684990 - DNA, 15 bp, Homo sapiens
tcccttctaggttag

SEQ ID NO: 1684991 - DNA, 15 bp, Homo sapiens
cccttctaggttagg

SEQ ID NO: 1684992 - DNA, 15 bp, Homo sapiens
ccttctaggttaggt

SEQ ID NO: 1684993 - DNA, 15 bp, Homo sapiens
cttctaggttaggtt

SEQ ID NO: 1684994 - DNA, 15 bp, Homo sapiens
ttctaggttaggttc

SEQ ID NO: 1684995 - DNA, 15 bp, Homo sapiens
tctaggttaggttca

SEQ ID NO: 1684996 - DNA, 15 bp, Homo sapiens
ctaggttaggttcaa

SEQ ID NO: 1684997 - DNA, 15 bp, Homo sapiens
taggttaggttcaaa

SEQ ID NO: 1684998 - DNA, 15 bp, Homo sapiens
aggttaggttcaaat

SEQ ID NO: 1684999 - DNA, 15 bp, Homo sapiens
ggttaggttcaaatg

SEQ ID NO: 1685000 - DNA, 15 bp, Homo sapiens
gttaggttcaaatgt

SEQ ID NO: 1685001 - DNA, 15 bp, Homo sapiens
ttaggttcaaatgtc

SEQ ID NO: 1685002 - DNA, 15 bp, Homo sapiens
taggttcaaatgtcc

SEQ ID NO: 1685003 - DNA, 15 bp, Homo sapiens
aggttcaaatgtccc

SEQ ID NO: 1685004 - DNA, 15 bp, Homo sapiens
ggttcaaatgtcccc

SEQ ID NO: 1685005 - DNA, 15 bp, Homo sapiens
gttcaaatgtcccct

SEQ ID NO: 1685006 - DNA, 15 bp, Homo sapiens
ttcaaatgtcccctc

SEQ ID NO: 1685007 - DNA, 15 bp, Homo sapiens
tcaaatgtcccctct

SEQ ID NO: 1685008 - DNA, 15 bp, Homo sapiens
caaatgtcccctctg

SEQ ID NO: 1685009 - DNA, 15 bp, Homo sapiens
aaatgtcccctctgt

SEQ ID NO: 1685010 - DNA, 15 bp, Homo sapiens
aatgtcccctctgta

SEQ ID NO: 1685011 - DNA, 15 bp, Homo sapiens
atgtcccctctgtat

SEQ ID NO: 1685012 - DNA, 15 bp, Homo sapiens
tgtcccctctgtatt

SEQ ID NO: 1685013 - DNA, 15 bp, Homo sapiens
gtcccctctgtattc

SEQ ID NO: 1685014 - DNA, 15 bp, Homo sapiens
tcccctctgtattca

SEQ ID NO: 1685015 - DNA, 15 bp, Homo sapiens
cccctctgtattcag

SEQ ID NO: 1685016 - DNA, 15 bp, Homo sapiens
ccctctgtattcagg

SEQ ID NO: 1685017 - DNA, 15 bp, Homo sapiens
cctctgtattcagga

SEQ ID NO: 1685018 - DNA, 15 bp, Homo sapiens
ctctgtattcaggaa

SEQ ID NO: 1685019 - DNA, 15 bp, Homo sapiens
tctgtattcaggaat

SEQ ID NO: 1685020 - DNA, 15 bp, Homo sapiens
ctgtattcaggaatg

SEQ ID NO: 1685021 - DNA, 15 bp, Homo sapiens
tgtattcaggaatgg

SEQ ID NO: 1685022 - DNA, 15 bp, Homo sapiens
gtattcaggaatggc

SEQ ID NO: 1685023 - DNA, 15 bp, Homo sapiens
tattcaggaatggca

SEQ ID NO: 1685024 - DNA, 15 bp, Homo sapiens
attcaggaatggcac

SEQ ID NO: 1685025 - DNA, 15 bp, Homo sapiens
ttcaggaatggcaca

SEQ ID NO: 1685026 - DNA, 15 bp, Homo sapiens
tcaggaatggcacag

SEQ ID NO: 1685027 - DNA, 15 bp, Homo sapiens
caggaatggcacaga

SEQ ID NO: 1685028 - DNA, 15 bp, Homo sapiens
aggaatggcacagaa

SEQ ID NO: 1685029 - DNA, 15 bp, Homo sapiens
ggaatggcacagaac

SEQ ID NO: 1685030 - DNA, 15 bp, Homo sapiens
gaatggcacagaact

SEQ ID NO: 1685031 - DNA, 15 bp, Homo sapiens
aatggcacagaactc

SEQ ID NO: 1685032 - DNA, 15 bp, Homo sapiens
atggcacagaactcc

SEQ ID NO: 1685033 - DNA, 15 bp, Homo sapiens
tggcacagaactcct

SEQ ID NO: 1685034 - DNA, 15 bp, Homo sapiens
ggcacagaactcctg

SEQ ID NO: 1685035 - DNA, 15 bp, Homo sapiens
gcacagaactcctga

SEQ ID NO: 1685036 - DNA, 15 bp, Homo sapiens
cacagaactcctgac

SEQ ID NO: 1685037 - DNA, 15 bp, Homo sapiens
acagaactcctgacc

SEQ ID NO: 1685038 - DNA, 15 bp, Homo sapiens
cagaactcctgacct

SEQ ID NO: 1685039 - DNA, 15 bp, Homo sapiens
agaactcctgaccta

SEQ ID NO: 1685040 - DNA, 15 bp, Homo sapiens
gaactcctgacctaa

SEQ ID NO: 1685041 - DNA, 15 bp, Homo sapiens
aactcctgacctaag

SEQ ID NO: 1685042 - DNA, 15 bp, Homo sapiens
actcctgacctaaga

SEQ ID NO: 1685043 - DNA, 15 bp, Homo sapiens
ctcctgacctaagag

SEQ ID NO: 1685044 - DNA, 15 bp, Homo sapiens
tcctgacctaagagg

SEQ ID NO: 1685045 - DNA, 15 bp, Homo sapiens
cctgacctaagaggg

SEQ ID NO: 1685046 - DNA, 15 bp, Homo sapiens
ctgacctaagaggga

SEQ ID NO: 1685047 - DNA, 15 bp, Homo sapiens
tgacctaagagggag

SEQ ID NO: 1685048 - DNA, 15 bp, Homo sapiens
gacctaagagggagg

SEQ ID NO: 1685049 - DNA, 15 bp, Homo sapiens
acctaagagggagga

SEQ ID NO: 1685050 - DNA, 15 bp, Homo sapiens
cctaagagggaggag

SEQ ID NO: 1685051 - DNA, 15 bp, Homo sapiens
ctaagagggaggagg

SEQ ID NO: 1685052 - DNA, 15 bp, Homo sapiens
taagagggaggagga

SEQ ID NO: 1685053 - DNA, 15 bp, Homo sapiens
aagagggaggaggaa

SEQ ID NO: 1685054 - DNA, 15 bp, Homo sapiens
agagggaggaggaaa

SEQ ID NO: 1685055 - DNA, 15 bp, Homo sapiens
gagggaggaggaaaa

SEQ ID NO: 1685056 - DNA, 15 bp, Homo sapiens
agggaggaggaaaag

SEQ ID NO: 1685057 - DNA, 15 bp, Homo sapiens
ggaggaggaaaagtt

SEQ ID NO: 1685058 - DNA, 15 bp, Homo sapiens
gaggaggaaaagttg

SEQ ID NO: 1685059 - DNA, 15 bp, Homo sapiens
aggaggaaaagttga

SEQ ID NO: 1685060 - DNA, 15 bp, Homo sapiens
ggaggaaaagttgaa

SEQ ID NO: 1685061 - DNA, 15 bp, Homo sapiens
gaggaaaagttgaac

SEQ ID NO: 1685062 - DNA, 15 bp, Homo sapiens
aggaaaagttgaaca

SEQ ID NO: 1685063 - DNA, 15 bp, Homo sapiens
ggaaaagttgaacaa

SEQ ID NO: 1685064 - DNA, 15 bp, Homo sapiens
gaaaagttgaacaac

SEQ ID NO: 1685065 - DNA, 15 bp, Homo sapiens
aaaagttgaacaaca

SEQ ID NO: 1685066 - DNA, 15 bp, Homo sapiens
aaagttgaacaacaa

SEQ ID NO: 1685067 - DNA, 15 bp, Homo sapiens
aagttgaacaacaag

SEQ ID NO: 1685068 - DNA, 15 bp, Homo sapiens
agttgaacaacaagt

SEQ ID NO: 1685069 - DNA, 15 bp, Homo sapiens
gttgaacaacaagta

SEQ ID NO: 1685070 - DNA, 15 bp, Homo sapiens
ttgaacaacaagtat

SEQ ID NO: 1685071 - DNA, 15 bp, Homo sapiens
tgaacaacaagtata

SEQ ID NO: 1685072 - DNA, 15 bp, Homo sapiens
gaacaacaagtataa

SEQ ID NO: 1685073 - DNA, 15 bp, Homo sapiens
aacaacaagtataat

SEQ ID NO: 1685074 - DNA, 15 bp, Homo sapiens
acaacaagtataatt

SEQ ID NO: 1685075 - DNA, 15 bp, Homo sapiens
caacaagtataattt

SEQ ID NO: 1685076 - DNA, 15 bp, Homo sapiens
aacaagtataatttc

SEQ ID NO: 1685077 - DNA, 15 bp, Homo sapiens
acaagtataatttca

SEQ ID NO: 1685078 - DNA, 15 bp, Homo sapiens
caagtataatttcat

SEQ ID NO: 1685079 - DNA, 15 bp, Homo sapiens
aagtataatttcatg

SEQ ID NO: 1685080 - DNA, 15 bp, Homo sapiens
agtataatttcatgg

SEQ ID NO: 1685081 - DNA, 15 bp, Homo sapiens
gtataatttcatggg

SEQ ID NO: 1685082 - DNA, 15 bp, Homo sapiens
tataatttcatgggc

SEQ ID NO: 1685083 - DNA, 15 bp, Homo sapiens
ataatttcatgggca

SEQ ID NO: 1685084 - DNA, 15 bp, Homo sapiens
taatttcatgggcat

SEQ ID NO: 1685085 - DNA, 15 bp, Homo sapiens
aatttcatgggcatt

SEQ ID NO: 1685086 - DNA, 15 bp, Homo sapiens
atttcatgggcattg

SEQ ID NO: 1685087 - DNA, 15 bp, Homo sapiens
tttcatgggcattgg

SEQ ID NO: 1685088 - DNA, 15 bp, Homo sapiens
ttcatgggcattgga

SEQ ID NO: 1685089 - DNA, 15 bp, Homo sapiens
tcatgggcattggag

SEQ ID NO: 1685090 - DNA, 15 bp, Homo sapiens
catgggcattggaga

SEQ ID NO: 1685091 - DNA, 15 bp, Homo sapiens
atgggcattggagag

SEQ ID NO: 1685092 - DNA, 15 bp, Homo sapiens
tgggcattggagagg

SEQ ID NO: 1685093 - DNA, 15 bp, Homo sapiens
gggcattggagaggt

SEQ ID NO: 1685094 - DNA, 15 bp, Homo sapiens
ggcattggagaggtc

SEQ ID NO: 1685095 - DNA, 15 bp, Homo sapiens
gcattggagaggtct

SEQ ID NO: 1685096 - DNA, 15 bp, Homo sapiens
cattggagaggtctc

SEQ ID NO: 1685097 - DNA, 15 bp, Homo sapiens
attggagaggtctct

SEQ ID NO: 1685098 - DNA, 15 bp, Homo sapiens
ttggagaggtctcta

SEQ ID NO: 1685099 - DNA, 15 bp, Homo sapiens
tggagaggtctctaa

SEQ ID NO: 1685100 - DNA, 15 bp, Homo sapiens
ggagaggtctctaaa

SEQ ID NO: 1685101 - DNA, 15 bp, Homo sapiens
gagaggtctctaaac

SEQ ID NO: 1685102 - DNA, 15 bp, Homo sapiens
agaggtctctaaacc

SEQ ID NO: 1685103 - DNA, 15 bp, Homo sapiens
gaggtctctaaaccc

SEQ ID NO: 1685104 - DNA, 15 bp, Homo sapiens
aggtctctaaacccc

SEQ ID NO: 1685105 - DNA, 15 bp, Homo sapiens
ggtctctaaacccca

SEQ ID NO: 1685106 - DNA, 15 bp, Homo sapiens
gtctctaaaccccaa

SEQ ID NO: 1685107 - DNA, 15 bp, Homo sapiens
tctctaaaccccaaa

SEQ ID NO: 1685108 - DNA, 15 bp, Homo sapiens
ctctaaaccccaaat

SEQ ID NO: 1685109 - DNA, 15 bp, Homo sapiens
tctaaaccccaaatt

SEQ ID NO: 1685110 - DNA, 15 bp, Homo sapiens
ctaaaccccaaattc

SEQ ID NO: 1685111 - DNA, 15 bp, Homo sapiens
taaaccccaaattct

SEQ ID NO: 1685112 - DNA, 15 bp, Homo sapiens
aaaccccaaattctt

SEQ ID NO: 1685113 - DNA, 15 bp, Homo sapiens
aaccccaaattcttg

SEQ ID NO: 1685114 - DNA, 15 bp, Homo sapiens
accccaaattcttgc

SEQ ID NO: 1685115 - DNA, 15 bp, Homo sapiens
ccccaaattcttgcc

SEQ ID NO: 1685116 - DNA, 15 bp, Homo sapiens
cccaaattcttgcca

SEQ ID NO: 1685117 - DNA, 15 bp, Homo sapiens
ccaaattcttgccac

SEQ ID NO: 1685118 - DNA, 15 bp, Homo sapiens
caaattcttgccaca

SEQ ID NO: 1685119 - DNA, 15 bp, Homo sapiens
aaattcttgccacag

SEQ ID NO: 1685120 - DNA, 15 bp, Homo sapiens
aattcttgccacagg

SEQ ID NO: 1685121 - DNA, 15 bp, Homo sapiens
attcttgccacaggc

SEQ ID NO: 1685122 - DNA, 15 bp, Homo sapiens
ttcttgccacaggca

SEQ ID NO: 1685123 - DNA, 15 bp, Homo sapiens
tcttgccacaggcaa

SEQ ID NO: 1685124 - DNA, 15 bp, Homo sapiens
cttgccacaggcaaa

SEQ ID NO: 1685125 - DNA, 15 bp, Homo sapiens
ttgccacaggcaaag

SEQ ID NO: 1685126 - DNA, 15 bp, Homo sapiens
tgccacaggcaaaga

SEQ ID NO: 1685127 - DNA, 15 bp, Homo sapiens
gccacaggcaaagag

SEQ ID NO: 1685128 - DNA, 15 bp, Homo sapiens
ccacaggcaaagagt

SEQ ID NO: 1685129 - DNA, 15 bp, Homo sapiens
cacaggcaaagagta

SEQ ID NO: 1685130 - DNA, 15 bp, Homo sapiens
acaggcaaagagtag

SEQ ID NO: 1685131 - DNA, 15 bp, Homo sapiens
caggcaaagagtaga

SEQ ID NO: 1685132 - DNA, 15 bp, Homo sapiens
aggcaaagagtagag

SEQ ID NO: 1685133 - DNA, 15 bp, Homo sapiens
ggcaaagagtagaga

SEQ ID NO: 1685134 - DNA, 15 bp, Homo sapiens
gcaaagagtagagac

SEQ ID NO: 1685135 - DNA, 15 bp, Homo sapiens
caaagagtagagacc

SEQ ID NO: 1685136 - DNA, 15 bp, Homo sapiens
aaagagtagagacct

SEQ ID NO: 1685137 - DNA, 15 bp, Homo sapiens
aagagtagagaccta

SEQ ID NO: 1685138 - DNA, 15 bp, Homo sapiens
agagtagagacctaa

SEQ ID NO: 1685139 - DNA, 15 bp, Homo sapiens
gagtagagacctaaa

SEQ ID NO: 1685140 - DNA, 15 bp, Homo sapiens
agtagagacctaaag

SEQ ID NO: 1685141 - DNA, 15 bp, Homo sapiens
gtagagacctaaagt

SEQ ID NO: 1685142 - DNA, 15 bp, Homo sapiens
tagagacctaaagtg

SEQ ID NO: 1685143 - DNA, 15 bp, Homo sapiens
agagacctaaagtgt

SEQ ID NO: 1685144 - DNA, 15 bp, Homo sapiens
gagacctaaagtgtc

SEQ ID NO: 1685145 - DNA, 15 bp, Homo sapiens
agacctaaagtgtca

SEQ ID NO: 1685146 - DNA, 15 bp, Homo sapiens
gacctaaagtgtcat

SEQ ID NO: 1685147 - DNA, 15 bp, Homo sapiens
acctaaagtgtcatt

SEQ ID NO: 1685148 - DNA, 15 bp, Homo sapiens
cctaaagtgtcatta

SEQ ID NO: 1685149 - DNA, 15 bp, Homo sapiens
ctaaagtgtcattat

SEQ ID NO: 1685150 - DNA, 15 bp, Homo sapiens
taaagtgtcattatt

SEQ ID NO: 1685151 - DNA, 15 bp, Homo sapiens
aaagtgtcattattg

SEQ ID NO: 1685152 - DNA, 15 bp, Homo sapiens
aagtgtcattattgc

SEQ ID NO: 1685153 - DNA, 15 bp, Homo sapiens
agtgtcattattgca

SEQ ID NO: 1685154 - DNA, 15 bp, Homo sapiens
gtgtcattattgcat

SEQ ID NO: 1685155 - DNA, 15 bp, Homo sapiens
tgtcattattgcata

SEQ ID NO: 1685156 - DNA, 15 bp, Homo sapiens
gtcattattgcatat

SEQ ID NO: 1685157 - DNA, 15 bp, Homo sapiens
tcattattgcatatt

SEQ ID NO: 1685158 - DNA, 15 bp, Homo sapiens
cattattgcatattt

SEQ ID NO: 1685159 - DNA, 15 bp, Homo sapiens
attattgcatatttc

SEQ ID NO: 1685160 - DNA, 15 bp, Homo sapiens
ttattgcatatttct

SEQ ID NO: 1685161 - DNA, 15 bp, Homo sapiens
tattgcatatttctg

SEQ ID NO: 1685162 - DNA, 15 bp, Homo sapiens
attgcatatttctgt

SEQ ID NO: 1685163 - DNA, 15 bp, Homo sapiens
ttgcatatttctgtt

SEQ ID NO: 1685164 - DNA, 15 bp, Homo sapiens
tgcatatttctgttc

SEQ ID NO: 1685165 - DNA, 15 bp, Homo sapiens
gcatatttctgttca

SEQ ID NO: 1685166 - DNA, 15 bp, Homo sapiens
catatttctgttcag

SEQ ID NO: 1685167 - DNA, 15 bp, Homo sapiens
atatttctgttcagc

SEQ ID NO: 1685168 - DNA, 15 bp, Homo sapiens
tatttctgttcagct

SEQ ID NO: 1685169 - DNA, 15 bp, Homo sapiens
atttctgttcagcta

SEQ ID NO: 1685170 - DNA, 15 bp, Homo sapiens
tttctgttcagctaa

SEQ ID NO: 1685171 - DNA, 15 bp, Homo sapiens
ttctgttcagctaaa

SEQ ID NO: 1685172 - DNA, 15 bp, Homo sapiens
tctgttcagctaaag

SEQ ID NO: 1685173 - DNA, 15 bp, Homo sapiens
ctgttcagctaaaga

SEQ ID NO: 1685174 - DNA, 15 bp, Homo sapiens
tgttcagctaaagat

SEQ ID NO: 1685175 - DNA, 15 bp, Homo sapiens
gttcagctaaagatt

SEQ ID NO: 1685176 - DNA, 15 bp, Homo sapiens
ttcagctaaagattt

SEQ ID NO: 1685177 - DNA, 15 bp, Homo sapiens
tcagctaaagatttt

SEQ ID NO: 1685178 - DNA, 15 bp, Homo sapiens
cagctaaagattttg

SEQ ID NO: 1685179 - DNA, 15 bp, Homo sapiens
agctaaagattttga

SEQ ID NO: 1685180 - DNA, 15 bp, Homo sapiens
gctaaagattttgaa

SEQ ID NO: 1685181 - DNA, 15 bp, Homo sapiens
ctaaagattttgaat

SEQ ID NO: 1685182 - DNA, 15 bp, Homo sapiens
taaagattttgaatt

SEQ ID NO: 1685183 - DNA, 15 bp, Homo sapiens
aaagattttgaattc

SEQ ID NO: 1685184 - DNA, 15 bp, Homo sapiens
aagattttgaattct

SEQ ID NO: 1685185 - DNA, 15 bp, Homo sapiens
agattttgaattctc

SEQ ID NO: 1685186 - DNA, 15 bp, Homo sapiens
gattttgaattctca

SEQ ID NO: 1685187 - DNA, 15 bp, Homo sapiens
attttgaattctcat

SEQ ID NO: 1685188 - DNA, 15 bp, Homo sapiens
ttttgaattctcata

SEQ ID NO: 1685189 - DNA, 15 bp, Homo sapiens
tttgaattctcatat

SEQ ID NO: 1685190 - DNA, 15 bp, Homo sapiens
ttgaattctcatata

SEQ ID NO: 1685191 - DNA, 15 bp, Homo sapiens
tgaattctcatatag

SEQ ID NO: 1685192 - DNA, 15 bp, Homo sapiens
gaattctcatataga

SEQ ID NO: 1685193 - DNA, 15 bp, Homo sapiens
aattctcatatagaa

SEQ ID NO: 1685194 - DNA, 15 bp, Homo sapiens
attctcatatagaac

SEQ ID NO: 1685195 - DNA, 15 bp, Homo sapiens
ttctcatatagaaca

SEQ ID NO: 1685196 - DNA, 15 bp, Homo sapiens
tctcatatagaacac

SEQ ID NO: 1685197 - DNA, 15 bp, Homo sapiens
ctcatatagaacaca

SEQ ID NO: 1685198 - DNA, 15 bp, Homo sapiens
tcatatagaacacat

SEQ ID NO: 1685199 - DNA, 15 bp, Homo sapiens
catatagaacacata

SEQ ID NO: 1685200 - DNA, 15 bp, Homo sapiens
atatagaacacatat

SEQ ID NO: 1685201 - DNA, 15 bp, Homo sapiens
tatagaacacatatc

SEQ ID NO: 1685202 - DNA, 15 bp, Homo sapiens
atagaacacatatca

SEQ ID NO: 1685203 - DNA, 15 bp, Homo sapiens
tagaacacatatcag

SEQ ID NO: 1685204 - DNA, 15 bp, Homo sapiens
agaacacatatcagc

SEQ ID NO: 1685205 - DNA, 15 bp, Homo sapiens
gaacacatatcagct

SEQ ID NO: 1685206 - DNA, 15 bp, Homo sapiens
aacacatatcagcta

SEQ ID NO: 1685207 - DNA, 15 bp, Homo sapiens
acacatatcagctaa

SEQ ID NO: 1685208 - DNA, 15 bp, Homo sapiens
cacatatcagctaat

SEQ ID NO: 1685209 - DNA, 15 bp, Homo sapiens
acatatcagctaatc

SEQ ID NO: 1685210 - DNA, 15 bp, Homo sapiens
catatcagctaatca

SEQ ID NO: 1685211 - DNA, 15 bp, Homo sapiens
atatcagctaatcac

SEQ ID NO: 1685212 - DNA, 15 bp, Homo sapiens
tatcagctaatcaca

SEQ ID NO: 1685213 - DNA, 15 bp, Homo sapiens
atcagctaatcacag

SEQ ID NO: 1685214 - DNA, 15 bp, Homo sapiens
tcagctaatcacagt

SEQ ID NO: 1685215 - DNA, 15 bp, Homo sapiens
cagctaatcacagtc

SEQ ID NO: 1685216 - DNA, 15 bp, Homo sapiens
agctaatcacagtct

SEQ ID NO: 1685217 - DNA, 15 bp, Homo sapiens
gctaatcacagtctg

SEQ ID NO: 1685218 - DNA, 15 bp, Homo sapiens
ctaatcacagtctgg

SEQ ID NO: 1685219 - DNA, 15 bp, Homo sapiens
taatcacagtctggt

SEQ ID NO: 1685220 - DNA, 15 bp, Homo sapiens
aatcacagtctggta

SEQ ID NO: 1685221 - DNA, 15 bp, Homo sapiens
atcacagtctggtat

SEQ ID NO: 1685222 - DNA, 15 bp, Homo sapiens
tcacagtctggtatg

SEQ ID NO: 1685223 - DNA, 15 bp, Homo sapiens
cacagtctggtatga

SEQ ID NO: 1685224 - DNA, 15 bp, Homo sapiens
acagtctggtatgaa

SEQ ID NO: 1685225 - DNA, 15 bp, Homo sapiens
cagtctggtatgaag

SEQ ID NO: 1685226 - DNA, 15 bp, Homo sapiens
gtacatgtgcacaat

SEQ ID NO: 1685227 - DNA, 15 bp, Homo sapiens
tacatgtgcacaatg

SEQ ID NO: 1685228 - DNA, 15 bp, Homo sapiens
acatgtgcacaatgt

SEQ ID NO: 1685229 - DNA, 15 bp, Homo sapiens
catgtgcacaatgtg

SEQ ID NO: 1685230 - DNA, 15 bp, Homo sapiens
atgtgcacaatgtgc

SEQ ID NO: 1685231 - DNA, 15 bp, Homo sapiens
tgtgcacaatgtgca

SEQ ID NO: 1685232 - DNA, 15 bp, Homo sapiens
gtgcacaatgtgcag

SEQ ID NO: 1685233 - DNA, 15 bp, Homo sapiens
tgcacaatgtgcagg

SEQ ID NO: 1685234 - DNA, 15 bp, Homo sapiens
gcacaatgtgcaggt

SEQ ID NO: 1685235 - DNA, 15 bp, Homo sapiens
cacaatgtgcaggtt

SEQ ID NO: 1685236 - DNA, 15 bp, Homo sapiens
acaatgtgcaggttt

SEQ ID NO: 1685237 - DNA, 15 bp, Homo sapiens
caatgtgcaggtttg

SEQ ID NO: 1685238 - DNA, 15 bp, Homo sapiens
aatgtgcaggtttgc

SEQ ID NO: 1685239 - DNA, 15 bp, Homo sapiens
atgtgcaggtttgct

SEQ ID NO: 1685240 - DNA, 15 bp, Homo sapiens
tgtgcaggtttgcta

SEQ ID NO: 1685241 - DNA, 15 bp, Homo sapiens
gtgcaggtttgctac

SEQ ID NO: 1685242 - DNA, 15 bp, Homo sapiens
tgcaggtttgctaca

SEQ ID NO: 1685243 - DNA, 15 bp, Homo sapiens
gcaggtttgctacat

SEQ ID NO: 1685244 - DNA, 15 bp, Homo sapiens
caggtttgctacata

SEQ ID NO: 1685245 - DNA, 15 bp, Homo sapiens
aggtttgctacatat

SEQ ID NO: 1685246 - DNA, 15 bp, Homo sapiens
ggtttgctacatata

SEQ ID NO: 1685247 - DNA, 15 bp, Homo sapiens
gtttgctacatatat

SEQ ID NO: 1685248 - DNA, 15 bp, Homo sapiens
tttgctacatatata

SEQ ID NO: 1685249 - DNA, 15 bp, Homo sapiens
ttgctacatatatac

SEQ ID NO: 1685250 - DNA, 15 bp, Homo sapiens
tgctacatatataca

SEQ ID NO: 1685251 - DNA, 15 bp, Homo sapiens
gctacatatatacac

SEQ ID NO: 1685252 - DNA, 15 bp, Homo sapiens
ctacatatatacaca

SEQ ID NO: 1685253 - DNA, 15 bp, Homo sapiens
acatatatacacatg

SEQ ID NO: 1685254 - DNA, 15 bp, Homo sapiens
catatatacacatgt

SEQ ID NO: 1685255 - DNA, 15 bp, Homo sapiens
atatatacacatgta

SEQ ID NO: 1685256 - DNA, 15 bp, Homo sapiens
tatatacacatgtac

SEQ ID NO: 1685257 - DNA, 15 bp, Homo sapiens
atatacacatgtacc

SEQ ID NO: 1685258 - DNA, 15 bp, Homo sapiens
tatacacatgtacca

SEQ ID NO: 1685259 - DNA, 15 bp, Homo sapiens
atacacatgtaccat

SEQ ID NO: 1685260 - DNA, 15 bp, Homo sapiens
tacacatgtaccatg

SEQ ID NO: 1685261 - DNA, 15 bp, Homo sapiens
acacatgtaccatgt

SEQ ID NO: 1685262 - DNA, 15 bp, Homo sapiens
cacatgtaccatgtt

SEQ ID NO: 1685263 - DNA, 15 bp, Homo sapiens
acatgtaccatgttg

SEQ ID NO: 1685264 - DNA, 15 bp, Homo sapiens
catgtaccatgttgg

SEQ ID NO: 1685265 - DNA, 15 bp, Homo sapiens
atgtaccatgttggt

SEQ ID NO: 1685266 - DNA, 15 bp, Homo sapiens
tgtaccatgttggtg

SEQ ID NO: 1685267 - DNA, 15 bp, Homo sapiens
gtaccatgttggtgt

SEQ ID NO: 1685268 - DNA, 15 bp, Homo sapiens
taccatgttggtgtg

SEQ ID NO: 1685269 - DNA, 15 bp, Homo sapiens
accatgttggtgtgc

SEQ ID NO: 1685270 - DNA, 15 bp, Homo sapiens
tgtgctgcacccatc

SEQ ID NO: 1685271 - DNA, 15 bp, Homo sapiens
gtgctgcacccatca

SEQ ID NO: 1685272 - DNA, 15 bp, Homo sapiens
ctgcacccatcaact

SEQ ID NO: 1685273 - DNA, 15 bp, Homo sapiens
tgcacccatcaactc

SEQ ID NO: 1685274 - DNA, 15 bp, Homo sapiens
gcacccatcaactcg

SEQ ID NO: 1685275 - DNA, 15 bp, Homo sapiens
cacccatcaactcgt

SEQ ID NO: 1685276 - DNA, 15 bp, Homo sapiens
acccatcaactcgtc

SEQ ID NO: 1685277 - DNA, 15 bp, Homo sapiens
cccatcaactcgtca

SEQ ID NO: 1685278 - DNA, 15 bp, Homo sapiens
ccatcaactcgtcat

SEQ ID NO: 1685279 - DNA, 15 bp, Homo sapiens
catcaactcgtcatt

SEQ ID NO: 1685280 - DNA, 15 bp, Homo sapiens
atcaactcgtcattt

SEQ ID NO: 1685281 - DNA, 15 bp, Homo sapiens
tcaactcgtcattta

SEQ ID NO: 1685282 - DNA, 15 bp, Homo sapiens
caactcgtcatttaa

SEQ ID NO: 1685283 - DNA, 15 bp, Homo sapiens
aactcgtcatttaac

SEQ ID NO: 1685284 - DNA, 15 bp, Homo sapiens
actcgtcatttaaca

SEQ ID NO: 1685285 - DNA, 15 bp, Homo sapiens
ctcgtcatttaacat

SEQ ID NO: 1685286 - DNA, 15 bp, Homo sapiens
tcgtcatttaacatt

SEQ ID NO: 1685287 - DNA, 15 bp, Homo sapiens
cgtcatttaacatta

SEQ ID NO: 1685288 - DNA, 15 bp, Homo sapiens
gtcatttaacattag

SEQ ID NO: 1685289 - DNA, 15 bp, Homo sapiens
tcatttaacattagg

SEQ ID NO: 1685290 - DNA, 15 bp, Homo sapiens
catttaacattaggt

SEQ ID NO: 1685291 - DNA, 15 bp, Homo sapiens
atttaacattaggta

SEQ ID NO: 1685292 - DNA, 15 bp, Homo sapiens
tttaacattaggtat

SEQ ID NO: 1685293 - DNA, 15 bp, Homo sapiens
ttaacattaggtatt

SEQ ID NO: 1685294 - DNA, 15 bp, Homo sapiens
taacattaggtattt

SEQ ID NO: 1685295 - DNA, 15 bp, Homo sapiens
aacattaggtatttc

SEQ ID NO: 1685296 - DNA, 15 bp, Homo sapiens
taggtatttctcctg

SEQ ID NO: 1685297 - DNA, 15 bp, Homo sapiens
aggtatttctcctga

SEQ ID NO: 1685298 - DNA, 15 bp, Homo sapiens
ggtatttctcctgat

SEQ ID NO: 1685299 - DNA, 15 bp, Homo sapiens
gtatttctcctgatg

SEQ ID NO: 1685300 - DNA, 15 bp, Homo sapiens
tatttctcctgatgc

SEQ ID NO: 1685301 - DNA, 15 bp, Homo sapiens
atttctcctgatgct

SEQ ID NO: 1685302 - DNA, 15 bp, Homo sapiens
tttctcctgatgcta

SEQ ID NO: 1685303 - DNA, 15 bp, Homo sapiens
ttctcctgatgctat

SEQ ID NO: 1685304 - DNA, 15 bp, Homo sapiens
tctcctgatgctatc

SEQ ID NO: 1685305 - DNA, 15 bp, Homo sapiens
ctcctgatgctatcc

SEQ ID NO: 1685306 - DNA, 15 bp, Homo sapiens
tcctgatgctatccc

SEQ ID NO: 1685307 - DNA, 15 bp, Homo sapiens
cctgatgctatccct

SEQ ID NO: 1685308 - DNA, 15 bp, Homo sapiens
ctgatgctatccctc

SEQ ID NO: 1685309 - DNA, 15 bp, Homo sapiens
tgatgctatccctcc

SEQ ID NO: 1685310 - DNA, 15 bp, Homo sapiens
gatgctatccctccc

SEQ ID NO: 1685311 - DNA, 15 bp, Homo sapiens
atgctatccctcccc

SEQ ID NO: 1685312 - DNA, 15 bp, Homo sapiens
tgctatccctccccc

SEQ ID NO: 1685313 - DNA, 15 bp, Homo sapiens
gctatccctcccccc

SEQ ID NO: 1685314 - DNA, 15 bp, Homo sapiens
ctatccctcccccct

SEQ ID NO: 1685315 - DNA, 15 bp, Homo sapiens
tatccctcccccctc

SEQ ID NO: 1685316 - DNA, 15 bp, Homo sapiens
atccctcccccctcc

SEQ ID NO: 1685317 - DNA, 15 bp, Homo sapiens
tccctcccccctccc

SEQ ID NO: 1685318 - DNA, 15 bp, Homo sapiens
ccctcccccctcccc

SEQ ID NO: 1685319 - DNA, 15 bp, Homo sapiens
cctcccccctccccc

SEQ ID NO: 1685320 - DNA, 15 bp, Homo sapiens
ctcccccctcccccc

SEQ ID NO: 1685321 - DNA, 15 bp, Homo sapiens
tcccccctcccccca

SEQ ID NO: 1685322 - DNA, 15 bp, Homo sapiens
cccccctccccccac

SEQ ID NO: 1685323 - DNA, 15 bp, Homo sapiens
ccccctccccccacc

SEQ ID NO: 1685324 - DNA, 15 bp, Homo sapiens
cccctccccccaccc

SEQ ID NO: 1685325 - DNA, 15 bp, Homo sapiens
ccctccccccacccc

SEQ ID NO: 1685326 - DNA, 15 bp, Homo sapiens
cctccccccacccca

SEQ ID NO: 1685327 - DNA, 15 bp, Homo sapiens
ctccccccaccccac

SEQ ID NO: 1685328 - DNA, 15 bp, Homo sapiens
tccccccaccccaca

SEQ ID NO: 1685329 - DNA, 15 bp, Homo sapiens
ccccccaccccacaa

SEQ ID NO: 1685330 - DNA, 15 bp, Homo sapiens
cccccaccccacaac

SEQ ID NO: 1685331 - DNA, 15 bp, Homo sapiens
ccccaccccacaaca

SEQ ID NO: 1685332 - DNA, 15 bp, Homo sapiens
cccaccccacaacag

SEQ ID NO: 1685333 - DNA, 15 bp, Homo sapiens
ccaccccacaacagg

SEQ ID NO: 1685334 - DNA, 15 bp, Homo sapiens
caccccacaacaggc

SEQ ID NO: 1685335 - DNA, 15 bp, Homo sapiens
accccacaacaggcc

SEQ ID NO: 1685336 - DNA, 15 bp, Homo sapiens
ccccacaacaggccc

SEQ ID NO: 1685337 - DNA, 15 bp, Homo sapiens
cccacaacaggcccc

SEQ ID NO: 1685338 - DNA, 15 bp, Homo sapiens
ccacaacaggcccca

SEQ ID NO: 1685339 - DNA, 15 bp, Homo sapiens
cacaacaggccccag

SEQ ID NO: 1685340 - DNA, 15 bp, Homo sapiens
acaacaggccccagt

SEQ ID NO: 1685341 - DNA, 15 bp, Homo sapiens
caacaggccccagtg

SEQ ID NO: 1685342 - DNA, 15 bp, Homo sapiens
aacaggccccagtgt

SEQ ID NO: 1685343 - DNA, 15 bp, Homo sapiens
tgtgatgttcccctt

SEQ ID NO: 1685344 - DNA, 15 bp, Homo sapiens
gtgatgttccccttc

SEQ ID NO: 1685345 - DNA, 15 bp, Homo sapiens
tgatgttccccttcc

SEQ ID NO: 1685346 - DNA, 15 bp, Homo sapiens
gatgttccccttcct

SEQ ID NO: 1685347 - DNA, 15 bp, Homo sapiens
atgttccccttcctg

SEQ ID NO: 1685348 - DNA, 15 bp, Homo sapiens
tgttccccttcctgt

SEQ ID NO: 1685349 - DNA, 15 bp, Homo sapiens
gttccccttcctgtg

SEQ ID NO: 1685350 - DNA, 15 bp, Homo sapiens
ttccccttcctgtgt

SEQ ID NO: 1685351 - DNA, 15 bp, Homo sapiens
tccccttcctgtgtc

SEQ ID NO: 1685352 - DNA, 15 bp, Homo sapiens
ccccttcctgtgtcc

SEQ ID NO: 1685353 - DNA, 15 bp, Homo sapiens
cccttcctgtgtcca

SEQ ID NO: 1685354 - DNA, 15 bp, Homo sapiens
ccttcctgtgtccat

SEQ ID NO: 1685355 - DNA, 15 bp, Homo sapiens
cttcctgtgtccatg

SEQ ID NO: 1685356 - DNA, 15 bp, Homo sapiens
ttcctgtgtccatgt

SEQ ID NO: 1685357 - DNA, 15 bp, Homo sapiens
tcctgtgtccatgtg

SEQ ID NO: 1685358 - DNA, 15 bp, Homo sapiens
gttctcattgttcaa

SEQ ID NO: 1685359 - DNA, 15 bp, Homo sapiens
ttctcattgttcaat

SEQ ID NO: 1685360 - DNA, 15 bp, Homo sapiens
tctcattgttcaatt

SEQ ID NO: 1685361 - DNA, 15 bp, Homo sapiens
ctcattgttcaattc

SEQ ID NO: 1685362 - DNA, 15 bp, Homo sapiens
tcattgttcaattcc

SEQ ID NO: 1685363 - DNA, 15 bp, Homo sapiens
cattgttcaattccc

SEQ ID NO: 1685364 - DNA, 15 bp, Homo sapiens
attgttcaattccca

SEQ ID NO: 1685365 - DNA, 15 bp, Homo sapiens
ttgttcaattcccac

SEQ ID NO: 1685366 - DNA, 15 bp, Homo sapiens
tgttcaattcccacc

SEQ ID NO: 1685367 - DNA, 15 bp, Homo sapiens
gttcaattcccacct

SEQ ID NO: 1685368 - DNA, 15 bp, Homo sapiens
tgagtgagaacatgt

SEQ ID NO: 1685369 - DNA, 15 bp, Homo sapiens
gagtgagaacatgta

SEQ ID NO: 1685370 - DNA, 15 bp, Homo sapiens
agtgagaacatgtag

SEQ ID NO: 1685371 - DNA, 15 bp, Homo sapiens
gtgagaacatgtagt

SEQ ID NO: 1685372 - DNA, 15 bp, Homo sapiens
tgagaacatgtagtg

SEQ ID NO: 1685373 - DNA, 15 bp, Homo sapiens
gagaacatgtagtgt

SEQ ID NO: 1685374 - DNA, 15 bp, Homo sapiens
agaacatgtagtgtt

SEQ ID NO: 1685375 - DNA, 15 bp, Homo sapiens
gaacatgtagtgttt

SEQ ID NO: 1685376 - DNA, 15 bp, Homo sapiens
aacatgtagtgtttg

SEQ ID NO: 1685377 - DNA, 15 bp, Homo sapiens
acatgtagtgtttgg

SEQ ID NO: 1685378 - DNA, 15 bp, Homo sapiens
catgtagtgtttggt

SEQ ID NO: 1685379 - DNA, 15 bp, Homo sapiens
atgtagtgtttggtt

SEQ ID NO: 1685380 - DNA, 15 bp, Homo sapiens
tgtagtgtttggttt

SEQ ID NO: 1685381 - DNA, 15 bp, Homo sapiens
gtagtgtttggtttt

SEQ ID NO: 1685382 - DNA, 15 bp, Homo sapiens
tagtgtttggttttt

SEQ ID NO: 1685383 - DNA, 15 bp, Homo sapiens
agtgtttggtttttt

SEQ ID NO: 1685384 - DNA, 15 bp, Homo sapiens
gtgtttggttttttg

SEQ ID NO: 1685385 - DNA, 15 bp, Homo sapiens
tgtttggttttttgt

SEQ ID NO: 1685386 - DNA, 15 bp, Homo sapiens
gtttggttttttgtc

SEQ ID NO: 1685387 - DNA, 15 bp, Homo sapiens
tttggttttttgtcc

SEQ ID NO: 1685388 - DNA, 15 bp, Homo sapiens
ttggttttttgtcct

SEQ ID NO: 1685389 - DNA, 15 bp, Homo sapiens
tggttttttgtcctc

SEQ ID NO: 1685390 - DNA, 15 bp, Homo sapiens
ggttttttgtcctcg

SEQ ID NO: 1685391 - DNA, 15 bp, Homo sapiens
gttttttgtcctcgc

SEQ ID NO: 1685392 - DNA, 15 bp, Homo sapiens
ttttttgtcctcgcg

SEQ ID NO: 1685393 - DNA, 15 bp, Homo sapiens
tttttgtcctcgcga

SEQ ID NO: 1685394 - DNA, 15 bp, Homo sapiens
ttttgtcctcgcgat

SEQ ID NO: 1685395 - DNA, 15 bp, Homo sapiens
tttgtcctcgcgata

SEQ ID NO: 1685396 - DNA, 15 bp, Homo sapiens
ttgtcctcgcgatag

SEQ ID NO: 1685397 - DNA, 15 bp, Homo sapiens
tgtcctcgcgatagt

SEQ ID NO: 1685398 - DNA, 15 bp, Homo sapiens
gtcctcgcgatagtt

SEQ ID NO: 1685399 - DNA, 15 bp, Homo sapiens
tcctcgcgatagttt

SEQ ID NO: 1685400 - DNA, 15 bp, Homo sapiens
cctcgcgatagtttg

SEQ ID NO: 1685401 - DNA, 15 bp, Homo sapiens
ctcgcgatagtttgc

SEQ ID NO: 1685402 - DNA, 15 bp, Homo sapiens
tcgcgatagtttgct

SEQ ID NO: 1685403 - DNA, 15 bp, Homo sapiens
cgcgatagtttgctg

SEQ ID NO: 1685404 - DNA, 15 bp, Homo sapiens
tttgctgagaatgat

SEQ ID NO: 1685405 - DNA, 15 bp, Homo sapiens
ttgctgagaatgatg

SEQ ID NO: 1685406 - DNA, 15 bp, Homo sapiens
tgctgagaatgatgg

SEQ ID NO: 1685407 - DNA, 15 bp, Homo sapiens
gctgagaatgatggt

SEQ ID NO: 1685408 - DNA, 15 bp, Homo sapiens
ctgagaatgatggtt

SEQ ID NO: 1685409 - DNA, 15 bp, Homo sapiens
tgagaatgatggttt

SEQ ID NO: 1685410 - DNA, 15 bp, Homo sapiens
gagaatgatggtttc

SEQ ID NO: 1685411 - DNA, 15 bp, Homo sapiens
agaatgatggtttcc

SEQ ID NO: 1685412 - DNA, 15 bp, Homo sapiens
gaatgatggtttcca

SEQ ID NO: 1685413 - DNA, 15 bp, Homo sapiens
aatgatggtttccag

SEQ ID NO: 1685414 - DNA, 15 bp, Homo sapiens
atgatggtttccagt

SEQ ID NO: 1685415 - DNA, 15 bp, Homo sapiens
tgatggtttccagtt

SEQ ID NO: 1685416 - DNA, 15 bp, Homo sapiens
gatggtttccagttt

SEQ ID NO: 1685417 - DNA, 15 bp, Homo sapiens
atggtttccagtttc

SEQ ID NO: 1685418 - DNA, 15 bp, Homo sapiens
tggtttccagtttca

SEQ ID NO: 1685419 - DNA, 15 bp, Homo sapiens
ggtttccagtttcat

SEQ ID NO: 1685420 - DNA, 15 bp, Homo sapiens
gtttccagtttcatc

SEQ ID NO: 1685421 - DNA, 15 bp, Homo sapiens
tttccagtttcatcc

SEQ ID NO: 1685422 - DNA, 15 bp, Homo sapiens
ttccagtttcatcca

SEQ ID NO: 1685423 - DNA, 15 bp, Homo sapiens
tccagtttcatccat

SEQ ID NO: 1685424 - DNA, 15 bp, Homo sapiens
ccagtttcatccatg

SEQ ID NO: 1685425 - DNA, 15 bp, Homo sapiens
cagtttcatccatgt

SEQ ID NO: 1685426 - DNA, 15 bp, Homo sapiens
agtttcatccatgtc

SEQ ID NO: 1685427 - DNA, 15 bp, Homo sapiens
gtttcatccatgtcc

SEQ ID NO: 1685428 - DNA, 15 bp, Homo sapiens
tttcatccatgtccc

SEQ ID NO: 1685429 - DNA, 15 bp, Homo sapiens
ttcatccatgtccct

SEQ ID NO: 1685430 - DNA, 15 bp, Homo sapiens
tcatccatgtcccta

SEQ ID NO: 1685431 - DNA, 15 bp, Homo sapiens
catccatgtccctac

SEQ ID NO: 1685432 - DNA, 15 bp, Homo sapiens
atccatgtccctaca

SEQ ID NO: 1685433 - DNA, 15 bp, Homo sapiens
tccatgtccctacaa

SEQ ID NO: 1685434 - DNA, 15 bp, Homo sapiens
ccatgtccctacaaa

SEQ ID NO: 1685435 - DNA, 15 bp, Homo sapiens
catgtccctacaaag

SEQ ID NO: 1685436 - DNA, 15 bp, Homo sapiens
atgtccctacaaagg

SEQ ID NO: 1685437 - DNA, 15 bp, Homo sapiens
tgtccctacaaagga

SEQ ID NO: 1685438 - DNA, 15 bp, Homo sapiens
gtccctacaaaggac

SEQ ID NO: 1685439 - DNA, 15 bp, Homo sapiens
tccctacaaaggaca

SEQ ID NO: 1685440 - DNA, 15 bp, Homo sapiens
ccctacaaaggacat

SEQ ID NO: 1685441 - DNA, 15 bp, Homo sapiens
cctacaaaggacatg

SEQ ID NO: 1685442 - DNA, 15 bp, Homo sapiens
ctacaaaggacatga

SEQ ID NO: 1685443 - DNA, 15 bp, Homo sapiens
tacaaaggacatgaa

SEQ ID NO: 1685444 - DNA, 15 bp, Homo sapiens
acaaaggacatgaac

SEQ ID NO: 1685445 - DNA, 15 bp, Homo sapiens
caaaggacatgaact

SEQ ID NO: 1685446 - DNA, 15 bp, Homo sapiens
aaaggacatgaactc

SEQ ID NO: 1685447 - DNA, 15 bp, Homo sapiens
aaggacatgaactca

SEQ ID NO: 1685448 - DNA, 15 bp, Homo sapiens
aggacatgaactcat

SEQ ID NO: 1685449 - DNA, 15 bp, Homo sapiens
gacatgaactcatca

SEQ ID NO: 1685450 - DNA, 15 bp, Homo sapiens
acatgaactcatcat

SEQ ID NO: 1685451 - DNA, 15 bp, Homo sapiens
catgaactcatcatt

SEQ ID NO: 1685452 - DNA, 15 bp, Homo sapiens
atgaactcatcattt

SEQ ID NO: 1685453 - DNA, 15 bp, Homo sapiens
tgaactcatcatttt

SEQ ID NO: 1685454 - DNA, 15 bp, Homo sapiens
gaactcatcattttt

SEQ ID NO: 1685455 - DNA, 15 bp, Homo sapiens
aactcatcatttttt

SEQ ID NO: 1685456 - DNA, 15 bp, Homo sapiens
actcatcatttttta

SEQ ID NO: 1685457 - DNA, 15 bp, Homo sapiens
ctcatcattttttat

SEQ ID NO: 1685458 - DNA, 15 bp, Homo sapiens
tcatcattttttatg

SEQ ID NO: 1685459 - DNA, 15 bp, Homo sapiens
catcattttttatgg

SEQ ID NO: 1685460 - DNA, 15 bp, Homo sapiens
atcattttttatggc

SEQ ID NO: 1685461 - DNA, 15 bp, Homo sapiens
tcattttttatggct

SEQ ID NO: 1685462 - DNA, 15 bp, Homo sapiens
cattttttatggctg

SEQ ID NO: 1685463 - DNA, 15 bp, Homo sapiens
attttttatggctgc

SEQ ID NO: 1685464 - DNA, 15 bp, Homo sapiens
gctgcatagtattcc

SEQ ID NO: 1685465 - DNA, 15 bp, Homo sapiens
ctgcatagtattcca

SEQ ID NO: 1685466 - DNA, 15 bp, Homo sapiens
tgcatagtattccat

SEQ ID NO: 1685467 - DNA, 15 bp, Homo sapiens
gcatagtattccatg

SEQ ID NO: 1685468 - DNA, 15 bp, Homo sapiens
catagtattccatgg

SEQ ID NO: 1685469 - DNA, 15 bp, Homo sapiens
atagtattccatggt

SEQ ID NO: 1685470 - DNA, 15 bp, Homo sapiens
tagtattccatggtg

SEQ ID NO: 1685471 - DNA, 15 bp, Homo sapiens
agtattccatggtgt

SEQ ID NO: 1685472 - DNA, 15 bp, Homo sapiens
gtattccatggtgta

SEQ ID NO: 1685473 - DNA, 15 bp, Homo sapiens
tattccatggtgtat

SEQ ID NO: 1685474 - DNA, 15 bp, Homo sapiens
attccatggtgtata

SEQ ID NO: 1685475 - DNA, 15 bp, Homo sapiens
ttccatggtgtatat

SEQ ID NO: 1685476 - DNA, 15 bp, Homo sapiens
tccatggtgtatatg

SEQ ID NO: 1685477 - DNA, 15 bp, Homo sapiens
ccatggtgtatatgt

SEQ ID NO: 1685478 - DNA, 15 bp, Homo sapiens
catggtgtatatgtg

SEQ ID NO: 1685479 - DNA, 15 bp, Homo sapiens
atggtgtatatgtgc

SEQ ID NO: 1685480 - DNA, 15 bp, Homo sapiens
tggtgtatatgtgcc

SEQ ID NO: 1685481 - DNA, 15 bp, Homo sapiens
ggtgtatatgtgcca

SEQ ID NO: 1685482 - DNA, 15 bp, Homo sapiens
gtgtatatgtgccac

SEQ ID NO: 1685483 - DNA, 15 bp, Homo sapiens
tgtatatgtgccaca

SEQ ID NO: 1685484 - DNA, 15 bp, Homo sapiens
gtatatgtgccacat

SEQ ID NO: 1685485 - DNA, 15 bp, Homo sapiens
tatatgtgccacatt

SEQ ID NO: 1685486 - DNA, 15 bp, Homo sapiens
atatgtgccacattt

SEQ ID NO: 1685487 - DNA, 15 bp, Homo sapiens
tatgtgccacatttt

SEQ ID NO: 1685488 - DNA, 15 bp, Homo sapiens
tgccacattttctta

SEQ ID NO: 1685489 - DNA, 15 bp, Homo sapiens
gccacattttcttaa

SEQ ID NO: 1685490 - DNA, 15 bp, Homo sapiens
ccacattttcttaat

SEQ ID NO: 1685491 - DNA, 15 bp, Homo sapiens
cacattttcttaatc

SEQ ID NO: 1685492 - DNA, 15 bp, Homo sapiens
acattttcttaatcc

SEQ ID NO: 1685493 - DNA, 15 bp, Homo sapiens
cattttcttaatcca

SEQ ID NO: 1685494 - DNA, 15 bp, Homo sapiens
attttcttaatccag

SEQ ID NO: 1685495 - DNA, 15 bp, Homo sapiens
ttttcttaatccagt

SEQ ID NO: 1685496 - DNA, 15 bp, Homo sapiens
tttcttaatccagtc

SEQ ID NO: 1685497 - DNA, 15 bp, Homo sapiens
ttcttaatccagtct

SEQ ID NO: 1685498 - DNA, 15 bp, Homo sapiens
tcttaatccagtcta

SEQ ID NO: 1685499 - DNA, 15 bp, Homo sapiens
cttaatccagtctat

SEQ ID NO: 1685500 - DNA, 15 bp, Homo sapiens
ttaatccagtctatc

SEQ ID NO: 1685501 - DNA, 15 bp, Homo sapiens
taatccagtctatca

SEQ ID NO: 1685502 - DNA, 15 bp, Homo sapiens
aatccagtctatcac

SEQ ID NO: 1685503 - DNA, 15 bp, Homo sapiens
atccagtctatcact

SEQ ID NO: 1685504 - DNA, 15 bp, Homo sapiens
tccagtctatcactg

SEQ ID NO: 1685505 - DNA, 15 bp, Homo sapiens
ccagtctatcactgt

SEQ ID NO: 1685506 - DNA, 15 bp, Homo sapiens
cagtctatcactgtt

SEQ ID NO: 1685507 - DNA, 15 bp, Homo sapiens
agtctatcactgttg

SEQ ID NO: 1685508 - DNA, 15 bp, Homo sapiens
gtctatcactgttgg

SEQ ID NO: 1685509 - DNA, 15 bp, Homo sapiens
tctatcactgttgga

SEQ ID NO: 1685510 - DNA, 15 bp, Homo sapiens
ctatcactgttggac

SEQ ID NO: 1685511 - DNA, 15 bp, Homo sapiens
tatcactgttggaca

SEQ ID NO: 1685512 - DNA, 15 bp, Homo sapiens
atcactgttggacat

SEQ ID NO: 1685513 - DNA, 15 bp, Homo sapiens
tcactgttggacatt

SEQ ID NO: 1685514 - DNA, 15 bp, Homo sapiens
cactgttggacattt

SEQ ID NO: 1685515 - DNA, 15 bp, Homo sapiens
actgttggacatttg

SEQ ID NO: 1685516 - DNA, 15 bp, Homo sapiens
ctgttggacatttgg

SEQ ID NO: 1685517 - DNA, 15 bp, Homo sapiens
tgttggacatttggg

SEQ ID NO: 1685518 - DNA, 15 bp, Homo sapiens
gttggacatttgggt

SEQ ID NO: 1685519 - DNA, 15 bp, Homo sapiens
ttggacatttgggtt

SEQ ID NO: 1685520 - DNA, 15 bp, Homo sapiens
tggacatttgggttg

SEQ ID NO: 1685521 - DNA, 15 bp, Homo sapiens
ggacatttgggttgg

SEQ ID NO: 1685522 - DNA, 15 bp, Homo sapiens
gacatttgggttggt

SEQ ID NO: 1685523 - DNA, 15 bp, Homo sapiens
acatttgggttggtt

SEQ ID NO: 1685524 - DNA, 15 bp, Homo sapiens
catttgggttggttc

SEQ ID NO: 1685525 - DNA, 15 bp, Homo sapiens
atttgggttggttcc

SEQ ID NO: 1685526 - DNA, 15 bp, Homo sapiens
tttgggttggttcca

SEQ ID NO: 1685527 - DNA, 15 bp, Homo sapiens
ttgggttggttccaa

SEQ ID NO: 1685528 - DNA, 15 bp, Homo sapiens
tgggttggttccaag

SEQ ID NO: 1685529 - DNA, 15 bp, Homo sapiens
gggttggttccaagt

SEQ ID NO: 1685530 - DNA, 15 bp, Homo sapiens
ggttggttccaagtc

SEQ ID NO: 1685531 - DNA, 15 bp, Homo sapiens
gttggttccaagtct

SEQ ID NO: 1685532 - DNA, 15 bp, Homo sapiens
ttggttccaagtctt

SEQ ID NO: 1685533 - DNA, 15 bp, Homo sapiens
tggttccaagtcttt

SEQ ID NO: 1685534 - DNA, 15 bp, Homo sapiens
ggttccaagtctttg

SEQ ID NO: 1685535 - DNA, 15 bp, Homo sapiens
gttccaagtctttgc

SEQ ID NO: 1685536 - DNA, 15 bp, Homo sapiens
ttccaagtctttgct

SEQ ID NO: 1685537 - DNA, 15 bp, Homo sapiens
tccaagtctttgcta

SEQ ID NO: 1685538 - DNA, 15 bp, Homo sapiens
ccaagtctttgctat

SEQ ID NO: 1685539 - DNA, 15 bp, Homo sapiens
caagtctttgctatt

SEQ ID NO: 1685540 - DNA, 15 bp, Homo sapiens
attgtgaatagtgcc

SEQ ID NO: 1685541 - DNA, 15 bp, Homo sapiens
ttgtgaatagtgcca

SEQ ID NO: 1685542 - DNA, 15 bp, Homo sapiens
tgtgaatagtgccac

SEQ ID NO: 1685543 - DNA, 15 bp, Homo sapiens
gtgaatagtgccaca

SEQ ID NO: 1685544 - DNA, 15 bp, Homo sapiens
tgaatagtgccacaa

SEQ ID NO: 1685545 - DNA, 15 bp, Homo sapiens
gaatagtgccacaat

SEQ ID NO: 1685546 - DNA, 15 bp, Homo sapiens
aatagtgccacaata

SEQ ID NO: 1685547 - DNA, 15 bp, Homo sapiens
atagtgccacaataa

SEQ ID NO: 1685548 - DNA, 15 bp, Homo sapiens
cacaataaacatacg

SEQ ID NO: 1685549 - DNA, 15 bp, Homo sapiens
acaataaacatacgt

SEQ ID NO: 1685550 - DNA, 15 bp, Homo sapiens
caataaacatacgtg

SEQ ID NO: 1685551 - DNA, 15 bp, Homo sapiens
aataaacatacgtgt

SEQ ID NO: 1685552 - DNA, 15 bp, Homo sapiens
ataaacatacgtgtg

SEQ ID NO: 1685553 - DNA, 15 bp, Homo sapiens
taaacatacgtgtgc

SEQ ID NO: 1685554 - DNA, 15 bp, Homo sapiens
aaacatacgtgtgca

SEQ ID NO: 1685555 - DNA, 15 bp, Homo sapiens
aacatacgtgtgcat

SEQ ID NO: 1685556 - DNA, 15 bp, Homo sapiens
acatacgtgtgcatg

SEQ ID NO: 1685557 - DNA, 15 bp, Homo sapiens
catacgtgtgcatgt

SEQ ID NO: 1685558 - DNA, 15 bp, Homo sapiens
atacgtgtgcatgta

SEQ ID NO: 1685559 - DNA, 15 bp, Homo sapiens
tacgtgtgcatgtat

SEQ ID NO: 1685560 - DNA, 15 bp, Homo sapiens
acgtgtgcatgtatc

SEQ ID NO: 1685561 - DNA, 15 bp, Homo sapiens
cgtgtgcatgtatcc

SEQ ID NO: 1685562 - DNA, 15 bp, Homo sapiens
gtgtgcatgtatcct

SEQ ID NO: 1685563 - DNA, 15 bp, Homo sapiens
tgtgcatgtatcctt

SEQ ID NO: 1685564 - DNA, 15 bp, Homo sapiens
gtgcatgtatcctta

SEQ ID NO: 1685565 - DNA, 15 bp, Homo sapiens
tgcatgtatccttat

SEQ ID NO: 1685566 - DNA, 15 bp, Homo sapiens
gcatgtatccttata

SEQ ID NO: 1685567 - DNA, 15 bp, Homo sapiens
catgtatccttatag

SEQ ID NO: 1685568 - DNA, 15 bp, Homo sapiens
atgtatccttatagc

SEQ ID NO: 1685569 - DNA, 15 bp, Homo sapiens
tgtatccttatagca

SEQ ID NO: 1685570 - DNA, 15 bp, Homo sapiens
gtatccttatagcag

SEQ ID NO: 1685571 - DNA, 15 bp, Homo sapiens
tatccttatagcagc

SEQ ID NO: 1685572 - DNA, 15 bp, Homo sapiens
atccttatagcagca

SEQ ID NO: 1685573 - DNA, 15 bp, Homo sapiens
tccttatagcagcat

SEQ ID NO: 1685574 - DNA, 15 bp, Homo sapiens
ccttatagcagcatg

SEQ ID NO: 1685575 - DNA, 15 bp, Homo sapiens
cttatagcagcatga

SEQ ID NO: 1685576 - DNA, 15 bp, Homo sapiens
ttatagcagcatgat

SEQ ID NO: 1685577 - DNA, 15 bp, Homo sapiens
tatagcagcatgatt

SEQ ID NO: 1685578 - DNA, 15 bp, Homo sapiens
atagcagcatgattt

SEQ ID NO: 1685579 - DNA, 15 bp, Homo sapiens
tagcagcatgattta

SEQ ID NO: 1685580 - DNA, 15 bp, Homo sapiens
agcagcatgatttat

SEQ ID NO: 1685581 - DNA, 15 bp, Homo sapiens
gcagcatgatttata

SEQ ID NO: 1685582 - DNA, 15 bp, Homo sapiens
cagcatgatttataa

SEQ ID NO: 1685583 - DNA, 15 bp, Homo sapiens
agcatgatttataat

SEQ ID NO: 1685584 - DNA, 15 bp, Homo sapiens
gcatgatttataatc

SEQ ID NO: 1685585 - DNA, 15 bp, Homo sapiens
catgatttataatcc

SEQ ID NO: 1685586 - DNA, 15 bp, Homo sapiens
atgatttataatcct

SEQ ID NO: 1685587 - DNA, 15 bp, Homo sapiens
tgatttataatcctt

SEQ ID NO: 1685588 - DNA, 15 bp, Homo sapiens
gatttataatccttt

SEQ ID NO: 1685589 - DNA, 15 bp, Homo sapiens
tcctttgggtatata

SEQ ID NO: 1685590 - DNA, 15 bp, Homo sapiens
cctttgggtatatac

SEQ ID NO: 1685591 - DNA, 15 bp, Homo sapiens
ctttgggtatatacc

SEQ ID NO: 1685592 - DNA, 15 bp, Homo sapiens
tttgggtatataccc

SEQ ID NO: 1685593 - DNA, 15 bp, Homo sapiens
ttgggtatataccca

SEQ ID NO: 1685594 - DNA, 15 bp, Homo sapiens
tgggtatatacccag

SEQ ID NO: 1685595 - DNA, 15 bp, Homo sapiens
gggtatatacccagt

SEQ ID NO: 1685596 - DNA, 15 bp, Homo sapiens
ggtatatacccagta

SEQ ID NO: 1685597 - DNA, 15 bp, Homo sapiens
gtatatacccagtaa

SEQ ID NO: 1685598 - DNA, 15 bp, Homo sapiens
cccagtaatgggatg

SEQ ID NO: 1685599 - DNA, 15 bp, Homo sapiens
ccagtaatgggatgg

SEQ ID NO: 1685600 - DNA, 15 bp, Homo sapiens
cagtaatgggatggc

SEQ ID NO: 1685601 - DNA, 15 bp, Homo sapiens
agtaatgggatggct

SEQ ID NO: 1685602 - DNA, 15 bp, Homo sapiens
gtaatgggatggctg

SEQ ID NO: 1685603 - DNA, 15 bp, Homo sapiens
taatgggatggctgg

SEQ ID NO: 1685604 - DNA, 15 bp, Homo sapiens
aatgggatggctggg

SEQ ID NO: 1685605 - DNA, 15 bp, Homo sapiens
atgggatggctgggt

SEQ ID NO: 1685606 - DNA, 15 bp, Homo sapiens
tgggatggctgggtc

SEQ ID NO: 1685607 - DNA, 15 bp, Homo sapiens
gggatggctgggtca

SEQ ID NO: 1685608 - DNA, 15 bp, Homo sapiens
ggatggctgggtcaa

SEQ ID NO: 1685609 - DNA, 15 bp, Homo sapiens
gatggctgggtcaaa

SEQ ID NO: 1685610 - DNA, 15 bp, Homo sapiens
atggctgggtcaaat

SEQ ID NO: 1685611 - DNA, 15 bp, Homo sapiens
tggctgggtcaaatg

SEQ ID NO: 1685612 - DNA, 15 bp, Homo sapiens
ggctgggtcaaatgg

SEQ ID NO: 1685613 - DNA, 15 bp, Homo sapiens
gctgggtcaaatggt

SEQ ID NO: 1685614 - DNA, 15 bp, Homo sapiens
ctgggtcaaatggta

SEQ ID NO: 1685615 - DNA, 15 bp, Homo sapiens
tgggtcaaatggtat

SEQ ID NO: 1685616 - DNA, 15 bp, Homo sapiens
gggtcaaatggtatt

SEQ ID NO: 1685617 - DNA, 15 bp, Homo sapiens
ggtcaaatggtattt

SEQ ID NO: 1685618 - DNA, 15 bp, Homo sapiens
gtcaaatggtatttc

SEQ ID NO: 1685619 - DNA, 15 bp, Homo sapiens
tcaaatggtatttct

SEQ ID NO: 1685620 - DNA, 15 bp, Homo sapiens
caaatggtatttcta

SEQ ID NO: 1685621 - DNA, 15 bp, Homo sapiens
aaatggtatttctag

SEQ ID NO: 1685622 - DNA, 15 bp, Homo sapiens
aatggtatttctaga

SEQ ID NO: 1685623 - DNA, 15 bp, Homo sapiens
atggtatttctagaa

SEQ ID NO: 1685624 - DNA, 15 bp, Homo sapiens
tggtatttctagaat

SEQ ID NO: 1685625 - DNA, 15 bp, Homo sapiens
ggtatttctagaatt

SEQ ID NO: 1685626 - DNA, 15 bp, Homo sapiens
gtatttctagaattt

SEQ ID NO: 1685627 - DNA, 15 bp, Homo sapiens
tatttctagaatttt

SEQ ID NO: 1685628 - DNA, 15 bp, Homo sapiens
atttctagaatttta

SEQ ID NO: 1685629 - DNA, 15 bp, Homo sapiens
tttctagaattttaa

SEQ ID NO: 1685630 - DNA, 15 bp, Homo sapiens
ttctagaattttaaa

SEQ ID NO: 1685631 - DNA, 15 bp, Homo sapiens
tctagaattttaaaa

SEQ ID NO: 1685632 - DNA, 15 bp, Homo sapiens
tagaattttaaaaca

SEQ ID NO: 1685633 - DNA, 15 bp, Homo sapiens
agaattttaaaacat

SEQ ID NO: 1685634 - DNA, 15 bp, Homo sapiens
gaattttaaaacatt

SEQ ID NO: 1685635 - DNA, 15 bp, Homo sapiens
aattttaaaacattt

SEQ ID NO: 1685636 - DNA, 15 bp, Homo sapiens
attttaaaacatttt

SEQ ID NO: 1685637 - DNA, 15 bp, Homo sapiens
ttttaaaacattttc

SEQ ID NO: 1685638 - DNA, 15 bp, Homo sapiens
tttaaaacattttca

SEQ ID NO: 1685639 - DNA, 15 bp, Homo sapiens
ttaaaacattttcat

SEQ ID NO: 1685640 - DNA, 15 bp, Homo sapiens
taaaacattttcatt

SEQ ID NO: 1685641 - DNA, 15 bp, Homo sapiens
aaaacattttcatta

SEQ ID NO: 1685642 - DNA, 15 bp, Homo sapiens
aaacattttcattac

SEQ ID NO: 1685643 - DNA, 15 bp, Homo sapiens
aacattttcattact

SEQ ID NO: 1685644 - DNA, 15 bp, Homo sapiens
cattttcattactag

SEQ ID NO: 1685645 - DNA, 15 bp, Homo sapiens
attttcattactaga

SEQ ID NO: 1685646 - DNA, 15 bp, Homo sapiens
ttttcattactagaa

SEQ ID NO: 1685647 - DNA, 15 bp, Homo sapiens
tttcattactagaaa

SEQ ID NO: 1685648 - DNA, 15 bp, Homo sapiens
ttcattactagaaaa

SEQ ID NO: 1685649 - DNA, 15 bp, Homo sapiens
tcattactagaaaaa

SEQ ID NO: 1685650 - DNA, 15 bp, Homo sapiens
cattactagaaaaag

SEQ ID NO: 1685651 - DNA, 15 bp, Homo sapiens
attactagaaaaaga

SEQ ID NO: 1685652 - DNA, 15 bp, Homo sapiens
ttactagaaaaagaa

SEQ ID NO: 1685653 - DNA, 15 bp, Homo sapiens
tactagaaaaagaaa

SEQ ID NO: 1685654 - DNA, 15 bp, Homo sapiens
actagaaaaagaaac

SEQ ID NO: 1685655 - DNA, 15 bp, Homo sapiens
ctagaaaaagaaacc

SEQ ID NO: 1685656 - DNA, 15 bp, Homo sapiens
tagaaaaagaaaccc

SEQ ID NO: 1685657 - DNA, 15 bp, Homo sapiens
agaaaaagaaacccc

SEQ ID NO: 1685658 - DNA, 15 bp, Homo sapiens
gaaaaagaaacccct

SEQ ID NO: 1685659 - DNA, 15 bp, Homo sapiens
aaaaagaaacccctt

SEQ ID NO: 1685660 - DNA, 15 bp, Homo sapiens
aaaagaaaccccttg

SEQ ID NO: 1685661 - DNA, 15 bp, Homo sapiens
aaagaaaccccttgc

SEQ ID NO: 1685662 - DNA, 15 bp, Homo sapiens
aagaaaccccttgcc

SEQ ID NO: 1685663 - DNA, 15 bp, Homo sapiens
agaaaccccttgccc

SEQ ID NO: 1685664 - DNA, 15 bp, Homo sapiens
gaaaccccttgcccc

SEQ ID NO: 1685665 - DNA, 15 bp, Homo sapiens
aaaccccttgcccct

SEQ ID NO: 1685666 - DNA, 15 bp, Homo sapiens
aaccccttgcccctc

SEQ ID NO: 1685667 - DNA, 15 bp, Homo sapiens
accccttgcccctcg

SEQ ID NO: 1685668 - DNA, 15 bp, Homo sapiens
ccccttgcccctcgg

SEQ ID NO: 1685669 - DNA, 15 bp, Homo sapiens
cccttgcccctcggc

SEQ ID NO: 1685670 - DNA, 15 bp, Homo sapiens
ccttgcccctcggcc

SEQ ID NO: 1685671 - DNA, 15 bp, Homo sapiens
cttgcccctcggcca

SEQ ID NO: 1685672 - DNA, 15 bp, Homo sapiens
ttgcccctcggccat

SEQ ID NO: 1685673 - DNA, 15 bp, Homo sapiens
tgcccctcggccatc

SEQ ID NO: 1685674 - DNA, 15 bp, Homo sapiens
gcccctcggccatca

SEQ ID NO: 1685675 - DNA, 15 bp, Homo sapiens
cccctcggccatcac

SEQ ID NO: 1685676 - DNA, 15 bp, Homo sapiens
ccctcggccatcact

SEQ ID NO: 1685677 - DNA, 15 bp, Homo sapiens
cctcggccatcactt

SEQ ID NO: 1685678 - DNA, 15 bp, Homo sapiens
ctcggccatcacttt

SEQ ID NO: 1685679 - DNA, 15 bp, Homo sapiens
tcggccatcactttc

SEQ ID NO: 1685680 - DNA, 15 bp, Homo sapiens
cggccatcactttct

SEQ ID NO: 1685681 - DNA, 15 bp, Homo sapiens
ggccatcactttcta

SEQ ID NO: 1685682 - DNA, 15 bp, Homo sapiens
gccatcactttctag

SEQ ID NO: 1685683 - DNA, 15 bp, Homo sapiens
ccatcactttctagt

SEQ ID NO: 1685684 - DNA, 15 bp, Homo sapiens
catcactttctagta

SEQ ID NO: 1685685 - DNA, 15 bp, Homo sapiens
atcactttctagtac

SEQ ID NO: 1685686 - DNA, 15 bp, Homo sapiens
tcactttctagtacc

SEQ ID NO: 1685687 - DNA, 15 bp, Homo sapiens
cactttctagtacct

SEQ ID NO: 1685688 - DNA, 15 bp, Homo sapiens
actttctagtacctc

SEQ ID NO: 1685689 - DNA, 15 bp, Homo sapiens
ctttctagtacctca

SEQ ID NO: 1685690 - DNA, 15 bp, Homo sapiens
tttctagtacctcat

SEQ ID NO: 1685691 - DNA, 15 bp, Homo sapiens
ttctagtacctcatc

SEQ ID NO: 1685692 - DNA, 15 bp, Homo sapiens
tctagtacctcatcc

SEQ ID NO: 1685693 - DNA, 15 bp, Homo sapiens
ctagtacctcatcct

SEQ ID NO: 1685694 - DNA, 15 bp, Homo sapiens
tagtacctcatcctc

SEQ ID NO: 1685695 - DNA, 15 bp, Homo sapiens
agtacctcatcctcc

SEQ ID NO: 1685696 - DNA, 15 bp, Homo sapiens
gtacctcatcctcct

SEQ ID NO: 1685697 - DNA, 15 bp, Homo sapiens
tacctcatcctcctc

SEQ ID NO: 1685698 - DNA, 15 bp, Homo sapiens
acctcatcctcctcc

SEQ ID NO: 1685699 - DNA, 15 bp, Homo sapiens
cctcatcctcctccc

SEQ ID NO: 1685700 - DNA, 15 bp, Homo sapiens
ctcatcctcctccct

SEQ ID NO: 1685701 - DNA, 15 bp, Homo sapiens
tcatcctcctcccta

SEQ ID NO: 1685702 - DNA, 15 bp, Homo sapiens
catcctcctccctat

SEQ ID NO: 1685703 - DNA, 15 bp, Homo sapiens
atcctcctccctatc

SEQ ID NO: 1685704 - DNA, 15 bp, Homo sapiens
tcctcctccctatcc

SEQ ID NO: 1685705 - DNA, 15 bp, Homo sapiens
cctcctccctatccc

SEQ ID NO: 1685706 - DNA, 15 bp, Homo sapiens
ctcctccctatccct

SEQ ID NO: 1685707 - DNA, 15 bp, Homo sapiens
tcctccctatcccta

SEQ ID NO: 1685708 - DNA, 15 bp, Homo sapiens
cctccctatccctag

SEQ ID NO: 1685709 - DNA, 15 bp, Homo sapiens
ctccctatccctagg

SEQ ID NO: 1685710 - DNA, 15 bp, Homo sapiens
tccctatccctaggc

SEQ ID NO: 1685711 - DNA, 15 bp, Homo sapiens
ccctatccctaggca

SEQ ID NO: 1685712 - DNA, 15 bp, Homo sapiens
cctatccctaggcaa

SEQ ID NO: 1685713 - DNA, 15 bp, Homo sapiens
ctatccctaggcaac

SEQ ID NO: 1685714 - DNA, 15 bp, Homo sapiens
tatccctaggcaaca

SEQ ID NO: 1685715 - DNA, 15 bp, Homo sapiens
atccctaggcaacac

SEQ ID NO: 1685716 - DNA, 15 bp, Homo sapiens
tccctaggcaacact

SEQ ID NO: 1685717 - DNA, 15 bp, Homo sapiens
ccctaggcaacacta

SEQ ID NO: 1685718 - DNA, 15 bp, Homo sapiens
cctaggcaacactaa

SEQ ID NO: 1685719 - DNA, 15 bp, Homo sapiens
ctaggcaacactaat

SEQ ID NO: 1685720 - DNA, 15 bp, Homo sapiens
taggcaacactaatc

SEQ ID NO: 1685721 - DNA, 15 bp, Homo sapiens
aggcaacactaatct

SEQ ID NO: 1685722 - DNA, 15 bp, Homo sapiens
ggcaacactaatctg

SEQ ID NO: 1685723 - DNA, 15 bp, Homo sapiens
gcaacactaatctgc

SEQ ID NO: 1685724 - DNA, 15 bp, Homo sapiens
caacactaatctgct

SEQ ID NO: 1685725 - DNA, 15 bp, Homo sapiens
aacactaatctgctt

SEQ ID NO: 1685726 - DNA, 15 bp, Homo sapiens
acactaatctgcttt

SEQ ID NO: 1685727 - DNA, 15 bp, Homo sapiens
cactaatctgctttc

SEQ ID NO: 1685728 - DNA, 15 bp, Homo sapiens
actaatctgctttct

SEQ ID NO: 1685729 - DNA, 15 bp, Homo sapiens
ctaatctgctttctg

SEQ ID NO: 1685730 - DNA, 15 bp, Homo sapiens
taatctgctttctga

SEQ ID NO: 1685731 - DNA, 15 bp, Homo sapiens
aatctgctttctgac

SEQ ID NO: 1685732 - DNA, 15 bp, Homo sapiens
atctgctttctgact

SEQ ID NO: 1685733 - DNA, 15 bp, Homo sapiens
tctgctttctgactg

SEQ ID NO: 1685734 - DNA, 15 bp, Homo sapiens
ctgctttctgactgt

SEQ ID NO: 1685735 - DNA, 15 bp, Homo sapiens
tgctttctgactgta

SEQ ID NO: 1685736 - DNA, 15 bp, Homo sapiens
gctttctgactgtag

SEQ ID NO: 1685737 - DNA, 15 bp, Homo sapiens
ctttctgactgtaga

SEQ ID NO: 1685738 - DNA, 15 bp, Homo sapiens
tttctgactgtagat

SEQ ID NO: 1685739 - DNA, 15 bp, Homo sapiens
ttctgactgtagatt

SEQ ID NO: 1685740 - DNA, 15 bp, Homo sapiens
tctgactgtagattt

SEQ ID NO: 1685741 - DNA, 15 bp, Homo sapiens
ctgactgtagatttg

SEQ ID NO: 1685742 - DNA, 15 bp, Homo sapiens
tgactgtagatttgc

SEQ ID NO: 1685743 - DNA, 15 bp, Homo sapiens
gactgtagatttgcc

SEQ ID NO: 1685744 - DNA, 15 bp, Homo sapiens
actgtagatttgcct

SEQ ID NO: 1685745 - DNA, 15 bp, Homo sapiens
ctgtagatttgccta

SEQ ID NO: 1685746 - DNA, 15 bp, Homo sapiens
tgtagatttgcctat

SEQ ID NO: 1685747 - DNA, 15 bp, Homo sapiens
gtagatttgcctatt

SEQ ID NO: 1685748 - DNA, 15 bp, Homo sapiens
tagatttgcctattc

SEQ ID NO: 1685749 - DNA, 15 bp, Homo sapiens
agatttgcctattct

SEQ ID NO: 1685750 - DNA, 15 bp, Homo sapiens
gatttgcctattctg

SEQ ID NO: 1685751 - DNA, 15 bp, Homo sapiens
atttgcctattctga

SEQ ID NO: 1685752 - DNA, 15 bp, Homo sapiens
tttgcctattctgaa

SEQ ID NO: 1685753 - DNA, 15 bp, Homo sapiens
ttgcctattctgaac

SEQ ID NO: 1685754 - DNA, 15 bp, Homo sapiens
tgcctattctgaaca

SEQ ID NO: 1685755 - DNA, 15 bp, Homo sapiens
gcctattctgaacat

SEQ ID NO: 1685756 - DNA, 15 bp, Homo sapiens
cctattctgaacatg

SEQ ID NO: 1685757 - DNA, 15 bp, Homo sapiens
ctattctgaacatgt

SEQ ID NO: 1685758 - DNA, 15 bp, Homo sapiens
tattctgaacatgtc

SEQ ID NO: 1685759 - DNA, 15 bp, Homo sapiens
attctgaacatgtca

SEQ ID NO: 1685760 - DNA, 15 bp, Homo sapiens
ttctgaacatgtcat

SEQ ID NO: 1685761 - DNA, 15 bp, Homo sapiens
tctgaacatgtcata

SEQ ID NO: 1685762 - DNA, 15 bp, Homo sapiens
ctgaacatgtcatat

SEQ ID NO: 1685763 - DNA, 15 bp, Homo sapiens
tgaacatgtcatatt

SEQ ID NO: 1685764 - DNA, 15 bp, Homo sapiens
gaacatgtcatatta

SEQ ID NO: 1685765 - DNA, 15 bp, Homo sapiens
aacatgtcatattaa

SEQ ID NO: 1685766 - DNA, 15 bp, Homo sapiens
acatgtcatattaat

SEQ ID NO: 1685767 - DNA, 15 bp, Homo sapiens
catgtcatattaata

SEQ ID NO: 1685768 - DNA, 15 bp, Homo sapiens
atgtcatattaataa

SEQ ID NO: 1685769 - DNA, 15 bp, Homo sapiens
tgtcatattaataat

SEQ ID NO: 1685770 - DNA, 15 bp, Homo sapiens
gtcatattaataata

SEQ ID NO: 1685771 - DNA, 15 bp, Homo sapiens
tcatattaataatat

SEQ ID NO: 1685772 - DNA, 15 bp, Homo sapiens
catattaataatatc

SEQ ID NO: 1685773 - DNA, 15 bp, Homo sapiens
atattaataatatca

SEQ ID NO: 1685774 - DNA, 15 bp, Homo sapiens
tattaataatatcat

SEQ ID NO: 1685775 - DNA, 15 bp, Homo sapiens
attaataatatcata

SEQ ID NO: 1685776 - DNA, 15 bp, Homo sapiens
ttaataatatcatat

SEQ ID NO: 1685777 - DNA, 15 bp, Homo sapiens
taataatatcatata

SEQ ID NO: 1685778 - DNA, 15 bp, Homo sapiens
aataatatcatataa

SEQ ID NO: 1685779 - DNA, 15 bp, Homo sapiens
ataatatcatataat

SEQ ID NO: 1685780 - DNA, 15 bp, Homo sapiens
taatatcatataata

SEQ ID NO: 1685781 - DNA, 15 bp, Homo sapiens
aatatcatataatat

SEQ ID NO: 1685782 - DNA, 15 bp, Homo sapiens
atatcatataatatg

SEQ ID NO: 1685783 - DNA, 15 bp, Homo sapiens
tatcatataatatgt

SEQ ID NO: 1685784 - DNA, 15 bp, Homo sapiens
atcatataatatgtg

SEQ ID NO: 1685785 - DNA, 15 bp, Homo sapiens
tcatataatatgtga

SEQ ID NO: 1685786 - DNA, 15 bp, Homo sapiens
catataatatgtgat

SEQ ID NO: 1685787 - DNA, 15 bp, Homo sapiens
atataatatgtgatc

SEQ ID NO: 1685788 - DNA, 15 bp, Homo sapiens
tataatatgtgatcc

SEQ ID NO: 1685789 - DNA, 15 bp, Homo sapiens
ataatatgtgatcct

SEQ ID NO: 1685790 - DNA, 15 bp, Homo sapiens
taatatgtgatcctt

SEQ ID NO: 1685791 - DNA, 15 bp, Homo sapiens
aatatgtgatccttt

SEQ ID NO: 1685792 - DNA, 15 bp, Homo sapiens
atatgtgatcctttg

SEQ ID NO: 1685793 - DNA, 15 bp, Homo sapiens
tatgtgatcctttga

SEQ ID NO: 1685794 - DNA, 15 bp, Homo sapiens
atgtgatcctttgag

SEQ ID NO: 1685795 - DNA, 15 bp, Homo sapiens
tgtgatcctttgaga

SEQ ID NO: 1685796 - DNA, 15 bp, Homo sapiens
gtgatcctttgagat

SEQ ID NO: 1685797 - DNA, 15 bp, Homo sapiens
tgatcctttgagatt

SEQ ID NO: 1685798 - DNA, 15 bp, Homo sapiens
gatcctttgagattg

SEQ ID NO: 1685799 - DNA, 15 bp, Homo sapiens
atcctttgagattgg

SEQ ID NO: 1685800 - DNA, 15 bp, Homo sapiens
tcctttgagattggc

SEQ ID NO: 1685801 - DNA, 15 bp, Homo sapiens
cctttgagattggct

SEQ ID NO: 1685802 - DNA, 15 bp, Homo sapiens
ctttgagattggctt

SEQ ID NO: 1685803 - DNA, 15 bp, Homo sapiens
tttgagattggcttc

SEQ ID NO: 1685804 - DNA, 15 bp, Homo sapiens
ttgagattggcttct

SEQ ID NO: 1685805 - DNA, 15 bp, Homo sapiens
tgagattggcttctt

SEQ ID NO: 1685806 - DNA, 15 bp, Homo sapiens
gagattggcttcttt

SEQ ID NO: 1685807 - DNA, 15 bp, Homo sapiens
agattggcttcttta

SEQ ID NO: 1685808 - DNA, 15 bp, Homo sapiens
gattggcttctttaa

SEQ ID NO: 1685809 - DNA, 15 bp, Homo sapiens
attggcttctttaac

SEQ ID NO: 1685810 - DNA, 15 bp, Homo sapiens
ttggcttctttaact

SEQ ID NO: 1685811 - DNA, 15 bp, Homo sapiens
tggcttctttaactt

SEQ ID NO: 1685812 - DNA, 15 bp, Homo sapiens
ggcttctttaactta

SEQ ID NO: 1685813 - DNA, 15 bp, Homo sapiens
gcttctttaacttaa

SEQ ID NO: 1685814 - DNA, 15 bp, Homo sapiens
cttctttaacttaag

SEQ ID NO: 1685815 - DNA, 15 bp, Homo sapiens
ttctttaacttaagc

SEQ ID NO: 1685816 - DNA, 15 bp, Homo sapiens
tctttaacttaagca

SEQ ID NO: 1685817 - DNA, 15 bp, Homo sapiens
ctttaacttaagcat

SEQ ID NO: 1685818 - DNA, 15 bp, Homo sapiens
tttaacttaagcatg

SEQ ID NO: 1685819 - DNA, 15 bp, Homo sapiens
ttaacttaagcatgt

SEQ ID NO: 1685820 - DNA, 15 bp, Homo sapiens
taacttaagcatgtg

SEQ ID NO: 1685821 - DNA, 15 bp, Homo sapiens
aacttaagcatgtgt

SEQ ID NO: 1685822 - DNA, 15 bp, Homo sapiens
acttaagcatgtgtt

SEQ ID NO: 1685823 - DNA, 15 bp, Homo sapiens
cttaagcatgtgttt

SEQ ID NO: 1685824 - DNA, 15 bp, Homo sapiens
ttaagcatgtgtttt

SEQ ID NO: 1685825 - DNA, 15 bp, Homo sapiens
taagcatgtgttttt

SEQ ID NO: 1685826 - DNA, 15 bp, Homo sapiens
aagcatgtgtttttt

SEQ ID NO: 1685827 - DNA, 15 bp, Homo sapiens
agcatgtgttttttg

SEQ ID NO: 1685828 - DNA, 15 bp, Homo sapiens
gcatgtgttttttgc

SEQ ID NO: 1685829 - DNA, 15 bp, Homo sapiens
catgtgttttttgca

SEQ ID NO: 1685830 - DNA, 15 bp, Homo sapiens
atgtgttttttgcag

SEQ ID NO: 1685831 - DNA, 15 bp, Homo sapiens
tgtgttttttgcagt

SEQ ID NO: 1685832 - DNA, 15 bp, Homo sapiens
gtgttttttgcagtt

SEQ ID NO: 1685833 - DNA, 15 bp, Homo sapiens
tgttttttgcagttc

SEQ ID NO: 1685834 - DNA, 15 bp, Homo sapiens
gttttttgcagttca

SEQ ID NO: 1685835 - DNA, 15 bp, Homo sapiens
ttttttgcagttcat

SEQ ID NO: 1685836 - DNA, 15 bp, Homo sapiens
tttttgcagttcatc

SEQ ID NO: 1685837 - DNA, 15 bp, Homo sapiens
ttttgcagttcatcc

SEQ ID NO: 1685838 - DNA, 15 bp, Homo sapiens
tttgcagttcatcca

SEQ ID NO: 1685839 - DNA, 15 bp, Homo sapiens
ttgcagttcatccac

SEQ ID NO: 1685840 - DNA, 15 bp, Homo sapiens
tgcagttcatccaca

SEQ ID NO: 1685841 - DNA, 15 bp, Homo sapiens
gcagttcatccacat

SEQ ID NO: 1685842 - DNA, 15 bp, Homo sapiens
cagttcatccacatg

SEQ ID NO: 1685843 - DNA, 15 bp, Homo sapiens
agttcatccacatgt

SEQ ID NO: 1685844 - DNA, 15 bp, Homo sapiens
gttcatccacatgta

SEQ ID NO: 1685845 - DNA, 15 bp, Homo sapiens
ttcatccacatgtat

SEQ ID NO: 1685846 - DNA, 15 bp, Homo sapiens
tcatccacatgtatt

SEQ ID NO: 1685847 - DNA, 15 bp, Homo sapiens
catccacatgtattt

SEQ ID NO: 1685848 - DNA, 15 bp, Homo sapiens
atccacatgtatttt

SEQ ID NO: 1685849 - DNA, 15 bp, Homo sapiens
tccacatgtattttt

SEQ ID NO: 1685850 - DNA, 15 bp, Homo sapiens
ggtccactcagattt

SEQ ID NO: 1685851 - DNA, 15 bp, Homo sapiens
gtccactcagatttt

SEQ ID NO: 1685852 - DNA, 15 bp, Homo sapiens
tccactcagattttc

SEQ ID NO: 1685853 - DNA, 15 bp, Homo sapiens
ccactcagattttct

SEQ ID NO: 1685854 - DNA, 15 bp, Homo sapiens
cactcagattttcta

SEQ ID NO: 1685855 - DNA, 15 bp, Homo sapiens
actcagattttctat

SEQ ID NO: 1685856 - DNA, 15 bp, Homo sapiens
ctcagattttctatg

SEQ ID NO: 1685857 - DNA, 15 bp, Homo sapiens
tcagattttctatgt

SEQ ID NO: 1685858 - DNA, 15 bp, Homo sapiens
cagattttctatgtc

SEQ ID NO: 1685859 - DNA, 15 bp, Homo sapiens
agattttctatgtct

SEQ ID NO: 1685860 - DNA, 15 bp, Homo sapiens
gattttctatgtctt

SEQ ID NO: 1685861 - DNA, 15 bp, Homo sapiens
attttctatgtcttt

SEQ ID NO: 1685862 - DNA, 15 bp, Homo sapiens
ttttctatgtcttta

SEQ ID NO: 1685863 - DNA, 15 bp, Homo sapiens
tttctatgtctttaa

SEQ ID NO: 1685864 - DNA, 15 bp, Homo sapiens
ttctatgtctttaaa

SEQ ID NO: 1685865 - DNA, 15 bp, Homo sapiens
tctatgtctttaaaa

SEQ ID NO: 1685866 - DNA, 15 bp, Homo sapiens
ctatgtctttaaaaa

SEQ ID NO: 1685867 - DNA, 15 bp, Homo sapiens
tatgtctttaaaaat

SEQ ID NO: 1685868 - DNA, 15 bp, Homo sapiens
atgtctttaaaaata

SEQ ID NO: 1685869 - DNA, 15 bp, Homo sapiens
tgtctttaaaaatat

SEQ ID NO: 1685870 - DNA, 15 bp, Homo sapiens
gtctttaaaaatatt

SEQ ID NO: 1685871 - DNA, 15 bp, Homo sapiens
tctttaaaaatattt

SEQ ID NO: 1685872 - DNA, 15 bp, Homo sapiens
ctttaaaaatatttt

SEQ ID NO: 1685873 - DNA, 15 bp, Homo sapiens
tttaaaaatattttt

SEQ ID NO: 1685874 - DNA, 15 bp, Homo sapiens
ttaaaaatatttttt

SEQ ID NO: 1685875 - DNA, 15 bp, Homo sapiens
taaaaatatttttta

SEQ ID NO: 1685876 - DNA, 15 bp, Homo sapiens
aaaaatattttttaa

SEQ ID NO: 1685877 - DNA, 15 bp, Homo sapiens
aaaatattttttaat

SEQ ID NO: 1685878 - DNA, 15 bp, Homo sapiens
aaatattttttaatt

SEQ ID NO: 1685879 - DNA, 15 bp, Homo sapiens
aatattttttaattt

SEQ ID NO: 1685880 - DNA, 15 bp, Homo sapiens
atattttttaatttg

SEQ ID NO: 1685881 - DNA, 15 bp, Homo sapiens
tattttttaatttgg

SEQ ID NO: 1685882 - DNA, 15 bp, Homo sapiens
attttttaatttggc

SEQ ID NO: 1685883 - DNA, 15 bp, Homo sapiens
ttttttaatttggca

SEQ ID NO: 1685884 - DNA, 15 bp, Homo sapiens
tttttaatttggcac

SEQ ID NO: 1685885 - DNA, 15 bp, Homo sapiens
ttttaatttggcaca

SEQ ID NO: 1685886 - DNA, 15 bp, Homo sapiens
tttaatttggcacat

SEQ ID NO: 1685887 - DNA, 15 bp, Homo sapiens
ttaatttggcacata

SEQ ID NO: 1685888 - DNA, 15 bp, Homo sapiens
taatttggcacataa

SEQ ID NO: 1685889 - DNA, 15 bp, Homo sapiens
aatttggcacataaa

SEQ ID NO: 1685890 - DNA, 15 bp, Homo sapiens
atttggcacataaaa

SEQ ID NO: 1685891 - DNA, 15 bp, Homo sapiens
tttggcacataaaaa

SEQ ID NO: 1685892 - DNA, 15 bp, Homo sapiens
ttggcacataaaaat

SEQ ID NO: 1685893 - DNA, 15 bp, Homo sapiens
tggcacataaaaatt

SEQ ID NO: 1685894 - DNA, 15 bp, Homo sapiens
ggcacataaaaatta

SEQ ID NO: 1685895 - DNA, 15 bp, Homo sapiens
gcacataaaaattat

SEQ ID NO: 1685896 - DNA, 15 bp, Homo sapiens
cacataaaaattata

SEQ ID NO: 1685897 - DNA, 15 bp, Homo sapiens
acataaaaattatat

SEQ ID NO: 1685898 - DNA, 15 bp, Homo sapiens
cataaaaattatata

SEQ ID NO: 1685899 - DNA, 15 bp, Homo sapiens
aaaattatatatatt

SEQ ID NO: 1685900 - DNA, 15 bp, Homo sapiens
aaattatatatattt

SEQ ID NO: 1685901 - DNA, 15 bp, Homo sapiens
aattatatatattta

SEQ ID NO: 1685902 - DNA, 15 bp, Homo sapiens
attatatatatttat

SEQ ID NO: 1685903 - DNA, 15 bp, Homo sapiens
ttatatatatttatg

SEQ ID NO: 1685904 - DNA, 15 bp, Homo sapiens
tatatatatttatgg

SEQ ID NO: 1685905 - DNA, 15 bp, Homo sapiens
atatatatttatggt

SEQ ID NO: 1685906 - DNA, 15 bp, Homo sapiens
tatatatttatggtg

SEQ ID NO: 1685907 - DNA, 15 bp, Homo sapiens
atatatttatggtgt

SEQ ID NO: 1685908 - DNA, 15 bp, Homo sapiens
tatatttatggtgtg

SEQ ID NO: 1685909 - DNA, 15 bp, Homo sapiens
atatttatggtgtgc

SEQ ID NO: 1685910 - DNA, 15 bp, Homo sapiens
tatttatggtgtgca

SEQ ID NO: 1685911 - DNA, 15 bp, Homo sapiens
atttatggtgtgcag

SEQ ID NO: 1685912 - DNA, 15 bp, Homo sapiens
tttatggtgtgcagc

SEQ ID NO: 1685913 - DNA, 15 bp, Homo sapiens
ttatggtgtgcagca

SEQ ID NO: 1685914 - DNA, 15 bp, Homo sapiens
tatggtgtgcagcat

SEQ ID NO: 1685915 - DNA, 15 bp, Homo sapiens
atggtgtgcagcatg

SEQ ID NO: 1685916 - DNA, 15 bp, Homo sapiens
tggtgtgcagcatga

SEQ ID NO: 1685917 - DNA, 15 bp, Homo sapiens
ggtgtgcagcatgat

SEQ ID NO: 1685918 - DNA, 15 bp, Homo sapiens
gtgtgcagcatgatg

SEQ ID NO: 1685919 - DNA, 15 bp, Homo sapiens
tgtgcagcatgatgt

SEQ ID NO: 1685920 - DNA, 15 bp, Homo sapiens
gtgcagcatgatgtt

SEQ ID NO: 1685921 - DNA, 15 bp, Homo sapiens
tgcagcatgatgttt

SEQ ID NO: 1685922 - DNA, 15 bp, Homo sapiens
gcagcatgatgtttt

SEQ ID NO: 1685923 - DNA, 15 bp, Homo sapiens
cagcatgatgttttg

SEQ ID NO: 1685924 - DNA, 15 bp, Homo sapiens
agcatgatgttttga

SEQ ID NO: 1685925 - DNA, 15 bp, Homo sapiens
gcatgatgttttgaa

SEQ ID NO: 1685926 - DNA, 15 bp, Homo sapiens
catgatgttttgaaa

SEQ ID NO: 1685927 - DNA, 15 bp, Homo sapiens
atgatgttttgaaat

SEQ ID NO: 1685928 - DNA, 15 bp, Homo sapiens
tgatgttttgaaata

SEQ ID NO: 1685929 - DNA, 15 bp, Homo sapiens
gatgttttgaaatat

SEQ ID NO: 1685930 - DNA, 15 bp, Homo sapiens
atgttttgaaatatg

SEQ ID NO: 1685931 - DNA, 15 bp, Homo sapiens
tgttttgaaatatgt

SEQ ID NO: 1685932 - DNA, 15 bp, Homo sapiens
gttttgaaatatgta

SEQ ID NO: 1685933 - DNA, 15 bp, Homo sapiens
ttttgaaatatgtat

SEQ ID NO: 1685934 - DNA, 15 bp, Homo sapiens
tttgaaatatgtata

SEQ ID NO: 1685935 - DNA, 15 bp, Homo sapiens
ttgaaatatgtatac

SEQ ID NO: 1685936 - DNA, 15 bp, Homo sapiens
tgaaatatgtataca

SEQ ID NO: 1685937 - DNA, 15 bp, Homo sapiens
gaaatatgtatacat

SEQ ID NO: 1685938 - DNA, 15 bp, Homo sapiens
aaatatgtatacatt

SEQ ID NO: 1685939 - DNA, 15 bp, Homo sapiens
aatatgtatacattg

SEQ ID NO: 1685940 - DNA, 15 bp, Homo sapiens
atatgtatacattgt

SEQ ID NO: 1685941 - DNA, 15 bp, Homo sapiens
tatgtatacattgtg

SEQ ID NO: 1685942 - DNA, 15 bp, Homo sapiens
atgtatacattgtgg

SEQ ID NO: 1685943 - DNA, 15 bp, Homo sapiens
tgtatacattgtgga

SEQ ID NO: 1685944 - DNA, 15 bp, Homo sapiens
gtatacattgtggaa

SEQ ID NO: 1685945 - DNA, 15 bp, Homo sapiens
tatacattgtggaat

SEQ ID NO: 1685946 - DNA, 15 bp, Homo sapiens
atacattgtggaatg

SEQ ID NO: 1685947 - DNA, 15 bp, Homo sapiens
tacattgtggaatgg

SEQ ID NO: 1685948 - DNA, 15 bp, Homo sapiens
acattgtggaatggc

SEQ ID NO: 1685949 - DNA, 15 bp, Homo sapiens
cattgtggaatggct

SEQ ID NO: 1685950 - DNA, 15 bp, Homo sapiens
attgtggaatggcta

SEQ ID NO: 1685951 - DNA, 15 bp, Homo sapiens
ttgtggaatggctaa

SEQ ID NO: 1685952 - DNA, 15 bp, Homo sapiens
tgtggaatggctaaa

SEQ ID NO: 1685953 - DNA, 15 bp, Homo sapiens
gtggaatggctaaat

SEQ ID NO: 1685954 - DNA, 15 bp, Homo sapiens
tggaatggctaaatt

SEQ ID NO: 1685955 - DNA, 15 bp, Homo sapiens
ggaatggctaaattg

SEQ ID NO: 1685956 - DNA, 15 bp, Homo sapiens
gaatggctaaattga

SEQ ID NO: 1685957 - DNA, 15 bp, Homo sapiens
aatggctaaattgag

SEQ ID NO: 1685958 - DNA, 15 bp, Homo sapiens
atggctaaattgagc

SEQ ID NO: 1685959 - DNA, 15 bp, Homo sapiens
tggctaaattgagct

SEQ ID NO: 1685960 - DNA, 15 bp, Homo sapiens
ggctaaattgagcta

SEQ ID NO: 1685961 - DNA, 15 bp, Homo sapiens
gctaaattgagctaa

SEQ ID NO: 1685962 - DNA, 15 bp, Homo sapiens
ctaaattgagctaat

SEQ ID NO: 1685963 - DNA, 15 bp, Homo sapiens
taaattgagctaatt

SEQ ID NO: 1685964 - DNA, 15 bp, Homo sapiens
aaattgagctaatta

SEQ ID NO: 1685965 - DNA, 15 bp, Homo sapiens
aattgagctaattaa

SEQ ID NO: 1685966 - DNA, 15 bp, Homo sapiens
attgagctaattaac

SEQ ID NO: 1685967 - DNA, 15 bp, Homo sapiens
ttgagctaattaaca

SEQ ID NO: 1685968 - DNA, 15 bp, Homo sapiens
tgagctaattaacat

SEQ ID NO: 1685969 - DNA, 15 bp, Homo sapiens
gagctaattaacata

SEQ ID NO: 1685970 - DNA, 15 bp, Homo sapiens
agctaattaacatat

SEQ ID NO: 1685971 - DNA, 15 bp, Homo sapiens
gctaattaacatatt

SEQ ID NO: 1685972 - DNA, 15 bp, Homo sapiens
ctaattaacatattt

SEQ ID NO: 1685973 - DNA, 15 bp, Homo sapiens
taattaacatattta

SEQ ID NO: 1685974 - DNA, 15 bp, Homo sapiens
aattaacatatttac

SEQ ID NO: 1685975 - DNA, 15 bp, Homo sapiens
attaacatatttact

SEQ ID NO: 1685976 - DNA, 15 bp, Homo sapiens
ttaacatatttacta

SEQ ID NO: 1685977 - DNA, 15 bp, Homo sapiens
taacatatttactac

SEQ ID NO: 1685978 - DNA, 15 bp, Homo sapiens
aacatatttactacc

SEQ ID NO: 1685979 - DNA, 15 bp, Homo sapiens
acatatttactacct

SEQ ID NO: 1685980 - DNA, 15 bp, Homo sapiens
catatttactacctc

SEQ ID NO: 1685981 - DNA, 15 bp, Homo sapiens
atatttactacctca

SEQ ID NO: 1685982 - DNA, 15 bp, Homo sapiens
tatttactacctcac

SEQ ID NO: 1685983 - DNA, 15 bp, Homo sapiens
atttactacctcaca

SEQ ID NO: 1685984 - DNA, 15 bp, Homo sapiens
tttactacctcacac

SEQ ID NO: 1685985 - DNA, 15 bp, Homo sapiens
ttactacctcacaca

SEQ ID NO: 1685986 - DNA, 15 bp, Homo sapiens
tactacctcacacac

SEQ ID NO: 1685987 - DNA, 15 bp, Homo sapiens
actacctcacacact

SEQ ID NO: 1685988 - DNA, 15 bp, Homo sapiens
ctacctcacacactt

SEQ ID NO: 1685989 - DNA, 15 bp, Homo sapiens
tacctcacacactta

SEQ ID NO: 1685990 - DNA, 15 bp, Homo sapiens
acctcacacacttat

SEQ ID NO: 1685991 - DNA, 15 bp, Homo sapiens
cctcacacacttatc

SEQ ID NO: 1685992 - DNA, 15 bp, Homo sapiens
ctcacacacttatct

SEQ ID NO: 1685993 - DNA, 15 bp, Homo sapiens
tcacacacttatctt

SEQ ID NO: 1685994 - DNA, 15 bp, Homo sapiens
cacacacttatcttt

SEQ ID NO: 1685995 - DNA, 15 bp, Homo sapiens
acacacttatctttt

SEQ ID NO: 1685996 - DNA, 15 bp, Homo sapiens
cacacttatcttttt

SEQ ID NO: 1685997 - DNA, 15 bp, Homo sapiens
acacttatctttttt

SEQ ID NO: 1685998 - DNA, 15 bp, Homo sapiens
cacttatcttttttt

SEQ ID NO: 1685999 - DNA, 15 bp, Homo sapiens
acttatctttttttg

SEQ ID NO: 1686000 - DNA, 15 bp, Homo sapiens
cttatctttttttgt

SEQ ID NO: 1686001 - DNA, 15 bp, Homo sapiens
tatctttttttgttg

SEQ ID NO: 1686002 - DNA, 15 bp, Homo sapiens
atctttttttgttgt

SEQ ID NO: 1686003 - DNA, 15 bp, Homo sapiens
tctttttttgttgta

SEQ ID NO: 1686004 - DNA, 15 bp, Homo sapiens
ctttttttgttgtaa

SEQ ID NO: 1686005 - DNA, 15 bp, Homo sapiens
tttttttgttgtaag

SEQ ID NO: 1686006 - DNA, 15 bp, Homo sapiens
ttttttgttgtaaga

SEQ ID NO: 1686007 - DNA, 15 bp, Homo sapiens
tttttgttgtaagaa

SEQ ID NO: 1686008 - DNA, 15 bp, Homo sapiens
ttttgttgtaagaac

SEQ ID NO: 1686009 - DNA, 15 bp, Homo sapiens
tttgttgtaagaaca

SEQ ID NO: 1686010 - DNA, 15 bp, Homo sapiens
ttgttgtaagaacac

SEQ ID NO: 1686011 - DNA, 15 bp, Homo sapiens
tgttgtaagaacact

SEQ ID NO: 1686012 - DNA, 15 bp, Homo sapiens
gttgtaagaacacta

SEQ ID NO: 1686013 - DNA, 15 bp, Homo sapiens
ttgtaagaacactaa

SEQ ID NO: 1686014 - DNA, 15 bp, Homo sapiens
tgtaagaacactaaa

SEQ ID NO: 1686015 - DNA, 15 bp, Homo sapiens
gtaagaacactaaaa

SEQ ID NO: 1686016 - DNA, 15 bp, Homo sapiens
taagaacactaaaaa

SEQ ID NO: 1686017 - DNA, 15 bp, Homo sapiens
aagaacactaaaaat

SEQ ID NO: 1686018 - DNA, 15 bp, Homo sapiens
agaacactaaaaatc

SEQ ID NO: 1686019 - DNA, 15 bp, Homo sapiens
gaacactaaaaatct

SEQ ID NO: 1686020 - DNA, 15 bp, Homo sapiens
aacactaaaaatcta

SEQ ID NO: 1686021 - DNA, 15 bp, Homo sapiens
acactaaaaatctac

SEQ ID NO: 1686022 - DNA, 15 bp, Homo sapiens
cactaaaaatctact

SEQ ID NO: 1686023 - DNA, 15 bp, Homo sapiens
actaaaaatctactc

SEQ ID NO: 1686024 - DNA, 15 bp, Homo sapiens
ctaaaaatctactct

SEQ ID NO: 1686025 - DNA, 15 bp, Homo sapiens
taaaaatctactctt

SEQ ID NO: 1686026 - DNA, 15 bp, Homo sapiens
aaaaatctactcttg

SEQ ID NO: 1686027 - DNA, 15 bp, Homo sapiens
aaaatctactcttgg

SEQ ID NO: 1686028 - DNA, 15 bp, Homo sapiens
aaatctactcttggc

SEQ ID NO: 1686029 - DNA, 15 bp, Homo sapiens
aatctactcttggct

SEQ ID NO: 1686030 - DNA, 15 bp, Homo sapiens
atctactcttggctt

SEQ ID NO: 1686031 - DNA, 15 bp, Homo sapiens
tctactcttggcttc

SEQ ID NO: 1686032 - DNA, 15 bp, Homo sapiens
ctactcttggcttca

SEQ ID NO: 1686033 - DNA, 15 bp, Homo sapiens
tactcttggcttcag

SEQ ID NO: 1686034 - DNA, 15 bp, Homo sapiens
actcttggcttcagg

SEQ ID NO: 1686035 - DNA, 15 bp, Homo sapiens
ctcttggcttcaggc

SEQ ID NO: 1686036 - DNA, 15 bp, Homo sapiens
tcttggcttcaggct

SEQ ID NO: 1686037 - DNA, 15 bp, Homo sapiens
cttggcttcaggctt

SEQ ID NO: 1686038 - DNA, 15 bp, Homo sapiens
ttggcttcaggcttc

SEQ ID NO: 1686039 - DNA, 15 bp, Homo sapiens
tggcttcaggcttcc

SEQ ID NO: 1686040 - DNA, 15 bp, Homo sapiens
ggcttcaggcttcct

SEQ ID NO: 1686041 - DNA, 15 bp, Homo sapiens
gcttcaggcttcctg

SEQ ID NO: 1686042 - DNA, 15 bp, Homo sapiens
cttcaggcttcctgg

SEQ ID NO: 1686043 - DNA, 15 bp, Homo sapiens
ttcaggcttcctggg

SEQ ID NO: 1686044 - DNA, 15 bp, Homo sapiens
tcaggcttcctggga

SEQ ID NO: 1686045 - DNA, 15 bp, Homo sapiens
caggcttcctgggat

SEQ ID NO: 1686046 - DNA, 15 bp, Homo sapiens
aggcttcctgggatg

SEQ ID NO: 1686047 - DNA, 15 bp, Homo sapiens
ggcttcctgggatgc

SEQ ID NO: 1686048 - DNA, 15 bp, Homo sapiens
gcttcctgggatgcc

SEQ ID NO: 1686049 - DNA, 15 bp, Homo sapiens
cttcctgggatgcca

SEQ ID NO: 1686050 - DNA, 15 bp, Homo sapiens
ttcctgggatgccaa

SEQ ID NO: 1686051 - DNA, 15 bp, Homo sapiens
tcctgggatgccaaa

SEQ ID NO: 1686052 - DNA, 15 bp, Homo sapiens
cctgggatgccaaaa

SEQ ID NO: 1686053 - DNA, 15 bp, Homo sapiens
ctgggatgccaaaaa

SEQ ID NO: 1686054 - DNA, 15 bp, Homo sapiens
tgggatgccaaaaaa

SEQ ID NO: 1686055 - DNA, 15 bp, Homo sapiens
gggatgccaaaaaac

SEQ ID NO: 1686056 - DNA, 15 bp, Homo sapiens
ggatgccaaaaaact

SEQ ID NO: 1686057 - DNA, 15 bp, Homo sapiens
gatgccaaaaaactg

SEQ ID NO: 1686058 - DNA, 15 bp, Homo sapiens
atgccaaaaaactgt

SEQ ID NO: 1686059 - DNA, 15 bp, Homo sapiens
tgccaaaaaactgtg

SEQ ID NO: 1686060 - DNA, 15 bp, Homo sapiens
gccaaaaaactgtgt

SEQ ID NO: 1686061 - DNA, 15 bp, Homo sapiens
ccaaaaaactgtgtg

SEQ ID NO: 1686062 - DNA, 15 bp, Homo sapiens
caaaaaactgtgtgt

SEQ ID NO: 1686063 - DNA, 15 bp, Homo sapiens
aaaaaactgtgtgtc

SEQ ID NO: 1686064 - DNA, 15 bp, Homo sapiens
aaaaactgtgtgtcc

SEQ ID NO: 1686065 - DNA, 15 bp, Homo sapiens
aaaactgtgtgtccg

SEQ ID NO: 1686066 - DNA, 15 bp, Homo sapiens
aaactgtgtgtccgc

SEQ ID NO: 1686067 - DNA, 15 bp, Homo sapiens
aactgtgtgtccgct

SEQ ID NO: 1686068 - DNA, 15 bp, Homo sapiens
actgtgtgtccgctt

SEQ ID NO: 1686069 - DNA, 15 bp, Homo sapiens
ctgtgtgtccgcttg

SEQ ID NO: 1686070 - DNA, 15 bp, Homo sapiens
tgtgtgtccgcttgc

SEQ ID NO: 1686071 - DNA, 15 bp, Homo sapiens
gtgtgtccgcttgct

SEQ ID NO: 1686072 - DNA, 15 bp, Homo sapiens
tgtgtccgcttgctt

SEQ ID NO: 1686073 - DNA, 15 bp, Homo sapiens
gtgtccgcttgcttt

SEQ ID NO: 1686074 - DNA, 15 bp, Homo sapiens
tgtccgcttgctttc

SEQ ID NO: 1686075 - DNA, 15 bp, Homo sapiens
gtccgcttgctttct

SEQ ID NO: 1686076 - DNA, 15 bp, Homo sapiens
tccgcttgctttctc

SEQ ID NO: 1686077 - DNA, 15 bp, Homo sapiens
ccgcttgctttctca

SEQ ID NO: 1686078 - DNA, 15 bp, Homo sapiens
cgcttgctttctcaa

SEQ ID NO: 1686079 - DNA, 15 bp, Homo sapiens
gcttgctttctcaat

SEQ ID NO: 1686080 - DNA, 15 bp, Homo sapiens
cttgctttctcaatg

SEQ ID NO: 1686081 - DNA, 15 bp, Homo sapiens
ttgctttctcaatgg

SEQ ID NO: 1686082 - DNA, 15 bp, Homo sapiens
tgctttctcaatggg

SEQ ID NO: 1686083 - DNA, 15 bp, Homo sapiens
gctttctcaatgggg

SEQ ID NO: 1686084 - DNA, 15 bp, Homo sapiens
ctttctcaatgggga

SEQ ID NO: 1686085 - DNA, 15 bp, Homo sapiens
tttctcaatggggag

SEQ ID NO: 1686086 - DNA, 15 bp, Homo sapiens
ttctcaatggggagg

SEQ ID NO: 1686087 - DNA, 15 bp, Homo sapiens
tctcaatggggaggc

SEQ ID NO: 1686088 - DNA, 15 bp, Homo sapiens
ctcaatggggaggct

SEQ ID NO: 1686089 - DNA, 15 bp, Homo sapiens
tcaatggggaggctt

SEQ ID NO: 1686090 - DNA, 15 bp, Homo sapiens
caatggggaggcttg

SEQ ID NO: 1686091 - DNA, 15 bp, Homo sapiens
aatggggaggcttgt

SEQ ID NO: 1686092 - DNA, 15 bp, Homo sapiens
atggggaggcttgtg

SEQ ID NO: 1686093 - DNA, 15 bp, Homo sapiens
tggggaggcttgtgg

SEQ ID NO: 1686094 - DNA, 15 bp, Homo sapiens
ggggaggcttgtggt

SEQ ID NO: 1686095 - DNA, 15 bp, Homo sapiens
gggaggcttgtggtc

SEQ ID NO: 1686096 - DNA, 15 bp, Homo sapiens
ggaggcttgtggtct

SEQ ID NO: 1686097 - DNA, 15 bp, Homo sapiens
gaggcttgtggtctg

SEQ ID NO: 1686098 - DNA, 15 bp, Homo sapiens
aggcttgtggtctgg

SEQ ID NO: 1686099 - DNA, 15 bp, Homo sapiens
ggcttgtggtctggg

SEQ ID NO: 1686100 - DNA, 15 bp, Homo sapiens
gcttgtggtctgggg

SEQ ID NO: 1686101 - DNA, 15 bp, Homo sapiens
cttgtggtctggggc

SEQ ID NO: 1686102 - DNA, 15 bp, Homo sapiens
ttgtggtctggggca

SEQ ID NO: 1686103 - DNA, 15 bp, Homo sapiens
tgtggtctggggcaa

SEQ ID NO: 1686104 - DNA, 15 bp, Homo sapiens
gtggtctggggcaaa

SEQ ID NO: 1686105 - DNA, 15 bp, Homo sapiens
tggtctggggcaaat

SEQ ID NO: 1686106 - DNA, 15 bp, Homo sapiens
ggtctggggcaaatt

SEQ ID NO: 1686107 - DNA, 15 bp, Homo sapiens
gtctggggcaaattt

SEQ ID NO: 1686108 - DNA, 15 bp, Homo sapiens
tctggggcaaatttt

SEQ ID NO: 1686109 - DNA, 15 bp, Homo sapiens
ctggggcaaattttc

SEQ ID NO: 1686110 - DNA, 15 bp, Homo sapiens
tggggcaaattttca

SEQ ID NO: 1686111 - DNA, 15 bp, Homo sapiens
ggggcaaattttcag

SEQ ID NO: 1686112 - DNA, 15 bp, Homo sapiens
gggcaaattttcagc

SEQ ID NO: 1686113 - DNA, 15 bp, Homo sapiens
ggcaaattttcagcc

SEQ ID NO: 1686114 - DNA, 15 bp, Homo sapiens
gcaaattttcagccc

SEQ ID NO: 1686115 - DNA, 15 bp, Homo sapiens
caaattttcagccct

SEQ ID NO: 1686116 - DNA, 15 bp, Homo sapiens
aaattttcagccctg

SEQ ID NO: 1686117 - DNA, 15 bp, Homo sapiens
aattttcagccctgg

SEQ ID NO: 1686118 - DNA, 15 bp, Homo sapiens
attttcagccctggt

SEQ ID NO: 1686119 - DNA, 15 bp, Homo sapiens
ttttcagccctggtc

SEQ ID NO: 1686120 - DNA, 15 bp, Homo sapiens
tttcagccctggtca

SEQ ID NO: 1686121 - DNA, 15 bp, Homo sapiens
ttcagccctggtcac

SEQ ID NO: 1686122 - DNA, 15 bp, Homo sapiens
tcagccctggtcact

SEQ ID NO: 1686123 - DNA, 15 bp, Homo sapiens
cagccctggtcactg

SEQ ID NO: 1686124 - DNA, 15 bp, Homo sapiens
agccctggtcactgg

SEQ ID NO: 1686125 - DNA, 15 bp, Homo sapiens
gccctggtcactggc

SEQ ID NO: 1686126 - DNA, 15 bp, Homo sapiens
ccctggtcactggct

SEQ ID NO: 1686127 - DNA, 15 bp, Homo sapiens
cctggtcactggctg

SEQ ID NO: 1686128 - DNA, 15 bp, Homo sapiens
ctggtcactggctgc

SEQ ID NO: 1686129 - DNA, 15 bp, Homo sapiens
tggtcactggctgcc

SEQ ID NO: 1686130 - DNA, 15 bp, Homo sapiens
ggtcactggctgcct

SEQ ID NO: 1686131 - DNA, 15 bp, Homo sapiens
gtcactggctgcctg

SEQ ID NO: 1686132 - DNA, 15 bp, Homo sapiens
tcactggctgcctgg

SEQ ID NO: 1686133 - DNA, 15 bp, Homo sapiens
cactggctgcctgga

SEQ ID NO: 1686134 - DNA, 15 bp, Homo sapiens
actggctgcctggaa

SEQ ID NO: 1686135 - DNA, 15 bp, Homo sapiens
ctggctgcctggaaa

SEQ ID NO: 1686136 - DNA, 15 bp, Homo sapiens
tggctgcctggaaat

SEQ ID NO: 1686137 - DNA, 15 bp, Homo sapiens
ggctgcctggaaata

SEQ ID NO: 1686138 - DNA, 15 bp, Homo sapiens
gctgcctggaaatag

SEQ ID NO: 1686139 - DNA, 15 bp, Homo sapiens
ctgcctggaaataga

SEQ ID NO: 1686140 - DNA, 15 bp, Homo sapiens
tgcctggaaatagat

SEQ ID NO: 1686141 - DNA, 15 bp, Homo sapiens
gcctggaaatagatt

SEQ ID NO: 1686142 - DNA, 15 bp, Homo sapiens
cctggaaatagattc

SEQ ID NO: 1686143 - DNA, 15 bp, Homo sapiens
ctggaaatagattca

SEQ ID NO: 1686144 - DNA, 15 bp, Homo sapiens
tggaaatagattcag

SEQ ID NO: 1686145 - DNA, 15 bp, Homo sapiens
ggaaatagattcagt

SEQ ID NO: 1686146 - DNA, 15 bp, Homo sapiens
gaaatagattcagtg

SEQ ID NO: 1686147 - DNA, 15 bp, Homo sapiens
aaatagattcagtgc

SEQ ID NO: 1686148 - DNA, 15 bp, Homo sapiens
aatagattcagtgct

SEQ ID NO: 1686149 - DNA, 15 bp, Homo sapiens
atagattcagtgctg

SEQ ID NO: 1686150 - DNA, 15 bp, Homo sapiens
tagattcagtgctgt

SEQ ID NO: 1686151 - DNA, 15 bp, Homo sapiens
agattcagtgctgtt

SEQ ID NO: 1686152 - DNA, 15 bp, Homo sapiens
gattcagtgctgttg

SEQ ID NO: 1686153 - DNA, 15 bp, Homo sapiens
attcagtgctgttgt

SEQ ID NO: 1686154 - DNA, 15 bp, Homo sapiens
ttcagtgctgttgtt

SEQ ID NO: 1686155 - DNA, 15 bp, Homo sapiens
tcagtgctgttgttg

SEQ ID NO: 1686156 - DNA, 15 bp, Homo sapiens
cagtgctgttgttgg

SEQ ID NO: 1686157 - DNA, 15 bp, Homo sapiens
agtgctgttgttggg

SEQ ID NO: 1686158 - DNA, 15 bp, Homo sapiens
gtgctgttgttgggg

SEQ ID NO: 1686159 - DNA, 15 bp, Homo sapiens
tgctgttgttggggg

SEQ ID NO: 1686160 - DNA, 15 bp, Homo sapiens
gctgttgttgggggc

SEQ ID NO: 1686161 - DNA, 15 bp, Homo sapiens
ctgttgttgggggca

SEQ ID NO: 1686162 - DNA, 15 bp, Homo sapiens
tgttgttgggggcac

SEQ ID NO: 1686163 - DNA, 15 bp, Homo sapiens
gttgttgggggcacg

SEQ ID NO: 1686164 - DNA, 15 bp, Homo sapiens
ttgttgggggcacgg

SEQ ID NO: 1686165 - DNA, 15 bp, Homo sapiens
tgttgggggcacggt

SEQ ID NO: 1686166 - DNA, 15 bp, Homo sapiens
gttgggggcacggtg

SEQ ID NO: 1686167 - DNA, 15 bp, Homo sapiens
ttgggggcacggtgg

SEQ ID NO: 1686168 - DNA, 15 bp, Homo sapiens
tgggggcacggtggg

SEQ ID NO: 1686169 - DNA, 15 bp, Homo sapiens
gggggcacggtgggc

SEQ ID NO: 1686170 - DNA, 15 bp, Homo sapiens
ggggcacggtgggca

SEQ ID NO: 1686171 - DNA, 15 bp, Homo sapiens
gggcacggtgggcat

SEQ ID NO: 1686172 - DNA, 15 bp, Homo sapiens
ggcacggtgggcatg

SEQ ID NO: 1686173 - DNA, 15 bp, Homo sapiens
gcacggtgggcatga

SEQ ID NO: 1686174 - DNA, 15 bp, Homo sapiens
cacggtgggcatgag

SEQ ID NO: 1686175 - DNA, 15 bp, Homo sapiens
acggtgggcatgaga

SEQ ID NO: 1686176 - DNA, 15 bp, Homo sapiens
cggtgggcatgagat

SEQ ID NO: 1686177 - DNA, 15 bp, Homo sapiens
ggtgggcatgagatt

SEQ ID NO: 1686178 - DNA, 15 bp, Homo sapiens
gtgggcatgagatta

SEQ ID NO: 1686179 - DNA, 15 bp, Homo sapiens
tgggcatgagattaa

SEQ ID NO: 1686180 - DNA, 15 bp, Homo sapiens
gggcatgagattaac

SEQ ID NO: 1686181 - DNA, 15 bp, Homo sapiens
ggcatgagattaacc

SEQ ID NO: 1686182 - DNA, 15 bp, Homo sapiens
gcatgagattaacct

SEQ ID NO: 1686183 - DNA, 15 bp, Homo sapiens
catgagattaacctc

SEQ ID NO: 1686184 - DNA, 15 bp, Homo sapiens
atgagattaacctct

SEQ ID NO: 1686185 - DNA, 15 bp, Homo sapiens
tgagattaacctcta

SEQ ID NO: 1686186 - DNA, 15 bp, Homo sapiens
gagattaacctctag

SEQ ID NO: 1686187 - DNA, 15 bp, Homo sapiens
agattaacctctagt

SEQ ID NO: 1686188 - DNA, 15 bp, Homo sapiens
gattaacctctagta

SEQ ID NO: 1686189 - DNA, 15 bp, Homo sapiens
attaacctctagtac

SEQ ID NO: 1686190 - DNA, 15 bp, Homo sapiens
ttaacctctagtact

SEQ ID NO: 1686191 - DNA, 15 bp, Homo sapiens
taacctctagtactg

SEQ ID NO: 1686192 - DNA, 15 bp, Homo sapiens
aacctctagtactgc

SEQ ID NO: 1686193 - DNA, 15 bp, Homo sapiens
acctctagtactgcg

SEQ ID NO: 1686194 - DNA, 15 bp, Homo sapiens
cctctagtactgcgg

SEQ ID NO: 1686195 - DNA, 15 bp, Homo sapiens
ctctagtactgcggg

SEQ ID NO: 1686196 - DNA, 15 bp, Homo sapiens
tctagtactgcgggc

SEQ ID NO: 1686197 - DNA, 15 bp, Homo sapiens
ctagtactgcgggct

SEQ ID NO: 1686198 - DNA, 15 bp, Homo sapiens
tagtactgcgggctg

SEQ ID NO: 1686199 - DNA, 15 bp, Homo sapiens
agtactgcgggctga

SEQ ID NO: 1686200 - DNA, 15 bp, Homo sapiens
gtactgcgggctgag

SEQ ID NO: 1686201 - DNA, 15 bp, Homo sapiens
tactgcgggctgagt

SEQ ID NO: 1686202 - DNA, 15 bp, Homo sapiens
actgcgggctgagtg

SEQ ID NO: 1686203 - DNA, 15 bp, Homo sapiens
ctgcgggctgagtgg

SEQ ID NO: 1686204 - DNA, 15 bp, Homo sapiens
tgcgggctgagtggg

SEQ ID NO: 1686205 - DNA, 15 bp, Homo sapiens
gcgggctgagtggga

SEQ ID NO: 1686206 - DNA, 15 bp, Homo sapiens
cgggctgagtgggag

SEQ ID NO: 1686207 - DNA, 15 bp, Homo sapiens
gggctgagtgggagc

SEQ ID NO: 1686208 - DNA, 15 bp, Homo sapiens
ggctgagtgggagca

SEQ ID NO: 1686209 - DNA, 15 bp, Homo sapiens
gctgagtgggagcag

SEQ ID NO: 1686210 - DNA, 15 bp, Homo sapiens
ctgagtgggagcagg

SEQ ID NO: 1686211 - DNA, 15 bp, Homo sapiens
tgagtgggagcaggt

SEQ ID NO: 1686212 - DNA, 15 bp, Homo sapiens
gagtgggagcaggtt

SEQ ID NO: 1686213 - DNA, 15 bp, Homo sapiens
agtgggagcaggtta

SEQ ID NO: 1686214 - DNA, 15 bp, Homo sapiens
gtgggagcaggttaa

SEQ ID NO: 1686215 - DNA, 15 bp, Homo sapiens
tgggagcaggttaag

SEQ ID NO: 1686216 - DNA, 15 bp, Homo sapiens
gggagcaggttaagg

SEQ ID NO: 1686217 - DNA, 15 bp, Homo sapiens
ggagcaggttaaggc

SEQ ID NO: 1686218 - DNA, 15 bp, Homo sapiens
gagcaggttaaggcc

SEQ ID NO: 1686219 - DNA, 15 bp, Homo sapiens
agcaggttaaggcct

SEQ ID NO: 1686220 - DNA, 15 bp, Homo sapiens
gcaggttaaggcctg

SEQ ID NO: 1686221 - DNA, 15 bp, Homo sapiens
caggttaaggcctgt

SEQ ID NO: 1686222 - DNA, 15 bp, Homo sapiens
aggttaaggcctgta

SEQ ID NO: 1686223 - DNA, 15 bp, Homo sapiens
ggttaaggcctgtaa

SEQ ID NO: 1686224 - DNA, 15 bp, Homo sapiens
gttaaggcctgtaac

SEQ ID NO: 1686225 - DNA, 15 bp, Homo sapiens
ttaaggcctgtaact

SEQ ID NO: 1686226 - DNA, 15 bp, Homo sapiens
taaggcctgtaactg

SEQ ID NO: 1686227 - DNA, 15 bp, Homo sapiens
aaggcctgtaactgc

SEQ ID NO: 1686228 - DNA, 15 bp, Homo sapiens
aggcctgtaactgcc

SEQ ID NO: 1686229 - DNA, 15 bp, Homo sapiens
ggcctgtaactgcca

SEQ ID NO: 1686230 - DNA, 15 bp, Homo sapiens
gcctgtaactgccag

SEQ ID NO: 1686231 - DNA, 15 bp, Homo sapiens
cctgtaactgccagc

SEQ ID NO: 1686232 - DNA, 15 bp, Homo sapiens
ctgtaactgccagct

SEQ ID NO: 1686233 - DNA, 15 bp, Homo sapiens
tgtaactgccagctt

SEQ ID NO: 1686234 - DNA, 15 bp, Homo sapiens
gtaactgccagcttt

SEQ ID NO: 1686235 - DNA, 15 bp, Homo sapiens
taactgccagctttc

SEQ ID NO: 1686236 - DNA, 15 bp, Homo sapiens
aactgccagctttcc

SEQ ID NO: 1686237 - DNA, 15 bp, Homo sapiens
actgccagctttccc

SEQ ID NO: 1686238 - DNA, 15 bp, Homo sapiens
ctgccagctttcccc

SEQ ID NO: 1686239 - DNA, 15 bp, Homo sapiens
tgccagctttccccc

SEQ ID NO: 1686240 - DNA, 15 bp, Homo sapiens
gccagctttccccca

SEQ ID NO: 1686241 - DNA, 15 bp, Homo sapiens
ccagctttcccccac

SEQ ID NO: 1686242 - DNA, 15 bp, Homo sapiens
cagctttcccccact

SEQ ID NO: 1686243 - DNA, 15 bp, Homo sapiens
agctttcccccactt

SEQ ID NO: 1686244 - DNA, 15 bp, Homo sapiens
gctttcccccacttc

SEQ ID NO: 1686245 - DNA, 15 bp, Homo sapiens
ctttcccccacttcc

SEQ ID NO: 1686246 - DNA, 15 bp, Homo sapiens
tttcccccacttccc

SEQ ID NO: 1686247 - DNA, 15 bp, Homo sapiens
ttcccccacttccct

SEQ ID NO: 1686248 - DNA, 15 bp, Homo sapiens
tcccccacttcccta

SEQ ID NO: 1686249 - DNA, 15 bp, Homo sapiens
cccccacttccctag

SEQ ID NO: 1686250 - DNA, 15 bp, Homo sapiens
ccccacttccctagt

SEQ ID NO: 1686251 - DNA, 15 bp, Homo sapiens
cccacttccctagtg

SEQ ID NO: 1686252 - DNA, 15 bp, Homo sapiens
ccacttccctagtga

SEQ ID NO: 1686253 - DNA, 15 bp, Homo sapiens
cacttccctagtgac

SEQ ID NO: 1686254 - DNA, 15 bp, Homo sapiens
acttccctagtgacc

SEQ ID NO: 1686255 - DNA, 15 bp, Homo sapiens
cttccctagtgacct

SEQ ID NO: 1686256 - DNA, 15 bp, Homo sapiens
ttccctagtgacctg

SEQ ID NO: 1686257 - DNA, 15 bp, Homo sapiens
tccctagtgacctgt

SEQ ID NO: 1686258 - DNA, 15 bp, Homo sapiens
ccctagtgacctgta

SEQ ID NO: 1686259 - DNA, 15 bp, Homo sapiens
cctagtgacctgtat

SEQ ID NO: 1686260 - DNA, 15 bp, Homo sapiens
ctagtgacctgtatg

SEQ ID NO: 1686261 - DNA, 15 bp, Homo sapiens
tagtgacctgtatga

SEQ ID NO: 1686262 - DNA, 15 bp, Homo sapiens
agtgacctgtatgac

SEQ ID NO: 1686263 - DNA, 15 bp, Homo sapiens
gtgacctgtatgact

SEQ ID NO: 1686264 - DNA, 15 bp, Homo sapiens
tgacctgtatgactt

SEQ ID NO: 1686265 - DNA, 15 bp, Homo sapiens
gacctgtatgactta

SEQ ID NO: 1686266 - DNA, 15 bp, Homo sapiens
acctgtatgacttag

SEQ ID NO: 1686267 - DNA, 15 bp, Homo sapiens
cctgtatgacttagc

SEQ ID NO: 1686268 - DNA, 15 bp, Homo sapiens
ctgtatgacttagca

SEQ ID NO: 1686269 - DNA, 15 bp, Homo sapiens
tgtatgacttagcag

SEQ ID NO: 1686270 - DNA, 15 bp, Homo sapiens
gtatgacttagcaga

SEQ ID NO: 1686271 - DNA, 15 bp, Homo sapiens
tatgacttagcagag

SEQ ID NO: 1686272 - DNA, 15 bp, Homo sapiens
atgacttagcagagg

SEQ ID NO: 1686273 - DNA, 15 bp, Homo sapiens
tgacttagcagaggc

SEQ ID NO: 1686274 - DNA, 15 bp, Homo sapiens
gacttagcagaggca

SEQ ID NO: 1686275 - DNA, 15 bp, Homo sapiens
acttagcagaggcag

SEQ ID NO: 1686276 - DNA, 15 bp, Homo sapiens
cttagcagaggcagc

SEQ ID NO: 1686277 - DNA, 15 bp, Homo sapiens
ttagcagaggcagcc

SEQ ID NO: 1686278 - DNA, 15 bp, Homo sapiens
tagcagaggcagcca

SEQ ID NO: 1686279 - DNA, 15 bp, Homo sapiens
agcagaggcagccat

SEQ ID NO: 1686280 - DNA, 15 bp, Homo sapiens
gcagaggcagccata

SEQ ID NO: 1686281 - DNA, 15 bp, Homo sapiens
cagaggcagccataa

SEQ ID NO: 1686282 - DNA, 15 bp, Homo sapiens
agaggcagccataat

SEQ ID NO: 1686283 - DNA, 15 bp, Homo sapiens
gaggcagccataatc

SEQ ID NO: 1686284 - DNA, 15 bp, Homo sapiens
aggcagccataatcc

SEQ ID NO: 1686285 - DNA, 15 bp, Homo sapiens
ggcagccataatcct

SEQ ID NO: 1686286 - DNA, 15 bp, Homo sapiens
gcagccataatcctc

SEQ ID NO: 1686287 - DNA, 15 bp, Homo sapiens
cagccataatcctcc

SEQ ID NO: 1686288 - DNA, 15 bp, Homo sapiens
agccataatcctcct

SEQ ID NO: 1686289 - DNA, 15 bp, Homo sapiens
gccataatcctcctg

SEQ ID NO: 1686290 - DNA, 15 bp, Homo sapiens
ccataatcctcctgg

SEQ ID NO: 1686291 - DNA, 15 bp, Homo sapiens
cataatcctcctggg

SEQ ID NO: 1686292 - DNA, 15 bp, Homo sapiens
ataatcctcctggga

SEQ ID NO: 1686293 - DNA, 15 bp, Homo sapiens
taatcctcctgggaa

SEQ ID NO: 1686294 - DNA, 15 bp, Homo sapiens
aatcctcctgggaac

SEQ ID NO: 1686295 - DNA, 15 bp, Homo sapiens
atcctcctgggaaca

SEQ ID NO: 1686296 - DNA, 15 bp, Homo sapiens
tcctcctgggaacat

SEQ ID NO: 1686297 - DNA, 15 bp, Homo sapiens
cctcctgggaacata

SEQ ID NO: 1686298 - DNA, 15 bp, Homo sapiens
ctcctgggaacataa

SEQ ID NO: 1686299 - DNA, 15 bp, Homo sapiens
tcctgggaacataac

SEQ ID NO: 1686300 - DNA, 15 bp, Homo sapiens
cctgggaacataact

SEQ ID NO: 1686301 - DNA, 15 bp, Homo sapiens
ctgggaacataactc

SEQ ID NO: 1686302 - DNA, 15 bp, Homo sapiens
tgggaacataactcc

SEQ ID NO: 1686303 - DNA, 15 bp, Homo sapiens
gggaacataactcca

SEQ ID NO: 1686304 - DNA, 15 bp, Homo sapiens
ggaacataactccat

SEQ ID NO: 1686305 - DNA, 15 bp, Homo sapiens
gaacataactccatt

SEQ ID NO: 1686306 - DNA, 15 bp, Homo sapiens
aacataactccattg

SEQ ID NO: 1686307 - DNA, 15 bp, Homo sapiens
acataactccattgg

SEQ ID NO: 1686308 - DNA, 15 bp, Homo sapiens
cataactccattgga

SEQ ID NO: 1686309 - DNA, 15 bp, Homo sapiens
ataactccattggac

SEQ ID NO: 1686310 - DNA, 15 bp, Homo sapiens
taactccattggact

SEQ ID NO: 1686311 - DNA, 15 bp, Homo sapiens
aactccattggactg

SEQ ID NO: 1686312 - DNA, 15 bp, Homo sapiens
actccattggactga

SEQ ID NO: 1686313 - DNA, 15 bp, Homo sapiens
ctccattggactgag

SEQ ID NO: 1686314 - DNA, 15 bp, Homo sapiens
tccattggactgaga

SEQ ID NO: 1686315 - DNA, 15 bp, Homo sapiens
ccattggactgagaa

SEQ ID NO: 1686316 - DNA, 15 bp, Homo sapiens
cattggactgagaac

SEQ ID NO: 1686317 - DNA, 15 bp, Homo sapiens
attggactgagaacc

SEQ ID NO: 1686318 - DNA, 15 bp, Homo sapiens
ttggactgagaacca

SEQ ID NO: 1686319 - DNA, 15 bp, Homo sapiens
tggactgagaaccac

SEQ ID NO: 1686320 - DNA, 15 bp, Homo sapiens
ggactgagaaccaca

SEQ ID NO: 1686321 - DNA, 15 bp, Homo sapiens
gactgagaaccacac

SEQ ID NO: 1686322 - DNA, 15 bp, Homo sapiens
actgagaaccacacc

SEQ ID NO: 1686323 - DNA, 15 bp, Homo sapiens
ctgagaaccacaccc

SEQ ID NO: 1686324 - DNA, 15 bp, Homo sapiens
tgagaaccacacccc

SEQ ID NO: 1686325 - DNA, 15 bp, Homo sapiens
gagaaccacaccccc

SEQ ID NO: 1686326 - DNA, 15 bp, Homo sapiens
agaaccacaccccca

SEQ ID NO: 1686327 - DNA, 15 bp, Homo sapiens
gaaccacacccccat

SEQ ID NO: 1686328 - DNA, 15 bp, Homo sapiens
aaccacacccccatc

SEQ ID NO: 1686329 - DNA, 15 bp, Homo sapiens
accacacccccatcc

SEQ ID NO: 1686330 - DNA, 15 bp, Homo sapiens
ccacacccccatccc

SEQ ID NO: 1686331 - DNA, 15 bp, Homo sapiens
cacacccccatcccc

SEQ ID NO: 1686332 - DNA, 15 bp, Homo sapiens
acacccccatccccc

SEQ ID NO: 1686333 - DNA, 15 bp, Homo sapiens
cacccccatccccca

SEQ ID NO: 1686334 - DNA, 15 bp, Homo sapiens
acccccatcccccac

SEQ ID NO: 1686335 - DNA, 15 bp, Homo sapiens
cccccatcccccaca

SEQ ID NO: 1686336 - DNA, 15 bp, Homo sapiens
ccccatcccccacag

SEQ ID NO: 1686337 - DNA, 15 bp, Homo sapiens
cccatcccccacagc

SEQ ID NO: 1686338 - DNA, 15 bp, Homo sapiens
ccatcccccacagca

SEQ ID NO: 1686339 - DNA, 15 bp, Homo sapiens
catcccccacagcag

SEQ ID NO: 1686340 - DNA, 15 bp, Homo sapiens
atcccccacagcagc

SEQ ID NO: 1686341 - DNA, 15 bp, Homo sapiens
tcccccacagcagct

SEQ ID NO: 1686342 - DNA, 15 bp, Homo sapiens
cccccacagcagctg

SEQ ID NO: 1686343 - DNA, 15 bp, Homo sapiens
ccccacagcagctgc

SEQ ID NO: 1686344 - DNA, 15 bp, Homo sapiens
cccacagcagctgca

SEQ ID NO: 1686345 - DNA, 15 bp, Homo sapiens
ccacagcagctgcag

SEQ ID NO: 1686346 - DNA, 15 bp, Homo sapiens
cacagcagctgcagc

SEQ ID NO: 1686347 - DNA, 15 bp, Homo sapiens
acagcagctgcagca

SEQ ID NO: 1686348 - DNA, 15 bp, Homo sapiens
cagcagctgcagcaa

SEQ ID NO: 1686349 - DNA, 15 bp, Homo sapiens
agcagctgcagcaag

SEQ ID NO: 1686350 - DNA, 15 bp, Homo sapiens
gcagctgcagcaagc

SEQ ID NO: 1686351 - DNA, 15 bp, Homo sapiens
cagctgcagcaagcc

SEQ ID NO: 1686352 - DNA, 15 bp, Homo sapiens
agctgcagcaagccc

SEQ ID NO: 1686353 - DNA, 15 bp, Homo sapiens
gctgcagcaagcccc

SEQ ID NO: 1686354 - DNA, 15 bp, Homo sapiens
ctgcagcaagccccg

SEQ ID NO: 1686355 - DNA, 15 bp, Homo sapiens
tgcagcaagccccgc

SEQ ID NO: 1686356 - DNA, 15 bp, Homo sapiens
gcagcaagccccgcc

SEQ ID NO: 1686357 - DNA, 15 bp, Homo sapiens
cagcaagccccgccc

SEQ ID NO: 1686358 - DNA, 15 bp, Homo sapiens
agcaagccccgccca

SEQ ID NO: 1686359 - DNA, 15 bp, Homo sapiens
gcaagccccgcccaa

SEQ ID NO: 1686360 - DNA, 15 bp, Homo sapiens
caagccccgcccaag

SEQ ID NO: 1686361 - DNA, 15 bp, Homo sapiens
aagccccgcccaagg

SEQ ID NO: 1686362 - DNA, 15 bp, Homo sapiens
agccccgcccaagga

SEQ ID NO: 1686363 - DNA, 15 bp, Homo sapiens
gccccgcccaaggag

SEQ ID NO: 1686364 - DNA, 15 bp, Homo sapiens
ccccgcccaaggaga

SEQ ID NO: 1686365 - DNA, 15 bp, Homo sapiens
cccgcccaaggagag

SEQ ID NO: 1686366 - DNA, 15 bp, Homo sapiens
ccgcccaaggagagg

SEQ ID NO: 1686367 - DNA, 15 bp, Homo sapiens
cgcccaaggagaggc

SEQ ID NO: 1686368 - DNA, 15 bp, Homo sapiens
gcccaaggagaggct

SEQ ID NO: 1686369 - DNA, 15 bp, Homo sapiens
cccaaggagaggctg

SEQ ID NO: 1686370 - DNA, 15 bp, Homo sapiens
ccaaggagaggctga

SEQ ID NO: 1686371 - DNA, 15 bp, Homo sapiens
caaggagaggctgag

SEQ ID NO: 1686372 - DNA, 15 bp, Homo sapiens
aaggagaggctgagc

SEQ ID NO: 1686373 - DNA, 15 bp, Homo sapiens
aggagaggctgagct

SEQ ID NO: 1686374 - DNA, 15 bp, Homo sapiens
ggagaggctgagctc

SEQ ID NO: 1686375 - DNA, 15 bp, Homo sapiens
gagaggctgagctca

SEQ ID NO: 1686376 - DNA, 15 bp, Homo sapiens
agaggctgagctcag

SEQ ID NO: 1686377 - DNA, 15 bp, Homo sapiens
gaggctgagctcaga

SEQ ID NO: 1686378 - DNA, 15 bp, Homo sapiens
aggctgagctcagag

SEQ ID NO: 1686379 - DNA, 15 bp, Homo sapiens
ggctgagctcagagg

SEQ ID NO: 1686380 - DNA, 15 bp, Homo sapiens
gctgagctcagaggc

SEQ ID NO: 1686381 - DNA, 15 bp, Homo sapiens
ctgagctcagaggcg

SEQ ID NO: 1686382 - DNA, 15 bp, Homo sapiens
tgagctcagaggcgc

SEQ ID NO: 1686383 - DNA, 15 bp, Homo sapiens
gagctcagaggcgcc

SEQ ID NO: 1686384 - DNA, 15 bp, Homo sapiens
agctcagaggcgcct

SEQ ID NO: 1686385 - DNA, 15 bp, Homo sapiens
gctcagaggcgccta

SEQ ID NO: 1686386 - DNA, 15 bp, Homo sapiens
ctcagaggcgcctat

SEQ ID NO: 1686387 - DNA, 15 bp, Homo sapiens
tcagaggcgcctatc

SEQ ID NO: 1686388 - DNA, 15 bp, Homo sapiens
cagaggcgcctatcc

SEQ ID NO: 1686389 - DNA, 15 bp, Homo sapiens
agaggcgcctatccc

SEQ ID NO: 1686390 - DNA, 15 bp, Homo sapiens
gaggcgcctatccct

SEQ ID NO: 1686391 - DNA, 15 bp, Homo sapiens
aggcgcctatccctg

SEQ ID NO: 1686392 - DNA, 15 bp, Homo sapiens
ggcgcctatccctgc

SEQ ID NO: 1686393 - DNA, 15 bp, Homo sapiens
gcgcctatccctgcc

SEQ ID NO: 1686394 - DNA, 15 bp, Homo sapiens
cgcctatccctgccc

SEQ ID NO: 1686395 - DNA, 15 bp, Homo sapiens
gcctatccctgcccc

SEQ ID NO: 1686396 - DNA, 15 bp, Homo sapiens
cctatccctgcccct

SEQ ID NO: 1686397 - DNA, 15 bp, Homo sapiens
ctatccctgccccta

SEQ ID NO: 1686398 - DNA, 15 bp, Homo sapiens
tatccctgcccctac

SEQ ID NO: 1686399 - DNA, 15 bp, Homo sapiens
atccctgcccctaca

SEQ ID NO: 1686400 - DNA, 15 bp, Homo sapiens
tccctgcccctacat

SEQ ID NO: 1686401 - DNA, 15 bp, Homo sapiens
ccctgcccctacatg

SEQ ID NO: 1686402 - DNA, 15 bp, Homo sapiens
cctgcccctacatgg

SEQ ID NO: 1686403 - DNA, 15 bp, Homo sapiens
ctgcccctacatggt

SEQ ID NO: 1686404 - DNA, 15 bp, Homo sapiens
tgcccctacatggtg

SEQ ID NO: 1686405 - DNA, 15 bp, Homo sapiens
gcccctacatggtgg

SEQ ID NO: 1686406 - DNA, 15 bp, Homo sapiens
cccctacatggtggt

SEQ ID NO: 1686407 - DNA, 15 bp, Homo sapiens
ccctacatggtggtc

SEQ ID NO: 1686408 - DNA, 15 bp, Homo sapiens
cctacatggtggtct

SEQ ID NO: 1686409 - DNA, 15 bp, Homo sapiens
ctacatggtggtctt

SEQ ID NO: 1686410 - DNA, 15 bp, Homo sapiens
tacatggtggtcttt

SEQ ID NO: 1686411 - DNA, 15 bp, Homo sapiens
acatggtggtctttc

SEQ ID NO: 1686412 - DNA, 15 bp, Homo sapiens
catggtggtctttct

SEQ ID NO: 1686413 - DNA, 15 bp, Homo sapiens
atggtggtctttctc

SEQ ID NO: 1686414 - DNA, 15 bp, Homo sapiens
tggtggtctttctct

SEQ ID NO: 1686415 - DNA, 15 bp, Homo sapiens
ggtggtctttctcta

SEQ ID NO: 1686416 - DNA, 15 bp, Homo sapiens
gtggtctttctctac

SEQ ID NO: 1686417 - DNA, 15 bp, Homo sapiens
tggtctttctctacc

SEQ ID NO: 1686418 - DNA, 15 bp, Homo sapiens
ggtctttctctacct

SEQ ID NO: 1686419 - DNA, 15 bp, Homo sapiens
gtctttctctacctg

SEQ ID NO: 1686420 - DNA, 15 bp, Homo sapiens
tctttctctacctgc

SEQ ID NO: 1686421 - DNA, 15 bp, Homo sapiens
ctttctctacctgcc

SEQ ID NO: 1686422 - DNA, 15 bp, Homo sapiens
tttctctacctgccc

SEQ ID NO: 1686423 - DNA, 15 bp, Homo sapiens
ttctctacctgccct

SEQ ID NO: 1686424 - DNA, 15 bp, Homo sapiens
tctctacctgccctg

SEQ ID NO: 1686425 - DNA, 15 bp, Homo sapiens
ctctacctgccctgg

SEQ ID NO: 1686426 - DNA, 15 bp, Homo sapiens
tctacctgccctggt

SEQ ID NO: 1686427 - DNA, 15 bp, Homo sapiens
ctacctgccctggta

SEQ ID NO: 1686428 - DNA, 15 bp, Homo sapiens
tacctgccctggtag

SEQ ID NO: 1686429 - DNA, 15 bp, Homo sapiens
acctgccctggtagc

SEQ ID NO: 1686430 - DNA, 15 bp, Homo sapiens
cctgccctggtagcc

SEQ ID NO: 1686431 - DNA, 15 bp, Homo sapiens
ctgccctggtagcca

SEQ ID NO: 1686432 - DNA, 15 bp, Homo sapiens
tgccctggtagccaa

SEQ ID NO: 1686433 - DNA, 15 bp, Homo sapiens
gccctggtagccaaa

SEQ ID NO: 1686434 - DNA, 15 bp, Homo sapiens
ccctggtagccaaag

SEQ ID NO: 1686435 - DNA, 15 bp, Homo sapiens
cctggtagccaaaga

SEQ ID NO: 1686436 - DNA, 15 bp, Homo sapiens
ctggtagccaaagac

SEQ ID NO: 1686437 - DNA, 15 bp, Homo sapiens
tggtagccaaagaca

SEQ ID NO: 1686438 - DNA, 15 bp, Homo sapiens
ggtagccaaagacaa

SEQ ID NO: 1686439 - DNA, 15 bp, Homo sapiens
gtagccaaagacaaa

SEQ ID NO: 1686440 - DNA, 15 bp, Homo sapiens
tagccaaagacaaag

SEQ ID NO: 1686441 - DNA, 15 bp, Homo sapiens
agccaaagacaaagg

SEQ ID NO: 1686442 - DNA, 15 bp, Homo sapiens
gccaaagacaaaggc

SEQ ID NO: 1686443 - DNA, 15 bp, Homo sapiens
ccaaagacaaaggcc

SEQ ID NO: 1686444 - DNA, 15 bp, Homo sapiens
caaagacaaaggccc

SEQ ID NO: 1686445 - DNA, 15 bp, Homo sapiens
aaagacaaaggccca

SEQ ID NO: 1686446 - DNA, 15 bp, Homo sapiens
aagacaaaggcccaa

SEQ ID NO: 1686447 - DNA, 15 bp, Homo sapiens
agacaaaggcccaat

SEQ ID NO: 1686448 - DNA, 15 bp, Homo sapiens
gacaaaggcccaatt

SEQ ID NO: 1686449 - DNA, 15 bp, Homo sapiens
acaaaggcccaattc

SEQ ID NO: 1686450 - DNA, 15 bp, Homo sapiens
caaaggcccaattct

SEQ ID NO: 1686451 - DNA, 15 bp, Homo sapiens
aaaggcccaattctc

SEQ ID NO: 1686452 - DNA, 15 bp, Homo sapiens
aaggcccaattctct

SEQ ID NO: 1686453 - DNA, 15 bp, Homo sapiens
aggcccaattctctt

SEQ ID NO: 1686454 - DNA, 15 bp, Homo sapiens
ggcccaattctcttg

SEQ ID NO: 1686455 - DNA, 15 bp, Homo sapiens
gcccaattctcttgg

SEQ ID NO: 1686456 - DNA, 15 bp, Homo sapiens
cccaattctcttggg

SEQ ID NO: 1686457 - DNA, 15 bp, Homo sapiens
ccaattctcttggga

SEQ ID NO: 1686458 - DNA, 15 bp, Homo sapiens
caattctcttgggaa

SEQ ID NO: 1686459 - DNA, 15 bp, Homo sapiens
aattctcttgggaac

SEQ ID NO: 1686460 - DNA, 15 bp, Homo sapiens
attctcttgggaact

SEQ ID NO: 1686461 - DNA, 15 bp, Homo sapiens
ttctcttgggaactc

SEQ ID NO: 1686462 - DNA, 15 bp, Homo sapiens
tctcttgggaactct

SEQ ID NO: 1686463 - DNA, 15 bp, Homo sapiens
ctcttgggaactctg

SEQ ID NO: 1686464 - DNA, 15 bp, Homo sapiens
tcttgggaactctgt

SEQ ID NO: 1686465 - DNA, 15 bp, Homo sapiens
cttgggaactctgtg

SEQ ID NO: 1686466 - DNA, 15 bp, Homo sapiens
ttgggaactctgtgg

SEQ ID NO: 1686467 - DNA, 15 bp, Homo sapiens
tgggaactctgtggc

SEQ ID NO: 1686468 - DNA, 15 bp, Homo sapiens
gggaactctgtggcc

SEQ ID NO: 1686469 - DNA, 15 bp, Homo sapiens
ggaactctgtggccc

SEQ ID NO: 1686470 - DNA, 15 bp, Homo sapiens
gaactctgtggccct

SEQ ID NO: 1686471 - DNA, 15 bp, Homo sapiens
aactctgtggccctg

SEQ ID NO: 1686472 - DNA, 15 bp, Homo sapiens
actctgtggccctgc

SEQ ID NO: 1686473 - DNA, 15 bp, Homo sapiens
ctctgtggccctgcc

SEQ ID NO: 1686474 - DNA, 15 bp, Homo sapiens
tctgtggccctgccc

SEQ ID NO: 1686475 - DNA, 15 bp, Homo sapiens
ctgtggccctgccca

SEQ ID NO: 1686476 - DNA, 15 bp, Homo sapiens
tgtggccctgcccac

SEQ ID NO: 1686477 - DNA, 15 bp, Homo sapiens
gtggccctgcccact

SEQ ID NO: 1686478 - DNA, 15 bp, Homo sapiens
tggccctgcccactg

SEQ ID NO: 1686479 - DNA, 15 bp, Homo sapiens
ggccctgcccactgc

SEQ ID NO: 1686480 - DNA, 15 bp, Homo sapiens
gccctgcccactgct

SEQ ID NO: 1686481 - DNA, 15 bp, Homo sapiens
ccctgcccactgctt

SEQ ID NO: 1686482 - DNA, 15 bp, Homo sapiens
cctgcccactgcttg

SEQ ID NO: 1686483 - DNA, 15 bp, Homo sapiens
ctgcccactgcttgg

SEQ ID NO: 1686484 - DNA, 15 bp, Homo sapiens
tgcccactgcttggg

SEQ ID NO: 1686485 - DNA, 15 bp, Homo sapiens
gcccactgcttggga

SEQ ID NO: 1686486 - DNA, 15 bp, Homo sapiens
cccactgcttgggaa

SEQ ID NO: 1686487 - DNA, 15 bp, Homo sapiens
ccactgcttgggaaa

SEQ ID NO: 1686488 - DNA, 15 bp, Homo sapiens
cactgcttgggaaac

SEQ ID NO: 1686489 - DNA, 15 bp, Homo sapiens
actgcttgggaaacc

SEQ ID NO: 1686490 - DNA, 15 bp, Homo sapiens
ctgcttgggaaacct

SEQ ID NO: 1686491 - DNA, 15 bp, Homo sapiens
tgcttgggaaacctg

SEQ ID NO: 1686492 - DNA, 15 bp, Homo sapiens
gcttgggaaacctga

SEQ ID NO: 1686493 - DNA, 15 bp, Homo sapiens
cttgggaaacctgaa

SEQ ID NO: 1686494 - DNA, 15 bp, Homo sapiens
ttgggaaacctgaat

SEQ ID NO: 1686495 - DNA, 15 bp, Homo sapiens
tgggaaacctgaata

SEQ ID NO: 1686496 - DNA, 15 bp, Homo sapiens
gggaaacctgaatag

SEQ ID NO: 1686497 - DNA, 15 bp, Homo sapiens
ggaaacctgaataga

SEQ ID NO: 1686498 - DNA, 15 bp, Homo sapiens
gaaacctgaatagat

SEQ ID NO: 1686499 - DNA, 15 bp, Homo sapiens
aaacctgaatagata

SEQ ID NO: 1686500 - DNA, 15 bp, Homo sapiens
aacctgaatagataa

SEQ ID NO: 1686501 - DNA, 15 bp, Homo sapiens
acctgaatagataac

SEQ ID NO: 1686502 - DNA, 15 bp, Homo sapiens
cctgaatagataacc

SEQ ID NO: 1686503 - DNA, 15 bp, Homo sapiens
ctgaatagataacca

SEQ ID NO: 1686504 - DNA, 15 bp, Homo sapiens
tgaatagataaccag

SEQ ID NO: 1686505 - DNA, 15 bp, Homo sapiens
gaatagataaccagg

SEQ ID NO: 1686506 - DNA, 15 bp, Homo sapiens
aatagataaccaggt

SEQ ID NO: 1686507 - DNA, 15 bp, Homo sapiens
atagataaccaggtg

SEQ ID NO: 1686508 - DNA, 15 bp, Homo sapiens
tagataaccaggtgt

SEQ ID NO: 1686509 - DNA, 15 bp, Homo sapiens
agataaccaggtgtc

SEQ ID NO: 1686510 - DNA, 15 bp, Homo sapiens
gataaccaggtgtcc

SEQ ID NO: 1686511 - DNA, 15 bp, Homo sapiens
ataaccaggtgtcct

SEQ ID NO: 1686512 - DNA, 15 bp, Homo sapiens
taaccaggtgtcctg

SEQ ID NO: 1686513 - DNA, 15 bp, Homo sapiens
aaccaggtgtcctga

SEQ ID NO: 1686514 - DNA, 15 bp, Homo sapiens
accaggtgtcctgag

SEQ ID NO: 1686515 - DNA, 15 bp, Homo sapiens
ccaggtgtcctgagg

SEQ ID NO: 1686516 - DNA, 15 bp, Homo sapiens
caggtgtcctgaggg

SEQ ID NO: 1686517 - DNA, 15 bp, Homo sapiens
aggtgtcctgagggc

SEQ ID NO: 1686518 - DNA, 15 bp, Homo sapiens
ggtgtcctgagggca

SEQ ID NO: 1686519 - DNA, 15 bp, Homo sapiens
gtgtcctgagggcaa

SEQ ID NO: 1686520 - DNA, 15 bp, Homo sapiens
tgtcctgagggcaac

SEQ ID NO: 1686521 - DNA, 15 bp, Homo sapiens
gtcctgagggcaact

SEQ ID NO: 1686522 - DNA, 15 bp, Homo sapiens
tcctgagggcaactt

SEQ ID NO: 1686523 - DNA, 15 bp, Homo sapiens
cctgagggcaacttt

SEQ ID NO: 1686524 - DNA, 15 bp, Homo sapiens
ctgagggcaactttg

SEQ ID NO: 1686525 - DNA, 15 bp, Homo sapiens
tgagggcaactttgc

SEQ ID NO: 1686526 - DNA, 15 bp, Homo sapiens
gagggcaactttgca

SEQ ID NO: 1686527 - DNA, 15 bp, Homo sapiens
agggcaactttgcat

SEQ ID NO: 1686528 - DNA, 15 bp, Homo sapiens
gggcaactttgcatt

SEQ ID NO: 1686529 - DNA, 15 bp, Homo sapiens
ggcaactttgcattc

SEQ ID NO: 1686530 - DNA, 15 bp, Homo sapiens
gcaactttgcattct

SEQ ID NO: 1686531 - DNA, 15 bp, Homo sapiens
caactttgcattctc

SEQ ID NO: 1686532 - DNA, 15 bp, Homo sapiens
aactttgcattctcc

SEQ ID NO: 1686533 - DNA, 15 bp, Homo sapiens
actttgcattctccc

SEQ ID NO: 1686534 - DNA, 15 bp, Homo sapiens
ctttgcattctccct

SEQ ID NO: 1686535 - DNA, 15 bp, Homo sapiens
tttgcattctcccta

SEQ ID NO: 1686536 - DNA, 15 bp, Homo sapiens
ttgcattctccctat

SEQ ID NO: 1686537 - DNA, 15 bp, Homo sapiens
tgcattctccctata

SEQ ID NO: 1686538 - DNA, 15 bp, Homo sapiens
gcattctccctatag

SEQ ID NO: 1686539 - DNA, 15 bp, Homo sapiens
cattctccctatagg

SEQ ID NO: 1686540 - DNA, 15 bp, Homo sapiens
attctccctatagga

SEQ ID NO: 1686541 - DNA, 15 bp, Homo sapiens
ttctccctataggac

SEQ ID NO: 1686542 - DNA, 15 bp, Homo sapiens
tctccctataggacc

SEQ ID NO: 1686543 - DNA, 15 bp, Homo sapiens
ctccctataggacca

SEQ ID NO: 1686544 - DNA, 15 bp, Homo sapiens
tccctataggaccat

SEQ ID NO: 1686545 - DNA, 15 bp, Homo sapiens
ccctataggaccata

SEQ ID NO: 1686546 - DNA, 15 bp, Homo sapiens
cctataggaccatag

SEQ ID NO: 1686547 - DNA, 15 bp, Homo sapiens
ctataggaccatagc

SEQ ID NO: 1686548 - DNA, 15 bp, Homo sapiens
tataggaccatagct

SEQ ID NO: 1686549 - DNA, 15 bp, Homo sapiens
ataggaccatagctg

SEQ ID NO: 1686550 - DNA, 15 bp, Homo sapiens
taggaccatagctga

SEQ ID NO: 1686551 - DNA, 15 bp, Homo sapiens
aggaccatagctgat

SEQ ID NO: 1686552 - DNA, 15 bp, Homo sapiens
ggaccatagctgatg

SEQ ID NO: 1686553 - DNA, 15 bp, Homo sapiens
gaccatagctgatgc

SEQ ID NO: 1686554 - DNA, 15 bp, Homo sapiens
accatagctgatgca

SEQ ID NO: 1686555 - DNA, 15 bp, Homo sapiens
ccatagctgatgcac

SEQ ID NO: 1686556 - DNA, 15 bp, Homo sapiens
catagctgatgcact

SEQ ID NO: 1686557 - DNA, 15 bp, Homo sapiens
atagctgatgcactc

SEQ ID NO: 1686558 - DNA, 15 bp, Homo sapiens
tagctgatgcactct

SEQ ID NO: 1686559 - DNA, 15 bp, Homo sapiens
agctgatgcactctt

SEQ ID NO: 1686560 - DNA, 15 bp, Homo sapiens
gctgatgcactcttg

SEQ ID NO: 1686561 - DNA, 15 bp, Homo sapiens
ctgatgcactcttga

SEQ ID NO: 1686562 - DNA, 15 bp, Homo sapiens
tgatgcactcttgaa

SEQ ID NO: 1686563 - DNA, 15 bp, Homo sapiens
gatgcactcttgaaa

SEQ ID NO: 1686564 - DNA, 15 bp, Homo sapiens
atgcactcttgaaag

SEQ ID NO: 1686565 - DNA, 15 bp, Homo sapiens
tgcactcttgaaagt

SEQ ID NO: 1686566 - DNA, 15 bp, Homo sapiens
gcactcttgaaagtg

SEQ ID NO: 1686567 - DNA, 15 bp, Homo sapiens
cactcttgaaagtgc

SEQ ID NO: 1686568 - DNA, 15 bp, Homo sapiens
actcttgaaagtgcc

SEQ ID NO: 1686569 - DNA, 15 bp, Homo sapiens
ctcttgaaagtgcca

SEQ ID NO: 1686570 - DNA, 15 bp, Homo sapiens
tcttgaaagtgccac

SEQ ID NO: 1686571 - DNA, 15 bp, Homo sapiens
cttgaaagtgccacc

SEQ ID NO: 1686572 - DNA, 15 bp, Homo sapiens
ttgaaagtgccacct

SEQ ID NO: 1686573 - DNA, 15 bp, Homo sapiens
tgaaagtgccacctc

SEQ ID NO: 1686574 - DNA, 15 bp, Homo sapiens
gaaagtgccacctcc

SEQ ID NO: 1686575 - DNA, 15 bp, Homo sapiens
aaagtgccacctcct

SEQ ID NO: 1686576 - DNA, 15 bp, Homo sapiens
aagtgccacctccta

SEQ ID NO: 1686577 - DNA, 15 bp, Homo sapiens
agtgccacctcctag

SEQ ID NO: 1686578 - DNA, 15 bp, Homo sapiens
gtgccacctcctagc

SEQ ID NO: 1686579 - DNA, 15 bp, Homo sapiens
tgccacctcctagct

SEQ ID NO: 1686580 - DNA, 15 bp, Homo sapiens
gccacctcctagcta

SEQ ID NO: 1686581 - DNA, 15 bp, Homo sapiens
ccacctcctagctag

SEQ ID NO: 1686582 - DNA, 15 bp, Homo sapiens
cacctcctagctaga

SEQ ID NO: 1686583 - DNA, 15 bp, Homo sapiens
acctcctagctagag

SEQ ID NO: 1686584 - DNA, 15 bp, Homo sapiens
cctcctagctagagg

SEQ ID NO: 1686585 - DNA, 15 bp, Homo sapiens
ctcctagctagaggc

SEQ ID NO: 1686586 - DNA, 15 bp, Homo sapiens
tcctagctagaggcc

SEQ ID NO: 1686587 - DNA, 15 bp, Homo sapiens
cctagctagaggcca

SEQ ID NO: 1686588 - DNA, 15 bp, Homo sapiens
ctagctagaggccaa

SEQ ID NO: 1686589 - DNA, 15 bp, Homo sapiens
tagctagaggccaac

SEQ ID NO: 1686590 - DNA, 15 bp, Homo sapiens
agctagaggccaacc

SEQ ID NO: 1686591 - DNA, 15 bp, Homo sapiens
gctagaggccaacca

SEQ ID NO: 1686592 - DNA, 15 bp, Homo sapiens
ctagaggccaaccaa

SEQ ID NO: 1686593 - DNA, 15 bp, Homo sapiens
tagaggccaaccaac

SEQ ID NO: 1686594 - DNA, 15 bp, Homo sapiens
agaggccaaccaaca

SEQ ID NO: 1686595 - DNA, 15 bp, Homo sapiens
gaggccaaccaacat

SEQ ID NO: 1686596 - DNA, 15 bp, Homo sapiens
aggccaaccaacata

SEQ ID NO: 1686597 - DNA, 15 bp, Homo sapiens
ggccaaccaacataa

SEQ ID NO: 1686598 - DNA, 15 bp, Homo sapiens
gccaaccaacataaa

SEQ ID NO: 1686599 - DNA, 15 bp, Homo sapiens
ccaaccaacataaaa

SEQ ID NO: 1686600 - DNA, 15 bp, Homo sapiens
caaccaacataaaac

SEQ ID NO: 1686601 - DNA, 15 bp, Homo sapiens
aaccaacataaaacc

SEQ ID NO: 1686602 - DNA, 15 bp, Homo sapiens
accaacataaaacca

SEQ ID NO: 1686603 - DNA, 15 bp, Homo sapiens
ccaacataaaaccaa

SEQ ID NO: 1686604 - DNA, 15 bp, Homo sapiens
caacataaaaccaac

SEQ ID NO: 1686605 - DNA, 15 bp, Homo sapiens
aacataaaaccaaca

SEQ ID NO: 1686606 - DNA, 15 bp, Homo sapiens
acataaaaccaacac

SEQ ID NO: 1686607 - DNA, 15 bp, Homo sapiens
cataaaaccaacaca

SEQ ID NO: 1686608 - DNA, 15 bp, Homo sapiens
ataaaaccaacacac

SEQ ID NO: 1686609 - DNA, 15 bp, Homo sapiens
taaaaccaacacact

SEQ ID NO: 1686610 - DNA, 15 bp, Homo sapiens
aaaaccaacacacta

SEQ ID NO: 1686611 - DNA, 15 bp, Homo sapiens
aaaccaacacactaa

SEQ ID NO: 1686612 - DNA, 15 bp, Homo sapiens
aaccaacacactaaa

SEQ ID NO: 1686613 - DNA, 15 bp, Homo sapiens
accaacacactaaat

SEQ ID NO: 1686614 - DNA, 15 bp, Homo sapiens
ccaacacactaaata

SEQ ID NO: 1686615 - DNA, 15 bp, Homo sapiens
caacacactaaataa

SEQ ID NO: 1686616 - DNA, 15 bp, Homo sapiens
aacacactaaataaa

SEQ ID NO: 1686617 - DNA, 15 bp, Homo sapiens
acacactaaataaaa

SEQ ID NO: 1686618 - DNA, 15 bp, Homo sapiens
cacactaaataaaaa

SEQ ID NO: 1686619 - DNA, 15 bp, Homo sapiens
acactaaataaaaac

SEQ ID NO: 1686620 - DNA, 15 bp, Homo sapiens
cactaaataaaaaca

SEQ ID NO: 1686621 - DNA, 15 bp, Homo sapiens
actaaataaaaacac

SEQ ID NO: 1686622 - DNA, 15 bp, Homo sapiens
ctaaataaaaacaca

SEQ ID NO: 1686623 - DNA, 15 bp, Homo sapiens
taaataaaaacacaa

SEQ ID NO: 1686624 - DNA, 15 bp, Homo sapiens
aaataaaaacacaac

SEQ ID NO: 1686625 - DNA, 15 bp, Homo sapiens
aataaaaacacaaca

SEQ ID NO: 1686626 - DNA, 15 bp, Homo sapiens
ataaaaacacaacag

SEQ ID NO: 1686627 - DNA, 15 bp, Homo sapiens
taaaaacacaacaga

SEQ ID NO: 1686628 - DNA, 15 bp, Homo sapiens
aaaaacacaacagag

SEQ ID NO: 1686629 - DNA, 15 bp, Homo sapiens
aaaacacaacagagg

SEQ ID NO: 1686630 - DNA, 15 bp, Homo sapiens
aaacacaacagagga

SEQ ID NO: 1686631 - DNA, 15 bp, Homo sapiens
aacacaacagaggac

SEQ ID NO: 1686632 - DNA, 15 bp, Homo sapiens
acacaacagaggacc

SEQ ID NO: 1686633 - DNA, 15 bp, Homo sapiens
cacaacagaggacct

SEQ ID NO: 1686634 - DNA, 15 bp, Homo sapiens
acaacagaggacctt

SEQ ID NO: 1686635 - DNA, 15 bp, Homo sapiens
caacagaggaccttc

SEQ ID NO: 1686636 - DNA, 15 bp, Homo sapiens
aacagaggaccttca

SEQ ID NO: 1686637 - DNA, 15 bp, Homo sapiens
acagaggaccttcac

SEQ ID NO: 1686638 - DNA, 15 bp, Homo sapiens
cagaggaccttcacg

SEQ ID NO: 1686639 - DNA, 15 bp, Homo sapiens
agaggaccttcacgg

SEQ ID NO: 1686640 - DNA, 15 bp, Homo sapiens
gaggaccttcacgga

SEQ ID NO: 1686641 - DNA, 15 bp, Homo sapiens
aggaccttcacggag

SEQ ID NO: 1686642 - DNA, 15 bp, Homo sapiens
ggaccttcacggagc

SEQ ID NO: 1686643 - DNA, 15 bp, Homo sapiens
gaccttcacggagcc

SEQ ID NO: 1686644 - DNA, 15 bp, Homo sapiens
accttcacggagccc

SEQ ID NO: 1686645 - DNA, 15 bp, Homo sapiens
ccttcacggagccca

SEQ ID NO: 1686646 - DNA, 15 bp, Homo sapiens
cttcacggagcccac

SEQ ID NO: 1686647 - DNA, 15 bp, Homo sapiens
ttcacggagcccact

SEQ ID NO: 1686648 - DNA, 15 bp, Homo sapiens
tcacggagcccactt

SEQ ID NO: 1686649 - DNA, 15 bp, Homo sapiens
cacggagcccacttc

SEQ ID NO: 1686650 - DNA, 15 bp, Homo sapiens
acggagcccacttca

SEQ ID NO: 1686651 - DNA, 15 bp, Homo sapiens
cggagcccacttcac

SEQ ID NO: 1686652 - DNA, 15 bp, Homo sapiens
ggagcccacttcact

SEQ ID NO: 1686653 - DNA, 15 bp, Homo sapiens
gagcccacttcactc

SEQ ID NO: 1686654 - DNA, 15 bp, Homo sapiens
agcccacttcactcc

SEQ ID NO: 1686655 - DNA, 15 bp, Homo sapiens
gcccacttcactccc

SEQ ID NO: 1686656 - DNA, 15 bp, Homo sapiens
cccacttcactcccc

SEQ ID NO: 1686657 - DNA, 15 bp, Homo sapiens
ccacttcactcccct

SEQ ID NO: 1686658 - DNA, 15 bp, Homo sapiens
cacttcactcccctg

SEQ ID NO: 1686659 - DNA, 15 bp, Homo sapiens
acttcactcccctgc

SEQ ID NO: 1686660 - DNA, 15 bp, Homo sapiens
cttcactcccctgct

SEQ ID NO: 1686661 - DNA, 15 bp, Homo sapiens
ttcactcccctgctg

SEQ ID NO: 1686662 - DNA, 15 bp, Homo sapiens
tcactcccctgctgc

SEQ ID NO: 1686663 - DNA, 15 bp, Homo sapiens
cactcccctgctgcc

SEQ ID NO: 1686664 - DNA, 15 bp, Homo sapiens
actcccctgctgcct

SEQ ID NO: 1686665 - DNA, 15 bp, Homo sapiens
ctcccctgctgcctc

SEQ ID NO: 1686666 - DNA, 15 bp, Homo sapiens
tcccctgctgcctcc

SEQ ID NO: 1686667 - DNA, 15 bp, Homo sapiens
cccctgctgcctcca

SEQ ID NO: 1686668 - DNA, 15 bp, Homo sapiens
ccctgctgcctccac

SEQ ID NO: 1686669 - DNA, 15 bp, Homo sapiens
cctgctgcctccacc

SEQ ID NO: 1686670 - DNA, 15 bp, Homo sapiens
ctgctgcctccacca

SEQ ID NO: 1686671 - DNA, 15 bp, Homo sapiens
tgctgcctccaccag

SEQ ID NO: 1686672 - DNA, 15 bp, Homo sapiens
gctgcctccaccagg

SEQ ID NO: 1686673 - DNA, 15 bp, Homo sapiens
ctgcctccaccaggt

SEQ ID NO: 1686674 - DNA, 15 bp, Homo sapiens
tgcctccaccaggtg

SEQ ID NO: 1686675 - DNA, 15 bp, Homo sapiens
gcctccaccaggtgc

SEQ ID NO: 1686676 - DNA, 15 bp, Homo sapiens
cctccaccaggtgca

SEQ ID NO: 1686677 - DNA, 15 bp, Homo sapiens
ctccaccaggtgcag

SEQ ID NO: 1686678 - DNA, 15 bp, Homo sapiens
tccaccaggtgcagg

SEQ ID NO: 1686679 - DNA, 15 bp, Homo sapiens
ccaccaggtgcaggt

SEQ ID NO: 1686680 - DNA, 15 bp, Homo sapiens
caccaggtgcaggtg

SEQ ID NO: 1686681 - DNA, 15 bp, Homo sapiens
accaggtgcaggtgc

SEQ ID NO: 1686682 - DNA, 15 bp, Homo sapiens
ccaggtgcaggtgct

SEQ ID NO: 1686683 - DNA, 15 bp, Homo sapiens
caggtgcaggtgctg

SEQ ID NO: 1686684 - DNA, 15 bp, Homo sapiens
aggtgcaggtgctgt

SEQ ID NO: 1686685 - DNA, 15 bp, Homo sapiens
ggtgcaggtgctgtt

SEQ ID NO: 1686686 - DNA, 15 bp, Homo sapiens
gtgcaggtgctgtta

SEQ ID NO: 1686687 - DNA, 15 bp, Homo sapiens
tgcaggtgctgttat

SEQ ID NO: 1686688 - DNA, 15 bp, Homo sapiens
gcaggtgctgttatc

SEQ ID NO: 1686689 - DNA, 15 bp, Homo sapiens
caggtgctgttatcc

SEQ ID NO: 1686690 - DNA, 15 bp, Homo sapiens
aggtgctgttatcca

SEQ ID NO: 1686691 - DNA, 15 bp, Homo sapiens
ggtgctgttatccac

SEQ ID NO: 1686692 - DNA, 15 bp, Homo sapiens
gtgctgttatccaca

SEQ ID NO: 1686693 - DNA, 15 bp, Homo sapiens
tgctgttatccacag

SEQ ID NO: 1686694 - DNA, 15 bp, Homo sapiens
gctgttatccacagc

SEQ ID NO: 1686695 - DNA, 15 bp, Homo sapiens
ctgttatccacagct

SEQ ID NO: 1686696 - DNA, 15 bp, Homo sapiens
tgttatccacagctg

SEQ ID NO: 1686697 - DNA, 15 bp, Homo sapiens
gttatccacagctgc

SEQ ID NO: 1686698 - DNA, 15 bp, Homo sapiens
ttatccacagctgca

SEQ ID NO: 1686699 - DNA, 15 bp, Homo sapiens
tatccacagctgcaa

SEQ ID NO: 1686700 - DNA, 15 bp, Homo sapiens
atccacagctgcaag

SEQ ID NO: 1686701 - DNA, 15 bp, Homo sapiens
tccacagctgcaaga

SEQ ID NO: 1686702 - DNA, 15 bp, Homo sapiens
ccacagctgcaagaa

SEQ ID NO: 1686703 - DNA, 15 bp, Homo sapiens
cacagctgcaagaac

SEQ ID NO: 1686704 - DNA, 15 bp, Homo sapiens
acagctgcaagaact

SEQ ID NO: 1686705 - DNA, 15 bp, Homo sapiens
cagctgcaagaactg

SEQ ID NO: 1686706 - DNA, 15 bp, Homo sapiens
agctgcaagaactga

SEQ ID NO: 1686707 - DNA, 15 bp, Homo sapiens
gctgcaagaactgaa

SEQ ID NO: 1686708 - DNA, 15 bp, Homo sapiens
ctgcaagaactgaag

SEQ ID NO: 1686709 - DNA, 15 bp, Homo sapiens
tgcaagaactgaaga

SEQ ID NO: 1686710 - DNA, 15 bp, Homo sapiens
gcaagaactgaagac

SEQ ID NO: 1686711 - DNA, 15 bp, Homo sapiens
caagaactgaagaca

SEQ ID NO: 1686712 - DNA, 15 bp, Homo sapiens
aagaactgaagacag

SEQ ID NO: 1686713 - DNA, 15 bp, Homo sapiens
agaactgaagacaga

SEQ ID NO: 1686714 - DNA, 15 bp, Homo sapiens
gaactgaagacagat

SEQ ID NO: 1686715 - DNA, 15 bp, Homo sapiens
aactgaagacagatc

SEQ ID NO: 1686716 - DNA, 15 bp, Homo sapiens
actgaagacagatca

SEQ ID NO: 1686717 - DNA, 15 bp, Homo sapiens
ctgaagacagatcac

SEQ ID NO: 1686718 - DNA, 15 bp, Homo sapiens
tgaagacagatcaca

SEQ ID NO: 1686719 - DNA, 15 bp, Homo sapiens
gaagacagatcacat

SEQ ID NO: 1686720 - DNA, 15 bp, Homo sapiens
aagacagatcacatc

SEQ ID NO: 1686721 - DNA, 15 bp, Homo sapiens
agacagatcacatca

SEQ ID NO: 1686722 - DNA, 15 bp, Homo sapiens
gacagatcacatcac

SEQ ID NO: 1686723 - DNA, 15 bp, Homo sapiens
acagatcacatcaca

SEQ ID NO: 1686724 - DNA, 15 bp, Homo sapiens
cagatcacatcacag

SEQ ID NO: 1686725 - DNA, 15 bp, Homo sapiens
agatcacatcacagg

SEQ ID NO: 1686726 - DNA, 15 bp, Homo sapiens
gatcacatcacagga

SEQ ID NO: 1686727 - DNA, 15 bp, Homo sapiens
atcacatcacaggac

SEQ ID NO: 1686728 - DNA, 15 bp, Homo sapiens
tcacatcacaggact

SEQ ID NO: 1686729 - DNA, 15 bp, Homo sapiens
cacatcacaggactc

SEQ ID NO: 1686730 - DNA, 15 bp, Homo sapiens
acatcacaggactct

SEQ ID NO: 1686731 - DNA, 15 bp, Homo sapiens
catcacaggactctt

SEQ ID NO: 1686732 - DNA, 15 bp, Homo sapiens
atcacaggactcttt

SEQ ID NO: 1686733 - DNA, 15 bp, Homo sapiens
tcacaggactctttg

SEQ ID NO: 1686734 - DNA, 15 bp, Homo sapiens
cacaggactctttgc

SEQ ID NO: 1686735 - DNA, 15 bp, Homo sapiens
acaggactctttgca

SEQ ID NO: 1686736 - DNA, 15 bp, Homo sapiens
caggactctttgcag

SEQ ID NO: 1686737 - DNA, 15 bp, Homo sapiens
aggactctttgcaga

SEQ ID NO: 1686738 - DNA, 15 bp, Homo sapiens
ggactctttgcagac

SEQ ID NO: 1686739 - DNA, 15 bp, Homo sapiens
gactctttgcagact

SEQ ID NO: 1686740 - DNA, 15 bp, Homo sapiens
actctttgcagactc

SEQ ID NO: 1686741 - DNA, 15 bp, Homo sapiens
ctctttgcagactct

SEQ ID NO: 1686742 - DNA, 15 bp, Homo sapiens
tctttgcagactctt

SEQ ID NO: 1686743 - DNA, 15 bp, Homo sapiens
ctttgcagactcttg

SEQ ID NO: 1686744 - DNA, 15 bp, Homo sapiens
tttgcagactcttgc

SEQ ID NO: 1686745 - DNA, 15 bp, Homo sapiens
ttgcagactcttgcc

SEQ ID NO: 1686746 - DNA, 15 bp, Homo sapiens
tgcagactcttgcca

SEQ ID NO: 1686747 - DNA, 15 bp, Homo sapiens
gcagactcttgccag

SEQ ID NO: 1686748 - DNA, 15 bp, Homo sapiens
cagactcttgccagt

SEQ ID NO: 1686749 - DNA, 15 bp, Homo sapiens
agactcttgccagta

SEQ ID NO: 1686750 - DNA, 15 bp, Homo sapiens
gactcttgccagtac

SEQ ID NO: 1686751 - DNA, 15 bp, Homo sapiens
actcttgccagtacc

SEQ ID NO: 1686752 - DNA, 15 bp, Homo sapiens
ctcttgccagtacca

SEQ ID NO: 1686753 - DNA, 15 bp, Homo sapiens
tcttgccagtaccag

SEQ ID NO: 1686754 - DNA, 15 bp, Homo sapiens
cttgccagtaccagc

SEQ ID NO: 1686755 - DNA, 15 bp, Homo sapiens
ttgccagtaccagcc

SEQ ID NO: 1686756 - DNA, 15 bp, Homo sapiens
tgccagtaccagccc

SEQ ID NO: 1686757 - DNA, 15 bp, Homo sapiens
gccagtaccagccca

SEQ ID NO: 1686758 - DNA, 15 bp, Homo sapiens
ccagtaccagcccag

SEQ ID NO: 1686759 - DNA, 15 bp, Homo sapiens
cagtaccagcccaga

SEQ ID NO: 1686760 - DNA, 15 bp, Homo sapiens
agtaccagcccagag

SEQ ID NO: 1686761 - DNA, 15 bp, Homo sapiens
gtaccagcccagagc

SEQ ID NO: 1686762 - DNA, 15 bp, Homo sapiens
taccagcccagagcc

SEQ ID NO: 1686763 - DNA, 15 bp, Homo sapiens
accagcccagagcct

SEQ ID NO: 1686764 - DNA, 15 bp, Homo sapiens
ccagcccagagcctg

SEQ ID NO: 1686765 - DNA, 15 bp, Homo sapiens
cagcccagagcctgg

SEQ ID NO: 1686766 - DNA, 15 bp, Homo sapiens
agcccagagcctggt

SEQ ID NO: 1686767 - DNA, 15 bp, Homo sapiens
gcccagagcctggta

SEQ ID NO: 1686768 - DNA, 15 bp, Homo sapiens
cccagagcctggtaa

SEQ ID NO: 1686769 - DNA, 15 bp, Homo sapiens
ccagagcctggtaac

SEQ ID NO: 1686770 - DNA, 15 bp, Homo sapiens
cagagcctggtaact

SEQ ID NO: 1686771 - DNA, 15 bp, Homo sapiens
agagcctggtaactt

SEQ ID NO: 1686772 - DNA, 15 bp, Homo sapiens
gagcctggtaacttt

SEQ ID NO: 1686773 - DNA, 15 bp, Homo sapiens
agcctggtaactttg

SEQ ID NO: 1686774 - DNA, 15 bp, Homo sapiens
gcctggtaactttgc

SEQ ID NO: 1686775 - DNA, 15 bp, Homo sapiens
cctggtaactttgct

SEQ ID NO: 1686776 - DNA, 15 bp, Homo sapiens
ctggtaactttgctg

SEQ ID NO: 1686777 - DNA, 15 bp, Homo sapiens
tggtaactttgctgg

SEQ ID NO: 1686778 - DNA, 15 bp, Homo sapiens
ggtaactttgctggg

SEQ ID NO: 1686779 - DNA, 15 bp, Homo sapiens
gtaactttgctgggt

SEQ ID NO: 1686780 - DNA, 15 bp, Homo sapiens
taactttgctgggtg

SEQ ID NO: 1686781 - DNA, 15 bp, Homo sapiens
aactttgctgggtgg

SEQ ID NO: 1686782 - DNA, 15 bp, Homo sapiens
actttgctgggtggc

SEQ ID NO: 1686783 - DNA, 15 bp, Homo sapiens
ctttgctgggtggct

SEQ ID NO: 1686784 - DNA, 15 bp, Homo sapiens
tttgctgggtggcta

SEQ ID NO: 1686785 - DNA, 15 bp, Homo sapiens
ttgctgggtggctag

SEQ ID NO: 1686786 - DNA, 15 bp, Homo sapiens
tgctgggtggctaga

SEQ ID NO: 1686787 - DNA, 15 bp, Homo sapiens
gctgggtggctagac

SEQ ID NO: 1686788 - DNA, 15 bp, Homo sapiens
ctgggtggctagacc

SEQ ID NO: 1686789 - DNA, 15 bp, Homo sapiens
tgggtggctagaccc

SEQ ID NO: 1686790 - DNA, 15 bp, Homo sapiens
gggtggctagaccca

SEQ ID NO: 1686791 - DNA, 15 bp, Homo sapiens
ggtggctagacccag

SEQ ID NO: 1686792 - DNA, 15 bp, Homo sapiens
gtggctagacccaga

SEQ ID NO: 1686793 - DNA, 15 bp, Homo sapiens
tggctagacccagaa

SEQ ID NO: 1686794 - DNA, 15 bp, Homo sapiens
ggctagacccagaag

SEQ ID NO: 1686795 - DNA, 15 bp, Homo sapiens
gctagacccagaaga

SEQ ID NO: 1686796 - DNA, 15 bp, Homo sapiens
ctagacccagaagag

SEQ ID NO: 1686797 - DNA, 15 bp, Homo sapiens
tagacccagaagagc

SEQ ID NO: 1686798 - DNA, 15 bp, Homo sapiens
agacccagaagagca

SEQ ID NO: 1686799 - DNA, 15 bp, Homo sapiens
gacccagaagagcaa

SEQ ID NO: 1686800 - DNA, 15 bp, Homo sapiens
acccagaagagcaaa

SEQ ID NO: 1686801 - DNA, 15 bp, Homo sapiens
cccagaagagcaaaa

SEQ ID NO: 1686802 - DNA, 15 bp, Homo sapiens
ccagaagagcaaaaa

SEQ ID NO: 1686803 - DNA, 15 bp, Homo sapiens
cagaagagcaaaaac

SEQ ID NO: 1686804 - DNA, 15 bp, Homo sapiens
agaagagcaaaaaca

SEQ ID NO: 1686805 - DNA, 15 bp, Homo sapiens
gaagagcaaaaacaa

SEQ ID NO: 1686806 - DNA, 15 bp, Homo sapiens
aagagcaaaaacaat

SEQ ID NO: 1686807 - DNA, 15 bp, Homo sapiens
agagcaaaaacaatc

SEQ ID NO: 1686808 - DNA, 15 bp, Homo sapiens
gagcaaaaacaatca

SEQ ID NO: 1686809 - DNA, 15 bp, Homo sapiens
agcaaaaacaatcac

SEQ ID NO: 1686810 - DNA, 15 bp, Homo sapiens
gcaaaaacaatcact

SEQ ID NO: 1686811 - DNA, 15 bp, Homo sapiens
caaaaacaatcacta

SEQ ID NO: 1686812 - DNA, 15 bp, Homo sapiens
aaaaacaatcactac

SEQ ID NO: 1686813 - DNA, 15 bp, Homo sapiens
aaaacaatcactaca

SEQ ID NO: 1686814 - DNA, 15 bp, Homo sapiens
aaacaatcactacag

SEQ ID NO: 1686815 - DNA, 15 bp, Homo sapiens
aacaatcactacagt

SEQ ID NO: 1686816 - DNA, 15 bp, Homo sapiens
acaatcactacagtt

SEQ ID NO: 1686817 - DNA, 15 bp, Homo sapiens
caatcactacagttt

SEQ ID NO: 1686818 - DNA, 15 bp, Homo sapiens
aatcactacagttta

SEQ ID NO: 1686819 - DNA, 15 bp, Homo sapiens
atcactacagtttag

SEQ ID NO: 1686820 - DNA, 15 bp, Homo sapiens
tcactacagtttagc

SEQ ID NO: 1686821 - DNA, 15 bp, Homo sapiens
cactacagtttagct

SEQ ID NO: 1686822 - DNA, 15 bp, Homo sapiens
actacagtttagctt

SEQ ID NO: 1686823 - DNA, 15 bp, Homo sapiens
ctacagtttagctta

SEQ ID NO: 1686824 - DNA, 15 bp, Homo sapiens
tacagtttagcttac

SEQ ID NO: 1686825 - DNA, 15 bp, Homo sapiens
acagtttagcttacc

SEQ ID NO: 1686826 - DNA, 15 bp, Homo sapiens
cagtttagcttaccg

SEQ ID NO: 1686827 - DNA, 15 bp, Homo sapiens
agtttagcttaccgg

SEQ ID NO: 1686828 - DNA, 15 bp, Homo sapiens
gtttagcttaccgga

SEQ ID NO: 1686829 - DNA, 15 bp, Homo sapiens
tttagcttaccggaa

SEQ ID NO: 1686830 - DNA, 15 bp, Homo sapiens
ttagcttaccggaag

SEQ ID NO: 1686831 - DNA, 15 bp, Homo sapiens
tagcttaccggaagc

SEQ ID NO: 1686832 - DNA, 15 bp, Homo sapiens
agcttaccggaagcc

SEQ ID NO: 1686833 - DNA, 15 bp, Homo sapiens
gcttaccggaagccc

SEQ ID NO: 1686834 - DNA, 15 bp, Homo sapiens
cttaccggaagcccc

SEQ ID NO: 1686835 - DNA, 15 bp, Homo sapiens
ttaccggaagcccca

SEQ ID NO: 1686836 - DNA, 15 bp, Homo sapiens
taccggaagccccat

SEQ ID NO: 1686837 - DNA, 15 bp, Homo sapiens
accggaagccccatt

SEQ ID NO: 1686838 - DNA, 15 bp, Homo sapiens
ccggaagccccattc

SEQ ID NO: 1686839 - DNA, 15 bp, Homo sapiens
cggaagccccattca

SEQ ID NO: 1686840 - DNA, 15 bp, Homo sapiens
ggaagccccattcat

SEQ ID NO: 1686841 - DNA, 15 bp, Homo sapiens
gaagccccattcata

SEQ ID NO: 1686842 - DNA, 15 bp, Homo sapiens
aagccccattcatag

SEQ ID NO: 1686843 - DNA, 15 bp, Homo sapiens
agccccattcatagg

SEQ ID NO: 1686844 - DNA, 15 bp, Homo sapiens
gccccattcataggg

SEQ ID NO: 1686845 - DNA, 15 bp, Homo sapiens
ccccattcatagggg

SEQ ID NO: 1686846 - DNA, 15 bp, Homo sapiens
cccattcatagggga

SEQ ID NO: 1686847 - DNA, 15 bp, Homo sapiens
ccattcataggggaa

SEQ ID NO: 1686848 - DNA, 15 bp, Homo sapiens
cattcataggggaag

SEQ ID NO: 1686849 - DNA, 15 bp, Homo sapiens
attcataggggaagg

SEQ ID NO: 1686850 - DNA, 15 bp, Homo sapiens
ttcataggggaaggg

SEQ ID NO: 1686851 - DNA, 15 bp, Homo sapiens
tcataggggaaggga

SEQ ID NO: 1686852 - DNA, 15 bp, Homo sapiens
cataggggaagggag

SEQ ID NO: 1686853 - DNA, 15 bp, Homo sapiens
ataggggaagggaga

SEQ ID NO: 1686854 - DNA, 15 bp, Homo sapiens
taggggaagggagag

SEQ ID NO: 1686855 - DNA, 15 bp, Homo sapiens
aggggaagggagaga

SEQ ID NO: 1686856 - DNA, 15 bp, Homo sapiens
ggggaagggagagaa

SEQ ID NO: 1686857 - DNA, 15 bp, Homo sapiens
gggaagggagagaac

SEQ ID NO: 1686858 - DNA, 15 bp, Homo sapiens
ggaagggagagaaca

SEQ ID NO: 1686859 - DNA, 15 bp, Homo sapiens
gaagggagagaacac

SEQ ID NO: 1686860 - DNA, 15 bp, Homo sapiens
aagggagagaacacc

SEQ ID NO: 1686861 - DNA, 15 bp, Homo sapiens
agggagagaacacca

SEQ ID NO: 1686862 - DNA, 15 bp, Homo sapiens
gggagagaacaccac

SEQ ID NO: 1686863 - DNA, 15 bp, Homo sapiens
ggagagaacaccaca

SEQ ID NO: 1686864 - DNA, 15 bp, Homo sapiens
gagagaacaccacac

SEQ ID NO: 1686865 - DNA, 15 bp, Homo sapiens
agagaacaccacacc

SEQ ID NO: 1686866 - DNA, 15 bp, Homo sapiens
gagaacaccacacca

SEQ ID NO: 1686867 - DNA, 15 bp, Homo sapiens
agaacaccacaccaa

SEQ ID NO: 1686868 - DNA, 15 bp, Homo sapiens
gaacaccacaccaag

SEQ ID NO: 1686869 - DNA, 15 bp, Homo sapiens
aacaccacaccaagg

SEQ ID NO: 1686870 - DNA, 15 bp, Homo sapiens
acaccacaccaagga

SEQ ID NO: 1686871 - DNA, 15 bp, Homo sapiens
caccacaccaaggaa

SEQ ID NO: 1686872 - DNA, 15 bp, Homo sapiens
accacaccaaggaag

SEQ ID NO: 1686873 - DNA, 15 bp, Homo sapiens
ccacaccaaggaagc

SEQ ID NO: 1686874 - DNA, 15 bp, Homo sapiens
cacaccaaggaagca

SEQ ID NO: 1686875 - DNA, 15 bp, Homo sapiens
acaccaaggaagcac

SEQ ID NO: 1686876 - DNA, 15 bp, Homo sapiens
caccaaggaagcaca

SEQ ID NO: 1686877 - DNA, 15 bp, Homo sapiens
accaaggaagcacac

SEQ ID NO: 1686878 - DNA, 15 bp, Homo sapiens
ccaaggaagcacacc

SEQ ID NO: 1686879 - DNA, 15 bp, Homo sapiens
caaggaagcacacca

SEQ ID NO: 1686880 - DNA, 15 bp, Homo sapiens
aaggaagcacaccat

SEQ ID NO: 1686881 - DNA, 15 bp, Homo sapiens
aggaagcacaccatg

SEQ ID NO: 1686882 - DNA, 15 bp, Homo sapiens
ggaagcacaccatga

SEQ ID NO: 1686883 - DNA, 15 bp, Homo sapiens
gaagcacaccatgag

SEQ ID NO: 1686884 - DNA, 15 bp, Homo sapiens
aagcacaccatgaga

SEQ ID NO: 1686885 - DNA, 15 bp, Homo sapiens
agcacaccatgagac

SEQ ID NO: 1686886 - DNA, 15 bp, Homo sapiens
gcacaccatgagaca

SEQ ID NO: 1686887 - DNA, 15 bp, Homo sapiens
cacaccatgagacaa

SEQ ID NO: 1686888 - DNA, 15 bp, Homo sapiens
acaccatgagacaaa

SEQ ID NO: 1686889 - DNA, 15 bp, Homo sapiens
caccatgagacaaaa

SEQ ID NO: 1686890 - DNA, 15 bp, Homo sapiens
accatgagacaaaag

SEQ ID NO: 1686891 - DNA, 15 bp, Homo sapiens
ccatgagacaaaaga

SEQ ID NO: 1686892 - DNA, 15 bp, Homo sapiens
catgagacaaaagaa

SEQ ID NO: 1686893 - DNA, 15 bp, Homo sapiens
atgagacaaaagaat

SEQ ID NO: 1686894 - DNA, 15 bp, Homo sapiens
tgagacaaaagaatc

SEQ ID NO: 1686895 - DNA, 15 bp, Homo sapiens
gagacaaaagaatct

SEQ ID NO: 1686896 - DNA, 15 bp, Homo sapiens
agacaaaagaatctg

SEQ ID NO: 1686897 - DNA, 15 bp, Homo sapiens
gacaaaagaatctga

SEQ ID NO: 1686898 - DNA, 15 bp, Homo sapiens
acaaaagaatctgaa

SEQ ID NO: 1686899 - DNA, 15 bp, Homo sapiens
caaaagaatctgaac

SEQ ID NO: 1686900 - DNA, 15 bp, Homo sapiens
aaaagaatctgaaca

SEQ ID NO: 1686901 - DNA, 15 bp, Homo sapiens
aaagaatctgaacag

SEQ ID NO: 1686902 - DNA, 15 bp, Homo sapiens
aagaatctgaacagc

SEQ ID NO: 1686903 - DNA, 15 bp, Homo sapiens
agaatctgaacagca

SEQ ID NO: 1686904 - DNA, 15 bp, Homo sapiens
gaatctgaacagcag

SEQ ID NO: 1686905 - DNA, 15 bp, Homo sapiens
aatctgaacagcagc

SEQ ID NO: 1686906 - DNA, 15 bp, Homo sapiens
atctgaacagcagcc

SEQ ID NO: 1686907 - DNA, 15 bp, Homo sapiens
tctgaacagcagcct

SEQ ID NO: 1686908 - DNA, 15 bp, Homo sapiens
ctgaacagcagccta

SEQ ID NO: 1686909 - DNA, 15 bp, Homo sapiens
tgaacagcagcctat

SEQ ID NO: 1686910 - DNA, 15 bp, Homo sapiens
gaacagcagcctatg

SEQ ID NO: 1686911 - DNA, 15 bp, Homo sapiens
aacagcagcctatga

SEQ ID NO: 1686912 - DNA, 15 bp, Homo sapiens
acagcagcctatgaa

SEQ ID NO: 1686913 - DNA, 15 bp, Homo sapiens
cagcagcctatgaat

SEQ ID NO: 1686914 - DNA, 15 bp, Homo sapiens
agcagcctatgaatc

SEQ ID NO: 1686915 - DNA, 15 bp, Homo sapiens
gcagcctatgaatcc

SEQ ID NO: 1686916 - DNA, 15 bp, Homo sapiens
cagcctatgaatccc

SEQ ID NO: 1686917 - DNA, 15 bp, Homo sapiens
agcctatgaatccca

SEQ ID NO: 1686918 - DNA, 15 bp, Homo sapiens
gcctatgaatcccag

SEQ ID NO: 1686919 - DNA, 15 bp, Homo sapiens
cctatgaatcccaga

SEQ ID NO: 1686920 - DNA, 15 bp, Homo sapiens
ctatgaatcccagat

SEQ ID NO: 1686921 - DNA, 15 bp, Homo sapiens
tatgaatcccagatc

SEQ ID NO: 1686922 - DNA, 15 bp, Homo sapiens
atgaatcccagatct

SEQ ID NO: 1686923 - DNA, 15 bp, Homo sapiens
tgaatcccagatctt

SEQ ID NO: 1686924 - DNA, 15 bp, Homo sapiens
gaatcccagatcttc

SEQ ID NO: 1686925 - DNA, 15 bp, Homo sapiens
aatcccagatcttcc

SEQ ID NO: 1686926 - DNA, 15 bp, Homo sapiens
atcccagatcttccc

SEQ ID NO: 1686927 - DNA, 15 bp, Homo sapiens
tcccagatcttccct

SEQ ID NO: 1686928 - DNA, 15 bp, Homo sapiens
cccagatcttccctc

SEQ ID NO: 1686929 - DNA, 15 bp, Homo sapiens
ccagatcttccctct

SEQ ID NO: 1686930 - DNA, 15 bp, Homo sapiens
cagatcttccctctg

SEQ ID NO: 1686931 - DNA, 15 bp, Homo sapiens
agatcttccctctga

SEQ ID NO: 1686932 - DNA, 15 bp, Homo sapiens
gatcttccctctgac

SEQ ID NO: 1686933 - DNA, 15 bp, Homo sapiens
atcttccctctgaca

SEQ ID NO: 1686934 - DNA, 15 bp, Homo sapiens
tcttccctctgacat

SEQ ID NO: 1686935 - DNA, 15 bp, Homo sapiens
cttccctctgacata

SEQ ID NO: 1686936 - DNA, 15 bp, Homo sapiens
ttccctctgacatag

SEQ ID NO: 1686937 - DNA, 15 bp, Homo sapiens
tccctctgacatagt

SEQ ID NO: 1686938 - DNA, 15 bp, Homo sapiens
ccctctgacatagtc

SEQ ID NO: 1686939 - DNA, 15 bp, Homo sapiens
cctctgacatagtct

SEQ ID NO: 1686940 - DNA, 15 bp, Homo sapiens
ctctgacatagtcta

SEQ ID NO: 1686941 - DNA, 15 bp, Homo sapiens
tctgacatagtctac

SEQ ID NO: 1686942 - DNA, 15 bp, Homo sapiens
ctgacatagtctacc

SEQ ID NO: 1686943 - DNA, 15 bp, Homo sapiens
tgacatagtctaccc

SEQ ID NO: 1686944 - DNA, 15 bp, Homo sapiens
gacatagtctaccca

SEQ ID NO: 1686945 - DNA, 15 bp, Homo sapiens
acatagtctacccaa

SEQ ID NO: 1686946 - DNA, 15 bp, Homo sapiens
catagtctacccaaa

SEQ ID NO: 1686947 - DNA, 15 bp, Homo sapiens
atagtctacccaaat

SEQ ID NO: 1686948 - DNA, 15 bp, Homo sapiens
tagtctacccaaata

SEQ ID NO: 1686949 - DNA, 15 bp, Homo sapiens
agtctacccaaataa

SEQ ID NO: 1686950 - DNA, 15 bp, Homo sapiens
gtctacccaaataag

SEQ ID NO: 1686951 - DNA, 15 bp, Homo sapiens
tctacccaaataaga

SEQ ID NO: 1686952 - DNA, 15 bp, Homo sapiens
ctacccaaataagag

SEQ ID NO: 1686953 - DNA, 15 bp, Homo sapiens
tacccaaataagaga

SEQ ID NO: 1686954 - DNA, 15 bp, Homo sapiens
acccaaataagagag

SEQ ID NO: 1686955 - DNA, 15 bp, Homo sapiens
cccaaataagagaga

SEQ ID NO: 1686956 - DNA, 15 bp, Homo sapiens
ccaaataagagagaa

SEQ ID NO: 1686957 - DNA, 15 bp, Homo sapiens
caaataagagagaac

SEQ ID NO: 1686958 - DNA, 15 bp, Homo sapiens
aaataagagagaacc

SEQ ID NO: 1686959 - DNA, 15 bp, Homo sapiens
ataagagagaaccag

SEQ ID NO: 1686960 - DNA, 15 bp, Homo sapiens
taagagagaaccaga

SEQ ID NO: 1686961 - DNA, 15 bp, Homo sapiens
aagagagaaccagaa

SEQ ID NO: 1686962 - DNA, 15 bp, Homo sapiens
agagagaaccagaaa

SEQ ID NO: 1686963 - DNA, 15 bp, Homo sapiens
gagagaaccagaaaa

SEQ ID NO: 1686964 - DNA, 15 bp, Homo sapiens
agagaaccagaaaag

SEQ ID NO: 1686965 - DNA, 15 bp, Homo sapiens
gagaaccagaaaagc

SEQ ID NO: 1686966 - DNA, 15 bp, Homo sapiens
agaaccagaaaagca

SEQ ID NO: 1686967 - DNA, 15 bp, Homo sapiens
gaaccagaaaagcaa

SEQ ID NO: 1686968 - DNA, 15 bp, Homo sapiens
aaccagaaaagcaag

SEQ ID NO: 1686969 - DNA, 15 bp, Homo sapiens
accagaaaagcaagg

SEQ ID NO: 1686970 - DNA, 15 bp, Homo sapiens
ccagaaaagcaaggt

SEQ ID NO: 1686971 - DNA, 15 bp, Homo sapiens
cagaaaagcaaggtt

SEQ ID NO: 1686972 - DNA, 15 bp, Homo sapiens
agaaaagcaaggttc

SEQ ID NO: 1686973 - DNA, 15 bp, Homo sapiens
gaaaagcaaggttct

SEQ ID NO: 1686974 - DNA, 15 bp, Homo sapiens
aaaagcaaggttctt

SEQ ID NO: 1686975 - DNA, 15 bp, Homo sapiens
aaagcaaggttcttt

SEQ ID NO: 1686976 - DNA, 15 bp, Homo sapiens
aagcaaggttcttta

SEQ ID NO: 1686977 - DNA, 15 bp, Homo sapiens
agcaaggttctttaa

SEQ ID NO: 1686978 - DNA, 15 bp, Homo sapiens
gcaaggttctttaac

SEQ ID NO: 1686979 - DNA, 15 bp, Homo sapiens
caaggttctttaaca

SEQ ID NO: 1686980 - DNA, 15 bp, Homo sapiens
aaggttctttaacac

SEQ ID NO: 1686981 - DNA, 15 bp, Homo sapiens
aggttctttaacacc

SEQ ID NO: 1686982 - DNA, 15 bp, Homo sapiens
ggttctttaacaccc

SEQ ID NO: 1686983 - DNA, 15 bp, Homo sapiens
gttctttaacaccct

SEQ ID NO: 1686984 - DNA, 15 bp, Homo sapiens
ttctttaacaccctg

SEQ ID NO: 1686985 - DNA, 15 bp, Homo sapiens
tctttaacaccctga

SEQ ID NO: 1686986 - DNA, 15 bp, Homo sapiens
ctttaacaccctgaa

SEQ ID NO: 1686987 - DNA, 15 bp, Homo sapiens
tttaacaccctgaaa

SEQ ID NO: 1686988 - DNA, 15 bp, Homo sapiens
ttaacaccctgaaaa

SEQ ID NO: 1686989 - DNA, 15 bp, Homo sapiens
taacaccctgaaaag

SEQ ID NO: 1686990 - DNA, 15 bp, Homo sapiens
acaccctgaaaagat

SEQ ID NO: 1686991 - DNA, 15 bp, Homo sapiens
caccctgaaaagatc

SEQ ID NO: 1686992 - DNA, 15 bp, Homo sapiens
accctgaaaagatca

SEQ ID NO: 1686993 - DNA, 15 bp, Homo sapiens
ccctgaaaagatcat

SEQ ID NO: 1686994 - DNA, 15 bp, Homo sapiens
cctgaaaagatcata

SEQ ID NO: 1686995 - DNA, 15 bp, Homo sapiens
ctgaaaagatcatac

SEQ ID NO: 1686996 - DNA, 15 bp, Homo sapiens
tgaaaagatcatacc

SEQ ID NO: 1686997 - DNA, 15 bp, Homo sapiens
gaaaagatcatacca

SEQ ID NO: 1686998 - DNA, 15 bp, Homo sapiens
aaaagatcataccag

SEQ ID NO: 1686999 - DNA, 15 bp, Homo sapiens
aaagatcataccagc

SEQ ID NO: 1687000 - DNA, 15 bp, Homo sapiens
aagatcataccagct

SEQ ID NO: 1687001 - DNA, 15 bp, Homo sapiens
agatcataccagctc

SEQ ID NO: 1687002 - DNA, 15 bp, Homo sapiens
gatcataccagctca

SEQ ID NO: 1687003 - DNA, 15 bp, Homo sapiens
atcataccagctcac

SEQ ID NO: 1687004 - DNA, 15 bp, Homo sapiens
tcataccagctcacc

SEQ ID NO: 1687005 - DNA, 15 bp, Homo sapiens
cataccagctcacca

SEQ ID NO: 1687006 - DNA, 15 bp, Homo sapiens
ataccagctcaccag

SEQ ID NO: 1687007 - DNA, 15 bp, Homo sapiens
taccagctcaccagc

SEQ ID NO: 1687008 - DNA, 15 bp, Homo sapiens
accagctcaccagca

SEQ ID NO: 1687009 - DNA, 15 bp, Homo sapiens
ccagctcaccagcaa

SEQ ID NO: 1687010 - DNA, 15 bp, Homo sapiens
cagctcaccagcaat

SEQ ID NO: 1687011 - DNA, 15 bp, Homo sapiens
agctcaccagcaatg

SEQ ID NO: 1687012 - DNA, 15 bp, Homo sapiens
gctcaccagcaatgg

SEQ ID NO: 1687013 - DNA, 15 bp, Homo sapiens
ctcaccagcaatgga

SEQ ID NO: 1687014 - DNA, 15 bp, Homo sapiens
tcaccagcaatggat

SEQ ID NO: 1687015 - DNA, 15 bp, Homo sapiens
caccagcaatggatc

SEQ ID NO: 1687016 - DNA, 15 bp, Homo sapiens
accagcaatggatct

SEQ ID NO: 1687017 - DNA, 15 bp, Homo sapiens
ccagcaatggatcta

SEQ ID NO: 1687018 - DNA, 15 bp, Homo sapiens
cagcaatggatctaa

SEQ ID NO: 1687019 - DNA, 15 bp, Homo sapiens
agcaatggatctaaa

SEQ ID NO: 1687020 - DNA, 15 bp, Homo sapiens
gcaatggatctaaac

SEQ ID NO: 1687021 - DNA, 15 bp, Homo sapiens
caatggatctaaacc

SEQ ID NO: 1687022 - DNA, 15 bp, Homo sapiens
aatggatctaaacca

SEQ ID NO: 1687023 - DNA, 15 bp, Homo sapiens
atggatctaaaccaa

SEQ ID NO: 1687024 - DNA, 15 bp, Homo sapiens
tggatctaaaccaag

SEQ ID NO: 1687025 - DNA, 15 bp, Homo sapiens
ggatctaaaccaaga

SEQ ID NO: 1687026 - DNA, 15 bp, Homo sapiens
gatctaaaccaagat

SEQ ID NO: 1687027 - DNA, 15 bp, Homo sapiens
atctaaaccaagatg

SEQ ID NO: 1687028 - DNA, 15 bp, Homo sapiens
tctaaaccaagatga

SEQ ID NO: 1687029 - DNA, 15 bp, Homo sapiens
ctaaaccaagatgaa

SEQ ID NO: 1687030 - DNA, 15 bp, Homo sapiens
taaaccaagatgaaa

SEQ ID NO: 1687031 - DNA, 15 bp, Homo sapiens
aaaccaagatgaaat

SEQ ID NO: 1687032 - DNA, 15 bp, Homo sapiens
aaccaagatgaaatc

SEQ ID NO: 1687033 - DNA, 15 bp, Homo sapiens
accaagatgaaatct

SEQ ID NO: 1687034 - DNA, 15 bp, Homo sapiens
ccaagatgaaatctc

SEQ ID NO: 1687035 - DNA, 15 bp, Homo sapiens
caagatgaaatctct

SEQ ID NO: 1687036 - DNA, 15 bp, Homo sapiens
aagatgaaatctctg

SEQ ID NO: 1687037 - DNA, 15 bp, Homo sapiens
agatgaaatctctga

SEQ ID NO: 1687038 - DNA, 15 bp, Homo sapiens
gatgaaatctctgaa

SEQ ID NO: 1687039 - DNA, 15 bp, Homo sapiens
atgaaatctctgaat

SEQ ID NO: 1687040 - DNA, 15 bp, Homo sapiens
tgaaatctctgaatt

SEQ ID NO: 1687041 - DNA, 15 bp, Homo sapiens
gaaatctctgaattg

SEQ ID NO: 1687042 - DNA, 15 bp, Homo sapiens
aaatctctgaattgc

SEQ ID NO: 1687043 - DNA, 15 bp, Homo sapiens
aatctctgaattgcc

SEQ ID NO: 1687044 - DNA, 15 bp, Homo sapiens
atctctgaattgcca

SEQ ID NO: 1687045 - DNA, 15 bp, Homo sapiens
tctctgaattgccag

SEQ ID NO: 1687046 - DNA, 15 bp, Homo sapiens
ctctgaattgccaga

SEQ ID NO: 1687047 - DNA, 15 bp, Homo sapiens
tctgaattgccagaa

SEQ ID NO: 1687048 - DNA, 15 bp, Homo sapiens
ctgaattgccagaaa

SEQ ID NO: 1687049 - DNA, 15 bp, Homo sapiens
tgaattgccagaaaa

SEQ ID NO: 1687050 - DNA, 15 bp, Homo sapiens
gaattgccagaaaaa

SEQ ID NO: 1687051 - DNA, 15 bp, Homo sapiens
aattgccagaaaaag

SEQ ID NO: 1687052 - DNA, 15 bp, Homo sapiens
attgccagaaaaaga

SEQ ID NO: 1687053 - DNA, 15 bp, Homo sapiens
ttgccagaaaaagac

SEQ ID NO: 1687054 - DNA, 15 bp, Homo sapiens
tgccagaaaaagact

SEQ ID NO: 1687055 - DNA, 15 bp, Homo sapiens
gccagaaaaagactt

SEQ ID NO: 1687056 - DNA, 15 bp, Homo sapiens
ccagaaaaagacttt

SEQ ID NO: 1687057 - DNA, 15 bp, Homo sapiens
cagaaaaagacttta

SEQ ID NO: 1687058 - DNA, 15 bp, Homo sapiens
agaaaaagactttag

SEQ ID NO: 1687059 - DNA, 15 bp, Homo sapiens
gaaaaagactttaga

SEQ ID NO: 1687060 - DNA, 15 bp, Homo sapiens
aaaaagactttagaa

SEQ ID NO: 1687061 - DNA, 15 bp, Homo sapiens
aaaagactttagaag

SEQ ID NO: 1687062 - DNA, 15 bp, Homo sapiens
aaagactttagaagg

SEQ ID NO: 1687063 - DNA, 15 bp, Homo sapiens
aagactttagaaggt

SEQ ID NO: 1687064 - DNA, 15 bp, Homo sapiens
agactttagaaggtt

SEQ ID NO: 1687065 - DNA, 15 bp, Homo sapiens
gactttagaaggttg

SEQ ID NO: 1687066 - DNA, 15 bp, Homo sapiens
actttagaaggttga

SEQ ID NO: 1687067 - DNA, 15 bp, Homo sapiens
ctttagaaggttgat

SEQ ID NO: 1687068 - DNA, 15 bp, Homo sapiens
tttagaaggttgatt

SEQ ID NO: 1687069 - DNA, 15 bp, Homo sapiens
ttagaaggttgatta

SEQ ID NO: 1687070 - DNA, 15 bp, Homo sapiens
tagaaggttgattat

SEQ ID NO: 1687071 - DNA, 15 bp, Homo sapiens
agaaggttgattatt

SEQ ID NO: 1687072 - DNA, 15 bp, Homo sapiens
gaaggttgattatta

SEQ ID NO: 1687073 - DNA, 15 bp, Homo sapiens
aaggttgattattaa

SEQ ID NO: 1687074 - DNA, 15 bp, Homo sapiens
aggttgattattaag

SEQ ID NO: 1687075 - DNA, 15 bp, Homo sapiens
ggttgattattaagc

SEQ ID NO: 1687076 - DNA, 15 bp, Homo sapiens
gttgattattaagct

SEQ ID NO: 1687077 - DNA, 15 bp, Homo sapiens
ttgattattaagcta

SEQ ID NO: 1687078 - DNA, 15 bp, Homo sapiens
tgattattaagctaa

SEQ ID NO: 1687079 - DNA, 15 bp, Homo sapiens
gattattaagctaat

SEQ ID NO: 1687080 - DNA, 15 bp, Homo sapiens
attattaagctaatc

SEQ ID NO: 1687081 - DNA, 15 bp, Homo sapiens
ttattaagctaatca

SEQ ID NO: 1687082 - DNA, 15 bp, Homo sapiens
tattaagctaatcaa

SEQ ID NO: 1687083 - DNA, 15 bp, Homo sapiens
attaagctaatcaag

SEQ ID NO: 1687084 - DNA, 15 bp, Homo sapiens
ttaagctaatcaagg

SEQ ID NO: 1687085 - DNA, 15 bp, Homo sapiens
taagctaatcaagga

SEQ ID NO: 1687086 - DNA, 15 bp, Homo sapiens
aagctaatcaaggag

SEQ ID NO: 1687087 - DNA, 15 bp, Homo sapiens
agctaatcaaggagg

SEQ ID NO: 1687088 - DNA, 15 bp, Homo sapiens
gctaatcaaggaggc

SEQ ID NO: 1687089 - DNA, 15 bp, Homo sapiens
ctaatcaaggaggca

SEQ ID NO: 1687090 - DNA, 15 bp, Homo sapiens
taatcaaggaggcac

SEQ ID NO: 1687091 - DNA, 15 bp, Homo sapiens
aatcaaggaggcacc

SEQ ID NO: 1687092 - DNA, 15 bp, Homo sapiens
atcaaggaggcacca

SEQ ID NO: 1687093 - DNA, 15 bp, Homo sapiens
tcaaggaggcaccag

SEQ ID NO: 1687094 - DNA, 15 bp, Homo sapiens
caaggaggcaccaga

SEQ ID NO: 1687095 - DNA, 15 bp, Homo sapiens
aaggaggcaccagag

SEQ ID NO: 1687096 - DNA, 15 bp, Homo sapiens
aggaggcaccagaga

SEQ ID NO: 1687097 - DNA, 15 bp, Homo sapiens
ggaggcaccagagaa

SEQ ID NO: 1687098 - DNA, 15 bp, Homo sapiens
gaggcaccagagaaa

SEQ ID NO: 1687099 - DNA, 15 bp, Homo sapiens
aggcaccagagaaag

SEQ ID NO: 1687100 - DNA, 15 bp, Homo sapiens
ggcaccagagaaagg

SEQ ID NO: 1687101 - DNA, 15 bp, Homo sapiens
gcaccagagaaaggt

SEQ ID NO: 1687102 - DNA, 15 bp, Homo sapiens
caccagagaaaggtt

SEQ ID NO: 1687103 - DNA, 15 bp, Homo sapiens
accagagaaaggtta

SEQ ID NO: 1687104 - DNA, 15 bp, Homo sapiens
ccagagaaaggttaa

SEQ ID NO: 1687105 - DNA, 15 bp, Homo sapiens
cagagaaaggttaag

SEQ ID NO: 1687106 - DNA, 15 bp, Homo sapiens
agagaaaggttaagt

SEQ ID NO: 1687107 - DNA, 15 bp, Homo sapiens
gagaaaggttaagtc

SEQ ID NO: 1687108 - DNA, 15 bp, Homo sapiens
agaaaggttaagtcc

SEQ ID NO: 1687109 - DNA, 15 bp, Homo sapiens
gaaaggttaagtcca

SEQ ID NO: 1687110 - DNA, 15 bp, Homo sapiens
aaaggttaagtccaa

SEQ ID NO: 1687111 - DNA, 15 bp, Homo sapiens
aaggttaagtccaac

SEQ ID NO: 1687112 - DNA, 15 bp, Homo sapiens
aggttaagtccaact

SEQ ID NO: 1687113 - DNA, 15 bp, Homo sapiens
ggttaagtccaactg

SEQ ID NO: 1687114 - DNA, 15 bp, Homo sapiens
gttaagtccaactga

SEQ ID NO: 1687115 - DNA, 15 bp, Homo sapiens
ttaagtccaactgaa

SEQ ID NO: 1687116 - DNA, 15 bp, Homo sapiens
taagtccaactgaag

SEQ ID NO: 1687117 - DNA, 15 bp, Homo sapiens
aagtccaactgaagg

SEQ ID NO: 1687118 - DNA, 15 bp, Homo sapiens
agtccaactgaagga

SEQ ID NO: 1687119 - DNA, 15 bp, Homo sapiens
gtccaactgaaggaa

SEQ ID NO: 1687120 - DNA, 15 bp, Homo sapiens
tccaactgaaggaaa

SEQ ID NO: 1687121 - DNA, 15 bp, Homo sapiens
ccaactgaaggaaat

SEQ ID NO: 1687122 - DNA, 15 bp, Homo sapiens
caactgaaggaaata

SEQ ID NO: 1687123 - DNA, 15 bp, Homo sapiens
aactgaaggaaataa

SEQ ID NO: 1687124 - DNA, 15 bp, Homo sapiens
actgaaggaaataaa

SEQ ID NO: 1687125 - DNA, 15 bp, Homo sapiens
ctgaaggaaataaaa

SEQ ID NO: 1687126 - DNA, 15 bp, Homo sapiens
tgaaggaaataaaaa

SEQ ID NO: 1687127 - DNA, 15 bp, Homo sapiens
gaaggaaataaaaaa

SEQ ID NO: 1687128 - DNA, 15 bp, Homo sapiens
aaggaaataaaaaac

SEQ ID NO: 1687129 - DNA, 15 bp, Homo sapiens
aggaaataaaaaaca

SEQ ID NO: 1687130 - DNA, 15 bp, Homo sapiens
ggaaataaaaaacat

SEQ ID NO: 1687131 - DNA, 15 bp, Homo sapiens
gaaataaaaaacatg

SEQ ID NO: 1687132 - DNA, 15 bp, Homo sapiens
aaataaaaaacatga

SEQ ID NO: 1687133 - DNA, 15 bp, Homo sapiens
aataaaaaacatgat

SEQ ID NO: 1687134 - DNA, 15 bp, Homo sapiens
ataaaaaacatgata

SEQ ID NO: 1687135 - DNA, 15 bp, Homo sapiens
taaaaaacatgatac

SEQ ID NO: 1687136 - DNA, 15 bp, Homo sapiens
aaaaaacatgataca

SEQ ID NO: 1687137 - DNA, 15 bp, Homo sapiens
aaaaacatgatacag

SEQ ID NO: 1687138 - DNA, 15 bp, Homo sapiens
aaaacatgatacagg

SEQ ID NO: 1687139 - DNA, 15 bp, Homo sapiens
aaacatgatacagga

SEQ ID NO: 1687140 - DNA, 15 bp, Homo sapiens
aacatgatacaggat

SEQ ID NO: 1687141 - DNA, 15 bp, Homo sapiens
acatgatacaggata

SEQ ID NO: 1687142 - DNA, 15 bp, Homo sapiens
catgatacaggatat

SEQ ID NO: 1687143 - DNA, 15 bp, Homo sapiens
atgatacaggatatg

SEQ ID NO: 1687144 - DNA, 15 bp, Homo sapiens
tgatacaggatatga

SEQ ID NO: 1687145 - DNA, 15 bp, Homo sapiens
gatacaggatatgaa

SEQ ID NO: 1687146 - DNA, 15 bp, Homo sapiens
atacaggatatgaaa

SEQ ID NO: 1687147 - DNA, 15 bp, Homo sapiens
tacaggatatgaaag

SEQ ID NO: 1687148 - DNA, 15 bp, Homo sapiens
acaggatatgaaagg

SEQ ID NO: 1687149 - DNA, 15 bp, Homo sapiens
caggatatgaaagga

SEQ ID NO: 1687150 - DNA, 15 bp, Homo sapiens
aggatatgaaaggaa

SEQ ID NO: 1687151 - DNA, 15 bp, Homo sapiens
ggatatgaaaggaaa

SEQ ID NO: 1687152 - DNA, 15 bp, Homo sapiens
gatatgaaaggaaaa

SEQ ID NO: 1687153 - DNA, 15 bp, Homo sapiens
atatgaaaggaaaat

SEQ ID NO: 1687154 - DNA, 15 bp, Homo sapiens
tatgaaaggaaaatt

SEQ ID NO: 1687155 - DNA, 15 bp, Homo sapiens
atgaaaggaaaattc

SEQ ID NO: 1687156 - DNA, 15 bp, Homo sapiens
tgaaaggaaaattct

SEQ ID NO: 1687157 - DNA, 15 bp, Homo sapiens
gaaaggaaaattctt

SEQ ID NO: 1687158 - DNA, 15 bp, Homo sapiens
aaaggaaaattcttc

SEQ ID NO: 1687159 - DNA, 15 bp, Homo sapiens
aaggaaaattcttca

SEQ ID NO: 1687160 - DNA, 15 bp, Homo sapiens
aggaaaattcttcag

SEQ ID NO: 1687161 - DNA, 15 bp, Homo sapiens
ggaaaattcttcagt

SEQ ID NO: 1687162 - DNA, 15 bp, Homo sapiens
gaaaattcttcagtt

SEQ ID NO: 1687163 - DNA, 15 bp, Homo sapiens
aaaattcttcagtta

SEQ ID NO: 1687164 - DNA, 15 bp, Homo sapiens
aaattcttcagttaa

SEQ ID NO: 1687165 - DNA, 15 bp, Homo sapiens
aattcttcagttaaa

SEQ ID NO: 1687166 - DNA, 15 bp, Homo sapiens
attcttcagttaaat

SEQ ID NO: 1687167 - DNA, 15 bp, Homo sapiens
ttcttcagttaaata

SEQ ID NO: 1687168 - DNA, 15 bp, Homo sapiens
tcttcagttaaatag

SEQ ID NO: 1687169 - DNA, 15 bp, Homo sapiens
cttcagttaaataga

SEQ ID NO: 1687170 - DNA, 15 bp, Homo sapiens
ttcagttaaatagat

SEQ ID NO: 1687171 - DNA, 15 bp, Homo sapiens
tcagttaaatagata

SEQ ID NO: 1687172 - DNA, 15 bp, Homo sapiens
cagttaaatagatag

SEQ ID NO: 1687173 - DNA, 15 bp, Homo sapiens
agttaaatagatagc

SEQ ID NO: 1687174 - DNA, 15 bp, Homo sapiens
gttaaatagatagca

SEQ ID NO: 1687175 - DNA, 15 bp, Homo sapiens
ttaaatagatagcat

SEQ ID NO: 1687176 - DNA, 15 bp, Homo sapiens
taaatagatagcata

SEQ ID NO: 1687177 - DNA, 15 bp, Homo sapiens
aaatagatagcataa

SEQ ID NO: 1687178 - DNA, 15 bp, Homo sapiens
aatagatagcataaa

SEQ ID NO: 1687179 - DNA, 15 bp, Homo sapiens
atagatagcataaat

SEQ ID NO: 1687180 - DNA, 15 bp, Homo sapiens
tagatagcataaata

SEQ ID NO: 1687181 - DNA, 15 bp, Homo sapiens
agatagcataaataa

SEQ ID NO: 1687182 - DNA, 15 bp, Homo sapiens
gatagcataaataaa

SEQ ID NO: 1687183 - DNA, 15 bp, Homo sapiens
atagcataaataaaa

SEQ ID NO: 1687184 - DNA, 15 bp, Homo sapiens
tagcataaataaaaa

SEQ ID NO: 1687185 - DNA, 15 bp, Homo sapiens
agcataaataaaaaa

SEQ ID NO: 1687186 - DNA, 15 bp, Homo sapiens
gcataaataaaaaaa

SEQ ID NO: 1687187 - DNA, 15 bp, Homo sapiens
cataaataaaaaaac

SEQ ID NO: 1687188 - DNA, 15 bp, Homo sapiens
ataaataaaaaaaca

SEQ ID NO: 1687189 - DNA, 15 bp, Homo sapiens
taaataaaaaaacaa

SEQ ID NO: 1687190 - DNA, 15 bp, Homo sapiens
aaataaaaaaacaac

SEQ ID NO: 1687191 - DNA, 15 bp, Homo sapiens
aataaaaaaacaacc

SEQ ID NO: 1687192 - DNA, 15 bp, Homo sapiens
ataaaaaaacaacca

SEQ ID NO: 1687193 - DNA, 15 bp, Homo sapiens
taaaaaaacaaccac

SEQ ID NO: 1687194 - DNA, 15 bp, Homo sapiens
aaaaaaacaaccaca

SEQ ID NO: 1687195 - DNA, 15 bp, Homo sapiens
aaaaaacaaccacaa

SEQ ID NO: 1687196 - DNA, 15 bp, Homo sapiens
aaaaacaaccacaac

SEQ ID NO: 1687197 - DNA, 15 bp, Homo sapiens
aaaacaaccacaact

SEQ ID NO: 1687198 - DNA, 15 bp, Homo sapiens
aaacaaccacaactt

SEQ ID NO: 1687199 - DNA, 15 bp, Homo sapiens
aacaaccacaacttc

SEQ ID NO: 1687200 - DNA, 15 bp, Homo sapiens
acaaccacaacttct

SEQ ID NO: 1687201 - DNA, 15 bp, Homo sapiens
caaccacaacttctg

SEQ ID NO: 1687202 - DNA, 15 bp, Homo sapiens
aaccacaacttctgg

SEQ ID NO: 1687203 - DNA, 15 bp, Homo sapiens
accacaacttctgga

SEQ ID NO: 1687204 - DNA, 15 bp, Homo sapiens
ccacaacttctggaa

SEQ ID NO: 1687205 - DNA, 15 bp, Homo sapiens
cacaacttctggaaa

SEQ ID NO: 1687206 - DNA, 15 bp, Homo sapiens
acaacttctggaaat

SEQ ID NO: 1687207 - DNA, 15 bp, Homo sapiens
caacttctggaaatc

SEQ ID NO: 1687208 - DNA, 15 bp, Homo sapiens
aacttctggaaatca

SEQ ID NO: 1687209 - DNA, 15 bp, Homo sapiens
acttctggaaatcaa

SEQ ID NO: 1687210 - DNA, 15 bp, Homo sapiens
cttctggaaatcaag

SEQ ID NO: 1687211 - DNA, 15 bp, Homo sapiens
ttctggaaatcaagg

SEQ ID NO: 1687212 - DNA, 15 bp, Homo sapiens
tctggaaatcaagga

SEQ ID NO: 1687213 - DNA, 15 bp, Homo sapiens
ctggaaatcaaggac

SEQ ID NO: 1687214 - DNA, 15 bp, Homo sapiens
tggaaatcaaggaca

SEQ ID NO: 1687215 - DNA, 15 bp, Homo sapiens
ggaaatcaaggacac

SEQ ID NO: 1687216 - DNA, 15 bp, Homo sapiens
gaaatcaaggacaca

SEQ ID NO: 1687217 - DNA, 15 bp, Homo sapiens
aaatcaaggacacac

SEQ ID NO: 1687218 - DNA, 15 bp, Homo sapiens
aatcaaggacacact

SEQ ID NO: 1687219 - DNA, 15 bp, Homo sapiens
atcaaggacacactt

SEQ ID NO: 1687220 - DNA, 15 bp, Homo sapiens
tcaaggacacactta

SEQ ID NO: 1687221 - DNA, 15 bp, Homo sapiens
caaggacacacttag

SEQ ID NO: 1687222 - DNA, 15 bp, Homo sapiens
aaggacacacttaga

SEQ ID NO: 1687223 - DNA, 15 bp, Homo sapiens
aggacacacttagag

SEQ ID NO: 1687224 - DNA, 15 bp, Homo sapiens
ggacacacttagaga

SEQ ID NO: 1687225 - DNA, 15 bp, Homo sapiens
gacacacttagagaa

SEQ ID NO: 1687226 - DNA, 15 bp, Homo sapiens
acacacttagagaaa

SEQ ID NO: 1687227 - DNA, 15 bp, Homo sapiens
cacacttagagaaat

SEQ ID NO: 1687228 - DNA, 15 bp, Homo sapiens
acacttagagaaatg

SEQ ID NO: 1687229 - DNA, 15 bp, Homo sapiens
cacttagagaaatgc

SEQ ID NO: 1687230 - DNA, 15 bp, Homo sapiens
acttagagaaatgca

SEQ ID NO: 1687231 - DNA, 15 bp, Homo sapiens
cttagagaaatgcat

SEQ ID NO: 1687232 - DNA, 15 bp, Homo sapiens
ttagagaaatgcata

SEQ ID NO: 1687233 - DNA, 15 bp, Homo sapiens
tagagaaatgcataa

SEQ ID NO: 1687234 - DNA, 15 bp, Homo sapiens
agagaaatgcataat

SEQ ID NO: 1687235 - DNA, 15 bp, Homo sapiens
gagaaatgcataatg

SEQ ID NO: 1687236 - DNA, 15 bp, Homo sapiens
agaaatgcataatgt

SEQ ID NO: 1687237 - DNA, 15 bp, Homo sapiens
gaaatgcataatgta

SEQ ID NO: 1687238 - DNA, 15 bp, Homo sapiens
aaatgcataatgtac

SEQ ID NO: 1687239 - DNA, 15 bp, Homo sapiens
aatgcataatgtact

SEQ ID NO: 1687240 - DNA, 15 bp, Homo sapiens
atgcataatgtactg

SEQ ID NO: 1687241 - DNA, 15 bp, Homo sapiens
tgcataatgtactgg

SEQ ID NO: 1687242 - DNA, 15 bp, Homo sapiens
gcataatgtactgga

SEQ ID NO: 1687243 - DNA, 15 bp, Homo sapiens
cataatgtactggaa

SEQ ID NO: 1687244 - DNA, 15 bp, Homo sapiens
ataatgtactggaac

SEQ ID NO: 1687245 - DNA, 15 bp, Homo sapiens
taatgtactggaacg

SEQ ID NO: 1687246 - DNA, 15 bp, Homo sapiens
aatgtactggaacgt

SEQ ID NO: 1687247 - DNA, 15 bp, Homo sapiens
atgtactggaacgtc

SEQ ID NO: 1687248 - DNA, 15 bp, Homo sapiens
tgtactggaacgtct

SEQ ID NO: 1687249 - DNA, 15 bp, Homo sapiens
gtactggaacgtctc

SEQ ID NO: 1687250 - DNA, 15 bp, Homo sapiens
tactggaacgtctca

SEQ ID NO: 1687251 - DNA, 15 bp, Homo sapiens
actggaacgtctcag

SEQ ID NO: 1687252 - DNA, 15 bp, Homo sapiens
ctggaacgtctcagc

SEQ ID NO: 1687253 - DNA, 15 bp, Homo sapiens
tggaacgtctcagca

SEQ ID NO: 1687254 - DNA, 15 bp, Homo sapiens
ggaacgtctcagcaa

SEQ ID NO: 1687255 - DNA, 15 bp, Homo sapiens
gaacgtctcagcaat

SEQ ID NO: 1687256 - DNA, 15 bp, Homo sapiens
aacgtctcagcaata

SEQ ID NO: 1687257 - DNA, 15 bp, Homo sapiens
acgtctcagcaatag

SEQ ID NO: 1687258 - DNA, 15 bp, Homo sapiens
cgtctcagcaataga

SEQ ID NO: 1687259 - DNA, 15 bp, Homo sapiens
gtctcagcaatagaa

SEQ ID NO: 1687260 - DNA, 15 bp, Homo sapiens
tctcagcaatagaat

SEQ ID NO: 1687261 - DNA, 15 bp, Homo sapiens
ctcagcaatagaatc

SEQ ID NO: 1687262 - DNA, 15 bp, Homo sapiens
tcagcaatagaatca

SEQ ID NO: 1687263 - DNA, 15 bp, Homo sapiens
cagcaatagaatcaa

SEQ ID NO: 1687264 - DNA, 15 bp, Homo sapiens
agcaatagaatcaaa

SEQ ID NO: 1687265 - DNA, 15 bp, Homo sapiens
gcaatagaatcaaat

SEQ ID NO: 1687266 - DNA, 15 bp, Homo sapiens
caatagaatcaaata

SEQ ID NO: 1687267 - DNA, 15 bp, Homo sapiens
aatagaatcaaataa

SEQ ID NO: 1687268 - DNA, 15 bp, Homo sapiens
atagaatcaaataaa

SEQ ID NO: 1687269 - DNA, 15 bp, Homo sapiens
tagaatcaaataaac

SEQ ID NO: 1687270 - DNA, 15 bp, Homo sapiens
agaatcaaataaaca

SEQ ID NO: 1687271 - DNA, 15 bp, Homo sapiens
gaatcaaataaacag

SEQ ID NO: 1687272 - DNA, 15 bp, Homo sapiens
aatcaaataaacaga

SEQ ID NO: 1687273 - DNA, 15 bp, Homo sapiens
atcaaataaacagaa

SEQ ID NO: 1687274 - DNA, 15 bp, Homo sapiens
tcaaataaacagaag

SEQ ID NO: 1687275 - DNA, 15 bp, Homo sapiens
caaataaacagaaga

SEQ ID NO: 1687276 - DNA, 15 bp, Homo sapiens
aaataaacagaagaa

SEQ ID NO: 1687277 - DNA, 15 bp, Homo sapiens
aataaacagaagaaa

SEQ ID NO: 1687278 - DNA, 15 bp, Homo sapiens
ataaacagaagaaag

SEQ ID NO: 1687279 - DNA, 15 bp, Homo sapiens
taaacagaagaaaga

SEQ ID NO: 1687280 - DNA, 15 bp, Homo sapiens
aacagaagaaagaaa

SEQ ID NO: 1687281 - DNA, 15 bp, Homo sapiens
acagaagaaagaaac

SEQ ID NO: 1687282 - DNA, 15 bp, Homo sapiens
cagaagaaagaaact

SEQ ID NO: 1687283 - DNA, 15 bp, Homo sapiens
agaagaaagaaactt

SEQ ID NO: 1687284 - DNA, 15 bp, Homo sapiens
gaagaaagaaacttc

SEQ ID NO: 1687285 - DNA, 15 bp, Homo sapiens
aagaaagaaacttca

SEQ ID NO: 1687286 - DNA, 15 bp, Homo sapiens
agaaagaaacttcag

SEQ ID NO: 1687287 - DNA, 15 bp, Homo sapiens
gaaagaaacttcaga

SEQ ID NO: 1687288 - DNA, 15 bp, Homo sapiens
aaagaaacttcagag

SEQ ID NO: 1687289 - DNA, 15 bp, Homo sapiens
aagaaacttcagagt

SEQ ID NO: 1687290 - DNA, 15 bp, Homo sapiens
agaaacttcagagtt

SEQ ID NO: 1687291 - DNA, 15 bp, Homo sapiens
gaaacttcagagttt

SEQ ID NO: 1687292 - DNA, 15 bp, Homo sapiens
aaacttcagagtttg

SEQ ID NO: 1687293 - DNA, 15 bp, Homo sapiens
aacttcagagtttga

SEQ ID NO: 1687294 - DNA, 15 bp, Homo sapiens
acttcagagtttgaa

SEQ ID NO: 1687295 - DNA, 15 bp, Homo sapiens
cttcagagtttgaag

SEQ ID NO: 1687296 - DNA, 15 bp, Homo sapiens
ttcagagtttgaaga

SEQ ID NO: 1687297 - DNA, 15 bp, Homo sapiens
tcagagtttgaagac

SEQ ID NO: 1687298 - DNA, 15 bp, Homo sapiens
cagagtttgaagaca

SEQ ID NO: 1687299 - DNA, 15 bp, Homo sapiens
agagtttgaagacat

SEQ ID NO: 1687300 - DNA, 15 bp, Homo sapiens
gagtttgaagacatg

SEQ ID NO: 1687301 - DNA, 15 bp, Homo sapiens
agtttgaagacatgg

SEQ ID NO: 1687302 - DNA, 15 bp, Homo sapiens
gtttgaagacatggg

SEQ ID NO: 1687303 - DNA, 15 bp, Homo sapiens
tttgaagacatgggt

SEQ ID NO: 1687304 - DNA, 15 bp, Homo sapiens
ttgaagacatgggtt

SEQ ID NO: 1687305 - DNA, 15 bp, Homo sapiens
tgaagacatgggttt

SEQ ID NO: 1687306 - DNA, 15 bp, Homo sapiens
gaagacatgggtttc

SEQ ID NO: 1687307 - DNA, 15 bp, Homo sapiens
aagacatgggtttca

SEQ ID NO: 1687308 - DNA, 15 bp, Homo sapiens
agacatgggtttcaa

SEQ ID NO: 1687309 - DNA, 15 bp, Homo sapiens
gacatgggtttcaaa

SEQ ID NO: 1687310 - DNA, 15 bp, Homo sapiens
acatgggtttcaaat

SEQ ID NO: 1687311 - DNA, 15 bp, Homo sapiens
catgggtttcaaatt

SEQ ID NO: 1687312 - DNA, 15 bp, Homo sapiens
atgggtttcaaatta

SEQ ID NO: 1687313 - DNA, 15 bp, Homo sapiens
tgggtttcaaattaa

SEQ ID NO: 1687314 - DNA, 15 bp, Homo sapiens
gggtttcaaattaat

SEQ ID NO: 1687315 - DNA, 15 bp, Homo sapiens
ggtttcaaattaatc

SEQ ID NO: 1687316 - DNA, 15 bp, Homo sapiens
gtttcaaattaatcc

SEQ ID NO: 1687317 - DNA, 15 bp, Homo sapiens
tttcaaattaatcca

SEQ ID NO: 1687318 - DNA, 15 bp, Homo sapiens
ttcaaattaatccat

SEQ ID NO: 1687319 - DNA, 15 bp, Homo sapiens
tcaaattaatccatc

SEQ ID NO: 1687320 - DNA, 15 bp, Homo sapiens
caaattaatccatca

SEQ ID NO: 1687321 - DNA, 15 bp, Homo sapiens
aaattaatccatcaa

SEQ ID NO: 1687322 - DNA, 15 bp, Homo sapiens
aattaatccatcaaa

SEQ ID NO: 1687323 - DNA, 15 bp, Homo sapiens
attaatccatcaaag

SEQ ID NO: 1687324 - DNA, 15 bp, Homo sapiens
ttaatccatcaaaga

SEQ ID NO: 1687325 - DNA, 15 bp, Homo sapiens
taatccatcaaagac

SEQ ID NO: 1687326 - DNA, 15 bp, Homo sapiens
aatccatcaaagaca

SEQ ID NO: 1687327 - DNA, 15 bp, Homo sapiens
atccatcaaagacaa

SEQ ID NO: 1687328 - DNA, 15 bp, Homo sapiens
tccatcaaagacaaa

SEQ ID NO: 1687329 - DNA, 15 bp, Homo sapiens
ccatcaaagacaaag

SEQ ID NO: 1687330 - DNA, 15 bp, Homo sapiens
catcaaagacaaaga

SEQ ID NO: 1687331 - DNA, 15 bp, Homo sapiens
atcaaagacaaagaa

SEQ ID NO: 1687332 - DNA, 15 bp, Homo sapiens
tcaaagacaaagaaa

SEQ ID NO: 1687333 - DNA, 15 bp, Homo sapiens
caaagacaaagaaaa

SEQ ID NO: 1687334 - DNA, 15 bp, Homo sapiens
aaagacaaagaaaaa

SEQ ID NO: 1687335 - DNA, 15 bp, Homo sapiens
aagacaaagaaaaaa

SEQ ID NO: 1687336 - DNA, 15 bp, Homo sapiens
agacaaagaaaaaag

SEQ ID NO: 1687337 - DNA, 15 bp, Homo sapiens
gacaaagaaaaaaga

SEQ ID NO: 1687338 - DNA, 15 bp, Homo sapiens
acaaagaaaaaagaa

SEQ ID NO: 1687339 - DNA, 15 bp, Homo sapiens
caaagaaaaaagaat

SEQ ID NO: 1687340 - DNA, 15 bp, Homo sapiens
aaagaaaaaagaatt

SEQ ID NO: 1687341 - DNA, 15 bp, Homo sapiens
aagaaaaaagaattt

SEQ ID NO: 1687342 - DNA, 15 bp, Homo sapiens
agaaaaaagaattta

SEQ ID NO: 1687343 - DNA, 15 bp, Homo sapiens
gaaaaaagaatttaa

SEQ ID NO: 1687344 - DNA, 15 bp, Homo sapiens
aaaaaagaatttaaa

SEQ ID NO: 1687345 - DNA, 15 bp, Homo sapiens
aaaaagaatttaaaa

SEQ ID NO: 1687346 - DNA, 15 bp, Homo sapiens
aaaagaatttaaaaa

SEQ ID NO: 1687347 - DNA, 15 bp, Homo sapiens
aaagaatttaaaaaa

SEQ ID NO: 1687348 - DNA, 15 bp, Homo sapiens
aagaatttaaaaaat

SEQ ID NO: 1687349 - DNA, 15 bp, Homo sapiens
agaatttaaaaaatg

SEQ ID NO: 1687350 - DNA, 15 bp, Homo sapiens
gaatttaaaaaatga

SEQ ID NO: 1687351 - DNA, 15 bp, Homo sapiens
aatttaaaaaatgaa

SEQ ID NO: 1687352 - DNA, 15 bp, Homo sapiens
atttaaaaaatgaac

SEQ ID NO: 1687353 - DNA, 15 bp, Homo sapiens
tttaaaaaatgaaca

SEQ ID NO: 1687354 - DNA, 15 bp, Homo sapiens
ttaaaaaatgaacaa

SEQ ID NO: 1687355 - DNA, 15 bp, Homo sapiens
taaaaaatgaacaaa

SEQ ID NO: 1687356 - DNA, 15 bp, Homo sapiens
aaaaaatgaacaaag

SEQ ID NO: 1687357 - DNA, 15 bp, Homo sapiens
aaaaatgaacaaagc

SEQ ID NO: 1687358 - DNA, 15 bp, Homo sapiens
aaaatgaacaaagct

SEQ ID NO: 1687359 - DNA, 15 bp, Homo sapiens
aaatgaacaaagctt

SEQ ID NO: 1687360 - DNA, 15 bp, Homo sapiens
aatgaacaaagcttc

SEQ ID NO: 1687361 - DNA, 15 bp, Homo sapiens
atgaacaaagcttcc

SEQ ID NO: 1687362 - DNA, 15 bp, Homo sapiens
tgaacaaagcttcca

SEQ ID NO: 1687363 - DNA, 15 bp, Homo sapiens
gaacaaagcttccaa

SEQ ID NO: 1687364 - DNA, 15 bp, Homo sapiens
aacaaagcttccaag

SEQ ID NO: 1687365 - DNA, 15 bp, Homo sapiens
acaaagcttccaaga

SEQ ID NO: 1687366 - DNA, 15 bp, Homo sapiens
caaagcttccaagaa

SEQ ID NO: 1687367 - DNA, 15 bp, Homo sapiens
aaagcttccaagaag

SEQ ID NO: 1687368 - DNA, 15 bp, Homo sapiens
aagcttccaagaagt

SEQ ID NO: 1687369 - DNA, 15 bp, Homo sapiens
agcttccaagaagtc

SEQ ID NO: 1687370 - DNA, 15 bp, Homo sapiens
gcttccaagaagtct

SEQ ID NO: 1687371 - DNA, 15 bp, Homo sapiens
cttccaagaagtctg

SEQ ID NO: 1687372 - DNA, 15 bp, Homo sapiens
ttccaagaagtctgg

SEQ ID NO: 1687373 - DNA, 15 bp, Homo sapiens
tccaagaagtctggg

SEQ ID NO: 1687374 - DNA, 15 bp, Homo sapiens
ccaagaagtctggga

SEQ ID NO: 1687375 - DNA, 15 bp, Homo sapiens
caagaagtctgggac

SEQ ID NO: 1687376 - DNA, 15 bp, Homo sapiens
aagaagtctgggact

SEQ ID NO: 1687377 - DNA, 15 bp, Homo sapiens
agaagtctgggacta

SEQ ID NO: 1687378 - DNA, 15 bp, Homo sapiens
gaagtctgggactat

SEQ ID NO: 1687379 - DNA, 15 bp, Homo sapiens
aagtctgggactatg

SEQ ID NO: 1687380 - DNA, 15 bp, Homo sapiens
agtctgggactatgt

SEQ ID NO: 1687381 - DNA, 15 bp, Homo sapiens
gtctgggactatgtt

SEQ ID NO: 1687382 - DNA, 15 bp, Homo sapiens
tctgggactatgtta

SEQ ID NO: 1687383 - DNA, 15 bp, Homo sapiens
ctgggactatgttaa

SEQ ID NO: 1687384 - DNA, 15 bp, Homo sapiens
tgggactatgttaaa

SEQ ID NO: 1687385 - DNA, 15 bp, Homo sapiens
gggactatgttaaat

SEQ ID NO: 1687386 - DNA, 15 bp, Homo sapiens
ggactatgttaaatg

SEQ ID NO: 1687387 - DNA, 15 bp, Homo sapiens
gactatgttaaatga

SEQ ID NO: 1687388 - DNA, 15 bp, Homo sapiens
actatgttaaatgac

SEQ ID NO: 1687389 - DNA, 15 bp, Homo sapiens
ctatgttaaatgacc

SEQ ID NO: 1687390 - DNA, 15 bp, Homo sapiens
tatgttaaatgacca

SEQ ID NO: 1687391 - DNA, 15 bp, Homo sapiens
atgttaaatgaccaa

SEQ ID NO: 1687392 - DNA, 15 bp, Homo sapiens
tgttaaatgaccaaa

SEQ ID NO: 1687393 - DNA, 15 bp, Homo sapiens
gttaaatgaccaaac

SEQ ID NO: 1687394 - DNA, 15 bp, Homo sapiens
ttaaatgaccaaacc

SEQ ID NO: 1687395 - DNA, 15 bp, Homo sapiens
taaatgaccaaacct

SEQ ID NO: 1687396 - DNA, 15 bp, Homo sapiens
aaatgaccaaaccta

SEQ ID NO: 1687397 - DNA, 15 bp, Homo sapiens
aatgaccaaacctaa

SEQ ID NO: 1687398 - DNA, 15 bp, Homo sapiens
atgaccaaacctaag

SEQ ID NO: 1687399 - DNA, 15 bp, Homo sapiens
tgaccaaacctaaga

SEQ ID NO: 1687400 - DNA, 15 bp, Homo sapiens
gaccaaacctaagaa

SEQ ID NO: 1687401 - DNA, 15 bp, Homo sapiens
accaaacctaagaat

SEQ ID NO: 1687402 - DNA, 15 bp, Homo sapiens
ccaaacctaagaata

SEQ ID NO: 1687403 - DNA, 15 bp, Homo sapiens
caaacctaagaataa

SEQ ID NO: 1687404 - DNA, 15 bp, Homo sapiens
aaacctaagaataat

SEQ ID NO: 1687405 - DNA, 15 bp, Homo sapiens
aacctaagaataatt

SEQ ID NO: 1687406 - DNA, 15 bp, Homo sapiens
acctaagaataattg

SEQ ID NO: 1687407 - DNA, 15 bp, Homo sapiens
cctaagaataattgg

SEQ ID NO: 1687408 - DNA, 15 bp, Homo sapiens
ctaagaataattggt

SEQ ID NO: 1687409 - DNA, 15 bp, Homo sapiens
taagaataattggtg

SEQ ID NO: 1687410 - DNA, 15 bp, Homo sapiens
aagaataattggtgt

SEQ ID NO: 1687411 - DNA, 15 bp, Homo sapiens
agaataattggtgtt

SEQ ID NO: 1687412 - DNA, 15 bp, Homo sapiens
gaataattggtgttc

SEQ ID NO: 1687413 - DNA, 15 bp, Homo sapiens
aataattggtgttct

SEQ ID NO: 1687414 - DNA, 15 bp, Homo sapiens
ataattggtgttctc

SEQ ID NO: 1687415 - DNA, 15 bp, Homo sapiens
taattggtgttctcg

SEQ ID NO: 1687416 - DNA, 15 bp, Homo sapiens
aattggtgttctcga

SEQ ID NO: 1687417 - DNA, 15 bp, Homo sapiens
attggtgttctcgag

SEQ ID NO: 1687418 - DNA, 15 bp, Homo sapiens
ttggtgttctcgagg

SEQ ID NO: 1687419 - DNA, 15 bp, Homo sapiens
tggtgttctcgagga

SEQ ID NO: 1687420 - DNA, 15 bp, Homo sapiens
ggtgttctcgaggaa

SEQ ID NO: 1687421 - DNA, 15 bp, Homo sapiens
gtgttctcgaggaag

SEQ ID NO: 1687422 - DNA, 15 bp, Homo sapiens
tgttctcgaggaaga

SEQ ID NO: 1687423 - DNA, 15 bp, Homo sapiens
gttctcgaggaagaa

SEQ ID NO: 1687424 - DNA, 15 bp, Homo sapiens
ttctcgaggaagaag

SEQ ID NO: 1687425 - DNA, 15 bp, Homo sapiens
tctcgaggaagaaga

SEQ ID NO: 1687426 - DNA, 15 bp, Homo sapiens
ctcgaggaagaagag

SEQ ID NO: 1687427 - DNA, 15 bp, Homo sapiens
tcgaggaagaagaga

SEQ ID NO: 1687428 - DNA, 15 bp, Homo sapiens
cgaggaagaagagaa

SEQ ID NO: 1687429 - DNA, 15 bp, Homo sapiens
gaggaagaagagaaa

SEQ ID NO: 1687430 - DNA, 15 bp, Homo sapiens
aggaagaagagaaat

SEQ ID NO: 1687431 - DNA, 15 bp, Homo sapiens
ggaagaagagaaatc

SEQ ID NO: 1687432 - DNA, 15 bp, Homo sapiens
gaagaagagaaatct

SEQ ID NO: 1687433 - DNA, 15 bp, Homo sapiens
aagaagagaaatcta

SEQ ID NO: 1687434 - DNA, 15 bp, Homo sapiens
agaagagaaatctaa

SEQ ID NO: 1687435 - DNA, 15 bp, Homo sapiens
gaagagaaatctaaa

SEQ ID NO: 1687436 - DNA, 15 bp, Homo sapiens
aagagaaatctaaaa

SEQ ID NO: 1687437 - DNA, 15 bp, Homo sapiens
agagaaatctaaaag

SEQ ID NO: 1687438 - DNA, 15 bp, Homo sapiens
gagaaatctaaaagt

SEQ ID NO: 1687439 - DNA, 15 bp, Homo sapiens
agaaatctaaaagtt

SEQ ID NO: 1687440 - DNA, 15 bp, Homo sapiens
gaaatctaaaagttt

SEQ ID NO: 1687441 - DNA, 15 bp, Homo sapiens
aaatctaaaagtttg

SEQ ID NO: 1687442 - DNA, 15 bp, Homo sapiens
aatctaaaagtttgg

SEQ ID NO: 1687443 - DNA, 15 bp, Homo sapiens
atctaaaagtttgga

SEQ ID NO: 1687444 - DNA, 15 bp, Homo sapiens
tctaaaagtttggaa

SEQ ID NO: 1687445 - DNA, 15 bp, Homo sapiens
ctaaaagtttggaaa

SEQ ID NO: 1687446 - DNA, 15 bp, Homo sapiens
taaaagtttggaaaa

SEQ ID NO: 1687447 - DNA, 15 bp, Homo sapiens
aaaagtttggaaaat

SEQ ID NO: 1687448 - DNA, 15 bp, Homo sapiens
aaagtttggaaaata

SEQ ID NO: 1687449 - DNA, 15 bp, Homo sapiens
aagtttggaaaatat

SEQ ID NO: 1687450 - DNA, 15 bp, Homo sapiens
agtttggaaaatata

SEQ ID NO: 1687451 - DNA, 15 bp, Homo sapiens
gtttggaaaatatat

SEQ ID NO: 1687452 - DNA, 15 bp, Homo sapiens
tttggaaaatatatc

SEQ ID NO: 1687453 - DNA, 15 bp, Homo sapiens
ttggaaaatatatct

SEQ ID NO: 1687454 - DNA, 15 bp, Homo sapiens
tggaaaatatatctg

SEQ ID NO: 1687455 - DNA, 15 bp, Homo sapiens
ggaaaatatatctga

SEQ ID NO: 1687456 - DNA, 15 bp, Homo sapiens
gaaaatatatctgaa

SEQ ID NO: 1687457 - DNA, 15 bp, Homo sapiens
aaaatatatctgaag

SEQ ID NO: 1687458 - DNA, 15 bp, Homo sapiens
aaatatatctgaagg

SEQ ID NO: 1687459 - DNA, 15 bp, Homo sapiens
aatatatctgaagga

SEQ ID NO: 1687460 - DNA, 15 bp, Homo sapiens
atatatctgaaggaa

SEQ ID NO: 1687461 - DNA, 15 bp, Homo sapiens
tatatctgaaggaat

SEQ ID NO: 1687462 - DNA, 15 bp, Homo sapiens
atatctgaaggaata

SEQ ID NO: 1687463 - DNA, 15 bp, Homo sapiens
tatctgaaggaataa

SEQ ID NO: 1687464 - DNA, 15 bp, Homo sapiens
atctgaaggaataat

SEQ ID NO: 1687465 - DNA, 15 bp, Homo sapiens
tctgaaggaataatt

SEQ ID NO: 1687466 - DNA, 15 bp, Homo sapiens
ctgaaggaataattg

SEQ ID NO: 1687467 - DNA, 15 bp, Homo sapiens
tgaaggaataattga

SEQ ID NO: 1687468 - DNA, 15 bp, Homo sapiens
gaaggaataattgag

SEQ ID NO: 1687469 - DNA, 15 bp, Homo sapiens
aaggaataattgagg

SEQ ID NO: 1687470 - DNA, 15 bp, Homo sapiens
aggaataattgagga

SEQ ID NO: 1687471 - DNA, 15 bp, Homo sapiens
ggaataattgaggaa

SEQ ID NO: 1687472 - DNA, 15 bp, Homo sapiens
gaataattgaggaaa

SEQ ID NO: 1687473 - DNA, 15 bp, Homo sapiens
aataattgaggaaaa

SEQ ID NO: 1687474 - DNA, 15 bp, Homo sapiens
ataattgaggaaaac

SEQ ID NO: 1687475 - DNA, 15 bp, Homo sapiens
taattgaggaaaact

SEQ ID NO: 1687476 - DNA, 15 bp, Homo sapiens
aattgaggaaaactt

SEQ ID NO: 1687477 - DNA, 15 bp, Homo sapiens
attgaggaaaacttc

SEQ ID NO: 1687478 - DNA, 15 bp, Homo sapiens
ttgaggaaaacttcc

SEQ ID NO: 1687479 - DNA, 15 bp, Homo sapiens
tgaggaaaacttccc

SEQ ID NO: 1687480 - DNA, 15 bp, Homo sapiens
gaggaaaacttccct

SEQ ID NO: 1687481 - DNA, 15 bp, Homo sapiens
aggaaaacttccctg

SEQ ID NO: 1687482 - DNA, 15 bp, Homo sapiens
ggaaaacttccctgg

SEQ ID NO: 1687483 - DNA, 15 bp, Homo sapiens
gaaaacttccctggc

SEQ ID NO: 1687484 - DNA, 15 bp, Homo sapiens
aaaacttccctggcc

SEQ ID NO: 1687485 - DNA, 15 bp, Homo sapiens
aaacttccctggcct

SEQ ID NO: 1687486 - DNA, 15 bp, Homo sapiens
aacttccctggcctt

SEQ ID NO: 1687487 - DNA, 15 bp, Homo sapiens
acttccctggccttg

SEQ ID NO: 1687488 - DNA, 15 bp, Homo sapiens
cttccctggccttgc

SEQ ID NO: 1687489 - DNA, 15 bp, Homo sapiens
ttccctggccttgct

SEQ ID NO: 1687490 - DNA, 15 bp, Homo sapiens
tccctggccttgctg

SEQ ID NO: 1687491 - DNA, 15 bp, Homo sapiens
ccctggccttgctga

SEQ ID NO: 1687492 - DNA, 15 bp, Homo sapiens
cctggccttgctgaa

SEQ ID NO: 1687493 - DNA, 15 bp, Homo sapiens
ctggccttgctgaag

SEQ ID NO: 1687494 - DNA, 15 bp, Homo sapiens
tggccttgctgaagg

SEQ ID NO: 1687495 - DNA, 15 bp, Homo sapiens
ggccttgctgaagga

SEQ ID NO: 1687496 - DNA, 15 bp, Homo sapiens
gccttgctgaaggaa

SEQ ID NO: 1687497 - DNA, 15 bp, Homo sapiens
ccttgctgaaggaag

SEQ ID NO: 1687498 - DNA, 15 bp, Homo sapiens
cttgctgaaggaaga

SEQ ID NO: 1687499 - DNA, 15 bp, Homo sapiens
ttgctgaaggaagat

SEQ ID NO: 1687500 - DNA, 15 bp, Homo sapiens
tgctgaaggaagatc

SEQ ID NO: 1687501 - DNA, 15 bp, Homo sapiens
gctgaaggaagatct

SEQ ID NO: 1687502 - DNA, 15 bp, Homo sapiens
ctgaaggaagatctt

SEQ ID NO: 1687503 - DNA, 15 bp, Homo sapiens
tgaaggaagatcttt

SEQ ID NO: 1687504 - DNA, 15 bp, Homo sapiens
gaaggaagatctttt

SEQ ID NO: 1687505 - DNA, 15 bp, Homo sapiens
aaggaagatcttttg

SEQ ID NO: 1687506 - DNA, 15 bp, Homo sapiens
aggaagatcttttgt

SEQ ID NO: 1687507 - DNA, 15 bp, Homo sapiens
ggaagatcttttgtc

SEQ ID NO: 1687508 - DNA, 15 bp, Homo sapiens
gaagatcttttgtct

SEQ ID NO: 1687509 - DNA, 15 bp, Homo sapiens
aagatcttttgtcta

SEQ ID NO: 1687510 - DNA, 15 bp, Homo sapiens
agatcttttgtctag

SEQ ID NO: 1687511 - DNA, 15 bp, Homo sapiens
gatcttttgtctagg

SEQ ID NO: 1687512 - DNA, 15 bp, Homo sapiens
atcttttgtctaggg

SEQ ID NO: 1687513 - DNA, 15 bp, Homo sapiens
tcttttgtctaggga

SEQ ID NO: 1687514 - DNA, 15 bp, Homo sapiens
cttttgtctagggat

SEQ ID NO: 1687515 - DNA, 15 bp, Homo sapiens
ttttgtctagggatg

SEQ ID NO: 1687516 - DNA, 15 bp, Homo sapiens
tttgtctagggatgt

SEQ ID NO: 1687517 - DNA, 15 bp, Homo sapiens
ttgtctagggatgta

SEQ ID NO: 1687518 - DNA, 15 bp, Homo sapiens
tgtctagggatgtag

SEQ ID NO: 1687519 - DNA, 15 bp, Homo sapiens
gtctagggatgtaga

SEQ ID NO: 1687520 - DNA, 15 bp, Homo sapiens
tctagggatgtagac

SEQ ID NO: 1687521 - DNA, 15 bp, Homo sapiens
ctagggatgtagaca

SEQ ID NO: 1687522 - DNA, 15 bp, Homo sapiens
tagggatgtagacat

SEQ ID NO: 1687523 - DNA, 15 bp, Homo sapiens
agggatgtagacatc

SEQ ID NO: 1687524 - DNA, 15 bp, Homo sapiens
gggatgtagacatcc

SEQ ID NO: 1687525 - DNA, 15 bp, Homo sapiens
ggatgtagacatcca

SEQ ID NO: 1687526 - DNA, 15 bp, Homo sapiens
gatgtagacatccaa

SEQ ID NO: 1687527 - DNA, 15 bp, Homo sapiens
atgtagacatccaaa

SEQ ID NO: 1687528 - DNA, 15 bp, Homo sapiens
tgtagacatccaaat

SEQ ID NO: 1687529 - DNA, 15 bp, Homo sapiens
gtagacatccaaata

SEQ ID NO: 1687530 - DNA, 15 bp, Homo sapiens
tagacatccaaatac

SEQ ID NO: 1687531 - DNA, 15 bp, Homo sapiens
agacatccaaatacg

SEQ ID NO: 1687532 - DNA, 15 bp, Homo sapiens
gacatccaaatacga

SEQ ID NO: 1687533 - DNA, 15 bp, Homo sapiens
acatccaaatacgag

SEQ ID NO: 1687534 - DNA, 15 bp, Homo sapiens
catccaaatacgaga

SEQ ID NO: 1687535 - DNA, 15 bp, Homo sapiens
atccaaatacgagaa

SEQ ID NO: 1687536 - DNA, 15 bp, Homo sapiens
tccaaatacgagaag

SEQ ID NO: 1687537 - DNA, 15 bp, Homo sapiens
ccaaatacgagaaga

SEQ ID NO: 1687538 - DNA, 15 bp, Homo sapiens
caaatacgagaagat

SEQ ID NO: 1687539 - DNA, 15 bp, Homo sapiens
aaatacgagaagatc

SEQ ID NO: 1687540 - DNA, 15 bp, Homo sapiens
aatacgagaagatca

SEQ ID NO: 1687541 - DNA, 15 bp, Homo sapiens
atacgagaagatcaa

SEQ ID NO: 1687542 - DNA, 15 bp, Homo sapiens
tacgagaagatcaaa

SEQ ID NO: 1687543 - DNA, 15 bp, Homo sapiens
acgagaagatcaaag

SEQ ID NO: 1687544 - DNA, 15 bp, Homo sapiens
cgagaagatcaaaga

SEQ ID NO: 1687545 - DNA, 15 bp, Homo sapiens
gagaagatcaaagaa

SEQ ID NO: 1687546 - DNA, 15 bp, Homo sapiens
agaagatcaaagaac

SEQ ID NO: 1687547 - DNA, 15 bp, Homo sapiens
gaagatcaaagaaca

SEQ ID NO: 1687548 - DNA, 15 bp, Homo sapiens
aagatcaaagaacac

SEQ ID NO: 1687549 - DNA, 15 bp, Homo sapiens
agatcaaagaacacc

SEQ ID NO: 1687550 - DNA, 15 bp, Homo sapiens
gatcaaagaacacct

SEQ ID NO: 1687551 - DNA, 15 bp, Homo sapiens
atcaaagaacacctg

SEQ ID NO: 1687552 - DNA, 15 bp, Homo sapiens
tcaaagaacacctgg

SEQ ID NO: 1687553 - DNA, 15 bp, Homo sapiens
caaagaacacctggg

SEQ ID NO: 1687554 - DNA, 15 bp, Homo sapiens
aaagaacacctggga

SEQ ID NO: 1687555 - DNA, 15 bp, Homo sapiens
aagaacacctgggaa

SEQ ID NO: 1687556 - DNA, 15 bp, Homo sapiens
agaacacctgggaaa

SEQ ID NO: 1687557 - DNA, 15 bp, Homo sapiens
gaacacctgggaaat

SEQ ID NO: 1687558 - DNA, 15 bp, Homo sapiens
aacacctgggaaatt

SEQ ID NO: 1687559 - DNA, 15 bp, Homo sapiens
acacctgggaaattc

SEQ ID NO: 1687560 - DNA, 15 bp, Homo sapiens
cacctgggaaattca

SEQ ID NO: 1687561 - DNA, 15 bp, Homo sapiens
acctgggaaattcat

SEQ ID NO: 1687562 - DNA, 15 bp, Homo sapiens
cctgggaaattcatt

SEQ ID NO: 1687563 - DNA, 15 bp, Homo sapiens
ctgggaaattcattg

SEQ ID NO: 1687564 - DNA, 15 bp, Homo sapiens
tgggaaattcattgc

SEQ ID NO: 1687565 - DNA, 15 bp, Homo sapiens
gggaaattcattgca

SEQ ID NO: 1687566 - DNA, 15 bp, Homo sapiens
ggaaattcattgcaa

SEQ ID NO: 1687567 - DNA, 15 bp, Homo sapiens
gaaattcattgcaaa

SEQ ID NO: 1687568 - DNA, 15 bp, Homo sapiens
aaattcattgcaaaa

SEQ ID NO: 1687569 - DNA, 15 bp, Homo sapiens
aattcattgcaaaaa

SEQ ID NO: 1687570 - DNA, 15 bp, Homo sapiens
attcattgcaaaaag

SEQ ID NO: 1687571 - DNA, 15 bp, Homo sapiens
ttcattgcaaaaaga

SEQ ID NO: 1687572 - DNA, 15 bp, Homo sapiens
tcattgcaaaaagat

SEQ ID NO: 1687573 - DNA, 15 bp, Homo sapiens
cattgcaaaaagatc

SEQ ID NO: 1687574 - DNA, 15 bp, Homo sapiens
attgcaaaaagatca

SEQ ID NO: 1687575 - DNA, 15 bp, Homo sapiens
ttgcaaaaagatcat

SEQ ID NO: 1687576 - DNA, 15 bp, Homo sapiens
tgcaaaaagatcatc

SEQ ID NO: 1687577 - DNA, 15 bp, Homo sapiens
gcaaaaagatcatca

SEQ ID NO: 1687578 - DNA, 15 bp, Homo sapiens
caaaaagatcatcac

SEQ ID NO: 1687579 - DNA, 15 bp, Homo sapiens
aaaaagatcatcacc

SEQ ID NO: 1687580 - DNA, 15 bp, Homo sapiens
aaaagatcatcacct

SEQ ID NO: 1687581 - DNA, 15 bp, Homo sapiens
aaagatcatcaccta

SEQ ID NO: 1687582 - DNA, 15 bp, Homo sapiens
aagatcatcacctag

SEQ ID NO: 1687583 - DNA, 15 bp, Homo sapiens
agatcatcacctagg

SEQ ID NO: 1687584 - DNA, 15 bp, Homo sapiens
gatcatcacctaggc

SEQ ID NO: 1687585 - DNA, 15 bp, Homo sapiens
atcatcacctaggca

SEQ ID NO: 1687586 - DNA, 15 bp, Homo sapiens
tcatcacctaggcac

SEQ ID NO: 1687587 - DNA, 15 bp, Homo sapiens
catcacctaggcaca

SEQ ID NO: 1687588 - DNA, 15 bp, Homo sapiens
atcacctaggcacat

SEQ ID NO: 1687589 - DNA, 15 bp, Homo sapiens
tcacctaggcacata

SEQ ID NO: 1687590 - DNA, 15 bp, Homo sapiens
cacctaggcacatag

SEQ ID NO: 1687591 - DNA, 15 bp, Homo sapiens
acctaggcacatagt

SEQ ID NO: 1687592 - DNA, 15 bp, Homo sapiens
cctaggcacatagtc

SEQ ID NO: 1687593 - DNA, 15 bp, Homo sapiens
ctaggcacatagtca

SEQ ID NO: 1687594 - DNA, 15 bp, Homo sapiens
taggcacatagtcat

SEQ ID NO: 1687595 - DNA, 15 bp, Homo sapiens
aggcacatagtcatc

SEQ ID NO: 1687596 - DNA, 15 bp, Homo sapiens
ggcacatagtcatca

SEQ ID NO: 1687597 - DNA, 15 bp, Homo sapiens
gcacatagtcatcag

SEQ ID NO: 1687598 - DNA, 15 bp, Homo sapiens
cacatagtcatcaga

SEQ ID NO: 1687599 - DNA, 15 bp, Homo sapiens
acatagtcatcagat

SEQ ID NO: 1687600 - DNA, 15 bp, Homo sapiens
catagtcatcagatt

SEQ ID NO: 1687601 - DNA, 15 bp, Homo sapiens
atagtcatcagatta

SEQ ID NO: 1687602 - DNA, 15 bp, Homo sapiens
tagtcatcagattat

SEQ ID NO: 1687603 - DNA, 15 bp, Homo sapiens
agtcatcagattatc

SEQ ID NO: 1687604 - DNA, 15 bp, Homo sapiens
gtcatcagattatct

SEQ ID NO: 1687605 - DNA, 15 bp, Homo sapiens
tcatcagattatcta

SEQ ID NO: 1687606 - DNA, 15 bp, Homo sapiens
catcagattatctaa

SEQ ID NO: 1687607 - DNA, 15 bp, Homo sapiens
atcagattatctaaa

SEQ ID NO: 1687608 - DNA, 15 bp, Homo sapiens
tcagattatctaaag

SEQ ID NO: 1687609 - DNA, 15 bp, Homo sapiens
cagattatctaaagt

SEQ ID NO: 1687610 - DNA, 15 bp, Homo sapiens
agattatctaaagtc

SEQ ID NO: 1687611 - DNA, 15 bp, Homo sapiens
gattatctaaagtca

SEQ ID NO: 1687612 - DNA, 15 bp, Homo sapiens
attatctaaagtcaa

SEQ ID NO: 1687613 - DNA, 15 bp, Homo sapiens
ttatctaaagtcaag

SEQ ID NO: 1687614 - DNA, 15 bp, Homo sapiens
tatctaaagtcaaga

SEQ ID NO: 1687615 - DNA, 15 bp, Homo sapiens
atctaaagtcaagat

SEQ ID NO: 1687616 - DNA, 15 bp, Homo sapiens
tctaaagtcaagatg

SEQ ID NO: 1687617 - DNA, 15 bp, Homo sapiens
ctaaagtcaagatga

SEQ ID NO: 1687618 - DNA, 15 bp, Homo sapiens
taaagtcaagatgaa

SEQ ID NO: 1687619 - DNA, 15 bp, Homo sapiens
aaagtcaagatgaag

SEQ ID NO: 1687620 - DNA, 15 bp, Homo sapiens
aagtcaagatgaagg

SEQ ID NO: 1687621 - DNA, 15 bp, Homo sapiens
agtcaagatgaagga

SEQ ID NO: 1687622 - DNA, 15 bp, Homo sapiens
gtcaagatgaaggaa

SEQ ID NO: 1687623 - DNA, 15 bp, Homo sapiens
tcaagatgaaggaaa

SEQ ID NO: 1687624 - DNA, 15 bp, Homo sapiens
caagatgaaggaaag

SEQ ID NO: 1687625 - DNA, 15 bp, Homo sapiens
aagatgaaggaaaga

SEQ ID NO: 1687626 - DNA, 15 bp, Homo sapiens
agatgaaggaaagaa

SEQ ID NO: 1687627 - DNA, 15 bp, Homo sapiens
gatgaaggaaagaat

SEQ ID NO: 1687628 - DNA, 15 bp, Homo sapiens
atgaaggaaagaatc

SEQ ID NO: 1687629 - DNA, 15 bp, Homo sapiens
tgaaggaaagaatct

SEQ ID NO: 1687630 - DNA, 15 bp, Homo sapiens
gaaggaaagaatctt

SEQ ID NO: 1687631 - DNA, 15 bp, Homo sapiens
aaggaaagaatctta

SEQ ID NO: 1687632 - DNA, 15 bp, Homo sapiens
aggaaagaatcttaa

SEQ ID NO: 1687633 - DNA, 15 bp, Homo sapiens
ggaaagaatcttaag

SEQ ID NO: 1687634 - DNA, 15 bp, Homo sapiens
gaaagaatcttaaga

SEQ ID NO: 1687635 - DNA, 15 bp, Homo sapiens
aaagaatcttaagag

SEQ ID NO: 1687636 - DNA, 15 bp, Homo sapiens
aagaatcttaagagc

SEQ ID NO: 1687637 - DNA, 15 bp, Homo sapiens
agaatcttaagagct

SEQ ID NO: 1687638 - DNA, 15 bp, Homo sapiens
gaatcttaagagctg

SEQ ID NO: 1687639 - DNA, 15 bp, Homo sapiens
aatcttaagagctgt

SEQ ID NO: 1687640 - DNA, 15 bp, Homo sapiens
atcttaagagctgtg

SEQ ID NO: 1687641 - DNA, 15 bp, Homo sapiens
tcttaagagctgtga

SEQ ID NO: 1687642 - DNA, 15 bp, Homo sapiens
cttaagagctgtgag

SEQ ID NO: 1687643 - DNA, 15 bp, Homo sapiens
ttaagagctgtgagg

SEQ ID NO: 1687644 - DNA, 15 bp, Homo sapiens
taagagctgtgaggc

SEQ ID NO: 1687645 - DNA, 15 bp, Homo sapiens
aagagctgtgaggca

SEQ ID NO: 1687646 - DNA, 15 bp, Homo sapiens
agagctgtgaggcaa

SEQ ID NO: 1687647 - DNA, 15 bp, Homo sapiens
gagctgtgaggcaaa

SEQ ID NO: 1687648 - DNA, 15 bp, Homo sapiens
agctgtgaggcaaaa

SEQ ID NO: 1687649 - DNA, 15 bp, Homo sapiens
gctgtgaggcaaaag

SEQ ID NO: 1687650 - DNA, 15 bp, Homo sapiens
ctgtgaggcaaaagc

SEQ ID NO: 1687651 - DNA, 15 bp, Homo sapiens
tgtgaggcaaaagca

SEQ ID NO: 1687652 - DNA, 15 bp, Homo sapiens
gtgaggcaaaagcac

SEQ ID NO: 1687653 - DNA, 15 bp, Homo sapiens
tgaggcaaaagcacc

SEQ ID NO: 1687654 - DNA, 15 bp, Homo sapiens
gaggcaaaagcacca

SEQ ID NO: 1687655 - DNA, 15 bp, Homo sapiens
aggcaaaagcaccag

SEQ ID NO: 1687656 - DNA, 15 bp, Homo sapiens
ggcaaaagcaccagg

SEQ ID NO: 1687657 - DNA, 15 bp, Homo sapiens
gcaaaagcaccaggt

SEQ ID NO: 1687658 - DNA, 15 bp, Homo sapiens
caaaagcaccaggta

SEQ ID NO: 1687659 - DNA, 15 bp, Homo sapiens
aaaagcaccaggtaa

SEQ ID NO: 1687660 - DNA, 15 bp, Homo sapiens
aaagcaccaggtaac

SEQ ID NO: 1687661 - DNA, 15 bp, Homo sapiens
aagcaccaggtaacc

SEQ ID NO: 1687662 - DNA, 15 bp, Homo sapiens
agcaccaggtaacct

SEQ ID NO: 1687663 - DNA, 15 bp, Homo sapiens
gcaccaggtaaccta

SEQ ID NO: 1687664 - DNA, 15 bp, Homo sapiens
caccaggtaacctat

SEQ ID NO: 1687665 - DNA, 15 bp, Homo sapiens
accaggtaacctata

SEQ ID NO: 1687666 - DNA, 15 bp, Homo sapiens
ccaggtaacctataa

SEQ ID NO: 1687667 - DNA, 15 bp, Homo sapiens
caggtaacctataaa

SEQ ID NO: 1687668 - DNA, 15 bp, Homo sapiens
aggtaacctataaag

SEQ ID NO: 1687669 - DNA, 15 bp, Homo sapiens
ggtaacctataaagg

SEQ ID NO: 1687670 - DNA, 15 bp, Homo sapiens
gtaacctataaagga

SEQ ID NO: 1687671 - DNA, 15 bp, Homo sapiens
taacctataaaggaa

SEQ ID NO: 1687672 - DNA, 15 bp, Homo sapiens
aacctataaaggaaa

SEQ ID NO: 1687673 - DNA, 15 bp, Homo sapiens
acctataaaggaaaa

SEQ ID NO: 1687674 - DNA, 15 bp, Homo sapiens
cctataaaggaaaac

SEQ ID NO: 1687675 - DNA, 15 bp, Homo sapiens
ctataaaggaaaacc

SEQ ID NO: 1687676 - DNA, 15 bp, Homo sapiens
tataaaggaaaacct

SEQ ID NO: 1687677 - DNA, 15 bp, Homo sapiens
ataaaggaaaaccta

SEQ ID NO: 1687678 - DNA, 15 bp, Homo sapiens
taaaggaaaacctat

SEQ ID NO: 1687679 - DNA, 15 bp, Homo sapiens
aaaggaaaacctatc

SEQ ID NO: 1687680 - DNA, 15 bp, Homo sapiens
aaggaaaacctatca

SEQ ID NO: 1687681 - DNA, 15 bp, Homo sapiens
aggaaaacctatcag

SEQ ID NO: 1687682 - DNA, 15 bp, Homo sapiens
ggaaaacctatcaga

SEQ ID NO: 1687683 - DNA, 15 bp, Homo sapiens
gaaaacctatcagaa

SEQ ID NO: 1687684 - DNA, 15 bp, Homo sapiens
aaaacctatcagaat

SEQ ID NO: 1687685 - DNA, 15 bp, Homo sapiens
aaacctatcagaata

SEQ ID NO: 1687686 - DNA, 15 bp, Homo sapiens
aacctatcagaataa

SEQ ID NO: 1687687 - DNA, 15 bp, Homo sapiens
acctatcagaataaa

SEQ ID NO: 1687688 - DNA, 15 bp, Homo sapiens
cctatcagaataaaa

SEQ ID NO: 1687689 - DNA, 15 bp, Homo sapiens
ctatcagaataaaaa

SEQ ID NO: 1687690 - DNA, 15 bp, Homo sapiens
tatcagaataaaaac

SEQ ID NO: 1687691 - DNA, 15 bp, Homo sapiens
atcagaataaaaaca

SEQ ID NO: 1687692 - DNA, 15 bp, Homo sapiens
tcagaataaaaacag

SEQ ID NO: 1687693 - DNA, 15 bp, Homo sapiens
cagaataaaaacaga

SEQ ID NO: 1687694 - DNA, 15 bp, Homo sapiens
agaataaaaacagac

SEQ ID NO: 1687695 - DNA, 15 bp, Homo sapiens
gaataaaaacagact

SEQ ID NO: 1687696 - DNA, 15 bp, Homo sapiens
aataaaaacagactt

SEQ ID NO: 1687697 - DNA, 15 bp, Homo sapiens
ataaaaacagacttc

SEQ ID NO: 1687698 - DNA, 15 bp, Homo sapiens
taaaaacagacttct

SEQ ID NO: 1687699 - DNA, 15 bp, Homo sapiens
aaaaacagacttctc

SEQ ID NO: 1687700 - DNA, 15 bp, Homo sapiens
aaaacagacttctca

SEQ ID NO: 1687701 - DNA, 15 bp, Homo sapiens
aaacagacttctcag

SEQ ID NO: 1687702 - DNA, 15 bp, Homo sapiens
aacagacttctcagc

SEQ ID NO: 1687703 - DNA, 15 bp, Homo sapiens
acagacttctcagca

SEQ ID NO: 1687704 - DNA, 15 bp, Homo sapiens
cagacttctcagcag

SEQ ID NO: 1687705 - DNA, 15 bp, Homo sapiens
agacttctcagcaga

SEQ ID NO: 1687706 - DNA, 15 bp, Homo sapiens
gacttctcagcagaa

SEQ ID NO: 1687707 - DNA, 15 bp, Homo sapiens
acttctcagcagaaa

SEQ ID NO: 1687708 - DNA, 15 bp, Homo sapiens
cttctcagcagaaac

SEQ ID NO: 1687709 - DNA, 15 bp, Homo sapiens
ttctcagcagaaacc

SEQ ID NO: 1687710 - DNA, 15 bp, Homo sapiens
tctcagcagaaaccc

SEQ ID NO: 1687711 - DNA, 15 bp, Homo sapiens
ctcagcagaaaccct

SEQ ID NO: 1687712 - DNA, 15 bp, Homo sapiens
tcagcagaaacccta

SEQ ID NO: 1687713 - DNA, 15 bp, Homo sapiens
cagcagaaaccctac

SEQ ID NO: 1687714 - DNA, 15 bp, Homo sapiens
agcagaaaccctaca

SEQ ID NO: 1687715 - DNA, 15 bp, Homo sapiens
gcagaaaccctacaa

SEQ ID NO: 1687716 - DNA, 15 bp, Homo sapiens
cagaaaccctacaag

SEQ ID NO: 1687717 - DNA, 15 bp, Homo sapiens
agaaaccctacaagc

SEQ ID NO: 1687718 - DNA, 15 bp, Homo sapiens
gaaaccctacaagct

SEQ ID NO: 1687719 - DNA, 15 bp, Homo sapiens
aaaccctacaagcta

SEQ ID NO: 1687720 - DNA, 15 bp, Homo sapiens
aaccctacaagctag

SEQ ID NO: 1687721 - DNA, 15 bp, Homo sapiens
accctacaagctaga

SEQ ID NO: 1687722 - DNA, 15 bp, Homo sapiens
ccctacaagctagaa

SEQ ID NO: 1687723 - DNA, 15 bp, Homo sapiens
cctacaagctagaag

SEQ ID NO: 1687724 - DNA, 15 bp, Homo sapiens
ctacaagctagaagg

SEQ ID NO: 1687725 - DNA, 15 bp, Homo sapiens
tacaagctagaaggg

SEQ ID NO: 1687726 - DNA, 15 bp, Homo sapiens
acaagctagaaggga

SEQ ID NO: 1687727 - DNA, 15 bp, Homo sapiens
caagctagaagggat

SEQ ID NO: 1687728 - DNA, 15 bp, Homo sapiens
aagctagaagggatt

SEQ ID NO: 1687729 - DNA, 15 bp, Homo sapiens
agctagaagggattg

SEQ ID NO: 1687730 - DNA, 15 bp, Homo sapiens
gctagaagggattgg

SEQ ID NO: 1687731 - DNA, 15 bp, Homo sapiens
ctagaagggattggg

SEQ ID NO: 1687732 - DNA, 15 bp, Homo sapiens
tagaagggattgggg

SEQ ID NO: 1687733 - DNA, 15 bp, Homo sapiens
agaagggattggggt

SEQ ID NO: 1687734 - DNA, 15 bp, Homo sapiens
gaagggattggggtc

SEQ ID NO: 1687735 - DNA, 15 bp, Homo sapiens
aagggattggggtcc

SEQ ID NO: 1687736 - DNA, 15 bp, Homo sapiens
agggattggggtcct

SEQ ID NO: 1687737 - DNA, 15 bp, Homo sapiens
gggattggggtccta

SEQ ID NO: 1687738 - DNA, 15 bp, Homo sapiens
ggattggggtcctat

SEQ ID NO: 1687739 - DNA, 15 bp, Homo sapiens
gattggggtcctatt

SEQ ID NO: 1687740 - DNA, 15 bp, Homo sapiens
attggggtcctattt

SEQ ID NO: 1687741 - DNA, 15 bp, Homo sapiens
ttggggtcctatttt

SEQ ID NO: 1687742 - DNA, 15 bp, Homo sapiens
tggggtcctattttt

SEQ ID NO: 1687743 - DNA, 15 bp, Homo sapiens
ggggtcctattttta

SEQ ID NO: 1687744 - DNA, 15 bp, Homo sapiens
gggtcctatttttag

SEQ ID NO: 1687745 - DNA, 15 bp, Homo sapiens
ggtcctatttttagc

SEQ ID NO: 1687746 - DNA, 15 bp, Homo sapiens
gtcctatttttagcc

SEQ ID NO: 1687747 - DNA, 15 bp, Homo sapiens
tcctatttttagcct

SEQ ID NO: 1687748 - DNA, 15 bp, Homo sapiens
cctatttttagcctc

SEQ ID NO: 1687749 - DNA, 15 bp, Homo sapiens
ctatttttagcctca

SEQ ID NO: 1687750 - DNA, 15 bp, Homo sapiens
tatttttagcctcat

SEQ ID NO: 1687751 - DNA, 15 bp, Homo sapiens
atttttagcctcatt

SEQ ID NO: 1687752 - DNA, 15 bp, Homo sapiens
tttttagcctcatta

SEQ ID NO: 1687753 - DNA, 15 bp, Homo sapiens
ttttagcctcattaa

SEQ ID NO: 1687754 - DNA, 15 bp, Homo sapiens
tttagcctcattaac

SEQ ID NO: 1687755 - DNA, 15 bp, Homo sapiens
ttagcctcattaacc

SEQ ID NO: 1687756 - DNA, 15 bp, Homo sapiens
tagcctcattaacca

SEQ ID NO: 1687757 - DNA, 15 bp, Homo sapiens
agcctcattaaccaa

SEQ ID NO: 1687758 - DNA, 15 bp, Homo sapiens
gcctcattaaccaaa

SEQ ID NO: 1687759 - DNA, 15 bp, Homo sapiens
cctcattaaccaaaa

SEQ ID NO: 1687760 - DNA, 15 bp, Homo sapiens
ctcattaaccaaaac

SEQ ID NO: 1687761 - DNA, 15 bp, Homo sapiens
tcattaaccaaaaca

SEQ ID NO: 1687762 - DNA, 15 bp, Homo sapiens
cattaaccaaaacaa

SEQ ID NO: 1687763 - DNA, 15 bp, Homo sapiens
attaaccaaaacaat

SEQ ID NO: 1687764 - DNA, 15 bp, Homo sapiens
ttaaccaaaacaatt

SEQ ID NO: 1687765 - DNA, 15 bp, Homo sapiens
taaccaaaacaatta

SEQ ID NO: 1687766 - DNA, 15 bp, Homo sapiens
aaccaaaacaattat

SEQ ID NO: 1687767 - DNA, 15 bp, Homo sapiens
accaaaacaattatc

SEQ ID NO: 1687768 - DNA, 15 bp, Homo sapiens
ccaaaacaattatca

SEQ ID NO: 1687769 - DNA, 15 bp, Homo sapiens
caaaacaattatcag

SEQ ID NO: 1687770 - DNA, 15 bp, Homo sapiens
aaaacaattatcagc

SEQ ID NO: 1687771 - DNA, 15 bp, Homo sapiens
aaacaattatcagcc

SEQ ID NO: 1687772 - DNA, 15 bp, Homo sapiens
aacaattatcagcca

SEQ ID NO: 1687773 - DNA, 15 bp, Homo sapiens
acaattatcagccaa

SEQ ID NO: 1687774 - DNA, 15 bp, Homo sapiens
caattatcagccaag

SEQ ID NO: 1687775 - DNA, 15 bp, Homo sapiens
aattatcagccaaga

SEQ ID NO: 1687776 - DNA, 15 bp, Homo sapiens
attatcagccaagaa

SEQ ID NO: 1687777 - DNA, 15 bp, Homo sapiens
ttatcagccaagaat

SEQ ID NO: 1687778 - DNA, 15 bp, Homo sapiens
tatcagccaagaatt

SEQ ID NO: 1687779 - DNA, 15 bp, Homo sapiens
atcagccaagaattt

SEQ ID NO: 1687780 - DNA, 15 bp, Homo sapiens
tcagccaagaatttt

SEQ ID NO: 1687781 - DNA, 15 bp, Homo sapiens
cagccaagaattttg

SEQ ID NO: 1687782 - DNA, 15 bp, Homo sapiens
agccaagaattttgt

SEQ ID NO: 1687783 - DNA, 15 bp, Homo sapiens
gccaagaattttgta

SEQ ID NO: 1687784 - DNA, 15 bp, Homo sapiens
ccaagaattttgtat

SEQ ID NO: 1687785 - DNA, 15 bp, Homo sapiens
caagaattttgtatc

SEQ ID NO: 1687786 - DNA, 15 bp, Homo sapiens
aagaattttgtatcc

SEQ ID NO: 1687787 - DNA, 15 bp, Homo sapiens
agaattttgtatcca

SEQ ID NO: 1687788 - DNA, 15 bp, Homo sapiens
gaattttgtatccaa

SEQ ID NO: 1687789 - DNA, 15 bp, Homo sapiens
aattttgtatccaat

SEQ ID NO: 1687790 - DNA, 15 bp, Homo sapiens
attttgtatccaatg

SEQ ID NO: 1687791 - DNA, 15 bp, Homo sapiens
ttttgtatccaatgg

SEQ ID NO: 1687792 - DNA, 15 bp, Homo sapiens
tttgtatccaatggc

SEQ ID NO: 1687793 - DNA, 15 bp, Homo sapiens
ttgtatccaatggca

SEQ ID NO: 1687794 - DNA, 15 bp, Homo sapiens
tgtatccaatggcac

SEQ ID NO: 1687795 - DNA, 15 bp, Homo sapiens
gtatccaatggcact

SEQ ID NO: 1687796 - DNA, 15 bp, Homo sapiens
tatccaatggcactt

SEQ ID NO: 1687797 - DNA, 15 bp, Homo sapiens
atccaatggcactta

SEQ ID NO: 1687798 - DNA, 15 bp, Homo sapiens
tccaatggcacttaa

SEQ ID NO: 1687799 - DNA, 15 bp, Homo sapiens
ccaatggcacttaac

SEQ ID NO: 1687800 - DNA, 15 bp, Homo sapiens
caatggcacttaact

SEQ ID NO: 1687801 - DNA, 15 bp, Homo sapiens
aatggcacttaactt

SEQ ID NO: 1687802 - DNA, 15 bp, Homo sapiens
atggcacttaacttc

SEQ ID NO: 1687803 - DNA, 15 bp, Homo sapiens
tggcacttaacttca

SEQ ID NO: 1687804 - DNA, 15 bp, Homo sapiens
ggcacttaacttcat

SEQ ID NO: 1687805 - DNA, 15 bp, Homo sapiens
gcacttaacttcata

SEQ ID NO: 1687806 - DNA, 15 bp, Homo sapiens
cacttaacttcataa

SEQ ID NO: 1687807 - DNA, 15 bp, Homo sapiens
acttaacttcataaa

SEQ ID NO: 1687808 - DNA, 15 bp, Homo sapiens
cttaacttcataaat

SEQ ID NO: 1687809 - DNA, 15 bp, Homo sapiens
ttaacttcataaatg

SEQ ID NO: 1687810 - DNA, 15 bp, Homo sapiens
taacttcataaatga

SEQ ID NO: 1687811 - DNA, 15 bp, Homo sapiens
aacttcataaatgaa

SEQ ID NO: 1687812 - DNA, 15 bp, Homo sapiens
acttcataaatgaag

SEQ ID NO: 1687813 - DNA, 15 bp, Homo sapiens
cttcataaatgaagg

SEQ ID NO: 1687814 - DNA, 15 bp, Homo sapiens
ttcataaatgaagga

SEQ ID NO: 1687815 - DNA, 15 bp, Homo sapiens
tcataaatgaaggaa

SEQ ID NO: 1687816 - DNA, 15 bp, Homo sapiens
cataaatgaaggaaa

SEQ ID NO: 1687817 - DNA, 15 bp, Homo sapiens
ataaatgaaggaaag

SEQ ID NO: 1687818 - DNA, 15 bp, Homo sapiens
taaatgaaggaaaga

SEQ ID NO: 1687819 - DNA, 15 bp, Homo sapiens
aaatgaaggaaagat

SEQ ID NO: 1687820 - DNA, 15 bp, Homo sapiens
aatgaaggaaagata

SEQ ID NO: 1687821 - DNA, 15 bp, Homo sapiens
atgaaggaaagatat

SEQ ID NO: 1687822 - DNA, 15 bp, Homo sapiens
tgaaggaaagatata

SEQ ID NO: 1687823 - DNA, 15 bp, Homo sapiens
gaaggaaagatatag

SEQ ID NO: 1687824 - DNA, 15 bp, Homo sapiens
aaggaaagatatagt

SEQ ID NO: 1687825 - DNA, 15 bp, Homo sapiens
aggaaagatatagtc

SEQ ID NO: 1687826 - DNA, 15 bp, Homo sapiens
ggaaagatatagtct

SEQ ID NO: 1687827 - DNA, 15 bp, Homo sapiens
gaaagatatagtctt

SEQ ID NO: 1687828 - DNA, 15 bp, Homo sapiens
aaagatatagtcttt

SEQ ID NO: 1687829 - DNA, 15 bp, Homo sapiens
aagatatagtctttt

SEQ ID NO: 1687830 - DNA, 15 bp, Homo sapiens
agatatagtcttttc

SEQ ID NO: 1687831 - DNA, 15 bp, Homo sapiens
gatatagtcttttcc

SEQ ID NO: 1687832 - DNA, 15 bp, Homo sapiens
atatagtcttttcca

SEQ ID NO: 1687833 - DNA, 15 bp, Homo sapiens
tatagtcttttccag

SEQ ID NO: 1687834 - DNA, 15 bp, Homo sapiens
atagtcttttccaga

SEQ ID NO: 1687835 - DNA, 15 bp, Homo sapiens
tagtcttttccagac

SEQ ID NO: 1687836 - DNA, 15 bp, Homo sapiens
agtcttttccagaca

SEQ ID NO: 1687837 - DNA, 15 bp, Homo sapiens
gtcttttccagacaa

SEQ ID NO: 1687838 - DNA, 15 bp, Homo sapiens
tcttttccagacaaa

SEQ ID NO: 1687839 - DNA, 15 bp, Homo sapiens
cttttccagacaaac

SEQ ID NO: 1687840 - DNA, 15 bp, Homo sapiens
ttttccagacaaaca

SEQ ID NO: 1687841 - DNA, 15 bp, Homo sapiens
tttccagacaaacaa

SEQ ID NO: 1687842 - DNA, 15 bp, Homo sapiens
ttccagacaaacaaa

SEQ ID NO: 1687843 - DNA, 15 bp, Homo sapiens
tccagacaaacaaat

SEQ ID NO: 1687844 - DNA, 15 bp, Homo sapiens
ccagacaaacaaatg

SEQ ID NO: 1687845 - DNA, 15 bp, Homo sapiens
cagacaaacaaatgc

SEQ ID NO: 1687846 - DNA, 15 bp, Homo sapiens
agacaaacaaatgct

SEQ ID NO: 1687847 - DNA, 15 bp, Homo sapiens
gacaaacaaatgctg

SEQ ID NO: 1687848 - DNA, 15 bp, Homo sapiens
acaaacaaatgctga

SEQ ID NO: 1687849 - DNA, 15 bp, Homo sapiens
caaacaaatgctgag

SEQ ID NO: 1687850 - DNA, 15 bp, Homo sapiens
aaacaaatgctgagg

SEQ ID NO: 1687851 - DNA, 15 bp, Homo sapiens
aacaaatgctgaggg

SEQ ID NO: 1687852 - DNA, 15 bp, Homo sapiens
acaaatgctgaggga

SEQ ID NO: 1687853 - DNA, 15 bp, Homo sapiens
caaatgctgagggaa

SEQ ID NO: 1687854 - DNA, 15 bp, Homo sapiens
aaatgctgagggaac

SEQ ID NO: 1687855 - DNA, 15 bp, Homo sapiens
aatgctgagggaact

SEQ ID NO: 1687856 - DNA, 15 bp, Homo sapiens
atgctgagggaactt

SEQ ID NO: 1687857 - DNA, 15 bp, Homo sapiens
tgctgagggaacttg

SEQ ID NO: 1687858 - DNA, 15 bp, Homo sapiens
gctgagggaacttgc

SEQ ID NO: 1687859 - DNA, 15 bp, Homo sapiens
ctgagggaacttgcc

SEQ ID NO: 1687860 - DNA, 15 bp, Homo sapiens
tgagggaacttgcca

SEQ ID NO: 1687861 - DNA, 15 bp, Homo sapiens
gagggaacttgccac

SEQ ID NO: 1687862 - DNA, 15 bp, Homo sapiens
agggaacttgccact

SEQ ID NO: 1687863 - DNA, 15 bp, Homo sapiens
gggaacttgccacta

SEQ ID NO: 1687864 - DNA, 15 bp, Homo sapiens
ggaacttgccactac

SEQ ID NO: 1687865 - DNA, 15 bp, Homo sapiens
gaacttgccactacc

SEQ ID NO: 1687866 - DNA, 15 bp, Homo sapiens
aacttgccactacca

SEQ ID NO: 1687867 - DNA, 15 bp, Homo sapiens
acttgccactaccaa

SEQ ID NO: 1687868 - DNA, 15 bp, Homo sapiens
cttgccactaccaag

SEQ ID NO: 1687869 - DNA, 15 bp, Homo sapiens
ttgccactaccaagc

SEQ ID NO: 1687870 - DNA, 15 bp, Homo sapiens
tgccactaccaagca

SEQ ID NO: 1687871 - DNA, 15 bp, Homo sapiens
gccactaccaagcaa

SEQ ID NO: 1687872 - DNA, 15 bp, Homo sapiens
ccactaccaagcaaa

SEQ ID NO: 1687873 - DNA, 15 bp, Homo sapiens
cactaccaagcaaat

SEQ ID NO: 1687874 - DNA, 15 bp, Homo sapiens
actaccaagcaaatc

SEQ ID NO: 1687875 - DNA, 15 bp, Homo sapiens
ctaccaagcaaatca

SEQ ID NO: 1687876 - DNA, 15 bp, Homo sapiens
taccaagcaaatcag

SEQ ID NO: 1687877 - DNA, 15 bp, Homo sapiens
accaagcaaatcagg

SEQ ID NO: 1687878 - DNA, 15 bp, Homo sapiens
ccaagcaaatcaggg

SEQ ID NO: 1687879 - DNA, 15 bp, Homo sapiens
caagcaaatcaggga

SEQ ID NO: 1687880 - DNA, 15 bp, Homo sapiens
aagcaaatcagggaa

SEQ ID NO: 1687881 - DNA, 15 bp, Homo sapiens
agcaaatcagggaaa

SEQ ID NO: 1687882 - DNA, 15 bp, Homo sapiens
gcaaatcagggaaat

SEQ ID NO: 1687883 - DNA, 15 bp, Homo sapiens
caaatcagggaaatg

SEQ ID NO: 1687884 - DNA, 15 bp, Homo sapiens
aaatcagggaaatgc

SEQ ID NO: 1687885 - DNA, 15 bp, Homo sapiens
aatcagggaaatgca

SEQ ID NO: 1687886 - DNA, 15 bp, Homo sapiens
agggaaatgcaaatc

SEQ ID NO: 1687887 - DNA, 15 bp, Homo sapiens
gggaaatgcaaatca

SEQ ID NO: 1687888 - DNA, 15 bp, Homo sapiens
ggaaatgcaaatcaa

SEQ ID NO: 1687889 - DNA, 15 bp, Homo sapiens
aaatcaaaaccacag

SEQ ID NO: 1687890 - DNA, 15 bp, Homo sapiens
aatcaaaaccacagt

SEQ ID NO: 1687891 - DNA, 15 bp, Homo sapiens
atcaaaaccacagtg

SEQ ID NO: 1687892 - DNA, 15 bp, Homo sapiens
tcaaaaccacagtgt

SEQ ID NO: 1687893 - DNA, 15 bp, Homo sapiens
caaaaccacagtgtg

SEQ ID NO: 1687894 - DNA, 15 bp, Homo sapiens
aaaaccacagtgtgt

SEQ ID NO: 1687895 - DNA, 15 bp, Homo sapiens
aaaccacagtgtgtt

SEQ ID NO: 1687896 - DNA, 15 bp, Homo sapiens
aaccacagtgtgtta

SEQ ID NO: 1687897 - DNA, 15 bp, Homo sapiens
accacagtgtgttat

SEQ ID NO: 1687898 - DNA, 15 bp, Homo sapiens
ccacagtgtgttatc

SEQ ID NO: 1687899 - DNA, 15 bp, Homo sapiens
cacagtgtgttatca

SEQ ID NO: 1687900 - DNA, 15 bp, Homo sapiens
acagtgtgttatcat

SEQ ID NO: 1687901 - DNA, 15 bp, Homo sapiens
cagtgtgttatcatc

SEQ ID NO: 1687902 - DNA, 15 bp, Homo sapiens
agtgtgttatcatct

SEQ ID NO: 1687903 - DNA, 15 bp, Homo sapiens
gtgtgttatcatctc

SEQ ID NO: 1687904 - DNA, 15 bp, Homo sapiens
tgtgttatcatctca

SEQ ID NO: 1687905 - DNA, 15 bp, Homo sapiens
gtgttatcatctcac

SEQ ID NO: 1687906 - DNA, 15 bp, Homo sapiens
tgttatcatctcact

SEQ ID NO: 1687907 - DNA, 15 bp, Homo sapiens
gttatcatctcactc

SEQ ID NO: 1687908 - DNA, 15 bp, Homo sapiens
ttatcatctcactcc

SEQ ID NO: 1687909 - DNA, 15 bp, Homo sapiens
tatcatctcactcct

SEQ ID NO: 1687910 - DNA, 15 bp, Homo sapiens
atcatctcactcctg

SEQ ID NO: 1687911 - DNA, 15 bp, Homo sapiens
tcatctcactcctgc

SEQ ID NO: 1687912 - DNA, 15 bp, Homo sapiens
catctcactcctgca

SEQ ID NO: 1687913 - DNA, 15 bp, Homo sapiens
atctcactcctgcaa

SEQ ID NO: 1687914 - DNA, 15 bp, Homo sapiens
tctcactcctgcaag

SEQ ID NO: 1687915 - DNA, 15 bp, Homo sapiens
ctcactcctgcaaga

SEQ ID NO: 1687916 - DNA, 15 bp, Homo sapiens
tcactcctgcaagaa

SEQ ID NO: 1687917 - DNA, 15 bp, Homo sapiens
cactcctgcaagaat

SEQ ID NO: 1687918 - DNA, 15 bp, Homo sapiens
cctgcaagaatggct

SEQ ID NO: 1687919 - DNA, 15 bp, Homo sapiens
ctgcaagaatggcta

SEQ ID NO: 1687920 - DNA, 15 bp, Homo sapiens
tgcaagaatggctat

SEQ ID NO: 1687921 - DNA, 15 bp, Homo sapiens
gcaagaatggctata

SEQ ID NO: 1687922 - DNA, 15 bp, Homo sapiens
caagaatggctataa

SEQ ID NO: 1687923 - DNA, 15 bp, Homo sapiens
aagaatggctataat

SEQ ID NO: 1687924 - DNA, 15 bp, Homo sapiens
agaatggctataatc

SEQ ID NO: 1687925 - DNA, 15 bp, Homo sapiens
gaatggctataatca

SEQ ID NO: 1687926 - DNA, 15 bp, Homo sapiens
aatggctataatcaa

SEQ ID NO: 1687927 - DNA, 15 bp, Homo sapiens
atggctataatcaaa

SEQ ID NO: 1687928 - DNA, 15 bp, Homo sapiens
tggctataatcaaaa

SEQ ID NO: 1687929 - DNA, 15 bp, Homo sapiens
ggctataatcaaaaa

SEQ ID NO: 1687930 - DNA, 15 bp, Homo sapiens
gctataatcaaaaaa

SEQ ID NO: 1687931 - DNA, 15 bp, Homo sapiens
ctataatcaaaaaat

SEQ ID NO: 1687932 - DNA, 15 bp, Homo sapiens
tataatcaaaaaatc

SEQ ID NO: 1687933 - DNA, 15 bp, Homo sapiens
ataatcaaaaaatca

SEQ ID NO: 1687934 - DNA, 15 bp, Homo sapiens
taatcaaaaaatcaa

SEQ ID NO: 1687935 - DNA, 15 bp, Homo sapiens
aatcaaaaaatcaaa

SEQ ID NO: 1687936 - DNA, 15 bp, Homo sapiens
atcaaaaaatcaaaa

SEQ ID NO: 1687937 - DNA, 15 bp, Homo sapiens
tcaaaaaatcaaaaa

SEQ ID NO: 1687938 - DNA, 15 bp, Homo sapiens
caaaaaatcaaaaaa

SEQ ID NO: 1687939 - DNA, 15 bp, Homo sapiens
aaaaaatcaaaaaag

SEQ ID NO: 1687940 - DNA, 15 bp, Homo sapiens
aaaaatcaaaaaaga

SEQ ID NO: 1687941 - DNA, 15 bp, Homo sapiens
aaaatcaaaaaagaa

SEQ ID NO: 1687942 - DNA, 15 bp, Homo sapiens
aaatcaaaaaagaat

SEQ ID NO: 1687943 - DNA, 15 bp, Homo sapiens
aatcaaaaaagaata

SEQ ID NO: 1687944 - DNA, 15 bp, Homo sapiens
atcaaaaaagaatag

SEQ ID NO: 1687945 - DNA, 15 bp, Homo sapiens
tcaaaaaagaataga

SEQ ID NO: 1687946 - DNA, 15 bp, Homo sapiens
caaaaaagaatagat

SEQ ID NO: 1687947 - DNA, 15 bp, Homo sapiens
aaaaaagaatagatg

SEQ ID NO: 1687948 - DNA, 15 bp, Homo sapiens
aaaaagaatagatgt

SEQ ID NO: 1687949 - DNA, 15 bp, Homo sapiens
aaaagaatagatgtt

SEQ ID NO: 1687950 - DNA, 15 bp, Homo sapiens
aaagaatagatgttg

SEQ ID NO: 1687951 - DNA, 15 bp, Homo sapiens
aagaatagatgttgg

SEQ ID NO: 1687952 - DNA, 15 bp, Homo sapiens
agaatagatgttggc

SEQ ID NO: 1687953 - DNA, 15 bp, Homo sapiens
gaatagatgttggca

SEQ ID NO: 1687954 - DNA, 15 bp, Homo sapiens
aatagatgttggcat

SEQ ID NO: 1687955 - DNA, 15 bp, Homo sapiens
atagatgttggcatg

SEQ ID NO: 1687956 - DNA, 15 bp, Homo sapiens
tagatgttggcatga

SEQ ID NO: 1687957 - DNA, 15 bp, Homo sapiens
agatgttggcatgaa

SEQ ID NO: 1687958 - DNA, 15 bp, Homo sapiens
gatgttggcatgaat

SEQ ID NO: 1687959 - DNA, 15 bp, Homo sapiens
atgttggcatgaatg

SEQ ID NO: 1687960 - DNA, 15 bp, Homo sapiens
tgttggcatgaatgt

SEQ ID NO: 1687961 - DNA, 15 bp, Homo sapiens
gttggcatgaatgtg

SEQ ID NO: 1687962 - DNA, 15 bp, Homo sapiens
ttggcatgaatgtgg

SEQ ID NO: 1687963 - DNA, 15 bp, Homo sapiens
tggcatgaatgtggt

SEQ ID NO: 1687964 - DNA, 15 bp, Homo sapiens
ggcatgaatgtggtg

SEQ ID NO: 1687965 - DNA, 15 bp, Homo sapiens
gcatgaatgtggtga

SEQ ID NO: 1687966 - DNA, 15 bp, Homo sapiens
catgaatgtggtgaa

SEQ ID NO: 1687967 - DNA, 15 bp, Homo sapiens
atgaatgtggtgaaa

SEQ ID NO: 1687968 - DNA, 15 bp, Homo sapiens
tgaatgtggtgaaaa

SEQ ID NO: 1687969 - DNA, 15 bp, Homo sapiens
gaatgtggtgaaaag

SEQ ID NO: 1687970 - DNA, 15 bp, Homo sapiens
aatgtggtgaaaagg

SEQ ID NO: 1687971 - DNA, 15 bp, Homo sapiens
atgtggtgaaaaggg

SEQ ID NO: 1687972 - DNA, 15 bp, Homo sapiens
tgtggtgaaaaggga

SEQ ID NO: 1687973 - DNA, 15 bp, Homo sapiens
gtggtgaaaagggaa

SEQ ID NO: 1687974 - DNA, 15 bp, Homo sapiens
tggtgaaaagggaac

SEQ ID NO: 1687975 - DNA, 15 bp, Homo sapiens
ggtgaaaagggaaca

SEQ ID NO: 1687976 - DNA, 15 bp, Homo sapiens
gtgaaaagggaacac

SEQ ID NO: 1687977 - DNA, 15 bp, Homo sapiens
tgaaaagggaacact

SEQ ID NO: 1687978 - DNA, 15 bp, Homo sapiens
gaaaagggaacactt

SEQ ID NO: 1687979 - DNA, 15 bp, Homo sapiens
aaaagggaacacttt

SEQ ID NO: 1687980 - DNA, 15 bp, Homo sapiens
aaagggaacactttt

SEQ ID NO: 1687981 - DNA, 15 bp, Homo sapiens
aagggaacactttta

SEQ ID NO: 1687982 - DNA, 15 bp, Homo sapiens
agggaacacttttac

SEQ ID NO: 1687983 - DNA, 15 bp, Homo sapiens
gggaacacttttaca

SEQ ID NO: 1687984 - DNA, 15 bp, Homo sapiens
ggaacacttttacac

SEQ ID NO: 1687985 - DNA, 15 bp, Homo sapiens
gaacacttttacacc

SEQ ID NO: 1687986 - DNA, 15 bp, Homo sapiens
aacacttttacacca

SEQ ID NO: 1687987 - DNA, 15 bp, Homo sapiens
acacttttacaccat

SEQ ID NO: 1687988 - DNA, 15 bp, Homo sapiens
cacttttacaccatt

SEQ ID NO: 1687989 - DNA, 15 bp, Homo sapiens
acttttacaccattg

SEQ ID NO: 1687990 - DNA, 15 bp, Homo sapiens
cttttacaccattgg

SEQ ID NO: 1687991 - DNA, 15 bp, Homo sapiens
ttttacaccattggt

SEQ ID NO: 1687992 - DNA, 15 bp, Homo sapiens
tttacaccattggtg

SEQ ID NO: 1687993 - DNA, 15 bp, Homo sapiens
ttacaccattggtgg

SEQ ID NO: 1687994 - DNA, 15 bp, Homo sapiens
tacaccattggtggg

SEQ ID NO: 1687995 - DNA, 15 bp, Homo sapiens
acaccattggtggga

SEQ ID NO: 1687996 - DNA, 15 bp, Homo sapiens
caccattggtgggaa

SEQ ID NO: 1687997 - DNA, 15 bp, Homo sapiens
accattggtgggaat

SEQ ID NO: 1687998 - DNA, 15 bp, Homo sapiens
ccattggtgggaatg

SEQ ID NO: 1687999 - DNA, 15 bp, Homo sapiens
cattggtgggaatgt

SEQ ID NO: 1688000 - DNA, 15 bp, Homo sapiens
attggtgggaatgta

SEQ ID NO: 1688001 - DNA, 15 bp, Homo sapiens
ttggtgggaatgtaa

SEQ ID NO: 1688002 - DNA, 15 bp, Homo sapiens
ggtgggaatgtaaac

SEQ ID NO: 1688003 - DNA, 15 bp, Homo sapiens
gtgggaatgtaaact

SEQ ID NO: 1688004 - DNA, 15 bp, Homo sapiens
tgggaatgtaaacta

SEQ ID NO: 1688005 - DNA, 15 bp, Homo sapiens
gggaatgtaaactag

SEQ ID NO: 1688006 - DNA, 15 bp, Homo sapiens
ggaatgtaaactagt

SEQ ID NO: 1688007 - DNA, 15 bp, Homo sapiens
gaatgtaaactagta

SEQ ID NO: 1688008 - DNA, 15 bp, Homo sapiens
aatgtaaactagtac

SEQ ID NO: 1688009 - DNA, 15 bp, Homo sapiens
atgtaaactagtaca

SEQ ID NO: 1688010 - DNA, 15 bp, Homo sapiens
tgtaaactagtacaa

SEQ ID NO: 1688011 - DNA, 15 bp, Homo sapiens
gtaaactagtacaac

SEQ ID NO: 1688012 - DNA, 15 bp, Homo sapiens
taaactagtacaacc

SEQ ID NO: 1688013 - DNA, 15 bp, Homo sapiens
aaactagtacaacca

SEQ ID NO: 1688014 - DNA, 15 bp, Homo sapiens
aactagtacaaccac

SEQ ID NO: 1688015 - DNA, 15 bp, Homo sapiens
actagtacaaccact

SEQ ID NO: 1688016 - DNA, 15 bp, Homo sapiens
ctagtacaaccacta

SEQ ID NO: 1688017 - DNA, 15 bp, Homo sapiens
tagtacaaccactat

SEQ ID NO: 1688018 - DNA, 15 bp, Homo sapiens
agtacaaccactatg

SEQ ID NO: 1688019 - DNA, 15 bp, Homo sapiens
gtacaaccactatgg

SEQ ID NO: 1688020 - DNA, 15 bp, Homo sapiens
tacaaccactatgga

SEQ ID NO: 1688021 - DNA, 15 bp, Homo sapiens
acaaccactatggaa

SEQ ID NO: 1688022 - DNA, 15 bp, Homo sapiens
caaccactatggaaa

SEQ ID NO: 1688023 - DNA, 15 bp, Homo sapiens
aaccactatggaaaa

SEQ ID NO: 1688024 - DNA, 15 bp, Homo sapiens
accactatggaaaac

SEQ ID NO: 1688025 - DNA, 15 bp, Homo sapiens
ccactatggaaaaca

SEQ ID NO: 1688026 - DNA, 15 bp, Homo sapiens
cactatggaaaacag

SEQ ID NO: 1688027 - DNA, 15 bp, Homo sapiens
actatggaaaacagt

SEQ ID NO: 1688028 - DNA, 15 bp, Homo sapiens
tggaaaacagtgtgt

SEQ ID NO: 1688029 - DNA, 15 bp, Homo sapiens
ggaaaacagtgtgtg

SEQ ID NO: 1688030 - DNA, 15 bp, Homo sapiens
gaaaacagtgtgtga

SEQ ID NO: 1688031 - DNA, 15 bp, Homo sapiens
aaaacagtgtgtgat

SEQ ID NO: 1688032 - DNA, 15 bp, Homo sapiens
aaacagtgtgtgatt

SEQ ID NO: 1688033 - DNA, 15 bp, Homo sapiens
aacagtgtgtgattc

SEQ ID NO: 1688034 - DNA, 15 bp, Homo sapiens
acagtgtgtgattcc

SEQ ID NO: 1688035 - DNA, 15 bp, Homo sapiens
cagtgtgtgattcct

SEQ ID NO: 1688036 - DNA, 15 bp, Homo sapiens
agtgtgtgattcctt

SEQ ID NO: 1688037 - DNA, 15 bp, Homo sapiens
gtgtgtgattcctta

SEQ ID NO: 1688038 - DNA, 15 bp, Homo sapiens
tgtgtgattccttaa

SEQ ID NO: 1688039 - DNA, 15 bp, Homo sapiens
gtgtgattccttaaa

SEQ ID NO: 1688040 - DNA, 15 bp, Homo sapiens
tgtgattccttaaag

SEQ ID NO: 1688041 - DNA, 15 bp, Homo sapiens
gtgattccttaaaga

SEQ ID NO: 1688042 - DNA, 15 bp, Homo sapiens
tgattccttaaagaa

SEQ ID NO: 1688043 - DNA, 15 bp, Homo sapiens
gattccttaaagaag

SEQ ID NO: 1688044 - DNA, 15 bp, Homo sapiens
attccttaaagaagt

SEQ ID NO: 1688045 - DNA, 15 bp, Homo sapiens
ttccttaaagaagta

SEQ ID NO: 1688046 - DNA, 15 bp, Homo sapiens
tccttaaagaagtaa

SEQ ID NO: 1688047 - DNA, 15 bp, Homo sapiens
ccttaaagaagtaaa

SEQ ID NO: 1688048 - DNA, 15 bp, Homo sapiens
cttaaagaagtaaac

SEQ ID NO: 1688049 - DNA, 15 bp, Homo sapiens
ttaaagaagtaaacg

SEQ ID NO: 1688050 - DNA, 15 bp, Homo sapiens
taaagaagtaaacgt

SEQ ID NO: 1688051 - DNA, 15 bp, Homo sapiens
aaagaagtaaacgta

SEQ ID NO: 1688052 - DNA, 15 bp, Homo sapiens
aagaagtaaacgtag

SEQ ID NO: 1688053 - DNA, 15 bp, Homo sapiens
agaagtaaacgtaga

SEQ ID NO: 1688054 - DNA, 15 bp, Homo sapiens
gaagtaaacgtagat

SEQ ID NO: 1688055 - DNA, 15 bp, Homo sapiens
aagtaaacgtagatc

SEQ ID NO: 1688056 - DNA, 15 bp, Homo sapiens
agtaaacgtagatct

SEQ ID NO: 1688057 - DNA, 15 bp, Homo sapiens
gtaaacgtagatcta

SEQ ID NO: 1688058 - DNA, 15 bp, Homo sapiens
taaacgtagatctac

SEQ ID NO: 1688059 - DNA, 15 bp, Homo sapiens
aaacgtagatctacc

SEQ ID NO: 1688060 - DNA, 15 bp, Homo sapiens
aacgtagatctaccg

SEQ ID NO: 1688061 - DNA, 15 bp, Homo sapiens
acgtagatctaccgt

SEQ ID NO: 1688062 - DNA, 15 bp, Homo sapiens
cgtagatctaccgtt

SEQ ID NO: 1688063 - DNA, 15 bp, Homo sapiens
gtagatctaccgttt

SEQ ID NO: 1688064 - DNA, 15 bp, Homo sapiens
tagatctaccgtttg

SEQ ID NO: 1688065 - DNA, 15 bp, Homo sapiens
agatctaccgtttga

SEQ ID NO: 1688066 - DNA, 15 bp, Homo sapiens
gatctaccgtttgat

SEQ ID NO: 1688067 - DNA, 15 bp, Homo sapiens
atctaccgtttgatc

SEQ ID NO: 1688068 - DNA, 15 bp, Homo sapiens
tctaccgtttgatcc

SEQ ID NO: 1688069 - DNA, 15 bp, Homo sapiens
ctaccgtttgatcca

SEQ ID NO: 1688070 - DNA, 15 bp, Homo sapiens
taccgtttgatccag

SEQ ID NO: 1688071 - DNA, 15 bp, Homo sapiens
accgtttgatccagt

SEQ ID NO: 1688072 - DNA, 15 bp, Homo sapiens
ccgtttgatccagta

SEQ ID NO: 1688073 - DNA, 15 bp, Homo sapiens
cgtttgatccagtaa

SEQ ID NO: 1688074 - DNA, 15 bp, Homo sapiens
gtttgatccagtaat

SEQ ID NO: 1688075 - DNA, 15 bp, Homo sapiens
tttgatccagtaatc

SEQ ID NO: 1688076 - DNA, 15 bp, Homo sapiens
ttgatccagtaatcc

SEQ ID NO: 1688077 - DNA, 15 bp, Homo sapiens
tgatccagtaatccc

SEQ ID NO: 1688078 - DNA, 15 bp, Homo sapiens
gatccagtaatccca

SEQ ID NO: 1688079 - DNA, 15 bp, Homo sapiens
atccagtaatcccac

SEQ ID NO: 1688080 - DNA, 15 bp, Homo sapiens
tccagtaatcccact

SEQ ID NO: 1688081 - DNA, 15 bp, Homo sapiens
ccagtaatcccacta

SEQ ID NO: 1688082 - DNA, 15 bp, Homo sapiens
cagtaatcccactac

SEQ ID NO: 1688083 - DNA, 15 bp, Homo sapiens
agtaatcccactact

SEQ ID NO: 1688084 - DNA, 15 bp, Homo sapiens
gtaatcccactacta

SEQ ID NO: 1688085 - DNA, 15 bp, Homo sapiens
taatcccactactat

SEQ ID NO: 1688086 - DNA, 15 bp, Homo sapiens
aatcccactactatt

SEQ ID NO: 1688087 - DNA, 15 bp, Homo sapiens
atcccactactatta

SEQ ID NO: 1688088 - DNA, 15 bp, Homo sapiens
tcccactactattaa

SEQ ID NO: 1688089 - DNA, 15 bp, Homo sapiens
cccactactattaat

SEQ ID NO: 1688090 - DNA, 15 bp, Homo sapiens
ccactactattaata

SEQ ID NO: 1688091 - DNA, 15 bp, Homo sapiens
cactactattaatag

SEQ ID NO: 1688092 - DNA, 15 bp, Homo sapiens
actactattaatagg

SEQ ID NO: 1688093 - DNA, 15 bp, Homo sapiens
ctactattaataggc

SEQ ID NO: 1688094 - DNA, 15 bp, Homo sapiens
tactattaataggca

SEQ ID NO: 1688095 - DNA, 15 bp, Homo sapiens
ctattaataggcatg

SEQ ID NO: 1688096 - DNA, 15 bp, Homo sapiens
tattaataggcatgt

SEQ ID NO: 1688097 - DNA, 15 bp, Homo sapiens
attaataggcatgta

SEQ ID NO: 1688098 - DNA, 15 bp, Homo sapiens
ttaataggcatgtac

SEQ ID NO: 1688099 - DNA, 15 bp, Homo sapiens
taataggcatgtacc

SEQ ID NO: 1688100 - DNA, 15 bp, Homo sapiens
aataggcatgtaccc

SEQ ID NO: 1688101 - DNA, 15 bp, Homo sapiens
ataggcatgtaccca

SEQ ID NO: 1688102 - DNA, 15 bp, Homo sapiens
taggcatgtacccag

SEQ ID NO: 1688103 - DNA, 15 bp, Homo sapiens
aggcatgtacccaga

SEQ ID NO: 1688104 - DNA, 15 bp, Homo sapiens
ggcatgtacccagag

SEQ ID NO: 1688105 - DNA, 15 bp, Homo sapiens
gcatgtacccagagg

SEQ ID NO: 1688106 - DNA, 15 bp, Homo sapiens
catgtacccagagga

SEQ ID NO: 1688107 - DNA, 15 bp, Homo sapiens
atgtacccagaggaa

SEQ ID NO: 1688108 - DNA, 15 bp, Homo sapiens
tgtacccagaggaaa

SEQ ID NO: 1688109 - DNA, 15 bp, Homo sapiens
gtacccagaggaaaa

SEQ ID NO: 1688110 - DNA, 15 bp, Homo sapiens
tacccagaggaaaat

SEQ ID NO: 1688111 - DNA, 15 bp, Homo sapiens
acccagaggaaaata

SEQ ID NO: 1688112 - DNA, 15 bp, Homo sapiens
cccagaggaaaataa

SEQ ID NO: 1688113 - DNA, 15 bp, Homo sapiens
ccagaggaaaataag

SEQ ID NO: 1688114 - DNA, 15 bp, Homo sapiens
cagaggaaaataagt

SEQ ID NO: 1688115 - DNA, 15 bp, Homo sapiens
agaggaaaataagtc

SEQ ID NO: 1688116 - DNA, 15 bp, Homo sapiens
gaggaaaataagtca

SEQ ID NO: 1688117 - DNA, 15 bp, Homo sapiens
gaaaataagtcatta

SEQ ID NO: 1688118 - DNA, 15 bp, Homo sapiens
aaaataagtcattat

SEQ ID NO: 1688119 - DNA, 15 bp, Homo sapiens
aaataagtcattata

SEQ ID NO: 1688120 - DNA, 15 bp, Homo sapiens
aataagtcattatac

SEQ ID NO: 1688121 - DNA, 15 bp, Homo sapiens
ataagtcattataca

SEQ ID NO: 1688122 - DNA, 15 bp, Homo sapiens
taagtcattatacaa

SEQ ID NO: 1688123 - DNA, 15 bp, Homo sapiens
aagtcattatacaaa

SEQ ID NO: 1688124 - DNA, 15 bp, Homo sapiens
agtcattatacaaaa

SEQ ID NO: 1688125 - DNA, 15 bp, Homo sapiens
gtcattatacaaaaa

SEQ ID NO: 1688126 - DNA, 15 bp, Homo sapiens
tcattatacaaaaaa

SEQ ID NO: 1688127 - DNA, 15 bp, Homo sapiens
cattatacaaaaaag

SEQ ID NO: 1688128 - DNA, 15 bp, Homo sapiens
attatacaaaaaaga

SEQ ID NO: 1688129 - DNA, 15 bp, Homo sapiens
ttatacaaaaaagat

SEQ ID NO: 1688130 - DNA, 15 bp, Homo sapiens
tatacaaaaaagata

SEQ ID NO: 1688131 - DNA, 15 bp, Homo sapiens
atacaaaaaagatac

SEQ ID NO: 1688132 - DNA, 15 bp, Homo sapiens
tacaaaaaagatact

SEQ ID NO: 1688133 - DNA, 15 bp, Homo sapiens
acaaaaaagatactt

SEQ ID NO: 1688134 - DNA, 15 bp, Homo sapiens
caaaaaagatacttg

SEQ ID NO: 1688135 - DNA, 15 bp, Homo sapiens
aaaaaagatacttgt

SEQ ID NO: 1688136 - DNA, 15 bp, Homo sapiens
aaaaagatacttgta

SEQ ID NO: 1688137 - DNA, 15 bp, Homo sapiens
aaaagatacttgtat

SEQ ID NO: 1688138 - DNA, 15 bp, Homo sapiens
aaagatacttgtata

SEQ ID NO: 1688139 - DNA, 15 bp, Homo sapiens
aagatacttgtatat

SEQ ID NO: 1688140 - DNA, 15 bp, Homo sapiens
agatacttgtatatg

SEQ ID NO: 1688141 - DNA, 15 bp, Homo sapiens
gatacttgtatatgt

SEQ ID NO: 1688142 - DNA, 15 bp, Homo sapiens
atacttgtatatgta

SEQ ID NO: 1688143 - DNA, 15 bp, Homo sapiens
tacttgtatatgtat

SEQ ID NO: 1688144 - DNA, 15 bp, Homo sapiens
acttgtatatgtatg

SEQ ID NO: 1688145 - DNA, 15 bp, Homo sapiens
cttgtatatgtatgt

SEQ ID NO: 1688146 - DNA, 15 bp, Homo sapiens
ttgtatatgtatgtg

SEQ ID NO: 1688147 - DNA, 15 bp, Homo sapiens
gtatatgtatgtgta

SEQ ID NO: 1688148 - DNA, 15 bp, Homo sapiens
tatatgtatgtgtat

SEQ ID NO: 1688149 - DNA, 15 bp, Homo sapiens
atatgtatgtgtata

SEQ ID NO: 1688150 - DNA, 15 bp, Homo sapiens
tatgtatgtgtatag

SEQ ID NO: 1688151 - DNA, 15 bp, Homo sapiens
atgtatgtgtatagc

SEQ ID NO: 1688152 - DNA, 15 bp, Homo sapiens
tgtatgtgtatagca

SEQ ID NO: 1688153 - DNA, 15 bp, Homo sapiens
gtatgtgtatagcag

SEQ ID NO: 1688154 - DNA, 15 bp, Homo sapiens
tatgtgtatagcagc

SEQ ID NO: 1688155 - DNA, 15 bp, Homo sapiens
atgtgtatagcagca

SEQ ID NO: 1688156 - DNA, 15 bp, Homo sapiens
tgtgtatagcagcag

SEQ ID NO: 1688157 - DNA, 15 bp, Homo sapiens
gtgtatagcagcaga

SEQ ID NO: 1688158 - DNA, 15 bp, Homo sapiens
tgtatagcagcagaa

SEQ ID NO: 1688159 - DNA, 15 bp, Homo sapiens
gtatagcagcagaat

SEQ ID NO: 1688160 - DNA, 15 bp, Homo sapiens
tatagcagcagaatt

SEQ ID NO: 1688161 - DNA, 15 bp, Homo sapiens
atagcagcagaattt

SEQ ID NO: 1688162 - DNA, 15 bp, Homo sapiens
tagcagcagaatttg

SEQ ID NO: 1688163 - DNA, 15 bp, Homo sapiens
agcagcagaatttgc

SEQ ID NO: 1688164 - DNA, 15 bp, Homo sapiens
gcagcagaatttgca

SEQ ID NO: 1688165 - DNA, 15 bp, Homo sapiens
cagcagaatttgcaa

SEQ ID NO: 1688166 - DNA, 15 bp, Homo sapiens
agcagaatttgcaat

SEQ ID NO: 1688167 - DNA, 15 bp, Homo sapiens
gcagaatttgcaatt

SEQ ID NO: 1688168 - DNA, 15 bp, Homo sapiens
cagaatttgcaattg

SEQ ID NO: 1688169 - DNA, 15 bp, Homo sapiens
agaatttgcaattgc

SEQ ID NO: 1688170 - DNA, 15 bp, Homo sapiens
gaatttgcaattgca

SEQ ID NO: 1688171 - DNA, 15 bp, Homo sapiens
aatttgcaattgcaa

SEQ ID NO: 1688172 - DNA, 15 bp, Homo sapiens
atttgcaattgcaaa

SEQ ID NO: 1688173 - DNA, 15 bp, Homo sapiens
tttgcaattgcaaaa

SEQ ID NO: 1688174 - DNA, 15 bp, Homo sapiens
ttgcaattgcaaaaa

SEQ ID NO: 1688175 - DNA, 15 bp, Homo sapiens
tgcaattgcaaaaat

SEQ ID NO: 1688176 - DNA, 15 bp, Homo sapiens
gcaattgcaaaaata

SEQ ID NO: 1688177 - DNA, 15 bp, Homo sapiens
caattgcaaaaatat

SEQ ID NO: 1688178 - DNA, 15 bp, Homo sapiens
aattgcaaaaatatg

SEQ ID NO: 1688179 - DNA, 15 bp, Homo sapiens
attgcaaaaatatgg

SEQ ID NO: 1688180 - DNA, 15 bp, Homo sapiens
ttgcaaaaatatgga

SEQ ID NO: 1688181 - DNA, 15 bp, Homo sapiens
tgcaaaaatatggaa

SEQ ID NO: 1688182 - DNA, 15 bp, Homo sapiens
gcaaaaatatggaac

SEQ ID NO: 1688183 - DNA, 15 bp, Homo sapiens
caaaaatatggaacc

SEQ ID NO: 1688184 - DNA, 15 bp, Homo sapiens
aaaaatatggaacca

SEQ ID NO: 1688185 - DNA, 15 bp, Homo sapiens
aaaatatggaaccag

SEQ ID NO: 1688186 - DNA, 15 bp, Homo sapiens
aaatatggaaccagc

SEQ ID NO: 1688187 - DNA, 15 bp, Homo sapiens
aatatggaaccagcc

SEQ ID NO: 1688188 - DNA, 15 bp, Homo sapiens
atatggaaccagccc

SEQ ID NO: 1688189 - DNA, 15 bp, Homo sapiens
tatggaaccagccca

SEQ ID NO: 1688190 - DNA, 15 bp, Homo sapiens
atggaaccagcccaa

SEQ ID NO: 1688191 - DNA, 15 bp, Homo sapiens
tggaaccagcccaaa

SEQ ID NO: 1688192 - DNA, 15 bp, Homo sapiens
ggaaccagcccaaag

SEQ ID NO: 1688193 - DNA, 15 bp, Homo sapiens
gaaccagcccaaagg

SEQ ID NO: 1688194 - DNA, 15 bp, Homo sapiens
aaccagcccaaaggc

SEQ ID NO: 1688195 - DNA, 15 bp, Homo sapiens
accagcccaaaggcc

SEQ ID NO: 1688196 - DNA, 15 bp, Homo sapiens
ccagcccaaaggccc

SEQ ID NO: 1688197 - DNA, 15 bp, Homo sapiens
cagcccaaaggccca

SEQ ID NO: 1688198 - DNA, 15 bp, Homo sapiens
agcccaaaggcccat

SEQ ID NO: 1688199 - DNA, 15 bp, Homo sapiens
gcccaaaggcccatc

SEQ ID NO: 1688200 - DNA, 15 bp, Homo sapiens
cccaaaggcccatca

SEQ ID NO: 1688201 - DNA, 15 bp, Homo sapiens
ccaaaggcccatcaa

SEQ ID NO: 1688202 - DNA, 15 bp, Homo sapiens
caaaggcccatcaat

SEQ ID NO: 1688203 - DNA, 15 bp, Homo sapiens
aaaggcccatcaatc

SEQ ID NO: 1688204 - DNA, 15 bp, Homo sapiens
aaggcccatcaatca

SEQ ID NO: 1688205 - DNA, 15 bp, Homo sapiens
aggcccatcaatcaa

SEQ ID NO: 1688206 - DNA, 15 bp, Homo sapiens
ggcccatcaatcaac

SEQ ID NO: 1688207 - DNA, 15 bp, Homo sapiens
gcccatcaatcaacg

SEQ ID NO: 1688208 - DNA, 15 bp, Homo sapiens
cccatcaatcaacga

SEQ ID NO: 1688209 - DNA, 15 bp, Homo sapiens
ccatcaatcaacgag

SEQ ID NO: 1688210 - DNA, 15 bp, Homo sapiens
catcaatcaacgagt

SEQ ID NO: 1688211 - DNA, 15 bp, Homo sapiens
atcaatcaacgagtg

SEQ ID NO: 1688212 - DNA, 15 bp, Homo sapiens
tcaatcaacgagtgg

SEQ ID NO: 1688213 - DNA, 15 bp, Homo sapiens
caatcaacgagtgga

SEQ ID NO: 1688214 - DNA, 15 bp, Homo sapiens
aatcaacgagtggat

SEQ ID NO: 1688215 - DNA, 15 bp, Homo sapiens
atcaacgagtggata

SEQ ID NO: 1688216 - DNA, 15 bp, Homo sapiens
tcaacgagtggataa

SEQ ID NO: 1688217 - DNA, 15 bp, Homo sapiens
caacgagtggataag

SEQ ID NO: 1688218 - DNA, 15 bp, Homo sapiens
aacgagtggataagg

SEQ ID NO: 1688219 - DNA, 15 bp, Homo sapiens
acgagtggataagga

SEQ ID NO: 1688220 - DNA, 15 bp, Homo sapiens
cgagtggataaggaa

SEQ ID NO: 1688221 - DNA, 15 bp, Homo sapiens
gagtggataaggaaa

SEQ ID NO: 1688222 - DNA, 15 bp, Homo sapiens
agtggataaggaaaa

SEQ ID NO: 1688223 - DNA, 15 bp, Homo sapiens
gtggataaggaaaat

SEQ ID NO: 1688224 - DNA, 15 bp, Homo sapiens
tggataaggaaaatg

SEQ ID NO: 1688225 - DNA, 15 bp, Homo sapiens
ggataaggaaaatgt

SEQ ID NO: 1688226 - DNA, 15 bp, Homo sapiens
gataaggaaaatgta

SEQ ID NO: 1688227 - DNA, 15 bp, Homo sapiens
ataaggaaaatgtaa

SEQ ID NO: 1688228 - DNA, 15 bp, Homo sapiens
taaggaaaatgtaat

SEQ ID NO: 1688229 - DNA, 15 bp, Homo sapiens
aaggaaaatgtaata

SEQ ID NO: 1688230 - DNA, 15 bp, Homo sapiens
aggaaaatgtaatat

SEQ ID NO: 1688231 - DNA, 15 bp, Homo sapiens
ggaaaatgtaatata

SEQ ID NO: 1688232 - DNA, 15 bp, Homo sapiens
gaaaatgtaatatat

SEQ ID NO: 1688233 - DNA, 15 bp, Homo sapiens
aaaatgtaatatata

SEQ ID NO: 1688234 - DNA, 15 bp, Homo sapiens
aaatgtaatatatat

SEQ ID NO: 1688235 - DNA, 15 bp, Homo sapiens
aatgtaatatatata

SEQ ID NO: 1688236 - DNA, 15 bp, Homo sapiens
atgtaatatatatat

SEQ ID NO: 1688237 - DNA, 15 bp, Homo sapiens
tgtaatatatatatt

SEQ ID NO: 1688238 - DNA, 15 bp, Homo sapiens
gtaatatatatatta

SEQ ID NO: 1688239 - DNA, 15 bp, Homo sapiens
taatatatatattac

SEQ ID NO: 1688240 - DNA, 15 bp, Homo sapiens
aatatatatattacg

SEQ ID NO: 1688241 - DNA, 15 bp, Homo sapiens
atatatatattacgt

SEQ ID NO: 1688242 - DNA, 15 bp, Homo sapiens
tatatatattacgta

SEQ ID NO: 1688243 - DNA, 15 bp, Homo sapiens
atatatattacgtat

SEQ ID NO: 1688244 - DNA, 15 bp, Homo sapiens
tatatattacgtatg

SEQ ID NO: 1688245 - DNA, 15 bp, Homo sapiens
atatattacgtatga

SEQ ID NO: 1688246 - DNA, 15 bp, Homo sapiens
tatattacgtatgat

SEQ ID NO: 1688247 - DNA, 15 bp, Homo sapiens
atattacgtatgata

SEQ ID NO: 1688248 - DNA, 15 bp, Homo sapiens
tattacgtatgatac

SEQ ID NO: 1688249 - DNA, 15 bp, Homo sapiens
attacgtatgataca

SEQ ID NO: 1688250 - DNA, 15 bp, Homo sapiens
ttacgtatgatacag

SEQ ID NO: 1688251 - DNA, 15 bp, Homo sapiens
tacgtatgatacaga

SEQ ID NO: 1688252 - DNA, 15 bp, Homo sapiens
acgtatgatacagat

SEQ ID NO: 1688253 - DNA, 15 bp, Homo sapiens
cgtatgatacagata

SEQ ID NO: 1688254 - DNA, 15 bp, Homo sapiens
gtatgatacagatat

SEQ ID NO: 1688255 - DNA, 15 bp, Homo sapiens
tatgatacagatatg

SEQ ID NO: 1688256 - DNA, 15 bp, Homo sapiens
atgatacagatatga

SEQ ID NO: 1688257 - DNA, 15 bp, Homo sapiens
tgatacagatatgat

SEQ ID NO: 1688258 - DNA, 15 bp, Homo sapiens
gatacagatatgata

SEQ ID NO: 1688259 - DNA, 15 bp, Homo sapiens
atacagatatgatat

SEQ ID NO: 1688260 - DNA, 15 bp, Homo sapiens
tacagatatgatata

SEQ ID NO: 1688261 - DNA, 15 bp, Homo sapiens
acagatatgatatat

SEQ ID NO: 1688262 - DNA, 15 bp, Homo sapiens
cagatatgatatata

SEQ ID NO: 1688263 - DNA, 15 bp, Homo sapiens
agatatgatatatat

SEQ ID NO: 1688264 - DNA, 15 bp, Homo sapiens
gatatgatatatatg

SEQ ID NO: 1688265 - DNA, 15 bp, Homo sapiens
atatgatatatatgt

SEQ ID NO: 1688266 - DNA, 15 bp, Homo sapiens
tatgatatatatgta

SEQ ID NO: 1688267 - DNA, 15 bp, Homo sapiens
atgatatatatgtaa

SEQ ID NO: 1688268 - DNA, 15 bp, Homo sapiens
tgatatatatgtaat

SEQ ID NO: 1688269 - DNA, 15 bp, Homo sapiens
gatatatatgtaata

SEQ ID NO: 1688270 - DNA, 15 bp, Homo sapiens
atatatatgtaatat

SEQ ID NO: 1688271 - DNA, 15 bp, Homo sapiens
tatatatgtaatata

SEQ ID NO: 1688272 - DNA, 15 bp, Homo sapiens
tatatgtaatatata

SEQ ID NO: 1688273 - DNA, 15 bp, Homo sapiens
atatgtaatatatat

SEQ ID NO: 1688274 - DNA, 15 bp, Homo sapiens
tatgtaatatatatt

SEQ ID NO: 1688275 - DNA, 15 bp, Homo sapiens
atgtaatatatatta

SEQ ID NO: 1688276 - DNA, 15 bp, Homo sapiens
tgtaatatatattac

SEQ ID NO: 1688277 - DNA, 15 bp, Homo sapiens
gtaatatatattaca

SEQ ID NO: 1688278 - DNA, 15 bp, Homo sapiens
taatatatattacat

SEQ ID NO: 1688279 - DNA, 15 bp, Homo sapiens
aatatatattacatt

SEQ ID NO: 1688280 - DNA, 15 bp, Homo sapiens
tatatattacatttt

SEQ ID NO: 1688281 - DNA, 15 bp, Homo sapiens
atatattacatttta

SEQ ID NO: 1688282 - DNA, 15 bp, Homo sapiens
tatattacattttat

SEQ ID NO: 1688283 - DNA, 15 bp, Homo sapiens
atattacattttata

SEQ ID NO: 1688284 - DNA, 15 bp, Homo sapiens
tattacattttatat

SEQ ID NO: 1688285 - DNA, 15 bp, Homo sapiens
attacattttatatt

SEQ ID NO: 1688286 - DNA, 15 bp, Homo sapiens
ttacattttatatta

SEQ ID NO: 1688287 - DNA, 15 bp, Homo sapiens
tacattttatattac

SEQ ID NO: 1688288 - DNA, 15 bp, Homo sapiens
acattttatattact

SEQ ID NO: 1688289 - DNA, 15 bp, Homo sapiens
cattttatattacta

SEQ ID NO: 1688290 - DNA, 15 bp, Homo sapiens
attttatattactat

SEQ ID NO: 1688291 - DNA, 15 bp, Homo sapiens
ttttatattactata

SEQ ID NO: 1688292 - DNA, 15 bp, Homo sapiens
tttatattactatat

SEQ ID NO: 1688293 - DNA, 15 bp, Homo sapiens
ttatattactatata

SEQ ID NO: 1688294 - DNA, 15 bp, Homo sapiens
tatattactatatat

SEQ ID NO: 1688295 - DNA, 15 bp, Homo sapiens
atattactatatatt

SEQ ID NO: 1688296 - DNA, 15 bp, Homo sapiens
tattactatatatta

SEQ ID NO: 1688297 - DNA, 15 bp, Homo sapiens
attactatatattac

SEQ ID NO: 1688298 - DNA, 15 bp, Homo sapiens
ttactatatattaca

SEQ ID NO: 1688299 - DNA, 15 bp, Homo sapiens
tactatatattacat

SEQ ID NO: 1688300 - DNA, 15 bp, Homo sapiens
actatatattacatt

SEQ ID NO: 1688301 - DNA, 15 bp, Homo sapiens
ctatatattacattt

SEQ ID NO: 1688302 - DNA, 15 bp, Homo sapiens
tatattacattttaa

SEQ ID NO: 1688303 - DNA, 15 bp, Homo sapiens
atattacattttaat

SEQ ID NO: 1688304 - DNA, 15 bp, Homo sapiens
tattacattttaata

SEQ ID NO: 1688305 - DNA, 15 bp, Homo sapiens
attacattttaatat

SEQ ID NO: 1688306 - DNA, 15 bp, Homo sapiens
ttacattttaatatg

SEQ ID NO: 1688307 - DNA, 15 bp, Homo sapiens
tacattttaatatgt

SEQ ID NO: 1688308 - DNA, 15 bp, Homo sapiens
acattttaatatgtt

SEQ ID NO: 1688309 - DNA, 15 bp, Homo sapiens
cattttaatatgttt

SEQ ID NO: 1688310 - DNA, 15 bp, Homo sapiens
attttaatatgtttt

SEQ ID NO: 1688311 - DNA, 15 bp, Homo sapiens
ttttaatatgttttt

SEQ ID NO: 1688312 - DNA, 15 bp, Homo sapiens
tttaatatgtttttg

SEQ ID NO: 1688313 - DNA, 15 bp, Homo sapiens
ttaatatgtttttgt

SEQ ID NO: 1688314 - DNA, 15 bp, Homo sapiens
taatatgtttttgtg

SEQ ID NO: 1688315 - DNA, 15 bp, Homo sapiens
aatatgtttttgtgt

SEQ ID NO: 1688316 - DNA, 15 bp, Homo sapiens
atatgtttttgtgtg

SEQ ID NO: 1688317 - DNA, 15 bp, Homo sapiens
tatgtttttgtgtgt

SEQ ID NO: 1688318 - DNA, 15 bp, Homo sapiens
atgtttttgtgtgtg

SEQ ID NO: 1688319 - DNA, 15 bp, Homo sapiens
tgtttttgtgtgtgt

SEQ ID NO: 1688320 - DNA, 15 bp, Homo sapiens
gtttttgtgtgtgtg

SEQ ID NO: 1688321 - DNA, 15 bp, Homo sapiens
tttttgtgtgtgtgc

SEQ ID NO: 1688322 - DNA, 15 bp, Homo sapiens
ttttgtgtgtgtgca

SEQ ID NO: 1688323 - DNA, 15 bp, Homo sapiens
tttgtgtgtgtgcat

SEQ ID NO: 1688324 - DNA, 15 bp, Homo sapiens
ttgtgtgtgtgcata

SEQ ID NO: 1688325 - DNA, 15 bp, Homo sapiens
tgtgtgtgtgcatat

SEQ ID NO: 1688326 - DNA, 15 bp, Homo sapiens
gtgtgtgtgcatata

SEQ ID NO: 1688327 - DNA, 15 bp, Homo sapiens
tgtgtgtgcatatat

SEQ ID NO: 1688328 - DNA, 15 bp, Homo sapiens
gtgtgtgcatatata

SEQ ID NO: 1688329 - DNA, 15 bp, Homo sapiens
tgtgtgcatatatat

SEQ ID NO: 1688330 - DNA, 15 bp, Homo sapiens
gtgtgcatatatata

SEQ ID NO: 1688331 - DNA, 15 bp, Homo sapiens
tgtgcatatatatat

SEQ ID NO: 1688332 - DNA, 15 bp, Homo sapiens
gtgcatatatatata

SEQ ID NO: 1688333 - DNA, 15 bp, Homo sapiens
tgcatatatatatat

SEQ ID NO: 1688334 - DNA, 15 bp, Homo sapiens
gcatatatatatata

SEQ ID NO: 1688335 - DNA, 15 bp, Homo sapiens
catatatatatatat

SEQ ID NO: 1688336 - DNA, 15 bp, Homo sapiens
atatatatatatatg

SEQ ID NO: 1688337 - DNA, 15 bp, Homo sapiens
tatatatatatatgc

SEQ ID NO: 1688338 - DNA, 15 bp, Homo sapiens
atatatatatatgca

SEQ ID NO: 1688339 - DNA, 15 bp, Homo sapiens
tatatatatatgcac

SEQ ID NO: 1688340 - DNA, 15 bp, Homo sapiens
atatatatatgcaca

SEQ ID NO: 1688341 - DNA, 15 bp, Homo sapiens
tatatatatgcacac

SEQ ID NO: 1688342 - DNA, 15 bp, Homo sapiens
atatatatgcacaca

SEQ ID NO: 1688343 - DNA, 15 bp, Homo sapiens
tatatatgcacacac

SEQ ID NO: 1688344 - DNA, 15 bp, Homo sapiens
atatatgcacacaca

SEQ ID NO: 1688345 - DNA, 15 bp, Homo sapiens
tatatgcacacacac

SEQ ID NO: 1688346 - DNA, 15 bp, Homo sapiens
atatgcacacacaca

SEQ ID NO: 1688347 - DNA, 15 bp, Homo sapiens
acacacacacgcacc

SEQ ID NO: 1688348 - DNA, 15 bp, Homo sapiens
cacacacacgcacca

SEQ ID NO: 1688349 - DNA, 15 bp, Homo sapiens
acacacacgcaccat

SEQ ID NO: 1688350 - DNA, 15 bp, Homo sapiens
cacacacgcaccatg

SEQ ID NO: 1688351 - DNA, 15 bp, Homo sapiens
acacacgcaccatgg

SEQ ID NO: 1688352 - DNA, 15 bp, Homo sapiens
cacacgcaccatgga

SEQ ID NO: 1688353 - DNA, 15 bp, Homo sapiens
acacgcaccatggaa

SEQ ID NO: 1688354 - DNA, 15 bp, Homo sapiens
cacgcaccatggaat

SEQ ID NO: 1688355 - DNA, 15 bp, Homo sapiens
acgcaccatggaata

SEQ ID NO: 1688356 - DNA, 15 bp, Homo sapiens
cgcaccatggaatac

SEQ ID NO: 1688357 - DNA, 15 bp, Homo sapiens
gcaccatggaatact

SEQ ID NO: 1688358 - DNA, 15 bp, Homo sapiens
accatggaatactac

SEQ ID NO: 1688359 - DNA, 15 bp, Homo sapiens
ccatggaatactact

SEQ ID NO: 1688360 - DNA, 15 bp, Homo sapiens
catggaatactactc

SEQ ID NO: 1688361 - DNA, 15 bp, Homo sapiens
atggaatactactca

SEQ ID NO: 1688362 - DNA, 15 bp, Homo sapiens
tggaatactactcag

SEQ ID NO: 1688363 - DNA, 15 bp, Homo sapiens
ggaatactactcagc

SEQ ID NO: 1688364 - DNA, 15 bp, Homo sapiens
gaatactactcagcc

SEQ ID NO: 1688365 - DNA, 15 bp, Homo sapiens
aatactactcagcca

SEQ ID NO: 1688366 - DNA, 15 bp, Homo sapiens
atactactcagccat

SEQ ID NO: 1688367 - DNA, 15 bp, Homo sapiens
tactactcagccata

SEQ ID NO: 1688368 - DNA, 15 bp, Homo sapiens
actactcagccataa

SEQ ID NO: 1688369 - DNA, 15 bp, Homo sapiens
ctactcagccataaa

SEQ ID NO: 1688370 - DNA, 15 bp, Homo sapiens
tactcagccataaaa

SEQ ID NO: 1688371 - DNA, 15 bp, Homo sapiens
actcagccataaaaa

SEQ ID NO: 1688372 - DNA, 15 bp, Homo sapiens
ctcagccataaaaag

SEQ ID NO: 1688373 - DNA, 15 bp, Homo sapiens
tcagccataaaaagg

SEQ ID NO: 1688374 - DNA, 15 bp, Homo sapiens
gccataaaaaggaat

SEQ ID NO: 1688375 - DNA, 15 bp, Homo sapiens
ccataaaaaggaatg

SEQ ID NO: 1688376 - DNA, 15 bp, Homo sapiens
cataaaaaggaatgc

SEQ ID NO: 1688377 - DNA, 15 bp, Homo sapiens
ataaaaaggaatgca

SEQ ID NO: 1688378 - DNA, 15 bp, Homo sapiens
taaaaaggaatgcaa

SEQ ID NO: 1688379 - DNA, 15 bp, Homo sapiens
aaaaaggaatgcaat

SEQ ID NO: 1688380 - DNA, 15 bp, Homo sapiens
aaaaggaatgcaata

SEQ ID NO: 1688381 - DNA, 15 bp, Homo sapiens
aaaggaatgcaataa

SEQ ID NO: 1688382 - DNA, 15 bp, Homo sapiens
aaggaatgcaataat

SEQ ID NO: 1688383 - DNA, 15 bp, Homo sapiens
aggaatgcaataatg

SEQ ID NO: 1688384 - DNA, 15 bp, Homo sapiens
ggaatgcaataatgg

SEQ ID NO: 1688385 - DNA, 15 bp, Homo sapiens
gaatgcaataatggc

SEQ ID NO: 1688386 - DNA, 15 bp, Homo sapiens
aatgcaataatggca

SEQ ID NO: 1688387 - DNA, 15 bp, Homo sapiens
atgcaataatggcat

SEQ ID NO: 1688388 - DNA, 15 bp, Homo sapiens
tgcaataatggcatt

SEQ ID NO: 1688389 - DNA, 15 bp, Homo sapiens
gcaataatggcattt

SEQ ID NO: 1688390 - DNA, 15 bp, Homo sapiens
caataatggcatttg

SEQ ID NO: 1688391 - DNA, 15 bp, Homo sapiens
aataatggcatttgc

SEQ ID NO: 1688392 - DNA, 15 bp, Homo sapiens
ataatggcatttgca

SEQ ID NO: 1688393 - DNA, 15 bp, Homo sapiens
taatggcatttgcag

SEQ ID NO: 1688394 - DNA, 15 bp, Homo sapiens
aatggcatttgcagc

SEQ ID NO: 1688395 - DNA, 15 bp, Homo sapiens
atggcatttgcagca

SEQ ID NO: 1688396 - DNA, 15 bp, Homo sapiens
tggcatttgcagcaa

SEQ ID NO: 1688397 - DNA, 15 bp, Homo sapiens
ggcatttgcagcaac

SEQ ID NO: 1688398 - DNA, 15 bp, Homo sapiens
gcatttgcagcaacc

SEQ ID NO: 1688399 - DNA, 15 bp, Homo sapiens
catttgcagcaacct

SEQ ID NO: 1688400 - DNA, 15 bp, Homo sapiens
atttgcagcaacctg

SEQ ID NO: 1688401 - DNA, 15 bp, Homo sapiens
tttgcagcaacctgg

SEQ ID NO: 1688402 - DNA, 15 bp, Homo sapiens
ttgcagcaacctgga

SEQ ID NO: 1688403 - DNA, 15 bp, Homo sapiens
tgcagcaacctggat

SEQ ID NO: 1688404 - DNA, 15 bp, Homo sapiens
gcagcaacctggatg

SEQ ID NO: 1688405 - DNA, 15 bp, Homo sapiens
cagcaacctggatgg

SEQ ID NO: 1688406 - DNA, 15 bp, Homo sapiens
agcaacctggatgga

SEQ ID NO: 1688407 - DNA, 15 bp, Homo sapiens
gcaacctggatggaa

SEQ ID NO: 1688408 - DNA, 15 bp, Homo sapiens
caacctggatggaat

SEQ ID NO: 1688409 - DNA, 15 bp, Homo sapiens
aacctggatggaatt

SEQ ID NO: 1688410 - DNA, 15 bp, Homo sapiens
acctggatggaattg

SEQ ID NO: 1688411 - DNA, 15 bp, Homo sapiens
cctggatggaattgg

SEQ ID NO: 1688412 - DNA, 15 bp, Homo sapiens
ctggatggaattgga

SEQ ID NO: 1688413 - DNA, 15 bp, Homo sapiens
tggatggaattggag

SEQ ID NO: 1688414 - DNA, 15 bp, Homo sapiens
ggatggaattggaga

SEQ ID NO: 1688415 - DNA, 15 bp, Homo sapiens
gatggaattggagac

SEQ ID NO: 1688416 - DNA, 15 bp, Homo sapiens
atggaattggagact

SEQ ID NO: 1688417 - DNA, 15 bp, Homo sapiens
tggaattggagacta

SEQ ID NO: 1688418 - DNA, 15 bp, Homo sapiens
ggaattggagactat

SEQ ID NO: 1688419 - DNA, 15 bp, Homo sapiens
gaattggagactatt

SEQ ID NO: 1688420 - DNA, 15 bp, Homo sapiens
aattggagactatta

SEQ ID NO: 1688421 - DNA, 15 bp, Homo sapiens
attggagactattat

SEQ ID NO: 1688422 - DNA, 15 bp, Homo sapiens
ttggagactattatt

SEQ ID NO: 1688423 - DNA, 15 bp, Homo sapiens
attattctaagtgaa

SEQ ID NO: 1688424 - DNA, 15 bp, Homo sapiens
ttattctaagtgaag

SEQ ID NO: 1688425 - DNA, 15 bp, Homo sapiens
tattctaagtgaagt

SEQ ID NO: 1688426 - DNA, 15 bp, Homo sapiens
attctaagtgaagta

SEQ ID NO: 1688427 - DNA, 15 bp, Homo sapiens
ttctaagtgaagtaa

SEQ ID NO: 1688428 - DNA, 15 bp, Homo sapiens
tctaagtgaagtaac

SEQ ID NO: 1688429 - DNA, 15 bp, Homo sapiens
ctaagtgaagtaact

SEQ ID NO: 1688430 - DNA, 15 bp, Homo sapiens
taagtgaagtaactc

SEQ ID NO: 1688431 - DNA, 15 bp, Homo sapiens
aagtgaagtaactca

SEQ ID NO: 1688432 - DNA, 15 bp, Homo sapiens
agtgaagtaactcag

SEQ ID NO: 1688433 - DNA, 15 bp, Homo sapiens
gtgaagtaactcagg

SEQ ID NO: 1688434 - DNA, 15 bp, Homo sapiens
tgaagtaactcagga

SEQ ID NO: 1688435 - DNA, 15 bp, Homo sapiens
gaagtaactcaggaa

SEQ ID NO: 1688436 - DNA, 15 bp, Homo sapiens
aagtaactcaggaat

SEQ ID NO: 1688437 - DNA, 15 bp, Homo sapiens
agtaactcaggaatg

SEQ ID NO: 1688438 - DNA, 15 bp, Homo sapiens
caggaatggaaaact

SEQ ID NO: 1688439 - DNA, 15 bp, Homo sapiens
aggaatggaaaacta

SEQ ID NO: 1688440 - DNA, 15 bp, Homo sapiens
ggaatggaaaactaa

SEQ ID NO: 1688441 - DNA, 15 bp, Homo sapiens
gaatggaaaactaaa

SEQ ID NO: 1688442 - DNA, 15 bp, Homo sapiens
aatggaaaactaaac

SEQ ID NO: 1688443 - DNA, 15 bp, Homo sapiens
atggaaaactaaacg

SEQ ID NO: 1688444 - DNA, 15 bp, Homo sapiens
tggaaaactaaacgg

SEQ ID NO: 1688445 - DNA, 15 bp, Homo sapiens
ggaaaactaaacggt

SEQ ID NO: 1688446 - DNA, 15 bp, Homo sapiens
gaaaactaaacggtg

SEQ ID NO: 1688447 - DNA, 15 bp, Homo sapiens
aaaactaaacggtgt

SEQ ID NO: 1688448 - DNA, 15 bp, Homo sapiens
aaactaaacggtgta

SEQ ID NO: 1688449 - DNA, 15 bp, Homo sapiens
aactaaacggtgtat

SEQ ID NO: 1688450 - DNA, 15 bp, Homo sapiens
actaaacggtgtatg

SEQ ID NO: 1688451 - DNA, 15 bp, Homo sapiens
ctaaacggtgtatgt

SEQ ID NO: 1688452 - DNA, 15 bp, Homo sapiens
taaacggtgtatgtt

SEQ ID NO: 1688453 - DNA, 15 bp, Homo sapiens
aaacggtgtatgttc

SEQ ID NO: 1688454 - DNA, 15 bp, Homo sapiens
aacggtgtatgttct

SEQ ID NO: 1688455 - DNA, 15 bp, Homo sapiens
acggtgtatgttctc

SEQ ID NO: 1688456 - DNA, 15 bp, Homo sapiens
cggtgtatgttctca

SEQ ID NO: 1688457 - DNA, 15 bp, Homo sapiens
ggtgtatgttctcac

SEQ ID NO: 1688458 - DNA, 15 bp, Homo sapiens
gtgtatgttctcact

SEQ ID NO: 1688459 - DNA, 15 bp, Homo sapiens
tgtatgttctcactc

SEQ ID NO: 1688460 - DNA, 15 bp, Homo sapiens
gtatgttctcactca

SEQ ID NO: 1688461 - DNA, 15 bp, Homo sapiens
tatgttctcactcat

SEQ ID NO: 1688462 - DNA, 15 bp, Homo sapiens
tgttctcactcatat

SEQ ID NO: 1688463 - DNA, 15 bp, Homo sapiens
gttctcactcatatg

SEQ ID NO: 1688464 - DNA, 15 bp, Homo sapiens
ttctcactcatatgt

SEQ ID NO: 1688465 - DNA, 15 bp, Homo sapiens
tctcactcatatgta

SEQ ID NO: 1688466 - DNA, 15 bp, Homo sapiens
ctcactcatatgtac

SEQ ID NO: 1688467 - DNA, 15 bp, Homo sapiens
tcactcatatgtacg

SEQ ID NO: 1688468 - DNA, 15 bp, Homo sapiens
cactcatatgtacga

SEQ ID NO: 1688469 - DNA, 15 bp, Homo sapiens
actcatatgtacgag

SEQ ID NO: 1688470 - DNA, 15 bp, Homo sapiens
ctcatatgtacgagc

SEQ ID NO: 1688471 - DNA, 15 bp, Homo sapiens
tcatatgtacgagct

SEQ ID NO: 1688472 - DNA, 15 bp, Homo sapiens
catatgtacgagcta

SEQ ID NO: 1688473 - DNA, 15 bp, Homo sapiens
atatgtacgagctaa

SEQ ID NO: 1688474 - DNA, 15 bp, Homo sapiens
tatgtacgagctaag

SEQ ID NO: 1688475 - DNA, 15 bp, Homo sapiens
atgtacgagctaagc

SEQ ID NO: 1688476 - DNA, 15 bp, Homo sapiens
tgtacgagctaagct

SEQ ID NO: 1688477 - DNA, 15 bp, Homo sapiens
gtacgagctaagcta

SEQ ID NO: 1688478 - DNA, 15 bp, Homo sapiens
tacgagctaagctat

SEQ ID NO: 1688479 - DNA, 15 bp, Homo sapiens
acgagctaagctatg

SEQ ID NO: 1688480 - DNA, 15 bp, Homo sapiens
cgagctaagctatga

SEQ ID NO: 1688481 - DNA, 15 bp, Homo sapiens
gagctaagctatgag

SEQ ID NO: 1688482 - DNA, 15 bp, Homo sapiens
agctaagctatgagg

SEQ ID NO: 1688483 - DNA, 15 bp, Homo sapiens
gctaagctatgagga

SEQ ID NO: 1688484 - DNA, 15 bp, Homo sapiens
ctaagctatgaggac

SEQ ID NO: 1688485 - DNA, 15 bp, Homo sapiens
taagctatgaggaca

SEQ ID NO: 1688486 - DNA, 15 bp, Homo sapiens
aagctatgaggacac

SEQ ID NO: 1688487 - DNA, 15 bp, Homo sapiens
agctatgaggacaca

SEQ ID NO: 1688488 - DNA, 15 bp, Homo sapiens
gctatgaggacacaa

SEQ ID NO: 1688489 - DNA, 15 bp, Homo sapiens
ctatgaggacacaaa

SEQ ID NO: 1688490 - DNA, 15 bp, Homo sapiens
tatgaggacacaaag

SEQ ID NO: 1688491 - DNA, 15 bp, Homo sapiens
atgaggacacaaagg

SEQ ID NO: 1688492 - DNA, 15 bp, Homo sapiens
tgaggacacaaaggc

SEQ ID NO: 1688493 - DNA, 15 bp, Homo sapiens
gaggacacaaaggca

SEQ ID NO: 1688494 - DNA, 15 bp, Homo sapiens
aggacacaaaggcat

SEQ ID NO: 1688495 - DNA, 15 bp, Homo sapiens
ggacacaaaggcatg

SEQ ID NO: 1688496 - DNA, 15 bp, Homo sapiens
gacacaaaggcatga

SEQ ID NO: 1688497 - DNA, 15 bp, Homo sapiens
acacaaaggcatgag

SEQ ID NO: 1688498 - DNA, 15 bp, Homo sapiens
cacaaaggcatgaga

SEQ ID NO: 1688499 - DNA, 15 bp, Homo sapiens
acaaaggcatgagaa

SEQ ID NO: 1688500 - DNA, 15 bp, Homo sapiens
caaaggcatgagaat

SEQ ID NO: 1688501 - DNA, 15 bp, Homo sapiens
aaaggcatgagaatg

SEQ ID NO: 1688502 - DNA, 15 bp, Homo sapiens
aaggcatgagaatga

SEQ ID NO: 1688503 - DNA, 15 bp, Homo sapiens
aggcatgagaatgat

SEQ ID NO: 1688504 - DNA, 15 bp, Homo sapiens
ggcatgagaatgata

SEQ ID NO: 1688505 - DNA, 15 bp, Homo sapiens
gcatgagaatgatac

SEQ ID NO: 1688506 - DNA, 15 bp, Homo sapiens
catgagaatgataca

SEQ ID NO: 1688507 - DNA, 15 bp, Homo sapiens
atgagaatgatacat

SEQ ID NO: 1688508 - DNA, 15 bp, Homo sapiens
tgagaatgatacatt

SEQ ID NO: 1688509 - DNA, 15 bp, Homo sapiens
gagaatgatacattg

SEQ ID NO: 1688510 - DNA, 15 bp, Homo sapiens
agaatgatacattgg

SEQ ID NO: 1688511 - DNA, 15 bp, Homo sapiens
gaatgatacattgga

SEQ ID NO: 1688512 - DNA, 15 bp, Homo sapiens
aatgatacattggac

SEQ ID NO: 1688513 - DNA, 15 bp, Homo sapiens
atgatacattggact

SEQ ID NO: 1688514 - DNA, 15 bp, Homo sapiens
tgatacattggactt

SEQ ID NO: 1688515 - DNA, 15 bp, Homo sapiens
gatacattggacttt

SEQ ID NO: 1688516 - DNA, 15 bp, Homo sapiens
atacattggactttg

SEQ ID NO: 1688517 - DNA, 15 bp, Homo sapiens
tacattggactttgg

SEQ ID NO: 1688518 - DNA, 15 bp, Homo sapiens
acattggactttggg

SEQ ID NO: 1688519 - DNA, 15 bp, Homo sapiens
cattggactttgggg

SEQ ID NO: 1688520 - DNA, 15 bp, Homo sapiens
attggactttgggga

SEQ ID NO: 1688521 - DNA, 15 bp, Homo sapiens
ttggactttggggac

SEQ ID NO: 1688522 - DNA, 15 bp, Homo sapiens
tggactttggggact

SEQ ID NO: 1688523 - DNA, 15 bp, Homo sapiens
ggactttggggactt

SEQ ID NO: 1688524 - DNA, 15 bp, Homo sapiens
gactttggggacttg

SEQ ID NO: 1688525 - DNA, 15 bp, Homo sapiens
actttggggacttgg

SEQ ID NO: 1688526 - DNA, 15 bp, Homo sapiens
ctttggggacttgga

SEQ ID NO: 1688527 - DNA, 15 bp, Homo sapiens
tttggggacttggag

SEQ ID NO: 1688528 - DNA, 15 bp, Homo sapiens
ttggggacttggagg

SEQ ID NO: 1688529 - DNA, 15 bp, Homo sapiens
tggggacttggagga

SEQ ID NO: 1688530 - DNA, 15 bp, Homo sapiens
ggggacttggaggaa

SEQ ID NO: 1688531 - DNA, 15 bp, Homo sapiens
gggacttggaggaaa

SEQ ID NO: 1688532 - DNA, 15 bp, Homo sapiens
ggacttggaggaaag

SEQ ID NO: 1688533 - DNA, 15 bp, Homo sapiens
gacttggaggaaagg

SEQ ID NO: 1688534 - DNA, 15 bp, Homo sapiens
acttggaggaaaggg

SEQ ID NO: 1688535 - DNA, 15 bp, Homo sapiens
cttggaggaaagggt

SEQ ID NO: 1688536 - DNA, 15 bp, Homo sapiens
ttggaggaaagggtg

SEQ ID NO: 1688537 - DNA, 15 bp, Homo sapiens
tggaggaaagggtgg

SEQ ID NO: 1688538 - DNA, 15 bp, Homo sapiens
ggaggaaagggtggg

SEQ ID NO: 1688539 - DNA, 15 bp, Homo sapiens
gaggaaagggtgggt

SEQ ID NO: 1688540 - DNA, 15 bp, Homo sapiens
aggaaagggtgggtg

SEQ ID NO: 1688541 - DNA, 15 bp, Homo sapiens
ggaaagggtgggtgg

SEQ ID NO: 1688542 - DNA, 15 bp, Homo sapiens
gaaagggtgggtggt

SEQ ID NO: 1688543 - DNA, 15 bp, Homo sapiens
aaagggtgggtggtg

SEQ ID NO: 1688544 - DNA, 15 bp, Homo sapiens
aagggtgggtggtga

SEQ ID NO: 1688545 - DNA, 15 bp, Homo sapiens
agggtgggtggtgag

SEQ ID NO: 1688546 - DNA, 15 bp, Homo sapiens
gggtgggtggtgagg

SEQ ID NO: 1688547 - DNA, 15 bp, Homo sapiens
ggtgggtggtgagga

SEQ ID NO: 1688548 - DNA, 15 bp, Homo sapiens
gtgggtggtgaggaa

SEQ ID NO: 1688549 - DNA, 15 bp, Homo sapiens
tgggtggtgaggaat

SEQ ID NO: 1688550 - DNA, 15 bp, Homo sapiens
gggtggtgaggaata

SEQ ID NO: 1688551 - DNA, 15 bp, Homo sapiens
ggtggtgaggaataa

SEQ ID NO: 1688552 - DNA, 15 bp, Homo sapiens
gtggtgaggaataaa

SEQ ID NO: 1688553 - DNA, 15 bp, Homo sapiens
tggtgaggaataaaa

SEQ ID NO: 1688554 - DNA, 15 bp, Homo sapiens
ggtgaggaataaaag

SEQ ID NO: 1688555 - DNA, 15 bp, Homo sapiens
gtgaggaataaaaga

SEQ ID NO: 1688556 - DNA, 15 bp, Homo sapiens
tgaggaataaaagac

SEQ ID NO: 1688557 - DNA, 15 bp, Homo sapiens
gaggaataaaagact

SEQ ID NO: 1688558 - DNA, 15 bp, Homo sapiens
aggaataaaagacta

SEQ ID NO: 1688559 - DNA, 15 bp, Homo sapiens
ggaataaaagactac

SEQ ID NO: 1688560 - DNA, 15 bp, Homo sapiens
gaataaaagactaca

SEQ ID NO: 1688561 - DNA, 15 bp, Homo sapiens
aataaaagactacac

SEQ ID NO: 1688562 - DNA, 15 bp, Homo sapiens
ataaaagactacaca

SEQ ID NO: 1688563 - DNA, 15 bp, Homo sapiens
taaaagactacacac

SEQ ID NO: 1688564 - DNA, 15 bp, Homo sapiens
aaaagactacacact

SEQ ID NO: 1688565 - DNA, 15 bp, Homo sapiens
aaagactacacactg

SEQ ID NO: 1688566 - DNA, 15 bp, Homo sapiens
aagactacacactgg

SEQ ID NO: 1688567 - DNA, 15 bp, Homo sapiens
agactacacactgga

SEQ ID NO: 1688568 - DNA, 15 bp, Homo sapiens
gactacacactggat

SEQ ID NO: 1688569 - DNA, 15 bp, Homo sapiens
actacacactggatg

SEQ ID NO: 1688570 - DNA, 15 bp, Homo sapiens
ctacacactggatgc

SEQ ID NO: 1688571 - DNA, 15 bp, Homo sapiens
tacacactggatgca

SEQ ID NO: 1688572 - DNA, 15 bp, Homo sapiens
acacactggatgcag

SEQ ID NO: 1688573 - DNA, 15 bp, Homo sapiens
cacactggatgcagt

SEQ ID NO: 1688574 - DNA, 15 bp, Homo sapiens
acactggatgcagtg

SEQ ID NO: 1688575 - DNA, 15 bp, Homo sapiens
cactggatgcagtgt

SEQ ID NO: 1688576 - DNA, 15 bp, Homo sapiens
actggatgcagtgta

SEQ ID NO: 1688577 - DNA, 15 bp, Homo sapiens
ctggatgcagtgtac

SEQ ID NO: 1688578 - DNA, 15 bp, Homo sapiens
tggatgcagtgtaca

SEQ ID NO: 1688579 - DNA, 15 bp, Homo sapiens
ggatgcagtgtacac

SEQ ID NO: 1688580 - DNA, 15 bp, Homo sapiens
gatgcagtgtacact

SEQ ID NO: 1688581 - DNA, 15 bp, Homo sapiens
atgcagtgtacactg

SEQ ID NO: 1688582 - DNA, 15 bp, Homo sapiens
tgcagtgtacactgc

SEQ ID NO: 1688583 - DNA, 15 bp, Homo sapiens
gcagtgtacactgct

SEQ ID NO: 1688584 - DNA, 15 bp, Homo sapiens
cagtgtacactgctt

SEQ ID NO: 1688585 - DNA, 15 bp, Homo sapiens
agtgtacactgcttg

SEQ ID NO: 1688586 - DNA, 15 bp, Homo sapiens
gtgtacactgcttgg

SEQ ID NO: 1688587 - DNA, 15 bp, Homo sapiens
tgtacactgcttgga

SEQ ID NO: 1688588 - DNA, 15 bp, Homo sapiens
gtacactgcttggat

SEQ ID NO: 1688589 - DNA, 15 bp, Homo sapiens
tacactgcttggatg

SEQ ID NO: 1688590 - DNA, 15 bp, Homo sapiens
acactgcttggatga

SEQ ID NO: 1688591 - DNA, 15 bp, Homo sapiens
cactgcttggatgat

SEQ ID NO: 1688592 - DNA, 15 bp, Homo sapiens
actgcttggatgatg

SEQ ID NO: 1688593 - DNA, 15 bp, Homo sapiens
ctgcttggatgatgg

SEQ ID NO: 1688594 - DNA, 15 bp, Homo sapiens
tgcttggatgatggg

SEQ ID NO: 1688595 - DNA, 15 bp, Homo sapiens
gcttggatgatgggt

SEQ ID NO: 1688596 - DNA, 15 bp, Homo sapiens
cttggatgatgggtg

SEQ ID NO: 1688597 - DNA, 15 bp, Homo sapiens
ttggatgatgggtgc

SEQ ID NO: 1688598 - DNA, 15 bp, Homo sapiens
tggatgatgggtgca

SEQ ID NO: 1688599 - DNA, 15 bp, Homo sapiens
ggatgatgggtgcac

SEQ ID NO: 1688600 - DNA, 15 bp, Homo sapiens
gatgatgggtgcacc

SEQ ID NO: 1688601 - DNA, 15 bp, Homo sapiens
atgatgggtgcacca

SEQ ID NO: 1688602 - DNA, 15 bp, Homo sapiens
tgatgggtgcaccat

SEQ ID NO: 1688603 - DNA, 15 bp, Homo sapiens
gatgggtgcaccatt

SEQ ID NO: 1688604 - DNA, 15 bp, Homo sapiens
atgggtgcaccattc

SEQ ID NO: 1688605 - DNA, 15 bp, Homo sapiens
tgggtgcaccattct

SEQ ID NO: 1688606 - DNA, 15 bp, Homo sapiens
gggtgcaccattcta

SEQ ID NO: 1688607 - DNA, 15 bp, Homo sapiens
ggtgcaccattctaa

SEQ ID NO: 1688608 - DNA, 15 bp, Homo sapiens
gtgcaccattctaaa

SEQ ID NO: 1688609 - DNA, 15 bp, Homo sapiens
tgcaccattctaaaa

SEQ ID NO: 1688610 - DNA, 15 bp, Homo sapiens
gcaccattctaaaat

SEQ ID NO: 1688611 - DNA, 15 bp, Homo sapiens
caccattctaaaatc

SEQ ID NO: 1688612 - DNA, 15 bp, Homo sapiens
accattctaaaatct

SEQ ID NO: 1688613 - DNA, 15 bp, Homo sapiens
ccattctaaaatctc

SEQ ID NO: 1688614 - DNA, 15 bp, Homo sapiens
cattctaaaatctca

SEQ ID NO: 1688615 - DNA, 15 bp, Homo sapiens
attctaaaatctcag

SEQ ID NO: 1688616 - DNA, 15 bp, Homo sapiens
ttctaaaatctcaga

SEQ ID NO: 1688617 - DNA, 15 bp, Homo sapiens
tctaaaatctcagaa

SEQ ID NO: 1688618 - DNA, 15 bp, Homo sapiens
ctaaaatctcagaaa

SEQ ID NO: 1688619 - DNA, 15 bp, Homo sapiens
taaaatctcagaaat

SEQ ID NO: 1688620 - DNA, 15 bp, Homo sapiens
aaaatctcagaaatc

SEQ ID NO: 1688621 - DNA, 15 bp, Homo sapiens
aaatctcagaaatca

SEQ ID NO: 1688622 - DNA, 15 bp, Homo sapiens
aatctcagaaatcac

SEQ ID NO: 1688623 - DNA, 15 bp, Homo sapiens
atctcagaaatcacc

SEQ ID NO: 1688624 - DNA, 15 bp, Homo sapiens
tctcagaaatcacca

SEQ ID NO: 1688625 - DNA, 15 bp, Homo sapiens
ctcagaaatcaccat

SEQ ID NO: 1688626 - DNA, 15 bp, Homo sapiens
tcagaaatcaccatc

SEQ ID NO: 1688627 - DNA, 15 bp, Homo sapiens
cagaaatcaccatca

SEQ ID NO: 1688628 - DNA, 15 bp, Homo sapiens
agaaatcaccatcaa

SEQ ID NO: 1688629 - DNA, 15 bp, Homo sapiens
gaaatcaccatcaaa

SEQ ID NO: 1688630 - DNA, 15 bp, Homo sapiens
aaatcaccatcaaag

SEQ ID NO: 1688631 - DNA, 15 bp, Homo sapiens
aatcaccatcaaaga

SEQ ID NO: 1688632 - DNA, 15 bp, Homo sapiens
atcaccatcaaagaa

SEQ ID NO: 1688633 - DNA, 15 bp, Homo sapiens
tcaccatcaaagaac

SEQ ID NO: 1688634 - DNA, 15 bp, Homo sapiens
caccatcaaagaact

SEQ ID NO: 1688635 - DNA, 15 bp, Homo sapiens
accatcaaagaactt

SEQ ID NO: 1688636 - DNA, 15 bp, Homo sapiens
ccatcaaagaactta

SEQ ID NO: 1688637 - DNA, 15 bp, Homo sapiens
catcaaagaacttat

SEQ ID NO: 1688638 - DNA, 15 bp, Homo sapiens
atcaaagaacttatt

SEQ ID NO: 1688639 - DNA, 15 bp, Homo sapiens
tcaaagaacttattc

SEQ ID NO: 1688640 - DNA, 15 bp, Homo sapiens
caaagaacttattca

SEQ ID NO: 1688641 - DNA, 15 bp, Homo sapiens
aaagaacttattcat

SEQ ID NO: 1688642 - DNA, 15 bp, Homo sapiens
aagaacttattcatg

SEQ ID NO: 1688643 - DNA, 15 bp, Homo sapiens
agaacttattcatgt

SEQ ID NO: 1688644 - DNA, 15 bp, Homo sapiens
gaacttattcatgta

SEQ ID NO: 1688645 - DNA, 15 bp, Homo sapiens
aacttattcatgtaa

SEQ ID NO: 1688646 - DNA, 15 bp, Homo sapiens
acttattcatgtaac

SEQ ID NO: 1688647 - DNA, 15 bp, Homo sapiens
cttattcatgtaacc

SEQ ID NO: 1688648 - DNA, 15 bp, Homo sapiens
ttattcatgtaaccc

SEQ ID NO: 1688649 - DNA, 15 bp, Homo sapiens
tattcatgtaaccca

SEQ ID NO: 1688650 - DNA, 15 bp, Homo sapiens
attcatgtaacccaa

SEQ ID NO: 1688651 - DNA, 15 bp, Homo sapiens
ttcatgtaacccaac

SEQ ID NO: 1688652 - DNA, 15 bp, Homo sapiens
tcatgtaacccaaca

SEQ ID NO: 1688653 - DNA, 15 bp, Homo sapiens
catgtaacccaacac

SEQ ID NO: 1688654 - DNA, 15 bp, Homo sapiens
atgtaacccaacacc

SEQ ID NO: 1688655 - DNA, 15 bp, Homo sapiens
tgtaacccaacacca

SEQ ID NO: 1688656 - DNA, 15 bp, Homo sapiens
gtaacccaacaccac

SEQ ID NO: 1688657 - DNA, 15 bp, Homo sapiens
taacccaacaccacc

SEQ ID NO: 1688658 - DNA, 15 bp, Homo sapiens
aacccaacaccacct

SEQ ID NO: 1688659 - DNA, 15 bp, Homo sapiens
acccaacaccacctg

SEQ ID NO: 1688660 - DNA, 15 bp, Homo sapiens
cccaacaccacctgt

SEQ ID NO: 1688661 - DNA, 15 bp, Homo sapiens
ccaacaccacctgtt

SEQ ID NO: 1688662 - DNA, 15 bp, Homo sapiens
caacaccacctgttc

SEQ ID NO: 1688663 - DNA, 15 bp, Homo sapiens
aacaccacctgttcc

SEQ ID NO: 1688664 - DNA, 15 bp, Homo sapiens
acaccacctgttccc

SEQ ID NO: 1688665 - DNA, 15 bp, Homo sapiens
caccacctgttcccc

SEQ ID NO: 1688666 - DNA, 15 bp, Homo sapiens
accacctgttcccca

SEQ ID NO: 1688667 - DNA, 15 bp, Homo sapiens
ccacctgttccccaa

SEQ ID NO: 1688668 - DNA, 15 bp, Homo sapiens
cacctgttccccaaa

SEQ ID NO: 1688669 - DNA, 15 bp, Homo sapiens
acctgttccccaaaa

SEQ ID NO: 1688670 - DNA, 15 bp, Homo sapiens
cctgttccccaaaaa

SEQ ID NO: 1688671 - DNA, 15 bp, Homo sapiens
ctgttccccaaaaac

SEQ ID NO: 1688672 - DNA, 15 bp, Homo sapiens
tgttccccaaaaacc

SEQ ID NO: 1688673 - DNA, 15 bp, Homo sapiens
gttccccaaaaacct

SEQ ID NO: 1688674 - DNA, 15 bp, Homo sapiens
ttccccaaaaaccta

SEQ ID NO: 1688675 - DNA, 15 bp, Homo sapiens
tccccaaaaacctat

SEQ ID NO: 1688676 - DNA, 15 bp, Homo sapiens
ccccaaaaacctatt

SEQ ID NO: 1688677 - DNA, 15 bp, Homo sapiens
cccaaaaacctattg

SEQ ID NO: 1688678 - DNA, 15 bp, Homo sapiens
ccaaaaacctattga

SEQ ID NO: 1688679 - DNA, 15 bp, Homo sapiens
caaaaacctattgaa

SEQ ID NO: 1688680 - DNA, 15 bp, Homo sapiens
aaaaacctattgaaa

SEQ ID NO: 1688681 - DNA, 15 bp, Homo sapiens
aaaacctattgaaat

SEQ ID NO: 1688682 - DNA, 15 bp, Homo sapiens
aaacctattgaaata

SEQ ID NO: 1688683 - DNA, 15 bp, Homo sapiens
aacctattgaaataa

SEQ ID NO: 1688684 - DNA, 15 bp, Homo sapiens
acctattgaaataaa

SEQ ID NO: 1688685 - DNA, 15 bp, Homo sapiens
cctattgaaataaaa

SEQ ID NO: 1688686 - DNA, 15 bp, Homo sapiens
ctattgaaataaaaa

SEQ ID NO: 1688687 - DNA, 15 bp, Homo sapiens
tattgaaataaaaat

SEQ ID NO: 1688688 - DNA, 15 bp, Homo sapiens
attgaaataaaaatt

SEQ ID NO: 1688689 - DNA, 15 bp, Homo sapiens
ttgaaataaaaatta

SEQ ID NO: 1688690 - DNA, 15 bp, Homo sapiens
tgaaataaaaattaa

SEQ ID NO: 1688691 - DNA, 15 bp, Homo sapiens
aataaaaattaaaat

SEQ ID NO: 1688692 - DNA, 15 bp, Homo sapiens
ataaaaattaaaatt

SEQ ID NO: 1688693 - DNA, 15 bp, Homo sapiens
taaaaattaaaattt

SEQ ID NO: 1688694 - DNA, 15 bp, Homo sapiens
aaaaattaaaatttt

SEQ ID NO: 1688695 - DNA, 15 bp, Homo sapiens
aaaattaaaattttt

SEQ ID NO: 1688696 - DNA, 15 bp, Homo sapiens
aaattaaaatttttt

SEQ ID NO: 1688697 - DNA, 15 bp, Homo sapiens
aattaaaatttttta

SEQ ID NO: 1688698 - DNA, 15 bp, Homo sapiens
attaaaattttttaa

SEQ ID NO: 1688699 - DNA, 15 bp, Homo sapiens
ttaaaattttttaaa

SEQ ID NO: 1688700 - DNA, 15 bp, Homo sapiens
taaaattttttaaaa

SEQ ID NO: 1688701 - DNA, 15 bp, Homo sapiens
aaattttttaaaaat

SEQ ID NO: 1688702 - DNA, 15 bp, Homo sapiens
aattttttaaaaata

SEQ ID NO: 1688703 - DNA, 15 bp, Homo sapiens
attttttaaaaataa

SEQ ID NO: 1688704 - DNA, 15 bp, Homo sapiens
ttttttaaaaataat

SEQ ID NO: 1688705 - DNA, 15 bp, Homo sapiens
tttttaaaaataata

SEQ ID NO: 1688706 - DNA, 15 bp, Homo sapiens
ttttaaaaataataa

SEQ ID NO: 1688707 - DNA, 15 bp, Homo sapiens
tttaaaaataataaa

SEQ ID NO: 1688708 - DNA, 15 bp, Homo sapiens
ttaaaaataataaaa

SEQ ID NO: 1688709 - DNA, 15 bp, Homo sapiens
taaaaataataaaat

SEQ ID NO: 1688710 - DNA, 15 bp, Homo sapiens
aaaaataataaaatg

SEQ ID NO: 1688711 - DNA, 15 bp, Homo sapiens
aaaataataaaatgt

SEQ ID NO: 1688712 - DNA, 15 bp, Homo sapiens
aaataataaaatgta

SEQ ID NO: 1688713 - DNA, 15 bp, Homo sapiens
aataataaaatgtac

SEQ ID NO: 1688714 - DNA, 15 bp, Homo sapiens
ataataaaatgtaca

SEQ ID NO: 1688715 - DNA, 15 bp, Homo sapiens
taataaaatgtacat

SEQ ID NO: 1688716 - DNA, 15 bp, Homo sapiens
aataaaatgtacatt

SEQ ID NO: 1688717 - DNA, 15 bp, Homo sapiens
ataaaatgtacatta

SEQ ID NO: 1688718 - DNA, 15 bp, Homo sapiens
taaaatgtacattat

SEQ ID NO: 1688719 - DNA, 15 bp, Homo sapiens
aaaatgtacattata

SEQ ID NO: 1688720 - DNA, 15 bp, Homo sapiens
aaatgtacattataa

SEQ ID NO: 1688721 - DNA, 15 bp, Homo sapiens
aatgtacattataaa

SEQ ID NO: 1688722 - DNA, 15 bp, Homo sapiens
atgtacattataaaa

SEQ ID NO: 1688723 - DNA, 15 bp, Homo sapiens
tgtacattataaaac

SEQ ID NO: 1688724 - DNA, 15 bp, Homo sapiens
gtacattataaaaca

SEQ ID NO: 1688725 - DNA, 15 bp, Homo sapiens
tacattataaaacaa

SEQ ID NO: 1688726 - DNA, 15 bp, Homo sapiens
acattataaaacaaa

SEQ ID NO: 1688727 - DNA, 15 bp, Homo sapiens
cattataaaacaaaa

SEQ ID NO: 1688728 - DNA, 15 bp, Homo sapiens
attataaaacaaaaa

SEQ ID NO: 1688729 - DNA, 15 bp, Homo sapiens
ttataaaacaaaaaa

SEQ ID NO: 1688730 - DNA, 15 bp, Homo sapiens
tataaaacaaaaaaa

SEQ ID NO: 1688731 - DNA, 15 bp, Homo sapiens
taaaacaaaaaaaat

SEQ ID NO: 1688732 - DNA, 15 bp, Homo sapiens
aaaacaaaaaaaata

SEQ ID NO: 1688733 - DNA, 15 bp, Homo sapiens
aaacaaaaaaaataa

SEQ ID NO: 1688734 - DNA, 15 bp, Homo sapiens
aacaaaaaaaataaa

SEQ ID NO: 1688735 - DNA, 15 bp, Homo sapiens
acaaaaaaaataaaa

SEQ ID NO: 1688736 - DNA, 15 bp, Homo sapiens
aaaaaaataaaaatc

SEQ ID NO: 1688737 - DNA, 15 bp, Homo sapiens
aaaaaataaaaatct

SEQ ID NO: 1688738 - DNA, 15 bp, Homo sapiens
aaaaataaaaatcta

SEQ ID NO: 1688739 - DNA, 15 bp, Homo sapiens
aaaataaaaatctac

SEQ ID NO: 1688740 - DNA, 15 bp, Homo sapiens
aaataaaaatctact

SEQ ID NO: 1688741 - DNA, 15 bp, Homo sapiens
aataaaaatctactc

SEQ ID NO: 1688742 - DNA, 15 bp, Homo sapiens
ataaaaatctactct

SEQ ID NO: 1688743 - DNA, 15 bp, Homo sapiens
aaaaatctactcttt

SEQ ID NO: 1688744 - DNA, 15 bp, Homo sapiens
aaaatctactctttc

SEQ ID NO: 1688745 - DNA, 15 bp, Homo sapiens
aaatctactctttca

SEQ ID NO: 1688746 - DNA, 15 bp, Homo sapiens
aatctactctttcaa

SEQ ID NO: 1688747 - DNA, 15 bp, Homo sapiens
atctactctttcaat

SEQ ID NO: 1688748 - DNA, 15 bp, Homo sapiens
tctactctttcaata

SEQ ID NO: 1688749 - DNA, 15 bp, Homo sapiens
ctactctttcaataa

SEQ ID NO: 1688750 - DNA, 15 bp, Homo sapiens
tactctttcaataat

SEQ ID NO: 1688751 - DNA, 15 bp, Homo sapiens
actctttcaataatt

SEQ ID NO: 1688752 - DNA, 15 bp, Homo sapiens
ctctttcaataattt

SEQ ID NO: 1688753 - DNA, 15 bp, Homo sapiens
tctttcaataatttt

SEQ ID NO: 1688754 - DNA, 15 bp, Homo sapiens
ctttcaataattttc

SEQ ID NO: 1688755 - DNA, 15 bp, Homo sapiens
tttcaataattttca

SEQ ID NO: 1688756 - DNA, 15 bp, Homo sapiens
ttcaataattttcaa

SEQ ID NO: 1688757 - DNA, 15 bp, Homo sapiens
tcaataattttcaag

SEQ ID NO: 1688758 - DNA, 15 bp, Homo sapiens
caataattttcaagc

SEQ ID NO: 1688759 - DNA, 15 bp, Homo sapiens
aataattttcaagca

SEQ ID NO: 1688760 - DNA, 15 bp, Homo sapiens
ataattttcaagcat

SEQ ID NO: 1688761 - DNA, 15 bp, Homo sapiens
taattttcaagcata

SEQ ID NO: 1688762 - DNA, 15 bp, Homo sapiens
aattttcaagcatac

SEQ ID NO: 1688763 - DNA, 15 bp, Homo sapiens
attttcaagcataca

SEQ ID NO: 1688764 - DNA, 15 bp, Homo sapiens
ttttcaagcatacaa

SEQ ID NO: 1688765 - DNA, 15 bp, Homo sapiens
tttcaagcatacaaa

SEQ ID NO: 1688766 - DNA, 15 bp, Homo sapiens
ttcaagcatacaaaa

SEQ ID NO: 1688767 - DNA, 15 bp, Homo sapiens
tcaagcatacaaaac

SEQ ID NO: 1688768 - DNA, 15 bp, Homo sapiens
caagcatacaaaaca

SEQ ID NO: 1688769 - DNA, 15 bp, Homo sapiens
aagcatacaaaacat

SEQ ID NO: 1688770 - DNA, 15 bp, Homo sapiens
agcatacaaaacatt

SEQ ID NO: 1688771 - DNA, 15 bp, Homo sapiens
gcatacaaaacattg

SEQ ID NO: 1688772 - DNA, 15 bp, Homo sapiens
catacaaaacattgt

SEQ ID NO: 1688773 - DNA, 15 bp, Homo sapiens
atacaaaacattgtt

SEQ ID NO: 1688774 - DNA, 15 bp, Homo sapiens
tacaaaacattgtta

SEQ ID NO: 1688775 - DNA, 15 bp, Homo sapiens
acaaaacattgttac

SEQ ID NO: 1688776 - DNA, 15 bp, Homo sapiens
caaaacattgttact

SEQ ID NO: 1688777 - DNA, 15 bp, Homo sapiens
aaaacattgttacta

SEQ ID NO: 1688778 - DNA, 15 bp, Homo sapiens
aaacattgttactaa

SEQ ID NO: 1688779 - DNA, 15 bp, Homo sapiens
aacattgttactaac

SEQ ID NO: 1688780 - DNA, 15 bp, Homo sapiens
acattgttactaact

SEQ ID NO: 1688781 - DNA, 15 bp, Homo sapiens
cattgttactaacta

SEQ ID NO: 1688782 - DNA, 15 bp, Homo sapiens
attgttactaactat

SEQ ID NO: 1688783 - DNA, 15 bp, Homo sapiens
ttgttactaactata

SEQ ID NO: 1688784 - DNA, 15 bp, Homo sapiens
tgttactaactatag

SEQ ID NO: 1688785 - DNA, 15 bp, Homo sapiens
gttactaactatagt

SEQ ID NO: 1688786 - DNA, 15 bp, Homo sapiens
ttactaactatagtc

SEQ ID NO: 1688787 - DNA, 15 bp, Homo sapiens
tactaactatagtca

SEQ ID NO: 1688788 - DNA, 15 bp, Homo sapiens
actaactatagtcag

SEQ ID NO: 1688789 - DNA, 15 bp, Homo sapiens
ctaactatagtcagc

SEQ ID NO: 1688790 - DNA, 15 bp, Homo sapiens
taactatagtcagcc

SEQ ID NO: 1688791 - DNA, 15 bp, Homo sapiens
aactatagtcagccc

SEQ ID NO: 1688792 - DNA, 15 bp, Homo sapiens
actatagtcagccca

SEQ ID NO: 1688793 - DNA, 15 bp, Homo sapiens
ctatagtcagcccag

SEQ ID NO: 1688794 - DNA, 15 bp, Homo sapiens
tatagtcagcccagt

SEQ ID NO: 1688795 - DNA, 15 bp, Homo sapiens
atagtcagcccagta

SEQ ID NO: 1688796 - DNA, 15 bp, Homo sapiens
tagtcagcccagtaa

SEQ ID NO: 1688797 - DNA, 15 bp, Homo sapiens
agtcagcccagtaaa

SEQ ID NO: 1688798 - DNA, 15 bp, Homo sapiens
gtcagcccagtaaat

SEQ ID NO: 1688799 - DNA, 15 bp, Homo sapiens
tcagcccagtaaatt

SEQ ID NO: 1688800 - DNA, 15 bp, Homo sapiens
cagcccagtaaattt

SEQ ID NO: 1688801 - DNA, 15 bp, Homo sapiens
agcccagtaaatttc

SEQ ID NO: 1688802 - DNA, 15 bp, Homo sapiens
gcccagtaaatttct

SEQ ID NO: 1688803 - DNA, 15 bp, Homo sapiens
cccagtaaatttctt

SEQ ID NO: 1688804 - DNA, 15 bp, Homo sapiens
ccagtaaatttcttg

SEQ ID NO: 1688805 - DNA, 15 bp, Homo sapiens
cagtaaatttcttga

SEQ ID NO: 1688806 - DNA, 15 bp, Homo sapiens
agtaaatttcttgaa

SEQ ID NO: 1688807 - DNA, 15 bp, Homo sapiens
gtaaatttcttgaac

SEQ ID NO: 1688808 - DNA, 15 bp, Homo sapiens
taaatttcttgaact

SEQ ID NO: 1688809 - DNA, 15 bp, Homo sapiens
aaatttcttgaactt

SEQ ID NO: 1688810 - DNA, 15 bp, Homo sapiens
aatttcttgaactta

SEQ ID NO: 1688811 - DNA, 15 bp, Homo sapiens
atttcttgaacttat

SEQ ID NO: 1688812 - DNA, 15 bp, Homo sapiens
tttcttgaacttatt

SEQ ID NO: 1688813 - DNA, 15 bp, Homo sapiens
ttcttgaacttattc

SEQ ID NO: 1688814 - DNA, 15 bp, Homo sapiens
tcttgaacttattcc

SEQ ID NO: 1688815 - DNA, 15 bp, Homo sapiens
cttgaacttattcct

SEQ ID NO: 1688816 - DNA, 15 bp, Homo sapiens
ttgaacttattcctc

SEQ ID NO: 1688817 - DNA, 15 bp, Homo sapiens
tgaacttattcctcc

SEQ ID NO: 1688818 - DNA, 15 bp, Homo sapiens
gaacttattcctcct

SEQ ID NO: 1688819 - DNA, 15 bp, Homo sapiens
aacttattcctccta

SEQ ID NO: 1688820 - DNA, 15 bp, Homo sapiens
acttattcctcctaa

SEQ ID NO: 1688821 - DNA, 15 bp, Homo sapiens
cttattcctcctaat

SEQ ID NO: 1688822 - DNA, 15 bp, Homo sapiens
ttattcctcctaatt

SEQ ID NO: 1688823 - DNA, 15 bp, Homo sapiens
tattcctcctaattg

SEQ ID NO: 1688824 - DNA, 15 bp, Homo sapiens
attcctcctaattga

SEQ ID NO: 1688825 - DNA, 15 bp, Homo sapiens
ttcctcctaattgaa

SEQ ID NO: 1688826 - DNA, 15 bp, Homo sapiens
tcctcctaattgaaa

SEQ ID NO: 1688827 - DNA, 15 bp, Homo sapiens
cctcctaattgaaat

SEQ ID NO: 1688828 - DNA, 15 bp, Homo sapiens
ctcctaattgaaatt

SEQ ID NO: 1688829 - DNA, 15 bp, Homo sapiens
tcctaattgaaattt

SEQ ID NO: 1688830 - DNA, 15 bp, Homo sapiens
cctaattgaaatttt

SEQ ID NO: 1688831 - DNA, 15 bp, Homo sapiens
ctaattgaaattttg

SEQ ID NO: 1688832 - DNA, 15 bp, Homo sapiens
taattgaaattttgt

SEQ ID NO: 1688833 - DNA, 15 bp, Homo sapiens
aattgaaattttgta

SEQ ID NO: 1688834 - DNA, 15 bp, Homo sapiens
attgaaattttgtat

SEQ ID NO: 1688835 - DNA, 15 bp, Homo sapiens
ttgaaattttgtatt

SEQ ID NO: 1688836 - DNA, 15 bp, Homo sapiens
tgaaattttgtattt

SEQ ID NO: 1688837 - DNA, 15 bp, Homo sapiens
gaaattttgtatttt

SEQ ID NO: 1688838 - DNA, 15 bp, Homo sapiens
aattttgtatttttt

SEQ ID NO: 1688839 - DNA, 15 bp, Homo sapiens
attttgtatttttta

SEQ ID NO: 1688840 - DNA, 15 bp, Homo sapiens
ttttgtattttttaa

SEQ ID NO: 1688841 - DNA, 15 bp, Homo sapiens
tttgtattttttaac

SEQ ID NO: 1688842 - DNA, 15 bp, Homo sapiens
ttgtattttttaacc

SEQ ID NO: 1688843 - DNA, 15 bp, Homo sapiens
tgtattttttaacca

SEQ ID NO: 1688844 - DNA, 15 bp, Homo sapiens
gtattttttaaccat

SEQ ID NO: 1688845 - DNA, 15 bp, Homo sapiens
tattttttaaccatc

SEQ ID NO: 1688846 - DNA, 15 bp, Homo sapiens
attttttaaccatct

SEQ ID NO: 1688847 - DNA, 15 bp, Homo sapiens
ttttttaaccatctc

SEQ ID NO: 1688848 - DNA, 15 bp, Homo sapiens
tttttaaccatctcc

SEQ ID NO: 1688849 - DNA, 15 bp, Homo sapiens
ttttaaccatctccc

SEQ ID NO: 1688850 - DNA, 15 bp, Homo sapiens
tttaaccatctccct

SEQ ID NO: 1688851 - DNA, 15 bp, Homo sapiens
taaccatctccctaa

SEQ ID NO: 1688852 - DNA, 15 bp, Homo sapiens
aaccatctccctaat

SEQ ID NO: 1688853 - DNA, 15 bp, Homo sapiens
accatctccctaatc

SEQ ID NO: 1688854 - DNA, 15 bp, Homo sapiens
ccatctccctaatct

SEQ ID NO: 1688855 - DNA, 15 bp, Homo sapiens
catctccctaatctc

SEQ ID NO: 1688856 - DNA, 15 bp, Homo sapiens
atctccctaatctcc

SEQ ID NO: 1688857 - DNA, 15 bp, Homo sapiens
tctccctaatctccc

SEQ ID NO: 1688858 - DNA, 15 bp, Homo sapiens
ctccctaatctcccc

SEQ ID NO: 1688859 - DNA, 15 bp, Homo sapiens
tccctaatctcccca

SEQ ID NO: 1688860 - DNA, 15 bp, Homo sapiens
ccctaatctccccac

SEQ ID NO: 1688861 - DNA, 15 bp, Homo sapiens
cctaatctccccacc

SEQ ID NO: 1688862 - DNA, 15 bp, Homo sapiens
ctaatctccccacct

SEQ ID NO: 1688863 - DNA, 15 bp, Homo sapiens
taatctccccacctc

SEQ ID NO: 1688864 - DNA, 15 bp, Homo sapiens
aatctccccacctct

SEQ ID NO: 1688865 - DNA, 15 bp, Homo sapiens
atctccccacctcta

SEQ ID NO: 1688866 - DNA, 15 bp, Homo sapiens
tctccccacctctag

SEQ ID NO: 1688867 - DNA, 15 bp, Homo sapiens
ctccccacctctagc

SEQ ID NO: 1688868 - DNA, 15 bp, Homo sapiens
tccccacctctagcc

SEQ ID NO: 1688869 - DNA, 15 bp, Homo sapiens
ccccacctctagccc

SEQ ID NO: 1688870 - DNA, 15 bp, Homo sapiens
cccacctctagccct

SEQ ID NO: 1688871 - DNA, 15 bp, Homo sapiens
ccacctctagccctt

SEQ ID NO: 1688872 - DNA, 15 bp, Homo sapiens
cacctctagccctta

SEQ ID NO: 1688873 - DNA, 15 bp, Homo sapiens
acctctagcccttag

SEQ ID NO: 1688874 - DNA, 15 bp, Homo sapiens
cctctagcccttagt

SEQ ID NO: 1688875 - DNA, 15 bp, Homo sapiens
ctctagcccttagta

SEQ ID NO: 1688876 - DNA, 15 bp, Homo sapiens
tctagcccttagtaa

SEQ ID NO: 1688877 - DNA, 15 bp, Homo sapiens
ctagcccttagtaac

SEQ ID NO: 1688878 - DNA, 15 bp, Homo sapiens
tagcccttagtaact

SEQ ID NO: 1688879 - DNA, 15 bp, Homo sapiens
agcccttagtaacta

SEQ ID NO: 1688880 - DNA, 15 bp, Homo sapiens
gcccttagtaactac

SEQ ID NO: 1688881 - DNA, 15 bp, Homo sapiens
cccttagtaactacc

SEQ ID NO: 1688882 - DNA, 15 bp, Homo sapiens
ccttagtaactacca

SEQ ID NO: 1688883 - DNA, 15 bp, Homo sapiens
cttagtaactaccat

SEQ ID NO: 1688884 - DNA, 15 bp, Homo sapiens
ttagtaactaccatt

SEQ ID NO: 1688885 - DNA, 15 bp, Homo sapiens
tagtaactaccattt

SEQ ID NO: 1688886 - DNA, 15 bp, Homo sapiens
agtaactaccatttt

SEQ ID NO: 1688887 - DNA, 15 bp, Homo sapiens
gtaactaccatttta

SEQ ID NO: 1688888 - DNA, 15 bp, Homo sapiens
taactaccattttac

SEQ ID NO: 1688889 - DNA, 15 bp, Homo sapiens
aactaccattttact

SEQ ID NO: 1688890 - DNA, 15 bp, Homo sapiens
actaccattttactc

SEQ ID NO: 1688891 - DNA, 15 bp, Homo sapiens
ctaccattttactct

SEQ ID NO: 1688892 - DNA, 15 bp, Homo sapiens
taccattttactctc

SEQ ID NO: 1688893 - DNA, 15 bp, Homo sapiens
accattttactctct

SEQ ID NO: 1688894 - DNA, 15 bp, Homo sapiens
ccattttactctctg

SEQ ID NO: 1688895 - DNA, 15 bp, Homo sapiens
cattttactctctgc

SEQ ID NO: 1688896 - DNA, 15 bp, Homo sapiens
attttactctctgct

SEQ ID NO: 1688897 - DNA, 15 bp, Homo sapiens
ttttactctctgctt

SEQ ID NO: 1688898 - DNA, 15 bp, Homo sapiens
tttactctctgcttc

SEQ ID NO: 1688899 - DNA, 15 bp, Homo sapiens
ttactctctgcttct

SEQ ID NO: 1688900 - DNA, 15 bp, Homo sapiens
tactctctgcttcta

SEQ ID NO: 1688901 - DNA, 15 bp, Homo sapiens
actctctgcttctat

SEQ ID NO: 1688902 - DNA, 15 bp, Homo sapiens
ctctctgcttctatg

SEQ ID NO: 1688903 - DNA, 15 bp, Homo sapiens
tctctgcttctatga

SEQ ID NO: 1688904 - DNA, 15 bp, Homo sapiens
ctctgcttctatgaa

SEQ ID NO: 1688905 - DNA, 15 bp, Homo sapiens
tctgcttctatgaat

SEQ ID NO: 1688906 - DNA, 15 bp, Homo sapiens
ctgcttctatgaatt

SEQ ID NO: 1688907 - DNA, 15 bp, Homo sapiens
tgcttctatgaattc

SEQ ID NO: 1688908 - DNA, 15 bp, Homo sapiens
gcttctatgaattca

SEQ ID NO: 1688909 - DNA, 15 bp, Homo sapiens
cttctatgaattcaa

SEQ ID NO: 1688910 - DNA, 15 bp, Homo sapiens
ttctatgaattcaaa

SEQ ID NO: 1688911 - DNA, 15 bp, Homo sapiens
tctatgaattcaaat

SEQ ID NO: 1688912 - DNA, 15 bp, Homo sapiens
ctatgaattcaaatt

SEQ ID NO: 1688913 - DNA, 15 bp, Homo sapiens
tatgaattcaaattt

SEQ ID NO: 1688914 - DNA, 15 bp, Homo sapiens
atgaattcaaatttt

SEQ ID NO: 1688915 - DNA, 15 bp, Homo sapiens
tgaattcaaattttt

SEQ ID NO: 1688916 - DNA, 15 bp, Homo sapiens
gaattcaaatttttt

SEQ ID NO: 1688917 - DNA, 15 bp, Homo sapiens
aattcaaatttttta

SEQ ID NO: 1688918 - DNA, 15 bp, Homo sapiens
attcaaattttttag

SEQ ID NO: 1688919 - DNA, 15 bp, Homo sapiens
ttcaaattttttaga

SEQ ID NO: 1688920 - DNA, 15 bp, Homo sapiens
tcaaattttttagat

SEQ ID NO: 1688921 - DNA, 15 bp, Homo sapiens
caaattttttagatg

SEQ ID NO: 1688922 - DNA, 15 bp, Homo sapiens
aaattttttagatgt

SEQ ID NO: 1688923 - DNA, 15 bp, Homo sapiens
aattttttagatgtc

SEQ ID NO: 1688924 - DNA, 15 bp, Homo sapiens
attttttagatgtca

SEQ ID NO: 1688925 - DNA, 15 bp, Homo sapiens
ttttttagatgtcac

SEQ ID NO: 1688926 - DNA, 15 bp, Homo sapiens
tttttagatgtcaca

SEQ ID NO: 1688927 - DNA, 15 bp, Homo sapiens
ttttagatgtcacat

SEQ ID NO: 1688928 - DNA, 15 bp, Homo sapiens
tttagatgtcacatt

SEQ ID NO: 1688929 - DNA, 15 bp, Homo sapiens
ttagatgtcacattt

SEQ ID NO: 1688930 - DNA, 15 bp, Homo sapiens
tagatgtcacattta

SEQ ID NO: 1688931 - DNA, 15 bp, Homo sapiens
agatgtcacatttaa

SEQ ID NO: 1688932 - DNA, 15 bp, Homo sapiens
gatgtcacatttaag

SEQ ID NO: 1688933 - DNA, 15 bp, Homo sapiens
atgtcacatttaagt

SEQ ID NO: 1688934 - DNA, 15 bp, Homo sapiens
tgtcacatttaagtg

SEQ ID NO: 1688935 - DNA, 15 bp, Homo sapiens
gtcacatttaagtga

SEQ ID NO: 1688936 - DNA, 15 bp, Homo sapiens
tcacatttaagtgag

SEQ ID NO: 1688937 - DNA, 15 bp, Homo sapiens
cacatttaagtgaga

SEQ ID NO: 1688938 - DNA, 15 bp, Homo sapiens
acatttaagtgagat

SEQ ID NO: 1688939 - DNA, 15 bp, Homo sapiens
catttaagtgagatt

SEQ ID NO: 1688940 - DNA, 15 bp, Homo sapiens
atttaagtgagatta

SEQ ID NO: 1688941 - DNA, 15 bp, Homo sapiens
tttaagtgagattac

SEQ ID NO: 1688942 - DNA, 15 bp, Homo sapiens
ttaagtgagattaca

SEQ ID NO: 1688943 - DNA, 15 bp, Homo sapiens
taagtgagattacac

SEQ ID NO: 1688944 - DNA, 15 bp, Homo sapiens
aagtgagattacact

SEQ ID NO: 1688945 - DNA, 15 bp, Homo sapiens
agtgagattacactg

SEQ ID NO: 1688946 - DNA, 15 bp, Homo sapiens
gtgagattacactgt

SEQ ID NO: 1688947 - DNA, 15 bp, Homo sapiens
tgagattacactgta

SEQ ID NO: 1688948 - DNA, 15 bp, Homo sapiens
gagattacactgtat

SEQ ID NO: 1688949 - DNA, 15 bp, Homo sapiens
agattacactgtatt

SEQ ID NO: 1688950 - DNA, 15 bp, Homo sapiens
gattacactgtattt

SEQ ID NO: 1688951 - DNA, 15 bp, Homo sapiens
attacactgtatttg

SEQ ID NO: 1688952 - DNA, 15 bp, Homo sapiens
ttacactgtatttgt

SEQ ID NO: 1688953 - DNA, 15 bp, Homo sapiens
tacactgtatttgtc

SEQ ID NO: 1688954 - DNA, 15 bp, Homo sapiens
acactgtatttgtct

SEQ ID NO: 1688955 - DNA, 15 bp, Homo sapiens
cactgtatttgtctt

SEQ ID NO: 1688956 - DNA, 15 bp, Homo sapiens
actgtatttgtcttt

SEQ ID NO: 1688957 - DNA, 15 bp, Homo sapiens
ctgtatttgtctttc

SEQ ID NO: 1688958 - DNA, 15 bp, Homo sapiens
tgtatttgtctttct

SEQ ID NO: 1688959 - DNA, 15 bp, Homo sapiens
gtatttgtctttctg

SEQ ID NO: 1688960 - DNA, 15 bp, Homo sapiens
tatttgtctttctgt

SEQ ID NO: 1688961 - DNA, 15 bp, Homo sapiens
atttgtctttctgtg

SEQ ID NO: 1688962 - DNA, 15 bp, Homo sapiens
cctggcttatttcac

SEQ ID NO: 1688963 - DNA, 15 bp, Homo sapiens
ctggcttatttcact

SEQ ID NO: 1688964 - DNA, 15 bp, Homo sapiens
tggcttatttcactt

SEQ ID NO: 1688965 - DNA, 15 bp, Homo sapiens
ggcttatttcactta

SEQ ID NO: 1688966 - DNA, 15 bp, Homo sapiens
gcttatttcacttaa

SEQ ID NO: 1688967 - DNA, 15 bp, Homo sapiens
cttatttcacttaac

SEQ ID NO: 1688968 - DNA, 15 bp, Homo sapiens
ttatttcacttaaca

SEQ ID NO: 1688969 - DNA, 15 bp, Homo sapiens
tatttcacttaacat

SEQ ID NO: 1688970 - DNA, 15 bp, Homo sapiens
atttcacttaacatg

SEQ ID NO: 1688971 - DNA, 15 bp, Homo sapiens
tttcacttaacatga

SEQ ID NO: 1688972 - DNA, 15 bp, Homo sapiens
ttcacttaacatgat

SEQ ID NO: 1688973 - DNA, 15 bp, Homo sapiens
tcacttaacatgata

SEQ ID NO: 1688974 - DNA, 15 bp, Homo sapiens
cacttaacatgatat

SEQ ID NO: 1688975 - DNA, 15 bp, Homo sapiens
acttaacatgatata

SEQ ID NO: 1688976 - DNA, 15 bp, Homo sapiens
cttaacatgatatac

SEQ ID NO: 1688977 - DNA, 15 bp, Homo sapiens
ttaacatgatatact

SEQ ID NO: 1688978 - DNA, 15 bp, Homo sapiens
taacatgatatactc

SEQ ID NO: 1688979 - DNA, 15 bp, Homo sapiens
aacatgatatactcg

SEQ ID NO: 1688980 - DNA, 15 bp, Homo sapiens
acatgatatactcga

SEQ ID NO: 1688981 - DNA, 15 bp, Homo sapiens
catgatatactcgag

SEQ ID NO: 1688982 - DNA, 15 bp, Homo sapiens
atgatatactcgagg

SEQ ID NO: 1688983 - DNA, 15 bp, Homo sapiens
tgatatactcgaggt

SEQ ID NO: 1688984 - DNA, 15 bp, Homo sapiens
gatatactcgaggtg

SEQ ID NO: 1688985 - DNA, 15 bp, Homo sapiens
atatactcgaggtgc

SEQ ID NO: 1688986 - DNA, 15 bp, Homo sapiens
tatactcgaggtgca

SEQ ID NO: 1688987 - DNA, 15 bp, Homo sapiens
atactcgaggtgcat

SEQ ID NO: 1688988 - DNA, 15 bp, Homo sapiens
tactcgaggtgcatc

SEQ ID NO: 1688989 - DNA, 15 bp, Homo sapiens
actcgaggtgcatct

SEQ ID NO: 1688990 - DNA, 15 bp, Homo sapiens
ctcgaggtgcatctg

SEQ ID NO: 1688991 - DNA, 15 bp, Homo sapiens
tcgaggtgcatctgt

SEQ ID NO: 1688992 - DNA, 15 bp, Homo sapiens
cgaggtgcatctgtg

SEQ ID NO: 1688993 - DNA, 15 bp, Homo sapiens
gaggtgcatctgtgt

SEQ ID NO: 1688994 - DNA, 15 bp, Homo sapiens
aggtgcatctgtgtt

SEQ ID NO: 1688995 - DNA, 15 bp, Homo sapiens
ggtgcatctgtgttg

SEQ ID NO: 1688996 - DNA, 15 bp, Homo sapiens
gtgcatctgtgttgt

SEQ ID NO: 1688997 - DNA, 15 bp, Homo sapiens
tgcatctgtgttgtt

SEQ ID NO: 1688998 - DNA, 15 bp, Homo sapiens
gcatctgtgttgttg

SEQ ID NO: 1688999 - DNA, 15 bp, Homo sapiens
catctgtgttgttgc

SEQ ID NO: 1689000 - DNA, 15 bp, Homo sapiens
atctgtgttgttgca

SEQ ID NO: 1689001 - DNA, 15 bp, Homo sapiens
tctgtgttgttgcaa

SEQ ID NO: 1689002 - DNA, 15 bp, Homo sapiens
ctgtgttgttgcaaa

SEQ ID NO: 1689003 - DNA, 15 bp, Homo sapiens
tgtgttgttgcaaag

SEQ ID NO: 1689004 - DNA, 15 bp, Homo sapiens
gtgttgttgcaaagg

SEQ ID NO: 1689005 - DNA, 15 bp, Homo sapiens
tgttgttgcaaagga

SEQ ID NO: 1689006 - DNA, 15 bp, Homo sapiens
gttgttgcaaaggac

SEQ ID NO: 1689007 - DNA, 15 bp, Homo sapiens
ttgttgcaaaggaca

SEQ ID NO: 1689008 - DNA, 15 bp, Homo sapiens
tgttgcaaaggacag

SEQ ID NO: 1689009 - DNA, 15 bp, Homo sapiens
gttgcaaaggacagg

SEQ ID NO: 1689010 - DNA, 15 bp, Homo sapiens
ttgcaaaggacagga

SEQ ID NO: 1689011 - DNA, 15 bp, Homo sapiens
tgcaaaggacaggat

SEQ ID NO: 1689012 - DNA, 15 bp, Homo sapiens
gcaaaggacaggatt

SEQ ID NO: 1689013 - DNA, 15 bp, Homo sapiens
caaaggacaggattt

SEQ ID NO: 1689014 - DNA, 15 bp, Homo sapiens
aaaggacaggatttt

SEQ ID NO: 1689015 - DNA, 15 bp, Homo sapiens
aaggacaggattttt

SEQ ID NO: 1689016 - DNA, 15 bp, Homo sapiens
aggacaggatttttt

SEQ ID NO: 1689017 - DNA, 15 bp, Homo sapiens
ggacaggattttttt

SEQ ID NO: 1689018 - DNA, 15 bp, Homo sapiens
gacaggattttttta

SEQ ID NO: 1689019 - DNA, 15 bp, Homo sapiens
acaggatttttttaa

SEQ ID NO: 1689020 - DNA, 15 bp, Homo sapiens
caggatttttttaaa

SEQ ID NO: 1689021 - DNA, 15 bp, Homo sapiens
aggatttttttaaaa

SEQ ID NO: 1689022 - DNA, 15 bp, Homo sapiens
atttttttaaaaggc

SEQ ID NO: 1689023 - DNA, 15 bp, Homo sapiens
tttttttaaaaggct

SEQ ID NO: 1689024 - DNA, 15 bp, Homo sapiens
ttttttaaaaggctg

SEQ ID NO: 1689025 - DNA, 15 bp, Homo sapiens
tttttaaaaggctga

SEQ ID NO: 1689026 - DNA, 15 bp, Homo sapiens
ttttaaaaggctgaa

SEQ ID NO: 1689027 - DNA, 15 bp, Homo sapiens
tttaaaaggctgaat

SEQ ID NO: 1689028 - DNA, 15 bp, Homo sapiens
ttaaaaggctgaata

SEQ ID NO: 1689029 - DNA, 15 bp, Homo sapiens
taaaaggctgaataa

SEQ ID NO: 1689030 - DNA, 15 bp, Homo sapiens
aaaaggctgaataat

SEQ ID NO: 1689031 - DNA, 15 bp, Homo sapiens
aaaggctgaataata

SEQ ID NO: 1689032 - DNA, 15 bp, Homo sapiens
taatattccattatc

SEQ ID NO: 1689033 - DNA, 15 bp, Homo sapiens
aatattccattatct

SEQ ID NO: 1689034 - DNA, 15 bp, Homo sapiens
attccattatctata

SEQ ID NO: 1689035 - DNA, 15 bp, Homo sapiens
ttccattatctatat

SEQ ID NO: 1689036 - DNA, 15 bp, Homo sapiens
tccattatctatatg

SEQ ID NO: 1689037 - DNA, 15 bp, Homo sapiens
ccattatctatatgt

SEQ ID NO: 1689038 - DNA, 15 bp, Homo sapiens
cattatctatatgta

SEQ ID NO: 1689039 - DNA, 15 bp, Homo sapiens
attatctatatgtac

SEQ ID NO: 1689040 - DNA, 15 bp, Homo sapiens
ttatctatatgtacc

SEQ ID NO: 1689041 - DNA, 15 bp, Homo sapiens
tatctatatgtacca

SEQ ID NO: 1689042 - DNA, 15 bp, Homo sapiens
atctatatgtaccac

SEQ ID NO: 1689043 - DNA, 15 bp, Homo sapiens
tctatatgtaccaca

SEQ ID NO: 1689044 - DNA, 15 bp, Homo sapiens
ctatatgtaccacat

SEQ ID NO: 1689045 - DNA, 15 bp, Homo sapiens
tatatgtaccacatt

SEQ ID NO: 1689046 - DNA, 15 bp, Homo sapiens
atatgtaccacattt

SEQ ID NO: 1689047 - DNA, 15 bp, Homo sapiens
tatgtaccacatttt

SEQ ID NO: 1689048 - DNA, 15 bp, Homo sapiens
atgtaccacattttc

SEQ ID NO: 1689049 - DNA, 15 bp, Homo sapiens
tttctttatccattc

SEQ ID NO: 1689050 - DNA, 15 bp, Homo sapiens
ctttatccattcatt

SEQ ID NO: 1689051 - DNA, 15 bp, Homo sapiens
atccattcatttgtt

SEQ ID NO: 1689052 - DNA, 15 bp, Homo sapiens
tccattcatttgttg

SEQ ID NO: 1689053 - DNA, 15 bp, Homo sapiens
ccattcatttgttga

SEQ ID NO: 1689054 - DNA, 15 bp, Homo sapiens
cattcatttgttgat

SEQ ID NO: 1689055 - DNA, 15 bp, Homo sapiens
attcatttgttgatg

SEQ ID NO: 1689056 - DNA, 15 bp, Homo sapiens
ttcatttgttgatgg

SEQ ID NO: 1689057 - DNA, 15 bp, Homo sapiens
tcatttgttgatgga

SEQ ID NO: 1689058 - DNA, 15 bp, Homo sapiens
catttgttgatggac

SEQ ID NO: 1689059 - DNA, 15 bp, Homo sapiens
atttgttgatggaca

SEQ ID NO: 1689060 - DNA, 15 bp, Homo sapiens
tttgttgatggacac

SEQ ID NO: 1689061 - DNA, 15 bp, Homo sapiens
ttgttgatggacaca

SEQ ID NO: 1689062 - DNA, 15 bp, Homo sapiens
tgttgatggacacat

SEQ ID NO: 1689063 - DNA, 15 bp, Homo sapiens
gttgatggacacata

SEQ ID NO: 1689064 - DNA, 15 bp, Homo sapiens
ttgatggacacatag

SEQ ID NO: 1689065 - DNA, 15 bp, Homo sapiens
tgatggacacatagg

SEQ ID NO: 1689066 - DNA, 15 bp, Homo sapiens
gatggacacataggt

SEQ ID NO: 1689067 - DNA, 15 bp, Homo sapiens
atggacacataggtg

SEQ ID NO: 1689068 - DNA, 15 bp, Homo sapiens
tggacacataggtgg

SEQ ID NO: 1689069 - DNA, 15 bp, Homo sapiens
ggacacataggtggc

SEQ ID NO: 1689070 - DNA, 15 bp, Homo sapiens
gacacataggtggct

SEQ ID NO: 1689071 - DNA, 15 bp, Homo sapiens
acacataggtggcta

SEQ ID NO: 1689072 - DNA, 15 bp, Homo sapiens
cacataggtggctat

SEQ ID NO: 1689073 - DNA, 15 bp, Homo sapiens
acataggtggctatt

SEQ ID NO: 1689074 - DNA, 15 bp, Homo sapiens
cataggtggctattg

SEQ ID NO: 1689075 - DNA, 15 bp, Homo sapiens
ataggtggctattgt

SEQ ID NO: 1689076 - DNA, 15 bp, Homo sapiens
taggtggctattgtg

SEQ ID NO: 1689077 - DNA, 15 bp, Homo sapiens
aggtggctattgtga

SEQ ID NO: 1689078 - DNA, 15 bp, Homo sapiens
ggtggctattgtgag

SEQ ID NO: 1689079 - DNA, 15 bp, Homo sapiens
gtggctattgtgagt

SEQ ID NO: 1689080 - DNA, 15 bp, Homo sapiens
tggctattgtgagta

SEQ ID NO: 1689081 - DNA, 15 bp, Homo sapiens
ggctattgtgagtaa

SEQ ID NO: 1689082 - DNA, 15 bp, Homo sapiens
gctattgtgagtaat

SEQ ID NO: 1689083 - DNA, 15 bp, Homo sapiens
ctattgtgagtaatg

SEQ ID NO: 1689084 - DNA, 15 bp, Homo sapiens
tattgtgagtaatgc

SEQ ID NO: 1689085 - DNA, 15 bp, Homo sapiens
attgtgagtaatgct

SEQ ID NO: 1689086 - DNA, 15 bp, Homo sapiens
ttgtgagtaatgctg

SEQ ID NO: 1689087 - DNA, 15 bp, Homo sapiens
tgtgagtaatgctgc

SEQ ID NO: 1689088 - DNA, 15 bp, Homo sapiens
gtgagtaatgctgca

SEQ ID NO: 1689089 - DNA, 15 bp, Homo sapiens
tgagtaatgctgcag

SEQ ID NO: 1689090 - DNA, 15 bp, Homo sapiens
gagtaatgctgcagt

SEQ ID NO: 1689091 - DNA, 15 bp, Homo sapiens
agtaatgctgcagtg

SEQ ID NO: 1689092 - DNA, 15 bp, Homo sapiens
gtaatgctgcagtgt

SEQ ID NO: 1689093 - DNA, 15 bp, Homo sapiens
taatgctgcagtgtg

SEQ ID NO: 1689094 - DNA, 15 bp, Homo sapiens
aatgctgcagtgtgc

SEQ ID NO: 1689095 - DNA, 15 bp, Homo sapiens
atgctgcagtgtgca

SEQ ID NO: 1689096 - DNA, 15 bp, Homo sapiens
tgctgcagtgtgcat

SEQ ID NO: 1689097 - DNA, 15 bp, Homo sapiens
gctgcagtgtgcatg

SEQ ID NO: 1689098 - DNA, 15 bp, Homo sapiens
ctgcagtgtgcatgg

SEQ ID NO: 1689099 - DNA, 15 bp, Homo sapiens
tgcagtgtgcatggg

SEQ ID NO: 1689100 - DNA, 15 bp, Homo sapiens
gcagtgtgcatggga

SEQ ID NO: 1689101 - DNA, 15 bp, Homo sapiens
cagtgtgcatgggag

SEQ ID NO: 1689102 - DNA, 15 bp, Homo sapiens
agtgtgcatgggagc

SEQ ID NO: 1689103 - DNA, 15 bp, Homo sapiens
gtgtgcatgggagcg

SEQ ID NO: 1689104 - DNA, 15 bp, Homo sapiens
tgtgcatgggagcgt

SEQ ID NO: 1689105 - DNA, 15 bp, Homo sapiens
gtgcatgggagcgta

SEQ ID NO: 1689106 - DNA, 15 bp, Homo sapiens
tgcatgggagcgtag

SEQ ID NO: 1689107 - DNA, 15 bp, Homo sapiens
gcatgggagcgtaga

SEQ ID NO: 1689108 - DNA, 15 bp, Homo sapiens
catgggagcgtagat

SEQ ID NO: 1689109 - DNA, 15 bp, Homo sapiens
atgggagcgtagata

SEQ ID NO: 1689110 - DNA, 15 bp, Homo sapiens
tgggagcgtagatat

SEQ ID NO: 1689111 - DNA, 15 bp, Homo sapiens
gggagcgtagatatc

SEQ ID NO: 1689112 - DNA, 15 bp, Homo sapiens
ggagcgtagatatct

SEQ ID NO: 1689113 - DNA, 15 bp, Homo sapiens
gagcgtagatatctt

SEQ ID NO: 1689114 - DNA, 15 bp, Homo sapiens
agcgtagatatcttt

SEQ ID NO: 1689115 - DNA, 15 bp, Homo sapiens
gcgtagatatctttt

SEQ ID NO: 1689116 - DNA, 15 bp, Homo sapiens
cgtagatatcttttt

SEQ ID NO: 1689117 - DNA, 15 bp, Homo sapiens
gtagatatctttttg

SEQ ID NO: 1689118 - DNA, 15 bp, Homo sapiens
tagatatctttttga

SEQ ID NO: 1689119 - DNA, 15 bp, Homo sapiens
agatatctttttgat

SEQ ID NO: 1689120 - DNA, 15 bp, Homo sapiens
gatatctttttgata

SEQ ID NO: 1689121 - DNA, 15 bp, Homo sapiens
atatctttttgatat

SEQ ID NO: 1689122 - DNA, 15 bp, Homo sapiens
tatctttttgatata

SEQ ID NO: 1689123 - DNA, 15 bp, Homo sapiens
atctttttgatatat

SEQ ID NO: 1689124 - DNA, 15 bp, Homo sapiens
tctttttgatatatt

SEQ ID NO: 1689125 - DNA, 15 bp, Homo sapiens
ctttttgatatattg

SEQ ID NO: 1689126 - DNA, 15 bp, Homo sapiens
tttttgatatattgg

SEQ ID NO: 1689127 - DNA, 15 bp, Homo sapiens
ttttgatatattggt

SEQ ID NO: 1689128 - DNA, 15 bp, Homo sapiens
tttgatatattggtt

SEQ ID NO: 1689129 - DNA, 15 bp, Homo sapiens
ttgatatattggttt

SEQ ID NO: 1689130 - DNA, 15 bp, Homo sapiens
tgatatattggtttc

SEQ ID NO: 1689131 - DNA, 15 bp, Homo sapiens
gatatattggtttca

SEQ ID NO: 1689132 - DNA, 15 bp, Homo sapiens
atatattggtttcat

SEQ ID NO: 1689133 - DNA, 15 bp, Homo sapiens
tatattggtttcatt

SEQ ID NO: 1689134 - DNA, 15 bp, Homo sapiens
atattggtttcattt

SEQ ID NO: 1689135 - DNA, 15 bp, Homo sapiens
tattggtttcatttt

SEQ ID NO: 1689136 - DNA, 15 bp, Homo sapiens
attggtttcattttc

SEQ ID NO: 1689137 - DNA, 15 bp, Homo sapiens
ttggtttcattttcc

SEQ ID NO: 1689138 - DNA, 15 bp, Homo sapiens
tggtttcattttcct

SEQ ID NO: 1689139 - DNA, 15 bp, Homo sapiens
ggtttcattttcctt

SEQ ID NO: 1689140 - DNA, 15 bp, Homo sapiens
gtttcattttccttg

SEQ ID NO: 1689141 - DNA, 15 bp, Homo sapiens
tttcattttccttgg

SEQ ID NO: 1689142 - DNA, 15 bp, Homo sapiens
ttcattttccttgga

SEQ ID NO: 1689143 - DNA, 15 bp, Homo sapiens
tcattttccttggat

SEQ ID NO: 1689144 - DNA, 15 bp, Homo sapiens
cattttccttggata

SEQ ID NO: 1689145 - DNA, 15 bp, Homo sapiens
attttccttggatat

SEQ ID NO: 1689146 - DNA, 15 bp, Homo sapiens
ttttccttggatata

SEQ ID NO: 1689147 - DNA, 15 bp, Homo sapiens
tttccttggatatat

SEQ ID NO: 1689148 - DNA, 15 bp, Homo sapiens
ttccttggatatata

SEQ ID NO: 1689149 - DNA, 15 bp, Homo sapiens
tccttggatatatac

SEQ ID NO: 1689150 - DNA, 15 bp, Homo sapiens
ccttggatatatacc

SEQ ID NO: 1689151 - DNA, 15 bp, Homo sapiens
cttggatatataccc

SEQ ID NO: 1689152 - DNA, 15 bp, Homo sapiens
ggatatatacccagt

SEQ ID NO: 1689153 - DNA, 15 bp, Homo sapiens
gatatatacccagta

SEQ ID NO: 1689154 - DNA, 15 bp, Homo sapiens
atatatacccagtat

SEQ ID NO: 1689155 - DNA, 15 bp, Homo sapiens
tatatacccagtata

SEQ ID NO: 1689156 - DNA, 15 bp, Homo sapiens
atatacccagtatag

SEQ ID NO: 1689157 - DNA, 15 bp, Homo sapiens
tatacccagtatagg

SEQ ID NO: 1689158 - DNA, 15 bp, Homo sapiens
atacccagtatagga

SEQ ID NO: 1689159 - DNA, 15 bp, Homo sapiens
tacccagtataggat

SEQ ID NO: 1689160 - DNA, 15 bp, Homo sapiens
acccagtataggatt

SEQ ID NO: 1689161 - DNA, 15 bp, Homo sapiens
cccagtataggattg

SEQ ID NO: 1689162 - DNA, 15 bp, Homo sapiens
ccagtataggattgc

SEQ ID NO: 1689163 - DNA, 15 bp, Homo sapiens
cagtataggattgct

SEQ ID NO: 1689164 - DNA, 15 bp, Homo sapiens
agtataggattgcta

SEQ ID NO: 1689165 - DNA, 15 bp, Homo sapiens
gtataggattgctag

SEQ ID NO: 1689166 - DNA, 15 bp, Homo sapiens
tataggattgctagg

SEQ ID NO: 1689167 - DNA, 15 bp, Homo sapiens
ataggattgctaggt

SEQ ID NO: 1689168 - DNA, 15 bp, Homo sapiens
taggattgctaggtt

SEQ ID NO: 1689169 - DNA, 15 bp, Homo sapiens
aggattgctaggtta

SEQ ID NO: 1689170 - DNA, 15 bp, Homo sapiens
ggattgctaggttat

SEQ ID NO: 1689171 - DNA, 15 bp, Homo sapiens
gattgctaggttata

SEQ ID NO: 1689172 - DNA, 15 bp, Homo sapiens
attgctaggttatat

SEQ ID NO: 1689173 - DNA, 15 bp, Homo sapiens
ttgctaggttatata

SEQ ID NO: 1689174 - DNA, 15 bp, Homo sapiens
tgctaggttatatag

SEQ ID NO: 1689175 - DNA, 15 bp, Homo sapiens
gctaggttatatagc

SEQ ID NO: 1689176 - DNA, 15 bp, Homo sapiens
ctaggttatatagca

SEQ ID NO: 1689177 - DNA, 15 bp, Homo sapiens
taggttatatagcag

SEQ ID NO: 1689178 - DNA, 15 bp, Homo sapiens
aggttatatagcagt

SEQ ID NO: 1689179 - DNA, 15 bp, Homo sapiens
ggttatatagcagtt

SEQ ID NO: 1689180 - DNA, 15 bp, Homo sapiens
gttatatagcagttc

SEQ ID NO: 1689181 - DNA, 15 bp, Homo sapiens
ttatatagcagttct

SEQ ID NO: 1689182 - DNA, 15 bp, Homo sapiens
tatatagcagttcta

SEQ ID NO: 1689183 - DNA, 15 bp, Homo sapiens
atatagcagttctat

SEQ ID NO: 1689184 - DNA, 15 bp, Homo sapiens
tatagcagttctatt

SEQ ID NO: 1689185 - DNA, 15 bp, Homo sapiens
atagcagttctattt

SEQ ID NO: 1689186 - DNA, 15 bp, Homo sapiens
tagcagttctatttc

SEQ ID NO: 1689187 - DNA, 15 bp, Homo sapiens
agcagttctatttct

SEQ ID NO: 1689188 - DNA, 15 bp, Homo sapiens
gcagttctatttcta

SEQ ID NO: 1689189 - DNA, 15 bp, Homo sapiens
cagttctatttctaa

SEQ ID NO: 1689190 - DNA, 15 bp, Homo sapiens
agttctatttctaac

SEQ ID NO: 1689191 - DNA, 15 bp, Homo sapiens
gttctatttctaact

SEQ ID NO: 1689192 - DNA, 15 bp, Homo sapiens
ttctatttctaactt

SEQ ID NO: 1689193 - DNA, 15 bp, Homo sapiens
tctatttctaacttt

SEQ ID NO: 1689194 - DNA, 15 bp, Homo sapiens
ctatttctaactttt

SEQ ID NO: 1689195 - DNA, 15 bp, Homo sapiens
tatttctaacttttt

SEQ ID NO: 1689196 - DNA, 15 bp, Homo sapiens
atttctaactttttg

SEQ ID NO: 1689197 - DNA, 15 bp, Homo sapiens
tttctaactttttga

SEQ ID NO: 1689198 - DNA, 15 bp, Homo sapiens
ttctaactttttgag

SEQ ID NO: 1689199 - DNA, 15 bp, Homo sapiens
tctaactttttgagg

SEQ ID NO: 1689200 - DNA, 15 bp, Homo sapiens
ctaactttttgagga

SEQ ID NO: 1689201 - DNA, 15 bp, Homo sapiens
taactttttgaggaa

SEQ ID NO: 1689202 - DNA, 15 bp, Homo sapiens
aactttttgaggaac

SEQ ID NO: 1689203 - DNA, 15 bp, Homo sapiens
actttttgaggaacc

SEQ ID NO: 1689204 - DNA, 15 bp, Homo sapiens
ctttttgaggaacct

SEQ ID NO: 1689205 - DNA, 15 bp, Homo sapiens
tttttgaggaaccta

SEQ ID NO: 1689206 - DNA, 15 bp, Homo sapiens
ttttgaggaacctac

SEQ ID NO: 1689207 - DNA, 15 bp, Homo sapiens
tttgaggaacctaca

SEQ ID NO: 1689208 - DNA, 15 bp, Homo sapiens
ttgaggaacctacat

SEQ ID NO: 1689209 - DNA, 15 bp, Homo sapiens
tgaggaacctacata

SEQ ID NO: 1689210 - DNA, 15 bp, Homo sapiens
gaggaacctacatac

SEQ ID NO: 1689211 - DNA, 15 bp, Homo sapiens
aggaacctacataca

SEQ ID NO: 1689212 - DNA, 15 bp, Homo sapiens
ggaacctacatacat

SEQ ID NO: 1689213 - DNA, 15 bp, Homo sapiens
gaacctacatacata

SEQ ID NO: 1689214 - DNA, 15 bp, Homo sapiens
aacctacatacatat

SEQ ID NO: 1689215 - DNA, 15 bp, Homo sapiens
acctacatacatatt

SEQ ID NO: 1689216 - DNA, 15 bp, Homo sapiens
cctacatacatattt

SEQ ID NO: 1689217 - DNA, 15 bp, Homo sapiens
ctacatacatatttc

SEQ ID NO: 1689218 - DNA, 15 bp, Homo sapiens
tacatacatatttcc

SEQ ID NO: 1689219 - DNA, 15 bp, Homo sapiens
acatacatatttcca

SEQ ID NO: 1689220 - DNA, 15 bp, Homo sapiens
catacatatttccat

SEQ ID NO: 1689221 - DNA, 15 bp, Homo sapiens
atacatatttccata

SEQ ID NO: 1689222 - DNA, 15 bp, Homo sapiens
tacatatttccataa

SEQ ID NO: 1689223 - DNA, 15 bp, Homo sapiens
acatatttccataat

SEQ ID NO: 1689224 - DNA, 15 bp, Homo sapiens
catatttccataatg

SEQ ID NO: 1689225 - DNA, 15 bp, Homo sapiens
atatttccataatga

SEQ ID NO: 1689226 - DNA, 15 bp, Homo sapiens
tatttccataatgac

SEQ ID NO: 1689227 - DNA, 15 bp, Homo sapiens
atttccataatgact

SEQ ID NO: 1689228 - DNA, 15 bp, Homo sapiens
tttccataatgactg

SEQ ID NO: 1689229 - DNA, 15 bp, Homo sapiens
ttccataatgactgt

SEQ ID NO: 1689230 - DNA, 15 bp, Homo sapiens
tccataatgactgta

SEQ ID NO: 1689231 - DNA, 15 bp, Homo sapiens
ccataatgactgtac

SEQ ID NO: 1689232 - DNA, 15 bp, Homo sapiens
cataatgactgtact

SEQ ID NO: 1689233 - DNA, 15 bp, Homo sapiens
ataatgactgtacta

SEQ ID NO: 1689234 - DNA, 15 bp, Homo sapiens
taatgactgtactaa

SEQ ID NO: 1689235 - DNA, 15 bp, Homo sapiens
aatgactgtactaat

SEQ ID NO: 1689236 - DNA, 15 bp, Homo sapiens
atgactgtactaatt

SEQ ID NO: 1689237 - DNA, 15 bp, Homo sapiens
tgactgtactaattt

SEQ ID NO: 1689238 - DNA, 15 bp, Homo sapiens
gactgtactaattta

SEQ ID NO: 1689239 - DNA, 15 bp, Homo sapiens
actgtactaatttac

SEQ ID NO: 1689240 - DNA, 15 bp, Homo sapiens
ctgtactaatttaca

SEQ ID NO: 1689241 - DNA, 15 bp, Homo sapiens
caacagtgtacaagt

SEQ ID NO: 1689242 - DNA, 15 bp, Homo sapiens
aacagtgtacaagtg

SEQ ID NO: 1689243 - DNA, 15 bp, Homo sapiens
acagtgtacaagtgt

SEQ ID NO: 1689244 - DNA, 15 bp, Homo sapiens
cagtgtacaagtgtt

SEQ ID NO: 1689245 - DNA, 15 bp, Homo sapiens
agtgtacaagtgttc

SEQ ID NO: 1689246 - DNA, 15 bp, Homo sapiens
gtgtacaagtgttcc

SEQ ID NO: 1689247 - DNA, 15 bp, Homo sapiens
tgtacaagtgttccc

SEQ ID NO: 1689248 - DNA, 15 bp, Homo sapiens
gtacaagtgttccct

SEQ ID NO: 1689249 - DNA, 15 bp, Homo sapiens
tacaagtgttccctt

SEQ ID NO: 1689250 - DNA, 15 bp, Homo sapiens
acaagtgttcccttt

SEQ ID NO: 1689251 - DNA, 15 bp, Homo sapiens
caagtgttccctttt

SEQ ID NO: 1689252 - DNA, 15 bp, Homo sapiens
aagtgttcccttttt

SEQ ID NO: 1689253 - DNA, 15 bp, Homo sapiens
agtgttccctttttt

SEQ ID NO: 1689254 - DNA, 15 bp, Homo sapiens
gtgttcccttttttc

SEQ ID NO: 1689255 - DNA, 15 bp, Homo sapiens
tgttcccttttttcc

SEQ ID NO: 1689256 - DNA, 15 bp, Homo sapiens
gttcccttttttcca

SEQ ID NO: 1689257 - DNA, 15 bp, Homo sapiens
ttcccttttttccac

SEQ ID NO: 1689258 - DNA, 15 bp, Homo sapiens
tcccttttttccaca

SEQ ID NO: 1689259 - DNA, 15 bp, Homo sapiens
ccttttttccacatt

SEQ ID NO: 1689260 - DNA, 15 bp, Homo sapiens
cttttttccacattc

SEQ ID NO: 1689261 - DNA, 15 bp, Homo sapiens
ttttttccacattct

SEQ ID NO: 1689262 - DNA, 15 bp, Homo sapiens
tttttccacattctt

SEQ ID NO: 1689263 - DNA, 15 bp, Homo sapiens
ttttccacattcttg

SEQ ID NO: 1689264 - DNA, 15 bp, Homo sapiens
tttccacattcttgc

SEQ ID NO: 1689265 - DNA, 15 bp, Homo sapiens
ttccacattcttgcc

SEQ ID NO: 1689266 - DNA, 15 bp, Homo sapiens
tccacattcttgcca

SEQ ID NO: 1689267 - DNA, 15 bp, Homo sapiens
ccacattcttgccat

SEQ ID NO: 1689268 - DNA, 15 bp, Homo sapiens
cacattcttgccatc

SEQ ID NO: 1689269 - DNA, 15 bp, Homo sapiens
acattcttgccatca

SEQ ID NO: 1689270 - DNA, 15 bp, Homo sapiens
cattcttgccatcac

SEQ ID NO: 1689271 - DNA, 15 bp, Homo sapiens
attcttgccatcact

SEQ ID NO: 1689272 - DNA, 15 bp, Homo sapiens
ttcttgccatcactt

SEQ ID NO: 1689273 - DNA, 15 bp, Homo sapiens
tcttgccatcacttg

SEQ ID NO: 1689274 - DNA, 15 bp, Homo sapiens
cttgccatcacttga

SEQ ID NO: 1689275 - DNA, 15 bp, Homo sapiens
ttgccatcacttgat

SEQ ID NO: 1689276 - DNA, 15 bp, Homo sapiens
tgccatcacttgatg

SEQ ID NO: 1689277 - DNA, 15 bp, Homo sapiens
gccatcacttgatgt

SEQ ID NO: 1689278 - DNA, 15 bp, Homo sapiens
ccatcacttgatgtc

SEQ ID NO: 1689279 - DNA, 15 bp, Homo sapiens
catcacttgatgtca

SEQ ID NO: 1689280 - DNA, 15 bp, Homo sapiens
atcacttgatgtcat

SEQ ID NO: 1689281 - DNA, 15 bp, Homo sapiens
tcacttgatgtcatc

SEQ ID NO: 1689282 - DNA, 15 bp, Homo sapiens
cacttgatgtcatcc

SEQ ID NO: 1689283 - DNA, 15 bp, Homo sapiens
acttgatgtcatcct

SEQ ID NO: 1689284 - DNA, 15 bp, Homo sapiens
cttgatgtcatcctt

SEQ ID NO: 1689285 - DNA, 15 bp, Homo sapiens
ttgatgtcatccttc

SEQ ID NO: 1689286 - DNA, 15 bp, Homo sapiens
tgatgtcatccttct

SEQ ID NO: 1689287 - DNA, 15 bp, Homo sapiens
gatgtcatccttctt

SEQ ID NO: 1689288 - DNA, 15 bp, Homo sapiens
atgtcatccttcttt

SEQ ID NO: 1689289 - DNA, 15 bp, Homo sapiens
tgtcatccttctttt

SEQ ID NO: 1689290 - DNA, 15 bp, Homo sapiens
gtcatccttcttttt

SEQ ID NO: 1689291 - DNA, 15 bp, Homo sapiens
tcatccttctttttt

SEQ ID NO: 1689292 - DNA, 15 bp, Homo sapiens
catccttctttttta

SEQ ID NO: 1689293 - DNA, 15 bp, Homo sapiens
atccttcttttttat

SEQ ID NO: 1689294 - DNA, 15 bp, Homo sapiens
tccttcttttttata

SEQ ID NO: 1689295 - DNA, 15 bp, Homo sapiens
ccttcttttttataa

SEQ ID NO: 1689296 - DNA, 15 bp, Homo sapiens
cttcttttttataat

SEQ ID NO: 1689297 - DNA, 15 bp, Homo sapiens
ttcttttttataata

SEQ ID NO: 1689298 - DNA, 15 bp, Homo sapiens
tcttttttataataa

SEQ ID NO: 1689299 - DNA, 15 bp, Homo sapiens
cttttttataataac

SEQ ID NO: 1689300 - DNA, 15 bp, Homo sapiens
ttttttataataacc

SEQ ID NO: 1689301 - DNA, 15 bp, Homo sapiens
tttttataataacca

SEQ ID NO: 1689302 - DNA, 15 bp, Homo sapiens
ttttataataaccag

SEQ ID NO: 1689303 - DNA, 15 bp, Homo sapiens
tttataataaccaga

SEQ ID NO: 1689304 - DNA, 15 bp, Homo sapiens
ttataataaccagac

SEQ ID NO: 1689305 - DNA, 15 bp, Homo sapiens
tataataaccagact

SEQ ID NO: 1689306 - DNA, 15 bp, Homo sapiens
ataataaccagactt

SEQ ID NO: 1689307 - DNA, 15 bp, Homo sapiens
taataaccagacttt

SEQ ID NO: 1689308 - DNA, 15 bp, Homo sapiens
aataaccagactttg

SEQ ID NO: 1689309 - DNA, 15 bp, Homo sapiens
ataaccagactttgc

SEQ ID NO: 1689310 - DNA, 15 bp, Homo sapiens
taaccagactttgct

SEQ ID NO: 1689311 - DNA, 15 bp, Homo sapiens
aaccagactttgctt

SEQ ID NO: 1689312 - DNA, 15 bp, Homo sapiens
accagactttgcttc

SEQ ID NO: 1689313 - DNA, 15 bp, Homo sapiens
ccagactttgcttca

SEQ ID NO: 1689314 - DNA, 15 bp, Homo sapiens
cagactttgcttcat

SEQ ID NO: 1689315 - DNA, 15 bp, Homo sapiens
agactttgcttcatg

SEQ ID NO: 1689316 - DNA, 15 bp, Homo sapiens
gactttgcttcatgt

SEQ ID NO: 1689317 - DNA, 15 bp, Homo sapiens
actttgcttcatgtg

SEQ ID NO: 1689318 - DNA, 15 bp, Homo sapiens
ctttgcttcatgtgt

SEQ ID NO: 1689319 - DNA, 15 bp, Homo sapiens
tttgcttcatgtgtt

SEQ ID NO: 1689320 - DNA, 15 bp, Homo sapiens
ttgcttcatgtgttt

SEQ ID NO: 1689321 - DNA, 15 bp, Homo sapiens
tgcttcatgtgtttt

SEQ ID NO: 1689322 - DNA, 15 bp, Homo sapiens
gcttcatgtgttttg

SEQ ID NO: 1689323 - DNA, 15 bp, Homo sapiens
cttcatgtgttttgg

SEQ ID NO: 1689324 - DNA, 15 bp, Homo sapiens
ttcatgtgttttgga

SEQ ID NO: 1689325 - DNA, 15 bp, Homo sapiens
tcatgtgttttggag

SEQ ID NO: 1689326 - DNA, 15 bp, Homo sapiens
catgtgttttggagg

SEQ ID NO: 1689327 - DNA, 15 bp, Homo sapiens
atgtgttttggaggc

SEQ ID NO: 1689328 - DNA, 15 bp, Homo sapiens
tgtgttttggaggct

SEQ ID NO: 1689329 - DNA, 15 bp, Homo sapiens
gtgttttggaggctc

SEQ ID NO: 1689330 - DNA, 15 bp, Homo sapiens
tgttttggaggctct

SEQ ID NO: 1689331 - DNA, 15 bp, Homo sapiens
gttttggaggctctt

SEQ ID NO: 1689332 - DNA, 15 bp, Homo sapiens
ttttggaggctcttt

SEQ ID NO: 1689333 - DNA, 15 bp, Homo sapiens
tttggaggctctttt

SEQ ID NO: 1689334 - DNA, 15 bp, Homo sapiens
ttggaggctcttttt

SEQ ID NO: 1689335 - DNA, 15 bp, Homo sapiens
tggaggctctttttt

SEQ ID NO: 1689336 - DNA, 15 bp, Homo sapiens
ggaggctcttttttt

SEQ ID NO: 1689337 - DNA, 15 bp, Homo sapiens
gaggctcttttttta

SEQ ID NO: 1689338 - DNA, 15 bp, Homo sapiens
aggctctttttttag

SEQ ID NO: 1689339 - DNA, 15 bp, Homo sapiens
ggctctttttttagg

SEQ ID NO: 1689340 - DNA, 15 bp, Homo sapiens
gctctttttttaggt

SEQ ID NO: 1689341 - DNA, 15 bp, Homo sapiens
ctctttttttaggtg

SEQ ID NO: 1689342 - DNA, 15 bp, Homo sapiens
tctttttttaggtgc

SEQ ID NO: 1689343 - DNA, 15 bp, Homo sapiens
ctttttttaggtgca

SEQ ID NO: 1689344 - DNA, 15 bp, Homo sapiens
tttttttaggtgcat

SEQ ID NO: 1689345 - DNA, 15 bp, Homo sapiens
ttttttaggtgcata

SEQ ID NO: 1689346 - DNA, 15 bp, Homo sapiens
tttttaggtgcatat

SEQ ID NO: 1689347 - DNA, 15 bp, Homo sapiens
ttttaggtgcatata

SEQ ID NO: 1689348 - DNA, 15 bp, Homo sapiens
tttaggtgcatatat

SEQ ID NO: 1689349 - DNA, 15 bp, Homo sapiens
ttaggtgcatatatc

SEQ ID NO: 1689350 - DNA, 15 bp, Homo sapiens
taggtgcatatatct

SEQ ID NO: 1689351 - DNA, 15 bp, Homo sapiens
aggtgcatatatctc

SEQ ID NO: 1689352 - DNA, 15 bp, Homo sapiens
ggtgcatatatctcc

SEQ ID NO: 1689353 - DNA, 15 bp, Homo sapiens
gtgcatatatctcca

SEQ ID NO: 1689354 - DNA, 15 bp, Homo sapiens
tgcatatatctccat

SEQ ID NO: 1689355 - DNA, 15 bp, Homo sapiens
gcatatatctccata

SEQ ID NO: 1689356 - DNA, 15 bp, Homo sapiens
catatatctccataa

SEQ ID NO: 1689357 - DNA, 15 bp, Homo sapiens
atatatctccataaa

SEQ ID NO: 1689358 - DNA, 15 bp, Homo sapiens
tatatctccataaat

SEQ ID NO: 1689359 - DNA, 15 bp, Homo sapiens
atatctccataaatg

SEQ ID NO: 1689360 - DNA, 15 bp, Homo sapiens
tatctccataaatgt

SEQ ID NO: 1689361 - DNA, 15 bp, Homo sapiens
atctccataaatgtt

SEQ ID NO: 1689362 - DNA, 15 bp, Homo sapiens
tctccataaatgtta

SEQ ID NO: 1689363 - DNA, 15 bp, Homo sapiens
ctccataaatgttat

SEQ ID NO: 1689364 - DNA, 15 bp, Homo sapiens
tccataaatgttatc

SEQ ID NO: 1689365 - DNA, 15 bp, Homo sapiens
ccataaatgttatca

SEQ ID NO: 1689366 - DNA, 15 bp, Homo sapiens
cataaatgttatcac

SEQ ID NO: 1689367 - DNA, 15 bp, Homo sapiens
ataaatgttatcact

SEQ ID NO: 1689368 - DNA, 15 bp, Homo sapiens
taaatgttatcactt

SEQ ID NO: 1689369 - DNA, 15 bp, Homo sapiens
aaatgttatcacttc

SEQ ID NO: 1689370 - DNA, 15 bp, Homo sapiens
aatgttatcacttca

SEQ ID NO: 1689371 - DNA, 15 bp, Homo sapiens
atgttatcacttcac

SEQ ID NO: 1689372 - DNA, 15 bp, Homo sapiens
tgttatcacttcacg

SEQ ID NO: 1689373 - DNA, 15 bp, Homo sapiens
gttatcacttcacga

SEQ ID NO: 1689374 - DNA, 15 bp, Homo sapiens
ttatcacttcacgat

SEQ ID NO: 1689375 - DNA, 15 bp, Homo sapiens
tatcacttcacgatg

SEQ ID NO: 1689376 - DNA, 15 bp, Homo sapiens
atcacttcacgatgg

SEQ ID NO: 1689377 - DNA, 15 bp, Homo sapiens
tcacttcacgatgga

SEQ ID NO: 1689378 - DNA, 15 bp, Homo sapiens
cacttcacgatggat

SEQ ID NO: 1689379 - DNA, 15 bp, Homo sapiens
acttcacgatggatt

SEQ ID NO: 1689380 - DNA, 15 bp, Homo sapiens
cttcacgatggattg

SEQ ID NO: 1689381 - DNA, 15 bp, Homo sapiens
ttcacgatggattga

SEQ ID NO: 1689382 - DNA, 15 bp, Homo sapiens
tcacgatggattgac

SEQ ID NO: 1689383 - DNA, 15 bp, Homo sapiens
cacgatggattgacc

SEQ ID NO: 1689384 - DNA, 15 bp, Homo sapiens
acgatggattgaccc

SEQ ID NO: 1689385 - DNA, 15 bp, Homo sapiens
cgatggattgaccct

SEQ ID NO: 1689386 - DNA, 15 bp, Homo sapiens
gatggattgaccctt

SEQ ID NO: 1689387 - DNA, 15 bp, Homo sapiens
atggattgacccttt

SEQ ID NO: 1689388 - DNA, 15 bp, Homo sapiens
tggattgaccctttt

SEQ ID NO: 1689389 - DNA, 15 bp, Homo sapiens
ggattgaccctttta

SEQ ID NO: 1689390 - DNA, 15 bp, Homo sapiens
gattgacccttttat

SEQ ID NO: 1689391 - DNA, 15 bp, Homo sapiens
attgacccttttatc

SEQ ID NO: 1689392 - DNA, 15 bp, Homo sapiens
ttgacccttttatct

SEQ ID NO: 1689393 - DNA, 15 bp, Homo sapiens
tgacccttttatctt

SEQ ID NO: 1689394 - DNA, 15 bp, Homo sapiens
gacccttttatcttt

SEQ ID NO: 1689395 - DNA, 15 bp, Homo sapiens
acccttttatcttta

SEQ ID NO: 1689396 - DNA, 15 bp, Homo sapiens
cccttttatctttac

SEQ ID NO: 1689397 - DNA, 15 bp, Homo sapiens
ccttttatctttaca

SEQ ID NO: 1689398 - DNA, 15 bp, Homo sapiens
cttttatctttacaa

SEQ ID NO: 1689399 - DNA, 15 bp, Homo sapiens
ttttatctttacaaa

SEQ ID NO: 1689400 - DNA, 15 bp, Homo sapiens
tttatctttacaaaa

SEQ ID NO: 1689401 - DNA, 15 bp, Homo sapiens
ttatctttacaaaat

SEQ ID NO: 1689402 - DNA, 15 bp, Homo sapiens
tatctttacaaaatg

SEQ ID NO: 1689403 - DNA, 15 bp, Homo sapiens
atctttacaaaatga

SEQ ID NO: 1689404 - DNA, 15 bp, Homo sapiens
tctttacaaaatgat

SEQ ID NO: 1689405 - DNA, 15 bp, Homo sapiens
ctttacaaaatgatt

SEQ ID NO: 1689406 - DNA, 15 bp, Homo sapiens
tttacaaaatgattt

SEQ ID NO: 1689407 - DNA, 15 bp, Homo sapiens
ttacaaaatgatttt

SEQ ID NO: 1689408 - DNA, 15 bp, Homo sapiens
tacaaaatgattttt

SEQ ID NO: 1689409 - DNA, 15 bp, Homo sapiens
acaaaatgattttta

SEQ ID NO: 1689410 - DNA, 15 bp, Homo sapiens
caaaatgatttttat

SEQ ID NO: 1689411 - DNA, 15 bp, Homo sapiens
aaaatgatttttatc

SEQ ID NO: 1689412 - DNA, 15 bp, Homo sapiens
aaatgatttttatct

SEQ ID NO: 1689413 - DNA, 15 bp, Homo sapiens
aatgatttttatctc

SEQ ID NO: 1689414 - DNA, 15 bp, Homo sapiens
atgatttttatctct

SEQ ID NO: 1689415 - DNA, 15 bp, Homo sapiens
tgatttttatctcta

SEQ ID NO: 1689416 - DNA, 15 bp, Homo sapiens
gatttttatctctag

SEQ ID NO: 1689417 - DNA, 15 bp, Homo sapiens
atttttatctctagt

SEQ ID NO: 1689418 - DNA, 15 bp, Homo sapiens
tttttatctctagta

SEQ ID NO: 1689419 - DNA, 15 bp, Homo sapiens
ttttatctctagtaa

SEQ ID NO: 1689420 - DNA, 15 bp, Homo sapiens
tttatctctagtaac

SEQ ID NO: 1689421 - DNA, 15 bp, Homo sapiens
ttatctctagtaaca

SEQ ID NO: 1689422 - DNA, 15 bp, Homo sapiens
tatctctagtaacaa

SEQ ID NO: 1689423 - DNA, 15 bp, Homo sapiens
atctctagtaacaag

SEQ ID NO: 1689424 - DNA, 15 bp, Homo sapiens
tctctagtaacaagt

SEQ ID NO: 1689425 - DNA, 15 bp, Homo sapiens
ctctagtaacaagtt

SEQ ID NO: 1689426 - DNA, 15 bp, Homo sapiens
tctagtaacaagttt

SEQ ID NO: 1689427 - DNA, 15 bp, Homo sapiens
ctagtaacaagtttt

SEQ ID NO: 1689428 - DNA, 15 bp, Homo sapiens
tagtaacaagttttt

SEQ ID NO: 1689429 - DNA, 15 bp, Homo sapiens
agtaacaagttttta

SEQ ID NO: 1689430 - DNA, 15 bp, Homo sapiens
gtaacaagtttttaa

SEQ ID NO: 1689431 - DNA, 15 bp, Homo sapiens
taacaagtttttaaa

SEQ ID NO: 1689432 - DNA, 15 bp, Homo sapiens
aacaagtttttaaag

SEQ ID NO: 1689433 - DNA, 15 bp, Homo sapiens
acaagtttttaaagt

SEQ ID NO: 1689434 - DNA, 15 bp, Homo sapiens
caagtttttaaagtc

SEQ ID NO: 1689435 - DNA, 15 bp, Homo sapiens
aagtttttaaagtcc

SEQ ID NO: 1689436 - DNA, 15 bp, Homo sapiens
agtttttaaagtcca

SEQ ID NO: 1689437 - DNA, 15 bp, Homo sapiens
gtttttaaagtccat

SEQ ID NO: 1689438 - DNA, 15 bp, Homo sapiens
tttttaaagtccatt

SEQ ID NO: 1689439 - DNA, 15 bp, Homo sapiens
ttttaaagtccattt

SEQ ID NO: 1689440 - DNA, 15 bp, Homo sapiens
tttaaagtccatttt

SEQ ID NO: 1689441 - DNA, 15 bp, Homo sapiens
ttaaagtccattttg

SEQ ID NO: 1689442 - DNA, 15 bp, Homo sapiens
taaagtccattttgt

SEQ ID NO: 1689443 - DNA, 15 bp, Homo sapiens
aaagtccattttgtc

SEQ ID NO: 1689444 - DNA, 15 bp, Homo sapiens
aagtccattttgtct

SEQ ID NO: 1689445 - DNA, 15 bp, Homo sapiens
agtccattttgtctg

SEQ ID NO: 1689446 - DNA, 15 bp, Homo sapiens
gtccattttgtctga

SEQ ID NO: 1689447 - DNA, 15 bp, Homo sapiens
tccattttgtctgat

SEQ ID NO: 1689448 - DNA, 15 bp, Homo sapiens
ccattttgtctgata

SEQ ID NO: 1689449 - DNA, 15 bp, Homo sapiens
cattttgtctgatat

SEQ ID NO: 1689450 - DNA, 15 bp, Homo sapiens
attttgtctgatatt

SEQ ID NO: 1689451 - DNA, 15 bp, Homo sapiens
ttttgtctgatatta

SEQ ID NO: 1689452 - DNA, 15 bp, Homo sapiens
tttgtctgatattag

SEQ ID NO: 1689453 - DNA, 15 bp, Homo sapiens
ttgtctgatattagt

SEQ ID NO: 1689454 - DNA, 15 bp, Homo sapiens
tgtctgatattagta

SEQ ID NO: 1689455 - DNA, 15 bp, Homo sapiens
gtctgatattagtat

SEQ ID NO: 1689456 - DNA, 15 bp, Homo sapiens
tctgatattagtata

SEQ ID NO: 1689457 - DNA, 15 bp, Homo sapiens
ctgatattagtatag

SEQ ID NO: 1689458 - DNA, 15 bp, Homo sapiens
tgatattagtatagc

SEQ ID NO: 1689459 - DNA, 15 bp, Homo sapiens
gatattagtatagcc

SEQ ID NO: 1689460 - DNA, 15 bp, Homo sapiens
atattagtatagcca

SEQ ID NO: 1689461 - DNA, 15 bp, Homo sapiens
tattagtatagccac

SEQ ID NO: 1689462 - DNA, 15 bp, Homo sapiens
attagtatagccact

SEQ ID NO: 1689463 - DNA, 15 bp, Homo sapiens
ttagtatagccactc

SEQ ID NO: 1689464 - DNA, 15 bp, Homo sapiens
tagtatagccactcc

SEQ ID NO: 1689465 - DNA, 15 bp, Homo sapiens
agtatagccactcct

SEQ ID NO: 1689466 - DNA, 15 bp, Homo sapiens
gtatagccactcctg

SEQ ID NO: 1689467 - DNA, 15 bp, Homo sapiens
tatagccactcctgg

SEQ ID NO: 1689468 - DNA, 15 bp, Homo sapiens
atagccactcctggg

SEQ ID NO: 1689469 - DNA, 15 bp, Homo sapiens
tagccactcctgggt

SEQ ID NO: 1689470 - DNA, 15 bp, Homo sapiens
agccactcctgggtt

SEQ ID NO: 1689471 - DNA, 15 bp, Homo sapiens
gccactcctgggttc

SEQ ID NO: 1689472 - DNA, 15 bp, Homo sapiens
ccactcctgggttct

SEQ ID NO: 1689473 - DNA, 15 bp, Homo sapiens
cactcctgggttctt

SEQ ID NO: 1689474 - DNA, 15 bp, Homo sapiens
actcctgggttctta

SEQ ID NO: 1689475 - DNA, 15 bp, Homo sapiens
ctcctgggttcttac

SEQ ID NO: 1689476 - DNA, 15 bp, Homo sapiens
tcctgggttcttacg

SEQ ID NO: 1689477 - DNA, 15 bp, Homo sapiens
cctgggttcttacgg

SEQ ID NO: 1689478 - DNA, 15 bp, Homo sapiens
ctgggttcttacggt

SEQ ID NO: 1689479 - DNA, 15 bp, Homo sapiens
tgggttcttacggtt

SEQ ID NO: 1689480 - DNA, 15 bp, Homo sapiens
gggttcttacggttg

SEQ ID NO: 1689481 - DNA, 15 bp, Homo sapiens
ggttcttacggttgc

SEQ ID NO: 1689482 - DNA, 15 bp, Homo sapiens
gttcttacggttgct

SEQ ID NO: 1689483 - DNA, 15 bp, Homo sapiens
ttcttacggttgctt

SEQ ID NO: 1689484 - DNA, 15 bp, Homo sapiens
tcttacggttgcttt

SEQ ID NO: 1689485 - DNA, 15 bp, Homo sapiens
cttacggttgctttt

SEQ ID NO: 1689486 - DNA, 15 bp, Homo sapiens
ttacggttgcttttt

SEQ ID NO: 1689487 - DNA, 15 bp, Homo sapiens
tacggttgctttttg

SEQ ID NO: 1689488 - DNA, 15 bp, Homo sapiens
acggttgctttttga

SEQ ID NO: 1689489 - DNA, 15 bp, Homo sapiens
cggttgctttttgaa

SEQ ID NO: 1689490 - DNA, 15 bp, Homo sapiens
ggttgctttttgaaa

SEQ ID NO: 1689491 - DNA, 15 bp, Homo sapiens
gttgctttttgaaat

SEQ ID NO: 1689492 - DNA, 15 bp, Homo sapiens
ttgctttttgaaatg

SEQ ID NO: 1689493 - DNA, 15 bp, Homo sapiens
tgctttttgaaatga

SEQ ID NO: 1689494 - DNA, 15 bp, Homo sapiens
gctttttgaaatgat

SEQ ID NO: 1689495 - DNA, 15 bp, Homo sapiens
ctttttgaaatgatt

SEQ ID NO: 1689496 - DNA, 15 bp, Homo sapiens
tttttgaaatgattt

SEQ ID NO: 1689497 - DNA, 15 bp, Homo sapiens
ttttgaaatgatttt

SEQ ID NO: 1689498 - DNA, 15 bp, Homo sapiens
tttgaaatgattttg

SEQ ID NO: 1689499 - DNA, 15 bp, Homo sapiens
ttgaaatgattttgt

SEQ ID NO: 1689500 - DNA, 15 bp, Homo sapiens
tgaaatgattttgtt

SEQ ID NO: 1689501 - DNA, 15 bp, Homo sapiens
gaaatgattttgttt

SEQ ID NO: 1689502 - DNA, 15 bp, Homo sapiens
aatgattttgttttt

SEQ ID NO: 1689503 - DNA, 15 bp, Homo sapiens
atgattttgtttttc

SEQ ID NO: 1689504 - DNA, 15 bp, Homo sapiens
tgattttgtttttct

SEQ ID NO: 1689505 - DNA, 15 bp, Homo sapiens
gattttgtttttcta

SEQ ID NO: 1689506 - DNA, 15 bp, Homo sapiens
attttgtttttctat

SEQ ID NO: 1689507 - DNA, 15 bp, Homo sapiens
ttttgtttttctatc

SEQ ID NO: 1689508 - DNA, 15 bp, Homo sapiens
tttgtttttctatct

SEQ ID NO: 1689509 - DNA, 15 bp, Homo sapiens
ttgtttttctatctt

SEQ ID NO: 1689510 - DNA, 15 bp, Homo sapiens
tgtttttctatcttt

SEQ ID NO: 1689511 - DNA, 15 bp, Homo sapiens
gtttttctatctttt

SEQ ID NO: 1689512 - DNA, 15 bp, Homo sapiens
tttttctatcttttt

SEQ ID NO: 1689513 - DNA, 15 bp, Homo sapiens
ttttctatctttttg

SEQ ID NO: 1689514 - DNA, 15 bp, Homo sapiens
tttctatctttttgt

SEQ ID NO: 1689515 - DNA, 15 bp, Homo sapiens
ttctatctttttgtt

SEQ ID NO: 1689516 - DNA, 15 bp, Homo sapiens
tctatctttttgttt

SEQ ID NO: 1689517 - DNA, 15 bp, Homo sapiens
ctatctttttgtttc

SEQ ID NO: 1689518 - DNA, 15 bp, Homo sapiens
tatctttttgtttca

SEQ ID NO: 1689519 - DNA, 15 bp, Homo sapiens
atctttttgtttcaa

SEQ ID NO: 1689520 - DNA, 15 bp, Homo sapiens
tctttttgtttcaac

SEQ ID NO: 1689521 - DNA, 15 bp, Homo sapiens
ctttttgtttcaacc

SEQ ID NO: 1689522 - DNA, 15 bp, Homo sapiens
tttttgtttcaacct

SEQ ID NO: 1689523 - DNA, 15 bp, Homo sapiens
ttttgtttcaacctg

SEQ ID NO: 1689524 - DNA, 15 bp, Homo sapiens
tttgtttcaacctgt

SEQ ID NO: 1689525 - DNA, 15 bp, Homo sapiens
ttgtttcaacctgtt

SEQ ID NO: 1689526 - DNA, 15 bp, Homo sapiens
tgtttcaacctgttt

SEQ ID NO: 1689527 - DNA, 15 bp, Homo sapiens
gtttcaacctgtttg

SEQ ID NO: 1689528 - DNA, 15 bp, Homo sapiens
tttcaacctgtttgt

SEQ ID NO: 1689529 - DNA, 15 bp, Homo sapiens
ttcaacctgtttgta

SEQ ID NO: 1689530 - DNA, 15 bp, Homo sapiens
tcaacctgtttgtat

SEQ ID NO: 1689531 - DNA, 15 bp, Homo sapiens
caacctgtttgtatc

SEQ ID NO: 1689532 - DNA, 15 bp, Homo sapiens
aacctgtttgtatct

SEQ ID NO: 1689533 - DNA, 15 bp, Homo sapiens
acctgtttgtatctt

SEQ ID NO: 1689534 - DNA, 15 bp, Homo sapiens
cctgtttgtatcttt

SEQ ID NO: 1689535 - DNA, 15 bp, Homo sapiens
ctgtttgtatctttg

SEQ ID NO: 1689536 - DNA, 15 bp, Homo sapiens
tgtttgtatctttgg

SEQ ID NO: 1689537 - DNA, 15 bp, Homo sapiens
gtttgtatctttgga

SEQ ID NO: 1689538 - DNA, 15 bp, Homo sapiens
tttgtatctttggat

SEQ ID NO: 1689539 - DNA, 15 bp, Homo sapiens
ttgtatctttggatc

SEQ ID NO: 1689540 - DNA, 15 bp, Homo sapiens
tgtatctttggatct

SEQ ID NO: 1689541 - DNA, 15 bp, Homo sapiens
gtatctttggatcta

SEQ ID NO: 1689542 - DNA, 15 bp, Homo sapiens
tatctttggatctaa

SEQ ID NO: 1689543 - DNA, 15 bp, Homo sapiens
atctttggatctaaa

SEQ ID NO: 1689544 - DNA, 15 bp, Homo sapiens
tctttggatctaaag

SEQ ID NO: 1689545 - DNA, 15 bp, Homo sapiens
ctttggatctaaagt

SEQ ID NO: 1689546 - DNA, 15 bp, Homo sapiens
tttggatctaaagtg

SEQ ID NO: 1689547 - DNA, 15 bp, Homo sapiens
ttggatctaaagtgt

SEQ ID NO: 1689548 - DNA, 15 bp, Homo sapiens
tggatctaaagtgtg

SEQ ID NO: 1689549 - DNA, 15 bp, Homo sapiens
ggatctaaagtgtgt

SEQ ID NO: 1689550 - DNA, 15 bp, Homo sapiens
gatctaaagtgtgtc

SEQ ID NO: 1689551 - DNA, 15 bp, Homo sapiens
tctaaagtgtgtctc

SEQ ID NO: 1689552 - DNA, 15 bp, Homo sapiens
ctaaagtgtgtctcc

SEQ ID NO: 1689553 - DNA, 15 bp, Homo sapiens
taaagtgtgtctcct

SEQ ID NO: 1689554 - DNA, 15 bp, Homo sapiens
aaagtgtgtctcctg

SEQ ID NO: 1689555 - DNA, 15 bp, Homo sapiens
aagtgtgtctcctgt

SEQ ID NO: 1689556 - DNA, 15 bp, Homo sapiens
agtgtgtctcctgta

SEQ ID NO: 1689557 - DNA, 15 bp, Homo sapiens
gtgtgtctcctgtag

SEQ ID NO: 1689558 - DNA, 15 bp, Homo sapiens
tgtgtctcctgtaga

SEQ ID NO: 1689559 - DNA, 15 bp, Homo sapiens
gtgtctcctgtagac

SEQ ID NO: 1689560 - DNA, 15 bp, Homo sapiens
tgtctcctgtagaca

SEQ ID NO: 1689561 - DNA, 15 bp, Homo sapiens
gtctcctgtagacag

SEQ ID NO: 1689562 - DNA, 15 bp, Homo sapiens
tctcctgtagacagt

SEQ ID NO: 1689563 - DNA, 15 bp, Homo sapiens
ctcctgtagacagta

SEQ ID NO: 1689564 - DNA, 15 bp, Homo sapiens
tcctgtagacagtac

SEQ ID NO: 1689565 - DNA, 15 bp, Homo sapiens
cctgtagacagtaca

SEQ ID NO: 1689566 - DNA, 15 bp, Homo sapiens
ctgtagacagtacat

SEQ ID NO: 1689567 - DNA, 15 bp, Homo sapiens
tgtagacagtacata

SEQ ID NO: 1689568 - DNA, 15 bp, Homo sapiens
gtagacagtacatag

SEQ ID NO: 1689569 - DNA, 15 bp, Homo sapiens
tagacagtacatagt

SEQ ID NO: 1689570 - DNA, 15 bp, Homo sapiens
agacagtacatagtt

SEQ ID NO: 1689571 - DNA, 15 bp, Homo sapiens
gacagtacatagttg

SEQ ID NO: 1689572 - DNA, 15 bp, Homo sapiens
acagtacatagttgg

SEQ ID NO: 1689573 - DNA, 15 bp, Homo sapiens
cagtacatagttgga

SEQ ID NO: 1689574 - DNA, 15 bp, Homo sapiens
agtacatagttggat

SEQ ID NO: 1689575 - DNA, 15 bp, Homo sapiens
gtacatagttggatc

SEQ ID NO: 1689576 - DNA, 15 bp, Homo sapiens
tacatagttggatct

SEQ ID NO: 1689577 - DNA, 15 bp, Homo sapiens
acatagttggatctt

SEQ ID NO: 1689578 - DNA, 15 bp, Homo sapiens
catagttggatcttg

SEQ ID NO: 1689579 - DNA, 15 bp, Homo sapiens
atagttggatcttgt

SEQ ID NO: 1689580 - DNA, 15 bp, Homo sapiens
tagttggatcttgtt

SEQ ID NO: 1689581 - DNA, 15 bp, Homo sapiens
agttggatcttgttt

SEQ ID NO: 1689582 - DNA, 15 bp, Homo sapiens
gttggatcttgtttt

SEQ ID NO: 1689583 - DNA, 15 bp, Homo sapiens
ttggatcttgtttta

SEQ ID NO: 1689584 - DNA, 15 bp, Homo sapiens
tggatcttgttttat

SEQ ID NO: 1689585 - DNA, 15 bp, Homo sapiens
ggatcttgttttatt

SEQ ID NO: 1689586 - DNA, 15 bp, Homo sapiens
gatcttgttttattt

SEQ ID NO: 1689587 - DNA, 15 bp, Homo sapiens
atcttgttttattta

SEQ ID NO: 1689588 - DNA, 15 bp, Homo sapiens
tcttgttttatttaa

SEQ ID NO: 1689589 - DNA, 15 bp, Homo sapiens
cttgttttatttaat

SEQ ID NO: 1689590 - DNA, 15 bp, Homo sapiens
ttgttttatttaatg

SEQ ID NO: 1689591 - DNA, 15 bp, Homo sapiens
tgttttatttaatgc

SEQ ID NO: 1689592 - DNA, 15 bp, Homo sapiens
gttttatttaatgca

SEQ ID NO: 1689593 - DNA, 15 bp, Homo sapiens
ttttatttaatgcaa

SEQ ID NO: 1689594 - DNA, 15 bp, Homo sapiens
tttatttaatgcaat

SEQ ID NO: 1689595 - DNA, 15 bp, Homo sapiens
ttatttaatgcaatc

SEQ ID NO: 1689596 - DNA, 15 bp, Homo sapiens
tatttaatgcaatct

SEQ ID NO: 1689597 - DNA, 15 bp, Homo sapiens
atttaatgcaatctg

SEQ ID NO: 1689598 - DNA, 15 bp, Homo sapiens
tttaatgcaatctga

SEQ ID NO: 1689599 - DNA, 15 bp, Homo sapiens
ttaatgcaatctgac

SEQ ID NO: 1689600 - DNA, 15 bp, Homo sapiens
taatgcaatctgaca

SEQ ID NO: 1689601 - DNA, 15 bp, Homo sapiens
aatgcaatctgacaa

SEQ ID NO: 1689602 - DNA, 15 bp, Homo sapiens
atgcaatctgacaat

SEQ ID NO: 1689603 - DNA, 15 bp, Homo sapiens
tgcaatctgacaatc

SEQ ID NO: 1689604 - DNA, 15 bp, Homo sapiens
gcaatctgacaatct

SEQ ID NO: 1689605 - DNA, 15 bp, Homo sapiens
caatctgacaatctc

SEQ ID NO: 1689606 - DNA, 15 bp, Homo sapiens
aatctgacaatctct

SEQ ID NO: 1689607 - DNA, 15 bp, Homo sapiens
atctgacaatctctg

SEQ ID NO: 1689608 - DNA, 15 bp, Homo sapiens
tctgacaatctctgt

SEQ ID NO: 1689609 - DNA, 15 bp, Homo sapiens
ctgacaatctctgtc

SEQ ID NO: 1689610 - DNA, 15 bp, Homo sapiens
tgacaatctctgtct

SEQ ID NO: 1689611 - DNA, 15 bp, Homo sapiens
gacaatctctgtctt

SEQ ID NO: 1689612 - DNA, 15 bp, Homo sapiens
acaatctctgtcttt

SEQ ID NO: 1689613 - DNA, 15 bp, Homo sapiens
caatctctgtctttt

SEQ ID NO: 1689614 - DNA, 15 bp, Homo sapiens
aatctctgtcttttg

SEQ ID NO: 1689615 - DNA, 15 bp, Homo sapiens
atctctgtcttttga

SEQ ID NO: 1689616 - DNA, 15 bp, Homo sapiens
tctctgtcttttgat

SEQ ID NO: 1689617 - DNA, 15 bp, Homo sapiens
ctctgtcttttgatt

SEQ ID NO: 1689618 - DNA, 15 bp, Homo sapiens
tctgtcttttgattg

SEQ ID NO: 1689619 - DNA, 15 bp, Homo sapiens
ctgtcttttgattgt

SEQ ID NO: 1689620 - DNA, 15 bp, Homo sapiens
tgtcttttgattgta

SEQ ID NO: 1689621 - DNA, 15 bp, Homo sapiens
gtcttttgattgtat

SEQ ID NO: 1689622 - DNA, 15 bp, Homo sapiens
tcttttgattgtatt

SEQ ID NO: 1689623 - DNA, 15 bp, Homo sapiens
cttttgattgtattg

SEQ ID NO: 1689624 - DNA, 15 bp, Homo sapiens
ttttgattgtattgt

SEQ ID NO: 1689625 - DNA, 15 bp, Homo sapiens
tttgattgtattgtt

SEQ ID NO: 1689626 - DNA, 15 bp, Homo sapiens
ttgattgtattgttt

SEQ ID NO: 1689627 - DNA, 15 bp, Homo sapiens
tgattgtattgttta

SEQ ID NO: 1689628 - DNA, 15 bp, Homo sapiens
gattgtattgtttaa

SEQ ID NO: 1689629 - DNA, 15 bp, Homo sapiens
attgtattgtttaat

SEQ ID NO: 1689630 - DNA, 15 bp, Homo sapiens
ttgtattgtttaatc

SEQ ID NO: 1689631 - DNA, 15 bp, Homo sapiens
tgtattgtttaatcc

SEQ ID NO: 1689632 - DNA, 15 bp, Homo sapiens
gtattgtttaatcca

SEQ ID NO: 1689633 - DNA, 15 bp, Homo sapiens
tattgtttaatccat

SEQ ID NO: 1689634 - DNA, 15 bp, Homo sapiens
attgtttaatccatt

SEQ ID NO: 1689635 - DNA, 15 bp, Homo sapiens
ttgtttaatccatta

SEQ ID NO: 1689636 - DNA, 15 bp, Homo sapiens
tgtttaatccattat

SEQ ID NO: 1689637 - DNA, 15 bp, Homo sapiens
gtttaatccattata

SEQ ID NO: 1689638 - DNA, 15 bp, Homo sapiens
tttaatccattatat

SEQ ID NO: 1689639 - DNA, 15 bp, Homo sapiens
ttaatccattatatg

SEQ ID NO: 1689640 - DNA, 15 bp, Homo sapiens
taatccattatatgt

SEQ ID NO: 1689641 - DNA, 15 bp, Homo sapiens
aatccattatatgta

SEQ ID NO: 1689642 - DNA, 15 bp, Homo sapiens
atccattatatgtaa

SEQ ID NO: 1689643 - DNA, 15 bp, Homo sapiens
tccattatatgtaaa

SEQ ID NO: 1689644 - DNA, 15 bp, Homo sapiens
ccattatatgtaaaa

SEQ ID NO: 1689645 - DNA, 15 bp, Homo sapiens
cattatatgtaaaac

SEQ ID NO: 1689646 - DNA, 15 bp, Homo sapiens
attatatgtaaaaca

SEQ ID NO: 1689647 - DNA, 15 bp, Homo sapiens
ttatatgtaaaacaa

SEQ ID NO: 1689648 - DNA, 15 bp, Homo sapiens
tatatgtaaaacaaa

SEQ ID NO: 1689649 - DNA, 15 bp, Homo sapiens
atatgtaaaacaaac

SEQ ID NO: 1689650 - DNA, 15 bp, Homo sapiens
tatgtaaaacaaaca

SEQ ID NO: 1689651 - DNA, 15 bp, Homo sapiens
atgtaaaacaaacat

SEQ ID NO: 1689652 - DNA, 15 bp, Homo sapiens
tgtaaaacaaacata

SEQ ID NO: 1689653 - DNA, 15 bp, Homo sapiens
gtaaaacaaacataa

SEQ ID NO: 1689654 - DNA, 15 bp, Homo sapiens
taaaacaaacataac

SEQ ID NO: 1689655 - DNA, 15 bp, Homo sapiens
aaaacaaacataaca

SEQ ID NO: 1689656 - DNA, 15 bp, Homo sapiens
aaacaaacataacat

SEQ ID NO: 1689657 - DNA, 15 bp, Homo sapiens
aacaaacataacatc

SEQ ID NO: 1689658 - DNA, 15 bp, Homo sapiens
acaaacataacatcc

SEQ ID NO: 1689659 - DNA, 15 bp, Homo sapiens
caaacataacatcct

SEQ ID NO: 1689660 - DNA, 15 bp, Homo sapiens
aaacataacatcctg

SEQ ID NO: 1689661 - DNA, 15 bp, Homo sapiens
aacataacatcctga

SEQ ID NO: 1689662 - DNA, 15 bp, Homo sapiens
acataacatcctgaa

SEQ ID NO: 1689663 - DNA, 15 bp, Homo sapiens
cataacatcctgaaa

SEQ ID NO: 1689664 - DNA, 15 bp, Homo sapiens
ataacatcctgaaaa

SEQ ID NO: 1689665 - DNA, 15 bp, Homo sapiens
taacatcctgaaaag

SEQ ID NO: 1689666 - DNA, 15 bp, Homo sapiens
aacatcctgaaaagt

SEQ ID NO: 1689667 - DNA, 15 bp, Homo sapiens
acatcctgaaaagtg

SEQ ID NO: 1689668 - DNA, 15 bp, Homo sapiens
catcctgaaaagtgg

SEQ ID NO: 1689669 - DNA, 15 bp, Homo sapiens
atcctgaaaagtggg

SEQ ID NO: 1689670 - DNA, 15 bp, Homo sapiens
tcctgaaaagtgggg

SEQ ID NO: 1689671 - DNA, 15 bp, Homo sapiens
cctgaaaagtggggg

SEQ ID NO: 1689672 - DNA, 15 bp, Homo sapiens
ctgaaaagtgggggg

SEQ ID NO: 1689673 - DNA, 15 bp, Homo sapiens
tgaaaagtgggggga

SEQ ID NO: 1689674 - DNA, 15 bp, Homo sapiens
gaaaagtggggggaa

SEQ ID NO: 1689675 - DNA, 15 bp, Homo sapiens
aaaagtggggggaaa

SEQ ID NO: 1689676 - DNA, 15 bp, Homo sapiens
aaagtggggggaaaa

SEQ ID NO: 1689677 - DNA, 15 bp, Homo sapiens
aagtggggggaaaaa

SEQ ID NO: 1689678 - DNA, 15 bp, Homo sapiens
agtggggggaaaaag

SEQ ID NO: 1689679 - DNA, 15 bp, Homo sapiens
gtggggggaaaaagt

SEQ ID NO: 1689680 - DNA, 15 bp, Homo sapiens
tggggggaaaaagtc

SEQ ID NO: 1689681 - DNA, 15 bp, Homo sapiens
ggggggaaaaagtca

SEQ ID NO: 1689682 - DNA, 15 bp, Homo sapiens
gggggaaaaagtcaa

SEQ ID NO: 1689683 - DNA, 15 bp, Homo sapiens
ggggaaaaagtcaac

SEQ ID NO: 1689684 - DNA, 15 bp, Homo sapiens
gggaaaaagtcaact

SEQ ID NO: 1689685 - DNA, 15 bp, Homo sapiens
ggaaaaagtcaactg

SEQ ID NO: 1689686 - DNA, 15 bp, Homo sapiens
gaaaaagtcaactgg

SEQ ID NO: 1689687 - DNA, 15 bp, Homo sapiens
aaaaagtcaactggc

SEQ ID NO: 1689688 - DNA, 15 bp, Homo sapiens
aaaagtcaactggct

SEQ ID NO: 1689689 - DNA, 15 bp, Homo sapiens
aaagtcaactggcta

SEQ ID NO: 1689690 - DNA, 15 bp, Homo sapiens
aagtcaactggctag

SEQ ID NO: 1689691 - DNA, 15 bp, Homo sapiens
agtcaactggctaga

SEQ ID NO: 1689692 - DNA, 15 bp, Homo sapiens
gtcaactggctagag

SEQ ID NO: 1689693 - DNA, 15 bp, Homo sapiens
tcaactggctagagc

SEQ ID NO: 1689694 - DNA, 15 bp, Homo sapiens
caactggctagagcc

SEQ ID NO: 1689695 - DNA, 15 bp, Homo sapiens
aactggctagagccc

SEQ ID NO: 1689696 - DNA, 15 bp, Homo sapiens
actggctagagccct

SEQ ID NO: 1689697 - DNA, 15 bp, Homo sapiens
ctggctagagccctc

SEQ ID NO: 1689698 - DNA, 15 bp, Homo sapiens
tggctagagccctca

SEQ ID NO: 1689699 - DNA, 15 bp, Homo sapiens
ggctagagccctcag

SEQ ID NO: 1689700 - DNA, 15 bp, Homo sapiens
gctagagccctcagg

SEQ ID NO: 1689701 - DNA, 15 bp, Homo sapiens
ctagagccctcagga

SEQ ID NO: 1689702 - DNA, 15 bp, Homo sapiens
tagagccctcaggag

SEQ ID NO: 1689703 - DNA, 15 bp, Homo sapiens
agagccctcaggagc

SEQ ID NO: 1689704 - DNA, 15 bp, Homo sapiens
gagccctcaggagcc

SEQ ID NO: 1689705 - DNA, 15 bp, Homo sapiens
agccctcaggagcca

SEQ ID NO: 1689706 - DNA, 15 bp, Homo sapiens
gccctcaggagccaa

SEQ ID NO: 1689707 - DNA, 15 bp, Homo sapiens
ccctcaggagccaag

SEQ ID NO: 1689708 - DNA, 15 bp, Homo sapiens
cctcaggagccaagt

SEQ ID NO: 1689709 - DNA, 15 bp, Homo sapiens
ctcaggagccaagta

SEQ ID NO: 1689710 - DNA, 15 bp, Homo sapiens
tcaggagccaagtaa

SEQ ID NO: 1689711 - DNA, 15 bp, Homo sapiens
caggagccaagtaat

SEQ ID NO: 1689712 - DNA, 15 bp, Homo sapiens
aggagccaagtaata

SEQ ID NO: 1689713 - DNA, 15 bp, Homo sapiens
ggagccaagtaataa

SEQ ID NO: 1689714 - DNA, 15 bp, Homo sapiens
gagccaagtaataac

SEQ ID NO: 1689715 - DNA, 15 bp, Homo sapiens
agccaagtaataaca

SEQ ID NO: 1689716 - DNA, 15 bp, Homo sapiens
gccaagtaataacat

SEQ ID NO: 1689717 - DNA, 15 bp, Homo sapiens
ccaagtaataacatg

SEQ ID NO: 1689718 - DNA, 15 bp, Homo sapiens
caagtaataacatgt

SEQ ID NO: 1689719 - DNA, 15 bp, Homo sapiens
aagtaataacatgtt

SEQ ID NO: 1689720 - DNA, 15 bp, Homo sapiens
agtaataacatgttg

SEQ ID NO: 1689721 - DNA, 15 bp, Homo sapiens
gtaataacatgttga

SEQ ID NO: 1689722 - DNA, 15 bp, Homo sapiens
taataacatgttgat

SEQ ID NO: 1689723 - DNA, 15 bp, Homo sapiens
aataacatgttgata

SEQ ID NO: 1689724 - DNA, 15 bp, Homo sapiens
ataacatgttgataa

SEQ ID NO: 1689725 - DNA, 15 bp, Homo sapiens
taacatgttgataag

SEQ ID NO: 1689726 - DNA, 15 bp, Homo sapiens
aacatgttgataagt

SEQ ID NO: 1689727 - DNA, 15 bp, Homo sapiens
acatgttgataagtt

SEQ ID NO: 1689728 - DNA, 15 bp, Homo sapiens
catgttgataagttc

SEQ ID NO: 1689729 - DNA, 15 bp, Homo sapiens
atgttgataagttcc

SEQ ID NO: 1689730 - DNA, 15 bp, Homo sapiens
tgttgataagttccc

SEQ ID NO: 1689731 - DNA, 15 bp, Homo sapiens
gttgataagttccct

SEQ ID NO: 1689732 - DNA, 15 bp, Homo sapiens
ttgataagttccctg

SEQ ID NO: 1689733 - DNA, 15 bp, Homo sapiens
tgataagttccctgg

SEQ ID NO: 1689734 - DNA, 15 bp, Homo sapiens
gataagttccctggg

SEQ ID NO: 1689735 - DNA, 15 bp, Homo sapiens
ataagttccctgggt

SEQ ID NO: 1689736 - DNA, 15 bp, Homo sapiens
taagttccctgggta

SEQ ID NO: 1689737 - DNA, 15 bp, Homo sapiens
aagttccctgggtat

SEQ ID NO: 1689738 - DNA, 15 bp, Homo sapiens
agttccctgggtatc

SEQ ID NO: 1689739 - DNA, 15 bp, Homo sapiens
gttccctgggtatct

SEQ ID NO: 1689740 - DNA, 15 bp, Homo sapiens
ttccctgggtatctt

SEQ ID NO: 1689741 - DNA, 15 bp, Homo sapiens
tccctgggtatctta

SEQ ID NO: 1689742 - DNA, 15 bp, Homo sapiens
ccctgggtatcttat

SEQ ID NO: 1689743 - DNA, 15 bp, Homo sapiens
cctgggtatcttatg

SEQ ID NO: 1689744 - DNA, 15 bp, Homo sapiens
ctgggtatcttatgc

SEQ ID NO: 1689745 - DNA, 15 bp, Homo sapiens
tgggtatcttatgcc

SEQ ID NO: 1689746 - DNA, 15 bp, Homo sapiens
gggtatcttatgcct

SEQ ID NO: 1689747 - DNA, 15 bp, Homo sapiens
ggtatcttatgcctg

SEQ ID NO: 1689748 - DNA, 15 bp, Homo sapiens
gtatcttatgcctga

SEQ ID NO: 1689749 - DNA, 15 bp, Homo sapiens
tatcttatgcctgat

SEQ ID NO: 1689750 - DNA, 15 bp, Homo sapiens
atcttatgcctgata

SEQ ID NO: 1689751 - DNA, 15 bp, Homo sapiens
tcttatgcctgatat

SEQ ID NO: 1689752 - DNA, 15 bp, Homo sapiens
cttatgcctgatatg

SEQ ID NO: 1689753 - DNA, 15 bp, Homo sapiens
ttatgcctgatatgt

SEQ ID NO: 1689754 - DNA, 15 bp, Homo sapiens
tatgcctgatatgta

SEQ ID NO: 1689755 - DNA, 15 bp, Homo sapiens
atgcctgatatgtac

SEQ ID NO: 1689756 - DNA, 15 bp, Homo sapiens
tgcctgatatgtact

SEQ ID NO: 1689757 - DNA, 15 bp, Homo sapiens
gcctgatatgtacta

SEQ ID NO: 1689758 - DNA, 15 bp, Homo sapiens
cctgatatgtactag

SEQ ID NO: 1689759 - DNA, 15 bp, Homo sapiens
ctgatatgtactaga

SEQ ID NO: 1689760 - DNA, 15 bp, Homo sapiens
tgatatgtactagat

SEQ ID NO: 1689761 - DNA, 15 bp, Homo sapiens
gatatgtactagatt

SEQ ID NO: 1689762 - DNA, 15 bp, Homo sapiens
atatgtactagatta

SEQ ID NO: 1689763 - DNA, 15 bp, Homo sapiens
tatgtactagattaa

SEQ ID NO: 1689764 - DNA, 15 bp, Homo sapiens
atgtactagattaag

SEQ ID NO: 1689765 - DNA, 15 bp, Homo sapiens
tgtactagattaagt

SEQ ID NO: 1689766 - DNA, 15 bp, Homo sapiens
gtactagattaagtg

SEQ ID NO: 1689767 - DNA, 15 bp, Homo sapiens
tactagattaagtgt

SEQ ID NO: 1689768 - DNA, 15 bp, Homo sapiens
actagattaagtgtt

SEQ ID NO: 1689769 - DNA, 15 bp, Homo sapiens
ctagattaagtgtta

SEQ ID NO: 1689770 - DNA, 15 bp, Homo sapiens
tagattaagtgttag

SEQ ID NO: 1689771 - DNA, 15 bp, Homo sapiens
agattaagtgttaga

SEQ ID NO: 1689772 - DNA, 15 bp, Homo sapiens
gattaagtgttagaa

SEQ ID NO: 1689773 - DNA, 15 bp, Homo sapiens
attaagtgttagaaa

SEQ ID NO: 1689774 - DNA, 15 bp, Homo sapiens
ttaagtgttagaaaa

SEQ ID NO: 1689775 - DNA, 15 bp, Homo sapiens
tcccagataaaatag

SEQ ID NO: 1689776 - DNA, 15 bp, Homo sapiens
cccagataaaataga

SEQ ID NO: 1689777 - DNA, 15 bp, Homo sapiens
ccagataaaatagaa

SEQ ID NO: 1689778 - DNA, 15 bp, Homo sapiens
cagataaaatagaaa

SEQ ID NO: 1689779 - DNA, 15 bp, Homo sapiens
agataaaatagaaaa

SEQ ID NO: 1689780 - DNA, 15 bp, Homo sapiens
gataaaatagaaaat

SEQ ID NO: 1689781 - DNA, 15 bp, Homo sapiens
ataaaatagaaaatg

SEQ ID NO: 1689782 - DNA, 15 bp, Homo sapiens
taaaatagaaaatgg

SEQ ID NO: 1689783 - DNA, 15 bp, Homo sapiens
aaaatagaaaatggt

SEQ ID NO: 1689784 - DNA, 15 bp, Homo sapiens
aaatagaaaatggtt

SEQ ID NO: 1689785 - DNA, 15 bp, Homo sapiens
aatagaaaatggttt

SEQ ID NO: 1689786 - DNA, 15 bp, Homo sapiens
atagaaaatggttta

SEQ ID NO: 1689787 - DNA, 15 bp, Homo sapiens
tagaaaatggtttaa

SEQ ID NO: 1689788 - DNA, 15 bp, Homo sapiens
agaaaatggtttaaa

SEQ ID NO: 1689789 - DNA, 15 bp, Homo sapiens
gaaaatggtttaaag

SEQ ID NO: 1689790 - DNA, 15 bp, Homo sapiens
aaaatggtttaaagt

SEQ ID NO: 1689791 - DNA, 15 bp, Homo sapiens
aaatggtttaaagtg

SEQ ID NO: 1689792 - DNA, 15 bp, Homo sapiens
aatggtttaaagtga

SEQ ID NO: 1689793 - DNA, 15 bp, Homo sapiens
atggtttaaagtgac

SEQ ID NO: 1689794 - DNA, 15 bp, Homo sapiens
tggtttaaagtgaca

SEQ ID NO: 1689795 - DNA, 15 bp, Homo sapiens
ggtttaaagtgacaa

SEQ ID NO: 1689796 - DNA, 15 bp, Homo sapiens
gtttaaagtgacaat

SEQ ID NO: 1689797 - DNA, 15 bp, Homo sapiens
tttaaagtgacaata

SEQ ID NO: 1689798 - DNA, 15 bp, Homo sapiens
ttaaagtgacaatag

SEQ ID NO: 1689799 - DNA, 15 bp, Homo sapiens
taaagtgacaatagc

SEQ ID NO: 1689800 - DNA, 15 bp, Homo sapiens
aaagtgacaatagca

SEQ ID NO: 1689801 - DNA, 15 bp, Homo sapiens
aagtgacaatagcaa

SEQ ID NO: 1689802 - DNA, 15 bp, Homo sapiens
agtgacaatagcaaa

SEQ ID NO: 1689803 - DNA, 15 bp, Homo sapiens
gtgacaatagcaaag

SEQ ID NO: 1689804 - DNA, 15 bp, Homo sapiens
tgacaatagcaaaga

SEQ ID NO: 1689805 - DNA, 15 bp, Homo sapiens
gacaatagcaaagag

SEQ ID NO: 1689806 - DNA, 15 bp, Homo sapiens
acaatagcaaagagc

SEQ ID NO: 1689807 - DNA, 15 bp, Homo sapiens
caatagcaaagagct

SEQ ID NO: 1689808 - DNA, 15 bp, Homo sapiens
aatagcaaagagctc

SEQ ID NO: 1689809 - DNA, 15 bp, Homo sapiens
atagcaaagagctcg

SEQ ID NO: 1689810 - DNA, 15 bp, Homo sapiens
tagcaaagagctcgc

SEQ ID NO: 1689811 - DNA, 15 bp, Homo sapiens
agcaaagagctcgct

SEQ ID NO: 1689812 - DNA, 15 bp, Homo sapiens
gcaaagagctcgctc

SEQ ID NO: 1689813 - DNA, 15 bp, Homo sapiens
caaagagctcgctcc

SEQ ID NO: 1689814 - DNA, 15 bp, Homo sapiens
aaagagctcgctcca

SEQ ID NO: 1689815 - DNA, 15 bp, Homo sapiens
aagagctcgctccat

SEQ ID NO: 1689816 - DNA, 15 bp, Homo sapiens
agagctcgctccatt

SEQ ID NO: 1689817 - DNA, 15 bp, Homo sapiens
gagctcgctccattt

SEQ ID NO: 1689818 - DNA, 15 bp, Homo sapiens
agctcgctccatttc

SEQ ID NO: 1689819 - DNA, 15 bp, Homo sapiens
gctcgctccatttca

SEQ ID NO: 1689820 - DNA, 15 bp, Homo sapiens
ctcgctccatttcat

SEQ ID NO: 1689821 - DNA, 15 bp, Homo sapiens
tcgctccatttcatt

SEQ ID NO: 1689822 - DNA, 15 bp, Homo sapiens
cgctccatttcatta

SEQ ID NO: 1689823 - DNA, 15 bp, Homo sapiens
gctccatttcattag

SEQ ID NO: 1689824 - DNA, 15 bp, Homo sapiens
ctccatttcattagg

SEQ ID NO: 1689825 - DNA, 15 bp, Homo sapiens
tccatttcattaggt

SEQ ID NO: 1689826 - DNA, 15 bp, Homo sapiens
ccatttcattaggtc

SEQ ID NO: 1689827 - DNA, 15 bp, Homo sapiens
catttcattaggtca

SEQ ID NO: 1689828 - DNA, 15 bp, Homo sapiens
atttcattaggtcac

SEQ ID NO: 1689829 - DNA, 15 bp, Homo sapiens
tttcattaggtcacc

SEQ ID NO: 1689830 - DNA, 15 bp, Homo sapiens
ttcattaggtcacca

SEQ ID NO: 1689831 - DNA, 15 bp, Homo sapiens
tcattaggtcaccac

SEQ ID NO: 1689832 - DNA, 15 bp, Homo sapiens
cattaggtcaccact

SEQ ID NO: 1689833 - DNA, 15 bp, Homo sapiens
attaggtcaccactt

SEQ ID NO: 1689834 - DNA, 15 bp, Homo sapiens
ttaggtcaccacttg

SEQ ID NO: 1689835 - DNA, 15 bp, Homo sapiens
taggtcaccacttgg

SEQ ID NO: 1689836 - DNA, 15 bp, Homo sapiens
aggtcaccacttggc

SEQ ID NO: 1689837 - DNA, 15 bp, Homo sapiens
ggtcaccacttggct

SEQ ID NO: 1689838 - DNA, 15 bp, Homo sapiens
gtcaccacttggctg

SEQ ID NO: 1689839 - DNA, 15 bp, Homo sapiens
tcaccacttggctgt

SEQ ID NO: 1689840 - DNA, 15 bp, Homo sapiens
caccacttggctgta

SEQ ID NO: 1689841 - DNA, 15 bp, Homo sapiens
accacttggctgtac

SEQ ID NO: 1689842 - DNA, 15 bp, Homo sapiens
ccacttggctgtacc

SEQ ID NO: 1689843 - DNA, 15 bp, Homo sapiens
cacttggctgtaccg

SEQ ID NO: 1689844 - DNA, 15 bp, Homo sapiens
acttggctgtaccgc

SEQ ID NO: 1689845 - DNA, 15 bp, Homo sapiens
cttggctgtaccgct

SEQ ID NO: 1689846 - DNA, 15 bp, Homo sapiens
ttggctgtaccgcta

SEQ ID NO: 1689847 - DNA, 15 bp, Homo sapiens
tggctgtaccgctaa

SEQ ID NO: 1689848 - DNA, 15 bp, Homo sapiens
ggctgtaccgctaac

SEQ ID NO: 1689849 - DNA, 15 bp, Homo sapiens
gctgtaccgctaaca

SEQ ID NO: 1689850 - DNA, 15 bp, Homo sapiens
ctgtaccgctaacag

SEQ ID NO: 1689851 - DNA, 15 bp, Homo sapiens
tgtaccgctaacagg

SEQ ID NO: 1689852 - DNA, 15 bp, Homo sapiens
gtaccgctaacaggt

SEQ ID NO: 1689853 - DNA, 15 bp, Homo sapiens
taccgctaacaggtt

SEQ ID NO: 1689854 - DNA, 15 bp, Homo sapiens
accgctaacaggttg

SEQ ID NO: 1689855 - DNA, 15 bp, Homo sapiens
ccgctaacaggttgt

SEQ ID NO: 1689856 - DNA, 15 bp, Homo sapiens
cgctaacaggttgtg

SEQ ID NO: 1689857 - DNA, 15 bp, Homo sapiens
gctaacaggttgtgt

SEQ ID NO: 1689858 - DNA, 15 bp, Homo sapiens
ctaacaggttgtgtg

SEQ ID NO: 1689859 - DNA, 15 bp, Homo sapiens
taacaggttgtgtga

SEQ ID NO: 1689860 - DNA, 15 bp, Homo sapiens
aacaggttgtgtgac

SEQ ID NO: 1689861 - DNA, 15 bp, Homo sapiens
acaggttgtgtgact

SEQ ID NO: 1689862 - DNA, 15 bp, Homo sapiens
caggttgtgtgactc

SEQ ID NO: 1689863 - DNA, 15 bp, Homo sapiens
aggttgtgtgactca

SEQ ID NO: 1689864 - DNA, 15 bp, Homo sapiens
ggttgtgtgactcag

SEQ ID NO: 1689865 - DNA, 15 bp, Homo sapiens
gttgtgtgactcagg

SEQ ID NO: 1689866 - DNA, 15 bp, Homo sapiens
ttgtgtgactcagga

SEQ ID NO: 1689867 - DNA, 15 bp, Homo sapiens
tgtgtgactcaggaa

SEQ ID NO: 1689868 - DNA, 15 bp, Homo sapiens
gtgtgactcaggaaa

SEQ ID NO: 1689869 - DNA, 15 bp, Homo sapiens
tgtgactcaggaaaa

SEQ ID NO: 1689870 - DNA, 15 bp, Homo sapiens
gtgactcaggaaaaa

SEQ ID NO: 1689871 - DNA, 15 bp, Homo sapiens
tgactcaggaaaaat

SEQ ID NO: 1689872 - DNA, 15 bp, Homo sapiens
gactcaggaaaaatc

SEQ ID NO: 1689873 - DNA, 15 bp, Homo sapiens
actcaggaaaaatcc

SEQ ID NO: 1689874 - DNA, 15 bp, Homo sapiens
ctcaggaaaaatcca

SEQ ID NO: 1689875 - DNA, 15 bp, Homo sapiens
tcaggaaaaatccat

SEQ ID NO: 1689876 - DNA, 15 bp, Homo sapiens
caggaaaaatccatt

SEQ ID NO: 1689877 - DNA, 15 bp, Homo sapiens
aggaaaaatccattt

SEQ ID NO: 1689878 - DNA, 15 bp, Homo sapiens
ggaaaaatccattta

SEQ ID NO: 1689879 - DNA, 15 bp, Homo sapiens
gaaaaatccatttaa

SEQ ID NO: 1689880 - DNA, 15 bp, Homo sapiens
aaaaatccatttaac

SEQ ID NO: 1689881 - DNA, 15 bp, Homo sapiens
aaaatccatttaacc

SEQ ID NO: 1689882 - DNA, 15 bp, Homo sapiens
aaatccatttaaccc

SEQ ID NO: 1689883 - DNA, 15 bp, Homo sapiens
aatccatttaacccc

SEQ ID NO: 1689884 - DNA, 15 bp, Homo sapiens
atccatttaacccct

SEQ ID NO: 1689885 - DNA, 15 bp, Homo sapiens
tccatttaacccctg

SEQ ID NO: 1689886 - DNA, 15 bp, Homo sapiens
ccatttaacccctga

SEQ ID NO: 1689887 - DNA, 15 bp, Homo sapiens
catttaacccctgaa

SEQ ID NO: 1689888 - DNA, 15 bp, Homo sapiens
atttaacccctgaaa

SEQ ID NO: 1689889 - DNA, 15 bp, Homo sapiens
tttaacccctgaaaa

SEQ ID NO: 1689890 - DNA, 15 bp, Homo sapiens
ttaacccctgaaaac

SEQ ID NO: 1689891 - DNA, 15 bp, Homo sapiens
taacccctgaaaacc

SEQ ID NO: 1689892 - DNA, 15 bp, Homo sapiens
aacccctgaaaacct

SEQ ID NO: 1689893 - DNA, 15 bp, Homo sapiens
acccctgaaaacctc

SEQ ID NO: 1689894 - DNA, 15 bp, Homo sapiens
cccctgaaaacctca

SEQ ID NO: 1689895 - DNA, 15 bp, Homo sapiens
ccctgaaaacctcag

SEQ ID NO: 1689896 - DNA, 15 bp, Homo sapiens
cctgaaaacctcagt

SEQ ID NO: 1689897 - DNA, 15 bp, Homo sapiens
ctgaaaacctcagtt

SEQ ID NO: 1689898 - DNA, 15 bp, Homo sapiens
tgaaaacctcagttt

SEQ ID NO: 1689899 - DNA, 15 bp, Homo sapiens
gaaaacctcagtttc

SEQ ID NO: 1689900 - DNA, 15 bp, Homo sapiens
aaaacctcagtttcc

SEQ ID NO: 1689901 - DNA, 15 bp, Homo sapiens
aaacctcagtttcct

SEQ ID NO: 1689902 - DNA, 15 bp, Homo sapiens
aacctcagtttcctt

SEQ ID NO: 1689903 - DNA, 15 bp, Homo sapiens
acctcagtttccttg

SEQ ID NO: 1689904 - DNA, 15 bp, Homo sapiens
cctcagtttccttgt

SEQ ID NO: 1689905 - DNA, 15 bp, Homo sapiens
ctcagtttccttgtc

SEQ ID NO: 1689906 - DNA, 15 bp, Homo sapiens
tcagtttccttgtct

SEQ ID NO: 1689907 - DNA, 15 bp, Homo sapiens
cagtttccttgtctt

SEQ ID NO: 1689908 - DNA, 15 bp, Homo sapiens
agtttccttgtcttt

SEQ ID NO: 1689909 - DNA, 15 bp, Homo sapiens
gtttccttgtcttta

SEQ ID NO: 1689910 - DNA, 15 bp, Homo sapiens
tttccttgtctttaa

SEQ ID NO: 1689911 - DNA, 15 bp, Homo sapiens
ttccttgtctttaaa

SEQ ID NO: 1689912 - DNA, 15 bp, Homo sapiens
tccttgtctttaaaa

SEQ ID NO: 1689913 - DNA, 15 bp, Homo sapiens
ccttgtctttaaaat

SEQ ID NO: 1689914 - DNA, 15 bp, Homo sapiens
cttgtctttaaaata

SEQ ID NO: 1689915 - DNA, 15 bp, Homo sapiens
ttgtctttaaaatag

SEQ ID NO: 1689916 - DNA, 15 bp, Homo sapiens
tgtctttaaaatagg

SEQ ID NO: 1689917 - DNA, 15 bp, Homo sapiens
gtctttaaaataggg

SEQ ID NO: 1689918 - DNA, 15 bp, Homo sapiens
tctttaaaataggga

SEQ ID NO: 1689919 - DNA, 15 bp, Homo sapiens
ctttaaaatagggat

SEQ ID NO: 1689920 - DNA, 15 bp, Homo sapiens
tttaaaatagggata

SEQ ID NO: 1689921 - DNA, 15 bp, Homo sapiens
ttaaaatagggataa

SEQ ID NO: 1689922 - DNA, 15 bp, Homo sapiens
taaaatagggataat

SEQ ID NO: 1689923 - DNA, 15 bp, Homo sapiens
aaaatagggataata

SEQ ID NO: 1689924 - DNA, 15 bp, Homo sapiens
aaatagggataatac

SEQ ID NO: 1689925 - DNA, 15 bp, Homo sapiens
aatagggataatacc

SEQ ID NO: 1689926 - DNA, 15 bp, Homo sapiens
atagggataatacct

SEQ ID NO: 1689927 - DNA, 15 bp, Homo sapiens
tagggataatacctc

SEQ ID NO: 1689928 - DNA, 15 bp, Homo sapiens
agggataatacctcc

SEQ ID NO: 1689929 - DNA, 15 bp, Homo sapiens
gggataatacctccc

SEQ ID NO: 1689930 - DNA, 15 bp, Homo sapiens
ggataatacctccca

SEQ ID NO: 1689931 - DNA, 15 bp, Homo sapiens
gataatacctcccaa

SEQ ID NO: 1689932 - DNA, 15 bp, Homo sapiens
ataatacctcccaaa

SEQ ID NO: 1689933 - DNA, 15 bp, Homo sapiens
taatacctcccaaaa

SEQ ID NO: 1689934 - DNA, 15 bp, Homo sapiens
aatacctcccaaaaa

SEQ ID NO: 1689935 - DNA, 15 bp, Homo sapiens
atacctcccaaaaac

SEQ ID NO: 1689936 - DNA, 15 bp, Homo sapiens
tacctcccaaaaaca

SEQ ID NO: 1689937 - DNA, 15 bp, Homo sapiens
acctcccaaaaacat

SEQ ID NO: 1689938 - DNA, 15 bp, Homo sapiens
cctcccaaaaacatt

SEQ ID NO: 1689939 - DNA, 15 bp, Homo sapiens
ctcccaaaaacatta

SEQ ID NO: 1689940 - DNA, 15 bp, Homo sapiens
tcccaaaaacattat

SEQ ID NO: 1689941 - DNA, 15 bp, Homo sapiens
cccaaaaacattatg

SEQ ID NO: 1689942 - DNA, 15 bp, Homo sapiens
ccaaaaacattatga

SEQ ID NO: 1689943 - DNA, 15 bp, Homo sapiens
caaaaacattatgat

SEQ ID NO: 1689944 - DNA, 15 bp, Homo sapiens
aaaaacattatgatg

SEQ ID NO: 1689945 - DNA, 15 bp, Homo sapiens
aaaacattatgatga

SEQ ID NO: 1689946 - DNA, 15 bp, Homo sapiens
aaacattatgatgat

SEQ ID NO: 1689947 - DNA, 15 bp, Homo sapiens
aacattatgatgatt

SEQ ID NO: 1689948 - DNA, 15 bp, Homo sapiens
acattatgatgattc

SEQ ID NO: 1689949 - DNA, 15 bp, Homo sapiens
cattatgatgattca

SEQ ID NO: 1689950 - DNA, 15 bp, Homo sapiens
attatgatgattcag

SEQ ID NO: 1689951 - DNA, 15 bp, Homo sapiens
ttatgatgattcagg

SEQ ID NO: 1689952 - DNA, 15 bp, Homo sapiens
tatgatgattcaggg

SEQ ID NO: 1689953 - DNA, 15 bp, Homo sapiens
atgatgattcaggga

SEQ ID NO: 1689954 - DNA, 15 bp, Homo sapiens
tgatgattcagggaa

SEQ ID NO: 1689955 - DNA, 15 bp, Homo sapiens
gatgattcagggaat

SEQ ID NO: 1689956 - DNA, 15 bp, Homo sapiens
atgattcagggaata

SEQ ID NO: 1689957 - DNA, 15 bp, Homo sapiens
tgattcagggaataa

SEQ ID NO: 1689958 - DNA, 15 bp, Homo sapiens
gattcagggaataat

SEQ ID NO: 1689959 - DNA, 15 bp, Homo sapiens
attcagggaataatc

SEQ ID NO: 1689960 - DNA, 15 bp, Homo sapiens
ttcagggaataatcc

SEQ ID NO: 1689961 - DNA, 15 bp, Homo sapiens
tcagggaataatcca

SEQ ID NO: 1689962 - DNA, 15 bp, Homo sapiens
cagggaataatccac

SEQ ID NO: 1689963 - DNA, 15 bp, Homo sapiens
agggaataatccacg

SEQ ID NO: 1689964 - DNA, 15 bp, Homo sapiens
gggaataatccacgt

SEQ ID NO: 1689965 - DNA, 15 bp, Homo sapiens
ggaataatccacgtt

SEQ ID NO: 1689966 - DNA, 15 bp, Homo sapiens
gaataatccacgtta

SEQ ID NO: 1689967 - DNA, 15 bp, Homo sapiens
aataatccacgttat

SEQ ID NO: 1689968 - DNA, 15 bp, Homo sapiens
ataatccacgttatg

SEQ ID NO: 1689969 - DNA, 15 bp, Homo sapiens
taatccacgttatgc

SEQ ID NO: 1689970 - DNA, 15 bp, Homo sapiens
aatccacgttatgca

SEQ ID NO: 1689971 - DNA, 15 bp, Homo sapiens
atccacgttatgcat

SEQ ID NO: 1689972 - DNA, 15 bp, Homo sapiens
tccacgttatgcatt

SEQ ID NO: 1689973 - DNA, 15 bp, Homo sapiens
ccacgttatgcattt

SEQ ID NO: 1689974 - DNA, 15 bp, Homo sapiens
cacgttatgcattta

SEQ ID NO: 1689975 - DNA, 15 bp, Homo sapiens
acgttatgcatttaa

SEQ ID NO: 1689976 - DNA, 15 bp, Homo sapiens
cgttatgcatttaag

SEQ ID NO: 1689977 - DNA, 15 bp, Homo sapiens
gttatgcatttaagc

SEQ ID NO: 1689978 - DNA, 15 bp, Homo sapiens
ttatgcatttaagcc

SEQ ID NO: 1689979 - DNA, 15 bp, Homo sapiens
tatgcatttaagccg

SEQ ID NO: 1689980 - DNA, 15 bp, Homo sapiens
atgcatttaagccgt

SEQ ID NO: 1689981 - DNA, 15 bp, Homo sapiens
tgcatttaagccgtg

SEQ ID NO: 1689982 - DNA, 15 bp, Homo sapiens
gcatttaagccgtgt

SEQ ID NO: 1689983 - DNA, 15 bp, Homo sapiens
catttaagccgtgtc

SEQ ID NO: 1689984 - DNA, 15 bp, Homo sapiens
atttaagccgtgtcg

SEQ ID NO: 1689985 - DNA, 15 bp, Homo sapiens
tttaagccgtgtcgg

SEQ ID NO: 1689986 - DNA, 15 bp, Homo sapiens
ttaagccgtgtcggg

SEQ ID NO: 1689987 - DNA, 15 bp, Homo sapiens
taagccgtgtcgggc

SEQ ID NO: 1689988 - DNA, 15 bp, Homo sapiens
aagccgtgtcgggca

SEQ ID NO: 1689989 - DNA, 15 bp, Homo sapiens
agccgtgtcgggcac

SEQ ID NO: 1689990 - DNA, 15 bp, Homo sapiens
gccgtgtcgggcaca

SEQ ID NO: 1689991 - DNA, 15 bp, Homo sapiens
ccgtgtcgggcacag

SEQ ID NO: 1689992 - DNA, 15 bp, Homo sapiens
cgtgtcgggcacaga

SEQ ID NO: 1689993 - DNA, 15 bp, Homo sapiens
gtgtcgggcacagaa

SEQ ID NO: 1689994 - DNA, 15 bp, Homo sapiens
tgtcgggcacagaat

SEQ ID NO: 1689995 - DNA, 15 bp, Homo sapiens
gtcgggcacagaatc

SEQ ID NO: 1689996 - DNA, 15 bp, Homo sapiens
tcgggcacagaatca

SEQ ID NO: 1689997 - DNA, 15 bp, Homo sapiens
cgggcacagaatcaa

SEQ ID NO: 1689998 - DNA, 15 bp, Homo sapiens
gggcacagaatcaat

SEQ ID NO: 1689999 - DNA, 15 bp, Homo sapiens
ggcacagaatcaatt

SEQ ID NO: 1690000 - DNA, 15 bp, Homo sapiens
gcacagaatcaattg

SEQ ID NO: 1690001 - DNA, 15 bp, Homo sapiens
cacagaatcaattgc

SEQ ID NO: 1690002 - DNA, 15 bp, Homo sapiens
acagaatcaattgct

SEQ ID NO: 1690003 - DNA, 15 bp, Homo sapiens
cagaatcaattgcta

SEQ ID NO: 1690004 - DNA, 15 bp, Homo sapiens
agaatcaattgctaa

SEQ ID NO: 1690005 - DNA, 15 bp, Homo sapiens
gaatcaattgctaaa

SEQ ID NO: 1690006 - DNA, 15 bp, Homo sapiens
aatcaattgctaaag

SEQ ID NO: 1690007 - DNA, 15 bp, Homo sapiens
atcaattgctaaaga

SEQ ID NO: 1690008 - DNA, 15 bp, Homo sapiens
tcaattgctaaagag

SEQ ID NO: 1690009 - DNA, 15 bp, Homo sapiens
caattgctaaagaga

SEQ ID NO: 1690010 - DNA, 15 bp, Homo sapiens
aattgctaaagagag

SEQ ID NO: 1690011 - DNA, 15 bp, Homo sapiens
attgctaaagagaga

SEQ ID NO: 1690012 - DNA, 15 bp, Homo sapiens
ttgctaaagagagat

SEQ ID NO: 1690013 - DNA, 15 bp, Homo sapiens
tgctaaagagagatg

SEQ ID NO: 1690014 - DNA, 15 bp, Homo sapiens
gctaaagagagatgt

SEQ ID NO: 1690015 - DNA, 15 bp, Homo sapiens
ctaaagagagatgta

SEQ ID NO: 1690016 - DNA, 15 bp, Homo sapiens
taaagagagatgtat

SEQ ID NO: 1690017 - DNA, 15 bp, Homo sapiens
aaagagagatgtata

SEQ ID NO: 1690018 - DNA, 15 bp, Homo sapiens
aagagagatgtatat

SEQ ID NO: 1690019 - DNA, 15 bp, Homo sapiens
agagagatgtatatg

SEQ ID NO: 1690020 - DNA, 15 bp, Homo sapiens
gagagatgtatatgt

SEQ ID NO: 1690021 - DNA, 15 bp, Homo sapiens
agagatgtatatgtt

SEQ ID NO: 1690022 - DNA, 15 bp, Homo sapiens
gagatgtatatgttt

SEQ ID NO: 1690023 - DNA, 15 bp, Homo sapiens
agatgtatatgtttt

SEQ ID NO: 1690024 - DNA, 15 bp, Homo sapiens
gatgtatatgttttt

SEQ ID NO: 1690025 - DNA, 15 bp, Homo sapiens
atgtatatgtttttc

SEQ ID NO: 1690026 - DNA, 15 bp, Homo sapiens
tgtatatgtttttca

SEQ ID NO: 1690027 - DNA, 15 bp, Homo sapiens
gtatatgtttttcaa

SEQ ID NO: 1690028 - DNA, 15 bp, Homo sapiens
tatatgtttttcaat

SEQ ID NO: 1690029 - DNA, 15 bp, Homo sapiens
atatgtttttcaatc

SEQ ID NO: 1690030 - DNA, 15 bp, Homo sapiens
tatgtttttcaatcc

SEQ ID NO: 1690031 - DNA, 15 bp, Homo sapiens
atgtttttcaatcca

SEQ ID NO: 1690032 - DNA, 15 bp, Homo sapiens
tgtttttcaatccac

SEQ ID NO: 1690033 - DNA, 15 bp, Homo sapiens
gtttttcaatccact

SEQ ID NO: 1690034 - DNA, 15 bp, Homo sapiens
tttttcaatccacta

SEQ ID NO: 1690035 - DNA, 15 bp, Homo sapiens
ttttcaatccactat

SEQ ID NO: 1690036 - DNA, 15 bp, Homo sapiens
tttcaatccactata

SEQ ID NO: 1690037 - DNA, 15 bp, Homo sapiens
ttcaatccactatat

SEQ ID NO: 1690038 - DNA, 15 bp, Homo sapiens
tcaatccactatatc

SEQ ID NO: 1690039 - DNA, 15 bp, Homo sapiens
caatccactatatca

SEQ ID NO: 1690040 - DNA, 15 bp, Homo sapiens
aatccactatatcat

SEQ ID NO: 1690041 - DNA, 15 bp, Homo sapiens
atccactatatcatt

SEQ ID NO: 1690042 - DNA, 15 bp, Homo sapiens
tccactatatcattc

SEQ ID NO: 1690043 - DNA, 15 bp, Homo sapiens
ccactatatcattca

SEQ ID NO: 1690044 - DNA, 15 bp, Homo sapiens
cactatatcattcaa

SEQ ID NO: 1690045 - DNA, 15 bp, Homo sapiens
actatatcattcaag

SEQ ID NO: 1690046 - DNA, 15 bp, Homo sapiens
ctatatcattcaagt

SEQ ID NO: 1690047 - DNA, 15 bp, Homo sapiens
tatatcattcaagtt

SEQ ID NO: 1690048 - DNA, 15 bp, Homo sapiens
atatcattcaagttt

SEQ ID NO: 1690049 - DNA, 15 bp, Homo sapiens
tatcattcaagtttt

SEQ ID NO: 1690050 - DNA, 15 bp, Homo sapiens
atcattcaagtttta

SEQ ID NO: 1690051 - DNA, 15 bp, Homo sapiens
tcattcaagttttac

SEQ ID NO: 1690052 - DNA, 15 bp, Homo sapiens
cattcaagttttacg

SEQ ID NO: 1690053 - DNA, 15 bp, Homo sapiens
attcaagttttacgg

SEQ ID NO: 1690054 - DNA, 15 bp, Homo sapiens
ttcaagttttacggc

SEQ ID NO: 1690055 - DNA, 15 bp, Homo sapiens
tcaagttttacggca

SEQ ID NO: 1690056 - DNA, 15 bp, Homo sapiens
caagttttacggcag

SEQ ID NO: 1690057 - DNA, 15 bp, Homo sapiens
aagttttacggcagt

SEQ ID NO: 1690058 - DNA, 15 bp, Homo sapiens
agttttacggcagtc

SEQ ID NO: 1690059 - DNA, 15 bp, Homo sapiens
gttttacggcagtct

SEQ ID NO: 1690060 - DNA, 15 bp, Homo sapiens
ttttacggcagtctt

SEQ ID NO: 1690061 - DNA, 15 bp, Homo sapiens
tttacggcagtcttt

SEQ ID NO: 1690062 - DNA, 15 bp, Homo sapiens
ttacggcagtctttc

SEQ ID NO: 1690063 - DNA, 15 bp, Homo sapiens
tacggcagtctttcc

SEQ ID NO: 1690064 - DNA, 15 bp, Homo sapiens
acggcagtctttcct

SEQ ID NO: 1690065 - DNA, 15 bp, Homo sapiens
cggcagtctttccta

SEQ ID NO: 1690066 - DNA, 15 bp, Homo sapiens
ggcagtctttcctac

SEQ ID NO: 1690067 - DNA, 15 bp, Homo sapiens
gcagtctttcctact

SEQ ID NO: 1690068 - DNA, 15 bp, Homo sapiens
cagtctttcctacta

SEQ ID NO: 1690069 - DNA, 15 bp, Homo sapiens
agtctttcctactaa

SEQ ID NO: 1690070 - DNA, 15 bp, Homo sapiens
gtctttcctactaac

SEQ ID NO: 1690071 - DNA, 15 bp, Homo sapiens
tctttcctactaacc

SEQ ID NO: 1690072 - DNA, 15 bp, Homo sapiens
ctttcctactaacca

SEQ ID NO: 1690073 - DNA, 15 bp, Homo sapiens
tttcctactaaccac

SEQ ID NO: 1690074 - DNA, 15 bp, Homo sapiens
ttcctactaaccact

SEQ ID NO: 1690075 - DNA, 15 bp, Homo sapiens
tcctactaaccactt

SEQ ID NO: 1690076 - DNA, 15 bp, Homo sapiens
cctactaaccacttt

SEQ ID NO: 1690077 - DNA, 15 bp, Homo sapiens
ctactaaccactttc

SEQ ID NO: 1690078 - DNA, 15 bp, Homo sapiens
tactaaccactttcc

SEQ ID NO: 1690079 - DNA, 15 bp, Homo sapiens
actaaccactttcca

SEQ ID NO: 1690080 - DNA, 15 bp, Homo sapiens
ctaaccactttccaa

SEQ ID NO: 1690081 - DNA, 15 bp, Homo sapiens
taaccactttccaac

SEQ ID NO: 1690082 - DNA, 15 bp, Homo sapiens
aaccactttccaact

SEQ ID NO: 1690083 - DNA, 15 bp, Homo sapiens
accactttccaacta

SEQ ID NO: 1690084 - DNA, 15 bp, Homo sapiens
ccactttccaactat

SEQ ID NO: 1690085 - DNA, 15 bp, Homo sapiens
cactttccaactata

SEQ ID NO: 1690086 - DNA, 15 bp, Homo sapiens
actttccaactatac

SEQ ID NO: 1690087 - DNA, 15 bp, Homo sapiens
ctttccaactatact

SEQ ID NO: 1690088 - DNA, 15 bp, Homo sapiens
tttccaactatactc

SEQ ID NO: 1690089 - DNA, 15 bp, Homo sapiens
ttccaactatactcc

SEQ ID NO: 1690090 - DNA, 15 bp, Homo sapiens
tccaactatactcca

SEQ ID NO: 1690091 - DNA, 15 bp, Homo sapiens
ccaactatactccag

SEQ ID NO: 1690092 - DNA, 15 bp, Homo sapiens
caactatactccaga

SEQ ID NO: 1690093 - DNA, 15 bp, Homo sapiens
aactatactccagag

SEQ ID NO: 1690094 - DNA, 15 bp, Homo sapiens
actatactccagaga

SEQ ID NO: 1690095 - DNA, 15 bp, Homo sapiens
ctatactccagagaa

SEQ ID NO: 1690096 - DNA, 15 bp, Homo sapiens
tatactccagagaac

SEQ ID NO: 1690097 - DNA, 15 bp, Homo sapiens
atactccagagaacc

SEQ ID NO: 1690098 - DNA, 15 bp, Homo sapiens
tactccagagaaccc

SEQ ID NO: 1690099 - DNA, 15 bp, Homo sapiens
actccagagaaccct

SEQ ID NO: 1690100 - DNA, 15 bp, Homo sapiens
ctccagagaaccctc

SEQ ID NO: 1690101 - DNA, 15 bp, Homo sapiens
tccagagaaccctca

SEQ ID NO: 1690102 - DNA, 15 bp, Homo sapiens
ccagagaaccctcaa

SEQ ID NO: 1690103 - DNA, 15 bp, Homo sapiens
cagagaaccctcaac

SEQ ID NO: 1690104 - DNA, 15 bp, Homo sapiens
agagaaccctcaact

SEQ ID NO: 1690105 - DNA, 15 bp, Homo sapiens
gagaaccctcaactt

SEQ ID NO: 1690106 - DNA, 15 bp, Homo sapiens
agaaccctcaacttc

SEQ ID NO: 1690107 - DNA, 15 bp, Homo sapiens
gaaccctcaacttcc

SEQ ID NO: 1690108 - DNA, 15 bp, Homo sapiens
aaccctcaacttcca

SEQ ID NO: 1690109 - DNA, 15 bp, Homo sapiens
accctcaacttccac

SEQ ID NO: 1690110 - DNA, 15 bp, Homo sapiens
ccctcaacttccaca

SEQ ID NO: 1690111 - DNA, 15 bp, Homo sapiens
cctcaacttccacag

SEQ ID NO: 1690112 - DNA, 15 bp, Homo sapiens
ctcaacttccacaga

SEQ ID NO: 1690113 - DNA, 15 bp, Homo sapiens
tcaacttccacagaa

SEQ ID NO: 1690114 - DNA, 15 bp, Homo sapiens
caacttccacagaag

SEQ ID NO: 1690115 - DNA, 15 bp, Homo sapiens
aacttccacagaaga

SEQ ID NO: 1690116 - DNA, 15 bp, Homo sapiens
acttccacagaagag

SEQ ID NO: 1690117 - DNA, 15 bp, Homo sapiens
cttccacagaagagc

SEQ ID NO: 1690118 - DNA, 15 bp, Homo sapiens
ttccacagaagagct

SEQ ID NO: 1690119 - DNA, 15 bp, Homo sapiens
tccacagaagagctt

SEQ ID NO: 1690120 - DNA, 15 bp, Homo sapiens
ccacagaagagcttc

SEQ ID NO: 1690121 - DNA, 15 bp, Homo sapiens
cacagaagagcttca

SEQ ID NO: 1690122 - DNA, 15 bp, Homo sapiens
acagaagagcttcag

SEQ ID NO: 1690123 - DNA, 15 bp, Homo sapiens
cagaagagcttcagg

SEQ ID NO: 1690124 - DNA, 15 bp, Homo sapiens
agaagagcttcaggg

SEQ ID NO: 1690125 - DNA, 15 bp, Homo sapiens
gaagagcttcagggg

SEQ ID NO: 1690126 - DNA, 15 bp, Homo sapiens
aagagcttcaggggt

SEQ ID NO: 1690127 - DNA, 15 bp, Homo sapiens
agagcttcaggggtt

SEQ ID NO: 1690128 - DNA, 15 bp, Homo sapiens
gagcttcaggggttt

SEQ ID NO: 1690129 - DNA, 15 bp, Homo sapiens
agcttcaggggtttt

SEQ ID NO: 1690130 - DNA, 15 bp, Homo sapiens
gcttcaggggttttg

SEQ ID NO: 1690131 - DNA, 15 bp, Homo sapiens
cttcaggggttttgc

SEQ ID NO: 1690132 - DNA, 15 bp, Homo sapiens
ttcaggggttttgca

SEQ ID NO: 1690133 - DNA, 15 bp, Homo sapiens
tcaggggttttgcaa

SEQ ID NO: 1690134 - DNA, 15 bp, Homo sapiens
caggggttttgcaaa

SEQ ID NO: 1690135 - DNA, 15 bp, Homo sapiens
aggggttttgcaaac

SEQ ID NO: 1690136 - DNA, 15 bp, Homo sapiens
ggggttttgcaaaca

SEQ ID NO: 1690137 - DNA, 15 bp, Homo sapiens
gggttttgcaaacat

SEQ ID NO: 1690138 - DNA, 15 bp, Homo sapiens
ggttttgcaaacatt

SEQ ID NO: 1690139 - DNA, 15 bp, Homo sapiens
gttttgcaaacattt

SEQ ID NO: 1690140 - DNA, 15 bp, Homo sapiens
ttttgcaaacatttt

SEQ ID NO: 1690141 - DNA, 15 bp, Homo sapiens
tttgcaaacattttt

SEQ ID NO: 1690142 - DNA, 15 bp, Homo sapiens
ttgcaaacatttttt

SEQ ID NO: 1690143 - DNA, 15 bp, Homo sapiens
tgcaaacattttttc

SEQ ID NO: 1690144 - DNA, 15 bp, Homo sapiens
gcaaacattttttca

SEQ ID NO: 1690145 - DNA, 15 bp, Homo sapiens
caaacattttttcat

SEQ ID NO: 1690146 - DNA, 15 bp, Homo sapiens
aaacattttttcatt

SEQ ID NO: 1690147 - DNA, 15 bp, Homo sapiens
aacattttttcattt

SEQ ID NO: 1690148 - DNA, 15 bp, Homo sapiens
acattttttcatttt

SEQ ID NO: 1690149 - DNA, 15 bp, Homo sapiens
cattttttcattttt

SEQ ID NO: 1690150 - DNA, 15 bp, Homo sapiens
attttttcatttttt

SEQ ID NO: 1690151 - DNA, 15 bp, Homo sapiens
ttttttcattttttt

SEQ ID NO: 1690152 - DNA, 15 bp, Homo sapiens
tttttcatttttttt

SEQ ID NO: 1690153 - DNA, 15 bp, Homo sapiens
ttttcattttttttc

SEQ ID NO: 1690154 - DNA, 15 bp, Homo sapiens
tttcattttttttct

SEQ ID NO: 1690155 - DNA, 15 bp, Homo sapiens
ttcattttttttctg

SEQ ID NO: 1690156 - DNA, 15 bp, Homo sapiens
tcattttttttctga

SEQ ID NO: 1690157 - DNA, 15 bp, Homo sapiens
cattttttttctgaa

SEQ ID NO: 1690158 - DNA, 15 bp, Homo sapiens
attttttttctgaat

SEQ ID NO: 1690159 - DNA, 15 bp, Homo sapiens
ttttttttctgaata

SEQ ID NO: 1690160 - DNA, 15 bp, Homo sapiens
tttttttctgaatac

SEQ ID NO: 1690161 - DNA, 15 bp, Homo sapiens
ttttttctgaataca

SEQ ID NO: 1690162 - DNA, 15 bp, Homo sapiens
tttttctgaatacac

SEQ ID NO: 1690163 - DNA, 15 bp, Homo sapiens
ttttctgaatacact

SEQ ID NO: 1690164 - DNA, 15 bp, Homo sapiens
tttctgaatacacta

SEQ ID NO: 1690165 - DNA, 15 bp, Homo sapiens
ttctgaatacactaa

SEQ ID NO: 1690166 - DNA, 15 bp, Homo sapiens
tctgaatacactaat

SEQ ID NO: 1690167 - DNA, 15 bp, Homo sapiens
ctgaatacactaatc

SEQ ID NO: 1690168 - DNA, 15 bp, Homo sapiens
tgaatacactaatct

SEQ ID NO: 1690169 - DNA, 15 bp, Homo sapiens
gaatacactaatctc

SEQ ID NO: 1690170 - DNA, 15 bp, Homo sapiens
aatacactaatctct

SEQ ID NO: 1690171 - DNA, 15 bp, Homo sapiens
atacactaatctctt

SEQ ID NO: 1690172 - DNA, 15 bp, Homo sapiens
tacactaatctcttt

SEQ ID NO: 1690173 - DNA, 15 bp, Homo sapiens
acactaatctctttc

SEQ ID NO: 1690174 - DNA, 15 bp, Homo sapiens
cactaatctctttct

SEQ ID NO: 1690175 - DNA, 15 bp, Homo sapiens
actaatctctttctt

SEQ ID NO: 1690176 - DNA, 15 bp, Homo sapiens
ctaatctctttcttc

SEQ ID NO: 1690177 - DNA, 15 bp, Homo sapiens
taatctctttcttca

SEQ ID NO: 1690178 - DNA, 15 bp, Homo sapiens
aatctctttcttcaa

SEQ ID NO: 1690179 - DNA, 15 bp, Homo sapiens
atctctttcttcaaa

SEQ ID NO: 1690180 - DNA, 15 bp, Homo sapiens
tctctttcttcaaac

SEQ ID NO: 1690181 - DNA, 15 bp, Homo sapiens
ctctttcttcaaacc

SEQ ID NO: 1690182 - DNA, 15 bp, Homo sapiens
tctttcttcaaacct

SEQ ID NO: 1690183 - DNA, 15 bp, Homo sapiens
ctttcttcaaacctg

SEQ ID NO: 1690184 - DNA, 15 bp, Homo sapiens
tttcttcaaacctgt

SEQ ID NO: 1690185 - DNA, 15 bp, Homo sapiens
ttcttcaaacctgtg

SEQ ID NO: 1690186 - DNA, 15 bp, Homo sapiens
tcttcaaacctgtga

SEQ ID NO: 1690187 - DNA, 15 bp, Homo sapiens
cttcaaacctgtgat

SEQ ID NO: 1690188 - DNA, 15 bp, Homo sapiens
ttcaaacctgtgata

SEQ ID NO: 1690189 - DNA, 15 bp, Homo sapiens
tcaaacctgtgataa

SEQ ID NO: 1690190 - DNA, 15 bp, Homo sapiens
caaacctgtgataaa

SEQ ID NO: 1690191 - DNA, 15 bp, Homo sapiens
aaacctgtgataaag

SEQ ID NO: 1690192 - DNA, 15 bp, Homo sapiens
aacctgtgataaagt

SEQ ID NO: 1690193 - DNA, 15 bp, Homo sapiens
acctgtgataaagta

SEQ ID NO: 1690194 - DNA, 15 bp, Homo sapiens
cctgtgataaagtaa

SEQ ID NO: 1690195 - DNA, 15 bp, Homo sapiens
ctgtgataaagtaat

SEQ ID NO: 1690196 - DNA, 15 bp, Homo sapiens
tgtgataaagtaata

SEQ ID NO: 1690197 - DNA, 15 bp, Homo sapiens
gtgataaagtaatat

SEQ ID NO: 1690198 - DNA, 15 bp, Homo sapiens
tgataaagtaatata

SEQ ID NO: 1690199 - DNA, 15 bp, Homo sapiens
gataaagtaatatac

SEQ ID NO: 1690200 - DNA, 15 bp, Homo sapiens
ataaagtaatataca

SEQ ID NO: 1690201 - DNA, 15 bp, Homo sapiens
taaagtaatatacac

SEQ ID NO: 1690202 - DNA, 15 bp, Homo sapiens
aaagtaatatacaca

SEQ ID NO: 1690203 - DNA, 15 bp, Homo sapiens
aagtaatatacacac

SEQ ID NO: 1690204 - DNA, 15 bp, Homo sapiens
agtaatatacacact

SEQ ID NO: 1690205 - DNA, 15 bp, Homo sapiens
gtaatatacacactc

SEQ ID NO: 1690206 - DNA, 15 bp, Homo sapiens
taatatacacactca

SEQ ID NO: 1690207 - DNA, 15 bp, Homo sapiens
aatatacacactcac

SEQ ID NO: 1690208 - DNA, 15 bp, Homo sapiens
atatacacactcacg

SEQ ID NO: 1690209 - DNA, 15 bp, Homo sapiens
tatacacactcacgt

SEQ ID NO: 1690210 - DNA, 15 bp, Homo sapiens
atacacactcacgtg

SEQ ID NO: 1690211 - DNA, 15 bp, Homo sapiens
tacacactcacgtgg

SEQ ID NO: 1690212 - DNA, 15 bp, Homo sapiens
acacactcacgtgga

SEQ ID NO: 1690213 - DNA, 15 bp, Homo sapiens
cacactcacgtggat

SEQ ID NO: 1690214 - DNA, 15 bp, Homo sapiens
acactcacgtggatc

SEQ ID NO: 1690215 - DNA, 15 bp, Homo sapiens
cactcacgtggatca

SEQ ID NO: 1690216 - DNA, 15 bp, Homo sapiens
actcacgtggatcat

SEQ ID NO: 1690217 - DNA, 15 bp, Homo sapiens
ctcacgtggatcata

SEQ ID NO: 1690218 - DNA, 15 bp, Homo sapiens
tcacgtggatcatag

SEQ ID NO: 1690219 - DNA, 15 bp, Homo sapiens
cacgtggatcatagg

SEQ ID NO: 1690220 - DNA, 15 bp, Homo sapiens
acgtggatcataggc

SEQ ID NO: 1690221 - DNA, 15 bp, Homo sapiens
cgtggatcataggcc

SEQ ID NO: 1690222 - DNA, 15 bp, Homo sapiens
gtggatcataggcca

SEQ ID NO: 1690223 - DNA, 15 bp, Homo sapiens
tggatcataggccac

SEQ ID NO: 1690224 - DNA, 15 bp, Homo sapiens
ggatcataggccaca

SEQ ID NO: 1690225 - DNA, 15 bp, Homo sapiens
gatcataggccacat

SEQ ID NO: 1690226 - DNA, 15 bp, Homo sapiens
atcataggccacatt

SEQ ID NO: 1690227 - DNA, 15 bp, Homo sapiens
tcataggccacattt

SEQ ID NO: 1690228 - DNA, 15 bp, Homo sapiens
cataggccacatttc

SEQ ID NO: 1690229 - DNA, 15 bp, Homo sapiens
ataggccacatttca

SEQ ID NO: 1690230 - DNA, 15 bp, Homo sapiens
taggccacatttcaa

SEQ ID NO: 1690231 - DNA, 15 bp, Homo sapiens
aggccacatttcaac

SEQ ID NO: 1690232 - DNA, 15 bp, Homo sapiens
ggccacatttcaaca

SEQ ID NO: 1690233 - DNA, 15 bp, Homo sapiens
gccacatttcaacat

SEQ ID NO: 1690234 - DNA, 15 bp, Homo sapiens
ccacatttcaacatg

SEQ ID NO: 1690235 - DNA, 15 bp, Homo sapiens
cacatttcaacatgt

SEQ ID NO: 1690236 - DNA, 15 bp, Homo sapiens
acatttcaacatgtt

SEQ ID NO: 1690237 - DNA, 15 bp, Homo sapiens
catttcaacatgttg

SEQ ID NO: 1690238 - DNA, 15 bp, Homo sapiens
atttcaacatgttgg

SEQ ID NO: 1690239 - DNA, 15 bp, Homo sapiens
ttcaacatgttggag

SEQ ID NO: 1690240 - DNA, 15 bp, Homo sapiens
tcaacatgttggagg

SEQ ID NO: 1690241 - DNA, 15 bp, Homo sapiens
caacatgttggaggt

SEQ ID NO: 1690242 - DNA, 15 bp, Homo sapiens
aacatgttggaggtt

SEQ ID NO: 1690243 - DNA, 15 bp, Homo sapiens
acatgttggaggtta

SEQ ID NO: 1690244 - DNA, 15 bp, Homo sapiens
catgttggaggttaa

SEQ ID NO: 1690245 - DNA, 15 bp, Homo sapiens
atgttggaggttaac

SEQ ID NO: 1690246 - DNA, 15 bp, Homo sapiens
tgttggaggttaaca

SEQ ID NO: 1690247 - DNA, 15 bp, Homo sapiens
gttggaggttaacat

SEQ ID NO: 1690248 - DNA, 15 bp, Homo sapiens
ttggaggttaacata

SEQ ID NO: 1690249 - DNA, 15 bp, Homo sapiens
tggaggttaacatat

SEQ ID NO: 1690250 - DNA, 15 bp, Homo sapiens
ggaggttaacatata

SEQ ID NO: 1690251 - DNA, 15 bp, Homo sapiens
gaggttaacatatag

SEQ ID NO: 1690252 - DNA, 15 bp, Homo sapiens
aggttaacatatagc

SEQ ID NO: 1690253 - DNA, 15 bp, Homo sapiens
ggttaacatatagcc

SEQ ID NO: 1690254 - DNA, 15 bp, Homo sapiens
gttaacatatagccc

SEQ ID NO: 1690255 - DNA, 15 bp, Homo sapiens
ttaacatatagccca

SEQ ID NO: 1690256 - DNA, 15 bp, Homo sapiens
taacatatagcccag

SEQ ID NO: 1690257 - DNA, 15 bp, Homo sapiens
aacatatagcccagt

SEQ ID NO: 1690258 - DNA, 15 bp, Homo sapiens
acatatagcccagtt

SEQ ID NO: 1690259 - DNA, 15 bp, Homo sapiens
catatagcccagttc

SEQ ID NO: 1690260 - DNA, 15 bp, Homo sapiens
atatagcccagttca

SEQ ID NO: 1690261 - DNA, 15 bp, Homo sapiens
tatagcccagttcac

SEQ ID NO: 1690262 - DNA, 15 bp, Homo sapiens
atagcccagttcact

SEQ ID NO: 1690263 - DNA, 15 bp, Homo sapiens
tagcccagttcactt

SEQ ID NO: 1690264 - DNA, 15 bp, Homo sapiens
agcccagttcacttg

SEQ ID NO: 1690265 - DNA, 15 bp, Homo sapiens
gcccagttcacttgg

SEQ ID NO: 1690266 - DNA, 15 bp, Homo sapiens
cccagttcacttggt

SEQ ID NO: 1690267 - DNA, 15 bp, Homo sapiens
ccagttcacttggtt

SEQ ID NO: 1690268 - DNA, 15 bp, Homo sapiens
cagttcacttggttt

SEQ ID NO: 1690269 - DNA, 15 bp, Homo sapiens
agttcacttggtttt

SEQ ID NO: 1690270 - DNA, 15 bp, Homo sapiens
gttcacttggtttta

SEQ ID NO: 1690271 - DNA, 15 bp, Homo sapiens
ttcacttggttttaa

SEQ ID NO: 1690272 - DNA, 15 bp, Homo sapiens
tcacttggttttaaa

SEQ ID NO: 1690273 - DNA, 15 bp, Homo sapiens
cacttggttttaaac

SEQ ID NO: 1690274 - DNA, 15 bp, Homo sapiens
acttggttttaaaca

SEQ ID NO: 1690275 - DNA, 15 bp, Homo sapiens
cttggttttaaacag

SEQ ID NO: 1690276 - DNA, 15 bp, Homo sapiens
ttggttttaaacagc

SEQ ID NO: 1690277 - DNA, 15 bp, Homo sapiens
tggttttaaacagct

SEQ ID NO: 1690278 - DNA, 15 bp, Homo sapiens
ggttttaaacagctc

SEQ ID NO: 1690279 - DNA, 15 bp, Homo sapiens
gttttaaacagctct

SEQ ID NO: 1690280 - DNA, 15 bp, Homo sapiens
ttttaaacagctcta

SEQ ID NO: 1690281 - DNA, 15 bp, Homo sapiens
tttaaacagctctaa

SEQ ID NO: 1690282 - DNA, 15 bp, Homo sapiens
ttaaacagctctaac

SEQ ID NO: 1690283 - DNA, 15 bp, Homo sapiens
taaacagctctaacg

SEQ ID NO: 1690284 - DNA, 15 bp, Homo sapiens
aaacagctctaacgc

SEQ ID NO: 1690285 - DNA, 15 bp, Homo sapiens
aacagctctaacgct

SEQ ID NO: 1690286 - DNA, 15 bp, Homo sapiens
acagctctaacgctt

SEQ ID NO: 1690287 - DNA, 15 bp, Homo sapiens
cagctctaacgctta

SEQ ID NO: 1690288 - DNA, 15 bp, Homo sapiens
agctctaacgcttag

SEQ ID NO: 1690289 - DNA, 15 bp, Homo sapiens
gctctaacgcttagt

SEQ ID NO: 1690290 - DNA, 15 bp, Homo sapiens
ctctaacgcttagtt

SEQ ID NO: 1690291 - DNA, 15 bp, Homo sapiens
tctaacgcttagttt

SEQ ID NO: 1690292 - DNA, 15 bp, Homo sapiens
ctaacgcttagtttc

SEQ ID NO: 1690293 - DNA, 15 bp, Homo sapiens
taacgcttagtttct

SEQ ID NO: 1690294 - DNA, 15 bp, Homo sapiens
aacgcttagtttctc

SEQ ID NO: 1690295 - DNA, 15 bp, Homo sapiens
acgcttagtttctct

SEQ ID NO: 1690296 - DNA, 15 bp, Homo sapiens
cgcttagtttctcta

SEQ ID NO: 1690297 - DNA, 15 bp, Homo sapiens
gcttagtttctctag

SEQ ID NO: 1690298 - DNA, 15 bp, Homo sapiens
cttagtttctctagt

SEQ ID NO: 1690299 - DNA, 15 bp, Homo sapiens
ttagtttctctagtc

SEQ ID NO: 1690300 - DNA, 15 bp, Homo sapiens
tagtttctctagtca

SEQ ID NO: 1690301 - DNA, 15 bp, Homo sapiens
agtttctctagtcat

SEQ ID NO: 1690302 - DNA, 15 bp, Homo sapiens
gtttctctagtcatc

SEQ ID NO: 1690303 - DNA, 15 bp, Homo sapiens
tttctctagtcatct

SEQ ID NO: 1690304 - DNA, 15 bp, Homo sapiens
ttctctagtcatctc

SEQ ID NO: 1690305 - DNA, 15 bp, Homo sapiens
tctctagtcatctca

SEQ ID NO: 1690306 - DNA, 15 bp, Homo sapiens
ctctagtcatctcag

SEQ ID NO: 1690307 - DNA, 15 bp, Homo sapiens
tctagtcatctcagt

SEQ ID NO: 1690308 - DNA, 15 bp, Homo sapiens
ctagtcatctcagta

SEQ ID NO: 1690309 - DNA, 15 bp, Homo sapiens
tagtcatctcagtac

SEQ ID NO: 1690310 - DNA, 15 bp, Homo sapiens
agtcatctcagtacc

SEQ ID NO: 1690311 - DNA, 15 bp, Homo sapiens
gtcatctcagtaccc

SEQ ID NO: 1690312 - DNA, 15 bp, Homo sapiens
tcatctcagtaccca

SEQ ID NO: 1690313 - DNA, 15 bp, Homo sapiens
catctcagtacccat

SEQ ID NO: 1690314 - DNA, 15 bp, Homo sapiens
atctcagtacccatt

SEQ ID NO: 1690315 - DNA, 15 bp, Homo sapiens
tctcagtacccattt

SEQ ID NO: 1690316 - DNA, 15 bp, Homo sapiens
ctcagtacccatttc

SEQ ID NO: 1690317 - DNA, 15 bp, Homo sapiens
tcagtacccatttct

SEQ ID NO: 1690318 - DNA, 15 bp, Homo sapiens
cagtacccatttcta

SEQ ID NO: 1690319 - DNA, 15 bp, Homo sapiens
attagtataatgact

SEQ ID NO: 1690320 - DNA, 15 bp, Homo sapiens
ttagtataatgactg

SEQ ID NO: 1690321 - DNA, 15 bp, Homo sapiens
tagtataatgactga

SEQ ID NO: 1690322 - DNA, 15 bp, Homo sapiens
agtataatgactgaa

SEQ ID NO: 1690323 - DNA, 15 bp, Homo sapiens
gtataatgactgaaa

SEQ ID NO: 1690324 - DNA, 15 bp, Homo sapiens
tataatgactgaaac

SEQ ID NO: 1690325 - DNA, 15 bp, Homo sapiens
ataatgactgaaaca

SEQ ID NO: 1690326 - DNA, 15 bp, Homo sapiens
taatgactgaaacac

SEQ ID NO: 1690327 - DNA, 15 bp, Homo sapiens
aatgactgaaacact

SEQ ID NO: 1690328 - DNA, 15 bp, Homo sapiens
atgactgaaacactt

SEQ ID NO: 1690329 - DNA, 15 bp, Homo sapiens
tgactgaaacacttt

SEQ ID NO: 1690330 - DNA, 15 bp, Homo sapiens
gactgaaacacttta

SEQ ID NO: 1690331 - DNA, 15 bp, Homo sapiens
actgaaacactttag

SEQ ID NO: 1690332 - DNA, 15 bp, Homo sapiens
ctgaaacactttagt

SEQ ID NO: 1690333 - DNA, 15 bp, Homo sapiens
tgaaacactttagtc

SEQ ID NO: 1690334 - DNA, 15 bp, Homo sapiens
gaaacactttagtct

SEQ ID NO: 1690335 - DNA, 15 bp, Homo sapiens
aaacactttagtctt

SEQ ID NO: 1690336 - DNA, 15 bp, Homo sapiens
aacactttagtctta

SEQ ID NO: 1690337 - DNA, 15 bp, Homo sapiens
acactttagtcttac

SEQ ID NO: 1690338 - DNA, 15 bp, Homo sapiens
cactttagtcttaca

SEQ ID NO: 1690339 - DNA, 15 bp, Homo sapiens
actttagtcttacag

SEQ ID NO: 1690340 - DNA, 15 bp, Homo sapiens
ctttagtcttacaga

SEQ ID NO: 1690341 - DNA, 15 bp, Homo sapiens
tttagtcttacagaa

SEQ ID NO: 1690342 - DNA, 15 bp, Homo sapiens
ttagtcttacagaat

SEQ ID NO: 1690343 - DNA, 15 bp, Homo sapiens
tagtcttacagaatg

SEQ ID NO: 1690344 - DNA, 15 bp, Homo sapiens
agtcttacagaatgt

SEQ ID NO: 1690345 - DNA, 15 bp, Homo sapiens
gtcttacagaatgtc

SEQ ID NO: 1690346 - DNA, 15 bp, Homo sapiens
tcttacagaatgtcc

SEQ ID NO: 1690347 - DNA, 15 bp, Homo sapiens
cttacagaatgtcct

SEQ ID NO: 1690348 - DNA, 15 bp, Homo sapiens
ttacagaatgtccta

SEQ ID NO: 1690349 - DNA, 15 bp, Homo sapiens
tacagaatgtcctat

SEQ ID NO: 1690350 - DNA, 15 bp, Homo sapiens
acagaatgtcctatt

SEQ ID NO: 1690351 - DNA, 15 bp, Homo sapiens
cagaatgtcctattt

SEQ ID NO: 1690352 - DNA, 15 bp, Homo sapiens
agaatgtcctatttg

SEQ ID NO: 1690353 - DNA, 15 bp, Homo sapiens
gaatgtcctatttgg

SEQ ID NO: 1690354 - DNA, 15 bp, Homo sapiens
aatgtcctatttgga

SEQ ID NO: 1690355 - DNA, 15 bp, Homo sapiens
atgtcctatttggaa

SEQ ID NO: 1690356 - DNA, 15 bp, Homo sapiens
tgtcctatttggaat

SEQ ID NO: 1690357 - DNA, 15 bp, Homo sapiens
gtcctatttggaatt

SEQ ID NO: 1690358 - DNA, 15 bp, Homo sapiens
tcctatttggaattt

SEQ ID NO: 1690359 - DNA, 15 bp, Homo sapiens
cctatttggaattta

SEQ ID NO: 1690360 - DNA, 15 bp, Homo sapiens
ctatttggaatttat

SEQ ID NO: 1690361 - DNA, 15 bp, Homo sapiens
tatttggaatttatt

SEQ ID NO: 1690362 - DNA, 15 bp, Homo sapiens
atttggaatttattc

SEQ ID NO: 1690363 - DNA, 15 bp, Homo sapiens
tttggaatttattct

SEQ ID NO: 1690364 - DNA, 15 bp, Homo sapiens
ttggaatttattctt

SEQ ID NO: 1690365 - DNA, 15 bp, Homo sapiens
tggaatttattcttt

SEQ ID NO: 1690366 - DNA, 15 bp, Homo sapiens
ggaatttattctttg

SEQ ID NO: 1690367 - DNA, 15 bp, Homo sapiens
gaatttattctttga

SEQ ID NO: 1690368 - DNA, 15 bp, Homo sapiens
aatttattctttgag

SEQ ID NO: 1690369 - DNA, 15 bp, Homo sapiens
atttattctttgagg

SEQ ID NO: 1690370 - DNA, 15 bp, Homo sapiens
tttattctttgagga

SEQ ID NO: 1690371 - DNA, 15 bp, Homo sapiens
ttattctttgaggag

SEQ ID NO: 1690372 - DNA, 15 bp, Homo sapiens
tattctttgaggagg

SEQ ID NO: 1690373 - DNA, 15 bp, Homo sapiens
attctttgaggaggt

SEQ ID NO: 1690374 - DNA, 15 bp, Homo sapiens
ttctttgaggaggtt

SEQ ID NO: 1690375 - DNA, 15 bp, Homo sapiens
tctttgaggaggttc

SEQ ID NO: 1690376 - DNA, 15 bp, Homo sapiens
ctttgaggaggttct

SEQ ID NO: 1690377 - DNA, 15 bp, Homo sapiens
tttgaggaggttctt

SEQ ID NO: 1690378 - DNA, 15 bp, Homo sapiens
ttgaggaggttctta

SEQ ID NO: 1690379 - DNA, 15 bp, Homo sapiens
tgaggaggttcttac

SEQ ID NO: 1690380 - DNA, 15 bp, Homo sapiens
gaggaggttcttact

SEQ ID NO: 1690381 - DNA, 15 bp, Homo sapiens
aggaggttcttactt

SEQ ID NO: 1690382 - DNA, 15 bp, Homo sapiens
ggaggttcttacttt

SEQ ID NO: 1690383 - DNA, 15 bp, Homo sapiens
gaggttcttactttt

SEQ ID NO: 1690384 - DNA, 15 bp, Homo sapiens
aggttcttactttta

SEQ ID NO: 1690385 - DNA, 15 bp, Homo sapiens
ggttcttacttttag

SEQ ID NO: 1690386 - DNA, 15 bp, Homo sapiens
gttcttacttttagt

SEQ ID NO: 1690387 - DNA, 15 bp, Homo sapiens
ttcttacttttagta

SEQ ID NO: 1690388 - DNA, 15 bp, Homo sapiens
tcttacttttagtag

SEQ ID NO: 1690389 - DNA, 15 bp, Homo sapiens
cttacttttagtagg

SEQ ID NO: 1690390 - DNA, 15 bp, Homo sapiens
ttacttttagtaggg

SEQ ID NO: 1690391 - DNA, 15 bp, Homo sapiens
tacttttagtagggt

SEQ ID NO: 1690392 - DNA, 15 bp, Homo sapiens
acttttagtagggtc

SEQ ID NO: 1690393 - DNA, 15 bp, Homo sapiens
cttttagtagggtca

SEQ ID NO: 1690394 - DNA, 15 bp, Homo sapiens
ttttagtagggtcat

SEQ ID NO: 1690395 - DNA, 15 bp, Homo sapiens
tttagtagggtcatt

SEQ ID NO: 1690396 - DNA, 15 bp, Homo sapiens
ttagtagggtcattt

SEQ ID NO: 1690397 - DNA, 15 bp, Homo sapiens
tagtagggtcatttt

SEQ ID NO: 1690398 - DNA, 15 bp, Homo sapiens
agtagggtcattttg

SEQ ID NO: 1690399 - DNA, 15 bp, Homo sapiens
gtagggtcattttga

SEQ ID NO: 1690400 - DNA, 15 bp, Homo sapiens
tagggtcattttgat

SEQ ID NO: 1690401 - DNA, 15 bp, Homo sapiens
agggtcattttgata

SEQ ID NO: 1690402 - DNA, 15 bp, Homo sapiens
gggtcattttgatat

SEQ ID NO: 1690403 - DNA, 15 bp, Homo sapiens
ggtcattttgatata

SEQ ID NO: 1690404 - DNA, 15 bp, Homo sapiens
gtcattttgatatat

SEQ ID NO: 1690405 - DNA, 15 bp, Homo sapiens
tcattttgatatatc

SEQ ID NO: 1690406 - DNA, 15 bp, Homo sapiens
cattttgatatatca

SEQ ID NO: 1690407 - DNA, 15 bp, Homo sapiens
attttgatatatcaa

SEQ ID NO: 1690408 - DNA, 15 bp, Homo sapiens
ttttgatatatcaac

SEQ ID NO: 1690409 - DNA, 15 bp, Homo sapiens
tttgatatatcaaca

SEQ ID NO: 1690410 - DNA, 15 bp, Homo sapiens
ttgatatatcaacaa

SEQ ID NO: 1690411 - DNA, 15 bp, Homo sapiens
tgatatatcaacaac

SEQ ID NO: 1690412 - DNA, 15 bp, Homo sapiens
gatatatcaacaacc

SEQ ID NO: 1690413 - DNA, 15 bp, Homo sapiens
atatatcaacaacca

SEQ ID NO: 1690414 - DNA, 15 bp, Homo sapiens
tatatcaacaaccag

SEQ ID NO: 1690415 - DNA, 15 bp, Homo sapiens
atatcaacaaccaga

SEQ ID NO: 1690416 - DNA, 15 bp, Homo sapiens
tatcaacaaccagac

SEQ ID NO: 1690417 - DNA, 15 bp, Homo sapiens
atcaacaaccagaca

SEQ ID NO: 1690418 - DNA, 15 bp, Homo sapiens
tcaacaaccagacaa

SEQ ID NO: 1690419 - DNA, 15 bp, Homo sapiens
caacaaccagacaac

SEQ ID NO: 1690420 - DNA, 15 bp, Homo sapiens
aacaaccagacaacc

SEQ ID NO: 1690421 - DNA, 15 bp, Homo sapiens
acaaccagacaaccc

SEQ ID NO: 1690422 - DNA, 15 bp, Homo sapiens
caaccagacaaccct

SEQ ID NO: 1690423 - DNA, 15 bp, Homo sapiens
aaccagacaaccctg

SEQ ID NO: 1690424 - DNA, 15 bp, Homo sapiens
accagacaaccctgg

SEQ ID NO: 1690425 - DNA, 15 bp, Homo sapiens
ccagacaaccctgga

SEQ ID NO: 1690426 - DNA, 15 bp, Homo sapiens
cagacaaccctggat

SEQ ID NO: 1690427 - DNA, 15 bp, Homo sapiens
agacaaccctggatg

SEQ ID NO: 1690428 - DNA, 15 bp, Homo sapiens
gacaaccctggatga

SEQ ID NO: 1690429 - DNA, 15 bp, Homo sapiens
acaaccctggatgaa

SEQ ID NO: 1690430 - DNA, 15 bp, Homo sapiens
caaccctggatgaag

SEQ ID NO: 1690431 - DNA, 15 bp, Homo sapiens
aaccctggatgaagc

SEQ ID NO: 1690432 - DNA, 15 bp, Homo sapiens
accctggatgaagct

SEQ ID NO: 1690433 - DNA, 15 bp, Homo sapiens
ccctggatgaagctt

SEQ ID NO: 1690434 - DNA, 15 bp, Homo sapiens
cctggatgaagctta

SEQ ID NO: 1690435 - DNA, 15 bp, Homo sapiens
ctggatgaagcttac

SEQ ID NO: 1690436 - DNA, 15 bp, Homo sapiens
tggatgaagcttacc

SEQ ID NO: 1690437 - DNA, 15 bp, Homo sapiens
ggatgaagcttacca

SEQ ID NO: 1690438 - DNA, 15 bp, Homo sapiens
gatgaagcttaccat

SEQ ID NO: 1690439 - DNA, 15 bp, Homo sapiens
atgaagcttaccata

SEQ ID NO: 1690440 - DNA, 15 bp, Homo sapiens
tgaagcttaccatag

SEQ ID NO: 1690441 - DNA, 15 bp, Homo sapiens
gaagcttaccataga

SEQ ID NO: 1690442 - DNA, 15 bp, Homo sapiens
aagcttaccatagac

SEQ ID NO: 1690443 - DNA, 15 bp, Homo sapiens
agcttaccatagacc

SEQ ID NO: 1690444 - DNA, 15 bp, Homo sapiens
gcttaccatagacca

SEQ ID NO: 1690445 - DNA, 15 bp, Homo sapiens
cttaccatagaccaa

SEQ ID NO: 1690446 - DNA, 15 bp, Homo sapiens
ttaccatagaccaaa

SEQ ID NO: 1690447 - DNA, 15 bp, Homo sapiens
taccatagaccaaat

SEQ ID NO: 1690448 - DNA, 15 bp, Homo sapiens
accatagaccaaatt

SEQ ID NO: 1690449 - DNA, 15 bp, Homo sapiens
ccatagaccaaattt

SEQ ID NO: 1690450 - DNA, 15 bp, Homo sapiens
catagaccaaatttg

SEQ ID NO: 1690451 - DNA, 15 bp, Homo sapiens
atagaccaaatttgg

SEQ ID NO: 1690452 - DNA, 15 bp, Homo sapiens
tagaccaaatttgga

SEQ ID NO: 1690453 - DNA, 15 bp, Homo sapiens
agaccaaatttggac

SEQ ID NO: 1690454 - DNA, 15 bp, Homo sapiens
gaccaaatttggacc

SEQ ID NO: 1690455 - DNA, 15 bp, Homo sapiens
accaaatttggacca

SEQ ID NO: 1690456 - DNA, 15 bp, Homo sapiens
ccaaatttggaccag

SEQ ID NO: 1690457 - DNA, 15 bp, Homo sapiens
caaatttggaccaga

SEQ ID NO: 1690458 - DNA, 15 bp, Homo sapiens
aaatttggaccagat

SEQ ID NO: 1690459 - DNA, 15 bp, Homo sapiens
aatttggaccagatt

SEQ ID NO: 1690460 - DNA, 15 bp, Homo sapiens
atttggaccagattt

SEQ ID NO: 1690461 - DNA, 15 bp, Homo sapiens
tttggaccagatttc

SEQ ID NO: 1690462 - DNA, 15 bp, Homo sapiens
ttggaccagatttct

SEQ ID NO: 1690463 - DNA, 15 bp, Homo sapiens
tggaccagatttctt

SEQ ID NO: 1690464 - DNA, 15 bp, Homo sapiens
ggaccagatttcttc

SEQ ID NO: 1690465 - DNA, 15 bp, Homo sapiens
gaccagatttcttcc

SEQ ID NO: 1690466 - DNA, 15 bp, Homo sapiens
accagatttcttcct

SEQ ID NO: 1690467 - DNA, 15 bp, Homo sapiens
ccagatttcttcctc

SEQ ID NO: 1690468 - DNA, 15 bp, Homo sapiens
cagatttcttcctcc

SEQ ID NO: 1690469 - DNA, 15 bp, Homo sapiens
agatttcttcctcct

SEQ ID NO: 1690470 - DNA, 15 bp, Homo sapiens
gatttcttcctcctg

SEQ ID NO: 1690471 - DNA, 15 bp, Homo sapiens
atttcttcctcctgt

SEQ ID NO: 1690472 - DNA, 15 bp, Homo sapiens
tttcttcctcctgtc

SEQ ID NO: 1690473 - DNA, 15 bp, Homo sapiens
ttcttcctcctgtca

SEQ ID NO: 1690474 - DNA, 15 bp, Homo sapiens
tcttcctcctgtcaa

SEQ ID NO: 1690475 - DNA, 15 bp, Homo sapiens
cttcctcctgtcaat

SEQ ID NO: 1690476 - DNA, 15 bp, Homo sapiens
ttcctcctgtcaatg

SEQ ID NO: 1690477 - DNA, 15 bp, Homo sapiens
tcctcctgtcaatga

SEQ ID NO: 1690478 - DNA, 15 bp, Homo sapiens
cctcctgtcaatgat

SEQ ID NO: 1690479 - DNA, 15 bp, Homo sapiens
ctcctgtcaatgatg

SEQ ID NO: 1690480 - DNA, 15 bp, Homo sapiens
tcctgtcaatgatgt

SEQ ID NO: 1690481 - DNA, 15 bp, Homo sapiens
cctgtcaatgatgtt

SEQ ID NO: 1690482 - DNA, 15 bp, Homo sapiens
ctgtcaatgatgtta

SEQ ID NO: 1690483 - DNA, 15 bp, Homo sapiens
tgtcaatgatgttac

SEQ ID NO: 1690484 - DNA, 15 bp, Homo sapiens
gtcaatgatgttaca

SEQ ID NO: 1690485 - DNA, 15 bp, Homo sapiens
tcaatgatgttacag

SEQ ID NO: 1690486 - DNA, 15 bp, Homo sapiens
caatgatgttacagt

SEQ ID NO: 1690487 - DNA, 15 bp, Homo sapiens
aatgatgttacagtg

SEQ ID NO: 1690488 - DNA, 15 bp, Homo sapiens
atgatgttacagtga

SEQ ID NO: 1690489 - DNA, 15 bp, Homo sapiens
tgatgttacagtgag

SEQ ID NO: 1690490 - DNA, 15 bp, Homo sapiens
gatgttacagtgaga

SEQ ID NO: 1690491 - DNA, 15 bp, Homo sapiens
atgttacagtgagaa

SEQ ID NO: 1690492 - DNA, 15 bp, Homo sapiens
tgttacagtgagaat

SEQ ID NO: 1690493 - DNA, 15 bp, Homo sapiens
gttacagtgagaatc

SEQ ID NO: 1690494 - DNA, 15 bp, Homo sapiens
ttacagtgagaatct

SEQ ID NO: 1690495 - DNA, 15 bp, Homo sapiens
tacagtgagaatcta

SEQ ID NO: 1690496 - DNA, 15 bp, Homo sapiens
acagtgagaatctaa

SEQ ID NO: 1690497 - DNA, 15 bp, Homo sapiens
cagtgagaatctaat

SEQ ID NO: 1690498 - DNA, 15 bp, Homo sapiens
agtgagaatctaata

SEQ ID NO: 1690499 - DNA, 15 bp, Homo sapiens
gtgagaatctaatat

SEQ ID NO: 1690500 - DNA, 15 bp, Homo sapiens
tgagaatctaatatt

SEQ ID NO: 1690501 - DNA, 15 bp, Homo sapiens
gagaatctaatattg

SEQ ID NO: 1690502 - DNA, 15 bp, Homo sapiens
agaatctaatattgt

SEQ ID NO: 1690503 - DNA, 15 bp, Homo sapiens
gaatctaatattgta

SEQ ID NO: 1690504 - DNA, 15 bp, Homo sapiens
aatctaatattgtat

SEQ ID NO: 1690505 - DNA, 15 bp, Homo sapiens
atctaatattgtatt

SEQ ID NO: 1690506 - DNA, 15 bp, Homo sapiens
tctaatattgtatta

SEQ ID NO: 1690507 - DNA, 15 bp, Homo sapiens
ctaatattgtattaa

SEQ ID NO: 1690508 - DNA, 15 bp, Homo sapiens
taatattgtattaaa

SEQ ID NO: 1690509 - DNA, 15 bp, Homo sapiens
aatattgtattaaac

SEQ ID NO: 1690510 - DNA, 15 bp, Homo sapiens
atattgtattaaacc

SEQ ID NO: 1690511 - DNA, 15 bp, Homo sapiens
tattgtattaaaccc

SEQ ID NO: 1690512 - DNA, 15 bp, Homo sapiens
attgtattaaaccca

SEQ ID NO: 1690513 - DNA, 15 bp, Homo sapiens
ttgtattaaacccat

SEQ ID NO: 1690514 - DNA, 15 bp, Homo sapiens
tgtattaaacccatg

SEQ ID NO: 1690515 - DNA, 15 bp, Homo sapiens
gtattaaacccatgc

SEQ ID NO: 1690516 - DNA, 15 bp, Homo sapiens
tattaaacccatgcc

SEQ ID NO: 1690517 - DNA, 15 bp, Homo sapiens
attaaacccatgcca

SEQ ID NO: 1690518 - DNA, 15 bp, Homo sapiens
ttaaacccatgccac

SEQ ID NO: 1690519 - DNA, 15 bp, Homo sapiens
taaacccatgccaca

SEQ ID NO: 1690520 - DNA, 15 bp, Homo sapiens
aaacccatgccacat

SEQ ID NO: 1690521 - DNA, 15 bp, Homo sapiens
aacccatgccacatg

SEQ ID NO: 1690522 - DNA, 15 bp, Homo sapiens
acccatgccacatgt

SEQ ID NO: 1690523 - DNA, 15 bp, Homo sapiens
cccatgccacatgtt

SEQ ID NO: 1690524 - DNA, 15 bp, Homo sapiens
ccatgccacatgtta

SEQ ID NO: 1690525 - DNA, 15 bp, Homo sapiens
catgccacatgttaa

SEQ ID NO: 1690526 - DNA, 15 bp, Homo sapiens
atgccacatgttaaa

SEQ ID NO: 1690527 - DNA, 15 bp, Homo sapiens
tgccacatgttaaat

SEQ ID NO: 1690528 - DNA, 15 bp, Homo sapiens
gccacatgttaaatg

SEQ ID NO: 1690529 - DNA, 15 bp, Homo sapiens
ccacatgttaaatga

SEQ ID NO: 1690530 - DNA, 15 bp, Homo sapiens
cacatgttaaatgaa

SEQ ID NO: 1690531 - DNA, 15 bp, Homo sapiens
acatgttaaatgaat

SEQ ID NO: 1690532 - DNA, 15 bp, Homo sapiens
catgttaaatgaatc

SEQ ID NO: 1690533 - DNA, 15 bp, Homo sapiens
atgttaaatgaatct

SEQ ID NO: 1690534 - DNA, 15 bp, Homo sapiens
tgttaaatgaatctg

SEQ ID NO: 1690535 - DNA, 15 bp, Homo sapiens
gttaaatgaatctga

SEQ ID NO: 1690536 - DNA, 15 bp, Homo sapiens
ttaaatgaatctgaa

SEQ ID NO: 1690537 - DNA, 15 bp, Homo sapiens
taaatgaatctgaat

SEQ ID NO: 1690538 - DNA, 15 bp, Homo sapiens
aaatgaatctgaatg

SEQ ID NO: 1690539 - DNA, 15 bp, Homo sapiens
aatgaatctgaatga

SEQ ID NO: 1690540 - DNA, 15 bp, Homo sapiens
atgaatctgaatgac

SEQ ID NO: 1690541 - DNA, 15 bp, Homo sapiens
tgaatctgaatgaca

SEQ ID NO: 1690542 - DNA, 15 bp, Homo sapiens
gaatctgaatgacag

SEQ ID NO: 1690543 - DNA, 15 bp, Homo sapiens
aatctgaatgacaga

SEQ ID NO: 1690544 - DNA, 15 bp, Homo sapiens
atctgaatgacagac

SEQ ID NO: 1690545 - DNA, 15 bp, Homo sapiens
tctgaatgacagact

SEQ ID NO: 1690546 - DNA, 15 bp, Homo sapiens
ctgaatgacagactg

SEQ ID NO: 1690547 - DNA, 15 bp, Homo sapiens
tgaatgacagactga

SEQ ID NO: 1690548 - DNA, 15 bp, Homo sapiens
gaatgacagactgac

SEQ ID NO: 1690549 - DNA, 15 bp, Homo sapiens
aatgacagactgact

SEQ ID NO: 1690550 - DNA, 15 bp, Homo sapiens
atgacagactgactt

SEQ ID NO: 1690551 - DNA, 15 bp, Homo sapiens
tgacagactgactta

SEQ ID NO: 1690552 - DNA, 15 bp, Homo sapiens
gacagactgacttac

SEQ ID NO: 1690553 - DNA, 15 bp, Homo sapiens
acagactgacttacc

SEQ ID NO: 1690554 - DNA, 15 bp, Homo sapiens
cagactgacttacct

SEQ ID NO: 1690555 - DNA, 15 bp, Homo sapiens
agactgacttaccta

SEQ ID NO: 1690556 - DNA, 15 bp, Homo sapiens
gactgacttacctaa

SEQ ID NO: 1690557 - DNA, 15 bp, Homo sapiens
actgacttacctaat

SEQ ID NO: 1690558 - DNA, 15 bp, Homo sapiens
ctgacttacctaatt

SEQ ID NO: 1690559 - DNA, 15 bp, Homo sapiens
tgacttacctaattt

SEQ ID NO: 1690560 - DNA, 15 bp, Homo sapiens
gacttacctaatttc

SEQ ID NO: 1690561 - DNA, 15 bp, Homo sapiens
acttacctaatttct

SEQ ID NO: 1690562 - DNA, 15 bp, Homo sapiens
cttacctaatttctt

SEQ ID NO: 1690563 - DNA, 15 bp, Homo sapiens
ttacctaatttcttg

SEQ ID NO: 1690564 - DNA, 15 bp, Homo sapiens
tacctaatttcttgg

SEQ ID NO: 1690565 - DNA, 15 bp, Homo sapiens
acctaatttcttgga

SEQ ID NO: 1690566 - DNA, 15 bp, Homo sapiens
cctaatttcttggac

SEQ ID NO: 1690567 - DNA, 15 bp, Homo sapiens
ctaatttcttggact

SEQ ID NO: 1690568 - DNA, 15 bp, Homo sapiens
taatttcttggactt

SEQ ID NO: 1690569 - DNA, 15 bp, Homo sapiens
aatttcttggacttc

SEQ ID NO: 1690570 - DNA, 15 bp, Homo sapiens
atttcttggacttca

SEQ ID NO: 1690571 - DNA, 15 bp, Homo sapiens
tttcttggacttcac

SEQ ID NO: 1690572 - DNA, 15 bp, Homo sapiens
ttcttggacttcaca

SEQ ID NO: 1690573 - DNA, 15 bp, Homo sapiens
tcttggacttcacat

SEQ ID NO: 1690574 - DNA, 15 bp, Homo sapiens
cttggacttcacatt

SEQ ID NO: 1690575 - DNA, 15 bp, Homo sapiens
ttggacttcacattt

SEQ ID NO: 1690576 - DNA, 15 bp, Homo sapiens
tggacttcacatttt

SEQ ID NO: 1690577 - DNA, 15 bp, Homo sapiens
ggacttcacattttc

SEQ ID NO: 1690578 - DNA, 15 bp, Homo sapiens
gacttcacattttct

SEQ ID NO: 1690579 - DNA, 15 bp, Homo sapiens
acttcacattttctt

SEQ ID NO: 1690580 - DNA, 15 bp, Homo sapiens
cttcacattttcttt

SEQ ID NO: 1690581 - DNA, 15 bp, Homo sapiens
ttcacattttctttt

SEQ ID NO: 1690582 - DNA, 15 bp, Homo sapiens
tcacattttcttttc

SEQ ID NO: 1690583 - DNA, 15 bp, Homo sapiens
cacattttcttttct

SEQ ID NO: 1690584 - DNA, 15 bp, Homo sapiens
acattttcttttctt

SEQ ID NO: 1690585 - DNA, 15 bp, Homo sapiens
cattttcttttcttc

SEQ ID NO: 1690586 - DNA, 15 bp, Homo sapiens
attttcttttcttct

SEQ ID NO: 1690587 - DNA, 15 bp, Homo sapiens
ttttcttttcttctt

SEQ ID NO: 1690588 - DNA, 15 bp, Homo sapiens
tttcttttcttcttt

SEQ ID NO: 1690589 - DNA, 15 bp, Homo sapiens
ttcttttcttctttt

SEQ ID NO: 1690590 - DNA, 15 bp, Homo sapiens
tcttttcttcttttt

SEQ ID NO: 1690591 - DNA, 15 bp, Homo sapiens
cttttcttctttttg

SEQ ID NO: 1690592 - DNA, 15 bp, Homo sapiens
ttttcttctttttga

SEQ ID NO: 1690593 - DNA, 15 bp, Homo sapiens
tttcttctttttgat

SEQ ID NO: 1690594 - DNA, 15 bp, Homo sapiens
ttcttctttttgatt

SEQ ID NO: 1690595 - DNA, 15 bp, Homo sapiens
tcttctttttgattt

SEQ ID NO: 1690596 - DNA, 15 bp, Homo sapiens
cttctttttgatttt

SEQ ID NO: 1690597 - DNA, 15 bp, Homo sapiens
ttctttttgattttt

SEQ ID NO: 1690598 - DNA, 15 bp, Homo sapiens
tctttttgattttta

SEQ ID NO: 1690599 - DNA, 15 bp, Homo sapiens
ctttttgatttttag

SEQ ID NO: 1690600 - DNA, 15 bp, Homo sapiens
tttttgatttttaga

SEQ ID NO: 1690601 - DNA, 15 bp, Homo sapiens
ttttgatttttagag

SEQ ID NO: 1690602 - DNA, 15 bp, Homo sapiens
tttgatttttagagt

SEQ ID NO: 1690603 - DNA, 15 bp, Homo sapiens
ttgatttttagagtg

SEQ ID NO: 1690604 - DNA, 15 bp, Homo sapiens
tgatttttagagtgt

SEQ ID NO: 1690605 - DNA, 15 bp, Homo sapiens
gatttttagagtgtg

SEQ ID NO: 1690606 - DNA, 15 bp, Homo sapiens
atttttagagtgtgt

SEQ ID NO: 1690607 - DNA, 15 bp, Homo sapiens
tttttagagtgtgtc

SEQ ID NO: 1690608 - DNA, 15 bp, Homo sapiens
ttttagagtgtgtcc

SEQ ID NO: 1690609 - DNA, 15 bp, Homo sapiens
tttagagtgtgtcca

SEQ ID NO: 1690610 - DNA, 15 bp, Homo sapiens
ttagagtgtgtccaa

SEQ ID NO: 1690611 - DNA, 15 bp, Homo sapiens
tagagtgtgtccaag

SEQ ID NO: 1690612 - DNA, 15 bp, Homo sapiens
agagtgtgtccaagt

SEQ ID NO: 1690613 - DNA, 15 bp, Homo sapiens
gagtgtgtccaagtt

SEQ ID NO: 1690614 - DNA, 15 bp, Homo sapiens
agtgtgtccaagttt

SEQ ID NO: 1690615 - DNA, 15 bp, Homo sapiens
gtgtgtccaagttta

SEQ ID NO: 1690616 - DNA, 15 bp, Homo sapiens
tgtgtccaagtttac

SEQ ID NO: 1690617 - DNA, 15 bp, Homo sapiens
gtgtccaagtttacg

SEQ ID NO: 1690618 - DNA, 15 bp, Homo sapiens
tgtccaagtttacgg

SEQ ID NO: 1690619 - DNA, 15 bp, Homo sapiens
gtccaagtttacgga

SEQ ID NO: 1690620 - DNA, 15 bp, Homo sapiens
tccaagtttacggac

SEQ ID NO: 1690621 - DNA, 15 bp, Homo sapiens
ccaagtttacggact

SEQ ID NO: 1690622 - DNA, 15 bp, Homo sapiens
caagtttacggacta

SEQ ID NO: 1690623 - DNA, 15 bp, Homo sapiens
aagtttacggactat

SEQ ID NO: 1690624 - DNA, 15 bp, Homo sapiens
agtttacggactatg

SEQ ID NO: 1690625 - DNA, 15 bp, Homo sapiens
gtttacggactatga

SEQ ID NO: 1690626 - DNA, 15 bp, Homo sapiens
tttacggactatgag

SEQ ID NO: 1690627 - DNA, 15 bp, Homo sapiens
ttacggactatgagc

SEQ ID NO: 1690628 - DNA, 15 bp, Homo sapiens
tacggactatgagct

SEQ ID NO: 1690629 - DNA, 15 bp, Homo sapiens
acggactatgagctg

SEQ ID NO: 1690630 - DNA, 15 bp, Homo sapiens
cggactatgagctga

SEQ ID NO: 1690631 - DNA, 15 bp, Homo sapiens
ggactatgagctgaa

SEQ ID NO: 1690632 - DNA, 15 bp, Homo sapiens
gactatgagctgaag

SEQ ID NO: 1690633 - DNA, 15 bp, Homo sapiens
actatgagctgaagg

SEQ ID NO: 1690634 - DNA, 15 bp, Homo sapiens
ctatgagctgaaggc

SEQ ID NO: 1690635 - DNA, 15 bp, Homo sapiens
tatgagctgaaggcc

SEQ ID NO: 1690636 - DNA, 15 bp, Homo sapiens
atgagctgaaggcct

SEQ ID NO: 1690637 - DNA, 15 bp, Homo sapiens
tgagctgaaggccta

SEQ ID NO: 1690638 - DNA, 15 bp, Homo sapiens
gagctgaaggcctat

SEQ ID NO: 1690639 - DNA, 15 bp, Homo sapiens
agctgaaggcctatg

SEQ ID NO: 1690640 - DNA, 15 bp, Homo sapiens
gctgaaggcctatgc

SEQ ID NO: 1690641 - DNA, 15 bp, Homo sapiens
ctgaaggcctatgcc

SEQ ID NO: 1690642 - DNA, 15 bp, Homo sapiens
tgaaggcctatgcca

SEQ ID NO: 1690643 - DNA, 15 bp, Homo sapiens
gaaggcctatgccaa

SEQ ID NO: 1690644 - DNA, 15 bp, Homo sapiens
aaggcctatgccaaa

SEQ ID NO: 1690645 - DNA, 15 bp, Homo sapiens
aggcctatgccaaag

SEQ ID NO: 1690646 - DNA, 15 bp, Homo sapiens
ggcctatgccaaagc

SEQ ID NO: 1690647 - DNA, 15 bp, Homo sapiens
gcctatgccaaagca

SEQ ID NO: 1690648 - DNA, 15 bp, Homo sapiens
cctatgccaaagcag

SEQ ID NO: 1690649 - DNA, 15 bp, Homo sapiens
ctatgccaaagcagg

SEQ ID NO: 1690650 - DNA, 15 bp, Homo sapiens
tatgccaaagcaggg

SEQ ID NO: 1690651 - DNA, 15 bp, Homo sapiens
atgccaaagcagggg

SEQ ID NO: 1690652 - DNA, 15 bp, Homo sapiens
tgccaaagcaggggt

SEQ ID NO: 1690653 - DNA, 15 bp, Homo sapiens
gccaaagcaggggtg

SEQ ID NO: 1690654 - DNA, 15 bp, Homo sapiens
ccaaagcaggggtgg

SEQ ID NO: 1690655 - DNA, 15 bp, Homo sapiens
caaagcaggggtggt

SEQ ID NO: 1690656 - DNA, 15 bp, Homo sapiens
aaagcaggggtggtg

SEQ ID NO: 1690657 - DNA, 15 bp, Homo sapiens
aagcaggggtggtgg

SEQ ID NO: 1690658 - DNA, 15 bp, Homo sapiens
agcaggggtggtggc

SEQ ID NO: 1690659 - DNA, 15 bp, Homo sapiens
gcaggggtggtggct

SEQ ID NO: 1690660 - DNA, 15 bp, Homo sapiens
caggggtggtggctg

SEQ ID NO: 1690661 - DNA, 15 bp, Homo sapiens
aggggtggtggctga

SEQ ID NO: 1690662 - DNA, 15 bp, Homo sapiens
ggggtggtggctgat

SEQ ID NO: 1690663 - DNA, 15 bp, Homo sapiens
gggtggtggctgatg

SEQ ID NO: 1690664 - DNA, 15 bp, Homo sapiens
ggtggtggctgatga

SEQ ID NO: 1690665 - DNA, 15 bp, Homo sapiens
gtggtggctgatgaa

SEQ ID NO: 1690666 - DNA, 15 bp, Homo sapiens
tggtggctgatgaag

SEQ ID NO: 1690667 - DNA, 15 bp, Homo sapiens
ggtggctgatgaagt

SEQ ID NO: 1690668 - DNA, 15 bp, Homo sapiens
gtggctgatgaagtc

SEQ ID NO: 1690669 - DNA, 15 bp, Homo sapiens
tggctgatgaagtca

SEQ ID NO: 1690670 - DNA, 15 bp, Homo sapiens
ggctgatgaagtcat

SEQ ID NO: 1690671 - DNA, 15 bp, Homo sapiens
gctgatgaagtcatt

SEQ ID NO: 1690672 - DNA, 15 bp, Homo sapiens
ctgatgaagtcattt

SEQ ID NO: 1690673 - DNA, 15 bp, Homo sapiens
tgatgaagtcatttc

SEQ ID NO: 1690674 - DNA, 15 bp, Homo sapiens
gatgaagtcatttca

SEQ ID NO: 1690675 - DNA, 15 bp, Homo sapiens
atgaagtcatttcat

SEQ ID NO: 1690676 - DNA, 15 bp, Homo sapiens
tgaagtcatttcatc

SEQ ID NO: 1690677 - DNA, 15 bp, Homo sapiens
gaagtcatttcatca

SEQ ID NO: 1690678 - DNA, 15 bp, Homo sapiens
aagtcatttcatcaa

SEQ ID NO: 1690679 - DNA, 15 bp, Homo sapiens
agtcatttcatcaat

SEQ ID NO: 1690680 - DNA, 15 bp, Homo sapiens
gtcatttcatcaatg

SEQ ID NO: 1690681 - DNA, 15 bp, Homo sapiens
tcatttcatcaatga

SEQ ID NO: 1690682 - DNA, 15 bp, Homo sapiens
catttcatcaatgag

SEQ ID NO: 1690683 - DNA, 15 bp, Homo sapiens
atttcatcaatgaga

SEQ ID NO: 1690684 - DNA, 15 bp, Homo sapiens
tttcatcaatgagaa

SEQ ID NO: 1690685 - DNA, 15 bp, Homo sapiens
ttcatcaatgagaac

SEQ ID NO: 1690686 - DNA, 15 bp, Homo sapiens
tcatcaatgagaaca

SEQ ID NO: 1690687 - DNA, 15 bp, Homo sapiens
catcaatgagaacag

SEQ ID NO: 1690688 - DNA, 15 bp, Homo sapiens
atcaatgagaacagt

SEQ ID NO: 1690689 - DNA, 15 bp, Homo sapiens
tcaatgagaacagtg

SEQ ID NO: 1690690 - DNA, 15 bp, Homo sapiens
caatgagaacagtgg

SEQ ID NO: 1690691 - DNA, 15 bp, Homo sapiens
aatgagaacagtggc

SEQ ID NO: 1690692 - DNA, 15 bp, Homo sapiens
atgagaacagtggct

SEQ ID NO: 1690693 - DNA, 15 bp, Homo sapiens
tgagaacagtggctg

SEQ ID NO: 1690694 - DNA, 15 bp, Homo sapiens
gagaacagtggctgc

SEQ ID NO: 1690695 - DNA, 15 bp, Homo sapiens
agaacagtggctgct

SEQ ID NO: 1690696 - DNA, 15 bp, Homo sapiens
gaacagtggctgctt

SEQ ID NO: 1690697 - DNA, 15 bp, Homo sapiens
aacagtggctgcttt

SEQ ID NO: 1690698 - DNA, 15 bp, Homo sapiens
acagtggctgctttt

SEQ ID NO: 1690699 - DNA, 15 bp, Homo sapiens
cagtggctgcttttg

SEQ ID NO: 1690700 - DNA, 15 bp, Homo sapiens
agtggctgcttttgg

SEQ ID NO: 1690701 - DNA, 15 bp, Homo sapiens
gtggctgcttttggt

SEQ ID NO: 1690702 - DNA, 15 bp, Homo sapiens
tggctgcttttggtg

SEQ ID NO: 1690703 - DNA, 15 bp, Homo sapiens
ggctgcttttggtgg

SEQ ID NO: 1690704 - DNA, 15 bp, Homo sapiens
gctgcttttggtggt

SEQ ID NO: 1690705 - DNA, 15 bp, Homo sapiens
tgcttttggtggtga

SEQ ID NO: 1690706 - DNA, 15 bp, Homo sapiens
gcttttggtggtgag

SEQ ID NO: 1690707 - DNA, 15 bp, Homo sapiens
cttttggtggtgaga

SEQ ID NO: 1690708 - DNA, 15 bp, Homo sapiens
ttttggtggtgagaa

SEQ ID NO: 1690709 - DNA, 15 bp, Homo sapiens
tttggtggtgagaaa

SEQ ID NO: 1690710 - DNA, 15 bp, Homo sapiens
ttggtggtgagaaaa

SEQ ID NO: 1690711 - DNA, 15 bp, Homo sapiens
tggtggtgagaaaag

SEQ ID NO: 1690712 - DNA, 15 bp, Homo sapiens
ggtggtgagaaaaga

SEQ ID NO: 1690713 - DNA, 15 bp, Homo sapiens
gtggtgagaaaagag

SEQ ID NO: 1690714 - DNA, 15 bp, Homo sapiens
tggtgagaaaagaga

SEQ ID NO: 1690715 - DNA, 15 bp, Homo sapiens
ggtgagaaaagagag

SEQ ID NO: 1690716 - DNA, 15 bp, Homo sapiens
gtgagaaaagagagg

SEQ ID NO: 1690717 - DNA, 15 bp, Homo sapiens
tgagaaaagagaggt

SEQ ID NO: 1690718 - DNA, 15 bp, Homo sapiens
gagaaaagagaggtt

SEQ ID NO: 1690719 - DNA, 15 bp, Homo sapiens
agaaaagagaggttg

SEQ ID NO: 1690720 - DNA, 15 bp, Homo sapiens
gaaaagagaggttga

SEQ ID NO: 1690721 - DNA, 15 bp, Homo sapiens
aaaagagaggttgaa

SEQ ID NO: 1690722 - DNA, 15 bp, Homo sapiens
aaagagaggttgaaa

SEQ ID NO: 1690723 - DNA, 15 bp, Homo sapiens
aagagaggttgaaag

SEQ ID NO: 1690724 - DNA, 15 bp, Homo sapiens
agagaggttgaaagg

SEQ ID NO: 1690725 - DNA, 15 bp, Homo sapiens
gagaggttgaaaggt

SEQ ID NO: 1690726 - DNA, 15 bp, Homo sapiens
agaggttgaaaggtt

SEQ ID NO: 1690727 - DNA, 15 bp, Homo sapiens
gaggttgaaaggttg

SEQ ID NO: 1690728 - DNA, 15 bp, Homo sapiens
aggttgaaaggttgg

SEQ ID NO: 1690729 - DNA, 15 bp, Homo sapiens
ggttgaaaggttggt

SEQ ID NO: 1690730 - DNA, 15 bp, Homo sapiens
gttgaaaggttggtt

SEQ ID NO: 1690731 - DNA, 15 bp, Homo sapiens
ttgaaaggttggtta

SEQ ID NO: 1690732 - DNA, 15 bp, Homo sapiens
tgaaaggttggttaa

SEQ ID NO: 1690733 - DNA, 15 bp, Homo sapiens
gaaaggttggttaat

SEQ ID NO: 1690734 - DNA, 15 bp, Homo sapiens
aaaggttggttaatt

SEQ ID NO: 1690735 - DNA, 15 bp, Homo sapiens
aaggttggttaattg

SEQ ID NO: 1690736 - DNA, 15 bp, Homo sapiens
aggttggttaattgg

SEQ ID NO: 1690737 - DNA, 15 bp, Homo sapiens
ggttggttaattgga

SEQ ID NO: 1690738 - DNA, 15 bp, Homo sapiens
gttggttaattggaa

SEQ ID NO: 1690739 - DNA, 15 bp, Homo sapiens
ttggttaattggaat

SEQ ID NO: 1690740 - DNA, 15 bp, Homo sapiens
tggttaattggaatc

SEQ ID NO: 1690741 - DNA, 15 bp, Homo sapiens
ggttaattggaatct

SEQ ID NO: 1690742 - DNA, 15 bp, Homo sapiens
gttaattggaatctg

SEQ ID NO: 1690743 - DNA, 15 bp, Homo sapiens
ttaattggaatctga

SEQ ID NO: 1690744 - DNA, 15 bp, Homo sapiens
taattggaatctgat

SEQ ID NO: 1690745 - DNA, 15 bp, Homo sapiens
aattggaatctgatt

SEQ ID NO: 1690746 - DNA, 15 bp, Homo sapiens
attggaatctgattc

SEQ ID NO: 1690747 - DNA, 15 bp, Homo sapiens
ttggaatctgattct

SEQ ID NO: 1690748 - DNA, 15 bp, Homo sapiens
tggaatctgattctt

SEQ ID NO: 1690749 - DNA, 15 bp, Homo sapiens
ggaatctgattcttt

SEQ ID NO: 1690750 - DNA, 15 bp, Homo sapiens
gaatctgattctttc

SEQ ID NO: 1690751 - DNA, 15 bp, Homo sapiens
aatctgattctttcc

SEQ ID NO: 1690752 - DNA, 15 bp, Homo sapiens
atctgattctttcct

SEQ ID NO: 1690753 - DNA, 15 bp, Homo sapiens
tctgattctttcctt

SEQ ID NO: 1690754 - DNA, 15 bp, Homo sapiens
ctgattctttcctta

SEQ ID NO: 1690755 - DNA, 15 bp, Homo sapiens
tgattctttccttaa

SEQ ID NO: 1690756 - DNA, 15 bp, Homo sapiens
gattctttccttaat

SEQ ID NO: 1690757 - DNA, 15 bp, Homo sapiens
attctttccttaatt

SEQ ID NO: 1690758 - DNA, 15 bp, Homo sapiens
ttctttccttaattt

SEQ ID NO: 1690759 - DNA, 15 bp, Homo sapiens
tctttccttaatttc

SEQ ID NO: 1690760 - DNA, 15 bp, Homo sapiens
ctttccttaatttca

SEQ ID NO: 1690761 - DNA, 15 bp, Homo sapiens
tttccttaatttcat

SEQ ID NO: 1690762 - DNA, 15 bp, Homo sapiens
ttccttaatttcatc

SEQ ID NO: 1690763 - DNA, 15 bp, Homo sapiens
tccttaatttcatca

SEQ ID NO: 1690764 - DNA, 15 bp, Homo sapiens
ccttaatttcatcaa

SEQ ID NO: 1690765 - DNA, 15 bp, Homo sapiens
cttaatttcatcaat

SEQ ID NO: 1690766 - DNA, 15 bp, Homo sapiens
ttaatttcatcaatc

SEQ ID NO: 1690767 - DNA, 15 bp, Homo sapiens
taatttcatcaatca

SEQ ID NO: 1690768 - DNA, 15 bp, Homo sapiens
aatttcatcaatcag

SEQ ID NO: 1690769 - DNA, 15 bp, Homo sapiens
atttcatcaatcagc

SEQ ID NO: 1690770 - DNA, 15 bp, Homo sapiens
tttcatcaatcagca

SEQ ID NO: 1690771 - DNA, 15 bp, Homo sapiens
ttcatcaatcagcat

SEQ ID NO: 1690772 - DNA, 15 bp, Homo sapiens
tcatcaatcagcata

SEQ ID NO: 1690773 - DNA, 15 bp, Homo sapiens
catcaatcagcatag

SEQ ID NO: 1690774 - DNA, 15 bp, Homo sapiens
atcaatcagcatagt

SEQ ID NO: 1690775 - DNA, 15 bp, Homo sapiens
tcaatcagcatagta

SEQ ID NO: 1690776 - DNA, 15 bp, Homo sapiens
caatcagcatagtac

SEQ ID NO: 1690777 - DNA, 15 bp, Homo sapiens
aatcagcatagtacc

SEQ ID NO: 1690778 - DNA, 15 bp, Homo sapiens
atcagcatagtaccc

SEQ ID NO: 1690779 - DNA, 15 bp, Homo sapiens
tcagcatagtaccct

SEQ ID NO: 1690780 - DNA, 15 bp, Homo sapiens
cagcatagtaccctg

SEQ ID NO: 1690781 - DNA, 15 bp, Homo sapiens
agcatagtaccctga

SEQ ID NO: 1690782 - DNA, 15 bp, Homo sapiens
gcatagtaccctgag

SEQ ID NO: 1690783 - DNA, 15 bp, Homo sapiens
catagtaccctgagt

SEQ ID NO: 1690784 - DNA, 15 bp, Homo sapiens
atagtaccctgagtc

SEQ ID NO: 1690785 - DNA, 15 bp, Homo sapiens
tagtaccctgagtct

SEQ ID NO: 1690786 - DNA, 15 bp, Homo sapiens
agtaccctgagtctc

SEQ ID NO: 1690787 - DNA, 15 bp, Homo sapiens
gtaccctgagtctct

SEQ ID NO: 1690788 - DNA, 15 bp, Homo sapiens
taccctgagtctctc

SEQ ID NO: 1690789 - DNA, 15 bp, Homo sapiens
accctgagtctctca

SEQ ID NO: 1690790 - DNA, 15 bp, Homo sapiens
ccctgagtctctcag

SEQ ID NO: 1690791 - DNA, 15 bp, Homo sapiens
cctgagtctctcagt

SEQ ID NO: 1690792 - DNA, 15 bp, Homo sapiens
ctgagtctctcagtt

SEQ ID NO: 1690793 - DNA, 15 bp, Homo sapiens
tgagtctctcagttt

SEQ ID NO: 1690794 - DNA, 15 bp, Homo sapiens
gagtctctcagtttg

SEQ ID NO: 1690795 - DNA, 15 bp, Homo sapiens
agtctctcagtttgt

SEQ ID NO: 1690796 - DNA, 15 bp, Homo sapiens
gtctctcagtttgtg

SEQ ID NO: 1690797 - DNA, 15 bp, Homo sapiens
tctctcagtttgtgc

SEQ ID NO: 1690798 - DNA, 15 bp, Homo sapiens
ctctcagtttgtgca

SEQ ID NO: 1690799 - DNA, 15 bp, Homo sapiens
tctcagtttgtgcaa

SEQ ID NO: 1690800 - DNA, 15 bp, Homo sapiens
ctcagtttgtgcaaa

SEQ ID NO: 1690801 - DNA, 15 bp, Homo sapiens
tcagtttgtgcaaag

SEQ ID NO: 1690802 - DNA, 15 bp, Homo sapiens
cagtttgtgcaaagc

SEQ ID NO: 1690803 - DNA, 15 bp, Homo sapiens
agtttgtgcaaagcg

SEQ ID NO: 1690804 - DNA, 15 bp, Homo sapiens
gtttgtgcaaagcgg

SEQ ID NO: 1690805 - DNA, 15 bp, Homo sapiens
tttgtgcaaagcggc

SEQ ID NO: 1690806 - DNA, 15 bp, Homo sapiens
ttgtgcaaagcggca

SEQ ID NO: 1690807 - DNA, 15 bp, Homo sapiens
tgtgcaaagcggcag

SEQ ID NO: 1690808 - DNA, 15 bp, Homo sapiens
gtgcaaagcggcaga

SEQ ID NO: 1690809 - DNA, 15 bp, Homo sapiens
tgcaaagcggcagac

SEQ ID NO: 1690810 - DNA, 15 bp, Homo sapiens
gcaaagcggcagacc

SEQ ID NO: 1690811 - DNA, 15 bp, Homo sapiens
caaagcggcagaccc

SEQ ID NO: 1690812 - DNA, 15 bp, Homo sapiens
aaagcggcagaccca

SEQ ID NO: 1690813 - DNA, 15 bp, Homo sapiens
aagcggcagacccac

SEQ ID NO: 1690814 - DNA, 15 bp, Homo sapiens
agcggcagacccacc

SEQ ID NO: 1690815 - DNA, 15 bp, Homo sapiens
gcggcagacccacct

SEQ ID NO: 1690816 - DNA, 15 bp, Homo sapiens
cggcagacccacctt

SEQ ID NO: 1690817 - DNA, 15 bp, Homo sapiens
ggcagacccaccttg

SEQ ID NO: 1690818 - DNA, 15 bp, Homo sapiens
gcagacccaccttgg

SEQ ID NO: 1690819 - DNA, 15 bp, Homo sapiens
cagacccaccttggt

SEQ ID NO: 1690820 - DNA, 15 bp, Homo sapiens
agacccaccttggtc

SEQ ID NO: 1690821 - DNA, 15 bp, Homo sapiens
gacccaccttggtct

SEQ ID NO: 1690822 - DNA, 15 bp, Homo sapiens
acccaccttggtctg

SEQ ID NO: 1690823 - DNA, 15 bp, Homo sapiens
cccaccttggtctgt

SEQ ID NO: 1690824 - DNA, 15 bp, Homo sapiens
ccaccttggtctgtg

SEQ ID NO: 1690825 - DNA, 15 bp, Homo sapiens
caccttggtctgtgg

SEQ ID NO: 1690826 - DNA, 15 bp, Homo sapiens
accttggtctgtggc

SEQ ID NO: 1690827 - DNA, 15 bp, Homo sapiens
ccttggtctgtggcc

SEQ ID NO: 1690828 - DNA, 15 bp, Homo sapiens
cttggtctgtggcct

SEQ ID NO: 1690829 - DNA, 15 bp, Homo sapiens
ttggtctgtggcctc

SEQ ID NO: 1690830 - DNA, 15 bp, Homo sapiens
tggtctgtggcctcc

SEQ ID NO: 1690831 - DNA, 15 bp, Homo sapiens
ggtctgtggcctcca

SEQ ID NO: 1690832 - DNA, 15 bp, Homo sapiens
gtctgtggcctccag

SEQ ID NO: 1690833 - DNA, 15 bp, Homo sapiens
tctgtggcctccaga

SEQ ID NO: 1690834 - DNA, 15 bp, Homo sapiens
ctgtggcctccagag

SEQ ID NO: 1690835 - DNA, 15 bp, Homo sapiens
tgtggcctccagagg

SEQ ID NO: 1690836 - DNA, 15 bp, Homo sapiens
gtggcctccagagga

SEQ ID NO: 1690837 - DNA, 15 bp, Homo sapiens
tggcctccagaggaa

SEQ ID NO: 1690838 - DNA, 15 bp, Homo sapiens
ggcctccagaggaag

SEQ ID NO: 1690839 - DNA, 15 bp, Homo sapiens
gcctccagaggaagt

SEQ ID NO: 1690840 - DNA, 15 bp, Homo sapiens
cctccagaggaagta

SEQ ID NO: 1690841 - DNA, 15 bp, Homo sapiens
ctccagaggaagtac

SEQ ID NO: 1690842 - DNA, 15 bp, Homo sapiens
tccagaggaagtact

SEQ ID NO: 1690843 - DNA, 15 bp, Homo sapiens
ccagaggaagtactt

SEQ ID NO: 1690844 - DNA, 15 bp, Homo sapiens
cagaggaagtacttg

SEQ ID NO: 1690845 - DNA, 15 bp, Homo sapiens
agaggaagtacttgt

SEQ ID NO: 1690846 - DNA, 15 bp, Homo sapiens
gaggaagtacttgtt

SEQ ID NO: 1690847 - DNA, 15 bp, Homo sapiens
aggaagtacttgttc

SEQ ID NO: 1690848 - DNA, 15 bp, Homo sapiens
ggaagtacttgttca

SEQ ID NO: 1690849 - DNA, 15 bp, Homo sapiens
gaagtacttgttcaa

SEQ ID NO: 1690850 - DNA, 15 bp, Homo sapiens
aagtacttgttcaag

SEQ ID NO: 1690851 - DNA, 15 bp, Homo sapiens
agtacttgttcaaga

SEQ ID NO: 1690852 - DNA, 15 bp, Homo sapiens
gtacttgttcaagag

SEQ ID NO: 1690853 - DNA, 15 bp, Homo sapiens
tacttgttcaagagg

SEQ ID NO: 1690854 - DNA, 15 bp, Homo sapiens
acttgttcaagaggg

SEQ ID NO: 1690855 - DNA, 15 bp, Homo sapiens
cttgttcaagaggga

SEQ ID NO: 1690856 - DNA, 15 bp, Homo sapiens
ttgttcaagagggag

SEQ ID NO: 1690857 - DNA, 15 bp, Homo sapiens
tgttcaagagggagc

SEQ ID NO: 1690858 - DNA, 15 bp, Homo sapiens
gttcaagagggagct

SEQ ID NO: 1690859 - DNA, 15 bp, Homo sapiens
ttcaagagggagcta

SEQ ID NO: 1690860 - DNA, 15 bp, Homo sapiens
tcaagagggagctaa

SEQ ID NO: 1690861 - DNA, 15 bp, Homo sapiens
caagagggagctaag

SEQ ID NO: 1690862 - DNA, 15 bp, Homo sapiens
aagagggagctaagc

SEQ ID NO: 1690863 - DNA, 15 bp, Homo sapiens
agagggagctaagca

SEQ ID NO: 1690864 - DNA, 15 bp, Homo sapiens
gagggagctaagcag

SEQ ID NO: 1690865 - DNA, 15 bp, Homo sapiens
agggagctaagcaga

SEQ ID NO: 1690866 - DNA, 15 bp, Homo sapiens
gggagctaagcagag

SEQ ID NO: 1690867 - DNA, 15 bp, Homo sapiens
ggagctaagcagagt

SEQ ID NO: 1690868 - DNA, 15 bp, Homo sapiens
gagctaagcagagta

SEQ ID NO: 1690869 - DNA, 15 bp, Homo sapiens
agctaagcagagtaa

SEQ ID NO: 1690870 - DNA, 15 bp, Homo sapiens
gctaagcagagtaat

SEQ ID NO: 1690871 - DNA, 15 bp, Homo sapiens
ctaagcagagtaatt

SEQ ID NO: 1690872 - DNA, 15 bp, Homo sapiens
taagcagagtaattt

SEQ ID NO: 1690873 - DNA, 15 bp, Homo sapiens
aagcagagtaattta

SEQ ID NO: 1690874 - DNA, 15 bp, Homo sapiens
agcagagtaatttag

SEQ ID NO: 1690875 - DNA, 15 bp, Homo sapiens
gcagagtaatttagg

SEQ ID NO: 1690876 - DNA, 15 bp, Homo sapiens
cagagtaatttaggt

SEQ ID NO: 1690877 - DNA, 15 bp, Homo sapiens
agagtaatttaggtt

SEQ ID NO: 1690878 - DNA, 15 bp, Homo sapiens
gagtaatttaggttg

SEQ ID NO: 1690879 - DNA, 15 bp, Homo sapiens
agtaatttaggttgg

SEQ ID NO: 1690880 - DNA, 15 bp, Homo sapiens
gtaatttaggttggt

SEQ ID NO: 1690881 - DNA, 15 bp, Homo sapiens
taatttaggttggta

SEQ ID NO: 1690882 - DNA, 15 bp, Homo sapiens
aatttaggttggtaa

SEQ ID NO: 1690883 - DNA, 15 bp, Homo sapiens
atttaggttggtaat

SEQ ID NO: 1690884 - DNA, 15 bp, Homo sapiens
tttaggttggtaatt

SEQ ID NO: 1690885 - DNA, 15 bp, Homo sapiens
ttaggttggtaattt

SEQ ID NO: 1690886 - DNA, 15 bp, Homo sapiens
taggttggtaattta

SEQ ID NO: 1690887 - DNA, 15 bp, Homo sapiens
aggttggtaatttag

SEQ ID NO: 1690888 - DNA, 15 bp, Homo sapiens
ggttggtaatttagg

SEQ ID NO: 1690889 - DNA, 15 bp, Homo sapiens
gttggtaatttaggt

SEQ ID NO: 1690890 - DNA, 15 bp, Homo sapiens
ttggtaatttaggta

SEQ ID NO: 1690891 - DNA, 15 bp, Homo sapiens
tggtaatttaggtac

SEQ ID NO: 1690892 - DNA, 15 bp, Homo sapiens
ggtaatttaggtact

SEQ ID NO: 1690893 - DNA, 15 bp, Homo sapiens
gtaatttaggtacta

SEQ ID NO: 1690894 - DNA, 15 bp, Homo sapiens
taatttaggtactat

SEQ ID NO: 1690895 - DNA, 15 bp, Homo sapiens
aatttaggtactata

SEQ ID NO: 1690896 - DNA, 15 bp, Homo sapiens
atttaggtactataa

SEQ ID NO: 1690897 - DNA, 15 bp, Homo sapiens
tttaggtactataag

SEQ ID NO: 1690898 - DNA, 15 bp, Homo sapiens
ttaggtactataaga

SEQ ID NO: 1690899 - DNA, 15 bp, Homo sapiens
taggtactataagaa

SEQ ID NO: 1690900 - DNA, 15 bp, Homo sapiens
aggtactataagaag

SEQ ID NO: 1690901 - DNA, 15 bp, Homo sapiens
ggtactataagaagt

SEQ ID NO: 1690902 - DNA, 15 bp, Homo sapiens
gtactataagaagtc

SEQ ID NO: 1690903 - DNA, 15 bp, Homo sapiens
tactataagaagtcc

SEQ ID NO: 1690904 - DNA, 15 bp, Homo sapiens
actataagaagtccc

SEQ ID NO: 1690905 - DNA, 15 bp, Homo sapiens
ctataagaagtccca

SEQ ID NO: 1690906 - DNA, 15 bp, Homo sapiens
tataagaagtcccaa

SEQ ID NO: 1690907 - DNA, 15 bp, Homo sapiens
ataagaagtcccaag

SEQ ID NO: 1690908 - DNA, 15 bp, Homo sapiens
taagaagtcccaagc

SEQ ID NO: 1690909 - DNA, 15 bp, Homo sapiens
aagaagtcccaagcc

SEQ ID NO: 1690910 - DNA, 15 bp, Homo sapiens
agaagtcccaagcct

SEQ ID NO: 1690911 - DNA, 15 bp, Homo sapiens
gaagtcccaagcctt

SEQ ID NO: 1690912 - DNA, 15 bp, Homo sapiens
aagtcccaagccttt

SEQ ID NO: 1690913 - DNA, 15 bp, Homo sapiens
agtcccaagccttta

SEQ ID NO: 1690914 - DNA, 15 bp, Homo sapiens
gtcccaagcctttag

SEQ ID NO: 1690915 - DNA, 15 bp, Homo sapiens
tcccaagcctttagc

SEQ ID NO: 1690916 - DNA, 15 bp, Homo sapiens
cccaagcctttagca

SEQ ID NO: 1690917 - DNA, 15 bp, Homo sapiens
ccaagcctttagcag

SEQ ID NO: 1690918 - DNA, 15 bp, Homo sapiens
caagcctttagcagt

SEQ ID NO: 1690919 - DNA, 15 bp, Homo sapiens
aagcctttagcagta

SEQ ID NO: 1690920 - DNA, 15 bp, Homo sapiens
agcctttagcagtat

SEQ ID NO: 1690921 - DNA, 15 bp, Homo sapiens
gcctttagcagtatg

SEQ ID NO: 1690922 - DNA, 15 bp, Homo sapiens
cctttagcagtatgt

SEQ ID NO: 1690923 - DNA, 15 bp, Homo sapiens
ctttagcagtatgtt

SEQ ID NO: 1690924 - DNA, 15 bp, Homo sapiens
tttagcagtatgttt

SEQ ID NO: 1690925 - DNA, 15 bp, Homo sapiens
ttagcagtatgtttt

SEQ ID NO: 1690926 - DNA, 15 bp, Homo sapiens
tagcagtatgttttt

SEQ ID NO: 1690927 - DNA, 15 bp, Homo sapiens
agcagtatgttttta

SEQ ID NO: 1690928 - DNA, 15 bp, Homo sapiens
gcagtatgtttttaa

SEQ ID NO: 1690929 - DNA, 15 bp, Homo sapiens
cagtatgtttttaaa

SEQ ID NO: 1690930 - DNA, 15 bp, Homo sapiens
agtatgtttttaaag

SEQ ID NO: 1690931 - DNA, 15 bp, Homo sapiens
gtatgtttttaaaga

SEQ ID NO: 1690932 - DNA, 15 bp, Homo sapiens
tatgtttttaaagat

SEQ ID NO: 1690933 - DNA, 15 bp, Homo sapiens
atgtttttaaagatg

SEQ ID NO: 1690934 - DNA, 15 bp, Homo sapiens
tgtttttaaagatgt

SEQ ID NO: 1690935 - DNA, 15 bp, Homo sapiens
gtttttaaagatgtt

SEQ ID NO: 1690936 - DNA, 15 bp, Homo sapiens
tttttaaagatgttg

SEQ ID NO: 1690937 - DNA, 15 bp, Homo sapiens
ttttaaagatgttgc

SEQ ID NO: 1690938 - DNA, 15 bp, Homo sapiens
tttaaagatgttgca

SEQ ID NO: 1690939 - DNA, 15 bp, Homo sapiens
ttaaagatgttgcag

SEQ ID NO: 1690940 - DNA, 15 bp, Homo sapiens
taaagatgttgcagt

SEQ ID NO: 1690941 - DNA, 15 bp, Homo sapiens
aaagatgttgcagtt

SEQ ID NO: 1690942 - DNA, 15 bp, Homo sapiens
aagatgttgcagttg

SEQ ID NO: 1690943 - DNA, 15 bp, Homo sapiens
agatgttgcagttgg

SEQ ID NO: 1690944 - DNA, 15 bp, Homo sapiens
gatgttgcagttggc

SEQ ID NO: 1690945 - DNA, 15 bp, Homo sapiens
atgttgcagttggca

SEQ ID NO: 1690946 - DNA, 15 bp, Homo sapiens
tgttgcagttggcaa

SEQ ID NO: 1690947 - DNA, 15 bp, Homo sapiens
gttgcagttggcaat

SEQ ID NO: 1690948 - DNA, 15 bp, Homo sapiens
ttgcagttggcaatt

SEQ ID NO: 1690949 - DNA, 15 bp, Homo sapiens
tgcagttggcaattt

SEQ ID NO: 1690950 - DNA, 15 bp, Homo sapiens
gcagttggcaatttt

SEQ ID NO: 1690951 - DNA, 15 bp, Homo sapiens
cagttggcaattttt

SEQ ID NO: 1690952 - DNA, 15 bp, Homo sapiens
agttggcaattttta

SEQ ID NO: 1690953 - DNA, 15 bp, Homo sapiens
gttggcaatttttag

SEQ ID NO: 1690954 - DNA, 15 bp, Homo sapiens
ttggcaatttttaga

SEQ ID NO: 1690955 - DNA, 15 bp, Homo sapiens
tggcaatttttagaa

SEQ ID NO: 1690956 - DNA, 15 bp, Homo sapiens
ggcaatttttagaaa

SEQ ID NO: 1690957 - DNA, 15 bp, Homo sapiens
gcaatttttagaaag

SEQ ID NO: 1690958 - DNA, 15 bp, Homo sapiens
caatttttagaaagc

SEQ ID NO: 1690959 - DNA, 15 bp, Homo sapiens
aatttttagaaagcc

SEQ ID NO: 1690960 - DNA, 15 bp, Homo sapiens
atttttagaaagcca

SEQ ID NO: 1690961 - DNA, 15 bp, Homo sapiens
tttttagaaagccag

SEQ ID NO: 1690962 - DNA, 15 bp, Homo sapiens
ttttagaaagccagc

SEQ ID NO: 1690963 - DNA, 15 bp, Homo sapiens
tttagaaagccagct

SEQ ID NO: 1690964 - DNA, 15 bp, Homo sapiens
ttagaaagccagctc

SEQ ID NO: 1690965 - DNA, 15 bp, Homo sapiens
tagaaagccagctca

SEQ ID NO: 1690966 - DNA, 15 bp, Homo sapiens
agaaagccagctcag

SEQ ID NO: 1690967 - DNA, 15 bp, Homo sapiens
gaaagccagctcagg

SEQ ID NO: 1690968 - DNA, 15 bp, Homo sapiens
aaagccagctcaggg

SEQ ID NO: 1690969 - DNA, 15 bp, Homo sapiens
aagccagctcagggt

SEQ ID NO: 1690970 - DNA, 15 bp, Homo sapiens
agccagctcagggta

SEQ ID NO: 1690971 - DNA, 15 bp, Homo sapiens
gccagctcagggtag

SEQ ID NO: 1690972 - DNA, 15 bp, Homo sapiens
ccagctcagggtaga

SEQ ID NO: 1690973 - DNA, 15 bp, Homo sapiens
cagctcagggtagat

SEQ ID NO: 1690974 - DNA, 15 bp, Homo sapiens
agctcagggtagata

SEQ ID NO: 1690975 - DNA, 15 bp, Homo sapiens
gctcagggtagatat

SEQ ID NO: 1690976 - DNA, 15 bp, Homo sapiens
ctcagggtagatatt

SEQ ID NO: 1690977 - DNA, 15 bp, Homo sapiens
tcagggtagatattt

SEQ ID NO: 1690978 - DNA, 15 bp, Homo sapiens
cagggtagatattta

SEQ ID NO: 1690979 - DNA, 15 bp, Homo sapiens
agggtagatatttat

SEQ ID NO: 1690980 - DNA, 15 bp, Homo sapiens
gggtagatatttatt

SEQ ID NO: 1690981 - DNA, 15 bp, Homo sapiens
ggtagatatttattt

SEQ ID NO: 1690982 - DNA, 15 bp, Homo sapiens
gtagatatttatttc

SEQ ID NO: 1690983 - DNA, 15 bp, Homo sapiens
tagatatttatttca

SEQ ID NO: 1690984 - DNA, 15 bp, Homo sapiens
agatatttatttcaa

SEQ ID NO: 1690985 - DNA, 15 bp, Homo sapiens
gatatttatttcaaa

SEQ ID NO: 1690986 - DNA, 15 bp, Homo sapiens
atatttatttcaaac

SEQ ID NO: 1690987 - DNA, 15 bp, Homo sapiens
tatttatttcaaact

SEQ ID NO: 1690988 - DNA, 15 bp, Homo sapiens
atttatttcaaactc

SEQ ID NO: 1690989 - DNA, 15 bp, Homo sapiens
tttatttcaaactct

SEQ ID NO: 1690990 - DNA, 15 bp, Homo sapiens
ttatttcaaactctg

SEQ ID NO: 1690991 - DNA, 15 bp, Homo sapiens
tatttcaaactctga

SEQ ID NO: 1690992 - DNA, 15 bp, Homo sapiens
atttcaaactctgat

SEQ ID NO: 1690993 - DNA, 15 bp, Homo sapiens
tttcaaactctgatg

SEQ ID NO: 1690994 - DNA, 15 bp, Homo sapiens
ttcaaactctgatgg

SEQ ID NO: 1690995 - DNA, 15 bp, Homo sapiens
tcaaactctgatggt

SEQ ID NO: 1690996 - DNA, 15 bp, Homo sapiens
caaactctgatggta

SEQ ID NO: 1690997 - DNA, 15 bp, Homo sapiens
aaactctgatggtat

SEQ ID NO: 1690998 - DNA, 15 bp, Homo sapiens
aactctgatggtatg

SEQ ID NO: 1690999 - DNA, 15 bp, Homo sapiens
actctgatggtatgt

SEQ ID NO: 1691000 - DNA, 15 bp, Homo sapiens
ctctgatggtatgta

SEQ ID NO: 1691001 - DNA, 15 bp, Homo sapiens
tctgatggtatgtat

SEQ ID NO: 1691002 - DNA, 15 bp, Homo sapiens
ctgatggtatgtatg

SEQ ID NO: 1691003 - DNA, 15 bp, Homo sapiens
tgatggtatgtatgt

SEQ ID NO: 1691004 - DNA, 15 bp, Homo sapiens
gatggtatgtatgta

SEQ ID NO: 1691005 - DNA, 15 bp, Homo sapiens
atggtatgtatgtat

SEQ ID NO: 1691006 - DNA, 15 bp, Homo sapiens
tggtatgtatgtata

SEQ ID NO: 1691007 - DNA, 15 bp, Homo sapiens
ggtatgtatgtataa

SEQ ID NO: 1691008 - DNA, 15 bp, Homo sapiens
gtatgtatgtataaa

SEQ ID NO: 1691009 - DNA, 15 bp, Homo sapiens
tatgtatgtataaat

SEQ ID NO: 1691010 - DNA, 15 bp, Homo sapiens
atgtatgtataaata

SEQ ID NO: 1691011 - DNA, 15 bp, Homo sapiens
tgtatgtataaatat

SEQ ID NO: 1691012 - DNA, 15 bp, Homo sapiens
gtatgtataaatatt

SEQ ID NO: 1691013 - DNA, 15 bp, Homo sapiens
tatgtataaatatta

SEQ ID NO: 1691014 - DNA, 15 bp, Homo sapiens
atgtataaatattat

SEQ ID NO: 1691015 - DNA, 15 bp, Homo sapiens
tgtataaatattata

SEQ ID NO: 1691016 - DNA, 15 bp, Homo sapiens
gtataaatattatac

SEQ ID NO: 1691017 - DNA, 15 bp, Homo sapiens
tataaatattatacc

SEQ ID NO: 1691018 - DNA, 15 bp, Homo sapiens
ataaatattatacct

SEQ ID NO: 1691019 - DNA, 15 bp, Homo sapiens
taaatattatacctc

SEQ ID NO: 1691020 - DNA, 15 bp, Homo sapiens
aaatattatacctca

SEQ ID NO: 1691021 - DNA, 15 bp, Homo sapiens
aatattatacctcat

SEQ ID NO: 1691022 - DNA, 15 bp, Homo sapiens
atattatacctcata

SEQ ID NO: 1691023 - DNA, 15 bp, Homo sapiens
tattatacctcatat

SEQ ID NO: 1691024 - DNA, 15 bp, Homo sapiens
attatacctcatatc

SEQ ID NO: 1691025 - DNA, 15 bp, Homo sapiens
ttatacctcatatca

SEQ ID NO: 1691026 - DNA, 15 bp, Homo sapiens
tatacctcatatcag

SEQ ID NO: 1691027 - DNA, 15 bp, Homo sapiens
atacctcatatcagt

SEQ ID NO: 1691028 - DNA, 15 bp, Homo sapiens
tacctcatatcagtc

SEQ ID NO: 1691029 - DNA, 15 bp, Homo sapiens
acctcatatcagtct

SEQ ID NO: 1691030 - DNA, 15 bp, Homo sapiens
cctcatatcagtcta

SEQ ID NO: 1691031 - DNA, 15 bp, Homo sapiens
ctcatatcagtctat

SEQ ID NO: 1691032 - DNA, 15 bp, Homo sapiens
tcatatcagtctata

SEQ ID NO: 1691033 - DNA, 15 bp, Homo sapiens
catatcagtctataa

SEQ ID NO: 1691034 - DNA, 15 bp, Homo sapiens
atatcagtctataat

SEQ ID NO: 1691035 - DNA, 15 bp, Homo sapiens
tatcagtctataatg

SEQ ID NO: 1691036 - DNA, 15 bp, Homo sapiens
atcagtctataatgc

SEQ ID NO: 1691037 - DNA, 15 bp, Homo sapiens
tcagtctataatgct

SEQ ID NO: 1691038 - DNA, 15 bp, Homo sapiens
cagtctataatgctg

SEQ ID NO: 1691039 - DNA, 15 bp, Homo sapiens
agtctataatgctgt

SEQ ID NO: 1691040 - DNA, 15 bp, Homo sapiens
gtctataatgctgtt

SEQ ID NO: 1691041 - DNA, 15 bp, Homo sapiens
tctataatgctgttt

SEQ ID NO: 1691042 - DNA, 15 bp, Homo sapiens
ctataatgctgtttg

SEQ ID NO: 1691043 - DNA, 15 bp, Homo sapiens
tataatgctgtttgc

SEQ ID NO: 1691044 - DNA, 15 bp, Homo sapiens
ataatgctgtttgct

SEQ ID NO: 1691045 - DNA, 15 bp, Homo sapiens
taatgctgtttgctg

SEQ ID NO: 1691046 - DNA, 15 bp, Homo sapiens
aatgctgtttgctgt

SEQ ID NO: 1691047 - DNA, 15 bp, Homo sapiens
atgctgtttgctgtc

SEQ ID NO: 1691048 - DNA, 15 bp, Homo sapiens
tgctgtttgctgtca

SEQ ID NO: 1691049 - DNA, 15 bp, Homo sapiens
gctgtttgctgtcat

SEQ ID NO: 1691050 - DNA, 15 bp, Homo sapiens
ctgtttgctgtcatt

SEQ ID NO: 1691051 - DNA, 15 bp, Homo sapiens
tgtttgctgtcatta

SEQ ID NO: 1691052 - DNA, 15 bp, Homo sapiens
gtttgctgtcattaa

SEQ ID NO: 1691053 - DNA, 15 bp, Homo sapiens
tttgctgtcattaaa

SEQ ID NO: 1691054 - DNA, 15 bp, Homo sapiens
ttgctgtcattaaag

SEQ ID NO: 1691055 - DNA, 15 bp, Homo sapiens
tgctgtcattaaaga

SEQ ID NO: 1691056 - DNA, 15 bp, Homo sapiens
gctgtcattaaagaa

SEQ ID NO: 1691057 - DNA, 15 bp, Homo sapiens
ctgtcattaaagaaa

SEQ ID NO: 1691058 - DNA, 15 bp, Homo sapiens
tgtcattaaagaaaa

SEQ ID NO: 1691059 - DNA, 15 bp, Homo sapiens
gtcattaaagaaaag

SEQ ID NO: 1691060 - DNA, 15 bp, Homo sapiens
tcattaaagaaaagc

SEQ ID NO: 1691061 - DNA, 15 bp, Homo sapiens
cattaaagaaaagcc

SEQ ID NO: 1691062 - DNA, 15 bp, Homo sapiens
attaaagaaaagcct

SEQ ID NO: 1691063 - DNA, 15 bp, Homo sapiens
ttaaagaaaagccta

SEQ ID NO: 1691064 - DNA, 15 bp, Homo sapiens
taaagaaaagcctac

SEQ ID NO: 1691065 - DNA, 15 bp, Homo sapiens
aaagaaaagcctaca

SEQ ID NO: 1691066 - DNA, 15 bp, Homo sapiens
aagaaaagcctacat

SEQ ID NO: 1691067 - DNA, 15 bp, Homo sapiens
agaaaagcctacatg

SEQ ID NO: 1691068 - DNA, 15 bp, Homo sapiens
gaaaagcctacatga

SEQ ID NO: 1691069 - DNA, 15 bp, Homo sapiens
aaaagcctacatgag

SEQ ID NO: 1691070 - DNA, 15 bp, Homo sapiens
aaagcctacatgaga

SEQ ID NO: 1691071 - DNA, 15 bp, Homo sapiens
aagcctacatgagac

SEQ ID NO: 1691072 - DNA, 15 bp, Homo sapiens
agcctacatgagaca

SEQ ID NO: 1691073 - DNA, 15 bp, Homo sapiens
gcctacatgagacat

SEQ ID NO: 1691074 - DNA, 15 bp, Homo sapiens
cctacatgagacatt

SEQ ID NO: 1691075 - DNA, 15 bp, Homo sapiens
ctacatgagacatta

SEQ ID NO: 1691076 - DNA, 15 bp, Homo sapiens
tacatgagacattac

SEQ ID NO: 1691077 - DNA, 15 bp, Homo sapiens
acatgagacattaca

SEQ ID NO: 1691078 - DNA, 15 bp, Homo sapiens
catgagacattacaa

SEQ ID NO: 1691079 - DNA, 15 bp, Homo sapiens
atgagacattacaac

SEQ ID NO: 1691080 - DNA, 15 bp, Homo sapiens
tgagacattacaact

SEQ ID NO: 1691081 - DNA, 15 bp, Homo sapiens
gagacattacaactg

SEQ ID NO: 1691082 - DNA, 15 bp, Homo sapiens
agacattacaactga

SEQ ID NO: 1691083 - DNA, 15 bp, Homo sapiens
gacattacaactgat

SEQ ID NO: 1691084 - DNA, 15 bp, Homo sapiens
acattacaactgata

SEQ ID NO: 1691085 - DNA, 15 bp, Homo sapiens
cattacaactgatac

SEQ ID NO: 1691086 - DNA, 15 bp, Homo sapiens
attacaactgatacc

SEQ ID NO: 1691087 - DNA, 15 bp, Homo sapiens
ttacaactgatacca

SEQ ID NO: 1691088 - DNA, 15 bp, Homo sapiens
tacaactgataccac

SEQ ID NO: 1691089 - DNA, 15 bp, Homo sapiens
acaactgataccaca

SEQ ID NO: 1691090 - DNA, 15 bp, Homo sapiens
caactgataccacag

SEQ ID NO: 1691091 - DNA, 15 bp, Homo sapiens
aactgataccacaga

SEQ ID NO: 1691092 - DNA, 15 bp, Homo sapiens
actgataccacagaa

SEQ ID NO: 1691093 - DNA, 15 bp, Homo sapiens
ctgataccacagaaa

SEQ ID NO: 1691094 - DNA, 15 bp, Homo sapiens
tgataccacagaaat

SEQ ID NO: 1691095 - DNA, 15 bp, Homo sapiens
gataccacagaaata

SEQ ID NO: 1691096 - DNA, 15 bp, Homo sapiens
ataccacagaaatac

SEQ ID NO: 1691097 - DNA, 15 bp, Homo sapiens
taccacagaaataca

SEQ ID NO: 1691098 - DNA, 15 bp, Homo sapiens
accacagaaatacag

SEQ ID NO: 1691099 - DNA, 15 bp, Homo sapiens
ccacagaaatacaga

SEQ ID NO: 1691100 - DNA, 15 bp, Homo sapiens
cacagaaatacagaa

SEQ ID NO: 1691101 - DNA, 15 bp, Homo sapiens
acagaaatacagaag

SEQ ID NO: 1691102 - DNA, 15 bp, Homo sapiens
cagaaatacagaaga

SEQ ID NO: 1691103 - DNA, 15 bp, Homo sapiens
agaaatacagaagat

SEQ ID NO: 1691104 - DNA, 15 bp, Homo sapiens
gaaatacagaagatc

SEQ ID NO: 1691105 - DNA, 15 bp, Homo sapiens
aaatacagaagatca

SEQ ID NO: 1691106 - DNA, 15 bp, Homo sapiens
aatacagaagatcat

SEQ ID NO: 1691107 - DNA, 15 bp, Homo sapiens
atacagaagatcata

SEQ ID NO: 1691108 - DNA, 15 bp, Homo sapiens
tacagaagatcataa

SEQ ID NO: 1691109 - DNA, 15 bp, Homo sapiens
acagaagatcataag

SEQ ID NO: 1691110 - DNA, 15 bp, Homo sapiens
cagaagatcataaga

SEQ ID NO: 1691111 - DNA, 15 bp, Homo sapiens
agaagatcataagag

SEQ ID NO: 1691112 - DNA, 15 bp, Homo sapiens
gaagatcataagaga

SEQ ID NO: 1691113 - DNA, 15 bp, Homo sapiens
aagatcataagagat

SEQ ID NO: 1691114 - DNA, 15 bp, Homo sapiens
agatcataagagatt

SEQ ID NO: 1691115 - DNA, 15 bp, Homo sapiens
gatcataagagatta

SEQ ID NO: 1691116 - DNA, 15 bp, Homo sapiens
atcataagagattac

SEQ ID NO: 1691117 - DNA, 15 bp, Homo sapiens
tcataagagattact

SEQ ID NO: 1691118 - DNA, 15 bp, Homo sapiens
cataagagattacta

SEQ ID NO: 1691119 - DNA, 15 bp, Homo sapiens
ataagagattactaa

SEQ ID NO: 1691120 - DNA, 15 bp, Homo sapiens
taagagattactaaa

SEQ ID NO: 1691121 - DNA, 15 bp, Homo sapiens
aagagattactaaaa

SEQ ID NO: 1691122 - DNA, 15 bp, Homo sapiens
agagattactaaaaa

SEQ ID NO: 1691123 - DNA, 15 bp, Homo sapiens
gagattactaaaaac

SEQ ID NO: 1691124 - DNA, 15 bp, Homo sapiens
agattactaaaaaca

SEQ ID NO: 1691125 - DNA, 15 bp, Homo sapiens
gattactaaaaacaa

SEQ ID NO: 1691126 - DNA, 15 bp, Homo sapiens
attactaaaaacaaa

SEQ ID NO: 1691127 - DNA, 15 bp, Homo sapiens
ttactaaaaacaaac

SEQ ID NO: 1691128 - DNA, 15 bp, Homo sapiens
tactaaaaacaaacg

SEQ ID NO: 1691129 - DNA, 15 bp, Homo sapiens
actaaaaacaaacgc

SEQ ID NO: 1691130 - DNA, 15 bp, Homo sapiens
ctaaaaacaaacgcc

SEQ ID NO: 1691131 - DNA, 15 bp, Homo sapiens
taaaaacaaacgcca

SEQ ID NO: 1691132 - DNA, 15 bp, Homo sapiens
aaaaacaaacgccaa

SEQ ID NO: 1691133 - DNA, 15 bp, Homo sapiens
aaaacaaacgccaac

SEQ ID NO: 1691134 - DNA, 15 bp, Homo sapiens
aaacaaacgccaaca

SEQ ID NO: 1691135 - DNA, 15 bp, Homo sapiens
aacaaacgccaacaa

SEQ ID NO: 1691136 - DNA, 15 bp, Homo sapiens
acaaacgccaacaaa

SEQ ID NO: 1691137 - DNA, 15 bp, Homo sapiens
caaacgccaacaaat

SEQ ID NO: 1691138 - DNA, 15 bp, Homo sapiens
aaacgccaacaaatt

SEQ ID NO: 1691139 - DNA, 15 bp, Homo sapiens
aacgccaacaaattg

SEQ ID NO: 1691140 - DNA, 15 bp, Homo sapiens
acgccaacaaattgg

SEQ ID NO: 1691141 - DNA, 15 bp, Homo sapiens
cgccaacaaattgga

SEQ ID NO: 1691142 - DNA, 15 bp, Homo sapiens
gccaacaaattggat

SEQ ID NO: 1691143 - DNA, 15 bp, Homo sapiens
ccaacaaattggatg

SEQ ID NO: 1691144 - DNA, 15 bp, Homo sapiens
caacaaattggatga

SEQ ID NO: 1691145 - DNA, 15 bp, Homo sapiens
aacaaattggatgac

SEQ ID NO: 1691146 - DNA, 15 bp, Homo sapiens
acaaattggatgacc

SEQ ID NO: 1691147 - DNA, 15 bp, Homo sapiens
caaattggatgacct

SEQ ID NO: 1691148 - DNA, 15 bp, Homo sapiens
aaattggatgaccta

SEQ ID NO: 1691149 - DNA, 15 bp, Homo sapiens
aattggatgacctag

SEQ ID NO: 1691150 - DNA, 15 bp, Homo sapiens
attggatgacctaga

SEQ ID NO: 1691151 - DNA, 15 bp, Homo sapiens
ttggatgacctagaa

SEQ ID NO: 1691152 - DNA, 15 bp, Homo sapiens
tggatgacctagaag

SEQ ID NO: 1691153 - DNA, 15 bp, Homo sapiens
ggatgacctagaaga

SEQ ID NO: 1691154 - DNA, 15 bp, Homo sapiens
gatgacctagaagaa

SEQ ID NO: 1691155 - DNA, 15 bp, Homo sapiens
atgacctagaagaaa

SEQ ID NO: 1691156 - DNA, 15 bp, Homo sapiens
tgacctagaagaaat

SEQ ID NO: 1691157 - DNA, 15 bp, Homo sapiens
gacctagaagaaatg

SEQ ID NO: 1691158 - DNA, 15 bp, Homo sapiens
acctagaagaaatgg

SEQ ID NO: 1691159 - DNA, 15 bp, Homo sapiens
cctagaagaaatgga

SEQ ID NO: 1691160 - DNA, 15 bp, Homo sapiens
ctagaagaaatggat

SEQ ID NO: 1691161 - DNA, 15 bp, Homo sapiens
tagaagaaatggata

SEQ ID NO: 1691162 - DNA, 15 bp, Homo sapiens
agaagaaatggataa

SEQ ID NO: 1691163 - DNA, 15 bp, Homo sapiens
gaagaaatggataaa

SEQ ID NO: 1691164 - DNA, 15 bp, Homo sapiens
aagaaatggataaat

SEQ ID NO: 1691165 - DNA, 15 bp, Homo sapiens
agaaatggataaatt

SEQ ID NO: 1691166 - DNA, 15 bp, Homo sapiens
gaaatggataaattc

SEQ ID NO: 1691167 - DNA, 15 bp, Homo sapiens
aaatggataaattcc

SEQ ID NO: 1691168 - DNA, 15 bp, Homo sapiens
aatggataaattcct

SEQ ID NO: 1691169 - DNA, 15 bp, Homo sapiens
atggataaattccta

SEQ ID NO: 1691170 - DNA, 15 bp, Homo sapiens
tggataaattcctat

SEQ ID NO: 1691171 - DNA, 15 bp, Homo sapiens
ggataaattcctata

SEQ ID NO: 1691172 - DNA, 15 bp, Homo sapiens
gataaattcctataa

SEQ ID NO: 1691173 - DNA, 15 bp, Homo sapiens
ataaattcctataaa

SEQ ID NO: 1691174 - DNA, 15 bp, Homo sapiens
taaattcctataaaa

SEQ ID NO: 1691175 - DNA, 15 bp, Homo sapiens
aaattcctataaaaa

SEQ ID NO: 1691176 - DNA, 15 bp, Homo sapiens
aattcctataaaaat

SEQ ID NO: 1691177 - DNA, 15 bp, Homo sapiens
attcctataaaaata

SEQ ID NO: 1691178 - DNA, 15 bp, Homo sapiens
ttcctataaaaatac

SEQ ID NO: 1691179 - DNA, 15 bp, Homo sapiens
tcctataaaaataca

SEQ ID NO: 1691180 - DNA, 15 bp, Homo sapiens
cctataaaaatacaa

SEQ ID NO: 1691181 - DNA, 15 bp, Homo sapiens
ctataaaaatacaac

SEQ ID NO: 1691182 - DNA, 15 bp, Homo sapiens
tataaaaatacaacc

SEQ ID NO: 1691183 - DNA, 15 bp, Homo sapiens
ataaaaatacaacct

SEQ ID NO: 1691184 - DNA, 15 bp, Homo sapiens
taaaaatacaacctg

SEQ ID NO: 1691185 - DNA, 15 bp, Homo sapiens
aaaaatacaacctgc

SEQ ID NO: 1691186 - DNA, 15 bp, Homo sapiens
aaaatacaacctgcc

SEQ ID NO: 1691187 - DNA, 15 bp, Homo sapiens
aaatacaacctgcca

SEQ ID NO: 1691188 - DNA, 15 bp, Homo sapiens
aatacaacctgccaa

SEQ ID NO: 1691189 - DNA, 15 bp, Homo sapiens
atacaacctgccaag

SEQ ID NO: 1691190 - DNA, 15 bp, Homo sapiens
tacaacctgccaagg

SEQ ID NO: 1691191 - DNA, 15 bp, Homo sapiens
acaacctgccaaggt

SEQ ID NO: 1691192 - DNA, 15 bp, Homo sapiens
caacctgccaaggtt

SEQ ID NO: 1691193 - DNA, 15 bp, Homo sapiens
aacctgccaaggttg

SEQ ID NO: 1691194 - DNA, 15 bp, Homo sapiens
acctgccaaggttga

SEQ ID NO: 1691195 - DNA, 15 bp, Homo sapiens
cctgccaaggttgaa

SEQ ID NO: 1691196 - DNA, 15 bp, Homo sapiens
ctgccaaggttgaat

SEQ ID NO: 1691197 - DNA, 15 bp, Homo sapiens
tgccaaggttgaatc

SEQ ID NO: 1691198 - DNA, 15 bp, Homo sapiens
gccaaggttgaatca

SEQ ID NO: 1691199 - DNA, 15 bp, Homo sapiens
ccaaggttgaatcac

SEQ ID NO: 1691200 - DNA, 15 bp, Homo sapiens
caaggttgaatcacg

SEQ ID NO: 1691201 - DNA, 15 bp, Homo sapiens
aaggttgaatcacgg

SEQ ID NO: 1691202 - DNA, 15 bp, Homo sapiens
aggttgaatcacgga

SEQ ID NO: 1691203 - DNA, 15 bp, Homo sapiens
ggttgaatcacggag

SEQ ID NO: 1691204 - DNA, 15 bp, Homo sapiens
gttgaatcacggaga

SEQ ID NO: 1691205 - DNA, 15 bp, Homo sapiens
ttgaatcacggagaa

SEQ ID NO: 1691206 - DNA, 15 bp, Homo sapiens
tgaatcacggagaaa

SEQ ID NO: 1691207 - DNA, 15 bp, Homo sapiens
gaatcacggagaaat

SEQ ID NO: 1691208 - DNA, 15 bp, Homo sapiens
aatcacggagaaata

SEQ ID NO: 1691209 - DNA, 15 bp, Homo sapiens
atcacggagaaataa

SEQ ID NO: 1691210 - DNA, 15 bp, Homo sapiens
tcacggagaaataaa

SEQ ID NO: 1691211 - DNA, 15 bp, Homo sapiens
cacggagaaataaag

SEQ ID NO: 1691212 - DNA, 15 bp, Homo sapiens
acggagaaataaaga

SEQ ID NO: 1691213 - DNA, 15 bp, Homo sapiens
cggagaaataaagag

SEQ ID NO: 1691214 - DNA, 15 bp, Homo sapiens
ggagaaataaagaga

SEQ ID NO: 1691215 - DNA, 15 bp, Homo sapiens
gagaaataaagagaa

SEQ ID NO: 1691216 - DNA, 15 bp, Homo sapiens
agaaataaagagaaa

SEQ ID NO: 1691217 - DNA, 15 bp, Homo sapiens
gaaataaagagaaat

SEQ ID NO: 1691218 - DNA, 15 bp, Homo sapiens
aaataaagagaaata

SEQ ID NO: 1691219 - DNA, 15 bp, Homo sapiens
aataaagagaaataa

SEQ ID NO: 1691220 - DNA, 15 bp, Homo sapiens
ataaagagaaataaa

SEQ ID NO: 1691221 - DNA, 15 bp, Homo sapiens
taaagagaaataaat

SEQ ID NO: 1691222 - DNA, 15 bp, Homo sapiens
aaagagaaataaatc

SEQ ID NO: 1691223 - DNA, 15 bp, Homo sapiens
aagagaaataaatct

SEQ ID NO: 1691224 - DNA, 15 bp, Homo sapiens
agagaaataaatctg

SEQ ID NO: 1691225 - DNA, 15 bp, Homo sapiens
gagaaataaatctga

SEQ ID NO: 1691226 - DNA, 15 bp, Homo sapiens
agaaataaatctgaa

SEQ ID NO: 1691227 - DNA, 15 bp, Homo sapiens
gaaataaatctgaac

SEQ ID NO: 1691228 - DNA, 15 bp, Homo sapiens
aaataaatctgaaca

SEQ ID NO: 1691229 - DNA, 15 bp, Homo sapiens
aataaatctgaacat

SEQ ID NO: 1691230 - DNA, 15 bp, Homo sapiens
ataaatctgaacata

SEQ ID NO: 1691231 - DNA, 15 bp, Homo sapiens
taaatctgaacatac

SEQ ID NO: 1691232 - DNA, 15 bp, Homo sapiens
aaatctgaacatacc

SEQ ID NO: 1691233 - DNA, 15 bp, Homo sapiens
aatctgaacatacca

SEQ ID NO: 1691234 - DNA, 15 bp, Homo sapiens
atctgaacataccaa

SEQ ID NO: 1691235 - DNA, 15 bp, Homo sapiens
tctgaacataccaat

SEQ ID NO: 1691236 - DNA, 15 bp, Homo sapiens
ctgaacataccaata

SEQ ID NO: 1691237 - DNA, 15 bp, Homo sapiens
tgaacataccaataa

SEQ ID NO: 1691238 - DNA, 15 bp, Homo sapiens
gaacataccaataat

SEQ ID NO: 1691239 - DNA, 15 bp, Homo sapiens
aacataccaataatg

SEQ ID NO: 1691240 - DNA, 15 bp, Homo sapiens
acataccaataatga

SEQ ID NO: 1691241 - DNA, 15 bp, Homo sapiens
cataccaataatgag

SEQ ID NO: 1691242 - DNA, 15 bp, Homo sapiens
ataccaataatgagt

SEQ ID NO: 1691243 - DNA, 15 bp, Homo sapiens
taccaataatgagta

SEQ ID NO: 1691244 - DNA, 15 bp, Homo sapiens
accaataatgagtaa

SEQ ID NO: 1691245 - DNA, 15 bp, Homo sapiens
ccaataatgagtaag

SEQ ID NO: 1691246 - DNA, 15 bp, Homo sapiens
caataatgagtaagg

SEQ ID NO: 1691247 - DNA, 15 bp, Homo sapiens
aataatgagtaagga

SEQ ID NO: 1691248 - DNA, 15 bp, Homo sapiens
ataatgagtaaggag

SEQ ID NO: 1691249 - DNA, 15 bp, Homo sapiens
taatgagtaaggaga

SEQ ID NO: 1691250 - DNA, 15 bp, Homo sapiens
aatgagtaaggagat

SEQ ID NO: 1691251 - DNA, 15 bp, Homo sapiens
atgagtaaggagatt

SEQ ID NO: 1691252 - DNA, 15 bp, Homo sapiens
tgagtaaggagattg

SEQ ID NO: 1691253 - DNA, 15 bp, Homo sapiens
gagtaaggagattga

SEQ ID NO: 1691254 - DNA, 15 bp, Homo sapiens
agtaaggagattgaa

SEQ ID NO: 1691255 - DNA, 15 bp, Homo sapiens
gtaaggagattgaat

SEQ ID NO: 1691256 - DNA, 15 bp, Homo sapiens
taaggagattgaatc

SEQ ID NO: 1691257 - DNA, 15 bp, Homo sapiens
aaggagattgaatca

SEQ ID NO: 1691258 - DNA, 15 bp, Homo sapiens
aggagattgaatcag

SEQ ID NO: 1691259 - DNA, 15 bp, Homo sapiens
ggagattgaatcagt

SEQ ID NO: 1691260 - DNA, 15 bp, Homo sapiens
gagattgaatcagta

SEQ ID NO: 1691261 - DNA, 15 bp, Homo sapiens
agattgaatcagtaa

SEQ ID NO: 1691262 - DNA, 15 bp, Homo sapiens
gattgaatcagtaat

SEQ ID NO: 1691263 - DNA, 15 bp, Homo sapiens
attgaatcagtaata

SEQ ID NO: 1691264 - DNA, 15 bp, Homo sapiens
ttgaatcagtaataa

SEQ ID NO: 1691265 - DNA, 15 bp, Homo sapiens
tgaatcagtaataaa

SEQ ID NO: 1691266 - DNA, 15 bp, Homo sapiens
gaatcagtaataaaa

SEQ ID NO: 1691267 - DNA, 15 bp, Homo sapiens
aatcagtaataaaaa

SEQ ID NO: 1691268 - DNA, 15 bp, Homo sapiens
atcagtaataaaaag

SEQ ID NO: 1691269 - DNA, 15 bp, Homo sapiens
tcagtaataaaaagt

SEQ ID NO: 1691270 - DNA, 15 bp, Homo sapiens
cagtaataaaaagtc

SEQ ID NO: 1691271 - DNA, 15 bp, Homo sapiens
agtaataaaaagtct

SEQ ID NO: 1691272 - DNA, 15 bp, Homo sapiens
gtaataaaaagtctc

SEQ ID NO: 1691273 - DNA, 15 bp, Homo sapiens
taataaaaagtctcc

SEQ ID NO: 1691274 - DNA, 15 bp, Homo sapiens
aataaaaagtctccc

SEQ ID NO: 1691275 - DNA, 15 bp, Homo sapiens
ataaaaagtctccca

SEQ ID NO: 1691276 - DNA, 15 bp, Homo sapiens
taaaaagtctcccat

SEQ ID NO: 1691277 - DNA, 15 bp, Homo sapiens
aaaaagtctcccatg

SEQ ID NO: 1691278 - DNA, 15 bp, Homo sapiens
aaaagtctcccatga

SEQ ID NO: 1691279 - DNA, 15 bp, Homo sapiens
aaagtctcccatgaa

SEQ ID NO: 1691280 - DNA, 15 bp, Homo sapiens
aagtctcccatgaaa

SEQ ID NO: 1691281 - DNA, 15 bp, Homo sapiens
agtctcccatgaaag

SEQ ID NO: 1691282 - DNA, 15 bp, Homo sapiens
gtctcccatgaaaga

SEQ ID NO: 1691283 - DNA, 15 bp, Homo sapiens
tctcccatgaaagaa

SEQ ID NO: 1691284 - DNA, 15 bp, Homo sapiens
ctcccatgaaagaaa

SEQ ID NO: 1691285 - DNA, 15 bp, Homo sapiens
tcccatgaaagaaaa

SEQ ID NO: 1691286 - DNA, 15 bp, Homo sapiens
cccatgaaagaaaag

SEQ ID NO: 1691287 - DNA, 15 bp, Homo sapiens
ccatgaaagaaaagc

SEQ ID NO: 1691288 - DNA, 15 bp, Homo sapiens
catgaaagaaaagcc

SEQ ID NO: 1691289 - DNA, 15 bp, Homo sapiens
atgaaagaaaagccc

SEQ ID NO: 1691290 - DNA, 15 bp, Homo sapiens
tgaaagaaaagccca

SEQ ID NO: 1691291 - DNA, 15 bp, Homo sapiens
gaaagaaaagcccag

SEQ ID NO: 1691292 - DNA, 15 bp, Homo sapiens
aaagaaaagcccagg

SEQ ID NO: 1691293 - DNA, 15 bp, Homo sapiens
aagaaaagcccagga

SEQ ID NO: 1691294 - DNA, 15 bp, Homo sapiens
agaaaagcccaggac

SEQ ID NO: 1691295 - DNA, 15 bp, Homo sapiens
gaaaagcccaggacc

SEQ ID NO: 1691296 - DNA, 15 bp, Homo sapiens
aaaagcccaggacct

SEQ ID NO: 1691297 - DNA, 15 bp, Homo sapiens
aaagcccaggacctg

SEQ ID NO: 1691298 - DNA, 15 bp, Homo sapiens
aagcccaggacctga

SEQ ID NO: 1691299 - DNA, 15 bp, Homo sapiens
agcccaggacctgat

SEQ ID NO: 1691300 - DNA, 15 bp, Homo sapiens
gcccaggacctgata

SEQ ID NO: 1691301 - DNA, 15 bp, Homo sapiens
cccaggacctgatag

SEQ ID NO: 1691302 - DNA, 15 bp, Homo sapiens
ccaggacctgatagc

SEQ ID NO: 1691303 - DNA, 15 bp, Homo sapiens
caggacctgatagct

SEQ ID NO: 1691304 - DNA, 15 bp, Homo sapiens
aggacctgatagctt

SEQ ID NO: 1691305 - DNA, 15 bp, Homo sapiens
ggacctgatagcttc

SEQ ID NO: 1691306 - DNA, 15 bp, Homo sapiens
gacctgatagcttca

SEQ ID NO: 1691307 - DNA, 15 bp, Homo sapiens
acctgatagcttcat

SEQ ID NO: 1691308 - DNA, 15 bp, Homo sapiens
cctgatagcttcatt

SEQ ID NO: 1691309 - DNA, 15 bp, Homo sapiens
ctgatagcttcattg

SEQ ID NO: 1691310 - DNA, 15 bp, Homo sapiens
tgatagcttcattgc

SEQ ID NO: 1691311 - DNA, 15 bp, Homo sapiens
gatagcttcattgct

SEQ ID NO: 1691312 - DNA, 15 bp, Homo sapiens
atagcttcattgctg

SEQ ID NO: 1691313 - DNA, 15 bp, Homo sapiens
tagcttcattgctga

SEQ ID NO: 1691314 - DNA, 15 bp, Homo sapiens
agcttcattgctgaa

SEQ ID NO: 1691315 - DNA, 15 bp, Homo sapiens
gcttcattgctgaat

SEQ ID NO: 1691316 - DNA, 15 bp, Homo sapiens
cttcattgctgaatt

SEQ ID NO: 1691317 - DNA, 15 bp, Homo sapiens
ttcattgctgaattt

SEQ ID NO: 1691318 - DNA, 15 bp, Homo sapiens
tcattgctgaatttt

SEQ ID NO: 1691319 - DNA, 15 bp, Homo sapiens
cattgctgaatttta

SEQ ID NO: 1691320 - DNA, 15 bp, Homo sapiens
attgctgaattttac

SEQ ID NO: 1691321 - DNA, 15 bp, Homo sapiens
ttgctgaattttacc

SEQ ID NO: 1691322 - DNA, 15 bp, Homo sapiens
tgctgaattttacca

SEQ ID NO: 1691323 - DNA, 15 bp, Homo sapiens
gctgaattttaccag

SEQ ID NO: 1691324 - DNA, 15 bp, Homo sapiens
ctgaattttaccaga

SEQ ID NO: 1691325 - DNA, 15 bp, Homo sapiens
tgaattttaccagac

SEQ ID NO: 1691326 - DNA, 15 bp, Homo sapiens
gaattttaccagaca

SEQ ID NO: 1691327 - DNA, 15 bp, Homo sapiens
aattttaccagacat

SEQ ID NO: 1691328 - DNA, 15 bp, Homo sapiens
attttaccagacatt

SEQ ID NO: 1691329 - DNA, 15 bp, Homo sapiens
ttttaccagacattt

SEQ ID NO: 1691330 - DNA, 15 bp, Homo sapiens
tttaccagacattta

SEQ ID NO: 1691331 - DNA, 15 bp, Homo sapiens
ttaccagacatttaa

SEQ ID NO: 1691332 - DNA, 15 bp, Homo sapiens
taccagacatttaaa

SEQ ID NO: 1691333 - DNA, 15 bp, Homo sapiens
accagacatttaaag

SEQ ID NO: 1691334 - DNA, 15 bp, Homo sapiens
ccagacatttaaaga

SEQ ID NO: 1691335 - DNA, 15 bp, Homo sapiens
cagacatttaaagaa

SEQ ID NO: 1691336 - DNA, 15 bp, Homo sapiens
agacatttaaagaaa

SEQ ID NO: 1691337 - DNA, 15 bp, Homo sapiens
gacatttaaagaaaa

SEQ ID NO: 1691338 - DNA, 15 bp, Homo sapiens
acatttaaagaaaaa

SEQ ID NO: 1691339 - DNA, 15 bp, Homo sapiens
catttaaagaaaaac

SEQ ID NO: 1691340 - DNA, 15 bp, Homo sapiens
atttaaagaaaaact

SEQ ID NO: 1691341 - DNA, 15 bp, Homo sapiens
tttaaagaaaaacta

SEQ ID NO: 1691342 - DNA, 15 bp, Homo sapiens
ttaaagaaaaactag

SEQ ID NO: 1691343 - DNA, 15 bp, Homo sapiens
taaagaaaaactagt

SEQ ID NO: 1691344 - DNA, 15 bp, Homo sapiens
aaagaaaaactagta

SEQ ID NO: 1691345 - DNA, 15 bp, Homo sapiens
aagaaaaactagtac

SEQ ID NO: 1691346 - DNA, 15 bp, Homo sapiens
agaaaaactagtacc

SEQ ID NO: 1691347 - DNA, 15 bp, Homo sapiens
gaaaaactagtacca

SEQ ID NO: 1691348 - DNA, 15 bp, Homo sapiens
aaaaactagtaccag

SEQ ID NO: 1691349 - DNA, 15 bp, Homo sapiens
aaaactagtaccagt

SEQ ID NO: 1691350 - DNA, 15 bp, Homo sapiens
aaactagtaccagtc

SEQ ID NO: 1691351 - DNA, 15 bp, Homo sapiens
aactagtaccagtcc

SEQ ID NO: 1691352 - DNA, 15 bp, Homo sapiens
actagtaccagtcct

SEQ ID NO: 1691353 - DNA, 15 bp, Homo sapiens
ctagtaccagtcctc

SEQ ID NO: 1691354 - DNA, 15 bp, Homo sapiens
tagtaccagtcctcc

SEQ ID NO: 1691355 - DNA, 15 bp, Homo sapiens
agtaccagtcctcct

SEQ ID NO: 1691356 - DNA, 15 bp, Homo sapiens
gtaccagtcctcctc

SEQ ID NO: 1691357 - DNA, 15 bp, Homo sapiens
taccagtcctcctca

SEQ ID NO: 1691358 - DNA, 15 bp, Homo sapiens
accagtcctcctcaa

SEQ ID NO: 1691359 - DNA, 15 bp, Homo sapiens
ccagtcctcctcaaa

SEQ ID NO: 1691360 - DNA, 15 bp, Homo sapiens
cagtcctcctcaaat

SEQ ID NO: 1691361 - DNA, 15 bp, Homo sapiens
agtcctcctcaaatt

SEQ ID NO: 1691362 - DNA, 15 bp, Homo sapiens
gtcctcctcaaattc

SEQ ID NO: 1691363 - DNA, 15 bp, Homo sapiens
tcctcctcaaattct

SEQ ID NO: 1691364 - DNA, 15 bp, Homo sapiens
cctcctcaaattctt

SEQ ID NO: 1691365 - DNA, 15 bp, Homo sapiens
ctcctcaaattcttc

SEQ ID NO: 1691366 - DNA, 15 bp, Homo sapiens
tcctcaaattcttcc

SEQ ID NO: 1691367 - DNA, 15 bp, Homo sapiens
cctcaaattcttcca

SEQ ID NO: 1691368 - DNA, 15 bp, Homo sapiens
ctcaaattcttccac

SEQ ID NO: 1691369 - DNA, 15 bp, Homo sapiens
tcaaattcttccaca

SEQ ID NO: 1691370 - DNA, 15 bp, Homo sapiens
caaattcttccacaa

SEQ ID NO: 1691371 - DNA, 15 bp, Homo sapiens
aaattcttccacaaa

SEQ ID NO: 1691372 - DNA, 15 bp, Homo sapiens
aattcttccacaaaa

SEQ ID NO: 1691373 - DNA, 15 bp, Homo sapiens
attcttccacaaaat

SEQ ID NO: 1691374 - DNA, 15 bp, Homo sapiens
ttcttccacaaaatt

SEQ ID NO: 1691375 - DNA, 15 bp, Homo sapiens
tcttccacaaaatta

SEQ ID NO: 1691376 - DNA, 15 bp, Homo sapiens
cttccacaaaattaa

SEQ ID NO: 1691377 - DNA, 15 bp, Homo sapiens
ttccacaaaattaaa

SEQ ID NO: 1691378 - DNA, 15 bp, Homo sapiens
tccacaaaattaaag

SEQ ID NO: 1691379 - DNA, 15 bp, Homo sapiens
ccacaaaattaaagc

SEQ ID NO: 1691380 - DNA, 15 bp, Homo sapiens
cacaaaattaaagcg

SEQ ID NO: 1691381 - DNA, 15 bp, Homo sapiens
acaaaattaaagcgg

SEQ ID NO: 1691382 - DNA, 15 bp, Homo sapiens
caaaattaaagcgga

SEQ ID NO: 1691383 - DNA, 15 bp, Homo sapiens
aaaattaaagcggag

SEQ ID NO: 1691384 - DNA, 15 bp, Homo sapiens
aaattaaagcggagg

SEQ ID NO: 1691385 - DNA, 15 bp, Homo sapiens
aattaaagcggaggg

SEQ ID NO: 1691386 - DNA, 15 bp, Homo sapiens
attaaagcggaggga

SEQ ID NO: 1691387 - DNA, 15 bp, Homo sapiens
ttaaagcggagggaa

SEQ ID NO: 1691388 - DNA, 15 bp, Homo sapiens
taaagcggagggaat

SEQ ID NO: 1691389 - DNA, 15 bp, Homo sapiens
aaagcggagggaata

SEQ ID NO: 1691390 - DNA, 15 bp, Homo sapiens
aagcggagggaatac

SEQ ID NO: 1691391 - DNA, 15 bp, Homo sapiens
agcggagggaatact

SEQ ID NO: 1691392 - DNA, 15 bp, Homo sapiens
gcggagggaatactt

SEQ ID NO: 1691393 - DNA, 15 bp, Homo sapiens
cggagggaatacttc

SEQ ID NO: 1691394 - DNA, 15 bp, Homo sapiens
ggagggaatacttca

SEQ ID NO: 1691395 - DNA, 15 bp, Homo sapiens
gagggaatacttcac

SEQ ID NO: 1691396 - DNA, 15 bp, Homo sapiens
agggaatacttcaca

SEQ ID NO: 1691397 - DNA, 15 bp, Homo sapiens
gggaatacttcacac

SEQ ID NO: 1691398 - DNA, 15 bp, Homo sapiens
ggaatacttcacact

SEQ ID NO: 1691399 - DNA, 15 bp, Homo sapiens
gaatacttcacactc

SEQ ID NO: 1691400 - DNA, 15 bp, Homo sapiens
aatacttcacactca

SEQ ID NO: 1691401 - DNA, 15 bp, Homo sapiens
atacttcacactcat

SEQ ID NO: 1691402 - DNA, 15 bp, Homo sapiens
tacttcacactcatt

SEQ ID NO: 1691403 - DNA, 15 bp, Homo sapiens
acttcacactcattt

SEQ ID NO: 1691404 - DNA, 15 bp, Homo sapiens
cttcacactcatttt

SEQ ID NO: 1691405 - DNA, 15 bp, Homo sapiens
ttcacactcatttta

SEQ ID NO: 1691406 - DNA, 15 bp, Homo sapiens
tcacactcattttac

SEQ ID NO: 1691407 - DNA, 15 bp, Homo sapiens
cacactcattttaca

SEQ ID NO: 1691408 - DNA, 15 bp, Homo sapiens
acactcattttacaa

SEQ ID NO: 1691409 - DNA, 15 bp, Homo sapiens
cactcattttacaag

SEQ ID NO: 1691410 - DNA, 15 bp, Homo sapiens
actcattttacaagg

SEQ ID NO: 1691411 - DNA, 15 bp, Homo sapiens
ctcattttacaaggc

SEQ ID NO: 1691412 - DNA, 15 bp, Homo sapiens
tcattttacaaggcc

SEQ ID NO: 1691413 - DNA, 15 bp, Homo sapiens
cattttacaaggcca

SEQ ID NO: 1691414 - DNA, 15 bp, Homo sapiens
attttacaaggccaa

SEQ ID NO: 1691415 - DNA, 15 bp, Homo sapiens
ttttacaaggccaat

SEQ ID NO: 1691416 - DNA, 15 bp, Homo sapiens
tttacaaggccaata

SEQ ID NO: 1691417 - DNA, 15 bp, Homo sapiens
ttacaaggccaatat

SEQ ID NO: 1691418 - DNA, 15 bp, Homo sapiens
tacaaggccaatatt

SEQ ID NO: 1691419 - DNA, 15 bp, Homo sapiens
acaaggccaatatta

SEQ ID NO: 1691420 - DNA, 15 bp, Homo sapiens
caaggccaatattac

SEQ ID NO: 1691421 - DNA, 15 bp, Homo sapiens
aaggccaatattacc

SEQ ID NO: 1691422 - DNA, 15 bp, Homo sapiens
aggccaatattacct

SEQ ID NO: 1691423 - DNA, 15 bp, Homo sapiens
ggccaatattacctt

SEQ ID NO: 1691424 - DNA, 15 bp, Homo sapiens
gccaatattaccttg

SEQ ID NO: 1691425 - DNA, 15 bp, Homo sapiens
ccaatattaccttga

SEQ ID NO: 1691426 - DNA, 15 bp, Homo sapiens
caatattaccttgat

SEQ ID NO: 1691427 - DNA, 15 bp, Homo sapiens
aatattaccttgata

SEQ ID NO: 1691428 - DNA, 15 bp, Homo sapiens
atattaccttgatac

SEQ ID NO: 1691429 - DNA, 15 bp, Homo sapiens
tattaccttgatacc

SEQ ID NO: 1691430 - DNA, 15 bp, Homo sapiens
attaccttgatacca

SEQ ID NO: 1691431 - DNA, 15 bp, Homo sapiens
ttaccttgataccaa

SEQ ID NO: 1691432 - DNA, 15 bp, Homo sapiens
taccttgataccaaa

SEQ ID NO: 1691433 - DNA, 15 bp, Homo sapiens
accttgataccaaag

SEQ ID NO: 1691434 - DNA, 15 bp, Homo sapiens
ccttgataccaaagc

SEQ ID NO: 1691435 - DNA, 15 bp, Homo sapiens
cttgataccaaagcc

SEQ ID NO: 1691436 - DNA, 15 bp, Homo sapiens
ttgataccaaagcca

SEQ ID NO: 1691437 - DNA, 15 bp, Homo sapiens
tgataccaaagccag

SEQ ID NO: 1691438 - DNA, 15 bp, Homo sapiens
gataccaaagccaga

SEQ ID NO: 1691439 - DNA, 15 bp, Homo sapiens
ataccaaagccagaa

SEQ ID NO: 1691440 - DNA, 15 bp, Homo sapiens
taccaaagccagaaa

SEQ ID NO: 1691441 - DNA, 15 bp, Homo sapiens
accaaagccagaaaa

SEQ ID NO: 1691442 - DNA, 15 bp, Homo sapiens
ccaaagccagaaaag

SEQ ID NO: 1691443 - DNA, 15 bp, Homo sapiens
caaagccagaaaagg

SEQ ID NO: 1691444 - DNA, 15 bp, Homo sapiens
aaagccagaaaagga

SEQ ID NO: 1691445 - DNA, 15 bp, Homo sapiens
aagccagaaaaggat

SEQ ID NO: 1691446 - DNA, 15 bp, Homo sapiens
agccagaaaaggata

SEQ ID NO: 1691447 - DNA, 15 bp, Homo sapiens
gccagaaaaggatac

SEQ ID NO: 1691448 - DNA, 15 bp, Homo sapiens
ccagaaaaggatact

SEQ ID NO: 1691449 - DNA, 15 bp, Homo sapiens
cagaaaaggatacta

SEQ ID NO: 1691450 - DNA, 15 bp, Homo sapiens
agaaaaggatactac

SEQ ID NO: 1691451 - DNA, 15 bp, Homo sapiens
gaaaaggatactaca

SEQ ID NO: 1691452 - DNA, 15 bp, Homo sapiens
aaaaggatactacaa

SEQ ID NO: 1691453 - DNA, 15 bp, Homo sapiens
aaaggatactacaag

SEQ ID NO: 1691454 - DNA, 15 bp, Homo sapiens
aaggatactacaaga

SEQ ID NO: 1691455 - DNA, 15 bp, Homo sapiens
aggatactacaagaa

SEQ ID NO: 1691456 - DNA, 15 bp, Homo sapiens
ggatactacaagaaa

SEQ ID NO: 1691457 - DNA, 15 bp, Homo sapiens
gatactacaagaaaa

SEQ ID NO: 1691458 - DNA, 15 bp, Homo sapiens
atactacaagaaaat

SEQ ID NO: 1691459 - DNA, 15 bp, Homo sapiens
tactacaagaaaatc

SEQ ID NO: 1691460 - DNA, 15 bp, Homo sapiens
actacaagaaaatca

SEQ ID NO: 1691461 - DNA, 15 bp, Homo sapiens
ctacaagaaaatcaa

SEQ ID NO: 1691462 - DNA, 15 bp, Homo sapiens
tacaagaaaatcaaa

SEQ ID NO: 1691463 - DNA, 15 bp, Homo sapiens
acaagaaaatcaaag

SEQ ID NO: 1691464 - DNA, 15 bp, Homo sapiens
caagaaaatcaaagg

SEQ ID NO: 1691465 - DNA, 15 bp, Homo sapiens
aagaaaatcaaaggc

SEQ ID NO: 1691466 - DNA, 15 bp, Homo sapiens
agaaaatcaaaggcc

SEQ ID NO: 1691467 - DNA, 15 bp, Homo sapiens
gaaaatcaaaggcca

SEQ ID NO: 1691468 - DNA, 15 bp, Homo sapiens
aaaatcaaaggccaa

SEQ ID NO: 1691469 - DNA, 15 bp, Homo sapiens
aaatcaaaggccaat

SEQ ID NO: 1691470 - DNA, 15 bp, Homo sapiens
aatcaaaggccaata

SEQ ID NO: 1691471 - DNA, 15 bp, Homo sapiens
atcaaaggccaatat

SEQ ID NO: 1691472 - DNA, 15 bp, Homo sapiens
tcaaaggccaatatc

SEQ ID NO: 1691473 - DNA, 15 bp, Homo sapiens
caaaggccaatatcc

SEQ ID NO: 1691474 - DNA, 15 bp, Homo sapiens
aaaggccaatatcca

SEQ ID NO: 1691475 - DNA, 15 bp, Homo sapiens
aaggccaatatccat

SEQ ID NO: 1691476 - DNA, 15 bp, Homo sapiens
aggccaatatccatg

SEQ ID NO: 1691477 - DNA, 15 bp, Homo sapiens
ggccaatatccatga

SEQ ID NO: 1691478 - DNA, 15 bp, Homo sapiens
gccaatatccatgat

SEQ ID NO: 1691479 - DNA, 15 bp, Homo sapiens
ccaatatccatgata

SEQ ID NO: 1691480 - DNA, 15 bp, Homo sapiens
caatatccatgataa

SEQ ID NO: 1691481 - DNA, 15 bp, Homo sapiens
aatatccatgataaa

SEQ ID NO: 1691482 - DNA, 15 bp, Homo sapiens
atatccatgataaac

SEQ ID NO: 1691483 - DNA, 15 bp, Homo sapiens
tatccatgataaaca

SEQ ID NO: 1691484 - DNA, 15 bp, Homo sapiens
atccatgataaacat

SEQ ID NO: 1691485 - DNA, 15 bp, Homo sapiens
tccatgataaacatg

SEQ ID NO: 1691486 - DNA, 15 bp, Homo sapiens
ccatgataaacatgg

SEQ ID NO: 1691487 - DNA, 15 bp, Homo sapiens
catgataaacatgga

SEQ ID NO: 1691488 - DNA, 15 bp, Homo sapiens
atgataaacatggac

SEQ ID NO: 1691489 - DNA, 15 bp, Homo sapiens
tgataaacatggacg

SEQ ID NO: 1691490 - DNA, 15 bp, Homo sapiens
gataaacatggacgt

SEQ ID NO: 1691491 - DNA, 15 bp, Homo sapiens
ataaacatggacgtg

SEQ ID NO: 1691492 - DNA, 15 bp, Homo sapiens
taaacatggacgtga

SEQ ID NO: 1691493 - DNA, 15 bp, Homo sapiens
aaacatggacgtgaa

SEQ ID NO: 1691494 - DNA, 15 bp, Homo sapiens
aacatggacgtgaaa

SEQ ID NO: 1691495 - DNA, 15 bp, Homo sapiens
acatggacgtgaaaa

SEQ ID NO: 1691496 - DNA, 15 bp, Homo sapiens
catggacgtgaaaat

SEQ ID NO: 1691497 - DNA, 15 bp, Homo sapiens
atggacgtgaaaatg

SEQ ID NO: 1691498 - DNA, 15 bp, Homo sapiens
tggacgtgaaaatgc

SEQ ID NO: 1691499 - DNA, 15 bp, Homo sapiens
ggacgtgaaaatgct

SEQ ID NO: 1691500 - DNA, 15 bp, Homo sapiens
gacgtgaaaatgctc

SEQ ID NO: 1691501 - DNA, 15 bp, Homo sapiens
acgtgaaaatgctca

SEQ ID NO: 1691502 - DNA, 15 bp, Homo sapiens
cgtgaaaatgctcaa

SEQ ID NO: 1691503 - DNA, 15 bp, Homo sapiens
gtgaaaatgctcaac

SEQ ID NO: 1691504 - DNA, 15 bp, Homo sapiens
tgaaaatgctcaaca

SEQ ID NO: 1691505 - DNA, 15 bp, Homo sapiens
gaaaatgctcaacaa

SEQ ID NO: 1691506 - DNA, 15 bp, Homo sapiens
aaaatgctcaacaaa

SEQ ID NO: 1691507 - DNA, 15 bp, Homo sapiens
aaatgctcaacaaaa

SEQ ID NO: 1691508 - DNA, 15 bp, Homo sapiens
aatgctcaacaaaaa

SEQ ID NO: 1691509 - DNA, 15 bp, Homo sapiens
atgctcaacaaaaat

SEQ ID NO: 1691510 - DNA, 15 bp, Homo sapiens
tgctcaacaaaaata

SEQ ID NO: 1691511 - DNA, 15 bp, Homo sapiens
gctcaacaaaaatac

SEQ ID NO: 1691512 - DNA, 15 bp, Homo sapiens
ctcaacaaaaatact

SEQ ID NO: 1691513 - DNA, 15 bp, Homo sapiens
tcaacaaaaatacta

SEQ ID NO: 1691514 - DNA, 15 bp, Homo sapiens
caacaaaaatactag

SEQ ID NO: 1691515 - DNA, 15 bp, Homo sapiens
aacaaaaatactagt

SEQ ID NO: 1691516 - DNA, 15 bp, Homo sapiens
acaaaaatactagta

SEQ ID NO: 1691517 - DNA, 15 bp, Homo sapiens
caaaaatactagtaa

SEQ ID NO: 1691518 - DNA, 15 bp, Homo sapiens
aaaaatactagtaaa

SEQ ID NO: 1691519 - DNA, 15 bp, Homo sapiens
aaaatactagtaaac

SEQ ID NO: 1691520 - DNA, 15 bp, Homo sapiens
aaatactagtaaacc

SEQ ID NO: 1691521 - DNA, 15 bp, Homo sapiens
aatactagtaaacca

SEQ ID NO: 1691522 - DNA, 15 bp, Homo sapiens
atactagtaaaccaa

SEQ ID NO: 1691523 - DNA, 15 bp, Homo sapiens
tactagtaaaccaaa

SEQ ID NO: 1691524 - DNA, 15 bp, Homo sapiens
actagtaaaccaaat

SEQ ID NO: 1691525 - DNA, 15 bp, Homo sapiens
ctagtaaaccaaatt

SEQ ID NO: 1691526 - DNA, 15 bp, Homo sapiens
tagtaaaccaaattg

SEQ ID NO: 1691527 - DNA, 15 bp, Homo sapiens
agtaaaccaaattga

SEQ ID NO: 1691528 - DNA, 15 bp, Homo sapiens
gtaaaccaaattgaa

SEQ ID NO: 1691529 - DNA, 15 bp, Homo sapiens
taaaccaaattgaat

SEQ ID NO: 1691530 - DNA, 15 bp, Homo sapiens
aaaccaaattgaata

SEQ ID NO: 1691531 - DNA, 15 bp, Homo sapiens
aaccaaattgaatag

SEQ ID NO: 1691532 - DNA, 15 bp, Homo sapiens
accaaattgaatagc

SEQ ID NO: 1691533 - DNA, 15 bp, Homo sapiens
ccaaattgaatagca

SEQ ID NO: 1691534 - DNA, 15 bp, Homo sapiens
caaattgaatagcac

SEQ ID NO: 1691535 - DNA, 15 bp, Homo sapiens
aaattgaatagcaca

SEQ ID NO: 1691536 - DNA, 15 bp, Homo sapiens
aattgaatagcacat

SEQ ID NO: 1691537 - DNA, 15 bp, Homo sapiens
attgaatagcacatt

SEQ ID NO: 1691538 - DNA, 15 bp, Homo sapiens
ttgaatagcacatta

SEQ ID NO: 1691539 - DNA, 15 bp, Homo sapiens
tgaatagcacattaa

SEQ ID NO: 1691540 - DNA, 15 bp, Homo sapiens
gaatagcacattaaa

SEQ ID NO: 1691541 - DNA, 15 bp, Homo sapiens
aatagcacattaaaa

SEQ ID NO: 1691542 - DNA, 15 bp, Homo sapiens
atagcacattaaaag

SEQ ID NO: 1691543 - DNA, 15 bp, Homo sapiens
tagcacattaaaaga

SEQ ID NO: 1691544 - DNA, 15 bp, Homo sapiens
agcacattaaaagaa

SEQ ID NO: 1691545 - DNA, 15 bp, Homo sapiens
gcacattaaaagaat

SEQ ID NO: 1691546 - DNA, 15 bp, Homo sapiens
cacattaaaagaatc

SEQ ID NO: 1691547 - DNA, 15 bp, Homo sapiens
acattaaaagaatca

SEQ ID NO: 1691548 - DNA, 15 bp, Homo sapiens
cattaaaagaatcat

SEQ ID NO: 1691549 - DNA, 15 bp, Homo sapiens
attaaaagaatcatt

SEQ ID NO: 1691550 - DNA, 15 bp, Homo sapiens
ttaaaagaatcattc

SEQ ID NO: 1691551 - DNA, 15 bp, Homo sapiens
taaaagaatcattca

SEQ ID NO: 1691552 - DNA, 15 bp, Homo sapiens
aaaagaatcattcac

SEQ ID NO: 1691553 - DNA, 15 bp, Homo sapiens
aaagaatcattcacc

SEQ ID NO: 1691554 - DNA, 15 bp, Homo sapiens
agaatcattcaccat

SEQ ID NO: 1691555 - DNA, 15 bp, Homo sapiens
gaatcattcaccatg

SEQ ID NO: 1691556 - DNA, 15 bp, Homo sapiens
aatcattcaccatga

SEQ ID NO: 1691557 - DNA, 15 bp, Homo sapiens
atcattcaccatgat

SEQ ID NO: 1691558 - DNA, 15 bp, Homo sapiens
tcattcaccatgatc

SEQ ID NO: 1691559 - DNA, 15 bp, Homo sapiens
cattcaccatgatca

SEQ ID NO: 1691560 - DNA, 15 bp, Homo sapiens
attcaccatgatcaa

SEQ ID NO: 1691561 - DNA, 15 bp, Homo sapiens
ttcaccatgatcaag

SEQ ID NO: 1691562 - DNA, 15 bp, Homo sapiens
tcaccatgatcaagt

SEQ ID NO: 1691563 - DNA, 15 bp, Homo sapiens
caccatgatcaagtg

SEQ ID NO: 1691564 - DNA, 15 bp, Homo sapiens
accatgatcaagtga

SEQ ID NO: 1691565 - DNA, 15 bp, Homo sapiens
ccatgatcaagtgag

SEQ ID NO: 1691566 - DNA, 15 bp, Homo sapiens
catgatcaagtgaga

SEQ ID NO: 1691567 - DNA, 15 bp, Homo sapiens
atgatcaagtgagat

SEQ ID NO: 1691568 - DNA, 15 bp, Homo sapiens
tgatcaagtgagatt

SEQ ID NO: 1691569 - DNA, 15 bp, Homo sapiens
gatcaagtgagattt

SEQ ID NO: 1691570 - DNA, 15 bp, Homo sapiens
atcaagtgagattta

SEQ ID NO: 1691571 - DNA, 15 bp, Homo sapiens
tcaagtgagatttat

SEQ ID NO: 1691572 - DNA, 15 bp, Homo sapiens
caagtgagatttatc

SEQ ID NO: 1691573 - DNA, 15 bp, Homo sapiens
aagtgagatttatcc

SEQ ID NO: 1691574 - DNA, 15 bp, Homo sapiens
agtgagatttatccc

SEQ ID NO: 1691575 - DNA, 15 bp, Homo sapiens
gtgagatttatccct

SEQ ID NO: 1691576 - DNA, 15 bp, Homo sapiens
tgagatttatcccta

SEQ ID NO: 1691577 - DNA, 15 bp, Homo sapiens
gagatttatccctag

SEQ ID NO: 1691578 - DNA, 15 bp, Homo sapiens
agatttatccctagg

SEQ ID NO: 1691579 - DNA, 15 bp, Homo sapiens
gatttatccctagga

SEQ ID NO: 1691580 - DNA, 15 bp, Homo sapiens
atttatccctaggat

SEQ ID NO: 1691581 - DNA, 15 bp, Homo sapiens
tttatccctaggatg

SEQ ID NO: 1691582 - DNA, 15 bp, Homo sapiens
ttatccctaggatgt

SEQ ID NO: 1691583 - DNA, 15 bp, Homo sapiens
tatccctaggatgta

SEQ ID NO: 1691584 - DNA, 15 bp, Homo sapiens
atccctaggatgtaa

SEQ ID NO: 1691585 - DNA, 15 bp, Homo sapiens
tccctaggatgtaag

SEQ ID NO: 1691586 - DNA, 15 bp, Homo sapiens
ccctaggatgtaagg

SEQ ID NO: 1691587 - DNA, 15 bp, Homo sapiens
cctaggatgtaagga

SEQ ID NO: 1691588 - DNA, 15 bp, Homo sapiens
ctaggatgtaaggat

SEQ ID NO: 1691589 - DNA, 15 bp, Homo sapiens
taggatgtaaggatg

SEQ ID NO: 1691590 - DNA, 15 bp, Homo sapiens
aggatgtaaggatgg

SEQ ID NO: 1691591 - DNA, 15 bp, Homo sapiens
ggatgtaaggatggt

SEQ ID NO: 1691592 - DNA, 15 bp, Homo sapiens
gatgtaaggatggtt

SEQ ID NO: 1691593 - DNA, 15 bp, Homo sapiens
atgtaaggatggttc

SEQ ID NO: 1691594 - DNA, 15 bp, Homo sapiens
tgtaaggatggttca

SEQ ID NO: 1691595 - DNA, 15 bp, Homo sapiens
gtaaggatggttcaa

SEQ ID NO: 1691596 - DNA, 15 bp, Homo sapiens
taaggatggttcaac

SEQ ID NO: 1691597 - DNA, 15 bp, Homo sapiens
aaggatggttcaaca

SEQ ID NO: 1691598 - DNA, 15 bp, Homo sapiens
aggatggttcaacat

SEQ ID NO: 1691599 - DNA, 15 bp, Homo sapiens
ggatggttcaacata

SEQ ID NO: 1691600 - DNA, 15 bp, Homo sapiens
gatggttcaacatag

SEQ ID NO: 1691601 - DNA, 15 bp, Homo sapiens
atggttcaacatagg

SEQ ID NO: 1691602 - DNA, 15 bp, Homo sapiens
tggttcaacataggc

SEQ ID NO: 1691603 - DNA, 15 bp, Homo sapiens
ggttcaacataggca

SEQ ID NO: 1691604 - DNA, 15 bp, Homo sapiens
gttcaacataggcat

SEQ ID NO: 1691605 - DNA, 15 bp, Homo sapiens
ttcaacataggcatg

SEQ ID NO: 1691606 - DNA, 15 bp, Homo sapiens
tcaacataggcatgt

SEQ ID NO: 1691607 - DNA, 15 bp, Homo sapiens
caacataggcatgtc

SEQ ID NO: 1691608 - DNA, 15 bp, Homo sapiens
aacataggcatgtca

SEQ ID NO: 1691609 - DNA, 15 bp, Homo sapiens
acataggcatgtcaa

SEQ ID NO: 1691610 - DNA, 15 bp, Homo sapiens
cataggcatgtcaat

SEQ ID NO: 1691611 - DNA, 15 bp, Homo sapiens
ataggcatgtcaata

SEQ ID NO: 1691612 - DNA, 15 bp, Homo sapiens
taggcatgtcaataa

SEQ ID NO: 1691613 - DNA, 15 bp, Homo sapiens
aggcatgtcaataaa

SEQ ID NO: 1691614 - DNA, 15 bp, Homo sapiens
ggcatgtcaataaat

SEQ ID NO: 1691615 - DNA, 15 bp, Homo sapiens
gcatgtcaataaatg

SEQ ID NO: 1691616 - DNA, 15 bp, Homo sapiens
catgtcaataaatgt

SEQ ID NO: 1691617 - DNA, 15 bp, Homo sapiens
atgtcaataaatgta

SEQ ID NO: 1691618 - DNA, 15 bp, Homo sapiens
tgtcaataaatgtaa

SEQ ID NO: 1691619 - DNA, 15 bp, Homo sapiens
gtcaataaatgtaat

SEQ ID NO: 1691620 - DNA, 15 bp, Homo sapiens
tcaataaatgtaata

SEQ ID NO: 1691621 - DNA, 15 bp, Homo sapiens
caataaatgtaatat

SEQ ID NO: 1691622 - DNA, 15 bp, Homo sapiens
aataaatgtaatata

SEQ ID NO: 1691623 - DNA, 15 bp, Homo sapiens
ataaatgtaatatac

SEQ ID NO: 1691624 - DNA, 15 bp, Homo sapiens
taaatgtaatatacc

SEQ ID NO: 1691625 - DNA, 15 bp, Homo sapiens
aaatgtaatatacca

SEQ ID NO: 1691626 - DNA, 15 bp, Homo sapiens
atgtaatataccaca

SEQ ID NO: 1691627 - DNA, 15 bp, Homo sapiens
tgtaatataccacat

SEQ ID NO: 1691628 - DNA, 15 bp, Homo sapiens
gtaatataccacatt

SEQ ID NO: 1691629 - DNA, 15 bp, Homo sapiens
taatataccacatta

SEQ ID NO: 1691630 - DNA, 15 bp, Homo sapiens
aatataccacattaa

SEQ ID NO: 1691631 - DNA, 15 bp, Homo sapiens
atataccacattaac

SEQ ID NO: 1691632 - DNA, 15 bp, Homo sapiens
tataccacattaaca

SEQ ID NO: 1691633 - DNA, 15 bp, Homo sapiens
ataccacattaacag

SEQ ID NO: 1691634 - DNA, 15 bp, Homo sapiens
taccacattaacaga

SEQ ID NO: 1691635 - DNA, 15 bp, Homo sapiens
accacattaacagaa

SEQ ID NO: 1691636 - DNA, 15 bp, Homo sapiens
ccacattaacagaat

SEQ ID NO: 1691637 - DNA, 15 bp, Homo sapiens
cacattaacagaatg

SEQ ID NO: 1691638 - DNA, 15 bp, Homo sapiens
acattaacagaatga

SEQ ID NO: 1691639 - DNA, 15 bp, Homo sapiens
cattaacagaatgaa

SEQ ID NO: 1691640 - DNA, 15 bp, Homo sapiens
attaacagaatgaaa

SEQ ID NO: 1691641 - DNA, 15 bp, Homo sapiens
ttaacagaatgaaag

SEQ ID NO: 1691642 - DNA, 15 bp, Homo sapiens
taacagaatgaaaga

SEQ ID NO: 1691643 - DNA, 15 bp, Homo sapiens
aacagaatgaaagac

SEQ ID NO: 1691644 - DNA, 15 bp, Homo sapiens
acagaatgaaagaca

SEQ ID NO: 1691645 - DNA, 15 bp, Homo sapiens
cagaatgaaagacaa

SEQ ID NO: 1691646 - DNA, 15 bp, Homo sapiens
agaatgaaagacaaa

SEQ ID NO: 1691647 - DNA, 15 bp, Homo sapiens
gaatgaaagacaaaa

SEQ ID NO: 1691648 - DNA, 15 bp, Homo sapiens
aatgaaagacaaaaa

SEQ ID NO: 1691649 - DNA, 15 bp, Homo sapiens
atgaaagacaaaaac

SEQ ID NO: 1691650 - DNA, 15 bp, Homo sapiens
tgaaagacaaaaacc

SEQ ID NO: 1691651 - DNA, 15 bp, Homo sapiens
gaaagacaaaaacca

SEQ ID NO: 1691652 - DNA, 15 bp, Homo sapiens
aaagacaaaaaccat

SEQ ID NO: 1691653 - DNA, 15 bp, Homo sapiens
aagacaaaaaccata

SEQ ID NO: 1691654 - DNA, 15 bp, Homo sapiens
agacaaaaaccatat

SEQ ID NO: 1691655 - DNA, 15 bp, Homo sapiens
gacaaaaaccatatg

SEQ ID NO: 1691656 - DNA, 15 bp, Homo sapiens
acaaaaaccatatgg

SEQ ID NO: 1691657 - DNA, 15 bp, Homo sapiens
caaaaaccatatggt

SEQ ID NO: 1691658 - DNA, 15 bp, Homo sapiens
aaaaaccatatggtt

SEQ ID NO: 1691659 - DNA, 15 bp, Homo sapiens
aaaaccatatggtta

SEQ ID NO: 1691660 - DNA, 15 bp, Homo sapiens
aaaccatatggttat

SEQ ID NO: 1691661 - DNA, 15 bp, Homo sapiens
aaccatatggttatc

SEQ ID NO: 1691662 - DNA, 15 bp, Homo sapiens
accatatggttatct

SEQ ID NO: 1691663 - DNA, 15 bp, Homo sapiens
ccatatggttatctc

SEQ ID NO: 1691664 - DNA, 15 bp, Homo sapiens
catatggttatctca

SEQ ID NO: 1691665 - DNA, 15 bp, Homo sapiens
atatggttatctcaa

SEQ ID NO: 1691666 - DNA, 15 bp, Homo sapiens
tatggttatctcaat

SEQ ID NO: 1691667 - DNA, 15 bp, Homo sapiens
atggttatctcaata

SEQ ID NO: 1691668 - DNA, 15 bp, Homo sapiens
tggttatctcaatag

SEQ ID NO: 1691669 - DNA, 15 bp, Homo sapiens
ggttatctcaataga

SEQ ID NO: 1691670 - DNA, 15 bp, Homo sapiens
gttatctcaatagat

SEQ ID NO: 1691671 - DNA, 15 bp, Homo sapiens
tatctcaatagatgc

SEQ ID NO: 1691672 - DNA, 15 bp, Homo sapiens
atctcaatagatgct

SEQ ID NO: 1691673 - DNA, 15 bp, Homo sapiens
tctcaatagatgctg

SEQ ID NO: 1691674 - DNA, 15 bp, Homo sapiens
ctcaatagatgctga

SEQ ID NO: 1691675 - DNA, 15 bp, Homo sapiens
tcaatagatgctgaa

SEQ ID NO: 1691676 - DNA, 15 bp, Homo sapiens
caatagatgctgaaa

SEQ ID NO: 1691677 - DNA, 15 bp, Homo sapiens
aatagatgctgaaaa

SEQ ID NO: 1691678 - DNA, 15 bp, Homo sapiens
atagatgctgaaaaa

SEQ ID NO: 1691679 - DNA, 15 bp, Homo sapiens
tagatgctgaaaaag

SEQ ID NO: 1691680 - DNA, 15 bp, Homo sapiens
agatgctgaaaaagc

SEQ ID NO: 1691681 - DNA, 15 bp, Homo sapiens
gatgctgaaaaagca

SEQ ID NO: 1691682 - DNA, 15 bp, Homo sapiens
atgctgaaaaagcat

SEQ ID NO: 1691683 - DNA, 15 bp, Homo sapiens
tgctgaaaaagcatt

SEQ ID NO: 1691684 - DNA, 15 bp, Homo sapiens
gctgaaaaagcattt

SEQ ID NO: 1691685 - DNA, 15 bp, Homo sapiens
ctgaaaaagcattta

SEQ ID NO: 1691686 - DNA, 15 bp, Homo sapiens
tgaaaaagcatttaa

SEQ ID NO: 1691687 - DNA, 15 bp, Homo sapiens
gaaaaagcatttaac

SEQ ID NO: 1691688 - DNA, 15 bp, Homo sapiens
aaaaagcatttaaca

SEQ ID NO: 1691689 - DNA, 15 bp, Homo sapiens
aaaagcatttaacaa

SEQ ID NO: 1691690 - DNA, 15 bp, Homo sapiens
aaagcatttaacaaa

SEQ ID NO: 1691691 - DNA, 15 bp, Homo sapiens
aagcatttaacaaaa

SEQ ID NO: 1691692 - DNA, 15 bp, Homo sapiens
agcatttaacaaaat

SEQ ID NO: 1691693 - DNA, 15 bp, Homo sapiens
gcatttaacaaaatt

SEQ ID NO: 1691694 - DNA, 15 bp, Homo sapiens
catttaacaaaattc

SEQ ID NO: 1691695 - DNA, 15 bp, Homo sapiens
atttaacaaaattca

SEQ ID NO: 1691696 - DNA, 15 bp, Homo sapiens
ttaacaaaattcaat

SEQ ID NO: 1691697 - DNA, 15 bp, Homo sapiens
taacaaaattcaata

SEQ ID NO: 1691698 - DNA, 15 bp, Homo sapiens
aacaaaattcaatat

SEQ ID NO: 1691699 - DNA, 15 bp, Homo sapiens
acaaaattcaatatc

SEQ ID NO: 1691700 - DNA, 15 bp, Homo sapiens
caaaattcaatatcc

SEQ ID NO: 1691701 - DNA, 15 bp, Homo sapiens
aaaattcaatatcct

SEQ ID NO: 1691702 - DNA, 15 bp, Homo sapiens
aaattcaatatcctt

SEQ ID NO: 1691703 - DNA, 15 bp, Homo sapiens
aattcaatatccttt

SEQ ID NO: 1691704 - DNA, 15 bp, Homo sapiens
attcaatatcctttc

SEQ ID NO: 1691705 - DNA, 15 bp, Homo sapiens
ttcaatatcctttcc

SEQ ID NO: 1691706 - DNA, 15 bp, Homo sapiens
tcaatatcctttcct

SEQ ID NO: 1691707 - DNA, 15 bp, Homo sapiens
caatatcctttcctg

SEQ ID NO: 1691708 - DNA, 15 bp, Homo sapiens
aatatcctttcctga

SEQ ID NO: 1691709 - DNA, 15 bp, Homo sapiens
atatcctttcctgac

SEQ ID NO: 1691710 - DNA, 15 bp, Homo sapiens
tatcctttcctgaca

SEQ ID NO: 1691711 - DNA, 15 bp, Homo sapiens
atcctttcctgacag

SEQ ID NO: 1691712 - DNA, 15 bp, Homo sapiens
tcctttcctgacaga

SEQ ID NO: 1691713 - DNA, 15 bp, Homo sapiens
cctttcctgacagaa

SEQ ID NO: 1691714 - DNA, 15 bp, Homo sapiens
ctttcctgacagaaa

SEQ ID NO: 1691715 - DNA, 15 bp, Homo sapiens
tttcctgacagaaac

SEQ ID NO: 1691716 - DNA, 15 bp, Homo sapiens
ttcctgacagaaact

SEQ ID NO: 1691717 - DNA, 15 bp, Homo sapiens
tcctgacagaaactc

SEQ ID NO: 1691718 - DNA, 15 bp, Homo sapiens
cctgacagaaactct

SEQ ID NO: 1691719 - DNA, 15 bp, Homo sapiens
ctgacagaaactctc

SEQ ID NO: 1691720 - DNA, 15 bp, Homo sapiens
tgacagaaactctca

SEQ ID NO: 1691721 - DNA, 15 bp, Homo sapiens
gacagaaactctcaa

SEQ ID NO: 1691722 - DNA, 15 bp, Homo sapiens
acagaaactctcaac

SEQ ID NO: 1691723 - DNA, 15 bp, Homo sapiens
cagaaactctcaaca

SEQ ID NO: 1691724 - DNA, 15 bp, Homo sapiens
agaaactctcaacaa

SEQ ID NO: 1691725 - DNA, 15 bp, Homo sapiens
gaaactctcaacaaa

SEQ ID NO: 1691726 - DNA, 15 bp, Homo sapiens
aaactctcaacaaat

SEQ ID NO: 1691727 - DNA, 15 bp, Homo sapiens
aactctcaacaaatt

SEQ ID NO: 1691728 - DNA, 15 bp, Homo sapiens
actctcaacaaatta

SEQ ID NO: 1691729 - DNA, 15 bp, Homo sapiens
ctctcaacaaattag

SEQ ID NO: 1691730 - DNA, 15 bp, Homo sapiens
tctcaacaaattagg

SEQ ID NO: 1691731 - DNA, 15 bp, Homo sapiens
ctcaacaaattaggt

SEQ ID NO: 1691732 - DNA, 15 bp, Homo sapiens
tcaacaaattaggta

SEQ ID NO: 1691733 - DNA, 15 bp, Homo sapiens
caacaaattaggtat

SEQ ID NO: 1691734 - DNA, 15 bp, Homo sapiens
aacaaattaggtata

SEQ ID NO: 1691735 - DNA, 15 bp, Homo sapiens
acaaattaggtataa

SEQ ID NO: 1691736 - DNA, 15 bp, Homo sapiens
caaattaggtataaa

SEQ ID NO: 1691737 - DNA, 15 bp, Homo sapiens
aaattaggtataaaa

SEQ ID NO: 1691738 - DNA, 15 bp, Homo sapiens
aattaggtataaaaa

SEQ ID NO: 1691739 - DNA, 15 bp, Homo sapiens
attaggtataaaaag

SEQ ID NO: 1691740 - DNA, 15 bp, Homo sapiens
ttaggtataaaaaga

SEQ ID NO: 1691741 - DNA, 15 bp, Homo sapiens
taggtataaaaagaa

SEQ ID NO: 1691742 - DNA, 15 bp, Homo sapiens
aggtataaaaagaat

SEQ ID NO: 1691743 - DNA, 15 bp, Homo sapiens
ggtataaaaagaatg

SEQ ID NO: 1691744 - DNA, 15 bp, Homo sapiens
gtataaaaagaatgt

SEQ ID NO: 1691745 - DNA, 15 bp, Homo sapiens
tataaaaagaatgta

SEQ ID NO: 1691746 - DNA, 15 bp, Homo sapiens
ataaaaagaatgtac

SEQ ID NO: 1691747 - DNA, 15 bp, Homo sapiens
taaaaagaatgtacc

SEQ ID NO: 1691748 - DNA, 15 bp, Homo sapiens
aaaaagaatgtacct

SEQ ID NO: 1691749 - DNA, 15 bp, Homo sapiens
aaaagaatgtacctc

SEQ ID NO: 1691750 - DNA, 15 bp, Homo sapiens
aaagaatgtacctca

SEQ ID NO: 1691751 - DNA, 15 bp, Homo sapiens
aagaatgtacctcaa

SEQ ID NO: 1691752 - DNA, 15 bp, Homo sapiens
agaatgtacctcaat

SEQ ID NO: 1691753 - DNA, 15 bp, Homo sapiens
gaatgtacctcaata

SEQ ID NO: 1691754 - DNA, 15 bp, Homo sapiens
aatgtacctcaatac

SEQ ID NO: 1691755 - DNA, 15 bp, Homo sapiens
atgtacctcaataca

SEQ ID NO: 1691756 - DNA, 15 bp, Homo sapiens
tgtacctcaatacaa

SEQ ID NO: 1691757 - DNA, 15 bp, Homo sapiens
gtacctcaatacaat

SEQ ID NO: 1691758 - DNA, 15 bp, Homo sapiens
tacctcaatacaata

SEQ ID NO: 1691759 - DNA, 15 bp, Homo sapiens
acctcaatacaataa

SEQ ID NO: 1691760 - DNA, 15 bp, Homo sapiens
cctcaatacaataaa

SEQ ID NO: 1691761 - DNA, 15 bp, Homo sapiens
ctcaatacaataaag

SEQ ID NO: 1691762 - DNA, 15 bp, Homo sapiens
tcaatacaataaagg

SEQ ID NO: 1691763 - DNA, 15 bp, Homo sapiens
caatacaataaaggt

SEQ ID NO: 1691764 - DNA, 15 bp, Homo sapiens
aatacaataaaggta

SEQ ID NO: 1691765 - DNA, 15 bp, Homo sapiens
atacaataaaggtaa

SEQ ID NO: 1691766 - DNA, 15 bp, Homo sapiens
tacaataaaggtaac

SEQ ID NO: 1691767 - DNA, 15 bp, Homo sapiens
acaataaaggtaaca

SEQ ID NO: 1691768 - DNA, 15 bp, Homo sapiens
caataaaggtaacat

SEQ ID NO: 1691769 - DNA, 15 bp, Homo sapiens
aataaaggtaacata

SEQ ID NO: 1691770 - DNA, 15 bp, Homo sapiens
ataaaggtaacatat

SEQ ID NO: 1691771 - DNA, 15 bp, Homo sapiens
taaaggtaacatatg

SEQ ID NO: 1691772 - DNA, 15 bp, Homo sapiens
aaaggtaacatatga

SEQ ID NO: 1691773 - DNA, 15 bp, Homo sapiens
aaggtaacatatgac

SEQ ID NO: 1691774 - DNA, 15 bp, Homo sapiens
aggtaacatatgaca

SEQ ID NO: 1691775 - DNA, 15 bp, Homo sapiens
ggtaacatatgacaa

SEQ ID NO: 1691776 - DNA, 15 bp, Homo sapiens
gtaacatatgacaag

SEQ ID NO: 1691777 - DNA, 15 bp, Homo sapiens
taacatatgacaagc

SEQ ID NO: 1691778 - DNA, 15 bp, Homo sapiens
aacatatgacaagcc

SEQ ID NO: 1691779 - DNA, 15 bp, Homo sapiens
acatatgacaagccc

SEQ ID NO: 1691780 - DNA, 15 bp, Homo sapiens
catatgacaagccca

SEQ ID NO: 1691781 - DNA, 15 bp, Homo sapiens
atatgacaagcccac

SEQ ID NO: 1691782 - DNA, 15 bp, Homo sapiens
tatgacaagcccaca

SEQ ID NO: 1691783 - DNA, 15 bp, Homo sapiens
atgacaagcccacag

SEQ ID NO: 1691784 - DNA, 15 bp, Homo sapiens
tgacaagcccacagc

SEQ ID NO: 1691785 - DNA, 15 bp, Homo sapiens
gacaagcccacagct

SEQ ID NO: 1691786 - DNA, 15 bp, Homo sapiens
acaagcccacagcta

SEQ ID NO: 1691787 - DNA, 15 bp, Homo sapiens
caagcccacagctaa

SEQ ID NO: 1691788 - DNA, 15 bp, Homo sapiens
aagcccacagctaaa

SEQ ID NO: 1691789 - DNA, 15 bp, Homo sapiens
agcccacagctaaat

SEQ ID NO: 1691790 - DNA, 15 bp, Homo sapiens
gcccacagctaaatc

SEQ ID NO: 1691791 - DNA, 15 bp, Homo sapiens
cccacagctaaatca

SEQ ID NO: 1691792 - DNA, 15 bp, Homo sapiens
ccacagctaaatcat

SEQ ID NO: 1691793 - DNA, 15 bp, Homo sapiens
cacagctaaatcata

SEQ ID NO: 1691794 - DNA, 15 bp, Homo sapiens
acagctaaatcatac

SEQ ID NO: 1691795 - DNA, 15 bp, Homo sapiens
cagctaaatcatact

SEQ ID NO: 1691796 - DNA, 15 bp, Homo sapiens
agctaaatcatactc

SEQ ID NO: 1691797 - DNA, 15 bp, Homo sapiens
gctaaatcatactca

SEQ ID NO: 1691798 - DNA, 15 bp, Homo sapiens
ctaaatcatactcaa

SEQ ID NO: 1691799 - DNA, 15 bp, Homo sapiens
taaatcatactcaag

SEQ ID NO: 1691800 - DNA, 15 bp, Homo sapiens
aaatcatactcaagg

SEQ ID NO: 1691801 - DNA, 15 bp, Homo sapiens
aatcatactcaaggg

SEQ ID NO: 1691802 - DNA, 15 bp, Homo sapiens
atcatactcaagggt

SEQ ID NO: 1691803 - DNA, 15 bp, Homo sapiens
tcatactcaagggtg

SEQ ID NO: 1691804 - DNA, 15 bp, Homo sapiens
catactcaagggtga

SEQ ID NO: 1691805 - DNA, 15 bp, Homo sapiens
atactcaagggtgag

SEQ ID NO: 1691806 - DNA, 15 bp, Homo sapiens
tactcaagggtgaga

SEQ ID NO: 1691807 - DNA, 15 bp, Homo sapiens
actcaagggtgagaa

SEQ ID NO: 1691808 - DNA, 15 bp, Homo sapiens
ctcaagggtgagaat

SEQ ID NO: 1691809 - DNA, 15 bp, Homo sapiens
tcaagggtgagaatt

SEQ ID NO: 1691810 - DNA, 15 bp, Homo sapiens
caagggtgagaattt

SEQ ID NO: 1691811 - DNA, 15 bp, Homo sapiens
aagggtgagaatttg

SEQ ID NO: 1691812 - DNA, 15 bp, Homo sapiens
agggtgagaatttga

SEQ ID NO: 1691813 - DNA, 15 bp, Homo sapiens
gggtgagaatttgaa

SEQ ID NO: 1691814 - DNA, 15 bp, Homo sapiens
ggtgagaatttgaaa

SEQ ID NO: 1691815 - DNA, 15 bp, Homo sapiens
gtgagaatttgaaag

SEQ ID NO: 1691816 - DNA, 15 bp, Homo sapiens
tgagaatttgaaagc

SEQ ID NO: 1691817 - DNA, 15 bp, Homo sapiens
gagaatttgaaagct

SEQ ID NO: 1691818 - DNA, 15 bp, Homo sapiens
agaatttgaaagctt

SEQ ID NO: 1691819 - DNA, 15 bp, Homo sapiens
gaatttgaaagcttt

SEQ ID NO: 1691820 - DNA, 15 bp, Homo sapiens
aatttgaaagctttt

SEQ ID NO: 1691821 - DNA, 15 bp, Homo sapiens
atttgaaagcttttc

SEQ ID NO: 1691822 - DNA, 15 bp, Homo sapiens
tttgaaagcttttcc

SEQ ID NO: 1691823 - DNA, 15 bp, Homo sapiens
ttgaaagcttttccc

SEQ ID NO: 1691824 - DNA, 15 bp, Homo sapiens
tgaaagcttttcccc

SEQ ID NO: 1691825 - DNA, 15 bp, Homo sapiens
gaaagcttttccccc

SEQ ID NO: 1691826 - DNA, 15 bp, Homo sapiens
aaagcttttccccct

SEQ ID NO: 1691827 - DNA, 15 bp, Homo sapiens
aagcttttcccccta

SEQ ID NO: 1691828 - DNA, 15 bp, Homo sapiens
agcttttccccctaa

SEQ ID NO: 1691829 - DNA, 15 bp, Homo sapiens
gcttttccccctaag

SEQ ID NO: 1691830 - DNA, 15 bp, Homo sapiens
cttttccccctaaga

SEQ ID NO: 1691831 - DNA, 15 bp, Homo sapiens
ttttccccctaagat

SEQ ID NO: 1691832 - DNA, 15 bp, Homo sapiens
tttccccctaagatc

SEQ ID NO: 1691833 - DNA, 15 bp, Homo sapiens
ttccccctaagatca

SEQ ID NO: 1691834 - DNA, 15 bp, Homo sapiens
tccccctaagatcag

SEQ ID NO: 1691835 - DNA, 15 bp, Homo sapiens
ccccctaagatcagg

SEQ ID NO: 1691836 - DNA, 15 bp, Homo sapiens
cccctaagatcagga

SEQ ID NO: 1691837 - DNA, 15 bp, Homo sapiens
ccctaagatcaggaa

SEQ ID NO: 1691838 - DNA, 15 bp, Homo sapiens
cctaagatcaggaac

SEQ ID NO: 1691839 - DNA, 15 bp, Homo sapiens
ctaagatcaggaaca

SEQ ID NO: 1691840 - DNA, 15 bp, Homo sapiens
taagatcaggaacaa

SEQ ID NO: 1691841 - DNA, 15 bp, Homo sapiens
aagatcaggaacaag

SEQ ID NO: 1691842 - DNA, 15 bp, Homo sapiens
agatcaggaacaaga

SEQ ID NO: 1691843 - DNA, 15 bp, Homo sapiens
gatcaggaacaagac

SEQ ID NO: 1691844 - DNA, 15 bp, Homo sapiens
atcaggaacaagaca

SEQ ID NO: 1691845 - DNA, 15 bp, Homo sapiens
tcaggaacaagacaa

SEQ ID NO: 1691846 - DNA, 15 bp, Homo sapiens
caggaacaagacaaa

SEQ ID NO: 1691847 - DNA, 15 bp, Homo sapiens
aggaacaagacaaaa

SEQ ID NO: 1691848 - DNA, 15 bp, Homo sapiens
ggaacaagacaaaaa

SEQ ID NO: 1691849 - DNA, 15 bp, Homo sapiens
gaacaagacaaaaat

SEQ ID NO: 1691850 - DNA, 15 bp, Homo sapiens
aacaagacaaaaatg

SEQ ID NO: 1691851 - DNA, 15 bp, Homo sapiens
acaagacaaaaatgc

SEQ ID NO: 1691852 - DNA, 15 bp, Homo sapiens
caagacaaaaatgcc

SEQ ID NO: 1691853 - DNA, 15 bp, Homo sapiens
aagacaaaaatgccc

SEQ ID NO: 1691854 - DNA, 15 bp, Homo sapiens
agacaaaaatgccca

SEQ ID NO: 1691855 - DNA, 15 bp, Homo sapiens
gacaaaaatgcccat

SEQ ID NO: 1691856 - DNA, 15 bp, Homo sapiens
acaaaaatgcccatt

SEQ ID NO: 1691857 - DNA, 15 bp, Homo sapiens
caaaaatgcccattc

SEQ ID NO: 1691858 - DNA, 15 bp, Homo sapiens
aaaaatgcccattct

SEQ ID NO: 1691859 - DNA, 15 bp, Homo sapiens
aaaatgcccattctt

SEQ ID NO: 1691860 - DNA, 15 bp, Homo sapiens
aaatgcccattcttg

SEQ ID NO: 1691861 - DNA, 15 bp, Homo sapiens
aatgcccattcttgc

SEQ ID NO: 1691862 - DNA, 15 bp, Homo sapiens
atgcccattcttgcc

SEQ ID NO: 1691863 - DNA, 15 bp, Homo sapiens
tgcccattcttgcca

SEQ ID NO: 1691864 - DNA, 15 bp, Homo sapiens
gcccattcttgccac

SEQ ID NO: 1691865 - DNA, 15 bp, Homo sapiens
cccattcttgccact

SEQ ID NO: 1691866 - DNA, 15 bp, Homo sapiens
ccattcttgccactt

SEQ ID NO: 1691867 - DNA, 15 bp, Homo sapiens
cattcttgccacttc

SEQ ID NO: 1691868 - DNA, 15 bp, Homo sapiens
attcttgccacttct

SEQ ID NO: 1691869 - DNA, 15 bp, Homo sapiens
ttcttgccacttctt

SEQ ID NO: 1691870 - DNA, 15 bp, Homo sapiens
tcttgccacttctta

SEQ ID NO: 1691871 - DNA, 15 bp, Homo sapiens
cttgccacttcttag

SEQ ID NO: 1691872 - DNA, 15 bp, Homo sapiens
ttgccacttcttagc

SEQ ID NO: 1691873 - DNA, 15 bp, Homo sapiens
tgccacttcttagca

SEQ ID NO: 1691874 - DNA, 15 bp, Homo sapiens
gccacttcttagcaa

SEQ ID NO: 1691875 - DNA, 15 bp, Homo sapiens
ccacttcttagcaac

SEQ ID NO: 1691876 - DNA, 15 bp, Homo sapiens
cacttcttagcaacc

SEQ ID NO: 1691877 - DNA, 15 bp, Homo sapiens
acttcttagcaacca

SEQ ID NO: 1691878 - DNA, 15 bp, Homo sapiens
cttcttagcaaccac

SEQ ID NO: 1691879 - DNA, 15 bp, Homo sapiens
ttcttagcaaccaca

SEQ ID NO: 1691880 - DNA, 15 bp, Homo sapiens
tcttagcaaccacaa

SEQ ID NO: 1691881 - DNA, 15 bp, Homo sapiens
cttagcaaccacaaa

SEQ ID NO: 1691882 - DNA, 15 bp, Homo sapiens
ttagcaaccacaaaa

SEQ ID NO: 1691883 - DNA, 15 bp, Homo sapiens
tagcaaccacaaaag

SEQ ID NO: 1691884 - DNA, 15 bp, Homo sapiens
agcaaccacaaaaga

SEQ ID NO: 1691885 - DNA, 15 bp, Homo sapiens
gcaaccacaaaagac

SEQ ID NO: 1691886 - DNA, 15 bp, Homo sapiens
caaccacaaaagacc

SEQ ID NO: 1691887 - DNA, 15 bp, Homo sapiens
aaccacaaaagacct

SEQ ID NO: 1691888 - DNA, 15 bp, Homo sapiens
accacaaaagacctt

SEQ ID NO: 1691889 - DNA, 15 bp, Homo sapiens
ccacaaaagaccttg

SEQ ID NO: 1691890 - DNA, 15 bp, Homo sapiens
cacaaaagaccttga

SEQ ID NO: 1691891 - DNA, 15 bp, Homo sapiens
acaaaagaccttgaa

SEQ ID NO: 1691892 - DNA, 15 bp, Homo sapiens
caaaagaccttgaat

SEQ ID NO: 1691893 - DNA, 15 bp, Homo sapiens
aaaagaccttgaata

SEQ ID NO: 1691894 - DNA, 15 bp, Homo sapiens
aaagaccttgaatag

SEQ ID NO: 1691895 - DNA, 15 bp, Homo sapiens
aagaccttgaatagc

SEQ ID NO: 1691896 - DNA, 15 bp, Homo sapiens
agaccttgaatagca

SEQ ID NO: 1691897 - DNA, 15 bp, Homo sapiens
gaccttgaatagcaa

SEQ ID NO: 1691898 - DNA, 15 bp, Homo sapiens
accttgaatagcaaa

SEQ ID NO: 1691899 - DNA, 15 bp, Homo sapiens
ccttgaatagcaaaa

SEQ ID NO: 1691900 - DNA, 15 bp, Homo sapiens
cttgaatagcaaaaa

SEQ ID NO: 1691901 - DNA, 15 bp, Homo sapiens
ttgaatagcaaaaat

SEQ ID NO: 1691902 - DNA, 15 bp, Homo sapiens
tgaatagcaaaaatc

SEQ ID NO: 1691903 - DNA, 15 bp, Homo sapiens
gaatagcaaaaatcc

SEQ ID NO: 1691904 - DNA, 15 bp, Homo sapiens
aatagcaaaaatcct

SEQ ID NO: 1691905 - DNA, 15 bp, Homo sapiens
atagcaaaaatcctg

SEQ ID NO: 1691906 - DNA, 15 bp, Homo sapiens
tagcaaaaatcctga

SEQ ID NO: 1691907 - DNA, 15 bp, Homo sapiens
agcaaaaatcctgaa

SEQ ID NO: 1691908 - DNA, 15 bp, Homo sapiens
gcaaaaatcctgaac

SEQ ID NO: 1691909 - DNA, 15 bp, Homo sapiens
caaaaatcctgaaca

SEQ ID NO: 1691910 - DNA, 15 bp, Homo sapiens
aaaaatcctgaacaa

SEQ ID NO: 1691911 - DNA, 15 bp, Homo sapiens
aaaatcctgaacaag

SEQ ID NO: 1691912 - DNA, 15 bp, Homo sapiens
aaatcctgaacaaga

SEQ ID NO: 1691913 - DNA, 15 bp, Homo sapiens
aatcctgaacaagaa

SEQ ID NO: 1691914 - DNA, 15 bp, Homo sapiens
atcctgaacaagaag

SEQ ID NO: 1691915 - DNA, 15 bp, Homo sapiens
tcctgaacaagaaga

SEQ ID NO: 1691916 - DNA, 15 bp, Homo sapiens
cctgaacaagaagaa

SEQ ID NO: 1691917 - DNA, 15 bp, Homo sapiens
ctgaacaagaagaac

SEQ ID NO: 1691918 - DNA, 15 bp, Homo sapiens
tgaacaagaagaaca

SEQ ID NO: 1691919 - DNA, 15 bp, Homo sapiens
gaacaagaagaacaa

SEQ ID NO: 1691920 - DNA, 15 bp, Homo sapiens
aacaagaagaacaaa

SEQ ID NO: 1691921 - DNA, 15 bp, Homo sapiens
acaagaagaacaaag

SEQ ID NO: 1691922 - DNA, 15 bp, Homo sapiens
caagaagaacaaagc

SEQ ID NO: 1691923 - DNA, 15 bp, Homo sapiens
aagaagaacaaagct

SEQ ID NO: 1691924 - DNA, 15 bp, Homo sapiens
agaagaacaaagctg

SEQ ID NO: 1691925 - DNA, 15 bp, Homo sapiens
gaagaacaaagctgg

SEQ ID NO: 1691926 - DNA, 15 bp, Homo sapiens
agctggaggcatcac

SEQ ID NO: 1691927 - DNA, 15 bp, Homo sapiens
gctggaggcatcacg

SEQ ID NO: 1691928 - DNA, 15 bp, Homo sapiens
ctggaggcatcacgt

SEQ ID NO: 1691929 - DNA, 15 bp, Homo sapiens
tggaggcatcacgtt

SEQ ID NO: 1691930 - DNA, 15 bp, Homo sapiens
ggaggcatcacgtta

SEQ ID NO: 1691931 - DNA, 15 bp, Homo sapiens
gaggcatcacgttac

SEQ ID NO: 1691932 - DNA, 15 bp, Homo sapiens
aggcatcacgttacc

SEQ ID NO: 1691933 - DNA, 15 bp, Homo sapiens
ggcatcacgttacct

SEQ ID NO: 1691934 - DNA, 15 bp, Homo sapiens
gcatcacgttacctg

SEQ ID NO: 1691935 - DNA, 15 bp, Homo sapiens
catcacgttacctga

SEQ ID NO: 1691936 - DNA, 15 bp, Homo sapiens
atcacgttacctgat

SEQ ID NO: 1691937 - DNA, 15 bp, Homo sapiens
tcacgttacctgatc

SEQ ID NO: 1691938 - DNA, 15 bp, Homo sapiens
cacgttacctgatct

SEQ ID NO: 1691939 - DNA, 15 bp, Homo sapiens
acgttacctgatctc

SEQ ID NO: 1691940 - DNA, 15 bp, Homo sapiens
cgttacctgatctca

SEQ ID NO: 1691941 - DNA, 15 bp, Homo sapiens
gttacctgatctcaa

SEQ ID NO: 1691942 - DNA, 15 bp, Homo sapiens
ttacctgatctcaaa

SEQ ID NO: 1691943 - DNA, 15 bp, Homo sapiens
tacctgatctcaaaa

SEQ ID NO: 1691944 - DNA, 15 bp, Homo sapiens
acctgatctcaaaat

SEQ ID NO: 1691945 - DNA, 15 bp, Homo sapiens
cctgatctcaaaatc

SEQ ID NO: 1691946 - DNA, 15 bp, Homo sapiens
ctgatctcaaaatct

SEQ ID NO: 1691947 - DNA, 15 bp, Homo sapiens
tgatctcaaaatcta

SEQ ID NO: 1691948 - DNA, 15 bp, Homo sapiens
gatctcaaaatctac

SEQ ID NO: 1691949 - DNA, 15 bp, Homo sapiens
atctcaaaatctact

SEQ ID NO: 1691950 - DNA, 15 bp, Homo sapiens
tctcaaaatctacta

SEQ ID NO: 1691951 - DNA, 15 bp, Homo sapiens
ctcaaaatctactac

SEQ ID NO: 1691952 - DNA, 15 bp, Homo sapiens
tcaaaatctactaca

SEQ ID NO: 1691953 - DNA, 15 bp, Homo sapiens
caaaatctactacaa

SEQ ID NO: 1691954 - DNA, 15 bp, Homo sapiens
aaaatctactacaaa

SEQ ID NO: 1691955 - DNA, 15 bp, Homo sapiens
aaatctactacaaag

SEQ ID NO: 1691956 - DNA, 15 bp, Homo sapiens
aatctactacaaagt

SEQ ID NO: 1691957 - DNA, 15 bp, Homo sapiens
atctactacaaagta

SEQ ID NO: 1691958 - DNA, 15 bp, Homo sapiens
tctactacaaagtaa

SEQ ID NO: 1691959 - DNA, 15 bp, Homo sapiens
ctactacaaagtaat

SEQ ID NO: 1691960 - DNA, 15 bp, Homo sapiens
tactacaaagtaata

SEQ ID NO: 1691961 - DNA, 15 bp, Homo sapiens
actacaaagtaatag

SEQ ID NO: 1691962 - DNA, 15 bp, Homo sapiens
ctacaaagtaataga

SEQ ID NO: 1691963 - DNA, 15 bp, Homo sapiens
tacaaagtaatagat

SEQ ID NO: 1691964 - DNA, 15 bp, Homo sapiens
acaaagtaatagatc

SEQ ID NO: 1691965 - DNA, 15 bp, Homo sapiens
caaagtaatagatca

SEQ ID NO: 1691966 - DNA, 15 bp, Homo sapiens
aaagtaatagatcat

SEQ ID NO: 1691967 - DNA, 15 bp, Homo sapiens
aagtaatagatcatt

SEQ ID NO: 1691968 - DNA, 15 bp, Homo sapiens
agtaatagatcatta

SEQ ID NO: 1691969 - DNA, 15 bp, Homo sapiens
gtaatagatcattat

SEQ ID NO: 1691970 - DNA, 15 bp, Homo sapiens
taatagatcattatt

SEQ ID NO: 1691971 - DNA, 15 bp, Homo sapiens
aatagatcattatta

SEQ ID NO: 1691972 - DNA, 15 bp, Homo sapiens
atagatcattattag

SEQ ID NO: 1691973 - DNA, 15 bp, Homo sapiens
tagatcattattaga

SEQ ID NO: 1691974 - DNA, 15 bp, Homo sapiens
agatcattattagat

SEQ ID NO: 1691975 - DNA, 15 bp, Homo sapiens
gatcattattagatt

SEQ ID NO: 1691976 - DNA, 15 bp, Homo sapiens
atcattattagatta

SEQ ID NO: 1691977 - DNA, 15 bp, Homo sapiens
tcattattagattat

SEQ ID NO: 1691978 - DNA, 15 bp, Homo sapiens
cattattagattatt

SEQ ID NO: 1691979 - DNA, 15 bp, Homo sapiens
attattagattattt

SEQ ID NO: 1691980 - DNA, 15 bp, Homo sapiens
ttattagattatttg

SEQ ID NO: 1691981 - DNA, 15 bp, Homo sapiens
tattagattatttga

SEQ ID NO: 1691982 - DNA, 15 bp, Homo sapiens
attagattatttgat

SEQ ID NO: 1691983 - DNA, 15 bp, Homo sapiens
ttagattatttgatt

SEQ ID NO: 1691984 - DNA, 15 bp, Homo sapiens
tagattatttgatta

SEQ ID NO: 1691985 - DNA, 15 bp, Homo sapiens
agattatttgattac

SEQ ID NO: 1691986 - DNA, 15 bp, Homo sapiens
gattatttgattact

SEQ ID NO: 1691987 - DNA, 15 bp, Homo sapiens
attatttgattacta

SEQ ID NO: 1691988 - DNA, 15 bp, Homo sapiens
ttatttgattactat

SEQ ID NO: 1691989 - DNA, 15 bp, Homo sapiens
tatttgattactata

SEQ ID NO: 1691990 - DNA, 15 bp, Homo sapiens
atttgattactatag

SEQ ID NO: 1691991 - DNA, 15 bp, Homo sapiens
tttgattactatagt

SEQ ID NO: 1691992 - DNA, 15 bp, Homo sapiens
ttgattactatagta

SEQ ID NO: 1691993 - DNA, 15 bp, Homo sapiens
tgattactatagtaa

SEQ ID NO: 1691994 - DNA, 15 bp, Homo sapiens
gattactatagtaat

SEQ ID NO: 1691995 - DNA, 15 bp, Homo sapiens
attactatagtaata

SEQ ID NO: 1691996 - DNA, 15 bp, Homo sapiens
ttactatagtaataa

SEQ ID NO: 1691997 - DNA, 15 bp, Homo sapiens
tactatagtaataaa

SEQ ID NO: 1691998 - DNA, 15 bp, Homo sapiens
actatagtaataaaa

SEQ ID NO: 1691999 - DNA, 15 bp, Homo sapiens
ctatagtaataaaaa

SEQ ID NO: 1692000 - DNA, 15 bp, Homo sapiens
tatagtaataaaaac

SEQ ID NO: 1692001 - DNA, 15 bp, Homo sapiens
tagtaataaaaacag

SEQ ID NO: 1692002 - DNA, 15 bp, Homo sapiens
agtaataaaaacagc

SEQ ID NO: 1692003 - DNA, 15 bp, Homo sapiens
gtaataaaaacagca

SEQ ID NO: 1692004 - DNA, 15 bp, Homo sapiens
taataaaaacagcat

SEQ ID NO: 1692005 - DNA, 15 bp, Homo sapiens
aataaaaacagcatg

SEQ ID NO: 1692006 - DNA, 15 bp, Homo sapiens
ataaaaacagcatgg

SEQ ID NO: 1692007 - DNA, 15 bp, Homo sapiens
taaaaacagcatggt

SEQ ID NO: 1692008 - DNA, 15 bp, Homo sapiens
aaaaacagcatggta

SEQ ID NO: 1692009 - DNA, 15 bp, Homo sapiens
cagcatggtactggc

SEQ ID NO: 1692010 - DNA, 15 bp, Homo sapiens
agcatggtactggca

SEQ ID NO: 1692011 - DNA, 15 bp, Homo sapiens
gcatggtactggcat

SEQ ID NO: 1692012 - DNA, 15 bp, Homo sapiens
catggtactggcata

SEQ ID NO: 1692013 - DNA, 15 bp, Homo sapiens
atggtactggcatag

SEQ ID NO: 1692014 - DNA, 15 bp, Homo sapiens
tggtactggcataga

SEQ ID NO: 1692015 - DNA, 15 bp, Homo sapiens
ggtactggcatagaa

SEQ ID NO: 1692016 - DNA, 15 bp, Homo sapiens
gtactggcatagaaa

SEQ ID NO: 1692017 - DNA, 15 bp, Homo sapiens
tactggcatagaaac

SEQ ID NO: 1692018 - DNA, 15 bp, Homo sapiens
actggcatagaaaca

SEQ ID NO: 1692019 - DNA, 15 bp, Homo sapiens
ctggcatagaaacag

SEQ ID NO: 1692020 - DNA, 15 bp, Homo sapiens
tggcatagaaacaga

SEQ ID NO: 1692021 - DNA, 15 bp, Homo sapiens
ggcatagaaacagac

SEQ ID NO: 1692022 - DNA, 15 bp, Homo sapiens
gcatagaaacagaca

SEQ ID NO: 1692023 - DNA, 15 bp, Homo sapiens
catagaaacagacac

SEQ ID NO: 1692024 - DNA, 15 bp, Homo sapiens
atagaaacagacaca

SEQ ID NO: 1692025 - DNA, 15 bp, Homo sapiens
tagaaacagacacat

SEQ ID NO: 1692026 - DNA, 15 bp, Homo sapiens
agaaacagacacata

SEQ ID NO: 1692027 - DNA, 15 bp, Homo sapiens
gaaacagacacatag

SEQ ID NO: 1692028 - DNA, 15 bp, Homo sapiens
aaacagacacataga

SEQ ID NO: 1692029 - DNA, 15 bp, Homo sapiens
aacagacacatagac

SEQ ID NO: 1692030 - DNA, 15 bp, Homo sapiens
acagacacatagacc

SEQ ID NO: 1692031 - DNA, 15 bp, Homo sapiens
cagacacatagacca

SEQ ID NO: 1692032 - DNA, 15 bp, Homo sapiens
agacacatagaccag

SEQ ID NO: 1692033 - DNA, 15 bp, Homo sapiens
gacacatagaccagt

SEQ ID NO: 1692034 - DNA, 15 bp, Homo sapiens
acacatagaccagtg

SEQ ID NO: 1692035 - DNA, 15 bp, Homo sapiens
cacatagaccagtga

SEQ ID NO: 1692036 - DNA, 15 bp, Homo sapiens
acatagaccagtgaa

SEQ ID NO: 1692037 - DNA, 15 bp, Homo sapiens
catagaccagtgaaa

SEQ ID NO: 1692038 - DNA, 15 bp, Homo sapiens
atagaccagtgaaaa

SEQ ID NO: 1692039 - DNA, 15 bp, Homo sapiens
tagaccagtgaaaaa

SEQ ID NO: 1692040 - DNA, 15 bp, Homo sapiens
agaccagtgaaaaag

SEQ ID NO: 1692041 - DNA, 15 bp, Homo sapiens
gaccagtgaaaaaga

SEQ ID NO: 1692042 - DNA, 15 bp, Homo sapiens
accagtgaaaaagaa

SEQ ID NO: 1692043 - DNA, 15 bp, Homo sapiens
ccagtgaaaaagaat

SEQ ID NO: 1692044 - DNA, 15 bp, Homo sapiens
cagtgaaaaagaatg

SEQ ID NO: 1692045 - DNA, 15 bp, Homo sapiens
agtgaaaaagaatgg

SEQ ID NO: 1692046 - DNA, 15 bp, Homo sapiens
gtgaaaaagaatgga

SEQ ID NO: 1692047 - DNA, 15 bp, Homo sapiens
tgaaaaagaatggag

SEQ ID NO: 1692048 - DNA, 15 bp, Homo sapiens
gaaaaagaatggaga

SEQ ID NO: 1692049 - DNA, 15 bp, Homo sapiens
aaaaagaatggagag

SEQ ID NO: 1692050 - DNA, 15 bp, Homo sapiens
aaaagaatggagagc

SEQ ID NO: 1692051 - DNA, 15 bp, Homo sapiens
aaagaatggagagcc

SEQ ID NO: 1692052 - DNA, 15 bp, Homo sapiens
aagaatggagagccc

SEQ ID NO: 1692053 - DNA, 15 bp, Homo sapiens
agaatggagagccca

SEQ ID NO: 1692054 - DNA, 15 bp, Homo sapiens
gaatggagagcccag

SEQ ID NO: 1692055 - DNA, 15 bp, Homo sapiens
aatggagagcccaga

SEQ ID NO: 1692056 - DNA, 15 bp, Homo sapiens
atggagagcccagaa

SEQ ID NO: 1692057 - DNA, 15 bp, Homo sapiens
tggagagcccagaaa

SEQ ID NO: 1692058 - DNA, 15 bp, Homo sapiens
ggagagcccagaaag

SEQ ID NO: 1692059 - DNA, 15 bp, Homo sapiens
gagagcccagaaaga

SEQ ID NO: 1692060 - DNA, 15 bp, Homo sapiens
agagcccagaaagaa

SEQ ID NO: 1692061 - DNA, 15 bp, Homo sapiens
gagcccagaaagaag

SEQ ID NO: 1692062 - DNA, 15 bp, Homo sapiens
agcccagaaagaagt

SEQ ID NO: 1692063 - DNA, 15 bp, Homo sapiens
gcccagaaagaagtc

SEQ ID NO: 1692064 - DNA, 15 bp, Homo sapiens
cccagaaagaagtcc

SEQ ID NO: 1692065 - DNA, 15 bp, Homo sapiens
ccagaaagaagtcca

SEQ ID NO: 1692066 - DNA, 15 bp, Homo sapiens
cagaaagaagtccat

SEQ ID NO: 1692067 - DNA, 15 bp, Homo sapiens
agaaagaagtccatg

SEQ ID NO: 1692068 - DNA, 15 bp, Homo sapiens
gaaagaagtccatgc

SEQ ID NO: 1692069 - DNA, 15 bp, Homo sapiens
aaagaagtccatgca

SEQ ID NO: 1692070 - DNA, 15 bp, Homo sapiens
aagaagtccatgcat

SEQ ID NO: 1692071 - DNA, 15 bp, Homo sapiens
agaagtccatgcatt

SEQ ID NO: 1692072 - DNA, 15 bp, Homo sapiens
gaagtccatgcattt

SEQ ID NO: 1692073 - DNA, 15 bp, Homo sapiens
aagtccatgcattta

SEQ ID NO: 1692074 - DNA, 15 bp, Homo sapiens
agtccatgcatttat

SEQ ID NO: 1692075 - DNA, 15 bp, Homo sapiens
gtccatgcatttata

SEQ ID NO: 1692076 - DNA, 15 bp, Homo sapiens
tccatgcatttatag

SEQ ID NO: 1692077 - DNA, 15 bp, Homo sapiens
ccatgcatttatagt

SEQ ID NO: 1692078 - DNA, 15 bp, Homo sapiens
catgcatttatagtc

SEQ ID NO: 1692079 - DNA, 15 bp, Homo sapiens
atgcatttatagtcc

SEQ ID NO: 1692080 - DNA, 15 bp, Homo sapiens
tgcatttatagtcca

SEQ ID NO: 1692081 - DNA, 15 bp, Homo sapiens
gcatttatagtccat

SEQ ID NO: 1692082 - DNA, 15 bp, Homo sapiens
catttatagtccatt

SEQ ID NO: 1692083 - DNA, 15 bp, Homo sapiens
atttatagtccattg

SEQ ID NO: 1692084 - DNA, 15 bp, Homo sapiens
tttatagtccattga

SEQ ID NO: 1692085 - DNA, 15 bp, Homo sapiens
ttatagtccattgat

SEQ ID NO: 1692086 - DNA, 15 bp, Homo sapiens
tatagtccattgatt

SEQ ID NO: 1692087 - DNA, 15 bp, Homo sapiens
atagtccattgattt

SEQ ID NO: 1692088 - DNA, 15 bp, Homo sapiens
tagtccattgatttt

SEQ ID NO: 1692089 - DNA, 15 bp, Homo sapiens
agtccattgattttc

SEQ ID NO: 1692090 - DNA, 15 bp, Homo sapiens
gtccattgattttca

SEQ ID NO: 1692091 - DNA, 15 bp, Homo sapiens
tccattgattttcaa

SEQ ID NO: 1692092 - DNA, 15 bp, Homo sapiens
ccattgattttcaat

SEQ ID NO: 1692093 - DNA, 15 bp, Homo sapiens
cattgattttcaata

SEQ ID NO: 1692094 - DNA, 15 bp, Homo sapiens
attgattttcaataa

SEQ ID NO: 1692095 - DNA, 15 bp, Homo sapiens
ttgattttcaataaa

SEQ ID NO: 1692096 - DNA, 15 bp, Homo sapiens
tgattttcaataaag

SEQ ID NO: 1692097 - DNA, 15 bp, Homo sapiens
gattttcaataaaga

SEQ ID NO: 1692098 - DNA, 15 bp, Homo sapiens
attttcaataaagag

SEQ ID NO: 1692099 - DNA, 15 bp, Homo sapiens
ttttcaataaagaga

SEQ ID NO: 1692100 - DNA, 15 bp, Homo sapiens
tttcaataaagagac

SEQ ID NO: 1692101 - DNA, 15 bp, Homo sapiens
ttcaataaagagacc

SEQ ID NO: 1692102 - DNA, 15 bp, Homo sapiens
tcaataaagagacca

SEQ ID NO: 1692103 - DNA, 15 bp, Homo sapiens
caataaagagaccaa

SEQ ID NO: 1692104 - DNA, 15 bp, Homo sapiens
aataaagagaccaac

SEQ ID NO: 1692105 - DNA, 15 bp, Homo sapiens
ataaagagaccaaca

SEQ ID NO: 1692106 - DNA, 15 bp, Homo sapiens
taaagagaccaacaa

SEQ ID NO: 1692107 - DNA, 15 bp, Homo sapiens
aaagagaccaacaac

SEQ ID NO: 1692108 - DNA, 15 bp, Homo sapiens
aagagaccaacaaca

SEQ ID NO: 1692109 - DNA, 15 bp, Homo sapiens
agagaccaacaacac

SEQ ID NO: 1692110 - DNA, 15 bp, Homo sapiens
gagaccaacaacaca

SEQ ID NO: 1692111 - DNA, 15 bp, Homo sapiens
agaccaacaacacac

SEQ ID NO: 1692112 - DNA, 15 bp, Homo sapiens
gaccaacaacacacc

SEQ ID NO: 1692113 - DNA, 15 bp, Homo sapiens
accaacaacacacca

SEQ ID NO: 1692114 - DNA, 15 bp, Homo sapiens
ccaacaacacaccat

SEQ ID NO: 1692115 - DNA, 15 bp, Homo sapiens
caacaacacaccatg

SEQ ID NO: 1692116 - DNA, 15 bp, Homo sapiens
aacaacacaccatga

SEQ ID NO: 1692117 - DNA, 15 bp, Homo sapiens
acaacacaccatgag

SEQ ID NO: 1692118 - DNA, 15 bp, Homo sapiens
caacacaccatgagg

SEQ ID NO: 1692119 - DNA, 15 bp, Homo sapiens
aacacaccatgagga

SEQ ID NO: 1692120 - DNA, 15 bp, Homo sapiens
acacaccatgaggaa

SEQ ID NO: 1692121 - DNA, 15 bp, Homo sapiens
cacaccatgaggaaa

SEQ ID NO: 1692122 - DNA, 15 bp, Homo sapiens
acaccatgaggaaag

SEQ ID NO: 1692123 - DNA, 15 bp, Homo sapiens
caccatgaggaaagg

SEQ ID NO: 1692124 - DNA, 15 bp, Homo sapiens
accatgaggaaaggg

SEQ ID NO: 1692125 - DNA, 15 bp, Homo sapiens
ccatgaggaaagggc

SEQ ID NO: 1692126 - DNA, 15 bp, Homo sapiens
catgaggaaagggca

SEQ ID NO: 1692127 - DNA, 15 bp, Homo sapiens
atgaggaaagggcag

SEQ ID NO: 1692128 - DNA, 15 bp, Homo sapiens
tgaggaaagggcagt

SEQ ID NO: 1692129 - DNA, 15 bp, Homo sapiens
gaggaaagggcagtc

SEQ ID NO: 1692130 - DNA, 15 bp, Homo sapiens
aggaaagggcagtct

SEQ ID NO: 1692131 - DNA, 15 bp, Homo sapiens
ggaaagggcagtctc

SEQ ID NO: 1692132 - DNA, 15 bp, Homo sapiens
gaaagggcagtctct

SEQ ID NO: 1692133 - DNA, 15 bp, Homo sapiens
aaagggcagtctctt

SEQ ID NO: 1692134 - DNA, 15 bp, Homo sapiens
aagggcagtctcttc

SEQ ID NO: 1692135 - DNA, 15 bp, Homo sapiens
agggcagtctcttca

SEQ ID NO: 1692136 - DNA, 15 bp, Homo sapiens
gggcagtctcttcaa

SEQ ID NO: 1692137 - DNA, 15 bp, Homo sapiens
ggcagtctcttcaat

SEQ ID NO: 1692138 - DNA, 15 bp, Homo sapiens
gcagtctcttcaata

SEQ ID NO: 1692139 - DNA, 15 bp, Homo sapiens
cagtctcttcaataa

SEQ ID NO: 1692140 - DNA, 15 bp, Homo sapiens
agtctcttcaataaa

SEQ ID NO: 1692141 - DNA, 15 bp, Homo sapiens
gtctcttcaataaac

SEQ ID NO: 1692142 - DNA, 15 bp, Homo sapiens
tctcttcaataaacg

SEQ ID NO: 1692143 - DNA, 15 bp, Homo sapiens
ctcttcaataaacga

SEQ ID NO: 1692144 - DNA, 15 bp, Homo sapiens
tcttcaataaacgat

SEQ ID NO: 1692145 - DNA, 15 bp, Homo sapiens
cttcaataaacgatg

SEQ ID NO: 1692146 - DNA, 15 bp, Homo sapiens
ttcaataaacgatgt

SEQ ID NO: 1692147 - DNA, 15 bp, Homo sapiens
tcaataaacgatgtt

SEQ ID NO: 1692148 - DNA, 15 bp, Homo sapiens
caataaacgatgttg

SEQ ID NO: 1692149 - DNA, 15 bp, Homo sapiens
aataaacgatgttgg

SEQ ID NO: 1692150 - DNA, 15 bp, Homo sapiens
ataaacgatgttggg

SEQ ID NO: 1692151 - DNA, 15 bp, Homo sapiens
taaacgatgttgggg

SEQ ID NO: 1692152 - DNA, 15 bp, Homo sapiens
aaacgatgttgggga

SEQ ID NO: 1692153 - DNA, 15 bp, Homo sapiens
aacgatgttggggaa

SEQ ID NO: 1692154 - DNA, 15 bp, Homo sapiens
acgatgttggggaaa

SEQ ID NO: 1692155 - DNA, 15 bp, Homo sapiens
cgatgttggggaaac

SEQ ID NO: 1692156 - DNA, 15 bp, Homo sapiens
gatgttggggaaact

SEQ ID NO: 1692157 - DNA, 15 bp, Homo sapiens
atgttggggaaactg

SEQ ID NO: 1692158 - DNA, 15 bp, Homo sapiens
tgttggggaaactgg

SEQ ID NO: 1692159 - DNA, 15 bp, Homo sapiens
gttggggaaactgga

SEQ ID NO: 1692160 - DNA, 15 bp, Homo sapiens
ttggggaaactggat

SEQ ID NO: 1692161 - DNA, 15 bp, Homo sapiens
tggggaaactggata

SEQ ID NO: 1692162 - DNA, 15 bp, Homo sapiens
ggggaaactggatat

SEQ ID NO: 1692163 - DNA, 15 bp, Homo sapiens
gggaaactggatatc

SEQ ID NO: 1692164 - DNA, 15 bp, Homo sapiens
ggaaactggatatcc

SEQ ID NO: 1692165 - DNA, 15 bp, Homo sapiens
gaaactggatatcca

SEQ ID NO: 1692166 - DNA, 15 bp, Homo sapiens
aaactggatatccac

SEQ ID NO: 1692167 - DNA, 15 bp, Homo sapiens
aactggatatccaca

SEQ ID NO: 1692168 - DNA, 15 bp, Homo sapiens
actggatatccacat

SEQ ID NO: 1692169 - DNA, 15 bp, Homo sapiens
ctggatatccacatg

SEQ ID NO: 1692170 - DNA, 15 bp, Homo sapiens
tggatatccacatgc

SEQ ID NO: 1692171 - DNA, 15 bp, Homo sapiens
ggatatccacatgca

SEQ ID NO: 1692172 - DNA, 15 bp, Homo sapiens
gatatccacatgcag

SEQ ID NO: 1692173 - DNA, 15 bp, Homo sapiens
atatccacatgcaga

SEQ ID NO: 1692174 - DNA, 15 bp, Homo sapiens
tatccacatgcagaa

SEQ ID NO: 1692175 - DNA, 15 bp, Homo sapiens
atccacatgcagaag

SEQ ID NO: 1692176 - DNA, 15 bp, Homo sapiens
tccacatgcagaaga

SEQ ID NO: 1692177 - DNA, 15 bp, Homo sapiens
ccacatgcagaagaa

SEQ ID NO: 1692178 - DNA, 15 bp, Homo sapiens
cacatgcagaagaat

SEQ ID NO: 1692179 - DNA, 15 bp, Homo sapiens
acatgcagaagaatg

SEQ ID NO: 1692180 - DNA, 15 bp, Homo sapiens
catgcagaagaatga

SEQ ID NO: 1692181 - DNA, 15 bp, Homo sapiens
atgcagaagaatgaa

SEQ ID NO: 1692182 - DNA, 15 bp, Homo sapiens
tgcagaagaatgaaa

SEQ ID NO: 1692183 - DNA, 15 bp, Homo sapiens
gcagaagaatgaaat

SEQ ID NO: 1692184 - DNA, 15 bp, Homo sapiens
cagaagaatgaaatt

SEQ ID NO: 1692185 - DNA, 15 bp, Homo sapiens
agaagaatgaaattt

SEQ ID NO: 1692186 - DNA, 15 bp, Homo sapiens
gaagaatgaaatttg

SEQ ID NO: 1692187 - DNA, 15 bp, Homo sapiens
aagaatgaaatttga

SEQ ID NO: 1692188 - DNA, 15 bp, Homo sapiens
agaatgaaatttgat

SEQ ID NO: 1692189 - DNA, 15 bp, Homo sapiens
gaatgaaatttgatc

SEQ ID NO: 1692190 - DNA, 15 bp, Homo sapiens
aatgaaatttgatcc

SEQ ID NO: 1692191 - DNA, 15 bp, Homo sapiens
atgaaatttgatcct

SEQ ID NO: 1692192 - DNA, 15 bp, Homo sapiens
tgaaatttgatcctt

SEQ ID NO: 1692193 - DNA, 15 bp, Homo sapiens
gaaatttgatcctta

SEQ ID NO: 1692194 - DNA, 15 bp, Homo sapiens
aaatttgatccttac

SEQ ID NO: 1692195 - DNA, 15 bp, Homo sapiens
aatttgatccttacc

SEQ ID NO: 1692196 - DNA, 15 bp, Homo sapiens
atttgatccttacct

SEQ ID NO: 1692197 - DNA, 15 bp, Homo sapiens
tttgatccttacctc

SEQ ID NO: 1692198 - DNA, 15 bp, Homo sapiens
ttgatccttacctca

SEQ ID NO: 1692199 - DNA, 15 bp, Homo sapiens
tgatccttacctcac

SEQ ID NO: 1692200 - DNA, 15 bp, Homo sapiens
gatccttacctcaca

SEQ ID NO: 1692201 - DNA, 15 bp, Homo sapiens
atccttacctcacac

SEQ ID NO: 1692202 - DNA, 15 bp, Homo sapiens
tccttacctcacact

SEQ ID NO: 1692203 - DNA, 15 bp, Homo sapiens
ccttacctcacacta

SEQ ID NO: 1692204 - DNA, 15 bp, Homo sapiens
cttacctcacactat

SEQ ID NO: 1692205 - DNA, 15 bp, Homo sapiens
ttacctcacactata

SEQ ID NO: 1692206 - DNA, 15 bp, Homo sapiens
tacctcacactatac

SEQ ID NO: 1692207 - DNA, 15 bp, Homo sapiens
acctcacactataca

SEQ ID NO: 1692208 - DNA, 15 bp, Homo sapiens
cctcacactatacac

SEQ ID NO: 1692209 - DNA, 15 bp, Homo sapiens
ctcacactatacaca

SEQ ID NO: 1692210 - DNA, 15 bp, Homo sapiens
tcacactatacacaa

SEQ ID NO: 1692211 - DNA, 15 bp, Homo sapiens
cacactatacacaaa

SEQ ID NO: 1692212 - DNA, 15 bp, Homo sapiens
acactatacacaaat

SEQ ID NO: 1692213 - DNA, 15 bp, Homo sapiens
cactatacacaaata

SEQ ID NO: 1692214 - DNA, 15 bp, Homo sapiens
actatacacaaatat

SEQ ID NO: 1692215 - DNA, 15 bp, Homo sapiens
ctatacacaaatatc

SEQ ID NO: 1692216 - DNA, 15 bp, Homo sapiens
tatacacaaatatca

SEQ ID NO: 1692217 - DNA, 15 bp, Homo sapiens
atacacaaatatcaa

SEQ ID NO: 1692218 - DNA, 15 bp, Homo sapiens
tacacaaatatcaac

SEQ ID NO: 1692219 - DNA, 15 bp, Homo sapiens
acacaaatatcaact

SEQ ID NO: 1692220 - DNA, 15 bp, Homo sapiens
cacaaatatcaactc

SEQ ID NO: 1692221 - DNA, 15 bp, Homo sapiens
acaaatatcaactca

SEQ ID NO: 1692222 - DNA, 15 bp, Homo sapiens
caaatatcaactcaa

SEQ ID NO: 1692223 - DNA, 15 bp, Homo sapiens
aaatatcaactcaaa

SEQ ID NO: 1692224 - DNA, 15 bp, Homo sapiens
aatatcaactcaaaa

SEQ ID NO: 1692225 - DNA, 15 bp, Homo sapiens
atatcaactcaaaat

SEQ ID NO: 1692226 - DNA, 15 bp, Homo sapiens
tatcaactcaaaatg

SEQ ID NO: 1692227 - DNA, 15 bp, Homo sapiens
atcaactcaaaatgg

SEQ ID NO: 1692228 - DNA, 15 bp, Homo sapiens
tcaactcaaaatgga

SEQ ID NO: 1692229 - DNA, 15 bp, Homo sapiens
caactcaaaatggat

SEQ ID NO: 1692230 - DNA, 15 bp, Homo sapiens
aactcaaaatggatt

SEQ ID NO: 1692231 - DNA, 15 bp, Homo sapiens
actcaaaatggatta

SEQ ID NO: 1692232 - DNA, 15 bp, Homo sapiens
ctcaaaatggattaa

SEQ ID NO: 1692233 - DNA, 15 bp, Homo sapiens
tcaaaatggattaaa

SEQ ID NO: 1692234 - DNA, 15 bp, Homo sapiens
caaaatggattaaag

SEQ ID NO: 1692235 - DNA, 15 bp, Homo sapiens
aaaatggattaaagt

SEQ ID NO: 1692236 - DNA, 15 bp, Homo sapiens
aaatggattaaagtt

SEQ ID NO: 1692237 - DNA, 15 bp, Homo sapiens
aatggattaaagttt

SEQ ID NO: 1692238 - DNA, 15 bp, Homo sapiens
atggattaaagtttt

SEQ ID NO: 1692239 - DNA, 15 bp, Homo sapiens
tggattaaagtttta

SEQ ID NO: 1692240 - DNA, 15 bp, Homo sapiens
ggattaaagttttaa

SEQ ID NO: 1692241 - DNA, 15 bp, Homo sapiens
gattaaagttttaaa

SEQ ID NO: 1692242 - DNA, 15 bp, Homo sapiens
attaaagttttaaat

SEQ ID NO: 1692243 - DNA, 15 bp, Homo sapiens
ttaaagttttaaatg

SEQ ID NO: 1692244 - DNA, 15 bp, Homo sapiens
taaagttttaaatgt

SEQ ID NO: 1692245 - DNA, 15 bp, Homo sapiens
aaagttttaaatgta

SEQ ID NO: 1692246 - DNA, 15 bp, Homo sapiens
aagttttaaatgtag

SEQ ID NO: 1692247 - DNA, 15 bp, Homo sapiens
agttttaaatgtagg

SEQ ID NO: 1692248 - DNA, 15 bp, Homo sapiens
gttttaaatgtagga

SEQ ID NO: 1692249 - DNA, 15 bp, Homo sapiens
ttttaaatgtaggat

SEQ ID NO: 1692250 - DNA, 15 bp, Homo sapiens
tttaaatgtaggata

SEQ ID NO: 1692251 - DNA, 15 bp, Homo sapiens
ttaaatgtaggatat

SEQ ID NO: 1692252 - DNA, 15 bp, Homo sapiens
taaatgtaggatata

SEQ ID NO: 1692253 - DNA, 15 bp, Homo sapiens
aaatgtaggatataa

SEQ ID NO: 1692254 - DNA, 15 bp, Homo sapiens
aatgtaggatataaa

SEQ ID NO: 1692255 - DNA, 15 bp, Homo sapiens
atgtaggatataaaa

SEQ ID NO: 1692256 - DNA, 15 bp, Homo sapiens
tgtaggatataaaac

SEQ ID NO: 1692257 - DNA, 15 bp, Homo sapiens
gtaggatataaaact

SEQ ID NO: 1692258 - DNA, 15 bp, Homo sapiens
taggatataaaactg

SEQ ID NO: 1692259 - DNA, 15 bp, Homo sapiens
aggatataaaactga

SEQ ID NO: 1692260 - DNA, 15 bp, Homo sapiens
ggatataaaactgaa

SEQ ID NO: 1692261 - DNA, 15 bp, Homo sapiens
gatataaaactgaaa

SEQ ID NO: 1692262 - DNA, 15 bp, Homo sapiens
atataaaactgaaaa

SEQ ID NO: 1692263 - DNA, 15 bp, Homo sapiens
tataaaactgaaaaa

SEQ ID NO: 1692264 - DNA, 15 bp, Homo sapiens
ataaaactgaaaaac

SEQ ID NO: 1692265 - DNA, 15 bp, Homo sapiens
taaaactgaaaaact

SEQ ID NO: 1692266 - DNA, 15 bp, Homo sapiens
aaaactgaaaaacta

SEQ ID NO: 1692267 - DNA, 15 bp, Homo sapiens
aaactgaaaaactac

SEQ ID NO: 1692268 - DNA, 15 bp, Homo sapiens
aactgaaaaactact

SEQ ID NO: 1692269 - DNA, 15 bp, Homo sapiens
actgaaaaactacta

SEQ ID NO: 1692270 - DNA, 15 bp, Homo sapiens
ctgaaaaactactag

SEQ ID NO: 1692271 - DNA, 15 bp, Homo sapiens
tgaaaaactactaga

SEQ ID NO: 1692272 - DNA, 15 bp, Homo sapiens
gaaaaactactagaa

SEQ ID NO: 1692273 - DNA, 15 bp, Homo sapiens
aaaaactactagaag

SEQ ID NO: 1692274 - DNA, 15 bp, Homo sapiens
aaaactactagaaga

SEQ ID NO: 1692275 - DNA, 15 bp, Homo sapiens
aaactactagaagaa

SEQ ID NO: 1692276 - DNA, 15 bp, Homo sapiens
aactactagaagaaa

SEQ ID NO: 1692277 - DNA, 15 bp, Homo sapiens
actactagaagaaag

SEQ ID NO: 1692278 - DNA, 15 bp, Homo sapiens
ctactagaagaaagc

SEQ ID NO: 1692279 - DNA, 15 bp, Homo sapiens
tactagaagaaagca

SEQ ID NO: 1692280 - DNA, 15 bp, Homo sapiens
actagaagaaagcat

SEQ ID NO: 1692281 - DNA, 15 bp, Homo sapiens
ctagaagaaagcata

SEQ ID NO: 1692282 - DNA, 15 bp, Homo sapiens
tagaagaaagcatag

SEQ ID NO: 1692283 - DNA, 15 bp, Homo sapiens
agaagaaagcatagg

SEQ ID NO: 1692284 - DNA, 15 bp, Homo sapiens
gaagaaagcataggg

SEQ ID NO: 1692285 - DNA, 15 bp, Homo sapiens
aagaaagcataggga

SEQ ID NO: 1692286 - DNA, 15 bp, Homo sapiens
agaaagcatagggaa

SEQ ID NO: 1692287 - DNA, 15 bp, Homo sapiens
gaaagcatagggaag

SEQ ID NO: 1692288 - DNA, 15 bp, Homo sapiens
aaagcatagggaaga

SEQ ID NO: 1692289 - DNA, 15 bp, Homo sapiens
aagcatagggaagaa

SEQ ID NO: 1692290 - DNA, 15 bp, Homo sapiens
agcatagggaagaag

SEQ ID NO: 1692291 - DNA, 15 bp, Homo sapiens
gcatagggaagaagc

SEQ ID NO: 1692292 - DNA, 15 bp, Homo sapiens
catagggaagaagct

SEQ ID NO: 1692293 - DNA, 15 bp, Homo sapiens
atagggaagaagctc

SEQ ID NO: 1692294 - DNA, 15 bp, Homo sapiens
tagggaagaagctct

SEQ ID NO: 1692295 - DNA, 15 bp, Homo sapiens
agggaagaagctcta

SEQ ID NO: 1692296 - DNA, 15 bp, Homo sapiens
gggaagaagctctat

SEQ ID NO: 1692297 - DNA, 15 bp, Homo sapiens
ggaagaagctctatg

SEQ ID NO: 1692298 - DNA, 15 bp, Homo sapiens
gaagaagctctatga

SEQ ID NO: 1692299 - DNA, 15 bp, Homo sapiens
aagaagctctatgac

SEQ ID NO: 1692300 - DNA, 15 bp, Homo sapiens
agaagctctatgaca

SEQ ID NO: 1692301 - DNA, 15 bp, Homo sapiens
gaagctctatgacat

SEQ ID NO: 1692302 - DNA, 15 bp, Homo sapiens
aagctctatgacatt

SEQ ID NO: 1692303 - DNA, 15 bp, Homo sapiens
agctctatgacattg

SEQ ID NO: 1692304 - DNA, 15 bp, Homo sapiens
gctctatgacattgg

SEQ ID NO: 1692305 - DNA, 15 bp, Homo sapiens
ctctatgacattggt

SEQ ID NO: 1692306 - DNA, 15 bp, Homo sapiens
tctatgacattggtc

SEQ ID NO: 1692307 - DNA, 15 bp, Homo sapiens
ctatgacattggtct

SEQ ID NO: 1692308 - DNA, 15 bp, Homo sapiens
tatgacattggtcta

SEQ ID NO: 1692309 - DNA, 15 bp, Homo sapiens
atgacattggtctag

SEQ ID NO: 1692310 - DNA, 15 bp, Homo sapiens
tgacattggtctagg

SEQ ID NO: 1692311 - DNA, 15 bp, Homo sapiens
gacattggtctaggc

SEQ ID NO: 1692312 - DNA, 15 bp, Homo sapiens
acattggtctaggca

SEQ ID NO: 1692313 - DNA, 15 bp, Homo sapiens
cattggtctaggcaa

SEQ ID NO: 1692314 - DNA, 15 bp, Homo sapiens
attggtctaggcaat

SEQ ID NO: 1692315 - DNA, 15 bp, Homo sapiens
ttggtctaggcaatg

SEQ ID NO: 1692316 - DNA, 15 bp, Homo sapiens
tggtctaggcaatga

SEQ ID NO: 1692317 - DNA, 15 bp, Homo sapiens
ggtctaggcaatgat

SEQ ID NO: 1692318 - DNA, 15 bp, Homo sapiens
gtctaggcaatgatt

SEQ ID NO: 1692319 - DNA, 15 bp, Homo sapiens
tctaggcaatgattt

SEQ ID NO: 1692320 - DNA, 15 bp, Homo sapiens
ctaggcaatgatttt

SEQ ID NO: 1692321 - DNA, 15 bp, Homo sapiens
taggcaatgattttt

SEQ ID NO: 1692322 - DNA, 15 bp, Homo sapiens
aggcaatgatttttt

SEQ ID NO: 1692323 - DNA, 15 bp, Homo sapiens
ggcaatgattttttt

SEQ ID NO: 1692324 - DNA, 15 bp, Homo sapiens
gcaatgatttttttg

SEQ ID NO: 1692325 - DNA, 15 bp, Homo sapiens
caatgatttttttga

SEQ ID NO: 1692326 - DNA, 15 bp, Homo sapiens
aatgatttttttgac

SEQ ID NO: 1692327 - DNA, 15 bp, Homo sapiens
atgatttttttgaca

SEQ ID NO: 1692328 - DNA, 15 bp, Homo sapiens
tgatttttttgacac

SEQ ID NO: 1692329 - DNA, 15 bp, Homo sapiens
gatttttttgacaca

SEQ ID NO: 1692330 - DNA, 15 bp, Homo sapiens
atttttttgacacaa

SEQ ID NO: 1692331 - DNA, 15 bp, Homo sapiens
tttttttgacacaac

SEQ ID NO: 1692332 - DNA, 15 bp, Homo sapiens
ttttttgacacaacc

SEQ ID NO: 1692333 - DNA, 15 bp, Homo sapiens
tttttgacacaaccc

SEQ ID NO: 1692334 - DNA, 15 bp, Homo sapiens
ttttgacacaacccc

SEQ ID NO: 1692335 - DNA, 15 bp, Homo sapiens
tttgacacaacccca

SEQ ID NO: 1692336 - DNA, 15 bp, Homo sapiens
ttgacacaaccccaa

SEQ ID NO: 1692337 - DNA, 15 bp, Homo sapiens
tgacacaaccccaaa

SEQ ID NO: 1692338 - DNA, 15 bp, Homo sapiens
gacacaaccccaaaa

SEQ ID NO: 1692339 - DNA, 15 bp, Homo sapiens
acacaaccccaaaag

SEQ ID NO: 1692340 - DNA, 15 bp, Homo sapiens
cacaaccccaaaagg

SEQ ID NO: 1692341 - DNA, 15 bp, Homo sapiens
acaaccccaaaagga

SEQ ID NO: 1692342 - DNA, 15 bp, Homo sapiens
caaccccaaaaggac

SEQ ID NO: 1692343 - DNA, 15 bp, Homo sapiens
aaccccaaaaggaca

SEQ ID NO: 1692344 - DNA, 15 bp, Homo sapiens
accccaaaaggacag

SEQ ID NO: 1692345 - DNA, 15 bp, Homo sapiens
ccccaaaaggacagg

SEQ ID NO: 1692346 - DNA, 15 bp, Homo sapiens
cccaaaaggacaggt

SEQ ID NO: 1692347 - DNA, 15 bp, Homo sapiens
ccaaaaggacaggta

SEQ ID NO: 1692348 - DNA, 15 bp, Homo sapiens
caaaaggacaggtaa

SEQ ID NO: 1692349 - DNA, 15 bp, Homo sapiens
aaaaggacaggtaac

SEQ ID NO: 1692350 - DNA, 15 bp, Homo sapiens
aaaggacaggtaaca

SEQ ID NO: 1692351 - DNA, 15 bp, Homo sapiens
aaggacaggtaacaa

SEQ ID NO: 1692352 - DNA, 15 bp, Homo sapiens
aggacaggtaacaaa

SEQ ID NO: 1692353 - DNA, 15 bp, Homo sapiens
ggacaggtaacaaaa

SEQ ID NO: 1692354 - DNA, 15 bp, Homo sapiens
gacaggtaacaaaag

SEQ ID NO: 1692355 - DNA, 15 bp, Homo sapiens
acaggtaacaaaagc

SEQ ID NO: 1692356 - DNA, 15 bp, Homo sapiens
caggtaacaaaagca

SEQ ID NO: 1692357 - DNA, 15 bp, Homo sapiens
aggtaacaaaagcaa

SEQ ID NO: 1692358 - DNA, 15 bp, Homo sapiens
ggtaacaaaagcaaa

SEQ ID NO: 1692359 - DNA, 15 bp, Homo sapiens
gtaacaaaagcaaaa

SEQ ID NO: 1692360 - DNA, 15 bp, Homo sapiens
taacaaaagcaaaaa

SEQ ID NO: 1692361 - DNA, 15 bp, Homo sapiens
aacaaaagcaaaaat

SEQ ID NO: 1692362 - DNA, 15 bp, Homo sapiens
acaaaagcaaaaata

SEQ ID NO: 1692363 - DNA, 15 bp, Homo sapiens
caaaagcaaaaatag

SEQ ID NO: 1692364 - DNA, 15 bp, Homo sapiens
aaaagcaaaaataga

SEQ ID NO: 1692365 - DNA, 15 bp, Homo sapiens
aaagcaaaaatagac

SEQ ID NO: 1692366 - DNA, 15 bp, Homo sapiens
aagcaaaaatagaca

SEQ ID NO: 1692367 - DNA, 15 bp, Homo sapiens
agcaaaaatagacag

SEQ ID NO: 1692368 - DNA, 15 bp, Homo sapiens
gcaaaaatagacaga

SEQ ID NO: 1692369 - DNA, 15 bp, Homo sapiens
caaaaatagacagat

SEQ ID NO: 1692370 - DNA, 15 bp, Homo sapiens
aaaaatagacagatg

SEQ ID NO: 1692371 - DNA, 15 bp, Homo sapiens
aaaatagacagatgg

SEQ ID NO: 1692372 - DNA, 15 bp, Homo sapiens
aaatagacagatggg

SEQ ID NO: 1692373 - DNA, 15 bp, Homo sapiens
aatagacagatggga

SEQ ID NO: 1692374 - DNA, 15 bp, Homo sapiens
atagacagatgggat

SEQ ID NO: 1692375 - DNA, 15 bp, Homo sapiens
tagacagatgggatt

SEQ ID NO: 1692376 - DNA, 15 bp, Homo sapiens
agacagatgggatta

SEQ ID NO: 1692377 - DNA, 15 bp, Homo sapiens
gacagatgggattac

SEQ ID NO: 1692378 - DNA, 15 bp, Homo sapiens
acagatgggattaca

SEQ ID NO: 1692379 - DNA, 15 bp, Homo sapiens
cagatgggattacat

SEQ ID NO: 1692380 - DNA, 15 bp, Homo sapiens
agatgggattacatc

SEQ ID NO: 1692381 - DNA, 15 bp, Homo sapiens
gatgggattacatca

SEQ ID NO: 1692382 - DNA, 15 bp, Homo sapiens
atgggattacatcaa

SEQ ID NO: 1692383 - DNA, 15 bp, Homo sapiens
tgggattacatcaaa

SEQ ID NO: 1692384 - DNA, 15 bp, Homo sapiens
gggattacatcaaac

SEQ ID NO: 1692385 - DNA, 15 bp, Homo sapiens
ggattacatcaaact

SEQ ID NO: 1692386 - DNA, 15 bp, Homo sapiens
gattacatcaaacta

SEQ ID NO: 1692387 - DNA, 15 bp, Homo sapiens
attacatcaaactaa

SEQ ID NO: 1692388 - DNA, 15 bp, Homo sapiens
ttacatcaaactaaa

SEQ ID NO: 1692389 - DNA, 15 bp, Homo sapiens
tacatcaaactaaaa

SEQ ID NO: 1692390 - DNA, 15 bp, Homo sapiens
acatcaaactaaaaa

SEQ ID NO: 1692391 - DNA, 15 bp, Homo sapiens
catcaaactaaaaag

SEQ ID NO: 1692392 - DNA, 15 bp, Homo sapiens
atcaaactaaaaagc

SEQ ID NO: 1692393 - DNA, 15 bp, Homo sapiens
tcaaactaaaaagct

SEQ ID NO: 1692394 - DNA, 15 bp, Homo sapiens
caaactaaaaagctt

SEQ ID NO: 1692395 - DNA, 15 bp, Homo sapiens
aaactaaaaagcttc

SEQ ID NO: 1692396 - DNA, 15 bp, Homo sapiens
aactaaaaagcttca

SEQ ID NO: 1692397 - DNA, 15 bp, Homo sapiens
actaaaaagcttcaa

SEQ ID NO: 1692398 - DNA, 15 bp, Homo sapiens
ctaaaaagcttcaaa

SEQ ID NO: 1692399 - DNA, 15 bp, Homo sapiens
taaaaagcttcaaaa

SEQ ID NO: 1692400 - DNA, 15 bp, Homo sapiens
aaaaagcttcaaaaa

SEQ ID NO: 1692401 - DNA, 15 bp, Homo sapiens
aaaagcttcaaaaag

SEQ ID NO: 1692402 - DNA, 15 bp, Homo sapiens
aaagcttcaaaaagg

SEQ ID NO: 1692403 - DNA, 15 bp, Homo sapiens
aagcttcaaaaagga

SEQ ID NO: 1692404 - DNA, 15 bp, Homo sapiens
agcttcaaaaaggaa

SEQ ID NO: 1692405 - DNA, 15 bp, Homo sapiens
gcttcaaaaaggaag

SEQ ID NO: 1692406 - DNA, 15 bp, Homo sapiens
cttcaaaaaggaagc

SEQ ID NO: 1692407 - DNA, 15 bp, Homo sapiens
ttcaaaaaggaagca

SEQ ID NO: 1692408 - DNA, 15 bp, Homo sapiens
tcaaaaaggaagcaa

SEQ ID NO: 1692409 - DNA, 15 bp, Homo sapiens
caaaaaggaagcaat

SEQ ID NO: 1692410 - DNA, 15 bp, Homo sapiens
aaaaaggaagcaatc

SEQ ID NO: 1692411 - DNA, 15 bp, Homo sapiens
aaaaggaagcaatca

SEQ ID NO: 1692412 - DNA, 15 bp, Homo sapiens
aaaggaagcaatcaa

SEQ ID NO: 1692413 - DNA, 15 bp, Homo sapiens
aaggaagcaatcaac

SEQ ID NO: 1692414 - DNA, 15 bp, Homo sapiens
aggaagcaatcaaca

SEQ ID NO: 1692415 - DNA, 15 bp, Homo sapiens
ggaagcaatcaacag

SEQ ID NO: 1692416 - DNA, 15 bp, Homo sapiens
gaagcaatcaacaga

SEQ ID NO: 1692417 - DNA, 15 bp, Homo sapiens
aagcaatcaacagag

SEQ ID NO: 1692418 - DNA, 15 bp, Homo sapiens
agcaatcaacagagt

SEQ ID NO: 1692419 - DNA, 15 bp, Homo sapiens
gcaatcaacagagtg

SEQ ID NO: 1692420 - DNA, 15 bp, Homo sapiens
caatcaacagagtga

SEQ ID NO: 1692421 - DNA, 15 bp, Homo sapiens
aatcaacagagtgaa

SEQ ID NO: 1692422 - DNA, 15 bp, Homo sapiens
atcaacagagtgaag

SEQ ID NO: 1692423 - DNA, 15 bp, Homo sapiens
tcaacagagtgaaga

SEQ ID NO: 1692424 - DNA, 15 bp, Homo sapiens
caacagagtgaagag

SEQ ID NO: 1692425 - DNA, 15 bp, Homo sapiens
aacagagtgaagagg

SEQ ID NO: 1692426 - DNA, 15 bp, Homo sapiens
acagagtgaagaggc

SEQ ID NO: 1692427 - DNA, 15 bp, Homo sapiens
cagagtgaagaggca

SEQ ID NO: 1692428 - DNA, 15 bp, Homo sapiens
agagtgaagaggcaa

SEQ ID NO: 1692429 - DNA, 15 bp, Homo sapiens
gagtgaagaggcaat

SEQ ID NO: 1692430 - DNA, 15 bp, Homo sapiens
agtgaagaggcaatt

SEQ ID NO: 1692431 - DNA, 15 bp, Homo sapiens
gtgaagaggcaattt

SEQ ID NO: 1692432 - DNA, 15 bp, Homo sapiens
tgaagaggcaattta

SEQ ID NO: 1692433 - DNA, 15 bp, Homo sapiens
gaagaggcaatttat

SEQ ID NO: 1692434 - DNA, 15 bp, Homo sapiens
aagaggcaatttata

SEQ ID NO: 1692435 - DNA, 15 bp, Homo sapiens
agaggcaatttatag

SEQ ID NO: 1692436 - DNA, 15 bp, Homo sapiens
gaggcaatttataga

SEQ ID NO: 1692437 - DNA, 15 bp, Homo sapiens
aggcaatttatagaa

SEQ ID NO: 1692438 - DNA, 15 bp, Homo sapiens
ggcaatttatagaat

SEQ ID NO: 1692439 - DNA, 15 bp, Homo sapiens
gcaatttatagaatg

SEQ ID NO: 1692440 - DNA, 15 bp, Homo sapiens
caatttatagaatga

SEQ ID NO: 1692441 - DNA, 15 bp, Homo sapiens
aatttatagaatgag

SEQ ID NO: 1692442 - DNA, 15 bp, Homo sapiens
atttatagaatgaga

SEQ ID NO: 1692443 - DNA, 15 bp, Homo sapiens
tttatagaatgagag

SEQ ID NO: 1692444 - DNA, 15 bp, Homo sapiens
ttatagaatgagaga

SEQ ID NO: 1692445 - DNA, 15 bp, Homo sapiens
tatagaatgagagaa

SEQ ID NO: 1692446 - DNA, 15 bp, Homo sapiens
atagaatgagagaaa

SEQ ID NO: 1692447 - DNA, 15 bp, Homo sapiens
tagaatgagagaaaa

SEQ ID NO: 1692448 - DNA, 15 bp, Homo sapiens
agaatgagagaaaat

SEQ ID NO: 1692449 - DNA, 15 bp, Homo sapiens
gaatgagagaaaata

SEQ ID NO: 1692450 - DNA, 15 bp, Homo sapiens
aatgagagaaaatat

SEQ ID NO: 1692451 - DNA, 15 bp, Homo sapiens
atgagagaaaatatt

SEQ ID NO: 1692452 - DNA, 15 bp, Homo sapiens
tgagagaaaatattt

SEQ ID NO: 1692453 - DNA, 15 bp, Homo sapiens
gagagaaaatatttg

SEQ ID NO: 1692454 - DNA, 15 bp, Homo sapiens
agagaaaatatttgt

SEQ ID NO: 1692455 - DNA, 15 bp, Homo sapiens
gagaaaatatttgta

SEQ ID NO: 1692456 - DNA, 15 bp, Homo sapiens
agaaaatatttgtaa

SEQ ID NO: 1692457 - DNA, 15 bp, Homo sapiens
gaaaatatttgtaac

SEQ ID NO: 1692458 - DNA, 15 bp, Homo sapiens
aaaatatttgtaacc

SEQ ID NO: 1692459 - DNA, 15 bp, Homo sapiens
aaatatttgtaaccc

SEQ ID NO: 1692460 - DNA, 15 bp, Homo sapiens
aatatttgtaaccca

SEQ ID NO: 1692461 - DNA, 15 bp, Homo sapiens
atatttgtaacccat

SEQ ID NO: 1692462 - DNA, 15 bp, Homo sapiens
tatttgtaacccata

SEQ ID NO: 1692463 - DNA, 15 bp, Homo sapiens
atttgtaacccatac

SEQ ID NO: 1692464 - DNA, 15 bp, Homo sapiens
tttgtaacccataca

SEQ ID NO: 1692465 - DNA, 15 bp, Homo sapiens
ttgtaacccatacat

SEQ ID NO: 1692466 - DNA, 15 bp, Homo sapiens
tgtaacccatacatc

SEQ ID NO: 1692467 - DNA, 15 bp, Homo sapiens
gtaacccatacatct

SEQ ID NO: 1692468 - DNA, 15 bp, Homo sapiens
taacccatacatctg

SEQ ID NO: 1692469 - DNA, 15 bp, Homo sapiens
aacccatacatctga

SEQ ID NO: 1692470 - DNA, 15 bp, Homo sapiens
acccatacatctgat

SEQ ID NO: 1692471 - DNA, 15 bp, Homo sapiens
cccatacatctgata

SEQ ID NO: 1692472 - DNA, 15 bp, Homo sapiens
ccatacatctgataa

SEQ ID NO: 1692473 - DNA, 15 bp, Homo sapiens
catacatctgataag

SEQ ID NO: 1692474 - DNA, 15 bp, Homo sapiens
atacatctgataagg

SEQ ID NO: 1692475 - DNA, 15 bp, Homo sapiens
tacatctgataaggg

SEQ ID NO: 1692476 - DNA, 15 bp, Homo sapiens
acatctgataagggg

SEQ ID NO: 1692477 - DNA, 15 bp, Homo sapiens
catctgataaggggt

SEQ ID NO: 1692478 - DNA, 15 bp, Homo sapiens
atctgataaggggtt

SEQ ID NO: 1692479 - DNA, 15 bp, Homo sapiens
tctgataaggggtta

SEQ ID NO: 1692480 - DNA, 15 bp, Homo sapiens
ctgataaggggttaa

SEQ ID NO: 1692481 - DNA, 15 bp, Homo sapiens
tgataaggggttaat

SEQ ID NO: 1692482 - DNA, 15 bp, Homo sapiens
gataaggggttaata

SEQ ID NO: 1692483 - DNA, 15 bp, Homo sapiens
ataaggggttaatat

SEQ ID NO: 1692484 - DNA, 15 bp, Homo sapiens
taaggggttaatatc

SEQ ID NO: 1692485 - DNA, 15 bp, Homo sapiens
aaggggttaatatcc

SEQ ID NO: 1692486 - DNA, 15 bp, Homo sapiens
aggggttaatatcca

SEQ ID NO: 1692487 - DNA, 15 bp, Homo sapiens
ggggttaatatccaa

SEQ ID NO: 1692488 - DNA, 15 bp, Homo sapiens
gggttaatatccaat

SEQ ID NO: 1692489 - DNA, 15 bp, Homo sapiens
ggttaatatccaata

SEQ ID NO: 1692490 - DNA, 15 bp, Homo sapiens
gttaatatccaatac

SEQ ID NO: 1692491 - DNA, 15 bp, Homo sapiens
ttaatatccaataca

SEQ ID NO: 1692492 - DNA, 15 bp, Homo sapiens
taatatccaatacat

SEQ ID NO: 1692493 - DNA, 15 bp, Homo sapiens
aatatccaatacata

SEQ ID NO: 1692494 - DNA, 15 bp, Homo sapiens
atatccaatacatat

SEQ ID NO: 1692495 - DNA, 15 bp, Homo sapiens
tatccaatacatata

SEQ ID NO: 1692496 - DNA, 15 bp, Homo sapiens
atccaatacatataa

SEQ ID NO: 1692497 - DNA, 15 bp, Homo sapiens
tccaatacatataag

SEQ ID NO: 1692498 - DNA, 15 bp, Homo sapiens
ccaatacatataaga

SEQ ID NO: 1692499 - DNA, 15 bp, Homo sapiens
caatacatataagaa

SEQ ID NO: 1692500 - DNA, 15 bp, Homo sapiens
aatacatataagaaa

SEQ ID NO: 1692501 - DNA, 15 bp, Homo sapiens
atacatataagaaac

SEQ ID NO: 1692502 - DNA, 15 bp, Homo sapiens
tacatataagaaaca

SEQ ID NO: 1692503 - DNA, 15 bp, Homo sapiens
acatataagaaacac

SEQ ID NO: 1692504 - DNA, 15 bp, Homo sapiens
catataagaaacaca

SEQ ID NO: 1692505 - DNA, 15 bp, Homo sapiens
atataagaaacacaa

SEQ ID NO: 1692506 - DNA, 15 bp, Homo sapiens
tataagaaacacaaa

SEQ ID NO: 1692507 - DNA, 15 bp, Homo sapiens
ataagaaacacaaac

SEQ ID NO: 1692508 - DNA, 15 bp, Homo sapiens
taagaaacacaaaca

SEQ ID NO: 1692509 - DNA, 15 bp, Homo sapiens
aagaaacacaaacaa

SEQ ID NO: 1692510 - DNA, 15 bp, Homo sapiens
agaaacacaaacaac

SEQ ID NO: 1692511 - DNA, 15 bp, Homo sapiens
gaaacacaaacaact

SEQ ID NO: 1692512 - DNA, 15 bp, Homo sapiens
aaacacaaacaactc

SEQ ID NO: 1692513 - DNA, 15 bp, Homo sapiens
aacacaaacaactca

SEQ ID NO: 1692514 - DNA, 15 bp, Homo sapiens
acacaaacaactcaa

SEQ ID NO: 1692515 - DNA, 15 bp, Homo sapiens
cacaaacaactcaat

SEQ ID NO: 1692516 - DNA, 15 bp, Homo sapiens
acaaacaactcaatg

SEQ ID NO: 1692517 - DNA, 15 bp, Homo sapiens
caaacaactcaatga

SEQ ID NO: 1692518 - DNA, 15 bp, Homo sapiens
aaacaactcaatgac

SEQ ID NO: 1692519 - DNA, 15 bp, Homo sapiens
aacaactcaatgaca

SEQ ID NO: 1692520 - DNA, 15 bp, Homo sapiens
acaactcaatgacaa

SEQ ID NO: 1692521 - DNA, 15 bp, Homo sapiens
caactcaatgacaag

SEQ ID NO: 1692522 - DNA, 15 bp, Homo sapiens
aactcaatgacaaga

SEQ ID NO: 1692523 - DNA, 15 bp, Homo sapiens
actcaatgacaagaa

SEQ ID NO: 1692524 - DNA, 15 bp, Homo sapiens
ctcaatgacaagaaa

SEQ ID NO: 1692525 - DNA, 15 bp, Homo sapiens
tcaatgacaagaaaa

SEQ ID NO: 1692526 - DNA, 15 bp, Homo sapiens
caatgacaagaaaac

SEQ ID NO: 1692527 - DNA, 15 bp, Homo sapiens
aatgacaagaaaaca

SEQ ID NO: 1692528 - DNA, 15 bp, Homo sapiens
atgacaagaaaacaa

SEQ ID NO: 1692529 - DNA, 15 bp, Homo sapiens
tgacaagaaaacaac

SEQ ID NO: 1692530 - DNA, 15 bp, Homo sapiens
gacaagaaaacaacc

SEQ ID NO: 1692531 - DNA, 15 bp, Homo sapiens
acaagaaaacaacct

SEQ ID NO: 1692532 - DNA, 15 bp, Homo sapiens
caagaaaacaacctg

SEQ ID NO: 1692533 - DNA, 15 bp, Homo sapiens
aagaaaacaacctga

SEQ ID NO: 1692534 - DNA, 15 bp, Homo sapiens
agaaaacaacctgat

SEQ ID NO: 1692535 - DNA, 15 bp, Homo sapiens
gaaaacaacctgatt

SEQ ID NO: 1692536 - DNA, 15 bp, Homo sapiens
aaaacaacctgatta

SEQ ID NO: 1692537 - DNA, 15 bp, Homo sapiens
aaacaacctgattaa

SEQ ID NO: 1692538 - DNA, 15 bp, Homo sapiens
aacaacctgattaaa

SEQ ID NO: 1692539 - DNA, 15 bp, Homo sapiens
acaacctgattaaaa

SEQ ID NO: 1692540 - DNA, 15 bp, Homo sapiens
caacctgattaaaaa

SEQ ID NO: 1692541 - DNA, 15 bp, Homo sapiens
aacctgattaaaaag

SEQ ID NO: 1692542 - DNA, 15 bp, Homo sapiens
acctgattaaaaagt

SEQ ID NO: 1692543 - DNA, 15 bp, Homo sapiens
cctgattaaaaagtg

SEQ ID NO: 1692544 - DNA, 15 bp, Homo sapiens
ctgattaaaaagtgg

SEQ ID NO: 1692545 - DNA, 15 bp, Homo sapiens
tgattaaaaagtggt

SEQ ID NO: 1692546 - DNA, 15 bp, Homo sapiens
gattaaaaagtggtc

SEQ ID NO: 1692547 - DNA, 15 bp, Homo sapiens
attaaaaagtggtca

SEQ ID NO: 1692548 - DNA, 15 bp, Homo sapiens
ttaaaaagtggtcaa

SEQ ID NO: 1692549 - DNA, 15 bp, Homo sapiens
taaaaagtggtcaaa

SEQ ID NO: 1692550 - DNA, 15 bp, Homo sapiens
aaaaagtggtcaaaa

SEQ ID NO: 1692551 - DNA, 15 bp, Homo sapiens
aaaagtggtcaaaag

SEQ ID NO: 1692552 - DNA, 15 bp, Homo sapiens
aaagtggtcaaaaga

SEQ ID NO: 1692553 - DNA, 15 bp, Homo sapiens
aagtggtcaaaagac

SEQ ID NO: 1692554 - DNA, 15 bp, Homo sapiens
agtggtcaaaagacc

SEQ ID NO: 1692555 - DNA, 15 bp, Homo sapiens
tggtcaaaagacctg

SEQ ID NO: 1692556 - DNA, 15 bp, Homo sapiens
ggtcaaaagacctga

SEQ ID NO: 1692557 - DNA, 15 bp, Homo sapiens
gtcaaaagacctgaa

SEQ ID NO: 1692558 - DNA, 15 bp, Homo sapiens
tcaaaagacctgaat

SEQ ID NO: 1692559 - DNA, 15 bp, Homo sapiens
caaaagacctgaata

SEQ ID NO: 1692560 - DNA, 15 bp, Homo sapiens
aaaagacctgaatag

SEQ ID NO: 1692561 - DNA, 15 bp, Homo sapiens
aaagacctgaataga

SEQ ID NO: 1692562 - DNA, 15 bp, Homo sapiens
aagacctgaatagac

SEQ ID NO: 1692563 - DNA, 15 bp, Homo sapiens
agacctgaatagaca

SEQ ID NO: 1692564 - DNA, 15 bp, Homo sapiens
gacctgaatagacat

SEQ ID NO: 1692565 - DNA, 15 bp, Homo sapiens
acctgaatagacatt

SEQ ID NO: 1692566 - DNA, 15 bp, Homo sapiens
cctgaatagacattt

SEQ ID NO: 1692567 - DNA, 15 bp, Homo sapiens
ctgaatagacatttc

SEQ ID NO: 1692568 - DNA, 15 bp, Homo sapiens
atagacatttctcag

SEQ ID NO: 1692569 - DNA, 15 bp, Homo sapiens
tagacatttctcaga

SEQ ID NO: 1692570 - DNA, 15 bp, Homo sapiens
agacatttctcagaa

SEQ ID NO: 1692571 - DNA, 15 bp, Homo sapiens
gacatttctcagaag

SEQ ID NO: 1692572 - DNA, 15 bp, Homo sapiens
acatttctcagaaga

SEQ ID NO: 1692573 - DNA, 15 bp, Homo sapiens
catttctcagaagaa

SEQ ID NO: 1692574 - DNA, 15 bp, Homo sapiens
atttctcagaagaaa

SEQ ID NO: 1692575 - DNA, 15 bp, Homo sapiens
tttctcagaagaaaa

SEQ ID NO: 1692576 - DNA, 15 bp, Homo sapiens
ttctcagaagaaaac

SEQ ID NO: 1692577 - DNA, 15 bp, Homo sapiens
tctcagaagaaaaca

SEQ ID NO: 1692578 - DNA, 15 bp, Homo sapiens
ctcagaagaaaacat

SEQ ID NO: 1692579 - DNA, 15 bp, Homo sapiens
tcagaagaaaacata

SEQ ID NO: 1692580 - DNA, 15 bp, Homo sapiens
cagaagaaaacatac

SEQ ID NO: 1692581 - DNA, 15 bp, Homo sapiens
agaagaaaacataca

SEQ ID NO: 1692582 - DNA, 15 bp, Homo sapiens
gaagaaaacatacaa

SEQ ID NO: 1692583 - DNA, 15 bp, Homo sapiens
aagaaaacatacaaa

SEQ ID NO: 1692584 - DNA, 15 bp, Homo sapiens
agaaaacatacaaat

SEQ ID NO: 1692585 - DNA, 15 bp, Homo sapiens
gaaaacatacaaata

SEQ ID NO: 1692586 - DNA, 15 bp, Homo sapiens
aaaacatacaaatag

SEQ ID NO: 1692587 - DNA, 15 bp, Homo sapiens
aaacatacaaataga

SEQ ID NO: 1692588 - DNA, 15 bp, Homo sapiens
aacatacaaatagaa

SEQ ID NO: 1692589 - DNA, 15 bp, Homo sapiens
acatacaaatagaaa

SEQ ID NO: 1692590 - DNA, 15 bp, Homo sapiens
catacaaatagaaac

SEQ ID NO: 1692591 - DNA, 15 bp, Homo sapiens
atacaaatagaaacg

SEQ ID NO: 1692592 - DNA, 15 bp, Homo sapiens
tacaaatagaaacgt

SEQ ID NO: 1692593 - DNA, 15 bp, Homo sapiens
acaaatagaaacgta

SEQ ID NO: 1692594 - DNA, 15 bp, Homo sapiens
caaatagaaacgtac

SEQ ID NO: 1692595 - DNA, 15 bp, Homo sapiens
aaatagaaacgtaca

SEQ ID NO: 1692596 - DNA, 15 bp, Homo sapiens
aatagaaacgtacaa

SEQ ID NO: 1692597 - DNA, 15 bp, Homo sapiens
atagaaacgtacaaa

SEQ ID NO: 1692598 - DNA, 15 bp, Homo sapiens
tagaaacgtacaaaa

SEQ ID NO: 1692599 - DNA, 15 bp, Homo sapiens
agaaacgtacaaaaa

SEQ ID NO: 1692600 - DNA, 15 bp, Homo sapiens
gaaacgtacaaaaag

SEQ ID NO: 1692601 - DNA, 15 bp, Homo sapiens
aaacgtacaaaaaga

SEQ ID NO: 1692602 - DNA, 15 bp, Homo sapiens
aacgtacaaaaagaa

SEQ ID NO: 1692603 - DNA, 15 bp, Homo sapiens
acgtacaaaaagaaa

SEQ ID NO: 1692604 - DNA, 15 bp, Homo sapiens
cgtacaaaaagaaac

SEQ ID NO: 1692605 - DNA, 15 bp, Homo sapiens
gtacaaaaagaaaca

SEQ ID NO: 1692606 - DNA, 15 bp, Homo sapiens
tacaaaaagaaacat

SEQ ID NO: 1692607 - DNA, 15 bp, Homo sapiens
acaaaaagaaacata

SEQ ID NO: 1692608 - DNA, 15 bp, Homo sapiens
caaaaagaaacatac

SEQ ID NO: 1692609 - DNA, 15 bp, Homo sapiens
aaaaagaaacataca

SEQ ID NO: 1692610 - DNA, 15 bp, Homo sapiens
aaaagaaacatacaa

SEQ ID NO: 1692611 - DNA, 15 bp, Homo sapiens
aaagaaacatacaac

SEQ ID NO: 1692612 - DNA, 15 bp, Homo sapiens
aagaaacatacaaca

SEQ ID NO: 1692613 - DNA, 15 bp, Homo sapiens
agaaacatacaacag

SEQ ID NO: 1692614 - DNA, 15 bp, Homo sapiens
gaaacatacaacagg

SEQ ID NO: 1692615 - DNA, 15 bp, Homo sapiens
aaacatacaacaggc

SEQ ID NO: 1692616 - DNA, 15 bp, Homo sapiens
aacatacaacaggca

SEQ ID NO: 1692617 - DNA, 15 bp, Homo sapiens
acatacaacaggcat

SEQ ID NO: 1692618 - DNA, 15 bp, Homo sapiens
catacaacaggcatg

SEQ ID NO: 1692619 - DNA, 15 bp, Homo sapiens
atacaacaggcatgt

SEQ ID NO: 1692620 - DNA, 15 bp, Homo sapiens
tacaacaggcatgtg

SEQ ID NO: 1692621 - DNA, 15 bp, Homo sapiens
acaacaggcatgtga

SEQ ID NO: 1692622 - DNA, 15 bp, Homo sapiens
caacaggcatgtgaa

SEQ ID NO: 1692623 - DNA, 15 bp, Homo sapiens
aacaggcatgtgaaa

SEQ ID NO: 1692624 - DNA, 15 bp, Homo sapiens
acaggcatgtgaaaa

SEQ ID NO: 1692625 - DNA, 15 bp, Homo sapiens
caggcatgtgaaaag

SEQ ID NO: 1692626 - DNA, 15 bp, Homo sapiens
aggcatgtgaaaaga

SEQ ID NO: 1692627 - DNA, 15 bp, Homo sapiens
ggcatgtgaaaagat

SEQ ID NO: 1692628 - DNA, 15 bp, Homo sapiens
gcatgtgaaaagatg

SEQ ID NO: 1692629 - DNA, 15 bp, Homo sapiens
catgtgaaaagatgt

SEQ ID NO: 1692630 - DNA, 15 bp, Homo sapiens
atgtgaaaagatgtc

SEQ ID NO: 1692631 - DNA, 15 bp, Homo sapiens
tgtgaaaagatgtca

SEQ ID NO: 1692632 - DNA, 15 bp, Homo sapiens
gtgaaaagatgtcac

SEQ ID NO: 1692633 - DNA, 15 bp, Homo sapiens
tgaaaagatgtcaca

SEQ ID NO: 1692634 - DNA, 15 bp, Homo sapiens
gaaaagatgtcacac

SEQ ID NO: 1692635 - DNA, 15 bp, Homo sapiens
aaaagatgtcacaca

SEQ ID NO: 1692636 - DNA, 15 bp, Homo sapiens
aaagatgtcacacat

SEQ ID NO: 1692637 - DNA, 15 bp, Homo sapiens
aagatgtcacacatc

SEQ ID NO: 1692638 - DNA, 15 bp, Homo sapiens
agatgtcacacatca

SEQ ID NO: 1692639 - DNA, 15 bp, Homo sapiens
gatgtcacacatcac

SEQ ID NO: 1692640 - DNA, 15 bp, Homo sapiens
atgtcacacatcact

SEQ ID NO: 1692641 - DNA, 15 bp, Homo sapiens
tgtcacacatcacta

SEQ ID NO: 1692642 - DNA, 15 bp, Homo sapiens
gtcacacatcactaa

SEQ ID NO: 1692643 - DNA, 15 bp, Homo sapiens
tcacacatcactaat

SEQ ID NO: 1692644 - DNA, 15 bp, Homo sapiens
cacacatcactaatc

SEQ ID NO: 1692645 - DNA, 15 bp, Homo sapiens
acacatcactaatca

SEQ ID NO: 1692646 - DNA, 15 bp, Homo sapiens
cacatcactaatcat

SEQ ID NO: 1692647 - DNA, 15 bp, Homo sapiens
atcactaatcatcaa

SEQ ID NO: 1692648 - DNA, 15 bp, Homo sapiens
tcactaatcatcaag

SEQ ID NO: 1692649 - DNA, 15 bp, Homo sapiens
cactaatcatcaagg

SEQ ID NO: 1692650 - DNA, 15 bp, Homo sapiens
actaatcatcaagga

SEQ ID NO: 1692651 - DNA, 15 bp, Homo sapiens
ctaatcatcaaggaa

SEQ ID NO: 1692652 - DNA, 15 bp, Homo sapiens
taatcatcaaggaaa

SEQ ID NO: 1692653 - DNA, 15 bp, Homo sapiens
aatcatcaaggaaac

SEQ ID NO: 1692654 - DNA, 15 bp, Homo sapiens
atcatcaaggaaaca

SEQ ID NO: 1692655 - DNA, 15 bp, Homo sapiens
tcatcaaggaaacac

SEQ ID NO: 1692656 - DNA, 15 bp, Homo sapiens
catcaaggaaacaca

SEQ ID NO: 1692657 - DNA, 15 bp, Homo sapiens
atcaaggaaacacaa

SEQ ID NO: 1692658 - DNA, 15 bp, Homo sapiens
tcaaggaaacacaag

SEQ ID NO: 1692659 - DNA, 15 bp, Homo sapiens
caaggaaacacaagt

SEQ ID NO: 1692660 - DNA, 15 bp, Homo sapiens
aaggaaacacaagtc

SEQ ID NO: 1692661 - DNA, 15 bp, Homo sapiens
aggaaacacaagtca

SEQ ID NO: 1692662 - DNA, 15 bp, Homo sapiens
ggaaacacaagtcaa

SEQ ID NO: 1692663 - DNA, 15 bp, Homo sapiens
gaaacacaagtcaaa

SEQ ID NO: 1692664 - DNA, 15 bp, Homo sapiens
aaacacaagtcaaaa

SEQ ID NO: 1692665 - DNA, 15 bp, Homo sapiens
aacacaagtcaaaac

SEQ ID NO: 1692666 - DNA, 15 bp, Homo sapiens
acacaagtcaaaacc

SEQ ID NO: 1692667 - DNA, 15 bp, Homo sapiens
cacaagtcaaaacca

SEQ ID NO: 1692668 - DNA, 15 bp, Homo sapiens
acaagtcaaaaccac

SEQ ID NO: 1692669 - DNA, 15 bp, Homo sapiens
caagtcaaaaccaca

SEQ ID NO: 1692670 - DNA, 15 bp, Homo sapiens
aagtcaaaaccacaa

SEQ ID NO: 1692671 - DNA, 15 bp, Homo sapiens
agtcaaaaccacaat

SEQ ID NO: 1692672 - DNA, 15 bp, Homo sapiens
gtcaaaaccacaatg

SEQ ID NO: 1692673 - DNA, 15 bp, Homo sapiens
accacaatgagatat

SEQ ID NO: 1692674 - DNA, 15 bp, Homo sapiens
ccacaatgagatatc

SEQ ID NO: 1692675 - DNA, 15 bp, Homo sapiens
cacaatgagatatca

SEQ ID NO: 1692676 - DNA, 15 bp, Homo sapiens
acaatgagatatcat

SEQ ID NO: 1692677 - DNA, 15 bp, Homo sapiens
caatgagatatcatc

SEQ ID NO: 1692678 - DNA, 15 bp, Homo sapiens
aatgagatatcatct

SEQ ID NO: 1692679 - DNA, 15 bp, Homo sapiens
atgagatatcatctt

SEQ ID NO: 1692680 - DNA, 15 bp, Homo sapiens
tgagatatcatctta

SEQ ID NO: 1692681 - DNA, 15 bp, Homo sapiens
gagatatcatcttat

SEQ ID NO: 1692682 - DNA, 15 bp, Homo sapiens
agatatcatcttata

SEQ ID NO: 1692683 - DNA, 15 bp, Homo sapiens
gatatcatcttatac

SEQ ID NO: 1692684 - DNA, 15 bp, Homo sapiens
atatcatcttatacc

SEQ ID NO: 1692685 - DNA, 15 bp, Homo sapiens
tatcatcttatacct

SEQ ID NO: 1692686 - DNA, 15 bp, Homo sapiens
atcatcttatacctg

SEQ ID NO: 1692687 - DNA, 15 bp, Homo sapiens
tcatcttatacctgt

SEQ ID NO: 1692688 - DNA, 15 bp, Homo sapiens
catcttatacctgta

SEQ ID NO: 1692689 - DNA, 15 bp, Homo sapiens
atcttatacctgtaa

SEQ ID NO: 1692690 - DNA, 15 bp, Homo sapiens
tcttatacctgtaag

SEQ ID NO: 1692691 - DNA, 15 bp, Homo sapiens
cttatacctgtaaga

SEQ ID NO: 1692692 - DNA, 15 bp, Homo sapiens
ttatacctgtaagaa

SEQ ID NO: 1692693 - DNA, 15 bp, Homo sapiens
tatacctgtaagaat

SEQ ID NO: 1692694 - DNA, 15 bp, Homo sapiens
atacctgtaagaatg

SEQ ID NO: 1692695 - DNA, 15 bp, Homo sapiens
tacctgtaagaatgg

SEQ ID NO: 1692696 - DNA, 15 bp, Homo sapiens
acctgtaagaatggc

SEQ ID NO: 1692697 - DNA, 15 bp, Homo sapiens
cctgtaagaatggcc

SEQ ID NO: 1692698 - DNA, 15 bp, Homo sapiens
ctgtaagaatggcca

SEQ ID NO: 1692699 - DNA, 15 bp, Homo sapiens
tgtaagaatggccat

SEQ ID NO: 1692700 - DNA, 15 bp, Homo sapiens
gtaagaatggccatt

SEQ ID NO: 1692701 - DNA, 15 bp, Homo sapiens
taagaatggccatta

SEQ ID NO: 1692702 - DNA, 15 bp, Homo sapiens
aagaatggccattat

SEQ ID NO: 1692703 - DNA, 15 bp, Homo sapiens
agaatggccattata

SEQ ID NO: 1692704 - DNA, 15 bp, Homo sapiens
gaatggccattataa

SEQ ID NO: 1692705 - DNA, 15 bp, Homo sapiens
aatggccattataaa

SEQ ID NO: 1692706 - DNA, 15 bp, Homo sapiens
atggccattataaaa

SEQ ID NO: 1692707 - DNA, 15 bp, Homo sapiens
tggccattataaaaa

SEQ ID NO: 1692708 - DNA, 15 bp, Homo sapiens
ggccattataaaaag

SEQ ID NO: 1692709 - DNA, 15 bp, Homo sapiens
gccattataaaaaga

SEQ ID NO: 1692710 - DNA, 15 bp, Homo sapiens
ccattataaaaagaa

SEQ ID NO: 1692711 - DNA, 15 bp, Homo sapiens
cattataaaaagaag

SEQ ID NO: 1692712 - DNA, 15 bp, Homo sapiens
attataaaaagaaga

SEQ ID NO: 1692713 - DNA, 15 bp, Homo sapiens
ttataaaaagaagaa

SEQ ID NO: 1692714 - DNA, 15 bp, Homo sapiens
tataaaaagaagaaa

SEQ ID NO: 1692715 - DNA, 15 bp, Homo sapiens
ataaaaagaagaaag

SEQ ID NO: 1692716 - DNA, 15 bp, Homo sapiens
taaaaagaagaaaga

SEQ ID NO: 1692717 - DNA, 15 bp, Homo sapiens
aaaaagaagaaagat

SEQ ID NO: 1692718 - DNA, 15 bp, Homo sapiens
aaaagaagaaagata

SEQ ID NO: 1692719 - DNA, 15 bp, Homo sapiens
aaagaagaaagatat

SEQ ID NO: 1692720 - DNA, 15 bp, Homo sapiens
aagaagaaagatatc

SEQ ID NO: 1692721 - DNA, 15 bp, Homo sapiens
agaagaaagatatca

SEQ ID NO: 1692722 - DNA, 15 bp, Homo sapiens
gaagaaagatatcaa

SEQ ID NO: 1692723 - DNA, 15 bp, Homo sapiens
aagaaagatatcaag

SEQ ID NO: 1692724 - DNA, 15 bp, Homo sapiens
agaaagatatcaagt

SEQ ID NO: 1692725 - DNA, 15 bp, Homo sapiens
gaaagatatcaagtg

SEQ ID NO: 1692726 - DNA, 15 bp, Homo sapiens
aaagatatcaagtgt

SEQ ID NO: 1692727 - DNA, 15 bp, Homo sapiens
aagatatcaagtgtt

SEQ ID NO: 1692728 - DNA, 15 bp, Homo sapiens
agatatcaagtgttg

SEQ ID NO: 1692729 - DNA, 15 bp, Homo sapiens
gatatcaagtgttgg

SEQ ID NO: 1692730 - DNA, 15 bp, Homo sapiens
atatcaagtgttggc

SEQ ID NO: 1692731 - DNA, 15 bp, Homo sapiens
tatcaagtgttggca

SEQ ID NO: 1692732 - DNA, 15 bp, Homo sapiens
atcaagtgttggcaa

SEQ ID NO: 1692733 - DNA, 15 bp, Homo sapiens
tcaagtgttggcaag

SEQ ID NO: 1692734 - DNA, 15 bp, Homo sapiens
caagtgttggcaagc

SEQ ID NO: 1692735 - DNA, 15 bp, Homo sapiens
aagtgttggcaagca

SEQ ID NO: 1692736 - DNA, 15 bp, Homo sapiens
agtgttggcaagcat

SEQ ID NO: 1692737 - DNA, 15 bp, Homo sapiens
gtgttggcaagcata

SEQ ID NO: 1692738 - DNA, 15 bp, Homo sapiens
tgttggcaagcatat

SEQ ID NO: 1692739 - DNA, 15 bp, Homo sapiens
gttggcaagcatatg

SEQ ID NO: 1692740 - DNA, 15 bp, Homo sapiens
ttggcaagcatatgg

SEQ ID NO: 1692741 - DNA, 15 bp, Homo sapiens
tggcaagcatatggg

SEQ ID NO: 1692742 - DNA, 15 bp, Homo sapiens
ggcaagcatatgggg

SEQ ID NO: 1692743 - DNA, 15 bp, Homo sapiens
gcaagcatatgggga

SEQ ID NO: 1692744 - DNA, 15 bp, Homo sapiens
caagcatatggggaa

SEQ ID NO: 1692745 - DNA, 15 bp, Homo sapiens
aagcatatggggaaa

SEQ ID NO: 1692746 - DNA, 15 bp, Homo sapiens
agcatatggggaaaa

SEQ ID NO: 1692747 - DNA, 15 bp, Homo sapiens
gcatatggggaaaat

SEQ ID NO: 1692748 - DNA, 15 bp, Homo sapiens
catatggggaaaatg

SEQ ID NO: 1692749 - DNA, 15 bp, Homo sapiens
atatggggaaaatga

SEQ ID NO: 1692750 - DNA, 15 bp, Homo sapiens
tatggggaaaatgaa

SEQ ID NO: 1692751 - DNA, 15 bp, Homo sapiens
atggggaaaatgaaa

SEQ ID NO: 1692752 - DNA, 15 bp, Homo sapiens
tggggaaaatgaaac

SEQ ID NO: 1692753 - DNA, 15 bp, Homo sapiens
ggggaaaatgaaaca

SEQ ID NO: 1692754 - DNA, 15 bp, Homo sapiens
gggaaaatgaaacac

SEQ ID NO: 1692755 - DNA, 15 bp, Homo sapiens
ggaaaatgaaacact

SEQ ID NO: 1692756 - DNA, 15 bp, Homo sapiens
gaaaatgaaacactg

SEQ ID NO: 1692757 - DNA, 15 bp, Homo sapiens
aaaatgaaacactgt

SEQ ID NO: 1692758 - DNA, 15 bp, Homo sapiens
aaatgaaacactgtt

SEQ ID NO: 1692759 - DNA, 15 bp, Homo sapiens
aatgaaacactgtta

SEQ ID NO: 1692760 - DNA, 15 bp, Homo sapiens
atgaaacactgttac

SEQ ID NO: 1692761 - DNA, 15 bp, Homo sapiens
tgaaacactgttaca

SEQ ID NO: 1692762 - DNA, 15 bp, Homo sapiens
gaaacactgttacac

SEQ ID NO: 1692763 - DNA, 15 bp, Homo sapiens
aaacactgttacacg

SEQ ID NO: 1692764 - DNA, 15 bp, Homo sapiens
aacactgttacacgg

SEQ ID NO: 1692765 - DNA, 15 bp, Homo sapiens
acactgttacacgga

SEQ ID NO: 1692766 - DNA, 15 bp, Homo sapiens
cactgttacacggat

SEQ ID NO: 1692767 - DNA, 15 bp, Homo sapiens
actgttacacggatc

SEQ ID NO: 1692768 - DNA, 15 bp, Homo sapiens
ctgttacacggatcg

SEQ ID NO: 1692769 - DNA, 15 bp, Homo sapiens
tgttacacggatcgc

SEQ ID NO: 1692770 - DNA, 15 bp, Homo sapiens
gttacacggatcgct

SEQ ID NO: 1692771 - DNA, 15 bp, Homo sapiens
ttacacggatcgctt

SEQ ID NO: 1692772 - DNA, 15 bp, Homo sapiens
tacacggatcgcttt

SEQ ID NO: 1692773 - DNA, 15 bp, Homo sapiens
acacggatcgctttt

SEQ ID NO: 1692774 - DNA, 15 bp, Homo sapiens
cacggatcgcttttg

SEQ ID NO: 1692775 - DNA, 15 bp, Homo sapiens
acggatcgcttttgg

SEQ ID NO: 1692776 - DNA, 15 bp, Homo sapiens
cggatcgcttttggt

SEQ ID NO: 1692777 - DNA, 15 bp, Homo sapiens
ggatcgcttttggtg

SEQ ID NO: 1692778 - DNA, 15 bp, Homo sapiens
gatcgcttttggtgg

SEQ ID NO: 1692779 - DNA, 15 bp, Homo sapiens
atcgcttttggtggg

SEQ ID NO: 1692780 - DNA, 15 bp, Homo sapiens
tcgcttttggtggga

SEQ ID NO: 1692781 - DNA, 15 bp, Homo sapiens
cgcttttggtgggaa

SEQ ID NO: 1692782 - DNA, 15 bp, Homo sapiens
gcttttggtgggaaa

SEQ ID NO: 1692783 - DNA, 15 bp, Homo sapiens
ggtgggaaagtaaat

SEQ ID NO: 1692784 - DNA, 15 bp, Homo sapiens
gtgggaaagtaaatc

SEQ ID NO: 1692785 - DNA, 15 bp, Homo sapiens
tgggaaagtaaatca

SEQ ID NO: 1692786 - DNA, 15 bp, Homo sapiens
gggaaagtaaatcag

SEQ ID NO: 1692787 - DNA, 15 bp, Homo sapiens
ggaaagtaaatcagt

SEQ ID NO: 1692788 - DNA, 15 bp, Homo sapiens
gaaagtaaatcagta

SEQ ID NO: 1692789 - DNA, 15 bp, Homo sapiens
aaagtaaatcagtac

SEQ ID NO: 1692790 - DNA, 15 bp, Homo sapiens
aagtaaatcagtaca

SEQ ID NO: 1692791 - DNA, 15 bp, Homo sapiens
agtaaatcagtacag

SEQ ID NO: 1692792 - DNA, 15 bp, Homo sapiens
gtaaatcagtacagc

SEQ ID NO: 1692793 - DNA, 15 bp, Homo sapiens
taaatcagtacagcc

SEQ ID NO: 1692794 - DNA, 15 bp, Homo sapiens
aaatcagtacagcca

SEQ ID NO: 1692795 - DNA, 15 bp, Homo sapiens
aatcagtacagccaa

SEQ ID NO: 1692796 - DNA, 15 bp, Homo sapiens
atcagtacagccaaa

SEQ ID NO: 1692797 - DNA, 15 bp, Homo sapiens
tcagtacagccaaag

SEQ ID NO: 1692798 - DNA, 15 bp, Homo sapiens
cagtacagccaaaga

SEQ ID NO: 1692799 - DNA, 15 bp, Homo sapiens
agtacagccaaagag

SEQ ID NO: 1692800 - DNA, 15 bp, Homo sapiens
gtacagccaaagagt

SEQ ID NO: 1692801 - DNA, 15 bp, Homo sapiens
tacagccaaagagta

SEQ ID NO: 1692802 - DNA, 15 bp, Homo sapiens
acagccaaagagtat

SEQ ID NO: 1692803 - DNA, 15 bp, Homo sapiens
cagccaaagagtatg

SEQ ID NO: 1692804 - DNA, 15 bp, Homo sapiens
agccaaagagtatgg

SEQ ID NO: 1692805 - DNA, 15 bp, Homo sapiens
gccaaagagtatgga

SEQ ID NO: 1692806 - DNA, 15 bp, Homo sapiens
ccaaagagtatggag

SEQ ID NO: 1692807 - DNA, 15 bp, Homo sapiens
caaagagtatggaga

SEQ ID NO: 1692808 - DNA, 15 bp, Homo sapiens
aaagagtatggagat

SEQ ID NO: 1692809 - DNA, 15 bp, Homo sapiens
aagagtatggagatt

SEQ ID NO: 1692810 - DNA, 15 bp, Homo sapiens
agagtatggagattc

SEQ ID NO: 1692811 - DNA, 15 bp, Homo sapiens
gagtatggagattca

SEQ ID NO: 1692812 - DNA, 15 bp, Homo sapiens
agtatggagattcat

SEQ ID NO: 1692813 - DNA, 15 bp, Homo sapiens
gtatggagattcatc

SEQ ID NO: 1692814 - DNA, 15 bp, Homo sapiens
tatggagattcatca

SEQ ID NO: 1692815 - DNA, 15 bp, Homo sapiens
atggagattcatcaa

SEQ ID NO: 1692816 - DNA, 15 bp, Homo sapiens
tggagattcatcaaa

SEQ ID NO: 1692817 - DNA, 15 bp, Homo sapiens
ggagattcatcaaaa

SEQ ID NO: 1692818 - DNA, 15 bp, Homo sapiens
gagattcatcaaaaa

SEQ ID NO: 1692819 - DNA, 15 bp, Homo sapiens
agattcatcaaaaaa

SEQ ID NO: 1692820 - DNA, 15 bp, Homo sapiens
gattcatcaaaaaat

SEQ ID NO: 1692821 - DNA, 15 bp, Homo sapiens
attcatcaaaaaatg

SEQ ID NO: 1692822 - DNA, 15 bp, Homo sapiens
ttcatcaaaaaatgg

SEQ ID NO: 1692823 - DNA, 15 bp, Homo sapiens
tcatcaaaaaatgga

SEQ ID NO: 1692824 - DNA, 15 bp, Homo sapiens
catcaaaaaatggaa

SEQ ID NO: 1692825 - DNA, 15 bp, Homo sapiens
atcaaaaaatggaaa

SEQ ID NO: 1692826 - DNA, 15 bp, Homo sapiens
tcaaaaaatggaaaa

SEQ ID NO: 1692827 - DNA, 15 bp, Homo sapiens
caaaaaatggaaaac

SEQ ID NO: 1692828 - DNA, 15 bp, Homo sapiens
aaaaaatggaaaaca

SEQ ID NO: 1692829 - DNA, 15 bp, Homo sapiens
aaaaatggaaaacag

SEQ ID NO: 1692830 - DNA, 15 bp, Homo sapiens
aaaatggaaaacaga

SEQ ID NO: 1692831 - DNA, 15 bp, Homo sapiens
aaatggaaaacagaa

SEQ ID NO: 1692832 - DNA, 15 bp, Homo sapiens
aatggaaaacagaac

SEQ ID NO: 1692833 - DNA, 15 bp, Homo sapiens
atggaaaacagaact

SEQ ID NO: 1692834 - DNA, 15 bp, Homo sapiens
tggaaaacagaacta

SEQ ID NO: 1692835 - DNA, 15 bp, Homo sapiens
ggaaaacagaactac

SEQ ID NO: 1692836 - DNA, 15 bp, Homo sapiens
gaaaacagaactacc

SEQ ID NO: 1692837 - DNA, 15 bp, Homo sapiens
aaaacagaactacca

SEQ ID NO: 1692838 - DNA, 15 bp, Homo sapiens
aaacagaactaccat

SEQ ID NO: 1692839 - DNA, 15 bp, Homo sapiens
aacagaactaccata

SEQ ID NO: 1692840 - DNA, 15 bp, Homo sapiens
acagaactaccatat

SEQ ID NO: 1692841 - DNA, 15 bp, Homo sapiens
cagaactaccatatg

SEQ ID NO: 1692842 - DNA, 15 bp, Homo sapiens
catatgatccagcat

SEQ ID NO: 1692843 - DNA, 15 bp, Homo sapiens
atatgatccagcatc

SEQ ID NO: 1692844 - DNA, 15 bp, Homo sapiens
tatgatccagcatcc

SEQ ID NO: 1692845 - DNA, 15 bp, Homo sapiens
atgatccagcatccc

SEQ ID NO: 1692846 - DNA, 15 bp, Homo sapiens
tgatccagcatcccc

SEQ ID NO: 1692847 - DNA, 15 bp, Homo sapiens
gatccagcatcccca

SEQ ID NO: 1692848 - DNA, 15 bp, Homo sapiens
atccagcatccccac

SEQ ID NO: 1692849 - DNA, 15 bp, Homo sapiens
tccagcatccccact

SEQ ID NO: 1692850 - DNA, 15 bp, Homo sapiens
ccagcatccccacta

SEQ ID NO: 1692851 - DNA, 15 bp, Homo sapiens
cagcatccccactac

SEQ ID NO: 1692852 - DNA, 15 bp, Homo sapiens
agcatccccactact

SEQ ID NO: 1692853 - DNA, 15 bp, Homo sapiens
gcatccccactactg

SEQ ID NO: 1692854 - DNA, 15 bp, Homo sapiens
catccccactactgg

SEQ ID NO: 1692855 - DNA, 15 bp, Homo sapiens
atccccactactggg

SEQ ID NO: 1692856 - DNA, 15 bp, Homo sapiens
tccccactactgggt

SEQ ID NO: 1692857 - DNA, 15 bp, Homo sapiens
ccccactactgggta

SEQ ID NO: 1692858 - DNA, 15 bp, Homo sapiens
cccactactgggtat

SEQ ID NO: 1692859 - DNA, 15 bp, Homo sapiens
ccactactgggtata

SEQ ID NO: 1692860 - DNA, 15 bp, Homo sapiens
cactactgggtatat

SEQ ID NO: 1692861 - DNA, 15 bp, Homo sapiens
actactgggtatata

SEQ ID NO: 1692862 - DNA, 15 bp, Homo sapiens
ctactgggtatatat

SEQ ID NO: 1692863 - DNA, 15 bp, Homo sapiens
tactgggtatatatc

SEQ ID NO: 1692864 - DNA, 15 bp, Homo sapiens
actgggtatatatcc

SEQ ID NO: 1692865 - DNA, 15 bp, Homo sapiens
ctgggtatatatcca

SEQ ID NO: 1692866 - DNA, 15 bp, Homo sapiens
tgggtatatatccaa

SEQ ID NO: 1692867 - DNA, 15 bp, Homo sapiens
gggtatatatccaaa

SEQ ID NO: 1692868 - DNA, 15 bp, Homo sapiens
ggtatatatccaaag

SEQ ID NO: 1692869 - DNA, 15 bp, Homo sapiens
gtatatatccaaagg

SEQ ID NO: 1692870 - DNA, 15 bp, Homo sapiens
aggaaatgaaatcac

SEQ ID NO: 1692871 - DNA, 15 bp, Homo sapiens
ggaaatgaaatcact

SEQ ID NO: 1692872 - DNA, 15 bp, Homo sapiens
gaaatgaaatcacta

SEQ ID NO: 1692873 - DNA, 15 bp, Homo sapiens
aaatgaaatcactat

SEQ ID NO: 1692874 - DNA, 15 bp, Homo sapiens
aatgaaatcactatg

SEQ ID NO: 1692875 - DNA, 15 bp, Homo sapiens
atgaaatcactatgt

SEQ ID NO: 1692876 - DNA, 15 bp, Homo sapiens
tgaaatcactatgtc

SEQ ID NO: 1692877 - DNA, 15 bp, Homo sapiens
gaaatcactatgtca

SEQ ID NO: 1692878 - DNA, 15 bp, Homo sapiens
aaatcactatgtcaa

SEQ ID NO: 1692879 - DNA, 15 bp, Homo sapiens
aatcactatgtcaag

SEQ ID NO: 1692880 - DNA, 15 bp, Homo sapiens
atcactatgtcaaga

SEQ ID NO: 1692881 - DNA, 15 bp, Homo sapiens
tcactatgtcaagag

SEQ ID NO: 1692882 - DNA, 15 bp, Homo sapiens
cactatgtcaagaga

SEQ ID NO: 1692883 - DNA, 15 bp, Homo sapiens
actatgtcaagagaa

SEQ ID NO: 1692884 - DNA, 15 bp, Homo sapiens
ctatgtcaagagaaa

SEQ ID NO: 1692885 - DNA, 15 bp, Homo sapiens
tatgtcaagagaaaa

SEQ ID NO: 1692886 - DNA, 15 bp, Homo sapiens
atgtcaagagaaaac

SEQ ID NO: 1692887 - DNA, 15 bp, Homo sapiens
tgtcaagagaaaact

SEQ ID NO: 1692888 - DNA, 15 bp, Homo sapiens
gtcaagagaaaactg

SEQ ID NO: 1692889 - DNA, 15 bp, Homo sapiens
tcaagagaaaactgt

SEQ ID NO: 1692890 - DNA, 15 bp, Homo sapiens
caagagaaaactgta

SEQ ID NO: 1692891 - DNA, 15 bp, Homo sapiens
aagagaaaactgtac

SEQ ID NO: 1692892 - DNA, 15 bp, Homo sapiens
agagaaaactgtact

SEQ ID NO: 1692893 - DNA, 15 bp, Homo sapiens
gagaaaactgtactc

SEQ ID NO: 1692894 - DNA, 15 bp, Homo sapiens
agaaaactgtactct

SEQ ID NO: 1692895 - DNA, 15 bp, Homo sapiens
gaaaactgtactctt

SEQ ID NO: 1692896 - DNA, 15 bp, Homo sapiens
aaaactgtactctta

SEQ ID NO: 1692897 - DNA, 15 bp, Homo sapiens
aaactgtactcttac

SEQ ID NO: 1692898 - DNA, 15 bp, Homo sapiens
aactgtactcttaca

SEQ ID NO: 1692899 - DNA, 15 bp, Homo sapiens
actgtactcttacat

SEQ ID NO: 1692900 - DNA, 15 bp, Homo sapiens
ctgtactcttacatt

SEQ ID NO: 1692901 - DNA, 15 bp, Homo sapiens
tgtactcttacattc

SEQ ID NO: 1692902 - DNA, 15 bp, Homo sapiens
gtactcttacattca

SEQ ID NO: 1692903 - DNA, 15 bp, Homo sapiens
tactcttacattcac

SEQ ID NO: 1692904 - DNA, 15 bp, Homo sapiens
actcttacattcact

SEQ ID NO: 1692905 - DNA, 15 bp, Homo sapiens
ctcttacattcactg

SEQ ID NO: 1692906 - DNA, 15 bp, Homo sapiens
tcttacattcactgc

SEQ ID NO: 1692907 - DNA, 15 bp, Homo sapiens
cttacattcactgca

SEQ ID NO: 1692908 - DNA, 15 bp, Homo sapiens
ttacattcactgcaa

SEQ ID NO: 1692909 - DNA, 15 bp, Homo sapiens
tacattcactgcaac

SEQ ID NO: 1692910 - DNA, 15 bp, Homo sapiens
acattcactgcaaca

SEQ ID NO: 1692911 - DNA, 15 bp, Homo sapiens
cattcactgcaacat

SEQ ID NO: 1692912 - DNA, 15 bp, Homo sapiens
attcactgcaacatt

SEQ ID NO: 1692913 - DNA, 15 bp, Homo sapiens
ttcactgcaacatta

SEQ ID NO: 1692914 - DNA, 15 bp, Homo sapiens
tcactgcaacattat

SEQ ID NO: 1692915 - DNA, 15 bp, Homo sapiens
cactgcaacattatt

SEQ ID NO: 1692916 - DNA, 15 bp, Homo sapiens
actgcaacattattc

SEQ ID NO: 1692917 - DNA, 15 bp, Homo sapiens
ctgcaacattattca

SEQ ID NO: 1692918 - DNA, 15 bp, Homo sapiens
tgcaacattattcac

SEQ ID NO: 1692919 - DNA, 15 bp, Homo sapiens
gcaacattattcaca

SEQ ID NO: 1692920 - DNA, 15 bp, Homo sapiens
caacattattcacaa

SEQ ID NO: 1692921 - DNA, 15 bp, Homo sapiens
aacattattcacaat

SEQ ID NO: 1692922 - DNA, 15 bp, Homo sapiens
acattattcacaata

SEQ ID NO: 1692923 - DNA, 15 bp, Homo sapiens
ttattcacaatagcc

SEQ ID NO: 1692924 - DNA, 15 bp, Homo sapiens
tattcacaatagcca

SEQ ID NO: 1692925 - DNA, 15 bp, Homo sapiens
attcacaatagccaa

SEQ ID NO: 1692926 - DNA, 15 bp, Homo sapiens
ttcacaatagccaag

SEQ ID NO: 1692927 - DNA, 15 bp, Homo sapiens
tcacaatagccaagg

SEQ ID NO: 1692928 - DNA, 15 bp, Homo sapiens
cacaatagccaaggt

SEQ ID NO: 1692929 - DNA, 15 bp, Homo sapiens
acaatagccaaggta

SEQ ID NO: 1692930 - DNA, 15 bp, Homo sapiens
caatagccaaggtat

SEQ ID NO: 1692931 - DNA, 15 bp, Homo sapiens
aatagccaaggtatg

SEQ ID NO: 1692932 - DNA, 15 bp, Homo sapiens
atagccaaggtatgg

SEQ ID NO: 1692933 - DNA, 15 bp, Homo sapiens
tagccaaggtatgga

SEQ ID NO: 1692934 - DNA, 15 bp, Homo sapiens
agccaaggtatggaa

SEQ ID NO: 1692935 - DNA, 15 bp, Homo sapiens
gccaaggtatggaat

SEQ ID NO: 1692936 - DNA, 15 bp, Homo sapiens
ccaaggtatggaatc

SEQ ID NO: 1692937 - DNA, 15 bp, Homo sapiens
caaggtatggaatca

SEQ ID NO: 1692938 - DNA, 15 bp, Homo sapiens
aaggtatggaatcaa

SEQ ID NO: 1692939 - DNA, 15 bp, Homo sapiens
aggtatggaatcaac

SEQ ID NO: 1692940 - DNA, 15 bp, Homo sapiens
ggtatggaatcaacc

SEQ ID NO: 1692941 - DNA, 15 bp, Homo sapiens
gtatggaatcaacct

SEQ ID NO: 1692942 - DNA, 15 bp, Homo sapiens
tggaatcaacctaag

SEQ ID NO: 1692943 - DNA, 15 bp, Homo sapiens
ggaatcaacctaagc

SEQ ID NO: 1692944 - DNA, 15 bp, Homo sapiens
gaatcaacctaagca

SEQ ID NO: 1692945 - DNA, 15 bp, Homo sapiens
aatcaacctaagcac

SEQ ID NO: 1692946 - DNA, 15 bp, Homo sapiens
atcaacctaagcacc

SEQ ID NO: 1692947 - DNA, 15 bp, Homo sapiens
tcaacctaagcaccc

SEQ ID NO: 1692948 - DNA, 15 bp, Homo sapiens
caacctaagcaccca

SEQ ID NO: 1692949 - DNA, 15 bp, Homo sapiens
aacctaagcacccat

SEQ ID NO: 1692950 - DNA, 15 bp, Homo sapiens
acctaagcacccatt

SEQ ID NO: 1692951 - DNA, 15 bp, Homo sapiens
cctaagcacccatta

SEQ ID NO: 1692952 - DNA, 15 bp, Homo sapiens
ctaagcacccattaa

SEQ ID NO: 1692953 - DNA, 15 bp, Homo sapiens
taagcacccattaac

SEQ ID NO: 1692954 - DNA, 15 bp, Homo sapiens
aagcacccattaaca

SEQ ID NO: 1692955 - DNA, 15 bp, Homo sapiens
agcacccattaacag

SEQ ID NO: 1692956 - DNA, 15 bp, Homo sapiens
gcacccattaacaga

SEQ ID NO: 1692957 - DNA, 15 bp, Homo sapiens
cacccattaacagac

SEQ ID NO: 1692958 - DNA, 15 bp, Homo sapiens
acccattaacagaca

SEQ ID NO: 1692959 - DNA, 15 bp, Homo sapiens
cccattaacagacaa

SEQ ID NO: 1692960 - DNA, 15 bp, Homo sapiens
ccattaacagacaag

SEQ ID NO: 1692961 - DNA, 15 bp, Homo sapiens
cattaacagacaagt

SEQ ID NO: 1692962 - DNA, 15 bp, Homo sapiens
attaacagacaagtg

SEQ ID NO: 1692963 - DNA, 15 bp, Homo sapiens
ttaacagacaagtga

SEQ ID NO: 1692964 - DNA, 15 bp, Homo sapiens
taacagacaagtgaa

SEQ ID NO: 1692965 - DNA, 15 bp, Homo sapiens
aacagacaagtgaat

SEQ ID NO: 1692966 - DNA, 15 bp, Homo sapiens
acagacaagtgaatg

SEQ ID NO: 1692967 - DNA, 15 bp, Homo sapiens
cagacaagtgaatga

SEQ ID NO: 1692968 - DNA, 15 bp, Homo sapiens
agacaagtgaatgaa

SEQ ID NO: 1692969 - DNA, 15 bp, Homo sapiens
gacaagtgaatgaag

SEQ ID NO: 1692970 - DNA, 15 bp, Homo sapiens
acaagtgaatgaaga

SEQ ID NO: 1692971 - DNA, 15 bp, Homo sapiens
caagtgaatgaagaa

SEQ ID NO: 1692972 - DNA, 15 bp, Homo sapiens
aagtgaatgaagaaa

SEQ ID NO: 1692973 - DNA, 15 bp, Homo sapiens
agtgaatgaagaaaa

SEQ ID NO: 1692974 - DNA, 15 bp, Homo sapiens
gtgaatgaagaaaat

SEQ ID NO: 1692975 - DNA, 15 bp, Homo sapiens
tgaatgaagaaaatg

SEQ ID NO: 1692976 - DNA, 15 bp, Homo sapiens
gaatgaagaaaatgt

SEQ ID NO: 1692977 - DNA, 15 bp, Homo sapiens
aatgaagaaaatgtg

SEQ ID NO: 1692978 - DNA, 15 bp, Homo sapiens
atgaagaaaatgtgt

SEQ ID NO: 1692979 - DNA, 15 bp, Homo sapiens
tgaagaaaatgtgtg

SEQ ID NO: 1692980 - DNA, 15 bp, Homo sapiens
gaagaaaatgtgtgt

SEQ ID NO: 1692981 - DNA, 15 bp, Homo sapiens
aagaaaatgtgtgtg

SEQ ID NO: 1692982 - DNA, 15 bp, Homo sapiens
agaaaatgtgtgtgt

SEQ ID NO: 1692983 - DNA, 15 bp, Homo sapiens
gaaaatgtgtgtgta

SEQ ID NO: 1692984 - DNA, 15 bp, Homo sapiens
aaaatgtgtgtgtaa

SEQ ID NO: 1692985 - DNA, 15 bp, Homo sapiens
aaatgtgtgtgtaaa

SEQ ID NO: 1692986 - DNA, 15 bp, Homo sapiens
aatgtgtgtgtaaat

SEQ ID NO: 1692987 - DNA, 15 bp, Homo sapiens
atgtgtgtgtaaatt

SEQ ID NO: 1692988 - DNA, 15 bp, Homo sapiens
tgtgtgtgtaaattt

SEQ ID NO: 1692989 - DNA, 15 bp, Homo sapiens
gtgtgtgtaaattta

SEQ ID NO: 1692990 - DNA, 15 bp, Homo sapiens
tgtgtgtaaatttac

SEQ ID NO: 1692991 - DNA, 15 bp, Homo sapiens
gtgtgtaaatttaca

SEQ ID NO: 1692992 - DNA, 15 bp, Homo sapiens
tgtgtaaatttacat

SEQ ID NO: 1692993 - DNA, 15 bp, Homo sapiens
gtgtaaatttacatg

SEQ ID NO: 1692994 - DNA, 15 bp, Homo sapiens
tgtaaatttacatgc

SEQ ID NO: 1692995 - DNA, 15 bp, Homo sapiens
gtaaatttacatgcc

SEQ ID NO: 1692996 - DNA, 15 bp, Homo sapiens
taaatttacatgcca

SEQ ID NO: 1692997 - DNA, 15 bp, Homo sapiens
aaatttacatgccat

SEQ ID NO: 1692998 - DNA, 15 bp, Homo sapiens
aatttacatgccata

SEQ ID NO: 1692999 - DNA, 15 bp, Homo sapiens
atttacatgccatat

SEQ ID NO: 1693000 - DNA, 15 bp, Homo sapiens
tttacatgccatatt

SEQ ID NO: 1693001 - DNA, 15 bp, Homo sapiens
ttacatgccatattc

SEQ ID NO: 1693002 - DNA, 15 bp, Homo sapiens
tacatgccatattca

SEQ ID NO: 1693003 - DNA, 15 bp, Homo sapiens
acatgccatattcaa

SEQ ID NO: 1693004 - DNA, 15 bp, Homo sapiens
catgccatattcaat

SEQ ID NO: 1693005 - DNA, 15 bp, Homo sapiens
atgccatattcaata

SEQ ID NO: 1693006 - DNA, 15 bp, Homo sapiens
tgccatattcaatag

SEQ ID NO: 1693007 - DNA, 15 bp, Homo sapiens
gccatattcaataga

SEQ ID NO: 1693008 - DNA, 15 bp, Homo sapiens
ccatattcaatagaa

SEQ ID NO: 1693009 - DNA, 15 bp, Homo sapiens
catattcaatagaat

SEQ ID NO: 1693010 - DNA, 15 bp, Homo sapiens
atattcaatagaata

SEQ ID NO: 1693011 - DNA, 15 bp, Homo sapiens
tattcaatagaatac

SEQ ID NO: 1693012 - DNA, 15 bp, Homo sapiens
attcaatagaatact

SEQ ID NO: 1693013 - DNA, 15 bp, Homo sapiens
ttcaatagaatacta

SEQ ID NO: 1693014 - DNA, 15 bp, Homo sapiens
tcaatagaatactat

SEQ ID NO: 1693015 - DNA, 15 bp, Homo sapiens
caatagaatactatt

SEQ ID NO: 1693016 - DNA, 15 bp, Homo sapiens
aatagaatactattc

SEQ ID NO: 1693017 - DNA, 15 bp, Homo sapiens
atagaatactattca

SEQ ID NO: 1693018 - DNA, 15 bp, Homo sapiens
tagaatactattcag

SEQ ID NO: 1693019 - DNA, 15 bp, Homo sapiens
agaatactattcagc

SEQ ID NO: 1693020 - DNA, 15 bp, Homo sapiens
gaatactattcagcc

SEQ ID NO: 1693021 - DNA, 15 bp, Homo sapiens
aatactattcagcct

SEQ ID NO: 1693022 - DNA, 15 bp, Homo sapiens
atactattcagcctt

SEQ ID NO: 1693023 - DNA, 15 bp, Homo sapiens
tactattcagccttt

SEQ ID NO: 1693024 - DNA, 15 bp, Homo sapiens
actattcagccttta

SEQ ID NO: 1693025 - DNA, 15 bp, Homo sapiens
ctattcagcctttaa

SEQ ID NO: 1693026 - DNA, 15 bp, Homo sapiens
tattcagcctttaaa

SEQ ID NO: 1693027 - DNA, 15 bp, Homo sapiens
attcagcctttaaaa

SEQ ID NO: 1693028 - DNA, 15 bp, Homo sapiens
ttcagcctttaaaaa

SEQ ID NO: 1693029 - DNA, 15 bp, Homo sapiens
tcagcctttaaaaag

SEQ ID NO: 1693030 - DNA, 15 bp, Homo sapiens
cagcctttaaaaaga

SEQ ID NO: 1693031 - DNA, 15 bp, Homo sapiens
agcctttaaaaagaa

SEQ ID NO: 1693032 - DNA, 15 bp, Homo sapiens
gcctttaaaaagaag

SEQ ID NO: 1693033 - DNA, 15 bp, Homo sapiens
cctttaaaaagaaga

SEQ ID NO: 1693034 - DNA, 15 bp, Homo sapiens
ctttaaaaagaagaa

SEQ ID NO: 1693035 - DNA, 15 bp, Homo sapiens
tttaaaaagaagaaa

SEQ ID NO: 1693036 - DNA, 15 bp, Homo sapiens
ttaaaaagaagaaaa

SEQ ID NO: 1693037 - DNA, 15 bp, Homo sapiens
taaaaagaagaaaat

SEQ ID NO: 1693038 - DNA, 15 bp, Homo sapiens
aaaaagaagaaaata

SEQ ID NO: 1693039 - DNA, 15 bp, Homo sapiens
aaaagaagaaaatac

SEQ ID NO: 1693040 - DNA, 15 bp, Homo sapiens
aaagaagaaaatact

SEQ ID NO: 1693041 - DNA, 15 bp, Homo sapiens
aagaagaaaatactg

SEQ ID NO: 1693042 - DNA, 15 bp, Homo sapiens
agaagaaaatactgt

SEQ ID NO: 1693043 - DNA, 15 bp, Homo sapiens
gaagaaaatactgtt

SEQ ID NO: 1693044 - DNA, 15 bp, Homo sapiens
aagaaaatactgtta

SEQ ID NO: 1693045 - DNA, 15 bp, Homo sapiens
agaaaatactgttat

SEQ ID NO: 1693046 - DNA, 15 bp, Homo sapiens
gaaaatactgttatt

SEQ ID NO: 1693047 - DNA, 15 bp, Homo sapiens
aaaatactgttattt

SEQ ID NO: 1693048 - DNA, 15 bp, Homo sapiens
aaatactgttatttg

SEQ ID NO: 1693049 - DNA, 15 bp, Homo sapiens
aatactgttatttgc

SEQ ID NO: 1693050 - DNA, 15 bp, Homo sapiens
atactgttatttgca

SEQ ID NO: 1693051 - DNA, 15 bp, Homo sapiens
tactgttatttgcag

SEQ ID NO: 1693052 - DNA, 15 bp, Homo sapiens
actgttatttgcagc

SEQ ID NO: 1693053 - DNA, 15 bp, Homo sapiens
ctgttatttgcagca

SEQ ID NO: 1693054 - DNA, 15 bp, Homo sapiens
tgttatttgcagcaa

SEQ ID NO: 1693055 - DNA, 15 bp, Homo sapiens
gttatttgcagcaac

SEQ ID NO: 1693056 - DNA, 15 bp, Homo sapiens
ttatttgcagcaaca

SEQ ID NO: 1693057 - DNA, 15 bp, Homo sapiens
tatttgcagcaacac

SEQ ID NO: 1693058 - DNA, 15 bp, Homo sapiens
atttgcagcaacacg

SEQ ID NO: 1693059 - DNA, 15 bp, Homo sapiens
tttgcagcaacacga

SEQ ID NO: 1693060 - DNA, 15 bp, Homo sapiens
ttgcagcaacacgat

SEQ ID NO: 1693061 - DNA, 15 bp, Homo sapiens
tgcagcaacacgatg

SEQ ID NO: 1693062 - DNA, 15 bp, Homo sapiens
gcagcaacacgatga

SEQ ID NO: 1693063 - DNA, 15 bp, Homo sapiens
cagcaacacgatgaa

SEQ ID NO: 1693064 - DNA, 15 bp, Homo sapiens
agcaacacgatgaac

SEQ ID NO: 1693065 - DNA, 15 bp, Homo sapiens
gcaacacgatgaacc

SEQ ID NO: 1693066 - DNA, 15 bp, Homo sapiens
caacacgatgaacct

SEQ ID NO: 1693067 - DNA, 15 bp, Homo sapiens
aacacgatgaacctg

SEQ ID NO: 1693068 - DNA, 15 bp, Homo sapiens
acacgatgaacctgg

SEQ ID NO: 1693069 - DNA, 15 bp, Homo sapiens
cacgatgaacctgga

SEQ ID NO: 1693070 - DNA, 15 bp, Homo sapiens
acgatgaacctggag

SEQ ID NO: 1693071 - DNA, 15 bp, Homo sapiens
cgatgaacctggagg

SEQ ID NO: 1693072 - DNA, 15 bp, Homo sapiens
gatgaacctggagga

SEQ ID NO: 1693073 - DNA, 15 bp, Homo sapiens
atgaacctggaggac

SEQ ID NO: 1693074 - DNA, 15 bp, Homo sapiens
tgaacctggaggaca

SEQ ID NO: 1693075 - DNA, 15 bp, Homo sapiens
gaacctggaggacat

SEQ ID NO: 1693076 - DNA, 15 bp, Homo sapiens
aacctggaggacatt

SEQ ID NO: 1693077 - DNA, 15 bp, Homo sapiens
acctggaggacatta

SEQ ID NO: 1693078 - DNA, 15 bp, Homo sapiens
cctggaggacattat

SEQ ID NO: 1693079 - DNA, 15 bp, Homo sapiens
ctggaggacattatg

SEQ ID NO: 1693080 - DNA, 15 bp, Homo sapiens
tggaggacattatgt

SEQ ID NO: 1693081 - DNA, 15 bp, Homo sapiens
ggaggacattatgtt

SEQ ID NO: 1693082 - DNA, 15 bp, Homo sapiens
gaggacattatgtta

SEQ ID NO: 1693083 - DNA, 15 bp, Homo sapiens
aggacattatgttaa

SEQ ID NO: 1693084 - DNA, 15 bp, Homo sapiens
ggacattatgttaag

SEQ ID NO: 1693085 - DNA, 15 bp, Homo sapiens
gacattatgttaagt

SEQ ID NO: 1693086 - DNA, 15 bp, Homo sapiens
acattatgttaagtg

SEQ ID NO: 1693087 - DNA, 15 bp, Homo sapiens
cattatgttaagtga

SEQ ID NO: 1693088 - DNA, 15 bp, Homo sapiens
attatgttaagtgaa

SEQ ID NO: 1693089 - DNA, 15 bp, Homo sapiens
ttatgttaagtgaaa

SEQ ID NO: 1693090 - DNA, 15 bp, Homo sapiens
tatgttaagtgaaat

SEQ ID NO: 1693091 - DNA, 15 bp, Homo sapiens
atgttaagtgaaata

SEQ ID NO: 1693092 - DNA, 15 bp, Homo sapiens
tgttaagtgaaataa

SEQ ID NO: 1693093 - DNA, 15 bp, Homo sapiens
gttaagtgaaataag

SEQ ID NO: 1693094 - DNA, 15 bp, Homo sapiens
ttaagtgaaataagc

SEQ ID NO: 1693095 - DNA, 15 bp, Homo sapiens
taagtgaaataagcc

SEQ ID NO: 1693096 - DNA, 15 bp, Homo sapiens
aagtgaaataagcca

SEQ ID NO: 1693097 - DNA, 15 bp, Homo sapiens
agtgaaataagccag

SEQ ID NO: 1693098 - DNA, 15 bp, Homo sapiens
gtgaaataagccagg

SEQ ID NO: 1693099 - DNA, 15 bp, Homo sapiens
tgaaataagccaggc

SEQ ID NO: 1693100 - DNA, 15 bp, Homo sapiens
gaaataagccaggca

SEQ ID NO: 1693101 - DNA, 15 bp, Homo sapiens
aaataagccaggcac

SEQ ID NO: 1693102 - DNA, 15 bp, Homo sapiens
aataagccaggcaca

SEQ ID NO: 1693103 - DNA, 15 bp, Homo sapiens
ataagccaggcacag

SEQ ID NO: 1693104 - DNA, 15 bp, Homo sapiens
taagccaggcacaga

SEQ ID NO: 1693105 - DNA, 15 bp, Homo sapiens
aagccaggcacagaa

SEQ ID NO: 1693106 - DNA, 15 bp, Homo sapiens
agccaggcacagaaa

SEQ ID NO: 1693107 - DNA, 15 bp, Homo sapiens
gccaggcacagaaaa

SEQ ID NO: 1693108 - DNA, 15 bp, Homo sapiens
ccaggcacagaaaaa

SEQ ID NO: 1693109 - DNA, 15 bp, Homo sapiens
caggcacagaaaaat

SEQ ID NO: 1693110 - DNA, 15 bp, Homo sapiens
aggcacagaaaaata

SEQ ID NO: 1693111 - DNA, 15 bp, Homo sapiens
ggcacagaaaaatac

SEQ ID NO: 1693112 - DNA, 15 bp, Homo sapiens
gcacagaaaaatacc

SEQ ID NO: 1693113 - DNA, 15 bp, Homo sapiens
cacagaaaaataccc

SEQ ID NO: 1693114 - DNA, 15 bp, Homo sapiens
acagaaaaatacccc

SEQ ID NO: 1693115 - DNA, 15 bp, Homo sapiens
cagaaaaatacccca

SEQ ID NO: 1693116 - DNA, 15 bp, Homo sapiens
agaaaaataccccat

SEQ ID NO: 1693117 - DNA, 15 bp, Homo sapiens
gaaaaataccccatg

SEQ ID NO: 1693118 - DNA, 15 bp, Homo sapiens
aaaaataccccatga

SEQ ID NO: 1693119 - DNA, 15 bp, Homo sapiens
aaaataccccatgat

SEQ ID NO: 1693120 - DNA, 15 bp, Homo sapiens
aaataccccatgatc

SEQ ID NO: 1693121 - DNA, 15 bp, Homo sapiens
aataccccatgatct

SEQ ID NO: 1693122 - DNA, 15 bp, Homo sapiens
ataccccatgatctc

SEQ ID NO: 1693123 - DNA, 15 bp, Homo sapiens
taccccatgatctca

SEQ ID NO: 1693124 - DNA, 15 bp, Homo sapiens
accccatgatctcac

SEQ ID NO: 1693125 - DNA, 15 bp, Homo sapiens
ccccatgatctcact

SEQ ID NO: 1693126 - DNA, 15 bp, Homo sapiens
cccatgatctcactg

SEQ ID NO: 1693127 - DNA, 15 bp, Homo sapiens
ccatgatctcactga

SEQ ID NO: 1693128 - DNA, 15 bp, Homo sapiens
catgatctcactgac

SEQ ID NO: 1693129 - DNA, 15 bp, Homo sapiens
atgatctcactgaca

SEQ ID NO: 1693130 - DNA, 15 bp, Homo sapiens
tgatctcactgacag

SEQ ID NO: 1693131 - DNA, 15 bp, Homo sapiens
gatctcactgacaga

SEQ ID NO: 1693132 - DNA, 15 bp, Homo sapiens
atctcactgacagag

SEQ ID NO: 1693133 - DNA, 15 bp, Homo sapiens
tctcactgacagagt

SEQ ID NO: 1693134 - DNA, 15 bp, Homo sapiens
ctcactgacagagtt

SEQ ID NO: 1693135 - DNA, 15 bp, Homo sapiens
tcactgacagagttg

SEQ ID NO: 1693136 - DNA, 15 bp, Homo sapiens
cactgacagagttga

SEQ ID NO: 1693137 - DNA, 15 bp, Homo sapiens
actgacagagttgaa

SEQ ID NO: 1693138 - DNA, 15 bp, Homo sapiens
ctgacagagttgaac

SEQ ID NO: 1693139 - DNA, 15 bp, Homo sapiens
tgacagagttgaact

SEQ ID NO: 1693140 - DNA, 15 bp, Homo sapiens
gacagagttgaactc

SEQ ID NO: 1693141 - DNA, 15 bp, Homo sapiens
acagagttgaactca

SEQ ID NO: 1693142 - DNA, 15 bp, Homo sapiens
cagagttgaactcac

SEQ ID NO: 1693143 - DNA, 15 bp, Homo sapiens
agagttgaactcaca

SEQ ID NO: 1693144 - DNA, 15 bp, Homo sapiens
gagttgaactcacag

SEQ ID NO: 1693145 - DNA, 15 bp, Homo sapiens
agttgaactcacaga

SEQ ID NO: 1693146 - DNA, 15 bp, Homo sapiens
gttgaactcacagaa

SEQ ID NO: 1693147 - DNA, 15 bp, Homo sapiens
ttgaactcacagaag

SEQ ID NO: 1693148 - DNA, 15 bp, Homo sapiens
tgaactcacagaagc

SEQ ID NO: 1693149 - DNA, 15 bp, Homo sapiens
gaactcacagaagca

SEQ ID NO: 1693150 - DNA, 15 bp, Homo sapiens
aactcacagaagcag

SEQ ID NO: 1693151 - DNA, 15 bp, Homo sapiens
actcacagaagcaga

SEQ ID NO: 1693152 - DNA, 15 bp, Homo sapiens
ctcacagaagcagag

SEQ ID NO: 1693153 - DNA, 15 bp, Homo sapiens
tcacagaagcagaga

SEQ ID NO: 1693154 - DNA, 15 bp, Homo sapiens
cacagaagcagagag

SEQ ID NO: 1693155 - DNA, 15 bp, Homo sapiens
acagaagcagagagc

SEQ ID NO: 1693156 - DNA, 15 bp, Homo sapiens
cagaagcagagagca

SEQ ID NO: 1693157 - DNA, 15 bp, Homo sapiens
agaagcagagagcag

SEQ ID NO: 1693158 - DNA, 15 bp, Homo sapiens
gaagcagagagcaga

SEQ ID NO: 1693159 - DNA, 15 bp, Homo sapiens
aagcagagagcagaa

SEQ ID NO: 1693160 - DNA, 15 bp, Homo sapiens
agcagagagcagaac

SEQ ID NO: 1693161 - DNA, 15 bp, Homo sapiens
gcagagagcagaaca

SEQ ID NO: 1693162 - DNA, 15 bp, Homo sapiens
cagagagcagaacag

SEQ ID NO: 1693163 - DNA, 15 bp, Homo sapiens
agagagcagaacagt

SEQ ID NO: 1693164 - DNA, 15 bp, Homo sapiens
gagagcagaacagtg

SEQ ID NO: 1693165 - DNA, 15 bp, Homo sapiens
agagcagaacagtgg

SEQ ID NO: 1693166 - DNA, 15 bp, Homo sapiens
gagcagaacagtggt

SEQ ID NO: 1693167 - DNA, 15 bp, Homo sapiens
agcagaacagtggtt

SEQ ID NO: 1693168 - DNA, 15 bp, Homo sapiens
gcagaacagtggtta

SEQ ID NO: 1693169 - DNA, 15 bp, Homo sapiens
cagaacagtggttac

SEQ ID NO: 1693170 - DNA, 15 bp, Homo sapiens
agaacagtggttacc

SEQ ID NO: 1693171 - DNA, 15 bp, Homo sapiens
gaacagtggttacca

SEQ ID NO: 1693172 - DNA, 15 bp, Homo sapiens
aacagtggttaccag

SEQ ID NO: 1693173 - DNA, 15 bp, Homo sapiens
acagtggttaccagg

SEQ ID NO: 1693174 - DNA, 15 bp, Homo sapiens
cagtggttaccaggg

SEQ ID NO: 1693175 - DNA, 15 bp, Homo sapiens
agtggttaccaggga

SEQ ID NO: 1693176 - DNA, 15 bp, Homo sapiens
gtggttaccagggac

SEQ ID NO: 1693177 - DNA, 15 bp, Homo sapiens
tggttaccagggact

SEQ ID NO: 1693178 - DNA, 15 bp, Homo sapiens
ggttaccagggactt

SEQ ID NO: 1693179 - DNA, 15 bp, Homo sapiens
gttaccagggacttt

SEQ ID NO: 1693180 - DNA, 15 bp, Homo sapiens
ttaccagggactttg

SEQ ID NO: 1693181 - DNA, 15 bp, Homo sapiens
taccagggactttga

SEQ ID NO: 1693182 - DNA, 15 bp, Homo sapiens
accagggactttgag

SEQ ID NO: 1693183 - DNA, 15 bp, Homo sapiens
ccagggactttgagg

SEQ ID NO: 1693184 - DNA, 15 bp, Homo sapiens
cagggactttgaggt

SEQ ID NO: 1693185 - DNA, 15 bp, Homo sapiens
agggactttgaggtg

SEQ ID NO: 1693186 - DNA, 15 bp, Homo sapiens
gggactttgaggtgg

SEQ ID NO: 1693187 - DNA, 15 bp, Homo sapiens
ggactttgaggtggg

SEQ ID NO: 1693188 - DNA, 15 bp, Homo sapiens
gactttgaggtggga

SEQ ID NO: 1693189 - DNA, 15 bp, Homo sapiens
actttgaggtgggag

SEQ ID NO: 1693190 - DNA, 15 bp, Homo sapiens
ctttgaggtgggagg

SEQ ID NO: 1693191 - DNA, 15 bp, Homo sapiens
tttgaggtgggaggg

SEQ ID NO: 1693192 - DNA, 15 bp, Homo sapiens
ttgaggtgggagggg

SEQ ID NO: 1693193 - DNA, 15 bp, Homo sapiens
tgaggtgggaggggg

SEQ ID NO: 1693194 - DNA, 15 bp, Homo sapiens
gaggtgggagggggc

SEQ ID NO: 1693195 - DNA, 15 bp, Homo sapiens
aggtgggagggggca

SEQ ID NO: 1693196 - DNA, 15 bp, Homo sapiens
ggtgggagggggcag

SEQ ID NO: 1693197 - DNA, 15 bp, Homo sapiens
tgggagggggcaggc

SEQ ID NO: 1693198 - DNA, 15 bp, Homo sapiens
gggagggggcaggcg

SEQ ID NO: 1693199 - DNA, 15 bp, Homo sapiens
ggagggggcaggcga

SEQ ID NO: 1693200 - DNA, 15 bp, Homo sapiens
gagggggcaggcgag

SEQ ID NO: 1693201 - DNA, 15 bp, Homo sapiens
agggggcaggcgaga

SEQ ID NO: 1693202 - DNA, 15 bp, Homo sapiens
gggggcaggcgagaa

SEQ ID NO: 1693203 - DNA, 15 bp, Homo sapiens
ggggcaggcgagaac

SEQ ID NO: 1693204 - DNA, 15 bp, Homo sapiens
gggcaggcgagaact

SEQ ID NO: 1693205 - DNA, 15 bp, Homo sapiens
ggcaggcgagaactg

SEQ ID NO: 1693206 - DNA, 15 bp, Homo sapiens
gcaggcgagaactgg

SEQ ID NO: 1693207 - DNA, 15 bp, Homo sapiens
caggcgagaactggg

SEQ ID NO: 1693208 - DNA, 15 bp, Homo sapiens
aggcgagaactgggg

SEQ ID NO: 1693209 - DNA, 15 bp, Homo sapiens
ggcgagaactgggga

SEQ ID NO: 1693210 - DNA, 15 bp, Homo sapiens
gcgagaactggggag

SEQ ID NO: 1693211 - DNA, 15 bp, Homo sapiens
cgagaactggggaga

SEQ ID NO: 1693212 - DNA, 15 bp, Homo sapiens
gagaactggggagac

SEQ ID NO: 1693213 - DNA, 15 bp, Homo sapiens
agaactggggagacg

SEQ ID NO: 1693214 - DNA, 15 bp, Homo sapiens
gaactggggagacgt

SEQ ID NO: 1693215 - DNA, 15 bp, Homo sapiens
aactggggagacgtt

SEQ ID NO: 1693216 - DNA, 15 bp, Homo sapiens
actggggagacgttg

SEQ ID NO: 1693217 - DNA, 15 bp, Homo sapiens
ctggggagacgttgg

SEQ ID NO: 1693218 - DNA, 15 bp, Homo sapiens
tggggagacgttggt

SEQ ID NO: 1693219 - DNA, 15 bp, Homo sapiens
ggggagacgttggtc

SEQ ID NO: 1693220 - DNA, 15 bp, Homo sapiens
gggagacgttggtca

SEQ ID NO: 1693221 - DNA, 15 bp, Homo sapiens
ggagacgttggtcaa

SEQ ID NO: 1693222 - DNA, 15 bp, Homo sapiens
gagacgttggtcaaa

SEQ ID NO: 1693223 - DNA, 15 bp, Homo sapiens
agacgttggtcaaag

SEQ ID NO: 1693224 - DNA, 15 bp, Homo sapiens
gacgttggtcaaagg

SEQ ID NO: 1693225 - DNA, 15 bp, Homo sapiens
acgttggtcaaagga

SEQ ID NO: 1693226 - DNA, 15 bp, Homo sapiens
cgttggtcaaaggat

SEQ ID NO: 1693227 - DNA, 15 bp, Homo sapiens
gttggtcaaaggatt

SEQ ID NO: 1693228 - DNA, 15 bp, Homo sapiens
ttggtcaaaggattc

SEQ ID NO: 1693229 - DNA, 15 bp, Homo sapiens
tggtcaaaggattca

SEQ ID NO: 1693230 - DNA, 15 bp, Homo sapiens
ggtcaaaggattcaa

SEQ ID NO: 1693231 - DNA, 15 bp, Homo sapiens
gtcaaaggattcaaa

SEQ ID NO: 1693232 - DNA, 15 bp, Homo sapiens
tcaaaggattcaaaa

SEQ ID NO: 1693233 - DNA, 15 bp, Homo sapiens
caaaggattcaaaat

SEQ ID NO: 1693234 - DNA, 15 bp, Homo sapiens
aaaggattcaaaatt

SEQ ID NO: 1693235 - DNA, 15 bp, Homo sapiens
aaggattcaaaattt

SEQ ID NO: 1693236 - DNA, 15 bp, Homo sapiens
aggattcaaaatttc

SEQ ID NO: 1693237 - DNA, 15 bp, Homo sapiens
ggattcaaaatttca

SEQ ID NO: 1693238 - DNA, 15 bp, Homo sapiens
gattcaaaatttcag

SEQ ID NO: 1693239 - DNA, 15 bp, Homo sapiens
attcaaaatttcagt

SEQ ID NO: 1693240 - DNA, 15 bp, Homo sapiens
ttcaaaatttcagtt

SEQ ID NO: 1693241 - DNA, 15 bp, Homo sapiens
tcaaaatttcagtta

SEQ ID NO: 1693242 - DNA, 15 bp, Homo sapiens
caaaatttcagttaa

SEQ ID NO: 1693243 - DNA, 15 bp, Homo sapiens
aaaatttcagttaaa

SEQ ID NO: 1693244 - DNA, 15 bp, Homo sapiens
aaatttcagttaaac

SEQ ID NO: 1693245 - DNA, 15 bp, Homo sapiens
aatttcagttaaaca

SEQ ID NO: 1693246 - DNA, 15 bp, Homo sapiens
atttcagttaaacag

SEQ ID NO: 1693247 - DNA, 15 bp, Homo sapiens
tttcagttaaacagg

SEQ ID NO: 1693248 - DNA, 15 bp, Homo sapiens
ttcagttaaacaggg

SEQ ID NO: 1693249 - DNA, 15 bp, Homo sapiens
tcagttaaacagggg

SEQ ID NO: 1693250 - DNA, 15 bp, Homo sapiens
cagttaaacaggggt

SEQ ID NO: 1693251 - DNA, 15 bp, Homo sapiens
agttaaacaggggta

SEQ ID NO: 1693252 - DNA, 15 bp, Homo sapiens
gttaaacaggggtag

SEQ ID NO: 1693253 - DNA, 15 bp, Homo sapiens
ttaaacaggggtagt

SEQ ID NO: 1693254 - DNA, 15 bp, Homo sapiens
taaacaggggtagtt

SEQ ID NO: 1693255 - DNA, 15 bp, Homo sapiens
aaacaggggtagttt

SEQ ID NO: 1693256 - DNA, 15 bp, Homo sapiens
aacaggggtagtttg

SEQ ID NO: 1693257 - DNA, 15 bp, Homo sapiens
acaggggtagtttga

SEQ ID NO: 1693258 - DNA, 15 bp, Homo sapiens
caggggtagtttgag

SEQ ID NO: 1693259 - DNA, 15 bp, Homo sapiens
aggggtagtttgaga

SEQ ID NO: 1693260 - DNA, 15 bp, Homo sapiens
ggggtagtttgagat

SEQ ID NO: 1693261 - DNA, 15 bp, Homo sapiens
gggtagtttgagata

SEQ ID NO: 1693262 - DNA, 15 bp, Homo sapiens
ggtagtttgagatat

SEQ ID NO: 1693263 - DNA, 15 bp, Homo sapiens
gtagtttgagatatt

SEQ ID NO: 1693264 - DNA, 15 bp, Homo sapiens
tagtttgagatattt

SEQ ID NO: 1693265 - DNA, 15 bp, Homo sapiens
agtttgagatatttt

SEQ ID NO: 1693266 - DNA, 15 bp, Homo sapiens
gtttgagatatttta

SEQ ID NO: 1693267 - DNA, 15 bp, Homo sapiens
tttgagatattttaa

SEQ ID NO: 1693268 - DNA, 15 bp, Homo sapiens
ttgagatattttaaa

SEQ ID NO: 1693269 - DNA, 15 bp, Homo sapiens
tgagatattttaaaa

SEQ ID NO: 1693270 - DNA, 15 bp, Homo sapiens
gagatattttaaaaa

SEQ ID NO: 1693271 - DNA, 15 bp, Homo sapiens
agatattttaaaaat

SEQ ID NO: 1693272 - DNA, 15 bp, Homo sapiens
gatattttaaaaata

SEQ ID NO: 1693273 - DNA, 15 bp, Homo sapiens
atattttaaaaataa

SEQ ID NO: 1693274 - DNA, 15 bp, Homo sapiens
tattttaaaaataat

SEQ ID NO: 1693275 - DNA, 15 bp, Homo sapiens
attttaaaaataatg

SEQ ID NO: 1693276 - DNA, 15 bp, Homo sapiens
ttttaaaaataatga

SEQ ID NO: 1693277 - DNA, 15 bp, Homo sapiens
tttaaaaataatgac

SEQ ID NO: 1693278 - DNA, 15 bp, Homo sapiens
ttaaaaataatgaca

SEQ ID NO: 1693279 - DNA, 15 bp, Homo sapiens
taaaaataatgacat

SEQ ID NO: 1693280 - DNA, 15 bp, Homo sapiens
aaaaataatgacatt

SEQ ID NO: 1693281 - DNA, 15 bp, Homo sapiens
aaaataatgacatta

SEQ ID NO: 1693282 - DNA, 15 bp, Homo sapiens
aaataatgacattaa

SEQ ID NO: 1693283 - DNA, 15 bp, Homo sapiens
aataatgacattaat

SEQ ID NO: 1693284 - DNA, 15 bp, Homo sapiens
ataatgacattaatt

SEQ ID NO: 1693285 - DNA, 15 bp, Homo sapiens
taatgacattaatta

SEQ ID NO: 1693286 - DNA, 15 bp, Homo sapiens
aatgacattaattat

SEQ ID NO: 1693287 - DNA, 15 bp, Homo sapiens
atgacattaattatc

SEQ ID NO: 1693288 - DNA, 15 bp, Homo sapiens
tgacattaattatct

SEQ ID NO: 1693289 - DNA, 15 bp, Homo sapiens
gacattaattatcta

SEQ ID NO: 1693290 - DNA, 15 bp, Homo sapiens
acattaattatctaa

SEQ ID NO: 1693291 - DNA, 15 bp, Homo sapiens
cattaattatctaat

SEQ ID NO: 1693292 - DNA, 15 bp, Homo sapiens
attaattatctaatt

SEQ ID NO: 1693293 - DNA, 15 bp, Homo sapiens
ttaattatctaattg

SEQ ID NO: 1693294 - DNA, 15 bp, Homo sapiens
taattatctaattgt

SEQ ID NO: 1693295 - DNA, 15 bp, Homo sapiens
aattatctaattgta

SEQ ID NO: 1693296 - DNA, 15 bp, Homo sapiens
attatctaattgtag

SEQ ID NO: 1693297 - DNA, 15 bp, Homo sapiens
ttatctaattgtagt

SEQ ID NO: 1693298 - DNA, 15 bp, Homo sapiens
tatctaattgtagtt

SEQ ID NO: 1693299 - DNA, 15 bp, Homo sapiens
atctaattgtagttg

SEQ ID NO: 1693300 - DNA, 15 bp, Homo sapiens
tctaattgtagttgt

SEQ ID NO: 1693301 - DNA, 15 bp, Homo sapiens
ctaattgtagttgtt

SEQ ID NO: 1693302 - DNA, 15 bp, Homo sapiens
taattgtagttgttt

SEQ ID NO: 1693303 - DNA, 15 bp, Homo sapiens
aattgtagttgtttt

SEQ ID NO: 1693304 - DNA, 15 bp, Homo sapiens
attgtagttgtttta

SEQ ID NO: 1693305 - DNA, 15 bp, Homo sapiens
ttgtagttgttttaa

SEQ ID NO: 1693306 - DNA, 15 bp, Homo sapiens
tgtagttgttttaat

SEQ ID NO: 1693307 - DNA, 15 bp, Homo sapiens
gtagttgttttaatt

SEQ ID NO: 1693308 - DNA, 15 bp, Homo sapiens
tagttgttttaattt

SEQ ID NO: 1693309 - DNA, 15 bp, Homo sapiens
agttgttttaattta

SEQ ID NO: 1693310 - DNA, 15 bp, Homo sapiens
gttgttttaatttag

SEQ ID NO: 1693311 - DNA, 15 bp, Homo sapiens
ttgttttaatttagt

SEQ ID NO: 1693312 - DNA, 15 bp, Homo sapiens
tgttttaatttagtt

SEQ ID NO: 1693313 - DNA, 15 bp, Homo sapiens
gttttaatttagttc

SEQ ID NO: 1693314 - DNA, 15 bp, Homo sapiens
ttttaatttagttca

SEQ ID NO: 1693315 - DNA, 15 bp, Homo sapiens
tttaatttagttcat

SEQ ID NO: 1693316 - DNA, 15 bp, Homo sapiens
ttaatttagttcatg

SEQ ID NO: 1693317 - DNA, 15 bp, Homo sapiens
taatttagttcatgg

SEQ ID NO: 1693318 - DNA, 15 bp, Homo sapiens
aatttagttcatggt

SEQ ID NO: 1693319 - DNA, 15 bp, Homo sapiens
atttagttcatggtg

SEQ ID NO: 1693320 - DNA, 15 bp, Homo sapiens
tttagttcatggtga

SEQ ID NO: 1693321 - DNA, 15 bp, Homo sapiens
ttagttcatggtgat

SEQ ID NO: 1693322 - DNA, 15 bp, Homo sapiens
tagttcatggtgatc

SEQ ID NO: 1693323 - DNA, 15 bp, Homo sapiens
agttcatggtgatct

SEQ ID NO: 1693324 - DNA, 15 bp, Homo sapiens
gttcatggtgatcta

SEQ ID NO: 1693325 - DNA, 15 bp, Homo sapiens
ttcatggtgatctaa

SEQ ID NO: 1693326 - DNA, 15 bp, Homo sapiens
tcatggtgatctaaa

SEQ ID NO: 1693327 - DNA, 15 bp, Homo sapiens
catggtgatctaaaa

SEQ ID NO: 1693328 - DNA, 15 bp, Homo sapiens
atggtgatctaaaag

SEQ ID NO: 1693329 - DNA, 15 bp, Homo sapiens
tggtgatctaaaaga

SEQ ID NO: 1693330 - DNA, 15 bp, Homo sapiens
ggtgatctaaaagaa

SEQ ID NO: 1693331 - DNA, 15 bp, Homo sapiens
gtgatctaaaagaaa

SEQ ID NO: 1693332 - DNA, 15 bp, Homo sapiens
tgatctaaaagaaac

SEQ ID NO: 1693333 - DNA, 15 bp, Homo sapiens
gatctaaaagaaacc

SEQ ID NO: 1693334 - DNA, 15 bp, Homo sapiens
atctaaaagaaaccc

SEQ ID NO: 1693335 - DNA, 15 bp, Homo sapiens
tctaaaagaaaccct

SEQ ID NO: 1693336 - DNA, 15 bp, Homo sapiens
ctaaaagaaaccctt

SEQ ID NO: 1693337 - DNA, 15 bp, Homo sapiens
taaaagaaacccttc

SEQ ID NO: 1693338 - DNA, 15 bp, Homo sapiens
aaaagaaacccttcc

SEQ ID NO: 1693339 - DNA, 15 bp, Homo sapiens
aaagaaacccttcct

SEQ ID NO: 1693340 - DNA, 15 bp, Homo sapiens
aagaaacccttcctt

SEQ ID NO: 1693341 - DNA, 15 bp, Homo sapiens
agaaacccttcctta

SEQ ID NO: 1693342 - DNA, 15 bp, Homo sapiens
gaaacccttccttat

SEQ ID NO: 1693343 - DNA, 15 bp, Homo sapiens
aaacccttccttatt

SEQ ID NO: 1693344 - DNA, 15 bp, Homo sapiens
aacccttccttattc

SEQ ID NO: 1693345 - DNA, 15 bp, Homo sapiens
acccttccttattca

SEQ ID NO: 1693346 - DNA, 15 bp, Homo sapiens
cccttccttattcac

SEQ ID NO: 1693347 - DNA, 15 bp, Homo sapiens
ccttccttattcaca

SEQ ID NO: 1693348 - DNA, 15 bp, Homo sapiens
cttccttattcacat

SEQ ID NO: 1693349 - DNA, 15 bp, Homo sapiens
ttccttattcacatt

SEQ ID NO: 1693350 - DNA, 15 bp, Homo sapiens
tccttattcacattt

SEQ ID NO: 1693351 - DNA, 15 bp, Homo sapiens
ccttattcacattta

SEQ ID NO: 1693352 - DNA, 15 bp, Homo sapiens
cttattcacatttaa

SEQ ID NO: 1693353 - DNA, 15 bp, Homo sapiens
ttattcacatttaag

SEQ ID NO: 1693354 - DNA, 15 bp, Homo sapiens
tattcacatttaaga

SEQ ID NO: 1693355 - DNA, 15 bp, Homo sapiens
attcacatttaagag

SEQ ID NO: 1693356 - DNA, 15 bp, Homo sapiens
ttcacatttaagagg

SEQ ID NO: 1693357 - DNA, 15 bp, Homo sapiens
tcacatttaagaggc

SEQ ID NO: 1693358 - DNA, 15 bp, Homo sapiens
cacatttaagaggca

SEQ ID NO: 1693359 - DNA, 15 bp, Homo sapiens
acatttaagaggcag

SEQ ID NO: 1693360 - DNA, 15 bp, Homo sapiens
catttaagaggcagt

SEQ ID NO: 1693361 - DNA, 15 bp, Homo sapiens
atttaagaggcagtt

SEQ ID NO: 1693362 - DNA, 15 bp, Homo sapiens
tttaagaggcagttt

SEQ ID NO: 1693363 - DNA, 15 bp, Homo sapiens
ttaagaggcagttta

SEQ ID NO: 1693364 - DNA, 15 bp, Homo sapiens
taagaggcagtttat

SEQ ID NO: 1693365 - DNA, 15 bp, Homo sapiens
aagaggcagtttata

SEQ ID NO: 1693366 - DNA, 15 bp, Homo sapiens
agaggcagtttataa

SEQ ID NO: 1693367 - DNA, 15 bp, Homo sapiens
gaggcagtttataaa

SEQ ID NO: 1693368 - DNA, 15 bp, Homo sapiens
aggcagtttataaag

SEQ ID NO: 1693369 - DNA, 15 bp, Homo sapiens
ggcagtttataaagt

SEQ ID NO: 1693370 - DNA, 15 bp, Homo sapiens
gcagtttataaagtc

SEQ ID NO: 1693371 - DNA, 15 bp, Homo sapiens
cagtttataaagtca

SEQ ID NO: 1693372 - DNA, 15 bp, Homo sapiens
agtttataaagtcaa

SEQ ID NO: 1693373 - DNA, 15 bp, Homo sapiens
gtttataaagtcaag

SEQ ID NO: 1693374 - DNA, 15 bp, Homo sapiens
tttataaagtcaaga

SEQ ID NO: 1693375 - DNA, 15 bp, Homo sapiens
ttataaagtcaagaa

SEQ ID NO: 1693376 - DNA, 15 bp, Homo sapiens
tataaagtcaagaaa

SEQ ID NO: 1693377 - DNA, 15 bp, Homo sapiens
ataaagtcaagaaat

SEQ ID NO: 1693378 - DNA, 15 bp, Homo sapiens
taaagtcaagaaatg

SEQ ID NO: 1693379 - DNA, 15 bp, Homo sapiens
aaagtcaagaaatgt

SEQ ID NO: 1693380 - DNA, 15 bp, Homo sapiens
aagtcaagaaatgtg

SEQ ID NO: 1693381 - DNA, 15 bp, Homo sapiens
agtcaagaaatgtgt

SEQ ID NO: 1693382 - DNA, 15 bp, Homo sapiens
gtcaagaaatgtgtt

SEQ ID NO: 1693383 - DNA, 15 bp, Homo sapiens
tcaagaaatgtgttg

SEQ ID NO: 1693384 - DNA, 15 bp, Homo sapiens
caagaaatgtgttgt

SEQ ID NO: 1693385 - DNA, 15 bp, Homo sapiens
aagaaatgtgttgtt

SEQ ID NO: 1693386 - DNA, 15 bp, Homo sapiens
agaaatgtgttgtta

SEQ ID NO: 1693387 - DNA, 15 bp, Homo sapiens
gaaatgtgttgttaa

SEQ ID NO: 1693388 - DNA, 15 bp, Homo sapiens
aaatgtgttgttaac

SEQ ID NO: 1693389 - DNA, 15 bp, Homo sapiens
aatgtgttgttaaca

SEQ ID NO: 1693390 - DNA, 15 bp, Homo sapiens
atgtgttgttaacat

SEQ ID NO: 1693391 - DNA, 15 bp, Homo sapiens
tgtgttgttaacatg

SEQ ID NO: 1693392 - DNA, 15 bp, Homo sapiens
gtgttgttaacatgg

SEQ ID NO: 1693393 - DNA, 15 bp, Homo sapiens
tgttgttaacatggt

SEQ ID NO: 1693394 - DNA, 15 bp, Homo sapiens
gttgttaacatggtg

SEQ ID NO: 1693395 - DNA, 15 bp, Homo sapiens
ttgttaacatggtga

SEQ ID NO: 1693396 - DNA, 15 bp, Homo sapiens
tgttaacatggtgac

SEQ ID NO: 1693397 - DNA, 15 bp, Homo sapiens
gttaacatggtgact

SEQ ID NO: 1693398 - DNA, 15 bp, Homo sapiens
ttaacatggtgacta

SEQ ID NO: 1693399 - DNA, 15 bp, Homo sapiens
taacatggtgactat

SEQ ID NO: 1693400 - DNA, 15 bp, Homo sapiens
aacatggtgactatg

SEQ ID NO: 1693401 - DNA, 15 bp, Homo sapiens
acatggtgactatgg

SEQ ID NO: 1693402 - DNA, 15 bp, Homo sapiens
catggtgactatggt

SEQ ID NO: 1693403 - DNA, 15 bp, Homo sapiens
atggtgactatggtt

SEQ ID NO: 1693404 - DNA, 15 bp, Homo sapiens
tggtgactatggtta

SEQ ID NO: 1693405 - DNA, 15 bp, Homo sapiens
ggtgactatggttaa

SEQ ID NO: 1693406 - DNA, 15 bp, Homo sapiens
gtgactatggttaat

SEQ ID NO: 1693407 - DNA, 15 bp, Homo sapiens
tgactatggttaata

SEQ ID NO: 1693408 - DNA, 15 bp, Homo sapiens
gactatggttaataa

SEQ ID NO: 1693409 - DNA, 15 bp, Homo sapiens
actatggttaataac

SEQ ID NO: 1693410 - DNA, 15 bp, Homo sapiens
ctatggttaataaca

SEQ ID NO: 1693411 - DNA, 15 bp, Homo sapiens
tatggttaataacat

SEQ ID NO: 1693412 - DNA, 15 bp, Homo sapiens
atggttaataacatc

SEQ ID NO: 1693413 - DNA, 15 bp, Homo sapiens
tggttaataacatca

SEQ ID NO: 1693414 - DNA, 15 bp, Homo sapiens
ggttaataacatcac

SEQ ID NO: 1693415 - DNA, 15 bp, Homo sapiens
gttaataacatcaca

SEQ ID NO: 1693416 - DNA, 15 bp, Homo sapiens
ttaataacatcacat

SEQ ID NO: 1693417 - DNA, 15 bp, Homo sapiens
taataacatcacatt

SEQ ID NO: 1693418 - DNA, 15 bp, Homo sapiens
aataacatcacattg

SEQ ID NO: 1693419 - DNA, 15 bp, Homo sapiens
ataacatcacattgc

SEQ ID NO: 1693420 - DNA, 15 bp, Homo sapiens
taacatcacattgca

SEQ ID NO: 1693421 - DNA, 15 bp, Homo sapiens
aacatcacattgcat

SEQ ID NO: 1693422 - DNA, 15 bp, Homo sapiens
acatcacattgcata

SEQ ID NO: 1693423 - DNA, 15 bp, Homo sapiens
catcacattgcatac

SEQ ID NO: 1693424 - DNA, 15 bp, Homo sapiens
atcacattgcatact

SEQ ID NO: 1693425 - DNA, 15 bp, Homo sapiens
tcacattgcatactt

SEQ ID NO: 1693426 - DNA, 15 bp, Homo sapiens
cacattgcatacttg

SEQ ID NO: 1693427 - DNA, 15 bp, Homo sapiens
acattgcatacttga

SEQ ID NO: 1693428 - DNA, 15 bp, Homo sapiens
cattgcatacttgaa

SEQ ID NO: 1693429 - DNA, 15 bp, Homo sapiens
attgcatacttgaaa

SEQ ID NO: 1693430 - DNA, 15 bp, Homo sapiens
ttgcatacttgaaaa

SEQ ID NO: 1693431 - DNA, 15 bp, Homo sapiens
tgcatacttgaaaat

SEQ ID NO: 1693432 - DNA, 15 bp, Homo sapiens
gcatacttgaaaatt

SEQ ID NO: 1693433 - DNA, 15 bp, Homo sapiens
catacttgaaaattg

SEQ ID NO: 1693434 - DNA, 15 bp, Homo sapiens
atacttgaaaattgc

SEQ ID NO: 1693435 - DNA, 15 bp, Homo sapiens
tacttgaaaattgct

SEQ ID NO: 1693436 - DNA, 15 bp, Homo sapiens
acttgaaaattgcta

SEQ ID NO: 1693437 - DNA, 15 bp, Homo sapiens
cttgaaaattgctaa

SEQ ID NO: 1693438 - DNA, 15 bp, Homo sapiens
ttgaaaattgctaag

SEQ ID NO: 1693439 - DNA, 15 bp, Homo sapiens
tgaaaattgctaaga

SEQ ID NO: 1693440 - DNA, 15 bp, Homo sapiens
gaaaattgctaagaa

SEQ ID NO: 1693441 - DNA, 15 bp, Homo sapiens
aaaattgctaagaat

SEQ ID NO: 1693442 - DNA, 15 bp, Homo sapiens
aaattgctaagaata

SEQ ID NO: 1693443 - DNA, 15 bp, Homo sapiens
aattgctaagaatag

SEQ ID NO: 1693444 - DNA, 15 bp, Homo sapiens
attgctaagaataga

SEQ ID NO: 1693445 - DNA, 15 bp, Homo sapiens
ttgctaagaatagat

SEQ ID NO: 1693446 - DNA, 15 bp, Homo sapiens
tgctaagaatagatt

SEQ ID NO: 1693447 - DNA, 15 bp, Homo sapiens
gctaagaatagattt

SEQ ID NO: 1693448 - DNA, 15 bp, Homo sapiens
ctaagaatagatttt

SEQ ID NO: 1693449 - DNA, 15 bp, Homo sapiens
taagaatagattttt

SEQ ID NO: 1693450 - DNA, 15 bp, Homo sapiens
aagaatagattttta

SEQ ID NO: 1693451 - DNA, 15 bp, Homo sapiens
agaatagatttttaa

SEQ ID NO: 1693452 - DNA, 15 bp, Homo sapiens
gaatagatttttaag

SEQ ID NO: 1693453 - DNA, 15 bp, Homo sapiens
aatagatttttaagt

SEQ ID NO: 1693454 - DNA, 15 bp, Homo sapiens
atagatttttaagtg

SEQ ID NO: 1693455 - DNA, 15 bp, Homo sapiens
tagatttttaagtgt

SEQ ID NO: 1693456 - DNA, 15 bp, Homo sapiens
agatttttaagtgtt

SEQ ID NO: 1693457 - DNA, 15 bp, Homo sapiens
gatttttaagtgttc

SEQ ID NO: 1693458 - DNA, 15 bp, Homo sapiens
atttttaagtgttct

SEQ ID NO: 1693459 - DNA, 15 bp, Homo sapiens
tttttaagtgttctc

SEQ ID NO: 1693460 - DNA, 15 bp, Homo sapiens
ttttaagtgttctca

SEQ ID NO: 1693461 - DNA, 15 bp, Homo sapiens
tttaagtgttctcat

SEQ ID NO: 1693462 - DNA, 15 bp, Homo sapiens
ttaagtgttctcatc

SEQ ID NO: 1693463 - DNA, 15 bp, Homo sapiens
taagtgttctcatca

SEQ ID NO: 1693464 - DNA, 15 bp, Homo sapiens
aagtgttctcatcac

SEQ ID NO: 1693465 - DNA, 15 bp, Homo sapiens
agtgttctcatcaca

SEQ ID NO: 1693466 - DNA, 15 bp, Homo sapiens
gtgttctcatcacac

SEQ ID NO: 1693467 - DNA, 15 bp, Homo sapiens
tgttctcatcacaca

SEQ ID NO: 1693468 - DNA, 15 bp, Homo sapiens
gttctcatcacacac

SEQ ID NO: 1693469 - DNA, 15 bp, Homo sapiens
ttctcatcacacaca

SEQ ID NO: 1693470 - DNA, 15 bp, Homo sapiens
tctcatcacacacac

SEQ ID NO: 1693471 - DNA, 15 bp, Homo sapiens
ctcatcacacacaca

SEQ ID NO: 1693472 - DNA, 15 bp, Homo sapiens
tcatcacacacacac

SEQ ID NO: 1693473 - DNA, 15 bp, Homo sapiens
cacacacacaatata

SEQ ID NO: 1693474 - DNA, 15 bp, Homo sapiens
acacacacaatataa

SEQ ID NO: 1693475 - DNA, 15 bp, Homo sapiens
cacacacaatataag

SEQ ID NO: 1693476 - DNA, 15 bp, Homo sapiens
acacacaatataagt

SEQ ID NO: 1693477 - DNA, 15 bp, Homo sapiens
cacacaatataagta

SEQ ID NO: 1693478 - DNA, 15 bp, Homo sapiens
acacaatataagtat

SEQ ID NO: 1693479 - DNA, 15 bp, Homo sapiens
atcatttaggaacac

SEQ ID NO: 1693480 - DNA, 15 bp, Homo sapiens
tcatttaggaacact

SEQ ID NO: 1693481 - DNA, 15 bp, Homo sapiens
catttaggaacactc

SEQ ID NO: 1693482 - DNA, 15 bp, Homo sapiens
atttaggaacactca

SEQ ID NO: 1693483 - DNA, 15 bp, Homo sapiens
tttaggaacactcag

SEQ ID NO: 1693484 - DNA, 15 bp, Homo sapiens
ttaggaacactcagt

SEQ ID NO: 1693485 - DNA, 15 bp, Homo sapiens
taggaacactcagtt

SEQ ID NO: 1693486 - DNA, 15 bp, Homo sapiens
aggaacactcagttt

SEQ ID NO: 1693487 - DNA, 15 bp, Homo sapiens
ggaacactcagtttt

SEQ ID NO: 1693488 - DNA, 15 bp, Homo sapiens
gaacactcagtttta

SEQ ID NO: 1693489 - DNA, 15 bp, Homo sapiens
aacactcagttttaa

SEQ ID NO: 1693490 - DNA, 15 bp, Homo sapiens
acactcagttttaat

SEQ ID NO: 1693491 - DNA, 15 bp, Homo sapiens
cactcagttttaatc

SEQ ID NO: 1693492 - DNA, 15 bp, Homo sapiens
actcagttttaatca

SEQ ID NO: 1693493 - DNA, 15 bp, Homo sapiens
ctcagttttaatcat

SEQ ID NO: 1693494 - DNA, 15 bp, Homo sapiens
tcagttttaatcatc

SEQ ID NO: 1693495 - DNA, 15 bp, Homo sapiens
cagttttaatcatca

SEQ ID NO: 1693496 - DNA, 15 bp, Homo sapiens
agttttaatcatcat

SEQ ID NO: 1693497 - DNA, 15 bp, Homo sapiens
gttttaatcatcatc

SEQ ID NO: 1693498 - DNA, 15 bp, Homo sapiens
ttttaatcatcatct

SEQ ID NO: 1693499 - DNA, 15 bp, Homo sapiens
tttaatcatcatcta

SEQ ID NO: 1693500 - DNA, 15 bp, Homo sapiens
ttaatcatcatctac

SEQ ID NO: 1693501 - DNA, 15 bp, Homo sapiens
taatcatcatctacc

SEQ ID NO: 1693502 - DNA, 15 bp, Homo sapiens
aatcatcatctacca

SEQ ID NO: 1693503 - DNA, 15 bp, Homo sapiens
atcatcatctaccat

SEQ ID NO: 1693504 - DNA, 15 bp, Homo sapiens
tcatcatctaccatg

SEQ ID NO: 1693505 - DNA, 15 bp, Homo sapiens
catcatctaccatgg

SEQ ID NO: 1693506 - DNA, 15 bp, Homo sapiens
atcatctaccatgga

SEQ ID NO: 1693507 - DNA, 15 bp, Homo sapiens
tcatctaccatggat

SEQ ID NO: 1693508 - DNA, 15 bp, Homo sapiens
catctaccatggata

SEQ ID NO: 1693509 - DNA, 15 bp, Homo sapiens
atctaccatggatac

SEQ ID NO: 1693510 - DNA, 15 bp, Homo sapiens
tctaccatggatact

SEQ ID NO: 1693511 - DNA, 15 bp, Homo sapiens
ctaccatggatactc

SEQ ID NO: 1693512 - DNA, 15 bp, Homo sapiens
taccatggatactca

SEQ ID NO: 1693513 - DNA, 15 bp, Homo sapiens
accatggatactcaa

SEQ ID NO: 1693514 - DNA, 15 bp, Homo sapiens
ccatggatactcaaa

SEQ ID NO: 1693515 - DNA, 15 bp, Homo sapiens
catggatactcaaaa

SEQ ID NO: 1693516 - DNA, 15 bp, Homo sapiens
atggatactcaaaag

SEQ ID NO: 1693517 - DNA, 15 bp, Homo sapiens
tggatactcaaaaga

SEQ ID NO: 1693518 - DNA, 15 bp, Homo sapiens
ggatactcaaaagaa

SEQ ID NO: 1693519 - DNA, 15 bp, Homo sapiens
gatactcaaaagaat

SEQ ID NO: 1693520 - DNA, 15 bp, Homo sapiens
atactcaaaagaata

SEQ ID NO: 1693521 - DNA, 15 bp, Homo sapiens
tactcaaaagaatac

SEQ ID NO: 1693522 - DNA, 15 bp, Homo sapiens
actcaaaagaatacc

SEQ ID NO: 1693523 - DNA, 15 bp, Homo sapiens
ctcaaaagaataccc

SEQ ID NO: 1693524 - DNA, 15 bp, Homo sapiens
tcaaaagaataccct

SEQ ID NO: 1693525 - DNA, 15 bp, Homo sapiens
caaaagaataccctc

SEQ ID NO: 1693526 - DNA, 15 bp, Homo sapiens
aaaagaataccctcg

SEQ ID NO: 1693527 - DNA, 15 bp, Homo sapiens
aaagaataccctcgg

SEQ ID NO: 1693528 - DNA, 15 bp, Homo sapiens
aagaataccctcgga

SEQ ID NO: 1693529 - DNA, 15 bp, Homo sapiens
agaataccctcggac

SEQ ID NO: 1693530 - DNA, 15 bp, Homo sapiens
gaataccctcggacc

SEQ ID NO: 1693531 - DNA, 15 bp, Homo sapiens
aataccctcggaccc

SEQ ID NO: 1693532 - DNA, 15 bp, Homo sapiens
ataccctcggacccc

SEQ ID NO: 1693533 - DNA, 15 bp, Homo sapiens
taccctcggaccccc

SEQ ID NO: 1693534 - DNA, 15 bp, Homo sapiens
accctcggacccccg

SEQ ID NO: 1693535 - DNA, 15 bp, Homo sapiens
ccctcggacccccga

SEQ ID NO: 1693536 - DNA, 15 bp, Homo sapiens
cctcggacccccgat

SEQ ID NO: 1693537 - DNA, 15 bp, Homo sapiens
ctcggacccccgatt

SEQ ID NO: 1693538 - DNA, 15 bp, Homo sapiens
tcggacccccgattg

SEQ ID NO: 1693539 - DNA, 15 bp, Homo sapiens
cggacccccgattgg

SEQ ID NO: 1693540 - DNA, 15 bp, Homo sapiens
ggacccccgattggt

SEQ ID NO: 1693541 - DNA, 15 bp, Homo sapiens
gacccccgattggtt

SEQ ID NO: 1693542 - DNA, 15 bp, Homo sapiens
acccccgattggttg

SEQ ID NO: 1693543 - DNA, 15 bp, Homo sapiens
cccccgattggttga

SEQ ID NO: 1693544 - DNA, 15 bp, Homo sapiens
ccccgattggttgac

SEQ ID NO: 1693545 - DNA, 15 bp, Homo sapiens
cccgattggttgact

SEQ ID NO: 1693546 - DNA, 15 bp, Homo sapiens
ccgattggttgacta

SEQ ID NO: 1693547 - DNA, 15 bp, Homo sapiens
cgattggttgactag

SEQ ID NO: 1693548 - DNA, 15 bp, Homo sapiens
gattggttgactagt

SEQ ID NO: 1693549 - DNA, 15 bp, Homo sapiens
attggttgactagtt

SEQ ID NO: 1693550 - DNA, 15 bp, Homo sapiens
ttggttgactagttg

SEQ ID NO: 1693551 - DNA, 15 bp, Homo sapiens
tggttgactagttgc

SEQ ID NO: 1693552 - DNA, 15 bp, Homo sapiens
ggttgactagttgcc

SEQ ID NO: 1693553 - DNA, 15 bp, Homo sapiens
gttgactagttgcct

SEQ ID NO: 1693554 - DNA, 15 bp, Homo sapiens
ttgactagttgcctg

SEQ ID NO: 1693555 - DNA, 15 bp, Homo sapiens
tgactagttgcctgg

SEQ ID NO: 1693556 - DNA, 15 bp, Homo sapiens
gactagttgcctggt

SEQ ID NO: 1693557 - DNA, 15 bp, Homo sapiens
actagttgcctggtc

SEQ ID NO: 1693558 - DNA, 15 bp, Homo sapiens
ctagttgcctggtct

SEQ ID NO: 1693559 - DNA, 15 bp, Homo sapiens
tagttgcctggtctt

SEQ ID NO: 1693560 - DNA, 15 bp, Homo sapiens
agttgcctggtctta

SEQ ID NO: 1693561 - DNA, 15 bp, Homo sapiens
gttgcctggtcttag

SEQ ID NO: 1693562 - DNA, 15 bp, Homo sapiens
ttgcctggtcttaga

SEQ ID NO: 1693563 - DNA, 15 bp, Homo sapiens
tgcctggtcttagaa

SEQ ID NO: 1693564 - DNA, 15 bp, Homo sapiens
gcctggtcttagaaa

SEQ ID NO: 1693565 - DNA, 15 bp, Homo sapiens
cctggtcttagaaac

SEQ ID NO: 1693566 - DNA, 15 bp, Homo sapiens
ctggtcttagaaact

SEQ ID NO: 1693567 - DNA, 15 bp, Homo sapiens
tggtcttagaaactt

SEQ ID NO: 1693568 - DNA, 15 bp, Homo sapiens
ggtcttagaaactta

SEQ ID NO: 1693569 - DNA, 15 bp, Homo sapiens
gtcttagaaacttaa

SEQ ID NO: 1693570 - DNA, 15 bp, Homo sapiens
tcttagaaacttaat

SEQ ID NO: 1693571 - DNA, 15 bp, Homo sapiens
cttagaaacttaatc

SEQ ID NO: 1693572 - DNA, 15 bp, Homo sapiens
ttagaaacttaatct

SEQ ID NO: 1693573 - DNA, 15 bp, Homo sapiens
tagaaacttaatctt

SEQ ID NO: 1693574 - DNA, 15 bp, Homo sapiens
agaaacttaatcttt

SEQ ID NO: 1693575 - DNA, 15 bp, Homo sapiens
gaaacttaatctttc

SEQ ID NO: 1693576 - DNA, 15 bp, Homo sapiens
aaacttaatctttct

SEQ ID NO: 1693577 - DNA, 15 bp, Homo sapiens
aacttaatctttctg

SEQ ID NO: 1693578 - DNA, 15 bp, Homo sapiens
acttaatctttctgc

SEQ ID NO: 1693579 - DNA, 15 bp, Homo sapiens
cttaatctttctgca

SEQ ID NO: 1693580 - DNA, 15 bp, Homo sapiens
ttaatctttctgcaa

SEQ ID NO: 1693581 - DNA, 15 bp, Homo sapiens
taatctttctgcaat

SEQ ID NO: 1693582 - DNA, 15 bp, Homo sapiens
aatctttctgcaatt

SEQ ID NO: 1693583 - DNA, 15 bp, Homo sapiens
atctttctgcaattc

SEQ ID NO: 1693584 - DNA, 15 bp, Homo sapiens
tctttctgcaattcc

SEQ ID NO: 1693585 - DNA, 15 bp, Homo sapiens
ctttctgcaattcct

SEQ ID NO: 1693586 - DNA, 15 bp, Homo sapiens
tttctgcaattcctc

SEQ ID NO: 1693587 - DNA, 15 bp, Homo sapiens
ttctgcaattcctcc

SEQ ID NO: 1693588 - DNA, 15 bp, Homo sapiens
tctgcaattcctcca

SEQ ID NO: 1693589 - DNA, 15 bp, Homo sapiens
ctgcaattcctccac

SEQ ID NO: 1693590 - DNA, 15 bp, Homo sapiens
tgcaattcctccact

SEQ ID NO: 1693591 - DNA, 15 bp, Homo sapiens
gcaattcctccactt

SEQ ID NO: 1693592 - DNA, 15 bp, Homo sapiens
caattcctccacttc

SEQ ID NO: 1693593 - DNA, 15 bp, Homo sapiens
aattcctccacttct

SEQ ID NO: 1693594 - DNA, 15 bp, Homo sapiens
attcctccacttctt

SEQ ID NO: 1693595 - DNA, 15 bp, Homo sapiens
ttcctccacttcttc

SEQ ID NO: 1693596 - DNA, 15 bp, Homo sapiens
tcctccacttcttca

SEQ ID NO: 1693597 - DNA, 15 bp, Homo sapiens
cctccacttcttcaa

SEQ ID NO: 1693598 - DNA, 15 bp, Homo sapiens
ctccacttcttcaac

SEQ ID NO: 1693599 - DNA, 15 bp, Homo sapiens
tccacttcttcaact

SEQ ID NO: 1693600 - DNA, 15 bp, Homo sapiens
ccacttcttcaactg

SEQ ID NO: 1693601 - DNA, 15 bp, Homo sapiens
cacttcttcaactga

SEQ ID NO: 1693602 - DNA, 15 bp, Homo sapiens
acttcttcaactgaa

SEQ ID NO: 1693603 - DNA, 15 bp, Homo sapiens
cttcttcaactgaaa

SEQ ID NO: 1693604 - DNA, 15 bp, Homo sapiens
ttcttcaactgaaaa

SEQ ID NO: 1693605 - DNA, 15 bp, Homo sapiens
tcttcaactgaaaat

SEQ ID NO: 1693606 - DNA, 15 bp, Homo sapiens
cttcaactgaaaatg

SEQ ID NO: 1693607 - DNA, 15 bp, Homo sapiens
ttcaactgaaaatgg

SEQ ID NO: 1693608 - DNA, 15 bp, Homo sapiens
tcaactgaaaatggg

SEQ ID NO: 1693609 - DNA, 15 bp, Homo sapiens
caactgaaaatgggc

SEQ ID NO: 1693610 - DNA, 15 bp, Homo sapiens
aactgaaaatgggca

SEQ ID NO: 1693611 - DNA, 15 bp, Homo sapiens
actgaaaatgggcat

SEQ ID NO: 1693612 - DNA, 15 bp, Homo sapiens
ctgaaaatgggcata

SEQ ID NO: 1693613 - DNA, 15 bp, Homo sapiens
tgaaaatgggcatat

SEQ ID NO: 1693614 - DNA, 15 bp, Homo sapiens
gaaaatgggcatatc

SEQ ID NO: 1693615 - DNA, 15 bp, Homo sapiens
aaaatgggcatatca

SEQ ID NO: 1693616 - DNA, 15 bp, Homo sapiens
aaatgggcatatcac

SEQ ID NO: 1693617 - DNA, 15 bp, Homo sapiens
aatgggcatatcacc

SEQ ID NO: 1693618 - DNA, 15 bp, Homo sapiens
atgggcatatcacca

SEQ ID NO: 1693619 - DNA, 15 bp, Homo sapiens
tgggcatatcaccag

SEQ ID NO: 1693620 - DNA, 15 bp, Homo sapiens
gggcatatcaccagt

SEQ ID NO: 1693621 - DNA, 15 bp, Homo sapiens
ggcatatcaccagtc

SEQ ID NO: 1693622 - DNA, 15 bp, Homo sapiens
gcatatcaccagtct

SEQ ID NO: 1693623 - DNA, 15 bp, Homo sapiens
catatcaccagtcta

SEQ ID NO: 1693624 - DNA, 15 bp, Homo sapiens
atatcaccagtctag

SEQ ID NO: 1693625 - DNA, 15 bp, Homo sapiens
tatcaccagtctagt

SEQ ID NO: 1693626 - DNA, 15 bp, Homo sapiens
atcaccagtctagtt

SEQ ID NO: 1693627 - DNA, 15 bp, Homo sapiens
tcaccagtctagttt

SEQ ID NO: 1693628 - DNA, 15 bp, Homo sapiens
caccagtctagtttg

SEQ ID NO: 1693629 - DNA, 15 bp, Homo sapiens
accagtctagtttgg

SEQ ID NO: 1693630 - DNA, 15 bp, Homo sapiens
ccagtctagtttggt

SEQ ID NO: 1693631 - DNA, 15 bp, Homo sapiens
cagtctagtttggtg

SEQ ID NO: 1693632 - DNA, 15 bp, Homo sapiens
agtctagtttggtga

SEQ ID NO: 1693633 - DNA, 15 bp, Homo sapiens
gtctagtttggtgac

SEQ ID NO: 1693634 - DNA, 15 bp, Homo sapiens
tctagtttggtgacg

SEQ ID NO: 1693635 - DNA, 15 bp, Homo sapiens
ctagtttggtgacgg

SEQ ID NO: 1693636 - DNA, 15 bp, Homo sapiens
tagtttggtgacggt

SEQ ID NO: 1693637 - DNA, 15 bp, Homo sapiens
agtttggtgacggtg

SEQ ID NO: 1693638 - DNA, 15 bp, Homo sapiens
gtttggtgacggtga

SEQ ID NO: 1693639 - DNA, 15 bp, Homo sapiens
tttggtgacggtgac

SEQ ID NO: 1693640 - DNA, 15 bp, Homo sapiens
ttggtgacggtgaca

SEQ ID NO: 1693641 - DNA, 15 bp, Homo sapiens
tggtgacggtgacaa

SEQ ID NO: 1693642 - DNA, 15 bp, Homo sapiens
ggtgacggtgacaat

SEQ ID NO: 1693643 - DNA, 15 bp, Homo sapiens
gtgacggtgacaatt

SEQ ID NO: 1693644 - DNA, 15 bp, Homo sapiens
tgacggtgacaatta

SEQ ID NO: 1693645 - DNA, 15 bp, Homo sapiens
gacggtgacaattat

SEQ ID NO: 1693646 - DNA, 15 bp, Homo sapiens
acggtgacaattatg

SEQ ID NO: 1693647 - DNA, 15 bp, Homo sapiens
cggtgacaattatgt

SEQ ID NO: 1693648 - DNA, 15 bp, Homo sapiens
ggtgacaattatgta

SEQ ID NO: 1693649 - DNA, 15 bp, Homo sapiens
gtgacaattatgtaa

SEQ ID NO: 1693650 - DNA, 15 bp, Homo sapiens
tgacaattatgtaaa

SEQ ID NO: 1693651 - DNA, 15 bp, Homo sapiens
gacaattatgtaaat

SEQ ID NO: 1693652 - DNA, 15 bp, Homo sapiens
acaattatgtaaata

SEQ ID NO: 1693653 - DNA, 15 bp, Homo sapiens
caattatgtaaataa

SEQ ID NO: 1693654 - DNA, 15 bp, Homo sapiens
aattatgtaaataaa

SEQ ID NO: 1693655 - DNA, 15 bp, Homo sapiens
attatgtaaataaaa

SEQ ID NO: 1693656 - DNA, 15 bp, Homo sapiens
ttatgtaaataaaag

SEQ ID NO: 1693657 - DNA, 15 bp, Homo sapiens
tatgtaaataaaagt

SEQ ID NO: 1693658 - DNA, 15 bp, Homo sapiens
atgtaaataaaagta

SEQ ID NO: 1693659 - DNA, 15 bp, Homo sapiens
tgtaaataaaagtat

SEQ ID NO: 1693660 - DNA, 15 bp, Homo sapiens
gtaaataaaagtata

SEQ ID NO: 1693661 - DNA, 15 bp, Homo sapiens
taaataaaagtataa

SEQ ID NO: 1693662 - DNA, 15 bp, Homo sapiens
aaataaaagtataaa

SEQ ID NO: 1693663 - DNA, 15 bp, Homo sapiens
aataaaagtataaaa

SEQ ID NO: 1693664 - DNA, 15 bp, Homo sapiens
ataaaagtataaaaa

SEQ ID NO: 1693665 - DNA, 15 bp, Homo sapiens
taaaagtataaaaac

SEQ ID NO: 1693666 - DNA, 15 bp, Homo sapiens
aaaagtataaaaaca

SEQ ID NO: 1693667 - DNA, 15 bp, Homo sapiens
aaagtataaaaacac

SEQ ID NO: 1693668 - DNA, 15 bp, Homo sapiens
aagtataaaaacacc

SEQ ID NO: 1693669 - DNA, 15 bp, Homo sapiens
agtataaaaacacct

SEQ ID NO: 1693670 - DNA, 15 bp, Homo sapiens
gtataaaaacaccta

SEQ ID NO: 1693671 - DNA, 15 bp, Homo sapiens
tataaaaacacctag

SEQ ID NO: 1693672 - DNA, 15 bp, Homo sapiens
ataaaaacacctagt

SEQ ID NO: 1693673 - DNA, 15 bp, Homo sapiens
taaaaacacctagta

SEQ ID NO: 1693674 - DNA, 15 bp, Homo sapiens
aaaaacacctagtac

SEQ ID NO: 1693675 - DNA, 15 bp, Homo sapiens
aaaacacctagtaca

SEQ ID NO: 1693676 - DNA, 15 bp, Homo sapiens
aaacacctagtacat

SEQ ID NO: 1693677 - DNA, 15 bp, Homo sapiens
aacacctagtacatt

SEQ ID NO: 1693678 - DNA, 15 bp, Homo sapiens
acacctagtacattg

SEQ ID NO: 1693679 - DNA, 15 bp, Homo sapiens
cacctagtacattgt

SEQ ID NO: 1693680 - DNA, 15 bp, Homo sapiens
acctagtacattgtc

SEQ ID NO: 1693681 - DNA, 15 bp, Homo sapiens
cctagtacattgtct

SEQ ID NO: 1693682 - DNA, 15 bp, Homo sapiens
ctagtacattgtctc

SEQ ID NO: 1693683 - DNA, 15 bp, Homo sapiens
tagtacattgtctcc

SEQ ID NO: 1693684 - DNA, 15 bp, Homo sapiens
agtacattgtctcct

SEQ ID NO: 1693685 - DNA, 15 bp, Homo sapiens
gtacattgtctccta

SEQ ID NO: 1693686 - DNA, 15 bp, Homo sapiens
tacattgtctcctat

SEQ ID NO: 1693687 - DNA, 15 bp, Homo sapiens
acattgtctcctata

SEQ ID NO: 1693688 - DNA, 15 bp, Homo sapiens
cattgtctcctatat

SEQ ID NO: 1693689 - DNA, 15 bp, Homo sapiens
attgtctcctatatt

SEQ ID NO: 1693690 - DNA, 15 bp, Homo sapiens
ttgtctcctatatta

SEQ ID NO: 1693691 - DNA, 15 bp, Homo sapiens
tgtctcctatattat

SEQ ID NO: 1693692 - DNA, 15 bp, Homo sapiens
gtctcctatattatc

SEQ ID NO: 1693693 - DNA, 15 bp, Homo sapiens
tctcctatattatct

SEQ ID NO: 1693694 - DNA, 15 bp, Homo sapiens
ctcctatattatctt

SEQ ID NO: 1693695 - DNA, 15 bp, Homo sapiens
tcctatattatctta

SEQ ID NO: 1693696 - DNA, 15 bp, Homo sapiens
cctatattatcttag

SEQ ID NO: 1693697 - DNA, 15 bp, Homo sapiens
ctatattatcttagt

SEQ ID NO: 1693698 - DNA, 15 bp, Homo sapiens
tatattatcttagta

SEQ ID NO: 1693699 - DNA, 15 bp, Homo sapiens
atattatcttagtaa

SEQ ID NO: 1693700 - DNA, 15 bp, Homo sapiens
tattatcttagtaat

SEQ ID NO: 1693701 - DNA, 15 bp, Homo sapiens
attatcttagtaata

SEQ ID NO: 1693702 - DNA, 15 bp, Homo sapiens
ttatcttagtaatat

SEQ ID NO: 1693703 - DNA, 15 bp, Homo sapiens
tatcttagtaatata

SEQ ID NO: 1693704 - DNA, 15 bp, Homo sapiens
atcttagtaatatat

SEQ ID NO: 1693705 - DNA, 15 bp, Homo sapiens
tcttagtaatatata

SEQ ID NO: 1693706 - DNA, 15 bp, Homo sapiens
cttagtaatatataa

SEQ ID NO: 1693707 - DNA, 15 bp, Homo sapiens
ttagtaatatataat

SEQ ID NO: 1693708 - DNA, 15 bp, Homo sapiens
tagtaatatataata

SEQ ID NO: 1693709 - DNA, 15 bp, Homo sapiens
agtaatatataatat

SEQ ID NO: 1693710 - DNA, 15 bp, Homo sapiens
gtaatatataatata

SEQ ID NO: 1693711 - DNA, 15 bp, Homo sapiens
taatatataatatat

SEQ ID NO: 1693712 - DNA, 15 bp, Homo sapiens
aatatataatatata

SEQ ID NO: 1693713 - DNA, 15 bp, Homo sapiens
atatataatatataa

SEQ ID NO: 1693714 - DNA, 15 bp, Homo sapiens
tatataatatataat

SEQ ID NO: 1693715 - DNA, 15 bp, Homo sapiens
atataatatataata

SEQ ID NO: 1693716 - DNA, 15 bp, Homo sapiens
tataatatataataa

SEQ ID NO: 1693717 - DNA, 15 bp, Homo sapiens
ataatatataataat

SEQ ID NO: 1693718 - DNA, 15 bp, Homo sapiens
taatatataataata

SEQ ID NO: 1693719 - DNA, 15 bp, Homo sapiens
aatatataataatat

SEQ ID NO: 1693720 - DNA, 15 bp, Homo sapiens
atatataataatatt

SEQ ID NO: 1693721 - DNA, 15 bp, Homo sapiens
tatataataatattg

SEQ ID NO: 1693722 - DNA, 15 bp, Homo sapiens
atataataatattgt

SEQ ID NO: 1693723 - DNA, 15 bp, Homo sapiens
tataataatattgtt

SEQ ID NO: 1693724 - DNA, 15 bp, Homo sapiens
ataataatattgtta

SEQ ID NO: 1693725 - DNA, 15 bp, Homo sapiens
taataatattgttaa

SEQ ID NO: 1693726 - DNA, 15 bp, Homo sapiens
aataatattgttaac

SEQ ID NO: 1693727 - DNA, 15 bp, Homo sapiens
ataatattgttaaca

SEQ ID NO: 1693728 - DNA, 15 bp, Homo sapiens
taatattgttaacat

SEQ ID NO: 1693729 - DNA, 15 bp, Homo sapiens
aatattgttaacata

SEQ ID NO: 1693730 - DNA, 15 bp, Homo sapiens
atattgttaacatat

SEQ ID NO: 1693731 - DNA, 15 bp, Homo sapiens
tattgttaacatatg

SEQ ID NO: 1693732 - DNA, 15 bp, Homo sapiens
attgttaacatatgt

SEQ ID NO: 1693733 - DNA, 15 bp, Homo sapiens
ttgttaacatatgtt

SEQ ID NO: 1693734 - DNA, 15 bp, Homo sapiens
tgttaacatatgtta

SEQ ID NO: 1693735 - DNA, 15 bp, Homo sapiens
gttaacatatgttat

SEQ ID NO: 1693736 - DNA, 15 bp, Homo sapiens
ttaacatatgttata

SEQ ID NO: 1693737 - DNA, 15 bp, Homo sapiens
taacatatgttatac

SEQ ID NO: 1693738 - DNA, 15 bp, Homo sapiens
aacatatgttataca

SEQ ID NO: 1693739 - DNA, 15 bp, Homo sapiens
acatatgttatacat

SEQ ID NO: 1693740 - DNA, 15 bp, Homo sapiens
catatgttatacatt

SEQ ID NO: 1693741 - DNA, 15 bp, Homo sapiens
atatgttatacattt

SEQ ID NO: 1693742 - DNA, 15 bp, Homo sapiens
tatgttatacattta

SEQ ID NO: 1693743 - DNA, 15 bp, Homo sapiens
atgttatacatttat

SEQ ID NO: 1693744 - DNA, 15 bp, Homo sapiens
tgttatacatttata

SEQ ID NO: 1693745 - DNA, 15 bp, Homo sapiens
gttatacatttataa

SEQ ID NO: 1693746 - DNA, 15 bp, Homo sapiens
ttatacatttataat

SEQ ID NO: 1693747 - DNA, 15 bp, Homo sapiens
tatacatttataata

SEQ ID NO: 1693748 - DNA, 15 bp, Homo sapiens
atacatttataatat

SEQ ID NO: 1693749 - DNA, 15 bp, Homo sapiens
tacatttataatatt

SEQ ID NO: 1693750 - DNA, 15 bp, Homo sapiens
acatttataatatta

SEQ ID NO: 1693751 - DNA, 15 bp, Homo sapiens
catttataatattaa

SEQ ID NO: 1693752 - DNA, 15 bp, Homo sapiens
atttataatattaat

SEQ ID NO: 1693753 - DNA, 15 bp, Homo sapiens
tttataatattaata

SEQ ID NO: 1693754 - DNA, 15 bp, Homo sapiens
ttataatattaatac

SEQ ID NO: 1693755 - DNA, 15 bp, Homo sapiens
tataatattaataca

SEQ ID NO: 1693756 - DNA, 15 bp, Homo sapiens
ataatattaatacaa

SEQ ID NO: 1693757 - DNA, 15 bp, Homo sapiens
taatattaatacaac

SEQ ID NO: 1693758 - DNA, 15 bp, Homo sapiens
aatattaatacaaca

SEQ ID NO: 1693759 - DNA, 15 bp, Homo sapiens
atattaatacaacat

SEQ ID NO: 1693760 - DNA, 15 bp, Homo sapiens
tattaatacaacata

SEQ ID NO: 1693761 - DNA, 15 bp, Homo sapiens
attaatacaacatat

SEQ ID NO: 1693762 - DNA, 15 bp, Homo sapiens
ttaatacaacatatg

SEQ ID NO: 1693763 - DNA, 15 bp, Homo sapiens
taatacaacatatgt

SEQ ID NO: 1693764 - DNA, 15 bp, Homo sapiens
aatacaacatatgta

SEQ ID NO: 1693765 - DNA, 15 bp, Homo sapiens
atacaacatatgtat

SEQ ID NO: 1693766 - DNA, 15 bp, Homo sapiens
tacaacatatgtatt

SEQ ID NO: 1693767 - DNA, 15 bp, Homo sapiens
acaacatatgtatta

SEQ ID NO: 1693768 - DNA, 15 bp, Homo sapiens
caacatatgtattat

SEQ ID NO: 1693769 - DNA, 15 bp, Homo sapiens
aacatatgtattata

SEQ ID NO: 1693770 - DNA, 15 bp, Homo sapiens
acatatgtattatat

SEQ ID NO: 1693771 - DNA, 15 bp, Homo sapiens
catatgtattatata

SEQ ID NO: 1693772 - DNA, 15 bp, Homo sapiens
tatgtattatatatg

SEQ ID NO: 1693773 - DNA, 15 bp, Homo sapiens
atgtattatatatgt

SEQ ID NO: 1693774 - DNA, 15 bp, Homo sapiens
tgtattatatatgta

SEQ ID NO: 1693775 - DNA, 15 bp, Homo sapiens
gtattatatatgtat

SEQ ID NO: 1693776 - DNA, 15 bp, Homo sapiens
tattatatatgtatt

SEQ ID NO: 1693777 - DNA, 15 bp, Homo sapiens
attatatatgtatta

SEQ ID NO: 1693778 - DNA, 15 bp, Homo sapiens
ttatatatgtattat

SEQ ID NO: 1693779 - DNA, 15 bp, Homo sapiens
tatatatgtattatt

SEQ ID NO: 1693780 - DNA, 15 bp, Homo sapiens
atatatgtattatta

SEQ ID NO: 1693781 - DNA, 15 bp, Homo sapiens
tatatgtattattat

SEQ ID NO: 1693782 - DNA, 15 bp, Homo sapiens
atatgtattattata

SEQ ID NO: 1693783 - DNA, 15 bp, Homo sapiens
tatgtattattatat

SEQ ID NO: 1693784 - DNA, 15 bp, Homo sapiens
atgtattattatata

SEQ ID NO: 1693785 - DNA, 15 bp, Homo sapiens
tgtattattatataa

SEQ ID NO: 1693786 - DNA, 15 bp, Homo sapiens
gtattattatataat

SEQ ID NO: 1693787 - DNA, 15 bp, Homo sapiens
tattattatataatg

SEQ ID NO: 1693788 - DNA, 15 bp, Homo sapiens
attattatataatgg

SEQ ID NO: 1693789 - DNA, 15 bp, Homo sapiens
ttattatataatggc

SEQ ID NO: 1693790 - DNA, 15 bp, Homo sapiens
tattatataatggca

SEQ ID NO: 1693791 - DNA, 15 bp, Homo sapiens
attatataatggcac

SEQ ID NO: 1693792 - DNA, 15 bp, Homo sapiens
ttatataatggcaca

SEQ ID NO: 1693793 - DNA, 15 bp, Homo sapiens
tatataatggcacat

SEQ ID NO: 1693794 - DNA, 15 bp, Homo sapiens
atataatggcacata

SEQ ID NO: 1693795 - DNA, 15 bp, Homo sapiens
tataatggcacatat

SEQ ID NO: 1693796 - DNA, 15 bp, Homo sapiens
ataatggcacatatt

SEQ ID NO: 1693797 - DNA, 15 bp, Homo sapiens
taatggcacatatta

SEQ ID NO: 1693798 - DNA, 15 bp, Homo sapiens
aatggcacatattat

SEQ ID NO: 1693799 - DNA, 15 bp, Homo sapiens
atggcacatattata

SEQ ID NO: 1693800 - DNA, 15 bp, Homo sapiens
tggcacatattatat

SEQ ID NO: 1693801 - DNA, 15 bp, Homo sapiens
ggcacatattatata

SEQ ID NO: 1693802 - DNA, 15 bp, Homo sapiens
gcacatattatataa

SEQ ID NO: 1693803 - DNA, 15 bp, Homo sapiens
cacatattatataat

SEQ ID NO: 1693804 - DNA, 15 bp, Homo sapiens
acatattatataata

SEQ ID NO: 1693805 - DNA, 15 bp, Homo sapiens
catattatataatat

SEQ ID NO: 1693806 - DNA, 15 bp, Homo sapiens
atattatataatatc

SEQ ID NO: 1693807 - DNA, 15 bp, Homo sapiens
tattatataatatct

SEQ ID NO: 1693808 - DNA, 15 bp, Homo sapiens
attatataatatctc

SEQ ID NO: 1693809 - DNA, 15 bp, Homo sapiens
ttatataatatctca

SEQ ID NO: 1693810 - DNA, 15 bp, Homo sapiens
tatataatatctcag

SEQ ID NO: 1693811 - DNA, 15 bp, Homo sapiens
atataatatctcagt

SEQ ID NO: 1693812 - DNA, 15 bp, Homo sapiens
tataatatctcagta

SEQ ID NO: 1693813 - DNA, 15 bp, Homo sapiens
ataatatctcagtaa

SEQ ID NO: 1693814 - DNA, 15 bp, Homo sapiens
taatatctcagtaac

SEQ ID NO: 1693815 - DNA, 15 bp, Homo sapiens
aatatctcagtaaca

SEQ ID NO: 1693816 - DNA, 15 bp, Homo sapiens
atatctcagtaacaa

SEQ ID NO: 1693817 - DNA, 15 bp, Homo sapiens
tatctcagtaacaac

SEQ ID NO: 1693818 - DNA, 15 bp, Homo sapiens
atctcagtaacaaca

SEQ ID NO: 1693819 - DNA, 15 bp, Homo sapiens
tctcagtaacaacat

SEQ ID NO: 1693820 - DNA, 15 bp, Homo sapiens
ctcagtaacaacatg

SEQ ID NO: 1693821 - DNA, 15 bp, Homo sapiens
tcagtaacaacatga

SEQ ID NO: 1693822 - DNA, 15 bp, Homo sapiens
cagtaacaacatgat

SEQ ID NO: 1693823 - DNA, 15 bp, Homo sapiens
agtaacaacatgata

SEQ ID NO: 1693824 - DNA, 15 bp, Homo sapiens
gtaacaacatgataa

SEQ ID NO: 1693825 - DNA, 15 bp, Homo sapiens
taacaacatgataaa

SEQ ID NO: 1693826 - DNA, 15 bp, Homo sapiens
aacaacatgataaat

SEQ ID NO: 1693827 - DNA, 15 bp, Homo sapiens
acaacatgataaata

SEQ ID NO: 1693828 - DNA, 15 bp, Homo sapiens
caacatgataaataa

SEQ ID NO: 1693829 - DNA, 15 bp, Homo sapiens
aacatgataaataat

SEQ ID NO: 1693830 - DNA, 15 bp, Homo sapiens
acatgataaataata

SEQ ID NO: 1693831 - DNA, 15 bp, Homo sapiens
catgataaataataa

SEQ ID NO: 1693832 - DNA, 15 bp, Homo sapiens
atgataaataataac

SEQ ID NO: 1693833 - DNA, 15 bp, Homo sapiens
tgataaataataaca

SEQ ID NO: 1693834 - DNA, 15 bp, Homo sapiens
gataaataataacaa

SEQ ID NO: 1693835 - DNA, 15 bp, Homo sapiens
ataaataataacaat

SEQ ID NO: 1693836 - DNA, 15 bp, Homo sapiens
taaataataacaatt

SEQ ID NO: 1693837 - DNA, 15 bp, Homo sapiens
aaataataacaatta

SEQ ID NO: 1693838 - DNA, 15 bp, Homo sapiens
aataataacaattaa

SEQ ID NO: 1693839 - DNA, 15 bp, Homo sapiens
ataataacaattaaa

SEQ ID NO: 1693840 - DNA, 15 bp, Homo sapiens
taataacaattaaat

SEQ ID NO: 1693841 - DNA, 15 bp, Homo sapiens
aataacaattaaata

SEQ ID NO: 1693842 - DNA, 15 bp, Homo sapiens
ataacaattaaataa

SEQ ID NO: 1693843 - DNA, 15 bp, Homo sapiens
taacaattaaataaa

SEQ ID NO: 1693844 - DNA, 15 bp, Homo sapiens
aacaattaaataaat

SEQ ID NO: 1693845 - DNA, 15 bp, Homo sapiens
acaattaaataaatt

SEQ ID NO: 1693846 - DNA, 15 bp, Homo sapiens
caattaaataaatta

SEQ ID NO: 1693847 - DNA, 15 bp, Homo sapiens
aattaaataaattaa

SEQ ID NO: 1693848 - DNA, 15 bp, Homo sapiens
attaaataaattaat

SEQ ID NO: 1693849 - DNA, 15 bp, Homo sapiens
ttaaataaattaatt

SEQ ID NO: 1693850 - DNA, 15 bp, Homo sapiens
taaataaattaatta

SEQ ID NO: 1693851 - DNA, 15 bp, Homo sapiens
aaataaattaattaa

SEQ ID NO: 1693852 - DNA, 15 bp, Homo sapiens
aataaattaattaaa

SEQ ID NO: 1693853 - DNA, 15 bp, Homo sapiens
ataaattaattaaat

SEQ ID NO: 1693854 - DNA, 15 bp, Homo sapiens
taaattaattaaata

SEQ ID NO: 1693855 - DNA, 15 bp, Homo sapiens
aaattaattaaatat

SEQ ID NO: 1693856 - DNA, 15 bp, Homo sapiens
aattaattaaatatg

SEQ ID NO: 1693857 - DNA, 15 bp, Homo sapiens
attaattaaatatgt

SEQ ID NO: 1693858 - DNA, 15 bp, Homo sapiens
ttaattaaatatgta

SEQ ID NO: 1693859 - DNA, 15 bp, Homo sapiens
taattaaatatgtat

SEQ ID NO: 1693860 - DNA, 15 bp, Homo sapiens
aattaaatatgtatt

SEQ ID NO: 1693861 - DNA, 15 bp, Homo sapiens
attaaatatgtatta

SEQ ID NO: 1693862 - DNA, 15 bp, Homo sapiens
ttaaatatgtattat

SEQ ID NO: 1693863 - DNA, 15 bp, Homo sapiens
taaatatgtattatg

SEQ ID NO: 1693864 - DNA, 15 bp, Homo sapiens
aaatatgtattatgt

SEQ ID NO: 1693865 - DNA, 15 bp, Homo sapiens
aatatgtattatgtt

SEQ ID NO: 1693866 - DNA, 15 bp, Homo sapiens
atatgtattatgtta

SEQ ID NO: 1693867 - DNA, 15 bp, Homo sapiens
tatgtattatgttaa

SEQ ID NO: 1693868 - DNA, 15 bp, Homo sapiens
atgtattatgttaat

SEQ ID NO: 1693869 - DNA, 15 bp, Homo sapiens
tgtattatgttaata

SEQ ID NO: 1693870 - DNA, 15 bp, Homo sapiens
gtattatgttaatat

SEQ ID NO: 1693871 - DNA, 15 bp, Homo sapiens
tattatgttaatata

SEQ ID NO: 1693872 - DNA, 15 bp, Homo sapiens
attatgttaatatat

SEQ ID NO: 1693873 - DNA, 15 bp, Homo sapiens
ttatgttaatatata

SEQ ID NO: 1693874 - DNA, 15 bp, Homo sapiens
tatgttaatatataa

SEQ ID NO: 1693875 - DNA, 15 bp, Homo sapiens
atgttaatatataat

SEQ ID NO: 1693876 - DNA, 15 bp, Homo sapiens
tgttaatatataata

SEQ ID NO: 1693877 - DNA, 15 bp, Homo sapiens
gttaatatataatat

SEQ ID NO: 1693878 - DNA, 15 bp, Homo sapiens
ttaatatataatatc

SEQ ID NO: 1693879 - DNA, 15 bp, Homo sapiens
taatatataatatct

SEQ ID NO: 1693880 - DNA, 15 bp, Homo sapiens
aatatataatatctc

SEQ ID NO: 1693881 - DNA, 15 bp, Homo sapiens
atatataatatctca

SEQ ID NO: 1693882 - DNA, 15 bp, Homo sapiens
taatatctcagtaat

SEQ ID NO: 1693883 - DNA, 15 bp, Homo sapiens
aatatctcagtaata

SEQ ID NO: 1693884 - DNA, 15 bp, Homo sapiens
atatctcagtaatag

SEQ ID NO: 1693885 - DNA, 15 bp, Homo sapiens
tatctcagtaatagc

SEQ ID NO: 1693886 - DNA, 15 bp, Homo sapiens
atctcagtaatagct

SEQ ID NO: 1693887 - DNA, 15 bp, Homo sapiens
tctcagtaatagctc

SEQ ID NO: 1693888 - DNA, 15 bp, Homo sapiens
ctcagtaatagctca

SEQ ID NO: 1693889 - DNA, 15 bp, Homo sapiens
tcagtaatagctcaa

SEQ ID NO: 1693890 - DNA, 15 bp, Homo sapiens
cagtaatagctcaag

SEQ ID NO: 1693891 - DNA, 15 bp, Homo sapiens
agtaatagctcaaga

SEQ ID NO: 1693892 - DNA, 15 bp, Homo sapiens
gtaatagctcaagaa

SEQ ID NO: 1693893 - DNA, 15 bp, Homo sapiens
taatagctcaagaag

SEQ ID NO: 1693894 - DNA, 15 bp, Homo sapiens
aatagctcaagaagt

SEQ ID NO: 1693895 - DNA, 15 bp, Homo sapiens
atagctcaagaagta

SEQ ID NO: 1693896 - DNA, 15 bp, Homo sapiens
tagctcaagaagtag

SEQ ID NO: 1693897 - DNA, 15 bp, Homo sapiens
agctcaagaagtagt

SEQ ID NO: 1693898 - DNA, 15 bp, Homo sapiens
gctcaagaagtagtg

SEQ ID NO: 1693899 - DNA, 15 bp, Homo sapiens
ctcaagaagtagtga

SEQ ID NO: 1693900 - DNA, 15 bp, Homo sapiens
tcaagaagtagtgat

SEQ ID NO: 1693901 - DNA, 15 bp, Homo sapiens
caagaagtagtgatt

SEQ ID NO: 1693902 - DNA, 15 bp, Homo sapiens
aagaagtagtgatta

SEQ ID NO: 1693903 - DNA, 15 bp, Homo sapiens
agaagtagtgattat

SEQ ID NO: 1693904 - DNA, 15 bp, Homo sapiens
gaagtagtgattatt

SEQ ID NO: 1693905 - DNA, 15 bp, Homo sapiens
aagtagtgattattc

SEQ ID NO: 1693906 - DNA, 15 bp, Homo sapiens
agtagtgattattct

SEQ ID NO: 1693907 - DNA, 15 bp, Homo sapiens
gtagtgattattctc

SEQ ID NO: 1693908 - DNA, 15 bp, Homo sapiens
tagtgattattctca

SEQ ID NO: 1693909 - DNA, 15 bp, Homo sapiens
agtgattattctcac

SEQ ID NO: 1693910 - DNA, 15 bp, Homo sapiens
gtgattattctcact

SEQ ID NO: 1693911 - DNA, 15 bp, Homo sapiens
tgattattctcacta

SEQ ID NO: 1693912 - DNA, 15 bp, Homo sapiens
gattattctcactat

SEQ ID NO: 1693913 - DNA, 15 bp, Homo sapiens
attattctcactatt

SEQ ID NO: 1693914 - DNA, 15 bp, Homo sapiens
ttattctcactatta

SEQ ID NO: 1693915 - DNA, 15 bp, Homo sapiens
tattctcactattat

SEQ ID NO: 1693916 - DNA, 15 bp, Homo sapiens
attctcactattatt

SEQ ID NO: 1693917 - DNA, 15 bp, Homo sapiens
ttctcactattatta

SEQ ID NO: 1693918 - DNA, 15 bp, Homo sapiens
tctcactattattaa

SEQ ID NO: 1693919 - DNA, 15 bp, Homo sapiens
ctcactattattaat

SEQ ID NO: 1693920 - DNA, 15 bp, Homo sapiens
tcactattattaata

SEQ ID NO: 1693921 - DNA, 15 bp, Homo sapiens
cactattattaataa

SEQ ID NO: 1693922 - DNA, 15 bp, Homo sapiens
actattattaataaa

SEQ ID NO: 1693923 - DNA, 15 bp, Homo sapiens
ctattattaataaac

SEQ ID NO: 1693924 - DNA, 15 bp, Homo sapiens
tattattaataaacg

SEQ ID NO: 1693925 - DNA, 15 bp, Homo sapiens
attattaataaacgt

SEQ ID NO: 1693926 - DNA, 15 bp, Homo sapiens
ttattaataaacgtt

SEQ ID NO: 1693927 - DNA, 15 bp, Homo sapiens
tattaataaacgttt

SEQ ID NO: 1693928 - DNA, 15 bp, Homo sapiens
attaataaacgttta

SEQ ID NO: 1693929 - DNA, 15 bp, Homo sapiens
ttaataaacgtttaa

SEQ ID NO: 1693930 - DNA, 15 bp, Homo sapiens
taataaacgtttaat

SEQ ID NO: 1693931 - DNA, 15 bp, Homo sapiens
aataaacgtttaatg

SEQ ID NO: 1693932 - DNA, 15 bp, Homo sapiens
ataaacgtttaatga

SEQ ID NO: 1693933 - DNA, 15 bp, Homo sapiens
taaacgtttaatgag

SEQ ID NO: 1693934 - DNA, 15 bp, Homo sapiens
aaacgtttaatgagt

SEQ ID NO: 1693935 - DNA, 15 bp, Homo sapiens
aacgtttaatgagta

SEQ ID NO: 1693936 - DNA, 15 bp, Homo sapiens
acgtttaatgagtac

SEQ ID NO: 1693937 - DNA, 15 bp, Homo sapiens
cgtttaatgagtaca

SEQ ID NO: 1693938 - DNA, 15 bp, Homo sapiens
gtttaatgagtacac

SEQ ID NO: 1693939 - DNA, 15 bp, Homo sapiens
tttaatgagtacaca

SEQ ID NO: 1693940 - DNA, 15 bp, Homo sapiens
ttaatgagtacacat

SEQ ID NO: 1693941 - DNA, 15 bp, Homo sapiens
taatgagtacacatc

SEQ ID NO: 1693942 - DNA, 15 bp, Homo sapiens
aatgagtacacatct

SEQ ID NO: 1693943 - DNA, 15 bp, Homo sapiens
atgagtacacatctt

SEQ ID NO: 1693944 - DNA, 15 bp, Homo sapiens
tgagtacacatcttt

SEQ ID NO: 1693945 - DNA, 15 bp, Homo sapiens
gagtacacatctttg

SEQ ID NO: 1693946 - DNA, 15 bp, Homo sapiens
agtacacatctttgg

SEQ ID NO: 1693947 - DNA, 15 bp, Homo sapiens
gtacacatctttggc

SEQ ID NO: 1693948 - DNA, 15 bp, Homo sapiens
tacacatctttggcg

SEQ ID NO: 1693949 - DNA, 15 bp, Homo sapiens
acacatctttggcgt

SEQ ID NO: 1693950 - DNA, 15 bp, Homo sapiens
cacatctttggcgta

SEQ ID NO: 1693951 - DNA, 15 bp, Homo sapiens
ttatctggttgttgt

SEQ ID NO: 1693952 - DNA, 15 bp, Homo sapiens
tatctggttgttgtt

SEQ ID NO: 1693953 - DNA, 15 bp, Homo sapiens
atctggttgttgttc

SEQ ID NO: 1693954 - DNA, 15 bp, Homo sapiens
tctggttgttgttct

SEQ ID NO: 1693955 - DNA, 15 bp, Homo sapiens
ctggttgttgttcta

SEQ ID NO: 1693956 - DNA, 15 bp, Homo sapiens
tggttgttgttctaa

SEQ ID NO: 1693957 - DNA, 15 bp, Homo sapiens
ggttgttgttctaag

SEQ ID NO: 1693958 - DNA, 15 bp, Homo sapiens
gttgttgttctaagt

SEQ ID NO: 1693959 - DNA, 15 bp, Homo sapiens
ttgttgttctaagta

SEQ ID NO: 1693960 - DNA, 15 bp, Homo sapiens
tgttgttctaagtaa

SEQ ID NO: 1693961 - DNA, 15 bp, Homo sapiens
gttgttctaagtaaa

SEQ ID NO: 1693962 - DNA, 15 bp, Homo sapiens
ttgttctaagtaaat

SEQ ID NO: 1693963 - DNA, 15 bp, Homo sapiens
tgttctaagtaaatt

SEQ ID NO: 1693964 - DNA, 15 bp, Homo sapiens
gttctaagtaaattc

SEQ ID NO: 1693965 - DNA, 15 bp, Homo sapiens
ttctaagtaaattca

SEQ ID NO: 1693966 - DNA, 15 bp, Homo sapiens
tctaagtaaattcaa

SEQ ID NO: 1693967 - DNA, 15 bp, Homo sapiens
ctaagtaaattcaaa

SEQ ID NO: 1693968 - DNA, 15 bp, Homo sapiens
taaattcaaattaag

SEQ ID NO: 1693969 - DNA, 15 bp, Homo sapiens
aaattcaaattaaga

SEQ ID NO: 1693970 - DNA, 15 bp, Homo sapiens
aattcaaattaagat

SEQ ID NO: 1693971 - DNA, 15 bp, Homo sapiens
attcaaattaagata

SEQ ID NO: 1693972 - DNA, 15 bp, Homo sapiens
ttcaaattaagatac

SEQ ID NO: 1693973 - DNA, 15 bp, Homo sapiens
tcaaattaagataca

SEQ ID NO: 1693974 - DNA, 15 bp, Homo sapiens
caaattaagatacat

SEQ ID NO: 1693975 - DNA, 15 bp, Homo sapiens
aaattaagatacatg

SEQ ID NO: 1693976 - DNA, 15 bp, Homo sapiens
aattaagatacatgc

SEQ ID NO: 1693977 - DNA, 15 bp, Homo sapiens
attaagatacatgca

SEQ ID NO: 1693978 - DNA, 15 bp, Homo sapiens
ttaagatacatgcaa

SEQ ID NO: 1693979 - DNA, 15 bp, Homo sapiens
taagatacatgcaaa

SEQ ID NO: 1693980 - DNA, 15 bp, Homo sapiens
aagatacatgcaaac

SEQ ID NO: 1693981 - DNA, 15 bp, Homo sapiens
agatacatgcaaact

SEQ ID NO: 1693982 - DNA, 15 bp, Homo sapiens
gatacatgcaaacta

SEQ ID NO: 1693983 - DNA, 15 bp, Homo sapiens
atacatgcaaactaa

SEQ ID NO: 1693984 - DNA, 15 bp, Homo sapiens
tacatgcaaactaag

SEQ ID NO: 1693985 - DNA, 15 bp, Homo sapiens
acatgcaaactaaga

SEQ ID NO: 1693986 - DNA, 15 bp, Homo sapiens
catgcaaactaagag

SEQ ID NO: 1693987 - DNA, 15 bp, Homo sapiens
atgcaaactaagagg

SEQ ID NO: 1693988 - DNA, 15 bp, Homo sapiens
tgcaaactaagaggc

SEQ ID NO: 1693989 - DNA, 15 bp, Homo sapiens
gcaaactaagaggca

SEQ ID NO: 1693990 - DNA, 15 bp, Homo sapiens
caaactaagaggcac

SEQ ID NO: 1693991 - DNA, 15 bp, Homo sapiens
aaactaagaggcaca

SEQ ID NO: 1693992 - DNA, 15 bp, Homo sapiens
aactaagaggcacaa

SEQ ID NO: 1693993 - DNA, 15 bp, Homo sapiens
actaagaggcacaat

SEQ ID NO: 1693994 - DNA, 15 bp, Homo sapiens
ctaagaggcacaata

SEQ ID NO: 1693995 - DNA, 15 bp, Homo sapiens
taagaggcacaataa

SEQ ID NO: 1693996 - DNA, 15 bp, Homo sapiens
aagaggcacaataaa

SEQ ID NO: 1693997 - DNA, 15 bp, Homo sapiens
agaggcacaataaat

SEQ ID NO: 1693998 - DNA, 15 bp, Homo sapiens
gaggcacaataaatg

SEQ ID NO: 1693999 - DNA, 15 bp, Homo sapiens
aggcacaataaatgt

SEQ ID NO: 1694000 - DNA, 15 bp, Homo sapiens
ggcacaataaatgta

SEQ ID NO: 1694001 - DNA, 15 bp, Homo sapiens
gcacaataaatgtat

SEQ ID NO: 1694002 - DNA, 15 bp, Homo sapiens
cacaataaatgtata

SEQ ID NO: 1694003 - DNA, 15 bp, Homo sapiens
acaataaatgtatac

SEQ ID NO: 1694004 - DNA, 15 bp, Homo sapiens
caataaatgtataca

SEQ ID NO: 1694005 - DNA, 15 bp, Homo sapiens
aataaatgtatacat

SEQ ID NO: 1694006 - DNA, 15 bp, Homo sapiens
ataaatgtatacatc

SEQ ID NO: 1694007 - DNA, 15 bp, Homo sapiens
taaatgtatacatct

SEQ ID NO: 1694008 - DNA, 15 bp, Homo sapiens
aaatgtatacatctt

SEQ ID NO: 1694009 - DNA, 15 bp, Homo sapiens
aatgtatacatcttc

SEQ ID NO: 1694010 - DNA, 15 bp, Homo sapiens
atgtatacatcttca

SEQ ID NO: 1694011 - DNA, 15 bp, Homo sapiens
tgtatacatcttcat

SEQ ID NO: 1694012 - DNA, 15 bp, Homo sapiens
gtatacatcttcatt

SEQ ID NO: 1694013 - DNA, 15 bp, Homo sapiens
tatacatcttcattt

SEQ ID NO: 1694014 - DNA, 15 bp, Homo sapiens
atacatcttcatttg

SEQ ID NO: 1694015 - DNA, 15 bp, Homo sapiens
tacatcttcatttga

SEQ ID NO: 1694016 - DNA, 15 bp, Homo sapiens
acatcttcatttgaa

SEQ ID NO: 1694017 - DNA, 15 bp, Homo sapiens
catcttcatttgaat

SEQ ID NO: 1694018 - DNA, 15 bp, Homo sapiens
atcttcatttgaatt

SEQ ID NO: 1694019 - DNA, 15 bp, Homo sapiens
tcttcatttgaattt

SEQ ID NO: 1694020 - DNA, 15 bp, Homo sapiens
cttcatttgaattta

SEQ ID NO: 1694021 - DNA, 15 bp, Homo sapiens
ttcatttgaatttac

SEQ ID NO: 1694022 - DNA, 15 bp, Homo sapiens
tcatttgaatttact

SEQ ID NO: 1694023 - DNA, 15 bp, Homo sapiens
catttgaatttactc

SEQ ID NO: 1694024 - DNA, 15 bp, Homo sapiens
atttgaatttactca

SEQ ID NO: 1694025 - DNA, 15 bp, Homo sapiens
tttgaatttactcat

SEQ ID NO: 1694026 - DNA, 15 bp, Homo sapiens
ttgaatttactcata

SEQ ID NO: 1694027 - DNA, 15 bp, Homo sapiens
tgaatttactcataa

SEQ ID NO: 1694028 - DNA, 15 bp, Homo sapiens
gaatttactcataaa

SEQ ID NO: 1694029 - DNA, 15 bp, Homo sapiens
aatttactcataaaa

SEQ ID NO: 1694030 - DNA, 15 bp, Homo sapiens
atttactcataaaac

SEQ ID NO: 1694031 - DNA, 15 bp, Homo sapiens
tttactcataaaaca

SEQ ID NO: 1694032 - DNA, 15 bp, Homo sapiens
ttactcataaaacag

SEQ ID NO: 1694033 - DNA, 15 bp, Homo sapiens
tactcataaaacaga

SEQ ID NO: 1694034 - DNA, 15 bp, Homo sapiens
actcataaaacagag

SEQ ID NO: 1694035 - DNA, 15 bp, Homo sapiens
ctcataaaacagagc

SEQ ID NO: 1694036 - DNA, 15 bp, Homo sapiens
tcataaaacagagca

SEQ ID NO: 1694037 - DNA, 15 bp, Homo sapiens
cataaaacagagcaa

SEQ ID NO: 1694038 - DNA, 15 bp, Homo sapiens
ataaaacagagcaac

SEQ ID NO: 1694039 - DNA, 15 bp, Homo sapiens
taaaacagagcaaca

SEQ ID NO: 1694040 - DNA, 15 bp, Homo sapiens
aaaacagagcaacaa

SEQ ID NO: 1694041 - DNA, 15 bp, Homo sapiens
aaacagagcaacaac

SEQ ID NO: 1694042 - DNA, 15 bp, Homo sapiens
aacagagcaacaacc

SEQ ID NO: 1694043 - DNA, 15 bp, Homo sapiens
acagagcaacaacca

SEQ ID NO: 1694044 - DNA, 15 bp, Homo sapiens
cagagcaacaaccag

SEQ ID NO: 1694045 - DNA, 15 bp, Homo sapiens
agagcaacaaccaga

SEQ ID NO: 1694046 - DNA, 15 bp, Homo sapiens
gagcaacaaccagat

SEQ ID NO: 1694047 - DNA, 15 bp, Homo sapiens
agcaacaaccagata

SEQ ID NO: 1694048 - DNA, 15 bp, Homo sapiens
gcaacaaccagataa

SEQ ID NO: 1694049 - DNA, 15 bp, Homo sapiens
tacgccaaagatgtt

SEQ ID NO: 1694050 - DNA, 15 bp, Homo sapiens
acgccaaagatgttt

SEQ ID NO: 1694051 - DNA, 15 bp, Homo sapiens
cgccaaagatgttta

SEQ ID NO: 1694052 - DNA, 15 bp, Homo sapiens
gccaaagatgtttat

SEQ ID NO: 1694053 - DNA, 15 bp, Homo sapiens
ccaaagatgtttatt

SEQ ID NO: 1694054 - DNA, 15 bp, Homo sapiens
caaagatgtttattt

SEQ ID NO: 1694055 - DNA, 15 bp, Homo sapiens
aaagatgtttatttg

SEQ ID NO: 1694056 - DNA, 15 bp, Homo sapiens
aagatgtttatttga

SEQ ID NO: 1694057 - DNA, 15 bp, Homo sapiens
agatgtttatttgaa

SEQ ID NO: 1694058 - DNA, 15 bp, Homo sapiens
gatgtttatttgaat

SEQ ID NO: 1694059 - DNA, 15 bp, Homo sapiens
atgtttatttgaatt

SEQ ID NO: 1694060 - DNA, 15 bp, Homo sapiens
tgtttatttgaattt

SEQ ID NO: 1694061 - DNA, 15 bp, Homo sapiens
gtttatttgaattta

SEQ ID NO: 1694062 - DNA, 15 bp, Homo sapiens
tttatttgaatttac

SEQ ID NO: 1694063 - DNA, 15 bp, Homo sapiens
ttatttgaatttaca

SEQ ID NO: 1694064 - DNA, 15 bp, Homo sapiens
tatttgaatttacaa

SEQ ID NO: 1694065 - DNA, 15 bp, Homo sapiens
atttgaatttacaat

SEQ ID NO: 1694066 - DNA, 15 bp, Homo sapiens
tttgaatttacaatt

SEQ ID NO: 1694067 - DNA, 15 bp, Homo sapiens
ttgaatttacaattt

SEQ ID NO: 1694068 - DNA, 15 bp, Homo sapiens
tgaatttacaatttg

SEQ ID NO: 1694069 - DNA, 15 bp, Homo sapiens
gaatttacaatttga

SEQ ID NO: 1694070 - DNA, 15 bp, Homo sapiens
aatttacaatttgaa

SEQ ID NO: 1694071 - DNA, 15 bp, Homo sapiens
atttacaatttgaat

SEQ ID NO: 1694072 - DNA, 15 bp, Homo sapiens
tttacaatttgaatt

SEQ ID NO: 1694073 - DNA, 15 bp, Homo sapiens
ttacaatttgaattg

SEQ ID NO: 1694074 - DNA, 15 bp, Homo sapiens
tacaatttgaattga

SEQ ID NO: 1694075 - DNA, 15 bp, Homo sapiens
acaatttgaattgag

SEQ ID NO: 1694076 - DNA, 15 bp, Homo sapiens
caatttgaattgagt

SEQ ID NO: 1694077 - DNA, 15 bp, Homo sapiens
aatttgaattgagtt

SEQ ID NO: 1694078 - DNA, 15 bp, Homo sapiens
atttgaattgagttg

SEQ ID NO: 1694079 - DNA, 15 bp, Homo sapiens
tttgaattgagttgt

SEQ ID NO: 1694080 - DNA, 15 bp, Homo sapiens
ttgaattgagttgtg

SEQ ID NO: 1694081 - DNA, 15 bp, Homo sapiens
tgaattgagttgtgc

SEQ ID NO: 1694082 - DNA, 15 bp, Homo sapiens
gaattgagttgtgca

SEQ ID NO: 1694083 - DNA, 15 bp, Homo sapiens
aattgagttgtgcat

SEQ ID NO: 1694084 - DNA, 15 bp, Homo sapiens
attgagttgtgcatc

SEQ ID NO: 1694085 - DNA, 15 bp, Homo sapiens
ttgagttgtgcatct

SEQ ID NO: 1694086 - DNA, 15 bp, Homo sapiens
tgagttgtgcatctt

SEQ ID NO: 1694087 - DNA, 15 bp, Homo sapiens
gagttgtgcatctta

SEQ ID NO: 1694088 - DNA, 15 bp, Homo sapiens
agttgtgcatcttag

SEQ ID NO: 1694089 - DNA, 15 bp, Homo sapiens
gttgtgcatcttagt

SEQ ID NO: 1694090 - DNA, 15 bp, Homo sapiens
ttgtgcatcttagtt

SEQ ID NO: 1694091 - DNA, 15 bp, Homo sapiens
tgtgcatcttagttt

SEQ ID NO: 1694092 - DNA, 15 bp, Homo sapiens
gtgcatcttagtttg

SEQ ID NO: 1694093 - DNA, 15 bp, Homo sapiens
tgcatcttagtttga

SEQ ID NO: 1694094 - DNA, 15 bp, Homo sapiens
gcatcttagtttgag

SEQ ID NO: 1694095 - DNA, 15 bp, Homo sapiens
catcttagtttgagt

SEQ ID NO: 1694096 - DNA, 15 bp, Homo sapiens
atcttagtttgagtt

SEQ ID NO: 1694097 - DNA, 15 bp, Homo sapiens
tcttagtttgagttt

SEQ ID NO: 1694098 - DNA, 15 bp, Homo sapiens
cttagtttgagttta

SEQ ID NO: 1694099 - DNA, 15 bp, Homo sapiens
ttagtttgagtttac

SEQ ID NO: 1694100 - DNA, 15 bp, Homo sapiens
tagtttgagtttaca

SEQ ID NO: 1694101 - DNA, 15 bp, Homo sapiens
agtttgagtttacac

SEQ ID NO: 1694102 - DNA, 15 bp, Homo sapiens
gtttgagtttacact

SEQ ID NO: 1694103 - DNA, 15 bp, Homo sapiens
tttgagtttacactg

SEQ ID NO: 1694104 - DNA, 15 bp, Homo sapiens
ttgagtttacactgt

SEQ ID NO: 1694105 - DNA, 15 bp, Homo sapiens
tgagtttacactgtg

SEQ ID NO: 1694106 - DNA, 15 bp, Homo sapiens
gagtttacactgtgt

SEQ ID NO: 1694107 - DNA, 15 bp, Homo sapiens
agtttacactgtgtc

SEQ ID NO: 1694108 - DNA, 15 bp, Homo sapiens
gtttacactgtgtcc

SEQ ID NO: 1694109 - DNA, 15 bp, Homo sapiens
tttacactgtgtccc

SEQ ID NO: 1694110 - DNA, 15 bp, Homo sapiens
ttacactgtgtccct

SEQ ID NO: 1694111 - DNA, 15 bp, Homo sapiens
tacactgtgtccctt

SEQ ID NO: 1694112 - DNA, 15 bp, Homo sapiens
acactgtgtcccttt

SEQ ID NO: 1694113 - DNA, 15 bp, Homo sapiens
cactgtgtccctttt

SEQ ID NO: 1694114 - DNA, 15 bp, Homo sapiens
actgtgtcccttttg

SEQ ID NO: 1694115 - DNA, 15 bp, Homo sapiens
ctgtgtcccttttgt

SEQ ID NO: 1694116 - DNA, 15 bp, Homo sapiens
tgtgtcccttttgta

SEQ ID NO: 1694117 - DNA, 15 bp, Homo sapiens
tgtcccttttgtatt

SEQ ID NO: 1694118 - DNA, 15 bp, Homo sapiens
gtcccttttgtattt

SEQ ID NO: 1694119 - DNA, 15 bp, Homo sapiens
tcccttttgtatttc

SEQ ID NO: 1694120 - DNA, 15 bp, Homo sapiens
cccttttgtatttca

SEQ ID NO: 1694121 - DNA, 15 bp, Homo sapiens
ccttttgtatttcac

SEQ ID NO: 1694122 - DNA, 15 bp, Homo sapiens
cttttgtatttcact

SEQ ID NO: 1694123 - DNA, 15 bp, Homo sapiens
ttttgtatttcactc

SEQ ID NO: 1694124 - DNA, 15 bp, Homo sapiens
tttgtatttcactcc

SEQ ID NO: 1694125 - DNA, 15 bp, Homo sapiens
ttgtatttcactcca

SEQ ID NO: 1694126 - DNA, 15 bp, Homo sapiens
tgtatttcactccag

SEQ ID NO: 1694127 - DNA, 15 bp, Homo sapiens
gtatttcactccaga

SEQ ID NO: 1694128 - DNA, 15 bp, Homo sapiens
tatttcactccagaa

SEQ ID NO: 1694129 - DNA, 15 bp, Homo sapiens
atttcactccagaaa

SEQ ID NO: 1694130 - DNA, 15 bp, Homo sapiens
tttcactccagaaac

SEQ ID NO: 1694131 - DNA, 15 bp, Homo sapiens
ttcactccagaaacc

SEQ ID NO: 1694132 - DNA, 15 bp, Homo sapiens
tcactccagaaaccc

SEQ ID NO: 1694133 - DNA, 15 bp, Homo sapiens
cactccagaaaccca

SEQ ID NO: 1694134 - DNA, 15 bp, Homo sapiens
actccagaaacccat

SEQ ID NO: 1694135 - DNA, 15 bp, Homo sapiens
ctccagaaacccatc

SEQ ID NO: 1694136 - DNA, 15 bp, Homo sapiens
tccagaaacccatca

SEQ ID NO: 1694137 - DNA, 15 bp, Homo sapiens
ccagaaacccatcat

SEQ ID NO: 1694138 - DNA, 15 bp, Homo sapiens
cagaaacccatcatt

SEQ ID NO: 1694139 - DNA, 15 bp, Homo sapiens
agaaacccatcattg

SEQ ID NO: 1694140 - DNA, 15 bp, Homo sapiens
gaaacccatcattga

SEQ ID NO: 1694141 - DNA, 15 bp, Homo sapiens
aaacccatcattgac

SEQ ID NO: 1694142 - DNA, 15 bp, Homo sapiens
aacccatcattgact

SEQ ID NO: 1694143 - DNA, 15 bp, Homo sapiens
acccatcattgactg

SEQ ID NO: 1694144 - DNA, 15 bp, Homo sapiens
cccatcattgactgc

SEQ ID NO: 1694145 - DNA, 15 bp, Homo sapiens
ccatcattgactgca

SEQ ID NO: 1694146 - DNA, 15 bp, Homo sapiens
catcattgactgcat

SEQ ID NO: 1694147 - DNA, 15 bp, Homo sapiens
atcattgactgcatg

SEQ ID NO: 1694148 - DNA, 15 bp, Homo sapiens
tcattgactgcatgt

SEQ ID NO: 1694149 - DNA, 15 bp, Homo sapiens
cattgactgcatgtc

SEQ ID NO: 1694150 - DNA, 15 bp, Homo sapiens
attgactgcatgtca

SEQ ID NO: 1694151 - DNA, 15 bp, Homo sapiens
ttgactgcatgtcag

SEQ ID NO: 1694152 - DNA, 15 bp, Homo sapiens
tgactgcatgtcaga

SEQ ID NO: 1694153 - DNA, 15 bp, Homo sapiens
gactgcatgtcagaa

SEQ ID NO: 1694154 - DNA, 15 bp, Homo sapiens
actgcatgtcagaag

SEQ ID NO: 1694155 - DNA, 15 bp, Homo sapiens
ctgcatgtcagaaga

SEQ ID NO: 1694156 - DNA, 15 bp, Homo sapiens
tgcatgtcagaagat

SEQ ID NO: 1694157 - DNA, 15 bp, Homo sapiens
gcatgtcagaagatg

SEQ ID NO: 1694158 - DNA, 15 bp, Homo sapiens
catgtcagaagatgg

SEQ ID NO: 1694159 - DNA, 15 bp, Homo sapiens
atgtcagaagatggt

SEQ ID NO: 1694160 - DNA, 15 bp, Homo sapiens
tgtcagaagatggtt

SEQ ID NO: 1694161 - DNA, 15 bp, Homo sapiens
gtcagaagatggtta

SEQ ID NO: 1694162 - DNA, 15 bp, Homo sapiens
tcagaagatggttac

SEQ ID NO: 1694163 - DNA, 15 bp, Homo sapiens
cagaagatggttaca

SEQ ID NO: 1694164 - DNA, 15 bp, Homo sapiens
agaagatggttacaa

SEQ ID NO: 1694165 - DNA, 15 bp, Homo sapiens
gaagatggttacaag

SEQ ID NO: 1694166 - DNA, 15 bp, Homo sapiens
aagatggttacaagt

SEQ ID NO: 1694167 - DNA, 15 bp, Homo sapiens
agatggttacaagtt

SEQ ID NO: 1694168 - DNA, 15 bp, Homo sapiens
gatggttacaagttg

SEQ ID NO: 1694169 - DNA, 15 bp, Homo sapiens
atggttacaagttgg

SEQ ID NO: 1694170 - DNA, 15 bp, Homo sapiens
tggttacaagttgga

SEQ ID NO: 1694171 - DNA, 15 bp, Homo sapiens
ggttacaagttggat

SEQ ID NO: 1694172 - DNA, 15 bp, Homo sapiens
gttacaagttggatc

SEQ ID NO: 1694173 - DNA, 15 bp, Homo sapiens
ttacaagttggatcg

SEQ ID NO: 1694174 - DNA, 15 bp, Homo sapiens
tacaagttggatcga

SEQ ID NO: 1694175 - DNA, 15 bp, Homo sapiens
acaagttggatcgaa

SEQ ID NO: 1694176 - DNA, 15 bp, Homo sapiens
caagttggatcgaat

SEQ ID NO: 1694177 - DNA, 15 bp, Homo sapiens
aagttggatcgaatc

SEQ ID NO: 1694178 - DNA, 15 bp, Homo sapiens
agttggatcgaatca

SEQ ID NO: 1694179 - DNA, 15 bp, Homo sapiens
gttggatcgaatcaa

SEQ ID NO: 1694180 - DNA, 15 bp, Homo sapiens
ttggatcgaatcaag

SEQ ID NO: 1694181 - DNA, 15 bp, Homo sapiens
tggatcgaatcaagg

SEQ ID NO: 1694182 - DNA, 15 bp, Homo sapiens
ggatcgaatcaaggg

SEQ ID NO: 1694183 - DNA, 15 bp, Homo sapiens
gatcgaatcaagggt

SEQ ID NO: 1694184 - DNA, 15 bp, Homo sapiens
atcgaatcaagggtg

SEQ ID NO: 1694185 - DNA, 15 bp, Homo sapiens
tcgaatcaagggtga

SEQ ID NO: 1694186 - DNA, 15 bp, Homo sapiens
cgaatcaagggtgaa

SEQ ID NO: 1694187 - DNA, 15 bp, Homo sapiens
gaatcaagggtgaaa

SEQ ID NO: 1694188 - DNA, 15 bp, Homo sapiens
aatcaagggtgaaat

SEQ ID NO: 1694189 - DNA, 15 bp, Homo sapiens
atcaagggtgaaatt

SEQ ID NO: 1694190 - DNA, 15 bp, Homo sapiens
tcaagggtgaaattg

SEQ ID NO: 1694191 - DNA, 15 bp, Homo sapiens
caagggtgaaattga

SEQ ID NO: 1694192 - DNA, 15 bp, Homo sapiens
aagggtgaaattgaa

SEQ ID NO: 1694193 - DNA, 15 bp, Homo sapiens
agggtgaaattgaat

SEQ ID NO: 1694194 - DNA, 15 bp, Homo sapiens
gggtgaaattgaatt

SEQ ID NO: 1694195 - DNA, 15 bp, Homo sapiens
ggtgaaattgaattc

SEQ ID NO: 1694196 - DNA, 15 bp, Homo sapiens
gtgaaattgaattcc

SEQ ID NO: 1694197 - DNA, 15 bp, Homo sapiens
tgaaattgaattcca

SEQ ID NO: 1694198 - DNA, 15 bp, Homo sapiens
gaaattgaattccat

SEQ ID NO: 1694199 - DNA, 15 bp, Homo sapiens
aaattgaattccata

SEQ ID NO: 1694200 - DNA, 15 bp, Homo sapiens
aattgaattccataa

SEQ ID NO: 1694201 - DNA, 15 bp, Homo sapiens
attgaattccataat

SEQ ID NO: 1694202 - DNA, 15 bp, Homo sapiens
ttgaattccataatg

SEQ ID NO: 1694203 - DNA, 15 bp, Homo sapiens
tgaattccataatgt

SEQ ID NO: 1694204 - DNA, 15 bp, Homo sapiens
gaattccataatgtg

SEQ ID NO: 1694205 - DNA, 15 bp, Homo sapiens
aattccataatgtga

SEQ ID NO: 1694206 - DNA, 15 bp, Homo sapiens
attccataatgtgac

SEQ ID NO: 1694207 - DNA, 15 bp, Homo sapiens
ttccataatgtgacc

SEQ ID NO: 1694208 - DNA, 15 bp, Homo sapiens
tccataatgtgacct

SEQ ID NO: 1694209 - DNA, 15 bp, Homo sapiens
ccataatgtgacctt

SEQ ID NO: 1694210 - DNA, 15 bp, Homo sapiens
cataatgtgaccttc

SEQ ID NO: 1694211 - DNA, 15 bp, Homo sapiens
ataatgtgaccttcc

SEQ ID NO: 1694212 - DNA, 15 bp, Homo sapiens
taatgtgaccttcca

SEQ ID NO: 1694213 - DNA, 15 bp, Homo sapiens
aatgtgaccttccat

SEQ ID NO: 1694214 - DNA, 15 bp, Homo sapiens
atgtgaccttccatt

SEQ ID NO: 1694215 - DNA, 15 bp, Homo sapiens
tgtgaccttccatta

SEQ ID NO: 1694216 - DNA, 15 bp, Homo sapiens
gtgaccttccattat

SEQ ID NO: 1694217 - DNA, 15 bp, Homo sapiens
tgaccttccattatc

SEQ ID NO: 1694218 - DNA, 15 bp, Homo sapiens
gaccttccattatcc

SEQ ID NO: 1694219 - DNA, 15 bp, Homo sapiens
accttccattatcct

SEQ ID NO: 1694220 - DNA, 15 bp, Homo sapiens
ccttccattatcctt

SEQ ID NO: 1694221 - DNA, 15 bp, Homo sapiens
cttccattatccttc

SEQ ID NO: 1694222 - DNA, 15 bp, Homo sapiens
ttccattatccttcc

SEQ ID NO: 1694223 - DNA, 15 bp, Homo sapiens
tccattatccttcca

SEQ ID NO: 1694224 - DNA, 15 bp, Homo sapiens
ccattatccttccag

SEQ ID NO: 1694225 - DNA, 15 bp, Homo sapiens
cattatccttccaga

SEQ ID NO: 1694226 - DNA, 15 bp, Homo sapiens
attatccttccagac

SEQ ID NO: 1694227 - DNA, 15 bp, Homo sapiens
ttatccttccagacc

SEQ ID NO: 1694228 - DNA, 15 bp, Homo sapiens
tatccttccagacca

SEQ ID NO: 1694229 - DNA, 15 bp, Homo sapiens
atccttccagaccag

SEQ ID NO: 1694230 - DNA, 15 bp, Homo sapiens
tccttccagaccaga

SEQ ID NO: 1694231 - DNA, 15 bp, Homo sapiens
ccttccagaccagag

SEQ ID NO: 1694232 - DNA, 15 bp, Homo sapiens
cttccagaccagagg

SEQ ID NO: 1694233 - DNA, 15 bp, Homo sapiens
ttccagaccagaggt

SEQ ID NO: 1694234 - DNA, 15 bp, Homo sapiens
tccagaccagaggtg

SEQ ID NO: 1694235 - DNA, 15 bp, Homo sapiens
ccagaccagaggtga

SEQ ID NO: 1694236 - DNA, 15 bp, Homo sapiens
cagaccagaggtgaa

SEQ ID NO: 1694237 - DNA, 15 bp, Homo sapiens
agaccagaggtgaag

SEQ ID NO: 1694238 - DNA, 15 bp, Homo sapiens
gaccagaggtgaagg

SEQ ID NO: 1694239 - DNA, 15 bp, Homo sapiens
accagaggtgaaggt

SEQ ID NO: 1694240 - DNA, 15 bp, Homo sapiens
ccagaggtgaaggtg

SEQ ID NO: 1694241 - DNA, 15 bp, Homo sapiens
cagaggtgaaggtga

SEQ ID NO: 1694242 - DNA, 15 bp, Homo sapiens
agaggtgaaggtgag

SEQ ID NO: 1694243 - DNA, 15 bp, Homo sapiens
gaggtgaaggtgagt

SEQ ID NO: 1694244 - DNA, 15 bp, Homo sapiens
aggtgaaggtgagtg

SEQ ID NO: 1694245 - DNA, 15 bp, Homo sapiens
ggtgaaggtgagtgc

SEQ ID NO: 1694246 - DNA, 15 bp, Homo sapiens
gtgaaggtgagtgct

SEQ ID NO: 1694247 - DNA, 15 bp, Homo sapiens
tgaaggtgagtgctg

SEQ ID NO: 1694248 - DNA, 15 bp, Homo sapiens
gaaggtgagtgctgg

SEQ ID NO: 1694249 - DNA, 15 bp, Homo sapiens
aaggtgagtgctggt

SEQ ID NO: 1694250 - DNA, 15 bp, Homo sapiens
aggtgagtgctggtc

SEQ ID NO: 1694251 - DNA, 15 bp, Homo sapiens
ggtgagtgctggtct

SEQ ID NO: 1694252 - DNA, 15 bp, Homo sapiens
gtgagtgctggtctg

SEQ ID NO: 1694253 - DNA, 15 bp, Homo sapiens
tgagtgctggtctgt

SEQ ID NO: 1694254 - DNA, 15 bp, Homo sapiens
gagtgctggtctgtt

SEQ ID NO: 1694255 - DNA, 15 bp, Homo sapiens
agtgctggtctgttc

SEQ ID NO: 1694256 - DNA, 15 bp, Homo sapiens
gtgctggtctgttcc

SEQ ID NO: 1694257 - DNA, 15 bp, Homo sapiens
tgctggtctgttccc

SEQ ID NO: 1694258 - DNA, 15 bp, Homo sapiens
gctggtctgttcccc

SEQ ID NO: 1694259 - DNA, 15 bp, Homo sapiens
ctggtctgttcccca

SEQ ID NO: 1694260 - DNA, 15 bp, Homo sapiens
tggtctgttccccag

SEQ ID NO: 1694261 - DNA, 15 bp, Homo sapiens
ggtctgttccccaga

SEQ ID NO: 1694262 - DNA, 15 bp, Homo sapiens
gtctgttccccagaa

SEQ ID NO: 1694263 - DNA, 15 bp, Homo sapiens
tctgttccccagaat

SEQ ID NO: 1694264 - DNA, 15 bp, Homo sapiens
ctgttccccagaata

SEQ ID NO: 1694265 - DNA, 15 bp, Homo sapiens
tgttccccagaatag

SEQ ID NO: 1694266 - DNA, 15 bp, Homo sapiens
gttccccagaatagt

SEQ ID NO: 1694267 - DNA, 15 bp, Homo sapiens
ttccccagaatagta

SEQ ID NO: 1694268 - DNA, 15 bp, Homo sapiens
tccccagaatagtaa

SEQ ID NO: 1694269 - DNA, 15 bp, Homo sapiens
ccccagaatagtaaa

SEQ ID NO: 1694270 - DNA, 15 bp, Homo sapiens
cccagaatagtaaat

SEQ ID NO: 1694271 - DNA, 15 bp, Homo sapiens
ccagaatagtaaatg

SEQ ID NO: 1694272 - DNA, 15 bp, Homo sapiens
cagaatagtaaatgt

SEQ ID NO: 1694273 - DNA, 15 bp, Homo sapiens
agaatagtaaatgtt

SEQ ID NO: 1694274 - DNA, 15 bp, Homo sapiens
gaatagtaaatgttt

SEQ ID NO: 1694275 - DNA, 15 bp, Homo sapiens
aatagtaaatgtttt

SEQ ID NO: 1694276 - DNA, 15 bp, Homo sapiens
atagtaaatgttttc

SEQ ID NO: 1694277 - DNA, 15 bp, Homo sapiens
tagtaaatgttttct

SEQ ID NO: 1694278 - DNA, 15 bp, Homo sapiens
agtaaatgttttctt

SEQ ID NO: 1694279 - DNA, 15 bp, Homo sapiens
gtaaatgttttcttc

SEQ ID NO: 1694280 - DNA, 15 bp, Homo sapiens
taaatgttttcttct

SEQ ID NO: 1694281 - DNA, 15 bp, Homo sapiens
aaatgttttcttctt

SEQ ID NO: 1694282 - DNA, 15 bp, Homo sapiens
aatgttttcttcttc

SEQ ID NO: 1694283 - DNA, 15 bp, Homo sapiens
atgttttcttcttcg

SEQ ID NO: 1694284 - DNA, 15 bp, Homo sapiens
tgttttcttcttcga

SEQ ID NO: 1694285 - DNA, 15 bp, Homo sapiens
gttttcttcttcgat

SEQ ID NO: 1694286 - DNA, 15 bp, Homo sapiens
ttttcttcttcgatg

SEQ ID NO: 1694287 - DNA, 15 bp, Homo sapiens
tttcttcttcgatga

SEQ ID NO: 1694288 - DNA, 15 bp, Homo sapiens
ttcttcttcgatgat

SEQ ID NO: 1694289 - DNA, 15 bp, Homo sapiens
tcttcttcgatgatt

SEQ ID NO: 1694290 - DNA, 15 bp, Homo sapiens
cttcttcgatgattt

SEQ ID NO: 1694291 - DNA, 15 bp, Homo sapiens
ttcttcgatgattta

SEQ ID NO: 1694292 - DNA, 15 bp, Homo sapiens
tcttcgatgatttat

SEQ ID NO: 1694293 - DNA, 15 bp, Homo sapiens
cttcgatgatttatt

SEQ ID NO: 1694294 - DNA, 15 bp, Homo sapiens
ttcgatgatttattt

SEQ ID NO: 1694295 - DNA, 15 bp, Homo sapiens
tcgatgatttatttg

SEQ ID NO: 1694296 - DNA, 15 bp, Homo sapiens
cgatgatttatttgc

SEQ ID NO: 1694297 - DNA, 15 bp, Homo sapiens
gatgatttatttgca

SEQ ID NO: 1694298 - DNA, 15 bp, Homo sapiens
atgatttatttgcat

SEQ ID NO: 1694299 - DNA, 15 bp, Homo sapiens
tgatttatttgcata

SEQ ID NO: 1694300 - DNA, 15 bp, Homo sapiens
gatttatttgcataa

SEQ ID NO: 1694301 - DNA, 15 bp, Homo sapiens
atttatttgcataac

SEQ ID NO: 1694302 - DNA, 15 bp, Homo sapiens
tttatttgcataacc

SEQ ID NO: 1694303 - DNA, 15 bp, Homo sapiens
ttatttgcataacca

SEQ ID NO: 1694304 - DNA, 15 bp, Homo sapiens
tatttgcataaccac

SEQ ID NO: 1694305 - DNA, 15 bp, Homo sapiens
atttgcataaccaca

SEQ ID NO: 1694306 - DNA, 15 bp, Homo sapiens
tttgcataaccacaa

SEQ ID NO: 1694307 - DNA, 15 bp, Homo sapiens
ttgcataaccacaaa

SEQ ID NO: 1694308 - DNA, 15 bp, Homo sapiens
tgcataaccacaaat

SEQ ID NO: 1694309 - DNA, 15 bp, Homo sapiens
gcataaccacaaatt

SEQ ID NO: 1694310 - DNA, 15 bp, Homo sapiens
cataaccacaaattg

SEQ ID NO: 1694311 - DNA, 15 bp, Homo sapiens
ataaccacaaattgc

SEQ ID NO: 1694312 - DNA, 15 bp, Homo sapiens
taaccacaaattgct

SEQ ID NO: 1694313 - DNA, 15 bp, Homo sapiens
aaccacaaattgctc

SEQ ID NO: 1694314 - DNA, 15 bp, Homo sapiens
accacaaattgctca

SEQ ID NO: 1694315 - DNA, 15 bp, Homo sapiens
ccacaaattgctcat

SEQ ID NO: 1694316 - DNA, 15 bp, Homo sapiens
cacaaattgctcatt

SEQ ID NO: 1694317 - DNA, 15 bp, Homo sapiens
acaaattgctcattt

SEQ ID NO: 1694318 - DNA, 15 bp, Homo sapiens
caaattgctcatttt

SEQ ID NO: 1694319 - DNA, 15 bp, Homo sapiens
aaattgctcattttc

SEQ ID NO: 1694320 - DNA, 15 bp, Homo sapiens
aattgctcattttct

SEQ ID NO: 1694321 - DNA, 15 bp, Homo sapiens
attgctcattttctg

SEQ ID NO: 1694322 - DNA, 15 bp, Homo sapiens
ttgctcattttctga

SEQ ID NO: 1694323 - DNA, 15 bp, Homo sapiens
tgctcattttctgaa

SEQ ID NO: 1694324 - DNA, 15 bp, Homo sapiens
gctcattttctgaag

SEQ ID NO: 1694325 - DNA, 15 bp, Homo sapiens
ctcattttctgaagc

SEQ ID NO: 1694326 - DNA, 15 bp, Homo sapiens
tcattttctgaagcc

SEQ ID NO: 1694327 - DNA, 15 bp, Homo sapiens
cattttctgaagcct

SEQ ID NO: 1694328 - DNA, 15 bp, Homo sapiens
attttctgaagcctg

SEQ ID NO: 1694329 - DNA, 15 bp, Homo sapiens
ttttctgaagcctga

SEQ ID NO: 1694330 - DNA, 15 bp, Homo sapiens
tttctgaagcctgac

SEQ ID NO: 1694331 - DNA, 15 bp, Homo sapiens
ttctgaagcctgact

SEQ ID NO: 1694332 - DNA, 15 bp, Homo sapiens
tctgaagcctgactc

SEQ ID NO: 1694333 - DNA, 15 bp, Homo sapiens
ctgaagcctgactct

SEQ ID NO: 1694334 - DNA, 15 bp, Homo sapiens
tgaagcctgactctg

SEQ ID NO: 1694335 - DNA, 15 bp, Homo sapiens
gaagcctgactctgt

SEQ ID NO: 1694336 - DNA, 15 bp, Homo sapiens
aagcctgactctgtt

SEQ ID NO: 1694337 - DNA, 15 bp, Homo sapiens
agcctgactctgttt

SEQ ID NO: 1694338 - DNA, 15 bp, Homo sapiens
gcctgactctgtttc

SEQ ID NO: 1694339 - DNA, 15 bp, Homo sapiens
cctgactctgtttcc

SEQ ID NO: 1694340 - DNA, 15 bp, Homo sapiens
ctgactctgtttcca

SEQ ID NO: 1694341 - DNA, 15 bp, Homo sapiens
tgactctgtttccag

SEQ ID NO: 1694342 - DNA, 15 bp, Homo sapiens
gactctgtttccagt

SEQ ID NO: 1694343 - DNA, 15 bp, Homo sapiens
actctgtttccagta

SEQ ID NO: 1694344 - DNA, 15 bp, Homo sapiens
ctctgtttccagtaa

SEQ ID NO: 1694345 - DNA, 15 bp, Homo sapiens
tctgtttccagtaat

SEQ ID NO: 1694346 - DNA, 15 bp, Homo sapiens
ctgtttccagtaata

SEQ ID NO: 1694347 - DNA, 15 bp, Homo sapiens
tgtttccagtaatag

SEQ ID NO: 1694348 - DNA, 15 bp, Homo sapiens
gtttccagtaatagg

SEQ ID NO: 1694349 - DNA, 15 bp, Homo sapiens
tttccagtaataggg

SEQ ID NO: 1694350 - DNA, 15 bp, Homo sapiens
ttccagtaataggga

SEQ ID NO: 1694351 - DNA, 15 bp, Homo sapiens
tccagtaatagggaa

SEQ ID NO: 1694352 - DNA, 15 bp, Homo sapiens
ccagtaatagggaat

SEQ ID NO: 1694353 - DNA, 15 bp, Homo sapiens
cagtaatagggaatg

SEQ ID NO: 1694354 - DNA, 15 bp, Homo sapiens
agtaatagggaatgg

SEQ ID NO: 1694355 - DNA, 15 bp, Homo sapiens
gtaatagggaatgga

SEQ ID NO: 1694356 - DNA, 15 bp, Homo sapiens
taatagggaatggag

SEQ ID NO: 1694357 - DNA, 15 bp, Homo sapiens
aatagggaatggagg

SEQ ID NO: 1694358 - DNA, 15 bp, Homo sapiens
atagggaatggaggt

SEQ ID NO: 1694359 - DNA, 15 bp, Homo sapiens
tagggaatggaggtg

SEQ ID NO: 1694360 - DNA, 15 bp, Homo sapiens
agggaatggaggtgt

SEQ ID NO: 1694361 - DNA, 15 bp, Homo sapiens
gggaatggaggtgtc

SEQ ID NO: 1694362 - DNA, 15 bp, Homo sapiens
ggaatggaggtgtct

SEQ ID NO: 1694363 - DNA, 15 bp, Homo sapiens
gaatggaggtgtctt

SEQ ID NO: 1694364 - DNA, 15 bp, Homo sapiens
aatggaggtgtcttt

SEQ ID NO: 1694365 - DNA, 15 bp, Homo sapiens
atggaggtgtctttc

SEQ ID NO: 1694366 - DNA, 15 bp, Homo sapiens
tggaggtgtctttct

SEQ ID NO: 1694367 - DNA, 15 bp, Homo sapiens
ggaggtgtctttctc

SEQ ID NO: 1694368 - DNA, 15 bp, Homo sapiens
gaggtgtctttctct

SEQ ID NO: 1694369 - DNA, 15 bp, Homo sapiens
aggtgtctttctctg

SEQ ID NO: 1694370 - DNA, 15 bp, Homo sapiens
ggtgtctttctctga

SEQ ID NO: 1694371 - DNA, 15 bp, Homo sapiens
gtgtctttctctgaa

SEQ ID NO: 1694372 - DNA, 15 bp, Homo sapiens
tgtctttctctgaaa

SEQ ID NO: 1694373 - DNA, 15 bp, Homo sapiens
gtctttctctgaaag

SEQ ID NO: 1694374 - DNA, 15 bp, Homo sapiens
tctttctctgaaagt

SEQ ID NO: 1694375 - DNA, 15 bp, Homo sapiens
ctttctctgaaagta

SEQ ID NO: 1694376 - DNA, 15 bp, Homo sapiens
tttctctgaaagtat

SEQ ID NO: 1694377 - DNA, 15 bp, Homo sapiens
ttctctgaaagtatc

SEQ ID NO: 1694378 - DNA, 15 bp, Homo sapiens
tctctgaaagtatcc

SEQ ID NO: 1694379 - DNA, 15 bp, Homo sapiens
ctctgaaagtatcct

SEQ ID NO: 1694380 - DNA, 15 bp, Homo sapiens
tctgaaagtatcctc

SEQ ID NO: 1694381 - DNA, 15 bp, Homo sapiens
ctgaaagtatcctcg

SEQ ID NO: 1694382 - DNA, 15 bp, Homo sapiens
tgaaagtatcctcgg

SEQ ID NO: 1694383 - DNA, 15 bp, Homo sapiens
gaaagtatcctcggg

SEQ ID NO: 1694384 - DNA, 15 bp, Homo sapiens
aaagtatcctcgggt

SEQ ID NO: 1694385 - DNA, 15 bp, Homo sapiens
aagtatcctcgggtg

SEQ ID NO: 1694386 - DNA, 15 bp, Homo sapiens
agtatcctcgggtgt

SEQ ID NO: 1694387 - DNA, 15 bp, Homo sapiens
gtatcctcgggtgtt

SEQ ID NO: 1694388 - DNA, 15 bp, Homo sapiens
tatcctcgggtgttg

SEQ ID NO: 1694389 - DNA, 15 bp, Homo sapiens
atcctcgggtgttgg

SEQ ID NO: 1694390 - DNA, 15 bp, Homo sapiens
tcctcgggtgttggc

SEQ ID NO: 1694391 - DNA, 15 bp, Homo sapiens
cctcgggtgttggct

SEQ ID NO: 1694392 - DNA, 15 bp, Homo sapiens
ctcgggtgttggctt

SEQ ID NO: 1694393 - DNA, 15 bp, Homo sapiens
tcgggtgttggctta

SEQ ID NO: 1694394 - DNA, 15 bp, Homo sapiens
cgggtgttggcttat

SEQ ID NO: 1694395 - DNA, 15 bp, Homo sapiens
gggtgttggcttatc

SEQ ID NO: 1694396 - DNA, 15 bp, Homo sapiens
ggtgttggcttatct

SEQ ID NO: 1694397 - DNA, 15 bp, Homo sapiens
gtgttggcttatctc

SEQ ID NO: 1694398 - DNA, 15 bp, Homo sapiens
tgttggcttatctca

SEQ ID NO: 1694399 - DNA, 15 bp, Homo sapiens
gttggcttatctcag

SEQ ID NO: 1694400 - DNA, 15 bp, Homo sapiens
ttggcttatctcagg

SEQ ID NO: 1694401 - DNA, 15 bp, Homo sapiens
tggcttatctcaggc

SEQ ID NO: 1694402 - DNA, 15 bp, Homo sapiens
ggcttatctcaggca

SEQ ID NO: 1694403 - DNA, 15 bp, Homo sapiens
gcttatctcaggcaa

SEQ ID NO: 1694404 - DNA, 15 bp, Homo sapiens
cttatctcaggcaac

SEQ ID NO: 1694405 - DNA, 15 bp, Homo sapiens
ttatctcaggcaaca

SEQ ID NO: 1694406 - DNA, 15 bp, Homo sapiens
tatctcaggcaacag

SEQ ID NO: 1694407 - DNA, 15 bp, Homo sapiens
atctcaggcaacaga

SEQ ID NO: 1694408 - DNA, 15 bp, Homo sapiens
tctcaggcaacagac

SEQ ID NO: 1694409 - DNA, 15 bp, Homo sapiens
ctcaggcaacagacc

SEQ ID NO: 1694410 - DNA, 15 bp, Homo sapiens
tcaggcaacagacca

SEQ ID NO: 1694411 - DNA, 15 bp, Homo sapiens
caggcaacagaccac

SEQ ID NO: 1694412 - DNA, 15 bp, Homo sapiens
aggcaacagaccaca

SEQ ID NO: 1694413 - DNA, 15 bp, Homo sapiens
ggcaacagaccacat

SEQ ID NO: 1694414 - DNA, 15 bp, Homo sapiens
gcaacagaccacatt

SEQ ID NO: 1694415 - DNA, 15 bp, Homo sapiens
caacagaccacattc

SEQ ID NO: 1694416 - DNA, 15 bp, Homo sapiens
aacagaccacattcc

SEQ ID NO: 1694417 - DNA, 15 bp, Homo sapiens
acagaccacattcct

SEQ ID NO: 1694418 - DNA, 15 bp, Homo sapiens
cagaccacattcctt

SEQ ID NO: 1694419 - DNA, 15 bp, Homo sapiens
agaccacattccttt

SEQ ID NO: 1694420 - DNA, 15 bp, Homo sapiens
gaccacattcctttg

SEQ ID NO: 1694421 - DNA, 15 bp, Homo sapiens
accacattcctttgt

SEQ ID NO: 1694422 - DNA, 15 bp, Homo sapiens
ccacattcctttgtg

SEQ ID NO: 1694423 - DNA, 15 bp, Homo sapiens
cacattcctttgtga

SEQ ID NO: 1694424 - DNA, 15 bp, Homo sapiens
acattcctttgtgat

SEQ ID NO: 1694425 - DNA, 15 bp, Homo sapiens
cattcctttgtgata

SEQ ID NO: 1694426 - DNA, 15 bp, Homo sapiens
attcctttgtgataa

SEQ ID NO: 1694427 - DNA, 15 bp, Homo sapiens
ttcctttgtgataac

SEQ ID NO: 1694428 - DNA, 15 bp, Homo sapiens
tcctttgtgataacc

SEQ ID NO: 1694429 - DNA, 15 bp, Homo sapiens
cctttgtgataacca

SEQ ID NO: 1694430 - DNA, 15 bp, Homo sapiens
ctttgtgataaccat

SEQ ID NO: 1694431 - DNA, 15 bp, Homo sapiens
tttgtgataaccata

SEQ ID NO: 1694432 - DNA, 15 bp, Homo sapiens
ttgtgataaccataa

SEQ ID NO: 1694433 - DNA, 15 bp, Homo sapiens
tgtgataaccataat

SEQ ID NO: 1694434 - DNA, 15 bp, Homo sapiens
gtgataaccataatg

SEQ ID NO: 1694435 - DNA, 15 bp, Homo sapiens
tgataaccataatgt

SEQ ID NO: 1694436 - DNA, 15 bp, Homo sapiens
gataaccataatgtg

SEQ ID NO: 1694437 - DNA, 15 bp, Homo sapiens
ataaccataatgtgc

SEQ ID NO: 1694438 - DNA, 15 bp, Homo sapiens
taaccataatgtgca

SEQ ID NO: 1694439 - DNA, 15 bp, Homo sapiens
aaccataatgtgcaa

SEQ ID NO: 1694440 - DNA, 15 bp, Homo sapiens
accataatgtgcaaa

SEQ ID NO: 1694441 - DNA, 15 bp, Homo sapiens
ccataatgtgcaaat

SEQ ID NO: 1694442 - DNA, 15 bp, Homo sapiens
cataatgtgcaaatc

SEQ ID NO: 1694443 - DNA, 15 bp, Homo sapiens
ataatgtgcaaatcc

SEQ ID NO: 1694444 - DNA, 15 bp, Homo sapiens
taatgtgcaaatccc

SEQ ID NO: 1694445 - DNA, 15 bp, Homo sapiens
aatgtgcaaatcccc

SEQ ID NO: 1694446 - DNA, 15 bp, Homo sapiens
atgtgcaaatcccct

SEQ ID NO: 1694447 - DNA, 15 bp, Homo sapiens
tgtgcaaatcccctg

SEQ ID NO: 1694448 - DNA, 15 bp, Homo sapiens
gtgcaaatcccctgg

SEQ ID NO: 1694449 - DNA, 15 bp, Homo sapiens
tgcaaatcccctggt

SEQ ID NO: 1694450 - DNA, 15 bp, Homo sapiens
gcaaatcccctggtt

SEQ ID NO: 1694451 - DNA, 15 bp, Homo sapiens
caaatcccctggttg

SEQ ID NO: 1694452 - DNA, 15 bp, Homo sapiens
aaatcccctggttgg

SEQ ID NO: 1694453 - DNA, 15 bp, Homo sapiens
aatcccctggttggg

SEQ ID NO: 1694454 - DNA, 15 bp, Homo sapiens
atcccctggttggga

SEQ ID NO: 1694455 - DNA, 15 bp, Homo sapiens
tcccctggttgggac

SEQ ID NO: 1694456 - DNA, 15 bp, Homo sapiens
cccctggttgggaca

SEQ ID NO: 1694457 - DNA, 15 bp, Homo sapiens
ccctggttgggacac

SEQ ID NO: 1694458 - DNA, 15 bp, Homo sapiens
cctggttgggacaca

SEQ ID NO: 1694459 - DNA, 15 bp, Homo sapiens
ctggttgggacacag

SEQ ID NO: 1694460 - DNA, 15 bp, Homo sapiens
tggttgggacacagt

SEQ ID NO: 1694461 - DNA, 15 bp, Homo sapiens
ggttgggacacagtc

SEQ ID NO: 1694462 - DNA, 15 bp, Homo sapiens
gttgggacacagtct

SEQ ID NO: 1694463 - DNA, 15 bp, Homo sapiens
ttgggacacagtctg

SEQ ID NO: 1694464 - DNA, 15 bp, Homo sapiens
tgggacacagtctgg

SEQ ID NO: 1694465 - DNA, 15 bp, Homo sapiens
gggacacagtctggc

SEQ ID NO: 1694466 - DNA, 15 bp, Homo sapiens
ggacacagtctggca

SEQ ID NO: 1694467 - DNA, 15 bp, Homo sapiens
gacacagtctggcag

SEQ ID NO: 1694468 - DNA, 15 bp, Homo sapiens
acacagtctggcagt

SEQ ID NO: 1694469 - DNA, 15 bp, Homo sapiens
cacagtctggcagta

SEQ ID NO: 1694470 - DNA, 15 bp, Homo sapiens
acagtctggcagtac

SEQ ID NO: 1694471 - DNA, 15 bp, Homo sapiens
cagtctggcagtaca

SEQ ID NO: 1694472 - DNA, 15 bp, Homo sapiens
agtctggcagtacat

SEQ ID NO: 1694473 - DNA, 15 bp, Homo sapiens
gtctggcagtacatt

SEQ ID NO: 1694474 - DNA, 15 bp, Homo sapiens
tctggcagtacattc

SEQ ID NO: 1694475 - DNA, 15 bp, Homo sapiens
ctggcagtacattca

SEQ ID NO: 1694476 - DNA, 15 bp, Homo sapiens
tggcagtacattcag

SEQ ID NO: 1694477 - DNA, 15 bp, Homo sapiens
ggcagtacattcagg

SEQ ID NO: 1694478 - DNA, 15 bp, Homo sapiens
gcagtacattcaggc

SEQ ID NO: 1694479 - DNA, 15 bp, Homo sapiens
cagtacattcaggct

SEQ ID NO: 1694480 - DNA, 15 bp, Homo sapiens
agtacattcaggcta

SEQ ID NO: 1694481 - DNA, 15 bp, Homo sapiens
gtacattcaggctaa

SEQ ID NO: 1694482 - DNA, 15 bp, Homo sapiens
tacattcaggctaaa

SEQ ID NO: 1694483 - DNA, 15 bp, Homo sapiens
acattcaggctaaat

SEQ ID NO: 1694484 - DNA, 15 bp, Homo sapiens
cattcaggctaaatg

SEQ ID NO: 1694485 - DNA, 15 bp, Homo sapiens
attcaggctaaatga

SEQ ID NO: 1694486 - DNA, 15 bp, Homo sapiens
ttcaggctaaatgaa

SEQ ID NO: 1694487 - DNA, 15 bp, Homo sapiens
tcaggctaaatgaac

SEQ ID NO: 1694488 - DNA, 15 bp, Homo sapiens
caggctaaatgaact

SEQ ID NO: 1694489 - DNA, 15 bp, Homo sapiens
aggctaaatgaactg

SEQ ID NO: 1694490 - DNA, 15 bp, Homo sapiens
ggctaaatgaactgt

SEQ ID NO: 1694491 - DNA, 15 bp, Homo sapiens
gctaaatgaactgta

SEQ ID NO: 1694492 - DNA, 15 bp, Homo sapiens
ctaaatgaactgtat

SEQ ID NO: 1694493 - DNA, 15 bp, Homo sapiens
taaatgaactgtatg

SEQ ID NO: 1694494 - DNA, 15 bp, Homo sapiens
aaatgaactgtatga

SEQ ID NO: 1694495 - DNA, 15 bp, Homo sapiens
aatgaactgtatgac

SEQ ID NO: 1694496 - DNA, 15 bp, Homo sapiens
atgaactgtatgacg

SEQ ID NO: 1694497 - DNA, 15 bp, Homo sapiens
tgaactgtatgacgc

SEQ ID NO: 1694498 - DNA, 15 bp, Homo sapiens
gaactgtatgacgct

SEQ ID NO: 1694499 - DNA, 15 bp, Homo sapiens
aactgtatgacgctc

SEQ ID NO: 1694500 - DNA, 15 bp, Homo sapiens
actgtatgacgctct

SEQ ID NO: 1694501 - DNA, 15 bp, Homo sapiens
ctgtatgacgctctg

SEQ ID NO: 1694502 - DNA, 15 bp, Homo sapiens
tgtatgacgctctgt

SEQ ID NO: 1694503 - DNA, 15 bp, Homo sapiens
gtatgacgctctgtt

SEQ ID NO: 1694504 - DNA, 15 bp, Homo sapiens
tatgacgctctgttg

SEQ ID NO: 1694505 - DNA, 15 bp, Homo sapiens
atgacgctctgttga

SEQ ID NO: 1694506 - DNA, 15 bp, Homo sapiens
tgacgctctgttgaa

SEQ ID NO: 1694507 - DNA, 15 bp, Homo sapiens
gacgctctgttgaaa

SEQ ID NO: 1694508 - DNA, 15 bp, Homo sapiens
acgctctgttgaaat

SEQ ID NO: 1694509 - DNA, 15 bp, Homo sapiens
cgctctgttgaaatg

SEQ ID NO: 1694510 - DNA, 15 bp, Homo sapiens
gctctgttgaaatga

SEQ ID NO: 1694511 - DNA, 15 bp, Homo sapiens
ctctgttgaaatgag

SEQ ID NO: 1694512 - DNA, 15 bp, Homo sapiens
tctgttgaaatgagt

SEQ ID NO: 1694513 - DNA, 15 bp, Homo sapiens
ctgttgaaatgagtg

SEQ ID NO: 1694514 - DNA, 15 bp, Homo sapiens
tgttgaaatgagtgg

SEQ ID NO: 1694515 - DNA, 15 bp, Homo sapiens
gttgaaatgagtggc

SEQ ID NO: 1694516 - DNA, 15 bp, Homo sapiens
ttgaaatgagtggca

SEQ ID NO: 1694517 - DNA, 15 bp, Homo sapiens
tgaaatgagtggcag

SEQ ID NO: 1694518 - DNA, 15 bp, Homo sapiens
gaaatgagtggcagg

SEQ ID NO: 1694519 - DNA, 15 bp, Homo sapiens
aaatgagtggcaggt

SEQ ID NO: 1694520 - DNA, 15 bp, Homo sapiens
aatgagtggcaggtc

SEQ ID NO: 1694521 - DNA, 15 bp, Homo sapiens
atgagtggcaggtcc

SEQ ID NO: 1694522 - DNA, 15 bp, Homo sapiens
tgagtggcaggtcct

SEQ ID NO: 1694523 - DNA, 15 bp, Homo sapiens
gagtggcaggtcctg

SEQ ID NO: 1694524 - DNA, 15 bp, Homo sapiens
agtggcaggtcctgt

SEQ ID NO: 1694525 - DNA, 15 bp, Homo sapiens
gtggcaggtcctgtc

SEQ ID NO: 1694526 - DNA, 15 bp, Homo sapiens
tggcaggtcctgtct

SEQ ID NO: 1694527 - DNA, 15 bp, Homo sapiens
ggcaggtcctgtctt

SEQ ID NO: 1694528 - DNA, 15 bp, Homo sapiens
gcaggtcctgtcttt

SEQ ID NO: 1694529 - DNA, 15 bp, Homo sapiens
caggtcctgtctttc

SEQ ID NO: 1694530 - DNA, 15 bp, Homo sapiens
aggtcctgtctttcc

SEQ ID NO: 1694531 - DNA, 15 bp, Homo sapiens
ggtcctgtctttcca

SEQ ID NO: 1694532 - DNA, 15 bp, Homo sapiens
gtcctgtctttccat

SEQ ID NO: 1694533 - DNA, 15 bp, Homo sapiens
tcctgtctttccatg

SEQ ID NO: 1694534 - DNA, 15 bp, Homo sapiens
cctgtctttccatgc

SEQ ID NO: 1694535 - DNA, 15 bp, Homo sapiens
ctgtctttccatgca

SEQ ID NO: 1694536 - DNA, 15 bp, Homo sapiens
tgtctttccatgcaa

SEQ ID NO: 1694537 - DNA, 15 bp, Homo sapiens
gtctttccatgcaag

SEQ ID NO: 1694538 - DNA, 15 bp, Homo sapiens
tctttccatgcaagt

SEQ ID NO: 1694539 - DNA, 15 bp, Homo sapiens
ctttccatgcaagtg

SEQ ID NO: 1694540 - DNA, 15 bp, Homo sapiens
tttccatgcaagtgc

SEQ ID NO: 1694541 - DNA, 15 bp, Homo sapiens
ttccatgcaagtgct

SEQ ID NO: 1694542 - DNA, 15 bp, Homo sapiens
tccatgcaagtgcta

SEQ ID NO: 1694543 - DNA, 15 bp, Homo sapiens
ccatgcaagtgctag

SEQ ID NO: 1694544 - DNA, 15 bp, Homo sapiens
catgcaagtgctaga

SEQ ID NO: 1694545 - DNA, 15 bp, Homo sapiens
atgcaagtgctagat

SEQ ID NO: 1694546 - DNA, 15 bp, Homo sapiens
tgcaagtgctagata

SEQ ID NO: 1694547 - DNA, 15 bp, Homo sapiens
gcaagtgctagataa

SEQ ID NO: 1694548 - DNA, 15 bp, Homo sapiens
caagtgctagataaa

SEQ ID NO: 1694549 - DNA, 15 bp, Homo sapiens
aagtgctagataaat

SEQ ID NO: 1694550 - DNA, 15 bp, Homo sapiens
agtgctagataaatg

SEQ ID NO: 1694551 - DNA, 15 bp, Homo sapiens
gtgctagataaatga

SEQ ID NO: 1694552 - DNA, 15 bp, Homo sapiens
tgctagataaatgac

SEQ ID NO: 1694553 - DNA, 15 bp, Homo sapiens
gctagataaatgaca

SEQ ID NO: 1694554 - DNA, 15 bp, Homo sapiens
ctagataaatgacaa

SEQ ID NO: 1694555 - DNA, 15 bp, Homo sapiens
tagataaatgacaag

SEQ ID NO: 1694556 - DNA, 15 bp, Homo sapiens
agataaatgacaagg

SEQ ID NO: 1694557 - DNA, 15 bp, Homo sapiens
gataaatgacaaggc

SEQ ID NO: 1694558 - DNA, 15 bp, Homo sapiens
ataaatgacaaggca

SEQ ID NO: 1694559 - DNA, 15 bp, Homo sapiens
taaatgacaaggcaa

SEQ ID NO: 1694560 - DNA, 15 bp, Homo sapiens
aaatgacaaggcaat

SEQ ID NO: 1694561 - DNA, 15 bp, Homo sapiens
aatgacaaggcaatt

SEQ ID NO: 1694562 - DNA, 15 bp, Homo sapiens
atgacaaggcaatta

SEQ ID NO: 1694563 - DNA, 15 bp, Homo sapiens
tgacaaggcaattac

SEQ ID NO: 1694564 - DNA, 15 bp, Homo sapiens
gacaaggcaattaca

SEQ ID NO: 1694565 - DNA, 15 bp, Homo sapiens
acaaggcaattacaa

SEQ ID NO: 1694566 - DNA, 15 bp, Homo sapiens
caaggcaattacaac

SEQ ID NO: 1694567 - DNA, 15 bp, Homo sapiens
aaggcaattacaaca

SEQ ID NO: 1694568 - DNA, 15 bp, Homo sapiens
aggcaattacaacaa

SEQ ID NO: 1694569 - DNA, 15 bp, Homo sapiens
ggcaattacaacaat

SEQ ID NO: 1694570 - DNA, 15 bp, Homo sapiens
gcaattacaacaatc

SEQ ID NO: 1694571 - DNA, 15 bp, Homo sapiens
caattacaacaatca

SEQ ID NO: 1694572 - DNA, 15 bp, Homo sapiens
aattacaacaatcag

SEQ ID NO: 1694573 - DNA, 15 bp, Homo sapiens
attacaacaatcagg

SEQ ID NO: 1694574 - DNA, 15 bp, Homo sapiens
ttacaacaatcagga

SEQ ID NO: 1694575 - DNA, 15 bp, Homo sapiens
tacaacaatcaggaa

SEQ ID NO: 1694576 - DNA, 15 bp, Homo sapiens
acaacaatcaggaag

SEQ ID NO: 1694577 - DNA, 15 bp, Homo sapiens
caacaatcaggaagc

SEQ ID NO: 1694578 - DNA, 15 bp, Homo sapiens
aacaatcaggaagca

SEQ ID NO: 1694579 - DNA, 15 bp, Homo sapiens
acaatcaggaagcac

SEQ ID NO: 1694580 - DNA, 15 bp, Homo sapiens
caatcaggaagcaca

SEQ ID NO: 1694581 - DNA, 15 bp, Homo sapiens
aatcaggaagcacag

SEQ ID NO: 1694582 - DNA, 15 bp, Homo sapiens
atcaggaagcacagg

SEQ ID NO: 1694583 - DNA, 15 bp, Homo sapiens
tcaggaagcacaggt

SEQ ID NO: 1694584 - DNA, 15 bp, Homo sapiens
caggaagcacaggtt

SEQ ID NO: 1694585 - DNA, 15 bp, Homo sapiens
aggaagcacaggttc

SEQ ID NO: 1694586 - DNA, 15 bp, Homo sapiens
ggaagcacaggttct

SEQ ID NO: 1694587 - DNA, 15 bp, Homo sapiens
gaagcacaggttctt

SEQ ID NO: 1694588 - DNA, 15 bp, Homo sapiens
aagcacaggttcttc

SEQ ID NO: 1694589 - DNA, 15 bp, Homo sapiens
agcacaggttcttcc

SEQ ID NO: 1694590 - DNA, 15 bp, Homo sapiens
gcacaggttcttccc

SEQ ID NO: 1694591 - DNA, 15 bp, Homo sapiens
cacaggttcttccca

SEQ ID NO: 1694592 - DNA, 15 bp, Homo sapiens
acaggttcttcccaa

SEQ ID NO: 1694593 - DNA, 15 bp, Homo sapiens
caggttcttcccaac

SEQ ID NO: 1694594 - DNA, 15 bp, Homo sapiens
aggttcttcccaacc

SEQ ID NO: 1694595 - DNA, 15 bp, Homo sapiens
ggttcttcccaacct

SEQ ID NO: 1694596 - DNA, 15 bp, Homo sapiens
gttcttcccaacctt

SEQ ID NO: 1694597 - DNA, 15 bp, Homo sapiens
ttcttcccaaccttc

SEQ ID NO: 1694598 - DNA, 15 bp, Homo sapiens
tcttcccaaccttcg

SEQ ID NO: 1694599 - DNA, 15 bp, Homo sapiens
cttcccaaccttcgc

SEQ ID NO: 1694600 - DNA, 15 bp, Homo sapiens
ttcccaaccttcgca

SEQ ID NO: 1694601 - DNA, 15 bp, Homo sapiens
tcccaaccttcgcag

SEQ ID NO: 1694602 - DNA, 15 bp, Homo sapiens
cccaaccttcgcaga

SEQ ID NO: 1694603 - DNA, 15 bp, Homo sapiens
ccaaccttcgcagag

SEQ ID NO: 1694604 - DNA, 15 bp, Homo sapiens
caaccttcgcagaga

SEQ ID NO: 1694605 - DNA, 15 bp, Homo sapiens
aaccttcgcagagac

SEQ ID NO: 1694606 - DNA, 15 bp, Homo sapiens
accttcgcagagact

SEQ ID NO: 1694607 - DNA, 15 bp, Homo sapiens
ccttcgcagagactg

SEQ ID NO: 1694608 - DNA, 15 bp, Homo sapiens
cttcgcagagactgc

SEQ ID NO: 1694609 - DNA, 15 bp, Homo sapiens
ttcgcagagactgca

SEQ ID NO: 1694610 - DNA, 15 bp, Homo sapiens
tcgcagagactgcag

SEQ ID NO: 1694611 - DNA, 15 bp, Homo sapiens
cgcagagactgcaga

SEQ ID NO: 1694612 - DNA, 15 bp, Homo sapiens
gcagagactgcagaa

SEQ ID NO: 1694613 - DNA, 15 bp, Homo sapiens
cagagactgcagaaa

SEQ ID NO: 1694614 - DNA, 15 bp, Homo sapiens
agagactgcagaaag

SEQ ID NO: 1694615 - DNA, 15 bp, Homo sapiens
gagactgcagaaagt

SEQ ID NO: 1694616 - DNA, 15 bp, Homo sapiens
agactgcagaaagtg

SEQ ID NO: 1694617 - DNA, 15 bp, Homo sapiens
gactgcagaaagtgg

SEQ ID NO: 1694618 - DNA, 15 bp, Homo sapiens
actgcagaaagtgga

SEQ ID NO: 1694619 - DNA, 15 bp, Homo sapiens
ctgcagaaagtggaa

SEQ ID NO: 1694620 - DNA, 15 bp, Homo sapiens
tgcagaaagtggaag

SEQ ID NO: 1694621 - DNA, 15 bp, Homo sapiens
gcagaaagtggaaga

SEQ ID NO: 1694622 - DNA, 15 bp, Homo sapiens
cagaaagtggaagac

SEQ ID NO: 1694623 - DNA, 15 bp, Homo sapiens
agaaagtggaagaca

SEQ ID NO: 1694624 - DNA, 15 bp, Homo sapiens
gaaagtggaagacac

SEQ ID NO: 1694625 - DNA, 15 bp, Homo sapiens
aaagtggaagacact

SEQ ID NO: 1694626 - DNA, 15 bp, Homo sapiens
aagtggaagacactg

SEQ ID NO: 1694627 - DNA, 15 bp, Homo sapiens
agtggaagacactga

SEQ ID NO: 1694628 - DNA, 15 bp, Homo sapiens
gtggaagacactgag

SEQ ID NO: 1694629 - DNA, 15 bp, Homo sapiens
tggaagacactgagt

SEQ ID NO: 1694630 - DNA, 15 bp, Homo sapiens
ggaagacactgagta

SEQ ID NO: 1694631 - DNA, 15 bp, Homo sapiens
gaagacactgagtat

SEQ ID NO: 1694632 - DNA, 15 bp, Homo sapiens
aagacactgagtata

SEQ ID NO: 1694633 - DNA, 15 bp, Homo sapiens
agacactgagtatag

SEQ ID NO: 1694634 - DNA, 15 bp, Homo sapiens
gacactgagtatagg

SEQ ID NO: 1694635 - DNA, 15 bp, Homo sapiens
acactgagtataggg

SEQ ID NO: 1694636 - DNA, 15 bp, Homo sapiens
cactgagtatagggt

SEQ ID NO: 1694637 - DNA, 15 bp, Homo sapiens
actgagtatagggta

SEQ ID NO: 1694638 - DNA, 15 bp, Homo sapiens
ctgagtatagggtat

SEQ ID NO: 1694639 - DNA, 15 bp, Homo sapiens
tgagtatagggtatg

SEQ ID NO: 1694640 - DNA, 15 bp, Homo sapiens
gagtatagggtatga

SEQ ID NO: 1694641 - DNA, 15 bp, Homo sapiens
agtatagggtatgaa

SEQ ID NO: 1694642 - DNA, 15 bp, Homo sapiens
gtatagggtatgaag

SEQ ID NO: 1694643 - DNA, 15 bp, Homo sapiens
tatagggtatgaagt

SEQ ID NO: 1694644 - DNA, 15 bp, Homo sapiens
atagggtatgaagtg

SEQ ID NO: 1694645 - DNA, 15 bp, Homo sapiens
tagggtatgaagtgg

SEQ ID NO: 1694646 - DNA, 15 bp, Homo sapiens
agggtatgaagtggc

SEQ ID NO: 1694647 - DNA, 15 bp, Homo sapiens
gggtatgaagtggca

SEQ ID NO: 1694648 - DNA, 15 bp, Homo sapiens
ggtatgaagtggcaa

SEQ ID NO: 1694649 - DNA, 15 bp, Homo sapiens
gtatgaagtggcaaa

SEQ ID NO: 1694650 - DNA, 15 bp, Homo sapiens
tatgaagtggcaaag

SEQ ID NO: 1694651 - DNA, 15 bp, Homo sapiens
atgaagtggcaaagg

SEQ ID NO: 1694652 - DNA, 15 bp, Homo sapiens
tgaagtggcaaagga

SEQ ID NO: 1694653 - DNA, 15 bp, Homo sapiens
gaagtggcaaaggaa

SEQ ID NO: 1694654 - DNA, 15 bp, Homo sapiens
aagtggcaaaggaaa

SEQ ID NO: 1694655 - DNA, 15 bp, Homo sapiens
agtggcaaaggaaag

SEQ ID NO: 1694656 - DNA, 15 bp, Homo sapiens
gtggcaaaggaaagc

SEQ ID NO: 1694657 - DNA, 15 bp, Homo sapiens
tggcaaaggaaagct

SEQ ID NO: 1694658 - DNA, 15 bp, Homo sapiens
ggcaaaggaaagctg

SEQ ID NO: 1694659 - DNA, 15 bp, Homo sapiens
gcaaaggaaagctgc

SEQ ID NO: 1694660 - DNA, 15 bp, Homo sapiens
caaaggaaagctgcc

SEQ ID NO: 1694661 - DNA, 15 bp, Homo sapiens
aaaggaaagctgcca

SEQ ID NO: 1694662 - DNA, 15 bp, Homo sapiens
aaggaaagctgccat

SEQ ID NO: 1694663 - DNA, 15 bp, Homo sapiens
aggaaagctgccatt

SEQ ID NO: 1694664 - DNA, 15 bp, Homo sapiens
ggaaagctgccatta

SEQ ID NO: 1694665 - DNA, 15 bp, Homo sapiens
gaaagctgccattat

SEQ ID NO: 1694666 - DNA, 15 bp, Homo sapiens
aaagctgccattatg

SEQ ID NO: 1694667 - DNA, 15 bp, Homo sapiens
aagctgccattatgt

SEQ ID NO: 1694668 - DNA, 15 bp, Homo sapiens
agctgccattatgta

SEQ ID NO: 1694669 - DNA, 15 bp, Homo sapiens
gctgccattatgtag

SEQ ID NO: 1694670 - DNA, 15 bp, Homo sapiens
ctgccattatgtagg

SEQ ID NO: 1694671 - DNA, 15 bp, Homo sapiens
tgccattatgtaggt

SEQ ID NO: 1694672 - DNA, 15 bp, Homo sapiens
gccattatgtaggtt

SEQ ID NO: 1694673 - DNA, 15 bp, Homo sapiens
ccattatgtaggttt

SEQ ID NO: 1694674 - DNA, 15 bp, Homo sapiens
cattatgtaggtttt

SEQ ID NO: 1694675 - DNA, 15 bp, Homo sapiens
attatgtaggttttt

SEQ ID NO: 1694676 - DNA, 15 bp, Homo sapiens
ttatgtaggttttta

SEQ ID NO: 1694677 - DNA, 15 bp, Homo sapiens
tatgtaggtttttac

SEQ ID NO: 1694678 - DNA, 15 bp, Homo sapiens
atgtaggtttttact

SEQ ID NO: 1694679 - DNA, 15 bp, Homo sapiens
tgtaggtttttactt

SEQ ID NO: 1694680 - DNA, 15 bp, Homo sapiens
gtaggtttttacttc

SEQ ID NO: 1694681 - DNA, 15 bp, Homo sapiens
taggtttttacttcc

SEQ ID NO: 1694682 - DNA, 15 bp, Homo sapiens
aggtttttacttccc

SEQ ID NO: 1694683 - DNA, 15 bp, Homo sapiens
ggtttttacttccca

SEQ ID NO: 1694684 - DNA, 15 bp, Homo sapiens
gtttttacttcccat

SEQ ID NO: 1694685 - DNA, 15 bp, Homo sapiens
tttttacttcccatc

SEQ ID NO: 1694686 - DNA, 15 bp, Homo sapiens
ttttacttcccatct

SEQ ID NO: 1694687 - DNA, 15 bp, Homo sapiens
tttacttcccatctg

SEQ ID NO: 1694688 - DNA, 15 bp, Homo sapiens
ttacttcccatctgt

SEQ ID NO: 1694689 - DNA, 15 bp, Homo sapiens
tacttcccatctgta

SEQ ID NO: 1694690 - DNA, 15 bp, Homo sapiens
acttcccatctgtaa

SEQ ID NO: 1694691 - DNA, 15 bp, Homo sapiens
cttcccatctgtaaa

SEQ ID NO: 1694692 - DNA, 15 bp, Homo sapiens
ttcccatctgtaaat

SEQ ID NO: 1694693 - DNA, 15 bp, Homo sapiens
tcccatctgtaaatt

SEQ ID NO: 1694694 - DNA, 15 bp, Homo sapiens
cccatctgtaaattc

SEQ ID NO: 1694695 - DNA, 15 bp, Homo sapiens
ccatctgtaaattca

SEQ ID NO: 1694696 - DNA, 15 bp, Homo sapiens
catctgtaaattcac

SEQ ID NO: 1694697 - DNA, 15 bp, Homo sapiens
atctgtaaattcact

SEQ ID NO: 1694698 - DNA, 15 bp, Homo sapiens
tctgtaaattcacta

SEQ ID NO: 1694699 - DNA, 15 bp, Homo sapiens
ctgtaaattcactag

SEQ ID NO: 1694700 - DNA, 15 bp, Homo sapiens
tgtaaattcactagg

SEQ ID NO: 1694701 - DNA, 15 bp, Homo sapiens
gtaaattcactaggt

SEQ ID NO: 1694702 - DNA, 15 bp, Homo sapiens
taaattcactaggtc

SEQ ID NO: 1694703 - DNA, 15 bp, Homo sapiens
aaattcactaggtca

SEQ ID NO: 1694704 - DNA, 15 bp, Homo sapiens
aattcactaggtcac

SEQ ID NO: 1694705 - DNA, 15 bp, Homo sapiens
attcactaggtcact

SEQ ID NO: 1694706 - DNA, 15 bp, Homo sapiens
ttcactaggtcactg

SEQ ID NO: 1694707 - DNA, 15 bp, Homo sapiens
tcactaggtcactgc

SEQ ID NO: 1694708 - DNA, 15 bp, Homo sapiens
cactaggtcactgca

SEQ ID NO: 1694709 - DNA, 15 bp, Homo sapiens
actaggtcactgcat

SEQ ID NO: 1694710 - DNA, 15 bp, Homo sapiens
ctaggtcactgcatc

SEQ ID NO: 1694711 - DNA, 15 bp, Homo sapiens
taggtcactgcatca

SEQ ID NO: 1694712 - DNA, 15 bp, Homo sapiens
aggtcactgcatcag

SEQ ID NO: 1694713 - DNA, 15 bp, Homo sapiens
ggtcactgcatcagc

SEQ ID NO: 1694714 - DNA, 15 bp, Homo sapiens
gtcactgcatcagcc

SEQ ID NO: 1694715 - DNA, 15 bp, Homo sapiens
tcactgcatcagccc

SEQ ID NO: 1694716 - DNA, 15 bp, Homo sapiens
cactgcatcagccct

SEQ ID NO: 1694717 - DNA, 15 bp, Homo sapiens
actgcatcagccctt

SEQ ID NO: 1694718 - DNA, 15 bp, Homo sapiens
ctgcatcagccctta

SEQ ID NO: 1694719 - DNA, 15 bp, Homo sapiens
tgcatcagcccttat

SEQ ID NO: 1694720 - DNA, 15 bp, Homo sapiens
gcatcagcccttata

SEQ ID NO: 1694721 - DNA, 15 bp, Homo sapiens
catcagcccttatag

SEQ ID NO: 1694722 - DNA, 15 bp, Homo sapiens
atcagcccttatagg

SEQ ID NO: 1694723 - DNA, 15 bp, Homo sapiens
tcagcccttatagga

SEQ ID NO: 1694724 - DNA, 15 bp, Homo sapiens
cagcccttataggaa

SEQ ID NO: 1694725 - DNA, 15 bp, Homo sapiens
agcccttataggaag

SEQ ID NO: 1694726 - DNA, 15 bp, Homo sapiens
gcccttataggaagg

SEQ ID NO: 1694727 - DNA, 15 bp, Homo sapiens
cccttataggaaggt

SEQ ID NO: 1694728 - DNA, 15 bp, Homo sapiens
ccttataggaaggta

SEQ ID NO: 1694729 - DNA, 15 bp, Homo sapiens
cttataggaaggtat

SEQ ID NO: 1694730 - DNA, 15 bp, Homo sapiens
ttataggaaggtatc

SEQ ID NO: 1694731 - DNA, 15 bp, Homo sapiens
tataggaaggtatcc

SEQ ID NO: 1694732 - DNA, 15 bp, Homo sapiens
ataggaaggtatcct

SEQ ID NO: 1694733 - DNA, 15 bp, Homo sapiens
taggaaggtatcctt

SEQ ID NO: 1694734 - DNA, 15 bp, Homo sapiens
aggaaggtatccttg

SEQ ID NO: 1694735 - DNA, 15 bp, Homo sapiens
ggaaggtatccttgt

SEQ ID NO: 1694736 - DNA, 15 bp, Homo sapiens
gaaggtatccttgtg

SEQ ID NO: 1694737 - DNA, 15 bp, Homo sapiens
aaggtatccttgtga

SEQ ID NO: 1694738 - DNA, 15 bp, Homo sapiens
aggtatccttgtgat

SEQ ID NO: 1694739 - DNA, 15 bp, Homo sapiens
ggtatccttgtgata

SEQ ID NO: 1694740 - DNA, 15 bp, Homo sapiens
gtatccttgtgatat

SEQ ID NO: 1694741 - DNA, 15 bp, Homo sapiens
tatccttgtgatatt

SEQ ID NO: 1694742 - DNA, 15 bp, Homo sapiens
atccttgtgatatta

SEQ ID NO: 1694743 - DNA, 15 bp, Homo sapiens
tccttgtgatattat

SEQ ID NO: 1694744 - DNA, 15 bp, Homo sapiens
ccttgtgatattatg

SEQ ID NO: 1694745 - DNA, 15 bp, Homo sapiens
cttgtgatattatgc

SEQ ID NO: 1694746 - DNA, 15 bp, Homo sapiens
ttgtgatattatgct

SEQ ID NO: 1694747 - DNA, 15 bp, Homo sapiens
tgtgatattatgctc

SEQ ID NO: 1694748 - DNA, 15 bp, Homo sapiens
gtgatattatgctca

SEQ ID NO: 1694749 - DNA, 15 bp, Homo sapiens
tgatattatgctcac

SEQ ID NO: 1694750 - DNA, 15 bp, Homo sapiens
gatattatgctcacg

SEQ ID NO: 1694751 - DNA, 15 bp, Homo sapiens
atattatgctcacgt

SEQ ID NO: 1694752 - DNA, 15 bp, Homo sapiens
tattatgctcacgtg

SEQ ID NO: 1694753 - DNA, 15 bp, Homo sapiens
attatgctcacgtgt

SEQ ID NO: 1694754 - DNA, 15 bp, Homo sapiens
ttatgctcacgtgtc

SEQ ID NO: 1694755 - DNA, 15 bp, Homo sapiens
tatgctcacgtgtct

SEQ ID NO: 1694756 - DNA, 15 bp, Homo sapiens
atgctcacgtgtctt

SEQ ID NO: 1694757 - DNA, 15 bp, Homo sapiens
tgctcacgtgtcttg

SEQ ID NO: 1694758 - DNA, 15 bp, Homo sapiens
gctcacgtgtcttgt

SEQ ID NO: 1694759 - DNA, 15 bp, Homo sapiens
ctcacgtgtcttgtt

SEQ ID NO: 1694760 - DNA, 15 bp, Homo sapiens
tcacgtgtcttgttc

SEQ ID NO: 1694761 - DNA, 15 bp, Homo sapiens
cacgtgtcttgttca

SEQ ID NO: 1694762 - DNA, 15 bp, Homo sapiens
acgtgtcttgttcag

SEQ ID NO: 1694763 - DNA, 15 bp, Homo sapiens
cgtgtcttgttcagg

SEQ ID NO: 1694764 - DNA, 15 bp, Homo sapiens
gtgtcttgttcaggg

SEQ ID NO: 1694765 - DNA, 15 bp, Homo sapiens
tgtcttgttcagggc

SEQ ID NO: 1694766 - DNA, 15 bp, Homo sapiens
gtcttgttcagggca

SEQ ID NO: 1694767 - DNA, 15 bp, Homo sapiens
tcttgttcagggcac

SEQ ID NO: 1694768 - DNA, 15 bp, Homo sapiens
cttgttcagggcaca

SEQ ID NO: 1694769 - DNA, 15 bp, Homo sapiens
ttgttcagggcacat

SEQ ID NO: 1694770 - DNA, 15 bp, Homo sapiens
tgttcagggcacatg

SEQ ID NO: 1694771 - DNA, 15 bp, Homo sapiens
gttcagggcacatgg

SEQ ID NO: 1694772 - DNA, 15 bp, Homo sapiens
ttcagggcacatggt

SEQ ID NO: 1694773 - DNA, 15 bp, Homo sapiens
tcagggcacatggtg

SEQ ID NO: 1694774 - DNA, 15 bp, Homo sapiens
cagggcacatggtga

SEQ ID NO: 1694775 - DNA, 15 bp, Homo sapiens
agggcacatggtgaa

SEQ ID NO: 1694776 - DNA, 15 bp, Homo sapiens
gggcacatggtgaaa

SEQ ID NO: 1694777 - DNA, 15 bp, Homo sapiens
ggcacatggtgaaaa

SEQ ID NO: 1694778 - DNA, 15 bp, Homo sapiens
gcacatggtgaaaaa

SEQ ID NO: 1694779 - DNA, 15 bp, Homo sapiens
cacatggtgaaaaaa

SEQ ID NO: 1694780 - DNA, 15 bp, Homo sapiens
acatggtgaaaaaaa

SEQ ID NO: 1694781 - DNA, 15 bp, Homo sapiens
catggtgaaaaaaat

SEQ ID NO: 1694782 - DNA, 15 bp, Homo sapiens
atggtgaaaaaaatt

SEQ ID NO: 1694783 - DNA, 15 bp, Homo sapiens
tggtgaaaaaaatta

SEQ ID NO: 1694784 - DNA, 15 bp, Homo sapiens
ggtgaaaaaaattat

SEQ ID NO: 1694785 - DNA, 15 bp, Homo sapiens
gtgaaaaaaattatt

SEQ ID NO: 1694786 - DNA, 15 bp, Homo sapiens
tgaaaaaaattattt

SEQ ID NO: 1694787 - DNA, 15 bp, Homo sapiens
gaaaaaaattatttc

SEQ ID NO: 1694788 - DNA, 15 bp, Homo sapiens
aaaaaaattatttcc

SEQ ID NO: 1694789 - DNA, 15 bp, Homo sapiens
aaaaaattatttcct

SEQ ID NO: 1694790 - DNA, 15 bp, Homo sapiens
aaaaattatttcctg

SEQ ID NO: 1694791 - DNA, 15 bp, Homo sapiens
aaaattatttcctgc

SEQ ID NO: 1694792 - DNA, 15 bp, Homo sapiens
aaattatttcctgcc

SEQ ID NO: 1694793 - DNA, 15 bp, Homo sapiens
aattatttcctgcct

SEQ ID NO: 1694794 - DNA, 15 bp, Homo sapiens
attatttcctgcctt

SEQ ID NO: 1694795 - DNA, 15 bp, Homo sapiens
ttatttcctgccttt

SEQ ID NO: 1694796 - DNA, 15 bp, Homo sapiens
tatttcctgccttta

SEQ ID NO: 1694797 - DNA, 15 bp, Homo sapiens
atttcctgcctttaa

SEQ ID NO: 1694798 - DNA, 15 bp, Homo sapiens
tttcctgcctttaaa

SEQ ID NO: 1694799 - DNA, 15 bp, Homo sapiens
ttcctgcctttaaat

SEQ ID NO: 1694800 - DNA, 15 bp, Homo sapiens
tcctgcctttaaatt

SEQ ID NO: 1694801 - DNA, 15 bp, Homo sapiens
cctgcctttaaatta

SEQ ID NO: 1694802 - DNA, 15 bp, Homo sapiens
ctgcctttaaattat

SEQ ID NO: 1694803 - DNA, 15 bp, Homo sapiens
tgcctttaaattatc

SEQ ID NO: 1694804 - DNA, 15 bp, Homo sapiens
gcctttaaattatct

SEQ ID NO: 1694805 - DNA, 15 bp, Homo sapiens
cctttaaattatctt

SEQ ID NO: 1694806 - DNA, 15 bp, Homo sapiens
ctttaaattatcttt

SEQ ID NO: 1694807 - DNA, 15 bp, Homo sapiens
tttaaattatcttta

SEQ ID NO: 1694808 - DNA, 15 bp, Homo sapiens
ttaaattatctttac

SEQ ID NO: 1694809 - DNA, 15 bp, Homo sapiens
taaattatctttaca

SEQ ID NO: 1694810 - DNA, 15 bp, Homo sapiens
aaattatctttacag

SEQ ID NO: 1694811 - DNA, 15 bp, Homo sapiens
aattatctttacagg

SEQ ID NO: 1694812 - DNA, 15 bp, Homo sapiens
attatctttacaggc

SEQ ID NO: 1694813 - DNA, 15 bp, Homo sapiens
ttatctttacaggca

SEQ ID NO: 1694814 - DNA, 15 bp, Homo sapiens
tatctttacaggcaa

SEQ ID NO: 1694815 - DNA, 15 bp, Homo sapiens
atctttacaggcaat

SEQ ID NO: 1694816 - DNA, 15 bp, Homo sapiens
tctttacaggcaatt

SEQ ID NO: 1694817 - DNA, 15 bp, Homo sapiens
ctttacaggcaattt

SEQ ID NO: 1694818 - DNA, 15 bp, Homo sapiens
tttacaggcaattta

SEQ ID NO: 1694819 - DNA, 15 bp, Homo sapiens
ttacaggcaatttac

SEQ ID NO: 1694820 - DNA, 15 bp, Homo sapiens
tacaggcaatttact

SEQ ID NO: 1694821 - DNA, 15 bp, Homo sapiens
acaggcaatttactc

SEQ ID NO: 1694822 - DNA, 15 bp, Homo sapiens
caggcaatttactct

SEQ ID NO: 1694823 - DNA, 15 bp, Homo sapiens
aggcaatttactcta

SEQ ID NO: 1694824 - DNA, 15 bp, Homo sapiens
ggcaatttactctac

SEQ ID NO: 1694825 - DNA, 15 bp, Homo sapiens
gcaatttactctaca

SEQ ID NO: 1694826 - DNA, 15 bp, Homo sapiens
caatttactctacaa

SEQ ID NO: 1694827 - DNA, 15 bp, Homo sapiens
aatttactctacaag

SEQ ID NO: 1694828 - DNA, 15 bp, Homo sapiens
atttactctacaaga

SEQ ID NO: 1694829 - DNA, 15 bp, Homo sapiens
tttactctacaagaa

SEQ ID NO: 1694830 - DNA, 15 bp, Homo sapiens
ttactctacaagaaa

SEQ ID NO: 1694831 - DNA, 15 bp, Homo sapiens
tactctacaagaaaa

SEQ ID NO: 1694832 - DNA, 15 bp, Homo sapiens
actctacaagaaaat

SEQ ID NO: 1694833 - DNA, 15 bp, Homo sapiens
ctctacaagaaaatt

SEQ ID NO: 1694834 - DNA, 15 bp, Homo sapiens
tctacaagaaaatta

SEQ ID NO: 1694835 - DNA, 15 bp, Homo sapiens
ctacaagaaaattag

SEQ ID NO: 1694836 - DNA, 15 bp, Homo sapiens
tacaagaaaattagg

SEQ ID NO: 1694837 - DNA, 15 bp, Homo sapiens
acaagaaaattagga

SEQ ID NO: 1694838 - DNA, 15 bp, Homo sapiens
caagaaaattaggat

SEQ ID NO: 1694839 - DNA, 15 bp, Homo sapiens
aagaaaattaggatc

SEQ ID NO: 1694840 - DNA, 15 bp, Homo sapiens
agaaaattaggatct

SEQ ID NO: 1694841 - DNA, 15 bp, Homo sapiens
gaaaattaggatcta

SEQ ID NO: 1694842 - DNA, 15 bp, Homo sapiens
aaaattaggatctac

SEQ ID NO: 1694843 - DNA, 15 bp, Homo sapiens
aaattaggatctact

SEQ ID NO: 1694844 - DNA, 15 bp, Homo sapiens
aattaggatctacta

SEQ ID NO: 1694845 - DNA, 15 bp, Homo sapiens
attaggatctactac

SEQ ID NO: 1694846 - DNA, 15 bp, Homo sapiens
ttaggatctactacc

SEQ ID NO: 1694847 - DNA, 15 bp, Homo sapiens
taggatctactaccc

SEQ ID NO: 1694848 - DNA, 15 bp, Homo sapiens
aggatctactacccc

SEQ ID NO: 1694849 - DNA, 15 bp, Homo sapiens
ggatctactacccct

SEQ ID NO: 1694850 - DNA, 15 bp, Homo sapiens
gatctactacccctg

SEQ ID NO: 1694851 - DNA, 15 bp, Homo sapiens
atctactacccctga

SEQ ID NO: 1694852 - DNA, 15 bp, Homo sapiens
tctactacccctgaa

SEQ ID NO: 1694853 - DNA, 15 bp, Homo sapiens
ctactacccctgaat

SEQ ID NO: 1694854 - DNA, 15 bp, Homo sapiens
tactacccctgaata

SEQ ID NO: 1694855 - DNA, 15 bp, Homo sapiens
actacccctgaataa

SEQ ID NO: 1694856 - DNA, 15 bp, Homo sapiens
ctacccctgaataaa

SEQ ID NO: 1694857 - DNA, 15 bp, Homo sapiens
tacccctgaataaat

SEQ ID NO: 1694858 - DNA, 15 bp, Homo sapiens
acccctgaataaatt

SEQ ID NO: 1694859 - DNA, 15 bp, Homo sapiens
cccctgaataaattg

SEQ ID NO: 1694860 - DNA, 15 bp, Homo sapiens
ccctgaataaattgg

SEQ ID NO: 1694861 - DNA, 15 bp, Homo sapiens
cctgaataaattggc

SEQ ID NO: 1694862 - DNA, 15 bp, Homo sapiens
ctgaataaattggct

SEQ ID NO: 1694863 - DNA, 15 bp, Homo sapiens
tgaataaattggctt

SEQ ID NO: 1694864 - DNA, 15 bp, Homo sapiens
gaataaattggcttt

SEQ ID NO: 1694865 - DNA, 15 bp, Homo sapiens
aataaattggctttg

SEQ ID NO: 1694866 - DNA, 15 bp, Homo sapiens
ataaattggctttga

SEQ ID NO: 1694867 - DNA, 15 bp, Homo sapiens
taaattggctttgaa

SEQ ID NO: 1694868 - DNA, 15 bp, Homo sapiens
aaattggctttgaaa

SEQ ID NO: 1694869 - DNA, 15 bp, Homo sapiens
aattggctttgaaat

SEQ ID NO: 1694870 - DNA, 15 bp, Homo sapiens
attggctttgaaatt

SEQ ID NO: 1694871 - DNA, 15 bp, Homo sapiens
ttggctttgaaatta

SEQ ID NO: 1694872 - DNA, 15 bp, Homo sapiens
tggctttgaaattag

SEQ ID NO: 1694873 - DNA, 15 bp, Homo sapiens
ggctttgaaattaga

SEQ ID NO: 1694874 - DNA, 15 bp, Homo sapiens
gctttgaaattagac

SEQ ID NO: 1694875 - DNA, 15 bp, Homo sapiens
ctttgaaattagact

SEQ ID NO: 1694876 - DNA, 15 bp, Homo sapiens
tttgaaattagactt

SEQ ID NO: 1694877 - DNA, 15 bp, Homo sapiens
ttgaaattagactta

SEQ ID NO: 1694878 - DNA, 15 bp, Homo sapiens
tgaaattagacttat

SEQ ID NO: 1694879 - DNA, 15 bp, Homo sapiens
gaaattagacttatt

SEQ ID NO: 1694880 - DNA, 15 bp, Homo sapiens
aaattagacttattc

SEQ ID NO: 1694881 - DNA, 15 bp, Homo sapiens
aattagacttattcc

SEQ ID NO: 1694882 - DNA, 15 bp, Homo sapiens
attagacttattcct

SEQ ID NO: 1694883 - DNA, 15 bp, Homo sapiens
ttagacttattcctc

SEQ ID NO: 1694884 - DNA, 15 bp, Homo sapiens
tagacttattcctca

SEQ ID NO: 1694885 - DNA, 15 bp, Homo sapiens
agacttattcctcat

SEQ ID NO: 1694886 - DNA, 15 bp, Homo sapiens
gacttattcctcatt

SEQ ID NO: 1694887 - DNA, 15 bp, Homo sapiens
acttattcctcattt

SEQ ID NO: 1694888 - DNA, 15 bp, Homo sapiens
cttattcctcatttt

SEQ ID NO: 1694889 - DNA, 15 bp, Homo sapiens
ttattcctcattttc

SEQ ID NO: 1694890 - DNA, 15 bp, Homo sapiens
tattcctcattttca

SEQ ID NO: 1694891 - DNA, 15 bp, Homo sapiens
attcctcattttcaa

SEQ ID NO: 1694892 - DNA, 15 bp, Homo sapiens
ttcctcattttcaac

SEQ ID NO: 1694893 - DNA, 15 bp, Homo sapiens
tcctcattttcaaca

SEQ ID NO: 1694894 - DNA, 15 bp, Homo sapiens
cctcattttcaacag

SEQ ID NO: 1694895 - DNA, 15 bp, Homo sapiens
ctcattttcaacaga

SEQ ID NO: 1694896 - DNA, 15 bp, Homo sapiens
tcattttcaacagag

SEQ ID NO: 1694897 - DNA, 15 bp, Homo sapiens
cattttcaacagagt

SEQ ID NO: 1694898 - DNA, 15 bp, Homo sapiens
attttcaacagagta

SEQ ID NO: 1694899 - DNA, 15 bp, Homo sapiens
ttttcaacagagtat

SEQ ID NO: 1694900 - DNA, 15 bp, Homo sapiens
tttcaacagagtatc

SEQ ID NO: 1694901 - DNA, 15 bp, Homo sapiens
ttcaacagagtatct

SEQ ID NO: 1694902 - DNA, 15 bp, Homo sapiens
tcaacagagtatctc

SEQ ID NO: 1694903 - DNA, 15 bp, Homo sapiens
caacagagtatctct

SEQ ID NO: 1694904 - DNA, 15 bp, Homo sapiens
aacagagtatctcta

SEQ ID NO: 1694905 - DNA, 15 bp, Homo sapiens
acagagtatctctag

SEQ ID NO: 1694906 - DNA, 15 bp, Homo sapiens
cagagtatctctagc

SEQ ID NO: 1694907 - DNA, 15 bp, Homo sapiens
agagtatctctagcc

SEQ ID NO: 1694908 - DNA, 15 bp, Homo sapiens
gagtatctctagcca

SEQ ID NO: 1694909 - DNA, 15 bp, Homo sapiens
agtatctctagccac

SEQ ID NO: 1694910 - DNA, 15 bp, Homo sapiens
gtatctctagccact

SEQ ID NO: 1694911 - DNA, 15 bp, Homo sapiens
tatctctagccactc

SEQ ID NO: 1694912 - DNA, 15 bp, Homo sapiens
atctctagccactct

SEQ ID NO: 1694913 - DNA, 15 bp, Homo sapiens
tctctagccactctc

SEQ ID NO: 1694914 - DNA, 15 bp, Homo sapiens
ctctagccactctct

SEQ ID NO: 1694915 - DNA, 15 bp, Homo sapiens
tctagccactctctc

SEQ ID NO: 1694916 - DNA, 15 bp, Homo sapiens
ctagccactctctct

SEQ ID NO: 1694917 - DNA, 15 bp, Homo sapiens
tagccactctctctt

SEQ ID NO: 1694918 - DNA, 15 bp, Homo sapiens
agccactctctctta

SEQ ID NO: 1694919 - DNA, 15 bp, Homo sapiens
gccactctctcttaa

SEQ ID NO: 1694920 - DNA, 15 bp, Homo sapiens
ccactctctcttaat

SEQ ID NO: 1694921 - DNA, 15 bp, Homo sapiens
cactctctcttaata

SEQ ID NO: 1694922 - DNA, 15 bp, Homo sapiens
actctctcttaatat

SEQ ID NO: 1694923 - DNA, 15 bp, Homo sapiens
ctctctcttaatatt

SEQ ID NO: 1694924 - DNA, 15 bp, Homo sapiens
tctctcttaatattt

SEQ ID NO: 1694925 - DNA, 15 bp, Homo sapiens
ctctcttaatatttc

SEQ ID NO: 1694926 - DNA, 15 bp, Homo sapiens
tctcttaatatttct

SEQ ID NO: 1694927 - DNA, 15 bp, Homo sapiens
ctcttaatatttctg

SEQ ID NO: 1694928 - DNA, 15 bp, Homo sapiens
tcttaatatttctgt

SEQ ID NO: 1694929 - DNA, 15 bp, Homo sapiens
cttaatatttctgtt

SEQ ID NO: 1694930 - DNA, 15 bp, Homo sapiens
ttaatatttctgtta

SEQ ID NO: 1694931 - DNA, 15 bp, Homo sapiens
taatatttctgttat

SEQ ID NO: 1694932 - DNA, 15 bp, Homo sapiens
aatatttctgttatc

SEQ ID NO: 1694933 - DNA, 15 bp, Homo sapiens
atatttctgttatct

SEQ ID NO: 1694934 - DNA, 15 bp, Homo sapiens
tatttctgttatctg

SEQ ID NO: 1694935 - DNA, 15 bp, Homo sapiens
atttctgttatctgc

SEQ ID NO: 1694936 - DNA, 15 bp, Homo sapiens
tttctgttatctgca

SEQ ID NO: 1694937 - DNA, 15 bp, Homo sapiens
ttctgttatctgcac

SEQ ID NO: 1694938 - DNA, 15 bp, Homo sapiens
tctgttatctgcaca

SEQ ID NO: 1694939 - DNA, 15 bp, Homo sapiens
ctgttatctgcacag

SEQ ID NO: 1694940 - DNA, 15 bp, Homo sapiens
tgttatctgcacaga

SEQ ID NO: 1694941 - DNA, 15 bp, Homo sapiens
gttatctgcacagaa

SEQ ID NO: 1694942 - DNA, 15 bp, Homo sapiens
ttatctgcacagaac

SEQ ID NO: 1694943 - DNA, 15 bp, Homo sapiens
tatctgcacagaact

SEQ ID NO: 1694944 - DNA, 15 bp, Homo sapiens
atctgcacagaacta

SEQ ID NO: 1694945 - DNA, 15 bp, Homo sapiens
tctgcacagaactaa

SEQ ID NO: 1694946 - DNA, 15 bp, Homo sapiens
acagaactaaatccc

SEQ ID NO: 1694947 - DNA, 15 bp, Homo sapiens
cagaactaaatccca

SEQ ID NO: 1694948 - DNA, 15 bp, Homo sapiens
agaactaaatcccat

SEQ ID NO: 1694949 - DNA, 15 bp, Homo sapiens
gaactaaatcccatt

SEQ ID NO: 1694950 - DNA, 15 bp, Homo sapiens
aactaaatcccattt

SEQ ID NO: 1694951 - DNA, 15 bp, Homo sapiens
actaaatcccatttt

SEQ ID NO: 1694952 - DNA, 15 bp, Homo sapiens
ctaaatcccattttg

SEQ ID NO: 1694953 - DNA, 15 bp, Homo sapiens
taaatcccattttgt

SEQ ID NO: 1694954 - DNA, 15 bp, Homo sapiens
aaatcccattttgtt

SEQ ID NO: 1694955 - DNA, 15 bp, Homo sapiens
aatcccattttgtta

SEQ ID NO: 1694956 - DNA, 15 bp, Homo sapiens
atcccattttgttag

SEQ ID NO: 1694957 - DNA, 15 bp, Homo sapiens
tcccattttgttagc

SEQ ID NO: 1694958 - DNA, 15 bp, Homo sapiens
cccattttgttagcc

SEQ ID NO: 1694959 - DNA, 15 bp, Homo sapiens
ccattttgttagcct

SEQ ID NO: 1694960 - DNA, 15 bp, Homo sapiens
cattttgttagccta

SEQ ID NO: 1694961 - DNA, 15 bp, Homo sapiens
attttgttagcctaa

SEQ ID NO: 1694962 - DNA, 15 bp, Homo sapiens
ttttgttagcctaac

SEQ ID NO: 1694963 - DNA, 15 bp, Homo sapiens
tttgttagcctaact

SEQ ID NO: 1694964 - DNA, 15 bp, Homo sapiens
ttgttagcctaactt

SEQ ID NO: 1694965 - DNA, 15 bp, Homo sapiens
tgttagcctaactta

SEQ ID NO: 1694966 - DNA, 15 bp, Homo sapiens
gttagcctaacttaa

SEQ ID NO: 1694967 - DNA, 15 bp, Homo sapiens
ttagcctaacttaat

SEQ ID NO: 1694968 - DNA, 15 bp, Homo sapiens
tagcctaacttaatt

SEQ ID NO: 1694969 - DNA, 15 bp, Homo sapiens
agcctaacttaattc

SEQ ID NO: 1694970 - DNA, 15 bp, Homo sapiens
gcctaacttaattct

SEQ ID NO: 1694971 - DNA, 15 bp, Homo sapiens
cctaacttaattctg

SEQ ID NO: 1694972 - DNA, 15 bp, Homo sapiens
ctaacttaattctga

SEQ ID NO: 1694973 - DNA, 15 bp, Homo sapiens
taacttaattctgac

SEQ ID NO: 1694974 - DNA, 15 bp, Homo sapiens
aacttaattctgaca

SEQ ID NO: 1694975 - DNA, 15 bp, Homo sapiens
acttaattctgacac

SEQ ID NO: 1694976 - DNA, 15 bp, Homo sapiens
cttaattctgacacc

SEQ ID NO: 1694977 - DNA, 15 bp, Homo sapiens
ttaattctgacacca

SEQ ID NO: 1694978 - DNA, 15 bp, Homo sapiens
taattctgacaccac

SEQ ID NO: 1694979 - DNA, 15 bp, Homo sapiens
aattctgacaccaca

SEQ ID NO: 1694980 - DNA, 15 bp, Homo sapiens
attctgacaccacat

SEQ ID NO: 1694981 - DNA, 15 bp, Homo sapiens
ttctgacaccacata

SEQ ID NO: 1694982 - DNA, 15 bp, Homo sapiens
tctgacaccacatac

SEQ ID NO: 1694983 - DNA, 15 bp, Homo sapiens
ctgacaccacatacc

SEQ ID NO: 1694984 - DNA, 15 bp, Homo sapiens
tgacaccacatacct

SEQ ID NO: 1694985 - DNA, 15 bp, Homo sapiens
gacaccacataccta

SEQ ID NO: 1694986 - DNA, 15 bp, Homo sapiens
acaccacatacctat

SEQ ID NO: 1694987 - DNA, 15 bp, Homo sapiens
caccacatacctatc

SEQ ID NO: 1694988 - DNA, 15 bp, Homo sapiens
accacatacctatca

SEQ ID NO: 1694989 - DNA, 15 bp, Homo sapiens
ccacatacctatcat

SEQ ID NO: 1694990 - DNA, 15 bp, Homo sapiens
cacatacctatcata

SEQ ID NO: 1694991 - DNA, 15 bp, Homo sapiens
acatacctatcatat

SEQ ID NO: 1694992 - DNA, 15 bp, Homo sapiens
catacctatcatata

SEQ ID NO: 1694993 - DNA, 15 bp, Homo sapiens
atacctatcatatat

SEQ ID NO: 1694994 - DNA, 15 bp, Homo sapiens
tacctatcatatata

SEQ ID NO: 1694995 - DNA, 15 bp, Homo sapiens
acctatcatatatat

SEQ ID NO: 1694996 - DNA, 15 bp, Homo sapiens
cctatcatatatata

SEQ ID NO: 1694997 - DNA, 15 bp, Homo sapiens
ctatcatatatatat

SEQ ID NO: 1694998 - DNA, 15 bp, Homo sapiens
tatcatatatatatg

SEQ ID NO: 1694999 - DNA, 15 bp, Homo sapiens
atcatatatatatgt

SEQ ID NO: 1695000 - DNA, 15 bp, Homo sapiens
tcatatatatatgtg

SEQ ID NO: 1695001 - DNA, 15 bp, Homo sapiens
catatatatatgtga

SEQ ID NO: 1695002 - DNA, 15 bp, Homo sapiens
atatatatatgtgat

SEQ ID NO: 1695003 - DNA, 15 bp, Homo sapiens
tatatatatgtgata

SEQ ID NO: 1695004 - DNA, 15 bp, Homo sapiens
atatatatgtgatat

SEQ ID NO: 1695005 - DNA, 15 bp, Homo sapiens
tatatatgtgatata

SEQ ID NO: 1695006 - DNA, 15 bp, Homo sapiens
atatatgtgatatat

SEQ ID NO: 1695007 - DNA, 15 bp, Homo sapiens
tatatgtgatatata

SEQ ID NO: 1695008 - DNA, 15 bp, Homo sapiens
atatgtgatatatat

SEQ ID NO: 1695009 - DNA, 15 bp, Homo sapiens
tatgtgatatatatg

SEQ ID NO: 1695010 - DNA, 15 bp, Homo sapiens
atgtgatatatatga

SEQ ID NO: 1695011 - DNA, 15 bp, Homo sapiens
tgtgatatatatgat

SEQ ID NO: 1695012 - DNA, 15 bp, Homo sapiens
gtgatatatatgata

SEQ ID NO: 1695013 - DNA, 15 bp, Homo sapiens
tgatatatatgatat

SEQ ID NO: 1695014 - DNA, 15 bp, Homo sapiens
gatatatatgatata

SEQ ID NO: 1695015 - DNA, 15 bp, Homo sapiens
atatatatgatatat

SEQ ID NO: 1695016 - DNA, 15 bp, Homo sapiens
tatatatgatatata

SEQ ID NO: 1695017 - DNA, 15 bp, Homo sapiens
tatatgatatatatg

SEQ ID NO: 1695018 - DNA, 15 bp, Homo sapiens
tatgatatatatgtg

SEQ ID NO: 1695019 - DNA, 15 bp, Homo sapiens
atgatatatatgtga

SEQ ID NO: 1695020 - DNA, 15 bp, Homo sapiens
tgatatatatgtgat

SEQ ID NO: 1695021 - DNA, 15 bp, Homo sapiens
gatatatatgtgata

SEQ ID NO: 1695022 - DNA, 15 bp, Homo sapiens
tatgtgatatatata

SEQ ID NO: 1695023 - DNA, 15 bp, Homo sapiens
atgtgatatatatat

SEQ ID NO: 1695024 - DNA, 15 bp, Homo sapiens
tgtgatatatatatc

SEQ ID NO: 1695025 - DNA, 15 bp, Homo sapiens
gtgatatatatatca

SEQ ID NO: 1695026 - DNA, 15 bp, Homo sapiens
tatatatcatatatc

SEQ ID NO: 1695027 - DNA, 15 bp, Homo sapiens
atatatcatatatct

SEQ ID NO: 1695028 - DNA, 15 bp, Homo sapiens
tatatcatatatctg

SEQ ID NO: 1695029 - DNA, 15 bp, Homo sapiens
atatcatatatctgt

SEQ ID NO: 1695030 - DNA, 15 bp, Homo sapiens
tatcatatatctgtg

SEQ ID NO: 1695031 - DNA, 15 bp, Homo sapiens
atcatatatctgtga

SEQ ID NO: 1695032 - DNA, 15 bp, Homo sapiens
tcatatatctgtgat

SEQ ID NO: 1695033 - DNA, 15 bp, Homo sapiens
catatatctgtgata

SEQ ID NO: 1695034 - DNA, 15 bp, Homo sapiens
atatatctgtgatat

SEQ ID NO: 1695035 - DNA, 15 bp, Homo sapiens
tatatctgtgatata

SEQ ID NO: 1695036 - DNA, 15 bp, Homo sapiens
atatctgtgatatat

SEQ ID NO: 1695037 - DNA, 15 bp, Homo sapiens
tatctgtgatatata

SEQ ID NO: 1695038 - DNA, 15 bp, Homo sapiens
atctgtgatatatat

SEQ ID NO: 1695039 - DNA, 15 bp, Homo sapiens
tctgtgatatatata

SEQ ID NO: 1695040 - DNA, 15 bp, Homo sapiens
ctgtgatatatatat

SEQ ID NO: 1695041 - DNA, 15 bp, Homo sapiens
tgtgatatatatatg

SEQ ID NO: 1695042 - DNA, 15 bp, Homo sapiens
gtgatatatatatga

SEQ ID NO: 1695043 - DNA, 15 bp, Homo sapiens
tgatatatatatgat

SEQ ID NO: 1695044 - DNA, 15 bp, Homo sapiens
gatatatatatgata

SEQ ID NO: 1695045 - DNA, 15 bp, Homo sapiens
atatatatatgatat

SEQ ID NO: 1695046 - DNA, 15 bp, Homo sapiens
tatatatatgatata

SEQ ID NO: 1695047 - DNA, 15 bp, Homo sapiens
gatatatatatcatt

SEQ ID NO: 1695048 - DNA, 15 bp, Homo sapiens
atatatatatcattc

SEQ ID NO: 1695049 - DNA, 15 bp, Homo sapiens
tatatatatcattct

SEQ ID NO: 1695050 - DNA, 15 bp, Homo sapiens
atatatatcattctc

SEQ ID NO: 1695051 - DNA, 15 bp, Homo sapiens
tatatatcattctct

SEQ ID NO: 1695052 - DNA, 15 bp, Homo sapiens
atatatcattctctc

SEQ ID NO: 1695053 - DNA, 15 bp, Homo sapiens
tatatcattctctct

SEQ ID NO: 1695054 - DNA, 15 bp, Homo sapiens
atatcattctctctt

SEQ ID NO: 1695055 - DNA, 15 bp, Homo sapiens
tatcattctctcttt

SEQ ID NO: 1695056 - DNA, 15 bp, Homo sapiens
atcattctctctttg

SEQ ID NO: 1695057 - DNA, 15 bp, Homo sapiens
tcattctctctttga

SEQ ID NO: 1695058 - DNA, 15 bp, Homo sapiens
cattctctctttgaa

SEQ ID NO: 1695059 - DNA, 15 bp, Homo sapiens
attctctctttgaat

SEQ ID NO: 1695060 - DNA, 15 bp, Homo sapiens
ttctctctttgaata

SEQ ID NO: 1695061 - DNA, 15 bp, Homo sapiens
tctctctttgaatat

SEQ ID NO: 1695062 - DNA, 15 bp, Homo sapiens
ctctctttgaatata

SEQ ID NO: 1695063 - DNA, 15 bp, Homo sapiens
tctctttgaatatat

SEQ ID NO: 1695064 - DNA, 15 bp, Homo sapiens
ctctttgaatatatg

SEQ ID NO: 1695065 - DNA, 15 bp, Homo sapiens
tctttgaatatatga

SEQ ID NO: 1695066 - DNA, 15 bp, Homo sapiens
ctttgaatatatgaa

SEQ ID NO: 1695067 - DNA, 15 bp, Homo sapiens
tttgaatatatgaat

SEQ ID NO: 1695068 - DNA, 15 bp, Homo sapiens
ttgaatatatgaata

SEQ ID NO: 1695069 - DNA, 15 bp, Homo sapiens
tgaatatatgaatat

SEQ ID NO: 1695070 - DNA, 15 bp, Homo sapiens
gaatatatgaatata

SEQ ID NO: 1695071 - DNA, 15 bp, Homo sapiens
aatatatgaatatat

SEQ ID NO: 1695072 - DNA, 15 bp, Homo sapiens
atatatgaatatata

SEQ ID NO: 1695073 - DNA, 15 bp, Homo sapiens
tatatgaatatatac

SEQ ID NO: 1695074 - DNA, 15 bp, Homo sapiens
atatgaatatataca

SEQ ID NO: 1695075 - DNA, 15 bp, Homo sapiens
tatgaatatatacag

SEQ ID NO: 1695076 - DNA, 15 bp, Homo sapiens
atgaatatatacaga

SEQ ID NO: 1695077 - DNA, 15 bp, Homo sapiens
tgaatatatacagag

SEQ ID NO: 1695078 - DNA, 15 bp, Homo sapiens
gaatatatacagaga

SEQ ID NO: 1695079 - DNA, 15 bp, Homo sapiens
aatatatacagagag

SEQ ID NO: 1695080 - DNA, 15 bp, Homo sapiens
atatatacagagaga

SEQ ID NO: 1695081 - DNA, 15 bp, Homo sapiens
tatatacagagagaa

SEQ ID NO: 1695082 - DNA, 15 bp, Homo sapiens
atatacagagagaag

SEQ ID NO: 1695083 - DNA, 15 bp, Homo sapiens
tatacagagagaagg

SEQ ID NO: 1695084 - DNA, 15 bp, Homo sapiens
atacagagagaaggt

SEQ ID NO: 1695085 - DNA, 15 bp, Homo sapiens
tacagagagaaggta

SEQ ID NO: 1695086 - DNA, 15 bp, Homo sapiens
acagagagaaggtaa

SEQ ID NO: 1695087 - DNA, 15 bp, Homo sapiens
cagagagaaggtaaa

SEQ ID NO: 1695088 - DNA, 15 bp, Homo sapiens
agagagaaggtaaac

SEQ ID NO: 1695089 - DNA, 15 bp, Homo sapiens
gagagaaggtaaaca

SEQ ID NO: 1695090 - DNA, 15 bp, Homo sapiens
agagaaggtaaacat

SEQ ID NO: 1695091 - DNA, 15 bp, Homo sapiens
gagaaggtaaacata

SEQ ID NO: 1695092 - DNA, 15 bp, Homo sapiens
agaaggtaaacatat

SEQ ID NO: 1695093 - DNA, 15 bp, Homo sapiens
gaaggtaaacatata

SEQ ID NO: 1695094 - DNA, 15 bp, Homo sapiens
aaggtaaacatatat

SEQ ID NO: 1695095 - DNA, 15 bp, Homo sapiens
aggtaaacatatata

SEQ ID NO: 1695096 - DNA, 15 bp, Homo sapiens
ggtaaacatatatat

SEQ ID NO: 1695097 - DNA, 15 bp, Homo sapiens
gtaaacatatatata

SEQ ID NO: 1695098 - DNA, 15 bp, Homo sapiens
taaacatatatataa

SEQ ID NO: 1695099 - DNA, 15 bp, Homo sapiens
aaacatatatataaa

SEQ ID NO: 1695100 - DNA, 15 bp, Homo sapiens
aacatatatataaaa

SEQ ID NO: 1695101 - DNA, 15 bp, Homo sapiens
acatatatataaaat

SEQ ID NO: 1695102 - DNA, 15 bp, Homo sapiens
catatatataaaatg

SEQ ID NO: 1695103 - DNA, 15 bp, Homo sapiens
atatatataaaatgc

SEQ ID NO: 1695104 - DNA, 15 bp, Homo sapiens
tatatataaaatgca

SEQ ID NO: 1695105 - DNA, 15 bp, Homo sapiens
atatataaaatgcag

SEQ ID NO: 1695106 - DNA, 15 bp, Homo sapiens
tatataaaatgcagg

SEQ ID NO: 1695107 - DNA, 15 bp, Homo sapiens
atataaaatgcaggt

SEQ ID NO: 1695108 - DNA, 15 bp, Homo sapiens
tataaaatgcaggta

SEQ ID NO: 1695109 - DNA, 15 bp, Homo sapiens
ataaaatgcaggtaa

SEQ ID NO: 1695110 - DNA, 15 bp, Homo sapiens
taaaatgcaggtaaa

SEQ ID NO: 1695111 - DNA, 15 bp, Homo sapiens
aaaatgcaggtaaat

SEQ ID NO: 1695112 - DNA, 15 bp, Homo sapiens
aaatgcaggtaaata

SEQ ID NO: 1695113 - DNA, 15 bp, Homo sapiens
aatgcaggtaaatat

SEQ ID NO: 1695114 - DNA, 15 bp, Homo sapiens
atgcaggtaaatatt

SEQ ID NO: 1695115 - DNA, 15 bp, Homo sapiens
tgcaggtaaatattt

SEQ ID NO: 1695116 - DNA, 15 bp, Homo sapiens
gcaggtaaatattta

SEQ ID NO: 1695117 - DNA, 15 bp, Homo sapiens
caggtaaatatttat

SEQ ID NO: 1695118 - DNA, 15 bp, Homo sapiens
aggtaaatatttata

SEQ ID NO: 1695119 - DNA, 15 bp, Homo sapiens
ggtaaatatttatat

SEQ ID NO: 1695120 - DNA, 15 bp, Homo sapiens
gtaaatatttatata

SEQ ID NO: 1695121 - DNA, 15 bp, Homo sapiens
taaatatttatataa

SEQ ID NO: 1695122 - DNA, 15 bp, Homo sapiens
aaatatttatataat

SEQ ID NO: 1695123 - DNA, 15 bp, Homo sapiens
aatatttatataata

SEQ ID NO: 1695124 - DNA, 15 bp, Homo sapiens
atatttatataatat

SEQ ID NO: 1695125 - DNA, 15 bp, Homo sapiens
tatttatataatata

SEQ ID NO: 1695126 - DNA, 15 bp, Homo sapiens
atttatataatataa

SEQ ID NO: 1695127 - DNA, 15 bp, Homo sapiens
tttatataatataat

SEQ ID NO: 1695128 - DNA, 15 bp, Homo sapiens
ttatataatataata

SEQ ID NO: 1695129 - DNA, 15 bp, Homo sapiens
tatataatataatat

SEQ ID NO: 1695130 - DNA, 15 bp, Homo sapiens
atataatataatatt

SEQ ID NO: 1695131 - DNA, 15 bp, Homo sapiens
tataatataatattt

SEQ ID NO: 1695132 - DNA, 15 bp, Homo sapiens
ataatataatatttg

SEQ ID NO: 1695133 - DNA, 15 bp, Homo sapiens
taatataatatttgt

SEQ ID NO: 1695134 - DNA, 15 bp, Homo sapiens
aatataatatttgta

SEQ ID NO: 1695135 - DNA, 15 bp, Homo sapiens
atataatatttgtaa

SEQ ID NO: 1695136 - DNA, 15 bp, Homo sapiens
tataatatttgtaat

SEQ ID NO: 1695137 - DNA, 15 bp, Homo sapiens
ataatatttgtaata

SEQ ID NO: 1695138 - DNA, 15 bp, Homo sapiens
taatatttgtaatat

SEQ ID NO: 1695139 - DNA, 15 bp, Homo sapiens
aatatttgtaatata

SEQ ID NO: 1695140 - DNA, 15 bp, Homo sapiens
atatttgtaatatat

SEQ ID NO: 1695141 - DNA, 15 bp, Homo sapiens
tatttgtaatatata

SEQ ID NO: 1695142 - DNA, 15 bp, Homo sapiens
atttgtaatatataa

SEQ ID NO: 1695143 - DNA, 15 bp, Homo sapiens
tttgtaatatataat

SEQ ID NO: 1695144 - DNA, 15 bp, Homo sapiens
ttgtaatatataata

SEQ ID NO: 1695145 - DNA, 15 bp, Homo sapiens
tgtaatatataatac

SEQ ID NO: 1695146 - DNA, 15 bp, Homo sapiens
gtaatatataataca

SEQ ID NO: 1695147 - DNA, 15 bp, Homo sapiens
taatatataatacat

SEQ ID NO: 1695148 - DNA, 15 bp, Homo sapiens
aatatataatacata

SEQ ID NO: 1695149 - DNA, 15 bp, Homo sapiens
tatataatacatata

SEQ ID NO: 1695150 - DNA, 15 bp, Homo sapiens
atataatacatatat

SEQ ID NO: 1695151 - DNA, 15 bp, Homo sapiens
tataatacatatata

SEQ ID NO: 1695152 - DNA, 15 bp, Homo sapiens
ataatacatatatat

SEQ ID NO: 1695153 - DNA, 15 bp, Homo sapiens
taatacatatatatg

SEQ ID NO: 1695154 - DNA, 15 bp, Homo sapiens
tacatatatatgtaa

SEQ ID NO: 1695155 - DNA, 15 bp, Homo sapiens
acatatatatgtaaa

SEQ ID NO: 1695156 - DNA, 15 bp, Homo sapiens
catatatatgtaaat

SEQ ID NO: 1695157 - DNA, 15 bp, Homo sapiens
atatatatgtaaata

SEQ ID NO: 1695158 - DNA, 15 bp, Homo sapiens
tatatatgtaaatat

SEQ ID NO: 1695159 - DNA, 15 bp, Homo sapiens
atatatgtaaatata

SEQ ID NO: 1695160 - DNA, 15 bp, Homo sapiens
tatatgtaaatatat

SEQ ID NO: 1695161 - DNA, 15 bp, Homo sapiens
atatgtaaatatata

SEQ ID NO: 1695162 - DNA, 15 bp, Homo sapiens
tatgtaaatatatat

SEQ ID NO: 1695163 - DNA, 15 bp, Homo sapiens
atgtaaatatatatt

SEQ ID NO: 1695164 - DNA, 15 bp, Homo sapiens
tgtaaatatatattt

SEQ ID NO: 1695165 - DNA, 15 bp, Homo sapiens
gtaaatatatattta

SEQ ID NO: 1695166 - DNA, 15 bp, Homo sapiens
aaatatatatttatc

SEQ ID NO: 1695167 - DNA, 15 bp, Homo sapiens
aatatatatttatct

SEQ ID NO: 1695168 - DNA, 15 bp, Homo sapiens
atatatatttatcta

SEQ ID NO: 1695169 - DNA, 15 bp, Homo sapiens
tatatatttatctat

SEQ ID NO: 1695170 - DNA, 15 bp, Homo sapiens
atatatttatctata

SEQ ID NO: 1695171 - DNA, 15 bp, Homo sapiens
tatatttatctataa

SEQ ID NO: 1695172 - DNA, 15 bp, Homo sapiens
atatttatctataaa

SEQ ID NO: 1695173 - DNA, 15 bp, Homo sapiens
tatttatctataaat

SEQ ID NO: 1695174 - DNA, 15 bp, Homo sapiens
atttatctataaata

SEQ ID NO: 1695175 - DNA, 15 bp, Homo sapiens
tttatctataaatat

SEQ ID NO: 1695176 - DNA, 15 bp, Homo sapiens
ttatctataaatatt

SEQ ID NO: 1695177 - DNA, 15 bp, Homo sapiens
tatctataaatattt

SEQ ID NO: 1695178 - DNA, 15 bp, Homo sapiens
atctataaatattta

SEQ ID NO: 1695179 - DNA, 15 bp, Homo sapiens
tctataaatatttaa

SEQ ID NO: 1695180 - DNA, 15 bp, Homo sapiens
ctataaatatttaaa

SEQ ID NO: 1695181 - DNA, 15 bp, Homo sapiens
tataaatatttaaat

SEQ ID NO: 1695182 - DNA, 15 bp, Homo sapiens
ataaatatttaaata

SEQ ID NO: 1695183 - DNA, 15 bp, Homo sapiens
taaatatttaaatat

SEQ ID NO: 1695184 - DNA, 15 bp, Homo sapiens
aaatatttaaatata

SEQ ID NO: 1695185 - DNA, 15 bp, Homo sapiens
aatatttaaatataa

SEQ ID NO: 1695186 - DNA, 15 bp, Homo sapiens
atatttaaatataaa

SEQ ID NO: 1695187 - DNA, 15 bp, Homo sapiens
tatttaaatataaaa

SEQ ID NO: 1695188 - DNA, 15 bp, Homo sapiens
atttaaatataaaaa

SEQ ID NO: 1695189 - DNA, 15 bp, Homo sapiens
tttaaatataaaaat

SEQ ID NO: 1695190 - DNA, 15 bp, Homo sapiens
ttaaatataaaaata

SEQ ID NO: 1695191 - DNA, 15 bp, Homo sapiens
taaatataaaaatat

SEQ ID NO: 1695192 - DNA, 15 bp, Homo sapiens
aatataaaaatattt

SEQ ID NO: 1695193 - DNA, 15 bp, Homo sapiens
atataaaaatattta

SEQ ID NO: 1695194 - DNA, 15 bp, Homo sapiens
tataaaaatatttat

SEQ ID NO: 1695195 - DNA, 15 bp, Homo sapiens
ataaaaatatttatg

SEQ ID NO: 1695196 - DNA, 15 bp, Homo sapiens
taaaaatatttatgt

SEQ ID NO: 1695197 - DNA, 15 bp, Homo sapiens
aaaaatatttatgta

SEQ ID NO: 1695198 - DNA, 15 bp, Homo sapiens
aaaatatttatgtat

SEQ ID NO: 1695199 - DNA, 15 bp, Homo sapiens
aaatatttatgtatt

SEQ ID NO: 1695200 - DNA, 15 bp, Homo sapiens
aatatttatgtattt

SEQ ID NO: 1695201 - DNA, 15 bp, Homo sapiens
atatttatgtattta

SEQ ID NO: 1695202 - DNA, 15 bp, Homo sapiens
tatttatgtatttat

SEQ ID NO: 1695203 - DNA, 15 bp, Homo sapiens
atttatgtatttata

SEQ ID NO: 1695204 - DNA, 15 bp, Homo sapiens
tttatgtatttatat

SEQ ID NO: 1695205 - DNA, 15 bp, Homo sapiens
ttatgtatttatata

SEQ ID NO: 1695206 - DNA, 15 bp, Homo sapiens
tatgtatttatatat

SEQ ID NO: 1695207 - DNA, 15 bp, Homo sapiens
atgtatttatatatt

SEQ ID NO: 1695208 - DNA, 15 bp, Homo sapiens
tgtatttatatattt

SEQ ID NO: 1695209 - DNA, 15 bp, Homo sapiens
gtatttatatattta

SEQ ID NO: 1695210 - DNA, 15 bp, Homo sapiens
tatttatatatttat

SEQ ID NO: 1695211 - DNA, 15 bp, Homo sapiens
atttatatatttatc

SEQ ID NO: 1695212 - DNA, 15 bp, Homo sapiens
ttatatatttatcta

SEQ ID NO: 1695213 - DNA, 15 bp, Homo sapiens
ttatctataaatata

SEQ ID NO: 1695214 - DNA, 15 bp, Homo sapiens
tatctataaatataa

SEQ ID NO: 1695215 - DNA, 15 bp, Homo sapiens
atctataaatataaa

SEQ ID NO: 1695216 - DNA, 15 bp, Homo sapiens
tctataaatataaaa

SEQ ID NO: 1695217 - DNA, 15 bp, Homo sapiens
ctataaatataaaaa

SEQ ID NO: 1695218 - DNA, 15 bp, Homo sapiens
tataaatataaaaat

SEQ ID NO: 1695219 - DNA, 15 bp, Homo sapiens
ataaatataaaaata

SEQ ID NO: 1695220 - DNA, 15 bp, Homo sapiens
ataaaaatatttata

SEQ ID NO: 1695221 - DNA, 15 bp, Homo sapiens
taaaaatatttatat

SEQ ID NO: 1695222 - DNA, 15 bp, Homo sapiens
aaaaatatttatata

SEQ ID NO: 1695223 - DNA, 15 bp, Homo sapiens
aaaatatttatatat

SEQ ID NO: 1695224 - DNA, 15 bp, Homo sapiens
aaatatttatatatt

SEQ ID NO: 1695225 - DNA, 15 bp, Homo sapiens
aatatttatatattt

SEQ ID NO: 1695226 - DNA, 15 bp, Homo sapiens
atatttatatattta

SEQ ID NO: 1695227 - DNA, 15 bp, Homo sapiens
atttatatatttata

SEQ ID NO: 1695228 - DNA, 15 bp, Homo sapiens
tttatatatttatat

SEQ ID NO: 1695229 - DNA, 15 bp, Homo sapiens
ttatatatttatata

SEQ ID NO: 1695230 - DNA, 15 bp, Homo sapiens
tatatatttatatat

SEQ ID NO: 1695231 - DNA, 15 bp, Homo sapiens
atatatttatatatt

SEQ ID NO: 1695232 - DNA, 15 bp, Homo sapiens
tatatttatatattt

SEQ ID NO: 1695233 - DNA, 15 bp, Homo sapiens
tataaaaatatttaa

SEQ ID NO: 1695234 - DNA, 15 bp, Homo sapiens
ataaaaatatttaaa

SEQ ID NO: 1695235 - DNA, 15 bp, Homo sapiens
aaaaatatttaaata

SEQ ID NO: 1695236 - DNA, 15 bp, Homo sapiens
aaaatatttaaatat

SEQ ID NO: 1695237 - DNA, 15 bp, Homo sapiens
aaatatttaaatatt

SEQ ID NO: 1695238 - DNA, 15 bp, Homo sapiens
aatatttaaatattc

SEQ ID NO: 1695239 - DNA, 15 bp, Homo sapiens
atatttaaatattca

SEQ ID NO: 1695240 - DNA, 15 bp, Homo sapiens
tatttaaatattcat

SEQ ID NO: 1695241 - DNA, 15 bp, Homo sapiens
atttaaatattcata

SEQ ID NO: 1695242 - DNA, 15 bp, Homo sapiens
tttaaatattcatat

SEQ ID NO: 1695243 - DNA, 15 bp, Homo sapiens
ttaaatattcatata

SEQ ID NO: 1695244 - DNA, 15 bp, Homo sapiens
taaatattcatatat

SEQ ID NO: 1695245 - DNA, 15 bp, Homo sapiens
aaatattcatatatt

SEQ ID NO: 1695246 - DNA, 15 bp, Homo sapiens
aatattcatatattt

SEQ ID NO: 1695247 - DNA, 15 bp, Homo sapiens
atattcatatattta

SEQ ID NO: 1695248 - DNA, 15 bp, Homo sapiens
tattcatatatttat

SEQ ID NO: 1695249 - DNA, 15 bp, Homo sapiens
attcatatatttatc

SEQ ID NO: 1695250 - DNA, 15 bp, Homo sapiens
ttcatatatttatct

SEQ ID NO: 1695251 - DNA, 15 bp, Homo sapiens
tcatatatttatcta

SEQ ID NO: 1695252 - DNA, 15 bp, Homo sapiens
catatatttatctat

SEQ ID NO: 1695253 - DNA, 15 bp, Homo sapiens
aatatttaaatattt

SEQ ID NO: 1695254 - DNA, 15 bp, Homo sapiens
tttaaatatttatat

SEQ ID NO: 1695255 - DNA, 15 bp, Homo sapiens
ttaaatatttatata

SEQ ID NO: 1695256 - DNA, 15 bp, Homo sapiens
taaatatttatatat

SEQ ID NO: 1695257 - DNA, 15 bp, Homo sapiens
ataaaaatatttatt

SEQ ID NO: 1695258 - DNA, 15 bp, Homo sapiens
taaaaatatttatta

SEQ ID NO: 1695259 - DNA, 15 bp, Homo sapiens
aaaaatatttattat

SEQ ID NO: 1695260 - DNA, 15 bp, Homo sapiens
aaaatatttattata

SEQ ID NO: 1695261 - DNA, 15 bp, Homo sapiens
aaatatttattatat

SEQ ID NO: 1695262 - DNA, 15 bp, Homo sapiens
aatatttattatata

SEQ ID NO: 1695263 - DNA, 15 bp, Homo sapiens
atttattatatattt

SEQ ID NO: 1695264 - DNA, 15 bp, Homo sapiens
tttattatatattta

SEQ ID NO: 1695265 - DNA, 15 bp, Homo sapiens
ttattatatatttat

SEQ ID NO: 1695266 - DNA, 15 bp, Homo sapiens
tattatatatttatc

SEQ ID NO: 1695267 - DNA, 15 bp, Homo sapiens
attatatatttatct

SEQ ID NO: 1695268 - DNA, 15 bp, Homo sapiens
tttatctataaataa

SEQ ID NO: 1695269 - DNA, 15 bp, Homo sapiens
ttatctataaataaa

SEQ ID NO: 1695270 - DNA, 15 bp, Homo sapiens
tatctataaataaat

SEQ ID NO: 1695271 - DNA, 15 bp, Homo sapiens
atctataaataaata

SEQ ID NO: 1695272 - DNA, 15 bp, Homo sapiens
tctataaataaatat

SEQ ID NO: 1695273 - DNA, 15 bp, Homo sapiens
ctataaataaatata

SEQ ID NO: 1695274 - DNA, 15 bp, Homo sapiens
tataaataaatataa

SEQ ID NO: 1695275 - DNA, 15 bp, Homo sapiens
taaataaatataaaa

SEQ ID NO: 1695276 - DNA, 15 bp, Homo sapiens
aaataaatataaaaa

SEQ ID NO: 1695277 - DNA, 15 bp, Homo sapiens
aataaatataaaaat

SEQ ID NO: 1695278 - DNA, 15 bp, Homo sapiens
atataaaaatatttg

SEQ ID NO: 1695279 - DNA, 15 bp, Homo sapiens
tataaaaatatttgt

SEQ ID NO: 1695280 - DNA, 15 bp, Homo sapiens
ataaaaatatttgtt

SEQ ID NO: 1695281 - DNA, 15 bp, Homo sapiens
taaaaatatttgttt

SEQ ID NO: 1695282 - DNA, 15 bp, Homo sapiens
aaaaatatttgttta

SEQ ID NO: 1695283 - DNA, 15 bp, Homo sapiens
aaaatatttgtttat

SEQ ID NO: 1695284 - DNA, 15 bp, Homo sapiens
aaatatttgtttata

SEQ ID NO: 1695285 - DNA, 15 bp, Homo sapiens
aatatttgtttatac

SEQ ID NO: 1695286 - DNA, 15 bp, Homo sapiens
atatttgtttataca

SEQ ID NO: 1695287 - DNA, 15 bp, Homo sapiens
tatttgtttatacat

SEQ ID NO: 1695288 - DNA, 15 bp, Homo sapiens
atttgtttatacatt

SEQ ID NO: 1695289 - DNA, 15 bp, Homo sapiens
tttgtttatacattt

SEQ ID NO: 1695290 - DNA, 15 bp, Homo sapiens
ttgtttatacattta

SEQ ID NO: 1695291 - DNA, 15 bp, Homo sapiens
tgtttatacatttat

SEQ ID NO: 1695292 - DNA, 15 bp, Homo sapiens
gtttatacatttatc

SEQ ID NO: 1695293 - DNA, 15 bp, Homo sapiens
tttatacatttatct

SEQ ID NO: 1695294 - DNA, 15 bp, Homo sapiens
ttatacatttatcta

SEQ ID NO: 1695295 - DNA, 15 bp, Homo sapiens
tatacatttatctat

SEQ ID NO: 1695296 - DNA, 15 bp, Homo sapiens
atacatttatctata

SEQ ID NO: 1695297 - DNA, 15 bp, Homo sapiens
tacatttatctataa

SEQ ID NO: 1695298 - DNA, 15 bp, Homo sapiens
acatttatctataaa

SEQ ID NO: 1695299 - DNA, 15 bp, Homo sapiens
catttatctataaat

SEQ ID NO: 1695300 - DNA, 15 bp, Homo sapiens
tatatttatctatat

SEQ ID NO: 1695301 - DNA, 15 bp, Homo sapiens
atatttatctatatt

SEQ ID NO: 1695302 - DNA, 15 bp, Homo sapiens
tatttatctatattt

SEQ ID NO: 1695303 - DNA, 15 bp, Homo sapiens
atttatctatatttt

SEQ ID NO: 1695304 - DNA, 15 bp, Homo sapiens
tttatctatatttta

SEQ ID NO: 1695305 - DNA, 15 bp, Homo sapiens
ttatctatattttat

SEQ ID NO: 1695306 - DNA, 15 bp, Homo sapiens
tatctatattttata

SEQ ID NO: 1695307 - DNA, 15 bp, Homo sapiens
atctatattttatat

SEQ ID NO: 1695308 - DNA, 15 bp, Homo sapiens
tctatattttatatc

SEQ ID NO: 1695309 - DNA, 15 bp, Homo sapiens
ctatattttatatct

SEQ ID NO: 1695310 - DNA, 15 bp, Homo sapiens
tatattttatatcta

SEQ ID NO: 1695311 - DNA, 15 bp, Homo sapiens
atattttatatctat

SEQ ID NO: 1695312 - DNA, 15 bp, Homo sapiens
tattttatatctata

SEQ ID NO: 1695313 - DNA, 15 bp, Homo sapiens
attttatatctatat

SEQ ID NO: 1695314 - DNA, 15 bp, Homo sapiens
ttttatatctatata

SEQ ID NO: 1695315 - DNA, 15 bp, Homo sapiens
tttatatctatatat

SEQ ID NO: 1695316 - DNA, 15 bp, Homo sapiens
ttatatctatatata

SEQ ID NO: 1695317 - DNA, 15 bp, Homo sapiens
tatatctatatatac

SEQ ID NO: 1695318 - DNA, 15 bp, Homo sapiens
atatctatatataca

SEQ ID NO: 1695319 - DNA, 15 bp, Homo sapiens
tatctatatatacat

SEQ ID NO: 1695320 - DNA, 15 bp, Homo sapiens
atctatatatacata

SEQ ID NO: 1695321 - DNA, 15 bp, Homo sapiens
tctatatatacatac

SEQ ID NO: 1695322 - DNA, 15 bp, Homo sapiens
ctatatatacatacc

SEQ ID NO: 1695323 - DNA, 15 bp, Homo sapiens
tatatatacatacct

SEQ ID NO: 1695324 - DNA, 15 bp, Homo sapiens
atatatacataccta

SEQ ID NO: 1695325 - DNA, 15 bp, Homo sapiens
tatatacatacctac

SEQ ID NO: 1695326 - DNA, 15 bp, Homo sapiens
atatacatacctaca

SEQ ID NO: 1695327 - DNA, 15 bp, Homo sapiens
tatacatacctacat

SEQ ID NO: 1695328 - DNA, 15 bp, Homo sapiens
atacatacctacatt

SEQ ID NO: 1695329 - DNA, 15 bp, Homo sapiens
tacatacctacatta

SEQ ID NO: 1695330 - DNA, 15 bp, Homo sapiens
acatacctacattat

SEQ ID NO: 1695331 - DNA, 15 bp, Homo sapiens
catacctacattatc

SEQ ID NO: 1695332 - DNA, 15 bp, Homo sapiens
atacctacattatca

SEQ ID NO: 1695333 - DNA, 15 bp, Homo sapiens
tacctacattatcag

SEQ ID NO: 1695334 - DNA, 15 bp, Homo sapiens
acctacattatcagt

SEQ ID NO: 1695335 - DNA, 15 bp, Homo sapiens
cctacattatcagta

SEQ ID NO: 1695336 - DNA, 15 bp, Homo sapiens
ctacattatcagtat

SEQ ID NO: 1695337 - DNA, 15 bp, Homo sapiens
tacattatcagtatg

SEQ ID NO: 1695338 - DNA, 15 bp, Homo sapiens
acattatcagtatgt

SEQ ID NO: 1695339 - DNA, 15 bp, Homo sapiens
cattatcagtatgta

SEQ ID NO: 1695340 - DNA, 15 bp, Homo sapiens
attatcagtatgtag

SEQ ID NO: 1695341 - DNA, 15 bp, Homo sapiens
ttatcagtatgtagg

SEQ ID NO: 1695342 - DNA, 15 bp, Homo sapiens
tatcagtatgtaggt

SEQ ID NO: 1695343 - DNA, 15 bp, Homo sapiens
atcagtatgtaggta

SEQ ID NO: 1695344 - DNA, 15 bp, Homo sapiens
tcagtatgtaggtaa

SEQ ID NO: 1695345 - DNA, 15 bp, Homo sapiens
cagtatgtaggtaaa

SEQ ID NO: 1695346 - DNA, 15 bp, Homo sapiens
agtatgtaggtaaat

SEQ ID NO: 1695347 - DNA, 15 bp, Homo sapiens
gtatgtaggtaaata

SEQ ID NO: 1695348 - DNA, 15 bp, Homo sapiens
tatgtaggtaaatat

SEQ ID NO: 1695349 - DNA, 15 bp, Homo sapiens
atgtaggtaaatata

SEQ ID NO: 1695350 - DNA, 15 bp, Homo sapiens
tgtaggtaaatatat

SEQ ID NO: 1695351 - DNA, 15 bp, Homo sapiens
gtaggtaaatatatc

SEQ ID NO: 1695352 - DNA, 15 bp, Homo sapiens
taggtaaatatatct

SEQ ID NO: 1695353 - DNA, 15 bp, Homo sapiens
aggtaaatatatcta

SEQ ID NO: 1695354 - DNA, 15 bp, Homo sapiens
ggtaaatatatctat

SEQ ID NO: 1695355 - DNA, 15 bp, Homo sapiens
gtaaatatatctata

SEQ ID NO: 1695356 - DNA, 15 bp, Homo sapiens
taaatatatctataa

SEQ ID NO: 1695357 - DNA, 15 bp, Homo sapiens
aaatatatctataaa

SEQ ID NO: 1695358 - DNA, 15 bp, Homo sapiens
aatatatctataaat

SEQ ID NO: 1695359 - DNA, 15 bp, Homo sapiens
atatatctataaata

SEQ ID NO: 1695360 - DNA, 15 bp, Homo sapiens
tatatctataaatat

SEQ ID NO: 1695361 - DNA, 15 bp, Homo sapiens
atatctataaatata

SEQ ID NO: 1695362 - DNA, 15 bp, Homo sapiens
tatctataaatatat

SEQ ID NO: 1695363 - DNA, 15 bp, Homo sapiens
atctataaatatata

SEQ ID NO: 1695364 - DNA, 15 bp, Homo sapiens
tctataaatatatat

SEQ ID NO: 1695365 - DNA, 15 bp, Homo sapiens
ctataaatatatata

SEQ ID NO: 1695366 - DNA, 15 bp, Homo sapiens
tataaatatatataa

SEQ ID NO: 1695367 - DNA, 15 bp, Homo sapiens
ataaatatatataac

SEQ ID NO: 1695368 - DNA, 15 bp, Homo sapiens
taaatatatataaca

SEQ ID NO: 1695369 - DNA, 15 bp, Homo sapiens
aaatatatataacaa

SEQ ID NO: 1695370 - DNA, 15 bp, Homo sapiens
aatatatataacaaa

SEQ ID NO: 1695371 - DNA, 15 bp, Homo sapiens
atatatataacaaat

SEQ ID NO: 1695372 - DNA, 15 bp, Homo sapiens
tatatataacaaatg

SEQ ID NO: 1695373 - DNA, 15 bp, Homo sapiens
atatataacaaatgt

SEQ ID NO: 1695374 - DNA, 15 bp, Homo sapiens
tatataacaaatgta

SEQ ID NO: 1695375 - DNA, 15 bp, Homo sapiens
atataacaaatgtac

SEQ ID NO: 1695376 - DNA, 15 bp, Homo sapiens
tataacaaatgtaca

SEQ ID NO: 1695377 - DNA, 15 bp, Homo sapiens
ataacaaatgtacaa

SEQ ID NO: 1695378 - DNA, 15 bp, Homo sapiens
taacaaatgtacaaa

SEQ ID NO: 1695379 - DNA, 15 bp, Homo sapiens
aacaaatgtacaaat

SEQ ID NO: 1695380 - DNA, 15 bp, Homo sapiens
acaaatgtacaaata

SEQ ID NO: 1695381 - DNA, 15 bp, Homo sapiens
caaatgtacaaatat

SEQ ID NO: 1695382 - DNA, 15 bp, Homo sapiens
aaatgtacaaatata

SEQ ID NO: 1695383 - DNA, 15 bp, Homo sapiens
aatgtacaaatataa

SEQ ID NO: 1695384 - DNA, 15 bp, Homo sapiens
atgtacaaatataag

SEQ ID NO: 1695385 - DNA, 15 bp, Homo sapiens
tgtacaaatataagt

SEQ ID NO: 1695386 - DNA, 15 bp, Homo sapiens
gtacaaatataagtg

SEQ ID NO: 1695387 - DNA, 15 bp, Homo sapiens
tacaaatataagtgt

SEQ ID NO: 1695388 - DNA, 15 bp, Homo sapiens
acaaatataagtgta

SEQ ID NO: 1695389 - DNA, 15 bp, Homo sapiens
caaatataagtgtat

SEQ ID NO: 1695390 - DNA, 15 bp, Homo sapiens
aaatataagtgtata

SEQ ID NO: 1695391 - DNA, 15 bp, Homo sapiens
aatataagtgtatat

SEQ ID NO: 1695392 - DNA, 15 bp, Homo sapiens
atataagtgtatatc

SEQ ID NO: 1695393 - DNA, 15 bp, Homo sapiens
tataagtgtatatct

SEQ ID NO: 1695394 - DNA, 15 bp, Homo sapiens
ataagtgtatatctc

SEQ ID NO: 1695395 - DNA, 15 bp, Homo sapiens
taagtgtatatctct

SEQ ID NO: 1695396 - DNA, 15 bp, Homo sapiens
aagtgtatatctcta

SEQ ID NO: 1695397 - DNA, 15 bp, Homo sapiens
agtgtatatctctat

SEQ ID NO: 1695398 - DNA, 15 bp, Homo sapiens
gtgtatatctctatt

SEQ ID NO: 1695399 - DNA, 15 bp, Homo sapiens
tgtatatctctattt

SEQ ID NO: 1695400 - DNA, 15 bp, Homo sapiens
gtatatctctattta

SEQ ID NO: 1695401 - DNA, 15 bp, Homo sapiens
tatatctctatttac

SEQ ID NO: 1695402 - DNA, 15 bp, Homo sapiens
atatctctatttacc

SEQ ID NO: 1695403 - DNA, 15 bp, Homo sapiens
tatctctatttacct

SEQ ID NO: 1695404 - DNA, 15 bp, Homo sapiens
atctctatttacctt

SEQ ID NO: 1695405 - DNA, 15 bp, Homo sapiens
tctctatttaccttc

SEQ ID NO: 1695406 - DNA, 15 bp, Homo sapiens
ctctatttaccttca

SEQ ID NO: 1695407 - DNA, 15 bp, Homo sapiens
tctatttaccttcat

SEQ ID NO: 1695408 - DNA, 15 bp, Homo sapiens
ctatttaccttcatt

SEQ ID NO: 1695409 - DNA, 15 bp, Homo sapiens
tatttaccttcatta

SEQ ID NO: 1695410 - DNA, 15 bp, Homo sapiens
atttaccttcattat

SEQ ID NO: 1695411 - DNA, 15 bp, Homo sapiens
tttaccttcattata

SEQ ID NO: 1695412 - DNA, 15 bp, Homo sapiens
ttaccttcattatat

SEQ ID NO: 1695413 - DNA, 15 bp, Homo sapiens
taccttcattatata

SEQ ID NO: 1695414 - DNA, 15 bp, Homo sapiens
accttcattatatac

SEQ ID NO: 1695415 - DNA, 15 bp, Homo sapiens
ccttcattatataca

SEQ ID NO: 1695416 - DNA, 15 bp, Homo sapiens
cttcattatatacat

SEQ ID NO: 1695417 - DNA, 15 bp, Homo sapiens
ttcattatatacata

SEQ ID NO: 1695418 - DNA, 15 bp, Homo sapiens
tcattatatacataa

SEQ ID NO: 1695419 - DNA, 15 bp, Homo sapiens
cattatatacataaa

SEQ ID NO: 1695420 - DNA, 15 bp, Homo sapiens
attatatacataaat

SEQ ID NO: 1695421 - DNA, 15 bp, Homo sapiens
ttatatacataaata

SEQ ID NO: 1695422 - DNA, 15 bp, Homo sapiens
atatacataaatata

SEQ ID NO: 1695423 - DNA, 15 bp, Homo sapiens
tatacataaatatat

SEQ ID NO: 1695424 - DNA, 15 bp, Homo sapiens
atacataaatatata

SEQ ID NO: 1695425 - DNA, 15 bp, Homo sapiens
tacataaatatataa

SEQ ID NO: 1695426 - DNA, 15 bp, Homo sapiens
acataaatatataaa

SEQ ID NO: 1695427 - DNA, 15 bp, Homo sapiens
cataaatatataaaa

SEQ ID NO: 1695428 - DNA, 15 bp, Homo sapiens
ataaatatataaaac

SEQ ID NO: 1695429 - DNA, 15 bp, Homo sapiens
taaatatataaaaca

SEQ ID NO: 1695430 - DNA, 15 bp, Homo sapiens
aaatatataaaacat

SEQ ID NO: 1695431 - DNA, 15 bp, Homo sapiens
aatatataaaacata

SEQ ID NO: 1695432 - DNA, 15 bp, Homo sapiens
atatataaaacataa

SEQ ID NO: 1695433 - DNA, 15 bp, Homo sapiens
tatataaaacataag

SEQ ID NO: 1695434 - DNA, 15 bp, Homo sapiens
atataaaacataagt

SEQ ID NO: 1695435 - DNA, 15 bp, Homo sapiens
tataaaacataagta

SEQ ID NO: 1695436 - DNA, 15 bp, Homo sapiens
ataaaacataagtaa

SEQ ID NO: 1695437 - DNA, 15 bp, Homo sapiens
taaaacataagtaaa

SEQ ID NO: 1695438 - DNA, 15 bp, Homo sapiens
aaaacataagtaaat

SEQ ID NO: 1695439 - DNA, 15 bp, Homo sapiens
aaacataagtaaata

SEQ ID NO: 1695440 - DNA, 15 bp, Homo sapiens
aacataagtaaatat

SEQ ID NO: 1695441 - DNA, 15 bp, Homo sapiens
acataagtaaatata

SEQ ID NO: 1695442 - DNA, 15 bp, Homo sapiens
cataagtaaatatat

SEQ ID NO: 1695443 - DNA, 15 bp, Homo sapiens
ataagtaaatatata

SEQ ID NO: 1695444 - DNA, 15 bp, Homo sapiens
taagtaaatatatat

SEQ ID NO: 1695445 - DNA, 15 bp, Homo sapiens
aagtaaatatatatt

SEQ ID NO: 1695446 - DNA, 15 bp, Homo sapiens
agtaaatatatattc

SEQ ID NO: 1695447 - DNA, 15 bp, Homo sapiens
gtaaatatatattct

SEQ ID NO: 1695448 - DNA, 15 bp, Homo sapiens
taaatatatattctg

SEQ ID NO: 1695449 - DNA, 15 bp, Homo sapiens
aaatatatattctga

SEQ ID NO: 1695450 - DNA, 15 bp, Homo sapiens
aatatatattctgat

SEQ ID NO: 1695451 - DNA, 15 bp, Homo sapiens
atatatattctgatt

SEQ ID NO: 1695452 - DNA, 15 bp, Homo sapiens
tatatattctgatta

SEQ ID NO: 1695453 - DNA, 15 bp, Homo sapiens
atatattctgattac

SEQ ID NO: 1695454 - DNA, 15 bp, Homo sapiens
tatattctgattaca

SEQ ID NO: 1695455 - DNA, 15 bp, Homo sapiens
atattctgattacat

SEQ ID NO: 1695456 - DNA, 15 bp, Homo sapiens
tattctgattacata

SEQ ID NO: 1695457 - DNA, 15 bp, Homo sapiens
attctgattacataa

SEQ ID NO: 1695458 - DNA, 15 bp, Homo sapiens
ttctgattacataaa

SEQ ID NO: 1695459 - DNA, 15 bp, Homo sapiens
tctgattacataaag

SEQ ID NO: 1695460 - DNA, 15 bp, Homo sapiens
ctgattacataaagt

SEQ ID NO: 1695461 - DNA, 15 bp, Homo sapiens
tgattacataaagta

SEQ ID NO: 1695462 - DNA, 15 bp, Homo sapiens
gattacataaagtat

SEQ ID NO: 1695463 - DNA, 15 bp, Homo sapiens
attacataaagtata

SEQ ID NO: 1695464 - DNA, 15 bp, Homo sapiens
ttacataaagtatat

SEQ ID NO: 1695465 - DNA, 15 bp, Homo sapiens
tacataaagtatatt

SEQ ID NO: 1695466 - DNA, 15 bp, Homo sapiens
acataaagtatattt

SEQ ID NO: 1695467 - DNA, 15 bp, Homo sapiens
cataaagtatatttt

SEQ ID NO: 1695468 - DNA, 15 bp, Homo sapiens
ataaagtatattttt

SEQ ID NO: 1695469 - DNA, 15 bp, Homo sapiens
taaagtatattttta

SEQ ID NO: 1695470 - DNA, 15 bp, Homo sapiens
aaagtatatttttat

SEQ ID NO: 1695471 - DNA, 15 bp, Homo sapiens
aagtatatttttatt

SEQ ID NO: 1695472 - DNA, 15 bp, Homo sapiens
agtatatttttatta

SEQ ID NO: 1695473 - DNA, 15 bp, Homo sapiens
gtatatttttattat

SEQ ID NO: 1695474 - DNA, 15 bp, Homo sapiens
tatatttttattatc

SEQ ID NO: 1695475 - DNA, 15 bp, Homo sapiens
atatttttattatct

SEQ ID NO: 1695476 - DNA, 15 bp, Homo sapiens
tatttttattatcta

SEQ ID NO: 1695477 - DNA, 15 bp, Homo sapiens
atttttattatctat

SEQ ID NO: 1695478 - DNA, 15 bp, Homo sapiens
tttttattatctatt

SEQ ID NO: 1695479 - DNA, 15 bp, Homo sapiens
ttttattatctatta

SEQ ID NO: 1695480 - DNA, 15 bp, Homo sapiens
tttattatctattac

SEQ ID NO: 1695481 - DNA, 15 bp, Homo sapiens
ttattatctattaca

SEQ ID NO: 1695482 - DNA, 15 bp, Homo sapiens
tattatctattacat

SEQ ID NO: 1695483 - DNA, 15 bp, Homo sapiens
attatctattacata

SEQ ID NO: 1695484 - DNA, 15 bp, Homo sapiens
ttatctattacatat

SEQ ID NO: 1695485 - DNA, 15 bp, Homo sapiens
tatctattacatatg

SEQ ID NO: 1695486 - DNA, 15 bp, Homo sapiens
atctattacatatgt

SEQ ID NO: 1695487 - DNA, 15 bp, Homo sapiens
tctattacatatgta

SEQ ID NO: 1695488 - DNA, 15 bp, Homo sapiens
ctattacatatgtac

SEQ ID NO: 1695489 - DNA, 15 bp, Homo sapiens
tattacatatgtacc

SEQ ID NO: 1695490 - DNA, 15 bp, Homo sapiens
attacatatgtacct

SEQ ID NO: 1695491 - DNA, 15 bp, Homo sapiens
ttacatatgtaccta

SEQ ID NO: 1695492 - DNA, 15 bp, Homo sapiens
tacatatgtacctaa

SEQ ID NO: 1695493 - DNA, 15 bp, Homo sapiens
acatatgtacctaaa

SEQ ID NO: 1695494 - DNA, 15 bp, Homo sapiens
catatgtacctaaac

SEQ ID NO: 1695495 - DNA, 15 bp, Homo sapiens
atatgtacctaaaca

SEQ ID NO: 1695496 - DNA, 15 bp, Homo sapiens
tatgtacctaaacat

SEQ ID NO: 1695497 - DNA, 15 bp, Homo sapiens
atgtacctaaacatc

SEQ ID NO: 1695498 - DNA, 15 bp, Homo sapiens
tgtacctaaacatca

SEQ ID NO: 1695499 - DNA, 15 bp, Homo sapiens
gtacctaaacatcaa

SEQ ID NO: 1695500 - DNA, 15 bp, Homo sapiens
tacctaaacatcaaa

SEQ ID NO: 1695501 - DNA, 15 bp, Homo sapiens
acctaaacatcaaat

SEQ ID NO: 1695502 - DNA, 15 bp, Homo sapiens
cctaaacatcaaatg

SEQ ID NO: 1695503 - DNA, 15 bp, Homo sapiens
ctaaacatcaaatgt

SEQ ID NO: 1695504 - DNA, 15 bp, Homo sapiens
taaacatcaaatgtt

SEQ ID NO: 1695505 - DNA, 15 bp, Homo sapiens
aaacatcaaatgtta

SEQ ID NO: 1695506 - DNA, 15 bp, Homo sapiens
aacatcaaatgttat

SEQ ID NO: 1695507 - DNA, 15 bp, Homo sapiens
acatcaaatgttata

SEQ ID NO: 1695508 - DNA, 15 bp, Homo sapiens
catcaaatgttataa

SEQ ID NO: 1695509 - DNA, 15 bp, Homo sapiens
atcaaatgttataac

SEQ ID NO: 1695510 - DNA, 15 bp, Homo sapiens
tcaaatgttataaca

SEQ ID NO: 1695511 - DNA, 15 bp, Homo sapiens
caaatgttataacat

SEQ ID NO: 1695512 - DNA, 15 bp, Homo sapiens
aaatgttataacata

SEQ ID NO: 1695513 - DNA, 15 bp, Homo sapiens
aatgttataacatat

SEQ ID NO: 1695514 - DNA, 15 bp, Homo sapiens
atgttataacatatg

SEQ ID NO: 1695515 - DNA, 15 bp, Homo sapiens
tgttataacatatgt

SEQ ID NO: 1695516 - DNA, 15 bp, Homo sapiens
gttataacatatgta

SEQ ID NO: 1695517 - DNA, 15 bp, Homo sapiens
ttataacatatgtaa

SEQ ID NO: 1695518 - DNA, 15 bp, Homo sapiens
tataacatatgtaaa

SEQ ID NO: 1695519 - DNA, 15 bp, Homo sapiens
ataacatatgtaaag

SEQ ID NO: 1695520 - DNA, 15 bp, Homo sapiens
taacatatgtaaagg

SEQ ID NO: 1695521 - DNA, 15 bp, Homo sapiens
aacatatgtaaaggt

SEQ ID NO: 1695522 - DNA, 15 bp, Homo sapiens
acatatgtaaaggtg

SEQ ID NO: 1695523 - DNA, 15 bp, Homo sapiens
catatgtaaaggtgc

SEQ ID NO: 1695524 - DNA, 15 bp, Homo sapiens
tatgtaaaggtgctt

SEQ ID NO: 1695525 - DNA, 15 bp, Homo sapiens
atgtaaaggtgcttt

SEQ ID NO: 1695526 - DNA, 15 bp, Homo sapiens
tgtaaaggtgctttg

SEQ ID NO: 1695527 - DNA, 15 bp, Homo sapiens
gtaaaggtgctttgt

SEQ ID NO: 1695528 - DNA, 15 bp, Homo sapiens
taaaggtgctttgta

SEQ ID NO: 1695529 - DNA, 15 bp, Homo sapiens
aaaggtgctttgtaa

SEQ ID NO: 1695530 - DNA, 15 bp, Homo sapiens
aaggtgctttgtaag

SEQ ID NO: 1695531 - DNA, 15 bp, Homo sapiens
aggtgctttgtaagc

SEQ ID NO: 1695532 - DNA, 15 bp, Homo sapiens
ggtgctttgtaagct

SEQ ID NO: 1695533 - DNA, 15 bp, Homo sapiens
gtgctttgtaagcta

SEQ ID NO: 1695534 - DNA, 15 bp, Homo sapiens
tgctttgtaagctat

SEQ ID NO: 1695535 - DNA, 15 bp, Homo sapiens
gctttgtaagctatg

SEQ ID NO: 1695536 - DNA, 15 bp, Homo sapiens
ctttgtaagctatga

SEQ ID NO: 1695537 - DNA, 15 bp, Homo sapiens
tttgtaagctatgaa

SEQ ID NO: 1695538 - DNA, 15 bp, Homo sapiens
ttgtaagctatgaat

SEQ ID NO: 1695539 - DNA, 15 bp, Homo sapiens
tgtaagctatgaatt

SEQ ID NO: 1695540 - DNA, 15 bp, Homo sapiens
gtaagctatgaatta

SEQ ID NO: 1695541 - DNA, 15 bp, Homo sapiens
taagctatgaattac

SEQ ID NO: 1695542 - DNA, 15 bp, Homo sapiens
aagctatgaattaca

SEQ ID NO: 1695543 - DNA, 15 bp, Homo sapiens
agctatgaattacaa

SEQ ID NO: 1695544 - DNA, 15 bp, Homo sapiens
gctatgaattacaaa

SEQ ID NO: 1695545 - DNA, 15 bp, Homo sapiens
ctatgaattacaaag

SEQ ID NO: 1695546 - DNA, 15 bp, Homo sapiens
tatgaattacaaagt

SEQ ID NO: 1695547 - DNA, 15 bp, Homo sapiens
atgaattacaaagta

SEQ ID NO: 1695548 - DNA, 15 bp, Homo sapiens
tgaattacaaagtaa

SEQ ID NO: 1695549 - DNA, 15 bp, Homo sapiens
gaattacaaagtaat

SEQ ID NO: 1695550 - DNA, 15 bp, Homo sapiens
aattacaaagtaata

SEQ ID NO: 1695551 - DNA, 15 bp, Homo sapiens
attacaaagtaatac

SEQ ID NO: 1695552 - DNA, 15 bp, Homo sapiens
ttacaaagtaataca

SEQ ID NO: 1695553 - DNA, 15 bp, Homo sapiens
tacaaagtaatacac

SEQ ID NO: 1695554 - DNA, 15 bp, Homo sapiens
acaaagtaatacaca

SEQ ID NO: 1695555 - DNA, 15 bp, Homo sapiens
caaagtaatacacac

SEQ ID NO: 1695556 - DNA, 15 bp, Homo sapiens
aaagtaatacacact

SEQ ID NO: 1695557 - DNA, 15 bp, Homo sapiens
aagtaatacacactc

SEQ ID NO: 1695558 - DNA, 15 bp, Homo sapiens
agtaatacacactca

SEQ ID NO: 1695559 - DNA, 15 bp, Homo sapiens
gtaatacacactcag

SEQ ID NO: 1695560 - DNA, 15 bp, Homo sapiens
taatacacactcagt

SEQ ID NO: 1695561 - DNA, 15 bp, Homo sapiens
aatacacactcagta

SEQ ID NO: 1695562 - DNA, 15 bp, Homo sapiens
atacacactcagtaa

SEQ ID NO: 1695563 - DNA, 15 bp, Homo sapiens
tacacactcagtaaa

SEQ ID NO: 1695564 - DNA, 15 bp, Homo sapiens
acacactcagtaaat

SEQ ID NO: 1695565 - DNA, 15 bp, Homo sapiens
cacactcagtaaata

SEQ ID NO: 1695566 - DNA, 15 bp, Homo sapiens
acactcagtaaatat

SEQ ID NO: 1695567 - DNA, 15 bp, Homo sapiens
cactcagtaaatatt

SEQ ID NO: 1695568 - DNA, 15 bp, Homo sapiens
actcagtaaatattt

SEQ ID NO: 1695569 - DNA, 15 bp, Homo sapiens
taaatatttttgaat

SEQ ID NO: 1695570 - DNA, 15 bp, Homo sapiens
aaatatttttgaatg

SEQ ID NO: 1695571 - DNA, 15 bp, Homo sapiens
aatatttttgaatgg

SEQ ID NO: 1695572 - DNA, 15 bp, Homo sapiens
atatttttgaatgga

SEQ ID NO: 1695573 - DNA, 15 bp, Homo sapiens
tatttttgaatggat

SEQ ID NO: 1695574 - DNA, 15 bp, Homo sapiens
atttttgaatggata

SEQ ID NO: 1695575 - DNA, 15 bp, Homo sapiens
tttttgaatggatag

SEQ ID NO: 1695576 - DNA, 15 bp, Homo sapiens
ttttgaatggatagc

SEQ ID NO: 1695577 - DNA, 15 bp, Homo sapiens
tttgaatggatagct

SEQ ID NO: 1695578 - DNA, 15 bp, Homo sapiens
ttgaatggatagcta

SEQ ID NO: 1695579 - DNA, 15 bp, Homo sapiens
tgaatggatagctaa

SEQ ID NO: 1695580 - DNA, 15 bp, Homo sapiens
gaatggatagctaaa

SEQ ID NO: 1695581 - DNA, 15 bp, Homo sapiens
aatggatagctaaaa

SEQ ID NO: 1695582 - DNA, 15 bp, Homo sapiens
atggatagctaaaac

SEQ ID NO: 1695583 - DNA, 15 bp, Homo sapiens
tggatagctaaaact

SEQ ID NO: 1695584 - DNA, 15 bp, Homo sapiens
ggatagctaaaactt

SEQ ID NO: 1695585 - DNA, 15 bp, Homo sapiens
gatagctaaaactta

SEQ ID NO: 1695586 - DNA, 15 bp, Homo sapiens
atagctaaaacttat

SEQ ID NO: 1695587 - DNA, 15 bp, Homo sapiens
tagctaaaacttata

SEQ ID NO: 1695588 - DNA, 15 bp, Homo sapiens
agctaaaacttatat

SEQ ID NO: 1695589 - DNA, 15 bp, Homo sapiens
gctaaaacttatatt

SEQ ID NO: 1695590 - DNA, 15 bp, Homo sapiens
ctaaaacttatatta

SEQ ID NO: 1695591 - DNA, 15 bp, Homo sapiens
taaaacttatattac

SEQ ID NO: 1695592 - DNA, 15 bp, Homo sapiens
aaaacttatattaca

SEQ ID NO: 1695593 - DNA, 15 bp, Homo sapiens
aaacttatattacaa

SEQ ID NO: 1695594 - DNA, 15 bp, Homo sapiens
aacttatattacaat

SEQ ID NO: 1695595 - DNA, 15 bp, Homo sapiens
acttatattacaatg

SEQ ID NO: 1695596 - DNA, 15 bp, Homo sapiens
cttatattacaatgg

SEQ ID NO: 1695597 - DNA, 15 bp, Homo sapiens
ttatattacaatggt

SEQ ID NO: 1695598 - DNA, 15 bp, Homo sapiens
tatattacaatggtg

SEQ ID NO: 1695599 - DNA, 15 bp, Homo sapiens
atattacaatggtgg

SEQ ID NO: 1695600 - DNA, 15 bp, Homo sapiens
tattacaatggtgga

SEQ ID NO: 1695601 - DNA, 15 bp, Homo sapiens
attacaatggtggag

SEQ ID NO: 1695602 - DNA, 15 bp, Homo sapiens
ttacaatggtggaga

SEQ ID NO: 1695603 - DNA, 15 bp, Homo sapiens
tacaatggtggagag

SEQ ID NO: 1695604 - DNA, 15 bp, Homo sapiens
acaatggtggagagt

SEQ ID NO: 1695605 - DNA, 15 bp, Homo sapiens
caatggtggagagta

SEQ ID NO: 1695606 - DNA, 15 bp, Homo sapiens
aatggtggagagtaa

SEQ ID NO: 1695607 - DNA, 15 bp, Homo sapiens
atggtggagagtaat

SEQ ID NO: 1695608 - DNA, 15 bp, Homo sapiens
tggtggagagtaatt

SEQ ID NO: 1695609 - DNA, 15 bp, Homo sapiens
ggtggagagtaattg

SEQ ID NO: 1695610 - DNA, 15 bp, Homo sapiens
gtggagagtaattga

SEQ ID NO: 1695611 - DNA, 15 bp, Homo sapiens
tggagagtaattgag

SEQ ID NO: 1695612 - DNA, 15 bp, Homo sapiens
ggagagtaattgagg

SEQ ID NO: 1695613 - DNA, 15 bp, Homo sapiens
gagagtaattgaggt

SEQ ID NO: 1695614 - DNA, 15 bp, Homo sapiens
agagtaattgaggtt

SEQ ID NO: 1695615 - DNA, 15 bp, Homo sapiens
gagtaattgaggttt

SEQ ID NO: 1695616 - DNA, 15 bp, Homo sapiens
agtaattgaggtttt

SEQ ID NO: 1695617 - DNA, 15 bp, Homo sapiens
gtaattgaggttttt

SEQ ID NO: 1695618 - DNA, 15 bp, Homo sapiens
taattgaggtttttg

SEQ ID NO: 1695619 - DNA, 15 bp, Homo sapiens
aattgaggtttttgc

SEQ ID NO: 1695620 - DNA, 15 bp, Homo sapiens
attgaggtttttgcc

SEQ ID NO: 1695621 - DNA, 15 bp, Homo sapiens
ttgaggtttttgcca

SEQ ID NO: 1695622 - DNA, 15 bp, Homo sapiens
tgaggtttttgccat

SEQ ID NO: 1695623 - DNA, 15 bp, Homo sapiens
gaggtttttgccatt

SEQ ID NO: 1695624 - DNA, 15 bp, Homo sapiens
aggtttttgccatta

SEQ ID NO: 1695625 - DNA, 15 bp, Homo sapiens
ggtttttgccattac

SEQ ID NO: 1695626 - DNA, 15 bp, Homo sapiens
gtttttgccattact

SEQ ID NO: 1695627 - DNA, 15 bp, Homo sapiens
tttttgccattactt

SEQ ID NO: 1695628 - DNA, 15 bp, Homo sapiens
ttttgccattacttt

SEQ ID NO: 1695629 - DNA, 15 bp, Homo sapiens
tttgccattactttt

SEQ ID NO: 1695630 - DNA, 15 bp, Homo sapiens
ttgccattactttta

SEQ ID NO: 1695631 - DNA, 15 bp, Homo sapiens
tgccattacttttaa

SEQ ID NO: 1695632 - DNA, 15 bp, Homo sapiens
gccattacttttaat

SEQ ID NO: 1695633 - DNA, 15 bp, Homo sapiens
ccattacttttaata

SEQ ID NO: 1695634 - DNA, 15 bp, Homo sapiens
cattacttttaatag

SEQ ID NO: 1695635 - DNA, 15 bp, Homo sapiens
attacttttaatagt

SEQ ID NO: 1695636 - DNA, 15 bp, Homo sapiens
ttacttttaatagtg

SEQ ID NO: 1695637 - DNA, 15 bp, Homo sapiens
tacttttaatagtga

SEQ ID NO: 1695638 - DNA, 15 bp, Homo sapiens
acttttaatagtgaa

SEQ ID NO: 1695639 - DNA, 15 bp, Homo sapiens
cttttaatagtgaaa

SEQ ID NO: 1695640 - DNA, 15 bp, Homo sapiens
ttttaatagtgaaat

SEQ ID NO: 1695641 - DNA, 15 bp, Homo sapiens
tttaatagtgaaata

SEQ ID NO: 1695642 - DNA, 15 bp, Homo sapiens
ttaatagtgaaataa

SEQ ID NO: 1695643 - DNA, 15 bp, Homo sapiens
taatagtgaaataaa

SEQ ID NO: 1695644 - DNA, 15 bp, Homo sapiens
aatagtgaaataaaa

SEQ ID NO: 1695645 - DNA, 15 bp, Homo sapiens
atagtgaaataaaat

SEQ ID NO: 1695646 - DNA, 15 bp, Homo sapiens
tagtgaaataaaatc

SEQ ID NO: 1695647 - DNA, 15 bp, Homo sapiens
agtgaaataaaatct

SEQ ID NO: 1695648 - DNA, 15 bp, Homo sapiens
gtgaaataaaatctt

SEQ ID NO: 1695649 - DNA, 15 bp, Homo sapiens
tgaaataaaatcttc

SEQ ID NO: 1695650 - DNA, 15 bp, Homo sapiens
gaaataaaatcttct

SEQ ID NO: 1695651 - DNA, 15 bp, Homo sapiens
aaataaaatcttctt

SEQ ID NO: 1695652 - DNA, 15 bp, Homo sapiens
aataaaatcttctta

SEQ ID NO: 1695653 - DNA, 15 bp, Homo sapiens
ataaaatcttcttac

SEQ ID NO: 1695654 - DNA, 15 bp, Homo sapiens
taaaatcttcttact

SEQ ID NO: 1695655 - DNA, 15 bp, Homo sapiens
aaaatcttcttactt

SEQ ID NO: 1695656 - DNA, 15 bp, Homo sapiens
aaatcttcttactta

SEQ ID NO: 1695657 - DNA, 15 bp, Homo sapiens
aatcttcttacttaa

SEQ ID NO: 1695658 - DNA, 15 bp, Homo sapiens
atcttcttacttaaa

SEQ ID NO: 1695659 - DNA, 15 bp, Homo sapiens
tcttcttacttaaac

SEQ ID NO: 1695660 - DNA, 15 bp, Homo sapiens
cttcttacttaaacc

SEQ ID NO: 1695661 - DNA, 15 bp, Homo sapiens
ttcttacttaaacct

SEQ ID NO: 1695662 - DNA, 15 bp, Homo sapiens
tcttacttaaaccta

SEQ ID NO: 1695663 - DNA, 15 bp, Homo sapiens
cttacttaaacctat

SEQ ID NO: 1695664 - DNA, 15 bp, Homo sapiens
ttacttaaacctata

SEQ ID NO: 1695665 - DNA, 15 bp, Homo sapiens
tacttaaacctatat

SEQ ID NO: 1695666 - DNA, 15 bp, Homo sapiens
acttaaacctatatg

SEQ ID NO: 1695667 - DNA, 15 bp, Homo sapiens
cttaaacctatatgt

SEQ ID NO: 1695668 - DNA, 15 bp, Homo sapiens
ttaaacctatatgta

SEQ ID NO: 1695669 - DNA, 15 bp, Homo sapiens
taaacctatatgtat

SEQ ID NO: 1695670 - DNA, 15 bp, Homo sapiens
aaacctatatgtatt

SEQ ID NO: 1695671 - DNA, 15 bp, Homo sapiens
aacctatatgtattt

SEQ ID NO: 1695672 - DNA, 15 bp, Homo sapiens
acctatatgtattta

SEQ ID NO: 1695673 - DNA, 15 bp, Homo sapiens
cctatatgtatttat

SEQ ID NO: 1695674 - DNA, 15 bp, Homo sapiens
ctatatgtatttatt

SEQ ID NO: 1695675 - DNA, 15 bp, Homo sapiens
tatatgtatttattc

SEQ ID NO: 1695676 - DNA, 15 bp, Homo sapiens
atatgtatttattca

SEQ ID NO: 1695677 - DNA, 15 bp, Homo sapiens
tatgtatttattcat

SEQ ID NO: 1695678 - DNA, 15 bp, Homo sapiens
atgtatttattcata

SEQ ID NO: 1695679 - DNA, 15 bp, Homo sapiens
tgtatttattcatag

SEQ ID NO: 1695680 - DNA, 15 bp, Homo sapiens
gtatttattcatagt

SEQ ID NO: 1695681 - DNA, 15 bp, Homo sapiens
tatttattcatagta

SEQ ID NO: 1695682 - DNA, 15 bp, Homo sapiens
atttattcatagtac

SEQ ID NO: 1695683 - DNA, 15 bp, Homo sapiens
tttattcatagtacg

SEQ ID NO: 1695684 - DNA, 15 bp, Homo sapiens
ttattcatagtacga

SEQ ID NO: 1695685 - DNA, 15 bp, Homo sapiens
tattcatagtacgag

SEQ ID NO: 1695686 - DNA, 15 bp, Homo sapiens
attcatagtacgagt

SEQ ID NO: 1695687 - DNA, 15 bp, Homo sapiens
ttcatagtacgagta

SEQ ID NO: 1695688 - DNA, 15 bp, Homo sapiens
tcatagtacgagtat

SEQ ID NO: 1695689 - DNA, 15 bp, Homo sapiens
catagtacgagtatg

SEQ ID NO: 1695690 - DNA, 15 bp, Homo sapiens
atagtacgagtatgt

SEQ ID NO: 1695691 - DNA, 15 bp, Homo sapiens
tagtacgagtatgtt

SEQ ID NO: 1695692 - DNA, 15 bp, Homo sapiens
agtacgagtatgttt

SEQ ID NO: 1695693 - DNA, 15 bp, Homo sapiens
gtacgagtatgtttt

SEQ ID NO: 1695694 - DNA, 15 bp, Homo sapiens
tacgagtatgttttt

SEQ ID NO: 1695695 - DNA, 15 bp, Homo sapiens
acgagtatgttttta

SEQ ID NO: 1695696 - DNA, 15 bp, Homo sapiens
cgagtatgtttttaa

SEQ ID NO: 1695697 - DNA, 15 bp, Homo sapiens
gagtatgtttttaac

SEQ ID NO: 1695698 - DNA, 15 bp, Homo sapiens
agtatgtttttaacc

SEQ ID NO: 1695699 - DNA, 15 bp, Homo sapiens
gtatgtttttaaccc

SEQ ID NO: 1695700 - DNA, 15 bp, Homo sapiens
tatgtttttaaccct

SEQ ID NO: 1695701 - DNA, 15 bp, Homo sapiens
atgtttttaaccctc

SEQ ID NO: 1695702 - DNA, 15 bp, Homo sapiens
tgtttttaaccctct

SEQ ID NO: 1695703 - DNA, 15 bp, Homo sapiens
gtttttaaccctctg

SEQ ID NO: 1695704 - DNA, 15 bp, Homo sapiens
tttttaaccctctgt

SEQ ID NO: 1695705 - DNA, 15 bp, Homo sapiens
ttttaaccctctgtg

SEQ ID NO: 1695706 - DNA, 15 bp, Homo sapiens
tttaaccctctgtgt

SEQ ID NO: 1695707 - DNA, 15 bp, Homo sapiens
ttaaccctctgtgtg

SEQ ID NO: 1695708 - DNA, 15 bp, Homo sapiens
taaccctctgtgtgc

SEQ ID NO: 1695709 - DNA, 15 bp, Homo sapiens
aaccctctgtgtgcc

SEQ ID NO: 1695710 - DNA, 15 bp, Homo sapiens
accctctgtgtgcca

SEQ ID NO: 1695711 - DNA, 15 bp, Homo sapiens
ccctctgtgtgccac

SEQ ID NO: 1695712 - DNA, 15 bp, Homo sapiens
cctctgtgtgccaca

SEQ ID NO: 1695713 - DNA, 15 bp, Homo sapiens
ctctgtgtgccacat

SEQ ID NO: 1695714 - DNA, 15 bp, Homo sapiens
tctgtgtgccacatt

SEQ ID NO: 1695715 - DNA, 15 bp, Homo sapiens
ctgtgtgccacattg

SEQ ID NO: 1695716 - DNA, 15 bp, Homo sapiens
tgtgtgccacattgt

SEQ ID NO: 1695717 - DNA, 15 bp, Homo sapiens
gtgtgccacattgta

SEQ ID NO: 1695718 - DNA, 15 bp, Homo sapiens
tgtgccacattgtac

SEQ ID NO: 1695719 - DNA, 15 bp, Homo sapiens
gtgccacattgtact

SEQ ID NO: 1695720 - DNA, 15 bp, Homo sapiens
tgccacattgtactg

SEQ ID NO: 1695721 - DNA, 15 bp, Homo sapiens
gccacattgtactgg

SEQ ID NO: 1695722 - DNA, 15 bp, Homo sapiens
ccacattgtactggt

SEQ ID NO: 1695723 - DNA, 15 bp, Homo sapiens
cacattgtactggtg

SEQ ID NO: 1695724 - DNA, 15 bp, Homo sapiens
acattgtactggtgc

SEQ ID NO: 1695725 - DNA, 15 bp, Homo sapiens
cattgtactggtgct

SEQ ID NO: 1695726 - DNA, 15 bp, Homo sapiens
attgtactggtgcta

SEQ ID NO: 1695727 - DNA, 15 bp, Homo sapiens
ttgtactggtgctat

SEQ ID NO: 1695728 - DNA, 15 bp, Homo sapiens
tgtactggtgctata

SEQ ID NO: 1695729 - DNA, 15 bp, Homo sapiens
gtactggtgctataa

SEQ ID NO: 1695730 - DNA, 15 bp, Homo sapiens
tactggtgctataat

SEQ ID NO: 1695731 - DNA, 15 bp, Homo sapiens
actggtgctataatg

SEQ ID NO: 1695732 - DNA, 15 bp, Homo sapiens
ctggtgctataatga

SEQ ID NO: 1695733 - DNA, 15 bp, Homo sapiens
tggtgctataatgat

SEQ ID NO: 1695734 - DNA, 15 bp, Homo sapiens
ggtgctataatgata

SEQ ID NO: 1695735 - DNA, 15 bp, Homo sapiens
gtgctataatgataa

SEQ ID NO: 1695736 - DNA, 15 bp, Homo sapiens
tgctataatgataaa

SEQ ID NO: 1695737 - DNA, 15 bp, Homo sapiens
gctataatgataaaa

SEQ ID NO: 1695738 - DNA, 15 bp, Homo sapiens
ctataatgataaaaa

SEQ ID NO: 1695739 - DNA, 15 bp, Homo sapiens
tataatgataaaaaa

SEQ ID NO: 1695740 - DNA, 15 bp, Homo sapiens
ataatgataaaaaag

SEQ ID NO: 1695741 - DNA, 15 bp, Homo sapiens
taatgataaaaaagc

SEQ ID NO: 1695742 - DNA, 15 bp, Homo sapiens
aatgataaaaaagca

SEQ ID NO: 1695743 - DNA, 15 bp, Homo sapiens
atgataaaaaagcac

SEQ ID NO: 1695744 - DNA, 15 bp, Homo sapiens
tgataaaaaagcaca

SEQ ID NO: 1695745 - DNA, 15 bp, Homo sapiens
gataaaaaagcacat

SEQ ID NO: 1695746 - DNA, 15 bp, Homo sapiens
ataaaaaagcacatt

SEQ ID NO: 1695747 - DNA, 15 bp, Homo sapiens
taaaaaagcacattt

SEQ ID NO: 1695748 - DNA, 15 bp, Homo sapiens
aaaaaagcacatttg

SEQ ID NO: 1695749 - DNA, 15 bp, Homo sapiens
aaaaagcacatttga

SEQ ID NO: 1695750 - DNA, 15 bp, Homo sapiens
aaaagcacatttgat

SEQ ID NO: 1695751 - DNA, 15 bp, Homo sapiens
aaagcacatttgatg

SEQ ID NO: 1695752 - DNA, 15 bp, Homo sapiens
aagcacatttgatgc

SEQ ID NO: 1695753 - DNA, 15 bp, Homo sapiens
agcacatttgatgcc

SEQ ID NO: 1695754 - DNA, 15 bp, Homo sapiens
gcacatttgatgcct

SEQ ID NO: 1695755 - DNA, 15 bp, Homo sapiens
cacatttgatgcctg

SEQ ID NO: 1695756 - DNA, 15 bp, Homo sapiens
acatttgatgcctgc

SEQ ID NO: 1695757 - DNA, 15 bp, Homo sapiens
catttgatgcctgct

SEQ ID NO: 1695758 - DNA, 15 bp, Homo sapiens
atttgatgcctgctt

SEQ ID NO: 1695759 - DNA, 15 bp, Homo sapiens
tttgatgcctgcttg

SEQ ID NO: 1695760 - DNA, 15 bp, Homo sapiens
ttgatgcctgcttgc

SEQ ID NO: 1695761 - DNA, 15 bp, Homo sapiens
tgatgcctgcttgct

SEQ ID NO: 1695762 - DNA, 15 bp, Homo sapiens
gatgcctgcttgctc

SEQ ID NO: 1695763 - DNA, 15 bp, Homo sapiens
atgcctgcttgctct

SEQ ID NO: 1695764 - DNA, 15 bp, Homo sapiens
tgcctgcttgctctg

SEQ ID NO: 1695765 - DNA, 15 bp, Homo sapiens
gcctgcttgctctgg

SEQ ID NO: 1695766 - DNA, 15 bp, Homo sapiens
cctgcttgctctggg

SEQ ID NO: 1695767 - DNA, 15 bp, Homo sapiens
ctgcttgctctggga

SEQ ID NO: 1695768 - DNA, 15 bp, Homo sapiens
tgcttgctctgggag

SEQ ID NO: 1695769 - DNA, 15 bp, Homo sapiens
gcttgctctgggagc

SEQ ID NO: 1695770 - DNA, 15 bp, Homo sapiens
cttgctctgggagct

SEQ ID NO: 1695771 - DNA, 15 bp, Homo sapiens
ttgctctgggagctt

SEQ ID NO: 1695772 - DNA, 15 bp, Homo sapiens
tgctctgggagctta

SEQ ID NO: 1695773 - DNA, 15 bp, Homo sapiens
gctctgggagcttac

SEQ ID NO: 1695774 - DNA, 15 bp, Homo sapiens
ctctgggagcttaca

SEQ ID NO: 1695775 - DNA, 15 bp, Homo sapiens
tctgggagcttacag

SEQ ID NO: 1695776 - DNA, 15 bp, Homo sapiens
ctgggagcttacagt

SEQ ID NO: 1695777 - DNA, 15 bp, Homo sapiens
tgggagcttacagtc

SEQ ID NO: 1695778 - DNA, 15 bp, Homo sapiens
gggagcttacagtcc

SEQ ID NO: 1695779 - DNA, 15 bp, Homo sapiens
ggagcttacagtcca

SEQ ID NO: 1695780 - DNA, 15 bp, Homo sapiens
gagcttacagtccaa

SEQ ID NO: 1695781 - DNA, 15 bp, Homo sapiens
agcttacagtccaat

SEQ ID NO: 1695782 - DNA, 15 bp, Homo sapiens
gcttacagtccaata

SEQ ID NO: 1695783 - DNA, 15 bp, Homo sapiens
cttacagtccaatac

SEQ ID NO: 1695784 - DNA, 15 bp, Homo sapiens
ttacagtccaataca

SEQ ID NO: 1695785 - DNA, 15 bp, Homo sapiens
tacagtccaatacag

SEQ ID NO: 1695786 - DNA, 15 bp, Homo sapiens
acagtccaatacagg

SEQ ID NO: 1695787 - DNA, 15 bp, Homo sapiens
cagtccaatacaggc

SEQ ID NO: 1695788 - DNA, 15 bp, Homo sapiens
agtccaatacaggcc

SEQ ID NO: 1695789 - DNA, 15 bp, Homo sapiens
gtccaatacaggcca

SEQ ID NO: 1695790 - DNA, 15 bp, Homo sapiens
tccaatacaggccag

SEQ ID NO: 1695791 - DNA, 15 bp, Homo sapiens
ccaatacaggccagt

SEQ ID NO: 1695792 - DNA, 15 bp, Homo sapiens
caatacaggccagta

SEQ ID NO: 1695793 - DNA, 15 bp, Homo sapiens
aatacaggccagtaa

SEQ ID NO: 1695794 - DNA, 15 bp, Homo sapiens
atacaggccagtaag

SEQ ID NO: 1695795 - DNA, 15 bp, Homo sapiens
tacaggccagtaagt

SEQ ID NO: 1695796 - DNA, 15 bp, Homo sapiens
acaggccagtaagtg

SEQ ID NO: 1695797 - DNA, 15 bp, Homo sapiens
caggccagtaagtga

SEQ ID NO: 1695798 - DNA, 15 bp, Homo sapiens
aggccagtaagtgaa

SEQ ID NO: 1695799 - DNA, 15 bp, Homo sapiens
ggccagtaagtgaaa

SEQ ID NO: 1695800 - DNA, 15 bp, Homo sapiens
gccagtaagtgaaaa

SEQ ID NO: 1695801 - DNA, 15 bp, Homo sapiens
ccagtaagtgaaaat

SEQ ID NO: 1695802 - DNA, 15 bp, Homo sapiens
cagtaagtgaaaatg

SEQ ID NO: 1695803 - DNA, 15 bp, Homo sapiens
agtaagtgaaaatgt

SEQ ID NO: 1695804 - DNA, 15 bp, Homo sapiens
gtaagtgaaaatgta

SEQ ID NO: 1695805 - DNA, 15 bp, Homo sapiens
taagtgaaaatgtat

SEQ ID NO: 1695806 - DNA, 15 bp, Homo sapiens
aagtgaaaatgtatt

SEQ ID NO: 1695807 - DNA, 15 bp, Homo sapiens
agtgaaaatgtattt

SEQ ID NO: 1695808 - DNA, 15 bp, Homo sapiens
gtgaaaatgtatttg

SEQ ID NO: 1695809 - DNA, 15 bp, Homo sapiens
tgaaaatgtatttgc

SEQ ID NO: 1695810 - DNA, 15 bp, Homo sapiens
gaaaatgtatttgca

SEQ ID NO: 1695811 - DNA, 15 bp, Homo sapiens
aaaatgtatttgcaa

SEQ ID NO: 1695812 - DNA, 15 bp, Homo sapiens
aaatgtatttgcaag

SEQ ID NO: 1695813 - DNA, 15 bp, Homo sapiens
aatgtatttgcaagt

SEQ ID NO: 1695814 - DNA, 15 bp, Homo sapiens
atgtatttgcaagtt

SEQ ID NO: 1695815 - DNA, 15 bp, Homo sapiens
tgtatttgcaagttt

SEQ ID NO: 1695816 - DNA, 15 bp, Homo sapiens
gtatttgcaagtttg

SEQ ID NO: 1695817 - DNA, 15 bp, Homo sapiens
tatttgcaagtttga

SEQ ID NO: 1695818 - DNA, 15 bp, Homo sapiens
atttgcaagtttgac

SEQ ID NO: 1695819 - DNA, 15 bp, Homo sapiens
tttgcaagtttgact

SEQ ID NO: 1695820 - DNA, 15 bp, Homo sapiens
ttgcaagtttgactc

SEQ ID NO: 1695821 - DNA, 15 bp, Homo sapiens
tgcaagtttgactcc

SEQ ID NO: 1695822 - DNA, 15 bp, Homo sapiens
gcaagtttgactcct

SEQ ID NO: 1695823 - DNA, 15 bp, Homo sapiens
caagtttgactccta

SEQ ID NO: 1695824 - DNA, 15 bp, Homo sapiens
aagtttgactcctag

SEQ ID NO: 1695825 - DNA, 15 bp, Homo sapiens
agtttgactcctagt

SEQ ID NO: 1695826 - DNA, 15 bp, Homo sapiens
gtttgactcctagtg

SEQ ID NO: 1695827 - DNA, 15 bp, Homo sapiens
tttgactcctagtgt

SEQ ID NO: 1695828 - DNA, 15 bp, Homo sapiens
ttgactcctagtgtg

SEQ ID NO: 1695829 - DNA, 15 bp, Homo sapiens
tgactcctagtgtga

SEQ ID NO: 1695830 - DNA, 15 bp, Homo sapiens
gactcctagtgtgaa

SEQ ID NO: 1695831 - DNA, 15 bp, Homo sapiens
actcctagtgtgaaa

SEQ ID NO: 1695832 - DNA, 15 bp, Homo sapiens
ctcctagtgtgaaat

SEQ ID NO: 1695833 - DNA, 15 bp, Homo sapiens
tcctagtgtgaaatg

SEQ ID NO: 1695834 - DNA, 15 bp, Homo sapiens
cctagtgtgaaatga

SEQ ID NO: 1695835 - DNA, 15 bp, Homo sapiens
ctagtgtgaaatgaa

SEQ ID NO: 1695836 - DNA, 15 bp, Homo sapiens
tagtgtgaaatgaaa

SEQ ID NO: 1695837 - DNA, 15 bp, Homo sapiens
agtgtgaaatgaaag

SEQ ID NO: 1695838 - DNA, 15 bp, Homo sapiens
gtgtgaaatgaaagg

SEQ ID NO: 1695839 - DNA, 15 bp, Homo sapiens
tgtgaaatgaaaggc

SEQ ID NO: 1695840 - DNA, 15 bp, Homo sapiens
gtgaaatgaaaggcg

SEQ ID NO: 1695841 - DNA, 15 bp, Homo sapiens
tgaaatgaaaggcgt

SEQ ID NO: 1695842 - DNA, 15 bp, Homo sapiens
gaaatgaaaggcgtg

SEQ ID NO: 1695843 - DNA, 15 bp, Homo sapiens
aaatgaaaggcgtga

SEQ ID NO: 1695844 - DNA, 15 bp, Homo sapiens
aatgaaaggcgtgag

SEQ ID NO: 1695845 - DNA, 15 bp, Homo sapiens
atgaaaggcgtgagg

SEQ ID NO: 1695846 - DNA, 15 bp, Homo sapiens
tgaaaggcgtgaggt

SEQ ID NO: 1695847 - DNA, 15 bp, Homo sapiens
gaaaggcgtgaggtt

SEQ ID NO: 1695848 - DNA, 15 bp, Homo sapiens
aaaggcgtgaggttt

SEQ ID NO: 1695849 - DNA, 15 bp, Homo sapiens
aaggcgtgaggtttt

SEQ ID NO: 1695850 - DNA, 15 bp, Homo sapiens
aggcgtgaggttttg

SEQ ID NO: 1695851 - DNA, 15 bp, Homo sapiens
ggcgtgaggttttgt

SEQ ID NO: 1695852 - DNA, 15 bp, Homo sapiens
gcgtgaggttttgtg

SEQ ID NO: 1695853 - DNA, 15 bp, Homo sapiens
cgtgaggttttgtga

SEQ ID NO: 1695854 - DNA, 15 bp, Homo sapiens
gtgaggttttgtgac

SEQ ID NO: 1695855 - DNA, 15 bp, Homo sapiens
tgaggttttgtgaca

SEQ ID NO: 1695856 - DNA, 15 bp, Homo sapiens
gaggttttgtgacac

SEQ ID NO: 1695857 - DNA, 15 bp, Homo sapiens
aggttttgtgacaca

SEQ ID NO: 1695858 - DNA, 15 bp, Homo sapiens
ggttttgtgacacag

SEQ ID NO: 1695859 - DNA, 15 bp, Homo sapiens
gttttgtgacacaga

SEQ ID NO: 1695860 - DNA, 15 bp, Homo sapiens
ttttgtgacacagag

SEQ ID NO: 1695861 - DNA, 15 bp, Homo sapiens
tttgtgacacagagg

SEQ ID NO: 1695862 - DNA, 15 bp, Homo sapiens
ttgtgacacagagga

SEQ ID NO: 1695863 - DNA, 15 bp, Homo sapiens
tgtgacacagaggac

SEQ ID NO: 1695864 - DNA, 15 bp, Homo sapiens
gtgacacagaggacc

SEQ ID NO: 1695865 - DNA, 15 bp, Homo sapiens
tgacacagaggaccc

SEQ ID NO: 1695866 - DNA, 15 bp, Homo sapiens
gacacagaggacccc

SEQ ID NO: 1695867 - DNA, 15 bp, Homo sapiens
acacagaggacccca

SEQ ID NO: 1695868 - DNA, 15 bp, Homo sapiens
cacagaggaccccaa

SEQ ID NO: 1695869 - DNA, 15 bp, Homo sapiens
acagaggaccccaaa

SEQ ID NO: 1695870 - DNA, 15 bp, Homo sapiens
cagaggaccccaaac

SEQ ID NO: 1695871 - DNA, 15 bp, Homo sapiens
agaggaccccaaacc

SEQ ID NO: 1695872 - DNA, 15 bp, Homo sapiens
gaggaccccaaacca

SEQ ID NO: 1695873 - DNA, 15 bp, Homo sapiens
aggaccccaaaccac

SEQ ID NO: 1695874 - DNA, 15 bp, Homo sapiens
ggaccccaaaccaca

SEQ ID NO: 1695875 - DNA, 15 bp, Homo sapiens
gaccccaaaccacat

SEQ ID NO: 1695876 - DNA, 15 bp, Homo sapiens
accccaaaccacatt

SEQ ID NO: 1695877 - DNA, 15 bp, Homo sapiens
ccccaaaccacattt

SEQ ID NO: 1695878 - DNA, 15 bp, Homo sapiens
cccaaaccacatttt

SEQ ID NO: 1695879 - DNA, 15 bp, Homo sapiens
ccaaaccacattttc

SEQ ID NO: 1695880 - DNA, 15 bp, Homo sapiens
caaaccacattttcc

SEQ ID NO: 1695881 - DNA, 15 bp, Homo sapiens
aaaccacattttcca

SEQ ID NO: 1695882 - DNA, 15 bp, Homo sapiens
aaccacattttccat

SEQ ID NO: 1695883 - DNA, 15 bp, Homo sapiens
accacattttccata

SEQ ID NO: 1695884 - DNA, 15 bp, Homo sapiens
ccacattttccataa

SEQ ID NO: 1695885 - DNA, 15 bp, Homo sapiens
cacattttccataat

SEQ ID NO: 1695886 - DNA, 15 bp, Homo sapiens
acattttccataatc

SEQ ID NO: 1695887 - DNA, 15 bp, Homo sapiens
cattttccataatca

SEQ ID NO: 1695888 - DNA, 15 bp, Homo sapiens
attttccataatcag

SEQ ID NO: 1695889 - DNA, 15 bp, Homo sapiens
ttttccataatcagt

SEQ ID NO: 1695890 - DNA, 15 bp, Homo sapiens
tttccataatcagta

SEQ ID NO: 1695891 - DNA, 15 bp, Homo sapiens
ttccataatcagtac

SEQ ID NO: 1695892 - DNA, 15 bp, Homo sapiens
tccataatcagtaca

SEQ ID NO: 1695893 - DNA, 15 bp, Homo sapiens
ccataatcagtacaa

SEQ ID NO: 1695894 - DNA, 15 bp, Homo sapiens
cataatcagtacaaa

SEQ ID NO: 1695895 - DNA, 15 bp, Homo sapiens
ataatcagtacaaaa

SEQ ID NO: 1695896 - DNA, 15 bp, Homo sapiens
taatcagtacaaaaa

SEQ ID NO: 1695897 - DNA, 15 bp, Homo sapiens
aatcagtacaaaaat

SEQ ID NO: 1695898 - DNA, 15 bp, Homo sapiens
atcagtacaaaaatc

SEQ ID NO: 1695899 - DNA, 15 bp, Homo sapiens
tcagtacaaaaatca

SEQ ID NO: 1695900 - DNA, 15 bp, Homo sapiens
cagtacaaaaatcac

SEQ ID NO: 1695901 - DNA, 15 bp, Homo sapiens
agtacaaaaatcacc

SEQ ID NO: 1695902 - DNA, 15 bp, Homo sapiens
gtacaaaaatcacct

SEQ ID NO: 1695903 - DNA, 15 bp, Homo sapiens
tacaaaaatcacctc

SEQ ID NO: 1695904 - DNA, 15 bp, Homo sapiens
acaaaaatcacctct

SEQ ID NO: 1695905 - DNA, 15 bp, Homo sapiens
caaaaatcacctctt

SEQ ID NO: 1695906 - DNA, 15 bp, Homo sapiens
aaaaatcacctctta

SEQ ID NO: 1695907 - DNA, 15 bp, Homo sapiens
aaaatcacctcttaa

SEQ ID NO: 1695908 - DNA, 15 bp, Homo sapiens
aaatcacctcttaat

SEQ ID NO: 1695909 - DNA, 15 bp, Homo sapiens
aatcacctcttaatt

SEQ ID NO: 1695910 - DNA, 15 bp, Homo sapiens
atcacctcttaattg

SEQ ID NO: 1695911 - DNA, 15 bp, Homo sapiens
tcacctcttaattgg

SEQ ID NO: 1695912 - DNA, 15 bp, Homo sapiens
cacctcttaattggt

SEQ ID NO: 1695913 - DNA, 15 bp, Homo sapiens
acctcttaattggtg

SEQ ID NO: 1695914 - DNA, 15 bp, Homo sapiens
cctcttaattggtga

SEQ ID NO: 1695915 - DNA, 15 bp, Homo sapiens
ctcttaattggtgaa

SEQ ID NO: 1695916 - DNA, 15 bp, Homo sapiens
tcttaattggtgaaa

SEQ ID NO: 1695917 - DNA, 15 bp, Homo sapiens
cttaattggtgaaaa

SEQ ID NO: 1695918 - DNA, 15 bp, Homo sapiens
ttaattggtgaaaat

SEQ ID NO: 1695919 - DNA, 15 bp, Homo sapiens
taattggtgaaaata

SEQ ID NO: 1695920 - DNA, 15 bp, Homo sapiens
aattggtgaaaatat

SEQ ID NO: 1695921 - DNA, 15 bp, Homo sapiens
attggtgaaaatatt

SEQ ID NO: 1695922 - DNA, 15 bp, Homo sapiens
ttggtgaaaatattg

SEQ ID NO: 1695923 - DNA, 15 bp, Homo sapiens
tggtgaaaatattga

SEQ ID NO: 1695924 - DNA, 15 bp, Homo sapiens
ggtgaaaatattgac

SEQ ID NO: 1695925 - DNA, 15 bp, Homo sapiens
gtgaaaatattgaca

SEQ ID NO: 1695926 - DNA, 15 bp, Homo sapiens
tgaaaatattgacag

SEQ ID NO: 1695927 - DNA, 15 bp, Homo sapiens
gaaaatattgacaga

SEQ ID NO: 1695928 - DNA, 15 bp, Homo sapiens
aaaatattgacagat

SEQ ID NO: 1695929 - DNA, 15 bp, Homo sapiens
aaatattgacagata

SEQ ID NO: 1695930 - DNA, 15 bp, Homo sapiens
aatattgacagatag

SEQ ID NO: 1695931 - DNA, 15 bp, Homo sapiens
atattgacagatagt

SEQ ID NO: 1695932 - DNA, 15 bp, Homo sapiens
tattgacagatagtt

SEQ ID NO: 1695933 - DNA, 15 bp, Homo sapiens
attgacagatagtta

SEQ ID NO: 1695934 - DNA, 15 bp, Homo sapiens
ttgacagatagttat

SEQ ID NO: 1695935 - DNA, 15 bp, Homo sapiens
tgacagatagttatg

SEQ ID NO: 1695936 - DNA, 15 bp, Homo sapiens
gacagatagttatga

SEQ ID NO: 1695937 - DNA, 15 bp, Homo sapiens
acagatagttatgaa

SEQ ID NO: 1695938 - DNA, 15 bp, Homo sapiens
cagatagttatgaat

SEQ ID NO: 1695939 - DNA, 15 bp, Homo sapiens
agatagttatgaatt

SEQ ID NO: 1695940 - DNA, 15 bp, Homo sapiens
gatagttatgaatta

SEQ ID NO: 1695941 - DNA, 15 bp, Homo sapiens
atagttatgaattag

SEQ ID NO: 1695942 - DNA, 15 bp, Homo sapiens
tagttatgaattagc

SEQ ID NO: 1695943 - DNA, 15 bp, Homo sapiens
agttatgaattagct

SEQ ID NO: 1695944 - DNA, 15 bp, Homo sapiens
gttatgaattagctt

SEQ ID NO: 1695945 - DNA, 15 bp, Homo sapiens
ttatgaattagcttc

SEQ ID NO: 1695946 - DNA, 15 bp, Homo sapiens
tatgaattagcttct

SEQ ID NO: 1695947 - DNA, 15 bp, Homo sapiens
atgaattagcttctc

SEQ ID NO: 1695948 - DNA, 15 bp, Homo sapiens
tgaattagcttctca

SEQ ID NO: 1695949 - DNA, 15 bp, Homo sapiens
gaattagcttctcat

SEQ ID NO: 1695950 - DNA, 15 bp, Homo sapiens
aattagcttctcatt

SEQ ID NO: 1695951 - DNA, 15 bp, Homo sapiens
attagcttctcattc

SEQ ID NO: 1695952 - DNA, 15 bp, Homo sapiens
ttagcttctcattct

SEQ ID NO: 1695953 - DNA, 15 bp, Homo sapiens
tagcttctcattctt

SEQ ID NO: 1695954 - DNA, 15 bp, Homo sapiens
agcttctcattcttt

SEQ ID NO: 1695955 - DNA, 15 bp, Homo sapiens
gcttctcattctttc

SEQ ID NO: 1695956 - DNA, 15 bp, Homo sapiens
cttctcattctttcc

SEQ ID NO: 1695957 - DNA, 15 bp, Homo sapiens
ttctcattctttcct

SEQ ID NO: 1695958 - DNA, 15 bp, Homo sapiens
tctcattctttcctc

SEQ ID NO: 1695959 - DNA, 15 bp, Homo sapiens
ctcattctttcctcg

SEQ ID NO: 1695960 - DNA, 15 bp, Homo sapiens
tcattctttcctcgc

SEQ ID NO: 1695961 - DNA, 15 bp, Homo sapiens
cattctttcctcgca

SEQ ID NO: 1695962 - DNA, 15 bp, Homo sapiens
attctttcctcgcaa

SEQ ID NO: 1695963 - DNA, 15 bp, Homo sapiens
ttctttcctcgcaag

SEQ ID NO: 1695964 - DNA, 15 bp, Homo sapiens
tctttcctcgcaaga

SEQ ID NO: 1695965 - DNA, 15 bp, Homo sapiens
ctttcctcgcaagac

SEQ ID NO: 1695966 - DNA, 15 bp, Homo sapiens
tttcctcgcaagacc

SEQ ID NO: 1695967 - DNA, 15 bp, Homo sapiens
ttcctcgcaagacct

SEQ ID NO: 1695968 - DNA, 15 bp, Homo sapiens
tcctcgcaagaccta

SEQ ID NO: 1695969 - DNA, 15 bp, Homo sapiens
cctcgcaagacctac

SEQ ID NO: 1695970 - DNA, 15 bp, Homo sapiens
ctcgcaagacctact

SEQ ID NO: 1695971 - DNA, 15 bp, Homo sapiens
tcgcaagacctacta

SEQ ID NO: 1695972 - DNA, 15 bp, Homo sapiens
cgcaagacctactag

SEQ ID NO: 1695973 - DNA, 15 bp, Homo sapiens
gcaagacctactagc

SEQ ID NO: 1695974 - DNA, 15 bp, Homo sapiens
caagacctactagcc

SEQ ID NO: 1695975 - DNA, 15 bp, Homo sapiens
aagacctactagcca

SEQ ID NO: 1695976 - DNA, 15 bp, Homo sapiens
agacctactagccag

SEQ ID NO: 1695977 - DNA, 15 bp, Homo sapiens
gacctactagccagc

SEQ ID NO: 1695978 - DNA, 15 bp, Homo sapiens
acctactagccagca

SEQ ID NO: 1695979 - DNA, 15 bp, Homo sapiens
cctactagccagcat

SEQ ID NO: 1695980 - DNA, 15 bp, Homo sapiens
ctactagccagcatt

SEQ ID NO: 1695981 - DNA, 15 bp, Homo sapiens
tactagccagcattc

SEQ ID NO: 1695982 - DNA, 15 bp, Homo sapiens
actagccagcattca

SEQ ID NO: 1695983 - DNA, 15 bp, Homo sapiens
ctagccagcattcag

SEQ ID NO: 1695984 - DNA, 15 bp, Homo sapiens
tagccagcattcagc

SEQ ID NO: 1695985 - DNA, 15 bp, Homo sapiens
agccagcattcagcc

SEQ ID NO: 1695986 - DNA, 15 bp, Homo sapiens
gccagcattcagcct

SEQ ID NO: 1695987 - DNA, 15 bp, Homo sapiens
ccagcattcagcctc

SEQ ID NO: 1695988 - DNA, 15 bp, Homo sapiens
cagcattcagcctct

SEQ ID NO: 1695989 - DNA, 15 bp, Homo sapiens
agcattcagcctcta

SEQ ID NO: 1695990 - DNA, 15 bp, Homo sapiens
gcattcagcctctac

SEQ ID NO: 1695991 - DNA, 15 bp, Homo sapiens
cattcagcctctacg

SEQ ID NO: 1695992 - DNA, 15 bp, Homo sapiens
attcagcctctacgt

SEQ ID NO: 1695993 - DNA, 15 bp, Homo sapiens
ttcagcctctacgta

SEQ ID NO: 1695994 - DNA, 15 bp, Homo sapiens
tcagcctctacgtag

SEQ ID NO: 1695995 - DNA, 15 bp, Homo sapiens
cagcctctacgtagc

SEQ ID NO: 1695996 - DNA, 15 bp, Homo sapiens
agcctctacgtagca

SEQ ID NO: 1695997 - DNA, 15 bp, Homo sapiens
gcctctacgtagcaa

SEQ ID NO: 1695998 - DNA, 15 bp, Homo sapiens
cctctacgtagcaaa

SEQ ID NO: 1695999 - DNA, 15 bp, Homo sapiens
ctctacgtagcaaac

SEQ ID NO: 1696000 - DNA, 15 bp, Homo sapiens
tctacgtagcaaaca

SEQ ID NO: 1696001 - DNA, 15 bp, Homo sapiens
ctacgtagcaaacac

SEQ ID NO: 1696002 - DNA, 15 bp, Homo sapiens
tacgtagcaaacaca

SEQ ID NO: 1696003 - DNA, 15 bp, Homo sapiens
acgtagcaaacacac

SEQ ID NO: 1696004 - DNA, 15 bp, Homo sapiens
cgtagcaaacacacc

SEQ ID NO: 1696005 - DNA, 15 bp, Homo sapiens
gtagcaaacacaccg

SEQ ID NO: 1696006 - DNA, 15 bp, Homo sapiens
tagcaaacacaccgt

SEQ ID NO: 1696007 - DNA, 15 bp, Homo sapiens
agcaaacacaccgtg

SEQ ID NO: 1696008 - DNA, 15 bp, Homo sapiens
gcaaacacaccgtgt

SEQ ID NO: 1696009 - DNA, 15 bp, Homo sapiens
caaacacaccgtgta

SEQ ID NO: 1696010 - DNA, 15 bp, Homo sapiens
aaacacaccgtgtat

SEQ ID NO: 1696011 - DNA, 15 bp, Homo sapiens
aacacaccgtgtata

SEQ ID NO: 1696012 - DNA, 15 bp, Homo sapiens
acacaccgtgtatat

SEQ ID NO: 1696013 - DNA, 15 bp, Homo sapiens
cacaccgtgtatatt

SEQ ID NO: 1696014 - DNA, 15 bp, Homo sapiens
acaccgtgtatattt

SEQ ID NO: 1696015 - DNA, 15 bp, Homo sapiens
caccgtgtatattta

SEQ ID NO: 1696016 - DNA, 15 bp, Homo sapiens
accgtgtatatttat

SEQ ID NO: 1696017 - DNA, 15 bp, Homo sapiens
ccgtgtatatttatt

SEQ ID NO: 1696018 - DNA, 15 bp, Homo sapiens
cgtgtatatttatta

SEQ ID NO: 1696019 - DNA, 15 bp, Homo sapiens
gtgtatatttattaa

SEQ ID NO: 1696020 - DNA, 15 bp, Homo sapiens
tgtatatttattaag

SEQ ID NO: 1696021 - DNA, 15 bp, Homo sapiens
gtatatttattaagt

SEQ ID NO: 1696022 - DNA, 15 bp, Homo sapiens
tatatttattaagta

SEQ ID NO: 1696023 - DNA, 15 bp, Homo sapiens
atatttattaagtaa

SEQ ID NO: 1696024 - DNA, 15 bp, Homo sapiens
tatttattaagtaag

SEQ ID NO: 1696025 - DNA, 15 bp, Homo sapiens
atttattaagtaagt

SEQ ID NO: 1696026 - DNA, 15 bp, Homo sapiens
tttattaagtaagtt

SEQ ID NO: 1696027 - DNA, 15 bp, Homo sapiens
ttattaagtaagttt

SEQ ID NO: 1696028 - DNA, 15 bp, Homo sapiens
tattaagtaagttta

SEQ ID NO: 1696029 - DNA, 15 bp, Homo sapiens
attaagtaagtttat

SEQ ID NO: 1696030 - DNA, 15 bp, Homo sapiens
ttaagtaagtttatt

SEQ ID NO: 1696031 - DNA, 15 bp, Homo sapiens
taagtaagtttattc

SEQ ID NO: 1696032 - DNA, 15 bp, Homo sapiens
aagtaagtttattca

SEQ ID NO: 1696033 - DNA, 15 bp, Homo sapiens
agtaagtttattcaa

SEQ ID NO: 1696034 - DNA, 15 bp, Homo sapiens
gtaagtttattcaaa

SEQ ID NO: 1696035 - DNA, 15 bp, Homo sapiens
taagtttattcaaat

SEQ ID NO: 1696036 - DNA, 15 bp, Homo sapiens
aagtttattcaaatg

SEQ ID NO: 1696037 - DNA, 15 bp, Homo sapiens
agtttattcaaatgg

SEQ ID NO: 1696038 - DNA, 15 bp, Homo sapiens
gtttattcaaatggt

SEQ ID NO: 1696039 - DNA, 15 bp, Homo sapiens
tttattcaaatggta

SEQ ID NO: 1696040 - DNA, 15 bp, Homo sapiens
ttattcaaatggtat

SEQ ID NO: 1696041 - DNA, 15 bp, Homo sapiens
tattcaaatggtatg

SEQ ID NO: 1696042 - DNA, 15 bp, Homo sapiens
attcaaatggtatgt

SEQ ID NO: 1696043 - DNA, 15 bp, Homo sapiens
ttcaaatggtatgtt

SEQ ID NO: 1696044 - DNA, 15 bp, Homo sapiens
tcaaatggtatgttc

SEQ ID NO: 1696045 - DNA, 15 bp, Homo sapiens
caaatggtatgttca

SEQ ID NO: 1696046 - DNA, 15 bp, Homo sapiens
aaatggtatgttcat

SEQ ID NO: 1696047 - DNA, 15 bp, Homo sapiens
aatggtatgttcata

SEQ ID NO: 1696048 - DNA, 15 bp, Homo sapiens
atggtatgttcatac

SEQ ID NO: 1696049 - DNA, 15 bp, Homo sapiens
tggtatgttcataca

SEQ ID NO: 1696050 - DNA, 15 bp, Homo sapiens
ggtatgttcatacac

SEQ ID NO: 1696051 - DNA, 15 bp, Homo sapiens
gtatgttcatacacc

SEQ ID NO: 1696052 - DNA, 15 bp, Homo sapiens
tatgttcatacacca

SEQ ID NO: 1696053 - DNA, 15 bp, Homo sapiens
atgttcatacaccat

SEQ ID NO: 1696054 - DNA, 15 bp, Homo sapiens
tgttcatacaccata

SEQ ID NO: 1696055 - DNA, 15 bp, Homo sapiens
gttcatacaccatac

SEQ ID NO: 1696056 - DNA, 15 bp, Homo sapiens
ttcatacaccataca

SEQ ID NO: 1696057 - DNA, 15 bp, Homo sapiens
tcatacaccatacac

SEQ ID NO: 1696058 - DNA, 15 bp, Homo sapiens
catacaccatacaca

SEQ ID NO: 1696059 - DNA, 15 bp, Homo sapiens
atacaccatacacat

SEQ ID NO: 1696060 - DNA, 15 bp, Homo sapiens
tacaccatacacatg

SEQ ID NO: 1696061 - DNA, 15 bp, Homo sapiens
acaccatacacatga

SEQ ID NO: 1696062 - DNA, 15 bp, Homo sapiens
caccatacacatgac

SEQ ID NO: 1696063 - DNA, 15 bp, Homo sapiens
accatacacatgacg

SEQ ID NO: 1696064 - DNA, 15 bp, Homo sapiens
ccatacacatgacgg

SEQ ID NO: 1696065 - DNA, 15 bp, Homo sapiens
catacacatgacgga

SEQ ID NO: 1696066 - DNA, 15 bp, Homo sapiens
atacacatgacggac

SEQ ID NO: 1696067 - DNA, 15 bp, Homo sapiens
tacacatgacggacg

SEQ ID NO: 1696068 - DNA, 15 bp, Homo sapiens
acacatgacggacgg

SEQ ID NO: 1696069 - DNA, 15 bp, Homo sapiens
cacatgacggacggc

SEQ ID NO: 1696070 - DNA, 15 bp, Homo sapiens
acatgacggacggct

SEQ ID NO: 1696071 - DNA, 15 bp, Homo sapiens
catgacggacggctt

SEQ ID NO: 1696072 - DNA, 15 bp, Homo sapiens
atgacggacggctta

SEQ ID NO: 1696073 - DNA, 15 bp, Homo sapiens
tgacggacggcttaa

SEQ ID NO: 1696074 - DNA, 15 bp, Homo sapiens
gacggacggcttaaa

SEQ ID NO: 1696075 - DNA, 15 bp, Homo sapiens
acggacggcttaaaa

SEQ ID NO: 1696076 - DNA, 15 bp, Homo sapiens
cggacggcttaaaat

SEQ ID NO: 1696077 - DNA, 15 bp, Homo sapiens
ggacggcttaaaatc

SEQ ID NO: 1696078 - DNA, 15 bp, Homo sapiens
gacggcttaaaatcc

SEQ ID NO: 1696079 - DNA, 15 bp, Homo sapiens
acggcttaaaatccg

SEQ ID NO: 1696080 - DNA, 15 bp, Homo sapiens
cggcttaaaatccgc

SEQ ID NO: 1696081 - DNA, 15 bp, Homo sapiens
ggcttaaaatccgca

SEQ ID NO: 1696082 - DNA, 15 bp, Homo sapiens
gcttaaaatccgcaa

SEQ ID NO: 1696083 - DNA, 15 bp, Homo sapiens
cttaaaatccgcaaa

SEQ ID NO: 1696084 - DNA, 15 bp, Homo sapiens
ttaaaatccgcaaat

SEQ ID NO: 1696085 - DNA, 15 bp, Homo sapiens
taaaatccgcaaatt

SEQ ID NO: 1696086 - DNA, 15 bp, Homo sapiens
aaaatccgcaaattt

SEQ ID NO: 1696087 - DNA, 15 bp, Homo sapiens
aaatccgcaaatttc

SEQ ID NO: 1696088 - DNA, 15 bp, Homo sapiens
aatccgcaaatttcc

SEQ ID NO: 1696089 - DNA, 15 bp, Homo sapiens
atccgcaaatttcct

SEQ ID NO: 1696090 - DNA, 15 bp, Homo sapiens
tccgcaaatttcctt

SEQ ID NO: 1696091 - DNA, 15 bp, Homo sapiens
ccgcaaatttcctta

SEQ ID NO: 1696092 - DNA, 15 bp, Homo sapiens
cgcaaatttccttac

SEQ ID NO: 1696093 - DNA, 15 bp, Homo sapiens
gcaaatttccttact

SEQ ID NO: 1696094 - DNA, 15 bp, Homo sapiens
caaatttccttactg

SEQ ID NO: 1696095 - DNA, 15 bp, Homo sapiens
aaatttccttactgt

SEQ ID NO: 1696096 - DNA, 15 bp, Homo sapiens
aatttccttactgtt

SEQ ID NO: 1696097 - DNA, 15 bp, Homo sapiens
atttccttactgtta

SEQ ID NO: 1696098 - DNA, 15 bp, Homo sapiens
tttccttactgttaa

SEQ ID NO: 1696099 - DNA, 15 bp, Homo sapiens
ttccttactgttaat

SEQ ID NO: 1696100 - DNA, 15 bp, Homo sapiens
tccttactgttaatc

SEQ ID NO: 1696101 - DNA, 15 bp, Homo sapiens
ccttactgttaatcc

SEQ ID NO: 1696102 - DNA, 15 bp, Homo sapiens
cttactgttaatcca

SEQ ID NO: 1696103 - DNA, 15 bp, Homo sapiens
ttactgttaatccat

SEQ ID NO: 1696104 - DNA, 15 bp, Homo sapiens
tactgttaatccatg

SEQ ID NO: 1696105 - DNA, 15 bp, Homo sapiens
actgttaatccatga

SEQ ID NO: 1696106 - DNA, 15 bp, Homo sapiens
ctgttaatccatgat

SEQ ID NO: 1696107 - DNA, 15 bp, Homo sapiens
tgttaatccatgatc

SEQ ID NO: 1696108 - DNA, 15 bp, Homo sapiens
gttaatccatgatca

SEQ ID NO: 1696109 - DNA, 15 bp, Homo sapiens
ttaatccatgatcag

SEQ ID NO: 1696110 - DNA, 15 bp, Homo sapiens
taatccatgatcagt

SEQ ID NO: 1696111 - DNA, 15 bp, Homo sapiens
aatccatgatcagta

SEQ ID NO: 1696112 - DNA, 15 bp, Homo sapiens
atccatgatcagtaa

SEQ ID NO: 1696113 - DNA, 15 bp, Homo sapiens
tccatgatcagtaaa

SEQ ID NO: 1696114 - DNA, 15 bp, Homo sapiens
ccatgatcagtaaat

SEQ ID NO: 1696115 - DNA, 15 bp, Homo sapiens
catgatcagtaaatt

SEQ ID NO: 1696116 - DNA, 15 bp, Homo sapiens
atgatcagtaaatta

SEQ ID NO: 1696117 - DNA, 15 bp, Homo sapiens
tgatcagtaaattag

SEQ ID NO: 1696118 - DNA, 15 bp, Homo sapiens
gatcagtaaattagt

SEQ ID NO: 1696119 - DNA, 15 bp, Homo sapiens
atcagtaaattagta

SEQ ID NO: 1696120 - DNA, 15 bp, Homo sapiens
tcagtaaattagtac

SEQ ID NO: 1696121 - DNA, 15 bp, Homo sapiens
cagtaaattagtact

SEQ ID NO: 1696122 - DNA, 15 bp, Homo sapiens
agtaaattagtacta

SEQ ID NO: 1696123 - DNA, 15 bp, Homo sapiens
gtaaattagtactat

SEQ ID NO: 1696124 - DNA, 15 bp, Homo sapiens
taaattagtactata

SEQ ID NO: 1696125 - DNA, 15 bp, Homo sapiens
aaattagtactatat

SEQ ID NO: 1696126 - DNA, 15 bp, Homo sapiens
aattagtactatatt

SEQ ID NO: 1696127 - DNA, 15 bp, Homo sapiens
attagtactatattt

SEQ ID NO: 1696128 - DNA, 15 bp, Homo sapiens
ttagtactatatttc

SEQ ID NO: 1696129 - DNA, 15 bp, Homo sapiens
tagtactatatttct

SEQ ID NO: 1696130 - DNA, 15 bp, Homo sapiens
agtactatatttcta

SEQ ID NO: 1696131 - DNA, 15 bp, Homo sapiens
gtactatatttctaa

SEQ ID NO: 1696132 - DNA, 15 bp, Homo sapiens
tactatatttctaac

SEQ ID NO: 1696133 - DNA, 15 bp, Homo sapiens
actatatttctaact

SEQ ID NO: 1696134 - DNA, 15 bp, Homo sapiens
ctatatttctaactt

SEQ ID NO: 1696135 - DNA, 15 bp, Homo sapiens
tatatttctaactta

SEQ ID NO: 1696136 - DNA, 15 bp, Homo sapiens
atatttctaacttaa

SEQ ID NO: 1696137 - DNA, 15 bp, Homo sapiens
tatttctaacttaat

SEQ ID NO: 1696138 - DNA, 15 bp, Homo sapiens
atttctaacttaatg

SEQ ID NO: 1696139 - DNA, 15 bp, Homo sapiens
tttctaacttaatgg

SEQ ID NO: 1696140 - DNA, 15 bp, Homo sapiens
ttctaacttaatgga

SEQ ID NO: 1696141 - DNA, 15 bp, Homo sapiens
tctaacttaatggat

SEQ ID NO: 1696142 - DNA, 15 bp, Homo sapiens
ctaacttaatggatt

SEQ ID NO: 1696143 - DNA, 15 bp, Homo sapiens
taacttaatggattt

SEQ ID NO: 1696144 - DNA, 15 bp, Homo sapiens
aacttaatggatttt

SEQ ID NO: 1696145 - DNA, 15 bp, Homo sapiens
acttaatggattttt

SEQ ID NO: 1696146 - DNA, 15 bp, Homo sapiens
cttaatggatttttt

SEQ ID NO: 1696147 - DNA, 15 bp, Homo sapiens
ttaatggattttttt

SEQ ID NO: 1696148 - DNA, 15 bp, Homo sapiens
taatggatttttttt

SEQ ID NO: 1696149 - DNA, 15 bp, Homo sapiens
aatggattttttttc

SEQ ID NO: 1696150 - DNA, 15 bp, Homo sapiens
atggattttttttct

SEQ ID NO: 1696151 - DNA, 15 bp, Homo sapiens
gattttttttcttta

SEQ ID NO: 1696152 - DNA, 15 bp, Homo sapiens
attttttttctttaa

SEQ ID NO: 1696153 - DNA, 15 bp, Homo sapiens
ttttttttctttaac

SEQ ID NO: 1696154 - DNA, 15 bp, Homo sapiens
tttttttctttaact

SEQ ID NO: 1696155 - DNA, 15 bp, Homo sapiens
ttttttctttaacta

SEQ ID NO: 1696156 - DNA, 15 bp, Homo sapiens
tttttctttaactaa

SEQ ID NO: 1696157 - DNA, 15 bp, Homo sapiens
ttttctttaactaat

SEQ ID NO: 1696158 - DNA, 15 bp, Homo sapiens
tttctttaactaatt

SEQ ID NO: 1696159 - DNA, 15 bp, Homo sapiens
ttctttaactaattg

SEQ ID NO: 1696160 - DNA, 15 bp, Homo sapiens
tctttaactaattgg

SEQ ID NO: 1696161 - DNA, 15 bp, Homo sapiens
ctttaactaattggc

SEQ ID NO: 1696162 - DNA, 15 bp, Homo sapiens
tttaactaattggca

SEQ ID NO: 1696163 - DNA, 15 bp, Homo sapiens
ttaactaattggcat

SEQ ID NO: 1696164 - DNA, 15 bp, Homo sapiens
taactaattggcata

SEQ ID NO: 1696165 - DNA, 15 bp, Homo sapiens
aactaattggcatag

SEQ ID NO: 1696166 - DNA, 15 bp, Homo sapiens
actaattggcatagt

SEQ ID NO: 1696167 - DNA, 15 bp, Homo sapiens
ctaattggcatagtc

SEQ ID NO: 1696168 - DNA, 15 bp, Homo sapiens
taattggcatagtct

SEQ ID NO: 1696169 - DNA, 15 bp, Homo sapiens
aattggcatagtctc

SEQ ID NO: 1696170 - DNA, 15 bp, Homo sapiens
attggcatagtctcc

SEQ ID NO: 1696171 - DNA, 15 bp, Homo sapiens
ttggcatagtctcct

SEQ ID NO: 1696172 - DNA, 15 bp, Homo sapiens
tggcatagtctcctt

SEQ ID NO: 1696173 - DNA, 15 bp, Homo sapiens
ggcatagtctcctta

SEQ ID NO: 1696174 - DNA, 15 bp, Homo sapiens
gcatagtctccttat

SEQ ID NO: 1696175 - DNA, 15 bp, Homo sapiens
catagtctccttatc

SEQ ID NO: 1696176 - DNA, 15 bp, Homo sapiens
atagtctccttatcc

SEQ ID NO: 1696177 - DNA, 15 bp, Homo sapiens
tagtctccttatcct

SEQ ID NO: 1696178 - DNA, 15 bp, Homo sapiens
agtctccttatccta

SEQ ID NO: 1696179 - DNA, 15 bp, Homo sapiens
gtctccttatcctag

SEQ ID NO: 1696180 - DNA, 15 bp, Homo sapiens
tctccttatcctagt

SEQ ID NO: 1696181 - DNA, 15 bp, Homo sapiens
ctccttatcctagta

SEQ ID NO: 1696182 - DNA, 15 bp, Homo sapiens
tccttatcctagtat

SEQ ID NO: 1696183 - DNA, 15 bp, Homo sapiens
ccttatcctagtatg

SEQ ID NO: 1696184 - DNA, 15 bp, Homo sapiens
cttatcctagtatgt

SEQ ID NO: 1696185 - DNA, 15 bp, Homo sapiens
ttatcctagtatgtc

SEQ ID NO: 1696186 - DNA, 15 bp, Homo sapiens
tatcctagtatgtca

SEQ ID NO: 1696187 - DNA, 15 bp, Homo sapiens
atcctagtatgtcag

SEQ ID NO: 1696188 - DNA, 15 bp, Homo sapiens
tcctagtatgtcagg

SEQ ID NO: 1696189 - DNA, 15 bp, Homo sapiens
cctagtatgtcagga

SEQ ID NO: 1696190 - DNA, 15 bp, Homo sapiens
ctagtatgtcaggag

SEQ ID NO: 1696191 - DNA, 15 bp, Homo sapiens
tagtatgtcaggagt

SEQ ID NO: 1696192 - DNA, 15 bp, Homo sapiens
agtatgtcaggagta

SEQ ID NO: 1696193 - DNA, 15 bp, Homo sapiens
gtatgtcaggagtat

SEQ ID NO: 1696194 - DNA, 15 bp, Homo sapiens
tatgtcaggagtatt

SEQ ID NO: 1696195 - DNA, 15 bp, Homo sapiens
atgtcaggagtattt

SEQ ID NO: 1696196 - DNA, 15 bp, Homo sapiens
tgtcaggagtatttt

SEQ ID NO: 1696197 - DNA, 15 bp, Homo sapiens
gtcaggagtatttta

SEQ ID NO: 1696198 - DNA, 15 bp, Homo sapiens
tcaggagtattttaa

SEQ ID NO: 1696199 - DNA, 15 bp, Homo sapiens
caggagtattttaaa

SEQ ID NO: 1696200 - DNA, 15 bp, Homo sapiens
aggagtattttaaat

SEQ ID NO: 1696201 - DNA, 15 bp, Homo sapiens
ggagtattttaaatc

SEQ ID NO: 1696202 - DNA, 15 bp, Homo sapiens
gagtattttaaatca

SEQ ID NO: 1696203 - DNA, 15 bp, Homo sapiens
agtattttaaatcag

SEQ ID NO: 1696204 - DNA, 15 bp, Homo sapiens
gtattttaaatcaga

SEQ ID NO: 1696205 - DNA, 15 bp, Homo sapiens
tattttaaatcagat

SEQ ID NO: 1696206 - DNA, 15 bp, Homo sapiens
attttaaatcagatt

SEQ ID NO: 1696207 - DNA, 15 bp, Homo sapiens
ttttaaatcagattt

SEQ ID NO: 1696208 - DNA, 15 bp, Homo sapiens
tttaaatcagatttt

SEQ ID NO: 1696209 - DNA, 15 bp, Homo sapiens
ttaaatcagattttg

SEQ ID NO: 1696210 - DNA, 15 bp, Homo sapiens
taaatcagattttgg

SEQ ID NO: 1696211 - DNA, 15 bp, Homo sapiens
aaatcagattttggg

SEQ ID NO: 1696212 - DNA, 15 bp, Homo sapiens
aatcagattttggga

SEQ ID NO: 1696213 - DNA, 15 bp, Homo sapiens
atcagattttgggac

SEQ ID NO: 1696214 - DNA, 15 bp, Homo sapiens
tcagattttgggaca

SEQ ID NO: 1696215 - DNA, 15 bp, Homo sapiens
cagattttgggacat

SEQ ID NO: 1696216 - DNA, 15 bp, Homo sapiens
agattttgggacata

SEQ ID NO: 1696217 - DNA, 15 bp, Homo sapiens
gattttgggacataa

SEQ ID NO: 1696218 - DNA, 15 bp, Homo sapiens
attttgggacataat

SEQ ID NO: 1696219 - DNA, 15 bp, Homo sapiens
ttttgggacataatt

SEQ ID NO: 1696220 - DNA, 15 bp, Homo sapiens
tttgggacataattt

SEQ ID NO: 1696221 - DNA, 15 bp, Homo sapiens
ttgggacataatttt

SEQ ID NO: 1696222 - DNA, 15 bp, Homo sapiens
tgggacataatttta

SEQ ID NO: 1696223 - DNA, 15 bp, Homo sapiens
gggacataattttaa

SEQ ID NO: 1696224 - DNA, 15 bp, Homo sapiens
ggacataattttaaa

SEQ ID NO: 1696225 - DNA, 15 bp, Homo sapiens
gacataattttaaaa

SEQ ID NO: 1696226 - DNA, 15 bp, Homo sapiens
acataattttaaaag

SEQ ID NO: 1696227 - DNA, 15 bp, Homo sapiens
cataattttaaaagt

SEQ ID NO: 1696228 - DNA, 15 bp, Homo sapiens
ataattttaaaagtt

SEQ ID NO: 1696229 - DNA, 15 bp, Homo sapiens
taattttaaaagtta

SEQ ID NO: 1696230 - DNA, 15 bp, Homo sapiens
aattttaaaagttaa

SEQ ID NO: 1696231 - DNA, 15 bp, Homo sapiens
attttaaaagttaac

SEQ ID NO: 1696232 - DNA, 15 bp, Homo sapiens
ttttaaaagttaaca

SEQ ID NO: 1696233 - DNA, 15 bp, Homo sapiens
tttaaaagttaacat

SEQ ID NO: 1696234 - DNA, 15 bp, Homo sapiens
ttaaaagttaacatg

SEQ ID NO: 1696235 - DNA, 15 bp, Homo sapiens
taaaagttaacatgt

SEQ ID NO: 1696236 - DNA, 15 bp, Homo sapiens
aaaagttaacatgtc

SEQ ID NO: 1696237 - DNA, 15 bp, Homo sapiens
aaagttaacatgtct

SEQ ID NO: 1696238 - DNA, 15 bp, Homo sapiens
aagttaacatgtctt

SEQ ID NO: 1696239 - DNA, 15 bp, Homo sapiens
agttaacatgtctta

SEQ ID NO: 1696240 - DNA, 15 bp, Homo sapiens
gttaacatgtcttat

SEQ ID NO: 1696241 - DNA, 15 bp, Homo sapiens
ttaacatgtcttatt

SEQ ID NO: 1696242 - DNA, 15 bp, Homo sapiens
taacatgtcttattt

SEQ ID NO: 1696243 - DNA, 15 bp, Homo sapiens
aacatgtcttattta

SEQ ID NO: 1696244 - DNA, 15 bp, Homo sapiens
acatgtcttatttac

SEQ ID NO: 1696245 - DNA, 15 bp, Homo sapiens
catgtcttatttact

SEQ ID NO: 1696246 - DNA, 15 bp, Homo sapiens
atgtcttatttactt

SEQ ID NO: 1696247 - DNA, 15 bp, Homo sapiens
tgtcttatttacttc

SEQ ID NO: 1696248 - DNA, 15 bp, Homo sapiens
gtcttatttacttca

SEQ ID NO: 1696249 - DNA, 15 bp, Homo sapiens
tcttatttacttcac

SEQ ID NO: 1696250 - DNA, 15 bp, Homo sapiens
cttatttacttcacc

SEQ ID NO: 1696251 - DNA, 15 bp, Homo sapiens
tatttacttcacctg

SEQ ID NO: 1696252 - DNA, 15 bp, Homo sapiens
atttacttcacctgt

SEQ ID NO: 1696253 - DNA, 15 bp, Homo sapiens
tttacttcacctgtg

SEQ ID NO: 1696254 - DNA, 15 bp, Homo sapiens
ttacttcacctgtgt

SEQ ID NO: 1696255 - DNA, 15 bp, Homo sapiens
tacttcacctgtgtt

SEQ ID NO: 1696256 - DNA, 15 bp, Homo sapiens
acttcacctgtgtta

SEQ ID NO: 1696257 - DNA, 15 bp, Homo sapiens
cttcacctgtgttaa

SEQ ID NO: 1696258 - DNA, 15 bp, Homo sapiens
ttcacctgtgttaat

SEQ ID NO: 1696259 - DNA, 15 bp, Homo sapiens
tcacctgtgttaatg

SEQ ID NO: 1696260 - DNA, 15 bp, Homo sapiens
cacctgtgttaatgt

SEQ ID NO: 1696261 - DNA, 15 bp, Homo sapiens
acctgtgttaatgtg

SEQ ID NO: 1696262 - DNA, 15 bp, Homo sapiens
cctgtgttaatgtgc

SEQ ID NO: 1696263 - DNA, 15 bp, Homo sapiens
ctgtgttaatgtgca

SEQ ID NO: 1696264 - DNA, 15 bp, Homo sapiens
tgtgttaatgtgcat

SEQ ID NO: 1696265 - DNA, 15 bp, Homo sapiens
gtgttaatgtgcatc

SEQ ID NO: 1696266 - DNA, 15 bp, Homo sapiens
tgttaatgtgcatca

SEQ ID NO: 1696267 - DNA, 15 bp, Homo sapiens
gttaatgtgcatcat

SEQ ID NO: 1696268 - DNA, 15 bp, Homo sapiens
ttaatgtgcatcatt

SEQ ID NO: 1696269 - DNA, 15 bp, Homo sapiens
taatgtgcatcattt

SEQ ID NO: 1696270 - DNA, 15 bp, Homo sapiens
aatgtgcatcatttt

SEQ ID NO: 1696271 - DNA, 15 bp, Homo sapiens
atgtgcatcatttta

SEQ ID NO: 1696272 - DNA, 15 bp, Homo sapiens
tgtgcatcattttac

SEQ ID NO: 1696273 - DNA, 15 bp, Homo sapiens
gtgcatcattttact

SEQ ID NO: 1696274 - DNA, 15 bp, Homo sapiens
tgcatcattttactt

SEQ ID NO: 1696275 - DNA, 15 bp, Homo sapiens
gcatcattttacttc

SEQ ID NO: 1696276 - DNA, 15 bp, Homo sapiens
catcattttacttct

SEQ ID NO: 1696277 - DNA, 15 bp, Homo sapiens
atcattttacttctt

SEQ ID NO: 1696278 - DNA, 15 bp, Homo sapiens
tcattttacttcttg

SEQ ID NO: 1696279 - DNA, 15 bp, Homo sapiens
cattttacttcttgg

SEQ ID NO: 1696280 - DNA, 15 bp, Homo sapiens
attttacttcttggt

SEQ ID NO: 1696281 - DNA, 15 bp, Homo sapiens
ttttacttcttggtc

SEQ ID NO: 1696282 - DNA, 15 bp, Homo sapiens
tttacttcttggtca

SEQ ID NO: 1696283 - DNA, 15 bp, Homo sapiens
ttacttcttggtcat

SEQ ID NO: 1696284 - DNA, 15 bp, Homo sapiens
tacttcttggtcatg

SEQ ID NO: 1696285 - DNA, 15 bp, Homo sapiens
acttcttggtcatgg

SEQ ID NO: 1696286 - DNA, 15 bp, Homo sapiens
cttcttggtcatggc

SEQ ID NO: 1696287 - DNA, 15 bp, Homo sapiens
ttcttggtcatggct

SEQ ID NO: 1696288 - DNA, 15 bp, Homo sapiens
tcttggtcatggctc

SEQ ID NO: 1696289 - DNA, 15 bp, Homo sapiens
cttggtcatggctct

SEQ ID NO: 1696290 - DNA, 15 bp, Homo sapiens
ttggtcatggctctc

SEQ ID NO: 1696291 - DNA, 15 bp, Homo sapiens
tggtcatggctctca

SEQ ID NO: 1696292 - DNA, 15 bp, Homo sapiens
ggtcatggctctcag

SEQ ID NO: 1696293 - DNA, 15 bp, Homo sapiens
gtcatggctctcagt

SEQ ID NO: 1696294 - DNA, 15 bp, Homo sapiens
tcatggctctcagtt

SEQ ID NO: 1696295 - DNA, 15 bp, Homo sapiens
catggctctcagtta

SEQ ID NO: 1696296 - DNA, 15 bp, Homo sapiens
atggctctcagttaa

SEQ ID NO: 1696297 - DNA, 15 bp, Homo sapiens
tggctctcagttaaa

SEQ ID NO: 1696298 - DNA, 15 bp, Homo sapiens
ggctctcagttaaat

SEQ ID NO: 1696299 - DNA, 15 bp, Homo sapiens
gctctcagttaaata

SEQ ID NO: 1696300 - DNA, 15 bp, Homo sapiens
ctctcagttaaataa

SEQ ID NO: 1696301 - DNA, 15 bp, Homo sapiens
tctcagttaaataat

SEQ ID NO: 1696302 - DNA, 15 bp, Homo sapiens
ctcagttaaataatt

SEQ ID NO: 1696303 - DNA, 15 bp, Homo sapiens
tcagttaaataatta

SEQ ID NO: 1696304 - DNA, 15 bp, Homo sapiens
cagttaaataattaa

SEQ ID NO: 1696305 - DNA, 15 bp, Homo sapiens
agttaaataattaag

SEQ ID NO: 1696306 - DNA, 15 bp, Homo sapiens
gttaaataattaagt

SEQ ID NO: 1696307 - DNA, 15 bp, Homo sapiens
ttaaataattaagta

SEQ ID NO: 1696308 - DNA, 15 bp, Homo sapiens
taaataattaagtaa

SEQ ID NO: 1696309 - DNA, 15 bp, Homo sapiens
aaataattaagtaat

SEQ ID NO: 1696310 - DNA, 15 bp, Homo sapiens
aataattaagtaatg

SEQ ID NO: 1696311 - DNA, 15 bp, Homo sapiens
ataattaagtaatgt

SEQ ID NO: 1696312 - DNA, 15 bp, Homo sapiens
taattaagtaatgtg

SEQ ID NO: 1696313 - DNA, 15 bp, Homo sapiens
aattaagtaatgtgc

SEQ ID NO: 1696314 - DNA, 15 bp, Homo sapiens
attaagtaatgtgct

SEQ ID NO: 1696315 - DNA, 15 bp, Homo sapiens
ttaagtaatgtgcta

SEQ ID NO: 1696316 - DNA, 15 bp, Homo sapiens
taagtaatgtgctaa

SEQ ID NO: 1696317 - DNA, 15 bp, Homo sapiens
aagtaatgtgctaaa

SEQ ID NO: 1696318 - DNA, 15 bp, Homo sapiens
agtaatgtgctaaat

SEQ ID NO: 1696319 - DNA, 15 bp, Homo sapiens
gtaatgtgctaaatg

SEQ ID NO: 1696320 - DNA, 15 bp, Homo sapiens
taatgtgctaaatgc

SEQ ID NO: 1696321 - DNA, 15 bp, Homo sapiens
aatgtgctaaatgcc

SEQ ID NO: 1696322 - DNA, 15 bp, Homo sapiens
atgtgctaaatgcca

SEQ ID NO: 1696323 - DNA, 15 bp, Homo sapiens
tgtgctaaatgccaa

SEQ ID NO: 1696324 - DNA, 15 bp, Homo sapiens
gtgctaaatgccaaa

SEQ ID NO: 1696325 - DNA, 15 bp, Homo sapiens
tgctaaatgccaaaa

SEQ ID NO: 1696326 - DNA, 15 bp, Homo sapiens
gctaaatgccaaaac

SEQ ID NO: 1696327 - DNA, 15 bp, Homo sapiens
ctaaatgccaaaacc

SEQ ID NO: 1696328 - DNA, 15 bp, Homo sapiens
taaatgccaaaacct

SEQ ID NO: 1696329 - DNA, 15 bp, Homo sapiens
aaatgccaaaacctc

SEQ ID NO: 1696330 - DNA, 15 bp, Homo sapiens
aatgccaaaacctca

SEQ ID NO: 1696331 - DNA, 15 bp, Homo sapiens
atgccaaaacctcat

SEQ ID NO: 1696332 - DNA, 15 bp, Homo sapiens
tgccaaaacctcatc

SEQ ID NO: 1696333 - DNA, 15 bp, Homo sapiens
gccaaaacctcatcc

SEQ ID NO: 1696334 - DNA, 15 bp, Homo sapiens
ccaaaacctcatcct

SEQ ID NO: 1696335 - DNA, 15 bp, Homo sapiens
caaaacctcatcctt

SEQ ID NO: 1696336 - DNA, 15 bp, Homo sapiens
aaaacctcatccttg

SEQ ID NO: 1696337 - DNA, 15 bp, Homo sapiens
aaacctcatccttgc

SEQ ID NO: 1696338 - DNA, 15 bp, Homo sapiens
aacctcatccttgcc

SEQ ID NO: 1696339 - DNA, 15 bp, Homo sapiens
acctcatccttgcca

SEQ ID NO: 1696340 - DNA, 15 bp, Homo sapiens
cctcatccttgccaa

SEQ ID NO: 1696341 - DNA, 15 bp, Homo sapiens
ctcatccttgccaat

SEQ ID NO: 1696342 - DNA, 15 bp, Homo sapiens
tcatccttgccaatg

SEQ ID NO: 1696343 - DNA, 15 bp, Homo sapiens
catccttgccaatgt

SEQ ID NO: 1696344 - DNA, 15 bp, Homo sapiens
atccttgccaatgtt

SEQ ID NO: 1696345 - DNA, 15 bp, Homo sapiens
tccttgccaatgttt

SEQ ID NO: 1696346 - DNA, 15 bp, Homo sapiens
ccttgccaatgtttc

SEQ ID NO: 1696347 - DNA, 15 bp, Homo sapiens
cttgccaatgtttcc

SEQ ID NO: 1696348 - DNA, 15 bp, Homo sapiens
ttgccaatgtttcct

SEQ ID NO: 1696349 - DNA, 15 bp, Homo sapiens
tgccaatgtttcctt

SEQ ID NO: 1696350 - DNA, 15 bp, Homo sapiens
gccaatgtttccttt

SEQ ID NO: 1696351 - DNA, 15 bp, Homo sapiens
ccaatgtttcctttt

SEQ ID NO: 1696352 - DNA, 15 bp, Homo sapiens
caatgtttcctttta

SEQ ID NO: 1696353 - DNA, 15 bp, Homo sapiens
aatgtttccttttac

SEQ ID NO: 1696354 - DNA, 15 bp, Homo sapiens
atgtttccttttact

SEQ ID NO: 1696355 - DNA, 15 bp, Homo sapiens
tgtttccttttactg

SEQ ID NO: 1696356 - DNA, 15 bp, Homo sapiens
gtttccttttactgg

SEQ ID NO: 1696357 - DNA, 15 bp, Homo sapiens
tttccttttactggt

SEQ ID NO: 1696358 - DNA, 15 bp, Homo sapiens
ttccttttactggtt

SEQ ID NO: 1696359 - DNA, 15 bp, Homo sapiens
tccttttactggttt

SEQ ID NO: 1696360 - DNA, 15 bp, Homo sapiens
ccttttactggtttt

SEQ ID NO: 1696361 - DNA, 15 bp, Homo sapiens
cttttactggttttt

SEQ ID NO: 1696362 - DNA, 15 bp, Homo sapiens
ttttactggtttttg

SEQ ID NO: 1696363 - DNA, 15 bp, Homo sapiens
tttactggtttttga

SEQ ID NO: 1696364 - DNA, 15 bp, Homo sapiens
ttactggtttttgat

SEQ ID NO: 1696365 - DNA, 15 bp, Homo sapiens
tactggtttttgatg

SEQ ID NO: 1696366 - DNA, 15 bp, Homo sapiens
actggtttttgatgg

SEQ ID NO: 1696367 - DNA, 15 bp, Homo sapiens
ctggtttttgatgga

SEQ ID NO: 1696368 - DNA, 15 bp, Homo sapiens
tggtttttgatggat

SEQ ID NO: 1696369 - DNA, 15 bp, Homo sapiens
ggtttttgatggatt

SEQ ID NO: 1696370 - DNA, 15 bp, Homo sapiens
gtttttgatggattt

SEQ ID NO: 1696371 - DNA, 15 bp, Homo sapiens
tttttgatggatttc

SEQ ID NO: 1696372 - DNA, 15 bp, Homo sapiens
ttttgatggatttca

SEQ ID NO: 1696373 - DNA, 15 bp, Homo sapiens
tttgatggatttcag

SEQ ID NO: 1696374 - DNA, 15 bp, Homo sapiens
ttgatggatttcagt

SEQ ID NO: 1696375 - DNA, 15 bp, Homo sapiens
tgatggatttcagtg

SEQ ID NO: 1696376 - DNA, 15 bp, Homo sapiens
gatggatttcagtgg

SEQ ID NO: 1696377 - DNA, 15 bp, Homo sapiens
atggatttcagtgga

SEQ ID NO: 1696378 - DNA, 15 bp, Homo sapiens
tggatttcagtggac

SEQ ID NO: 1696379 - DNA, 15 bp, Homo sapiens
ggatttcagtggacg

SEQ ID NO: 1696380 - DNA, 15 bp, Homo sapiens
gatttcagtggacgt

SEQ ID NO: 1696381 - DNA, 15 bp, Homo sapiens
atttcagtggacgtt

SEQ ID NO: 1696382 - DNA, 15 bp, Homo sapiens
tttcagtggacgttg

SEQ ID NO: 1696383 - DNA, 15 bp, Homo sapiens
ttcagtggacgttgc

SEQ ID NO: 1696384 - DNA, 15 bp, Homo sapiens
tcagtggacgttgct

SEQ ID NO: 1696385 - DNA, 15 bp, Homo sapiens
cagtggacgttgctt

SEQ ID NO: 1696386 - DNA, 15 bp, Homo sapiens
agtggacgttgcttt

SEQ ID NO: 1696387 - DNA, 15 bp, Homo sapiens
gtggacgttgctttg

SEQ ID NO: 1696388 - DNA, 15 bp, Homo sapiens
tggacgttgctttgg

SEQ ID NO: 1696389 - DNA, 15 bp, Homo sapiens
ggacgttgctttggg

SEQ ID NO: 1696390 - DNA, 15 bp, Homo sapiens
gacgttgctttgggg

SEQ ID NO: 1696391 - DNA, 15 bp, Homo sapiens
acgttgctttggggg

SEQ ID NO: 1696392 - DNA, 15 bp, Homo sapiens
cgttgctttgggggc

SEQ ID NO: 1696393 - DNA, 15 bp, Homo sapiens
gttgctttgggggca

SEQ ID NO: 1696394 - DNA, 15 bp, Homo sapiens
ttgctttgggggcat

SEQ ID NO: 1696395 - DNA, 15 bp, Homo sapiens
tgctttgggggcata

SEQ ID NO: 1696396 - DNA, 15 bp, Homo sapiens
gctttgggggcatac

SEQ ID NO: 1696397 - DNA, 15 bp, Homo sapiens
ctttgggggcataca

SEQ ID NO: 1696398 - DNA, 15 bp, Homo sapiens
tttgggggcatacat

SEQ ID NO: 1696399 - DNA, 15 bp, Homo sapiens
ttgggggcatacata

SEQ ID NO: 1696400 - DNA, 15 bp, Homo sapiens
tgggggcatacataa

SEQ ID NO: 1696401 - DNA, 15 bp, Homo sapiens
gggggcatacataaa

SEQ ID NO: 1696402 - DNA, 15 bp, Homo sapiens
ggggcatacataaac

SEQ ID NO: 1696403 - DNA, 15 bp, Homo sapiens
gggcatacataaacg

SEQ ID NO: 1696404 - DNA, 15 bp, Homo sapiens
ggcatacataaacgc

SEQ ID NO: 1696405 - DNA, 15 bp, Homo sapiens
gcatacataaacgca

SEQ ID NO: 1696406 - DNA, 15 bp, Homo sapiens
catacataaacgcac

SEQ ID NO: 1696407 - DNA, 15 bp, Homo sapiens
atacataaacgcaca

SEQ ID NO: 1696408 - DNA, 15 bp, Homo sapiens
tacataaacgcacac

SEQ ID NO: 1696409 - DNA, 15 bp, Homo sapiens
acataaacgcacaca

SEQ ID NO: 1696410 - DNA, 15 bp, Homo sapiens
cataaacgcacacac

SEQ ID NO: 1696411 - DNA, 15 bp, Homo sapiens
ataaacgcacacaca

SEQ ID NO: 1696412 - DNA, 15 bp, Homo sapiens
taaacgcacacacag

SEQ ID NO: 1696413 - DNA, 15 bp, Homo sapiens
gcacacacagacacc

SEQ ID NO: 1696414 - DNA, 15 bp, Homo sapiens
cacacacagacaccg

SEQ ID NO: 1696415 - DNA, 15 bp, Homo sapiens
acacacagacaccga

SEQ ID NO: 1696416 - DNA, 15 bp, Homo sapiens
cacacagacaccgag

SEQ ID NO: 1696417 - DNA, 15 bp, Homo sapiens
acacagacaccgagt

SEQ ID NO: 1696418 - DNA, 15 bp, Homo sapiens
cacagacaccgagta

SEQ ID NO: 1696419 - DNA, 15 bp, Homo sapiens
acagacaccgagtat

SEQ ID NO: 1696420 - DNA, 15 bp, Homo sapiens
cagacaccgagtatc

SEQ ID NO: 1696421 - DNA, 15 bp, Homo sapiens
agacaccgagtatca

SEQ ID NO: 1696422 - DNA, 15 bp, Homo sapiens
gacaccgagtatcaa

SEQ ID NO: 1696423 - DNA, 15 bp, Homo sapiens
acaccgagtatcaac

SEQ ID NO: 1696424 - DNA, 15 bp, Homo sapiens
caccgagtatcaaca

SEQ ID NO: 1696425 - DNA, 15 bp, Homo sapiens
accgagtatcaacac

SEQ ID NO: 1696426 - DNA, 15 bp, Homo sapiens
ccgagtatcaacaca

SEQ ID NO: 1696427 - DNA, 15 bp, Homo sapiens
cgagtatcaacacaa

SEQ ID NO: 1696428 - DNA, 15 bp, Homo sapiens
gagtatcaacacaaa

SEQ ID NO: 1696429 - DNA, 15 bp, Homo sapiens
agtatcaacacaaag

SEQ ID NO: 1696430 - DNA, 15 bp, Homo sapiens
gtatcaacacaaagc

SEQ ID NO: 1696431 - DNA, 15 bp, Homo sapiens
tatcaacacaaagca

SEQ ID NO: 1696432 - DNA, 15 bp, Homo sapiens
atcaacacaaagcat

SEQ ID NO: 1696433 - DNA, 15 bp, Homo sapiens
tcaacacaaagcatc

SEQ ID NO: 1696434 - DNA, 15 bp, Homo sapiens
caacacaaagcatct

SEQ ID NO: 1696435 - DNA, 15 bp, Homo sapiens
aacacaaagcatctg

SEQ ID NO: 1696436 - DNA, 15 bp, Homo sapiens
acacaaagcatctgc

SEQ ID NO: 1696437 - DNA, 15 bp, Homo sapiens
cacaaagcatctgca

SEQ ID NO: 1696438 - DNA, 15 bp, Homo sapiens
acaaagcatctgcac

SEQ ID NO: 1696439 - DNA, 15 bp, Homo sapiens
caaagcatctgcacc

SEQ ID NO: 1696440 - DNA, 15 bp, Homo sapiens
aaagcatctgcacct

SEQ ID NO: 1696441 - DNA, 15 bp, Homo sapiens
aagcatctgcacctg

SEQ ID NO: 1696442 - DNA, 15 bp, Homo sapiens
agcatctgcacctgt

SEQ ID NO: 1696443 - DNA, 15 bp, Homo sapiens
gcatctgcacctgta

SEQ ID NO: 1696444 - DNA, 15 bp, Homo sapiens
catctgcacctgtag

SEQ ID NO: 1696445 - DNA, 15 bp, Homo sapiens
atctgcacctgtagc

SEQ ID NO: 1696446 - DNA, 15 bp, Homo sapiens
tctgcacctgtagcc

SEQ ID NO: 1696447 - DNA, 15 bp, Homo sapiens
ctgcacctgtagcct

SEQ ID NO: 1696448 - DNA, 15 bp, Homo sapiens
tgcacctgtagccta

SEQ ID NO: 1696449 - DNA, 15 bp, Homo sapiens
gcacctgtagcctaa

SEQ ID NO: 1696450 - DNA, 15 bp, Homo sapiens
cacctgtagcctaat

SEQ ID NO: 1696451 - DNA, 15 bp, Homo sapiens
acctgtagcctaatt

SEQ ID NO: 1696452 - DNA, 15 bp, Homo sapiens
cctgtagcctaattg

SEQ ID NO: 1696453 - DNA, 15 bp, Homo sapiens
ctgtagcctaattgt

SEQ ID NO: 1696454 - DNA, 15 bp, Homo sapiens
tgtagcctaattgtt

SEQ ID NO: 1696455 - DNA, 15 bp, Homo sapiens
gtagcctaattgttt

SEQ ID NO: 1696456 - DNA, 15 bp, Homo sapiens
tagcctaattgtttg

SEQ ID NO: 1696457 - DNA, 15 bp, Homo sapiens
agcctaattgtttga

SEQ ID NO: 1696458 - DNA, 15 bp, Homo sapiens
gcctaattgtttgat

SEQ ID NO: 1696459 - DNA, 15 bp, Homo sapiens
cctaattgtttgatt

SEQ ID NO: 1696460 - DNA, 15 bp, Homo sapiens
ctaattgtttgattt

SEQ ID NO: 1696461 - DNA, 15 bp, Homo sapiens
taattgtttgatttg

SEQ ID NO: 1696462 - DNA, 15 bp, Homo sapiens
aattgtttgatttgg

SEQ ID NO: 1696463 - DNA, 15 bp, Homo sapiens
attgtttgatttggt

SEQ ID NO: 1696464 - DNA, 15 bp, Homo sapiens
ttgtttgatttggta

SEQ ID NO: 1696465 - DNA, 15 bp, Homo sapiens
tgtttgatttggtaa

SEQ ID NO: 1696466 - DNA, 15 bp, Homo sapiens
gtttgatttggtaaa

SEQ ID NO: 1696467 - DNA, 15 bp, Homo sapiens
tttgatttggtaaac

SEQ ID NO: 1696468 - DNA, 15 bp, Homo sapiens
ttgatttggtaaaca

SEQ ID NO: 1696469 - DNA, 15 bp, Homo sapiens
tgatttggtaaacag

SEQ ID NO: 1696470 - DNA, 15 bp, Homo sapiens
gatttggtaaacagt

SEQ ID NO: 1696471 - DNA, 15 bp, Homo sapiens
atttggtaaacagtg

SEQ ID NO: 1696472 - DNA, 15 bp, Homo sapiens
tttggtaaacagtga

SEQ ID NO: 1696473 - DNA, 15 bp, Homo sapiens
ttggtaaacagtgac

SEQ ID NO: 1696474 - DNA, 15 bp, Homo sapiens
tggtaaacagtgaca

SEQ ID NO: 1696475 - DNA, 15 bp, Homo sapiens
ggtaaacagtgacaa

SEQ ID NO: 1696476 - DNA, 15 bp, Homo sapiens
gtaaacagtgacaat

SEQ ID NO: 1696477 - DNA, 15 bp, Homo sapiens
taaacagtgacaatc

SEQ ID NO: 1696478 - DNA, 15 bp, Homo sapiens
aaacagtgacaatct

SEQ ID NO: 1696479 - DNA, 15 bp, Homo sapiens
aacagtgacaatctg

SEQ ID NO: 1696480 - DNA, 15 bp, Homo sapiens
acagtgacaatctga

SEQ ID NO: 1696481 - DNA, 15 bp, Homo sapiens
cagtgacaatctgaa

SEQ ID NO: 1696482 - DNA, 15 bp, Homo sapiens
agtgacaatctgaac

SEQ ID NO: 1696483 - DNA, 15 bp, Homo sapiens
gtgacaatctgaact

SEQ ID NO: 1696484 - DNA, 15 bp, Homo sapiens
tgacaatctgaactt

SEQ ID NO: 1696485 - DNA, 15 bp, Homo sapiens
gacaatctgaacttt

SEQ ID NO: 1696486 - DNA, 15 bp, Homo sapiens
acaatctgaactttg

SEQ ID NO: 1696487 - DNA, 15 bp, Homo sapiens
caatctgaactttgc

SEQ ID NO: 1696488 - DNA, 15 bp, Homo sapiens
aatctgaactttgct

SEQ ID NO: 1696489 - DNA, 15 bp, Homo sapiens
atctgaactttgctg

SEQ ID NO: 1696490 - DNA, 15 bp, Homo sapiens
tctgaactttgctgt

SEQ ID NO: 1696491 - DNA, 15 bp, Homo sapiens
ctgaactttgctgtt

SEQ ID NO: 1696492 - DNA, 15 bp, Homo sapiens
tgaactttgctgttt

SEQ ID NO: 1696493 - DNA, 15 bp, Homo sapiens
gaactttgctgtttt

SEQ ID NO: 1696494 - DNA, 15 bp, Homo sapiens
aactttgctgttttc

SEQ ID NO: 1696495 - DNA, 15 bp, Homo sapiens
actttgctgttttct

SEQ ID NO: 1696496 - DNA, 15 bp, Homo sapiens
ctttgctgttttctt

SEQ ID NO: 1696497 - DNA, 15 bp, Homo sapiens
tttgctgttttcttt

SEQ ID NO: 1696498 - DNA, 15 bp, Homo sapiens
ttgctgttttctttc

SEQ ID NO: 1696499 - DNA, 15 bp, Homo sapiens
tgctgttttctttct

SEQ ID NO: 1696500 - DNA, 15 bp, Homo sapiens
gctgttttctttctt

SEQ ID NO: 1696501 - DNA, 15 bp, Homo sapiens
ctgttttctttcttc

SEQ ID NO: 1696502 - DNA, 15 bp, Homo sapiens
tgttttctttcttct

SEQ ID NO: 1696503 - DNA, 15 bp, Homo sapiens
gttttctttcttctc

SEQ ID NO: 1696504 - DNA, 15 bp, Homo sapiens
ttttctttcttctcc

SEQ ID NO: 1696505 - DNA, 15 bp, Homo sapiens
tttctttcttctcca

SEQ ID NO: 1696506 - DNA, 15 bp, Homo sapiens
ttctttcttctccag

SEQ ID NO: 1696507 - DNA, 15 bp, Homo sapiens
tctttcttctccaga

SEQ ID NO: 1696508 - DNA, 15 bp, Homo sapiens
ctttcttctccagat

SEQ ID NO: 1696509 - DNA, 15 bp, Homo sapiens
tttcttctccagatt

SEQ ID NO: 1696510 - DNA, 15 bp, Homo sapiens
ttcttctccagattc

SEQ ID NO: 1696511 - DNA, 15 bp, Homo sapiens
tcttctccagattct

SEQ ID NO: 1696512 - DNA, 15 bp, Homo sapiens
cttctccagattcta

SEQ ID NO: 1696513 - DNA, 15 bp, Homo sapiens
ttctccagattctaa

SEQ ID NO: 1696514 - DNA, 15 bp, Homo sapiens
tctccagattctaaa

SEQ ID NO: 1696515 - DNA, 15 bp, Homo sapiens
ctccagattctaaat

SEQ ID NO: 1696516 - DNA, 15 bp, Homo sapiens
tccagattctaaatg

SEQ ID NO: 1696517 - DNA, 15 bp, Homo sapiens
ccagattctaaatga

SEQ ID NO: 1696518 - DNA, 15 bp, Homo sapiens
cagattctaaatgac

SEQ ID NO: 1696519 - DNA, 15 bp, Homo sapiens
agattctaaatgacc

SEQ ID NO: 1696520 - DNA, 15 bp, Homo sapiens
gattctaaatgacct

SEQ ID NO: 1696521 - DNA, 15 bp, Homo sapiens
attctaaatgacctc

SEQ ID NO: 1696522 - DNA, 15 bp, Homo sapiens
ttctaaatgacctca

SEQ ID NO: 1696523 - DNA, 15 bp, Homo sapiens
tctaaatgacctcaa

SEQ ID NO: 1696524 - DNA, 15 bp, Homo sapiens
ctaaatgacctcaac

SEQ ID NO: 1696525 - DNA, 15 bp, Homo sapiens
taaatgacctcaaca

SEQ ID NO: 1696526 - DNA, 15 bp, Homo sapiens
aaatgacctcaacat

SEQ ID NO: 1696527 - DNA, 15 bp, Homo sapiens
aatgacctcaacatg

SEQ ID NO: 1696528 - DNA, 15 bp, Homo sapiens
atgacctcaacatgg

SEQ ID NO: 1696529 - DNA, 15 bp, Homo sapiens
tgacctcaacatggt

SEQ ID NO: 1696530 - DNA, 15 bp, Homo sapiens
gacctcaacatggtc

SEQ ID NO: 1696531 - DNA, 15 bp, Homo sapiens
acctcaacatggtca

SEQ ID NO: 1696532 - DNA, 15 bp, Homo sapiens
cctcaacatggtcat

SEQ ID NO: 1696533 - DNA, 15 bp, Homo sapiens
ctcaacatggtcatt

SEQ ID NO: 1696534 - DNA, 15 bp, Homo sapiens
tcaacatggtcatta

SEQ ID NO: 1696535 - DNA, 15 bp, Homo sapiens
caacatggtcattaa

SEQ ID NO: 1696536 - DNA, 15 bp, Homo sapiens
aacatggtcattaaa

SEQ ID NO: 1696537 - DNA, 15 bp, Homo sapiens
acatggtcattaaac

SEQ ID NO: 1696538 - DNA, 15 bp, Homo sapiens
catggtcattaaacc

SEQ ID NO: 1696539 - DNA, 15 bp, Homo sapiens
atggtcattaaacca

SEQ ID NO: 1696540 - DNA, 15 bp, Homo sapiens
tggtcattaaaccag

SEQ ID NO: 1696541 - DNA, 15 bp, Homo sapiens
ggtcattaaaccagg

SEQ ID NO: 1696542 - DNA, 15 bp, Homo sapiens
gtcattaaaccaggg

SEQ ID NO: 1696543 - DNA, 15 bp, Homo sapiens
tcattaaaccagggg

SEQ ID NO: 1696544 - DNA, 15 bp, Homo sapiens
cattaaaccagggga

SEQ ID NO: 1696545 - DNA, 15 bp, Homo sapiens
attaaaccaggggaa

SEQ ID NO: 1696546 - DNA, 15 bp, Homo sapiens
ttaaaccaggggaaa

SEQ ID NO: 1696547 - DNA, 15 bp, Homo sapiens
taaaccaggggaaat

SEQ ID NO: 1696548 - DNA, 15 bp, Homo sapiens
aaaccaggggaaatg

SEQ ID NO: 1696549 - DNA, 15 bp, Homo sapiens
aaccaggggaaatga

SEQ ID NO: 1696550 - DNA, 15 bp, Homo sapiens
accaggggaaatgac

SEQ ID NO: 1696551 - DNA, 15 bp, Homo sapiens
ccaggggaaatgaca

SEQ ID NO: 1696552 - DNA, 15 bp, Homo sapiens
caggggaaatgacag

SEQ ID NO: 1696553 - DNA, 15 bp, Homo sapiens
aggggaaatgacagc

SEQ ID NO: 1696554 - DNA, 15 bp, Homo sapiens
ggggaaatgacagct

SEQ ID NO: 1696555 - DNA, 15 bp, Homo sapiens
gggaaatgacagctc

SEQ ID NO: 1696556 - DNA, 15 bp, Homo sapiens
ggaaatgacagctct

SEQ ID NO: 1696557 - DNA, 15 bp, Homo sapiens
gaaatgacagctctg

SEQ ID NO: 1696558 - DNA, 15 bp, Homo sapiens
aaatgacagctctgg

SEQ ID NO: 1696559 - DNA, 15 bp, Homo sapiens
aatgacagctctggt

SEQ ID NO: 1696560 - DNA, 15 bp, Homo sapiens
atgacagctctggta

SEQ ID NO: 1696561 - DNA, 15 bp, Homo sapiens
tgacagctctggtag

SEQ ID NO: 1696562 - DNA, 15 bp, Homo sapiens
gacagctctggtagg

SEQ ID NO: 1696563 - DNA, 15 bp, Homo sapiens
acagctctggtagga

SEQ ID NO: 1696564 - DNA, 15 bp, Homo sapiens
cagctctggtaggac

SEQ ID NO: 1696565 - DNA, 15 bp, Homo sapiens
agctctggtaggacc

SEQ ID NO: 1696566 - DNA, 15 bp, Homo sapiens
gctctggtaggaccc

SEQ ID NO: 1696567 - DNA, 15 bp, Homo sapiens
ctctggtaggaccca

SEQ ID NO: 1696568 - DNA, 15 bp, Homo sapiens
tctggtaggacccag

SEQ ID NO: 1696569 - DNA, 15 bp, Homo sapiens
ctggtaggacccagt

SEQ ID NO: 1696570 - DNA, 15 bp, Homo sapiens
tggtaggacccagtg

SEQ ID NO: 1696571 - DNA, 15 bp, Homo sapiens
ggtaggacccagtgg

SEQ ID NO: 1696572 - DNA, 15 bp, Homo sapiens
gtaggacccagtgga

SEQ ID NO: 1696573 - DNA, 15 bp, Homo sapiens
taggacccagtggag

SEQ ID NO: 1696574 - DNA, 15 bp, Homo sapiens
aggacccagtggagc

SEQ ID NO: 1696575 - DNA, 15 bp, Homo sapiens
ggacccagtggagct

SEQ ID NO: 1696576 - DNA, 15 bp, Homo sapiens
gacccagtggagctg

SEQ ID NO: 1696577 - DNA, 15 bp, Homo sapiens
acccagtggagctgg

SEQ ID NO: 1696578 - DNA, 15 bp, Homo sapiens
cccagtggagctgga

SEQ ID NO: 1696579 - DNA, 15 bp, Homo sapiens
ccagtggagctggaa

SEQ ID NO: 1696580 - DNA, 15 bp, Homo sapiens
cagtggagctggaaa

SEQ ID NO: 1696581 - DNA, 15 bp, Homo sapiens
agtggagctggaaaa

SEQ ID NO: 1696582 - DNA, 15 bp, Homo sapiens
gtggagctggaaaaa

SEQ ID NO: 1696583 - DNA, 15 bp, Homo sapiens
tggagctggaaaaag

SEQ ID NO: 1696584 - DNA, 15 bp, Homo sapiens
ggagctggaaaaagt

SEQ ID NO: 1696585 - DNA, 15 bp, Homo sapiens
gagctggaaaaagta

SEQ ID NO: 1696586 - DNA, 15 bp, Homo sapiens
agctggaaaaagtac

SEQ ID NO: 1696587 - DNA, 15 bp, Homo sapiens
gctggaaaaagtaca

SEQ ID NO: 1696588 - DNA, 15 bp, Homo sapiens
ctggaaaaagtacag

SEQ ID NO: 1696589 - DNA, 15 bp, Homo sapiens
tggaaaaagtacagc

SEQ ID NO: 1696590 - DNA, 15 bp, Homo sapiens
ggaaaaagtacagca

SEQ ID NO: 1696591 - DNA, 15 bp, Homo sapiens
gaaaaagtacagcac

SEQ ID NO: 1696592 - DNA, 15 bp, Homo sapiens
aaaaagtacagcact

SEQ ID NO: 1696593 - DNA, 15 bp, Homo sapiens
aaaagtacagcactg

SEQ ID NO: 1696594 - DNA, 15 bp, Homo sapiens
aaagtacagcactgc

SEQ ID NO: 1696595 - DNA, 15 bp, Homo sapiens
aagtacagcactgca

SEQ ID NO: 1696596 - DNA, 15 bp, Homo sapiens
agtacagcactgcaa

SEQ ID NO: 1696597 - DNA, 15 bp, Homo sapiens
gtacagcactgcaac

SEQ ID NO: 1696598 - DNA, 15 bp, Homo sapiens
tacagcactgcaact

SEQ ID NO: 1696599 - DNA, 15 bp, Homo sapiens
acagcactgcaactc

SEQ ID NO: 1696600 - DNA, 15 bp, Homo sapiens
cagcactgcaactca

SEQ ID NO: 1696601 - DNA, 15 bp, Homo sapiens
agcactgcaactcat

SEQ ID NO: 1696602 - DNA, 15 bp, Homo sapiens
gcactgcaactcatt

SEQ ID NO: 1696603 - DNA, 15 bp, Homo sapiens
cactgcaactcattc

SEQ ID NO: 1696604 - DNA, 15 bp, Homo sapiens
actgcaactcattca

SEQ ID NO: 1696605 - DNA, 15 bp, Homo sapiens
ctgcaactcattcag

SEQ ID NO: 1696606 - DNA, 15 bp, Homo sapiens
tgcaactcattcagc

SEQ ID NO: 1696607 - DNA, 15 bp, Homo sapiens
gcaactcattcagcg

SEQ ID NO: 1696608 - DNA, 15 bp, Homo sapiens
caactcattcagcga

SEQ ID NO: 1696609 - DNA, 15 bp, Homo sapiens
aactcattcagcgat

SEQ ID NO: 1696610 - DNA, 15 bp, Homo sapiens
actcattcagcgatt

SEQ ID NO: 1696611 - DNA, 15 bp, Homo sapiens
ctcattcagcgattc

SEQ ID NO: 1696612 - DNA, 15 bp, Homo sapiens
tcattcagcgattct

SEQ ID NO: 1696613 - DNA, 15 bp, Homo sapiens
cattcagcgattcta

SEQ ID NO: 1696614 - DNA, 15 bp, Homo sapiens
attcagcgattctat

SEQ ID NO: 1696615 - DNA, 15 bp, Homo sapiens
ttcagcgattctatg

SEQ ID NO: 1696616 - DNA, 15 bp, Homo sapiens
tcagcgattctatga

SEQ ID NO: 1696617 - DNA, 15 bp, Homo sapiens
cagcgattctatgac

SEQ ID NO: 1696618 - DNA, 15 bp, Homo sapiens
agcgattctatgacc

SEQ ID NO: 1696619 - DNA, 15 bp, Homo sapiens
gcgattctatgaccc

SEQ ID NO: 1696620 - DNA, 15 bp, Homo sapiens
cgattctatgacccc

SEQ ID NO: 1696621 - DNA, 15 bp, Homo sapiens
gattctatgacccct

SEQ ID NO: 1696622 - DNA, 15 bp, Homo sapiens
attctatgacccctg

SEQ ID NO: 1696623 - DNA, 15 bp, Homo sapiens
ttctatgacccctgt

SEQ ID NO: 1696624 - DNA, 15 bp, Homo sapiens
tctatgacccctgtg

SEQ ID NO: 1696625 - DNA, 15 bp, Homo sapiens
ctatgacccctgtga

SEQ ID NO: 1696626 - DNA, 15 bp, Homo sapiens
tatgacccctgtgaa

SEQ ID NO: 1696627 - DNA, 15 bp, Homo sapiens
atgacccctgtgaag

SEQ ID NO: 1696628 - DNA, 15 bp, Homo sapiens
tgacccctgtgaagg

SEQ ID NO: 1696629 - DNA, 15 bp, Homo sapiens
gacccctgtgaagga

SEQ ID NO: 1696630 - DNA, 15 bp, Homo sapiens
acccctgtgaaggaa

SEQ ID NO: 1696631 - DNA, 15 bp, Homo sapiens
cccctgtgaaggaat

SEQ ID NO: 1696632 - DNA, 15 bp, Homo sapiens
ccctgtgaaggaatg

SEQ ID NO: 1696633 - DNA, 15 bp, Homo sapiens
cctgtgaaggaatgg

SEQ ID NO: 1696634 - DNA, 15 bp, Homo sapiens
ctgtgaaggaatggt

SEQ ID NO: 1696635 - DNA, 15 bp, Homo sapiens
tgtgaaggaatggtg

SEQ ID NO: 1696636 - DNA, 15 bp, Homo sapiens
gtgaaggaatggtgg

SEQ ID NO: 1696637 - DNA, 15 bp, Homo sapiens
tgaaggaatggtggg

SEQ ID NO: 1696638 - DNA, 15 bp, Homo sapiens
gaaggaatggtgggt

SEQ ID NO: 1696639 - DNA, 15 bp, Homo sapiens
aaggaatggtgggtg

SEQ ID NO: 1696640 - DNA, 15 bp, Homo sapiens
aggaatggtgggtgt

SEQ ID NO: 1696641 - DNA, 15 bp, Homo sapiens
ggaatggtgggtgtc

SEQ ID NO: 1696642 - DNA, 15 bp, Homo sapiens
gaatggtgggtgtct

SEQ ID NO: 1696643 - DNA, 15 bp, Homo sapiens
aatggtgggtgtctt

SEQ ID NO: 1696644 - DNA, 15 bp, Homo sapiens
atggtgggtgtcttc

SEQ ID NO: 1696645 - DNA, 15 bp, Homo sapiens
tggtgggtgtcttcc

SEQ ID NO: 1696646 - DNA, 15 bp, Homo sapiens
ggtgggtgtcttcca

SEQ ID NO: 1696647 - DNA, 15 bp, Homo sapiens
gtgggtgtcttccag

SEQ ID NO: 1696648 - DNA, 15 bp, Homo sapiens
tgggtgtcttccaga

SEQ ID NO: 1696649 - DNA, 15 bp, Homo sapiens
gggtgtcttccagaa

SEQ ID NO: 1696650 - DNA, 15 bp, Homo sapiens
ggtgtcttccagaaa

SEQ ID NO: 1696651 - DNA, 15 bp, Homo sapiens
gtgtcttccagaaac

SEQ ID NO: 1696652 - DNA, 15 bp, Homo sapiens
tgtcttccagaaact

SEQ ID NO: 1696653 - DNA, 15 bp, Homo sapiens
gtcttccagaaactc

SEQ ID NO: 1696654 - DNA, 15 bp, Homo sapiens
tcttccagaaactcc

SEQ ID NO: 1696655 - DNA, 15 bp, Homo sapiens
cttccagaaactcct

SEQ ID NO: 1696656 - DNA, 15 bp, Homo sapiens
ttccagaaactcctc

SEQ ID NO: 1696657 - DNA, 15 bp, Homo sapiens
tccagaaactcctca

SEQ ID NO: 1696658 - DNA, 15 bp, Homo sapiens
ccagaaactcctcaa

SEQ ID NO: 1696659 - DNA, 15 bp, Homo sapiens
cagaaactcctcaat

SEQ ID NO: 1696660 - DNA, 15 bp, Homo sapiens
agaaactcctcaata

SEQ ID NO: 1696661 - DNA, 15 bp, Homo sapiens
gaaactcctcaatac

SEQ ID NO: 1696662 - DNA, 15 bp, Homo sapiens
aaactcctcaataca

SEQ ID NO: 1696663 - DNA, 15 bp, Homo sapiens
aactcctcaatacat

SEQ ID NO: 1696664 - DNA, 15 bp, Homo sapiens
actcctcaatacatg

SEQ ID NO: 1696665 - DNA, 15 bp, Homo sapiens
ctcctcaatacatgg

SEQ ID NO: 1696666 - DNA, 15 bp, Homo sapiens
tcctcaatacatggg

SEQ ID NO: 1696667 - DNA, 15 bp, Homo sapiens
cctcaatacatgggg

SEQ ID NO: 1696668 - DNA, 15 bp, Homo sapiens
ctcaatacatgggga

SEQ ID NO: 1696669 - DNA, 15 bp, Homo sapiens
tcaatacatggggac

SEQ ID NO: 1696670 - DNA, 15 bp, Homo sapiens
caatacatggggaca

SEQ ID NO: 1696671 - DNA, 15 bp, Homo sapiens
aatacatggggacag

SEQ ID NO: 1696672 - DNA, 15 bp, Homo sapiens
atacatggggacagt

SEQ ID NO: 1696673 - DNA, 15 bp, Homo sapiens
tacatggggacagta

SEQ ID NO: 1696674 - DNA, 15 bp, Homo sapiens
acatggggacagtaa

SEQ ID NO: 1696675 - DNA, 15 bp, Homo sapiens
catggggacagtaaa

SEQ ID NO: 1696676 - DNA, 15 bp, Homo sapiens
atggggacagtaaag

SEQ ID NO: 1696677 - DNA, 15 bp, Homo sapiens
tggggacagtaaagt

SEQ ID NO: 1696678 - DNA, 15 bp, Homo sapiens
ggggacagtaaagtg

SEQ ID NO: 1696679 - DNA, 15 bp, Homo sapiens
gggacagtaaagtgc

SEQ ID NO: 1696680 - DNA, 15 bp, Homo sapiens
ggacagtaaagtgca

SEQ ID NO: 1696681 - DNA, 15 bp, Homo sapiens
gacagtaaagtgcaa

SEQ ID NO: 1696682 - DNA, 15 bp, Homo sapiens
acagtaaagtgcaaa

SEQ ID NO: 1696683 - DNA, 15 bp, Homo sapiens
cagtaaagtgcaaat

SEQ ID NO: 1696684 - DNA, 15 bp, Homo sapiens
agtaaagtgcaaatg

SEQ ID NO: 1696685 - DNA, 15 bp, Homo sapiens
gtaaagtgcaaatgg

SEQ ID NO: 1696686 - DNA, 15 bp, Homo sapiens
taaagtgcaaatggc

SEQ ID NO: 1696687 - DNA, 15 bp, Homo sapiens
aaagtgcaaatggca

SEQ ID NO: 1696688 - DNA, 15 bp, Homo sapiens
aagtgcaaatggcag

SEQ ID NO: 1696689 - DNA, 15 bp, Homo sapiens
agtgcaaatggcagt

SEQ ID NO: 1696690 - DNA, 15 bp, Homo sapiens
gtgcaaatggcagta

SEQ ID NO: 1696691 - DNA, 15 bp, Homo sapiens
tgcaaatggcagtat

SEQ ID NO: 1696692 - DNA, 15 bp, Homo sapiens
gcaaatggcagtata

SEQ ID NO: 1696693 - DNA, 15 bp, Homo sapiens
caaatggcagtatat

SEQ ID NO: 1696694 - DNA, 15 bp, Homo sapiens
aaatggcagtatatt

SEQ ID NO: 1696695 - DNA, 15 bp, Homo sapiens
aatggcagtatattg

SEQ ID NO: 1696696 - DNA, 15 bp, Homo sapiens
atggcagtatattga

SEQ ID NO: 1696697 - DNA, 15 bp, Homo sapiens
tggcagtatattgat

SEQ ID NO: 1696698 - DNA, 15 bp, Homo sapiens
ggcagtatattgatc

SEQ ID NO: 1696699 - DNA, 15 bp, Homo sapiens
gcagtatattgatca

SEQ ID NO: 1696700 - DNA, 15 bp, Homo sapiens
cagtatattgatcaa

SEQ ID NO: 1696701 - DNA, 15 bp, Homo sapiens
agtatattgatcaaa

SEQ ID NO: 1696702 - DNA, 15 bp, Homo sapiens
gtatattgatcaaac

SEQ ID NO: 1696703 - DNA, 15 bp, Homo sapiens
tatattgatcaaaca

SEQ ID NO: 1696704 - DNA, 15 bp, Homo sapiens
atattgatcaaacag

SEQ ID NO: 1696705 - DNA, 15 bp, Homo sapiens
tattgatcaaacaga

SEQ ID NO: 1696706 - DNA, 15 bp, Homo sapiens
attgatcaaacagaa

SEQ ID NO: 1696707 - DNA, 15 bp, Homo sapiens
ttgatcaaacagaaa

SEQ ID NO: 1696708 - DNA, 15 bp, Homo sapiens
tgatcaaacagaaag

SEQ ID NO: 1696709 - DNA, 15 bp, Homo sapiens
gatcaaacagaaagg

SEQ ID NO: 1696710 - DNA, 15 bp, Homo sapiens
atcaaacagaaaggt

SEQ ID NO: 1696711 - DNA, 15 bp, Homo sapiens
tcaaacagaaaggtg

SEQ ID NO: 1696712 - DNA, 15 bp, Homo sapiens
caaacagaaaggtgt

SEQ ID NO: 1696713 - DNA, 15 bp, Homo sapiens
aaacagaaaggtgta

SEQ ID NO: 1696714 - DNA, 15 bp, Homo sapiens
aacagaaaggtgtag

SEQ ID NO: 1696715 - DNA, 15 bp, Homo sapiens
acagaaaggtgtagc

SEQ ID NO: 1696716 - DNA, 15 bp, Homo sapiens
cagaaaggtgtagca

SEQ ID NO: 1696717 - DNA, 15 bp, Homo sapiens
agaaaggtgtagcat

SEQ ID NO: 1696718 - DNA, 15 bp, Homo sapiens
gaaaggtgtagcata

SEQ ID NO: 1696719 - DNA, 15 bp, Homo sapiens
aaaggtgtagcatac

SEQ ID NO: 1696720 - DNA, 15 bp, Homo sapiens
aaggtgtagcataca

SEQ ID NO: 1696721 - DNA, 15 bp, Homo sapiens
aggtgtagcatacat

SEQ ID NO: 1696722 - DNA, 15 bp, Homo sapiens
ggtgtagcatacatt

SEQ ID NO: 1696723 - DNA, 15 bp, Homo sapiens
gtgtagcatacattg

SEQ ID NO: 1696724 - DNA, 15 bp, Homo sapiens
tgtagcatacattga

SEQ ID NO: 1696725 - DNA, 15 bp, Homo sapiens
gtagcatacattgag

SEQ ID NO: 1696726 - DNA, 15 bp, Homo sapiens
tagcatacattgaga

SEQ ID NO: 1696727 - DNA, 15 bp, Homo sapiens
agcatacattgagac

SEQ ID NO: 1696728 - DNA, 15 bp, Homo sapiens
gcatacattgagact

SEQ ID NO: 1696729 - DNA, 15 bp, Homo sapiens
catacattgagactg

SEQ ID NO: 1696730 - DNA, 15 bp, Homo sapiens
atacattgagactgt

SEQ ID NO: 1696731 - DNA, 15 bp, Homo sapiens
tacattgagactgtc

SEQ ID NO: 1696732 - DNA, 15 bp, Homo sapiens
acattgagactgtcc

SEQ ID NO: 1696733 - DNA, 15 bp, Homo sapiens
cattgagactgtcct

SEQ ID NO: 1696734 - DNA, 15 bp, Homo sapiens
attgagactgtcctg

SEQ ID NO: 1696735 - DNA, 15 bp, Homo sapiens
ttgagactgtcctgg

SEQ ID NO: 1696736 - DNA, 15 bp, Homo sapiens
tgagactgtcctggc

SEQ ID NO: 1696737 - DNA, 15 bp, Homo sapiens
gagactgtcctggca

SEQ ID NO: 1696738 - DNA, 15 bp, Homo sapiens
agactgtcctggcat

SEQ ID NO: 1696739 - DNA, 15 bp, Homo sapiens
gactgtcctggcatg

SEQ ID NO: 1696740 - DNA, 15 bp, Homo sapiens
actgtcctggcatgc

SEQ ID NO: 1696741 - DNA, 15 bp, Homo sapiens
ctgtcctggcatgca

SEQ ID NO: 1696742 - DNA, 15 bp, Homo sapiens
tgtcctggcatgcat

SEQ ID NO: 1696743 - DNA, 15 bp, Homo sapiens
gtcctggcatgcata

SEQ ID NO: 1696744 - DNA, 15 bp, Homo sapiens
tcctggcatgcatag

SEQ ID NO: 1696745 - DNA, 15 bp, Homo sapiens
cctggcatgcatagt

SEQ ID NO: 1696746 - DNA, 15 bp, Homo sapiens
ctggcatgcatagtt

SEQ ID NO: 1696747 - DNA, 15 bp, Homo sapiens
tggcatgcatagtta

SEQ ID NO: 1696748 - DNA, 15 bp, Homo sapiens
ggcatgcatagttaa

SEQ ID NO: 1696749 - DNA, 15 bp, Homo sapiens
gcatgcatagttaac

SEQ ID NO: 1696750 - DNA, 15 bp, Homo sapiens
catgcatagttaact

SEQ ID NO: 1696751 - DNA, 15 bp, Homo sapiens
atgcatagttaactt

SEQ ID NO: 1696752 - DNA, 15 bp, Homo sapiens
tgcatagttaactta

SEQ ID NO: 1696753 - DNA, 15 bp, Homo sapiens
gcatagttaacttaa

SEQ ID NO: 1696754 - DNA, 15 bp, Homo sapiens
catagttaacttaat

SEQ ID NO: 1696755 - DNA, 15 bp, Homo sapiens
atagttaacttaatg

SEQ ID NO: 1696756 - DNA, 15 bp, Homo sapiens
tagttaacttaatga

SEQ ID NO: 1696757 - DNA, 15 bp, Homo sapiens
agttaacttaatgat

SEQ ID NO: 1696758 - DNA, 15 bp, Homo sapiens
gttaacttaatgatt

SEQ ID NO: 1696759 - DNA, 15 bp, Homo sapiens
ttaacttaatgattt

SEQ ID NO: 1696760 - DNA, 15 bp, Homo sapiens
taacttaatgatttg

SEQ ID NO: 1696761 - DNA, 15 bp, Homo sapiens
aacttaatgatttgt

SEQ ID NO: 1696762 - DNA, 15 bp, Homo sapiens
acttaatgatttgtt

SEQ ID NO: 1696763 - DNA, 15 bp, Homo sapiens
cttaatgatttgtta

SEQ ID NO: 1696764 - DNA, 15 bp, Homo sapiens
ttaatgatttgttac

SEQ ID NO: 1696765 - DNA, 15 bp, Homo sapiens
taatgatttgttact

SEQ ID NO: 1696766 - DNA, 15 bp, Homo sapiens
aatgatttgttactg

SEQ ID NO: 1696767 - DNA, 15 bp, Homo sapiens
atgatttgttactga

SEQ ID NO: 1696768 - DNA, 15 bp, Homo sapiens
tgatttgttactgaa

SEQ ID NO: 1696769 - DNA, 15 bp, Homo sapiens
gatttgttactgaat

SEQ ID NO: 1696770 - DNA, 15 bp, Homo sapiens
atttgttactgaatt

SEQ ID NO: 1696771 - DNA, 15 bp, Homo sapiens
tttgttactgaattg

SEQ ID NO: 1696772 - DNA, 15 bp, Homo sapiens
ttgttactgaattga

SEQ ID NO: 1696773 - DNA, 15 bp, Homo sapiens
tgttactgaattgat

SEQ ID NO: 1696774 - DNA, 15 bp, Homo sapiens
gttactgaattgatg

SEQ ID NO: 1696775 - DNA, 15 bp, Homo sapiens
ttactgaattgatgg

SEQ ID NO: 1696776 - DNA, 15 bp, Homo sapiens
tactgaattgatggg

SEQ ID NO: 1696777 - DNA, 15 bp, Homo sapiens
actgaattgatggga

SEQ ID NO: 1696778 - DNA, 15 bp, Homo sapiens
ctgaattgatgggac

SEQ ID NO: 1696779 - DNA, 15 bp, Homo sapiens
tgaattgatgggaca

SEQ ID NO: 1696780 - DNA, 15 bp, Homo sapiens
gaattgatgggacac

SEQ ID NO: 1696781 - DNA, 15 bp, Homo sapiens
aattgatgggacacg

SEQ ID NO: 1696782 - DNA, 15 bp, Homo sapiens
attgatgggacacgc

SEQ ID NO: 1696783 - DNA, 15 bp, Homo sapiens
ttgatgggacacgct

SEQ ID NO: 1696784 - DNA, 15 bp, Homo sapiens
tgatgggacacgctt

SEQ ID NO: 1696785 - DNA, 15 bp, Homo sapiens
gatgggacacgcttc

SEQ ID NO: 1696786 - DNA, 15 bp, Homo sapiens
atgggacacgcttcc

SEQ ID NO: 1696787 - DNA, 15 bp, Homo sapiens
tgggacacgcttcct

SEQ ID NO: 1696788 - DNA, 15 bp, Homo sapiens
gggacacgcttccta

SEQ ID NO: 1696789 - DNA, 15 bp, Homo sapiens
ggacacgcttcctac

SEQ ID NO: 1696790 - DNA, 15 bp, Homo sapiens
gacacgcttcctaca

SEQ ID NO: 1696791 - DNA, 15 bp, Homo sapiens
acacgcttcctacat

SEQ ID NO: 1696792 - DNA, 15 bp, Homo sapiens
cacgcttcctacatg

SEQ ID NO: 1696793 - DNA, 15 bp, Homo sapiens
acgcttcctacatgg

SEQ ID NO: 1696794 - DNA, 15 bp, Homo sapiens
cgcttcctacatggt

SEQ ID NO: 1696795 - DNA, 15 bp, Homo sapiens
gcttcctacatggta

SEQ ID NO: 1696796 - DNA, 15 bp, Homo sapiens
cttcctacatggtaa

SEQ ID NO: 1696797 - DNA, 15 bp, Homo sapiens
ttcctacatggtaac

SEQ ID NO: 1696798 - DNA, 15 bp, Homo sapiens
tcctacatggtaaca

SEQ ID NO: 1696799 - DNA, 15 bp, Homo sapiens
cctacatggtaacag

SEQ ID NO: 1696800 - DNA, 15 bp, Homo sapiens
ctacatggtaacagt

SEQ ID NO: 1696801 - DNA, 15 bp, Homo sapiens
tacatggtaacagtg

SEQ ID NO: 1696802 - DNA, 15 bp, Homo sapiens
acatggtaacagtgt

SEQ ID NO: 1696803 - DNA, 15 bp, Homo sapiens
catggtaacagtgtt

SEQ ID NO: 1696804 - DNA, 15 bp, Homo sapiens
atggtaacagtgttc

SEQ ID NO: 1696805 - DNA, 15 bp, Homo sapiens
tggtaacagtgttca

SEQ ID NO: 1696806 - DNA, 15 bp, Homo sapiens
ggtaacagtgttcag

SEQ ID NO: 1696807 - DNA, 15 bp, Homo sapiens
gtaacagtgttcagt

SEQ ID NO: 1696808 - DNA, 15 bp, Homo sapiens
taacagtgttcagtg

SEQ ID NO: 1696809 - DNA, 15 bp, Homo sapiens
aacagtgttcagtga

SEQ ID NO: 1696810 - DNA, 15 bp, Homo sapiens
acagtgttcagtgaa

SEQ ID NO: 1696811 - DNA, 15 bp, Homo sapiens
cagtgttcagtgaat

SEQ ID NO: 1696812 - DNA, 15 bp, Homo sapiens
agtgttcagtgaata

SEQ ID NO: 1696813 - DNA, 15 bp, Homo sapiens
gtgttcagtgaataa

SEQ ID NO: 1696814 - DNA, 15 bp, Homo sapiens
tgttcagtgaataac

SEQ ID NO: 1696815 - DNA, 15 bp, Homo sapiens
gttcagtgaataacc

SEQ ID NO: 1696816 - DNA, 15 bp, Homo sapiens
ttcagtgaataacca

SEQ ID NO: 1696817 - DNA, 15 bp, Homo sapiens
tcagtgaataaccag

SEQ ID NO: 1696818 - DNA, 15 bp, Homo sapiens
cagtgaataaccagt

SEQ ID NO: 1696819 - DNA, 15 bp, Homo sapiens
agtgaataaccagtc

SEQ ID NO: 1696820 - DNA, 15 bp, Homo sapiens
gtgaataaccagtca

SEQ ID NO: 1696821 - DNA, 15 bp, Homo sapiens
tgaataaccagtcaa

SEQ ID NO: 1696822 - DNA, 15 bp, Homo sapiens
gaataaccagtcaat

SEQ ID NO: 1696823 - DNA, 15 bp, Homo sapiens
aataaccagtcaatt

SEQ ID NO: 1696824 - DNA, 15 bp, Homo sapiens
ataaccagtcaattc

SEQ ID NO: 1696825 - DNA, 15 bp, Homo sapiens
taaccagtcaattcc

SEQ ID NO: 1696826 - DNA, 15 bp, Homo sapiens
aaccagtcaattcca

SEQ ID NO: 1696827 - DNA, 15 bp, Homo sapiens
accagtcaattccat

SEQ ID NO: 1696828 - DNA, 15 bp, Homo sapiens
ccagtcaattccatt

SEQ ID NO: 1696829 - DNA, 15 bp, Homo sapiens
cagtcaattccattc

SEQ ID NO: 1696830 - DNA, 15 bp, Homo sapiens
agtcaattccattca

SEQ ID NO: 1696831 - DNA, 15 bp, Homo sapiens
gtcaattccattcac

SEQ ID NO: 1696832 - DNA, 15 bp, Homo sapiens
tcaattccattcact

SEQ ID NO: 1696833 - DNA, 15 bp, Homo sapiens
caattccattcactg

SEQ ID NO: 1696834 - DNA, 15 bp, Homo sapiens
aattccattcactgt

SEQ ID NO: 1696835 - DNA, 15 bp, Homo sapiens
attccattcactgta

SEQ ID NO: 1696836 - DNA, 15 bp, Homo sapiens
ttccattcactgtat

SEQ ID NO: 1696837 - DNA, 15 bp, Homo sapiens
tccattcactgtata

SEQ ID NO: 1696838 - DNA, 15 bp, Homo sapiens
ccattcactgtataa

SEQ ID NO: 1696839 - DNA, 15 bp, Homo sapiens
cattcactgtataat

SEQ ID NO: 1696840 - DNA, 15 bp, Homo sapiens
attcactgtataatg

SEQ ID NO: 1696841 - DNA, 15 bp, Homo sapiens
ttcactgtataatgt

SEQ ID NO: 1696842 - DNA, 15 bp, Homo sapiens
tcactgtataatgta

SEQ ID NO: 1696843 - DNA, 15 bp, Homo sapiens
cactgtataatgtaa

SEQ ID NO: 1696844 - DNA, 15 bp, Homo sapiens
actgtataatgtaac

SEQ ID NO: 1696845 - DNA, 15 bp, Homo sapiens
ctgtataatgtaact

SEQ ID NO: 1696846 - DNA, 15 bp, Homo sapiens
tgtataatgtaactg

SEQ ID NO: 1696847 - DNA, 15 bp, Homo sapiens
gtataatgtaactga

SEQ ID NO: 1696848 - DNA, 15 bp, Homo sapiens
tataatgtaactgaa

SEQ ID NO: 1696849 - DNA, 15 bp, Homo sapiens
ataatgtaactgaat

SEQ ID NO: 1696850 - DNA, 15 bp, Homo sapiens
taatgtaactgaatg

SEQ ID NO: 1696851 - DNA, 15 bp, Homo sapiens
aatgtaactgaatgt

SEQ ID NO: 1696852 - DNA, 15 bp, Homo sapiens
atgtaactgaatgtg

SEQ ID NO: 1696853 - DNA, 15 bp, Homo sapiens
tgtaactgaatgtgc

SEQ ID NO: 1696854 - DNA, 15 bp, Homo sapiens
gtaactgaatgtgca

SEQ ID NO: 1696855 - DNA, 15 bp, Homo sapiens
taactgaatgtgcag

SEQ ID NO: 1696856 - DNA, 15 bp, Homo sapiens
aactgaatgtgcaga

SEQ ID NO: 1696857 - DNA, 15 bp, Homo sapiens
actgaatgtgcagat

SEQ ID NO: 1696858 - DNA, 15 bp, Homo sapiens
ctgaatgtgcagata

SEQ ID NO: 1696859 - DNA, 15 bp, Homo sapiens
tgaatgtgcagatac

SEQ ID NO: 1696860 - DNA, 15 bp, Homo sapiens
gaatgtgcagataca

SEQ ID NO: 1696861 - DNA, 15 bp, Homo sapiens
aatgtgcagatacag

SEQ ID NO: 1696862 - DNA, 15 bp, Homo sapiens
atgtgcagatacagt

SEQ ID NO: 1696863 - DNA, 15 bp, Homo sapiens
tgtgcagatacagtc

SEQ ID NO: 1696864 - DNA, 15 bp, Homo sapiens
gtgcagatacagtca

SEQ ID NO: 1696865 - DNA, 15 bp, Homo sapiens
tgcagatacagtcag

SEQ ID NO: 1696866 - DNA, 15 bp, Homo sapiens
gcagatacagtcaga

SEQ ID NO: 1696867 - DNA, 15 bp, Homo sapiens
cagatacagtcagat

SEQ ID NO: 1696868 - DNA, 15 bp, Homo sapiens
agatacagtcagatg

SEQ ID NO: 1696869 - DNA, 15 bp, Homo sapiens
gatacagtcagatgt

SEQ ID NO: 1696870 - DNA, 15 bp, Homo sapiens
atacagtcagatgtg

SEQ ID NO: 1696871 - DNA, 15 bp, Homo sapiens
tacagtcagatgtgg

SEQ ID NO: 1696872 - DNA, 15 bp, Homo sapiens
acagtcagatgtggc

SEQ ID NO: 1696873 - DNA, 15 bp, Homo sapiens
cagtcagatgtggca

SEQ ID NO: 1696874 - DNA, 15 bp, Homo sapiens
agtcagatgtggcat

SEQ ID NO: 1696875 - DNA, 15 bp, Homo sapiens
gtcagatgtggcata

SEQ ID NO: 1696876 - DNA, 15 bp, Homo sapiens
tcagatgtggcatag

SEQ ID NO: 1696877 - DNA, 15 bp, Homo sapiens
cagatgtggcatagc

SEQ ID NO: 1696878 - DNA, 15 bp, Homo sapiens
agatgtggcatagca

SEQ ID NO: 1696879 - DNA, 15 bp, Homo sapiens
gatgtggcatagcaa

SEQ ID NO: 1696880 - DNA, 15 bp, Homo sapiens
atgtggcatagcaac

SEQ ID NO: 1696881 - DNA, 15 bp, Homo sapiens
tgtggcatagcaaca

SEQ ID NO: 1696882 - DNA, 15 bp, Homo sapiens
gtggcatagcaacat

SEQ ID NO: 1696883 - DNA, 15 bp, Homo sapiens
tggcatagcaacatt

SEQ ID NO: 1696884 - DNA, 15 bp, Homo sapiens
ggcatagcaacattt

SEQ ID NO: 1696885 - DNA, 15 bp, Homo sapiens
gcatagcaacatttc

SEQ ID NO: 1696886 - DNA, 15 bp, Homo sapiens
catagcaacatttca

SEQ ID NO: 1696887 - DNA, 15 bp, Homo sapiens
atagcaacatttcag

SEQ ID NO: 1696888 - DNA, 15 bp, Homo sapiens
tagcaacatttcagt

SEQ ID NO: 1696889 - DNA, 15 bp, Homo sapiens
agcaacatttcagtc

SEQ ID NO: 1696890 - DNA, 15 bp, Homo sapiens
gcaacatttcagtca

SEQ ID NO: 1696891 - DNA, 15 bp, Homo sapiens
caacatttcagtcag

SEQ ID NO: 1696892 - DNA, 15 bp, Homo sapiens
aacatttcagtcagt

SEQ ID NO: 1696893 - DNA, 15 bp, Homo sapiens
acatttcagtcagtg

SEQ ID NO: 1696894 - DNA, 15 bp, Homo sapiens
catttcagtcagtga

SEQ ID NO: 1696895 - DNA, 15 bp, Homo sapiens
atttcagtcagtgat

SEQ ID NO: 1696896 - DNA, 15 bp, Homo sapiens
tttcagtcagtgatt

SEQ ID NO: 1696897 - DNA, 15 bp, Homo sapiens
ttcagtcagtgattg

SEQ ID NO: 1696898 - DNA, 15 bp, Homo sapiens
tcagtcagtgattga

SEQ ID NO: 1696899 - DNA, 15 bp, Homo sapiens
cagtcagtgattgat

SEQ ID NO: 1696900 - DNA, 15 bp, Homo sapiens
agtcagtgattgatt

SEQ ID NO: 1696901 - DNA, 15 bp, Homo sapiens
gtcagtgattgattt

SEQ ID NO: 1696902 - DNA, 15 bp, Homo sapiens
tcagtgattgatttc

SEQ ID NO: 1696903 - DNA, 15 bp, Homo sapiens
cagtgattgatttca

SEQ ID NO: 1696904 - DNA, 15 bp, Homo sapiens
agtgattgatttcat

SEQ ID NO: 1696905 - DNA, 15 bp, Homo sapiens
gtgattgatttcata

SEQ ID NO: 1696906 - DNA, 15 bp, Homo sapiens
tgattgatttcatat

SEQ ID NO: 1696907 - DNA, 15 bp, Homo sapiens
gattgatttcatata

SEQ ID NO: 1696908 - DNA, 15 bp, Homo sapiens
attgatttcatatat

SEQ ID NO: 1696909 - DNA, 15 bp, Homo sapiens
ttgatttcatatatg

SEQ ID NO: 1696910 - DNA, 15 bp, Homo sapiens
tgatttcatatatga

SEQ ID NO: 1696911 - DNA, 15 bp, Homo sapiens
gatttcatatatgat

SEQ ID NO: 1696912 - DNA, 15 bp, Homo sapiens
atttcatatatgatg

SEQ ID NO: 1696913 - DNA, 15 bp, Homo sapiens
tttcatatatgatgg

SEQ ID NO: 1696914 - DNA, 15 bp, Homo sapiens
ttcatatatgatggt

SEQ ID NO: 1696915 - DNA, 15 bp, Homo sapiens
tcatatatgatggtg

SEQ ID NO: 1696916 - DNA, 15 bp, Homo sapiens
catatatgatggtgg

SEQ ID NO: 1696917 - DNA, 15 bp, Homo sapiens
atatatgatggtggt

SEQ ID NO: 1696918 - DNA, 15 bp, Homo sapiens
tatatgatggtggtt

SEQ ID NO: 1696919 - DNA, 15 bp, Homo sapiens
atatgatggtggttc

SEQ ID NO: 1696920 - DNA, 15 bp, Homo sapiens
tatgatggtggttcc

SEQ ID NO: 1696921 - DNA, 15 bp, Homo sapiens
atgatggtggttcca

SEQ ID NO: 1696922 - DNA, 15 bp, Homo sapiens
tgatggtggttccat

SEQ ID NO: 1696923 - DNA, 15 bp, Homo sapiens
gatggtggttccata

SEQ ID NO: 1696924 - DNA, 15 bp, Homo sapiens
atggtggttccataa

SEQ ID NO: 1696925 - DNA, 15 bp, Homo sapiens
tggtggttccataag

SEQ ID NO: 1696926 - DNA, 15 bp, Homo sapiens
ggtggttccataaga

SEQ ID NO: 1696927 - DNA, 15 bp, Homo sapiens
gtggttccataagat

SEQ ID NO: 1696928 - DNA, 15 bp, Homo sapiens
tggttccataagatt

SEQ ID NO: 1696929 - DNA, 15 bp, Homo sapiens
ggttccataagatta

SEQ ID NO: 1696930 - DNA, 15 bp, Homo sapiens
gttccataagattat

SEQ ID NO: 1696931 - DNA, 15 bp, Homo sapiens
ttccataagattata

SEQ ID NO: 1696932 - DNA, 15 bp, Homo sapiens
tccataagattataa

SEQ ID NO: 1696933 - DNA, 15 bp, Homo sapiens
ccataagattataat

SEQ ID NO: 1696934 - DNA, 15 bp, Homo sapiens
cataagattataatg

SEQ ID NO: 1696935 - DNA, 15 bp, Homo sapiens
ataagattataatgg

SEQ ID NO: 1696936 - DNA, 15 bp, Homo sapiens
taagattataatgga

SEQ ID NO: 1696937 - DNA, 15 bp, Homo sapiens
aagattataatggaa

SEQ ID NO: 1696938 - DNA, 15 bp, Homo sapiens
agattataatggaac

SEQ ID NO: 1696939 - DNA, 15 bp, Homo sapiens
gattataatggaaca

SEQ ID NO: 1696940 - DNA, 15 bp, Homo sapiens
attataatggaacat

SEQ ID NO: 1696941 - DNA, 15 bp, Homo sapiens
ttataatggaacatg

SEQ ID NO: 1696942 - DNA, 15 bp, Homo sapiens
tataatggaacatgt

SEQ ID NO: 1696943 - DNA, 15 bp, Homo sapiens
ataatggaacatgta

SEQ ID NO: 1696944 - DNA, 15 bp, Homo sapiens
taatggaacatgtat

SEQ ID NO: 1696945 - DNA, 15 bp, Homo sapiens
aatggaacatgtata

SEQ ID NO: 1696946 - DNA, 15 bp, Homo sapiens
atggaacatgtatag

SEQ ID NO: 1696947 - DNA, 15 bp, Homo sapiens
tggaacatgtataga

SEQ ID NO: 1696948 - DNA, 15 bp, Homo sapiens
ggaacatgtatagaa

SEQ ID NO: 1696949 - DNA, 15 bp, Homo sapiens
gaacatgtatagaaa

SEQ ID NO: 1696950 - DNA, 15 bp, Homo sapiens
aacatgtatagaaat

SEQ ID NO: 1696951 - DNA, 15 bp, Homo sapiens
acatgtatagaaatc

SEQ ID NO: 1696952 - DNA, 15 bp, Homo sapiens
catgtatagaaatct

SEQ ID NO: 1696953 - DNA, 15 bp, Homo sapiens
atgtatagaaatctg

SEQ ID NO: 1696954 - DNA, 15 bp, Homo sapiens
tgtatagaaatctga

SEQ ID NO: 1696955 - DNA, 15 bp, Homo sapiens
gtatagaaatctgat

SEQ ID NO: 1696956 - DNA, 15 bp, Homo sapiens
tatagaaatctgata

SEQ ID NO: 1696957 - DNA, 15 bp, Homo sapiens
atagaaatctgatat

SEQ ID NO: 1696958 - DNA, 15 bp, Homo sapiens
tagaaatctgatata

SEQ ID NO: 1696959 - DNA, 15 bp, Homo sapiens
agaaatctgatatat

SEQ ID NO: 1696960 - DNA, 15 bp, Homo sapiens
gaaatctgatatatg

SEQ ID NO: 1696961 - DNA, 15 bp, Homo sapiens
aaatctgatatatgt

SEQ ID NO: 1696962 - DNA, 15 bp, Homo sapiens
aatctgatatatgtc

SEQ ID NO: 1696963 - DNA, 15 bp, Homo sapiens
atctgatatatgtca

SEQ ID NO: 1696964 - DNA, 15 bp, Homo sapiens
tctgatatatgtcac

SEQ ID NO: 1696965 - DNA, 15 bp, Homo sapiens
ctgatatatgtcact

SEQ ID NO: 1696966 - DNA, 15 bp, Homo sapiens
tgatatatgtcactt

SEQ ID NO: 1696967 - DNA, 15 bp, Homo sapiens
gatatatgtcacttg

SEQ ID NO: 1696968 - DNA, 15 bp, Homo sapiens
atatatgtcacttga

SEQ ID NO: 1696969 - DNA, 15 bp, Homo sapiens
tatatgtcacttgat

SEQ ID NO: 1696970 - DNA, 15 bp, Homo sapiens
atatgtcacttgatg

SEQ ID NO: 1696971 - DNA, 15 bp, Homo sapiens
tatgtcacttgatgt

SEQ ID NO: 1696972 - DNA, 15 bp, Homo sapiens
atgtcacttgatgtt

SEQ ID NO: 1696973 - DNA, 15 bp, Homo sapiens
tgtcacttgatgttg

SEQ ID NO: 1696974 - DNA, 15 bp, Homo sapiens
gtcacttgatgttgg

SEQ ID NO: 1696975 - DNA, 15 bp, Homo sapiens
tcacttgatgttggc

SEQ ID NO: 1696976 - DNA, 15 bp, Homo sapiens
cacttgatgttggca

SEQ ID NO: 1696977 - DNA, 15 bp, Homo sapiens
acttgatgttggcat

SEQ ID NO: 1696978 - DNA, 15 bp, Homo sapiens
cttgatgttggcatt

SEQ ID NO: 1696979 - DNA, 15 bp, Homo sapiens
ttgatgttggcattg

SEQ ID NO: 1696980 - DNA, 15 bp, Homo sapiens
tgatgttggcattgc

SEQ ID NO: 1696981 - DNA, 15 bp, Homo sapiens
gatgttggcattgca

SEQ ID NO: 1696982 - DNA, 15 bp, Homo sapiens
atgttggcattgcag

SEQ ID NO: 1696983 - DNA, 15 bp, Homo sapiens
tgttggcattgcaga

SEQ ID NO: 1696984 - DNA, 15 bp, Homo sapiens
gttggcattgcagat

SEQ ID NO: 1696985 - DNA, 15 bp, Homo sapiens
ttggcattgcagatc

SEQ ID NO: 1696986 - DNA, 15 bp, Homo sapiens
tggcattgcagatca

SEQ ID NO: 1696987 - DNA, 15 bp, Homo sapiens
ggcattgcagatcaa

SEQ ID NO: 1696988 - DNA, 15 bp, Homo sapiens
gcattgcagatcaag

SEQ ID NO: 1696989 - DNA, 15 bp, Homo sapiens
cattgcagatcaagt

SEQ ID NO: 1696990 - DNA, 15 bp, Homo sapiens
attgcagatcaagtt

SEQ ID NO: 1696991 - DNA, 15 bp, Homo sapiens
ttgcagatcaagtta

SEQ ID NO: 1696992 - DNA, 15 bp, Homo sapiens
tgcagatcaagttaa

SEQ ID NO: 1696993 - DNA, 15 bp, Homo sapiens
gcagatcaagttaag

SEQ ID NO: 1696994 - DNA, 15 bp, Homo sapiens
cagatcaagttaaga

SEQ ID NO: 1696995 - DNA, 15 bp, Homo sapiens
agatcaagttaagag

SEQ ID NO: 1696996 - DNA, 15 bp, Homo sapiens
gatcaagttaagaga

SEQ ID NO: 1696997 - DNA, 15 bp, Homo sapiens
atcaagttaagagaa

SEQ ID NO: 1696998 - DNA, 15 bp, Homo sapiens
tcaagttaagagaaa

SEQ ID NO: 1696999 - DNA, 15 bp, Homo sapiens
caagttaagagaaat

SEQ ID NO: 1697000 - DNA, 15 bp, Homo sapiens
aagttaagagaaatg

SEQ ID NO: 1697001 - DNA, 15 bp, Homo sapiens
agttaagagaaatga

SEQ ID NO: 1697002 - DNA, 15 bp, Homo sapiens
gttaagagaaatgat

SEQ ID NO: 1697003 - DNA, 15 bp, Homo sapiens
ttaagagaaatgatt

SEQ ID NO: 1697004 - DNA, 15 bp, Homo sapiens
taagagaaatgattg

SEQ ID NO: 1697005 - DNA, 15 bp, Homo sapiens
aagagaaatgattga

SEQ ID NO: 1697006 - DNA, 15 bp, Homo sapiens
agagaaatgattgat

SEQ ID NO: 1697007 - DNA, 15 bp, Homo sapiens
gagaaatgattgata

SEQ ID NO: 1697008 - DNA, 15 bp, Homo sapiens
agaaatgattgatat

SEQ ID NO: 1697009 - DNA, 15 bp, Homo sapiens
tgcagtgagaagtgg

SEQ ID NO: 1697010 - DNA, 15 bp, Homo sapiens
gcagtgagaagtggt

SEQ ID NO: 1697011 - DNA, 15 bp, Homo sapiens
cagtgagaagtggta

SEQ ID NO: 1697012 - DNA, 15 bp, Homo sapiens
agtgagaagtggtac

SEQ ID NO: 1697013 - DNA, 15 bp, Homo sapiens
gtgagaagtggtaca

SEQ ID NO: 1697014 - DNA, 15 bp, Homo sapiens
tgagaagtggtacac

SEQ ID NO: 1697015 - DNA, 15 bp, Homo sapiens
gagaagtggtacaca

SEQ ID NO: 1697016 - DNA, 15 bp, Homo sapiens
agaagtggtacacag

SEQ ID NO: 1697017 - DNA, 15 bp, Homo sapiens
gaagtggtacacagc

SEQ ID NO: 1697018 - DNA, 15 bp, Homo sapiens
aagtggtacacagct

SEQ ID NO: 1697019 - DNA, 15 bp, Homo sapiens
agtggtacacagctt

SEQ ID NO: 1697020 - DNA, 15 bp, Homo sapiens
gtggtacacagcttc

SEQ ID NO: 1697021 - DNA, 15 bp, Homo sapiens
tggtacacagcttca

SEQ ID NO: 1697022 - DNA, 15 bp, Homo sapiens
ggtacacagcttcag

SEQ ID NO: 1697023 - DNA, 15 bp, Homo sapiens
gtacacagcttcaga

SEQ ID NO: 1697024 - DNA, 15 bp, Homo sapiens
tacacagcttcagag

SEQ ID NO: 1697025 - DNA, 15 bp, Homo sapiens
acacagcttcagaga

SEQ ID NO: 1697026 - DNA, 15 bp, Homo sapiens
cacagcttcagagaa

SEQ ID NO: 1697027 - DNA, 15 bp, Homo sapiens
acagcttcagagaag

SEQ ID NO: 1697028 - DNA, 15 bp, Homo sapiens
cagcttcagagaagg

SEQ ID NO: 1697029 - DNA, 15 bp, Homo sapiens
agcttcagagaaggg

SEQ ID NO: 1697030 - DNA, 15 bp, Homo sapiens
gcttcagagaagggg

SEQ ID NO: 1697031 - DNA, 15 bp, Homo sapiens
cttcagagaagggga

SEQ ID NO: 1697032 - DNA, 15 bp, Homo sapiens
ttcagagaaggggag

SEQ ID NO: 1697033 - DNA, 15 bp, Homo sapiens
tcagagaaggggaga

SEQ ID NO: 1697034 - DNA, 15 bp, Homo sapiens
cagagaaggggagag

SEQ ID NO: 1697035 - DNA, 15 bp, Homo sapiens
agagaaggggagaga

SEQ ID NO: 1697036 - DNA, 15 bp, Homo sapiens
gagaaggggagagac

SEQ ID NO: 1697037 - DNA, 15 bp, Homo sapiens
agaaggggagagaca

SEQ ID NO: 1697038 - DNA, 15 bp, Homo sapiens
gaaggggagagacag

SEQ ID NO: 1697039 - DNA, 15 bp, Homo sapiens
aaggggagagacaga

SEQ ID NO: 1697040 - DNA, 15 bp, Homo sapiens
aggggagagacagat

SEQ ID NO: 1697041 - DNA, 15 bp, Homo sapiens
ggggagagacagatg

SEQ ID NO: 1697042 - DNA, 15 bp, Homo sapiens
gggagagacagatgt

SEQ ID NO: 1697043 - DNA, 15 bp, Homo sapiens
ggagagacagatgtt

SEQ ID NO: 1697044 - DNA, 15 bp, Homo sapiens
gagagacagatgttg

SEQ ID NO: 1697045 - DNA, 15 bp, Homo sapiens
agagacagatgttgt

SEQ ID NO: 1697046 - DNA, 15 bp, Homo sapiens
gagacagatgttgtc

SEQ ID NO: 1697047 - DNA, 15 bp, Homo sapiens
agacagatgttgtca

SEQ ID NO: 1697048 - DNA, 15 bp, Homo sapiens
gacagatgttgtcag

SEQ ID NO: 1697049 - DNA, 15 bp, Homo sapiens
acagatgttgtcagt

SEQ ID NO: 1697050 - DNA, 15 bp, Homo sapiens
cagatgttgtcagtt

SEQ ID NO: 1697051 - DNA, 15 bp, Homo sapiens
agatgttgtcagttt

SEQ ID NO: 1697052 - DNA, 15 bp, Homo sapiens
gatgttgtcagtttc

SEQ ID NO: 1697053 - DNA, 15 bp, Homo sapiens
atgttgtcagtttct

SEQ ID NO: 1697054 - DNA, 15 bp, Homo sapiens
tgttgtcagtttctg

SEQ ID NO: 1697055 - DNA, 15 bp, Homo sapiens
gttgtcagtttctga

SEQ ID NO: 1697056 - DNA, 15 bp, Homo sapiens
ttgtcagtttctgaa

SEQ ID NO: 1697057 - DNA, 15 bp, Homo sapiens
tgtcagtttctgaaa

SEQ ID NO: 1697058 - DNA, 15 bp, Homo sapiens
gtcagtttctgaaaa

SEQ ID NO: 1697059 - DNA, 15 bp, Homo sapiens
tcagtttctgaaaag

SEQ ID NO: 1697060 - DNA, 15 bp, Homo sapiens
cagtttctgaaaagg

SEQ ID NO: 1697061 - DNA, 15 bp, Homo sapiens
agtttctgaaaaggg

SEQ ID NO: 1697062 - DNA, 15 bp, Homo sapiens
gtttctgaaaaggga

SEQ ID NO: 1697063 - DNA, 15 bp, Homo sapiens
tttctgaaaagggat

SEQ ID NO: 1697064 - DNA, 15 bp, Homo sapiens
ttctgaaaagggatg

SEQ ID NO: 1697065 - DNA, 15 bp, Homo sapiens
tctgaaaagggatgg

SEQ ID NO: 1697066 - DNA, 15 bp, Homo sapiens
ctgaaaagggatggt

SEQ ID NO: 1697067 - DNA, 15 bp, Homo sapiens
tgaaaagggatggtg

SEQ ID NO: 1697068 - DNA, 15 bp, Homo sapiens
gaaaagggatggtgt

SEQ ID NO: 1697069 - DNA, 15 bp, Homo sapiens
aaaagggatggtgtt

SEQ ID NO: 1697070 - DNA, 15 bp, Homo sapiens
aaagggatggtgttt

SEQ ID NO: 1697071 - DNA, 15 bp, Homo sapiens
aagggatggtgtttc

SEQ ID NO: 1697072 - DNA, 15 bp, Homo sapiens
agggatggtgtttct

SEQ ID NO: 1697073 - DNA, 15 bp, Homo sapiens
gggatggtgtttcta

SEQ ID NO: 1697074 - DNA, 15 bp, Homo sapiens
ggatggtgtttctag

SEQ ID NO: 1697075 - DNA, 15 bp, Homo sapiens
gatggtgtttctagt

SEQ ID NO: 1697076 - DNA, 15 bp, Homo sapiens
atggtgtttctagtg

SEQ ID NO: 1697077 - DNA, 15 bp, Homo sapiens
tggtgtttctagtgg

SEQ ID NO: 1697078 - DNA, 15 bp, Homo sapiens
ggtgtttctagtgga

SEQ ID NO: 1697079 - DNA, 15 bp, Homo sapiens
gtgtttctagtggat

SEQ ID NO: 1697080 - DNA, 15 bp, Homo sapiens
tgtttctagtggatg

SEQ ID NO: 1697081 - DNA, 15 bp, Homo sapiens
gtttctagtggatga

SEQ ID NO: 1697082 - DNA, 15 bp, Homo sapiens
tttctagtggatgag

SEQ ID NO: 1697083 - DNA, 15 bp, Homo sapiens
ttctagtggatgaga

SEQ ID NO: 1697084 - DNA, 15 bp, Homo sapiens
tctagtggatgagag

SEQ ID NO: 1697085 - DNA, 15 bp, Homo sapiens
ctagtggatgagaga

SEQ ID NO: 1697086 - DNA, 15 bp, Homo sapiens
tagtggatgagagag

SEQ ID NO: 1697087 - DNA, 15 bp, Homo sapiens
agtggatgagagagg

SEQ ID NO: 1697088 - DNA, 15 bp, Homo sapiens
gtggatgagagaggt

SEQ ID NO: 1697089 - DNA, 15 bp, Homo sapiens
tggatgagagaggta

SEQ ID NO: 1697090 - DNA, 15 bp, Homo sapiens
ggatgagagaggtaa

SEQ ID NO: 1697091 - DNA, 15 bp, Homo sapiens
gatgagagaggtaaa

SEQ ID NO: 1697092 - DNA, 15 bp, Homo sapiens
atgagagaggtaaac

SEQ ID NO: 1697093 - DNA, 15 bp, Homo sapiens
tgagagaggtaaacc

SEQ ID NO: 1697094 - DNA, 15 bp, Homo sapiens
gagagaggtaaacct

SEQ ID NO: 1697095 - DNA, 15 bp, Homo sapiens
agagaggtaaacctg

SEQ ID NO: 1697096 - DNA, 15 bp, Homo sapiens
gagaggtaaacctgc

SEQ ID NO: 1697097 - DNA, 15 bp, Homo sapiens
agaggtaaacctgcc

SEQ ID NO: 1697098 - DNA, 15 bp, Homo sapiens
gaggtaaacctgcct

SEQ ID NO: 1697099 - DNA, 15 bp, Homo sapiens
aggtaaacctgccta

SEQ ID NO: 1697100 - DNA, 15 bp, Homo sapiens
ggtaaacctgcctag

SEQ ID NO: 1697101 - DNA, 15 bp, Homo sapiens
gtaaacctgcctagc

SEQ ID NO: 1697102 - DNA, 15 bp, Homo sapiens
taaacctgcctagca

SEQ ID NO: 1697103 - DNA, 15 bp, Homo sapiens
aaacctgcctagcac

SEQ ID NO: 1697104 - DNA, 15 bp, Homo sapiens
aacctgcctagcaca

SEQ ID NO: 1697105 - DNA, 15 bp, Homo sapiens
acctgcctagcacat

SEQ ID NO: 1697106 - DNA, 15 bp, Homo sapiens
cctgcctagcacatg

SEQ ID NO: 1697107 - DNA, 15 bp, Homo sapiens
ctgcctagcacatgc

SEQ ID NO: 1697108 - DNA, 15 bp, Homo sapiens
tgcctagcacatgca

SEQ ID NO: 1697109 - DNA, 15 bp, Homo sapiens
gcctagcacatgcac

SEQ ID NO: 1697110 - DNA, 15 bp, Homo sapiens
cctagcacatgcact

SEQ ID NO: 1697111 - DNA, 15 bp, Homo sapiens
ctagcacatgcactg

SEQ ID NO: 1697112 - DNA, 15 bp, Homo sapiens
tagcacatgcactgc

SEQ ID NO: 1697113 - DNA, 15 bp, Homo sapiens
agcacatgcactgcc

SEQ ID NO: 1697114 - DNA, 15 bp, Homo sapiens
gcacatgcactgccc

SEQ ID NO: 1697115 - DNA, 15 bp, Homo sapiens
cacatgcactgccca

SEQ ID NO: 1697116 - DNA, 15 bp, Homo sapiens
acatgcactgcccat

SEQ ID NO: 1697117 - DNA, 15 bp, Homo sapiens
catgcactgcccatg

SEQ ID NO: 1697118 - DNA, 15 bp, Homo sapiens
atgcactgcccatgg

SEQ ID NO: 1697119 - DNA, 15 bp, Homo sapiens
tgcactgcccatggc

SEQ ID NO: 1697120 - DNA, 15 bp, Homo sapiens
gcactgcccatggcc

SEQ ID NO: 1697121 - DNA, 15 bp, Homo sapiens
cactgcccatggcct

SEQ ID NO: 1697122 - DNA, 15 bp, Homo sapiens
actgcccatggcctc

SEQ ID NO: 1697123 - DNA, 15 bp, Homo sapiens
ctgcccatggcctca

SEQ ID NO: 1697124 - DNA, 15 bp, Homo sapiens
tgcccatggcctcat

SEQ ID NO: 1697125 - DNA, 15 bp, Homo sapiens
gcccatggcctcatg

SEQ ID NO: 1697126 - DNA, 15 bp, Homo sapiens
cccatggcctcatga

SEQ ID NO: 1697127 - DNA, 15 bp, Homo sapiens
ccatggcctcatgac

SEQ ID NO: 1697128 - DNA, 15 bp, Homo sapiens
catggcctcatgaca

SEQ ID NO: 1697129 - DNA, 15 bp, Homo sapiens
atggcctcatgacag

SEQ ID NO: 1697130 - DNA, 15 bp, Homo sapiens
tggcctcatgacagc

SEQ ID NO: 1697131 - DNA, 15 bp, Homo sapiens
ggcctcatgacagcc

SEQ ID NO: 1697132 - DNA, 15 bp, Homo sapiens
gcctcatgacagcct

SEQ ID NO: 1697133 - DNA, 15 bp, Homo sapiens
cctcatgacagccta

SEQ ID NO: 1697134 - DNA, 15 bp, Homo sapiens
ctcatgacagcctag

SEQ ID NO: 1697135 - DNA, 15 bp, Homo sapiens
tcatgacagcctagg

SEQ ID NO: 1697136 - DNA, 15 bp, Homo sapiens
catgacagcctaggc

SEQ ID NO: 1697137 - DNA, 15 bp, Homo sapiens
atgacagcctaggct

SEQ ID NO: 1697138 - DNA, 15 bp, Homo sapiens
tgacagcctaggcta

SEQ ID NO: 1697139 - DNA, 15 bp, Homo sapiens
gacagcctaggctag

SEQ ID NO: 1697140 - DNA, 15 bp, Homo sapiens
acagcctaggctaga

SEQ ID NO: 1697141 - DNA, 15 bp, Homo sapiens
cagcctaggctagac

SEQ ID NO: 1697142 - DNA, 15 bp, Homo sapiens
agcctaggctagaca

SEQ ID NO: 1697143 - DNA, 15 bp, Homo sapiens
gcctaggctagacag

SEQ ID NO: 1697144 - DNA, 15 bp, Homo sapiens
cctaggctagacagc

SEQ ID NO: 1697145 - DNA, 15 bp, Homo sapiens
ctaggctagacagct

SEQ ID NO: 1697146 - DNA, 15 bp, Homo sapiens
taggctagacagctc

SEQ ID NO: 1697147 - DNA, 15 bp, Homo sapiens
aggctagacagctcg

SEQ ID NO: 1697148 - DNA, 15 bp, Homo sapiens
ggctagacagctcga

SEQ ID NO: 1697149 - DNA, 15 bp, Homo sapiens
gctagacagctcgaa

SEQ ID NO: 1697150 - DNA, 15 bp, Homo sapiens
ctagacagctcgaat

SEQ ID NO: 1697151 - DNA, 15 bp, Homo sapiens
tagacagctcgaatg

SEQ ID NO: 1697152 - DNA, 15 bp, Homo sapiens
agacagctcgaatga

SEQ ID NO: 1697153 - DNA, 15 bp, Homo sapiens
gacagctcgaatgat

SEQ ID NO: 1697154 - DNA, 15 bp, Homo sapiens
acagctcgaatgatc

SEQ ID NO: 1697155 - DNA, 15 bp, Homo sapiens
cagctcgaatgatct

SEQ ID NO: 1697156 - DNA, 15 bp, Homo sapiens
agctcgaatgatctg

SEQ ID NO: 1697157 - DNA, 15 bp, Homo sapiens
gctcgaatgatctgg

SEQ ID NO: 1697158 - DNA, 15 bp, Homo sapiens
ctcgaatgatctgga

SEQ ID NO: 1697159 - DNA, 15 bp, Homo sapiens
tcgaatgatctggag

SEQ ID NO: 1697160 - DNA, 15 bp, Homo sapiens
cgaatgatctggaga

SEQ ID NO: 1697161 - DNA, 15 bp, Homo sapiens
gaatgatctggagaa

SEQ ID NO: 1697162 - DNA, 15 bp, Homo sapiens
aatgatctggagaat

SEQ ID NO: 1697163 - DNA, 15 bp, Homo sapiens
atgatctggagaatg

SEQ ID NO: 1697164 - DNA, 15 bp, Homo sapiens
tgatctggagaatgg

SEQ ID NO: 1697165 - DNA, 15 bp, Homo sapiens
gatctggagaatggt

SEQ ID NO: 1697166 - DNA, 15 bp, Homo sapiens
atctggagaatggtg

SEQ ID NO: 1697167 - DNA, 15 bp, Homo sapiens
tctggagaatggtga

SEQ ID NO: 1697168 - DNA, 15 bp, Homo sapiens
ctggagaatggtgaa

SEQ ID NO: 1697169 - DNA, 15 bp, Homo sapiens
tggagaatggtgaaa

SEQ ID NO: 1697170 - DNA, 15 bp, Homo sapiens
ggagaatggtgaaag

SEQ ID NO: 1697171 - DNA, 15 bp, Homo sapiens
gagaatggtgaaaga

SEQ ID NO: 1697172 - DNA, 15 bp, Homo sapiens
agaatggtgaaagag

SEQ ID NO: 1697173 - DNA, 15 bp, Homo sapiens
gaatggtgaaagaga

SEQ ID NO: 1697174 - DNA, 15 bp, Homo sapiens
aatggtgaaagagag

SEQ ID NO: 1697175 - DNA, 15 bp, Homo sapiens
atggtgaaagagaga

SEQ ID NO: 1697176 - DNA, 15 bp, Homo sapiens
tggtgaaagagagag

SEQ ID NO: 1697177 - DNA, 15 bp, Homo sapiens
ggtgaaagagagaga

SEQ ID NO: 1697178 - DNA, 15 bp, Homo sapiens
gtgaaagagagagac

SEQ ID NO: 1697179 - DNA, 15 bp, Homo sapiens
tgaaagagagagact

SEQ ID NO: 1697180 - DNA, 15 bp, Homo sapiens
gaaagagagagactt

SEQ ID NO: 1697181 - DNA, 15 bp, Homo sapiens
aaagagagagactta

SEQ ID NO: 1697182 - DNA, 15 bp, Homo sapiens
aagagagagacttaa

SEQ ID NO: 1697183 - DNA, 15 bp, Homo sapiens
agagagagacttaaa

SEQ ID NO: 1697184 - DNA, 15 bp, Homo sapiens
gagagagacttaaaa

SEQ ID NO: 1697185 - DNA, 15 bp, Homo sapiens
agagagacttaaaaa

SEQ ID NO: 1697186 - DNA, 15 bp, Homo sapiens
gagagacttaaaaaa

SEQ ID NO: 1697187 - DNA, 15 bp, Homo sapiens
agagacttaaaaaat

SEQ ID NO: 1697188 - DNA, 15 bp, Homo sapiens
gagacttaaaaaata

SEQ ID NO: 1697189 - DNA, 15 bp, Homo sapiens
agacttaaaaaatat

SEQ ID NO: 1697190 - DNA, 15 bp, Homo sapiens
gacttaaaaaatata

SEQ ID NO: 1697191 - DNA, 15 bp, Homo sapiens
acttaaaaaatataa

SEQ ID NO: 1697192 - DNA, 15 bp, Homo sapiens
cttaaaaaatataaa

SEQ ID NO: 1697193 - DNA, 15 bp, Homo sapiens
ttaaaaaatataaag

SEQ ID NO: 1697194 - DNA, 15 bp, Homo sapiens
taaaaaatataaagt

SEQ ID NO: 1697195 - DNA, 15 bp, Homo sapiens
aaaaaatataaagta

SEQ ID NO: 1697196 - DNA, 15 bp, Homo sapiens
aaaaatataaagtag

SEQ ID NO: 1697197 - DNA, 15 bp, Homo sapiens
aaatataaagtagat

SEQ ID NO: 1697198 - DNA, 15 bp, Homo sapiens
aatataaagtagata

SEQ ID NO: 1697199 - DNA, 15 bp, Homo sapiens
atataaagtagatat

SEQ ID NO: 1697200 - DNA, 15 bp, Homo sapiens
tataaagtagatatc

SEQ ID NO: 1697201 - DNA, 15 bp, Homo sapiens
ataaagtagatatcc

SEQ ID NO: 1697202 - DNA, 15 bp, Homo sapiens
taaagtagatatcca

SEQ ID NO: 1697203 - DNA, 15 bp, Homo sapiens
aaagtagatatccaa

SEQ ID NO: 1697204 - DNA, 15 bp, Homo sapiens
aagtagatatccaag

SEQ ID NO: 1697205 - DNA, 15 bp, Homo sapiens
agtagatatccaagg

SEQ ID NO: 1697206 - DNA, 15 bp, Homo sapiens
gtagatatccaaggg

SEQ ID NO: 1697207 - DNA, 15 bp, Homo sapiens
tagatatccaagggg

SEQ ID NO: 1697208 - DNA, 15 bp, Homo sapiens
agatatccaaggggc

SEQ ID NO: 1697209 - DNA, 15 bp, Homo sapiens
gatatccaaggggcc

SEQ ID NO: 1697210 - DNA, 15 bp, Homo sapiens
atatccaaggggcca

SEQ ID NO: 1697211 - DNA, 15 bp, Homo sapiens
tatccaaggggccaa

SEQ ID NO: 1697212 - DNA, 15 bp, Homo sapiens
atccaaggggccaag

SEQ ID NO: 1697213 - DNA, 15 bp, Homo sapiens
tccaaggggccaagg

SEQ ID NO: 1697214 - DNA, 15 bp, Homo sapiens
ccaaggggccaagga

SEQ ID NO: 1697215 - DNA, 15 bp, Homo sapiens
caaggggccaaggac

SEQ ID NO: 1697216 - DNA, 15 bp, Homo sapiens
aaggggccaaggaca

SEQ ID NO: 1697217 - DNA, 15 bp, Homo sapiens
aggggccaaggacat

SEQ ID NO: 1697218 - DNA, 15 bp, Homo sapiens
ggggccaaggacata

SEQ ID NO: 1697219 - DNA, 15 bp, Homo sapiens
gggccaaggacatag

SEQ ID NO: 1697220 - DNA, 15 bp, Homo sapiens
ggccaaggacatagg

SEQ ID NO: 1697221 - DNA, 15 bp, Homo sapiens
gccaaggacataggt

SEQ ID NO: 1697222 - DNA, 15 bp, Homo sapiens
ccaaggacataggtc

SEQ ID NO: 1697223 - DNA, 15 bp, Homo sapiens
caaggacataggtct

SEQ ID NO: 1697224 - DNA, 15 bp, Homo sapiens
aaggacataggtctt

SEQ ID NO: 1697225 - DNA, 15 bp, Homo sapiens
aggacataggtcttc

SEQ ID NO: 1697226 - DNA, 15 bp, Homo sapiens
ggacataggtcttcc

SEQ ID NO: 1697227 - DNA, 15 bp, Homo sapiens
gacataggtcttccc

SEQ ID NO: 1697228 - DNA, 15 bp, Homo sapiens
acataggtcttccca

SEQ ID NO: 1697229 - DNA, 15 bp, Homo sapiens
cataggtcttcccat

SEQ ID NO: 1697230 - DNA, 15 bp, Homo sapiens
ataggtcttcccata

SEQ ID NO: 1697231 - DNA, 15 bp, Homo sapiens
taggtcttcccatac

SEQ ID NO: 1697232 - DNA, 15 bp, Homo sapiens
aggtcttcccatact

SEQ ID NO: 1697233 - DNA, 15 bp, Homo sapiens
ggtcttcccatactc

SEQ ID NO: 1697234 - DNA, 15 bp, Homo sapiens
gtcttcccatactca

SEQ ID NO: 1697235 - DNA, 15 bp, Homo sapiens
tcttcccatactcag

SEQ ID NO: 1697236 - DNA, 15 bp, Homo sapiens
cttcccatactcaga

SEQ ID NO: 1697237 - DNA, 15 bp, Homo sapiens
ttcccatactcagaa

SEQ ID NO: 1697238 - DNA, 15 bp, Homo sapiens
tcccatactcagaac

SEQ ID NO: 1697239 - DNA, 15 bp, Homo sapiens
cccatactcagaact

SEQ ID NO: 1697240 - DNA, 15 bp, Homo sapiens
ccatactcagaactg

SEQ ID NO: 1697241 - DNA, 15 bp, Homo sapiens
catactcagaactgg

SEQ ID NO: 1697242 - DNA, 15 bp, Homo sapiens
atactcagaactgga

SEQ ID NO: 1697243 - DNA, 15 bp, Homo sapiens
tactcagaactggaa

SEQ ID NO: 1697244 - DNA, 15 bp, Homo sapiens
actcagaactggaag

SEQ ID NO: 1697245 - DNA, 15 bp, Homo sapiens
ctcagaactggaagg

SEQ ID NO: 1697246 - DNA, 15 bp, Homo sapiens
tcagaactggaaggt

SEQ ID NO: 1697247 - DNA, 15 bp, Homo sapiens
cagaactggaaggta

SEQ ID NO: 1697248 - DNA, 15 bp, Homo sapiens
agaactggaaggtag

SEQ ID NO: 1697249 - DNA, 15 bp, Homo sapiens
gaactggaaggtagt

SEQ ID NO: 1697250 - DNA, 15 bp, Homo sapiens
aactggaaggtagtc

SEQ ID NO: 1697251 - DNA, 15 bp, Homo sapiens
actggaaggtagtca

SEQ ID NO: 1697252 - DNA, 15 bp, Homo sapiens
ctggaaggtagtcag

SEQ ID NO: 1697253 - DNA, 15 bp, Homo sapiens
tggaaggtagtcagt

SEQ ID NO: 1697254 - DNA, 15 bp, Homo sapiens
ggaaggtagtcagtc

SEQ ID NO: 1697255 - DNA, 15 bp, Homo sapiens
gaaggtagtcagtca

SEQ ID NO: 1697256 - DNA, 15 bp, Homo sapiens
aaggtagtcagtcat

SEQ ID NO: 1697257 - DNA, 15 bp, Homo sapiens
aggtagtcagtcata

SEQ ID NO: 1697258 - DNA, 15 bp, Homo sapiens
ggtagtcagtcatat

SEQ ID NO: 1697259 - DNA, 15 bp, Homo sapiens
gtagtcagtcatatg

SEQ ID NO: 1697260 - DNA, 15 bp, Homo sapiens
tagtcagtcatatgt

SEQ ID NO: 1697261 - DNA, 15 bp, Homo sapiens
agtcagtcatatgtt

SEQ ID NO: 1697262 - DNA, 15 bp, Homo sapiens
gtcagtcatatgttg

SEQ ID NO: 1697263 - DNA, 15 bp, Homo sapiens
tcagtcatatgttga

SEQ ID NO: 1697264 - DNA, 15 bp, Homo sapiens
cagtcatatgttgat

SEQ ID NO: 1697265 - DNA, 15 bp, Homo sapiens
agtcatatgttgatg

SEQ ID NO: 1697266 - DNA, 15 bp, Homo sapiens
gtcatatgttgatgg

SEQ ID NO: 1697267 - DNA, 15 bp, Homo sapiens
tcatatgttgatggc

SEQ ID NO: 1697268 - DNA, 15 bp, Homo sapiens
catatgttgatggcc

SEQ ID NO: 1697269 - DNA, 15 bp, Homo sapiens
atatgttgatggcct

SEQ ID NO: 1697270 - DNA, 15 bp, Homo sapiens
tatgttgatggcctc

SEQ ID NO: 1697271 - DNA, 15 bp, Homo sapiens
atgttgatggcctct

SEQ ID NO: 1697272 - DNA, 15 bp, Homo sapiens
tgttgatggcctctc

SEQ ID NO: 1697273 - DNA, 15 bp, Homo sapiens
gttgatggcctctcc

SEQ ID NO: 1697274 - DNA, 15 bp, Homo sapiens
ttgatggcctctcct

SEQ ID NO: 1697275 - DNA, 15 bp, Homo sapiens
tgatggcctctcctg

SEQ ID NO: 1697276 - DNA, 15 bp, Homo sapiens
gatggcctctcctgc

SEQ ID NO: 1697277 - DNA, 15 bp, Homo sapiens
atggcctctcctgct

SEQ ID NO: 1697278 - DNA, 15 bp, Homo sapiens
tggcctctcctgctc

SEQ ID NO: 1697279 - DNA, 15 bp, Homo sapiens
ggcctctcctgctcc

SEQ ID NO: 1697280 - DNA, 15 bp, Homo sapiens
gcctctcctgctcca

SEQ ID NO: 1697281 - DNA, 15 bp, Homo sapiens
cctctcctgctccac

SEQ ID NO: 1697282 - DNA, 15 bp, Homo sapiens
ctctcctgctccaca

SEQ ID NO: 1697283 - DNA, 15 bp, Homo sapiens
tctcctgctccacaa

SEQ ID NO: 1697284 - DNA, 15 bp, Homo sapiens
ctcctgctccacaaa

SEQ ID NO: 1697285 - DNA, 15 bp, Homo sapiens
tcctgctccacaaac

SEQ ID NO: 1697286 - DNA, 15 bp, Homo sapiens
cctgctccacaaact

SEQ ID NO: 1697287 - DNA, 15 bp, Homo sapiens
ctgctccacaaactc

SEQ ID NO: 1697288 - DNA, 15 bp, Homo sapiens
tgctccacaaactcc

SEQ ID NO: 1697289 - DNA, 15 bp, Homo sapiens
gctccacaaactcct

SEQ ID NO: 1697290 - DNA, 15 bp, Homo sapiens
ctccacaaactccta

SEQ ID NO: 1697291 - DNA, 15 bp, Homo sapiens
tccacaaactcctac

SEQ ID NO: 1697292 - DNA, 15 bp, Homo sapiens
ccacaaactcctacc

SEQ ID NO: 1697293 - DNA, 15 bp, Homo sapiens
cacaaactcctacct

SEQ ID NO: 1697294 - DNA, 15 bp, Homo sapiens
acaaactcctacctt

SEQ ID NO: 1697295 - DNA, 15 bp, Homo sapiens
caaactcctaccttg

SEQ ID NO: 1697296 - DNA, 15 bp, Homo sapiens
aaactcctaccttgg

SEQ ID NO: 1697297 - DNA, 15 bp, Homo sapiens
aactcctaccttggc

SEQ ID NO: 1697298 - DNA, 15 bp, Homo sapiens
actcctaccttggca

SEQ ID NO: 1697299 - DNA, 15 bp, Homo sapiens
ctcctaccttggcat

SEQ ID NO: 1697300 - DNA, 15 bp, Homo sapiens
tcctaccttggcatc

SEQ ID NO: 1697301 - DNA, 15 bp, Homo sapiens
cctaccttggcatcc

SEQ ID NO: 1697302 - DNA, 15 bp, Homo sapiens
ctaccttggcatcca

SEQ ID NO: 1697303 - DNA, 15 bp, Homo sapiens
taccttggcatccat

SEQ ID NO: 1697304 - DNA, 15 bp, Homo sapiens
accttggcatccatt

SEQ ID NO: 1697305 - DNA, 15 bp, Homo sapiens
ccttggcatccattg

SEQ ID NO: 1697306 - DNA, 15 bp, Homo sapiens
cttggcatccattgc

SEQ ID NO: 1697307 - DNA, 15 bp, Homo sapiens
ttggcatccattgct

SEQ ID NO: 1697308 - DNA, 15 bp, Homo sapiens
tggcatccattgctc

SEQ ID NO: 1697309 - DNA, 15 bp, Homo sapiens
ggcatccattgctct

SEQ ID NO: 1697310 - DNA, 15 bp, Homo sapiens
gcatccattgctctg

SEQ ID NO: 1697311 - DNA, 15 bp, Homo sapiens
catccattgctctgc

SEQ ID NO: 1697312 - DNA, 15 bp, Homo sapiens
atccattgctctgca

SEQ ID NO: 1697313 - DNA, 15 bp, Homo sapiens
tccattgctctgcat

SEQ ID NO: 1697314 - DNA, 15 bp, Homo sapiens
ccattgctctgcatt

SEQ ID NO: 1697315 - DNA, 15 bp, Homo sapiens
cattgctctgcattt

SEQ ID NO: 1697316 - DNA, 15 bp, Homo sapiens
attgctctgcatttg

SEQ ID NO: 1697317 - DNA, 15 bp, Homo sapiens
ttgctctgcatttgc

SEQ ID NO: 1697318 - DNA, 15 bp, Homo sapiens
tgctctgcatttgct

SEQ ID NO: 1697319 - DNA, 15 bp, Homo sapiens
gctctgcatttgctt

SEQ ID NO: 1697320 - DNA, 15 bp, Homo sapiens
ctctgcatttgcttt

SEQ ID NO: 1697321 - DNA, 15 bp, Homo sapiens
tctgcatttgctttt

SEQ ID NO: 1697322 - DNA, 15 bp, Homo sapiens
ctgcatttgcttttt

SEQ ID NO: 1697323 - DNA, 15 bp, Homo sapiens
tgcatttgcttttta

SEQ ID NO: 1697324 - DNA, 15 bp, Homo sapiens
gcatttgctttttag

SEQ ID NO: 1697325 - DNA, 15 bp, Homo sapiens
catttgctttttagg

SEQ ID NO: 1697326 - DNA, 15 bp, Homo sapiens
atttgctttttaggt

SEQ ID NO: 1697327 - DNA, 15 bp, Homo sapiens
tttgctttttaggtc

SEQ ID NO: 1697328 - DNA, 15 bp, Homo sapiens
ttgctttttaggtcc

SEQ ID NO: 1697329 - DNA, 15 bp, Homo sapiens
tgctttttaggtcct

SEQ ID NO: 1697330 - DNA, 15 bp, Homo sapiens
gctttttaggtcctt

SEQ ID NO: 1697331 - DNA, 15 bp, Homo sapiens
ctttttaggtccttg

SEQ ID NO: 1697332 - DNA, 15 bp, Homo sapiens
tttttaggtccttga

SEQ ID NO: 1697333 - DNA, 15 bp, Homo sapiens
ttttaggtccttgac

SEQ ID NO: 1697334 - DNA, 15 bp, Homo sapiens
tttaggtccttgacc

SEQ ID NO: 1697335 - DNA, 15 bp, Homo sapiens
ttaggtccttgacct

SEQ ID NO: 1697336 - DNA, 15 bp, Homo sapiens
taggtccttgacctt

SEQ ID NO: 1697337 - DNA, 15 bp, Homo sapiens
aggtccttgacctta

SEQ ID NO: 1697338 - DNA, 15 bp, Homo sapiens
ggtccttgaccttaa

SEQ ID NO: 1697339 - DNA, 15 bp, Homo sapiens
gtccttgaccttaag

SEQ ID NO: 1697340 - DNA, 15 bp, Homo sapiens
tccttgaccttaagt

SEQ ID NO: 1697341 - DNA, 15 bp, Homo sapiens
ccttgaccttaagtc

SEQ ID NO: 1697342 - DNA, 15 bp, Homo sapiens
cttgaccttaagtct

SEQ ID NO: 1697343 - DNA, 15 bp, Homo sapiens
ttgaccttaagtctc

SEQ ID NO: 1697344 - DNA, 15 bp, Homo sapiens
tgaccttaagtctcc

SEQ ID NO: 1697345 - DNA, 15 bp, Homo sapiens
gaccttaagtctcct

SEQ ID NO: 1697346 - DNA, 15 bp, Homo sapiens
accttaagtctcctc

SEQ ID NO: 1697347 - DNA, 15 bp, Homo sapiens
ccttaagtctcctcc

SEQ ID NO: 1697348 - DNA, 15 bp, Homo sapiens
cttaagtctcctcct

SEQ ID NO: 1697349 - DNA, 15 bp, Homo sapiens
ttaagtctcctccta

SEQ ID NO: 1697350 - DNA, 15 bp, Homo sapiens
taagtctcctcctat

SEQ ID NO: 1697351 - DNA, 15 bp, Homo sapiens
aagtctcctcctatc

SEQ ID NO: 1697352 - DNA, 15 bp, Homo sapiens
agtctcctcctatca

SEQ ID NO: 1697353 - DNA, 15 bp, Homo sapiens
gtctcctcctatcaa

SEQ ID NO: 1697354 - DNA, 15 bp, Homo sapiens
tctcctcctatcaag

SEQ ID NO: 1697355 - DNA, 15 bp, Homo sapiens
ctcctcctatcaagc

SEQ ID NO: 1697356 - DNA, 15 bp, Homo sapiens
tcctcctatcaagca

SEQ ID NO: 1697357 - DNA, 15 bp, Homo sapiens
cctcctatcaagcac

SEQ ID NO: 1697358 - DNA, 15 bp, Homo sapiens
ctcctatcaagcacc

SEQ ID NO: 1697359 - DNA, 15 bp, Homo sapiens
tcctatcaagcacct

SEQ ID NO: 1697360 - DNA, 15 bp, Homo sapiens
cctatcaagcacctt

SEQ ID NO: 1697361 - DNA, 15 bp, Homo sapiens
ctatcaagcaccttg

SEQ ID NO: 1697362 - DNA, 15 bp, Homo sapiens
tatcaagcaccttgt

SEQ ID NO: 1697363 - DNA, 15 bp, Homo sapiens
atcaagcaccttgtt

SEQ ID NO: 1697364 - DNA, 15 bp, Homo sapiens
tcaagcaccttgttc

SEQ ID NO: 1697365 - DNA, 15 bp, Homo sapiens
caagcaccttgttct

SEQ ID NO: 1697366 - DNA, 15 bp, Homo sapiens
aagcaccttgttctc

SEQ ID NO: 1697367 - DNA, 15 bp, Homo sapiens
agcaccttgttctca

SEQ ID NO: 1697368 - DNA, 15 bp, Homo sapiens
gcaccttgttctcac

SEQ ID NO: 1697369 - DNA, 15 bp, Homo sapiens
caccttgttctcacc

SEQ ID NO: 1697370 - DNA, 15 bp, Homo sapiens
accttgttctcacca

SEQ ID NO: 1697371 - DNA, 15 bp, Homo sapiens
ccttgttctcaccag

SEQ ID NO: 1697372 - DNA, 15 bp, Homo sapiens
cttgttctcaccagc

SEQ ID NO: 1697373 - DNA, 15 bp, Homo sapiens
ttgttctcaccagct

SEQ ID NO: 1697374 - DNA, 15 bp, Homo sapiens
tgttctcaccagctg

SEQ ID NO: 1697375 - DNA, 15 bp, Homo sapiens
gttctcaccagctga

SEQ ID NO: 1697376 - DNA, 15 bp, Homo sapiens
ttctcaccagctgac

SEQ ID NO: 1697377 - DNA, 15 bp, Homo sapiens
tctcaccagctgaca

SEQ ID NO: 1697378 - DNA, 15 bp, Homo sapiens
ctcaccagctgacac

SEQ ID NO: 1697379 - DNA, 15 bp, Homo sapiens
tcaccagctgacaca

SEQ ID NO: 1697380 - DNA, 15 bp, Homo sapiens
caccagctgacacaa

SEQ ID NO: 1697381 - DNA, 15 bp, Homo sapiens
accagctgacacaag

SEQ ID NO: 1697382 - DNA, 15 bp, Homo sapiens
ccagctgacacaagc

SEQ ID NO: 1697383 - DNA, 15 bp, Homo sapiens
cagctgacacaagcc

SEQ ID NO: 1697384 - DNA, 15 bp, Homo sapiens
agctgacacaagcct

SEQ ID NO: 1697385 - DNA, 15 bp, Homo sapiens
gctgacacaagccta

SEQ ID NO: 1697386 - DNA, 15 bp, Homo sapiens
ctgacacaagcctat

SEQ ID NO: 1697387 - DNA, 15 bp, Homo sapiens
tgacacaagcctatt

SEQ ID NO: 1697388 - DNA, 15 bp, Homo sapiens
gacacaagcctattc

SEQ ID NO: 1697389 - DNA, 15 bp, Homo sapiens
acacaagcctattct

SEQ ID NO: 1697390 - DNA, 15 bp, Homo sapiens
cacaagcctattctg

SEQ ID NO: 1697391 - DNA, 15 bp, Homo sapiens
acaagcctattctgc

SEQ ID NO: 1697392 - DNA, 15 bp, Homo sapiens
caagcctattctgca

SEQ ID NO: 1697393 - DNA, 15 bp, Homo sapiens
aagcctattctgcac

SEQ ID NO: 1697394 - DNA, 15 bp, Homo sapiens
agcctattctgcaca

SEQ ID NO: 1697395 - DNA, 15 bp, Homo sapiens
gcctattctgcacac

SEQ ID NO: 1697396 - DNA, 15 bp, Homo sapiens
cctattctgcacacc

SEQ ID NO: 1697397 - DNA, 15 bp, Homo sapiens
ctattctgcacacct

SEQ ID NO: 1697398 - DNA, 15 bp, Homo sapiens
tattctgcacacctt

SEQ ID NO: 1697399 - DNA, 15 bp, Homo sapiens
attctgcacaccttc

SEQ ID NO: 1697400 - DNA, 15 bp, Homo sapiens
ttctgcacaccttct

SEQ ID NO: 1697401 - DNA, 15 bp, Homo sapiens
tctgcacaccttctg

SEQ ID NO: 1697402 - DNA, 15 bp, Homo sapiens
ctgcacaccttctgg

SEQ ID NO: 1697403 - DNA, 15 bp, Homo sapiens
tgcacaccttctgga

SEQ ID NO: 1697404 - DNA, 15 bp, Homo sapiens
gcacaccttctggag

SEQ ID NO: 1697405 - DNA, 15 bp, Homo sapiens
cacaccttctggaga

SEQ ID NO: 1697406 - DNA, 15 bp, Homo sapiens
acaccttctggagaa

SEQ ID NO: 1697407 - DNA, 15 bp, Homo sapiens
caccttctggagaag

SEQ ID NO: 1697408 - DNA, 15 bp, Homo sapiens
accttctggagaaga

SEQ ID NO: 1697409 - DNA, 15 bp, Homo sapiens
ccttctggagaagac

SEQ ID NO: 1697410 - DNA, 15 bp, Homo sapiens
cttctggagaagaca

SEQ ID NO: 1697411 - DNA, 15 bp, Homo sapiens
ttctggagaagacat

SEQ ID NO: 1697412 - DNA, 15 bp, Homo sapiens
tctggagaagacatc

SEQ ID NO: 1697413 - DNA, 15 bp, Homo sapiens
ctggagaagacatcc

SEQ ID NO: 1697414 - DNA, 15 bp, Homo sapiens
tggagaagacatcct

SEQ ID NO: 1697415 - DNA, 15 bp, Homo sapiens
ggagaagacatcctg

SEQ ID NO: 1697416 - DNA, 15 bp, Homo sapiens
gagaagacatcctga

SEQ ID NO: 1697417 - DNA, 15 bp, Homo sapiens
agaagacatcctgac

SEQ ID NO: 1697418 - DNA, 15 bp, Homo sapiens
gaagacatcctgacc

SEQ ID NO: 1697419 - DNA, 15 bp, Homo sapiens
aagacatcctgacct

SEQ ID NO: 1697420 - DNA, 15 bp, Homo sapiens
agacatcctgacctc

SEQ ID NO: 1697421 - DNA, 15 bp, Homo sapiens
gacatcctgacctct

SEQ ID NO: 1697422 - DNA, 15 bp, Homo sapiens
acatcctgacctctg

SEQ ID NO: 1697423 - DNA, 15 bp, Homo sapiens
catcctgacctctgt

SEQ ID NO: 1697424 - DNA, 15 bp, Homo sapiens
atcctgacctctgtt

SEQ ID NO: 1697425 - DNA, 15 bp, Homo sapiens
tcctgacctctgtta

SEQ ID NO: 1697426 - DNA, 15 bp, Homo sapiens
cctgacctctgttac

SEQ ID NO: 1697427 - DNA, 15 bp, Homo sapiens
ctgacctctgttacc

SEQ ID NO: 1697428 - DNA, 15 bp, Homo sapiens
tgacctctgttacct

SEQ ID NO: 1697429 - DNA, 15 bp, Homo sapiens
gacctctgttaccta

SEQ ID NO: 1697430 - DNA, 15 bp, Homo sapiens
acctctgttacctaa

SEQ ID NO: 1697431 - DNA, 15 bp, Homo sapiens
cctctgttacctaac

SEQ ID NO: 1697432 - DNA, 15 bp, Homo sapiens
ctctgttacctaact

SEQ ID NO: 1697433 - DNA, 15 bp, Homo sapiens
tctgttacctaactg

SEQ ID NO: 1697434 - DNA, 15 bp, Homo sapiens
ctgttacctaactgg

SEQ ID NO: 1697435 - DNA, 15 bp, Homo sapiens
tgttacctaactggg

SEQ ID NO: 1697436 - DNA, 15 bp, Homo sapiens
gttacctaactggga

SEQ ID NO: 1697437 - DNA, 15 bp, Homo sapiens
ttacctaactgggag

SEQ ID NO: 1697438 - DNA, 15 bp, Homo sapiens
tacctaactgggaga

SEQ ID NO: 1697439 - DNA, 15 bp, Homo sapiens
acctaactgggagaa

SEQ ID NO: 1697440 - DNA, 15 bp, Homo sapiens
cctaactgggagaaa

SEQ ID NO: 1697441 - DNA, 15 bp, Homo sapiens
ctaactgggagaaat

SEQ ID NO: 1697442 - DNA, 15 bp, Homo sapiens
taactgggagaaatg

SEQ ID NO: 1697443 - DNA, 15 bp, Homo sapiens
aactgggagaaatga

SEQ ID NO: 1697444 - DNA, 15 bp, Homo sapiens
actgggagaaatgac

SEQ ID NO: 1697445 - DNA, 15 bp, Homo sapiens
ctgggagaaatgact

SEQ ID NO: 1697446 - DNA, 15 bp, Homo sapiens
tgggagaaatgactt

SEQ ID NO: 1697447 - DNA, 15 bp, Homo sapiens
gggagaaatgacttc

SEQ ID NO: 1697448 - DNA, 15 bp, Homo sapiens
ggagaaatgacttca

SEQ ID NO: 1697449 - DNA, 15 bp, Homo sapiens
gagaaatgacttcat

SEQ ID NO: 1697450 - DNA, 15 bp, Homo sapiens
agaaatgacttcatt

SEQ ID NO: 1697451 - DNA, 15 bp, Homo sapiens
gaaatgacttcattg

SEQ ID NO: 1697452 - DNA, 15 bp, Homo sapiens
aaatgacttcattgc

SEQ ID NO: 1697453 - DNA, 15 bp, Homo sapiens
aatgacttcattgct

SEQ ID NO: 1697454 - DNA, 15 bp, Homo sapiens
atgacttcattgctg

SEQ ID NO: 1697455 - DNA, 15 bp, Homo sapiens
tgacttcattgctgt

SEQ ID NO: 1697456 - DNA, 15 bp, Homo sapiens
gacttcattgctgtg

SEQ ID NO: 1697457 - DNA, 15 bp, Homo sapiens
acttcattgctgtgt

SEQ ID NO: 1697458 - DNA, 15 bp, Homo sapiens
cttcattgctgtgta

SEQ ID NO: 1697459 - DNA, 15 bp, Homo sapiens
ttcattgctgtgtag

SEQ ID NO: 1697460 - DNA, 15 bp, Homo sapiens
tcattgctgtgtagt

SEQ ID NO: 1697461 - DNA, 15 bp, Homo sapiens
cattgctgtgtagtt

SEQ ID NO: 1697462 - DNA, 15 bp, Homo sapiens
attgctgtgtagttt

SEQ ID NO: 1697463 - DNA, 15 bp, Homo sapiens
ttgctgtgtagtttc

SEQ ID NO: 1697464 - DNA, 15 bp, Homo sapiens
tgctgtgtagtttca

SEQ ID NO: 1697465 - DNA, 15 bp, Homo sapiens
gctgtgtagtttcag

SEQ ID NO: 1697466 - DNA, 15 bp, Homo sapiens
ctgtgtagtttcagg

SEQ ID NO: 1697467 - DNA, 15 bp, Homo sapiens
tgtgtagtttcaggc

SEQ ID NO: 1697468 - DNA, 15 bp, Homo sapiens
gtgtagtttcaggct

SEQ ID NO: 1697469 - DNA, 15 bp, Homo sapiens
tgtagtttcaggcta

SEQ ID NO: 1697470 - DNA, 15 bp, Homo sapiens
gtagtttcaggctag

SEQ ID NO: 1697471 - DNA, 15 bp, Homo sapiens
tagtttcaggctagg

SEQ ID NO: 1697472 - DNA, 15 bp, Homo sapiens
agtttcaggctaggt

SEQ ID NO: 1697473 - DNA, 15 bp, Homo sapiens
gtttcaggctaggtg

SEQ ID NO: 1697474 - DNA, 15 bp, Homo sapiens
tttcaggctaggtgg

SEQ ID NO: 1697475 - DNA, 15 bp, Homo sapiens
ttcaggctaggtggg

SEQ ID NO: 1697476 - DNA, 15 bp, Homo sapiens
tcaggctaggtggga

SEQ ID NO: 1697477 - DNA, 15 bp, Homo sapiens
caggctaggtgggag

SEQ ID NO: 1697478 - DNA, 15 bp, Homo sapiens
aggctaggtgggagg

SEQ ID NO: 1697479 - DNA, 15 bp, Homo sapiens
ggctaggtgggaggg

SEQ ID NO: 1697480 - DNA, 15 bp, Homo sapiens
gctaggtgggaggga

SEQ ID NO: 1697481 - DNA, 15 bp, Homo sapiens
ctaggtgggagggag

SEQ ID NO: 1697482 - DNA, 15 bp, Homo sapiens
taggtgggagggagt

SEQ ID NO: 1697483 - DNA, 15 bp, Homo sapiens
aggtgggagggagtc

SEQ ID NO: 1697484 - DNA, 15 bp, Homo sapiens
ggtgggagggagtct

SEQ ID NO: 1697485 - DNA, 15 bp, Homo sapiens
gtgggagggagtctc

SEQ ID NO: 1697486 - DNA, 15 bp, Homo sapiens
tgggagggagtctct

SEQ ID NO: 1697487 - DNA, 15 bp, Homo sapiens
gggagggagtctctg

SEQ ID NO: 1697488 - DNA, 15 bp, Homo sapiens
ggagggagtctctgg

SEQ ID NO: 1697489 - DNA, 15 bp, Homo sapiens
gagggagtctctgga

SEQ ID NO: 1697490 - DNA, 15 bp, Homo sapiens
agggagtctctggag

SEQ ID NO: 1697491 - DNA, 15 bp, Homo sapiens
gggagtctctggagg

SEQ ID NO: 1697492 - DNA, 15 bp, Homo sapiens
ggagtctctggaggt

SEQ ID NO: 1697493 - DNA, 15 bp, Homo sapiens
gagtctctggaggtg

SEQ ID NO: 1697494 - DNA, 15 bp, Homo sapiens
agtctctggaggtgt

SEQ ID NO: 1697495 - DNA, 15 bp, Homo sapiens
gtctctggaggtgtc

SEQ ID NO: 1697496 - DNA, 15 bp, Homo sapiens
tctctggaggtgtcc

SEQ ID NO: 1697497 - DNA, 15 bp, Homo sapiens
ctctggaggtgtccc

SEQ ID NO: 1697498 - DNA, 15 bp, Homo sapiens
tctggaggtgtccca

SEQ ID NO: 1697499 - DNA, 15 bp, Homo sapiens
ctggaggtgtcccag

SEQ ID NO: 1697500 - DNA, 15 bp, Homo sapiens
tggaggtgtcccaga

SEQ ID NO: 1697501 - DNA, 15 bp, Homo sapiens
ggaggtgtcccagaa

SEQ ID NO: 1697502 - DNA, 15 bp, Homo sapiens
gaggtgtcccagaag

SEQ ID NO: 1697503 - DNA, 15 bp, Homo sapiens
aggtgtcccagaagt

SEQ ID NO: 1697504 - DNA, 15 bp, Homo sapiens
ggtgtcccagaagtt

SEQ ID NO: 1697505 - DNA, 15 bp, Homo sapiens
gtgtcccagaagttt

SEQ ID NO: 1697506 - DNA, 15 bp, Homo sapiens
tgtcccagaagtttg

SEQ ID NO: 1697507 - DNA, 15 bp, Homo sapiens
gtcccagaagtttgg

SEQ ID NO: 1697508 - DNA, 15 bp, Homo sapiens
tcccagaagtttggt

SEQ ID NO: 1697509 - DNA, 15 bp, Homo sapiens
cccagaagtttggtg

SEQ ID NO: 1697510 - DNA, 15 bp, Homo sapiens
ccagaagtttggtgg

SEQ ID NO: 1697511 - DNA, 15 bp, Homo sapiens
cagaagtttggtggc

SEQ ID NO: 1697512 - DNA, 15 bp, Homo sapiens
agaagtttggtggca

SEQ ID NO: 1697513 - DNA, 15 bp, Homo sapiens
gaagtttggtggcag

SEQ ID NO: 1697514 - DNA, 15 bp, Homo sapiens
aagtttggtggcagg

SEQ ID NO: 1697515 - DNA, 15 bp, Homo sapiens
agtttggtggcaggg

SEQ ID NO: 1697516 - DNA, 15 bp, Homo sapiens
gtttggtggcaggga

SEQ ID NO: 1697517 - DNA, 15 bp, Homo sapiens
tttggtggcagggag

SEQ ID NO: 1697518 - DNA, 15 bp, Homo sapiens
ttggtggcagggagt

SEQ ID NO: 1697519 - DNA, 15 bp, Homo sapiens
tggtggcagggagta

SEQ ID NO: 1697520 - DNA, 15 bp, Homo sapiens
ggtggcagggagtag

SEQ ID NO: 1697521 - DNA, 15 bp, Homo sapiens
gtggcagggagtagc

SEQ ID NO: 1697522 - DNA, 15 bp, Homo sapiens
tggcagggagtagcg

SEQ ID NO: 1697523 - DNA, 15 bp, Homo sapiens
ggcagggagtagcgt

SEQ ID NO: 1697524 - DNA, 15 bp, Homo sapiens
gcagggagtagcgtt

SEQ ID NO: 1697525 - DNA, 15 bp, Homo sapiens
cagggagtagcgttg

SEQ ID NO: 1697526 - DNA, 15 bp, Homo sapiens
agggagtagcgttga

SEQ ID NO: 1697527 - DNA, 15 bp, Homo sapiens
gggagtagcgttgag

SEQ ID NO: 1697528 - DNA, 15 bp, Homo sapiens
ggagtagcgttgagg

SEQ ID NO: 1697529 - DNA, 15 bp, Homo sapiens
gagtagcgttgagga

SEQ ID NO: 1697530 - DNA, 15 bp, Homo sapiens
agtagcgttgaggag

SEQ ID NO: 1697531 - DNA, 15 bp, Homo sapiens
gtagcgttgaggagt

SEQ ID NO: 1697532 - DNA, 15 bp, Homo sapiens
tagcgttgaggagtg

SEQ ID NO: 1697533 - DNA, 15 bp, Homo sapiens
agcgttgaggagtgg

SEQ ID NO: 1697534 - DNA, 15 bp, Homo sapiens
gcgttgaggagtggt

SEQ ID NO: 1697535 - DNA, 15 bp, Homo sapiens
cgttgaggagtggtt

SEQ ID NO: 1697536 - DNA, 15 bp, Homo sapiens
gttgaggagtggttt

SEQ ID NO: 1697537 - DNA, 15 bp, Homo sapiens
ttgaggagtggttta

SEQ ID NO: 1697538 - DNA, 15 bp, Homo sapiens
tgaggagtggtttaa

SEQ ID NO: 1697539 - DNA, 15 bp, Homo sapiens
gaggagtggtttaat

SEQ ID NO: 1697540 - DNA, 15 bp, Homo sapiens
aggagtggtttaatg

SEQ ID NO: 1697541 - DNA, 15 bp, Homo sapiens
ggagtggtttaatgc

SEQ ID NO: 1697542 - DNA, 15 bp, Homo sapiens
gagtggtttaatgcc

SEQ ID NO: 1697543 - DNA, 15 bp, Homo sapiens
agtggtttaatgcct

SEQ ID NO: 1697544 - DNA, 15 bp, Homo sapiens
gtggtttaatgcctg

SEQ ID NO: 1697545 - DNA, 15 bp, Homo sapiens
tggtttaatgcctgg

SEQ ID NO: 1697546 - DNA, 15 bp, Homo sapiens
ggtttaatgcctggt

SEQ ID NO: 1697547 - DNA, 15 bp, Homo sapiens
gtttaatgcctggtc

SEQ ID NO: 1697548 - DNA, 15 bp, Homo sapiens
tttaatgcctggtca

SEQ ID NO: 1697549 - DNA, 15 bp, Homo sapiens
ttaatgcctggtcat

SEQ ID NO: 1697550 - DNA, 15 bp, Homo sapiens
taatgcctggtcata

SEQ ID NO: 1697551 - DNA, 15 bp, Homo sapiens
aatgcctggtcataa

SEQ ID NO: 1697552 - DNA, 15 bp, Homo sapiens
atgcctggtcataat

SEQ ID NO: 1697553 - DNA, 15 bp, Homo sapiens
tgcctggtcataatg

SEQ ID NO: 1697554 - DNA, 15 bp, Homo sapiens
gcctggtcataatga

SEQ ID NO: 1697555 - DNA, 15 bp, Homo sapiens
cctggtcataatgag

SEQ ID NO: 1697556 - DNA, 15 bp, Homo sapiens
ctggtcataatgagt

SEQ ID NO: 1697557 - DNA, 15 bp, Homo sapiens
tggtcataatgagtc

SEQ ID NO: 1697558 - DNA, 15 bp, Homo sapiens
ggtcataatgagtct

SEQ ID NO: 1697559 - DNA, 15 bp, Homo sapiens
gtcataatgagtctt

SEQ ID NO: 1697560 - DNA, 15 bp, Homo sapiens
tcataatgagtcttg

SEQ ID NO: 1697561 - DNA, 15 bp, Homo sapiens
cataatgagtcttgg

SEQ ID NO: 1697562 - DNA, 15 bp, Homo sapiens
ataatgagtcttggc

SEQ ID NO: 1697563 - DNA, 15 bp, Homo sapiens
taatgagtcttggca

SEQ ID NO: 1697564 - DNA, 15 bp, Homo sapiens
aatgagtcttggcaa

SEQ ID NO: 1697565 - DNA, 15 bp, Homo sapiens
atgagtcttggcaag

SEQ ID NO: 1697566 - DNA, 15 bp, Homo sapiens
tgagtcttggcaaga

SEQ ID NO: 1697567 - DNA, 15 bp, Homo sapiens
gagtcttggcaagag

SEQ ID NO: 1697568 - DNA, 15 bp, Homo sapiens
agtcttggcaagagt

SEQ ID NO: 1697569 - DNA, 15 bp, Homo sapiens
gtcttggcaagagtc

SEQ ID NO: 1697570 - DNA, 15 bp, Homo sapiens
tcttggcaagagtct

SEQ ID NO: 1697571 - DNA, 15 bp, Homo sapiens
cttggcaagagtctg

SEQ ID NO: 1697572 - DNA, 15 bp, Homo sapiens
ttggcaagagtctga

SEQ ID NO: 1697573 - DNA, 15 bp, Homo sapiens
tggcaagagtctgaa

SEQ ID NO: 1697574 - DNA, 15 bp, Homo sapiens
ggcaagagtctgaat

SEQ ID NO: 1697575 - DNA, 15 bp, Homo sapiens
gcaagagtctgaatg

SEQ ID NO: 1697576 - DNA, 15 bp, Homo sapiens
caagagtctgaatgt

SEQ ID NO: 1697577 - DNA, 15 bp, Homo sapiens
aagagtctgaatgtg

SEQ ID NO: 1697578 - DNA, 15 bp, Homo sapiens
agagtctgaatgtgc

SEQ ID NO: 1697579 - DNA, 15 bp, Homo sapiens
gagtctgaatgtgca

SEQ ID NO: 1697580 - DNA, 15 bp, Homo sapiens
agtctgaatgtgcaa

SEQ ID NO: 1697581 - DNA, 15 bp, Homo sapiens
gtctgaatgtgcaag

SEQ ID NO: 1697582 - DNA, 15 bp, Homo sapiens
tctgaatgtgcaaga

SEQ ID NO: 1697583 - DNA, 15 bp, Homo sapiens
ctgaatgtgcaagag

SEQ ID NO: 1697584 - DNA, 15 bp, Homo sapiens
tgaatgtgcaagagc

SEQ ID NO: 1697585 - DNA, 15 bp, Homo sapiens
gaatgtgcaagagca

SEQ ID NO: 1697586 - DNA, 15 bp, Homo sapiens
aatgtgcaagagcaa

SEQ ID NO: 1697587 - DNA, 15 bp, Homo sapiens
atgtgcaagagcaag

SEQ ID NO: 1697588 - DNA, 15 bp, Homo sapiens
tgtgcaagagcaagg

SEQ ID NO: 1697589 - DNA, 15 bp, Homo sapiens
gtgcaagagcaagga

SEQ ID NO: 1697590 - DNA, 15 bp, Homo sapiens
tgcaagagcaaggaa

SEQ ID NO: 1697591 - DNA, 15 bp, Homo sapiens
gcaagagcaaggaag

SEQ ID NO: 1697592 - DNA, 15 bp, Homo sapiens
caagagcaaggaaga

SEQ ID NO: 1697593 - DNA, 15 bp, Homo sapiens
aagagcaaggaagag

SEQ ID NO: 1697594 - DNA, 15 bp, Homo sapiens
agagcaaggaagagg

SEQ ID NO: 1697595 - DNA, 15 bp, Homo sapiens
gagcaaggaagaggg

SEQ ID NO: 1697596 - DNA, 15 bp, Homo sapiens
agcaaggaagaggga

SEQ ID NO: 1697597 - DNA, 15 bp, Homo sapiens
gcaaggaagagggag

SEQ ID NO: 1697598 - DNA, 15 bp, Homo sapiens
caaggaagagggagg

SEQ ID NO: 1697599 - DNA, 15 bp, Homo sapiens
aaggaagagggaggg

SEQ ID NO: 1697600 - DNA, 15 bp, Homo sapiens
aggaagagggagggc

SEQ ID NO: 1697601 - DNA, 15 bp, Homo sapiens
ggaagagggagggct

SEQ ID NO: 1697602 - DNA, 15 bp, Homo sapiens
gaagagggagggctt

SEQ ID NO: 1697603 - DNA, 15 bp, Homo sapiens
aagagggagggcttg

SEQ ID NO: 1697604 - DNA, 15 bp, Homo sapiens
agagggagggcttga

SEQ ID NO: 1697605 - DNA, 15 bp, Homo sapiens
gagggagggcttgag

SEQ ID NO: 1697606 - DNA, 15 bp, Homo sapiens
agggagggcttgagg

SEQ ID NO: 1697607 - DNA, 15 bp, Homo sapiens
gggagggcttgagga

SEQ ID NO: 1697608 - DNA, 15 bp, Homo sapiens
ggagggcttgaggaa

SEQ ID NO: 1697609 - DNA, 15 bp, Homo sapiens
gagggcttgaggaaa

SEQ ID NO: 1697610 - DNA, 15 bp, Homo sapiens
agggcttgaggaaac

SEQ ID NO: 1697611 - DNA, 15 bp, Homo sapiens
gggcttgaggaaact

SEQ ID NO: 1697612 - DNA, 15 bp, Homo sapiens
ggcttgaggaaactg

SEQ ID NO: 1697613 - DNA, 15 bp, Homo sapiens
gcttgaggaaactgc

SEQ ID NO: 1697614 - DNA, 15 bp, Homo sapiens
cttgaggaaactgca

SEQ ID NO: 1697615 - DNA, 15 bp, Homo sapiens
ttgaggaaactgcat

SEQ ID NO: 1697616 - DNA, 15 bp, Homo sapiens
tgaggaaactgcatg

SEQ ID NO: 1697617 - DNA, 15 bp, Homo sapiens
gaggaaactgcatgg

SEQ ID NO: 1697618 - DNA, 15 bp, Homo sapiens
aggaaactgcatggt

SEQ ID NO: 1697619 - DNA, 15 bp, Homo sapiens
ggaaactgcatggtg

SEQ ID NO: 1697620 - DNA, 15 bp, Homo sapiens
gaaactgcatggtgt

SEQ ID NO: 1697621 - DNA, 15 bp, Homo sapiens
aaactgcatggtgtt

SEQ ID NO: 1697622 - DNA, 15 bp, Homo sapiens
aactgcatggtgttg

SEQ ID NO: 1697623 - DNA, 15 bp, Homo sapiens
actgcatggtgttga

SEQ ID NO: 1697624 - DNA, 15 bp, Homo sapiens
ctgcatggtgttgaa

SEQ ID NO: 1697625 - DNA, 15 bp, Homo sapiens
tgcatggtgttgaac

SEQ ID NO: 1697626 - DNA, 15 bp, Homo sapiens
gcatggtgttgaacc

SEQ ID NO: 1697627 - DNA, 15 bp, Homo sapiens
catggtgttgaacct

SEQ ID NO: 1697628 - DNA, 15 bp, Homo sapiens
atggtgttgaacctg

SEQ ID NO: 1697629 - DNA, 15 bp, Homo sapiens
tggtgttgaacctgg

SEQ ID NO: 1697630 - DNA, 15 bp, Homo sapiens
ggtgttgaacctggg

SEQ ID NO: 1697631 - DNA, 15 bp, Homo sapiens
gtgttgaacctgggt

SEQ ID NO: 1697632 - DNA, 15 bp, Homo sapiens
tgttgaacctgggtg

SEQ ID NO: 1697633 - DNA, 15 bp, Homo sapiens
gttgaacctgggtga

SEQ ID NO: 1697634 - DNA, 15 bp, Homo sapiens
ttgaacctgggtgac

SEQ ID NO: 1697635 - DNA, 15 bp, Homo sapiens
tgaacctgggtgact

SEQ ID NO: 1697636 - DNA, 15 bp, Homo sapiens
gaacctgggtgacta

SEQ ID NO: 1697637 - DNA, 15 bp, Homo sapiens
aacctgggtgactaa

SEQ ID NO: 1697638 - DNA, 15 bp, Homo sapiens
acctgggtgactaag

SEQ ID NO: 1697639 - DNA, 15 bp, Homo sapiens
cctgggtgactaaga

SEQ ID NO: 1697640 - DNA, 15 bp, Homo sapiens
ctgggtgactaagag

SEQ ID NO: 1697641 - DNA, 15 bp, Homo sapiens
tgggtgactaagagg

SEQ ID NO: 1697642 - DNA, 15 bp, Homo sapiens
gggtgactaagagga

SEQ ID NO: 1697643 - DNA, 15 bp, Homo sapiens
ggtgactaagaggat

SEQ ID NO: 1697644 - DNA, 15 bp, Homo sapiens
gtgactaagaggatg

SEQ ID NO: 1697645 - DNA, 15 bp, Homo sapiens
tgactaagaggatgg

SEQ ID NO: 1697646 - DNA, 15 bp, Homo sapiens
gactaagaggatgga

SEQ ID NO: 1697647 - DNA, 15 bp, Homo sapiens
actaagaggatggaa

SEQ ID NO: 1697648 - DNA, 15 bp, Homo sapiens
ctaagaggatggaag

SEQ ID NO: 1697649 - DNA, 15 bp, Homo sapiens
taagaggatggaagt

SEQ ID NO: 1697650 - DNA, 15 bp, Homo sapiens
aagaggatggaagtg

SEQ ID NO: 1697651 - DNA, 15 bp, Homo sapiens
agaggatggaagtgc

SEQ ID NO: 1697652 - DNA, 15 bp, Homo sapiens
gaggatggaagtgcc

SEQ ID NO: 1697653 - DNA, 15 bp, Homo sapiens
aggatggaagtgcca

SEQ ID NO: 1697654 - DNA, 15 bp, Homo sapiens
ggatggaagtgccat

SEQ ID NO: 1697655 - DNA, 15 bp, Homo sapiens
gatggaagtgccatt

SEQ ID NO: 1697656 - DNA, 15 bp, Homo sapiens
atggaagtgccatta

SEQ ID NO: 1697657 - DNA, 15 bp, Homo sapiens
tggaagtgccattaa

SEQ ID NO: 1697658 - DNA, 15 bp, Homo sapiens
ggaagtgccattaac

SEQ ID NO: 1697659 - DNA, 15 bp, Homo sapiens
gaagtgccattaaca

SEQ ID NO: 1697660 - DNA, 15 bp, Homo sapiens
aagtgccattaacag

SEQ ID NO: 1697661 - DNA, 15 bp, Homo sapiens
agtgccattaacaga

SEQ ID NO: 1697662 - DNA, 15 bp, Homo sapiens
gtgccattaacagaa

SEQ ID NO: 1697663 - DNA, 15 bp, Homo sapiens
tgccattaacagaaa

SEQ ID NO: 1697664 - DNA, 15 bp, Homo sapiens
gccattaacagaaaa

SEQ ID NO: 1697665 - DNA, 15 bp, Homo sapiens
ccattaacagaaaat

SEQ ID NO: 1697666 - DNA, 15 bp, Homo sapiens
cattaacagaaaatg

SEQ ID NO: 1697667 - DNA, 15 bp, Homo sapiens
attaacagaaaatgg

SEQ ID NO: 1697668 - DNA, 15 bp, Homo sapiens
ttaacagaaaatggg

SEQ ID NO: 1697669 - DNA, 15 bp, Homo sapiens
taacagaaaatggga

SEQ ID NO: 1697670 - DNA, 15 bp, Homo sapiens
aacagaaaatgggaa

SEQ ID NO: 1697671 - DNA, 15 bp, Homo sapiens
acagaaaatgggaac

SEQ ID NO: 1697672 - DNA, 15 bp, Homo sapiens
cagaaaatgggaaca

SEQ ID NO: 1697673 - DNA, 15 bp, Homo sapiens
agaaaatgggaacaa

SEQ ID NO: 1697674 - DNA, 15 bp, Homo sapiens
gaaaatgggaacaaa

SEQ ID NO: 1697675 - DNA, 15 bp, Homo sapiens
aaaatgggaacaaat

SEQ ID NO: 1697676 - DNA, 15 bp, Homo sapiens
aaatgggaacaaatt

SEQ ID NO: 1697677 - DNA, 15 bp, Homo sapiens
aatgggaacaaattg

SEQ ID NO: 1697678 - DNA, 15 bp, Homo sapiens
atgggaacaaattgg

SEQ ID NO: 1697679 - DNA, 15 bp, Homo sapiens
tgggaacaaattgga

SEQ ID NO: 1697680 - DNA, 15 bp, Homo sapiens
gggaacaaattggag

SEQ ID NO: 1697681 - DNA, 15 bp, Homo sapiens
ggaacaaattggagc

SEQ ID NO: 1697682 - DNA, 15 bp, Homo sapiens
gaacaaattggagca

SEQ ID NO: 1697683 - DNA, 15 bp, Homo sapiens
aacaaattggagcaa

SEQ ID NO: 1697684 - DNA, 15 bp, Homo sapiens
acaaattggagcaac

SEQ ID NO: 1697685 - DNA, 15 bp, Homo sapiens
caaattggagcaact

SEQ ID NO: 1697686 - DNA, 15 bp, Homo sapiens
aaattggagcaactc

SEQ ID NO: 1697687 - DNA, 15 bp, Homo sapiens
aattggagcaactca

SEQ ID NO: 1697688 - DNA, 15 bp, Homo sapiens
attggagcaactcag

SEQ ID NO: 1697689 - DNA, 15 bp, Homo sapiens
ttggagcaactcagt

SEQ ID NO: 1697690 - DNA, 15 bp, Homo sapiens
tggagcaactcagtt

SEQ ID NO: 1697691 - DNA, 15 bp, Homo sapiens
ggagcaactcagttg

SEQ ID NO: 1697692 - DNA, 15 bp, Homo sapiens
gagcaactcagttga

SEQ ID NO: 1697693 - DNA, 15 bp, Homo sapiens
agcaactcagttgat

SEQ ID NO: 1697694 - DNA, 15 bp, Homo sapiens
gcaactcagttgata

SEQ ID NO: 1697695 - DNA, 15 bp, Homo sapiens
caactcagttgatac

SEQ ID NO: 1697696 - DNA, 15 bp, Homo sapiens
aactcagttgataca

SEQ ID NO: 1697697 - DNA, 15 bp, Homo sapiens
actcagttgatacat

SEQ ID NO: 1697698 - DNA, 15 bp, Homo sapiens
ctcagttgatacatt

SEQ ID NO: 1697699 - DNA, 15 bp, Homo sapiens
tcagttgatacatta

SEQ ID NO: 1697700 - DNA, 15 bp, Homo sapiens
cagttgatacattac

SEQ ID NO: 1697701 - DNA, 15 bp, Homo sapiens
agttgatacattact

SEQ ID NO: 1697702 - DNA, 15 bp, Homo sapiens
gttgatacattactg

SEQ ID NO: 1697703 - DNA, 15 bp, Homo sapiens
ttgatacattactgc

SEQ ID NO: 1697704 - DNA, 15 bp, Homo sapiens
tgatacattactgcc

SEQ ID NO: 1697705 - DNA, 15 bp, Homo sapiens
gatacattactgcct

SEQ ID NO: 1697706 - DNA, 15 bp, Homo sapiens
atacattactgcctt

SEQ ID NO: 1697707 - DNA, 15 bp, Homo sapiens
tacattactgccttc

SEQ ID NO: 1697708 - DNA, 15 bp, Homo sapiens
acattactgccttct

SEQ ID NO: 1697709 - DNA, 15 bp, Homo sapiens
cattactgccttctc

SEQ ID NO: 1697710 - DNA, 15 bp, Homo sapiens
attactgccttctct

SEQ ID NO: 1697711 - DNA, 15 bp, Homo sapiens
ttactgccttctctg

SEQ ID NO: 1697712 - DNA, 15 bp, Homo sapiens
tactgccttctctgg

SEQ ID NO: 1697713 - DNA, 15 bp, Homo sapiens
actgccttctctgga

SEQ ID NO: 1697714 - DNA, 15 bp, Homo sapiens
ctgccttctctggaa

SEQ ID NO: 1697715 - DNA, 15 bp, Homo sapiens
tgccttctctggaag

SEQ ID NO: 1697716 - DNA, 15 bp, Homo sapiens
gccttctctggaagg

SEQ ID NO: 1697717 - DNA, 15 bp, Homo sapiens
ccttctctggaaggc

SEQ ID NO: 1697718 - DNA, 15 bp, Homo sapiens
cttctctggaaggct

SEQ ID NO: 1697719 - DNA, 15 bp, Homo sapiens
ttctctggaaggcta

SEQ ID NO: 1697720 - DNA, 15 bp, Homo sapiens
tctctggaaggctag

SEQ ID NO: 1697721 - DNA, 15 bp, Homo sapiens
ctctggaaggctaga

SEQ ID NO: 1697722 - DNA, 15 bp, Homo sapiens
tctggaaggctagat

SEQ ID NO: 1697723 - DNA, 15 bp, Homo sapiens
ctggaaggctagatg

SEQ ID NO: 1697724 - DNA, 15 bp, Homo sapiens
tggaaggctagatga

SEQ ID NO: 1697725 - DNA, 15 bp, Homo sapiens
ggaaggctagatgag

SEQ ID NO: 1697726 - DNA, 15 bp, Homo sapiens
gaaggctagatgagc

SEQ ID NO: 1697727 - DNA, 15 bp, Homo sapiens
aaggctagatgagca

SEQ ID NO: 1697728 - DNA, 15 bp, Homo sapiens
aggctagatgagcat

SEQ ID NO: 1697729 - DNA, 15 bp, Homo sapiens
ggctagatgagcata

SEQ ID NO: 1697730 - DNA, 15 bp, Homo sapiens
gctagatgagcatat

SEQ ID NO: 1697731 - DNA, 15 bp, Homo sapiens
ctagatgagcatata

SEQ ID NO: 1697732 - DNA, 15 bp, Homo sapiens
tagatgagcatatag

SEQ ID NO: 1697733 - DNA, 15 bp, Homo sapiens
agatgagcatatagt

SEQ ID NO: 1697734 - DNA, 15 bp, Homo sapiens
gatgagcatatagta

SEQ ID NO: 1697735 - DNA, 15 bp, Homo sapiens
atgagcatatagtag

SEQ ID NO: 1697736 - DNA, 15 bp, Homo sapiens
tgagcatatagtagg

SEQ ID NO: 1697737 - DNA, 15 bp, Homo sapiens
gagcatatagtaggc

SEQ ID NO: 1697738 - DNA, 15 bp, Homo sapiens
agcatatagtaggca

SEQ ID NO: 1697739 - DNA, 15 bp, Homo sapiens
gcatatagtaggcag

SEQ ID NO: 1697740 - DNA, 15 bp, Homo sapiens
catatagtaggcagg

SEQ ID NO: 1697741 - DNA, 15 bp, Homo sapiens
atatagtaggcaggc

SEQ ID NO: 1697742 - DNA, 15 bp, Homo sapiens
tatagtaggcaggca

SEQ ID NO: 1697743 - DNA, 15 bp, Homo sapiens
atagtaggcaggcac

SEQ ID NO: 1697744 - DNA, 15 bp, Homo sapiens
tagtaggcaggcacc

SEQ ID NO: 1697745 - DNA, 15 bp, Homo sapiens
agtaggcaggcacca

SEQ ID NO: 1697746 - DNA, 15 bp, Homo sapiens
gtaggcaggcaccac

SEQ ID NO: 1697747 - DNA, 15 bp, Homo sapiens
taggcaggcaccacc

SEQ ID NO: 1697748 - DNA, 15 bp, Homo sapiens
aggcaggcaccacct

SEQ ID NO: 1697749 - DNA, 15 bp, Homo sapiens
ggcaggcaccacctt

SEQ ID NO: 1697750 - DNA, 15 bp, Homo sapiens
gcaggcaccaccttg

SEQ ID NO: 1697751 - DNA, 15 bp, Homo sapiens
caggcaccaccttga

SEQ ID NO: 1697752 - DNA, 15 bp, Homo sapiens
aggcaccaccttgat

SEQ ID NO: 1697753 - DNA, 15 bp, Homo sapiens
ggcaccaccttgata

SEQ ID NO: 1697754 - DNA, 15 bp, Homo sapiens
gcaccaccttgatat

SEQ ID NO: 1697755 - DNA, 15 bp, Homo sapiens
caccaccttgatatt

SEQ ID NO: 1697756 - DNA, 15 bp, Homo sapiens
accaccttgatattt

SEQ ID NO: 1697757 - DNA, 15 bp, Homo sapiens
ccaccttgatatttg

SEQ ID NO: 1697758 - DNA, 15 bp, Homo sapiens
caccttgatatttgt

SEQ ID NO: 1697759 - DNA, 15 bp, Homo sapiens
accttgatatttgtt

SEQ ID NO: 1697760 - DNA, 15 bp, Homo sapiens
ccttgatatttgttt

SEQ ID NO: 1697761 - DNA, 15 bp, Homo sapiens
cttgatatttgtttt

SEQ ID NO: 1697762 - DNA, 15 bp, Homo sapiens
ttgatatttgttttg

SEQ ID NO: 1697763 - DNA, 15 bp, Homo sapiens
tgatatttgttttgg

SEQ ID NO: 1697764 - DNA, 15 bp, Homo sapiens
gatatttgttttggt

SEQ ID NO: 1697765 - DNA, 15 bp, Homo sapiens
atatttgttttggtg

SEQ ID NO: 1697766 - DNA, 15 bp, Homo sapiens
tatttgttttggtga

SEQ ID NO: 1697767 - DNA, 15 bp, Homo sapiens
atttgttttggtgaa

SEQ ID NO: 1697768 - DNA, 15 bp, Homo sapiens
tttgttttggtgaaa

SEQ ID NO: 1697769 - DNA, 15 bp, Homo sapiens
ttgttttggtgaaat

SEQ ID NO: 1697770 - DNA, 15 bp, Homo sapiens
tgttttggtgaaatt

SEQ ID NO: 1697771 - DNA, 15 bp, Homo sapiens
gttttggtgaaattt

SEQ ID NO: 1697772 - DNA, 15 bp, Homo sapiens
ttttggtgaaatttc

SEQ ID NO: 1697773 - DNA, 15 bp, Homo sapiens
tttggtgaaatttca

SEQ ID NO: 1697774 - DNA, 15 bp, Homo sapiens
ttggtgaaatttcac

SEQ ID NO: 1697775 - DNA, 15 bp, Homo sapiens
tggtgaaatttcact

SEQ ID NO: 1697776 - DNA, 15 bp, Homo sapiens
ggtgaaatttcactt

SEQ ID NO: 1697777 - DNA, 15 bp, Homo sapiens
gtgaaatttcacttg

SEQ ID NO: 1697778 - DNA, 15 bp, Homo sapiens
tgaaatttcacttgg

SEQ ID NO: 1697779 - DNA, 15 bp, Homo sapiens
gaaatttcacttgga

SEQ ID NO: 1697780 - DNA, 15 bp, Homo sapiens
aaatttcacttggat

SEQ ID NO: 1697781 - DNA, 15 bp, Homo sapiens
aatttcacttggatg

SEQ ID NO: 1697782 - DNA, 15 bp, Homo sapiens
atttcacttggatgc

SEQ ID NO: 1697783 - DNA, 15 bp, Homo sapiens
tttcacttggatgca

SEQ ID NO: 1697784 - DNA, 15 bp, Homo sapiens
ttcacttggatgcaa

SEQ ID NO: 1697785 - DNA, 15 bp, Homo sapiens
tcacttggatgcaaa

SEQ ID NO: 1697786 - DNA, 15 bp, Homo sapiens
cacttggatgcaaaa

SEQ ID NO: 1697787 - DNA, 15 bp, Homo sapiens
acttggatgcaaaat

SEQ ID NO: 1697788 - DNA, 15 bp, Homo sapiens
cttggatgcaaaatg

SEQ ID NO: 1697789 - DNA, 15 bp, Homo sapiens
ttggatgcaaaatgg

SEQ ID NO: 1697790 - DNA, 15 bp, Homo sapiens
tggatgcaaaatggt

SEQ ID NO: 1697791 - DNA, 15 bp, Homo sapiens
ggatgcaaaatggta

SEQ ID NO: 1697792 - DNA, 15 bp, Homo sapiens
gatgcaaaatggtag

SEQ ID NO: 1697793 - DNA, 15 bp, Homo sapiens
atgcaaaatggtaga

SEQ ID NO: 1697794 - DNA, 15 bp, Homo sapiens
tgcaaaatggtagag

SEQ ID NO: 1697795 - DNA, 15 bp, Homo sapiens
gcaaaatggtagaga

SEQ ID NO: 1697796 - DNA, 15 bp, Homo sapiens
caaaatggtagagaa

SEQ ID NO: 1697797 - DNA, 15 bp, Homo sapiens
aaaatggtagagaaa

SEQ ID NO: 1697798 - DNA, 15 bp, Homo sapiens
aaatggtagagaaag

SEQ ID NO: 1697799 - DNA, 15 bp, Homo sapiens
aatggtagagaaaga

SEQ ID NO: 1697800 - DNA, 15 bp, Homo sapiens
atggtagagaaagat

SEQ ID NO: 1697801 - DNA, 15 bp, Homo sapiens
tggtagagaaagata

SEQ ID NO: 1697802 - DNA, 15 bp, Homo sapiens
ggtagagaaagatat

SEQ ID NO: 1697803 - DNA, 15 bp, Homo sapiens
gtagagaaagatatg

SEQ ID NO: 1697804 - DNA, 15 bp, Homo sapiens
tagagaaagatatgt

SEQ ID NO: 1697805 - DNA, 15 bp, Homo sapiens
agagaaagatatgtg

SEQ ID NO: 1697806 - DNA, 15 bp, Homo sapiens
gagaaagatatgtga

SEQ ID NO: 1697807 - DNA, 15 bp, Homo sapiens
agaaagatatgtgaa

SEQ ID NO: 1697808 - DNA, 15 bp, Homo sapiens
gaaagatatgtgaat

SEQ ID NO: 1697809 - DNA, 15 bp, Homo sapiens
aaagatatgtgaatg

SEQ ID NO: 1697810 - DNA, 15 bp, Homo sapiens
aagatatgtgaatgg

SEQ ID NO: 1697811 - DNA, 15 bp, Homo sapiens
agatatgtgaatgga

SEQ ID NO: 1697812 - DNA, 15 bp, Homo sapiens
gatatgtgaatggat

SEQ ID NO: 1697813 - DNA, 15 bp, Homo sapiens
atatgtgaatggatt

SEQ ID NO: 1697814 - DNA, 15 bp, Homo sapiens
tatgtgaatggattc

SEQ ID NO: 1697815 - DNA, 15 bp, Homo sapiens
atgtgaatggattca

SEQ ID NO: 1697816 - DNA, 15 bp, Homo sapiens
tgtgaatggattcat

SEQ ID NO: 1697817 - DNA, 15 bp, Homo sapiens
gtgaatggattcatc

SEQ ID NO: 1697818 - DNA, 15 bp, Homo sapiens
tgaatggattcatct

SEQ ID NO: 1697819 - DNA, 15 bp, Homo sapiens
gaatggattcatcta

SEQ ID NO: 1697820 - DNA, 15 bp, Homo sapiens
aatggattcatctag

SEQ ID NO: 1697821 - DNA, 15 bp, Homo sapiens
atggattcatctaga

SEQ ID NO: 1697822 - DNA, 15 bp, Homo sapiens
tggattcatctagat

SEQ ID NO: 1697823 - DNA, 15 bp, Homo sapiens
ggattcatctagatg

SEQ ID NO: 1697824 - DNA, 15 bp, Homo sapiens
gattcatctagatgg

SEQ ID NO: 1697825 - DNA, 15 bp, Homo sapiens
attcatctagatggc

SEQ ID NO: 1697826 - DNA, 15 bp, Homo sapiens
ttcatctagatggca

SEQ ID NO: 1697827 - DNA, 15 bp, Homo sapiens
tcatctagatggcac

SEQ ID NO: 1697828 - DNA, 15 bp, Homo sapiens
catctagatggcact

SEQ ID NO: 1697829 - DNA, 15 bp, Homo sapiens
atctagatggcacta

SEQ ID NO: 1697830 - DNA, 15 bp, Homo sapiens
tctagatggcactaa

SEQ ID NO: 1697831 - DNA, 15 bp, Homo sapiens
ctagatggcactaaa

SEQ ID NO: 1697832 - DNA, 15 bp, Homo sapiens
tagatggcactaaaa

SEQ ID NO: 1697833 - DNA, 15 bp, Homo sapiens
agatggcactaaaac

SEQ ID NO: 1697834 - DNA, 15 bp, Homo sapiens
gatggcactaaaaca

SEQ ID NO: 1697835 - DNA, 15 bp, Homo sapiens
atggcactaaaacag

SEQ ID NO: 1697836 - DNA, 15 bp, Homo sapiens
tggcactaaaacagt

SEQ ID NO: 1697837 - DNA, 15 bp, Homo sapiens
ggcactaaaacagtt

SEQ ID NO: 1697838 - DNA, 15 bp, Homo sapiens
gcactaaaacagttg

SEQ ID NO: 1697839 - DNA, 15 bp, Homo sapiens
cactaaaacagttga

SEQ ID NO: 1697840 - DNA, 15 bp, Homo sapiens
actaaaacagttgat

SEQ ID NO: 1697841 - DNA, 15 bp, Homo sapiens
ctaaaacagttgatg

SEQ ID NO: 1697842 - DNA, 15 bp, Homo sapiens
taaaacagttgatgc

SEQ ID NO: 1697843 - DNA, 15 bp, Homo sapiens
aaaacagttgatgca

SEQ ID NO: 1697844 - DNA, 15 bp, Homo sapiens
aaacagttgatgcag

SEQ ID NO: 1697845 - DNA, 15 bp, Homo sapiens
aacagttgatgcagg

SEQ ID NO: 1697846 - DNA, 15 bp, Homo sapiens
acagttgatgcaggt

SEQ ID NO: 1697847 - DNA, 15 bp, Homo sapiens
cagttgatgcaggtc

SEQ ID NO: 1697848 - DNA, 15 bp, Homo sapiens
agttgatgcaggtct

SEQ ID NO: 1697849 - DNA, 15 bp, Homo sapiens
gttgatgcaggtctc

SEQ ID NO: 1697850 - DNA, 15 bp, Homo sapiens
ttgatgcaggtctcc

SEQ ID NO: 1697851 - DNA, 15 bp, Homo sapiens
tgatgcaggtctcct

SEQ ID NO: 1697852 - DNA, 15 bp, Homo sapiens
gatgcaggtctcctc

SEQ ID NO: 1697853 - DNA, 15 bp, Homo sapiens
atgcaggtctcctca

SEQ ID NO: 1697854 - DNA, 15 bp, Homo sapiens
tgcaggtctcctcat

SEQ ID NO: 1697855 - DNA, 15 bp, Homo sapiens
gcaggtctcctcatc

SEQ ID NO: 1697856 - DNA, 15 bp, Homo sapiens
caggtctcctcatca

SEQ ID NO: 1697857 - DNA, 15 bp, Homo sapiens
aggtctcctcatcac

SEQ ID NO: 1697858 - DNA, 15 bp, Homo sapiens
ggtctcctcatcact

SEQ ID NO: 1697859 - DNA, 15 bp, Homo sapiens
gtctcctcatcactc

SEQ ID NO: 1697860 - DNA, 15 bp, Homo sapiens
tctcctcatcactca

SEQ ID NO: 1697861 - DNA, 15 bp, Homo sapiens
ctcctcatcactcac

SEQ ID NO: 1697862 - DNA, 15 bp, Homo sapiens
tcctcatcactcaca

SEQ ID NO: 1697863 - DNA, 15 bp, Homo sapiens
cctcatcactcacat

SEQ ID NO: 1697864 - DNA, 15 bp, Homo sapiens
ctcatcactcacatc

SEQ ID NO: 1697865 - DNA, 15 bp, Homo sapiens
tcatcactcacatct

SEQ ID NO: 1697866 - DNA, 15 bp, Homo sapiens
catcactcacatctc

SEQ ID NO: 1697867 - DNA, 15 bp, Homo sapiens
atcactcacatctct

SEQ ID NO: 1697868 - DNA, 15 bp, Homo sapiens
tcactcacatctctc

SEQ ID NO: 1697869 - DNA, 15 bp, Homo sapiens
cactcacatctctct

SEQ ID NO: 1697870 - DNA, 15 bp, Homo sapiens
actcacatctctctc

SEQ ID NO: 1697871 - DNA, 15 bp, Homo sapiens
ctcacatctctctct

SEQ ID NO: 1697872 - DNA, 15 bp, Homo sapiens
tcacatctctctctt

SEQ ID NO: 1697873 - DNA, 15 bp, Homo sapiens
cacatctctctcttt

SEQ ID NO: 1697874 - DNA, 15 bp, Homo sapiens
acatctctctcttta

SEQ ID NO: 1697875 - DNA, 15 bp, Homo sapiens
catctctctctttac

SEQ ID NO: 1697876 - DNA, 15 bp, Homo sapiens
atctctctctttaca

SEQ ID NO: 1697877 - DNA, 15 bp, Homo sapiens
tctctctctttacac

SEQ ID NO: 1697878 - DNA, 15 bp, Homo sapiens
ctctctctttacacc

SEQ ID NO: 1697879 - DNA, 15 bp, Homo sapiens
tctctctttacacca

SEQ ID NO: 1697880 - DNA, 15 bp, Homo sapiens
ctctctttacaccat

SEQ ID NO: 1697881 - DNA, 15 bp, Homo sapiens
tctctttacaccatt

SEQ ID NO: 1697882 - DNA, 15 bp, Homo sapiens
ctctttacaccattt

SEQ ID NO: 1697883 - DNA, 15 bp, Homo sapiens
tctttacaccattta

SEQ ID NO: 1697884 - DNA, 15 bp, Homo sapiens
ctttacaccatttac

SEQ ID NO: 1697885 - DNA, 15 bp, Homo sapiens
tttacaccatttact

SEQ ID NO: 1697886 - DNA, 15 bp, Homo sapiens
ttacaccatttactt

SEQ ID NO: 1697887 - DNA, 15 bp, Homo sapiens
tacaccatttacttc

SEQ ID NO: 1697888 - DNA, 15 bp, Homo sapiens
acaccatttacttca

SEQ ID NO: 1697889 - DNA, 15 bp, Homo sapiens
caccatttacttcag

SEQ ID NO: 1697890 - DNA, 15 bp, Homo sapiens
accatttacttcagg

SEQ ID NO: 1697891 - DNA, 15 bp, Homo sapiens
ccatttacttcaggt

SEQ ID NO: 1697892 - DNA, 15 bp, Homo sapiens
catttacttcaggtg

SEQ ID NO: 1697893 - DNA, 15 bp, Homo sapiens
atttacttcaggtga

SEQ ID NO: 1697894 - DNA, 15 bp, Homo sapiens
tttacttcaggtgat

SEQ ID NO: 1697895 - DNA, 15 bp, Homo sapiens
ttacttcaggtgatt

SEQ ID NO: 1697896 - DNA, 15 bp, Homo sapiens
tacttcaggtgattc

SEQ ID NO: 1697897 - DNA, 15 bp, Homo sapiens
acttcaggtgattct

SEQ ID NO: 1697898 - DNA, 15 bp, Homo sapiens
cttcaggtgattctt

SEQ ID NO: 1697899 - DNA, 15 bp, Homo sapiens
ttcaggtgattcttt

SEQ ID NO: 1697900 - DNA, 15 bp, Homo sapiens
tcaggtgattctttc

SEQ ID NO: 1697901 - DNA, 15 bp, Homo sapiens
caggtgattctttct

SEQ ID NO: 1697902 - DNA, 15 bp, Homo sapiens
aggtgattctttcta

SEQ ID NO: 1697903 - DNA, 15 bp, Homo sapiens
ggtgattctttctaa

SEQ ID NO: 1697904 - DNA, 15 bp, Homo sapiens
gtgattctttctaaa

SEQ ID NO: 1697905 - DNA, 15 bp, Homo sapiens
tgattctttctaaaa

SEQ ID NO: 1697906 - DNA, 15 bp, Homo sapiens
gattctttctaaaac

SEQ ID NO: 1697907 - DNA, 15 bp, Homo sapiens
attctttctaaaaca

SEQ ID NO: 1697908 - DNA, 15 bp, Homo sapiens
ttctttctaaaacac

SEQ ID NO: 1697909 - DNA, 15 bp, Homo sapiens
tctttctaaaacaca

SEQ ID NO: 1697910 - DNA, 15 bp, Homo sapiens
ctttctaaaacacag

SEQ ID NO: 1697911 - DNA, 15 bp, Homo sapiens
tttctaaaacacagt

SEQ ID NO: 1697912 - DNA, 15 bp, Homo sapiens
ttctaaaacacagtc

SEQ ID NO: 1697913 - DNA, 15 bp, Homo sapiens
tctaaaacacagtct

SEQ ID NO: 1697914 - DNA, 15 bp, Homo sapiens
ctaaaacacagtctt

SEQ ID NO: 1697915 - DNA, 15 bp, Homo sapiens
taaaacacagtcttc

SEQ ID NO: 1697916 - DNA, 15 bp, Homo sapiens
aaaacacagtcttca

SEQ ID NO: 1697917 - DNA, 15 bp, Homo sapiens
aaacacagtcttcag

SEQ ID NO: 1697918 - DNA, 15 bp, Homo sapiens
aacacagtcttcagc

SEQ ID NO: 1697919 - DNA, 15 bp, Homo sapiens
acacagtcttcagca

SEQ ID NO: 1697920 - DNA, 15 bp, Homo sapiens
cacagtcttcagcat

SEQ ID NO: 1697921 - DNA, 15 bp, Homo sapiens
acagtcttcagcatt

SEQ ID NO: 1697922 - DNA, 15 bp, Homo sapiens
cagtcttcagcattg

SEQ ID NO: 1697923 - DNA, 15 bp, Homo sapiens
agtcttcagcattgc

SEQ ID NO: 1697924 - DNA, 15 bp, Homo sapiens
gtcttcagcattgcc

SEQ ID NO: 1697925 - DNA, 15 bp, Homo sapiens
tcttcagcattgcct

SEQ ID NO: 1697926 - DNA, 15 bp, Homo sapiens
cttcagcattgcctc

SEQ ID NO: 1697927 - DNA, 15 bp, Homo sapiens
ttcagcattgcctct

SEQ ID NO: 1697928 - DNA, 15 bp, Homo sapiens
tcagcattgcctctt

SEQ ID NO: 1697929 - DNA, 15 bp, Homo sapiens
cagcattgcctctta

SEQ ID NO: 1697930 - DNA, 15 bp, Homo sapiens
agcattgcctcttaa

SEQ ID NO: 1697931 - DNA, 15 bp, Homo sapiens
gcattgcctcttaac

SEQ ID NO: 1697932 - DNA, 15 bp, Homo sapiens
cattgcctcttaacc

SEQ ID NO: 1697933 - DNA, 15 bp, Homo sapiens
attgcctcttaacca

SEQ ID NO: 1697934 - DNA, 15 bp, Homo sapiens
ttgcctcttaaccat

SEQ ID NO: 1697935 - DNA, 15 bp, Homo sapiens
tgcctcttaaccatt

SEQ ID NO: 1697936 - DNA, 15 bp, Homo sapiens
gcctcttaaccatta

SEQ ID NO: 1697937 - DNA, 15 bp, Homo sapiens
cctcttaaccattaa

SEQ ID NO: 1697938 - DNA, 15 bp, Homo sapiens
ctcttaaccattaag

SEQ ID NO: 1697939 - DNA, 15 bp, Homo sapiens
tcttaaccattaaga

SEQ ID NO: 1697940 - DNA, 15 bp, Homo sapiens
cttaaccattaagac

SEQ ID NO: 1697941 - DNA, 15 bp, Homo sapiens
ttaaccattaagact

SEQ ID NO: 1697942 - DNA, 15 bp, Homo sapiens
taaccattaagactg

SEQ ID NO: 1697943 - DNA, 15 bp, Homo sapiens
aaccattaagactgt

SEQ ID NO: 1697944 - DNA, 15 bp, Homo sapiens
accattaagactgtt

SEQ ID NO: 1697945 - DNA, 15 bp, Homo sapiens
ccattaagactgttt

SEQ ID NO: 1697946 - DNA, 15 bp, Homo sapiens
cattaagactgttta

SEQ ID NO: 1697947 - DNA, 15 bp, Homo sapiens
attaagactgtttac

SEQ ID NO: 1697948 - DNA, 15 bp, Homo sapiens
ttaagactgtttaca

SEQ ID NO: 1697949 - DNA, 15 bp, Homo sapiens
taagactgtttacaa

SEQ ID NO: 1697950 - DNA, 15 bp, Homo sapiens
aagactgtttacaaa

SEQ ID NO: 1697951 - DNA, 15 bp, Homo sapiens
agactgtttacaaat

SEQ ID NO: 1697952 - DNA, 15 bp, Homo sapiens
gactgtttacaaatg

SEQ ID NO: 1697953 - DNA, 15 bp, Homo sapiens
actgtttacaaatga

SEQ ID NO: 1697954 - DNA, 15 bp, Homo sapiens
ctgtttacaaatgac

SEQ ID NO: 1697955 - DNA, 15 bp, Homo sapiens
tgtttacaaatgact

SEQ ID NO: 1697956 - DNA, 15 bp, Homo sapiens
gtttacaaatgactg

SEQ ID NO: 1697957 - DNA, 15 bp, Homo sapiens
tttacaaatgactga

SEQ ID NO: 1697958 - DNA, 15 bp, Homo sapiens
ttacaaatgactgaa

SEQ ID NO: 1697959 - DNA, 15 bp, Homo sapiens
tacaaatgactgaaa

SEQ ID NO: 1697960 - DNA, 15 bp, Homo sapiens
acaaatgactgaaaa

SEQ ID NO: 1697961 - DNA, 15 bp, Homo sapiens
caaatgactgaaaac

SEQ ID NO: 1697962 - DNA, 15 bp, Homo sapiens
aaatgactgaaaacc

SEQ ID NO: 1697963 - DNA, 15 bp, Homo sapiens
aatgactgaaaacct

SEQ ID NO: 1697964 - DNA, 15 bp, Homo sapiens
atgactgaaaaccta

SEQ ID NO: 1697965 - DNA, 15 bp, Homo sapiens
tgactgaaaacctaa

SEQ ID NO: 1697966 - DNA, 15 bp, Homo sapiens
gactgaaaacctaac

SEQ ID NO: 1697967 - DNA, 15 bp, Homo sapiens
actgaaaacctaacc

SEQ ID NO: 1697968 - DNA, 15 bp, Homo sapiens
ctgaaaacctaaccc

SEQ ID NO: 1697969 - DNA, 15 bp, Homo sapiens
tgaaaacctaaccca

SEQ ID NO: 1697970 - DNA, 15 bp, Homo sapiens
gaaaacctaacccaa

SEQ ID NO: 1697971 - DNA, 15 bp, Homo sapiens
aaaacctaacccaac

SEQ ID NO: 1697972 - DNA, 15 bp, Homo sapiens
aaacctaacccaact

SEQ ID NO: 1697973 - DNA, 15 bp, Homo sapiens
aacctaacccaactt

SEQ ID NO: 1697974 - DNA, 15 bp, Homo sapiens
acctaacccaacttg

SEQ ID NO: 1697975 - DNA, 15 bp, Homo sapiens
cctaacccaacttgg

SEQ ID NO: 1697976 - DNA, 15 bp, Homo sapiens
ctaacccaacttgga

SEQ ID NO: 1697977 - DNA, 15 bp, Homo sapiens
taacccaacttggat

SEQ ID NO: 1697978 - DNA, 15 bp, Homo sapiens
aacccaacttggatt

SEQ ID NO: 1697979 - DNA, 15 bp, Homo sapiens
acccaacttggattt

SEQ ID NO: 1697980 - DNA, 15 bp, Homo sapiens
cccaacttggattta

SEQ ID NO: 1697981 - DNA, 15 bp, Homo sapiens
ccaacttggatttac

SEQ ID NO: 1697982 - DNA, 15 bp, Homo sapiens
caacttggatttacc

SEQ ID NO: 1697983 - DNA, 15 bp, Homo sapiens
aacttggatttacct

SEQ ID NO: 1697984 - DNA, 15 bp, Homo sapiens
acttggatttacctt

SEQ ID NO: 1697985 - DNA, 15 bp, Homo sapiens
cttggatttaccttt

SEQ ID NO: 1697986 - DNA, 15 bp, Homo sapiens
ttggatttaccttta

SEQ ID NO: 1697987 - DNA, 15 bp, Homo sapiens
tggatttacctttag

SEQ ID NO: 1697988 - DNA, 15 bp, Homo sapiens
ggatttacctttaga

SEQ ID NO: 1697989 - DNA, 15 bp, Homo sapiens
gatttacctttagag

SEQ ID NO: 1697990 - DNA, 15 bp, Homo sapiens
atttacctttagaga

SEQ ID NO: 1697991 - DNA, 15 bp, Homo sapiens
tttacctttagagag

SEQ ID NO: 1697992 - DNA, 15 bp, Homo sapiens
ttacctttagagaga

SEQ ID NO: 1697993 - DNA, 15 bp, Homo sapiens
tacctttagagagac

SEQ ID NO: 1697994 - DNA, 15 bp, Homo sapiens
acctttagagagaca

SEQ ID NO: 1697995 - DNA, 15 bp, Homo sapiens
cctttagagagacag

SEQ ID NO: 1697996 - DNA, 15 bp, Homo sapiens
ctttagagagacaga

SEQ ID NO: 1697997 - DNA, 15 bp, Homo sapiens
tttagagagacagaa

SEQ ID NO: 1697998 - DNA, 15 bp, Homo sapiens
ttagagagacagaat

SEQ ID NO: 1697999 - DNA, 15 bp, Homo sapiens
tagagagacagaatc

SEQ ID NO: 1698000 - DNA, 15 bp, Homo sapiens
agagagacagaatca

SEQ ID NO: 1698001 - DNA, 15 bp, Homo sapiens
gagagacagaatcag

SEQ ID NO: 1698002 - DNA, 15 bp, Homo sapiens
agagacagaatcagc

SEQ ID NO: 1698003 - DNA, 15 bp, Homo sapiens
gagacagaatcagct

SEQ ID NO: 1698004 - DNA, 15 bp, Homo sapiens
agacagaatcagctc

SEQ ID NO: 1698005 - DNA, 15 bp, Homo sapiens
gacagaatcagctca

SEQ ID NO: 1698006 - DNA, 15 bp, Homo sapiens
acagaatcagctcat

SEQ ID NO: 1698007 - DNA, 15 bp, Homo sapiens
cagaatcagctcata

SEQ ID NO: 1698008 - DNA, 15 bp, Homo sapiens
agaatcagctcatat

SEQ ID NO: 1698009 - DNA, 15 bp, Homo sapiens
gaatcagctcatata

SEQ ID NO: 1698010 - DNA, 15 bp, Homo sapiens
aatcagctcatataa

SEQ ID NO: 1698011 - DNA, 15 bp, Homo sapiens
atcagctcatataac

SEQ ID NO: 1698012 - DNA, 15 bp, Homo sapiens
tcagctcatataact

SEQ ID NO: 1698013 - DNA, 15 bp, Homo sapiens
cagctcatataacta

SEQ ID NO: 1698014 - DNA, 15 bp, Homo sapiens
agctcatataactaa

SEQ ID NO: 1698015 - DNA, 15 bp, Homo sapiens
gctcatataactaaa

SEQ ID NO: 1698016 - DNA, 15 bp, Homo sapiens
ctcatataactaaat

SEQ ID NO: 1698017 - DNA, 15 bp, Homo sapiens
tcatataactaaata

SEQ ID NO: 1698018 - DNA, 15 bp, Homo sapiens
catataactaaatat

SEQ ID NO: 1698019 - DNA, 15 bp, Homo sapiens
atataactaaatatt

SEQ ID NO: 1698020 - DNA, 15 bp, Homo sapiens
tataactaaatattc

SEQ ID NO: 1698021 - DNA, 15 bp, Homo sapiens
ataactaaatattcc

SEQ ID NO: 1698022 - DNA, 15 bp, Homo sapiens
taactaaatattcca

SEQ ID NO: 1698023 - DNA, 15 bp, Homo sapiens
aactaaatattccaa

SEQ ID NO: 1698024 - DNA, 15 bp, Homo sapiens
actaaatattccaaa

SEQ ID NO: 1698025 - DNA, 15 bp, Homo sapiens
ctaaatattccaaag

SEQ ID NO: 1698026 - DNA, 15 bp, Homo sapiens
taaatattccaaaga

SEQ ID NO: 1698027 - DNA, 15 bp, Homo sapiens
aaatattccaaagat

SEQ ID NO: 1698028 - DNA, 15 bp, Homo sapiens
aatattccaaagatg

SEQ ID NO: 1698029 - DNA, 15 bp, Homo sapiens
atattccaaagatgc

SEQ ID NO: 1698030 - DNA, 15 bp, Homo sapiens
tattccaaagatgct

SEQ ID NO: 1698031 - DNA, 15 bp, Homo sapiens
attccaaagatgctt

SEQ ID NO: 1698032 - DNA, 15 bp, Homo sapiens
ttccaaagatgcttt

SEQ ID NO: 1698033 - DNA, 15 bp, Homo sapiens
tccaaagatgctttg

SEQ ID NO: 1698034 - DNA, 15 bp, Homo sapiens
ccaaagatgctttgg

SEQ ID NO: 1698035 - DNA, 15 bp, Homo sapiens
caaagatgctttggc

SEQ ID NO: 1698036 - DNA, 15 bp, Homo sapiens
aaagatgctttggct

SEQ ID NO: 1698037 - DNA, 15 bp, Homo sapiens
aagatgctttggctt

SEQ ID NO: 1698038 - DNA, 15 bp, Homo sapiens
agatgctttggcttc

SEQ ID NO: 1698039 - DNA, 15 bp, Homo sapiens
gatgctttggcttca

SEQ ID NO: 1698040 - DNA, 15 bp, Homo sapiens
atgctttggcttcag

SEQ ID NO: 1698041 - DNA, 15 bp, Homo sapiens
tgctttggcttcagg

SEQ ID NO: 1698042 - DNA, 15 bp, Homo sapiens
gctttggcttcaggc

SEQ ID NO: 1698043 - DNA, 15 bp, Homo sapiens
ctttggcttcaggca

SEQ ID NO: 1698044 - DNA, 15 bp, Homo sapiens
tttggcttcaggcaa

SEQ ID NO: 1698045 - DNA, 15 bp, Homo sapiens
ttggcttcaggcaag

SEQ ID NO: 1698046 - DNA, 15 bp, Homo sapiens
tggcttcaggcaagg

SEQ ID NO: 1698047 - DNA, 15 bp, Homo sapiens
ggcttcaggcaaggc

SEQ ID NO: 1698048 - DNA, 15 bp, Homo sapiens
gcttcaggcaaggct

SEQ ID NO: 1698049 - DNA, 15 bp, Homo sapiens
cttcaggcaaggcta

SEQ ID NO: 1698050 - DNA, 15 bp, Homo sapiens
ttcaggcaaggctag

SEQ ID NO: 1698051 - DNA, 15 bp, Homo sapiens
tcaggcaaggctaga

SEQ ID NO: 1698052 - DNA, 15 bp, Homo sapiens
caggcaaggctagag

SEQ ID NO: 1698053 - DNA, 15 bp, Homo sapiens
aggcaaggctagagc

SEQ ID NO: 1698054 - DNA, 15 bp, Homo sapiens
ggcaaggctagagct

SEQ ID NO: 1698055 - DNA, 15 bp, Homo sapiens
gcaaggctagagctt

SEQ ID NO: 1698056 - DNA, 15 bp, Homo sapiens
caaggctagagcttc

SEQ ID NO: 1698057 - DNA, 15 bp, Homo sapiens
aaggctagagcttca

SEQ ID NO: 1698058 - DNA, 15 bp, Homo sapiens
aggctagagcttcag

SEQ ID NO: 1698059 - DNA, 15 bp, Homo sapiens
ggctagagcttcagt

SEQ ID NO: 1698060 - DNA, 15 bp, Homo sapiens
gctagagcttcagtg

SEQ ID NO: 1698061 - DNA, 15 bp, Homo sapiens
ctagagcttcagtga

SEQ ID NO: 1698062 - DNA, 15 bp, Homo sapiens
tagagcttcagtgat

SEQ ID NO: 1698063 - DNA, 15 bp, Homo sapiens
agagcttcagtgata

SEQ ID NO: 1698064 - DNA, 15 bp, Homo sapiens
gagcttcagtgatat

SEQ ID NO: 1698065 - DNA, 15 bp, Homo sapiens
agcttcagtgatatg

SEQ ID NO: 1698066 - DNA, 15 bp, Homo sapiens
gcttcagtgatatgt

SEQ ID NO: 1698067 - DNA, 15 bp, Homo sapiens
cttcagtgatatgtc

SEQ ID NO: 1698068 - DNA, 15 bp, Homo sapiens
ttcagtgatatgtcc

SEQ ID NO: 1698069 - DNA, 15 bp, Homo sapiens
tcagtgatatgtcca

SEQ ID NO: 1698070 - DNA, 15 bp, Homo sapiens
cagtgatatgtccaa

SEQ ID NO: 1698071 - DNA, 15 bp, Homo sapiens
agtgatatgtccaag

SEQ ID NO: 1698072 - DNA, 15 bp, Homo sapiens
gtgatatgtccaagc

SEQ ID NO: 1698073 - DNA, 15 bp, Homo sapiens
tgatatgtccaagct

SEQ ID NO: 1698074 - DNA, 15 bp, Homo sapiens
gatatgtccaagcta

SEQ ID NO: 1698075 - DNA, 15 bp, Homo sapiens
atatgtccaagctag

SEQ ID NO: 1698076 - DNA, 15 bp, Homo sapiens
tatgtccaagctaga

SEQ ID NO: 1698077 - DNA, 15 bp, Homo sapiens
atgtccaagctagaa

SEQ ID NO: 1698078 - DNA, 15 bp, Homo sapiens
tgtccaagctagaaa

SEQ ID NO: 1698079 - DNA, 15 bp, Homo sapiens
gtccaagctagaaaa

SEQ ID NO: 1698080 - DNA, 15 bp, Homo sapiens
tccaagctagaaaat

SEQ ID NO: 1698081 - DNA, 15 bp, Homo sapiens
ccaagctagaaaata

SEQ ID NO: 1698082 - DNA, 15 bp, Homo sapiens
caagctagaaaatag

SEQ ID NO: 1698083 - DNA, 15 bp, Homo sapiens
aagctagaaaatagt

SEQ ID NO: 1698084 - DNA, 15 bp, Homo sapiens
agctagaaaatagtt

SEQ ID NO: 1698085 - DNA, 15 bp, Homo sapiens
gctagaaaatagttt

SEQ ID NO: 1698086 - DNA, 15 bp, Homo sapiens
ctagaaaatagtttc

SEQ ID NO: 1698087 - DNA, 15 bp, Homo sapiens
tagaaaatagtttct

SEQ ID NO: 1698088 - DNA, 15 bp, Homo sapiens
agaaaatagtttctc

SEQ ID NO: 1698089 - DNA, 15 bp, Homo sapiens
gaaaatagtttctct

SEQ ID NO: 1698090 - DNA, 15 bp, Homo sapiens
aaaatagtttctctc

SEQ ID NO: 1698091 - DNA, 15 bp, Homo sapiens
aaatagtttctctct

SEQ ID NO: 1698092 - DNA, 15 bp, Homo sapiens
aatagtttctctctc

SEQ ID NO: 1698093 - DNA, 15 bp, Homo sapiens
atagtttctctctct

SEQ ID NO: 1698094 - DNA, 15 bp, Homo sapiens
tagtttctctctctt

SEQ ID NO: 1698095 - DNA, 15 bp, Homo sapiens
agtttctctctcttc

SEQ ID NO: 1698096 - DNA, 15 bp, Homo sapiens
gtttctctctcttcc

SEQ ID NO: 1698097 - DNA, 15 bp, Homo sapiens
tttctctctcttcct

SEQ ID NO: 1698098 - DNA, 15 bp, Homo sapiens
ttctctctcttcctt

SEQ ID NO: 1698099 - DNA, 15 bp, Homo sapiens
tctctctcttccttt

SEQ ID NO: 1698100 - DNA, 15 bp, Homo sapiens
ctctctcttcctttc

SEQ ID NO: 1698101 - DNA, 15 bp, Homo sapiens
tctctcttcctttct

SEQ ID NO: 1698102 - DNA, 15 bp, Homo sapiens
ctctcttcctttctc

SEQ ID NO: 1698103 - DNA, 15 bp, Homo sapiens
tctcttcctttctca

SEQ ID NO: 1698104 - DNA, 15 bp, Homo sapiens
ctcttcctttctcag

SEQ ID NO: 1698105 - DNA, 15 bp, Homo sapiens
tcttcctttctcagc

SEQ ID NO: 1698106 - DNA, 15 bp, Homo sapiens
cttcctttctcagct

SEQ ID NO: 1698107 - DNA, 15 bp, Homo sapiens
ttcctttctcagctc

SEQ ID NO: 1698108 - DNA, 15 bp, Homo sapiens
tcctttctcagctct

SEQ ID NO: 1698109 - DNA, 15 bp, Homo sapiens
cctttctcagctcta

SEQ ID NO: 1698110 - DNA, 15 bp, Homo sapiens
ctttctcagctctac

SEQ ID NO: 1698111 - DNA, 15 bp, Homo sapiens
tttctcagctctact

SEQ ID NO: 1698112 - DNA, 15 bp, Homo sapiens
ttctcagctctacta

SEQ ID NO: 1698113 - DNA, 15 bp, Homo sapiens
tctcagctctactat

SEQ ID NO: 1698114 - DNA, 15 bp, Homo sapiens
ctcagctctactatt

SEQ ID NO: 1698115 - DNA, 15 bp, Homo sapiens
tcagctctactattt

SEQ ID NO: 1698116 - DNA, 15 bp, Homo sapiens
cagctctactatttc

SEQ ID NO: 1698117 - DNA, 15 bp, Homo sapiens
agctctactatttca

SEQ ID NO: 1698118 - DNA, 15 bp, Homo sapiens
gctctactatttcac

SEQ ID NO: 1698119 - DNA, 15 bp, Homo sapiens
ctctactatttcact

SEQ ID NO: 1698120 - DNA, 15 bp, Homo sapiens
tctactatttcactg

SEQ ID NO: 1698121 - DNA, 15 bp, Homo sapiens
ctactatttcactgt

SEQ ID NO: 1698122 - DNA, 15 bp, Homo sapiens
tactatttcactgtt

SEQ ID NO: 1698123 - DNA, 15 bp, Homo sapiens
actatttcactgttg

SEQ ID NO: 1698124 - DNA, 15 bp, Homo sapiens
ctatttcactgttgg

SEQ ID NO: 1698125 - DNA, 15 bp, Homo sapiens
tatttcactgttggc

SEQ ID NO: 1698126 - DNA, 15 bp, Homo sapiens
atttcactgttggct

SEQ ID NO: 1698127 - DNA, 15 bp, Homo sapiens
tttcactgttggctt

SEQ ID NO: 1698128 - DNA, 15 bp, Homo sapiens
ttcactgttggcttc

SEQ ID NO: 1698129 - DNA, 15 bp, Homo sapiens
tcactgttggcttca

SEQ ID NO: 1698130 - DNA, 15 bp, Homo sapiens
cactgttggcttcat

SEQ ID NO: 1698131 - DNA, 15 bp, Homo sapiens
actgttggcttcatt

SEQ ID NO: 1698132 - DNA, 15 bp, Homo sapiens
ctgttggcttcattt

SEQ ID NO: 1698133 - DNA, 15 bp, Homo sapiens
tgttggcttcatttt

SEQ ID NO: 1698134 - DNA, 15 bp, Homo sapiens
gttggcttcattttt

SEQ ID NO: 1698135 - DNA, 15 bp, Homo sapiens
ttggcttcatttttc

SEQ ID NO: 1698136 - DNA, 15 bp, Homo sapiens
tggcttcatttttca

SEQ ID NO: 1698137 - DNA, 15 bp, Homo sapiens
ggcttcatttttcag

SEQ ID NO: 1698138 - DNA, 15 bp, Homo sapiens
gcttcatttttcaga

SEQ ID NO: 1698139 - DNA, 15 bp, Homo sapiens
cttcatttttcagaa

SEQ ID NO: 1698140 - DNA, 15 bp, Homo sapiens
ttcatttttcagaaa

SEQ ID NO: 1698141 - DNA, 15 bp, Homo sapiens
tcatttttcagaaag

SEQ ID NO: 1698142 - DNA, 15 bp, Homo sapiens
catttttcagaaagc

SEQ ID NO: 1698143 - DNA, 15 bp, Homo sapiens
atttttcagaaagct

SEQ ID NO: 1698144 - DNA, 15 bp, Homo sapiens
tttttcagaaagctt

SEQ ID NO: 1698145 - DNA, 15 bp, Homo sapiens
ttttcagaaagcttc

SEQ ID NO: 1698146 - DNA, 15 bp, Homo sapiens
tttcagaaagcttct

SEQ ID NO: 1698147 - DNA, 15 bp, Homo sapiens
ttcagaaagcttctt

SEQ ID NO: 1698148 - DNA, 15 bp, Homo sapiens
tcagaaagcttcttt

SEQ ID NO: 1698149 - DNA, 15 bp, Homo sapiens
cagaaagcttctttt

SEQ ID NO: 1698150 - DNA, 15 bp, Homo sapiens
agaaagcttcttttt

SEQ ID NO: 1698151 - DNA, 15 bp, Homo sapiens
gaaagcttctttttt

SEQ ID NO: 1698152 - DNA, 15 bp, Homo sapiens
aaagcttcttttttt

SEQ ID NO: 1698153 - DNA, 15 bp, Homo sapiens
aagcttctttttttg

SEQ ID NO: 1698154 - DNA, 15 bp, Homo sapiens
agcttctttttttga

SEQ ID NO: 1698155 - DNA, 15 bp, Homo sapiens
gcttctttttttgaa

SEQ ID NO: 1698156 - DNA, 15 bp, Homo sapiens
cttctttttttgaag

SEQ ID NO: 1698157 - DNA, 15 bp, Homo sapiens
ttctttttttgaagg

SEQ ID NO: 1698158 - DNA, 15 bp, Homo sapiens
tctttttttgaaggt

SEQ ID NO: 1698159 - DNA, 15 bp, Homo sapiens
ctttttttgaaggtc

SEQ ID NO: 1698160 - DNA, 15 bp, Homo sapiens
tttttttgaaggtct

SEQ ID NO: 1698161 - DNA, 15 bp, Homo sapiens
ttttttgaaggtctc

SEQ ID NO: 1698162 - DNA, 15 bp, Homo sapiens
tttttgaaggtctca

SEQ ID NO: 1698163 - DNA, 15 bp, Homo sapiens
ttttgaaggtctcaa

SEQ ID NO: 1698164 - DNA, 15 bp, Homo sapiens
tttgaaggtctcaac

SEQ ID NO: 1698165 - DNA, 15 bp, Homo sapiens
ttgaaggtctcaaca

SEQ ID NO: 1698166 - DNA, 15 bp, Homo sapiens
tgaaggtctcaacat

SEQ ID NO: 1698167 - DNA, 15 bp, Homo sapiens
gaaggtctcaacata

SEQ ID NO: 1698168 - DNA, 15 bp, Homo sapiens
aaggtctcaacataa

SEQ ID NO: 1698169 - DNA, 15 bp, Homo sapiens
aggtctcaacataat

SEQ ID NO: 1698170 - DNA, 15 bp, Homo sapiens
ggtctcaacataatt

SEQ ID NO: 1698171 - DNA, 15 bp, Homo sapiens
gtctcaacataattg

SEQ ID NO: 1698172 - DNA, 15 bp, Homo sapiens
tctcaacataattgt

SEQ ID NO: 1698173 - DNA, 15 bp, Homo sapiens
ctcaacataattgtc

SEQ ID NO: 1698174 - DNA, 15 bp, Homo sapiens
tcaacataattgtca

SEQ ID NO: 1698175 - DNA, 15 bp, Homo sapiens
caacataattgtcaa

SEQ ID NO: 1698176 - DNA, 15 bp, Homo sapiens
aacataattgtcaac

SEQ ID NO: 1698177 - DNA, 15 bp, Homo sapiens
acataattgtcaaca

SEQ ID NO: 1698178 - DNA, 15 bp, Homo sapiens
cataattgtcaacag

SEQ ID NO: 1698179 - DNA, 15 bp, Homo sapiens
ataattgtcaacagc

SEQ ID NO: 1698180 - DNA, 15 bp, Homo sapiens
taattgtcaacagct

SEQ ID NO: 1698181 - DNA, 15 bp, Homo sapiens
aattgtcaacagctc

SEQ ID NO: 1698182 - DNA, 15 bp, Homo sapiens
attgtcaacagctcc

SEQ ID NO: 1698183 - DNA, 15 bp, Homo sapiens
ttgtcaacagctccc

SEQ ID NO: 1698184 - DNA, 15 bp, Homo sapiens
tgtcaacagctccca

SEQ ID NO: 1698185 - DNA, 15 bp, Homo sapiens
gtcaacagctcccag

SEQ ID NO: 1698186 - DNA, 15 bp, Homo sapiens
tcaacagctcccagc

SEQ ID NO: 1698187 - DNA, 15 bp, Homo sapiens
caacagctcccagca

SEQ ID NO: 1698188 - DNA, 15 bp, Homo sapiens
aacagctcccagcac

SEQ ID NO: 1698189 - DNA, 15 bp, Homo sapiens
acagctcccagcact

SEQ ID NO: 1698190 - DNA, 15 bp, Homo sapiens
cagctcccagcacta

SEQ ID NO: 1698191 - DNA, 15 bp, Homo sapiens
agctcccagcactaa

SEQ ID NO: 1698192 - DNA, 15 bp, Homo sapiens
gctcccagcactaaa

SEQ ID NO: 1698193 - DNA, 15 bp, Homo sapiens
ctcccagcactaaat

SEQ ID NO: 1698194 - DNA, 15 bp, Homo sapiens
tcccagcactaaata

SEQ ID NO: 1698195 - DNA, 15 bp, Homo sapiens
cccagcactaaatac

SEQ ID NO: 1698196 - DNA, 15 bp, Homo sapiens
ccagcactaaatact

SEQ ID NO: 1698197 - DNA, 15 bp, Homo sapiens
cagcactaaatactt

SEQ ID NO: 1698198 - DNA, 15 bp, Homo sapiens
agcactaaatacttt

SEQ ID NO: 1698199 - DNA, 15 bp, Homo sapiens
gcactaaatacttta

SEQ ID NO: 1698200 - DNA, 15 bp, Homo sapiens
cactaaatactttaa

SEQ ID NO: 1698201 - DNA, 15 bp, Homo sapiens
actaaatactttaag

SEQ ID NO: 1698202 - DNA, 15 bp, Homo sapiens
ctaaatactttaaga

SEQ ID NO: 1698203 - DNA, 15 bp, Homo sapiens
taaatactttaagat

SEQ ID NO: 1698204 - DNA, 15 bp, Homo sapiens
aaatactttaagatt

SEQ ID NO: 1698205 - DNA, 15 bp, Homo sapiens
aatactttaagatta

SEQ ID NO: 1698206 - DNA, 15 bp, Homo sapiens
atactttaagattaa

SEQ ID NO: 1698207 - DNA, 15 bp, Homo sapiens
tactttaagattaac

SEQ ID NO: 1698208 - DNA, 15 bp, Homo sapiens
actttaagattaacc

SEQ ID NO: 1698209 - DNA, 15 bp, Homo sapiens
ctttaagattaacct

SEQ ID NO: 1698210 - DNA, 15 bp, Homo sapiens
tttaagattaaccta

SEQ ID NO: 1698211 - DNA, 15 bp, Homo sapiens
ttaagattaacctag

SEQ ID NO: 1698212 - DNA, 15 bp, Homo sapiens
taagattaacctaga

SEQ ID NO: 1698213 - DNA, 15 bp, Homo sapiens
aagattaacctagag

SEQ ID NO: 1698214 - DNA, 15 bp, Homo sapiens
agattaacctagagg

SEQ ID NO: 1698215 - DNA, 15 bp, Homo sapiens
gattaacctagagga

SEQ ID NO: 1698216 - DNA, 15 bp, Homo sapiens
attaacctagaggag

SEQ ID NO: 1698217 - DNA, 15 bp, Homo sapiens
ttaacctagaggaga

SEQ ID NO: 1698218 - DNA, 15 bp, Homo sapiens
taacctagaggagaa

SEQ ID NO: 1698219 - DNA, 15 bp, Homo sapiens
aacctagaggagaat

SEQ ID NO: 1698220 - DNA, 15 bp, Homo sapiens
acctagaggagaatg

SEQ ID NO: 1698221 - DNA, 15 bp, Homo sapiens
cctagaggagaatgg

SEQ ID NO: 1698222 - DNA, 15 bp, Homo sapiens
ctagaggagaatggg

SEQ ID NO: 1698223 - DNA, 15 bp, Homo sapiens
tagaggagaatgggg

SEQ ID NO: 1698224 - DNA, 15 bp, Homo sapiens
agaggagaatggggg

SEQ ID NO: 1698225 - DNA, 15 bp, Homo sapiens
gaggagaatgggggc

SEQ ID NO: 1698226 - DNA, 15 bp, Homo sapiens
aggagaatgggggcc

SEQ ID NO: 1698227 - DNA, 15 bp, Homo sapiens
ggagaatgggggcct

SEQ ID NO: 1698228 - DNA, 15 bp, Homo sapiens
gagaatgggggcctc

SEQ ID NO: 1698229 - DNA, 15 bp, Homo sapiens
agaatgggggcctcc

SEQ ID NO: 1698230 - DNA, 15 bp, Homo sapiens
gaatgggggcctcct

SEQ ID NO: 1698231 - DNA, 15 bp, Homo sapiens
aatgggggcctcctt

SEQ ID NO: 1698232 - DNA, 15 bp, Homo sapiens
atgggggcctccttc

SEQ ID NO: 1698233 - DNA, 15 bp, Homo sapiens
tgggggcctccttcc

SEQ ID NO: 1698234 - DNA, 15 bp, Homo sapiens
gggggcctccttccc

SEQ ID NO: 1698235 - DNA, 15 bp, Homo sapiens
ggggcctccttccca

SEQ ID NO: 1698236 - DNA, 15 bp, Homo sapiens
gggcctccttcccag

SEQ ID NO: 1698237 - DNA, 15 bp, Homo sapiens
ggcctccttcccagg

SEQ ID NO: 1698238 - DNA, 15 bp, Homo sapiens
gcctccttcccagga

SEQ ID NO: 1698239 - DNA, 15 bp, Homo sapiens
cctccttcccaggag

SEQ ID NO: 1698240 - DNA, 15 bp, Homo sapiens
ctccttcccaggagt

SEQ ID NO: 1698241 - DNA, 15 bp, Homo sapiens
tccttcccaggagtc

SEQ ID NO: 1698242 - DNA, 15 bp, Homo sapiens
ccttcccaggagtct

SEQ ID NO: 1698243 - DNA, 15 bp, Homo sapiens
cttcccaggagtctg

SEQ ID NO: 1698244 - DNA, 15 bp, Homo sapiens
ttcccaggagtctgg

SEQ ID NO: 1698245 - DNA, 15 bp, Homo sapiens
tcccaggagtctggg

SEQ ID NO: 1698246 - DNA, 15 bp, Homo sapiens
cccaggagtctgggg

SEQ ID NO: 1698247 - DNA, 15 bp, Homo sapiens
ccaggagtctggggg

SEQ ID NO: 1698248 - DNA, 15 bp, Homo sapiens
caggagtctggggga

SEQ ID NO: 1698249 - DNA, 15 bp, Homo sapiens
aggagtctgggggag

SEQ ID NO: 1698250 - DNA, 15 bp, Homo sapiens
ggagtctgggggagg

SEQ ID NO: 1698251 - DNA, 15 bp, Homo sapiens
gagtctgggggaggg

SEQ ID NO: 1698252 - DNA, 15 bp, Homo sapiens
agtctgggggaggga

SEQ ID NO: 1698253 - DNA, 15 bp, Homo sapiens
gtctgggggagggaa

SEQ ID NO: 1698254 - DNA, 15 bp, Homo sapiens
tctgggggagggaag

SEQ ID NO: 1698255 - DNA, 15 bp, Homo sapiens
ctgggggagggaaga

SEQ ID NO: 1698256 - DNA, 15 bp, Homo sapiens
tgggggagggaagag

SEQ ID NO: 1698257 - DNA, 15 bp, Homo sapiens
gggggagggaagagg

SEQ ID NO: 1698258 - DNA, 15 bp, Homo sapiens
ggggagggaagagga

SEQ ID NO: 1698259 - DNA, 15 bp, Homo sapiens
gggagggaagaggag

SEQ ID NO: 1698260 - DNA, 15 bp, Homo sapiens
ggagggaagaggagg

SEQ ID NO: 1698261 - DNA, 15 bp, Homo sapiens
gagggaagaggaggg

SEQ ID NO: 1698262 - DNA, 15 bp, Homo sapiens
agggaagaggagggt

SEQ ID NO: 1698263 - DNA, 15 bp, Homo sapiens
gggaagaggagggtg

SEQ ID NO: 1698264 - DNA, 15 bp, Homo sapiens
ggaagaggagggtgg

SEQ ID NO: 1698265 - DNA, 15 bp, Homo sapiens
gaagaggagggtgga

SEQ ID NO: 1698266 - DNA, 15 bp, Homo sapiens
aagaggagggtggag

SEQ ID NO: 1698267 - DNA, 15 bp, Homo sapiens
agaggagggtggagt

SEQ ID NO: 1698268 - DNA, 15 bp, Homo sapiens
gaggagggtggagtc

SEQ ID NO: 1698269 - DNA, 15 bp, Homo sapiens
aggagggtggagtct

SEQ ID NO: 1698270 - DNA, 15 bp, Homo sapiens
ggagggtggagtctg

SEQ ID NO: 1698271 - DNA, 15 bp, Homo sapiens
gagggtggagtctga

SEQ ID NO: 1698272 - DNA, 15 bp, Homo sapiens
agggtggagtctgaa

SEQ ID NO: 1698273 - DNA, 15 bp, Homo sapiens
gggtggagtctgaac

SEQ ID NO: 1698274 - DNA, 15 bp, Homo sapiens
ggtggagtctgaacc

SEQ ID NO: 1698275 - DNA, 15 bp, Homo sapiens
gtggagtctgaacca

SEQ ID NO: 1698276 - DNA, 15 bp, Homo sapiens
tggagtctgaaccaa

SEQ ID NO: 1698277 - DNA, 15 bp, Homo sapiens
ggagtctgaaccaat

SEQ ID NO: 1698278 - DNA, 15 bp, Homo sapiens
gagtctgaaccaatc

SEQ ID NO: 1698279 - DNA, 15 bp, Homo sapiens
agtctgaaccaatca

SEQ ID NO: 1698280 - DNA, 15 bp, Homo sapiens
gtctgaaccaatcac

SEQ ID NO: 1698281 - DNA, 15 bp, Homo sapiens
tctgaaccaatcact

SEQ ID NO: 1698282 - DNA, 15 bp, Homo sapiens
ctgaaccaatcactt

SEQ ID NO: 1698283 - DNA, 15 bp, Homo sapiens
tgaaccaatcacttc

SEQ ID NO: 1698284 - DNA, 15 bp, Homo sapiens
gaaccaatcacttcc

SEQ ID NO: 1698285 - DNA, 15 bp, Homo sapiens
aaccaatcacttccc

SEQ ID NO: 1698286 - DNA, 15 bp, Homo sapiens
accaatcacttccca

SEQ ID NO: 1698287 - DNA, 15 bp, Homo sapiens
ccaatcacttcccat

SEQ ID NO: 1698288 - DNA, 15 bp, Homo sapiens
caatcacttcccatg

SEQ ID NO: 1698289 - DNA, 15 bp, Homo sapiens
aatcacttcccatgc

SEQ ID NO: 1698290 - DNA, 15 bp, Homo sapiens
atcacttcccatgct

SEQ ID NO: 1698291 - DNA, 15 bp, Homo sapiens
tcacttcccatgctt

SEQ ID NO: 1698292 - DNA, 15 bp, Homo sapiens
cacttcccatgcttg

SEQ ID NO: 1698293 - DNA, 15 bp, Homo sapiens
acttcccatgcttgt

SEQ ID NO: 1698294 - DNA, 15 bp, Homo sapiens
cttcccatgcttgtc

SEQ ID NO: 1698295 - DNA, 15 bp, Homo sapiens
ttcccatgcttgtca

SEQ ID NO: 1698296 - DNA, 15 bp, Homo sapiens
tcccatgcttgtcat

SEQ ID NO: 1698297 - DNA, 15 bp, Homo sapiens
cccatgcttgtcatg

SEQ ID NO: 1698298 - DNA, 15 bp, Homo sapiens
ccatgcttgtcatgt

SEQ ID NO: 1698299 - DNA, 15 bp, Homo sapiens
catgcttgtcatgta

SEQ ID NO: 1698300 - DNA, 15 bp, Homo sapiens
atgcttgtcatgtac

SEQ ID NO: 1698301 - DNA, 15 bp, Homo sapiens
tgcttgtcatgtact

SEQ ID NO: 1698302 - DNA, 15 bp, Homo sapiens
gcttgtcatgtactc

SEQ ID NO: 1698303 - DNA, 15 bp, Homo sapiens
cttgtcatgtactca

SEQ ID NO: 1698304 - DNA, 15 bp, Homo sapiens
ttgtcatgtactcag

SEQ ID NO: 1698305 - DNA, 15 bp, Homo sapiens
tgtcatgtactcagt

SEQ ID NO: 1698306 - DNA, 15 bp, Homo sapiens
gtcatgtactcagta

SEQ ID NO: 1698307 - DNA, 15 bp, Homo sapiens
tcatgtactcagtat

SEQ ID NO: 1698308 - DNA, 15 bp, Homo sapiens
catgtactcagtata

SEQ ID NO: 1698309 - DNA, 15 bp, Homo sapiens
atgtactcagtatat

SEQ ID NO: 1698310 - DNA, 15 bp, Homo sapiens
tgtactcagtatatt

SEQ ID NO: 1698311 - DNA, 15 bp, Homo sapiens
gtactcagtatattc

SEQ ID NO: 1698312 - DNA, 15 bp, Homo sapiens
tactcagtatattca

SEQ ID NO: 1698313 - DNA, 15 bp, Homo sapiens
actcagtatattcag

SEQ ID NO: 1698314 - DNA, 15 bp, Homo sapiens
ctcagtatattcagc

SEQ ID NO: 1698315 - DNA, 15 bp, Homo sapiens
tcagtatattcagca

SEQ ID NO: 1698316 - DNA, 15 bp, Homo sapiens
cagtatattcagcaa

SEQ ID NO: 1698317 - DNA, 15 bp, Homo sapiens
agtatattcagcaag

SEQ ID NO: 1698318 - DNA, 15 bp, Homo sapiens
gtatattcagcaagc

SEQ ID NO: 1698319 - DNA, 15 bp, Homo sapiens
tatattcagcaagca

SEQ ID NO: 1698320 - DNA, 15 bp, Homo sapiens
atattcagcaagcaa

SEQ ID NO: 1698321 - DNA, 15 bp, Homo sapiens
tattcagcaagcaac

SEQ ID NO: 1698322 - DNA, 15 bp, Homo sapiens
attcagcaagcaacc

SEQ ID NO: 1698323 - DNA, 15 bp, Homo sapiens
ttcagcaagcaaccc

SEQ ID NO: 1698324 - DNA, 15 bp, Homo sapiens
tcagcaagcaaccct

SEQ ID NO: 1698325 - DNA, 15 bp, Homo sapiens
cagcaagcaaccctg

SEQ ID NO: 1698326 - DNA, 15 bp, Homo sapiens
agcaagcaaccctgt

SEQ ID NO: 1698327 - DNA, 15 bp, Homo sapiens
gcaagcaaccctgtc

SEQ ID NO: 1698328 - DNA, 15 bp, Homo sapiens
caagcaaccctgtcc

SEQ ID NO: 1698329 - DNA, 15 bp, Homo sapiens
aagcaaccctgtcct

SEQ ID NO: 1698330 - DNA, 15 bp, Homo sapiens
agcaaccctgtcctc

SEQ ID NO: 1698331 - DNA, 15 bp, Homo sapiens
gcaaccctgtcctcc

SEQ ID NO: 1698332 - DNA, 15 bp, Homo sapiens
caaccctgtcctccc

SEQ ID NO: 1698333 - DNA, 15 bp, Homo sapiens
aaccctgtcctcccc

SEQ ID NO: 1698334 - DNA, 15 bp, Homo sapiens
accctgtcctcccct

SEQ ID NO: 1698335 - DNA, 15 bp, Homo sapiens
ccctgtcctcccctg

SEQ ID NO: 1698336 - DNA, 15 bp, Homo sapiens
cctgtcctcccctgt

SEQ ID NO: 1698337 - DNA, 15 bp, Homo sapiens
ctgtcctcccctgtc

SEQ ID NO: 1698338 - DNA, 15 bp, Homo sapiens
tgtcctcccctgtct

SEQ ID NO: 1698339 - DNA, 15 bp, Homo sapiens
gtcctcccctgtctc

SEQ ID NO: 1698340 - DNA, 15 bp, Homo sapiens
tcctcccctgtctcc

SEQ ID NO: 1698341 - DNA, 15 bp, Homo sapiens
cctcccctgtctcca

SEQ ID NO: 1698342 - DNA, 15 bp, Homo sapiens
ctcccctgtctccat

SEQ ID NO: 1698343 - DNA, 15 bp, Homo sapiens
tcccctgtctccatg

SEQ ID NO: 1698344 - DNA, 15 bp, Homo sapiens
cccctgtctccatgc

SEQ ID NO: 1698345 - DNA, 15 bp, Homo sapiens
ccctgtctccatgct

SEQ ID NO: 1698346 - DNA, 15 bp, Homo sapiens
cctgtctccatgctt

SEQ ID NO: 1698347 - DNA, 15 bp, Homo sapiens
ctgtctccatgctta

SEQ ID NO: 1698348 - DNA, 15 bp, Homo sapiens
tgtctccatgcttat

SEQ ID NO: 1698349 - DNA, 15 bp, Homo sapiens
gtctccatgcttatg

SEQ ID NO: 1698350 - DNA, 15 bp, Homo sapiens
tctccatgcttatgt

SEQ ID NO: 1698351 - DNA, 15 bp, Homo sapiens
ctccatgcttatgtt

SEQ ID NO: 1698352 - DNA, 15 bp, Homo sapiens
tccatgcttatgttt

SEQ ID NO: 1698353 - DNA, 15 bp, Homo sapiens
ccatgcttatgttta

SEQ ID NO: 1698354 - DNA, 15 bp, Homo sapiens
catgcttatgtttat

SEQ ID NO: 1698355 - DNA, 15 bp, Homo sapiens
atgcttatgtttata

SEQ ID NO: 1698356 - DNA, 15 bp, Homo sapiens
tgcttatgtttatac

SEQ ID NO: 1698357 - DNA, 15 bp, Homo sapiens
gcttatgtttataca

SEQ ID NO: 1698358 - DNA, 15 bp, Homo sapiens
cttatgtttatacat

SEQ ID NO: 1698359 - DNA, 15 bp, Homo sapiens
ttatgtttatacatt

SEQ ID NO: 1698360 - DNA, 15 bp, Homo sapiens
tatgtttatacattc

SEQ ID NO: 1698361 - DNA, 15 bp, Homo sapiens
atgtttatacattct

SEQ ID NO: 1698362 - DNA, 15 bp, Homo sapiens
tgtttatacattctc

SEQ ID NO: 1698363 - DNA, 15 bp, Homo sapiens
gtttatacattctct

SEQ ID NO: 1698364 - DNA, 15 bp, Homo sapiens
tttatacattctctc

SEQ ID NO: 1698365 - DNA, 15 bp, Homo sapiens
ttatacattctctca

SEQ ID NO: 1698366 - DNA, 15 bp, Homo sapiens
tatacattctctcag

SEQ ID NO: 1698367 - DNA, 15 bp, Homo sapiens
atacattctctcagt

SEQ ID NO: 1698368 - DNA, 15 bp, Homo sapiens
tacattctctcagtc

SEQ ID NO: 1698369 - DNA, 15 bp, Homo sapiens
acattctctcagtca

SEQ ID NO: 1698370 - DNA, 15 bp, Homo sapiens
cattctctcagtcag

SEQ ID NO: 1698371 - DNA, 15 bp, Homo sapiens
attctctcagtcaga

SEQ ID NO: 1698372 - DNA, 15 bp, Homo sapiens
ttctctcagtcagaa

SEQ ID NO: 1698373 - DNA, 15 bp, Homo sapiens
tctctcagtcagaaa

SEQ ID NO: 1698374 - DNA, 15 bp, Homo sapiens
ctctcagtcagaaat

SEQ ID NO: 1698375 - DNA, 15 bp, Homo sapiens
tctcagtcagaaatg

SEQ ID NO: 1698376 - DNA, 15 bp, Homo sapiens
ctcagtcagaaatgc

SEQ ID NO: 1698377 - DNA, 15 bp, Homo sapiens
tcagtcagaaatgct

SEQ ID NO: 1698378 - DNA, 15 bp, Homo sapiens
cagtcagaaatgctc

SEQ ID NO: 1698379 - DNA, 15 bp, Homo sapiens
agtcagaaatgctct

SEQ ID NO: 1698380 - DNA, 15 bp, Homo sapiens
gtcagaaatgctctt

SEQ ID NO: 1698381 - DNA, 15 bp, Homo sapiens
tcagaaatgctcttt

SEQ ID NO: 1698382 - DNA, 15 bp, Homo sapiens
cagaaatgctctttt

SEQ ID NO: 1698383 - DNA, 15 bp, Homo sapiens
agaaatgctcttttc

SEQ ID NO: 1698384 - DNA, 15 bp, Homo sapiens
gaaatgctcttttct

SEQ ID NO: 1698385 - DNA, 15 bp, Homo sapiens
aaatgctcttttcta

SEQ ID NO: 1698386 - DNA, 15 bp, Homo sapiens
aatgctcttttctat

SEQ ID NO: 1698387 - DNA, 15 bp, Homo sapiens
atgctcttttctata

SEQ ID NO: 1698388 - DNA, 15 bp, Homo sapiens
tgctcttttctatag

SEQ ID NO: 1698389 - DNA, 15 bp, Homo sapiens
gctcttttctatagt

SEQ ID NO: 1698390 - DNA, 15 bp, Homo sapiens
ctcttttctatagtc

SEQ ID NO: 1698391 - DNA, 15 bp, Homo sapiens
tcttttctatagtct

SEQ ID NO: 1698392 - DNA, 15 bp, Homo sapiens
cttttctatagtcta

SEQ ID NO: 1698393 - DNA, 15 bp, Homo sapiens
ttttctatagtctac

SEQ ID NO: 1698394 - DNA, 15 bp, Homo sapiens
tttctatagtctaca

SEQ ID NO: 1698395 - DNA, 15 bp, Homo sapiens
ttctatagtctacaa

SEQ ID NO: 1698396 - DNA, 15 bp, Homo sapiens
tctatagtctacaaa

SEQ ID NO: 1698397 - DNA, 15 bp, Homo sapiens
ctatagtctacaaat

SEQ ID NO: 1698398 - DNA, 15 bp, Homo sapiens
tatagtctacaaatc

SEQ ID NO: 1698399 - DNA, 15 bp, Homo sapiens
atagtctacaaatcc

SEQ ID NO: 1698400 - DNA, 15 bp, Homo sapiens
tagtctacaaatccc

SEQ ID NO: 1698401 - DNA, 15 bp, Homo sapiens
agtctacaaatcccc

SEQ ID NO: 1698402 - DNA, 15 bp, Homo sapiens
gtctacaaatcccca

SEQ ID NO: 1698403 - DNA, 15 bp, Homo sapiens
tctacaaatccccat

SEQ ID NO: 1698404 - DNA, 15 bp, Homo sapiens
ctacaaatccccata

SEQ ID NO: 1698405 - DNA, 15 bp, Homo sapiens
tacaaatccccatat

SEQ ID NO: 1698406 - DNA, 15 bp, Homo sapiens
acaaatccccatatc

SEQ ID NO: 1698407 - DNA, 15 bp, Homo sapiens
caaatccccatatcc

SEQ ID NO: 1698408 - DNA, 15 bp, Homo sapiens
aaatccccatatcct

SEQ ID NO: 1698409 - DNA, 15 bp, Homo sapiens
aatccccatatccta

SEQ ID NO: 1698410 - DNA, 15 bp, Homo sapiens
atccccatatcctac

SEQ ID NO: 1698411 - DNA, 15 bp, Homo sapiens
tccccatatcctacc

SEQ ID NO: 1698412 - DNA, 15 bp, Homo sapiens
ccccatatcctacct

SEQ ID NO: 1698413 - DNA, 15 bp, Homo sapiens
cccatatcctacctt

SEQ ID NO: 1698414 - DNA, 15 bp, Homo sapiens
ccatatcctacctta

SEQ ID NO: 1698415 - DNA, 15 bp, Homo sapiens
catatcctaccttag

SEQ ID NO: 1698416 - DNA, 15 bp, Homo sapiens
atatcctaccttagc

SEQ ID NO: 1698417 - DNA, 15 bp, Homo sapiens
tatcctaccttagcc

SEQ ID NO: 1698418 - DNA, 15 bp, Homo sapiens
atcctaccttagcca

SEQ ID NO: 1698419 - DNA, 15 bp, Homo sapiens
tcctaccttagccat

SEQ ID NO: 1698420 - DNA, 15 bp, Homo sapiens
cctaccttagccatc

SEQ ID NO: 1698421 - DNA, 15 bp, Homo sapiens
ctaccttagccatct

SEQ ID NO: 1698422 - DNA, 15 bp, Homo sapiens
taccttagccatctc

SEQ ID NO: 1698423 - DNA, 15 bp, Homo sapiens
accttagccatctca

SEQ ID NO: 1698424 - DNA, 15 bp, Homo sapiens
ccttagccatctcat

SEQ ID NO: 1698425 - DNA, 15 bp, Homo sapiens
cttagccatctcatc

SEQ ID NO: 1698426 - DNA, 15 bp, Homo sapiens
ttagccatctcatcc

SEQ ID NO: 1698427 - DNA, 15 bp, Homo sapiens
tagccatctcatcca

SEQ ID NO: 1698428 - DNA, 15 bp, Homo sapiens
agccatctcatccat

SEQ ID NO: 1698429 - DNA, 15 bp, Homo sapiens
gccatctcatccatg

SEQ ID NO: 1698430 - DNA, 15 bp, Homo sapiens
ccatctcatccatga

SEQ ID NO: 1698431 - DNA, 15 bp, Homo sapiens
catctcatccatgaa

SEQ ID NO: 1698432 - DNA, 15 bp, Homo sapiens
atctcatccatgaat

SEQ ID NO: 1698433 - DNA, 15 bp, Homo sapiens
tctcatccatgaatc

SEQ ID NO: 1698434 - DNA, 15 bp, Homo sapiens
ctcatccatgaatct

SEQ ID NO: 1698435 - DNA, 15 bp, Homo sapiens
tcatccatgaatctt

SEQ ID NO: 1698436 - DNA, 15 bp, Homo sapiens
catccatgaatcttg

SEQ ID NO: 1698437 - DNA, 15 bp, Homo sapiens
atccatgaatcttgc

SEQ ID NO: 1698438 - DNA, 15 bp, Homo sapiens
tccatgaatcttgcc

SEQ ID NO: 1698439 - DNA, 15 bp, Homo sapiens
ccatgaatcttgcct

SEQ ID NO: 1698440 - DNA, 15 bp, Homo sapiens
catgaatcttgcctt

SEQ ID NO: 1698441 - DNA, 15 bp, Homo sapiens
atgaatcttgccttg

SEQ ID NO: 1698442 - DNA, 15 bp, Homo sapiens
tgaatcttgccttgg

SEQ ID NO: 1698443 - DNA, 15 bp, Homo sapiens
gaatcttgccttggt

SEQ ID NO: 1698444 - DNA, 15 bp, Homo sapiens
aatcttgccttggta

SEQ ID NO: 1698445 - DNA, 15 bp, Homo sapiens
atcttgccttggtaa

SEQ ID NO: 1698446 - DNA, 15 bp, Homo sapiens
tcttgccttggtaac

SEQ ID NO: 1698447 - DNA, 15 bp, Homo sapiens
cttgccttggtaaca

SEQ ID NO: 1698448 - DNA, 15 bp, Homo sapiens
ttgccttggtaacac

SEQ ID NO: 1698449 - DNA, 15 bp, Homo sapiens
tgccttggtaacacc

SEQ ID NO: 1698450 - DNA, 15 bp, Homo sapiens
gccttggtaacacct

SEQ ID NO: 1698451 - DNA, 15 bp, Homo sapiens
ccttggtaacacctg

SEQ ID NO: 1698452 - DNA, 15 bp, Homo sapiens
cttggtaacacctgc

SEQ ID NO: 1698453 - DNA, 15 bp, Homo sapiens
ttggtaacacctgcc

SEQ ID NO: 1698454 - DNA, 15 bp, Homo sapiens
tggtaacacctgcca

SEQ ID NO: 1698455 - DNA, 15 bp, Homo sapiens
ggtaacacctgccat

SEQ ID NO: 1698456 - DNA, 15 bp, Homo sapiens
gtaacacctgccata

SEQ ID NO: 1698457 - DNA, 15 bp, Homo sapiens
taacacctgccatac

SEQ ID NO: 1698458 - DNA, 15 bp, Homo sapiens
aacacctgccataca

SEQ ID NO: 1698459 - DNA, 15 bp, Homo sapiens
acacctgccatacat

SEQ ID NO: 1698460 - DNA, 15 bp, Homo sapiens
cacctgccatacatt

SEQ ID NO: 1698461 - DNA, 15 bp, Homo sapiens
acctgccatacattt

SEQ ID NO: 1698462 - DNA, 15 bp, Homo sapiens
cctgccatacatttc

SEQ ID NO: 1698463 - DNA, 15 bp, Homo sapiens
ctgccatacatttct

SEQ ID NO: 1698464 - DNA, 15 bp, Homo sapiens
tgccatacatttctt

SEQ ID NO: 1698465 - DNA, 15 bp, Homo sapiens
gccatacatttcttt

SEQ ID NO: 1698466 - DNA, 15 bp, Homo sapiens
ccatacatttctttt

SEQ ID NO: 1698467 - DNA, 15 bp, Homo sapiens
catacatttcttttt

SEQ ID NO: 1698468 - DNA, 15 bp, Homo sapiens
atacatttctttttc

SEQ ID NO: 1698469 - DNA, 15 bp, Homo sapiens
tacatttctttttcc

SEQ ID NO: 1698470 - DNA, 15 bp, Homo sapiens
acatttctttttcct

SEQ ID NO: 1698471 - DNA, 15 bp, Homo sapiens
catttctttttcctt

SEQ ID NO: 1698472 - DNA, 15 bp, Homo sapiens
atttctttttccttt

SEQ ID NO: 1698473 - DNA, 15 bp, Homo sapiens
tttctttttcctttg

SEQ ID NO: 1698474 - DNA, 15 bp, Homo sapiens
ttctttttcctttga

SEQ ID NO: 1698475 - DNA, 15 bp, Homo sapiens
tctttttcctttgac

SEQ ID NO: 1698476 - DNA, 15 bp, Homo sapiens
ctttttcctttgact

SEQ ID NO: 1698477 - DNA, 15 bp, Homo sapiens
tttttcctttgactt

SEQ ID NO: 1698478 - DNA, 15 bp, Homo sapiens
ttttcctttgacttt

SEQ ID NO: 1698479 - DNA, 15 bp, Homo sapiens
tttcctttgactttc

SEQ ID NO: 1698480 - DNA, 15 bp, Homo sapiens
ttcctttgactttcc

SEQ ID NO: 1698481 - DNA, 15 bp, Homo sapiens
tcctttgactttcca

SEQ ID NO: 1698482 - DNA, 15 bp, Homo sapiens
cctttgactttccat

SEQ ID NO: 1698483 - DNA, 15 bp, Homo sapiens
ctttgactttccata

SEQ ID NO: 1698484 - DNA, 15 bp, Homo sapiens
tttgactttccatac

SEQ ID NO: 1698485 - DNA, 15 bp, Homo sapiens
ttgactttccatact

SEQ ID NO: 1698486 - DNA, 15 bp, Homo sapiens
tgactttccatactc

SEQ ID NO: 1698487 - DNA, 15 bp, Homo sapiens
gactttccatactct

SEQ ID NO: 1698488 - DNA, 15 bp, Homo sapiens
actttccatactctt

SEQ ID NO: 1698489 - DNA, 15 bp, Homo sapiens
ctttccatactcttt

SEQ ID NO: 1698490 - DNA, 15 bp, Homo sapiens
tttccatactcttta

SEQ ID NO: 1698491 - DNA, 15 bp, Homo sapiens
ttccatactctttat

SEQ ID NO: 1698492 - DNA, 15 bp, Homo sapiens
tccatactctttatt

SEQ ID NO: 1698493 - DNA, 15 bp, Homo sapiens
ccatactctttattc

SEQ ID NO: 1698494 - DNA, 15 bp, Homo sapiens
catactctttattca

SEQ ID NO: 1698495 - DNA, 15 bp, Homo sapiens
atactctttattcaa

SEQ ID NO: 1698496 - DNA, 15 bp, Homo sapiens
tactctttattcaaa

SEQ ID NO: 1698497 - DNA, 15 bp, Homo sapiens
actctttattcaaac

SEQ ID NO: 1698498 - DNA, 15 bp, Homo sapiens
ctctttattcaaacc

SEQ ID NO: 1698499 - DNA, 15 bp, Homo sapiens
tctttattcaaacct

SEQ ID NO: 1698500 - DNA, 15 bp, Homo sapiens
ctttattcaaacctg

SEQ ID NO: 1698501 - DNA, 15 bp, Homo sapiens
tttattcaaacctgc

SEQ ID NO: 1698502 - DNA, 15 bp, Homo sapiens
ttattcaaacctgcc

SEQ ID NO: 1698503 - DNA, 15 bp, Homo sapiens
tattcaaacctgcct

SEQ ID NO: 1698504 - DNA, 15 bp, Homo sapiens
attcaaacctgccta

SEQ ID NO: 1698505 - DNA, 15 bp, Homo sapiens
ttcaaacctgcctaa

SEQ ID NO: 1698506 - DNA, 15 bp, Homo sapiens
tcaaacctgcctaat

SEQ ID NO: 1698507 - DNA, 15 bp, Homo sapiens
caaacctgcctaata

SEQ ID NO: 1698508 - DNA, 15 bp, Homo sapiens
aaacctgcctaatag

SEQ ID NO: 1698509 - DNA, 15 bp, Homo sapiens
aacctgcctaatagc

SEQ ID NO: 1698510 - DNA, 15 bp, Homo sapiens
acctgcctaatagca

SEQ ID NO: 1698511 - DNA, 15 bp, Homo sapiens
cctgcctaatagcac

SEQ ID NO: 1698512 - DNA, 15 bp, Homo sapiens
ctgcctaatagcact

SEQ ID NO: 1698513 - DNA, 15 bp, Homo sapiens
tgcctaatagcactt

SEQ ID NO: 1698514 - DNA, 15 bp, Homo sapiens
gcctaatagcactta

SEQ ID NO: 1698515 - DNA, 15 bp, Homo sapiens
cctaatagcacttac

SEQ ID NO: 1698516 - DNA, 15 bp, Homo sapiens
ctaatagcacttacc

SEQ ID NO: 1698517 - DNA, 15 bp, Homo sapiens
taatagcacttacca

SEQ ID NO: 1698518 - DNA, 15 bp, Homo sapiens
aatagcacttaccac

SEQ ID NO: 1698519 - DNA, 15 bp, Homo sapiens
atagcacttaccaca

SEQ ID NO: 1698520 - DNA, 15 bp, Homo sapiens
tagcacttaccacat

SEQ ID NO: 1698521 - DNA, 15 bp, Homo sapiens
agcacttaccacatt

SEQ ID NO: 1698522 - DNA, 15 bp, Homo sapiens
gcacttaccacattc

SEQ ID NO: 1698523 - DNA, 15 bp, Homo sapiens
cacttaccacattct

SEQ ID NO: 1698524 - DNA, 15 bp, Homo sapiens
acttaccacattctt

SEQ ID NO: 1698525 - DNA, 15 bp, Homo sapiens
cttaccacattcttc

SEQ ID NO: 1698526 - DNA, 15 bp, Homo sapiens
ttaccacattcttct

SEQ ID NO: 1698527 - DNA, 15 bp, Homo sapiens
taccacattcttctt

SEQ ID NO: 1698528 - DNA, 15 bp, Homo sapiens
accacattcttcttt

SEQ ID NO: 1698529 - DNA, 15 bp, Homo sapiens
ccacattcttcttta

SEQ ID NO: 1698530 - DNA, 15 bp, Homo sapiens
cacattcttctttac

SEQ ID NO: 1698531 - DNA, 15 bp, Homo sapiens
acattcttctttacc

SEQ ID NO: 1698532 - DNA, 15 bp, Homo sapiens
cattcttctttacct

SEQ ID NO: 1698533 - DNA, 15 bp, Homo sapiens
attcttctttacctt

SEQ ID NO: 1698534 - DNA, 15 bp, Homo sapiens
ttcttctttacctta

SEQ ID NO: 1698535 - DNA, 15 bp, Homo sapiens
tcttctttaccttag

SEQ ID NO: 1698536 - DNA, 15 bp, Homo sapiens
cttctttaccttagg

SEQ ID NO: 1698537 - DNA, 15 bp, Homo sapiens
ttctttaccttaggg

SEQ ID NO: 1698538 - DNA, 15 bp, Homo sapiens
tctttaccttagggt

SEQ ID NO: 1698539 - DNA, 15 bp, Homo sapiens
ctttaccttagggtg

SEQ ID NO: 1698540 - DNA, 15 bp, Homo sapiens
tttaccttagggtgt

SEQ ID NO: 1698541 - DNA, 15 bp, Homo sapiens
ttaccttagggtgtg

SEQ ID NO: 1698542 - DNA, 15 bp, Homo sapiens
taccttagggtgtgg

SEQ ID NO: 1698543 - DNA, 15 bp, Homo sapiens
accttagggtgtggt

SEQ ID NO: 1698544 - DNA, 15 bp, Homo sapiens
ccttagggtgtggta

SEQ ID NO: 1698545 - DNA, 15 bp, Homo sapiens
cttagggtgtggtac

SEQ ID NO: 1698546 - DNA, 15 bp, Homo sapiens
ttagggtgtggtaca

SEQ ID NO: 1698547 - DNA, 15 bp, Homo sapiens
tagggtgtggtacag

SEQ ID NO: 1698548 - DNA, 15 bp, Homo sapiens
agggtgtggtacagg

SEQ ID NO: 1698549 - DNA, 15 bp, Homo sapiens
gggtgtggtacaggc

SEQ ID NO: 1698550 - DNA, 15 bp, Homo sapiens
ggtgtggtacaggcc

SEQ ID NO: 1698551 - DNA, 15 bp, Homo sapiens
gtgtggtacaggcct

SEQ ID NO: 1698552 - DNA, 15 bp, Homo sapiens
tgtggtacaggcctc

SEQ ID NO: 1698553 - DNA, 15 bp, Homo sapiens
gtggtacaggcctct

SEQ ID NO: 1698554 - DNA, 15 bp, Homo sapiens
tggtacaggcctctt

SEQ ID NO: 1698555 - DNA, 15 bp, Homo sapiens
ggtacaggcctcttc

SEQ ID NO: 1698556 - DNA, 15 bp, Homo sapiens
gtacaggcctcttct

SEQ ID NO: 1698557 - DNA, 15 bp, Homo sapiens
tacaggcctcttcta

SEQ ID NO: 1698558 - DNA, 15 bp, Homo sapiens
acaggcctcttctat

SEQ ID NO: 1698559 - DNA, 15 bp, Homo sapiens
caggcctcttctata

SEQ ID NO: 1698560 - DNA, 15 bp, Homo sapiens
aggcctcttctataa

SEQ ID NO: 1698561 - DNA, 15 bp, Homo sapiens
ggcctcttctataag

SEQ ID NO: 1698562 - DNA, 15 bp, Homo sapiens
gcctcttctataagg

SEQ ID NO: 1698563 - DNA, 15 bp, Homo sapiens
cctcttctataaggt

SEQ ID NO: 1698564 - DNA, 15 bp, Homo sapiens
ctcttctataaggtt

SEQ ID NO: 1698565 - DNA, 15 bp, Homo sapiens
tcttctataaggttt

SEQ ID NO: 1698566 - DNA, 15 bp, Homo sapiens
cttctataaggttta

SEQ ID NO: 1698567 - DNA, 15 bp, Homo sapiens
ttctataaggtttaa

SEQ ID NO: 1698568 - DNA, 15 bp, Homo sapiens
tctataaggtttaaa

SEQ ID NO: 1698569 - DNA, 15 bp, Homo sapiens
ctataaggtttaaat

SEQ ID NO: 1698570 - DNA, 15 bp, Homo sapiens
tataaggtttaaatt

SEQ ID NO: 1698571 - DNA, 15 bp, Homo sapiens
ataaggtttaaattt

SEQ ID NO: 1698572 - DNA, 15 bp, Homo sapiens
taaggtttaaatttt

SEQ ID NO: 1698573 - DNA, 15 bp, Homo sapiens
aaggtttaaattttt

SEQ ID NO: 1698574 - DNA, 15 bp, Homo sapiens
aggtttaaatttttt

SEQ ID NO: 1698575 - DNA, 15 bp, Homo sapiens
ggtttaaattttttg

SEQ ID NO: 1698576 - DNA, 15 bp, Homo sapiens
gtttaaattttttga

SEQ ID NO: 1698577 - DNA, 15 bp, Homo sapiens
tttaaattttttgaa

SEQ ID NO: 1698578 - DNA, 15 bp, Homo sapiens
ttaaattttttgaag

SEQ ID NO: 1698579 - DNA, 15 bp, Homo sapiens
taaattttttgaagg

SEQ ID NO: 1698580 - DNA, 15 bp, Homo sapiens
aaattttttgaagga

SEQ ID NO: 1698581 - DNA, 15 bp, Homo sapiens
aattttttgaaggag

SEQ ID NO: 1698582 - DNA, 15 bp, Homo sapiens
ttttttgaaggagaa

SEQ ID NO: 1698583 - DNA, 15 bp, Homo sapiens
tttttgaaggagaaa

SEQ ID NO: 1698584 - DNA, 15 bp, Homo sapiens
ttttgaaggagaaat

SEQ ID NO: 1698585 - DNA, 15 bp, Homo sapiens
tttgaaggagaaatc

SEQ ID NO: 1698586 - DNA, 15 bp, Homo sapiens
ttgaaggagaaatct

SEQ ID NO: 1698587 - DNA, 15 bp, Homo sapiens
tgaaggagaaatctg

SEQ ID NO: 1698588 - DNA, 15 bp, Homo sapiens
gaaggagaaatctgt

SEQ ID NO: 1698589 - DNA, 15 bp, Homo sapiens
aaggagaaatctgtt

SEQ ID NO: 1698590 - DNA, 15 bp, Homo sapiens
aggagaaatctgtta

SEQ ID NO: 1698591 - DNA, 15 bp, Homo sapiens
ggagaaatctgttat

SEQ ID NO: 1698592 - DNA, 15 bp, Homo sapiens
gagaaatctgttatt

SEQ ID NO: 1698593 - DNA, 15 bp, Homo sapiens
agaaatctgttattg

SEQ ID NO: 1698594 - DNA, 15 bp, Homo sapiens
gaaatctgttattgg

SEQ ID NO: 1698595 - DNA, 15 bp, Homo sapiens
aaatctgttattggc

SEQ ID NO: 1698596 - DNA, 15 bp, Homo sapiens
aatctgttattggct

SEQ ID NO: 1698597 - DNA, 15 bp, Homo sapiens
atctgttattggcta

SEQ ID NO: 1698598 - DNA, 15 bp, Homo sapiens
tctgttattggctag

SEQ ID NO: 1698599 - DNA, 15 bp, Homo sapiens
ctgttattggctagt

SEQ ID NO: 1698600 - DNA, 15 bp, Homo sapiens
tgttattggctagtc

SEQ ID NO: 1698601 - DNA, 15 bp, Homo sapiens
gttattggctagtct

SEQ ID NO: 1698602 - DNA, 15 bp, Homo sapiens
ttattggctagtctt

SEQ ID NO: 1698603 - DNA, 15 bp, Homo sapiens
tattggctagtcttt

SEQ ID NO: 1698604 - DNA, 15 bp, Homo sapiens
attggctagtctttg

SEQ ID NO: 1698605 - DNA, 15 bp, Homo sapiens
ttggctagtctttgt

SEQ ID NO: 1698606 - DNA, 15 bp, Homo sapiens
tggctagtctttgtg

SEQ ID NO: 1698607 - DNA, 15 bp, Homo sapiens
ggctagtctttgtgt

SEQ ID NO: 1698608 - DNA, 15 bp, Homo sapiens
gctagtctttgtgtc

SEQ ID NO: 1698609 - DNA, 15 bp, Homo sapiens
ctagtctttgtgtcc

SEQ ID NO: 1698610 - DNA, 15 bp, Homo sapiens
tagtctttgtgtccc

SEQ ID NO: 1698611 - DNA, 15 bp, Homo sapiens
agtctttgtgtcccc

SEQ ID NO: 1698612 - DNA, 15 bp, Homo sapiens
gtctttgtgtcccca

SEQ ID NO: 1698613 - DNA, 15 bp, Homo sapiens
tctttgtgtccccaa

SEQ ID NO: 1698614 - DNA, 15 bp, Homo sapiens
ctttgtgtccccaac

SEQ ID NO: 1698615 - DNA, 15 bp, Homo sapiens
tttgtgtccccaaca

SEQ ID NO: 1698616 - DNA, 15 bp, Homo sapiens
ttgtgtccccaacat

SEQ ID NO: 1698617 - DNA, 15 bp, Homo sapiens
tgtgtccccaacatc

SEQ ID NO: 1698618 - DNA, 15 bp, Homo sapiens
gtgtccccaacatca

SEQ ID NO: 1698619 - DNA, 15 bp, Homo sapiens
tgtccccaacatcac

SEQ ID NO: 1698620 - DNA, 15 bp, Homo sapiens
gtccccaacatcacc

SEQ ID NO: 1698621 - DNA, 15 bp, Homo sapiens
tccccaacatcacct

SEQ ID NO: 1698622 - DNA, 15 bp, Homo sapiens
ccccaacatcacctg

SEQ ID NO: 1698623 - DNA, 15 bp, Homo sapiens
cccaacatcacctgg

SEQ ID NO: 1698624 - DNA, 15 bp, Homo sapiens
ccaacatcacctggc

SEQ ID NO: 1698625 - DNA, 15 bp, Homo sapiens
caacatcacctggca

SEQ ID NO: 1698626 - DNA, 15 bp, Homo sapiens
aacatcacctggcat

SEQ ID NO: 1698627 - DNA, 15 bp, Homo sapiens
acatcacctggcatt

SEQ ID NO: 1698628 - DNA, 15 bp, Homo sapiens
catcacctggcattg

SEQ ID NO: 1698629 - DNA, 15 bp, Homo sapiens
atcacctggcattgg

SEQ ID NO: 1698630 - DNA, 15 bp, Homo sapiens
tcacctggcattggt

SEQ ID NO: 1698631 - DNA, 15 bp, Homo sapiens
cacctggcattggtt

SEQ ID NO: 1698632 - DNA, 15 bp, Homo sapiens
acctggcattggttt

SEQ ID NO: 1698633 - DNA, 15 bp, Homo sapiens
cctggcattggtttg

SEQ ID NO: 1698634 - DNA, 15 bp, Homo sapiens
ctggcattggtttgt

SEQ ID NO: 1698635 - DNA, 15 bp, Homo sapiens
tggcattggtttgta

SEQ ID NO: 1698636 - DNA, 15 bp, Homo sapiens
ggcattggtttgtaa

SEQ ID NO: 1698637 - DNA, 15 bp, Homo sapiens
gcattggtttgtaag

SEQ ID NO: 1698638 - DNA, 15 bp, Homo sapiens
cattggtttgtaagt

SEQ ID NO: 1698639 - DNA, 15 bp, Homo sapiens
attggtttgtaagtt

SEQ ID NO: 1698640 - DNA, 15 bp, Homo sapiens
ttggtttgtaagttg

SEQ ID NO: 1698641 - DNA, 15 bp, Homo sapiens
tggtttgtaagttgt

SEQ ID NO: 1698642 - DNA, 15 bp, Homo sapiens
ggtttgtaagttgta

SEQ ID NO: 1698643 - DNA, 15 bp, Homo sapiens
gtttgtaagttgtag

SEQ ID NO: 1698644 - DNA, 15 bp, Homo sapiens
tttgtaagttgtaga

SEQ ID NO: 1698645 - DNA, 15 bp, Homo sapiens
ttgtaagttgtagat

SEQ ID NO: 1698646 - DNA, 15 bp, Homo sapiens
tgtaagttgtagatg

SEQ ID NO: 1698647 - DNA, 15 bp, Homo sapiens
gtaagttgtagatgc

SEQ ID NO: 1698648 - DNA, 15 bp, Homo sapiens
taagttgtagatgcc

SEQ ID NO: 1698649 - DNA, 15 bp, Homo sapiens
aagttgtagatgccc

SEQ ID NO: 1698650 - DNA, 15 bp, Homo sapiens
agttgtagatgccca

SEQ ID NO: 1698651 - DNA, 15 bp, Homo sapiens
gttgtagatgcccaa

SEQ ID NO: 1698652 - DNA, 15 bp, Homo sapiens
ttgtagatgcccaat

SEQ ID NO: 1698653 - DNA, 15 bp, Homo sapiens
tgtagatgcccaata

SEQ ID NO: 1698654 - DNA, 15 bp, Homo sapiens
gtagatgcccaataa

SEQ ID NO: 1698655 - DNA, 15 bp, Homo sapiens
tagatgcccaataag

SEQ ID NO: 1698656 - DNA, 15 bp, Homo sapiens
agatgcccaataagc

SEQ ID NO: 1698657 - DNA, 15 bp, Homo sapiens
gatgcccaataagct

SEQ ID NO: 1698658 - DNA, 15 bp, Homo sapiens
atgcccaataagctt

SEQ ID NO: 1698659 - DNA, 15 bp, Homo sapiens
tgcccaataagcttc

SEQ ID NO: 1698660 - DNA, 15 bp, Homo sapiens
gcccaataagcttct

SEQ ID NO: 1698661 - DNA, 15 bp, Homo sapiens
cccaataagcttctg

SEQ ID NO: 1698662 - DNA, 15 bp, Homo sapiens
ccaataagcttctgt

SEQ ID NO: 1698663 - DNA, 15 bp, Homo sapiens
caataagcttctgtt

SEQ ID NO: 1698664 - DNA, 15 bp, Homo sapiens
aataagcttctgttg

SEQ ID NO: 1698665 - DNA, 15 bp, Homo sapiens
ataagcttctgttga

SEQ ID NO: 1698666 - DNA, 15 bp, Homo sapiens
taagcttctgttgaa

SEQ ID NO: 1698667 - DNA, 15 bp, Homo sapiens
aagcttctgttgaat

SEQ ID NO: 1698668 - DNA, 15 bp, Homo sapiens
agcttctgttgaatt

SEQ ID NO: 1698669 - DNA, 15 bp, Homo sapiens
gcttctgttgaatta

SEQ ID NO: 1698670 - DNA, 15 bp, Homo sapiens
cttctgttgaattaa

SEQ ID NO: 1698671 - DNA, 15 bp, Homo sapiens
ttctgttgaattaat

SEQ ID NO: 1698672 - DNA, 15 bp, Homo sapiens
tctgttgaattaatg

SEQ ID NO: 1698673 - DNA, 15 bp, Homo sapiens
ctgttgaattaatga

SEQ ID NO: 1698674 - DNA, 15 bp, Homo sapiens
tgttgaattaatgaa

SEQ ID NO: 1698675 - DNA, 15 bp, Homo sapiens
gttgaattaatgaat

SEQ ID NO: 1698676 - DNA, 15 bp, Homo sapiens
ttgaattaatgaata

SEQ ID NO: 1698677 - DNA, 15 bp, Homo sapiens
tgaattaatgaataa

SEQ ID NO: 1698678 - DNA, 15 bp, Homo sapiens
gaattaatgaataaa

SEQ ID NO: 1698679 - DNA, 15 bp, Homo sapiens
aattaatgaataaat

SEQ ID NO: 1698680 - DNA, 15 bp, Homo sapiens
attaatgaataaatg

SEQ ID NO: 1698681 - DNA, 15 bp, Homo sapiens
ttaatgaataaatga

SEQ ID NO: 1698682 - DNA, 15 bp, Homo sapiens
taatgaataaatgaa

SEQ ID NO: 1698683 - DNA, 15 bp, Homo sapiens
aatgaataaatgaat

SEQ ID NO: 1698684 - DNA, 15 bp, Homo sapiens
atgaataaatgaatg

SEQ ID NO: 1698685 - DNA, 15 bp, Homo sapiens
tgaataaatgaatga

SEQ ID NO: 1698686 - DNA, 15 bp, Homo sapiens
gaataaatgaatgaa

SEQ ID NO: 1698687 - DNA, 15 bp, Homo sapiens
aataaatgaatgaac

SEQ ID NO: 1698688 - DNA, 15 bp, Homo sapiens
ataaatgaatgaaca

SEQ ID NO: 1698689 - DNA, 15 bp, Homo sapiens
taaatgaatgaacac

SEQ ID NO: 1698690 - DNA, 15 bp, Homo sapiens
aaatgaatgaacaca

SEQ ID NO: 1698691 - DNA, 15 bp, Homo sapiens
aatgaatgaacacat

SEQ ID NO: 1698692 - DNA, 15 bp, Homo sapiens
atgaatgaacacatt

SEQ ID NO: 1698693 - DNA, 15 bp, Homo sapiens
tgaatgaacacattg

SEQ ID NO: 1698694 - DNA, 15 bp, Homo sapiens
gaatgaacacattga

SEQ ID NO: 1698695 - DNA, 15 bp, Homo sapiens
aatgaacacattgag

SEQ ID NO: 1698696 - DNA, 15 bp, Homo sapiens
atgaacacattgagc

SEQ ID NO: 1698697 - DNA, 15 bp, Homo sapiens
tgaacacattgagct

SEQ ID NO: 1698698 - DNA, 15 bp, Homo sapiens
gaacacattgagcta

SEQ ID NO: 1698699 - DNA, 15 bp, Homo sapiens
aacacattgagctaa

SEQ ID NO: 1698700 - DNA, 15 bp, Homo sapiens
acacattgagctaaa

SEQ ID NO: 1698701 - DNA, 15 bp, Homo sapiens
cacattgagctaaat

SEQ ID NO: 1698702 - DNA, 15 bp, Homo sapiens
acattgagctaaatt

SEQ ID NO: 1698703 - DNA, 15 bp, Homo sapiens
cattgagctaaatta

SEQ ID NO: 1698704 - DNA, 15 bp, Homo sapiens
attgagctaaattat

SEQ ID NO: 1698705 - DNA, 15 bp, Homo sapiens
ttgagctaaattata

SEQ ID NO: 1698706 - DNA, 15 bp, Homo sapiens
tgagctaaattatat

SEQ ID NO: 1698707 - DNA, 15 bp, Homo sapiens
gagctaaattatatt

SEQ ID NO: 1698708 - DNA, 15 bp, Homo sapiens
agctaaattatattt

SEQ ID NO: 1698709 - DNA, 15 bp, Homo sapiens
gctaaattatatttc

SEQ ID NO: 1698710 - DNA, 15 bp, Homo sapiens
ctaaattatatttca

SEQ ID NO: 1698711 - DNA, 15 bp, Homo sapiens
taaattatatttcaa

SEQ ID NO: 1698712 - DNA, 15 bp, Homo sapiens
aaattatatttcaac

SEQ ID NO: 1698713 - DNA, 15 bp, Homo sapiens
aattatatttcaaca

SEQ ID NO: 1698714 - DNA, 15 bp, Homo sapiens
attatatttcaacaa

SEQ ID NO: 1698715 - DNA, 15 bp, Homo sapiens
ttatatttcaacaag

SEQ ID NO: 1698716 - DNA, 15 bp, Homo sapiens
tatatttcaacaaga

SEQ ID NO: 1698717 - DNA, 15 bp, Homo sapiens
atatttcaacaagat

SEQ ID NO: 1698718 - DNA, 15 bp, Homo sapiens
tatttcaacaagata

SEQ ID NO: 1698719 - DNA, 15 bp, Homo sapiens
atttcaacaagatac

SEQ ID NO: 1698720 - DNA, 15 bp, Homo sapiens
tttcaacaagatact

SEQ ID NO: 1698721 - DNA, 15 bp, Homo sapiens
ttcaacaagatactc

SEQ ID NO: 1698722 - DNA, 15 bp, Homo sapiens
tcaacaagatactca

SEQ ID NO: 1698723 - DNA, 15 bp, Homo sapiens
caacaagatactcat

SEQ ID NO: 1698724 - DNA, 15 bp, Homo sapiens
aacaagatactcatt

SEQ ID NO: 1698725 - DNA, 15 bp, Homo sapiens
acaagatactcattc

SEQ ID NO: 1698726 - DNA, 15 bp, Homo sapiens
caagatactcattca

SEQ ID NO: 1698727 - DNA, 15 bp, Homo sapiens
aagatactcattcat

SEQ ID NO: 1698728 - DNA, 15 bp, Homo sapiens
agatactcattcatg

SEQ ID NO: 1698729 - DNA, 15 bp, Homo sapiens
gatactcattcatgc

SEQ ID NO: 1698730 - DNA, 15 bp, Homo sapiens
atactcattcatgca

SEQ ID NO: 1698731 - DNA, 15 bp, Homo sapiens
tactcattcatgcat

SEQ ID NO: 1698732 - DNA, 15 bp, Homo sapiens
actcattcatgcatg

SEQ ID NO: 1698733 - DNA, 15 bp, Homo sapiens
ctcattcatgcatgt

SEQ ID NO: 1698734 - DNA, 15 bp, Homo sapiens
tcattcatgcatgtc

SEQ ID NO: 1698735 - DNA, 15 bp, Homo sapiens
cattcatgcatgtct

SEQ ID NO: 1698736 - DNA, 15 bp, Homo sapiens
attcatgcatgtctg

SEQ ID NO: 1698737 - DNA, 15 bp, Homo sapiens
ttcatgcatgtctga

SEQ ID NO: 1698738 - DNA, 15 bp, Homo sapiens
tcatgcatgtctgaa

SEQ ID NO: 1698739 - DNA, 15 bp, Homo sapiens
catgcatgtctgaat

SEQ ID NO: 1698740 - DNA, 15 bp, Homo sapiens
atgcatgtctgaatg

SEQ ID NO: 1698741 - DNA, 15 bp, Homo sapiens
tgcatgtctgaatgc

SEQ ID NO: 1698742 - DNA, 15 bp, Homo sapiens
gcatgtctgaatgca

SEQ ID NO: 1698743 - DNA, 15 bp, Homo sapiens
catgtctgaatgcag

SEQ ID NO: 1698744 - DNA, 15 bp, Homo sapiens
atgtctgaatgcagg

SEQ ID NO: 1698745 - DNA, 15 bp, Homo sapiens
tgtctgaatgcaggg

SEQ ID NO: 1698746 - DNA, 15 bp, Homo sapiens
gtctgaatgcagggt

SEQ ID NO: 1698747 - DNA, 15 bp, Homo sapiens
tctgaatgcagggta

SEQ ID NO: 1698748 - DNA, 15 bp, Homo sapiens
ctgaatgcagggtag

SEQ ID NO: 1698749 - DNA, 15 bp, Homo sapiens
tgaatgcagggtagt

SEQ ID NO: 1698750 - DNA, 15 bp, Homo sapiens
gaatgcagggtagta

SEQ ID NO: 1698751 - DNA, 15 bp, Homo sapiens
aatgcagggtagtat

SEQ ID NO: 1698752 - DNA, 15 bp, Homo sapiens
atgcagggtagtata

SEQ ID NO: 1698753 - DNA, 15 bp, Homo sapiens
tgcagggtagtatat

SEQ ID NO: 1698754 - DNA, 15 bp, Homo sapiens
gcagggtagtatata

SEQ ID NO: 1698755 - DNA, 15 bp, Homo sapiens
cagggtagtatatag

SEQ ID NO: 1698756 - DNA, 15 bp, Homo sapiens
agggtagtatatagc

SEQ ID NO: 1698757 - DNA, 15 bp, Homo sapiens
gggtagtatatagcc

SEQ ID NO: 1698758 - DNA, 15 bp, Homo sapiens
ggtagtatatagcct

SEQ ID NO: 1698759 - DNA, 15 bp, Homo sapiens
gtagtatatagcctg

SEQ ID NO: 1698760 - DNA, 15 bp, Homo sapiens
tagtatatagcctgg

SEQ ID NO: 1698761 - DNA, 15 bp, Homo sapiens
agtatatagcctgga

SEQ ID NO: 1698762 - DNA, 15 bp, Homo sapiens
gtatatagcctggag

SEQ ID NO: 1698763 - DNA, 15 bp, Homo sapiens
tatatagcctggaga

SEQ ID NO: 1698764 - DNA, 15 bp, Homo sapiens
atatagcctggagaa

SEQ ID NO: 1698765 - DNA, 15 bp, Homo sapiens
tatagcctggagaaa

SEQ ID NO: 1698766 - DNA, 15 bp, Homo sapiens
atagcctggagaaaa

SEQ ID NO: 1698767 - DNA, 15 bp, Homo sapiens
tagcctggagaaaat

SEQ ID NO: 1698768 - DNA, 15 bp, Homo sapiens
agcctggagaaaatc

SEQ ID NO: 1698769 - DNA, 15 bp, Homo sapiens
gcctggagaaaatct

SEQ ID NO: 1698770 - DNA, 15 bp, Homo sapiens
cctggagaaaatctc

SEQ ID NO: 1698771 - DNA, 15 bp, Homo sapiens
ctggagaaaatctca

SEQ ID NO: 1698772 - DNA, 15 bp, Homo sapiens
tggagaaaatctcat

SEQ ID NO: 1698773 - DNA, 15 bp, Homo sapiens
ggagaaaatctcatc

SEQ ID NO: 1698774 - DNA, 15 bp, Homo sapiens
gagaaaatctcatca

SEQ ID NO: 1698775 - DNA, 15 bp, Homo sapiens
agaaaatctcatcag

SEQ ID NO: 1698776 - DNA, 15 bp, Homo sapiens
gaaaatctcatcaga

SEQ ID NO: 1698777 - DNA, 15 bp, Homo sapiens
aaaatctcatcagag

SEQ ID NO: 1698778 - DNA, 15 bp, Homo sapiens
aaatctcatcagagg

SEQ ID NO: 1698779 - DNA, 15 bp, Homo sapiens
aatctcatcagaggc

SEQ ID NO: 1698780 - DNA, 15 bp, Homo sapiens
atctcatcagaggcc

SEQ ID NO: 1698781 - DNA, 15 bp, Homo sapiens
tctcatcagaggccc

SEQ ID NO: 1698782 - DNA, 15 bp, Homo sapiens
ctcatcagaggccct

SEQ ID NO: 1698783 - DNA, 15 bp, Homo sapiens
tcatcagaggcccta

SEQ ID NO: 1698784 - DNA, 15 bp, Homo sapiens
catcagaggccctat

SEQ ID NO: 1698785 - DNA, 15 bp, Homo sapiens
atcagaggccctatt

SEQ ID NO: 1698786 - DNA, 15 bp, Homo sapiens
tcagaggccctattt

SEQ ID NO: 1698787 - DNA, 15 bp, Homo sapiens
cagaggccctatttc

SEQ ID NO: 1698788 - DNA, 15 bp, Homo sapiens
agaggccctatttcc

SEQ ID NO: 1698789 - DNA, 15 bp, Homo sapiens
gaggccctatttcct

SEQ ID NO: 1698790 - DNA, 15 bp, Homo sapiens
aggccctatttcctc

SEQ ID NO: 1698791 - DNA, 15 bp, Homo sapiens
ggccctatttcctca

SEQ ID NO: 1698792 - DNA, 15 bp, Homo sapiens
gccctatttcctcat

SEQ ID NO: 1698793 - DNA, 15 bp, Homo sapiens
ccctatttcctcata

SEQ ID NO: 1698794 - DNA, 15 bp, Homo sapiens
cctatttcctcatat

SEQ ID NO: 1698795 - DNA, 15 bp, Homo sapiens
ctatttcctcatatc

SEQ ID NO: 1698796 - DNA, 15 bp, Homo sapiens
tatttcctcatatca

SEQ ID NO: 1698797 - DNA, 15 bp, Homo sapiens
atttcctcatatcat

SEQ ID NO: 1698798 - DNA, 15 bp, Homo sapiens
tttcctcatatcatt

SEQ ID NO: 1698799 - DNA, 15 bp, Homo sapiens
ttcctcatatcattt

SEQ ID NO: 1698800 - DNA, 15 bp, Homo sapiens
tcctcatatcatttg

SEQ ID NO: 1698801 - DNA, 15 bp, Homo sapiens
cctcatatcatttgt

SEQ ID NO: 1698802 - DNA, 15 bp, Homo sapiens
ctcatatcatttgta

SEQ ID NO: 1698803 - DNA, 15 bp, Homo sapiens
tcatatcatttgtaa

SEQ ID NO: 1698804 - DNA, 15 bp, Homo sapiens
catatcatttgtaac

SEQ ID NO: 1698805 - DNA, 15 bp, Homo sapiens
atatcatttgtaacc

SEQ ID NO: 1698806 - DNA, 15 bp, Homo sapiens
tatcatttgtaacca

SEQ ID NO: 1698807 - DNA, 15 bp, Homo sapiens
atcatttgtaaccat

SEQ ID NO: 1698808 - DNA, 15 bp, Homo sapiens
tcatttgtaaccatg

SEQ ID NO: 1698809 - DNA, 15 bp, Homo sapiens
catttgtaaccatgc

SEQ ID NO: 1698810 - DNA, 15 bp, Homo sapiens
atttgtaaccatgct

SEQ ID NO: 1698811 - DNA, 15 bp, Homo sapiens
tttgtaaccatgcta

SEQ ID NO: 1698812 - DNA, 15 bp, Homo sapiens
ttgtaaccatgctaa

SEQ ID NO: 1698813 - DNA, 15 bp, Homo sapiens
tgtaaccatgctaaa

SEQ ID NO: 1698814 - DNA, 15 bp, Homo sapiens
gtaaccatgctaaag

SEQ ID NO: 1698815 - DNA, 15 bp, Homo sapiens
taaccatgctaaagt

SEQ ID NO: 1698816 - DNA, 15 bp, Homo sapiens
aaccatgctaaagtg

SEQ ID NO: 1698817 - DNA, 15 bp, Homo sapiens
accatgctaaagtga

SEQ ID NO: 1698818 - DNA, 15 bp, Homo sapiens
ccatgctaaagtgaa

SEQ ID NO: 1698819 - DNA, 15 bp, Homo sapiens
catgctaaagtgaac

SEQ ID NO: 1698820 - DNA, 15 bp, Homo sapiens
atgctaaagtgaaca

SEQ ID NO: 1698821 - DNA, 15 bp, Homo sapiens
tgctaaagtgaacac

SEQ ID NO: 1698822 - DNA, 15 bp, Homo sapiens
gctaaagtgaacaca

SEQ ID NO: 1698823 - DNA, 15 bp, Homo sapiens
ctaaagtgaacacat

SEQ ID NO: 1698824 - DNA, 15 bp, Homo sapiens
taaagtgaacacatc

SEQ ID NO: 1698825 - DNA, 15 bp, Homo sapiens
aaagtgaacacatca

SEQ ID NO: 1698826 - DNA, 15 bp, Homo sapiens
aagtgaacacatcag

SEQ ID NO: 1698827 - DNA, 15 bp, Homo sapiens
agtgaacacatcagg

SEQ ID NO: 1698828 - DNA, 15 bp, Homo sapiens
gtgaacacatcaggt

SEQ ID NO: 1698829 - DNA, 15 bp, Homo sapiens
tgaacacatcaggta

SEQ ID NO: 1698830 - DNA, 15 bp, Homo sapiens
gaacacatcaggtat

SEQ ID NO: 1698831 - DNA, 15 bp, Homo sapiens
aacacatcaggtatg

SEQ ID NO: 1698832 - DNA, 15 bp, Homo sapiens
acacatcaggtatga

SEQ ID NO: 1698833 - DNA, 15 bp, Homo sapiens
cacatcaggtatgag

SEQ ID NO: 1698834 - DNA, 15 bp, Homo sapiens
acatcaggtatgaga

SEQ ID NO: 1698835 - DNA, 15 bp, Homo sapiens
catcaggtatgagag

SEQ ID NO: 1698836 - DNA, 15 bp, Homo sapiens
atcaggtatgagaga

SEQ ID NO: 1698837 - DNA, 15 bp, Homo sapiens
tcaggtatgagagaa

SEQ ID NO: 1698838 - DNA, 15 bp, Homo sapiens
caggtatgagagaaa

SEQ ID NO: 1698839 - DNA, 15 bp, Homo sapiens
aggtatgagagaaag

SEQ ID NO: 1698840 - DNA, 15 bp, Homo sapiens
ggtatgagagaaaga

SEQ ID NO: 1698841 - DNA, 15 bp, Homo sapiens
gtatgagagaaagat

SEQ ID NO: 1698842 - DNA, 15 bp, Homo sapiens
tatgagagaaagata

SEQ ID NO: 1698843 - DNA, 15 bp, Homo sapiens
atgagagaaagatat

SEQ ID NO: 1698844 - DNA, 15 bp, Homo sapiens
tgagagaaagatatc

SEQ ID NO: 1698845 - DNA, 15 bp, Homo sapiens
gagagaaagatatca

SEQ ID NO: 1698846 - DNA, 15 bp, Homo sapiens
agagaaagatatcaa

SEQ ID NO: 1698847 - DNA, 15 bp, Homo sapiens
gagaaagatatcaag

SEQ ID NO: 1698848 - DNA, 15 bp, Homo sapiens
agaaagatatcaaga

SEQ ID NO: 1698849 - DNA, 15 bp, Homo sapiens
gaaagatatcaagac

SEQ ID NO: 1698850 - DNA, 15 bp, Homo sapiens
aaagatatcaagacc

SEQ ID NO: 1698851 - DNA, 15 bp, Homo sapiens
aagatatcaagacca

SEQ ID NO: 1698852 - DNA, 15 bp, Homo sapiens
agatatcaagaccac

SEQ ID NO: 1698853 - DNA, 15 bp, Homo sapiens
gatatcaagaccaca

SEQ ID NO: 1698854 - DNA, 15 bp, Homo sapiens
atatcaagaccacaa

SEQ ID NO: 1698855 - DNA, 15 bp, Homo sapiens
tatcaagaccacaat

SEQ ID NO: 1698856 - DNA, 15 bp, Homo sapiens
atcaagaccacaatc

SEQ ID NO: 1698857 - DNA, 15 bp, Homo sapiens
tcaagaccacaatct

SEQ ID NO: 1698858 - DNA, 15 bp, Homo sapiens
caagaccacaatcta

SEQ ID NO: 1698859 - DNA, 15 bp, Homo sapiens
aagaccacaatctaa

SEQ ID NO: 1698860 - DNA, 15 bp, Homo sapiens
agaccacaatctaag

SEQ ID NO: 1698861 - DNA, 15 bp, Homo sapiens
gaccacaatctaagc

SEQ ID NO: 1698862 - DNA, 15 bp, Homo sapiens
accacaatctaagcc

SEQ ID NO: 1698863 - DNA, 15 bp, Homo sapiens
ccacaatctaagcca

SEQ ID NO: 1698864 - DNA, 15 bp, Homo sapiens
cacaatctaagccag

SEQ ID NO: 1698865 - DNA, 15 bp, Homo sapiens
acaatctaagccaga

SEQ ID NO: 1698866 - DNA, 15 bp, Homo sapiens
caatctaagccagaa

SEQ ID NO: 1698867 - DNA, 15 bp, Homo sapiens
aatctaagccagaag

SEQ ID NO: 1698868 - DNA, 15 bp, Homo sapiens
atctaagccagaagg

SEQ ID NO: 1698869 - DNA, 15 bp, Homo sapiens
tctaagccagaagga

SEQ ID NO: 1698870 - DNA, 15 bp, Homo sapiens
ctaagccagaaggaa

SEQ ID NO: 1698871 - DNA, 15 bp, Homo sapiens
taagccagaaggaaa

SEQ ID NO: 1698872 - DNA, 15 bp, Homo sapiens
aagccagaaggaaag

SEQ ID NO: 1698873 - DNA, 15 bp, Homo sapiens
agccagaaggaaagt

SEQ ID NO: 1698874 - DNA, 15 bp, Homo sapiens
gccagaaggaaagta

SEQ ID NO: 1698875 - DNA, 15 bp, Homo sapiens
ccagaaggaaagtaa

SEQ ID NO: 1698876 - DNA, 15 bp, Homo sapiens
gaaggaaagtaaagg

SEQ ID NO: 1698877 - DNA, 15 bp, Homo sapiens
aaggaaagtaaagga

SEQ ID NO: 1698878 - DNA, 15 bp, Homo sapiens
aggaaagtaaaggaa

SEQ ID NO: 1698879 - DNA, 15 bp, Homo sapiens
ggaaagtaaaggaaa

SEQ ID NO: 1698880 - DNA, 15 bp, Homo sapiens
gaaagtaaaggaaat

SEQ ID NO: 1698881 - DNA, 15 bp, Homo sapiens
aaagtaaaggaaata

SEQ ID NO: 1698882 - DNA, 15 bp, Homo sapiens
aagtaaaggaaatag

SEQ ID NO: 1698883 - DNA, 15 bp, Homo sapiens
agtaaaggaaataga

SEQ ID NO: 1698884 - DNA, 15 bp, Homo sapiens
gtaaaggaaatagac

SEQ ID NO: 1698885 - DNA, 15 bp, Homo sapiens
taaaggaaatagact

SEQ ID NO: 1698886 - DNA, 15 bp, Homo sapiens
aaaggaaatagactg

SEQ ID NO: 1698887 - DNA, 15 bp, Homo sapiens
aaggaaatagactgt

SEQ ID NO: 1698888 - DNA, 15 bp, Homo sapiens
aggaaatagactgtt

SEQ ID NO: 1698889 - DNA, 15 bp, Homo sapiens
ggaaatagactgttg

SEQ ID NO: 1698890 - DNA, 15 bp, Homo sapiens
gaaatagactgttgc

SEQ ID NO: 1698891 - DNA, 15 bp, Homo sapiens
aaatagactgttgcc

SEQ ID NO: 1698892 - DNA, 15 bp, Homo sapiens
aatagactgttgcca

SEQ ID NO: 1698893 - DNA, 15 bp, Homo sapiens
atagactgttgccaa

SEQ ID NO: 1698894 - DNA, 15 bp, Homo sapiens
tagactgttgccaag

SEQ ID NO: 1698895 - DNA, 15 bp, Homo sapiens
agactgttgccaagg

SEQ ID NO: 1698896 - DNA, 15 bp, Homo sapiens
gactgttgccaaggc

SEQ ID NO: 1698897 - DNA, 15 bp, Homo sapiens
actgttgccaaggca

SEQ ID NO: 1698898 - DNA, 15 bp, Homo sapiens
ctgttgccaaggcag

SEQ ID NO: 1698899 - DNA, 15 bp, Homo sapiens
tgttgccaaggcagc

SEQ ID NO: 1698900 - DNA, 15 bp, Homo sapiens
gttgccaaggcagca

SEQ ID NO: 1698901 - DNA, 15 bp, Homo sapiens
ttgccaaggcagcaa

SEQ ID NO: 1698902 - DNA, 15 bp, Homo sapiens
tgccaaggcagcaat

SEQ ID NO: 1698903 - DNA, 15 bp, Homo sapiens
gccaaggcagcaatt

SEQ ID NO: 1698904 - DNA, 15 bp, Homo sapiens
ccaaggcagcaatta

SEQ ID NO: 1698905 - DNA, 15 bp, Homo sapiens
caaggcagcaattag

SEQ ID NO: 1698906 - DNA, 15 bp, Homo sapiens
aaggcagcaattagc

SEQ ID NO: 1698907 - DNA, 15 bp, Homo sapiens
aggcagcaattagca

SEQ ID NO: 1698908 - DNA, 15 bp, Homo sapiens
ggcagcaattagcag

SEQ ID NO: 1698909 - DNA, 15 bp, Homo sapiens
gcagcaattagcaga

SEQ ID NO: 1698910 - DNA, 15 bp, Homo sapiens
cagcaattagcagaa

SEQ ID NO: 1698911 - DNA, 15 bp, Homo sapiens
agcaattagcagaac

SEQ ID NO: 1698912 - DNA, 15 bp, Homo sapiens
gcaattagcagaacc

SEQ ID NO: 1698913 - DNA, 15 bp, Homo sapiens
caattagcagaacca

SEQ ID NO: 1698914 - DNA, 15 bp, Homo sapiens
aattagcagaaccat

SEQ ID NO: 1698915 - DNA, 15 bp, Homo sapiens
attagcagaaccatg

SEQ ID NO: 1698916 - DNA, 15 bp, Homo sapiens
ttagcagaaccatgt

SEQ ID NO: 1698917 - DNA, 15 bp, Homo sapiens
tagcagaaccatgtg

SEQ ID NO: 1698918 - DNA, 15 bp, Homo sapiens
agcagaaccatgtgg

SEQ ID NO: 1698919 - DNA, 15 bp, Homo sapiens
gcagaaccatgtggg

SEQ ID NO: 1698920 - DNA, 15 bp, Homo sapiens
cagaaccatgtgggt

SEQ ID NO: 1698921 - DNA, 15 bp, Homo sapiens
agaaccatgtgggtt

SEQ ID NO: 1698922 - DNA, 15 bp, Homo sapiens
gaaccatgtgggttt

SEQ ID NO: 1698923 - DNA, 15 bp, Homo sapiens
aaccatgtgggtttg

SEQ ID NO: 1698924 - DNA, 15 bp, Homo sapiens
accatgtgggtttgg

SEQ ID NO: 1698925 - DNA, 15 bp, Homo sapiens
ccatgtgggtttgga

SEQ ID NO: 1698926 - DNA, 15 bp, Homo sapiens
catgtgggtttggaa

SEQ ID NO: 1698927 - DNA, 15 bp, Homo sapiens
atgtgggtttggaaa

SEQ ID NO: 1698928 - DNA, 15 bp, Homo sapiens
tgtgggtttggaaag

SEQ ID NO: 1698929 - DNA, 15 bp, Homo sapiens
gtgggtttggaaagt

SEQ ID NO: 1698930 - DNA, 15 bp, Homo sapiens
tgggtttggaaagta

SEQ ID NO: 1698931 - DNA, 15 bp, Homo sapiens
gggtttggaaagtat

SEQ ID NO: 1698932 - DNA, 15 bp, Homo sapiens
ggtttggaaagtatt

SEQ ID NO: 1698933 - DNA, 15 bp, Homo sapiens
gtttggaaagtattt

SEQ ID NO: 1698934 - DNA, 15 bp, Homo sapiens
tttggaaagtatttg

SEQ ID NO: 1698935 - DNA, 15 bp, Homo sapiens
ttggaaagtatttga

SEQ ID NO: 1698936 - DNA, 15 bp, Homo sapiens
tggaaagtatttgag

SEQ ID NO: 1698937 - DNA, 15 bp, Homo sapiens
ggaaagtatttgagc

SEQ ID NO: 1698938 - DNA, 15 bp, Homo sapiens
gaaagtatttgagcc

SEQ ID NO: 1698939 - DNA, 15 bp, Homo sapiens
aaagtatttgagcct

SEQ ID NO: 1698940 - DNA, 15 bp, Homo sapiens
aagtatttgagcctt

SEQ ID NO: 1698941 - DNA, 15 bp, Homo sapiens
agtatttgagcctta

SEQ ID NO: 1698942 - DNA, 15 bp, Homo sapiens
gtatttgagccttag

SEQ ID NO: 1698943 - DNA, 15 bp, Homo sapiens
tatttgagccttagg

SEQ ID NO: 1698944 - DNA, 15 bp, Homo sapiens
atttgagccttaggt

SEQ ID NO: 1698945 - DNA, 15 bp, Homo sapiens
tttgagccttaggtg

SEQ ID NO: 1698946 - DNA, 15 bp, Homo sapiens
ttgagccttaggtgg

SEQ ID NO: 1698947 - DNA, 15 bp, Homo sapiens
tgagccttaggtggt

SEQ ID NO: 1698948 - DNA, 15 bp, Homo sapiens
gagccttaggtggtt

SEQ ID NO: 1698949 - DNA, 15 bp, Homo sapiens
agccttaggtggttt

SEQ ID NO: 1698950 - DNA, 15 bp, Homo sapiens
gccttaggtggtttt

SEQ ID NO: 1698951 - DNA, 15 bp, Homo sapiens
ccttaggtggttttt

SEQ ID NO: 1698952 - DNA, 15 bp, Homo sapiens
cttaggtggtttttt

SEQ ID NO: 1698953 - DNA, 15 bp, Homo sapiens
ttaggtggttttttg

SEQ ID NO: 1698954 - DNA, 15 bp, Homo sapiens
taggtggttttttga

SEQ ID NO: 1698955 - DNA, 15 bp, Homo sapiens
aggtggttttttgat

SEQ ID NO: 1698956 - DNA, 15 bp, Homo sapiens
ggtggttttttgatg

SEQ ID NO: 1698957 - DNA, 15 bp, Homo sapiens
gtggttttttgatga

SEQ ID NO: 1698958 - DNA, 15 bp, Homo sapiens
tggttttttgatgaa

SEQ ID NO: 1698959 - DNA, 15 bp, Homo sapiens
ggttttttgatgaac

SEQ ID NO: 1698960 - DNA, 15 bp, Homo sapiens
gttttttgatgaact

SEQ ID NO: 1698961 - DNA, 15 bp, Homo sapiens
ttttttgatgaactg

SEQ ID NO: 1698962 - DNA, 15 bp, Homo sapiens
tttttgatgaactgg

SEQ ID NO: 1698963 - DNA, 15 bp, Homo sapiens
ttttgatgaactggt

SEQ ID NO: 1698964 - DNA, 15 bp, Homo sapiens
tttgatgaactggta

SEQ ID NO: 1698965 - DNA, 15 bp, Homo sapiens
ttgatgaactggtag

SEQ ID NO: 1698966 - DNA, 15 bp, Homo sapiens
tgatgaactggtagg

SEQ ID NO: 1698967 - DNA, 15 bp, Homo sapiens
gatgaactggtagga

SEQ ID NO: 1698968 - DNA, 15 bp, Homo sapiens
atgaactggtaggac

SEQ ID NO: 1698969 - DNA, 15 bp, Homo sapiens
tgaactggtaggaca

SEQ ID NO: 1698970 - DNA, 15 bp, Homo sapiens
gaactggtaggacag

SEQ ID NO: 1698971 - DNA, 15 bp, Homo sapiens
aactggtaggacagc

SEQ ID NO: 1698972 - DNA, 15 bp, Homo sapiens
actggtaggacagct

SEQ ID NO: 1698973 - DNA, 15 bp, Homo sapiens
ctggtaggacagctt

SEQ ID NO: 1698974 - DNA, 15 bp, Homo sapiens
tggtaggacagcttt

SEQ ID NO: 1698975 - DNA, 15 bp, Homo sapiens
ggtaggacagctttg

SEQ ID NO: 1698976 - DNA, 15 bp, Homo sapiens
gtaggacagctttgc

SEQ ID NO: 1698977 - DNA, 15 bp, Homo sapiens
taggacagctttgct

SEQ ID NO: 1698978 - DNA, 15 bp, Homo sapiens
aggacagctttgctc

SEQ ID NO: 1698979 - DNA, 15 bp, Homo sapiens
ggacagctttgctcc

SEQ ID NO: 1698980 - DNA, 15 bp, Homo sapiens
gacagctttgctccc

SEQ ID NO: 1698981 - DNA, 15 bp, Homo sapiens
acagctttgctccct

SEQ ID NO: 1698982 - DNA, 15 bp, Homo sapiens
cagctttgctccctt

SEQ ID NO: 1698983 - DNA, 15 bp, Homo sapiens
agctttgctcccttt

SEQ ID NO: 1698984 - DNA, 15 bp, Homo sapiens
gctttgctccctttc

SEQ ID NO: 1698985 - DNA, 15 bp, Homo sapiens
ctttgctccctttct

SEQ ID NO: 1698986 - DNA, 15 bp, Homo sapiens
tttgctccctttctc

SEQ ID NO: 1698987 - DNA, 15 bp, Homo sapiens
ttgctccctttctct

SEQ ID NO: 1698988 - DNA, 15 bp, Homo sapiens
tgctccctttctctt

SEQ ID NO: 1698989 - DNA, 15 bp, Homo sapiens
gctccctttctcttt

SEQ ID NO: 1698990 - DNA, 15 bp, Homo sapiens
ctccctttctctttc

SEQ ID NO: 1698991 - DNA, 15 bp, Homo sapiens
tccctttctctttct

SEQ ID NO: 1698992 - DNA, 15 bp, Homo sapiens
ccctttctctttctc

SEQ ID NO: 1698993 - DNA, 15 bp, Homo sapiens
cctttctctttctcc

SEQ ID NO: 1698994 - DNA, 15 bp, Homo sapiens
ctttctctttctccc

SEQ ID NO: 1698995 - DNA, 15 bp, Homo sapiens
tttctctttctccct

SEQ ID NO: 1698996 - DNA, 15 bp, Homo sapiens
ttctctttctccctc

SEQ ID NO: 1698997 - DNA, 15 bp, Homo sapiens
tctctttctccctcc

SEQ ID NO: 1698998 - DNA, 15 bp, Homo sapiens
ctctttctccctccc

SEQ ID NO: 1698999 - DNA, 15 bp, Homo sapiens
tctttctccctccct

SEQ ID NO: 1699000 - DNA, 15 bp, Homo sapiens
ctttctccctccctg

SEQ ID NO: 1699001 - DNA, 15 bp, Homo sapiens
tctccctccctgact

SEQ ID NO: 1699002 - DNA, 15 bp, Homo sapiens
ctccctccctgacta

SEQ ID NO: 1699003 - DNA, 15 bp, Homo sapiens
tccctccctgactac

SEQ ID NO: 1699004 - DNA, 15 bp, Homo sapiens
ccctccctgactaca

SEQ ID NO: 1699005 - DNA, 15 bp, Homo sapiens
cctccctgactacac

SEQ ID NO: 1699006 - DNA, 15 bp, Homo sapiens
ctccctgactacact

SEQ ID NO: 1699007 - DNA, 15 bp, Homo sapiens
tccctgactacactc

SEQ ID NO: 1699008 - DNA, 15 bp, Homo sapiens
ccctgactacactct

SEQ ID NO: 1699009 - DNA, 15 bp, Homo sapiens
cctgactacactctg

SEQ ID NO: 1699010 - DNA, 15 bp, Homo sapiens
ctgactacactctga

SEQ ID NO: 1699011 - DNA, 15 bp, Homo sapiens
tgactacactctgaa

SEQ ID NO: 1699012 - DNA, 15 bp, Homo sapiens
gactacactctgaat

SEQ ID NO: 1699013 - DNA, 15 bp, Homo sapiens
actacactctgaatc

SEQ ID NO: 1699014 - DNA, 15 bp, Homo sapiens
ctacactctgaatct

SEQ ID NO: 1699015 - DNA, 15 bp, Homo sapiens
tacactctgaatctg

SEQ ID NO: 1699016 - DNA, 15 bp, Homo sapiens
acactctgaatctgg

SEQ ID NO: 1699017 - DNA, 15 bp, Homo sapiens
cactctgaatctggg

SEQ ID NO: 1699018 - DNA, 15 bp, Homo sapiens
actctgaatctgggt

SEQ ID NO: 1699019 - DNA, 15 bp, Homo sapiens
ctctgaatctgggtc

SEQ ID NO: 1699020 - DNA, 15 bp, Homo sapiens
tctgaatctgggtcc

SEQ ID NO: 1699021 - DNA, 15 bp, Homo sapiens
ctgaatctgggtcca

SEQ ID NO: 1699022 - DNA, 15 bp, Homo sapiens
tgaatctgggtccaa

SEQ ID NO: 1699023 - DNA, 15 bp, Homo sapiens
gaatctgggtccaac

SEQ ID NO: 1699024 - DNA, 15 bp, Homo sapiens
aatctgggtccaaca

SEQ ID NO: 1699025 - DNA, 15 bp, Homo sapiens
atctgggtccaacac

SEQ ID NO: 1699026 - DNA, 15 bp, Homo sapiens
tctgggtccaacact

SEQ ID NO: 1699027 - DNA, 15 bp, Homo sapiens
ctgggtccaacactt

SEQ ID NO: 1699028 - DNA, 15 bp, Homo sapiens
tgggtccaacacttg

SEQ ID NO: 1699029 - DNA, 15 bp, Homo sapiens
gggtccaacacttgc

SEQ ID NO: 1699030 - DNA, 15 bp, Homo sapiens
ggtccaacacttgca

SEQ ID NO: 1699031 - DNA, 15 bp, Homo sapiens
gtccaacacttgcaa

SEQ ID NO: 1699032 - DNA, 15 bp, Homo sapiens
tccaacacttgcaag

SEQ ID NO: 1699033 - DNA, 15 bp, Homo sapiens
ccaacacttgcaaga

SEQ ID NO: 1699034 - DNA, 15 bp, Homo sapiens
caacacttgcaagag

SEQ ID NO: 1699035 - DNA, 15 bp, Homo sapiens
aacacttgcaagagt

SEQ ID NO: 1699036 - DNA, 15 bp, Homo sapiens
acacttgcaagagtt

SEQ ID NO: 1699037 - DNA, 15 bp, Homo sapiens
cacttgcaagagttt

SEQ ID NO: 1699038 - DNA, 15 bp, Homo sapiens
acttgcaagagttta

SEQ ID NO: 1699039 - DNA, 15 bp, Homo sapiens
cttgcaagagtttag

SEQ ID NO: 1699040 - DNA, 15 bp, Homo sapiens
ttgcaagagtttagg

SEQ ID NO: 1699041 - DNA, 15 bp, Homo sapiens
tgcaagagtttaggg

SEQ ID NO: 1699042 - DNA, 15 bp, Homo sapiens
gcaagagtttagggc

SEQ ID NO: 1699043 - DNA, 15 bp, Homo sapiens
caagagtttagggcc

SEQ ID NO: 1699044 - DNA, 15 bp, Homo sapiens
aagagtttagggccc

SEQ ID NO: 1699045 - DNA, 15 bp, Homo sapiens
agagtttagggccca

SEQ ID NO: 1699046 - DNA, 15 bp, Homo sapiens
gagtttagggcccag

SEQ ID NO: 1699047 - DNA, 15 bp, Homo sapiens
agtttagggcccaga

SEQ ID NO: 1699048 - DNA, 15 bp, Homo sapiens
gtttagggcccagag

SEQ ID NO: 1699049 - DNA, 15 bp, Homo sapiens
tttagggcccagagc

SEQ ID NO: 1699050 - DNA, 15 bp, Homo sapiens
ttagggcccagagca

SEQ ID NO: 1699051 - DNA, 15 bp, Homo sapiens
tagggcccagagcaa

SEQ ID NO: 1699052 - DNA, 15 bp, Homo sapiens
agggcccagagcaat

SEQ ID NO: 1699053 - DNA, 15 bp, Homo sapiens
gggcccagagcaatc

SEQ ID NO: 1699054 - DNA, 15 bp, Homo sapiens
ggcccagagcaatca

SEQ ID NO: 1699055 - DNA, 15 bp, Homo sapiens
gcccagagcaatcaa

SEQ ID NO: 1699056 - DNA, 15 bp, Homo sapiens
cccagagcaatcaac

SEQ ID NO: 1699057 - DNA, 15 bp, Homo sapiens
ccagagcaatcaacc

SEQ ID NO: 1699058 - DNA, 15 bp, Homo sapiens
cagagcaatcaacct

SEQ ID NO: 1699059 - DNA, 15 bp, Homo sapiens
agagcaatcaacctg

SEQ ID NO: 1699060 - DNA, 15 bp, Homo sapiens
gagcaatcaacctga

SEQ ID NO: 1699061 - DNA, 15 bp, Homo sapiens
agcaatcaacctgat

SEQ ID NO: 1699062 - DNA, 15 bp, Homo sapiens
gcaatcaacctgatt

SEQ ID NO: 1699063 - DNA, 15 bp, Homo sapiens
caatcaacctgatta

SEQ ID NO: 1699064 - DNA, 15 bp, Homo sapiens
aatcaacctgattag

SEQ ID NO: 1699065 - DNA, 15 bp, Homo sapiens
atcaacctgattagc

SEQ ID NO: 1699066 - DNA, 15 bp, Homo sapiens
tcaacctgattagct

SEQ ID NO: 1699067 - DNA, 15 bp, Homo sapiens
caacctgattagctc

SEQ ID NO: 1699068 - DNA, 15 bp, Homo sapiens
aacctgattagctct

SEQ ID NO: 1699069 - DNA, 15 bp, Homo sapiens
acctgattagctctg

SEQ ID NO: 1699070 - DNA, 15 bp, Homo sapiens
cctgattagctctgc

SEQ ID NO: 1699071 - DNA, 15 bp, Homo sapiens
ctgattagctctgcc

SEQ ID NO: 1699072 - DNA, 15 bp, Homo sapiens
tgattagctctgccc

SEQ ID NO: 1699073 - DNA, 15 bp, Homo sapiens
gattagctctgccct

SEQ ID NO: 1699074 - DNA, 15 bp, Homo sapiens
attagctctgcccta

SEQ ID NO: 1699075 - DNA, 15 bp, Homo sapiens
ttagctctgccctaa

SEQ ID NO: 1699076 - DNA, 15 bp, Homo sapiens
tagctctgccctaag

SEQ ID NO: 1699077 - DNA, 15 bp, Homo sapiens
agctctgccctaaga

SEQ ID NO: 1699078 - DNA, 15 bp, Homo sapiens
gctctgccctaagat

SEQ ID NO: 1699079 - DNA, 15 bp, Homo sapiens
ctctgccctaagatt

SEQ ID NO: 1699080 - DNA, 15 bp, Homo sapiens
tctgccctaagatta

SEQ ID NO: 1699081 - DNA, 15 bp, Homo sapiens
ctgccctaagattag

SEQ ID NO: 1699082 - DNA, 15 bp, Homo sapiens
tgccctaagattagc

SEQ ID NO: 1699083 - DNA, 15 bp, Homo sapiens
gccctaagattagct

SEQ ID NO: 1699084 - DNA, 15 bp, Homo sapiens
ccctaagattagctc

SEQ ID NO: 1699085 - DNA, 15 bp, Homo sapiens
cctaagattagctct

SEQ ID NO: 1699086 - DNA, 15 bp, Homo sapiens
ctaagattagctctg

SEQ ID NO: 1699087 - DNA, 15 bp, Homo sapiens
taagattagctctgt

SEQ ID NO: 1699088 - DNA, 15 bp, Homo sapiens
aagattagctctgtc

SEQ ID NO: 1699089 - DNA, 15 bp, Homo sapiens
agattagctctgtca

SEQ ID NO: 1699090 - DNA, 15 bp, Homo sapiens
gattagctctgtcaa

SEQ ID NO: 1699091 - DNA, 15 bp, Homo sapiens
attagctctgtcaaa

SEQ ID NO: 1699092 - DNA, 15 bp, Homo sapiens
ttagctctgtcaaac

SEQ ID NO: 1699093 - DNA, 15 bp, Homo sapiens
tagctctgtcaaacc

SEQ ID NO: 1699094 - DNA, 15 bp, Homo sapiens
agctctgtcaaacct

SEQ ID NO: 1699095 - DNA, 15 bp, Homo sapiens
gctctgtcaaaccta

SEQ ID NO: 1699096 - DNA, 15 bp, Homo sapiens
ctctgtcaaacctaa

SEQ ID NO: 1699097 - DNA, 15 bp, Homo sapiens
tctgtcaaacctaac

SEQ ID NO: 1699098 - DNA, 15 bp, Homo sapiens
ctgtcaaacctaacc

SEQ ID NO: 1699099 - DNA, 15 bp, Homo sapiens
tgtcaaacctaacct

SEQ ID NO: 1699100 - DNA, 15 bp, Homo sapiens
gtcaaacctaacctg

SEQ ID NO: 1699101 - DNA, 15 bp, Homo sapiens
tcaaacctaacctgc

SEQ ID NO: 1699102 - DNA, 15 bp, Homo sapiens
caaacctaacctgca

SEQ ID NO: 1699103 - DNA, 15 bp, Homo sapiens
aaacctaacctgcaa

SEQ ID NO: 1699104 - DNA, 15 bp, Homo sapiens
aacctaacctgcaag

SEQ ID NO: 1699105 - DNA, 15 bp, Homo sapiens
acctaacctgcaagc

SEQ ID NO: 1699106 - DNA, 15 bp, Homo sapiens
cctaacctgcaagct

SEQ ID NO: 1699107 - DNA, 15 bp, Homo sapiens
ctaacctgcaagctc

SEQ ID NO: 1699108 - DNA, 15 bp, Homo sapiens
taacctgcaagctcc

SEQ ID NO: 1699109 - DNA, 15 bp, Homo sapiens
aacctgcaagctccc

SEQ ID NO: 1699110 - DNA, 15 bp, Homo sapiens
acctgcaagctccct

SEQ ID NO: 1699111 - DNA, 15 bp, Homo sapiens
cctgcaagctccctt

SEQ ID NO: 1699112 - DNA, 15 bp, Homo sapiens
ctgcaagctcccttt

SEQ ID NO: 1699113 - DNA, 15 bp, Homo sapiens
tgcaagctccctttc

SEQ ID NO: 1699114 - DNA, 15 bp, Homo sapiens
gcaagctccctttcc

SEQ ID NO: 1699115 - DNA, 15 bp, Homo sapiens
caagctccctttcct

SEQ ID NO: 1699116 - DNA, 15 bp, Homo sapiens
aagctccctttcctg

SEQ ID NO: 1699117 - DNA, 15 bp, Homo sapiens
agctccctttcctgg

SEQ ID NO: 1699118 - DNA, 15 bp, Homo sapiens
gctccctttcctggt

SEQ ID NO: 1699119 - DNA, 15 bp, Homo sapiens
ctccctttcctggtt

SEQ ID NO: 1699120 - DNA, 15 bp, Homo sapiens
tccctttcctggtta

SEQ ID NO: 1699121 - DNA, 15 bp, Homo sapiens
ccctttcctggttac

SEQ ID NO: 1699122 - DNA, 15 bp, Homo sapiens
cctttcctggttacc

SEQ ID NO: 1699123 - DNA, 15 bp, Homo sapiens
ctttcctggttacca

SEQ ID NO: 1699124 - DNA, 15 bp, Homo sapiens
tttcctggttaccat

SEQ ID NO: 1699125 - DNA, 15 bp, Homo sapiens
ttcctggttaccatg

SEQ ID NO: 1699126 - DNA, 15 bp, Homo sapiens
tcctggttaccatgt

SEQ ID NO: 1699127 - DNA, 15 bp, Homo sapiens
cctggttaccatgtg

SEQ ID NO: 1699128 - DNA, 15 bp, Homo sapiens
ctggttaccatgtga

SEQ ID NO: 1699129 - DNA, 15 bp, Homo sapiens
tggttaccatgtgac

SEQ ID NO: 1699130 - DNA, 15 bp, Homo sapiens
ggttaccatgtgacc

SEQ ID NO: 1699131 - DNA, 15 bp, Homo sapiens
gttaccatgtgacct

SEQ ID NO: 1699132 - DNA, 15 bp, Homo sapiens
ttaccatgtgaccta

SEQ ID NO: 1699133 - DNA, 15 bp, Homo sapiens
taccatgtgacctac

SEQ ID NO: 1699134 - DNA, 15 bp, Homo sapiens
accatgtgacctacc

SEQ ID NO: 1699135 - DNA, 15 bp, Homo sapiens
ccatgtgacctacca

SEQ ID NO: 1699136 - DNA, 15 bp, Homo sapiens
catgtgacctaccaa

SEQ ID NO: 1699137 - DNA, 15 bp, Homo sapiens
atgtgacctaccaaa

SEQ ID NO: 1699138 - DNA, 15 bp, Homo sapiens
tgtgacctaccaaac

SEQ ID NO: 1699139 - DNA, 15 bp, Homo sapiens
gtgacctaccaaaca

SEQ ID NO: 1699140 - DNA, 15 bp, Homo sapiens
tgacctaccaaacat

SEQ ID NO: 1699141 - DNA, 15 bp, Homo sapiens
gacctaccaaacatt

SEQ ID NO: 1699142 - DNA, 15 bp, Homo sapiens
acctaccaaacattt

SEQ ID NO: 1699143 - DNA, 15 bp, Homo sapiens
cctaccaaacatttc

SEQ ID NO: 1699144 - DNA, 15 bp, Homo sapiens
ctaccaaacatttct

SEQ ID NO: 1699145 - DNA, 15 bp, Homo sapiens
taccaaacatttcta

SEQ ID NO: 1699146 - DNA, 15 bp, Homo sapiens
accaaacatttctat

SEQ ID NO: 1699147 - DNA, 15 bp, Homo sapiens
ccaaacatttctatt

SEQ ID NO: 1699148 - DNA, 15 bp, Homo sapiens
caaacatttctattt

SEQ ID NO: 1699149 - DNA, 15 bp, Homo sapiens
aaacatttctattta

SEQ ID NO: 1699150 - DNA, 15 bp, Homo sapiens
aacatttctatttat

SEQ ID NO: 1699151 - DNA, 15 bp, Homo sapiens
acatttctatttatt

SEQ ID NO: 1699152 - DNA, 15 bp, Homo sapiens
catttctatttattt

SEQ ID NO: 1699153 - DNA, 15 bp, Homo sapiens
atttctatttatttg

SEQ ID NO: 1699154 - DNA, 15 bp, Homo sapiens
tttctatttatttga

SEQ ID NO: 1699155 - DNA, 15 bp, Homo sapiens
ttctatttatttgac

SEQ ID NO: 1699156 - DNA, 15 bp, Homo sapiens
tctatttatttgaca

SEQ ID NO: 1699157 - DNA, 15 bp, Homo sapiens
ctatttatttgacat

SEQ ID NO: 1699158 - DNA, 15 bp, Homo sapiens
tatttatttgacata

SEQ ID NO: 1699159 - DNA, 15 bp, Homo sapiens
atttatttgacatat

SEQ ID NO: 1699160 - DNA, 15 bp, Homo sapiens
tttatttgacatatg

SEQ ID NO: 1699161 - DNA, 15 bp, Homo sapiens
ttatttgacatatga

SEQ ID NO: 1699162 - DNA, 15 bp, Homo sapiens
tatttgacatatgaa

SEQ ID NO: 1699163 - DNA, 15 bp, Homo sapiens
atttgacatatgaaa

SEQ ID NO: 1699164 - DNA, 15 bp, Homo sapiens
tttgacatatgaaat

SEQ ID NO: 1699165 - DNA, 15 bp, Homo sapiens
ttgacatatgaaatg

SEQ ID NO: 1699166 - DNA, 15 bp, Homo sapiens
tgacatatgaaatgt

SEQ ID NO: 1699167 - DNA, 15 bp, Homo sapiens
gacatatgaaatgta

SEQ ID NO: 1699168 - DNA, 15 bp, Homo sapiens
acatatgaaatgtaa

SEQ ID NO: 1699169 - DNA, 15 bp, Homo sapiens
catatgaaatgtaaa

SEQ ID NO: 1699170 - DNA, 15 bp, Homo sapiens
atatgaaatgtaaac

SEQ ID NO: 1699171 - DNA, 15 bp, Homo sapiens
tatgaaatgtaaact

SEQ ID NO: 1699172 - DNA, 15 bp, Homo sapiens
atgaaatgtaaactt

SEQ ID NO: 1699173 - DNA, 15 bp, Homo sapiens
tgaaatgtaaacttg

SEQ ID NO: 1699174 - DNA, 15 bp, Homo sapiens
gaaatgtaaacttgg

SEQ ID NO: 1699175 - DNA, 15 bp, Homo sapiens
aaatgtaaacttgga

SEQ ID NO: 1699176 - DNA, 15 bp, Homo sapiens
aatgtaaacttggac

SEQ ID NO: 1699177 - DNA, 15 bp, Homo sapiens
atgtaaacttggaca

SEQ ID NO: 1699178 - DNA, 15 bp, Homo sapiens
tgtaaacttggacac

SEQ ID NO: 1699179 - DNA, 15 bp, Homo sapiens
gtaaacttggacacc

SEQ ID NO: 1699180 - DNA, 15 bp, Homo sapiens
taaacttggacacca

SEQ ID NO: 1699181 - DNA, 15 bp, Homo sapiens
aaacttggacaccag

SEQ ID NO: 1699182 - DNA, 15 bp, Homo sapiens
aacttggacaccagt

SEQ ID NO: 1699183 - DNA, 15 bp, Homo sapiens
acttggacaccagtt

SEQ ID NO: 1699184 - DNA, 15 bp, Homo sapiens
cttggacaccagttg

SEQ ID NO: 1699185 - DNA, 15 bp, Homo sapiens
ttggacaccagttga

SEQ ID NO: 1699186 - DNA, 15 bp, Homo sapiens
tggacaccagttgat

SEQ ID NO: 1699187 - DNA, 15 bp, Homo sapiens
ggacaccagttgatc

SEQ ID NO: 1699188 - DNA, 15 bp, Homo sapiens
gacaccagttgatcc

SEQ ID NO: 1699189 - DNA, 15 bp, Homo sapiens
acaccagttgatcct

SEQ ID NO: 1699190 - DNA, 15 bp, Homo sapiens
caccagttgatcctg

SEQ ID NO: 1699191 - DNA, 15 bp, Homo sapiens
accagttgatcctgc

SEQ ID NO: 1699192 - DNA, 15 bp, Homo sapiens
ccagttgatcctgct

SEQ ID NO: 1699193 - DNA, 15 bp, Homo sapiens
cagttgatcctgctc

SEQ ID NO: 1699194 - DNA, 15 bp, Homo sapiens
agttgatcctgctcc

SEQ ID NO: 1699195 - DNA, 15 bp, Homo sapiens
gttgatcctgctcca

SEQ ID NO: 1699196 - DNA, 15 bp, Homo sapiens
ttgatcctgctccaa

SEQ ID NO: 1699197 - DNA, 15 bp, Homo sapiens
tgatcctgctccaat

SEQ ID NO: 1699198 - DNA, 15 bp, Homo sapiens
gatcctgctccaatc

SEQ ID NO: 1699199 - DNA, 15 bp, Homo sapiens
atcctgctccaatct

SEQ ID NO: 1699200 - DNA, 15 bp, Homo sapiens
tcctgctccaatctg

SEQ ID NO: 1699201 - DNA, 15 bp, Homo sapiens
cctgctccaatctgg

SEQ ID NO: 1699202 - DNA, 15 bp, Homo sapiens
ctgctccaatctggc

SEQ ID NO: 1699203 - DNA, 15 bp, Homo sapiens
tgctccaatctggcc

SEQ ID NO: 1699204 - DNA, 15 bp, Homo sapiens
gctccaatctggcca

SEQ ID NO: 1699205 - DNA, 15 bp, Homo sapiens
ctccaatctggccac

SEQ ID NO: 1699206 - DNA, 15 bp, Homo sapiens
tccaatctggccaca

SEQ ID NO: 1699207 - DNA, 15 bp, Homo sapiens
ccaatctggccacag

SEQ ID NO: 1699208 - DNA, 15 bp, Homo sapiens
caatctggccacagt

SEQ ID NO: 1699209 - DNA, 15 bp, Homo sapiens
aatctggccacagtc

SEQ ID NO: 1699210 - DNA, 15 bp, Homo sapiens
atctggccacagtct

SEQ ID NO: 1699211 - DNA, 15 bp, Homo sapiens
tctggccacagtcta

SEQ ID NO: 1699212 - DNA, 15 bp, Homo sapiens
ctggccacagtctac

SEQ ID NO: 1699213 - DNA, 15 bp, Homo sapiens
tggccacagtctaca

SEQ ID NO: 1699214 - DNA, 15 bp, Homo sapiens
ggccacagtctacac

SEQ ID NO: 1699215 - DNA, 15 bp, Homo sapiens
gccacagtctacact

SEQ ID NO: 1699216 - DNA, 15 bp, Homo sapiens
ccacagtctacactg

SEQ ID NO: 1699217 - DNA, 15 bp, Homo sapiens
cacagtctacactgt

SEQ ID NO: 1699218 - DNA, 15 bp, Homo sapiens
acagtctacactgtt

SEQ ID NO: 1699219 - DNA, 15 bp, Homo sapiens
cagtctacactgttt

SEQ ID NO: 1699220 - DNA, 15 bp, Homo sapiens
agtctacactgtttc

SEQ ID NO: 1699221 - DNA, 15 bp, Homo sapiens
gtctacactgtttca

SEQ ID NO: 1699222 - DNA, 15 bp, Homo sapiens
tctacactgtttcat

SEQ ID NO: 1699223 - DNA, 15 bp, Homo sapiens
ctacactgtttcatc

SEQ ID NO: 1699224 - DNA, 15 bp, Homo sapiens
tacactgtttcatct

SEQ ID NO: 1699225 - DNA, 15 bp, Homo sapiens
acactgtttcatctt

SEQ ID NO: 1699226 - DNA, 15 bp, Homo sapiens
cactgtttcatcttt

SEQ ID NO: 1699227 - DNA, 15 bp, Homo sapiens
actgtttcatctttc

SEQ ID NO: 1699228 - DNA, 15 bp, Homo sapiens
ctgtttcatctttct

SEQ ID NO: 1699229 - DNA, 15 bp, Homo sapiens
tgtttcatctttctg

SEQ ID NO: 1699230 - DNA, 15 bp, Homo sapiens
gtttcatctttctgt

SEQ ID NO: 1699231 - DNA, 15 bp, Homo sapiens
tttcatctttctgtt

SEQ ID NO: 1699232 - DNA, 15 bp, Homo sapiens
ttcatctttctgttt

SEQ ID NO: 1699233 - DNA, 15 bp, Homo sapiens
tcatctttctgttta

SEQ ID NO: 1699234 - DNA, 15 bp, Homo sapiens
catctttctgtttat

SEQ ID NO: 1699235 - DNA, 15 bp, Homo sapiens
atctttctgtttatt

SEQ ID NO: 1699236 - DNA, 15 bp, Homo sapiens
tctttctgtttattt

SEQ ID NO: 1699237 - DNA, 15 bp, Homo sapiens
ctttctgtttattta

SEQ ID NO: 1699238 - DNA, 15 bp, Homo sapiens
tttctgtttatttac

SEQ ID NO: 1699239 - DNA, 15 bp, Homo sapiens
ttctgtttatttaca

SEQ ID NO: 1699240 - DNA, 15 bp, Homo sapiens
tctgtttatttacag

SEQ ID NO: 1699241 - DNA, 15 bp, Homo sapiens
ctgtttatttacagg

SEQ ID NO: 1699242 - DNA, 15 bp, Homo sapiens
tgtttatttacaggg

SEQ ID NO: 1699243 - DNA, 15 bp, Homo sapiens
gtttatttacagggc

SEQ ID NO: 1699244 - DNA, 15 bp, Homo sapiens
tttatttacagggct

SEQ ID NO: 1699245 - DNA, 15 bp, Homo sapiens
ttatttacagggctt

SEQ ID NO: 1699246 - DNA, 15 bp, Homo sapiens
tatttacagggcttc

SEQ ID NO: 1699247 - DNA, 15 bp, Homo sapiens
atttacagggcttcc

SEQ ID NO: 1699248 - DNA, 15 bp, Homo sapiens
tttacagggcttcca

SEQ ID NO: 1699249 - DNA, 15 bp, Homo sapiens
ttacagggcttccat

SEQ ID NO: 1699250 - DNA, 15 bp, Homo sapiens
tacagggcttccatc

SEQ ID NO: 1699251 - DNA, 15 bp, Homo sapiens
acagggcttccatcc

SEQ ID NO: 1699252 - DNA, 15 bp, Homo sapiens
cagggcttccatccg

SEQ ID NO: 1699253 - DNA, 15 bp, Homo sapiens
agggcttccatccgg

SEQ ID NO: 1699254 - DNA, 15 bp, Homo sapiens
gggcttccatccggc

SEQ ID NO: 1699255 - DNA, 15 bp, Homo sapiens
ggcttccatccggca

SEQ ID NO: 1699256 - DNA, 15 bp, Homo sapiens
gcttccatccggcaa

SEQ ID NO: 1699257 - DNA, 15 bp, Homo sapiens
cttccatccggcaac

SEQ ID NO: 1699258 - DNA, 15 bp, Homo sapiens
ttccatccggcaacg

SEQ ID NO: 1699259 - DNA, 15 bp, Homo sapiens
tccatccggcaacgc

SEQ ID NO: 1699260 - DNA, 15 bp, Homo sapiens
ccatccggcaacgct

SEQ ID NO: 1699261 - DNA, 15 bp, Homo sapiens
catccggcaacgctc

SEQ ID NO: 1699262 - DNA, 15 bp, Homo sapiens
atccggcaacgctcc

SEQ ID NO: 1699263 - DNA, 15 bp, Homo sapiens
tccggcaacgctcca

SEQ ID NO: 1699264 - DNA, 15 bp, Homo sapiens
ccggcaacgctccaa

SEQ ID NO: 1699265 - DNA, 15 bp, Homo sapiens
cggcaacgctccaag

SEQ ID NO: 1699266 - DNA, 15 bp, Homo sapiens
ggcaacgctccaagt

SEQ ID NO: 1699267 - DNA, 15 bp, Homo sapiens
gcaacgctccaagtc

SEQ ID NO: 1699268 - DNA, 15 bp, Homo sapiens
caacgctccaagtct

SEQ ID NO: 1699269 - DNA, 15 bp, Homo sapiens
aacgctccaagtctc

SEQ ID NO: 1699270 - DNA, 15 bp, Homo sapiens
acgctccaagtctca

SEQ ID NO: 1699271 - DNA, 15 bp, Homo sapiens
cgctccaagtctcag

SEQ ID NO: 1699272 - DNA, 15 bp, Homo sapiens
gctccaagtctcagc

SEQ ID NO: 1699273 - DNA, 15 bp, Homo sapiens
ctccaagtctcagct

SEQ ID NO: 1699274 - DNA, 15 bp, Homo sapiens
tccaagtctcagctt

SEQ ID NO: 1699275 - DNA, 15 bp, Homo sapiens
ccaagtctcagcttt

SEQ ID NO: 1699276 - DNA, 15 bp, Homo sapiens
caagtctcagctttc

SEQ ID NO: 1699277 - DNA, 15 bp, Homo sapiens
aagtctcagctttct

SEQ ID NO: 1699278 - DNA, 15 bp, Homo sapiens
agtctcagctttctt

SEQ ID NO: 1699279 - DNA, 15 bp, Homo sapiens
gtctcagctttctta

SEQ ID NO: 1699280 - DNA, 15 bp, Homo sapiens
tctcagctttcttac

SEQ ID NO: 1699281 - DNA, 15 bp, Homo sapiens
ctcagctttcttacc

SEQ ID NO: 1699282 - DNA, 15 bp, Homo sapiens
tcagctttcttacct

SEQ ID NO: 1699283 - DNA, 15 bp, Homo sapiens
cagctttcttacctg

SEQ ID NO: 1699284 - DNA, 15 bp, Homo sapiens
agctttcttacctgg

SEQ ID NO: 1699285 - DNA, 15 bp, Homo sapiens
gctttcttacctggt

SEQ ID NO: 1699286 - DNA, 15 bp, Homo sapiens
ctttcttacctggtg

SEQ ID NO: 1699287 - DNA, 15 bp, Homo sapiens
tttcttacctggtgc

SEQ ID NO: 1699288 - DNA, 15 bp, Homo sapiens
ttcttacctggtgca

SEQ ID NO: 1699289 - DNA, 15 bp, Homo sapiens
tcttacctggtgcac

SEQ ID NO: 1699290 - DNA, 15 bp, Homo sapiens
cttacctggtgcacg

SEQ ID NO: 1699291 - DNA, 15 bp, Homo sapiens
ttacctggtgcacga

SEQ ID NO: 1699292 - DNA, 15 bp, Homo sapiens
tacctggtgcacgaa

SEQ ID NO: 1699293 - DNA, 15 bp, Homo sapiens
acctggtgcacgaac

SEQ ID NO: 1699294 - DNA, 15 bp, Homo sapiens
cctggtgcacgaacc

SEQ ID NO: 1699295 - DNA, 15 bp, Homo sapiens
ctggtgcacgaacct

SEQ ID NO: 1699296 - DNA, 15 bp, Homo sapiens
tggtgcacgaacctc

SEQ ID NO: 1699297 - DNA, 15 bp, Homo sapiens
ggtgcacgaacctcc

SEQ ID NO: 1699298 - DNA, 15 bp, Homo sapiens
gtgcacgaacctcca

SEQ ID NO: 1699299 - DNA, 15 bp, Homo sapiens
tgcacgaacctccat

SEQ ID NO: 1699300 - DNA, 15 bp, Homo sapiens
gcacgaacctccatt

SEQ ID NO: 1699301 - DNA, 15 bp, Homo sapiens
cacgaacctccatta

SEQ ID NO: 1699302 - DNA, 15 bp, Homo sapiens
acgaacctccattag

SEQ ID NO: 1699303 - DNA, 15 bp, Homo sapiens
cgaacctccattagc

SEQ ID NO: 1699304 - DNA, 15 bp, Homo sapiens
gaacctccattagct

SEQ ID NO: 1699305 - DNA, 15 bp, Homo sapiens
aacctccattagctg

SEQ ID NO: 1699306 - DNA, 15 bp, Homo sapiens
acctccattagctgt

SEQ ID NO: 1699307 - DNA, 15 bp, Homo sapiens
cctccattagctgtt

SEQ ID NO: 1699308 - DNA, 15 bp, Homo sapiens
ctccattagctgttg

SEQ ID NO: 1699309 - DNA, 15 bp, Homo sapiens
tccattagctgttgt

SEQ ID NO: 1699310 - DNA, 15 bp, Homo sapiens
ccattagctgttgta

SEQ ID NO: 1699311 - DNA, 15 bp, Homo sapiens
cattagctgttgtag

SEQ ID NO: 1699312 - DNA, 15 bp, Homo sapiens
attagctgttgtaga

SEQ ID NO: 1699313 - DNA, 15 bp, Homo sapiens
ttagctgttgtagat

SEQ ID NO: 1699314 - DNA, 15 bp, Homo sapiens
tagctgttgtagatc

SEQ ID NO: 1699315 - DNA, 15 bp, Homo sapiens
agctgttgtagatca

SEQ ID NO: 1699316 - DNA, 15 bp, Homo sapiens
gctgttgtagatcat

SEQ ID NO: 1699317 - DNA, 15 bp, Homo sapiens
ctgttgtagatcata

SEQ ID NO: 1699318 - DNA, 15 bp, Homo sapiens
tgttgtagatcataa

SEQ ID NO: 1699319 - DNA, 15 bp, Homo sapiens
gttgtagatcataag

SEQ ID NO: 1699320 - DNA, 15 bp, Homo sapiens
ttgtagatcataagt

SEQ ID NO: 1699321 - DNA, 15 bp, Homo sapiens
tgtagatcataagtc

SEQ ID NO: 1699322 - DNA, 15 bp, Homo sapiens
gtagatcataagtct

SEQ ID NO: 1699323 - DNA, 15 bp, Homo sapiens
tagatcataagtcta

SEQ ID NO: 1699324 - DNA, 15 bp, Homo sapiens
agatcataagtctac

SEQ ID NO: 1699325 - DNA, 15 bp, Homo sapiens
gatcataagtctacc

SEQ ID NO: 1699326 - DNA, 15 bp, Homo sapiens
atcataagtctacct

SEQ ID NO: 1699327 - DNA, 15 bp, Homo sapiens
tcataagtctaccta

SEQ ID NO: 1699328 - DNA, 15 bp, Homo sapiens
cataagtctacctat

SEQ ID NO: 1699329 - DNA, 15 bp, Homo sapiens
ataagtctacctatg

SEQ ID NO: 1699330 - DNA, 15 bp, Homo sapiens
taagtctacctatga

SEQ ID NO: 1699331 - DNA, 15 bp, Homo sapiens
aagtctacctatgaa

SEQ ID NO: 1699332 - DNA, 15 bp, Homo sapiens
agtctacctatgaag

SEQ ID NO: 1699333 - DNA, 15 bp, Homo sapiens
gtctacctatgaaga

SEQ ID NO: 1699334 - DNA, 15 bp, Homo sapiens
tctacctatgaagaa

SEQ ID NO: 1699335 - DNA, 15 bp, Homo sapiens
ctacctatgaagaag

SEQ ID NO: 1699336 - DNA, 15 bp, Homo sapiens
tacctatgaagaaga

SEQ ID NO: 1699337 - DNA, 15 bp, Homo sapiens
acctatgaagaagat

SEQ ID NO: 1699338 - DNA, 15 bp, Homo sapiens
cctatgaagaagata

SEQ ID NO: 1699339 - DNA, 15 bp, Homo sapiens
ctatgaagaagatag

SEQ ID NO: 1699340 - DNA, 15 bp, Homo sapiens
tatgaagaagataga

SEQ ID NO: 1699341 - DNA, 15 bp, Homo sapiens
atgaagaagatagaa

SEQ ID NO: 1699342 - DNA, 15 bp, Homo sapiens
tgaagaagatagaaa

SEQ ID NO: 1699343 - DNA, 15 bp, Homo sapiens
gaagaagatagaaag

SEQ ID NO: 1699344 - DNA, 15 bp, Homo sapiens
aagaagatagaaagg

SEQ ID NO: 1699345 - DNA, 15 bp, Homo sapiens
agaagatagaaaggt

SEQ ID NO: 1699346 - DNA, 15 bp, Homo sapiens
gaagatagaaaggtc

SEQ ID NO: 1699347 - DNA, 15 bp, Homo sapiens
aagatagaaaggtca

SEQ ID NO: 1699348 - DNA, 15 bp, Homo sapiens
agatagaaaggtcag

SEQ ID NO: 1699349 - DNA, 15 bp, Homo sapiens
gatagaaaggtcagg

SEQ ID NO: 1699350 - DNA, 15 bp, Homo sapiens
atagaaaggtcaggc

SEQ ID NO: 1699351 - DNA, 15 bp, Homo sapiens
tagaaaggtcaggca

SEQ ID NO: 1699352 - DNA, 15 bp, Homo sapiens
agaaaggtcaggcac

SEQ ID NO: 1699353 - DNA, 15 bp, Homo sapiens
gaaaggtcaggcacc

SEQ ID NO: 1699354 - DNA, 15 bp, Homo sapiens
aaaggtcaggcacca

SEQ ID NO: 1699355 - DNA, 15 bp, Homo sapiens
aaggtcaggcaccaa

SEQ ID NO: 1699356 - DNA, 15 bp, Homo sapiens
aggtcaggcaccaac

SEQ ID NO: 1699357 - DNA, 15 bp, Homo sapiens
ggtcaggcaccaact

SEQ ID NO: 1699358 - DNA, 15 bp, Homo sapiens
gtcaggcaccaactg

SEQ ID NO: 1699359 - DNA, 15 bp, Homo sapiens
tcaggcaccaactgc

SEQ ID NO: 1699360 - DNA, 15 bp, Homo sapiens
caggcaccaactgct

SEQ ID NO: 1699361 - DNA, 15 bp, Homo sapiens
aggcaccaactgctt

SEQ ID NO: 1699362 - DNA, 15 bp, Homo sapiens
ggcaccaactgctta

SEQ ID NO: 1699363 - DNA, 15 bp, Homo sapiens
gcaccaactgcttat

SEQ ID NO: 1699364 - DNA, 15 bp, Homo sapiens
caccaactgcttatg

SEQ ID NO: 1699365 - DNA, 15 bp, Homo sapiens
accaactgcttatgg

SEQ ID NO: 1699366 - DNA, 15 bp, Homo sapiens
ccaactgcttatggg

SEQ ID NO: 1699367 - DNA, 15 bp, Homo sapiens
caactgcttatgggg

SEQ ID NO: 1699368 - DNA, 15 bp, Homo sapiens
aactgcttatggggg

SEQ ID NO: 1699369 - DNA, 15 bp, Homo sapiens
actgcttatgggggg

SEQ ID NO: 1699370 - DNA, 15 bp, Homo sapiens
ctgcttatggggggg

SEQ ID NO: 1699371 - DNA, 15 bp, Homo sapiens
tgcttatggggggga

SEQ ID NO: 1699372 - DNA, 15 bp, Homo sapiens
gcttatgggggggaa

SEQ ID NO: 1699373 - DNA, 15 bp, Homo sapiens
cttatgggggggaat

SEQ ID NO: 1699374 - DNA, 15 bp, Homo sapiens
ttatgggggggaatg

SEQ ID NO: 1699375 - DNA, 15 bp, Homo sapiens
tatgggggggaatgg

SEQ ID NO: 1699376 - DNA, 15 bp, Homo sapiens
atgggggggaatgga

SEQ ID NO: 1699377 - DNA, 15 bp, Homo sapiens
tgggggggaatggaa

SEQ ID NO: 1699378 - DNA, 15 bp, Homo sapiens
gggggggaatggaag

SEQ ID NO: 1699379 - DNA, 15 bp, Homo sapiens
ggggggaatggaaga

SEQ ID NO: 1699380 - DNA, 15 bp, Homo sapiens
gggggaatggaagaa

SEQ ID NO: 1699381 - DNA, 15 bp, Homo sapiens
ggggaatggaagaag

SEQ ID NO: 1699382 - DNA, 15 bp, Homo sapiens
gggaatggaagaagt

SEQ ID NO: 1699383 - DNA, 15 bp, Homo sapiens
ggaatggaagaagtc

SEQ ID NO: 1699384 - DNA, 15 bp, Homo sapiens
gaatggaagaagtct

SEQ ID NO: 1699385 - DNA, 15 bp, Homo sapiens
aatggaagaagtctc

SEQ ID NO: 1699386 - DNA, 15 bp, Homo sapiens
atggaagaagtctct

SEQ ID NO: 1699387 - DNA, 15 bp, Homo sapiens
tggaagaagtctctc

SEQ ID NO: 1699388 - DNA, 15 bp, Homo sapiens
ggaagaagtctctcc

SEQ ID NO: 1699389 - DNA, 15 bp, Homo sapiens
gaagaagtctctcct

SEQ ID NO: 1699390 - DNA, 15 bp, Homo sapiens
aagaagtctctcctg

SEQ ID NO: 1699391 - DNA, 15 bp, Homo sapiens
agaagtctctcctgg

SEQ ID NO: 1699392 - DNA, 15 bp, Homo sapiens
gaagtctctcctggg

SEQ ID NO: 1699393 - DNA, 15 bp, Homo sapiens
aagtctctcctgggg

SEQ ID NO: 1699394 - DNA, 15 bp, Homo sapiens
agtctctcctgggga

SEQ ID NO: 1699395 - DNA, 15 bp, Homo sapiens
gtctctcctggggac

SEQ ID NO: 1699396 - DNA, 15 bp, Homo sapiens
tctctcctggggact

SEQ ID NO: 1699397 - DNA, 15 bp, Homo sapiens
ctctcctggggactg

SEQ ID NO: 1699398 - DNA, 15 bp, Homo sapiens
tctcctggggactgt

SEQ ID NO: 1699399 - DNA, 15 bp, Homo sapiens
ctcctggggactgtt

SEQ ID NO: 1699400 - DNA, 15 bp, Homo sapiens
tcctggggactgttg

SEQ ID NO: 1699401 - DNA, 15 bp, Homo sapiens
cctggggactgttgg

SEQ ID NO: 1699402 - DNA, 15 bp, Homo sapiens
ctggggactgttggg

SEQ ID NO: 1699403 - DNA, 15 bp, Homo sapiens
tggggactgttgggt

SEQ ID NO: 1699404 - DNA, 15 bp, Homo sapiens
ggggactgttgggta

SEQ ID NO: 1699405 - DNA, 15 bp, Homo sapiens
gggactgttgggtac

SEQ ID NO: 1699406 - DNA, 15 bp, Homo sapiens
ggactgttgggtacc

SEQ ID NO: 1699407 - DNA, 15 bp, Homo sapiens
gactgttgggtaccc

SEQ ID NO: 1699408 - DNA, 15 bp, Homo sapiens
actgttgggtaccct

SEQ ID NO: 1699409 - DNA, 15 bp, Homo sapiens
ctgttgggtaccctt

SEQ ID NO: 1699410 - DNA, 15 bp, Homo sapiens
tgttgggtacccttt

SEQ ID NO: 1699411 - DNA, 15 bp, Homo sapiens
gttgggtacccttta

SEQ ID NO: 1699412 - DNA, 15 bp, Homo sapiens
ttgggtaccctttaa

SEQ ID NO: 1699413 - DNA, 15 bp, Homo sapiens
tgggtaccctttaag

SEQ ID NO: 1699414 - DNA, 15 bp, Homo sapiens
gggtaccctttaagc

SEQ ID NO: 1699415 - DNA, 15 bp, Homo sapiens
ggtaccctttaagcc

SEQ ID NO: 1699416 - DNA, 15 bp, Homo sapiens
gtaccctttaagcct

SEQ ID NO: 1699417 - DNA, 15 bp, Homo sapiens
taccctttaagcctg

SEQ ID NO: 1699418 - DNA, 15 bp, Homo sapiens
accctttaagcctga

SEQ ID NO: 1699419 - DNA, 15 bp, Homo sapiens
ccctttaagcctgag

SEQ ID NO: 1699420 - DNA, 15 bp, Homo sapiens
cctttaagcctgaga

SEQ ID NO: 1699421 - DNA, 15 bp, Homo sapiens
ctttaagcctgagaa

SEQ ID NO: 1699422 - DNA, 15 bp, Homo sapiens
tttaagcctgagaat

SEQ ID NO: 1699423 - DNA, 15 bp, Homo sapiens
taagcctgagaatat

SEQ ID NO: 1699424 - DNA, 15 bp, Homo sapiens
aagcctgagaatatg

SEQ ID NO: 1699425 - DNA, 15 bp, Homo sapiens
agcctgagaatatga

SEQ ID NO: 1699426 - DNA, 15 bp, Homo sapiens
gcctgagaatatgag

SEQ ID NO: 1699427 - DNA, 15 bp, Homo sapiens
cctgagaatatgagt

SEQ ID NO: 1699428 - DNA, 15 bp, Homo sapiens
ctgagaatatgagtt

SEQ ID NO: 1699429 - DNA, 15 bp, Homo sapiens
tgagaatatgagttt

SEQ ID NO: 1699430 - DNA, 15 bp, Homo sapiens
gagaatatgagtttt

SEQ ID NO: 1699431 - DNA, 15 bp, Homo sapiens
agaatatgagttttc

SEQ ID NO: 1699432 - DNA, 15 bp, Homo sapiens
gaatatgagttttct

SEQ ID NO: 1699433 - DNA, 15 bp, Homo sapiens
aatatgagttttcta

SEQ ID NO: 1699434 - DNA, 15 bp, Homo sapiens
atatgagttttctag

SEQ ID NO: 1699435 - DNA, 15 bp, Homo sapiens
tatgagttttctagg

SEQ ID NO: 1699436 - DNA, 15 bp, Homo sapiens
atgagttttctaggt

SEQ ID NO: 1699437 - DNA, 15 bp, Homo sapiens
tgagttttctaggta

SEQ ID NO: 1699438 - DNA, 15 bp, Homo sapiens
gagttttctaggtat

SEQ ID NO: 1699439 - DNA, 15 bp, Homo sapiens
agttttctaggtata

SEQ ID NO: 1699440 - DNA, 15 bp, Homo sapiens
gttttctaggtatat

SEQ ID NO: 1699441 - DNA, 15 bp, Homo sapiens
ttttctaggtatata

SEQ ID NO: 1699442 - DNA, 15 bp, Homo sapiens
tttctaggtatatat

SEQ ID NO: 1699443 - DNA, 15 bp, Homo sapiens
ttctaggtatatatc

SEQ ID NO: 1699444 - DNA, 15 bp, Homo sapiens
tctaggtatatatct

SEQ ID NO: 1699445 - DNA, 15 bp, Homo sapiens
ctaggtatatatcta

SEQ ID NO: 1699446 - DNA, 15 bp, Homo sapiens
taggtatatatctag

SEQ ID NO: 1699447 - DNA, 15 bp, Homo sapiens
aggtatatatctagc

SEQ ID NO: 1699448 - DNA, 15 bp, Homo sapiens
ggtatatatctagca

SEQ ID NO: 1699449 - DNA, 15 bp, Homo sapiens
gtatatatctagcag

SEQ ID NO: 1699450 - DNA, 15 bp, Homo sapiens
tatatatctagcagt

SEQ ID NO: 1699451 - DNA, 15 bp, Homo sapiens
atatatctagcagtg

SEQ ID NO: 1699452 - DNA, 15 bp, Homo sapiens
tatatctagcagtgt

SEQ ID NO: 1699453 - DNA, 15 bp, Homo sapiens
atatctagcagtgtt

SEQ ID NO: 1699454 - DNA, 15 bp, Homo sapiens
tatctagcagtgttt

SEQ ID NO: 1699455 - DNA, 15 bp, Homo sapiens
atctagcagtgtttc

SEQ ID NO: 1699456 - DNA, 15 bp, Homo sapiens
tctagcagtgtttca

SEQ ID NO: 1699457 - DNA, 15 bp, Homo sapiens
ctagcagtgtttcaa

SEQ ID NO: 1699458 - DNA, 15 bp, Homo sapiens
tagcagtgtttcaag

SEQ ID NO: 1699459 - DNA, 15 bp, Homo sapiens
agcagtgtttcaagt

SEQ ID NO: 1699460 - DNA, 15 bp, Homo sapiens
gcagtgtttcaagtc

SEQ ID NO: 1699461 - DNA, 15 bp, Homo sapiens
cagtgtttcaagtca

SEQ ID NO: 1699462 - DNA, 15 bp, Homo sapiens
agtgtttcaagtcag

SEQ ID NO: 1699463 - DNA, 15 bp, Homo sapiens
gtgtttcaagtcaga

SEQ ID NO: 1699464 - DNA, 15 bp, Homo sapiens
tgtttcaagtcagac

SEQ ID NO: 1699465 - DNA, 15 bp, Homo sapiens
gtttcaagtcagact

SEQ ID NO: 1699466 - DNA, 15 bp, Homo sapiens
tttcaagtcagacta

SEQ ID NO: 1699467 - DNA, 15 bp, Homo sapiens
ttcaagtcagactaa

SEQ ID NO: 1699468 - DNA, 15 bp, Homo sapiens
tcaagtcagactaaa

SEQ ID NO: 1699469 - DNA, 15 bp, Homo sapiens
caagtcagactaaaa

SEQ ID NO: 1699470 - DNA, 15 bp, Homo sapiens
aagtcagactaaaag

SEQ ID NO: 1699471 - DNA, 15 bp, Homo sapiens
agtcagactaaaaga

SEQ ID NO: 1699472 - DNA, 15 bp, Homo sapiens
gtcagactaaaagac

SEQ ID NO: 1699473 - DNA, 15 bp, Homo sapiens
tcagactaaaagaca

SEQ ID NO: 1699474 - DNA, 15 bp, Homo sapiens
cagactaaaagacag

SEQ ID NO: 1699475 - DNA, 15 bp, Homo sapiens
agactaaaagacaga

SEQ ID NO: 1699476 - DNA, 15 bp, Homo sapiens
gactaaaagacagag

SEQ ID NO: 1699477 - DNA, 15 bp, Homo sapiens
actaaaagacagagc

SEQ ID NO: 1699478 - DNA, 15 bp, Homo sapiens
ctaaaagacagagca

SEQ ID NO: 1699479 - DNA, 15 bp, Homo sapiens
taaaagacagagcat

SEQ ID NO: 1699480 - DNA, 15 bp, Homo sapiens
aaaagacagagcatt

SEQ ID NO: 1699481 - DNA, 15 bp, Homo sapiens
aaagacagagcatta

SEQ ID NO: 1699482 - DNA, 15 bp, Homo sapiens
aagacagagcattaa

SEQ ID NO: 1699483 - DNA, 15 bp, Homo sapiens
agacagagcattaag

SEQ ID NO: 1699484 - DNA, 15 bp, Homo sapiens
gacagagcattaaga

SEQ ID NO: 1699485 - DNA, 15 bp, Homo sapiens
acagagcattaagac

SEQ ID NO: 1699486 - DNA, 15 bp, Homo sapiens
cagagcattaagacc

SEQ ID NO: 1699487 - DNA, 15 bp, Homo sapiens
agagcattaagacct

SEQ ID NO: 1699488 - DNA, 15 bp, Homo sapiens
gagcattaagaccta

SEQ ID NO: 1699489 - DNA, 15 bp, Homo sapiens
agcattaagacctaa

SEQ ID NO: 1699490 - DNA, 15 bp, Homo sapiens
gcattaagacctaat

SEQ ID NO: 1699491 - DNA, 15 bp, Homo sapiens
cattaagacctaatg

SEQ ID NO: 1699492 - DNA, 15 bp, Homo sapiens
attaagacctaatga

SEQ ID NO: 1699493 - DNA, 15 bp, Homo sapiens
ttaagacctaatgaa

SEQ ID NO: 1699494 - DNA, 15 bp, Homo sapiens
taagacctaatgaaa

SEQ ID NO: 1699495 - DNA, 15 bp, Homo sapiens
aagacctaatgaaaa

SEQ ID NO: 1699496 - DNA, 15 bp, Homo sapiens
agacctaatgaaaac

SEQ ID NO: 1699497 - DNA, 15 bp, Homo sapiens
gacctaatgaaaact

SEQ ID NO: 1699498 - DNA, 15 bp, Homo sapiens
acctaatgaaaactc

SEQ ID NO: 1699499 - DNA, 15 bp, Homo sapiens
cctaatgaaaactct

SEQ ID NO: 1699500 - DNA, 15 bp, Homo sapiens
ctaatgaaaactcta

SEQ ID NO: 1699501 - DNA, 15 bp, Homo sapiens
taatgaaaactctaa

SEQ ID NO: 1699502 - DNA, 15 bp, Homo sapiens
aatgaaaactctaag

SEQ ID NO: 1699503 - DNA, 15 bp, Homo sapiens
atgaaaactctaagt

SEQ ID NO: 1699504 - DNA, 15 bp, Homo sapiens
tgaaaactctaagtt

SEQ ID NO: 1699505 - DNA, 15 bp, Homo sapiens
gaaaactctaagttt

SEQ ID NO: 1699506 - DNA, 15 bp, Homo sapiens
aaaactctaagtttt

SEQ ID NO: 1699507 - DNA, 15 bp, Homo sapiens
aaactctaagtttta

SEQ ID NO: 1699508 - DNA, 15 bp, Homo sapiens
aactctaagttttac

SEQ ID NO: 1699509 - DNA, 15 bp, Homo sapiens
actctaagttttaca

SEQ ID NO: 1699510 - DNA, 15 bp, Homo sapiens
ctctaagttttacac

SEQ ID NO: 1699511 - DNA, 15 bp, Homo sapiens
tctaagttttacaca

SEQ ID NO: 1699512 - DNA, 15 bp, Homo sapiens
ctaagttttacacaa

SEQ ID NO: 1699513 - DNA, 15 bp, Homo sapiens
taagttttacacaat

SEQ ID NO: 1699514 - DNA, 15 bp, Homo sapiens
aagttttacacaata

SEQ ID NO: 1699515 - DNA, 15 bp, Homo sapiens
agttttacacaatat

SEQ ID NO: 1699516 - DNA, 15 bp, Homo sapiens
gttttacacaatatt

SEQ ID NO: 1699517 - DNA, 15 bp, Homo sapiens
ttttacacaatattt

SEQ ID NO: 1699518 - DNA, 15 bp, Homo sapiens
tttacacaatatttt

SEQ ID NO: 1699519 - DNA, 15 bp, Homo sapiens
ttacacaatattttt

SEQ ID NO: 1699520 - DNA, 15 bp, Homo sapiens
tacacaatattttta

SEQ ID NO: 1699521 - DNA, 15 bp, Homo sapiens
acacaatatttttaa

SEQ ID NO: 1699522 - DNA, 15 bp, Homo sapiens
cacaatatttttaat

SEQ ID NO: 1699523 - DNA, 15 bp, Homo sapiens
acaatatttttaatg

SEQ ID NO: 1699524 - DNA, 15 bp, Homo sapiens
caatatttttaatgc

SEQ ID NO: 1699525 - DNA, 15 bp, Homo sapiens
aatatttttaatgca

SEQ ID NO: 1699526 - DNA, 15 bp, Homo sapiens
atatttttaatgcag

SEQ ID NO: 1699527 - DNA, 15 bp, Homo sapiens
tatttttaatgcaga

SEQ ID NO: 1699528 - DNA, 15 bp, Homo sapiens
atttttaatgcagat

SEQ ID NO: 1699529 - DNA, 15 bp, Homo sapiens
tttttaatgcagatt

SEQ ID NO: 1699530 - DNA, 15 bp, Homo sapiens
ttttaatgcagatta

SEQ ID NO: 1699531 - DNA, 15 bp, Homo sapiens
tttaatgcagattag

SEQ ID NO: 1699532 - DNA, 15 bp, Homo sapiens
ttaatgcagattagt

SEQ ID NO: 1699533 - DNA, 15 bp, Homo sapiens
taatgcagattagtt

SEQ ID NO: 1699534 - DNA, 15 bp, Homo sapiens
aatgcagattagtta

SEQ ID NO: 1699535 - DNA, 15 bp, Homo sapiens
atgcagattagttaa

SEQ ID NO: 1699536 - DNA, 15 bp, Homo sapiens
tgcagattagttaat

SEQ ID NO: 1699537 - DNA, 15 bp, Homo sapiens
gcagattagttaatt

SEQ ID NO: 1699538 - DNA, 15 bp, Homo sapiens
cagattagttaattg

SEQ ID NO: 1699539 - DNA, 15 bp, Homo sapiens
agattagttaattga

SEQ ID NO: 1699540 - DNA, 15 bp, Homo sapiens
gattagttaattgat

SEQ ID NO: 1699541 - DNA, 15 bp, Homo sapiens
attagttaattgatt

SEQ ID NO: 1699542 - DNA, 15 bp, Homo sapiens
ttagttaattgatta

SEQ ID NO: 1699543 - DNA, 15 bp, Homo sapiens
tagttaattgattat

SEQ ID NO: 1699544 - DNA, 15 bp, Homo sapiens
agttaattgattatt

SEQ ID NO: 1699545 - DNA, 15 bp, Homo sapiens
gttaattgattattt

SEQ ID NO: 1699546 - DNA, 15 bp, Homo sapiens
ttaattgattatttt

SEQ ID NO: 1699547 - DNA, 15 bp, Homo sapiens
taattgattattttt

SEQ ID NO: 1699548 - DNA, 15 bp, Homo sapiens
aattgattattttta

SEQ ID NO: 1699549 - DNA, 15 bp, Homo sapiens
attgattatttttaa

SEQ ID NO: 1699550 - DNA, 15 bp, Homo sapiens
ttgattatttttaag

SEQ ID NO: 1699551 - DNA, 15 bp, Homo sapiens
tgattatttttaaga

SEQ ID NO: 1699552 - DNA, 15 bp, Homo sapiens
gattatttttaagaa

SEQ ID NO: 1699553 - DNA, 15 bp, Homo sapiens
attatttttaagaat

SEQ ID NO: 1699554 - DNA, 15 bp, Homo sapiens
ttatttttaagaata

SEQ ID NO: 1699555 - DNA, 15 bp, Homo sapiens
tatttttaagaatac

SEQ ID NO: 1699556 - DNA, 15 bp, Homo sapiens
atttttaagaataca

SEQ ID NO: 1699557 - DNA, 15 bp, Homo sapiens
tttttaagaatacaa

SEQ ID NO: 1699558 - DNA, 15 bp, Homo sapiens
ttttaagaatacaag

SEQ ID NO: 1699559 - DNA, 15 bp, Homo sapiens
tttaagaatacaagg

SEQ ID NO: 1699560 - DNA, 15 bp, Homo sapiens
ttaagaatacaaggt

SEQ ID NO: 1699561 - DNA, 15 bp, Homo sapiens
taagaatacaaggta

SEQ ID NO: 1699562 - DNA, 15 bp, Homo sapiens
aagaatacaaggtaa

SEQ ID NO: 1699563 - DNA, 15 bp, Homo sapiens
agaatacaaggtaat

SEQ ID NO: 1699564 - DNA, 15 bp, Homo sapiens
gaatacaaggtaatg

SEQ ID NO: 1699565 - DNA, 15 bp, Homo sapiens
aatacaaggtaatga

SEQ ID NO: 1699566 - DNA, 15 bp, Homo sapiens
atacaaggtaatgaa

SEQ ID NO: 1699567 - DNA, 15 bp, Homo sapiens
tacaaggtaatgaaa

SEQ ID NO: 1699568 - DNA, 15 bp, Homo sapiens
acaaggtaatgaaaa

SEQ ID NO: 1699569 - DNA, 15 bp, Homo sapiens
caaggtaatgaaaac

SEQ ID NO: 1699570 - DNA, 15 bp, Homo sapiens
aaggtaatgaaaact

SEQ ID NO: 1699571 - DNA, 15 bp, Homo sapiens
aggtaatgaaaactg

SEQ ID NO: 1699572 - DNA, 15 bp, Homo sapiens
ggtaatgaaaactgg

SEQ ID NO: 1699573 - DNA, 15 bp, Homo sapiens
gtaatgaaaactgga

SEQ ID NO: 1699574 - DNA, 15 bp, Homo sapiens
taatgaaaactggac

SEQ ID NO: 1699575 - DNA, 15 bp, Homo sapiens
aatgaaaactggact

SEQ ID NO: 1699576 - DNA, 15 bp, Homo sapiens
atgaaaactggactt

SEQ ID NO: 1699577 - DNA, 15 bp, Homo sapiens
tgaaaactggacttc

SEQ ID NO: 1699578 - DNA, 15 bp, Homo sapiens
gaaaactggacttcg

SEQ ID NO: 1699579 - DNA, 15 bp, Homo sapiens
aaaactggacttcgg

SEQ ID NO: 1699580 - DNA, 15 bp, Homo sapiens
aaactggacttcgga

SEQ ID NO: 1699581 - DNA, 15 bp, Homo sapiens
aactggacttcggag

SEQ ID NO: 1699582 - DNA, 15 bp, Homo sapiens
actggacttcggagg

SEQ ID NO: 1699583 - DNA, 15 bp, Homo sapiens
ctggacttcggaggg

SEQ ID NO: 1699584 - DNA, 15 bp, Homo sapiens
tggacttcggagggt

SEQ ID NO: 1699585 - DNA, 15 bp, Homo sapiens
ggacttcggagggtt

SEQ ID NO: 1699586 - DNA, 15 bp, Homo sapiens
gacttcggagggtta

SEQ ID NO: 1699587 - DNA, 15 bp, Homo sapiens
acttcggagggttaa

SEQ ID NO: 1699588 - DNA, 15 bp, Homo sapiens
cttcggagggttaat

SEQ ID NO: 1699589 - DNA, 15 bp, Homo sapiens
ttcggagggttaatt

SEQ ID NO: 1699590 - DNA, 15 bp, Homo sapiens
tcggagggttaattg

SEQ ID NO: 1699591 - DNA, 15 bp, Homo sapiens
cggagggttaattgt

SEQ ID NO: 1699592 - DNA, 15 bp, Homo sapiens
ggagggttaattgtc

SEQ ID NO: 1699593 - DNA, 15 bp, Homo sapiens
gagggttaattgtct

SEQ ID NO: 1699594 - DNA, 15 bp, Homo sapiens
agggttaattgtctt

SEQ ID NO: 1699595 - DNA, 15 bp, Homo sapiens
gggttaattgtctta

SEQ ID NO: 1699596 - DNA, 15 bp, Homo sapiens
ggttaattgtcttag

SEQ ID NO: 1699597 - DNA, 15 bp, Homo sapiens
gttaattgtcttaga

SEQ ID NO: 1699598 - DNA, 15 bp, Homo sapiens
ttaattgtcttagac

SEQ ID NO: 1699599 - DNA, 15 bp, Homo sapiens
taattgtcttagaca

SEQ ID NO: 1699600 - DNA, 15 bp, Homo sapiens
aattgtcttagacaa

SEQ ID NO: 1699601 - DNA, 15 bp, Homo sapiens
attgtcttagacaaa

SEQ ID NO: 1699602 - DNA, 15 bp, Homo sapiens
ttgtcttagacaaac

SEQ ID NO: 1699603 - DNA, 15 bp, Homo sapiens
tgtcttagacaaact

SEQ ID NO: 1699604 - DNA, 15 bp, Homo sapiens
gtcttagacaaacta

SEQ ID NO: 1699605 - DNA, 15 bp, Homo sapiens
tcttagacaaactat

SEQ ID NO: 1699606 - DNA, 15 bp, Homo sapiens
cttagacaaactatt

SEQ ID NO: 1699607 - DNA, 15 bp, Homo sapiens
ttagacaaactattc

SEQ ID NO: 1699608 - DNA, 15 bp, Homo sapiens
tagacaaactattct

SEQ ID NO: 1699609 - DNA, 15 bp, Homo sapiens
agacaaactattcta

SEQ ID NO: 1699610 - DNA, 15 bp, Homo sapiens
gacaaactattctaa

SEQ ID NO: 1699611 - DNA, 15 bp, Homo sapiens
acaaactattctaac

SEQ ID NO: 1699612 - DNA, 15 bp, Homo sapiens
caaactattctaaca

SEQ ID NO: 1699613 - DNA, 15 bp, Homo sapiens
aaactattctaacaa

SEQ ID NO: 1699614 - DNA, 15 bp, Homo sapiens
aactattctaacaaa

SEQ ID NO: 1699615 - DNA, 15 bp, Homo sapiens
actattctaacaaac

SEQ ID NO: 1699616 - DNA, 15 bp, Homo sapiens
ctattctaacaaaca

SEQ ID NO: 1699617 - DNA, 15 bp, Homo sapiens
tattctaacaaacac

SEQ ID NO: 1699618 - DNA, 15 bp, Homo sapiens
attctaacaaacaca

SEQ ID NO: 1699619 - DNA, 15 bp, Homo sapiens
ttctaacaaacacag

SEQ ID NO: 1699620 - DNA, 15 bp, Homo sapiens
tctaacaaacacaga

SEQ ID NO: 1699621 - DNA, 15 bp, Homo sapiens
ctaacaaacacagaa

SEQ ID NO: 1699622 - DNA, 15 bp, Homo sapiens
taacaaacacagaat

SEQ ID NO: 1699623 - DNA, 15 bp, Homo sapiens
aacaaacacagaatg

SEQ ID NO: 1699624 - DNA, 15 bp, Homo sapiens
acaaacacagaatgt

SEQ ID NO: 1699625 - DNA, 15 bp, Homo sapiens
caaacacagaatgtg

SEQ ID NO: 1699626 - DNA, 15 bp, Homo sapiens
aaacacagaatgtgt

SEQ ID NO: 1699627 - DNA, 15 bp, Homo sapiens
aacacagaatgtgtg

SEQ ID NO: 1699628 - DNA, 15 bp, Homo sapiens
acacagaatgtgtga

SEQ ID NO: 1699629 - DNA, 15 bp, Homo sapiens
cacagaatgtgtgaa

SEQ ID NO: 1699630 - DNA, 15 bp, Homo sapiens
acagaatgtgtgaat

SEQ ID NO: 1699631 - DNA, 15 bp, Homo sapiens
cagaatgtgtgaatt

SEQ ID NO: 1699632 - DNA, 15 bp, Homo sapiens
agaatgtgtgaattc

SEQ ID NO: 1699633 - DNA, 15 bp, Homo sapiens
gaatgtgtgaattct

SEQ ID NO: 1699634 - DNA, 15 bp, Homo sapiens
aatgtgtgaattcta

SEQ ID NO: 1699635 - DNA, 15 bp, Homo sapiens
atgtgtgaattctag

SEQ ID NO: 1699636 - DNA, 15 bp, Homo sapiens
tgtgtgaattctaga

SEQ ID NO: 1699637 - DNA, 15 bp, Homo sapiens
gtgtgaattctagat

SEQ ID NO: 1699638 - DNA, 15 bp, Homo sapiens
tgtgaattctagata

SEQ ID NO: 1699639 - DNA, 15 bp, Homo sapiens
gtgaattctagatat

SEQ ID NO: 1699640 - DNA, 15 bp, Homo sapiens
tgaattctagatatt

SEQ ID NO: 1699641 - DNA, 15 bp, Homo sapiens
gaattctagatattt

SEQ ID NO: 1699642 - DNA, 15 bp, Homo sapiens
aattctagatattta

SEQ ID NO: 1699643 - DNA, 15 bp, Homo sapiens
attctagatatttag

SEQ ID NO: 1699644 - DNA, 15 bp, Homo sapiens
ttctagatatttagc

SEQ ID NO: 1699645 - DNA, 15 bp, Homo sapiens
tctagatatttagca

SEQ ID NO: 1699646 - DNA, 15 bp, Homo sapiens
ctagatatttagcag

SEQ ID NO: 1699647 - DNA, 15 bp, Homo sapiens
tagatatttagcaga

SEQ ID NO: 1699648 - DNA, 15 bp, Homo sapiens
agatatttagcagat

SEQ ID NO: 1699649 - DNA, 15 bp, Homo sapiens
gatatttagcagatt

SEQ ID NO: 1699650 - DNA, 15 bp, Homo sapiens
atatttagcagatta

SEQ ID NO: 1699651 - DNA, 15 bp, Homo sapiens
tatttagcagattat

SEQ ID NO: 1699652 - DNA, 15 bp, Homo sapiens
atttagcagattatt

SEQ ID NO: 1699653 - DNA, 15 bp, Homo sapiens
tttagcagattattt

SEQ ID NO: 1699654 - DNA, 15 bp, Homo sapiens
ttagcagattatttg

SEQ ID NO: 1699655 - DNA, 15 bp, Homo sapiens
tagcagattatttgc

SEQ ID NO: 1699656 - DNA, 15 bp, Homo sapiens
agcagattatttgct

SEQ ID NO: 1699657 - DNA, 15 bp, Homo sapiens
gcagattatttgctc

SEQ ID NO: 1699658 - DNA, 15 bp, Homo sapiens
cagattatttgctca

SEQ ID NO: 1699659 - DNA, 15 bp, Homo sapiens
agattatttgctcat

SEQ ID NO: 1699660 - DNA, 15 bp, Homo sapiens
gattatttgctcata

SEQ ID NO: 1699661 - DNA, 15 bp, Homo sapiens
attatttgctcatat

SEQ ID NO: 1699662 - DNA, 15 bp, Homo sapiens
ttatttgctcatatg

SEQ ID NO: 1699663 - DNA, 15 bp, Homo sapiens
tatttgctcatatgt

SEQ ID NO: 1699664 - DNA, 15 bp, Homo sapiens
atttgctcatatgta

SEQ ID NO: 1699665 - DNA, 15 bp, Homo sapiens
tttgctcatatgtag

SEQ ID NO: 1699666 - DNA, 15 bp, Homo sapiens
ttgctcatatgtaga

SEQ ID NO: 1699667 - DNA, 15 bp, Homo sapiens
tgctcatatgtagaa

SEQ ID NO: 1699668 - DNA, 15 bp, Homo sapiens
gctcatatgtagaaa

SEQ ID NO: 1699669 - DNA, 15 bp, Homo sapiens
ctcatatgtagaaat

SEQ ID NO: 1699670 - DNA, 15 bp, Homo sapiens
tcatatgtagaaatc

SEQ ID NO: 1699671 - DNA, 15 bp, Homo sapiens
catatgtagaaatcc

SEQ ID NO: 1699672 - DNA, 15 bp, Homo sapiens
atatgtagaaatcct

SEQ ID NO: 1699673 - DNA, 15 bp, Homo sapiens
tatgtagaaatcctt

SEQ ID NO: 1699674 - DNA, 15 bp, Homo sapiens
atgtagaaatccttt

SEQ ID NO: 1699675 - DNA, 15 bp, Homo sapiens
tgtagaaatcctttt

SEQ ID NO: 1699676 - DNA, 15 bp, Homo sapiens
gtagaaatcctttta

SEQ ID NO: 1699677 - DNA, 15 bp, Homo sapiens
tagaaatccttttat

SEQ ID NO: 1699678 - DNA, 15 bp, Homo sapiens
agaaatccttttata

SEQ ID NO: 1699679 - DNA, 15 bp, Homo sapiens
gaaatccttttataa

SEQ ID NO: 1699680 - DNA, 15 bp, Homo sapiens
aaatccttttataaa

SEQ ID NO: 1699681 - DNA, 15 bp, Homo sapiens
aatccttttataaaa

SEQ ID NO: 1699682 - DNA, 15 bp, Homo sapiens
atccttttataaaag

SEQ ID NO: 1699683 - DNA, 15 bp, Homo sapiens
tccttttataaaagt

SEQ ID NO: 1699684 - DNA, 15 bp, Homo sapiens
ccttttataaaagtt

SEQ ID NO: 1699685 - DNA, 15 bp, Homo sapiens
cttttataaaagttg

SEQ ID NO: 1699686 - DNA, 15 bp, Homo sapiens
ttttataaaagttgt

SEQ ID NO: 1699687 - DNA, 15 bp, Homo sapiens
tttataaaagttgtt

SEQ ID NO: 1699688 - DNA, 15 bp, Homo sapiens
ttataaaagttgtta

SEQ ID NO: 1699689 - DNA, 15 bp, Homo sapiens
tataaaagttgttaa

SEQ ID NO: 1699690 - DNA, 15 bp, Homo sapiens
ataaaagttgttaag

SEQ ID NO: 1699691 - DNA, 15 bp, Homo sapiens
taaaagttgttaaga

SEQ ID NO: 1699692 - DNA, 15 bp, Homo sapiens
aaaagttgttaagaa

SEQ ID NO: 1699693 - DNA, 15 bp, Homo sapiens
aaagttgttaagaat

SEQ ID NO: 1699694 - DNA, 15 bp, Homo sapiens
aagttgttaagaata

SEQ ID NO: 1699695 - DNA, 15 bp, Homo sapiens
agttgttaagaatac

SEQ ID NO: 1699696 - DNA, 15 bp, Homo sapiens
gttgttaagaatacc

SEQ ID NO: 1699697 - DNA, 15 bp, Homo sapiens
ttgttaagaatacct

SEQ ID NO: 1699698 - DNA, 15 bp, Homo sapiens
tgttaagaatacctg

SEQ ID NO: 1699699 - DNA, 15 bp, Homo sapiens
gttaagaatacctga

SEQ ID NO: 1699700 - DNA, 15 bp, Homo sapiens
ttaagaatacctgaa

SEQ ID NO: 1699701 - DNA, 15 bp, Homo sapiens
taagaatacctgaaa

SEQ ID NO: 1699702 - DNA, 15 bp, Homo sapiens
aagaatacctgaaag

SEQ ID NO: 1699703 - DNA, 15 bp, Homo sapiens
agaatacctgaaagc

SEQ ID NO: 1699704 - DNA, 15 bp, Homo sapiens
gaatacctgaaagct

SEQ ID NO: 1699705 - DNA, 15 bp, Homo sapiens
aatacctgaaagctt

SEQ ID NO: 1699706 - DNA, 15 bp, Homo sapiens
atacctgaaagcttt

SEQ ID NO: 1699707 - DNA, 15 bp, Homo sapiens
tacctgaaagctttt

SEQ ID NO: 1699708 - DNA, 15 bp, Homo sapiens
acctgaaagcttttt

SEQ ID NO: 1699709 - DNA, 15 bp, Homo sapiens
cctgaaagctttttt

SEQ ID NO: 1699710 - DNA, 15 bp, Homo sapiens
ctgaaagcttttttc

SEQ ID NO: 1699711 - DNA, 15 bp, Homo sapiens
tgaaagcttttttct

SEQ ID NO: 1699712 - DNA, 15 bp, Homo sapiens
gaaagcttttttctc

SEQ ID NO: 1699713 - DNA, 15 bp, Homo sapiens
aaagcttttttctca

SEQ ID NO: 1699714 - DNA, 15 bp, Homo sapiens
aagcttttttctcaa

SEQ ID NO: 1699715 - DNA, 15 bp, Homo sapiens
agcttttttctcaaa

SEQ ID NO: 1699716 - DNA, 15 bp, Homo sapiens
gcttttttctcaaat

SEQ ID NO: 1699717 - DNA, 15 bp, Homo sapiens
cttttttctcaaatt

SEQ ID NO: 1699718 - DNA, 15 bp, Homo sapiens
ttttttctcaaattt

SEQ ID NO: 1699719 - DNA, 15 bp, Homo sapiens
tttttctcaaatttt

SEQ ID NO: 1699720 - DNA, 15 bp, Homo sapiens
ttttctcaaatttta

SEQ ID NO: 1699721 - DNA, 15 bp, Homo sapiens
tttctcaaattttaa

SEQ ID NO: 1699722 - DNA, 15 bp, Homo sapiens
ttctcaaattttaaa

SEQ ID NO: 1699723 - DNA, 15 bp, Homo sapiens
tctcaaattttaaaa

SEQ ID NO: 1699724 - DNA, 15 bp, Homo sapiens
ctcaaattttaaaat

SEQ ID NO: 1699725 - DNA, 15 bp, Homo sapiens
tcaaattttaaaatt

SEQ ID NO: 1699726 - DNA, 15 bp, Homo sapiens
caaattttaaaattt

SEQ ID NO: 1699727 - DNA, 15 bp, Homo sapiens
aaattttaaaatttc

SEQ ID NO: 1699728 - DNA, 15 bp, Homo sapiens
aattttaaaatttct

SEQ ID NO: 1699729 - DNA, 15 bp, Homo sapiens
attttaaaatttctt

SEQ ID NO: 1699730 - DNA, 15 bp, Homo sapiens
ttttaaaatttcttt

SEQ ID NO: 1699731 - DNA, 15 bp, Homo sapiens
ttaaaatttctttct

SEQ ID NO: 1699732 - DNA, 15 bp, Homo sapiens
taaaatttctttctt

SEQ ID NO: 1699733 - DNA, 15 bp, Homo sapiens
aaaatttctttctta

SEQ ID NO: 1699734 - DNA, 15 bp, Homo sapiens
aaatttctttcttaa

SEQ ID NO: 1699735 - DNA, 15 bp, Homo sapiens
aatttctttcttaaa

SEQ ID NO: 1699736 - DNA, 15 bp, Homo sapiens
atttctttcttaaat

SEQ ID NO: 1699737 - DNA, 15 bp, Homo sapiens
tttctttcttaaatt

SEQ ID NO: 1699738 - DNA, 15 bp, Homo sapiens
ttctttcttaaatta

SEQ ID NO: 1699739 - DNA, 15 bp, Homo sapiens
tctttcttaaattac

SEQ ID NO: 1699740 - DNA, 15 bp, Homo sapiens
ctttcttaaattaca

SEQ ID NO: 1699741 - DNA, 15 bp, Homo sapiens
tttcttaaattacaa

SEQ ID NO: 1699742 - DNA, 15 bp, Homo sapiens
ttcttaaattacaat

SEQ ID NO: 1699743 - DNA, 15 bp, Homo sapiens
tcttaaattacaata

SEQ ID NO: 1699744 - DNA, 15 bp, Homo sapiens
cttaaattacaataa

SEQ ID NO: 1699745 - DNA, 15 bp, Homo sapiens
ttaaattacaataat

SEQ ID NO: 1699746 - DNA, 15 bp, Homo sapiens
taaattacaataatt

SEQ ID NO: 1699747 - DNA, 15 bp, Homo sapiens
aaattacaataattt

SEQ ID NO: 1699748 - DNA, 15 bp, Homo sapiens
aattacaataatttt

SEQ ID NO: 1699749 - DNA, 15 bp, Homo sapiens
attacaataattttg

SEQ ID NO: 1699750 - DNA, 15 bp, Homo sapiens
ttacaataattttgg

SEQ ID NO: 1699751 - DNA, 15 bp, Homo sapiens
tacaataattttggc

SEQ ID NO: 1699752 - DNA, 15 bp, Homo sapiens
acaataattttggca

SEQ ID NO: 1699753 - DNA, 15 bp, Homo sapiens
caataattttggcaa

SEQ ID NO: 1699754 - DNA, 15 bp, Homo sapiens
aataattttggcaaa

SEQ ID NO: 1699755 - DNA, 15 bp, Homo sapiens
ataattttggcaaaa

SEQ ID NO: 1699756 - DNA, 15 bp, Homo sapiens
taattttggcaaaaa

SEQ ID NO: 1699757 - DNA, 15 bp, Homo sapiens
aattttggcaaaaat

SEQ ID NO: 1699758 - DNA, 15 bp, Homo sapiens
attttggcaaaaata

SEQ ID NO: 1699759 - DNA, 15 bp, Homo sapiens
ttttggcaaaaatac

SEQ ID NO: 1699760 - DNA, 15 bp, Homo sapiens
tttggcaaaaatacc

SEQ ID NO: 1699761 - DNA, 15 bp, Homo sapiens
ttggcaaaaatacct

SEQ ID NO: 1699762 - DNA, 15 bp, Homo sapiens
tggcaaaaatacctt

SEQ ID NO: 1699763 - DNA, 15 bp, Homo sapiens
ggcaaaaataccttg

SEQ ID NO: 1699764 - DNA, 15 bp, Homo sapiens
gcaaaaataccttga

SEQ ID NO: 1699765 - DNA, 15 bp, Homo sapiens
caaaaataccttgat

SEQ ID NO: 1699766 - DNA, 15 bp, Homo sapiens
aaaaataccttgatc

SEQ ID NO: 1699767 - DNA, 15 bp, Homo sapiens
aaaataccttgatca

SEQ ID NO: 1699768 - DNA, 15 bp, Homo sapiens
aaataccttgatcaa

SEQ ID NO: 1699769 - DNA, 15 bp, Homo sapiens
aataccttgatcaac

SEQ ID NO: 1699770 - DNA, 15 bp, Homo sapiens
ataccttgatcaaca

SEQ ID NO: 1699771 - DNA, 15 bp, Homo sapiens
taccttgatcaacaa

SEQ ID NO: 1699772 - DNA, 15 bp, Homo sapiens
accttgatcaacaaa

SEQ ID NO: 1699773 - DNA, 15 bp, Homo sapiens
ccttgatcaacaaaa

SEQ ID NO: 1699774 - DNA, 15 bp, Homo sapiens
cttgatcaacaaaag

SEQ ID NO: 1699775 - DNA, 15 bp, Homo sapiens
ttgatcaacaaaagt

SEQ ID NO: 1699776 - DNA, 15 bp, Homo sapiens
tgatcaacaaaagtg

SEQ ID NO: 1699777 - DNA, 15 bp, Homo sapiens
gatcaacaaaagtgt

SEQ ID NO: 1699778 - DNA, 15 bp, Homo sapiens
atcaacaaaagtgtt

SEQ ID NO: 1699779 - DNA, 15 bp, Homo sapiens
tcaacaaaagtgttt

SEQ ID NO: 1699780 - DNA, 15 bp, Homo sapiens
caacaaaagtgtttg

SEQ ID NO: 1699781 - DNA, 15 bp, Homo sapiens
aacaaaagtgtttga

SEQ ID NO: 1699782 - DNA, 15 bp, Homo sapiens
acaaaagtgtttgaa

SEQ ID NO: 1699783 - DNA, 15 bp, Homo sapiens
caaaagtgtttgaat

SEQ ID NO: 1699784 - DNA, 15 bp, Homo sapiens
aaaagtgtttgaata

SEQ ID NO: 1699785 - DNA, 15 bp, Homo sapiens
aaagtgtttgaatag

SEQ ID NO: 1699786 - DNA, 15 bp, Homo sapiens
aagtgtttgaatagg

SEQ ID NO: 1699787 - DNA, 15 bp, Homo sapiens
agtgtttgaataggc

SEQ ID NO: 1699788 - DNA, 15 bp, Homo sapiens
gtgtttgaataggct

SEQ ID NO: 1699789 - DNA, 15 bp, Homo sapiens
tgtttgaataggcta

SEQ ID NO: 1699790 - DNA, 15 bp, Homo sapiens
gtttgaataggctag

SEQ ID NO: 1699791 - DNA, 15 bp, Homo sapiens
tttgaataggctagc

SEQ ID NO: 1699792 - DNA, 15 bp, Homo sapiens
ttgaataggctagcc

SEQ ID NO: 1699793 - DNA, 15 bp, Homo sapiens
tgaataggctagccc

SEQ ID NO: 1699794 - DNA, 15 bp, Homo sapiens
gaataggctagccct

SEQ ID NO: 1699795 - DNA, 15 bp, Homo sapiens
aataggctagccctt

SEQ ID NO: 1699796 - DNA, 15 bp, Homo sapiens
ataggctagccctta

SEQ ID NO: 1699797 - DNA, 15 bp, Homo sapiens
taggctagcccttat

SEQ ID NO: 1699798 - DNA, 15 bp, Homo sapiens
aggctagcccttatt

SEQ ID NO: 1699799 - DNA, 15 bp, Homo sapiens
ggctagcccttatta

SEQ ID NO: 1699800 - DNA, 15 bp, Homo sapiens
gctagcccttattac

SEQ ID NO: 1699801 - DNA, 15 bp, Homo sapiens
ctagcccttattaca

SEQ ID NO: 1699802 - DNA, 15 bp, Homo sapiens
tagcccttattacaa

SEQ ID NO: 1699803 - DNA, 15 bp, Homo sapiens
agcccttattacaag

SEQ ID NO: 1699804 - DNA, 15 bp, Homo sapiens
gcccttattacaagt

SEQ ID NO: 1699805 - DNA, 15 bp, Homo sapiens
cccttattacaagtt

SEQ ID NO: 1699806 - DNA, 15 bp, Homo sapiens
ccttattacaagtta

SEQ ID NO: 1699807 - DNA, 15 bp, Homo sapiens
cttattacaagttat

SEQ ID NO: 1699808 - DNA, 15 bp, Homo sapiens
ttattacaagttatc

SEQ ID NO: 1699809 - DNA, 15 bp, Homo sapiens
tattacaagttatca

SEQ ID NO: 1699810 - DNA, 15 bp, Homo sapiens
attacaagttatcaa

SEQ ID NO: 1699811 - DNA, 15 bp, Homo sapiens
ttacaagttatcaaa

SEQ ID NO: 1699812 - DNA, 15 bp, Homo sapiens
tacaagttatcaaaa

SEQ ID NO: 1699813 - DNA, 15 bp, Homo sapiens
acaagttatcaaaat

SEQ ID NO: 1699814 - DNA, 15 bp, Homo sapiens
caagttatcaaaata

SEQ ID NO: 1699815 - DNA, 15 bp, Homo sapiens
aagttatcaaaatat

SEQ ID NO: 1699816 - DNA, 15 bp, Homo sapiens
agttatcaaaatatt

SEQ ID NO: 1699817 - DNA, 15 bp, Homo sapiens
gttatcaaaatattt

SEQ ID NO: 1699818 - DNA, 15 bp, Homo sapiens
ttatcaaaatatttg

SEQ ID NO: 1699819 - DNA, 15 bp, Homo sapiens
tatcaaaatatttga

SEQ ID NO: 1699820 - DNA, 15 bp, Homo sapiens
atcaaaatatttgaa

SEQ ID NO: 1699821 - DNA, 15 bp, Homo sapiens
tcaaaatatttgaat

SEQ ID NO: 1699822 - DNA, 15 bp, Homo sapiens
caaaatatttgaatt

SEQ ID NO: 1699823 - DNA, 15 bp, Homo sapiens
aaaatatttgaatta

SEQ ID NO: 1699824 - DNA, 15 bp, Homo sapiens
tatttgaattaatgg

SEQ ID NO: 1699825 - DNA, 15 bp, Homo sapiens
atttgaattaatgga

SEQ ID NO: 1699826 - DNA, 15 bp, Homo sapiens
tttgaattaatggag

SEQ ID NO: 1699827 - DNA, 15 bp, Homo sapiens
ttgaattaatggagg

SEQ ID NO: 1699828 - DNA, 15 bp, Homo sapiens
tgaattaatggaggc

SEQ ID NO: 1699829 - DNA, 15 bp, Homo sapiens
gaattaatggaggcc

SEQ ID NO: 1699830 - DNA, 15 bp, Homo sapiens
aattaatggaggcca

SEQ ID NO: 1699831 - DNA, 15 bp, Homo sapiens
attaatggaggccaa

SEQ ID NO: 1699832 - DNA, 15 bp, Homo sapiens
ttaatggaggccaat

SEQ ID NO: 1699833 - DNA, 15 bp, Homo sapiens
taatggaggccaatt

SEQ ID NO: 1699834 - DNA, 15 bp, Homo sapiens
aatggaggccaatta

SEQ ID NO: 1699835 - DNA, 15 bp, Homo sapiens
atggaggccaattag

SEQ ID NO: 1699836 - DNA, 15 bp, Homo sapiens
tggaggccaattagg

SEQ ID NO: 1699837 - DNA, 15 bp, Homo sapiens
ggaggccaattaggt

SEQ ID NO: 1699838 - DNA, 15 bp, Homo sapiens
gaggccaattaggtt

SEQ ID NO: 1699839 - DNA, 15 bp, Homo sapiens
aggccaattaggttt

SEQ ID NO: 1699840 - DNA, 15 bp, Homo sapiens
ggccaattaggtttc

SEQ ID NO: 1699841 - DNA, 15 bp, Homo sapiens
gccaattaggtttca

SEQ ID NO: 1699842 - DNA, 15 bp, Homo sapiens
ccaattaggtttcac

SEQ ID NO: 1699843 - DNA, 15 bp, Homo sapiens
caattaggtttcaca

SEQ ID NO: 1699844 - DNA, 15 bp, Homo sapiens
aattaggtttcacag

SEQ ID NO: 1699845 - DNA, 15 bp, Homo sapiens
attaggtttcacaga

SEQ ID NO: 1699846 - DNA, 15 bp, Homo sapiens
ttaggtttcacagac

SEQ ID NO: 1699847 - DNA, 15 bp, Homo sapiens
taggtttcacagaca

SEQ ID NO: 1699848 - DNA, 15 bp, Homo sapiens
aggtttcacagacat

SEQ ID NO: 1699849 - DNA, 15 bp, Homo sapiens
ggtttcacagacatt

SEQ ID NO: 1699850 - DNA, 15 bp, Homo sapiens
gtttcacagacattt

SEQ ID NO: 1699851 - DNA, 15 bp, Homo sapiens
tttcacagacatttg

SEQ ID NO: 1699852 - DNA, 15 bp, Homo sapiens
ttcacagacatttgt

SEQ ID NO: 1699853 - DNA, 15 bp, Homo sapiens
tcacagacatttgtt

SEQ ID NO: 1699854 - DNA, 15 bp, Homo sapiens
cacagacatttgttg

SEQ ID NO: 1699855 - DNA, 15 bp, Homo sapiens
acagacatttgttga

SEQ ID NO: 1699856 - DNA, 15 bp, Homo sapiens
cagacatttgttgat

SEQ ID NO: 1699857 - DNA, 15 bp, Homo sapiens
agacatttgttgatt

SEQ ID NO: 1699858 - DNA, 15 bp, Homo sapiens
gacatttgttgattt

SEQ ID NO: 1699859 - DNA, 15 bp, Homo sapiens
acatttgttgatttc

SEQ ID NO: 1699860 - DNA, 15 bp, Homo sapiens
catttgttgatttca

SEQ ID NO: 1699861 - DNA, 15 bp, Homo sapiens
atttgttgatttcat

SEQ ID NO: 1699862 - DNA, 15 bp, Homo sapiens
tttgttgatttcata

SEQ ID NO: 1699863 - DNA, 15 bp, Homo sapiens
ttgttgatttcatac

SEQ ID NO: 1699864 - DNA, 15 bp, Homo sapiens
tgttgatttcataca

SEQ ID NO: 1699865 - DNA, 15 bp, Homo sapiens
gttgatttcatacaa

SEQ ID NO: 1699866 - DNA, 15 bp, Homo sapiens
ttgatttcatacaat

SEQ ID NO: 1699867 - DNA, 15 bp, Homo sapiens
tgatttcatacaatt

SEQ ID NO: 1699868 - DNA, 15 bp, Homo sapiens
gatttcatacaattt

SEQ ID NO: 1699869 - DNA, 15 bp, Homo sapiens
atttcatacaatttt

SEQ ID NO: 1699870 - DNA, 15 bp, Homo sapiens
tttcatacaattttt

SEQ ID NO: 1699871 - DNA, 15 bp, Homo sapiens
ttcatacaattttta

SEQ ID NO: 1699872 - DNA, 15 bp, Homo sapiens
tcatacaatttttat

SEQ ID NO: 1699873 - DNA, 15 bp, Homo sapiens
catacaatttttata

SEQ ID NO: 1699874 - DNA, 15 bp, Homo sapiens
atacaatttttataa

SEQ ID NO: 1699875 - DNA, 15 bp, Homo sapiens
tacaatttttataat

SEQ ID NO: 1699876 - DNA, 15 bp, Homo sapiens
acaatttttataatg

SEQ ID NO: 1699877 - DNA, 15 bp, Homo sapiens
caatttttataatgg

SEQ ID NO: 1699878 - DNA, 15 bp, Homo sapiens
aatttttataatggt

SEQ ID NO: 1699879 - DNA, 15 bp, Homo sapiens
atttttataatggtt

SEQ ID NO: 1699880 - DNA, 15 bp, Homo sapiens
tttttataatggttt

SEQ ID NO: 1699881 - DNA, 15 bp, Homo sapiens
ttttataatggtttt

SEQ ID NO: 1699882 - DNA, 15 bp, Homo sapiens
tttataatggtttta

SEQ ID NO: 1699883 - DNA, 15 bp, Homo sapiens
ttataatggttttaa

SEQ ID NO: 1699884 - DNA, 15 bp, Homo sapiens
tataatggttttaag

SEQ ID NO: 1699885 - DNA, 15 bp, Homo sapiens
ataatggttttaaga

SEQ ID NO: 1699886 - DNA, 15 bp, Homo sapiens
taatggttttaagat

SEQ ID NO: 1699887 - DNA, 15 bp, Homo sapiens
aatggttttaagata

SEQ ID NO: 1699888 - DNA, 15 bp, Homo sapiens
atggttttaagatac

SEQ ID NO: 1699889 - DNA, 15 bp, Homo sapiens
tggttttaagataca

SEQ ID NO: 1699890 - DNA, 15 bp, Homo sapiens
ggttttaagatacat

SEQ ID NO: 1699891 - DNA, 15 bp, Homo sapiens
gttttaagatacatt

SEQ ID NO: 1699892 - DNA, 15 bp, Homo sapiens
ttttaagatacattt

SEQ ID NO: 1699893 - DNA, 15 bp, Homo sapiens
tttaagatacattta

SEQ ID NO: 1699894 - DNA, 15 bp, Homo sapiens
ttaagatacatttaa

SEQ ID NO: 1699895 - DNA, 15 bp, Homo sapiens
taagatacatttaaa

SEQ ID NO: 1699896 - DNA, 15 bp, Homo sapiens
agatacatttaaaat

SEQ ID NO: 1699897 - DNA, 15 bp, Homo sapiens
gatacatttaaaata

SEQ ID NO: 1699898 - DNA, 15 bp, Homo sapiens
atacatttaaaataa

SEQ ID NO: 1699899 - DNA, 15 bp, Homo sapiens
tacatttaaaataat

SEQ ID NO: 1699900 - DNA, 15 bp, Homo sapiens
acatttaaaataata

SEQ ID NO: 1699901 - DNA, 15 bp, Homo sapiens
catttaaaataatac

SEQ ID NO: 1699902 - DNA, 15 bp, Homo sapiens
atttaaaataatact

SEQ ID NO: 1699903 - DNA, 15 bp, Homo sapiens
ttaaaataatactat

SEQ ID NO: 1699904 - DNA, 15 bp, Homo sapiens
taaaataatactatc

SEQ ID NO: 1699905 - DNA, 15 bp, Homo sapiens
aaaataatactatca

SEQ ID NO: 1699906 - DNA, 15 bp, Homo sapiens
aaataatactatcaa

SEQ ID NO: 1699907 - DNA, 15 bp, Homo sapiens
aataatactatcaat

SEQ ID NO: 1699908 - DNA, 15 bp, Homo sapiens
ataatactatcaatt

SEQ ID NO: 1699909 - DNA, 15 bp, Homo sapiens
taatactatcaattt

SEQ ID NO: 1699910 - DNA, 15 bp, Homo sapiens
aatactatcaatttt

SEQ ID NO: 1699911 - DNA, 15 bp, Homo sapiens
atactatcaatttta

SEQ ID NO: 1699912 - DNA, 15 bp, Homo sapiens
tactatcaattttaa

SEQ ID NO: 1699913 - DNA, 15 bp, Homo sapiens
actatcaattttaac

SEQ ID NO: 1699914 - DNA, 15 bp, Homo sapiens
ctatcaattttaaca

SEQ ID NO: 1699915 - DNA, 15 bp, Homo sapiens
tatcaattttaacat

SEQ ID NO: 1699916 - DNA, 15 bp, Homo sapiens
atcaattttaacata

SEQ ID NO: 1699917 - DNA, 15 bp, Homo sapiens
tcaattttaacataa

SEQ ID NO: 1699918 - DNA, 15 bp, Homo sapiens
caattttaacataat

SEQ ID NO: 1699919 - DNA, 15 bp, Homo sapiens
aattttaacataatt

SEQ ID NO: 1699920 - DNA, 15 bp, Homo sapiens
attttaacataattc

SEQ ID NO: 1699921 - DNA, 15 bp, Homo sapiens
ttaacataattcaag

SEQ ID NO: 1699922 - DNA, 15 bp, Homo sapiens
taacataattcaagg

SEQ ID NO: 1699923 - DNA, 15 bp, Homo sapiens
aacataattcaaggt

SEQ ID NO: 1699924 - DNA, 15 bp, Homo sapiens
acataattcaaggta

SEQ ID NO: 1699925 - DNA, 15 bp, Homo sapiens
cataattcaaggtag

SEQ ID NO: 1699926 - DNA, 15 bp, Homo sapiens
ataattcaaggtagc

SEQ ID NO: 1699927 - DNA, 15 bp, Homo sapiens
taattcaaggtagca

SEQ ID NO: 1699928 - DNA, 15 bp, Homo sapiens
aattcaaggtagcat

SEQ ID NO: 1699929 - DNA, 15 bp, Homo sapiens
attcaaggtagcata

SEQ ID NO: 1699930 - DNA, 15 bp, Homo sapiens
ttcaaggtagcataa

SEQ ID NO: 1699931 - DNA, 15 bp, Homo sapiens
tcaaggtagcataaa

SEQ ID NO: 1699932 - DNA, 15 bp, Homo sapiens
caaggtagcataaaa

SEQ ID NO: 1699933 - DNA, 15 bp, Homo sapiens
aaggtagcataaaat

SEQ ID NO: 1699934 - DNA, 15 bp, Homo sapiens
aggtagcataaaatt

SEQ ID NO: 1699935 - DNA, 15 bp, Homo sapiens
ggtagcataaaatta

SEQ ID NO: 1699936 - DNA, 15 bp, Homo sapiens
gtagcataaaattaa

SEQ ID NO: 1699937 - DNA, 15 bp, Homo sapiens
tagcataaaattaaa

SEQ ID NO: 1699938 - DNA, 15 bp, Homo sapiens
agcataaaattaaag

SEQ ID NO: 1699939 - DNA, 15 bp, Homo sapiens
gcataaaattaaaga

SEQ ID NO: 1699940 - DNA, 15 bp, Homo sapiens
cataaaattaaagag

SEQ ID NO: 1699941 - DNA, 15 bp, Homo sapiens
ataaaattaaagagc

SEQ ID NO: 1699942 - DNA, 15 bp, Homo sapiens
taaaattaaagagct

SEQ ID NO: 1699943 - DNA, 15 bp, Homo sapiens
aaaattaaagagcta

SEQ ID NO: 1699944 - DNA, 15 bp, Homo sapiens
aaattaaagagctag

SEQ ID NO: 1699945 - DNA, 15 bp, Homo sapiens
aattaaagagctagg

SEQ ID NO: 1699946 - DNA, 15 bp, Homo sapiens
attaaagagctagga

SEQ ID NO: 1699947 - DNA, 15 bp, Homo sapiens
ttaaagagctaggaa

SEQ ID NO: 1699948 - DNA, 15 bp, Homo sapiens
taaagagctaggaaa

SEQ ID NO: 1699949 - DNA, 15 bp, Homo sapiens
aaagagctaggaaag

SEQ ID NO: 1699950 - DNA, 15 bp, Homo sapiens
aagagctaggaaagc

SEQ ID NO: 1699951 - DNA, 15 bp, Homo sapiens
agagctaggaaagca

SEQ ID NO: 1699952 - DNA, 15 bp, Homo sapiens
gagctaggaaagcaa

SEQ ID NO: 1699953 - DNA, 15 bp, Homo sapiens
agctaggaaagcaaa

SEQ ID NO: 1699954 - DNA, 15 bp, Homo sapiens
gctaggaaagcaaac

SEQ ID NO: 1699955 - DNA, 15 bp, Homo sapiens
ctaggaaagcaaaca

SEQ ID NO: 1699956 - DNA, 15 bp, Homo sapiens
taggaaagcaaacaa

SEQ ID NO: 1699957 - DNA, 15 bp, Homo sapiens
aggaaagcaaacaac

SEQ ID NO: 1699958 - DNA, 15 bp, Homo sapiens
ggaaagcaaacaaca

SEQ ID NO: 1699959 - DNA, 15 bp, Homo sapiens
gaaagcaaacaacat

SEQ ID NO: 1699960 - DNA, 15 bp, Homo sapiens
aaagcaaacaacatg

SEQ ID NO: 1699961 - DNA, 15 bp, Homo sapiens
aagcaaacaacatgt

SEQ ID NO: 1699962 - DNA, 15 bp, Homo sapiens
agcaaacaacatgta

SEQ ID NO: 1699963 - DNA, 15 bp, Homo sapiens
gcaaacaacatgtat

SEQ ID NO: 1699964 - DNA, 15 bp, Homo sapiens
caaacaacatgtata

SEQ ID NO: 1699965 - DNA, 15 bp, Homo sapiens
aaacaacatgtatag

SEQ ID NO: 1699966 - DNA, 15 bp, Homo sapiens
aacaacatgtatagc

SEQ ID NO: 1699967 - DNA, 15 bp, Homo sapiens
acaacatgtatagca

SEQ ID NO: 1699968 - DNA, 15 bp, Homo sapiens
caacatgtatagcaa

SEQ ID NO: 1699969 - DNA, 15 bp, Homo sapiens
aacatgtatagcaat

SEQ ID NO: 1699970 - DNA, 15 bp, Homo sapiens
acatgtatagcaata

SEQ ID NO: 1699971 - DNA, 15 bp, Homo sapiens
catgtatagcaatac

SEQ ID NO: 1699972 - DNA, 15 bp, Homo sapiens
atgtatagcaataca

SEQ ID NO: 1699973 - DNA, 15 bp, Homo sapiens
tgtatagcaatacac

SEQ ID NO: 1699974 - DNA, 15 bp, Homo sapiens
gtatagcaatacaca

SEQ ID NO: 1699975 - DNA, 15 bp, Homo sapiens
tatagcaatacacaa

SEQ ID NO: 1699976 - DNA, 15 bp, Homo sapiens
atagcaatacacaat

SEQ ID NO: 1699977 - DNA, 15 bp, Homo sapiens
tagcaatacacaatt

SEQ ID NO: 1699978 - DNA, 15 bp, Homo sapiens
agcaatacacaattt

SEQ ID NO: 1699979 - DNA, 15 bp, Homo sapiens
gcaatacacaatttc

SEQ ID NO: 1699980 - DNA, 15 bp, Homo sapiens
caatacacaatttct

SEQ ID NO: 1699981 - DNA, 15 bp, Homo sapiens
aatacacaatttctt

SEQ ID NO: 1699982 - DNA, 15 bp, Homo sapiens
atacacaatttcttc

SEQ ID NO: 1699983 - DNA, 15 bp, Homo sapiens
tacacaatttcttcc

SEQ ID NO: 1699984 - DNA, 15 bp, Homo sapiens
acacaatttcttcct

SEQ ID NO: 1699985 - DNA, 15 bp, Homo sapiens
cacaatttcttccta

SEQ ID NO: 1699986 - DNA, 15 bp, Homo sapiens
acaatttcttcctaa

SEQ ID NO: 1699987 - DNA, 15 bp, Homo sapiens
caatttcttcctaag

SEQ ID NO: 1699988 - DNA, 15 bp, Homo sapiens
aatttcttcctaagg

SEQ ID NO: 1699989 - DNA, 15 bp, Homo sapiens
atttcttcctaagga

SEQ ID NO: 1699990 - DNA, 15 bp, Homo sapiens
tttcttcctaaggat

SEQ ID NO: 1699991 - DNA, 15 bp, Homo sapiens
ttcttcctaaggatg

SEQ ID NO: 1699992 - DNA, 15 bp, Homo sapiens
tcttcctaaggatgc

SEQ ID NO: 1699993 - DNA, 15 bp, Homo sapiens
cttcctaaggatgca

SEQ ID NO: 1699994 - DNA, 15 bp, Homo sapiens
ttcctaaggatgcag

SEQ ID NO: 1699995 - DNA, 15 bp, Homo sapiens
tcctaaggatgcagg

SEQ ID NO: 1699996 - DNA, 15 bp, Homo sapiens
cctaaggatgcaggt

SEQ ID NO: 1699997 - DNA, 15 bp, Homo sapiens
ctaaggatgcaggtg

SEQ ID NO: 1699998 - DNA, 15 bp, Homo sapiens
taaggatgcaggtgt

SEQ ID NO: 1699999 - DNA, 15 bp, Homo sapiens
aaggatgcaggtgtc

SEQ ID NO: 1700000 - DNA, 15 bp, Homo sapiens
aggatgcaggtgtcc

SEQ ID NO: 1700001 - DNA, 15 bp, Homo sapiens
ggatgcaggtgtcct

SEQ ID NO: 1700002 - DNA, 15 bp, Homo sapiens
gatgcaggtgtcctg

SEQ ID NO: 1700003 - DNA, 15 bp, Homo sapiens
atgcaggtgtcctgc

SEQ ID NO: 1700004 - DNA, 15 bp, Homo sapiens
tgcaggtgtcctgct

SEQ ID NO: 1700005 - DNA, 15 bp, Homo sapiens
gcaggtgtcctgctg

SEQ ID NO: 1700006 - DNA, 15 bp, Homo sapiens
caggtgtcctgctgt

SEQ ID NO: 1700007 - DNA, 15 bp, Homo sapiens
aggtgtcctgctgtt

SEQ ID NO: 1700008 - DNA, 15 bp, Homo sapiens
ggtgtcctgctgttg

SEQ ID NO: 1700009 - DNA, 15 bp, Homo sapiens
gtgtcctgctgttgt

SEQ ID NO: 1700010 - DNA, 15 bp, Homo sapiens
tgtcctgctgttgta

SEQ ID NO: 1700011 - DNA, 15 bp, Homo sapiens
gtcctgctgttgtag

SEQ ID NO: 1700012 - DNA, 15 bp, Homo sapiens
tcctgctgttgtaga

SEQ ID NO: 1700013 - DNA, 15 bp, Homo sapiens
cctgctgttgtagac

SEQ ID NO: 1700014 - DNA, 15 bp, Homo sapiens
ctgctgttgtagaca

SEQ ID NO: 1700015 - DNA, 15 bp, Homo sapiens
tgctgttgtagacat

SEQ ID NO: 1700016 - DNA, 15 bp, Homo sapiens
gctgttgtagacatt

SEQ ID NO: 1700017 - DNA, 15 bp, Homo sapiens
ctgttgtagacattg

SEQ ID NO: 1700018 - DNA, 15 bp, Homo sapiens
tgttgtagacattgt

SEQ ID NO: 1700019 - DNA, 15 bp, Homo sapiens
gttgtagacattgtc

SEQ ID NO: 1700020 - DNA, 15 bp, Homo sapiens
ttgtagacattgtct

SEQ ID NO: 1700021 - DNA, 15 bp, Homo sapiens
tgtagacattgtcta

SEQ ID NO: 1700022 - DNA, 15 bp, Homo sapiens
gtagacattgtctaa

SEQ ID NO: 1700023 - DNA, 15 bp, Homo sapiens
tagacattgtctaat

SEQ ID NO: 1700024 - DNA, 15 bp, Homo sapiens
agacattgtctaatt

SEQ ID NO: 1700025 - DNA, 15 bp, Homo sapiens
gacattgtctaattt

SEQ ID NO: 1700026 - DNA, 15 bp, Homo sapiens
acattgtctaatttt

SEQ ID NO: 1700027 - DNA, 15 bp, Homo sapiens
cattgtctaattttc

SEQ ID NO: 1700028 - DNA, 15 bp, Homo sapiens
attgtctaattttca

SEQ ID NO: 1700029 - DNA, 15 bp, Homo sapiens
ttgtctaattttcac

SEQ ID NO: 1700030 - DNA, 15 bp, Homo sapiens
tgtctaattttcaca

SEQ ID NO: 1700031 - DNA, 15 bp, Homo sapiens
gtctaattttcacat

SEQ ID NO: 1700032 - DNA, 15 bp, Homo sapiens
tctaattttcacata

SEQ ID NO: 1700033 - DNA, 15 bp, Homo sapiens
ctaattttcacataa

SEQ ID NO: 1700034 - DNA, 15 bp, Homo sapiens
taattttcacataaa

SEQ ID NO: 1700035 - DNA, 15 bp, Homo sapiens
aattttcacataaac

SEQ ID NO: 1700036 - DNA, 15 bp, Homo sapiens
attttcacataaaca

SEQ ID NO: 1700037 - DNA, 15 bp, Homo sapiens
ttttcacataaacag

SEQ ID NO: 1700038 - DNA, 15 bp, Homo sapiens
tttcacataaacaga

SEQ ID NO: 1700039 - DNA, 15 bp, Homo sapiens
ttcacataaacagac

SEQ ID NO: 1700040 - DNA, 15 bp, Homo sapiens
tcacataaacagacc

SEQ ID NO: 1700041 - DNA, 15 bp, Homo sapiens
cacataaacagacca

SEQ ID NO: 1700042 - DNA, 15 bp, Homo sapiens
acataaacagaccac

SEQ ID NO: 1700043 - DNA, 15 bp, Homo sapiens
cataaacagaccacc

SEQ ID NO: 1700044 - DNA, 15 bp, Homo sapiens
ataaacagaccaccc

SEQ ID NO: 1700045 - DNA, 15 bp, Homo sapiens
taaacagaccaccca

SEQ ID NO: 1700046 - DNA, 15 bp, Homo sapiens
aaacagaccacccat

SEQ ID NO: 1700047 - DNA, 15 bp, Homo sapiens
aacagaccacccatt

SEQ ID NO: 1700048 - DNA, 15 bp, Homo sapiens
acagaccacccattc

SEQ ID NO: 1700049 - DNA, 15 bp, Homo sapiens
cagaccacccattct

SEQ ID NO: 1700050 - DNA, 15 bp, Homo sapiens
agaccacccattctc

SEQ ID NO: 1700051 - DNA, 15 bp, Homo sapiens
gaccacccattctcc

SEQ ID NO: 1700052 - DNA, 15 bp, Homo sapiens
accacccattctcct

SEQ ID NO: 1700053 - DNA, 15 bp, Homo sapiens
ccacccattctcctc

SEQ ID NO: 1700054 - DNA, 15 bp, Homo sapiens
cacccattctcctcc

SEQ ID NO: 1700055 - DNA, 15 bp, Homo sapiens
acccattctcctcca

SEQ ID NO: 1700056 - DNA, 15 bp, Homo sapiens
cccattctcctccaa

SEQ ID NO: 1700057 - DNA, 15 bp, Homo sapiens
ccattctcctccaag

SEQ ID NO: 1700058 - DNA, 15 bp, Homo sapiens
cattctcctccaagc

SEQ ID NO: 1700059 - DNA, 15 bp, Homo sapiens
attctcctccaagcc

SEQ ID NO: 1700060 - DNA, 15 bp, Homo sapiens
ttctcctccaagcct

SEQ ID NO: 1700061 - DNA, 15 bp, Homo sapiens
tctcctccaagcctt

SEQ ID NO: 1700062 - DNA, 15 bp, Homo sapiens
ctcctccaagccttt

SEQ ID NO: 1700063 - DNA, 15 bp, Homo sapiens
tcctccaagcctttc

SEQ ID NO: 1700064 - DNA, 15 bp, Homo sapiens
cctccaagcctttcc

SEQ ID NO: 1700065 - DNA, 15 bp, Homo sapiens
ctccaagcctttcct

SEQ ID NO: 1700066 - DNA, 15 bp, Homo sapiens
tccaagcctttcctc

SEQ ID NO: 1700067 - DNA, 15 bp, Homo sapiens
ccaagcctttcctca

SEQ ID NO: 1700068 - DNA, 15 bp, Homo sapiens
caagcctttcctcat

SEQ ID NO: 1700069 - DNA, 15 bp, Homo sapiens
aagcctttcctcatt

SEQ ID NO: 1700070 - DNA, 15 bp, Homo sapiens
agcctttcctcatta

SEQ ID NO: 1700071 - DNA, 15 bp, Homo sapiens
gcctttcctcattac

SEQ ID NO: 1700072 - DNA, 15 bp, Homo sapiens
cctttcctcattact

SEQ ID NO: 1700073 - DNA, 15 bp, Homo sapiens
ctttcctcattactg

SEQ ID NO: 1700074 - DNA, 15 bp, Homo sapiens
tttcctcattactgc

SEQ ID NO: 1700075 - DNA, 15 bp, Homo sapiens
ttcctcattactgca

SEQ ID NO: 1700076 - DNA, 15 bp, Homo sapiens
tcctcattactgcac

SEQ ID NO: 1700077 - DNA, 15 bp, Homo sapiens
cctcattactgcacg

SEQ ID NO: 1700078 - DNA, 15 bp, Homo sapiens
ctcattactgcacgt

SEQ ID NO: 1700079 - DNA, 15 bp, Homo sapiens
tcattactgcacgtt

SEQ ID NO: 1700080 - DNA, 15 bp, Homo sapiens
cattactgcacgtta

SEQ ID NO: 1700081 - DNA, 15 bp, Homo sapiens
attactgcacgttac

SEQ ID NO: 1700082 - DNA, 15 bp, Homo sapiens
ttactgcacgttaca

SEQ ID NO: 1700083 - DNA, 15 bp, Homo sapiens
tactgcacgttacat

SEQ ID NO: 1700084 - DNA, 15 bp, Homo sapiens
actgcacgttacatg

SEQ ID NO: 1700085 - DNA, 15 bp, Homo sapiens
ctgcacgttacatgt

SEQ ID NO: 1700086 - DNA, 15 bp, Homo sapiens
tgcacgttacatgtc

SEQ ID NO: 1700087 - DNA, 15 bp, Homo sapiens
gcacgttacatgtca

SEQ ID NO: 1700088 - DNA, 15 bp, Homo sapiens
cacgttacatgtcag

SEQ ID NO: 1700089 - DNA, 15 bp, Homo sapiens
acgttacatgtcagc

SEQ ID NO: 1700090 - DNA, 15 bp, Homo sapiens
cgttacatgtcagcc

SEQ ID NO: 1700091 - DNA, 15 bp, Homo sapiens
gttacatgtcagccc

SEQ ID NO: 1700092 - DNA, 15 bp, Homo sapiens
ttacatgtcagccct

SEQ ID NO: 1700093 - DNA, 15 bp, Homo sapiens
tacatgtcagccctg

SEQ ID NO: 1700094 - DNA, 15 bp, Homo sapiens
acatgtcagccctga

SEQ ID NO: 1700095 - DNA, 15 bp, Homo sapiens
catgtcagccctgat

SEQ ID NO: 1700096 - DNA, 15 bp, Homo sapiens
atgtcagccctgata

SEQ ID NO: 1700097 - DNA, 15 bp, Homo sapiens
tgtcagccctgatac

SEQ ID NO: 1700098 - DNA, 15 bp, Homo sapiens
gtcagccctgatact

SEQ ID NO: 1700099 - DNA, 15 bp, Homo sapiens
tcagccctgatactt

SEQ ID NO: 1700100 - DNA, 15 bp, Homo sapiens
cagccctgatacttt

SEQ ID NO: 1700101 - DNA, 15 bp, Homo sapiens
agccctgatactttt

SEQ ID NO: 1700102 - DNA, 15 bp, Homo sapiens
gccctgatactttta

SEQ ID NO: 1700103 - DNA, 15 bp, Homo sapiens
ccctgatacttttac

SEQ ID NO: 1700104 - DNA, 15 bp, Homo sapiens
cctgatacttttacg

SEQ ID NO: 1700105 - DNA, 15 bp, Homo sapiens
ctgatacttttacgt

SEQ ID NO: 1700106 - DNA, 15 bp, Homo sapiens
tgatacttttacgtt

SEQ ID NO: 1700107 - DNA, 15 bp, Homo sapiens
gatacttttacgttc

SEQ ID NO: 1700108 - DNA, 15 bp, Homo sapiens
atacttttacgttca

SEQ ID NO: 1700109 - DNA, 15 bp, Homo sapiens
tacttttacgttcat

SEQ ID NO: 1700110 - DNA, 15 bp, Homo sapiens
acttttacgttcatt

SEQ ID NO: 1700111 - DNA, 15 bp, Homo sapiens
cttttacgttcattc

SEQ ID NO: 1700112 - DNA, 15 bp, Homo sapiens
ttttacgttcattcc

SEQ ID NO: 1700113 - DNA, 15 bp, Homo sapiens
tttacgttcattccc

SEQ ID NO: 1700114 - DNA, 15 bp, Homo sapiens
ttacgttcattcccc

SEQ ID NO: 1700115 - DNA, 15 bp, Homo sapiens
tacgttcattcccct

SEQ ID NO: 1700116 - DNA, 15 bp, Homo sapiens
acgttcattccccta

SEQ ID NO: 1700117 - DNA, 15 bp, Homo sapiens
cgttcattcccctac

SEQ ID NO: 1700118 - DNA, 15 bp, Homo sapiens
gttcattcccctacc

SEQ ID NO: 1700119 - DNA, 15 bp, Homo sapiens
ttcattcccctacca

SEQ ID NO: 1700120 - DNA, 15 bp, Homo sapiens
tcattcccctaccac

SEQ ID NO: 1700121 - DNA, 15 bp, Homo sapiens
cattcccctaccacc

SEQ ID NO: 1700122 - DNA, 15 bp, Homo sapiens
attcccctaccaccc

SEQ ID NO: 1700123 - DNA, 15 bp, Homo sapiens
ttcccctaccaccct

SEQ ID NO: 1700124 - DNA, 15 bp, Homo sapiens
tcccctaccaccctt

SEQ ID NO: 1700125 - DNA, 15 bp, Homo sapiens
cccctaccacccttc

SEQ ID NO: 1700126 - DNA, 15 bp, Homo sapiens
ccctaccacccttcg

SEQ ID NO: 1700127 - DNA, 15 bp, Homo sapiens
cctaccacccttcgt

SEQ ID NO: 1700128 - DNA, 15 bp, Homo sapiens
ctaccacccttcgtt

SEQ ID NO: 1700129 - DNA, 15 bp, Homo sapiens
taccacccttcgtta

SEQ ID NO: 1700130 - DNA, 15 bp, Homo sapiens
accacccttcgttag

SEQ ID NO: 1700131 - DNA, 15 bp, Homo sapiens
ccacccttcgttaga

SEQ ID NO: 1700132 - DNA, 15 bp, Homo sapiens
cacccttcgttagaa

SEQ ID NO: 1700133 - DNA, 15 bp, Homo sapiens
acccttcgttagaaa

SEQ ID NO: 1700134 - DNA, 15 bp, Homo sapiens
cccttcgttagaaaa

SEQ ID NO: 1700135 - DNA, 15 bp, Homo sapiens
ccttcgttagaaaat

SEQ ID NO: 1700136 - DNA, 15 bp, Homo sapiens
cttcgttagaaaatt

SEQ ID NO: 1700137 - DNA, 15 bp, Homo sapiens
ttcgttagaaaattt

SEQ ID NO: 1700138 - DNA, 15 bp, Homo sapiens
tcgttagaaaatttt

SEQ ID NO: 1700139 - DNA, 15 bp, Homo sapiens
cgttagaaaattttc

SEQ ID NO: 1700140 - DNA, 15 bp, Homo sapiens
gttagaaaattttca

SEQ ID NO: 1700141 - DNA, 15 bp, Homo sapiens
ttagaaaattttcat

SEQ ID NO: 1700142 - DNA, 15 bp, Homo sapiens
tagaaaattttcatg

SEQ ID NO: 1700143 - DNA, 15 bp, Homo sapiens
agaaaattttcatgg

SEQ ID NO: 1700144 - DNA, 15 bp, Homo sapiens
gaaaattttcatggc

SEQ ID NO: 1700145 - DNA, 15 bp, Homo sapiens
aaaattttcatggca

SEQ ID NO: 1700146 - DNA, 15 bp, Homo sapiens
aaattttcatggcaa

SEQ ID NO: 1700147 - DNA, 15 bp, Homo sapiens
aattttcatggcaat

SEQ ID NO: 1700148 - DNA, 15 bp, Homo sapiens
attttcatggcaatt

SEQ ID NO: 1700149 - DNA, 15 bp, Homo sapiens
ttttcatggcaattt

SEQ ID NO: 1700150 - DNA, 15 bp, Homo sapiens
tttcatggcaatttt

SEQ ID NO: 1700151 - DNA, 15 bp, Homo sapiens
ttcatggcaattttc

SEQ ID NO: 1700152 - DNA, 15 bp, Homo sapiens
tcatggcaattttct

SEQ ID NO: 1700153 - DNA, 15 bp, Homo sapiens
catggcaattttctt

SEQ ID NO: 1700154 - DNA, 15 bp, Homo sapiens
atggcaattttctta

SEQ ID NO: 1700155 - DNA, 15 bp, Homo sapiens
tggcaattttcttat

SEQ ID NO: 1700156 - DNA, 15 bp, Homo sapiens
ggcaattttcttatt

SEQ ID NO: 1700157 - DNA, 15 bp, Homo sapiens
gcaattttcttattg

SEQ ID NO: 1700158 - DNA, 15 bp, Homo sapiens
caattttcttattga

SEQ ID NO: 1700159 - DNA, 15 bp, Homo sapiens
aattttcttattgag

SEQ ID NO: 1700160 - DNA, 15 bp, Homo sapiens
attttcttattgagc

SEQ ID NO: 1700161 - DNA, 15 bp, Homo sapiens
ttttcttattgagcc

SEQ ID NO: 1700162 - DNA, 15 bp, Homo sapiens
tttcttattgagcct

SEQ ID NO: 1700163 - DNA, 15 bp, Homo sapiens
ttcttattgagcctt

SEQ ID NO: 1700164 - DNA, 15 bp, Homo sapiens
tcttattgagcctta

SEQ ID NO: 1700165 - DNA, 15 bp, Homo sapiens
cttattgagccttaa

SEQ ID NO: 1700166 - DNA, 15 bp, Homo sapiens
ttattgagccttaat

SEQ ID NO: 1700167 - DNA, 15 bp, Homo sapiens
tattgagccttaatc

SEQ ID NO: 1700168 - DNA, 15 bp, Homo sapiens
attgagccttaatca

SEQ ID NO: 1700169 - DNA, 15 bp, Homo sapiens
ttgagccttaatcaa

SEQ ID NO: 1700170 - DNA, 15 bp, Homo sapiens
tgagccttaatcaaa

SEQ ID NO: 1700171 - DNA, 15 bp, Homo sapiens
gagccttaatcaaag

SEQ ID NO: 1700172 - DNA, 15 bp, Homo sapiens
agccttaatcaaagt

SEQ ID NO: 1700173 - DNA, 15 bp, Homo sapiens
gccttaatcaaagtc

SEQ ID NO: 1700174 - DNA, 15 bp, Homo sapiens
ccttaatcaaagtca

SEQ ID NO: 1700175 - DNA, 15 bp, Homo sapiens
cttaatcaaagtcat

SEQ ID NO: 1700176 - DNA, 15 bp, Homo sapiens
ttaatcaaagtcatg

SEQ ID NO: 1700177 - DNA, 15 bp, Homo sapiens
taatcaaagtcatgt

SEQ ID NO: 1700178 - DNA, 15 bp, Homo sapiens
aatcaaagtcatgtt

SEQ ID NO: 1700179 - DNA, 15 bp, Homo sapiens
atcaaagtcatgttg

SEQ ID NO: 1700180 - DNA, 15 bp, Homo sapiens
tcaaagtcatgttga

SEQ ID NO: 1700181 - DNA, 15 bp, Homo sapiens
caaagtcatgttgac

SEQ ID NO: 1700182 - DNA, 15 bp, Homo sapiens
aaagtcatgttgact

SEQ ID NO: 1700183 - DNA, 15 bp, Homo sapiens
aagtcatgttgactt

SEQ ID NO: 1700184 - DNA, 15 bp, Homo sapiens
agtcatgttgactta

SEQ ID NO: 1700185 - DNA, 15 bp, Homo sapiens
gtcatgttgacttat

SEQ ID NO: 1700186 - DNA, 15 bp, Homo sapiens
tcatgttgacttatc

SEQ ID NO: 1700187 - DNA, 15 bp, Homo sapiens
catgttgacttatcc

SEQ ID NO: 1700188 - DNA, 15 bp, Homo sapiens
atgttgacttatccc

SEQ ID NO: 1700189 - DNA, 15 bp, Homo sapiens
tgttgacttatcccc

SEQ ID NO: 1700190 - DNA, 15 bp, Homo sapiens
gttgacttatcccct

SEQ ID NO: 1700191 - DNA, 15 bp, Homo sapiens
ttgacttatcccctt

SEQ ID NO: 1700192 - DNA, 15 bp, Homo sapiens
tgacttatccccttt

SEQ ID NO: 1700193 - DNA, 15 bp, Homo sapiens
gacttatcccctttc

SEQ ID NO: 1700194 - DNA, 15 bp, Homo sapiens
acttatcccctttct

SEQ ID NO: 1700195 - DNA, 15 bp, Homo sapiens
cttatcccctttcta

SEQ ID NO: 1700196 - DNA, 15 bp, Homo sapiens
ttatcccctttctaa

SEQ ID NO: 1700197 - DNA, 15 bp, Homo sapiens
tatcccctttctaaa

SEQ ID NO: 1700198 - DNA, 15 bp, Homo sapiens
atcccctttctaaat

SEQ ID NO: 1700199 - DNA, 15 bp, Homo sapiens
tcccctttctaaatt

SEQ ID NO: 1700200 - DNA, 15 bp, Homo sapiens
cccctttctaaatta

SEQ ID NO: 1700201 - DNA, 15 bp, Homo sapiens
ccctttctaaattat

SEQ ID NO: 1700202 - DNA, 15 bp, Homo sapiens
cctttctaaattata

SEQ ID NO: 1700203 - DNA, 15 bp, Homo sapiens
ctttctaaattataa

SEQ ID NO: 1700204 - DNA, 15 bp, Homo sapiens
tttctaaattataag

SEQ ID NO: 1700205 - DNA, 15 bp, Homo sapiens
ttctaaattataagc

SEQ ID NO: 1700206 - DNA, 15 bp, Homo sapiens
tctaaattataagcc

SEQ ID NO: 1700207 - DNA, 15 bp, Homo sapiens
ctaaattataagcct

SEQ ID NO: 1700208 - DNA, 15 bp, Homo sapiens
taaattataagcctc

SEQ ID NO: 1700209 - DNA, 15 bp, Homo sapiens
aaattataagcctct

SEQ ID NO: 1700210 - DNA, 15 bp, Homo sapiens
aattataagcctctg

SEQ ID NO: 1700211 - DNA, 15 bp, Homo sapiens
attataagcctctga

SEQ ID NO: 1700212 - DNA, 15 bp, Homo sapiens
ttataagcctctgaa

SEQ ID NO: 1700213 - DNA, 15 bp, Homo sapiens
tataagcctctgaaa

SEQ ID NO: 1700214 - DNA, 15 bp, Homo sapiens
ataagcctctgaaag

SEQ ID NO: 1700215 - DNA, 15 bp, Homo sapiens
taagcctctgaaagt

SEQ ID NO: 1700216 - DNA, 15 bp, Homo sapiens
aagcctctgaaagtt

SEQ ID NO: 1700217 - DNA, 15 bp, Homo sapiens
agcctctgaaagtta

SEQ ID NO: 1700218 - DNA, 15 bp, Homo sapiens
gcctctgaaagttag

SEQ ID NO: 1700219 - DNA, 15 bp, Homo sapiens
cctctgaaagttagt

SEQ ID NO: 1700220 - DNA, 15 bp, Homo sapiens
ctctgaaagttagtg

SEQ ID NO: 1700221 - DNA, 15 bp, Homo sapiens
tctgaaagttagtga

SEQ ID NO: 1700222 - DNA, 15 bp, Homo sapiens
ctgaaagttagtgat

SEQ ID NO: 1700223 - DNA, 15 bp, Homo sapiens
tgaaagttagtgata

SEQ ID NO: 1700224 - DNA, 15 bp, Homo sapiens
gaaagttagtgatac

SEQ ID NO: 1700225 - DNA, 15 bp, Homo sapiens
aaagttagtgataca

SEQ ID NO: 1700226 - DNA, 15 bp, Homo sapiens
aagttagtgatacac

SEQ ID NO: 1700227 - DNA, 15 bp, Homo sapiens
agttagtgatacacc

SEQ ID NO: 1700228 - DNA, 15 bp, Homo sapiens
gttagtgatacacct

SEQ ID NO: 1700229 - DNA, 15 bp, Homo sapiens
ttagtgatacacctt

SEQ ID NO: 1700230 - DNA, 15 bp, Homo sapiens
tagtgatacacctta

SEQ ID NO: 1700231 - DNA, 15 bp, Homo sapiens
agtgatacaccttat

SEQ ID NO: 1700232 - DNA, 15 bp, Homo sapiens
gtgatacaccttatt

SEQ ID NO: 1700233 - DNA, 15 bp, Homo sapiens
tgatacaccttattt

SEQ ID NO: 1700234 - DNA, 15 bp, Homo sapiens
gatacaccttatttg

SEQ ID NO: 1700235 - DNA, 15 bp, Homo sapiens
atacaccttatttgt

SEQ ID NO: 1700236 - DNA, 15 bp, Homo sapiens
tacaccttatttgtg

SEQ ID NO: 1700237 - DNA, 15 bp, Homo sapiens
acaccttatttgtgt

SEQ ID NO: 1700238 - DNA, 15 bp, Homo sapiens
caccttatttgtgtt

SEQ ID NO: 1700239 - DNA, 15 bp, Homo sapiens
accttatttgtgttt

SEQ ID NO: 1700240 - DNA, 15 bp, Homo sapiens
ccttatttgtgtttg

SEQ ID NO: 1700241 - DNA, 15 bp, Homo sapiens
cttatttgtgtttga

SEQ ID NO: 1700242 - DNA, 15 bp, Homo sapiens
ttatttgtgtttgaa

SEQ ID NO: 1700243 - DNA, 15 bp, Homo sapiens
tatttgtgtttgaat

SEQ ID NO: 1700244 - DNA, 15 bp, Homo sapiens
atttgtgtttgaatc

SEQ ID NO: 1700245 - DNA, 15 bp, Homo sapiens
tttgtgtttgaatca

SEQ ID NO: 1700246 - DNA, 15 bp, Homo sapiens
ttgtgtttgaatcaa

SEQ ID NO: 1700247 - DNA, 15 bp, Homo sapiens
tgtgtttgaatcaac

SEQ ID NO: 1700248 - DNA, 15 bp, Homo sapiens
gtgtttgaatcaact

SEQ ID NO: 1700249 - DNA, 15 bp, Homo sapiens
tgtttgaatcaactt

SEQ ID NO: 1700250 - DNA, 15 bp, Homo sapiens
gtttgaatcaacttg

SEQ ID NO: 1700251 - DNA, 15 bp, Homo sapiens
tttgaatcaacttgg

SEQ ID NO: 1700252 - DNA, 15 bp, Homo sapiens
ttgaatcaacttggt

SEQ ID NO: 1700253 - DNA, 15 bp, Homo sapiens
tgaatcaacttggtt

SEQ ID NO: 1700254 - DNA, 15 bp, Homo sapiens
gaatcaacttggtta

SEQ ID NO: 1700255 - DNA, 15 bp, Homo sapiens
aatcaacttggttac

SEQ ID NO: 1700256 - DNA, 15 bp, Homo sapiens
atcaacttggttacc

SEQ ID NO: 1700257 - DNA, 15 bp, Homo sapiens
tcaacttggttacct

SEQ ID NO: 1700258 - DNA, 15 bp, Homo sapiens
caacttggttaccta

SEQ ID NO: 1700259 - DNA, 15 bp, Homo sapiens
aacttggttacctaa

SEQ ID NO: 1700260 - DNA, 15 bp, Homo sapiens
acttggttacctaac

SEQ ID NO: 1700261 - DNA, 15 bp, Homo sapiens
cttggttacctaacc

SEQ ID NO: 1700262 - DNA, 15 bp, Homo sapiens
ttggttacctaaccc

SEQ ID NO: 1700263 - DNA, 15 bp, Homo sapiens
tggttacctaaccca

SEQ ID NO: 1700264 - DNA, 15 bp, Homo sapiens
ggttacctaacccag

SEQ ID NO: 1700265 - DNA, 15 bp, Homo sapiens
gttacctaacccagt

SEQ ID NO: 1700266 - DNA, 15 bp, Homo sapiens
ttacctaacccagtg

SEQ ID NO: 1700267 - DNA, 15 bp, Homo sapiens
tacctaacccagtgc

SEQ ID NO: 1700268 - DNA, 15 bp, Homo sapiens
acctaacccagtgcc

SEQ ID NO: 1700269 - DNA, 15 bp, Homo sapiens
cctaacccagtgcct

SEQ ID NO: 1700270 - DNA, 15 bp, Homo sapiens
ctaacccagtgcctt

SEQ ID NO: 1700271 - DNA, 15 bp, Homo sapiens
taacccagtgccttg

SEQ ID NO: 1700272 - DNA, 15 bp, Homo sapiens
aacccagtgccttgc

SEQ ID NO: 1700273 - DNA, 15 bp, Homo sapiens
acccagtgccttgca

SEQ ID NO: 1700274 - DNA, 15 bp, Homo sapiens
cccagtgccttgcac

SEQ ID NO: 1700275 - DNA, 15 bp, Homo sapiens
ccagtgccttgcact

SEQ ID NO: 1700276 - DNA, 15 bp, Homo sapiens
cagtgccttgcactt

SEQ ID NO: 1700277 - DNA, 15 bp, Homo sapiens
agtgccttgcactta

SEQ ID NO: 1700278 - DNA, 15 bp, Homo sapiens
gtgccttgcacttag

SEQ ID NO: 1700279 - DNA, 15 bp, Homo sapiens
tgccttgcacttagt

SEQ ID NO: 1700280 - DNA, 15 bp, Homo sapiens
gccttgcacttagta

SEQ ID NO: 1700281 - DNA, 15 bp, Homo sapiens
ccttgcacttagtaa

SEQ ID NO: 1700282 - DNA, 15 bp, Homo sapiens
cttgcacttagtaag

SEQ ID NO: 1700283 - DNA, 15 bp, Homo sapiens
ttgcacttagtaagg

SEQ ID NO: 1700284 - DNA, 15 bp, Homo sapiens
tgcacttagtaaggc

SEQ ID NO: 1700285 - DNA, 15 bp, Homo sapiens
gcacttagtaaggca

SEQ ID NO: 1700286 - DNA, 15 bp, Homo sapiens
cacttagtaaggcat

SEQ ID NO: 1700287 - DNA, 15 bp, Homo sapiens
acttagtaaggcatc

SEQ ID NO: 1700288 - DNA, 15 bp, Homo sapiens
cttagtaaggcatca

SEQ ID NO: 1700289 - DNA, 15 bp, Homo sapiens
ttagtaaggcatcag

SEQ ID NO: 1700290 - DNA, 15 bp, Homo sapiens
tagtaaggcatcagg

SEQ ID NO: 1700291 - DNA, 15 bp, Homo sapiens
agtaaggcatcagga

SEQ ID NO: 1700292 - DNA, 15 bp, Homo sapiens
gtaaggcatcaggag

SEQ ID NO: 1700293 - DNA, 15 bp, Homo sapiens
taaggcatcaggaga

SEQ ID NO: 1700294 - DNA, 15 bp, Homo sapiens
aaggcatcaggagat

SEQ ID NO: 1700295 - DNA, 15 bp, Homo sapiens
aggcatcaggagatt

SEQ ID NO: 1700296 - DNA, 15 bp, Homo sapiens
ggcatcaggagattt

SEQ ID NO: 1700297 - DNA, 15 bp, Homo sapiens
gcatcaggagatttt

SEQ ID NO: 1700298 - DNA, 15 bp, Homo sapiens
catcaggagatttta

SEQ ID NO: 1700299 - DNA, 15 bp, Homo sapiens
atcaggagattttaa

SEQ ID NO: 1700300 - DNA, 15 bp, Homo sapiens
aggagattttaaaaa

SEQ ID NO: 1700301 - DNA, 15 bp, Homo sapiens
ggagattttaaaaat

SEQ ID NO: 1700302 - DNA, 15 bp, Homo sapiens
gagattttaaaaatt

SEQ ID NO: 1700303 - DNA, 15 bp, Homo sapiens
agattttaaaaatta

SEQ ID NO: 1700304 - DNA, 15 bp, Homo sapiens
gattttaaaaattag

SEQ ID NO: 1700305 - DNA, 15 bp, Homo sapiens
attttaaaaattaga

SEQ ID NO: 1700306 - DNA, 15 bp, Homo sapiens
tttaaaaattagaat

SEQ ID NO: 1700307 - DNA, 15 bp, Homo sapiens
ttaaaaattagaatg

SEQ ID NO: 1700308 - DNA, 15 bp, Homo sapiens
taaaaattagaatga

SEQ ID NO: 1700309 - DNA, 15 bp, Homo sapiens
aaaaattagaatgaa

SEQ ID NO: 1700310 - DNA, 15 bp, Homo sapiens
aaaattagaatgaaa

SEQ ID NO: 1700311 - DNA, 15 bp, Homo sapiens
aaattagaatgaaaa

SEQ ID NO: 1700312 - DNA, 15 bp, Homo sapiens
aattagaatgaaaac

SEQ ID NO: 1700313 - DNA, 15 bp, Homo sapiens
attagaatgaaaaca

SEQ ID NO: 1700314 - DNA, 15 bp, Homo sapiens
ttagaatgaaaacat

SEQ ID NO: 1700315 - DNA, 15 bp, Homo sapiens
tagaatgaaaacatg

SEQ ID NO: 1700316 - DNA, 15 bp, Homo sapiens
agaatgaaaacatga

SEQ ID NO: 1700317 - DNA, 15 bp, Homo sapiens
gaatgaaaacatgaa

SEQ ID NO: 1700318 - DNA, 15 bp, Homo sapiens
aatgaaaacatgaat

SEQ ID NO: 1700319 - DNA, 15 bp, Homo sapiens
atgaaaacatgaatt

SEQ ID NO: 1700320 - DNA, 15 bp, Homo sapiens
tgaaaacatgaattt

SEQ ID NO: 1700321 - DNA, 15 bp, Homo sapiens
gaaaacatgaatttc

SEQ ID NO: 1700322 - DNA, 15 bp, Homo sapiens
aaaacatgaatttct

SEQ ID NO: 1700323 - DNA, 15 bp, Homo sapiens
aaacatgaatttcta

SEQ ID NO: 1700324 - DNA, 15 bp, Homo sapiens
aacatgaatttctac

SEQ ID NO: 1700325 - DNA, 15 bp, Homo sapiens
acatgaatttctaca

SEQ ID NO: 1700326 - DNA, 15 bp, Homo sapiens
catgaatttctacaa

SEQ ID NO: 1700327 - DNA, 15 bp, Homo sapiens
atgaatttctacaat

SEQ ID NO: 1700328 - DNA, 15 bp, Homo sapiens
tgaatttctacaata

SEQ ID NO: 1700329 - DNA, 15 bp, Homo sapiens
gaatttctacaataa

SEQ ID NO: 1700330 - DNA, 15 bp, Homo sapiens
aatttctacaataaa

SEQ ID NO: 1700331 - DNA, 15 bp, Homo sapiens
atttctacaataaaa

SEQ ID NO: 1700332 - DNA, 15 bp, Homo sapiens
tttctacaataaaat

SEQ ID NO: 1700333 - DNA, 15 bp, Homo sapiens
ttctacaataaaata

SEQ ID NO: 1700334 - DNA, 15 bp, Homo sapiens
acaataaaataaaac

SEQ ID NO: 1700335 - DNA, 15 bp, Homo sapiens
caataaaataaaacc

SEQ ID NO: 1700336 - DNA, 15 bp, Homo sapiens
aataaaataaaaccc

SEQ ID NO: 1700337 - DNA, 15 bp, Homo sapiens
ataaaataaaacccc

SEQ ID NO: 1700338 - DNA, 15 bp, Homo sapiens
taaaataaaacccca

SEQ ID NO: 1700339 - DNA, 15 bp, Homo sapiens
aaaataaaaccccaa

SEQ ID NO: 1700340 - DNA, 15 bp, Homo sapiens
aaataaaaccccaac

SEQ ID NO: 1700341 - DNA, 15 bp, Homo sapiens
aataaaaccccaact

SEQ ID NO: 1700342 - DNA, 15 bp, Homo sapiens
ataaaaccccaactg

SEQ ID NO: 1700343 - DNA, 15 bp, Homo sapiens
taaaaccccaactgc

SEQ ID NO: 1700344 - DNA, 15 bp, Homo sapiens
aaaaccccaactgca

SEQ ID NO: 1700345 - DNA, 15 bp, Homo sapiens
aaaccccaactgcaa

SEQ ID NO: 1700346 - DNA, 15 bp, Homo sapiens
aaccccaactgcaag

SEQ ID NO: 1700347 - DNA, 15 bp, Homo sapiens
accccaactgcaaga

SEQ ID NO: 1700348 - DNA, 15 bp, Homo sapiens
ccccaactgcaagat

SEQ ID NO: 1700349 - DNA, 15 bp, Homo sapiens
cccaactgcaagatt

SEQ ID NO: 1700350 - DNA, 15 bp, Homo sapiens
ccaactgcaagattt

SEQ ID NO: 1700351 - DNA, 15 bp, Homo sapiens
caactgcaagattta

SEQ ID NO: 1700352 - DNA, 15 bp, Homo sapiens
aactgcaagatttat

SEQ ID NO: 1700353 - DNA, 15 bp, Homo sapiens
actgcaagatttatc

SEQ ID NO: 1700354 - DNA, 15 bp, Homo sapiens
ctgcaagatttatca

SEQ ID NO: 1700355 - DNA, 15 bp, Homo sapiens
tgcaagatttatcaa

SEQ ID NO: 1700356 - DNA, 15 bp, Homo sapiens
gcaagatttatcaaa

SEQ ID NO: 1700357 - DNA, 15 bp, Homo sapiens
caagatttatcaaag

SEQ ID NO: 1700358 - DNA, 15 bp, Homo sapiens
aagatttatcaaagc

SEQ ID NO: 1700359 - DNA, 15 bp, Homo sapiens
agatttatcaaagca

SEQ ID NO: 1700360 - DNA, 15 bp, Homo sapiens
gatttatcaaagcaa

SEQ ID NO: 1700361 - DNA, 15 bp, Homo sapiens
atttatcaaagcaaa

SEQ ID NO: 1700362 - DNA, 15 bp, Homo sapiens
tttatcaaagcaaat

SEQ ID NO: 1700363 - DNA, 15 bp, Homo sapiens
ttatcaaagcaaata

SEQ ID NO: 1700364 - DNA, 15 bp, Homo sapiens
tatcaaagcaaataa

SEQ ID NO: 1700365 - DNA, 15 bp, Homo sapiens
atcaaagcaaataag

SEQ ID NO: 1700366 - DNA, 15 bp, Homo sapiens
tcaaagcaaataagt

SEQ ID NO: 1700367 - DNA, 15 bp, Homo sapiens
caaagcaaataagtc

SEQ ID NO: 1700368 - DNA, 15 bp, Homo sapiens
aaagcaaataagtca

SEQ ID NO: 1700369 - DNA, 15 bp, Homo sapiens
aagcaaataagtcag

SEQ ID NO: 1700370 - DNA, 15 bp, Homo sapiens
agcaaataagtcaga

SEQ ID NO: 1700371 - DNA, 15 bp, Homo sapiens
gcaaataagtcagag

SEQ ID NO: 1700372 - DNA, 15 bp, Homo sapiens
caaataagtcagaga

SEQ ID NO: 1700373 - DNA, 15 bp, Homo sapiens
aaataagtcagagaa

SEQ ID NO: 1700374 - DNA, 15 bp, Homo sapiens
aataagtcagagaat

SEQ ID NO: 1700375 - DNA, 15 bp, Homo sapiens
ataagtcagagaatt

SEQ ID NO: 1700376 - DNA, 15 bp, Homo sapiens
taagtcagagaattt

SEQ ID NO: 1700377 - DNA, 15 bp, Homo sapiens
aagtcagagaatttt

SEQ ID NO: 1700378 - DNA, 15 bp, Homo sapiens
agtcagagaattttt

SEQ ID NO: 1700379 - DNA, 15 bp, Homo sapiens
gtcagagaattttta

SEQ ID NO: 1700380 - DNA, 15 bp, Homo sapiens
tcagagaatttttaa

SEQ ID NO: 1700381 - DNA, 15 bp, Homo sapiens
cagagaatttttaaa

SEQ ID NO: 1700382 - DNA, 15 bp, Homo sapiens
agagaatttttaaat

SEQ ID NO: 1700383 - DNA, 15 bp, Homo sapiens
gagaatttttaaatt

SEQ ID NO: 1700384 - DNA, 15 bp, Homo sapiens
agaatttttaaatta

SEQ ID NO: 1700385 - DNA, 15 bp, Homo sapiens
gaatttttaaattac

SEQ ID NO: 1700386 - DNA, 15 bp, Homo sapiens
aatttttaaattaca

SEQ ID NO: 1700387 - DNA, 15 bp, Homo sapiens
atttttaaattacaa

SEQ ID NO: 1700388 - DNA, 15 bp, Homo sapiens
tttttaaattacaag

SEQ ID NO: 1700389 - DNA, 15 bp, Homo sapiens
ttttaaattacaagc

SEQ ID NO: 1700390 - DNA, 15 bp, Homo sapiens
tttaaattacaagca

SEQ ID NO: 1700391 - DNA, 15 bp, Homo sapiens
ttaaattacaagcac

SEQ ID NO: 1700392 - DNA, 15 bp, Homo sapiens
taaattacaagcaca

SEQ ID NO: 1700393 - DNA, 15 bp, Homo sapiens
aaattacaagcacat

SEQ ID NO: 1700394 - DNA, 15 bp, Homo sapiens
aattacaagcacatc

SEQ ID NO: 1700395 - DNA, 15 bp, Homo sapiens
attacaagcacatcc

SEQ ID NO: 1700396 - DNA, 15 bp, Homo sapiens
ttacaagcacatcca

SEQ ID NO: 1700397 - DNA, 15 bp, Homo sapiens
tacaagcacatccat

SEQ ID NO: 1700398 - DNA, 15 bp, Homo sapiens
acaagcacatccatt

SEQ ID NO: 1700399 - DNA, 15 bp, Homo sapiens
caagcacatccatta

SEQ ID NO: 1700400 - DNA, 15 bp, Homo sapiens
aagcacatccattat

SEQ ID NO: 1700401 - DNA, 15 bp, Homo sapiens
agcacatccattatg

SEQ ID NO: 1700402 - DNA, 15 bp, Homo sapiens
gcacatccattatgc

SEQ ID NO: 1700403 - DNA, 15 bp, Homo sapiens
cacatccattatgca

SEQ ID NO: 1700404 - DNA, 15 bp, Homo sapiens
acatccattatgcat

SEQ ID NO: 1700405 - DNA, 15 bp, Homo sapiens
catccattatgcatg

SEQ ID NO: 1700406 - DNA, 15 bp, Homo sapiens
atccattatgcatga

SEQ ID NO: 1700407 - DNA, 15 bp, Homo sapiens
tccattatgcatgat

SEQ ID NO: 1700408 - DNA, 15 bp, Homo sapiens
ccattatgcatgata

SEQ ID NO: 1700409 - DNA, 15 bp, Homo sapiens
cattatgcatgatat

SEQ ID NO: 1700410 - DNA, 15 bp, Homo sapiens
attatgcatgatata

SEQ ID NO: 1700411 - DNA, 15 bp, Homo sapiens
ttatgcatgatataa

SEQ ID NO: 1700412 - DNA, 15 bp, Homo sapiens
tatgcatgatataat

SEQ ID NO: 1700413 - DNA, 15 bp, Homo sapiens
atgcatgatataatt

SEQ ID NO: 1700414 - DNA, 15 bp, Homo sapiens
tgcatgatataattt

SEQ ID NO: 1700415 - DNA, 15 bp, Homo sapiens
gcatgatataatttc

SEQ ID NO: 1700416 - DNA, 15 bp, Homo sapiens
catgatataatttca

SEQ ID NO: 1700417 - DNA, 15 bp, Homo sapiens
atgatataatttcaa

SEQ ID NO: 1700418 - DNA, 15 bp, Homo sapiens
tgatataatttcaaa

SEQ ID NO: 1700419 - DNA, 15 bp, Homo sapiens
gatataatttcaaat

SEQ ID NO: 1700420 - DNA, 15 bp, Homo sapiens
atataatttcaaatt

SEQ ID NO: 1700421 - DNA, 15 bp, Homo sapiens
tataatttcaaattg

SEQ ID NO: 1700422 - DNA, 15 bp, Homo sapiens
ataatttcaaattgt

SEQ ID NO: 1700423 - DNA, 15 bp, Homo sapiens
taatttcaaattgtc

SEQ ID NO: 1700424 - DNA, 15 bp, Homo sapiens
aatttcaaattgtct

SEQ ID NO: 1700425 - DNA, 15 bp, Homo sapiens
atttcaaattgtctt

SEQ ID NO: 1700426 - DNA, 15 bp, Homo sapiens
tttcaaattgtctta

SEQ ID NO: 1700427 - DNA, 15 bp, Homo sapiens
ttcaaattgtcttaa

SEQ ID NO: 1700428 - DNA, 15 bp, Homo sapiens
tcaaattgtcttaaa

SEQ ID NO: 1700429 - DNA, 15 bp, Homo sapiens
caaattgtcttaaat

SEQ ID NO: 1700430 - DNA, 15 bp, Homo sapiens
aaattgtcttaaata

SEQ ID NO: 1700431 - DNA, 15 bp, Homo sapiens
aattgtcttaaataa

SEQ ID NO: 1700432 - DNA, 15 bp, Homo sapiens
attgtcttaaataaa

SEQ ID NO: 1700433 - DNA, 15 bp, Homo sapiens
ttgtcttaaataaaa

SEQ ID NO: 1700434 - DNA, 15 bp, Homo sapiens
tgtcttaaataaaat

SEQ ID NO: 1700435 - DNA, 15 bp, Homo sapiens
gtcttaaataaaatt

SEQ ID NO: 1700436 - DNA, 15 bp, Homo sapiens
tcttaaataaaattc

SEQ ID NO: 1700437 - DNA, 15 bp, Homo sapiens
cttaaataaaattcc

SEQ ID NO: 1700438 - DNA, 15 bp, Homo sapiens
ttaaataaaattcca

SEQ ID NO: 1700439 - DNA, 15 bp, Homo sapiens
taaataaaattccaa

SEQ ID NO: 1700440 - DNA, 15 bp, Homo sapiens
aaataaaattccaac

SEQ ID NO: 1700441 - DNA, 15 bp, Homo sapiens
aataaaattccaaca

SEQ ID NO: 1700442 - DNA, 15 bp, Homo sapiens
ataaaattccaacac

SEQ ID NO: 1700443 - DNA, 15 bp, Homo sapiens
taaaattccaacacg

SEQ ID NO: 1700444 - DNA, 15 bp, Homo sapiens
aaaattccaacacgt

SEQ ID NO: 1700445 - DNA, 15 bp, Homo sapiens
aaattccaacacgtg

SEQ ID NO: 1700446 - DNA, 15 bp, Homo sapiens
aattccaacacgtga

SEQ ID NO: 1700447 - DNA, 15 bp, Homo sapiens
attccaacacgtgaa

SEQ ID NO: 1700448 - DNA, 15 bp, Homo sapiens
ttccaacacgtgaat

SEQ ID NO: 1700449 - DNA, 15 bp, Homo sapiens
tccaacacgtgaatc

SEQ ID NO: 1700450 - DNA, 15 bp, Homo sapiens
ccaacacgtgaatcc

SEQ ID NO: 1700451 - DNA, 15 bp, Homo sapiens
caacacgtgaatcca

SEQ ID NO: 1700452 - DNA, 15 bp, Homo sapiens
aacacgtgaatccac

SEQ ID NO: 1700453 - DNA, 15 bp, Homo sapiens
acacgtgaatccact

SEQ ID NO: 1700454 - DNA, 15 bp, Homo sapiens
cacgtgaatccacta

SEQ ID NO: 1700455 - DNA, 15 bp, Homo sapiens
acgtgaatccactag

SEQ ID NO: 1700456 - DNA, 15 bp, Homo sapiens
cgtgaatccactagg

SEQ ID NO: 1700457 - DNA, 15 bp, Homo sapiens
gtgaatccactaggc

SEQ ID NO: 1700458 - DNA, 15 bp, Homo sapiens
tgaatccactaggca

SEQ ID NO: 1700459 - DNA, 15 bp, Homo sapiens
gaatccactaggcag

SEQ ID NO: 1700460 - DNA, 15 bp, Homo sapiens
aatccactaggcagt

SEQ ID NO: 1700461 - DNA, 15 bp, Homo sapiens
atccactaggcagta

SEQ ID NO: 1700462 - DNA, 15 bp, Homo sapiens
tccactaggcagtaa

SEQ ID NO: 1700463 - DNA, 15 bp, Homo sapiens
ccactaggcagtaat

SEQ ID NO: 1700464 - DNA, 15 bp, Homo sapiens
cactaggcagtaatt

SEQ ID NO: 1700465 - DNA, 15 bp, Homo sapiens
actaggcagtaatta

SEQ ID NO: 1700466 - DNA, 15 bp, Homo sapiens
ctaggcagtaattac

SEQ ID NO: 1700467 - DNA, 15 bp, Homo sapiens
taggcagtaattaca

SEQ ID NO: 1700468 - DNA, 15 bp, Homo sapiens
aggcagtaattacaa

SEQ ID NO: 1700469 - DNA, 15 bp, Homo sapiens
ggcagtaattacaaa

SEQ ID NO: 1700470 - DNA, 15 bp, Homo sapiens
gcagtaattacaaac

SEQ ID NO: 1700471 - DNA, 15 bp, Homo sapiens
cagtaattacaaaca

SEQ ID NO: 1700472 - DNA, 15 bp, Homo sapiens
agtaattacaaacat

SEQ ID NO: 1700473 - DNA, 15 bp, Homo sapiens
gtaattacaaacatt

SEQ ID NO: 1700474 - DNA, 15 bp, Homo sapiens
taattacaaacattg

SEQ ID NO: 1700475 - DNA, 15 bp, Homo sapiens
aattacaaacattga

SEQ ID NO: 1700476 - DNA, 15 bp, Homo sapiens
attacaaacattgat

SEQ ID NO: 1700477 - DNA, 15 bp, Homo sapiens
ttacaaacattgatt

SEQ ID NO: 1700478 - DNA, 15 bp, Homo sapiens
tacaaacattgattc

SEQ ID NO: 1700479 - DNA, 15 bp, Homo sapiens
acaaacattgattca

SEQ ID NO: 1700480 - DNA, 15 bp, Homo sapiens
caaacattgattcat

SEQ ID NO: 1700481 - DNA, 15 bp, Homo sapiens
aaacattgattcata

SEQ ID NO: 1700482 - DNA, 15 bp, Homo sapiens
aacattgattcataa

SEQ ID NO: 1700483 - DNA, 15 bp, Homo sapiens
acattgattcataat

SEQ ID NO: 1700484 - DNA, 15 bp, Homo sapiens
cattgattcataatg

SEQ ID NO: 1700485 - DNA, 15 bp, Homo sapiens
attgattcataatgg

SEQ ID NO: 1700486 - DNA, 15 bp, Homo sapiens
ttgattcataatgga

SEQ ID NO: 1700487 - DNA, 15 bp, Homo sapiens
tgattcataatggac

SEQ ID NO: 1700488 - DNA, 15 bp, Homo sapiens
gattcataatggaca

SEQ ID NO: 1700489 - DNA, 15 bp, Homo sapiens
attcataatggacaa

SEQ ID NO: 1700490 - DNA, 15 bp, Homo sapiens
ttcataatggacaaa

SEQ ID NO: 1700491 - DNA, 15 bp, Homo sapiens
tcataatggacaaat

SEQ ID NO: 1700492 - DNA, 15 bp, Homo sapiens
cataatggacaaatt

SEQ ID NO: 1700493 - DNA, 15 bp, Homo sapiens
ataatggacaaattt

SEQ ID NO: 1700494 - DNA, 15 bp, Homo sapiens
taatggacaaatttg

SEQ ID NO: 1700495 - DNA, 15 bp, Homo sapiens
aatggacaaatttgg

SEQ ID NO: 1700496 - DNA, 15 bp, Homo sapiens
atggacaaatttgga

SEQ ID NO: 1700497 - DNA, 15 bp, Homo sapiens
tggacaaatttggaa

SEQ ID NO: 1700498 - DNA, 15 bp, Homo sapiens
ggacaaatttggaat

SEQ ID NO: 1700499 - DNA, 15 bp, Homo sapiens
gacaaatttggaata

SEQ ID NO: 1700500 - DNA, 15 bp, Homo sapiens
acaaatttggaataa

SEQ ID NO: 1700501 - DNA, 15 bp, Homo sapiens
caaatttggaataaa

SEQ ID NO: 1700502 - DNA, 15 bp, Homo sapiens
aaatttggaataaag

SEQ ID NO: 1700503 - DNA, 15 bp, Homo sapiens
aatttggaataaagt

SEQ ID NO: 1700504 - DNA, 15 bp, Homo sapiens
atttggaataaagta

SEQ ID NO: 1700505 - DNA, 15 bp, Homo sapiens
tttggaataaagtag

SEQ ID NO: 1700506 - DNA, 15 bp, Homo sapiens
ttggaataaagtaga

SEQ ID NO: 1700507 - DNA, 15 bp, Homo sapiens
tggaataaagtagag

SEQ ID NO: 1700508 - DNA, 15 bp, Homo sapiens
ggaataaagtagagt

SEQ ID NO: 1700509 - DNA, 15 bp, Homo sapiens
gaataaagtagagta

SEQ ID NO: 1700510 - DNA, 15 bp, Homo sapiens
aataaagtagagtac

SEQ ID NO: 1700511 - DNA, 15 bp, Homo sapiens
ataaagtagagtact

SEQ ID NO: 1700512 - DNA, 15 bp, Homo sapiens
taaagtagagtactc

SEQ ID NO: 1700513 - DNA, 15 bp, Homo sapiens
aaagtagagtactct

SEQ ID NO: 1700514 - DNA, 15 bp, Homo sapiens
aagtagagtactctt

SEQ ID NO: 1700515 - DNA, 15 bp, Homo sapiens
agtagagtactcttt

SEQ ID NO: 1700516 - DNA, 15 bp, Homo sapiens
gtagagtactcttta

SEQ ID NO: 1700517 - DNA, 15 bp, Homo sapiens
tagagtactctttat

SEQ ID NO: 1700518 - DNA, 15 bp, Homo sapiens
agagtactctttatg

SEQ ID NO: 1700519 - DNA, 15 bp, Homo sapiens
gagtactctttatga

SEQ ID NO: 1700520 - DNA, 15 bp, Homo sapiens
agtactctttatgac

SEQ ID NO: 1700521 - DNA, 15 bp, Homo sapiens
gtactctttatgacc

SEQ ID NO: 1700522 - DNA, 15 bp, Homo sapiens
tactctttatgaccg

SEQ ID NO: 1700523 - DNA, 15 bp, Homo sapiens
actctttatgaccgt

SEQ ID NO: 1700524 - DNA, 15 bp, Homo sapiens
ctctttatgaccgta

SEQ ID NO: 1700525 - DNA, 15 bp, Homo sapiens
tctttatgaccgtat

SEQ ID NO: 1700526 - DNA, 15 bp, Homo sapiens
ctttatgaccgtatg

SEQ ID NO: 1700527 - DNA, 15 bp, Homo sapiens
tttatgaccgtatga

SEQ ID NO: 1700528 - DNA, 15 bp, Homo sapiens
ttatgaccgtatgaa

SEQ ID NO: 1700529 - DNA, 15 bp, Homo sapiens
tatgaccgtatgaaa

SEQ ID NO: 1700530 - DNA, 15 bp, Homo sapiens
atgaccgtatgaaaa

SEQ ID NO: 1700531 - DNA, 15 bp, Homo sapiens
tgaccgtatgaaaat

SEQ ID NO: 1700532 - DNA, 15 bp, Homo sapiens
gaccgtatgaaaatg

SEQ ID NO: 1700533 - DNA, 15 bp, Homo sapiens
accgtatgaaaatga

SEQ ID NO: 1700534 - DNA, 15 bp, Homo sapiens
ccgtatgaaaatgac

SEQ ID NO: 1700535 - DNA, 15 bp, Homo sapiens
cgtatgaaaatgaca

SEQ ID NO: 1700536 - DNA, 15 bp, Homo sapiens
gtatgaaaatgacaa

SEQ ID NO: 1700537 - DNA, 15 bp, Homo sapiens
tatgaaaatgacaag

SEQ ID NO: 1700538 - DNA, 15 bp, Homo sapiens
atgaaaatgacaagg

SEQ ID NO: 1700539 - DNA, 15 bp, Homo sapiens
tgaaaatgacaaggg

SEQ ID NO: 1700540 - DNA, 15 bp, Homo sapiens
gaaaatgacaaggga

SEQ ID NO: 1700541 - DNA, 15 bp, Homo sapiens
aaaatgacaagggag

SEQ ID NO: 1700542 - DNA, 15 bp, Homo sapiens
aaatgacaagggagt

SEQ ID NO: 1700543 - DNA, 15 bp, Homo sapiens
aatgacaagggagtg

SEQ ID NO: 1700544 - DNA, 15 bp, Homo sapiens
atgacaagggagtga

SEQ ID NO: 1700545 - DNA, 15 bp, Homo sapiens
tgacaagggagtgat

SEQ ID NO: 1700546 - DNA, 15 bp, Homo sapiens
gacaagggagtgatt

SEQ ID NO: 1700547 - DNA, 15 bp, Homo sapiens
acaagggagtgattg

SEQ ID NO: 1700548 - DNA, 15 bp, Homo sapiens
caagggagtgattgg

SEQ ID NO: 1700549 - DNA, 15 bp, Homo sapiens
aagggagtgattggg

SEQ ID NO: 1700550 - DNA, 15 bp, Homo sapiens
agggagtgattgggt

SEQ ID NO: 1700551 - DNA, 15 bp, Homo sapiens
gggagtgattgggtt

SEQ ID NO: 1700552 - DNA, 15 bp, Homo sapiens
ggagtgattgggttc

SEQ ID NO: 1700553 - DNA, 15 bp, Homo sapiens
gagtgattgggttct

SEQ ID NO: 1700554 - DNA, 15 bp, Homo sapiens
agtgattgggttctc

SEQ ID NO: 1700555 - DNA, 15 bp, Homo sapiens
gtgattgggttctct

SEQ ID NO: 1700556 - DNA, 15 bp, Homo sapiens
tgattgggttctctt

SEQ ID NO: 1700557 - DNA, 15 bp, Homo sapiens
gattgggttctcttt

SEQ ID NO: 1700558 - DNA, 15 bp, Homo sapiens
attgggttctctttt

SEQ ID NO: 1700559 - DNA, 15 bp, Homo sapiens
ttgggttctcttttg

SEQ ID NO: 1700560 - DNA, 15 bp, Homo sapiens
tgggttctcttttgt

SEQ ID NO: 1700561 - DNA, 15 bp, Homo sapiens
gggttctcttttgtt

SEQ ID NO: 1700562 - DNA, 15 bp, Homo sapiens
ggttctcttttgttt

SEQ ID NO: 1700563 - DNA, 15 bp, Homo sapiens
gttctcttttgtttt

SEQ ID NO: 1700564 - DNA, 15 bp, Homo sapiens
ttctcttttgttttt

SEQ ID NO: 1700565 - DNA, 15 bp, Homo sapiens
tctcttttgttttta

SEQ ID NO: 1700566 - DNA, 15 bp, Homo sapiens
ctcttttgtttttaa

SEQ ID NO: 1700567 - DNA, 15 bp, Homo sapiens
tcttttgtttttaat

SEQ ID NO: 1700568 - DNA, 15 bp, Homo sapiens
cttttgtttttaatg

SEQ ID NO: 1700569 - DNA, 15 bp, Homo sapiens
ttttgtttttaatgt

SEQ ID NO: 1700570 - DNA, 15 bp, Homo sapiens
tttgtttttaatgta

SEQ ID NO: 1700571 - DNA, 15 bp, Homo sapiens
ttgtttttaatgtat

SEQ ID NO: 1700572 - DNA, 15 bp, Homo sapiens
tgtttttaatgtatt

SEQ ID NO: 1700573 - DNA, 15 bp, Homo sapiens
gtttttaatgtatta

SEQ ID NO: 1700574 - DNA, 15 bp, Homo sapiens
tttttaatgtattaa

SEQ ID NO: 1700575 - DNA, 15 bp, Homo sapiens
ttttaatgtattaat

SEQ ID NO: 1700576 - DNA, 15 bp, Homo sapiens
tttaatgtattaata

SEQ ID NO: 1700577 - DNA, 15 bp, Homo sapiens
ttaatgtattaatac

SEQ ID NO: 1700578 - DNA, 15 bp, Homo sapiens
taatgtattaatact

SEQ ID NO: 1700579 - DNA, 15 bp, Homo sapiens
aatgtattaatactg

SEQ ID NO: 1700580 - DNA, 15 bp, Homo sapiens
atgtattaatactga

SEQ ID NO: 1700581 - DNA, 15 bp, Homo sapiens
tgtattaatactgaa

SEQ ID NO: 1700582 - DNA, 15 bp, Homo sapiens
gtattaatactgaat

SEQ ID NO: 1700583 - DNA, 15 bp, Homo sapiens
tattaatactgaata

SEQ ID NO: 1700584 - DNA, 15 bp, Homo sapiens
attaatactgaataa

SEQ ID NO: 1700585 - DNA, 15 bp, Homo sapiens
ttaatactgaataaa

SEQ ID NO: 1700586 - DNA, 15 bp, Homo sapiens
taatactgaataaac

SEQ ID NO: 1700587 - DNA, 15 bp, Homo sapiens
aatactgaataaaca

SEQ ID NO: 1700588 - DNA, 15 bp, Homo sapiens
atactgaataaacag

SEQ ID NO: 1700589 - DNA, 15 bp, Homo sapiens
tactgaataaacaga

SEQ ID NO: 1700590 - DNA, 15 bp, Homo sapiens
actgaataaacagag

SEQ ID NO: 1700591 - DNA, 15 bp, Homo sapiens
ctgaataaacagagg

SEQ ID NO: 1700592 - DNA, 15 bp, Homo sapiens
tgaataaacagaggt

SEQ ID NO: 1700593 - DNA, 15 bp, Homo sapiens
gaataaacagaggtc

SEQ ID NO: 1700594 - DNA, 15 bp, Homo sapiens
aataaacagaggtct

SEQ ID NO: 1700595 - DNA, 15 bp, Homo sapiens
ataaacagaggtctc

SEQ ID NO: 1700596 - DNA, 15 bp, Homo sapiens
taaacagaggtctca

SEQ ID NO: 1700597 - DNA, 15 bp, Homo sapiens
aaacagaggtctcaa

SEQ ID NO: 1700598 - DNA, 15 bp, Homo sapiens
aacagaggtctcaat

SEQ ID NO: 1700599 - DNA, 15 bp, Homo sapiens
acagaggtctcaatt

SEQ ID NO: 1700600 - DNA, 15 bp, Homo sapiens
cagaggtctcaattt

SEQ ID NO: 1700601 - DNA, 15 bp, Homo sapiens
agaggtctcaatttc

SEQ ID NO: 1700602 - DNA, 15 bp, Homo sapiens
gaggtctcaatttct

SEQ ID NO: 1700603 - DNA, 15 bp, Homo sapiens
aggtctcaatttcta

SEQ ID NO: 1700604 - DNA, 15 bp, Homo sapiens
ggtctcaatttctaa

SEQ ID NO: 1700605 - DNA, 15 bp, Homo sapiens
gtctcaatttctaac

SEQ ID NO: 1700606 - DNA, 15 bp, Homo sapiens
tctcaatttctaaca

SEQ ID NO: 1700607 - DNA, 15 bp, Homo sapiens
ctcaatttctaacac

SEQ ID NO: 1700608 - DNA, 15 bp, Homo sapiens
tcaatttctaacaca

SEQ ID NO: 1700609 - DNA, 15 bp, Homo sapiens
caatttctaacacag

SEQ ID NO: 1700610 - DNA, 15 bp, Homo sapiens
aatttctaacacagg

SEQ ID NO: 1700611 - DNA, 15 bp, Homo sapiens
atttctaacacaggc

SEQ ID NO: 1700612 - DNA, 15 bp, Homo sapiens
tttctaacacaggct

SEQ ID NO: 1700613 - DNA, 15 bp, Homo sapiens
ttctaacacaggctt

SEQ ID NO: 1700614 - DNA, 15 bp, Homo sapiens
tctaacacaggcttt

SEQ ID NO: 1700615 - DNA, 15 bp, Homo sapiens
ctaacacaggcttta

SEQ ID NO: 1700616 - DNA, 15 bp, Homo sapiens
taacacaggctttaa

SEQ ID NO: 1700617 - DNA, 15 bp, Homo sapiens
aacacaggctttaaa

SEQ ID NO: 1700618 - DNA, 15 bp, Homo sapiens
acacaggctttaaat

SEQ ID NO: 1700619 - DNA, 15 bp, Homo sapiens
cacaggctttaaata

SEQ ID NO: 1700620 - DNA, 15 bp, Homo sapiens
acaggctttaaataa

SEQ ID NO: 1700621 - DNA, 15 bp, Homo sapiens
caggctttaaataaa

SEQ ID NO: 1700622 - DNA, 15 bp, Homo sapiens
aggctttaaataaat

SEQ ID NO: 1700623 - DNA, 15 bp, Homo sapiens
ggctttaaataaatt

SEQ ID NO: 1700624 - DNA, 15 bp, Homo sapiens
gctttaaataaattc

SEQ ID NO: 1700625 - DNA, 15 bp, Homo sapiens
ctttaaataaattcc

SEQ ID NO: 1700626 - DNA, 15 bp, Homo sapiens
tttaaataaattcca

SEQ ID NO: 1700627 - DNA, 15 bp, Homo sapiens
ttaaataaattccat

SEQ ID NO: 1700628 - DNA, 15 bp, Homo sapiens
taaataaattccatg

SEQ ID NO: 1700629 - DNA, 15 bp, Homo sapiens
aaataaattccatgg

SEQ ID NO: 1700630 - DNA, 15 bp, Homo sapiens
aataaattccatgga

SEQ ID NO: 1700631 - DNA, 15 bp, Homo sapiens
ataaattccatggaa

SEQ ID NO: 1700632 - DNA, 15 bp, Homo sapiens
taaattccatggaag

SEQ ID NO: 1700633 - DNA, 15 bp, Homo sapiens
aaattccatggaaga

SEQ ID NO: 1700634 - DNA, 15 bp, Homo sapiens
aattccatggaagac

SEQ ID NO: 1700635 - DNA, 15 bp, Homo sapiens
attccatggaagact

SEQ ID NO: 1700636 - DNA, 15 bp, Homo sapiens
ttccatggaagactt

SEQ ID NO: 1700637 - DNA, 15 bp, Homo sapiens
tccatggaagacttt

SEQ ID NO: 1700638 - DNA, 15 bp, Homo sapiens
ccatggaagactttt

SEQ ID NO: 1700639 - DNA, 15 bp, Homo sapiens
catggaagacttttt

SEQ ID NO: 1700640 - DNA, 15 bp, Homo sapiens
atggaagactttttc

SEQ ID NO: 1700641 - DNA, 15 bp, Homo sapiens
tggaagactttttct

SEQ ID NO: 1700642 - DNA, 15 bp, Homo sapiens
ggaagactttttctc

SEQ ID NO: 1700643 - DNA, 15 bp, Homo sapiens
gaagactttttctca

SEQ ID NO: 1700644 - DNA, 15 bp, Homo sapiens
aagactttttctcag

SEQ ID NO: 1700645 - DNA, 15 bp, Homo sapiens
agactttttctcagg

SEQ ID NO: 1700646 - DNA, 15 bp, Homo sapiens
gactttttctcagga

SEQ ID NO: 1700647 - DNA, 15 bp, Homo sapiens
actttttctcaggag

SEQ ID NO: 1700648 - DNA, 15 bp, Homo sapiens
ctttttctcaggagc

SEQ ID NO: 1700649 - DNA, 15 bp, Homo sapiens
tttttctcaggagca

SEQ ID NO: 1700650 - DNA, 15 bp, Homo sapiens
ttttctcaggagcag

SEQ ID NO: 1700651 - DNA, 15 bp, Homo sapiens
tttctcaggagcagc

SEQ ID NO: 1700652 - DNA, 15 bp, Homo sapiens
ttctcaggagcagca

SEQ ID NO: 1700653 - DNA, 15 bp, Homo sapiens
tctcaggagcagcag

SEQ ID NO: 1700654 - DNA, 15 bp, Homo sapiens
ctcaggagcagcagg

SEQ ID NO: 1700655 - DNA, 15 bp, Homo sapiens
tcaggagcagcagga

SEQ ID NO: 1700656 - DNA, 15 bp, Homo sapiens
caggagcagcaggat

SEQ ID NO: 1700657 - DNA, 15 bp, Homo sapiens
aggagcagcaggatg

SEQ ID NO: 1700658 - DNA, 15 bp, Homo sapiens
ggagcagcaggatga

SEQ ID NO: 1700659 - DNA, 15 bp, Homo sapiens
gagcagcaggatgaa

SEQ ID NO: 1700660 - DNA, 15 bp, Homo sapiens
agcagcaggatgaat

SEQ ID NO: 1700661 - DNA, 15 bp, Homo sapiens
gcagcaggatgaatc

SEQ ID NO: 1700662 - DNA, 15 bp, Homo sapiens
cagcaggatgaatca

SEQ ID NO: 1700663 - DNA, 15 bp, Homo sapiens
agcaggatgaatcac

SEQ ID NO: 1700664 - DNA, 15 bp, Homo sapiens
gcaggatgaatcaca

SEQ ID NO: 1700665 - DNA, 15 bp, Homo sapiens
caggatgaatcacag

SEQ ID NO: 1700666 - DNA, 15 bp, Homo sapiens
aggatgaatcacagt

SEQ ID NO: 1700667 - DNA, 15 bp, Homo sapiens
ggatgaatcacagtg

SEQ ID NO: 1700668 - DNA, 15 bp, Homo sapiens
gatgaatcacagtga

SEQ ID NO: 1700669 - DNA, 15 bp, Homo sapiens
atgaatcacagtgag

SEQ ID NO: 1700670 - DNA, 15 bp, Homo sapiens
tgaatcacagtgaga

SEQ ID NO: 1700671 - DNA, 15 bp, Homo sapiens
gaatcacagtgagag

SEQ ID NO: 1700672 - DNA, 15 bp, Homo sapiens
aatcacagtgagaga

SEQ ID NO: 1700673 - DNA, 15 bp, Homo sapiens
atcacagtgagagaa

SEQ ID NO: 1700674 - DNA, 15 bp, Homo sapiens
tcacagtgagagaaa

SEQ ID NO: 1700675 - DNA, 15 bp, Homo sapiens
cacagtgagagaaaa

SEQ ID NO: 1700676 - DNA, 15 bp, Homo sapiens
acagtgagagaaaac

SEQ ID NO: 1700677 - DNA, 15 bp, Homo sapiens
cagtgagagaaaaca

SEQ ID NO: 1700678 - DNA, 15 bp, Homo sapiens
agtgagagaaaacac

SEQ ID NO: 1700679 - DNA, 15 bp, Homo sapiens
gtgagagaaaacaca

SEQ ID NO: 1700680 - DNA, 15 bp, Homo sapiens
tgagagaaaacacat

SEQ ID NO: 1700681 - DNA, 15 bp, Homo sapiens
gagagaaaacacatt

SEQ ID NO: 1700682 - DNA, 15 bp, Homo sapiens
agagaaaacacattt

SEQ ID NO: 1700683 - DNA, 15 bp, Homo sapiens
gagaaaacacattta

SEQ ID NO: 1700684 - DNA, 15 bp, Homo sapiens
agaaaacacatttag

SEQ ID NO: 1700685 - DNA, 15 bp, Homo sapiens
gaaaacacatttagc

SEQ ID NO: 1700686 - DNA, 15 bp, Homo sapiens
aaaacacatttagca

SEQ ID NO: 1700687 - DNA, 15 bp, Homo sapiens
aaacacatttagcaa

SEQ ID NO: 1700688 - DNA, 15 bp, Homo sapiens
aacacatttagcaag

SEQ ID NO: 1700689 - DNA, 15 bp, Homo sapiens
acacatttagcaagc

SEQ ID NO: 1700690 - DNA, 15 bp, Homo sapiens
cacatttagcaagca

SEQ ID NO: 1700691 - DNA, 15 bp, Homo sapiens
acatttagcaagcat

SEQ ID NO: 1700692 - DNA, 15 bp, Homo sapiens
catttagcaagcata

SEQ ID NO: 1700693 - DNA, 15 bp, Homo sapiens
atttagcaagcatag

SEQ ID NO: 1700694 - DNA, 15 bp, Homo sapiens
tttagcaagcatagt

SEQ ID NO: 1700695 - DNA, 15 bp, Homo sapiens
ttagcaagcatagtt

SEQ ID NO: 1700696 - DNA, 15 bp, Homo sapiens
tagcaagcatagttt

SEQ ID NO: 1700697 - DNA, 15 bp, Homo sapiens
agcaagcatagtttc

SEQ ID NO: 1700698 - DNA, 15 bp, Homo sapiens
gcaagcatagtttct

SEQ ID NO: 1700699 - DNA, 15 bp, Homo sapiens
caagcatagtttctt

SEQ ID NO: 1700700 - DNA, 15 bp, Homo sapiens
aagcatagtttctta

SEQ ID NO: 1700701 - DNA, 15 bp, Homo sapiens
agcatagtttcttac

SEQ ID NO: 1700702 - DNA, 15 bp, Homo sapiens
gcatagtttcttact

SEQ ID NO: 1700703 - DNA, 15 bp, Homo sapiens
catagtttcttactg

SEQ ID NO: 1700704 - DNA, 15 bp, Homo sapiens
atagtttcttactgc

SEQ ID NO: 1700705 - DNA, 15 bp, Homo sapiens
tagtttcttactgca

SEQ ID NO: 1700706 - DNA, 15 bp, Homo sapiens
agtttcttactgcat

SEQ ID NO: 1700707 - DNA, 15 bp, Homo sapiens
gtttcttactgcatc

SEQ ID NO: 1700708 - DNA, 15 bp, Homo sapiens
tttcttactgcatcc

SEQ ID NO: 1700709 - DNA, 15 bp, Homo sapiens
ttcttactgcatcct

SEQ ID NO: 1700710 - DNA, 15 bp, Homo sapiens
tcttactgcatcctg

SEQ ID NO: 1700711 - DNA, 15 bp, Homo sapiens
cttactgcatcctgc

SEQ ID NO: 1700712 - DNA, 15 bp, Homo sapiens
ttactgcatcctgcc

SEQ ID NO: 1700713 - DNA, 15 bp, Homo sapiens
tactgcatcctgcca

SEQ ID NO: 1700714 - DNA, 15 bp, Homo sapiens
actgcatcctgccac

SEQ ID NO: 1700715 - DNA, 15 bp, Homo sapiens
ctgcatcctgccact

SEQ ID NO: 1700716 - DNA, 15 bp, Homo sapiens
tgcatcctgccacta

SEQ ID NO: 1700717 - DNA, 15 bp, Homo sapiens
gcatcctgccactaa

SEQ ID NO: 1700718 - DNA, 15 bp, Homo sapiens
catcctgccactaaa

SEQ ID NO: 1700719 - DNA, 15 bp, Homo sapiens
atcctgccactaaag

SEQ ID NO: 1700720 - DNA, 15 bp, Homo sapiens
tcctgccactaaaga

SEQ ID NO: 1700721 - DNA, 15 bp, Homo sapiens
cctgccactaaagac

SEQ ID NO: 1700722 - DNA, 15 bp, Homo sapiens
ctgccactaaagact

SEQ ID NO: 1700723 - DNA, 15 bp, Homo sapiens
tgccactaaagactc

SEQ ID NO: 1700724 - DNA, 15 bp, Homo sapiens
gccactaaagactca

SEQ ID NO: 1700725 - DNA, 15 bp, Homo sapiens
ccactaaagactcaa

SEQ ID NO: 1700726 - DNA, 15 bp, Homo sapiens
cactaaagactcaac

SEQ ID NO: 1700727 - DNA, 15 bp, Homo sapiens
actaaagactcaacc

SEQ ID NO: 1700728 - DNA, 15 bp, Homo sapiens
ctaaagactcaacct

SEQ ID NO: 1700729 - DNA, 15 bp, Homo sapiens
taaagactcaacctc

SEQ ID NO: 1700730 - DNA, 15 bp, Homo sapiens
aaagactcaacctct

SEQ ID NO: 1700731 - DNA, 15 bp, Homo sapiens
aagactcaacctctc

SEQ ID NO: 1700732 - DNA, 15 bp, Homo sapiens
agactcaacctctct

SEQ ID NO: 1700733 - DNA, 15 bp, Homo sapiens
gactcaacctctctt

SEQ ID NO: 1700734 - DNA, 15 bp, Homo sapiens
actcaacctctcttc

SEQ ID NO: 1700735 - DNA, 15 bp, Homo sapiens
ctcaacctctcttct

SEQ ID NO: 1700736 - DNA, 15 bp, Homo sapiens
tcaacctctcttcta

SEQ ID NO: 1700737 - DNA, 15 bp, Homo sapiens
caacctctcttctag

SEQ ID NO: 1700738 - DNA, 15 bp, Homo sapiens
aacctctcttctagt

SEQ ID NO: 1700739 - DNA, 15 bp, Homo sapiens
acctctcttctagtt

SEQ ID NO: 1700740 - DNA, 15 bp, Homo sapiens
cctctcttctagttc

SEQ ID NO: 1700741 - DNA, 15 bp, Homo sapiens
ctctcttctagttct

SEQ ID NO: 1700742 - DNA, 15 bp, Homo sapiens
tctcttctagttcta

SEQ ID NO: 1700743 - DNA, 15 bp, Homo sapiens
ctcttctagttctag

SEQ ID NO: 1700744 - DNA, 15 bp, Homo sapiens
tcttctagttctaga

SEQ ID NO: 1700745 - DNA, 15 bp, Homo sapiens
cttctagttctagaa

SEQ ID NO: 1700746 - DNA, 15 bp, Homo sapiens
ttctagttctagaaa

SEQ ID NO: 1700747 - DNA, 15 bp, Homo sapiens
tctagttctagaaat

SEQ ID NO: 1700748 - DNA, 15 bp, Homo sapiens
ctagttctagaaata

SEQ ID NO: 1700749 - DNA, 15 bp, Homo sapiens
tagttctagaaatag

SEQ ID NO: 1700750 - DNA, 15 bp, Homo sapiens
agttctagaaatagc

SEQ ID NO: 1700751 - DNA, 15 bp, Homo sapiens
gttctagaaatagct

SEQ ID NO: 1700752 - DNA, 15 bp, Homo sapiens
ttctagaaatagcta

SEQ ID NO: 1700753 - DNA, 15 bp, Homo sapiens
tctagaaatagctat

SEQ ID NO: 1700754 - DNA, 15 bp, Homo sapiens
ctagaaatagctatt

SEQ ID NO: 1700755 - DNA, 15 bp, Homo sapiens
tagaaatagctattt

SEQ ID NO: 1700756 - DNA, 15 bp, Homo sapiens
agaaatagctatttc

SEQ ID NO: 1700757 - DNA, 15 bp, Homo sapiens
gaaatagctatttca

SEQ ID NO: 1700758 - DNA, 15 bp, Homo sapiens
aaatagctatttcat

SEQ ID NO: 1700759 - DNA, 15 bp, Homo sapiens
aatagctatttcatt

SEQ ID NO: 1700760 - DNA, 15 bp, Homo sapiens
atagctatttcattg

SEQ ID NO: 1700761 - DNA, 15 bp, Homo sapiens
tagctatttcattga

SEQ ID NO: 1700762 - DNA, 15 bp, Homo sapiens
agctatttcattgag

SEQ ID NO: 1700763 - DNA, 15 bp, Homo sapiens
gctatttcattgagt

SEQ ID NO: 1700764 - DNA, 15 bp, Homo sapiens
ctatttcattgagtc

SEQ ID NO: 1700765 - DNA, 15 bp, Homo sapiens
tatttcattgagtcc

SEQ ID NO: 1700766 - DNA, 15 bp, Homo sapiens
atttcattgagtcca

SEQ ID NO: 1700767 - DNA, 15 bp, Homo sapiens
tttcattgagtccat

SEQ ID NO: 1700768 - DNA, 15 bp, Homo sapiens
ttcattgagtccatg

SEQ ID NO: 1700769 - DNA, 15 bp, Homo sapiens
tcattgagtccatgg

SEQ ID NO: 1700770 - DNA, 15 bp, Homo sapiens
cattgagtccatggt

SEQ ID NO: 1700771 - DNA, 15 bp, Homo sapiens
attgagtccatggtg

SEQ ID NO: 1700772 - DNA, 15 bp, Homo sapiens
ttgagtccatggtgc

SEQ ID NO: 1700773 - DNA, 15 bp, Homo sapiens
tgagtccatggtgct

SEQ ID NO: 1700774 - DNA, 15 bp, Homo sapiens
gagtccatggtgctg

SEQ ID NO: 1700775 - DNA, 15 bp, Homo sapiens
agtccatggtgctgt

SEQ ID NO: 1700776 - DNA, 15 bp, Homo sapiens
gtccatggtgctgtc

SEQ ID NO: 1700777 - DNA, 15 bp, Homo sapiens
tccatggtgctgtcc

SEQ ID NO: 1700778 - DNA, 15 bp, Homo sapiens
ccatggtgctgtccc

SEQ ID NO: 1700779 - DNA, 15 bp, Homo sapiens
catggtgctgtccca

SEQ ID NO: 1700780 - DNA, 15 bp, Homo sapiens
atggtgctgtcccag

SEQ ID NO: 1700781 - DNA, 15 bp, Homo sapiens
tggtgctgtcccaga

SEQ ID NO: 1700782 - DNA, 15 bp, Homo sapiens
ggtgctgtcccagat

SEQ ID NO: 1700783 - DNA, 15 bp, Homo sapiens
gtgctgtcccagata

SEQ ID NO: 1700784 - DNA, 15 bp, Homo sapiens
tgctgtcccagataa

SEQ ID NO: 1700785 - DNA, 15 bp, Homo sapiens
gctgtcccagataac

SEQ ID NO: 1700786 - DNA, 15 bp, Homo sapiens
ctgtcccagataact

SEQ ID NO: 1700787 - DNA, 15 bp, Homo sapiens
tgtcccagataacta

SEQ ID NO: 1700788 - DNA, 15 bp, Homo sapiens
gtcccagataactat

SEQ ID NO: 1700789 - DNA, 15 bp, Homo sapiens
tcccagataactata

SEQ ID NO: 1700790 - DNA, 15 bp, Homo sapiens
cccagataactataa

SEQ ID NO: 1700791 - DNA, 15 bp, Homo sapiens
ccagataactataag

SEQ ID NO: 1700792 - DNA, 15 bp, Homo sapiens
cagataactataaga

SEQ ID NO: 1700793 - DNA, 15 bp, Homo sapiens
agataactataagat

SEQ ID NO: 1700794 - DNA, 15 bp, Homo sapiens
gataactataagatg

SEQ ID NO: 1700795 - DNA, 15 bp, Homo sapiens
ataactataagatgt

SEQ ID NO: 1700796 - DNA, 15 bp, Homo sapiens
taactataagatgta

SEQ ID NO: 1700797 - DNA, 15 bp, Homo sapiens
aactataagatgtat

SEQ ID NO: 1700798 - DNA, 15 bp, Homo sapiens
actataagatgtatt

SEQ ID NO: 1700799 - DNA, 15 bp, Homo sapiens
ctataagatgtatta

SEQ ID NO: 1700800 - DNA, 15 bp, Homo sapiens
tataagatgtattat

SEQ ID NO: 1700801 - DNA, 15 bp, Homo sapiens
ataagatgtattata

SEQ ID NO: 1700802 - DNA, 15 bp, Homo sapiens
taagatgtattatat

SEQ ID NO: 1700803 - DNA, 15 bp, Homo sapiens
aagatgtattatata

SEQ ID NO: 1700804 - DNA, 15 bp, Homo sapiens
agatgtattatataa

SEQ ID NO: 1700805 - DNA, 15 bp, Homo sapiens
gatgtattatataag

SEQ ID NO: 1700806 - DNA, 15 bp, Homo sapiens
atgtattatataaga

SEQ ID NO: 1700807 - DNA, 15 bp, Homo sapiens
tgtattatataagag

SEQ ID NO: 1700808 - DNA, 15 bp, Homo sapiens
gtattatataagagc

SEQ ID NO: 1700809 - DNA, 15 bp, Homo sapiens
tattatataagagca

SEQ ID NO: 1700810 - DNA, 15 bp, Homo sapiens
attatataagagcag

SEQ ID NO: 1700811 - DNA, 15 bp, Homo sapiens
ttatataagagcagg

SEQ ID NO: 1700812 - DNA, 15 bp, Homo sapiens
tatataagagcagga

SEQ ID NO: 1700813 - DNA, 15 bp, Homo sapiens
atataagagcaggag

SEQ ID NO: 1700814 - DNA, 15 bp, Homo sapiens
tataagagcaggagt

SEQ ID NO: 1700815 - DNA, 15 bp, Homo sapiens
ataagagcaggagtt

SEQ ID NO: 1700816 - DNA, 15 bp, Homo sapiens
taagagcaggagttt

SEQ ID NO: 1700817 - DNA, 15 bp, Homo sapiens
aagagcaggagttta

SEQ ID NO: 1700818 - DNA, 15 bp, Homo sapiens
agagcaggagtttaa

SEQ ID NO: 1700819 - DNA, 15 bp, Homo sapiens
gagcaggagtttaat

SEQ ID NO: 1700820 - DNA, 15 bp, Homo sapiens
agcaggagtttaata

SEQ ID NO: 1700821 - DNA, 15 bp, Homo sapiens
gcaggagtttaatag

SEQ ID NO: 1700822 - DNA, 15 bp, Homo sapiens
caggagtttaataga

SEQ ID NO: 1700823 - DNA, 15 bp, Homo sapiens
aggagtttaatagag

SEQ ID NO: 1700824 - DNA, 15 bp, Homo sapiens
ggagtttaatagagc

SEQ ID NO: 1700825 - DNA, 15 bp, Homo sapiens
gagtttaatagagct

SEQ ID NO: 1700826 - DNA, 15 bp, Homo sapiens
agtttaatagagctt

SEQ ID NO: 1700827 - DNA, 15 bp, Homo sapiens
gtttaatagagcttc

SEQ ID NO: 1700828 - DNA, 15 bp, Homo sapiens
tttaatagagcttca

SEQ ID NO: 1700829 - DNA, 15 bp, Homo sapiens
ttaatagagcttcag

SEQ ID NO: 1700830 - DNA, 15 bp, Homo sapiens
taatagagcttcagg

SEQ ID NO: 1700831 - DNA, 15 bp, Homo sapiens
aatagagcttcaggg

SEQ ID NO: 1700832 - DNA, 15 bp, Homo sapiens
atagagcttcagggg

SEQ ID NO: 1700833 - DNA, 15 bp, Homo sapiens
tagagcttcagggga

SEQ ID NO: 1700834 - DNA, 15 bp, Homo sapiens
agagcttcaggggag

SEQ ID NO: 1700835 - DNA, 15 bp, Homo sapiens
gagcttcaggggaga

SEQ ID NO: 1700836 - DNA, 15 bp, Homo sapiens
agcttcaggggagaa

SEQ ID NO: 1700837 - DNA, 15 bp, Homo sapiens
gcttcaggggagaaa

SEQ ID NO: 1700838 - DNA, 15 bp, Homo sapiens
cttcaggggagaaag

SEQ ID NO: 1700839 - DNA, 15 bp, Homo sapiens
ttcaggggagaaaga

SEQ ID NO: 1700840 - DNA, 15 bp, Homo sapiens
tcaggggagaaagaa

SEQ ID NO: 1700841 - DNA, 15 bp, Homo sapiens
caggggagaaagaac

SEQ ID NO: 1700842 - DNA, 15 bp, Homo sapiens
aggggagaaagaacc

SEQ ID NO: 1700843 - DNA, 15 bp, Homo sapiens
ggggagaaagaacca

SEQ ID NO: 1700844 - DNA, 15 bp, Homo sapiens
gggagaaagaaccaa

SEQ ID NO: 1700845 - DNA, 15 bp, Homo sapiens
ggagaaagaaccaaa

SEQ ID NO: 1700846 - DNA, 15 bp, Homo sapiens
gagaaagaaccaaac

SEQ ID NO: 1700847 - DNA, 15 bp, Homo sapiens
agaaagaaccaaaca

SEQ ID NO: 1700848 - DNA, 15 bp, Homo sapiens
gaaagaaccaaacac

SEQ ID NO: 1700849 - DNA, 15 bp, Homo sapiens
aaagaaccaaacact

SEQ ID NO: 1700850 - DNA, 15 bp, Homo sapiens
aagaaccaaacacta

SEQ ID NO: 1700851 - DNA, 15 bp, Homo sapiens
agaaccaaacactac

SEQ ID NO: 1700852 - DNA, 15 bp, Homo sapiens
gaaccaaacactaca

SEQ ID NO: 1700853 - DNA, 15 bp, Homo sapiens
accaaacactacatt

SEQ ID NO: 1700854 - DNA, 15 bp, Homo sapiens
ccaaacactacattg

SEQ ID NO: 1700855 - DNA, 15 bp, Homo sapiens
caaacactacattga

SEQ ID NO: 1700856 - DNA, 15 bp, Homo sapiens
aaacactacattgac

SEQ ID NO: 1700857 - DNA, 15 bp, Homo sapiens
aacactacattgaca

SEQ ID NO: 1700858 - DNA, 15 bp, Homo sapiens
acactacattgacat

SEQ ID NO: 1700859 - DNA, 15 bp, Homo sapiens
cactacattgacatt

SEQ ID NO: 1700860 - DNA, 15 bp, Homo sapiens
actacattgacattt

SEQ ID NO: 1700861 - DNA, 15 bp, Homo sapiens
ctacattgacatttc

SEQ ID NO: 1700862 - DNA, 15 bp, Homo sapiens
tacattgacatttct

SEQ ID NO: 1700863 - DNA, 15 bp, Homo sapiens
acattgacatttcta

SEQ ID NO: 1700864 - DNA, 15 bp, Homo sapiens
cattgacatttctat

SEQ ID NO: 1700865 - DNA, 15 bp, Homo sapiens
attgacatttctatt

SEQ ID NO: 1700866 - DNA, 15 bp, Homo sapiens
ttgacatttctattg

SEQ ID NO: 1700867 - DNA, 15 bp, Homo sapiens
tgacatttctattga

SEQ ID NO: 1700868 - DNA, 15 bp, Homo sapiens
gacatttctattgaa

SEQ ID NO: 1700869 - DNA, 15 bp, Homo sapiens
acatttctattgaac

SEQ ID NO: 1700870 - DNA, 15 bp, Homo sapiens
catttctattgaacc

SEQ ID NO: 1700871 - DNA, 15 bp, Homo sapiens
atttctattgaacca

SEQ ID NO: 1700872 - DNA, 15 bp, Homo sapiens
tttctattgaaccat

SEQ ID NO: 1700873 - DNA, 15 bp, Homo sapiens
ttctattgaaccata

SEQ ID NO: 1700874 - DNA, 15 bp, Homo sapiens
tctattgaaccataa

SEQ ID NO: 1700875 - DNA, 15 bp, Homo sapiens
ctattgaaccataac

SEQ ID NO: 1700876 - DNA, 15 bp, Homo sapiens
tattgaaccataaca

SEQ ID NO: 1700877 - DNA, 15 bp, Homo sapiens
attgaaccataacaa

SEQ ID NO: 1700878 - DNA, 15 bp, Homo sapiens
ttgaaccataacaat

SEQ ID NO: 1700879 - DNA, 15 bp, Homo sapiens
tgaaccataacaata

SEQ ID NO: 1700880 - DNA, 15 bp, Homo sapiens
gaaccataacaatac

SEQ ID NO: 1700881 - DNA, 15 bp, Homo sapiens
aaccataacaatacc

SEQ ID NO: 1700882 - DNA, 15 bp, Homo sapiens
accataacaatacca

SEQ ID NO: 1700883 - DNA, 15 bp, Homo sapiens
ccataacaataccaa

SEQ ID NO: 1700884 - DNA, 15 bp, Homo sapiens
cataacaataccaat

SEQ ID NO: 1700885 - DNA, 15 bp, Homo sapiens
ataacaataccaatc

SEQ ID NO: 1700886 - DNA, 15 bp, Homo sapiens
taacaataccaatca

SEQ ID NO: 1700887 - DNA, 15 bp, Homo sapiens
aacaataccaatcat

SEQ ID NO: 1700888 - DNA, 15 bp, Homo sapiens
acaataccaatcata

SEQ ID NO: 1700889 - DNA, 15 bp, Homo sapiens
caataccaatcatat

SEQ ID NO: 1700890 - DNA, 15 bp, Homo sapiens
aataccaatcatatt

SEQ ID NO: 1700891 - DNA, 15 bp, Homo sapiens
ataccaatcatattt

SEQ ID NO: 1700892 - DNA, 15 bp, Homo sapiens
taccaatcatattta

SEQ ID NO: 1700893 - DNA, 15 bp, Homo sapiens
accaatcatatttaa

SEQ ID NO: 1700894 - DNA, 15 bp, Homo sapiens
ccaatcatatttaat

SEQ ID NO: 1700895 - DNA, 15 bp, Homo sapiens
caatcatatttaatt

SEQ ID NO: 1700896 - DNA, 15 bp, Homo sapiens
aatcatatttaattt

SEQ ID NO: 1700897 - DNA, 15 bp, Homo sapiens
atcatatttaatttt

SEQ ID NO: 1700898 - DNA, 15 bp, Homo sapiens
tcatatttaattttt

SEQ ID NO: 1700899 - DNA, 15 bp, Homo sapiens
catatttaatttttg

SEQ ID NO: 1700900 - DNA, 15 bp, Homo sapiens
atatttaatttttgc

SEQ ID NO: 1700901 - DNA, 15 bp, Homo sapiens
tatttaatttttgca

SEQ ID NO: 1700902 - DNA, 15 bp, Homo sapiens
atttaatttttgcat

SEQ ID NO: 1700903 - DNA, 15 bp, Homo sapiens
tttaatttttgcatt

SEQ ID NO: 1700904 - DNA, 15 bp, Homo sapiens
ttaatttttgcattt

SEQ ID NO: 1700905 - DNA, 15 bp, Homo sapiens
taatttttgcatttt

SEQ ID NO: 1700906 - DNA, 15 bp, Homo sapiens
aatttttgcatttta

SEQ ID NO: 1700907 - DNA, 15 bp, Homo sapiens
atttttgcattttaa

SEQ ID NO: 1700908 - DNA, 15 bp, Homo sapiens
tttttgcattttaat

SEQ ID NO: 1700909 - DNA, 15 bp, Homo sapiens
ttttgcattttaatt

SEQ ID NO: 1700910 - DNA, 15 bp, Homo sapiens
tttgcattttaattt

SEQ ID NO: 1700911 - DNA, 15 bp, Homo sapiens
ttgcattttaatttt

SEQ ID NO: 1700912 - DNA, 15 bp, Homo sapiens
tgcattttaattttt

SEQ ID NO: 1700913 - DNA, 15 bp, Homo sapiens
gcattttaatttttt

SEQ ID NO: 1700914 - DNA, 15 bp, Homo sapiens
cattttaattttttc

SEQ ID NO: 1700915 - DNA, 15 bp, Homo sapiens
attttaattttttct

SEQ ID NO: 1700916 - DNA, 15 bp, Homo sapiens
ttttaattttttcta

SEQ ID NO: 1700917 - DNA, 15 bp, Homo sapiens
tttaattttttctag

SEQ ID NO: 1700918 - DNA, 15 bp, Homo sapiens
ttaattttttctagt

SEQ ID NO: 1700919 - DNA, 15 bp, Homo sapiens
taattttttctagtt

SEQ ID NO: 1700920 - DNA, 15 bp, Homo sapiens
aattttttctagttt

SEQ ID NO: 1700921 - DNA, 15 bp, Homo sapiens
attttttctagtttc

SEQ ID NO: 1700922 - DNA, 15 bp, Homo sapiens
ttttttctagtttct

SEQ ID NO: 1700923 - DNA, 15 bp, Homo sapiens
tttttctagtttctg

SEQ ID NO: 1700924 - DNA, 15 bp, Homo sapiens
ttttctagtttctgg

SEQ ID NO: 1700925 - DNA, 15 bp, Homo sapiens
tttctagtttctggg

SEQ ID NO: 1700926 - DNA, 15 bp, Homo sapiens
ttctagtttctgggt

SEQ ID NO: 1700927 - DNA, 15 bp, Homo sapiens
tctagtttctgggta

SEQ ID NO: 1700928 - DNA, 15 bp, Homo sapiens
ctagtttctgggtag

SEQ ID NO: 1700929 - DNA, 15 bp, Homo sapiens
tagtttctgggtaga

SEQ ID NO: 1700930 - DNA, 15 bp, Homo sapiens
agtttctgggtagat

SEQ ID NO: 1700931 - DNA, 15 bp, Homo sapiens
gtttctgggtagata

SEQ ID NO: 1700932 - DNA, 15 bp, Homo sapiens
tttctgggtagatat

SEQ ID NO: 1700933 - DNA, 15 bp, Homo sapiens
ttctgggtagatatt

SEQ ID NO: 1700934 - DNA, 15 bp, Homo sapiens
tctgggtagatattt

SEQ ID NO: 1700935 - DNA, 15 bp, Homo sapiens
ctgggtagatatttg

SEQ ID NO: 1700936 - DNA, 15 bp, Homo sapiens
tgggtagatatttga

SEQ ID NO: 1700937 - DNA, 15 bp, Homo sapiens
gggtagatatttgac

SEQ ID NO: 1700938 - DNA, 15 bp, Homo sapiens
ggtagatatttgaca

SEQ ID NO: 1700939 - DNA, 15 bp, Homo sapiens
gtagatatttgacaa

SEQ ID NO: 1700940 - DNA, 15 bp, Homo sapiens
tagatatttgacaat

SEQ ID NO: 1700941 - DNA, 15 bp, Homo sapiens
agatatttgacaata

SEQ ID NO: 1700942 - DNA, 15 bp, Homo sapiens
gatatttgacaataa

SEQ ID NO: 1700943 - DNA, 15 bp, Homo sapiens
atatttgacaataaa

SEQ ID NO: 1700944 - DNA, 15 bp, Homo sapiens
tatttgacaataaaa

SEQ ID NO: 1700945 - DNA, 15 bp, Homo sapiens
atttgacaataaaag

SEQ ID NO: 1700946 - DNA, 15 bp, Homo sapiens
tttgacaataaaagt

SEQ ID NO: 1700947 - DNA, 15 bp, Homo sapiens
ttgacaataaaagta

SEQ ID NO: 1700948 - DNA, 15 bp, Homo sapiens
tgacaataaaagtaa

SEQ ID NO: 1700949 - DNA, 15 bp, Homo sapiens
gacaataaaagtaaa

SEQ ID NO: 1700950 - DNA, 15 bp, Homo sapiens
acaataaaagtaaaa

SEQ ID NO: 1700951 - DNA, 15 bp, Homo sapiens
caataaaagtaaaag

SEQ ID NO: 1700952 - DNA, 15 bp, Homo sapiens
aataaaagtaaaagt

SEQ ID NO: 1700953 - DNA, 15 bp, Homo sapiens
ataaaagtaaaagta

SEQ ID NO: 1700954 - DNA, 15 bp, Homo sapiens
taaaagtaaaagtaa

SEQ ID NO: 1700955 - DNA, 15 bp, Homo sapiens
aaaagtaaaagtaag

SEQ ID NO: 1700956 - DNA, 15 bp, Homo sapiens
aaagtaaaagtaaga

SEQ ID NO: 1700957 - DNA, 15 bp, Homo sapiens
aagtaaaagtaagaa

SEQ ID NO: 1700958 - DNA, 15 bp, Homo sapiens
agtaaaagtaagaaa

SEQ ID NO: 1700959 - DNA, 15 bp, Homo sapiens
gtaaaagtaagaaag

SEQ ID NO: 1700960 - DNA, 15 bp, Homo sapiens
taaaagtaagaaagg

SEQ ID NO: 1700961 - DNA, 15 bp, Homo sapiens
aaaagtaagaaagga

SEQ ID NO: 1700962 - DNA, 15 bp, Homo sapiens
aaagtaagaaaggat

SEQ ID NO: 1700963 - DNA, 15 bp, Homo sapiens
aagtaagaaaggatg

SEQ ID NO: 1700964 - DNA, 15 bp, Homo sapiens
agtaagaaaggatgg

SEQ ID NO: 1700965 - DNA, 15 bp, Homo sapiens
gtaagaaaggatgga

SEQ ID NO: 1700966 - DNA, 15 bp, Homo sapiens
taagaaaggatggaa

SEQ ID NO: 1700967 - DNA, 15 bp, Homo sapiens
aagaaaggatggaaa

SEQ ID NO: 1700968 - DNA, 15 bp, Homo sapiens
agaaaggatggaaag

SEQ ID NO: 1700969 - DNA, 15 bp, Homo sapiens
gaaaggatggaaaga

SEQ ID NO: 1700970 - DNA, 15 bp, Homo sapiens
aaaggatggaaagaa

SEQ ID NO: 1700971 - DNA, 15 bp, Homo sapiens
aaggatggaaagaag

SEQ ID NO: 1700972 - DNA, 15 bp, Homo sapiens
aggatggaaagaagg

SEQ ID NO: 1700973 - DNA, 15 bp, Homo sapiens
ggatggaaagaaggg

SEQ ID NO: 1700974 - DNA, 15 bp, Homo sapiens
gatggaaagaaggga

SEQ ID NO: 1700975 - DNA, 15 bp, Homo sapiens
atggaaagaagggag

SEQ ID NO: 1700976 - DNA, 15 bp, Homo sapiens
tggaaagaagggagg

SEQ ID NO: 1700977 - DNA, 15 bp, Homo sapiens
ggaaagaagggaggg

SEQ ID NO: 1700978 - DNA, 15 bp, Homo sapiens
gaaagaagggaggga

SEQ ID NO: 1700979 - DNA, 15 bp, Homo sapiens
aaagaagggagggag

SEQ ID NO: 1700980 - DNA, 15 bp, Homo sapiens
aagaagggagggagg

SEQ ID NO: 1700981 - DNA, 15 bp, Homo sapiens
agaagggagggaggg

SEQ ID NO: 1700982 - DNA, 15 bp, Homo sapiens
gaagggagggaggga

SEQ ID NO: 1700983 - DNA, 15 bp, Homo sapiens
agggagggaaggaaa

SEQ ID NO: 1700984 - DNA, 15 bp, Homo sapiens
gggagggaaggaaaa

SEQ ID NO: 1700985 - DNA, 15 bp, Homo sapiens
ggagggaaggaaaat

SEQ ID NO: 1700986 - DNA, 15 bp, Homo sapiens
gagggaaggaaaatc

SEQ ID NO: 1700987 - DNA, 15 bp, Homo sapiens
agggaaggaaaatct

SEQ ID NO: 1700988 - DNA, 15 bp, Homo sapiens
gggaaggaaaatctg

SEQ ID NO: 1700989 - DNA, 15 bp, Homo sapiens
ggaaggaaaatctga

SEQ ID NO: 1700990 - DNA, 15 bp, Homo sapiens
gaaggaaaatctgac

SEQ ID NO: 1700991 - DNA, 15 bp, Homo sapiens
aaggaaaatctgact

SEQ ID NO: 1700992 - DNA, 15 bp, Homo sapiens
aggaaaatctgactt

SEQ ID NO: 1700993 - DNA, 15 bp, Homo sapiens
ggaaaatctgacttt

SEQ ID NO: 1700994 - DNA, 15 bp, Homo sapiens
gaaaatctgactttt

SEQ ID NO: 1700995 - DNA, 15 bp, Homo sapiens
aaaatctgacttttt

SEQ ID NO: 1700996 - DNA, 15 bp, Homo sapiens
aaatctgactttttc

SEQ ID NO: 1700997 - DNA, 15 bp, Homo sapiens
aatctgactttttca

SEQ ID NO: 1700998 - DNA, 15 bp, Homo sapiens
atctgactttttcat

SEQ ID NO: 1700999 - DNA, 15 bp, Homo sapiens
tctgactttttcatt

SEQ ID NO: 1701000 - DNA, 15 bp, Homo sapiens
ctgactttttcattg

SEQ ID NO: 1701001 - DNA, 15 bp, Homo sapiens
tgactttttcattgt

SEQ ID NO: 1701002 - DNA, 15 bp, Homo sapiens
gactttttcattgtt

SEQ ID NO: 1701003 - DNA, 15 bp, Homo sapiens
actttttcattgttg

SEQ ID NO: 1701004 - DNA, 15 bp, Homo sapiens
ctttttcattgttgt

SEQ ID NO: 1701005 - DNA, 15 bp, Homo sapiens
tttttcattgttgtt

SEQ ID NO: 1701006 - DNA, 15 bp, Homo sapiens
ttttcattgttgttg

SEQ ID NO: 1701007 - DNA, 15 bp, Homo sapiens
tttcattgttgttgt

SEQ ID NO: 1701008 - DNA, 15 bp, Homo sapiens
ttcattgttgttgtt

SEQ ID NO: 1701009 - DNA, 15 bp, Homo sapiens
tcattgttgttgttc

SEQ ID NO: 1701010 - DNA, 15 bp, Homo sapiens
cattgttgttgttca

SEQ ID NO: 1701011 - DNA, 15 bp, Homo sapiens
attgttgttgttcaa

SEQ ID NO: 1701012 - DNA, 15 bp, Homo sapiens
ttgttgttgttcaag

SEQ ID NO: 1701013 - DNA, 15 bp, Homo sapiens
tgttgttgttcaagc

SEQ ID NO: 1701014 - DNA, 15 bp, Homo sapiens
gttgttgttcaagct

SEQ ID NO: 1701015 - DNA, 15 bp, Homo sapiens
ttgttgttcaagctg

SEQ ID NO: 1701016 - DNA, 15 bp, Homo sapiens
tgttgttcaagctgg

SEQ ID NO: 1701017 - DNA, 15 bp, Homo sapiens
gttgttcaagctggt

SEQ ID NO: 1701018 - DNA, 15 bp, Homo sapiens
ttgttcaagctggta

SEQ ID NO: 1701019 - DNA, 15 bp, Homo sapiens
tgttcaagctggtag

SEQ ID NO: 1701020 - DNA, 15 bp, Homo sapiens
gttcaagctggtaga

SEQ ID NO: 1701021 - DNA, 15 bp, Homo sapiens
ttcaagctggtagag

SEQ ID NO: 1701022 - DNA, 15 bp, Homo sapiens
tcaagctggtagagg

SEQ ID NO: 1701023 - DNA, 15 bp, Homo sapiens
caagctggtagagga

SEQ ID NO: 1701024 - DNA, 15 bp, Homo sapiens
aagctggtagaggac

SEQ ID NO: 1701025 - DNA, 15 bp, Homo sapiens
agctggtagaggacc

SEQ ID NO: 1701026 - DNA, 15 bp, Homo sapiens
gctggtagaggacct

SEQ ID NO: 1701027 - DNA, 15 bp, Homo sapiens
ctggtagaggaccta

SEQ ID NO: 1701028 - DNA, 15 bp, Homo sapiens
tggtagaggacctag

SEQ ID NO: 1701029 - DNA, 15 bp, Homo sapiens
ggtagaggacctagc

SEQ ID NO: 1701030 - DNA, 15 bp, Homo sapiens
gtagaggacctagcg

SEQ ID NO: 1701031 - DNA, 15 bp, Homo sapiens
tagaggacctagcgt

SEQ ID NO: 1701032 - DNA, 15 bp, Homo sapiens
agaggacctagcgta

SEQ ID NO: 1701033 - DNA, 15 bp, Homo sapiens
gaggacctagcgtag

SEQ ID NO: 1701034 - DNA, 15 bp, Homo sapiens
aggacctagcgtagg

SEQ ID NO: 1701035 - DNA, 15 bp, Homo sapiens
ggacctagcgtaggt

SEQ ID NO: 1701036 - DNA, 15 bp, Homo sapiens
gacctagcgtaggtg

SEQ ID NO: 1701037 - DNA, 15 bp, Homo sapiens
acctagcgtaggtgt

SEQ ID NO: 1701038 - DNA, 15 bp, Homo sapiens
cctagcgtaggtgta

SEQ ID NO: 1701039 - DNA, 15 bp, Homo sapiens
ctagcgtaggtgtag

SEQ ID NO: 1701040 - DNA, 15 bp, Homo sapiens
tagcgtaggtgtagg

SEQ ID NO: 1701041 - DNA, 15 bp, Homo sapiens
agcgtaggtgtaggg

SEQ ID NO: 1701042 - DNA, 15 bp, Homo sapiens
gcgtaggtgtagggg

SEQ ID NO: 1701043 - DNA, 15 bp, Homo sapiens
cgtaggtgtagggga

SEQ ID NO: 1701044 - DNA, 15 bp, Homo sapiens
gtaggtgtaggggac

SEQ ID NO: 1701045 - DNA, 15 bp, Homo sapiens
taggtgtaggggacc

SEQ ID NO: 1701046 - DNA, 15 bp, Homo sapiens
aggtgtaggggacca

SEQ ID NO: 1701047 - DNA, 15 bp, Homo sapiens
ggtgtaggggaccat

SEQ ID NO: 1701048 - DNA, 15 bp, Homo sapiens
gtgtaggggaccatc

SEQ ID NO: 1701049 - DNA, 15 bp, Homo sapiens
tgtaggggaccatca

SEQ ID NO: 1701050 - DNA, 15 bp, Homo sapiens
gtaggggaccatcag

SEQ ID NO: 1701051 - DNA, 15 bp, Homo sapiens
taggggaccatcaga

SEQ ID NO: 1701052 - DNA, 15 bp, Homo sapiens
aggggaccatcagat

SEQ ID NO: 1701053 - DNA, 15 bp, Homo sapiens
ggggaccatcagatt

SEQ ID NO: 1701054 - DNA, 15 bp, Homo sapiens
gggaccatcagattc

SEQ ID NO: 1701055 - DNA, 15 bp, Homo sapiens
ggaccatcagattcc

SEQ ID NO: 1701056 - DNA, 15 bp, Homo sapiens
gaccatcagattccc

SEQ ID NO: 1701057 - DNA, 15 bp, Homo sapiens
accatcagattccct

SEQ ID NO: 1701058 - DNA, 15 bp, Homo sapiens
ccatcagattccctg

SEQ ID NO: 1701059 - DNA, 15 bp, Homo sapiens
catcagattccctgg

SEQ ID NO: 1701060 - DNA, 15 bp, Homo sapiens
atcagattccctgga

SEQ ID NO: 1701061 - DNA, 15 bp, Homo sapiens
tcagattccctggac

SEQ ID NO: 1701062 - DNA, 15 bp, Homo sapiens
cagattccctggaca

SEQ ID NO: 1701063 - DNA, 15 bp, Homo sapiens
agattccctggacat

SEQ ID NO: 1701064 - DNA, 15 bp, Homo sapiens
gattccctggacatc

SEQ ID NO: 1701065 - DNA, 15 bp, Homo sapiens
attccctggacatct

SEQ ID NO: 1701066 - DNA, 15 bp, Homo sapiens
ttccctggacatctg

SEQ ID NO: 1701067 - DNA, 15 bp, Homo sapiens
tccctggacatctgg

SEQ ID NO: 1701068 - DNA, 15 bp, Homo sapiens
ccctggacatctgga

SEQ ID NO: 1701069 - DNA, 15 bp, Homo sapiens
cctggacatctggag

SEQ ID NO: 1701070 - DNA, 15 bp, Homo sapiens
ctggacatctggaga

SEQ ID NO: 1701071 - DNA, 15 bp, Homo sapiens
tggacatctggagat

SEQ ID NO: 1701072 - DNA, 15 bp, Homo sapiens
ggacatctggagatc

SEQ ID NO: 1701073 - DNA, 15 bp, Homo sapiens
gacatctggagatca

SEQ ID NO: 1701074 - DNA, 15 bp, Homo sapiens
acatctggagatcag

SEQ ID NO: 1701075 - DNA, 15 bp, Homo sapiens
catctggagatcaga

SEQ ID NO: 1701076 - DNA, 15 bp, Homo sapiens
atctggagatcagat

SEQ ID NO: 1701077 - DNA, 15 bp, Homo sapiens
tctggagatcagatt

SEQ ID NO: 1701078 - DNA, 15 bp, Homo sapiens
ctggagatcagattc

SEQ ID NO: 1701079 - DNA, 15 bp, Homo sapiens
tggagatcagattcc

SEQ ID NO: 1701080 - DNA, 15 bp, Homo sapiens
ggagatcagattccc

SEQ ID NO: 1701081 - DNA, 15 bp, Homo sapiens
gagatcagattccca

SEQ ID NO: 1701082 - DNA, 15 bp, Homo sapiens
agatcagattcccat

SEQ ID NO: 1701083 - DNA, 15 bp, Homo sapiens
gatcagattcccata

SEQ ID NO: 1701084 - DNA, 15 bp, Homo sapiens
atcagattcccatag

SEQ ID NO: 1701085 - DNA, 15 bp, Homo sapiens
tcagattcccataga

SEQ ID NO: 1701086 - DNA, 15 bp, Homo sapiens
cagattcccatagag

SEQ ID NO: 1701087 - DNA, 15 bp, Homo sapiens
agattcccatagagt

SEQ ID NO: 1701088 - DNA, 15 bp, Homo sapiens
gattcccatagagtt

SEQ ID NO: 1701089 - DNA, 15 bp, Homo sapiens
attcccatagagttc

SEQ ID NO: 1701090 - DNA, 15 bp, Homo sapiens
ttcccatagagttct

SEQ ID NO: 1701091 - DNA, 15 bp, Homo sapiens
tcccatagagttctc

SEQ ID NO: 1701092 - DNA, 15 bp, Homo sapiens
cccatagagttctct

SEQ ID NO: 1701093 - DNA, 15 bp, Homo sapiens
ccatagagttctctt

SEQ ID NO: 1701094 - DNA, 15 bp, Homo sapiens
catagagttctcttg

SEQ ID NO: 1701095 - DNA, 15 bp, Homo sapiens
atagagttctcttga

SEQ ID NO: 1701096 - DNA, 15 bp, Homo sapiens
tagagttctcttgat

SEQ ID NO: 1701097 - DNA, 15 bp, Homo sapiens
agagttctcttgatg

SEQ ID NO: 1701098 - DNA, 15 bp, Homo sapiens
gagttctcttgatgc

SEQ ID NO: 1701099 - DNA, 15 bp, Homo sapiens
agttctcttgatgca

SEQ ID NO: 1701100 - DNA, 15 bp, Homo sapiens
gttctcttgatgcag

SEQ ID NO: 1701101 - DNA, 15 bp, Homo sapiens
ttctcttgatgcagg

SEQ ID NO: 1701102 - DNA, 15 bp, Homo sapiens
tctcttgatgcagga

SEQ ID NO: 1701103 - DNA, 15 bp, Homo sapiens
ctcttgatgcaggaa

SEQ ID NO: 1701104 - DNA, 15 bp, Homo sapiens
tcttgatgcaggaac

SEQ ID NO: 1701105 - DNA, 15 bp, Homo sapiens
cttgatgcaggaaca

SEQ ID NO: 1701106 - DNA, 15 bp, Homo sapiens
ttgatgcaggaacaa

SEQ ID NO: 1701107 - DNA, 15 bp, Homo sapiens
tgatgcaggaacaat

SEQ ID NO: 1701108 - DNA, 15 bp, Homo sapiens
gatgcaggaacaatt

SEQ ID NO: 1701109 - DNA, 15 bp, Homo sapiens
atgcaggaacaattc

SEQ ID NO: 1701110 - DNA, 15 bp, Homo sapiens
tgcaggaacaattca

SEQ ID NO: 1701111 - DNA, 15 bp, Homo sapiens
gcaggaacaattcag

SEQ ID NO: 1701112 - DNA, 15 bp, Homo sapiens
caggaacaattcagg

SEQ ID NO: 1701113 - DNA, 15 bp, Homo sapiens
aggaacaattcagga

SEQ ID NO: 1701114 - DNA, 15 bp, Homo sapiens
ggaacaattcaggag

SEQ ID NO: 1701115 - DNA, 15 bp, Homo sapiens
gaacaattcaggagg

SEQ ID NO: 1701116 - DNA, 15 bp, Homo sapiens
aacaattcaggaggg

SEQ ID NO: 1701117 - DNA, 15 bp, Homo sapiens
acaattcaggaggga

SEQ ID NO: 1701118 - DNA, 15 bp, Homo sapiens
caattcaggagggaa

SEQ ID NO: 1701119 - DNA, 15 bp, Homo sapiens
aattcaggagggaac

SEQ ID NO: 1701120 - DNA, 15 bp, Homo sapiens
attcaggagggaacc

SEQ ID NO: 1701121 - DNA, 15 bp, Homo sapiens
ttcaggagggaacca

SEQ ID NO: 1701122 - DNA, 15 bp, Homo sapiens
tcaggagggaaccat

SEQ ID NO: 1701123 - DNA, 15 bp, Homo sapiens
caggagggaaccatt

SEQ ID NO: 1701124 - DNA, 15 bp, Homo sapiens
aggagggaaccattt

SEQ ID NO: 1701125 - DNA, 15 bp, Homo sapiens
ggagggaaccattta

SEQ ID NO: 1701126 - DNA, 15 bp, Homo sapiens
gagggaaccatttaa

SEQ ID NO: 1701127 - DNA, 15 bp, Homo sapiens
agggaaccatttaac

SEQ ID NO: 1701128 - DNA, 15 bp, Homo sapiens
gggaaccatttaact

SEQ ID NO: 1701129 - DNA, 15 bp, Homo sapiens
ggaaccatttaacta

SEQ ID NO: 1701130 - DNA, 15 bp, Homo sapiens
gaaccatttaactaa

SEQ ID NO: 1701131 - DNA, 15 bp, Homo sapiens
aaccatttaactaaa

SEQ ID NO: 1701132 - DNA, 15 bp, Homo sapiens
accatttaactaaaa

SEQ ID NO: 1701133 - DNA, 15 bp, Homo sapiens
ccatttaactaaaag

SEQ ID NO: 1701134 - DNA, 15 bp, Homo sapiens
catttaactaaaagg

SEQ ID NO: 1701135 - DNA, 15 bp, Homo sapiens
atttaactaaaagga

SEQ ID NO: 1701136 - DNA, 15 bp, Homo sapiens
tttaactaaaaggaa

SEQ ID NO: 1701137 - DNA, 15 bp, Homo sapiens
ttaactaaaaggaaa

SEQ ID NO: 1701138 - DNA, 15 bp, Homo sapiens
taactaaaaggaaat

SEQ ID NO: 1701139 - DNA, 15 bp, Homo sapiens
aactaaaaggaaatc

SEQ ID NO: 1701140 - DNA, 15 bp, Homo sapiens
actaaaaggaaatct

SEQ ID NO: 1701141 - DNA, 15 bp, Homo sapiens
ctaaaaggaaatcta

SEQ ID NO: 1701142 - DNA, 15 bp, Homo sapiens
taaaaggaaatctaa

SEQ ID NO: 1701143 - DNA, 15 bp, Homo sapiens
aaaaggaaatctaaa

SEQ ID NO: 1701144 - DNA, 15 bp, Homo sapiens
aaaggaaatctaaat

SEQ ID NO: 1701145 - DNA, 15 bp, Homo sapiens
aaggaaatctaaatc

SEQ ID NO: 1701146 - DNA, 15 bp, Homo sapiens
aggaaatctaaatct

SEQ ID NO: 1701147 - DNA, 15 bp, Homo sapiens
ggaaatctaaatcta

SEQ ID NO: 1701148 - DNA, 15 bp, Homo sapiens
gaaatctaaatctaa

SEQ ID NO: 1701149 - DNA, 15 bp, Homo sapiens
aaatctaaatctaat

SEQ ID NO: 1701150 - DNA, 15 bp, Homo sapiens
aatctaaatctaata

SEQ ID NO: 1701151 - DNA, 15 bp, Homo sapiens
atctaaatctaatat

SEQ ID NO: 1701152 - DNA, 15 bp, Homo sapiens
tctaaatctaatata

SEQ ID NO: 1701153 - DNA, 15 bp, Homo sapiens
ctaaatctaatatac

SEQ ID NO: 1701154 - DNA, 15 bp, Homo sapiens
taaatctaatatacg

SEQ ID NO: 1701155 - DNA, 15 bp, Homo sapiens
aaatctaatatacgg

SEQ ID NO: 1701156 - DNA, 15 bp, Homo sapiens
aatctaatatacggt

SEQ ID NO: 1701157 - DNA, 15 bp, Homo sapiens
atctaatatacggtc

SEQ ID NO: 1701158 - DNA, 15 bp, Homo sapiens
tctaatatacggtct

SEQ ID NO: 1701159 - DNA, 15 bp, Homo sapiens
ctaatatacggtcta

SEQ ID NO: 1701160 - DNA, 15 bp, Homo sapiens
taatatacggtctag

SEQ ID NO: 1701161 - DNA, 15 bp, Homo sapiens
aatatacggtctagt

SEQ ID NO: 1701162 - DNA, 15 bp, Homo sapiens
atatacggtctagtt

SEQ ID NO: 1701163 - DNA, 15 bp, Homo sapiens
tatacggtctagttt

SEQ ID NO: 1701164 - DNA, 15 bp, Homo sapiens
atacggtctagtttt

SEQ ID NO: 1701165 - DNA, 15 bp, Homo sapiens
tacggtctagtttta

SEQ ID NO: 1701166 - DNA, 15 bp, Homo sapiens
acggtctagttttac

SEQ ID NO: 1701167 - DNA, 15 bp, Homo sapiens
cggtctagttttaca

SEQ ID NO: 1701168 - DNA, 15 bp, Homo sapiens
ggtctagttttacag

SEQ ID NO: 1701169 - DNA, 15 bp, Homo sapiens
gtctagttttacaga

SEQ ID NO: 1701170 - DNA, 15 bp, Homo sapiens
tctagttttacagag

SEQ ID NO: 1701171 - DNA, 15 bp, Homo sapiens
ctagttttacagaga

SEQ ID NO: 1701172 - DNA, 15 bp, Homo sapiens
tagttttacagagat

SEQ ID NO: 1701173 - DNA, 15 bp, Homo sapiens
agttttacagagatt

SEQ ID NO: 1701174 - DNA, 15 bp, Homo sapiens
gttttacagagatta

SEQ ID NO: 1701175 - DNA, 15 bp, Homo sapiens
ttttacagagattaa

SEQ ID NO: 1701176 - DNA, 15 bp, Homo sapiens
tttacagagattaaa

SEQ ID NO: 1701177 - DNA, 15 bp, Homo sapiens
ttacagagattaaaa

SEQ ID NO: 1701178 - DNA, 15 bp, Homo sapiens
tacagagattaaaat

SEQ ID NO: 1701179 - DNA, 15 bp, Homo sapiens
acagagattaaaatg

SEQ ID NO: 1701180 - DNA, 15 bp, Homo sapiens
cagagattaaaatgt

SEQ ID NO: 1701181 - DNA, 15 bp, Homo sapiens
agagattaaaatgtt

SEQ ID NO: 1701182 - DNA, 15 bp, Homo sapiens
gagattaaaatgttt

SEQ ID NO: 1701183 - DNA, 15 bp, Homo sapiens
agattaaaatgtttc

SEQ ID NO: 1701184 - DNA, 15 bp, Homo sapiens
gattaaaatgtttca

SEQ ID NO: 1701185 - DNA, 15 bp, Homo sapiens
attaaaatgtttcat

SEQ ID NO: 1701186 - DNA, 15 bp, Homo sapiens
ttaaaatgtttcata

SEQ ID NO: 1701187 - DNA, 15 bp, Homo sapiens
taaaatgtttcatat

SEQ ID NO: 1701188 - DNA, 15 bp, Homo sapiens
aaaatgtttcatatt

SEQ ID NO: 1701189 - DNA, 15 bp, Homo sapiens
aaatgtttcatatta

SEQ ID NO: 1701190 - DNA, 15 bp, Homo sapiens
aatgtttcatattat

SEQ ID NO: 1701191 - DNA, 15 bp, Homo sapiens
atgtttcatattatg

SEQ ID NO: 1701192 - DNA, 15 bp, Homo sapiens
tgtttcatattatgt

SEQ ID NO: 1701193 - DNA, 15 bp, Homo sapiens
gtttcatattatgtt

SEQ ID NO: 1701194 - DNA, 15 bp, Homo sapiens
tttcatattatgttc

SEQ ID NO: 1701195 - DNA, 15 bp, Homo sapiens
ttcatattatgttct

SEQ ID NO: 1701196 - DNA, 15 bp, Homo sapiens
tcatattatgttcta

SEQ ID NO: 1701197 - DNA, 15 bp, Homo sapiens
catattatgttctac

SEQ ID NO: 1701198 - DNA, 15 bp, Homo sapiens
atattatgttctact

SEQ ID NO: 1701199 - DNA, 15 bp, Homo sapiens
tattatgttctacta

SEQ ID NO: 1701200 - DNA, 15 bp, Homo sapiens
attatgttctactag

SEQ ID NO: 1701201 - DNA, 15 bp, Homo sapiens
ttatgttctactagt

SEQ ID NO: 1701202 - DNA, 15 bp, Homo sapiens
tatgttctactagtc

SEQ ID NO: 1701203 - DNA, 15 bp, Homo sapiens
atgttctactagtca

SEQ ID NO: 1701204 - DNA, 15 bp, Homo sapiens
tgttctactagtcag

SEQ ID NO: 1701205 - DNA, 15 bp, Homo sapiens
gttctactagtcagc

SEQ ID NO: 1701206 - DNA, 15 bp, Homo sapiens
tctactagtcagcat

SEQ ID NO: 1701207 - DNA, 15 bp, Homo sapiens
ctactagtcagcatt

SEQ ID NO: 1701208 - DNA, 15 bp, Homo sapiens
tactagtcagcatta

SEQ ID NO: 1701209 - DNA, 15 bp, Homo sapiens
actagtcagcattat

SEQ ID NO: 1701210 - DNA, 15 bp, Homo sapiens
ctagtcagcattata

SEQ ID NO: 1701211 - DNA, 15 bp, Homo sapiens
tagtcagcattatac

SEQ ID NO: 1701212 - DNA, 15 bp, Homo sapiens
agtcagcattataca

SEQ ID NO: 1701213 - DNA, 15 bp, Homo sapiens
gtcagcattatacat

SEQ ID NO: 1701214 - DNA, 15 bp, Homo sapiens
tcagcattatacatt

SEQ ID NO: 1701215 - DNA, 15 bp, Homo sapiens
cagcattatacattt

SEQ ID NO: 1701216 - DNA, 15 bp, Homo sapiens
agcattatacattta

SEQ ID NO: 1701217 - DNA, 15 bp, Homo sapiens
gcattatacatttag

SEQ ID NO: 1701218 - DNA, 15 bp, Homo sapiens
cattatacatttaga

SEQ ID NO: 1701219 - DNA, 15 bp, Homo sapiens
attatacatttagaa

SEQ ID NO: 1701220 - DNA, 15 bp, Homo sapiens
ttatacatttagaat

SEQ ID NO: 1701221 - DNA, 15 bp, Homo sapiens
tatacatttagaata

SEQ ID NO: 1701222 - DNA, 15 bp, Homo sapiens
atacatttagaatag

SEQ ID NO: 1701223 - DNA, 15 bp, Homo sapiens
tacatttagaataga

SEQ ID NO: 1701224 - DNA, 15 bp, Homo sapiens
acatttagaatagaa

SEQ ID NO: 1701225 - DNA, 15 bp, Homo sapiens
catttagaatagaac

SEQ ID NO: 1701226 - DNA, 15 bp, Homo sapiens
atttagaatagaaca

SEQ ID NO: 1701227 - DNA, 15 bp, Homo sapiens
tttagaatagaacaa

SEQ ID NO: 1701228 - DNA, 15 bp, Homo sapiens
ttagaatagaacaat

SEQ ID NO: 1701229 - DNA, 15 bp, Homo sapiens
tagaatagaacaatt

SEQ ID NO: 1701230 - DNA, 15 bp, Homo sapiens
agaatagaacaatta

SEQ ID NO: 1701231 - DNA, 15 bp, Homo sapiens
gaatagaacaattaa

SEQ ID NO: 1701232 - DNA, 15 bp, Homo sapiens
aatagaacaattaaa

SEQ ID NO: 1701233 - DNA, 15 bp, Homo sapiens
atagaacaattaaac

SEQ ID NO: 1701234 - DNA, 15 bp, Homo sapiens
tagaacaattaaact

SEQ ID NO: 1701235 - DNA, 15 bp, Homo sapiens
agaacaattaaactc

SEQ ID NO: 1701236 - DNA, 15 bp, Homo sapiens
gaacaattaaactca

SEQ ID NO: 1701237 - DNA, 15 bp, Homo sapiens
aacaattaaactcag

SEQ ID NO: 1701238 - DNA, 15 bp, Homo sapiens
acaattaaactcagt

SEQ ID NO: 1701239 - DNA, 15 bp, Homo sapiens
caattaaactcagtt

SEQ ID NO: 1701240 - DNA, 15 bp, Homo sapiens
aattaaactcagtta

SEQ ID NO: 1701241 - DNA, 15 bp, Homo sapiens
attaaactcagttat

SEQ ID NO: 1701242 - DNA, 15 bp, Homo sapiens
ttaaactcagttata

SEQ ID NO: 1701243 - DNA, 15 bp, Homo sapiens
taaactcagttatat

SEQ ID NO: 1701244 - DNA, 15 bp, Homo sapiens
aaactcagttatatg

SEQ ID NO: 1701245 - DNA, 15 bp, Homo sapiens
aactcagttatatgt

SEQ ID NO: 1701246 - DNA, 15 bp, Homo sapiens
actcagttatatgta

SEQ ID NO: 1701247 - DNA, 15 bp, Homo sapiens
ctcagttatatgtag

SEQ ID NO: 1701248 - DNA, 15 bp, Homo sapiens
tcagttatatgtagg

SEQ ID NO: 1701249 - DNA, 15 bp, Homo sapiens
cagttatatgtaggc

SEQ ID NO: 1701250 - DNA, 15 bp, Homo sapiens
agttatatgtaggcc

SEQ ID NO: 1701251 - DNA, 15 bp, Homo sapiens
gttatatgtaggcca

SEQ ID NO: 1701252 - DNA, 15 bp, Homo sapiens
ttatatgtaggccag

SEQ ID NO: 1701253 - DNA, 15 bp, Homo sapiens
tatatgtaggccagc

SEQ ID NO: 1701254 - DNA, 15 bp, Homo sapiens
atatgtaggccagca

SEQ ID NO: 1701255 - DNA, 15 bp, Homo sapiens
tatgtaggccagcat

SEQ ID NO: 1701256 - DNA, 15 bp, Homo sapiens
atgtaggccagcata

SEQ ID NO: 1701257 - DNA, 15 bp, Homo sapiens
tgtaggccagcatac

SEQ ID NO: 1701258 - DNA, 15 bp, Homo sapiens
gtaggccagcatacg

SEQ ID NO: 1701259 - DNA, 15 bp, Homo sapiens
taggccagcatacgt

SEQ ID NO: 1701260 - DNA, 15 bp, Homo sapiens
aggccagcatacgtt

SEQ ID NO: 1701261 - DNA, 15 bp, Homo sapiens
ggccagcatacgttt

SEQ ID NO: 1701262 - DNA, 15 bp, Homo sapiens
gccagcatacgtttt

SEQ ID NO: 1701263 - DNA, 15 bp, Homo sapiens
ccagcatacgtttta

SEQ ID NO: 1701264 - DNA, 15 bp, Homo sapiens
cagcatacgttttaa

SEQ ID NO: 1701265 - DNA, 15 bp, Homo sapiens
agcatacgttttaaa

SEQ ID NO: 1701266 - DNA, 15 bp, Homo sapiens
gcatacgttttaaaa

SEQ ID NO: 1701267 - DNA, 15 bp, Homo sapiens
catacgttttaaaag

SEQ ID NO: 1701268 - DNA, 15 bp, Homo sapiens
atacgttttaaaaga

SEQ ID NO: 1701269 - DNA, 15 bp, Homo sapiens
tacgttttaaaagat

SEQ ID NO: 1701270 - DNA, 15 bp, Homo sapiens
acgttttaaaagatg

SEQ ID NO: 1701271 - DNA, 15 bp, Homo sapiens
cgttttaaaagatgt

SEQ ID NO: 1701272 - DNA, 15 bp, Homo sapiens
gttttaaaagatgtg

SEQ ID NO: 1701273 - DNA, 15 bp, Homo sapiens
ttttaaaagatgtga

SEQ ID NO: 1701274 - DNA, 15 bp, Homo sapiens
tttaaaagatgtgac

SEQ ID NO: 1701275 - DNA, 15 bp, Homo sapiens
ttaaaagatgtgact

SEQ ID NO: 1701276 - DNA, 15 bp, Homo sapiens
taaaagatgtgactt

SEQ ID NO: 1701277 - DNA, 15 bp, Homo sapiens
aaaagatgtgacttt

SEQ ID NO: 1701278 - DNA, 15 bp, Homo sapiens
aaagatgtgacttta

SEQ ID NO: 1701279 - DNA, 15 bp, Homo sapiens
aagatgtgactttac

SEQ ID NO: 1701280 - DNA, 15 bp, Homo sapiens
agatgtgactttacg

SEQ ID NO: 1701281 - DNA, 15 bp, Homo sapiens
gatgtgactttacgt

SEQ ID NO: 1701282 - DNA, 15 bp, Homo sapiens
atgtgactttacgtt

SEQ ID NO: 1701283 - DNA, 15 bp, Homo sapiens
tgtgactttacgttc

SEQ ID NO: 1701284 - DNA, 15 bp, Homo sapiens
gtgactttacgttct

SEQ ID NO: 1701285 - DNA, 15 bp, Homo sapiens
tgactttacgttctc

SEQ ID NO: 1701286 - DNA, 15 bp, Homo sapiens
gactttacgttctct

SEQ ID NO: 1701287 - DNA, 15 bp, Homo sapiens
actttacgttctctc

SEQ ID NO: 1701288 - DNA, 15 bp, Homo sapiens
ctttacgttctctct

SEQ ID NO: 1701289 - DNA, 15 bp, Homo sapiens
tttacgttctctcta

SEQ ID NO: 1701290 - DNA, 15 bp, Homo sapiens
ttacgttctctctag

SEQ ID NO: 1701291 - DNA, 15 bp, Homo sapiens
tacgttctctctagt

SEQ ID NO: 1701292 - DNA, 15 bp, Homo sapiens
acgttctctctagtt

SEQ ID NO: 1701293 - DNA, 15 bp, Homo sapiens
cgttctctctagtta

SEQ ID NO: 1701294 - DNA, 15 bp, Homo sapiens
gttctctctagttaa

SEQ ID NO: 1701295 - DNA, 15 bp, Homo sapiens
ttctctctagttaag

SEQ ID NO: 1701296 - DNA, 15 bp, Homo sapiens
tctctctagttaagg

SEQ ID NO: 1701297 - DNA, 15 bp, Homo sapiens
ctctctagttaaggg

SEQ ID NO: 1701298 - DNA, 15 bp, Homo sapiens
tctctagttaaggga

SEQ ID NO: 1701299 - DNA, 15 bp, Homo sapiens
ctctagttaagggag

SEQ ID NO: 1701300 - DNA, 15 bp, Homo sapiens
tctagttaagggaga

SEQ ID NO: 1701301 - DNA, 15 bp, Homo sapiens
ctagttaagggagat

SEQ ID NO: 1701302 - DNA, 15 bp, Homo sapiens
tagttaagggagata

SEQ ID NO: 1701303 - DNA, 15 bp, Homo sapiens
agttaagggagatag

SEQ ID NO: 1701304 - DNA, 15 bp, Homo sapiens
gttaagggagataga

SEQ ID NO: 1701305 - DNA, 15 bp, Homo sapiens
ttaagggagatagaa

SEQ ID NO: 1701306 - DNA, 15 bp, Homo sapiens
taagggagatagaaa

SEQ ID NO: 1701307 - DNA, 15 bp, Homo sapiens
aagggagatagaaag

SEQ ID NO: 1701308 - DNA, 15 bp, Homo sapiens
agggagatagaaagg

SEQ ID NO: 1701309 - DNA, 15 bp, Homo sapiens
gggagatagaaagga

SEQ ID NO: 1701310 - DNA, 15 bp, Homo sapiens
ggagatagaaaggaa

SEQ ID NO: 1701311 - DNA, 15 bp, Homo sapiens
gagatagaaaggaag

SEQ ID NO: 1701312 - DNA, 15 bp, Homo sapiens
agatagaaaggaaga

SEQ ID NO: 1701313 - DNA, 15 bp, Homo sapiens
gatagaaaggaagaa

SEQ ID NO: 1701314 - DNA, 15 bp, Homo sapiens
atagaaaggaagaag

SEQ ID NO: 1701315 - DNA, 15 bp, Homo sapiens
tagaaaggaagaaga

SEQ ID NO: 1701316 - DNA, 15 bp, Homo sapiens
agaaaggaagaagag

SEQ ID NO: 1701317 - DNA, 15 bp, Homo sapiens
gaaaggaagaagaga

SEQ ID NO: 1701318 - DNA, 15 bp, Homo sapiens
aaaggaagaagagag

SEQ ID NO: 1701319 - DNA, 15 bp, Homo sapiens
aaggaagaagagaga

SEQ ID NO: 1701320 - DNA, 15 bp, Homo sapiens
aggaagaagagagaa

SEQ ID NO: 1701321 - DNA, 15 bp, Homo sapiens
ggaagaagagagaaa

SEQ ID NO: 1701322 - DNA, 15 bp, Homo sapiens
gaagaagagagaaaa

SEQ ID NO: 1701323 - DNA, 15 bp, Homo sapiens
aagaagagagaaaaa

SEQ ID NO: 1701324 - DNA, 15 bp, Homo sapiens
agaagagagaaaaaa

SEQ ID NO: 1701325 - DNA, 15 bp, Homo sapiens
gaagagagaaaaaat

SEQ ID NO: 1701326 - DNA, 15 bp, Homo sapiens
aagagagaaaaaatg

SEQ ID NO: 1701327 - DNA, 15 bp, Homo sapiens
agagagaaaaaatga

SEQ ID NO: 1701328 - DNA, 15 bp, Homo sapiens
gagagaaaaaatgat

SEQ ID NO: 1701329 - DNA, 15 bp, Homo sapiens
agagaaaaaatgata

SEQ ID NO: 1701330 - DNA, 15 bp, Homo sapiens
gagaaaaaatgatag

SEQ ID NO: 1701331 - DNA, 15 bp, Homo sapiens
agaaaaaatgatagg

SEQ ID NO: 1701332 - DNA, 15 bp, Homo sapiens
gaaaaaatgatagga

SEQ ID NO: 1701333 - DNA, 15 bp, Homo sapiens
aaaaaatgataggag

SEQ ID NO: 1701334 - DNA, 15 bp, Homo sapiens
aaaaatgataggaga

SEQ ID NO: 1701335 - DNA, 15 bp, Homo sapiens
aaaatgataggagag

SEQ ID NO: 1701336 - DNA, 15 bp, Homo sapiens
aaatgataggagagc

SEQ ID NO: 1701337 - DNA, 15 bp, Homo sapiens
aatgataggagagcc

SEQ ID NO: 1701338 - DNA, 15 bp, Homo sapiens
atgataggagagcca

SEQ ID NO: 1701339 - DNA, 15 bp, Homo sapiens
tgataggagagccaa

SEQ ID NO: 1701340 - DNA, 15 bp, Homo sapiens
gataggagagccaat

SEQ ID NO: 1701341 - DNA, 15 bp, Homo sapiens
ataggagagccaatg

SEQ ID NO: 1701342 - DNA, 15 bp, Homo sapiens
taggagagccaatgt

SEQ ID NO: 1701343 - DNA, 15 bp, Homo sapiens
aggagagccaatgtg

SEQ ID NO: 1701344 - DNA, 15 bp, Homo sapiens
ggagagccaatgtga

SEQ ID NO: 1701345 - DNA, 15 bp, Homo sapiens
gagagccaatgtgat

SEQ ID NO: 1701346 - DNA, 15 bp, Homo sapiens
agagccaatgtgatt

SEQ ID NO: 1701347 - DNA, 15 bp, Homo sapiens
gagccaatgtgatta

SEQ ID NO: 1701348 - DNA, 15 bp, Homo sapiens
agccaatgtgattat

SEQ ID NO: 1701349 - DNA, 15 bp, Homo sapiens
gccaatgtgattata

SEQ ID NO: 1701350 - DNA, 15 bp, Homo sapiens
ccaatgtgattatac

SEQ ID NO: 1701351 - DNA, 15 bp, Homo sapiens
caatgtgattatact

SEQ ID NO: 1701352 - DNA, 15 bp, Homo sapiens
aatgtgattatacta

SEQ ID NO: 1701353 - DNA, 15 bp, Homo sapiens
atgtgattatactaa

SEQ ID NO: 1701354 - DNA, 15 bp, Homo sapiens
tgtgattatactaaa

SEQ ID NO: 1701355 - DNA, 15 bp, Homo sapiens
gtgattatactaaag

SEQ ID NO: 1701356 - DNA, 15 bp, Homo sapiens
tgattatactaaagc

SEQ ID NO: 1701357 - DNA, 15 bp, Homo sapiens
gattatactaaagct

SEQ ID NO: 1701358 - DNA, 15 bp, Homo sapiens
attatactaaagctc

SEQ ID NO: 1701359 - DNA, 15 bp, Homo sapiens
ttatactaaagctcc

SEQ ID NO: 1701360 - DNA, 15 bp, Homo sapiens
tatactaaagctcca

SEQ ID NO: 1701361 - DNA, 15 bp, Homo sapiens
atactaaagctccaa

SEQ ID NO: 1701362 - DNA, 15 bp, Homo sapiens
tactaaagctccaag

SEQ ID NO: 1701363 - DNA, 15 bp, Homo sapiens
actaaagctccaagg

SEQ ID NO: 1701364 - DNA, 15 bp, Homo sapiens
ctaaagctccaaggg

SEQ ID NO: 1701365 - DNA, 15 bp, Homo sapiens
taaagctccaagggg

SEQ ID NO: 1701366 - DNA, 15 bp, Homo sapiens
aaagctccaagggga

SEQ ID NO: 1701367 - DNA, 15 bp, Homo sapiens
aagctccaaggggaa

SEQ ID NO: 1701368 - DNA, 15 bp, Homo sapiens
agctccaaggggaaa

SEQ ID NO: 1701369 - DNA, 15 bp, Homo sapiens
gctccaaggggaaaa

SEQ ID NO: 1701370 - DNA, 15 bp, Homo sapiens
ctccaaggggaaaag

SEQ ID NO: 1701371 - DNA, 15 bp, Homo sapiens
tccaaggggaaaagg

SEQ ID NO: 1701372 - DNA, 15 bp, Homo sapiens
ccaaggggaaaaggt

SEQ ID NO: 1701373 - DNA, 15 bp, Homo sapiens
caaggggaaaaggtc

SEQ ID NO: 1701374 - DNA, 15 bp, Homo sapiens
aaggggaaaaggtct

SEQ ID NO: 1701375 - DNA, 15 bp, Homo sapiens
aggggaaaaggtctc

SEQ ID NO: 1701376 - DNA, 15 bp, Homo sapiens
ggggaaaaggtctca

SEQ ID NO: 1701377 - DNA, 15 bp, Homo sapiens
gggaaaaggtctcat

SEQ ID NO: 1701378 - DNA, 15 bp, Homo sapiens
ggaaaaggtctcata

SEQ ID NO: 1701379 - DNA, 15 bp, Homo sapiens
gaaaaggtctcataa

SEQ ID NO: 1701380 - DNA, 15 bp, Homo sapiens
aaaaggtctcataat

SEQ ID NO: 1701381 - DNA, 15 bp, Homo sapiens
aaaggtctcataata

SEQ ID NO: 1701382 - DNA, 15 bp, Homo sapiens
aaggtctcataataa

SEQ ID NO: 1701383 - DNA, 15 bp, Homo sapiens
aggtctcataataat

SEQ ID NO: 1701384 - DNA, 15 bp, Homo sapiens
ggtctcataataata

SEQ ID NO: 1701385 - DNA, 15 bp, Homo sapiens
gtctcataataatac

SEQ ID NO: 1701386 - DNA, 15 bp, Homo sapiens
tctcataataatacc

SEQ ID NO: 1701387 - DNA, 15 bp, Homo sapiens
ctcataataatacca

SEQ ID NO: 1701388 - DNA, 15 bp, Homo sapiens
tcataataataccac

SEQ ID NO: 1701389 - DNA, 15 bp, Homo sapiens
cataataataccact

SEQ ID NO: 1701390 - DNA, 15 bp, Homo sapiens
ataataataccactg

SEQ ID NO: 1701391 - DNA, 15 bp, Homo sapiens
taataataccactgg

SEQ ID NO: 1701392 - DNA, 15 bp, Homo sapiens
aataataccactggt

SEQ ID NO: 1701393 - DNA, 15 bp, Homo sapiens
ataataccactggtt

SEQ ID NO: 1701394 - DNA, 15 bp, Homo sapiens
taataccactggttt

SEQ ID NO: 1701395 - DNA, 15 bp, Homo sapiens
aataccactggtttg

SEQ ID NO: 1701396 - DNA, 15 bp, Homo sapiens
ataccactggtttgt

SEQ ID NO: 1701397 - DNA, 15 bp, Homo sapiens
taccactggtttgta

SEQ ID NO: 1701398 - DNA, 15 bp, Homo sapiens
accactggtttgtac

SEQ ID NO: 1701399 - DNA, 15 bp, Homo sapiens
ccactggtttgtacg

SEQ ID NO: 1701400 - DNA, 15 bp, Homo sapiens
cactggtttgtacga

SEQ ID NO: 1701401 - DNA, 15 bp, Homo sapiens
actggtttgtacgat

SEQ ID NO: 1701402 - DNA, 15 bp, Homo sapiens
ctggtttgtacgata

SEQ ID NO: 1701403 - DNA, 15 bp, Homo sapiens
tggtttgtacgataa

SEQ ID NO: 1701404 - DNA, 15 bp, Homo sapiens
ggtttgtacgataat

SEQ ID NO: 1701405 - DNA, 15 bp, Homo sapiens
gtttgtacgataatt

SEQ ID NO: 1701406 - DNA, 15 bp, Homo sapiens
tttgtacgataattt

SEQ ID NO: 1701407 - DNA, 15 bp, Homo sapiens
ttgtacgataatttt

SEQ ID NO: 1701408 - DNA, 15 bp, Homo sapiens
tgtacgataattttg

SEQ ID NO: 1701409 - DNA, 15 bp, Homo sapiens
gtacgataattttgt

SEQ ID NO: 1701410 - DNA, 15 bp, Homo sapiens
tacgataattttgtt

SEQ ID NO: 1701411 - DNA, 15 bp, Homo sapiens
acgataattttgtta

SEQ ID NO: 1701412 - DNA, 15 bp, Homo sapiens
cgataattttgttag

SEQ ID NO: 1701413 - DNA, 15 bp, Homo sapiens
gataattttgttagt

SEQ ID NO: 1701414 - DNA, 15 bp, Homo sapiens
ataattttgttagtc

SEQ ID NO: 1701415 - DNA, 15 bp, Homo sapiens
taattttgttagtcc

SEQ ID NO: 1701416 - DNA, 15 bp, Homo sapiens
aattttgttagtcct

SEQ ID NO: 1701417 - DNA, 15 bp, Homo sapiens
attttgttagtcctt

SEQ ID NO: 1701418 - DNA, 15 bp, Homo sapiens
ttttgttagtccttt

SEQ ID NO: 1701419 - DNA, 15 bp, Homo sapiens
tttgttagtccttta

SEQ ID NO: 1701420 - DNA, 15 bp, Homo sapiens
ttgttagtcctttag

SEQ ID NO: 1701421 - DNA, 15 bp, Homo sapiens
tgttagtcctttagg

SEQ ID NO: 1701422 - DNA, 15 bp, Homo sapiens
gttagtcctttaggt

SEQ ID NO: 1701423 - DNA, 15 bp, Homo sapiens
ttagtcctttaggtt

SEQ ID NO: 1701424 - DNA, 15 bp, Homo sapiens
tagtcctttaggttt

SEQ ID NO: 1701425 - DNA, 15 bp, Homo sapiens
agtcctttaggttta

SEQ ID NO: 1701426 - DNA, 15 bp, Homo sapiens
gtcctttaggtttaa

SEQ ID NO: 1701427 - DNA, 15 bp, Homo sapiens
tcctttaggtttaaa

SEQ ID NO: 1701428 - DNA, 15 bp, Homo sapiens
cctttaggtttaaaa

SEQ ID NO: 1701429 - DNA, 15 bp, Homo sapiens
ctttaggtttaaaaa

SEQ ID NO: 1701430 - DNA, 15 bp, Homo sapiens
tttaggtttaaaaaa

SEQ ID NO: 1701431 - DNA, 15 bp, Homo sapiens
ttaggtttaaaaaat

SEQ ID NO: 1701432 - DNA, 15 bp, Homo sapiens
taggtttaaaaaatt

SEQ ID NO: 1701433 - DNA, 15 bp, Homo sapiens
aggtttaaaaaatta

SEQ ID NO: 1701434 - DNA, 15 bp, Homo sapiens
ggtttaaaaaattaa

SEQ ID NO: 1701435 - DNA, 15 bp, Homo sapiens
gtttaaaaaattaat

SEQ ID NO: 1701436 - DNA, 15 bp, Homo sapiens
tttaaaaaattaatg

SEQ ID NO: 1701437 - DNA, 15 bp, Homo sapiens
ttaaaaaattaatga

SEQ ID NO: 1701438 - DNA, 15 bp, Homo sapiens
taaaaaattaatgat

SEQ ID NO: 1701439 - DNA, 15 bp, Homo sapiens
aaaaaattaatgatt

SEQ ID NO: 1701440 - DNA, 15 bp, Homo sapiens
aaaaattaatgattt

SEQ ID NO: 1701441 - DNA, 15 bp, Homo sapiens
aaaattaatgatttt

SEQ ID NO: 1701442 - DNA, 15 bp, Homo sapiens
aaattaatgattttt

SEQ ID NO: 1701443 - DNA, 15 bp, Homo sapiens
aattaatgatttttg

SEQ ID NO: 1701444 - DNA, 15 bp, Homo sapiens
attaatgatttttga

SEQ ID NO: 1701445 - DNA, 15 bp, Homo sapiens
ttaatgatttttgaa

SEQ ID NO: 1701446 - DNA, 15 bp, Homo sapiens
taatgatttttgaaa

SEQ ID NO: 1701447 - DNA, 15 bp, Homo sapiens
aatgatttttgaaaa

SEQ ID NO: 1701448 - DNA, 15 bp, Homo sapiens
atgatttttgaaaag

SEQ ID NO: 1701449 - DNA, 15 bp, Homo sapiens
tgatttttgaaaaga

SEQ ID NO: 1701450 - DNA, 15 bp, Homo sapiens
gatttttgaaaagaa

SEQ ID NO: 1701451 - DNA, 15 bp, Homo sapiens
atttttgaaaagaaa

SEQ ID NO: 1701452 - DNA, 15 bp, Homo sapiens
tttttgaaaagaaaa

SEQ ID NO: 1701453 - DNA, 15 bp, Homo sapiens
ttttgaaaagaaaat

SEQ ID NO: 1701454 - DNA, 15 bp, Homo sapiens
tttgaaaagaaaata

SEQ ID NO: 1701455 - DNA, 15 bp, Homo sapiens
ttgaaaagaaaataa

SEQ ID NO: 1701456 - DNA, 15 bp, Homo sapiens
tgaaaagaaaataat

SEQ ID NO: 1701457 - DNA, 15 bp, Homo sapiens
gaaaagaaaataatg

SEQ ID NO: 1701458 - DNA, 15 bp, Homo sapiens
aaaagaaaataatgg

SEQ ID NO: 1701459 - DNA, 15 bp, Homo sapiens
aaagaaaataatgga

SEQ ID NO: 1701460 - DNA, 15 bp, Homo sapiens
aagaaaataatggaa

SEQ ID NO: 1701461 - DNA, 15 bp, Homo sapiens
agaaaataatggaaa

SEQ ID NO: 1701462 - DNA, 15 bp, Homo sapiens
gaaaataatggaaaa

SEQ ID NO: 1701463 - DNA, 15 bp, Homo sapiens
aaaataatggaaaag

SEQ ID NO: 1701464 - DNA, 15 bp, Homo sapiens
aaataatggaaaagg

SEQ ID NO: 1701465 - DNA, 15 bp, Homo sapiens
aataatggaaaaggg

SEQ ID NO: 1701466 - DNA, 15 bp, Homo sapiens
ataatggaaaagggt

SEQ ID NO: 1701467 - DNA, 15 bp, Homo sapiens
taatggaaaagggtt

SEQ ID NO: 1701468 - DNA, 15 bp, Homo sapiens
aatggaaaagggtta

SEQ ID NO: 1701469 - DNA, 15 bp, Homo sapiens
atggaaaagggttaa

SEQ ID NO: 1701470 - DNA, 15 bp, Homo sapiens
tggaaaagggttaat

SEQ ID NO: 1701471 - DNA, 15 bp, Homo sapiens
ggaaaagggttaata

SEQ ID NO: 1701472 - DNA, 15 bp, Homo sapiens
gaaaagggttaataa

SEQ ID NO: 1701473 - DNA, 15 bp, Homo sapiens
aaaagggttaataaa

SEQ ID NO: 1701474 - DNA, 15 bp, Homo sapiens
aaagggttaataaaa

SEQ ID NO: 1701475 - DNA, 15 bp, Homo sapiens
aagggttaataaaat

SEQ ID NO: 1701476 - DNA, 15 bp, Homo sapiens
agggttaataaaatt

SEQ ID NO: 1701477 - DNA, 15 bp, Homo sapiens
gggttaataaaattt

SEQ ID NO: 1701478 - DNA, 15 bp, Homo sapiens
ggttaataaaatttg

SEQ ID NO: 1701479 - DNA, 15 bp, Homo sapiens
gttaataaaatttga

SEQ ID NO: 1701480 - DNA, 15 bp, Homo sapiens
ttaataaaatttgac

SEQ ID NO: 1701481 - DNA, 15 bp, Homo sapiens
taataaaatttgact

SEQ ID NO: 1701482 - DNA, 15 bp, Homo sapiens
aataaaatttgactt

SEQ ID NO: 1701483 - DNA, 15 bp, Homo sapiens
ataaaatttgactta

SEQ ID NO: 1701484 - DNA, 15 bp, Homo sapiens
taaaatttgacttat

SEQ ID NO: 1701485 - DNA, 15 bp, Homo sapiens
aaaatttgacttatg

SEQ ID NO: 1701486 - DNA, 15 bp, Homo sapiens
aaatttgacttatga

SEQ ID NO: 1701487 - DNA, 15 bp, Homo sapiens
aatttgacttatgaa

SEQ ID NO: 1701488 - DNA, 15 bp, Homo sapiens
atttgacttatgaaa

SEQ ID NO: 1701489 - DNA, 15 bp, Homo sapiens
tttgacttatgaaat

SEQ ID NO: 1701490 - DNA, 15 bp, Homo sapiens
ttgacttatgaaatt

SEQ ID NO: 1701491 - DNA, 15 bp, Homo sapiens
tgacttatgaaattt

SEQ ID NO: 1701492 - DNA, 15 bp, Homo sapiens
gacttatgaaatttc

SEQ ID NO: 1701493 - DNA, 15 bp, Homo sapiens
acttatgaaatttct

SEQ ID NO: 1701494 - DNA, 15 bp, Homo sapiens
cttatgaaatttcta

SEQ ID NO: 1701495 - DNA, 15 bp, Homo sapiens
ttatgaaatttctaa

SEQ ID NO: 1701496 - DNA, 15 bp, Homo sapiens
tatgaaatttctaat

SEQ ID NO: 1701497 - DNA, 15 bp, Homo sapiens
atgaaatttctaatc

SEQ ID NO: 1701498 - DNA, 15 bp, Homo sapiens
tgaaatttctaatct

SEQ ID NO: 1701499 - DNA, 15 bp, Homo sapiens
gaaatttctaatctc

SEQ ID NO: 1701500 - DNA, 15 bp, Homo sapiens
aaatttctaatctca

SEQ ID NO: 1701501 - DNA, 15 bp, Homo sapiens
aatttctaatctcaa

SEQ ID NO: 1701502 - DNA, 15 bp, Homo sapiens
atttctaatctcaag

SEQ ID NO: 1701503 - DNA, 15 bp, Homo sapiens
tttctaatctcaagt

SEQ ID NO: 1701504 - DNA, 15 bp, Homo sapiens
ttctaatctcaagta

SEQ ID NO: 1701505 - DNA, 15 bp, Homo sapiens
tctaatctcaagtaa

SEQ ID NO: 1701506 - DNA, 15 bp, Homo sapiens
ctaatctcaagtaac

SEQ ID NO: 1701507 - DNA, 15 bp, Homo sapiens
taatctcaagtaaca

SEQ ID NO: 1701508 - DNA, 15 bp, Homo sapiens
aatctcaagtaacat

SEQ ID NO: 1701509 - DNA, 15 bp, Homo sapiens
atctcaagtaacatt

SEQ ID NO: 1701510 - DNA, 15 bp, Homo sapiens
tctcaagtaacatta

SEQ ID NO: 1701511 - DNA, 15 bp, Homo sapiens
ctcaagtaacattat

SEQ ID NO: 1701512 - DNA, 15 bp, Homo sapiens
tcaagtaacattata

SEQ ID NO: 1701513 - DNA, 15 bp, Homo sapiens
caagtaacattatat

SEQ ID NO: 1701514 - DNA, 15 bp, Homo sapiens
aagtaacattatatg

SEQ ID NO: 1701515 - DNA, 15 bp, Homo sapiens
agtaacattatatgg

SEQ ID NO: 1701516 - DNA, 15 bp, Homo sapiens
gtaacattatatggt

SEQ ID NO: 1701517 - DNA, 15 bp, Homo sapiens
taacattatatggta

SEQ ID NO: 1701518 - DNA, 15 bp, Homo sapiens
aacattatatggtaa

SEQ ID NO: 1701519 - DNA, 15 bp, Homo sapiens
acattatatggtaaa

SEQ ID NO: 1701520 - DNA, 15 bp, Homo sapiens
cattatatggtaaaa

SEQ ID NO: 1701521 - DNA, 15 bp, Homo sapiens
attatatggtaaaat

SEQ ID NO: 1701522 - DNA, 15 bp, Homo sapiens
ttatatggtaaaatg

SEQ ID NO: 1701523 - DNA, 15 bp, Homo sapiens
tatatggtaaaatgt

SEQ ID NO: 1701524 - DNA, 15 bp, Homo sapiens
atatggtaaaatgtt

SEQ ID NO: 1701525 - DNA, 15 bp, Homo sapiens
tatggtaaaatgttg

SEQ ID NO: 1701526 - DNA, 15 bp, Homo sapiens
atggtaaaatgttgc

SEQ ID NO: 1701527 - DNA, 15 bp, Homo sapiens
tggtaaaatgttgct

SEQ ID NO: 1701528 - DNA, 15 bp, Homo sapiens
ggtaaaatgttgctc

SEQ ID NO: 1701529 - DNA, 15 bp, Homo sapiens
gtaaaatgttgctct

SEQ ID NO: 1701530 - DNA, 15 bp, Homo sapiens
taaaatgttgctctg

SEQ ID NO: 1701531 - DNA, 15 bp, Homo sapiens
aaaatgttgctctgt

SEQ ID NO: 1701532 - DNA, 15 bp, Homo sapiens
aaatgttgctctgtt

SEQ ID NO: 1701533 - DNA, 15 bp, Homo sapiens
aatgttgctctgttt

SEQ ID NO: 1701534 - DNA, 15 bp, Homo sapiens
atgttgctctgtttt

SEQ ID NO: 1701535 - DNA, 15 bp, Homo sapiens
tgttgctctgttttg

SEQ ID NO: 1701536 - DNA, 15 bp, Homo sapiens
gttgctctgttttgg

SEQ ID NO: 1701537 - DNA, 15 bp, Homo sapiens
ttgctctgttttggt

SEQ ID NO: 1701538 - DNA, 15 bp, Homo sapiens
tgctctgttttggta

SEQ ID NO: 1701539 - DNA, 15 bp, Homo sapiens
gctctgttttggtat

SEQ ID NO: 1701540 - DNA, 15 bp, Homo sapiens
ctctgttttggtatt

SEQ ID NO: 1701541 - DNA, 15 bp, Homo sapiens
tctgttttggtattt

SEQ ID NO: 1701542 - DNA, 15 bp, Homo sapiens
ctgttttggtatttt

SEQ ID NO: 1701543 - DNA, 15 bp, Homo sapiens
tgttttggtatttta

SEQ ID NO: 1701544 - DNA, 15 bp, Homo sapiens
gttttggtattttaa

SEQ ID NO: 1701545 - DNA, 15 bp, Homo sapiens
ttttggtattttaaa

SEQ ID NO: 1701546 - DNA, 15 bp, Homo sapiens
tttggtattttaaag

SEQ ID NO: 1701547 - DNA, 15 bp, Homo sapiens
ttggtattttaaagt

SEQ ID NO: 1701548 - DNA, 15 bp, Homo sapiens
tggtattttaaagta

SEQ ID NO: 1701549 - DNA, 15 bp, Homo sapiens
ggtattttaaagtat

SEQ ID NO: 1701550 - DNA, 15 bp, Homo sapiens
gtattttaaagtatt

SEQ ID NO: 1701551 - DNA, 15 bp, Homo sapiens
tattttaaagtattt

SEQ ID NO: 1701552 - DNA, 15 bp, Homo sapiens
attttaaagtatttt

SEQ ID NO: 1701553 - DNA, 15 bp, Homo sapiens
ttttaaagtatttta

SEQ ID NO: 1701554 - DNA, 15 bp, Homo sapiens
tttaaagtattttaa

SEQ ID NO: 1701555 - DNA, 15 bp, Homo sapiens
ttaaagtattttaat

SEQ ID NO: 1701556 - DNA, 15 bp, Homo sapiens
taaagtattttaata

SEQ ID NO: 1701557 - DNA, 15 bp, Homo sapiens
aaagtattttaatac

SEQ ID NO: 1701558 - DNA, 15 bp, Homo sapiens
aagtattttaatact

SEQ ID NO: 1701559 - DNA, 15 bp, Homo sapiens
agtattttaatactt

SEQ ID NO: 1701560 - DNA, 15 bp, Homo sapiens
gtattttaatactta

SEQ ID NO: 1701561 - DNA, 15 bp, Homo sapiens
tattttaatacttaa

SEQ ID NO: 1701562 - DNA, 15 bp, Homo sapiens
attttaatacttaac

SEQ ID NO: 1701563 - DNA, 15 bp, Homo sapiens
ttttaatacttaact

SEQ ID NO: 1701564 - DNA, 15 bp, Homo sapiens
tttaatacttaacta

SEQ ID NO: 1701565 - DNA, 15 bp, Homo sapiens
ttaatacttaactaa

SEQ ID NO: 1701566 - DNA, 15 bp, Homo sapiens
taatacttaactaaa

SEQ ID NO: 1701567 - DNA, 15 bp, Homo sapiens
aatacttaactaaat

SEQ ID NO: 1701568 - DNA, 15 bp, Homo sapiens
atacttaactaaatt

SEQ ID NO: 1701569 - DNA, 15 bp, Homo sapiens
tacttaactaaattc

SEQ ID NO: 1701570 - DNA, 15 bp, Homo sapiens
acttaactaaattcc

SEQ ID NO: 1701571 - DNA, 15 bp, Homo sapiens
cttaactaaattcca

SEQ ID NO: 1701572 - DNA, 15 bp, Homo sapiens
ttaactaaattccac

SEQ ID NO: 1701573 - DNA, 15 bp, Homo sapiens
taactaaattccaca

SEQ ID NO: 1701574 - DNA, 15 bp, Homo sapiens
aactaaattccacaa

SEQ ID NO: 1701575 - DNA, 15 bp, Homo sapiens
actaaattccacaag

SEQ ID NO: 1701576 - DNA, 15 bp, Homo sapiens
ctaaattccacaagc

SEQ ID NO: 1701577 - DNA, 15 bp, Homo sapiens
taaattccacaagcc

SEQ ID NO: 1701578 - DNA, 15 bp, Homo sapiens
aaattccacaagccc

SEQ ID NO: 1701579 - DNA, 15 bp, Homo sapiens
aattccacaagccca

SEQ ID NO: 1701580 - DNA, 15 bp, Homo sapiens
attccacaagcccaa

SEQ ID NO: 1701581 - DNA, 15 bp, Homo sapiens
ttccacaagcccaag

SEQ ID NO: 1701582 - DNA, 15 bp, Homo sapiens
tccacaagcccaagc

SEQ ID NO: 1701583 - DNA, 15 bp, Homo sapiens
ccacaagcccaagca

SEQ ID NO: 1701584 - DNA, 15 bp, Homo sapiens
cacaagcccaagcat

SEQ ID NO: 1701585 - DNA, 15 bp, Homo sapiens
acaagcccaagcatt

SEQ ID NO: 1701586 - DNA, 15 bp, Homo sapiens
caagcccaagcattg

SEQ ID NO: 1701587 - DNA, 15 bp, Homo sapiens
aagcccaagcattgg

SEQ ID NO: 1701588 - DNA, 15 bp, Homo sapiens
agcccaagcattggt

SEQ ID NO: 1701589 - DNA, 15 bp, Homo sapiens
gcccaagcattggtg

SEQ ID NO: 1701590 - DNA, 15 bp, Homo sapiens
cccaagcattggtga

SEQ ID NO: 1701591 - DNA, 15 bp, Homo sapiens
ccaagcattggtgaa

SEQ ID NO: 1701592 - DNA, 15 bp, Homo sapiens
caagcattggtgaaa

SEQ ID NO: 1701593 - DNA, 15 bp, Homo sapiens
aagcattggtgaaat

SEQ ID NO: 1701594 - DNA, 15 bp, Homo sapiens
agcattggtgaaatc

SEQ ID NO: 1701595 - DNA, 15 bp, Homo sapiens
gcattggtgaaatcc

SEQ ID NO: 1701596 - DNA, 15 bp, Homo sapiens
cattggtgaaatcct

SEQ ID NO: 1701597 - DNA, 15 bp, Homo sapiens
attggtgaaatcctt

SEQ ID NO: 1701598 - DNA, 15 bp, Homo sapiens
ttggtgaaatccttt

SEQ ID NO: 1701599 - DNA, 15 bp, Homo sapiens
tggtgaaatcctttc

SEQ ID NO: 1701600 - DNA, 15 bp, Homo sapiens
ggtgaaatcctttct

SEQ ID NO: 1701601 - DNA, 15 bp, Homo sapiens
gtgaaatcctttctt

SEQ ID NO: 1701602 - DNA, 15 bp, Homo sapiens
tgaaatcctttcttt

SEQ ID NO: 1701603 - DNA, 15 bp, Homo sapiens
gaaatcctttctttt

SEQ ID NO: 1701604 - DNA, 15 bp, Homo sapiens
aaatcctttcttttt

SEQ ID NO: 1701605 - DNA, 15 bp, Homo sapiens
aatcctttctttttc

SEQ ID NO: 1701606 - DNA, 15 bp, Homo sapiens
atcctttctttttct

SEQ ID NO: 1701607 - DNA, 15 bp, Homo sapiens
tcctttctttttctc

SEQ ID NO: 1701608 - DNA, 15 bp, Homo sapiens
cctttctttttctca

SEQ ID NO: 1701609 - DNA, 15 bp, Homo sapiens
ctttctttttctcat

SEQ ID NO: 1701610 - DNA, 15 bp, Homo sapiens
tttctttttctcatg

SEQ ID NO: 1701611 - DNA, 15 bp, Homo sapiens
ttctttttctcatgt

SEQ ID NO: 1701612 - DNA, 15 bp, Homo sapiens
tctttttctcatgtt

SEQ ID NO: 1701613 - DNA, 15 bp, Homo sapiens
ctttttctcatgttg

SEQ ID NO: 1701614 - DNA, 15 bp, Homo sapiens
tttttctcatgttga

SEQ ID NO: 1701615 - DNA, 15 bp, Homo sapiens
ttttctcatgttgat

SEQ ID NO: 1701616 - DNA, 15 bp, Homo sapiens
tttctcatgttgatg

SEQ ID NO: 1701617 - DNA, 15 bp, Homo sapiens
ttctcatgttgatgg

SEQ ID NO: 1701618 - DNA, 15 bp, Homo sapiens
tctcatgttgatgga

SEQ ID NO: 1701619 - DNA, 15 bp, Homo sapiens
ctcatgttgatggaa

SEQ ID NO: 1701620 - DNA, 15 bp, Homo sapiens
tcatgttgatggaaa

SEQ ID NO: 1701621 - DNA, 15 bp, Homo sapiens
catgttgatggaaaa

SEQ ID NO: 1701622 - DNA, 15 bp, Homo sapiens
atgttgatggaaaag

SEQ ID NO: 1701623 - DNA, 15 bp, Homo sapiens
tgttgatggaaaagg

SEQ ID NO: 1701624 - DNA, 15 bp, Homo sapiens
gttgatggaaaaggc

SEQ ID NO: 1701625 - DNA, 15 bp, Homo sapiens
ttgatggaaaaggcc

SEQ ID NO: 1701626 - DNA, 15 bp, Homo sapiens
tgatggaaaaggcct

SEQ ID NO: 1701627 - DNA, 15 bp, Homo sapiens
gatggaaaaggccta

SEQ ID NO: 1701628 - DNA, 15 bp, Homo sapiens
atggaaaaggcctaa

SEQ ID NO: 1701629 - DNA, 15 bp, Homo sapiens
tggaaaaggcctaac

SEQ ID NO: 1701630 - DNA, 15 bp, Homo sapiens
ggaaaaggcctaacc

SEQ ID NO: 1701631 - DNA, 15 bp, Homo sapiens
gaaaaggcctaacct

SEQ ID NO: 1701632 - DNA, 15 bp, Homo sapiens
aaaaggcctaacctt

SEQ ID NO: 1701633 - DNA, 15 bp, Homo sapiens
aaaggcctaacctta

SEQ ID NO: 1701634 - DNA, 15 bp, Homo sapiens
aaggcctaaccttac

SEQ ID NO: 1701635 - DNA, 15 bp, Homo sapiens
aggcctaaccttact

SEQ ID NO: 1701636 - DNA, 15 bp, Homo sapiens
ggcctaaccttactt

SEQ ID NO: 1701637 - DNA, 15 bp, Homo sapiens
gcctaaccttacttt

SEQ ID NO: 1701638 - DNA, 15 bp, Homo sapiens
cctaaccttactttc

SEQ ID NO: 1701639 - DNA, 15 bp, Homo sapiens
ctaaccttactttct

SEQ ID NO: 1701640 - DNA, 15 bp, Homo sapiens
taaccttactttctg

SEQ ID NO: 1701641 - DNA, 15 bp, Homo sapiens
aaccttactttctgt

SEQ ID NO: 1701642 - DNA, 15 bp, Homo sapiens
accttactttctgta

SEQ ID NO: 1701643 - DNA, 15 bp, Homo sapiens
ccttactttctgtag

SEQ ID NO: 1701644 - DNA, 15 bp, Homo sapiens
cttactttctgtaga

SEQ ID NO: 1701645 - DNA, 15 bp, Homo sapiens
ttactttctgtagat

SEQ ID NO: 1701646 - DNA, 15 bp, Homo sapiens
tactttctgtagatt

SEQ ID NO: 1701647 - DNA, 15 bp, Homo sapiens
actttctgtagattg

SEQ ID NO: 1701648 - DNA, 15 bp, Homo sapiens
ctttctgtagattgg

SEQ ID NO: 1701649 - DNA, 15 bp, Homo sapiens
tttctgtagattggg

SEQ ID NO: 1701650 - DNA, 15 bp, Homo sapiens
ttctgtagattggga

SEQ ID NO: 1701651 - DNA, 15 bp, Homo sapiens
tctgtagattgggaa

SEQ ID NO: 1701652 - DNA, 15 bp, Homo sapiens
ctgtagattgggaaa

SEQ ID NO: 1701653 - DNA, 15 bp, Homo sapiens
tgtagattgggaaat

SEQ ID NO: 1701654 - DNA, 15 bp, Homo sapiens
gtagattgggaaata

SEQ ID NO: 1701655 - DNA, 15 bp, Homo sapiens
tagattgggaaatac

SEQ ID NO: 1701656 - DNA, 15 bp, Homo sapiens
agattgggaaatact

SEQ ID NO: 1701657 - DNA, 15 bp, Homo sapiens
gattgggaaatactc

SEQ ID NO: 1701658 - DNA, 15 bp, Homo sapiens
attgggaaatactct

SEQ ID NO: 1701659 - DNA, 15 bp, Homo sapiens
ttgggaaatactctc

SEQ ID NO: 1701660 - DNA, 15 bp, Homo sapiens
tgggaaatactctct

SEQ ID NO: 1701661 - DNA, 15 bp, Homo sapiens
gggaaatactctctt

SEQ ID NO: 1701662 - DNA, 15 bp, Homo sapiens
ggaaatactctctta

SEQ ID NO: 1701663 - DNA, 15 bp, Homo sapiens
gaaatactctcttac

SEQ ID NO: 1701664 - DNA, 15 bp, Homo sapiens
aaatactctcttacg

SEQ ID NO: 1701665 - DNA, 15 bp, Homo sapiens
aatactctcttacgg

SEQ ID NO: 1701666 - DNA, 15 bp, Homo sapiens
atactctcttacggt

SEQ ID NO: 1701667 - DNA, 15 bp, Homo sapiens
tactctcttacggtg

SEQ ID NO: 1701668 - DNA, 15 bp, Homo sapiens
actctcttacggtgc

SEQ ID NO: 1701669 - DNA, 15 bp, Homo sapiens
ctctcttacggtgct

SEQ ID NO: 1701670 - DNA, 15 bp, Homo sapiens
tctcttacggtgcta

SEQ ID NO: 1701671 - DNA, 15 bp, Homo sapiens
ctcttacggtgctaa

SEQ ID NO: 1701672 - DNA, 15 bp, Homo sapiens
tcttacggtgctaaa

SEQ ID NO: 1701673 - DNA, 15 bp, Homo sapiens
cttacggtgctaaag

SEQ ID NO: 1701674 - DNA, 15 bp, Homo sapiens
ttacggtgctaaagg

SEQ ID NO: 1701675 - DNA, 15 bp, Homo sapiens
tacggtgctaaaggt

SEQ ID NO: 1701676 - DNA, 15 bp, Homo sapiens
acggtgctaaaggtc

SEQ ID NO: 1701677 - DNA, 15 bp, Homo sapiens
cggtgctaaaggtcg

SEQ ID NO: 1701678 - DNA, 15 bp, Homo sapiens
ggtgctaaaggtcga

SEQ ID NO: 1701679 - DNA, 15 bp, Homo sapiens
gtgctaaaggtcgat

SEQ ID NO: 1701680 - DNA, 15 bp, Homo sapiens
tgctaaaggtcgatt

SEQ ID NO: 1701681 - DNA, 15 bp, Homo sapiens
gctaaaggtcgattc

SEQ ID NO: 1701682 - DNA, 15 bp, Homo sapiens
ctaaaggtcgattca

SEQ ID NO: 1701683 - DNA, 15 bp, Homo sapiens
taaaggtcgattcac

SEQ ID NO: 1701684 - DNA, 15 bp, Homo sapiens
aaaggtcgattcaca

SEQ ID NO: 1701685 - DNA, 15 bp, Homo sapiens
aaggtcgattcacac

SEQ ID NO: 1701686 - DNA, 15 bp, Homo sapiens
aggtcgattcacaca

SEQ ID NO: 1701687 - DNA, 15 bp, Homo sapiens
ggtcgattcacacaa

SEQ ID NO: 1701688 - DNA, 15 bp, Homo sapiens
gtcgattcacacaaa

SEQ ID NO: 1701689 - DNA, 15 bp, Homo sapiens
tcgattcacacaaag

SEQ ID NO: 1701690 - DNA, 15 bp, Homo sapiens
cgattcacacaaagg

SEQ ID NO: 1701691 - DNA, 15 bp, Homo sapiens
gattcacacaaagga

SEQ ID NO: 1701692 - DNA, 15 bp, Homo sapiens
attcacacaaaggag

SEQ ID NO: 1701693 - DNA, 15 bp, Homo sapiens
ttcacacaaaggagt

SEQ ID NO: 1701694 - DNA, 15 bp, Homo sapiens
tcacacaaaggagtt

SEQ ID NO: 1701695 - DNA, 15 bp, Homo sapiens
cacacaaaggagtta

SEQ ID NO: 1701696 - DNA, 15 bp, Homo sapiens
acacaaaggagttat

SEQ ID NO: 1701697 - DNA, 15 bp, Homo sapiens
cacaaaggagttatc

SEQ ID NO: 1701698 - DNA, 15 bp, Homo sapiens
acaaaggagttatcg

SEQ ID NO: 1701699 - DNA, 15 bp, Homo sapiens
caaaggagttatcgc

SEQ ID NO: 1701700 - DNA, 15 bp, Homo sapiens
aaaggagttatcgcc

SEQ ID NO: 1701701 - DNA, 15 bp, Homo sapiens
aaggagttatcgcca

SEQ ID NO: 1701702 - DNA, 15 bp, Homo sapiens
aggagttatcgccac

SEQ ID NO: 1701703 - DNA, 15 bp, Homo sapiens
ggagttatcgccacc

SEQ ID NO: 1701704 - DNA, 15 bp, Homo sapiens
gagttatcgccacct

SEQ ID NO: 1701705 - DNA, 15 bp, Homo sapiens
agttatcgccacctt

SEQ ID NO: 1701706 - DNA, 15 bp, Homo sapiens
gttatcgccaccttg

SEQ ID NO: 1701707 - DNA, 15 bp, Homo sapiens
ttatcgccaccttgt

SEQ ID NO: 1701708 - DNA, 15 bp, Homo sapiens
tatcgccaccttgtg

SEQ ID NO: 1701709 - DNA, 15 bp, Homo sapiens
atcgccaccttgtgg

SEQ ID NO: 1701710 - DNA, 15 bp, Homo sapiens
tcgccaccttgtggt

SEQ ID NO: 1701711 - DNA, 15 bp, Homo sapiens
cgccaccttgtggtc

SEQ ID NO: 1701712 - DNA, 15 bp, Homo sapiens
gccaccttgtggtct

SEQ ID NO: 1701713 - DNA, 15 bp, Homo sapiens
ccaccttgtggtctt

SEQ ID NO: 1701714 - DNA, 15 bp, Homo sapiens
caccttgtggtcttg

SEQ ID NO: 1701715 - DNA, 15 bp, Homo sapiens
accttgtggtcttgt

SEQ ID NO: 1701716 - DNA, 15 bp, Homo sapiens
ccttgtggtcttgtg

SEQ ID NO: 1701717 - DNA, 15 bp, Homo sapiens
cttgtggtcttgtgg

SEQ ID NO: 1701718 - DNA, 15 bp, Homo sapiens
ttgtggtcttgtgga

SEQ ID NO: 1701719 - DNA, 15 bp, Homo sapiens
tgtggtcttgtggag

SEQ ID NO: 1701720 - DNA, 15 bp, Homo sapiens
gtggtcttgtggagt

SEQ ID NO: 1701721 - DNA, 15 bp, Homo sapiens
tggtcttgtggagta

SEQ ID NO: 1701722 - DNA, 15 bp, Homo sapiens
ggtcttgtggagtat

SEQ ID NO: 1701723 - DNA, 15 bp, Homo sapiens
gtcttgtggagtatt

SEQ ID NO: 1701724 - DNA, 15 bp, Homo sapiens
tcttgtggagtattg

SEQ ID NO: 1701725 - DNA, 15 bp, Homo sapiens
cttgtggagtattga

SEQ ID NO: 1701726 - DNA, 15 bp, Homo sapiens
ttgtggagtattgac

SEQ ID NO: 1701727 - DNA, 15 bp, Homo sapiens
tgtggagtattgact

SEQ ID NO: 1701728 - DNA, 15 bp, Homo sapiens
gtggagtattgactc

SEQ ID NO: 1701729 - DNA, 15 bp, Homo sapiens
tggagtattgactct

SEQ ID NO: 1701730 - DNA, 15 bp, Homo sapiens
ggagtattgactcta

SEQ ID NO: 1701731 - DNA, 15 bp, Homo sapiens
gagtattgactctaa

SEQ ID NO: 1701732 - DNA, 15 bp, Homo sapiens
agtattgactctaaa

SEQ ID NO: 1701733 - DNA, 15 bp, Homo sapiens
gtattgactctaaaa

SEQ ID NO: 1701734 - DNA, 15 bp, Homo sapiens
tattgactctaaaac

SEQ ID NO: 1701735 - DNA, 15 bp, Homo sapiens
attgactctaaaact

SEQ ID NO: 1701736 - DNA, 15 bp, Homo sapiens
ttgactctaaaactt

SEQ ID NO: 1701737 - DNA, 15 bp, Homo sapiens
tgactctaaaactta

SEQ ID NO: 1701738 - DNA, 15 bp, Homo sapiens
gactctaaaacttag

SEQ ID NO: 1701739 - DNA, 15 bp, Homo sapiens
actctaaaacttaga

SEQ ID NO: 1701740 - DNA, 15 bp, Homo sapiens
ctctaaaacttagaa

SEQ ID NO: 1701741 - DNA, 15 bp, Homo sapiens
tctaaaacttagaac

SEQ ID NO: 1701742 - DNA, 15 bp, Homo sapiens
ctaaaacttagaacc

SEQ ID NO: 1701743 - DNA, 15 bp, Homo sapiens
taaaacttagaacca

SEQ ID NO: 1701744 - DNA, 15 bp, Homo sapiens
aaaacttagaaccat

SEQ ID NO: 1701745 - DNA, 15 bp, Homo sapiens
aaacttagaaccatt

SEQ ID NO: 1701746 - DNA, 15 bp, Homo sapiens
aacttagaaccattt

SEQ ID NO: 1701747 - DNA, 15 bp, Homo sapiens
acttagaaccatttc

SEQ ID NO: 1701748 - DNA, 15 bp, Homo sapiens
cttagaaccatttcc

SEQ ID NO: 1701749 - DNA, 15 bp, Homo sapiens
ttagaaccatttcct

SEQ ID NO: 1701750 - DNA, 15 bp, Homo sapiens
tagaaccatttcctg

SEQ ID NO: 1701751 - DNA, 15 bp, Homo sapiens
agaaccatttcctga

SEQ ID NO: 1701752 - DNA, 15 bp, Homo sapiens
gaaccatttcctgag

SEQ ID NO: 1701753 - DNA, 15 bp, Homo sapiens
aaccatttcctgaga

SEQ ID NO: 1701754 - DNA, 15 bp, Homo sapiens
accatttcctgagaa

SEQ ID NO: 1701755 - DNA, 15 bp, Homo sapiens
ccatttcctgagaag

SEQ ID NO: 1701756 - DNA, 15 bp, Homo sapiens
catttcctgagaagt

SEQ ID NO: 1701757 - DNA, 15 bp, Homo sapiens
atttcctgagaagtc

SEQ ID NO: 1701758 - DNA, 15 bp, Homo sapiens
tttcctgagaagtct

SEQ ID NO: 1701759 - DNA, 15 bp, Homo sapiens
ttcctgagaagtctg

SEQ ID NO: 1701760 - DNA, 15 bp, Homo sapiens
tcctgagaagtctgt

SEQ ID NO: 1701761 - DNA, 15 bp, Homo sapiens
cctgagaagtctgtg

SEQ ID NO: 1701762 - DNA, 15 bp, Homo sapiens
ctgagaagtctgtgc

SEQ ID NO: 1701763 - DNA, 15 bp, Homo sapiens
tgagaagtctgtgct

SEQ ID NO: 1701764 - DNA, 15 bp, Homo sapiens
gagaagtctgtgctt

SEQ ID NO: 1701765 - DNA, 15 bp, Homo sapiens
agaagtctgtgcttt

SEQ ID NO: 1701766 - DNA, 15 bp, Homo sapiens
gaagtctgtgctttc

SEQ ID NO: 1701767 - DNA, 15 bp, Homo sapiens
aagtctgtgctttca

SEQ ID NO: 1701768 - DNA, 15 bp, Homo sapiens
agtctgtgctttcac

SEQ ID NO: 1701769 - DNA, 15 bp, Homo sapiens
gtctgtgctttcacc

SEQ ID NO: 1701770 - DNA, 15 bp, Homo sapiens
tctgtgctttcaccc

SEQ ID NO: 1701771 - DNA, 15 bp, Homo sapiens
ctgtgctttcaccca

SEQ ID NO: 1701772 - DNA, 15 bp, Homo sapiens
tgtgctttcacccaa

SEQ ID NO: 1701773 - DNA, 15 bp, Homo sapiens
gtgctttcacccaag

SEQ ID NO: 1701774 - DNA, 15 bp, Homo sapiens
tgctttcacccaagg

SEQ ID NO: 1701775 - DNA, 15 bp, Homo sapiens
gctttcacccaaggt

SEQ ID NO: 1701776 - DNA, 15 bp, Homo sapiens
ctttcacccaaggtc

SEQ ID NO: 1701777 - DNA, 15 bp, Homo sapiens
tttcacccaaggtct

SEQ ID NO: 1701778 - DNA, 15 bp, Homo sapiens
ttcacccaaggtctc

SEQ ID NO: 1701779 - DNA, 15 bp, Homo sapiens
tcacccaaggtctca

SEQ ID NO: 1701780 - DNA, 15 bp, Homo sapiens
cacccaaggtctcat

SEQ ID NO: 1701781 - DNA, 15 bp, Homo sapiens
acccaaggtctcatg

SEQ ID NO: 1701782 - DNA, 15 bp, Homo sapiens
cccaaggtctcatgg

SEQ ID NO: 1701783 - DNA, 15 bp, Homo sapiens
ccaaggtctcatggt

SEQ ID NO: 1701784 - DNA, 15 bp, Homo sapiens
caaggtctcatggtt

SEQ ID NO: 1701785 - DNA, 15 bp, Homo sapiens
aaggtctcatggtta

SEQ ID NO: 1701786 - DNA, 15 bp, Homo sapiens
aggtctcatggttag

SEQ ID NO: 1701787 - DNA, 15 bp, Homo sapiens
ggtctcatggttagt

SEQ ID NO: 1701788 - DNA, 15 bp, Homo sapiens
gtctcatggttagtt

SEQ ID NO: 1701789 - DNA, 15 bp, Homo sapiens
tctcatggttagttg

SEQ ID NO: 1701790 - DNA, 15 bp, Homo sapiens
ctcatggttagttgg

SEQ ID NO: 1701791 - DNA, 15 bp, Homo sapiens
tcatggttagttggt

SEQ ID NO: 1701792 - DNA, 15 bp, Homo sapiens
catggttagttggtg

SEQ ID NO: 1701793 - DNA, 15 bp, Homo sapiens
atggttagttggtga

SEQ ID NO: 1701794 - DNA, 15 bp, Homo sapiens
tggttagttggtgac

SEQ ID NO: 1701795 - DNA, 15 bp, Homo sapiens
ggttagttggtgaca

SEQ ID NO: 1701796 - DNA, 15 bp, Homo sapiens
gttagttggtgacag

SEQ ID NO: 1701797 - DNA, 15 bp, Homo sapiens
ttagttggtgacaga

SEQ ID NO: 1701798 - DNA, 15 bp, Homo sapiens
tagttggtgacagag

SEQ ID NO: 1701799 - DNA, 15 bp, Homo sapiens
agttggtgacagaga

SEQ ID NO: 1701800 - DNA, 15 bp, Homo sapiens
gttggtgacagagat

SEQ ID NO: 1701801 - DNA, 15 bp, Homo sapiens
ttggtgacagagatg

SEQ ID NO: 1701802 - DNA, 15 bp, Homo sapiens
tggtgacagagatga

SEQ ID NO: 1701803 - DNA, 15 bp, Homo sapiens
ggtgacagagatgag

SEQ ID NO: 1701804 - DNA, 15 bp, Homo sapiens
gtgacagagatgaga

SEQ ID NO: 1701805 - DNA, 15 bp, Homo sapiens
tgacagagatgagac

SEQ ID NO: 1701806 - DNA, 15 bp, Homo sapiens
gacagagatgagact

SEQ ID NO: 1701807 - DNA, 15 bp, Homo sapiens
acagagatgagacta

SEQ ID NO: 1701808 - DNA, 15 bp, Homo sapiens
cagagatgagactat

SEQ ID NO: 1701809 - DNA, 15 bp, Homo sapiens
agagatgagactata

SEQ ID NO: 1701810 - DNA, 15 bp, Homo sapiens
gagatgagactatac

SEQ ID NO: 1701811 - DNA, 15 bp, Homo sapiens
agatgagactatacc

SEQ ID NO: 1701812 - DNA, 15 bp, Homo sapiens
gatgagactataccc

SEQ ID NO: 1701813 - DNA, 15 bp, Homo sapiens
atgagactataccca

SEQ ID NO: 1701814 - DNA, 15 bp, Homo sapiens
tgagactatacccat

SEQ ID NO: 1701815 - DNA, 15 bp, Homo sapiens
gagactatacccatt

SEQ ID NO: 1701816 - DNA, 15 bp, Homo sapiens
agactatacccattt

SEQ ID NO: 1701817 - DNA, 15 bp, Homo sapiens
gactatacccattta

SEQ ID NO: 1701818 - DNA, 15 bp, Homo sapiens
actatacccatttat

SEQ ID NO: 1701819 - DNA, 15 bp, Homo sapiens
ctatacccatttatc

SEQ ID NO: 1701820 - DNA, 15 bp, Homo sapiens
tatacccatttatcc

SEQ ID NO: 1701821 - DNA, 15 bp, Homo sapiens
atacccatttatcct

SEQ ID NO: 1701822 - DNA, 15 bp, Homo sapiens
tacccatttatcctt

SEQ ID NO: 1701823 - DNA, 15 bp, Homo sapiens
acccatttatccttg

SEQ ID NO: 1701824 - DNA, 15 bp, Homo sapiens
cccatttatccttgc

SEQ ID NO: 1701825 - DNA, 15 bp, Homo sapiens
ccatttatccttgct

SEQ ID NO: 1701826 - DNA, 15 bp, Homo sapiens
catttatccttgctc

SEQ ID NO: 1701827 - DNA, 15 bp, Homo sapiens
atttatccttgctct

SEQ ID NO: 1701828 - DNA, 15 bp, Homo sapiens
tttatccttgctctc

SEQ ID NO: 1701829 - DNA, 15 bp, Homo sapiens
ttatccttgctctcc

SEQ ID NO: 1701830 - DNA, 15 bp, Homo sapiens
tatccttgctctcca

SEQ ID NO: 1701831 - DNA, 15 bp, Homo sapiens
atccttgctctccaa

SEQ ID NO: 1701832 - DNA, 15 bp, Homo sapiens
tccttgctctccaag

SEQ ID NO: 1701833 - DNA, 15 bp, Homo sapiens
ccttgctctccaagc

SEQ ID NO: 1701834 - DNA, 15 bp, Homo sapiens
cttgctctccaagca

SEQ ID NO: 1701835 - DNA, 15 bp, Homo sapiens
ttgctctccaagcag

SEQ ID NO: 1701836 - DNA, 15 bp, Homo sapiens
tgctctccaagcagt

SEQ ID NO: 1701837 - DNA, 15 bp, Homo sapiens
gctctccaagcagta

SEQ ID NO: 1701838 - DNA, 15 bp, Homo sapiens
ctctccaagcagtac

SEQ ID NO: 1701839 - DNA, 15 bp, Homo sapiens
tctccaagcagtact

SEQ ID NO: 1701840 - DNA, 15 bp, Homo sapiens
ctccaagcagtactc

SEQ ID NO: 1701841 - DNA, 15 bp, Homo sapiens
tccaagcagtactct

SEQ ID NO: 1701842 - DNA, 15 bp, Homo sapiens
ccaagcagtactctt

SEQ ID NO: 1701843 - DNA, 15 bp, Homo sapiens
caagcagtactctta

SEQ ID NO: 1701844 - DNA, 15 bp, Homo sapiens
aagcagtactcttag

SEQ ID NO: 1701845 - DNA, 15 bp, Homo sapiens
agcagtactcttagc

SEQ ID NO: 1701846 - DNA, 15 bp, Homo sapiens
gcagtactcttagct

SEQ ID NO: 1701847 - DNA, 15 bp, Homo sapiens
cagtactcttagctc

SEQ ID NO: 1701848 - DNA, 15 bp, Homo sapiens
agtactcttagctcc

SEQ ID NO: 1701849 - DNA, 15 bp, Homo sapiens
gtactcttagctcct

SEQ ID NO: 1701850 - DNA, 15 bp, Homo sapiens
tactcttagctcctg

SEQ ID NO: 1701851 - DNA, 15 bp, Homo sapiens
actcttagctcctgt

SEQ ID NO: 1701852 - DNA, 15 bp, Homo sapiens
ctcttagctcctgta

SEQ ID NO: 1701853 - DNA, 15 bp, Homo sapiens
tcttagctcctgtaa

SEQ ID NO: 1701854 - DNA, 15 bp, Homo sapiens
cttagctcctgtaaa

SEQ ID NO: 1701855 - DNA, 15 bp, Homo sapiens
ttagctcctgtaaac

SEQ ID NO: 1701856 - DNA, 15 bp, Homo sapiens
tagctcctgtaaacg

SEQ ID NO: 1701857 - DNA, 15 bp, Homo sapiens
agctcctgtaaacgg

SEQ ID NO: 1701858 - DNA, 15 bp, Homo sapiens
gctcctgtaaacggg

SEQ ID NO: 1701859 - DNA, 15 bp, Homo sapiens
ctcctgtaaacgggg

SEQ ID NO: 1701860 - DNA, 15 bp, Homo sapiens
tcctgtaaacggggt

SEQ ID NO: 1701861 - DNA, 15 bp, Homo sapiens
cctgtaaacggggtc

SEQ ID NO: 1701862 - DNA, 15 bp, Homo sapiens
ctgtaaacggggtca

SEQ ID NO: 1701863 - DNA, 15 bp, Homo sapiens
tgtaaacggggtcag

SEQ ID NO: 1701864 - DNA, 15 bp, Homo sapiens
gtaaacggggtcaga

SEQ ID NO: 1701865 - DNA, 15 bp, Homo sapiens
taaacggggtcagat

SEQ ID NO: 1701866 - DNA, 15 bp, Homo sapiens
aaacggggtcagatg

SEQ ID NO: 1701867 - DNA, 15 bp, Homo sapiens
aacggggtcagatgt

SEQ ID NO: 1701868 - DNA, 15 bp, Homo sapiens
acggggtcagatgtt

SEQ ID NO: 1701869 - DNA, 15 bp, Homo sapiens
cggggtcagatgtta

SEQ ID NO: 1701870 - DNA, 15 bp, Homo sapiens
ggggtcagatgttag

SEQ ID NO: 1701871 - DNA, 15 bp, Homo sapiens
gggtcagatgttagt

SEQ ID NO: 1701872 - DNA, 15 bp, Homo sapiens
ggtcagatgttagtt

SEQ ID NO: 1701873 - DNA, 15 bp, Homo sapiens
gtcagatgttagtta

SEQ ID NO: 1701874 - DNA, 15 bp, Homo sapiens
tcagatgttagttac

SEQ ID NO: 1701875 - DNA, 15 bp, Homo sapiens
cagatgttagttaca

SEQ ID NO: 1701876 - DNA, 15 bp, Homo sapiens
agatgttagttacaa

SEQ ID NO: 1701877 - DNA, 15 bp, Homo sapiens
gatgttagttacaat

SEQ ID NO: 1701878 - DNA, 15 bp, Homo sapiens
atgttagttacaatg

SEQ ID NO: 1701879 - DNA, 15 bp, Homo sapiens
tgttagttacaatgt

SEQ ID NO: 1701880 - DNA, 15 bp, Homo sapiens
gttagttacaatgtt

SEQ ID NO: 1701881 - DNA, 15 bp, Homo sapiens
ttagttacaatgttg

SEQ ID NO: 1701882 - DNA, 15 bp, Homo sapiens
tagttacaatgttga

SEQ ID NO: 1701883 - DNA, 15 bp, Homo sapiens
agttacaatgttgac

SEQ ID NO: 1701884 - DNA, 15 bp, Homo sapiens
gttacaatgttgaca

SEQ ID NO: 1701885 - DNA, 15 bp, Homo sapiens
ttacaatgttgacaa

SEQ ID NO: 1701886 - DNA, 15 bp, Homo sapiens
tacaatgttgacaac

SEQ ID NO: 1701887 - DNA, 15 bp, Homo sapiens
acaatgttgacaaca

SEQ ID NO: 1701888 - DNA, 15 bp, Homo sapiens
caatgttgacaacat

SEQ ID NO: 1701889 - DNA, 15 bp, Homo sapiens
aatgttgacaacatt

SEQ ID NO: 1701890 - DNA, 15 bp, Homo sapiens
atgttgacaacatta

SEQ ID NO: 1701891 - DNA, 15 bp, Homo sapiens
tgttgacaacattaa

SEQ ID NO: 1701892 - DNA, 15 bp, Homo sapiens
gttgacaacattaag

SEQ ID NO: 1701893 - DNA, 15 bp, Homo sapiens
ttgacaacattaagt

SEQ ID NO: 1701894 - DNA, 15 bp, Homo sapiens
tgacaacattaagtt

SEQ ID NO: 1701895 - DNA, 15 bp, Homo sapiens
gacaacattaagttt

SEQ ID NO: 1701896 - DNA, 15 bp, Homo sapiens
acaacattaagttta

SEQ ID NO: 1701897 - DNA, 15 bp, Homo sapiens
caacattaagtttag

SEQ ID NO: 1701898 - DNA, 15 bp, Homo sapiens
aacattaagtttagg

SEQ ID NO: 1701899 - DNA, 15 bp, Homo sapiens
acattaagtttagga

SEQ ID NO: 1701900 - DNA, 15 bp, Homo sapiens
attaagtttaggatt

SEQ ID NO: 1701901 - DNA, 15 bp, Homo sapiens
ttaagtttaggatta

SEQ ID NO: 1701902 - DNA, 15 bp, Homo sapiens
taagtttaggattag

SEQ ID NO: 1701903 - DNA, 15 bp, Homo sapiens
aagtttaggattagg

SEQ ID NO: 1701904 - DNA, 15 bp, Homo sapiens
agtttaggattaggg

SEQ ID NO: 1701905 - DNA, 15 bp, Homo sapiens
gtttaggattaggga

SEQ ID NO: 1701906 - DNA, 15 bp, Homo sapiens
tttaggattagggaa

SEQ ID NO: 1701907 - DNA, 15 bp, Homo sapiens
ttaggattagggaaa

SEQ ID NO: 1701908 - DNA, 15 bp, Homo sapiens
taggattagggaaac

SEQ ID NO: 1701909 - DNA, 15 bp, Homo sapiens
aggattagggaaacc

SEQ ID NO: 1701910 - DNA, 15 bp, Homo sapiens
ggattagggaaaccc

SEQ ID NO: 1701911 - DNA, 15 bp, Homo sapiens
gattagggaaaccca

SEQ ID NO: 1701912 - DNA, 15 bp, Homo sapiens
attagggaaacccac

SEQ ID NO: 1701913 - DNA, 15 bp, Homo sapiens
ttagggaaacccaca

SEQ ID NO: 1701914 - DNA, 15 bp, Homo sapiens
tagggaaacccacag

SEQ ID NO: 1701915 - DNA, 15 bp, Homo sapiens
agggaaacccacagg

SEQ ID NO: 1701916 - DNA, 15 bp, Homo sapiens
gggaaacccacaggc

SEQ ID NO: 1701917 - DNA, 15 bp, Homo sapiens
ggaaacccacaggct

SEQ ID NO: 1701918 - DNA, 15 bp, Homo sapiens
gaaacccacaggcta

SEQ ID NO: 1701919 - DNA, 15 bp, Homo sapiens
aaacccacaggctaa

SEQ ID NO: 1701920 - DNA, 15 bp, Homo sapiens
aacccacaggctaaa

SEQ ID NO: 1701921 - DNA, 15 bp, Homo sapiens
acccacaggctaaag

SEQ ID NO: 1701922 - DNA, 15 bp, Homo sapiens
cccacaggctaaagg

SEQ ID NO: 1701923 - DNA, 15 bp, Homo sapiens
ccacaggctaaaggt

SEQ ID NO: 1701924 - DNA, 15 bp, Homo sapiens
cacaggctaaaggtt

SEQ ID NO: 1701925 - DNA, 15 bp, Homo sapiens
acaggctaaaggttt

SEQ ID NO: 1701926 - DNA, 15 bp, Homo sapiens
caggctaaaggtttt

SEQ ID NO: 1701927 - DNA, 15 bp, Homo sapiens
aggctaaaggtttta

SEQ ID NO: 1701928 - DNA, 15 bp, Homo sapiens
ggctaaaggttttag

SEQ ID NO: 1701929 - DNA, 15 bp, Homo sapiens
gctaaaggttttagt

SEQ ID NO: 1701930 - DNA, 15 bp, Homo sapiens
ctaaaggttttagtc

SEQ ID NO: 1701931 - DNA, 15 bp, Homo sapiens
taaaggttttagtct

SEQ ID NO: 1701932 - DNA, 15 bp, Homo sapiens
aaaggttttagtctc

SEQ ID NO: 1701933 - DNA, 15 bp, Homo sapiens
aaggttttagtctct

SEQ ID NO: 1701934 - DNA, 15 bp, Homo sapiens
aggttttagtctcta

SEQ ID NO: 1701935 - DNA, 15 bp, Homo sapiens
ggttttagtctctaa

SEQ ID NO: 1701936 - DNA, 15 bp, Homo sapiens
gttttagtctctaat

SEQ ID NO: 1701937 - DNA, 15 bp, Homo sapiens
ttttagtctctaata

SEQ ID NO: 1701938 - DNA, 15 bp, Homo sapiens
tttagtctctaatat

SEQ ID NO: 1701939 - DNA, 15 bp, Homo sapiens
ttagtctctaatatt

SEQ ID NO: 1701940 - DNA, 15 bp, Homo sapiens
tagtctctaatattt

SEQ ID NO: 1701941 - DNA, 15 bp, Homo sapiens
agtctctaatattta

SEQ ID NO: 1701942 - DNA, 15 bp, Homo sapiens
gtctctaatatttag

SEQ ID NO: 1701943 - DNA, 15 bp, Homo sapiens
tctctaatatttagg

SEQ ID NO: 1701944 - DNA, 15 bp, Homo sapiens
ctctaatatttaggc

SEQ ID NO: 1701945 - DNA, 15 bp, Homo sapiens
tctaatatttaggca

SEQ ID NO: 1701946 - DNA, 15 bp, Homo sapiens
ctaatatttaggcaa

SEQ ID NO: 1701947 - DNA, 15 bp, Homo sapiens
taatatttaggcaat

SEQ ID NO: 1701948 - DNA, 15 bp, Homo sapiens
aatatttaggcaatc

SEQ ID NO: 1701949 - DNA, 15 bp, Homo sapiens
atatttaggcaatct

SEQ ID NO: 1701950 - DNA, 15 bp, Homo sapiens
tatttaggcaatctc

SEQ ID NO: 1701951 - DNA, 15 bp, Homo sapiens
atttaggcaatctct

SEQ ID NO: 1701952 - DNA, 15 bp, Homo sapiens
tttaggcaatctctt

SEQ ID NO: 1701953 - DNA, 15 bp, Homo sapiens
ttaggcaatctcttt

SEQ ID NO: 1701954 - DNA, 15 bp, Homo sapiens
taggcaatctctttt

SEQ ID NO: 1701955 - DNA, 15 bp, Homo sapiens
aggcaatctcttttg

SEQ ID NO: 1701956 - DNA, 15 bp, Homo sapiens
ggcaatctcttttgg

SEQ ID NO: 1701957 - DNA, 15 bp, Homo sapiens
gcaatctcttttggt

SEQ ID NO: 1701958 - DNA, 15 bp, Homo sapiens
caatctcttttggtg

SEQ ID NO: 1701959 - DNA, 15 bp, Homo sapiens
aatctcttttggtga

SEQ ID NO: 1701960 - DNA, 15 bp, Homo sapiens
atctcttttggtgaa

SEQ ID NO: 1701961 - DNA, 15 bp, Homo sapiens
tctcttttggtgaaa

SEQ ID NO: 1701962 - DNA, 15 bp, Homo sapiens
ctcttttggtgaaac

SEQ ID NO: 1701963 - DNA, 15 bp, Homo sapiens
tcttttggtgaaact

SEQ ID NO: 1701964 - DNA, 15 bp, Homo sapiens
cttttggtgaaacta

SEQ ID NO: 1701965 - DNA, 15 bp, Homo sapiens
ttttggtgaaactaa

SEQ ID NO: 1701966 - DNA, 15 bp, Homo sapiens
tttggtgaaactaaa

SEQ ID NO: 1701967 - DNA, 15 bp, Homo sapiens
ttggtgaaactaaaa

SEQ ID NO: 1701968 - DNA, 15 bp, Homo sapiens
tggtgaaactaaaac

SEQ ID NO: 1701969 - DNA, 15 bp, Homo sapiens
ggtgaaactaaaaca

SEQ ID NO: 1701970 - DNA, 15 bp, Homo sapiens
gtgaaactaaaacac

SEQ ID NO: 1701971 - DNA, 15 bp, Homo sapiens
tgaaactaaaacaca

SEQ ID NO: 1701972 - DNA, 15 bp, Homo sapiens
gaaactaaaacacaa

SEQ ID NO: 1701973 - DNA, 15 bp, Homo sapiens
aaactaaaacacaag

SEQ ID NO: 1701974 - DNA, 15 bp, Homo sapiens
aactaaaacacaagg

SEQ ID NO: 1701975 - DNA, 15 bp, Homo sapiens
actaaaacacaaggc

SEQ ID NO: 1701976 - DNA, 15 bp, Homo sapiens
ctaaaacacaaggca

SEQ ID NO: 1701977 - DNA, 15 bp, Homo sapiens
taaaacacaaggcag

SEQ ID NO: 1701978 - DNA, 15 bp, Homo sapiens
aaaacacaaggcaga

SEQ ID NO: 1701979 - DNA, 15 bp, Homo sapiens
aaacacaaggcagaa

SEQ ID NO: 1701980 - DNA, 15 bp, Homo sapiens
aacacaaggcagaac

SEQ ID NO: 1701981 - DNA, 15 bp, Homo sapiens
acacaaggcagaaca

SEQ ID NO: 1701982 - DNA, 15 bp, Homo sapiens
cacaaggcagaacat

SEQ ID NO: 1701983 - DNA, 15 bp, Homo sapiens
acaaggcagaacatg

SEQ ID NO: 1701984 - DNA, 15 bp, Homo sapiens
caaggcagaacatgt

SEQ ID NO: 1701985 - DNA, 15 bp, Homo sapiens
aaggcagaacatgta

SEQ ID NO: 1701986 - DNA, 15 bp, Homo sapiens
aggcagaacatgtat

SEQ ID NO: 1701987 - DNA, 15 bp, Homo sapiens
ggcagaacatgtatg

SEQ ID NO: 1701988 - DNA, 15 bp, Homo sapiens
gcagaacatgtatga

SEQ ID NO: 1701989 - DNA, 15 bp, Homo sapiens
cagaacatgtatgag

SEQ ID NO: 1701990 - DNA, 15 bp, Homo sapiens
agaacatgtatgaga

SEQ ID NO: 1701991 - DNA, 15 bp, Homo sapiens
gaacatgtatgagat

SEQ ID NO: 1701992 - DNA, 15 bp, Homo sapiens
aacatgtatgagatc

SEQ ID NO: 1701993 - DNA, 15 bp, Homo sapiens
acatgtatgagatca

SEQ ID NO: 1701994 - DNA, 15 bp, Homo sapiens
catgtatgagatcaa

SEQ ID NO: 1701995 - DNA, 15 bp, Homo sapiens
atgtatgagatcaag

SEQ ID NO: 1701996 - DNA, 15 bp, Homo sapiens
tgtatgagatcaagt

SEQ ID NO: 1701997 - DNA, 15 bp, Homo sapiens
gtatgagatcaagtc

SEQ ID NO: 1701998 - DNA, 15 bp, Homo sapiens
tatgagatcaagtca

SEQ ID NO: 1701999 - DNA, 15 bp, Homo sapiens
atgagatcaagtcag

SEQ ID NO: 1702000 - DNA, 15 bp, Homo sapiens
tgagatcaagtcagg

SEQ ID NO: 1702001 - DNA, 15 bp, Homo sapiens
gagatcaagtcagga

SEQ ID NO: 1702002 - DNA, 15 bp, Homo sapiens
agatcaagtcaggat

SEQ ID NO: 1702003 - DNA, 15 bp, Homo sapiens
gatcaagtcaggatc

SEQ ID NO: 1702004 - DNA, 15 bp, Homo sapiens
atcaagtcaggatca

SEQ ID NO: 1702005 - DNA, 15 bp, Homo sapiens
tcaagtcaggatcaa

SEQ ID NO: 1702006 - DNA, 15 bp, Homo sapiens
caagtcaggatcaaa

SEQ ID NO: 1702007 - DNA, 15 bp, Homo sapiens
aagtcaggatcaaat

SEQ ID NO: 1702008 - DNA, 15 bp, Homo sapiens
agtcaggatcaaata

SEQ ID NO: 1702009 - DNA, 15 bp, Homo sapiens
gtcaggatcaaatat

SEQ ID NO: 1702010 - DNA, 15 bp, Homo sapiens
tcaggatcaaatatt

SEQ ID NO: 1702011 - DNA, 15 bp, Homo sapiens
caggatcaaatatta

SEQ ID NO: 1702012 - DNA, 15 bp, Homo sapiens
aggatcaaatattag

SEQ ID NO: 1702013 - DNA, 15 bp, Homo sapiens
ggatcaaatattaga

SEQ ID NO: 1702014 - DNA, 15 bp, Homo sapiens
gatcaaatattagac

SEQ ID NO: 1702015 - DNA, 15 bp, Homo sapiens
atcaaatattagaca

SEQ ID NO: 1702016 - DNA, 15 bp, Homo sapiens
tcaaatattagacac

SEQ ID NO: 1702017 - DNA, 15 bp, Homo sapiens
caaatattagacacc

SEQ ID NO: 1702018 - DNA, 15 bp, Homo sapiens
aaatattagacaccc

SEQ ID NO: 1702019 - DNA, 15 bp, Homo sapiens
aatattagacaccca

SEQ ID NO: 1702020 - DNA, 15 bp, Homo sapiens
atattagacacccat

SEQ ID NO: 1702021 - DNA, 15 bp, Homo sapiens
tattagacacccata

SEQ ID NO: 1702022 - DNA, 15 bp, Homo sapiens
attagacacccataa

SEQ ID NO: 1702023 - DNA, 15 bp, Homo sapiens
ttagacacccataac

SEQ ID NO: 1702024 - DNA, 15 bp, Homo sapiens
tagacacccataact

SEQ ID NO: 1702025 - DNA, 15 bp, Homo sapiens
agacacccataactg

SEQ ID NO: 1702026 - DNA, 15 bp, Homo sapiens
gacacccataactgc

SEQ ID NO: 1702027 - DNA, 15 bp, Homo sapiens
acacccataactgca

SEQ ID NO: 1702028 - DNA, 15 bp, Homo sapiens
cacccataactgcat

SEQ ID NO: 1702029 - DNA, 15 bp, Homo sapiens
acccataactgcatc

SEQ ID NO: 1702030 - DNA, 15 bp, Homo sapiens
cccataactgcatca

SEQ ID NO: 1702031 - DNA, 15 bp, Homo sapiens
ccataactgcatcac

SEQ ID NO: 1702032 - DNA, 15 bp, Homo sapiens
cataactgcatcaca

SEQ ID NO: 1702033 - DNA, 15 bp, Homo sapiens
ataactgcatcacag

SEQ ID NO: 1702034 - DNA, 15 bp, Homo sapiens
taactgcatcacaga

SEQ ID NO: 1702035 - DNA, 15 bp, Homo sapiens
aactgcatcacagat

SEQ ID NO: 1702036 - DNA, 15 bp, Homo sapiens
actgcatcacagata

SEQ ID NO: 1702037 - DNA, 15 bp, Homo sapiens
ctgcatcacagataa

SEQ ID NO: 1702038 - DNA, 15 bp, Homo sapiens
tgcatcacagataac

SEQ ID NO: 1702039 - DNA, 15 bp, Homo sapiens
gcatcacagataact

SEQ ID NO: 1702040 - DNA, 15 bp, Homo sapiens
catcacagataactt

SEQ ID NO: 1702041 - DNA, 15 bp, Homo sapiens
atcacagataactta

SEQ ID NO: 1702042 - DNA, 15 bp, Homo sapiens
tcacagataacttat

SEQ ID NO: 1702043 - DNA, 15 bp, Homo sapiens
cacagataacttatg

SEQ ID NO: 1702044 - DNA, 15 bp, Homo sapiens
acagataacttatgt

SEQ ID NO: 1702045 - DNA, 15 bp, Homo sapiens
cagataacttatgtg

SEQ ID NO: 1702046 - DNA, 15 bp, Homo sapiens
agataacttatgtga

SEQ ID NO: 1702047 - DNA, 15 bp, Homo sapiens
gataacttatgtgat

SEQ ID NO: 1702048 - DNA, 15 bp, Homo sapiens
ataacttatgtgata

SEQ ID NO: 1702049 - DNA, 15 bp, Homo sapiens
taacttatgtgatag

SEQ ID NO: 1702050 - DNA, 15 bp, Homo sapiens
aacttatgtgatagg

SEQ ID NO: 1702051 - DNA, 15 bp, Homo sapiens
acttatgtgatagga

SEQ ID NO: 1702052 - DNA, 15 bp, Homo sapiens
cttatgtgataggat

SEQ ID NO: 1702053 - DNA, 15 bp, Homo sapiens
ttatgtgataggatt

SEQ ID NO: 1702054 - DNA, 15 bp, Homo sapiens
tatgtgataggattt

SEQ ID NO: 1702055 - DNA, 15 bp, Homo sapiens
atgtgataggattta

SEQ ID NO: 1702056 - DNA, 15 bp, Homo sapiens
tgtgataggatttag

SEQ ID NO: 1702057 - DNA, 15 bp, Homo sapiens
gtgataggatttagg

SEQ ID NO: 1702058 - DNA, 15 bp, Homo sapiens
tgataggatttaggc

SEQ ID NO: 1702059 - DNA, 15 bp, Homo sapiens
gataggatttaggca

SEQ ID NO: 1702060 - DNA, 15 bp, Homo sapiens
ataggatttaggcat

SEQ ID NO: 1702061 - DNA, 15 bp, Homo sapiens
taggatttaggcatt

SEQ ID NO: 1702062 - DNA, 15 bp, Homo sapiens
aggatttaggcattg

SEQ ID NO: 1702063 - DNA, 15 bp, Homo sapiens
ggatttaggcattgg

SEQ ID NO: 1702064 - DNA, 15 bp, Homo sapiens
gatttaggcattggt

SEQ ID NO: 1702065 - DNA, 15 bp, Homo sapiens
atttaggcattggtt

SEQ ID NO: 1702066 - DNA, 15 bp, Homo sapiens
tttaggcattggtta

SEQ ID NO: 1702067 - DNA, 15 bp, Homo sapiens
ttaggcattggttaa

SEQ ID NO: 1702068 - DNA, 15 bp, Homo sapiens
taggcattggttaag

SEQ ID NO: 1702069 - DNA, 15 bp, Homo sapiens
aggcattggttaaga

SEQ ID NO: 1702070 - DNA, 15 bp, Homo sapiens
ggcattggttaagat

SEQ ID NO: 1702071 - DNA, 15 bp, Homo sapiens
gcattggttaagata

SEQ ID NO: 1702072 - DNA, 15 bp, Homo sapiens
cattggttaagataa

SEQ ID NO: 1702073 - DNA, 15 bp, Homo sapiens
attggttaagataag

SEQ ID NO: 1702074 - DNA, 15 bp, Homo sapiens
ttggttaagataaga

SEQ ID NO: 1702075 - DNA, 15 bp, Homo sapiens
tggttaagataagac

SEQ ID NO: 1702076 - DNA, 15 bp, Homo sapiens
ggttaagataagaca

SEQ ID NO: 1702077 - DNA, 15 bp, Homo sapiens
gttaagataagacag

SEQ ID NO: 1702078 - DNA, 15 bp, Homo sapiens
ttaagataagacaga

SEQ ID NO: 1702079 - DNA, 15 bp, Homo sapiens
taagataagacagag

SEQ ID NO: 1702080 - DNA, 15 bp, Homo sapiens
aagataagacagaga

SEQ ID NO: 1702081 - DNA, 15 bp, Homo sapiens
agataagacagagat

SEQ ID NO: 1702082 - DNA, 15 bp, Homo sapiens
gataagacagagatg

SEQ ID NO: 1702083 - DNA, 15 bp, Homo sapiens
ataagacagagatgg

SEQ ID NO: 1702084 - DNA, 15 bp, Homo sapiens
taagacagagatggg

SEQ ID NO: 1702085 - DNA, 15 bp, Homo sapiens
aagacagagatggga

SEQ ID NO: 1702086 - DNA, 15 bp, Homo sapiens
agacagagatgggac

SEQ ID NO: 1702087 - DNA, 15 bp, Homo sapiens
gacagagatgggacc

SEQ ID NO: 1702088 - DNA, 15 bp, Homo sapiens
acagagatgggaccc

SEQ ID NO: 1702089 - DNA, 15 bp, Homo sapiens
cagagatgggaccca

SEQ ID NO: 1702090 - DNA, 15 bp, Homo sapiens
agagatgggacccat

SEQ ID NO: 1702091 - DNA, 15 bp, Homo sapiens
gagatgggacccata

SEQ ID NO: 1702092 - DNA, 15 bp, Homo sapiens
agatgggacccataa

SEQ ID NO: 1702093 - DNA, 15 bp, Homo sapiens
gatgggacccataaa

SEQ ID NO: 1702094 - DNA, 15 bp, Homo sapiens
atgggacccataaaa

SEQ ID NO: 1702095 - DNA, 15 bp, Homo sapiens
tgggacccataaaaa

SEQ ID NO: 1702096 - DNA, 15 bp, Homo sapiens
gggacccataaaaat

SEQ ID NO: 1702097 - DNA, 15 bp, Homo sapiens
ggacccataaaaatg

SEQ ID NO: 1702098 - DNA, 15 bp, Homo sapiens
gacccataaaaatgg

SEQ ID NO: 1702099 - DNA, 15 bp, Homo sapiens
acccataaaaatggc

SEQ ID NO: 1702100 - DNA, 15 bp, Homo sapiens
cccataaaaatggct

SEQ ID NO: 1702101 - DNA, 15 bp, Homo sapiens
ccataaaaatggcta

SEQ ID NO: 1702102 - DNA, 15 bp, Homo sapiens
cataaaaatggctat

SEQ ID NO: 1702103 - DNA, 15 bp, Homo sapiens
ataaaaatggctatc

SEQ ID NO: 1702104 - DNA, 15 bp, Homo sapiens
taaaaatggctatca

SEQ ID NO: 1702105 - DNA, 15 bp, Homo sapiens
aaaaatggctatcag

SEQ ID NO: 1702106 - DNA, 15 bp, Homo sapiens
aaaatggctatcagt

SEQ ID NO: 1702107 - DNA, 15 bp, Homo sapiens
aaatggctatcagta

SEQ ID NO: 1702108 - DNA, 15 bp, Homo sapiens
aatggctatcagtat

SEQ ID NO: 1702109 - DNA, 15 bp, Homo sapiens
atggctatcagtatt

SEQ ID NO: 1702110 - DNA, 15 bp, Homo sapiens
tggctatcagtatta

SEQ ID NO: 1702111 - DNA, 15 bp, Homo sapiens
ggctatcagtattag

SEQ ID NO: 1702112 - DNA, 15 bp, Homo sapiens
gctatcagtattagt

SEQ ID NO: 1702113 - DNA, 15 bp, Homo sapiens
ctatcagtattagtt

SEQ ID NO: 1702114 - DNA, 15 bp, Homo sapiens
tatcagtattagttc

SEQ ID NO: 1702115 - DNA, 15 bp, Homo sapiens
atcagtattagttca

SEQ ID NO: 1702116 - DNA, 15 bp, Homo sapiens
tcagtattagttcat

SEQ ID NO: 1702117 - DNA, 15 bp, Homo sapiens
cagtattagttcatt

SEQ ID NO: 1702118 - DNA, 15 bp, Homo sapiens
agtattagttcattt

SEQ ID NO: 1702119 - DNA, 15 bp, Homo sapiens
gtattagttcatttg

SEQ ID NO: 1702120 - DNA, 15 bp, Homo sapiens
tattagttcatttga

SEQ ID NO: 1702121 - DNA, 15 bp, Homo sapiens
attagttcatttgaa

SEQ ID NO: 1702122 - DNA, 15 bp, Homo sapiens
ttagttcatttgaaa

SEQ ID NO: 1702123 - DNA, 15 bp, Homo sapiens
tagttcatttgaaaa

SEQ ID NO: 1702124 - DNA, 15 bp, Homo sapiens
agttcatttgaaaaa

SEQ ID NO: 1702125 - DNA, 15 bp, Homo sapiens
gttcatttgaaaaat

SEQ ID NO: 1702126 - DNA, 15 bp, Homo sapiens
ttcatttgaaaaatc

SEQ ID NO: 1702127 - DNA, 15 bp, Homo sapiens
tcatttgaaaaatct

SEQ ID NO: 1702128 - DNA, 15 bp, Homo sapiens
catttgaaaaatctc

SEQ ID NO: 1702129 - DNA, 15 bp, Homo sapiens
atttgaaaaatctct

SEQ ID NO: 1702130 - DNA, 15 bp, Homo sapiens
tttgaaaaatctctg

SEQ ID NO: 1702131 - DNA, 15 bp, Homo sapiens
ttgaaaaatctctgc

SEQ ID NO: 1702132 - DNA, 15 bp, Homo sapiens
tgaaaaatctctgct

SEQ ID NO: 1702133 - DNA, 15 bp, Homo sapiens
gaaaaatctctgctc

SEQ ID NO: 1702134 - DNA, 15 bp, Homo sapiens
aaaaatctctgctcc

SEQ ID NO: 1702135 - DNA, 15 bp, Homo sapiens
aaaatctctgctcct

SEQ ID NO: 1702136 - DNA, 15 bp, Homo sapiens
aaatctctgctcctt

SEQ ID NO: 1702137 - DNA, 15 bp, Homo sapiens
aatctctgctccttt

SEQ ID NO: 1702138 - DNA, 15 bp, Homo sapiens
atctctgctcctttg

SEQ ID NO: 1702139 - DNA, 15 bp, Homo sapiens
tctctgctcctttgt

SEQ ID NO: 1702140 - DNA, 15 bp, Homo sapiens
ctctgctcctttgtc

SEQ ID NO: 1702141 - DNA, 15 bp, Homo sapiens
tctgctcctttgtca

SEQ ID NO: 1702142 - DNA, 15 bp, Homo sapiens
ctgctcctttgtcat

SEQ ID NO: 1702143 - DNA, 15 bp, Homo sapiens
tgctcctttgtcata

SEQ ID NO: 1702144 - DNA, 15 bp, Homo sapiens
gctcctttgtcatag

SEQ ID NO: 1702145 - DNA, 15 bp, Homo sapiens
ctcctttgtcatagt

SEQ ID NO: 1702146 - DNA, 15 bp, Homo sapiens
tcctttgtcatagtt

SEQ ID NO: 1702147 - DNA, 15 bp, Homo sapiens
cctttgtcatagtta

SEQ ID NO: 1702148 - DNA, 15 bp, Homo sapiens
ctttgtcatagttac

SEQ ID NO: 1702149 - DNA, 15 bp, Homo sapiens
tttgtcatagttacc

SEQ ID NO: 1702150 - DNA, 15 bp, Homo sapiens
ttgtcatagttacca

SEQ ID NO: 1702151 - DNA, 15 bp, Homo sapiens
tgtcatagttaccac

SEQ ID NO: 1702152 - DNA, 15 bp, Homo sapiens
gtcatagttaccact

SEQ ID NO: 1702153 - DNA, 15 bp, Homo sapiens
tcatagttaccactt

SEQ ID NO: 1702154 - DNA, 15 bp, Homo sapiens
catagttaccacttt

SEQ ID NO: 1702155 - DNA, 15 bp, Homo sapiens
atagttaccactttt

SEQ ID NO: 1702156 - DNA, 15 bp, Homo sapiens
tagttaccacttttt

SEQ ID NO: 1702157 - DNA, 15 bp, Homo sapiens
agttaccacttttta

SEQ ID NO: 1702158 - DNA, 15 bp, Homo sapiens
gttaccactttttat

SEQ ID NO: 1702159 - DNA, 15 bp, Homo sapiens
ttaccactttttatc

SEQ ID NO: 1702160 - DNA, 15 bp, Homo sapiens
taccactttttatca

SEQ ID NO: 1702161 - DNA, 15 bp, Homo sapiens
accactttttatcat

SEQ ID NO: 1702162 - DNA, 15 bp, Homo sapiens
ccactttttatcatc

SEQ ID NO: 1702163 - DNA, 15 bp, Homo sapiens
cactttttatcatca

SEQ ID NO: 1702164 - DNA, 15 bp, Homo sapiens
actttttatcatcaa

SEQ ID NO: 1702165 - DNA, 15 bp, Homo sapiens
ctttttatcatcaaa

SEQ ID NO: 1702166 - DNA, 15 bp, Homo sapiens
tttttatcatcaaat

SEQ ID NO: 1702167 - DNA, 15 bp, Homo sapiens
ttttatcatcaaatc

SEQ ID NO: 1702168 - DNA, 15 bp, Homo sapiens
tttatcatcaaatct

SEQ ID NO: 1702169 - DNA, 15 bp, Homo sapiens
ttatcatcaaatctt

SEQ ID NO: 1702170 - DNA, 15 bp, Homo sapiens
tatcatcaaatctta

SEQ ID NO: 1702171 - DNA, 15 bp, Homo sapiens
atcatcaaatcttaa

SEQ ID NO: 1702172 - DNA, 15 bp, Homo sapiens
tcatcaaatcttaaa

SEQ ID NO: 1702173 - DNA, 15 bp, Homo sapiens
catcaaatcttaaag

SEQ ID NO: 1702174 - DNA, 15 bp, Homo sapiens
atcaaatcttaaagt

SEQ ID NO: 1702175 - DNA, 15 bp, Homo sapiens
tcaaatcttaaagtt

SEQ ID NO: 1702176 - DNA, 15 bp, Homo sapiens
caaatcttaaagtta

SEQ ID NO: 1702177 - DNA, 15 bp, Homo sapiens
aaatcttaaagttat

SEQ ID NO: 1702178 - DNA, 15 bp, Homo sapiens
aatcttaaagttatt

SEQ ID NO: 1702179 - DNA, 15 bp, Homo sapiens
atcttaaagttatta

SEQ ID NO: 1702180 - DNA, 15 bp, Homo sapiens
tcttaaagttattat

SEQ ID NO: 1702181 - DNA, 15 bp, Homo sapiens
cttaaagttattatt

SEQ ID NO: 1702182 - DNA, 15 bp, Homo sapiens
ttaaagttattatta

SEQ ID NO: 1702183 - DNA, 15 bp, Homo sapiens
taaagttattattag

SEQ ID NO: 1702184 - DNA, 15 bp, Homo sapiens
aaagttattattagg

SEQ ID NO: 1702185 - DNA, 15 bp, Homo sapiens
aagttattattaggg

SEQ ID NO: 1702186 - DNA, 15 bp, Homo sapiens
agttattattagggc

SEQ ID NO: 1702187 - DNA, 15 bp, Homo sapiens
gttattattagggca

SEQ ID NO: 1702188 - DNA, 15 bp, Homo sapiens
ttattattagggcag

SEQ ID NO: 1702189 - DNA, 15 bp, Homo sapiens
tattattagggcagg

SEQ ID NO: 1702190 - DNA, 15 bp, Homo sapiens
attattagggcaggg

SEQ ID NO: 1702191 - DNA, 15 bp, Homo sapiens
ttattagggcaggga

SEQ ID NO: 1702192 - DNA, 15 bp, Homo sapiens
tattagggcagggaa

SEQ ID NO: 1702193 - DNA, 15 bp, Homo sapiens
attagggcagggaac

SEQ ID NO: 1702194 - DNA, 15 bp, Homo sapiens
ttagggcagggaacc

SEQ ID NO: 1702195 - DNA, 15 bp, Homo sapiens
tagggcagggaacct

SEQ ID NO: 1702196 - DNA, 15 bp, Homo sapiens
agggcagggaacctc

SEQ ID NO: 1702197 - DNA, 15 bp, Homo sapiens
gggcagggaacctct

SEQ ID NO: 1702198 - DNA, 15 bp, Homo sapiens
ggcagggaacctcta

SEQ ID NO: 1702199 - DNA, 15 bp, Homo sapiens
gcagggaacctctac

SEQ ID NO: 1702200 - DNA, 15 bp, Homo sapiens
cagggaacctctact

SEQ ID NO: 1702201 - DNA, 15 bp, Homo sapiens
agggaacctctactg

SEQ ID NO: 1702202 - DNA, 15 bp, Homo sapiens
gggaacctctactga

SEQ ID NO: 1702203 - DNA, 15 bp, Homo sapiens
ggaacctctactgaa

SEQ ID NO: 1702204 - DNA, 15 bp, Homo sapiens
gaacctctactgaat

SEQ ID NO: 1702205 - DNA, 15 bp, Homo sapiens
aacctctactgaatg

SEQ ID NO: 1702206 - DNA, 15 bp, Homo sapiens
acctctactgaatgg

SEQ ID NO: 1702207 - DNA, 15 bp, Homo sapiens
cctctactgaatgga

SEQ ID NO: 1702208 - DNA, 15 bp, Homo sapiens
ctctactgaatggaa

SEQ ID NO: 1702209 - DNA, 15 bp, Homo sapiens
tctactgaatggaag

SEQ ID NO: 1702210 - DNA, 15 bp, Homo sapiens
ctactgaatggaagg

SEQ ID NO: 1702211 - DNA, 15 bp, Homo sapiens
tactgaatggaaggc

SEQ ID NO: 1702212 - DNA, 15 bp, Homo sapiens
actgaatggaaggca

SEQ ID NO: 1702213 - DNA, 15 bp, Homo sapiens
ctgaatggaaggcag

SEQ ID NO: 1702214 - DNA, 15 bp, Homo sapiens
tgaatggaaggcaga

SEQ ID NO: 1702215 - DNA, 15 bp, Homo sapiens
gaatggaaggcagaa

SEQ ID NO: 1702216 - DNA, 15 bp, Homo sapiens
aatggaaggcagaaa

SEQ ID NO: 1702217 - DNA, 15 bp, Homo sapiens
atggaaggcagaaat

SEQ ID NO: 1702218 - DNA, 15 bp, Homo sapiens
tggaaggcagaaatt

SEQ ID NO: 1702219 - DNA, 15 bp, Homo sapiens
ggaaggcagaaatta

SEQ ID NO: 1702220 - DNA, 15 bp, Homo sapiens
gaaggcagaaattag

SEQ ID NO: 1702221 - DNA, 15 bp, Homo sapiens
aaggcagaaattagt

SEQ ID NO: 1702222 - DNA, 15 bp, Homo sapiens
aggcagaaattagtg

SEQ ID NO: 1702223 - DNA, 15 bp, Homo sapiens
ggcagaaattagtgt

SEQ ID NO: 1702224 - DNA, 15 bp, Homo sapiens
gcagaaattagtgta

SEQ ID NO: 1702225 - DNA, 15 bp, Homo sapiens
cagaaattagtgtaa

SEQ ID NO: 1702226 - DNA, 15 bp, Homo sapiens
agaaattagtgtaac

SEQ ID NO: 1702227 - DNA, 15 bp, Homo sapiens
gaaattagtgtaaca

SEQ ID NO: 1702228 - DNA, 15 bp, Homo sapiens
aaattagtgtaacaa

SEQ ID NO: 1702229 - DNA, 15 bp, Homo sapiens
aattagtgtaacaaa

SEQ ID NO: 1702230 - DNA, 15 bp, Homo sapiens
attagtgtaacaaag

SEQ ID NO: 1702231 - DNA, 15 bp, Homo sapiens
ttagtgtaacaaagt

SEQ ID NO: 1702232 - DNA, 15 bp, Homo sapiens
tagtgtaacaaagta

SEQ ID NO: 1702233 - DNA, 15 bp, Homo sapiens
agtgtaacaaagtat

SEQ ID NO: 1702234 - DNA, 15 bp, Homo sapiens
gtgtaacaaagtata

SEQ ID NO: 1702235 - DNA, 15 bp, Homo sapiens
tgtaacaaagtatag

SEQ ID NO: 1702236 - DNA, 15 bp, Homo sapiens
gtaacaaagtataga

SEQ ID NO: 1702237 - DNA, 15 bp, Homo sapiens
taacaaagtatagaa

SEQ ID NO: 1702238 - DNA, 15 bp, Homo sapiens
aacaaagtatagaaa

SEQ ID NO: 1702239 - DNA, 15 bp, Homo sapiens
acaaagtatagaaag

SEQ ID NO: 1702240 - DNA, 15 bp, Homo sapiens
caaagtatagaaagc

SEQ ID NO: 1702241 - DNA, 15 bp, Homo sapiens
aaagtatagaaagca

SEQ ID NO: 1702242 - DNA, 15 bp, Homo sapiens
aagtatagaaagcaa

SEQ ID NO: 1702243 - DNA, 15 bp, Homo sapiens
agtatagaaagcaag

SEQ ID NO: 1702244 - DNA, 15 bp, Homo sapiens
gtatagaaagcaaga

SEQ ID NO: 1702245 - DNA, 15 bp, Homo sapiens
tatagaaagcaagac

SEQ ID NO: 1702246 - DNA, 15 bp, Homo sapiens
atagaaagcaagacc

SEQ ID NO: 1702247 - DNA, 15 bp, Homo sapiens
tagaaagcaagacct

SEQ ID NO: 1702248 - DNA, 15 bp, Homo sapiens
agaaagcaagaccta

SEQ ID NO: 1702249 - DNA, 15 bp, Homo sapiens
gaaagcaagacctaa

SEQ ID NO: 1702250 - DNA, 15 bp, Homo sapiens
aaagcaagacctaag

SEQ ID NO: 1702251 - DNA, 15 bp, Homo sapiens
aagcaagacctaaga

SEQ ID NO: 1702252 - DNA, 15 bp, Homo sapiens
agcaagacctaagat

SEQ ID NO: 1702253 - DNA, 15 bp, Homo sapiens
gcaagacctaagatt

SEQ ID NO: 1702254 - DNA, 15 bp, Homo sapiens
caagacctaagattt

SEQ ID NO: 1702255 - DNA, 15 bp, Homo sapiens
aagacctaagattta

SEQ ID NO: 1702256 - DNA, 15 bp, Homo sapiens
agacctaagatttaa

SEQ ID NO: 1702257 - DNA, 15 bp, Homo sapiens
gacctaagatttaag

SEQ ID NO: 1702258 - DNA, 15 bp, Homo sapiens
acctaagatttaagt

SEQ ID NO: 1702259 - DNA, 15 bp, Homo sapiens
cctaagatttaagtc

SEQ ID NO: 1702260 - DNA, 15 bp, Homo sapiens
ctaagatttaagtcg

SEQ ID NO: 1702261 - DNA, 15 bp, Homo sapiens
taagatttaagtcgg

SEQ ID NO: 1702262 - DNA, 15 bp, Homo sapiens
aagatttaagtcgga

SEQ ID NO: 1702263 - DNA, 15 bp, Homo sapiens
agatttaagtcggag

SEQ ID NO: 1702264 - DNA, 15 bp, Homo sapiens
gatttaagtcggagg

SEQ ID NO: 1702265 - DNA, 15 bp, Homo sapiens
atttaagtcggaggt

SEQ ID NO: 1702266 - DNA, 15 bp, Homo sapiens
tttaagtcggaggtt

SEQ ID NO: 1702267 - DNA, 15 bp, Homo sapiens
ttaagtcggaggtta

SEQ ID NO: 1702268 - DNA, 15 bp, Homo sapiens
taagtcggaggttat

SEQ ID NO: 1702269 - DNA, 15 bp, Homo sapiens
aagtcggaggttatt

SEQ ID NO: 1702270 - DNA, 15 bp, Homo sapiens
agtcggaggttattt

SEQ ID NO: 1702271 - DNA, 15 bp, Homo sapiens
gtcggaggttatttt

SEQ ID NO: 1702272 - DNA, 15 bp, Homo sapiens
tcggaggttattttt

SEQ ID NO: 1702273 - DNA, 15 bp, Homo sapiens
cggaggttatttttc

SEQ ID NO: 1702274 - DNA, 15 bp, Homo sapiens
ggaggttatttttcc

SEQ ID NO: 1702275 - DNA, 15 bp, Homo sapiens
gaggttatttttcct

SEQ ID NO: 1702276 - DNA, 15 bp, Homo sapiens
aggttatttttcctc

SEQ ID NO: 1702277 - DNA, 15 bp, Homo sapiens
ggttatttttcctct

SEQ ID NO: 1702278 - DNA, 15 bp, Homo sapiens
gttatttttcctctg

SEQ ID NO: 1702279 - DNA, 15 bp, Homo sapiens
ttatttttcctctgg

SEQ ID NO: 1702280 - DNA, 15 bp, Homo sapiens
tatttttcctctggc

SEQ ID NO: 1702281 - DNA, 15 bp, Homo sapiens
atttttcctctggcc

SEQ ID NO: 1702282 - DNA, 15 bp, Homo sapiens
tttttcctctggcct

SEQ ID NO: 1702283 - DNA, 15 bp, Homo sapiens
ttttcctctggccta

SEQ ID NO: 1702284 - DNA, 15 bp, Homo sapiens
tttcctctggcctac

SEQ ID NO: 1702285 - DNA, 15 bp, Homo sapiens
ttcctctggcctaca

SEQ ID NO: 1702286 - DNA, 15 bp, Homo sapiens
tcctctggcctacac

SEQ ID NO: 1702287 - DNA, 15 bp, Homo sapiens
cctctggcctacaca

SEQ ID NO: 1702288 - DNA, 15 bp, Homo sapiens
ctctggcctacacag

SEQ ID NO: 1702289 - DNA, 15 bp, Homo sapiens
tctggcctacacaga

SEQ ID NO: 1702290 - DNA, 15 bp, Homo sapiens
ctggcctacacagaa

SEQ ID NO: 1702291 - DNA, 15 bp, Homo sapiens
tggcctacacagaag

SEQ ID NO: 1702292 - DNA, 15 bp, Homo sapiens
ggcctacacagaaga

SEQ ID NO: 1702293 - DNA, 15 bp, Homo sapiens
gcctacacagaagat

SEQ ID NO: 1702294 - DNA, 15 bp, Homo sapiens
cctacacagaagatg

SEQ ID NO: 1702295 - DNA, 15 bp, Homo sapiens
ctacacagaagatgt

SEQ ID NO: 1702296 - DNA, 15 bp, Homo sapiens
tacacagaagatgta

SEQ ID NO: 1702297 - DNA, 15 bp, Homo sapiens
acacagaagatgtaa

SEQ ID NO: 1702298 - DNA, 15 bp, Homo sapiens
cacagaagatgtaag

SEQ ID NO: 1702299 - DNA, 15 bp, Homo sapiens
acagaagatgtaaga

SEQ ID NO: 1702300 - DNA, 15 bp, Homo sapiens
cagaagatgtaagaa

SEQ ID NO: 1702301 - DNA, 15 bp, Homo sapiens
agaagatgtaagaaa

SEQ ID NO: 1702302 - DNA, 15 bp, Homo sapiens
gaagatgtaagaaag

SEQ ID NO: 1702303 - DNA, 15 bp, Homo sapiens
aagatgtaagaaagg

SEQ ID NO: 1702304 - DNA, 15 bp, Homo sapiens
agatgtaagaaagga

SEQ ID NO: 1702305 - DNA, 15 bp, Homo sapiens
gatgtaagaaaggaa

SEQ ID NO: 1702306 - DNA, 15 bp, Homo sapiens
atgtaagaaaggaaa

SEQ ID NO: 1702307 - DNA, 15 bp, Homo sapiens
tgtaagaaaggaaac

SEQ ID NO: 1702308 - DNA, 15 bp, Homo sapiens
gtaagaaaggaaaca

SEQ ID NO: 1702309 - DNA, 15 bp, Homo sapiens
taagaaaggaaacag

SEQ ID NO: 1702310 - DNA, 15 bp, Homo sapiens
aagaaaggaaacaga

SEQ ID NO: 1702311 - DNA, 15 bp, Homo sapiens
agaaaggaaacagaa

SEQ ID NO: 1702312 - DNA, 15 bp, Homo sapiens
gaaaggaaacagaaa

SEQ ID NO: 1702313 - DNA, 15 bp, Homo sapiens
aaaggaaacagaaaa

SEQ ID NO: 1702314 - DNA, 15 bp, Homo sapiens
aaggaaacagaaaag

SEQ ID NO: 1702315 - DNA, 15 bp, Homo sapiens
aggaaacagaaaagc

SEQ ID NO: 1702316 - DNA, 15 bp, Homo sapiens
ggaaacagaaaagcc

SEQ ID NO: 1702317 - DNA, 15 bp, Homo sapiens
gaaacagaaaagccc

SEQ ID NO: 1702318 - DNA, 15 bp, Homo sapiens
aaacagaaaagccca

SEQ ID NO: 1702319 - DNA, 15 bp, Homo sapiens
aacagaaaagcccag

SEQ ID NO: 1702320 - DNA, 15 bp, Homo sapiens
acagaaaagcccagt

SEQ ID NO: 1702321 - DNA, 15 bp, Homo sapiens
cagaaaagcccagtg

SEQ ID NO: 1702322 - DNA, 15 bp, Homo sapiens
agaaaagcccagtgt

SEQ ID NO: 1702323 - DNA, 15 bp, Homo sapiens
gaaaagcccagtgtc

SEQ ID NO: 1702324 - DNA, 15 bp, Homo sapiens
aaaagcccagtgtct

SEQ ID NO: 1702325 - DNA, 15 bp, Homo sapiens
aaagcccagtgtcta

SEQ ID NO: 1702326 - DNA, 15 bp, Homo sapiens
aagcccagtgtctag

SEQ ID NO: 1702327 - DNA, 15 bp, Homo sapiens
agcccagtgtctagc

SEQ ID NO: 1702328 - DNA, 15 bp, Homo sapiens
gcccagtgtctagca

SEQ ID NO: 1702329 - DNA, 15 bp, Homo sapiens
cccagtgtctagcat

SEQ ID NO: 1702330 - DNA, 15 bp, Homo sapiens
ccagtgtctagcatt

SEQ ID NO: 1702331 - DNA, 15 bp, Homo sapiens
cagtgtctagcattg

SEQ ID NO: 1702332 - DNA, 15 bp, Homo sapiens
agtgtctagcattga

SEQ ID NO: 1702333 - DNA, 15 bp, Homo sapiens
gtgtctagcattgaa

SEQ ID NO: 1702334 - DNA, 15 bp, Homo sapiens
tgtctagcattgaac

SEQ ID NO: 1702335 - DNA, 15 bp, Homo sapiens
gtctagcattgaact

SEQ ID NO: 1702336 - DNA, 15 bp, Homo sapiens
tctagcattgaacta

SEQ ID NO: 1702337 - DNA, 15 bp, Homo sapiens
ctagcattgaactat

SEQ ID NO: 1702338 - DNA, 15 bp, Homo sapiens
tagcattgaactatg

SEQ ID NO: 1702339 - DNA, 15 bp, Homo sapiens
agcattgaactatga

SEQ ID NO: 1702340 - DNA, 15 bp, Homo sapiens
gcattgaactatgaa

SEQ ID NO: 1702341 - DNA, 15 bp, Homo sapiens
cattgaactatgaat

SEQ ID NO: 1702342 - DNA, 15 bp, Homo sapiens
attgaactatgaatg

SEQ ID NO: 1702343 - DNA, 15 bp, Homo sapiens
ttgaactatgaatgc

SEQ ID NO: 1702344 - DNA, 15 bp, Homo sapiens
tgaactatgaatgca

SEQ ID NO: 1702345 - DNA, 15 bp, Homo sapiens
gaactatgaatgcat

SEQ ID NO: 1702346 - DNA, 15 bp, Homo sapiens
aactatgaatgcatc

SEQ ID NO: 1702347 - DNA, 15 bp, Homo sapiens
actatgaatgcatca

SEQ ID NO: 1702348 - DNA, 15 bp, Homo sapiens
ctatgaatgcatcat

SEQ ID NO: 1702349 - DNA, 15 bp, Homo sapiens
tatgaatgcatcata

SEQ ID NO: 1702350 - DNA, 15 bp, Homo sapiens
atgaatgcatcatag

SEQ ID NO: 1702351 - DNA, 15 bp, Homo sapiens
tgaatgcatcatagt

SEQ ID NO: 1702352 - DNA, 15 bp, Homo sapiens
gaatgcatcatagta

SEQ ID NO: 1702353 - DNA, 15 bp, Homo sapiens
aatgcatcatagtag

SEQ ID NO: 1702354 - DNA, 15 bp, Homo sapiens
atgcatcatagtaga

SEQ ID NO: 1702355 - DNA, 15 bp, Homo sapiens
tgcatcatagtagat

SEQ ID NO: 1702356 - DNA, 15 bp, Homo sapiens
gcatcatagtagatg

SEQ ID NO: 1702357 - DNA, 15 bp, Homo sapiens
catcatagtagatga

SEQ ID NO: 1702358 - DNA, 15 bp, Homo sapiens
atcatagtagatgag

SEQ ID NO: 1702359 - DNA, 15 bp, Homo sapiens
tcatagtagatgagc

SEQ ID NO: 1702360 - DNA, 15 bp, Homo sapiens
catagtagatgagca

SEQ ID NO: 1702361 - DNA, 15 bp, Homo sapiens
atagtagatgagcaa

SEQ ID NO: 1702362 - DNA, 15 bp, Homo sapiens
tagtagatgagcaat

SEQ ID NO: 1702363 - DNA, 15 bp, Homo sapiens
agtagatgagcaatt

SEQ ID NO: 1702364 - DNA, 15 bp, Homo sapiens
gtagatgagcaattt

SEQ ID NO: 1702365 - DNA, 15 bp, Homo sapiens
tagatgagcaatttt

SEQ ID NO: 1702366 - DNA, 15 bp, Homo sapiens
agatgagcaatttta

SEQ ID NO: 1702367 - DNA, 15 bp, Homo sapiens
gatgagcaattttaa

SEQ ID NO: 1702368 - DNA, 15 bp, Homo sapiens
atgagcaattttaaa

SEQ ID NO: 1702369 - DNA, 15 bp, Homo sapiens
tgagcaattttaaat

SEQ ID NO: 1702370 - DNA, 15 bp, Homo sapiens
gagcaattttaaata

SEQ ID NO: 1702371 - DNA, 15 bp, Homo sapiens
agcaattttaaataa

SEQ ID NO: 1702372 - DNA, 15 bp, Homo sapiens
gcaattttaaataaa

SEQ ID NO: 1702373 - DNA, 15 bp, Homo sapiens
caattttaaataaat

SEQ ID NO: 1702374 - DNA, 15 bp, Homo sapiens
aattttaaataaatc

SEQ ID NO: 1702375 - DNA, 15 bp, Homo sapiens
attttaaataaatct

SEQ ID NO: 1702376 - DNA, 15 bp, Homo sapiens
ttttaaataaatctc

SEQ ID NO: 1702377 - DNA, 15 bp, Homo sapiens
tttaaataaatctct

SEQ ID NO: 1702378 - DNA, 15 bp, Homo sapiens
ttaaataaatctctt

SEQ ID NO: 1702379 - DNA, 15 bp, Homo sapiens
taaataaatctcttg

SEQ ID NO: 1702380 - DNA, 15 bp, Homo sapiens
aaataaatctcttgt

SEQ ID NO: 1702381 - DNA, 15 bp, Homo sapiens
aataaatctcttgtt

SEQ ID NO: 1702382 - DNA, 15 bp, Homo sapiens
ataaatctcttgttg

SEQ ID NO: 1702383 - DNA, 15 bp, Homo sapiens
taaatctcttgttgc

SEQ ID NO: 1702384 - DNA, 15 bp, Homo sapiens
aaatctcttgttgca

SEQ ID NO: 1702385 - DNA, 15 bp, Homo sapiens
aatctcttgttgcat

SEQ ID NO: 1702386 - DNA, 15 bp, Homo sapiens
atctcttgttgcatg

SEQ ID NO: 1702387 - DNA, 15 bp, Homo sapiens
tctcttgttgcatgt

SEQ ID NO: 1702388 - DNA, 15 bp, Homo sapiens
ctcttgttgcatgta

SEQ ID NO: 1702389 - DNA, 15 bp, Homo sapiens
tcttgttgcatgtat

SEQ ID NO: 1702390 - DNA, 15 bp, Homo sapiens
cttgttgcatgtatg

SEQ ID NO: 1702391 - DNA, 15 bp, Homo sapiens
ttgttgcatgtatgc

SEQ ID NO: 1702392 - DNA, 15 bp, Homo sapiens
tgttgcatgtatgca

SEQ ID NO: 1702393 - DNA, 15 bp, Homo sapiens
gttgcatgtatgcag

SEQ ID NO: 1702394 - DNA, 15 bp, Homo sapiens
ttgcatgtatgcagc

SEQ ID NO: 1702395 - DNA, 15 bp, Homo sapiens
tgcatgtatgcagca

SEQ ID NO: 1702396 - DNA, 15 bp, Homo sapiens
gcatgtatgcagcat

SEQ ID NO: 1702397 - DNA, 15 bp, Homo sapiens
catgtatgcagcatg

SEQ ID NO: 1702398 - DNA, 15 bp, Homo sapiens
atgtatgcagcatgg

SEQ ID NO: 1702399 - DNA, 15 bp, Homo sapiens
tgtatgcagcatgga

SEQ ID NO: 1702400 - DNA, 15 bp, Homo sapiens
gtatgcagcatggac

SEQ ID NO: 1702401 - DNA, 15 bp, Homo sapiens
tatgcagcatggaca

SEQ ID NO: 1702402 - DNA, 15 bp, Homo sapiens
atgcagcatggacat

SEQ ID NO: 1702403 - DNA, 15 bp, Homo sapiens
tgcagcatggacata

SEQ ID NO: 1702404 - DNA, 15 bp, Homo sapiens
gcagcatggacataa

SEQ ID NO: 1702405 - DNA, 15 bp, Homo sapiens
cagcatggacataaa

SEQ ID NO: 1702406 - DNA, 15 bp, Homo sapiens
agcatggacataaaa

SEQ ID NO: 1702407 - DNA, 15 bp, Homo sapiens
gcatggacataaaag

SEQ ID NO: 1702408 - DNA, 15 bp, Homo sapiens
catggacataaaagt

SEQ ID NO: 1702409 - DNA, 15 bp, Homo sapiens
atggacataaaagtt

SEQ ID NO: 1702410 - DNA, 15 bp, Homo sapiens
tggacataaaagttt

SEQ ID NO: 1702411 - DNA, 15 bp, Homo sapiens
ggacataaaagtttc

SEQ ID NO: 1702412 - DNA, 15 bp, Homo sapiens
gacataaaagtttca

SEQ ID NO: 1702413 - DNA, 15 bp, Homo sapiens
acataaaagtttcat

SEQ ID NO: 1702414 - DNA, 15 bp, Homo sapiens
cataaaagtttcatt

SEQ ID NO: 1702415 - DNA, 15 bp, Homo sapiens
ataaaagtttcattc

SEQ ID NO: 1702416 - DNA, 15 bp, Homo sapiens
taaaagtttcattca

SEQ ID NO: 1702417 - DNA, 15 bp, Homo sapiens
aaaagtttcattcat

SEQ ID NO: 1702418 - DNA, 15 bp, Homo sapiens
aaagtttcattcatt

SEQ ID NO: 1702419 - DNA, 15 bp, Homo sapiens
aagtttcattcattc

SEQ ID NO: 1702420 - DNA, 15 bp, Homo sapiens
agtttcattcattct

SEQ ID NO: 1702421 - DNA, 15 bp, Homo sapiens
gtttcattcattctt

SEQ ID NO: 1702422 - DNA, 15 bp, Homo sapiens
tttcattcattcttt

SEQ ID NO: 1702423 - DNA, 15 bp, Homo sapiens
ttcattcattctttt

SEQ ID NO: 1702424 - DNA, 15 bp, Homo sapiens
tcattcattctttta

SEQ ID NO: 1702425 - DNA, 15 bp, Homo sapiens
cattcattcttttat

SEQ ID NO: 1702426 - DNA, 15 bp, Homo sapiens
attcattcttttatc

SEQ ID NO: 1702427 - DNA, 15 bp, Homo sapiens
ttcattcttttatcc

SEQ ID NO: 1702428 - DNA, 15 bp, Homo sapiens
tcattcttttatccc

SEQ ID NO: 1702429 - DNA, 15 bp, Homo sapiens
cattcttttatccca

SEQ ID NO: 1702430 - DNA, 15 bp, Homo sapiens
attcttttatcccat

SEQ ID NO: 1702431 - DNA, 15 bp, Homo sapiens
ttcttttatcccata

SEQ ID NO: 1702432 - DNA, 15 bp, Homo sapiens
tcttttatcccataa

SEQ ID NO: 1702433 - DNA, 15 bp, Homo sapiens
cttttatcccataaa

SEQ ID NO: 1702434 - DNA, 15 bp, Homo sapiens
ttttatcccataaac

SEQ ID NO: 1702435 - DNA, 15 bp, Homo sapiens
tttatcccataaaca

SEQ ID NO: 1702436 - DNA, 15 bp, Homo sapiens
ttatcccataaacat

SEQ ID NO: 1702437 - DNA, 15 bp, Homo sapiens
tatcccataaacatc

SEQ ID NO: 1702438 - DNA, 15 bp, Homo sapiens
atcccataaacatcg

SEQ ID NO: 1702439 - DNA, 15 bp, Homo sapiens
tcccataaacatcga

SEQ ID NO: 1702440 - DNA, 15 bp, Homo sapiens
cccataaacatcgat

SEQ ID NO: 1702441 - DNA, 15 bp, Homo sapiens
ccataaacatcgatt

SEQ ID NO: 1702442 - DNA, 15 bp, Homo sapiens
cataaacatcgattg

SEQ ID NO: 1702443 - DNA, 15 bp, Homo sapiens
ataaacatcgattgt

SEQ ID NO: 1702444 - DNA, 15 bp, Homo sapiens
taaacatcgattgta

SEQ ID NO: 1702445 - DNA, 15 bp, Homo sapiens
aaacatcgattgtac

SEQ ID NO: 1702446 - DNA, 15 bp, Homo sapiens
aacatcgattgtaca

SEQ ID NO: 1702447 - DNA, 15 bp, Homo sapiens
acatcgattgtacac

SEQ ID NO: 1702448 - DNA, 15 bp, Homo sapiens
catcgattgtacact

SEQ ID NO: 1702449 - DNA, 15 bp, Homo sapiens
atcgattgtacactg

SEQ ID NO: 1702450 - DNA, 15 bp, Homo sapiens
tcgattgtacactgt

SEQ ID NO: 1702451 - DNA, 15 bp, Homo sapiens
cgattgtacactgtg

SEQ ID NO: 1702452 - DNA, 15 bp, Homo sapiens
gattgtacactgtga

SEQ ID NO: 1702453 - DNA, 15 bp, Homo sapiens
attgtacactgtgaa

SEQ ID NO: 1702454 - DNA, 15 bp, Homo sapiens
ttgtacactgtgaag

SEQ ID NO: 1702455 - DNA, 15 bp, Homo sapiens
tgtacactgtgaagt

SEQ ID NO: 1702456 - DNA, 15 bp, Homo sapiens
gtacactgtgaagtg

SEQ ID NO: 1702457 - DNA, 15 bp, Homo sapiens
tacactgtgaagtgc

SEQ ID NO: 1702458 - DNA, 15 bp, Homo sapiens
acactgtgaagtgcc

SEQ ID NO: 1702459 - DNA, 15 bp, Homo sapiens
cactgtgaagtgcca

SEQ ID NO: 1702460 - DNA, 15 bp, Homo sapiens
actgtgaagtgccag

SEQ ID NO: 1702461 - DNA, 15 bp, Homo sapiens
ctgtgaagtgccagg

SEQ ID NO: 1702462 - DNA, 15 bp, Homo sapiens
tgtgaagtgccaggt

SEQ ID NO: 1702463 - DNA, 15 bp, Homo sapiens
gtgaagtgccaggta

SEQ ID NO: 1702464 - DNA, 15 bp, Homo sapiens
tgaagtgccaggtat

SEQ ID NO: 1702465 - DNA, 15 bp, Homo sapiens
gaagtgccaggtatc

SEQ ID NO: 1702466 - DNA, 15 bp, Homo sapiens
aagtgccaggtatca

SEQ ID NO: 1702467 - DNA, 15 bp, Homo sapiens
agtgccaggtatcac

SEQ ID NO: 1702468 - DNA, 15 bp, Homo sapiens
gtgccaggtatcaca

SEQ ID NO: 1702469 - DNA, 15 bp, Homo sapiens
tgccaggtatcacac

SEQ ID NO: 1702470 - DNA, 15 bp, Homo sapiens
gccaggtatcacact

SEQ ID NO: 1702471 - DNA, 15 bp, Homo sapiens
ccaggtatcacactg

SEQ ID NO: 1702472 - DNA, 15 bp, Homo sapiens
caggtatcacactgg

SEQ ID NO: 1702473 - DNA, 15 bp, Homo sapiens
aggtatcacactggg

SEQ ID NO: 1702474 - DNA, 15 bp, Homo sapiens
ggtatcacactgggg

SEQ ID NO: 1702475 - DNA, 15 bp, Homo sapiens
gtatcacactgggga

SEQ ID NO: 1702476 - DNA, 15 bp, Homo sapiens
tatcacactggggat

SEQ ID NO: 1702477 - DNA, 15 bp, Homo sapiens
atcacactggggatg

SEQ ID NO: 1702478 - DNA, 15 bp, Homo sapiens
tcacactggggatgc

SEQ ID NO: 1702479 - DNA, 15 bp, Homo sapiens
cacactggggatgca

SEQ ID NO: 1702480 - DNA, 15 bp, Homo sapiens
acactggggatgcaa

SEQ ID NO: 1702481 - DNA, 15 bp, Homo sapiens
cactggggatgcaaa

SEQ ID NO: 1702482 - DNA, 15 bp, Homo sapiens
actggggatgcaaaa

SEQ ID NO: 1702483 - DNA, 15 bp, Homo sapiens
ctggggatgcaaaaa

SEQ ID NO: 1702484 - DNA, 15 bp, Homo sapiens
tggggatgcaaaaat

SEQ ID NO: 1702485 - DNA, 15 bp, Homo sapiens
ggggatgcaaaaatg

SEQ ID NO: 1702486 - DNA, 15 bp, Homo sapiens
gggatgcaaaaatga

SEQ ID NO: 1702487 - DNA, 15 bp, Homo sapiens
ggatgcaaaaatgaa

SEQ ID NO: 1702488 - DNA, 15 bp, Homo sapiens
gatgcaaaaatgaac

SEQ ID NO: 1702489 - DNA, 15 bp, Homo sapiens
atgcaaaaatgaaca

SEQ ID NO: 1702490 - DNA, 15 bp, Homo sapiens
tgcaaaaatgaacaa

SEQ ID NO: 1702491 - DNA, 15 bp, Homo sapiens
gcaaaaatgaacaag

SEQ ID NO: 1702492 - DNA, 15 bp, Homo sapiens
caaaaatgaacaaga

SEQ ID NO: 1702493 - DNA, 15 bp, Homo sapiens
aaaaatgaacaagag

SEQ ID NO: 1702494 - DNA, 15 bp, Homo sapiens
aaaatgaacaagagc

SEQ ID NO: 1702495 - DNA, 15 bp, Homo sapiens
aaatgaacaagagct

SEQ ID NO: 1702496 - DNA, 15 bp, Homo sapiens
aatgaacaagagcta

SEQ ID NO: 1702497 - DNA, 15 bp, Homo sapiens
atgaacaagagctat

SEQ ID NO: 1702498 - DNA, 15 bp, Homo sapiens
tgaacaagagctatt

SEQ ID NO: 1702499 - DNA, 15 bp, Homo sapiens
gaacaagagctattg

SEQ ID NO: 1702500 - DNA, 15 bp, Homo sapiens
aacaagagctattgt

SEQ ID NO: 1702501 - DNA, 15 bp, Homo sapiens
acaagagctattgtt

SEQ ID NO: 1702502 - DNA, 15 bp, Homo sapiens
caagagctattgtta

SEQ ID NO: 1702503 - DNA, 15 bp, Homo sapiens
aagagctattgttac

SEQ ID NO: 1702504 - DNA, 15 bp, Homo sapiens
agagctattgttact

SEQ ID NO: 1702505 - DNA, 15 bp, Homo sapiens
gagctattgttactc

SEQ ID NO: 1702506 - DNA, 15 bp, Homo sapiens
agctattgttactct

SEQ ID NO: 1702507 - DNA, 15 bp, Homo sapiens
gctattgttactctc

SEQ ID NO: 1702508 - DNA, 15 bp, Homo sapiens
ctattgttactctcc

SEQ ID NO: 1702509 - DNA, 15 bp, Homo sapiens
tattgttactctccc

SEQ ID NO: 1702510 - DNA, 15 bp, Homo sapiens
attgttactctccct

SEQ ID NO: 1702511 - DNA, 15 bp, Homo sapiens
ttgttactctcccta

SEQ ID NO: 1702512 - DNA, 15 bp, Homo sapiens
tgttactctccctac

SEQ ID NO: 1702513 - DNA, 15 bp, Homo sapiens
gttactctccctact

SEQ ID NO: 1702514 - DNA, 15 bp, Homo sapiens
ttactctccctacta

SEQ ID NO: 1702515 - DNA, 15 bp, Homo sapiens
tactctccctactat

SEQ ID NO: 1702516 - DNA, 15 bp, Homo sapiens
actctccctactatg

SEQ ID NO: 1702517 - DNA, 15 bp, Homo sapiens
ctctccctactatgg

SEQ ID NO: 1702518 - DNA, 15 bp, Homo sapiens
tctccctactatgga

SEQ ID NO: 1702519 - DNA, 15 bp, Homo sapiens
ctccctactatggag

SEQ ID NO: 1702520 - DNA, 15 bp, Homo sapiens
tccctactatggagc

SEQ ID NO: 1702521 - DNA, 15 bp, Homo sapiens
ccctactatggagct

SEQ ID NO: 1702522 - DNA, 15 bp, Homo sapiens
cctactatggagctg

SEQ ID NO: 1702523 - DNA, 15 bp, Homo sapiens
ctactatggagctgc

SEQ ID NO: 1702524 - DNA, 15 bp, Homo sapiens
tactatggagctgct

SEQ ID NO: 1702525 - DNA, 15 bp, Homo sapiens
actatggagctgctg

SEQ ID NO: 1702526 - DNA, 15 bp, Homo sapiens
ctatggagctgctga

SEQ ID NO: 1702527 - DNA, 15 bp, Homo sapiens
tatggagctgctgac

SEQ ID NO: 1702528 - DNA, 15 bp, Homo sapiens
atggagctgctgaca

SEQ ID NO: 1702529 - DNA, 15 bp, Homo sapiens
tggagctgctgacag

SEQ ID NO: 1702530 - DNA, 15 bp, Homo sapiens
ggagctgctgacagg

SEQ ID NO: 1702531 - DNA, 15 bp, Homo sapiens
gagctgctgacaggc

SEQ ID NO: 1702532 - DNA, 15 bp, Homo sapiens
agctgctgacaggca

SEQ ID NO: 1702533 - DNA, 15 bp, Homo sapiens
gctgctgacaggcat

SEQ ID NO: 1702534 - DNA, 15 bp, Homo sapiens
ctgctgacaggcatt

SEQ ID NO: 1702535 - DNA, 15 bp, Homo sapiens
tgctgacaggcattt

SEQ ID NO: 1702536 - DNA, 15 bp, Homo sapiens
gctgacaggcatttc

SEQ ID NO: 1702537 - DNA, 15 bp, Homo sapiens
ctgacaggcatttct

SEQ ID NO: 1702538 - DNA, 15 bp, Homo sapiens
tgacaggcatttctt

SEQ ID NO: 1702539 - DNA, 15 bp, Homo sapiens
gacaggcatttcttt

SEQ ID NO: 1702540 - DNA, 15 bp, Homo sapiens
acaggcatttcttta

SEQ ID NO: 1702541 - DNA, 15 bp, Homo sapiens
caggcatttctttac

SEQ ID NO: 1702542 - DNA, 15 bp, Homo sapiens
aggcatttctttaca

SEQ ID NO: 1702543 - DNA, 15 bp, Homo sapiens
ggcatttctttacat

SEQ ID NO: 1702544 - DNA, 15 bp, Homo sapiens
gcatttctttacata

SEQ ID NO: 1702545 - DNA, 15 bp, Homo sapiens
catttctttacatat

SEQ ID NO: 1702546 - DNA, 15 bp, Homo sapiens
atttctttacatatg

SEQ ID NO: 1702547 - DNA, 15 bp, Homo sapiens
tttctttacatatga

SEQ ID NO: 1702548 - DNA, 15 bp, Homo sapiens
ttctttacatatgat

SEQ ID NO: 1702549 - DNA, 15 bp, Homo sapiens
tctttacatatgatt

SEQ ID NO: 1702550 - DNA, 15 bp, Homo sapiens
ctttacatatgattt

SEQ ID NO: 1702551 - DNA, 15 bp, Homo sapiens
tttacatatgatttt

SEQ ID NO: 1702552 - DNA, 15 bp, Homo sapiens
ttacatatgattttt

SEQ ID NO: 1702553 - DNA, 15 bp, Homo sapiens
tacatatgatttttt

SEQ ID NO: 1702554 - DNA, 15 bp, Homo sapiens
acatatgattttttt

SEQ ID NO: 1702555 - DNA, 15 bp, Homo sapiens
catatgatttttttt

SEQ ID NO: 1702556 - DNA, 15 bp, Homo sapiens
atatgatttttttta

SEQ ID NO: 1702557 - DNA, 15 bp, Homo sapiens
tatgattttttttaa

SEQ ID NO: 1702558 - DNA, 15 bp, Homo sapiens
atgattttttttaaa

SEQ ID NO: 1702559 - DNA, 15 bp, Homo sapiens
tgattttttttaaaa

SEQ ID NO: 1702560 - DNA, 15 bp, Homo sapiens
gattttttttaaaag

SEQ ID NO: 1702561 - DNA, 15 bp, Homo sapiens
attttttttaaaagt

SEQ ID NO: 1702562 - DNA, 15 bp, Homo sapiens
ttttttttaaaagtg

SEQ ID NO: 1702563 - DNA, 15 bp, Homo sapiens
tttttttaaaagtgc

SEQ ID NO: 1702564 - DNA, 15 bp, Homo sapiens
ttttttaaaagtgct

SEQ ID NO: 1702565 - DNA, 15 bp, Homo sapiens
tttttaaaagtgctg

SEQ ID NO: 1702566 - DNA, 15 bp, Homo sapiens
ttttaaaagtgctgt

SEQ ID NO: 1702567 - DNA, 15 bp, Homo sapiens
tttaaaagtgctgtg

SEQ ID NO: 1702568 - DNA, 15 bp, Homo sapiens
ttaaaagtgctgtgc

SEQ ID NO: 1702569 - DNA, 15 bp, Homo sapiens
taaaagtgctgtgca

SEQ ID NO: 1702570 - DNA, 15 bp, Homo sapiens
aaaagtgctgtgcaa

SEQ ID NO: 1702571 - DNA, 15 bp, Homo sapiens
aaagtgctgtgcaac

SEQ ID NO: 1702572 - DNA, 15 bp, Homo sapiens
aagtgctgtgcaacc

SEQ ID NO: 1702573 - DNA, 15 bp, Homo sapiens
agtgctgtgcaacct

SEQ ID NO: 1702574 - DNA, 15 bp, Homo sapiens
gtgctgtgcaacctg

SEQ ID NO: 1702575 - DNA, 15 bp, Homo sapiens
tgctgtgcaacctgc

SEQ ID NO: 1702576 - DNA, 15 bp, Homo sapiens
gctgtgcaacctgcc

SEQ ID NO: 1702577 - DNA, 15 bp, Homo sapiens
ctgtgcaacctgcca

SEQ ID NO: 1702578 - DNA, 15 bp, Homo sapiens
tgtgcaacctgccag

SEQ ID NO: 1702579 - DNA, 15 bp, Homo sapiens
gtgcaacctgccagt

SEQ ID NO: 1702580 - DNA, 15 bp, Homo sapiens
tgcaacctgccagtg

SEQ ID NO: 1702581 - DNA, 15 bp, Homo sapiens
gcaacctgccagtgc

SEQ ID NO: 1702582 - DNA, 15 bp, Homo sapiens
caacctgccagtgct

SEQ ID NO: 1702583 - DNA, 15 bp, Homo sapiens
aacctgccagtgcta

SEQ ID NO: 1702584 - DNA, 15 bp, Homo sapiens
acctgccagtgctac

SEQ ID NO: 1702585 - DNA, 15 bp, Homo sapiens
cctgccagtgctaca

SEQ ID NO: 1702586 - DNA, 15 bp, Homo sapiens
ctgccagtgctacaa

SEQ ID NO: 1702587 - DNA, 15 bp, Homo sapiens
tgccagtgctacaat

SEQ ID NO: 1702588 - DNA, 15 bp, Homo sapiens
gccagtgctacaata

SEQ ID NO: 1702589 - DNA, 15 bp, Homo sapiens
ccagtgctacaatag

SEQ ID NO: 1702590 - DNA, 15 bp, Homo sapiens
cagtgctacaataga

SEQ ID NO: 1702591 - DNA, 15 bp, Homo sapiens
agtgctacaatagaa

SEQ ID NO: 1702592 - DNA, 15 bp, Homo sapiens
gtgctacaatagaag

SEQ ID NO: 1702593 - DNA, 15 bp, Homo sapiens
tgctacaatagaagt

SEQ ID NO: 1702594 - DNA, 15 bp, Homo sapiens
gctacaatagaagta

SEQ ID NO: 1702595 - DNA, 15 bp, Homo sapiens
ctacaatagaagtac

SEQ ID NO: 1702596 - DNA, 15 bp, Homo sapiens
tacaatagaagtaca

SEQ ID NO: 1702597 - DNA, 15 bp, Homo sapiens
acaatagaagtacaa

SEQ ID NO: 1702598 - DNA, 15 bp, Homo sapiens
caatagaagtacaag

SEQ ID NO: 1702599 - DNA, 15 bp, Homo sapiens
aatagaagtacaagg

SEQ ID NO: 1702600 - DNA, 15 bp, Homo sapiens
atagaagtacaagga

SEQ ID NO: 1702601 - DNA, 15 bp, Homo sapiens
tagaagtacaaggaa

SEQ ID NO: 1702602 - DNA, 15 bp, Homo sapiens
agaagtacaaggaaa

SEQ ID NO: 1702603 - DNA, 15 bp, Homo sapiens
gaagtacaaggaaac

SEQ ID NO: 1702604 - DNA, 15 bp, Homo sapiens
aagtacaaggaaaca

SEQ ID NO: 1702605 - DNA, 15 bp, Homo sapiens
agtacaaggaaacac

SEQ ID NO: 1702606 - DNA, 15 bp, Homo sapiens
gtacaaggaaacaca

SEQ ID NO: 1702607 - DNA, 15 bp, Homo sapiens
tacaaggaaacacat

SEQ ID NO: 1702608 - DNA, 15 bp, Homo sapiens
acaaggaaacacata

SEQ ID NO: 1702609 - DNA, 15 bp, Homo sapiens
caaggaaacacatat

SEQ ID NO: 1702610 - DNA, 15 bp, Homo sapiens
aaggaaacacatata

SEQ ID NO: 1702611 - DNA, 15 bp, Homo sapiens
aggaaacacatataa

SEQ ID NO: 1702612 - DNA, 15 bp, Homo sapiens
ggaaacacatataaa

SEQ ID NO: 1702613 - DNA, 15 bp, Homo sapiens
gaaacacatataaat

SEQ ID NO: 1702614 - DNA, 15 bp, Homo sapiens
aaacacatataaatt

SEQ ID NO: 1702615 - DNA, 15 bp, Homo sapiens
aacacatataaattt

SEQ ID NO: 1702616 - DNA, 15 bp, Homo sapiens
acacatataaatttt

SEQ ID NO: 1702617 - DNA, 15 bp, Homo sapiens
cacatataaatttta

SEQ ID NO: 1702618 - DNA, 15 bp, Homo sapiens
acatataaattttat

SEQ ID NO: 1702619 - DNA, 15 bp, Homo sapiens
catataaattttata

SEQ ID NO: 1702620 - DNA, 15 bp, Homo sapiens
atataaattttataa

SEQ ID NO: 1702621 - DNA, 15 bp, Homo sapiens
tataaattttataat

SEQ ID NO: 1702622 - DNA, 15 bp, Homo sapiens
ataaattttataatt

SEQ ID NO: 1702623 - DNA, 15 bp, Homo sapiens
taaattttataattt

SEQ ID NO: 1702624 - DNA, 15 bp, Homo sapiens
aaattttataatttt

SEQ ID NO: 1702625 - DNA, 15 bp, Homo sapiens
aattttataatttta

SEQ ID NO: 1702626 - DNA, 15 bp, Homo sapiens
attttataattttac

SEQ ID NO: 1702627 - DNA, 15 bp, Homo sapiens
ttttataattttacc

SEQ ID NO: 1702628 - DNA, 15 bp, Homo sapiens
tttataattttacct

SEQ ID NO: 1702629 - DNA, 15 bp, Homo sapiens
ttataattttacctg

SEQ ID NO: 1702630 - DNA, 15 bp, Homo sapiens
tataattttacctgt

SEQ ID NO: 1702631 - DNA, 15 bp, Homo sapiens
ataattttacctgtc

SEQ ID NO: 1702632 - DNA, 15 bp, Homo sapiens
taattttacctgtct

SEQ ID NO: 1702633 - DNA, 15 bp, Homo sapiens
aattttacctgtctg

SEQ ID NO: 1702634 - DNA, 15 bp, Homo sapiens
attttacctgtctgt

SEQ ID NO: 1702635 - DNA, 15 bp, Homo sapiens
ttttacctgtctgtg

SEQ ID NO: 1702636 - DNA, 15 bp, Homo sapiens
tttacctgtctgtga

SEQ ID NO: 1702637 - DNA, 15 bp, Homo sapiens
ttacctgtctgtgag

SEQ ID NO: 1702638 - DNA, 15 bp, Homo sapiens
tacctgtctgtgaga

SEQ ID NO: 1702639 - DNA, 15 bp, Homo sapiens
acctgtctgtgagat

SEQ ID NO: 1702640 - DNA, 15 bp, Homo sapiens
cctgtctgtgagatt

SEQ ID NO: 1702641 - DNA, 15 bp, Homo sapiens
ctgtctgtgagattt

SEQ ID NO: 1702642 - DNA, 15 bp, Homo sapiens
tgtctgtgagatttg

SEQ ID NO: 1702643 - DNA, 15 bp, Homo sapiens
gtctgtgagatttgt

SEQ ID NO: 1702644 - DNA, 15 bp, Homo sapiens
tctgtgagatttgtt

SEQ ID NO: 1702645 - DNA, 15 bp, Homo sapiens
ctgtgagatttgttg

SEQ ID NO: 1702646 - DNA, 15 bp, Homo sapiens
tgtgagatttgttgt

SEQ ID NO: 1702647 - DNA, 15 bp, Homo sapiens
gtgagatttgttgtt

SEQ ID NO: 1702648 - DNA, 15 bp, Homo sapiens
tgagatttgttgtta

SEQ ID NO: 1702649 - DNA, 15 bp, Homo sapiens
gagatttgttgttaa

SEQ ID NO: 1702650 - DNA, 15 bp, Homo sapiens
agatttgttgttaat

SEQ ID NO: 1702651 - DNA, 15 bp, Homo sapiens
gatttgttgttaatt

SEQ ID NO: 1702652 - DNA, 15 bp, Homo sapiens
atttgttgttaattt

SEQ ID NO: 1702653 - DNA, 15 bp, Homo sapiens
tttgttgttaattta

SEQ ID NO: 1702654 - DNA, 15 bp, Homo sapiens
ttgttgttaatttat

SEQ ID NO: 1702655 - DNA, 15 bp, Homo sapiens
tgttgttaatttata

SEQ ID NO: 1702656 - DNA, 15 bp, Homo sapiens
gttgttaatttataa

SEQ ID NO: 1702657 - DNA, 15 bp, Homo sapiens
ttgttaatttataat

SEQ ID NO: 1702658 - DNA, 15 bp, Homo sapiens
tgttaatttataatc

SEQ ID NO: 1702659 - DNA, 15 bp, Homo sapiens
gttaatttataatct

SEQ ID NO: 1702660 - DNA, 15 bp, Homo sapiens
ttaatttataatctt

SEQ ID NO: 1702661 - DNA, 15 bp, Homo sapiens
taatttataatcttc

SEQ ID NO: 1702662 - DNA, 15 bp, Homo sapiens
aatttataatcttct

SEQ ID NO: 1702663 - DNA, 15 bp, Homo sapiens
atttataatcttctc

SEQ ID NO: 1702664 - DNA, 15 bp, Homo sapiens
tttataatcttctct

SEQ ID NO: 1702665 - DNA, 15 bp, Homo sapiens
ttataatcttctctt

SEQ ID NO: 1702666 - DNA, 15 bp, Homo sapiens
tataatcttctcttt

SEQ ID NO: 1702667 - DNA, 15 bp, Homo sapiens
ataatcttctcttta

SEQ ID NO: 1702668 - DNA, 15 bp, Homo sapiens
taatcttctctttat

SEQ ID NO: 1702669 - DNA, 15 bp, Homo sapiens
aatcttctctttatg

SEQ ID NO: 1702670 - DNA, 15 bp, Homo sapiens
atcttctctttatgt

SEQ ID NO: 1702671 - DNA, 15 bp, Homo sapiens
tcttctctttatgtt

SEQ ID NO: 1702672 - DNA, 15 bp, Homo sapiens
cttctctttatgttt

SEQ ID NO: 1702673 - DNA, 15 bp, Homo sapiens
ttctctttatgttta

SEQ ID NO: 1702674 - DNA, 15 bp, Homo sapiens
tctctttatgtttaa

SEQ ID NO: 1702675 - DNA, 15 bp, Homo sapiens
ctctttatgtttaat

SEQ ID NO: 1702676 - DNA, 15 bp, Homo sapiens
tctttatgtttaatt

SEQ ID NO: 1702677 - DNA, 15 bp, Homo sapiens
ctttatgtttaattt

SEQ ID NO: 1702678 - DNA, 15 bp, Homo sapiens
tttatgtttaatttt

SEQ ID NO: 1702679 - DNA, 15 bp, Homo sapiens
ttatgtttaattttg

SEQ ID NO: 1702680 - DNA, 15 bp, Homo sapiens
tatgtttaattttgc

SEQ ID NO: 1702681 - DNA, 15 bp, Homo sapiens
atgtttaattttgca

SEQ ID NO: 1702682 - DNA, 15 bp, Homo sapiens
tgtttaattttgcaa

SEQ ID NO: 1702683 - DNA, 15 bp, Homo sapiens
gtttaattttgcaaa

SEQ ID NO: 1702684 - DNA, 15 bp, Homo sapiens
tttaattttgcaaaa

SEQ ID NO: 1702685 - DNA, 15 bp, Homo sapiens
ttaattttgcaaaat

SEQ ID NO: 1702686 - DNA, 15 bp, Homo sapiens
taattttgcaaaatc

SEQ ID NO: 1702687 - DNA, 15 bp, Homo sapiens
aattttgcaaaatca

SEQ ID NO: 1702688 - DNA, 15 bp, Homo sapiens
attttgcaaaatcag

SEQ ID NO: 1702689 - DNA, 15 bp, Homo sapiens
ttttgcaaaatcaga

SEQ ID NO: 1702690 - DNA, 15 bp, Homo sapiens
tttgcaaaatcagag

SEQ ID NO: 1702691 - DNA, 15 bp, Homo sapiens
ttgcaaaatcagaga

SEQ ID NO: 1702692 - DNA, 15 bp, Homo sapiens
tgcaaaatcagagag

SEQ ID NO: 1702693 - DNA, 15 bp, Homo sapiens
gcaaaatcagagaga

SEQ ID NO: 1702694 - DNA, 15 bp, Homo sapiens
caaaatcagagagaa

SEQ ID NO: 1702695 - DNA, 15 bp, Homo sapiens
aaaatcagagagaaa

SEQ ID NO: 1702696 - DNA, 15 bp, Homo sapiens
aaatcagagagaaaa

SEQ ID NO: 1702697 - DNA, 15 bp, Homo sapiens
aatcagagagaaaaa

SEQ ID NO: 1702698 - DNA, 15 bp, Homo sapiens
atcagagagaaaaat

SEQ ID NO: 1702699 - DNA, 15 bp, Homo sapiens
tcagagagaaaaata

SEQ ID NO: 1702700 - DNA, 15 bp, Homo sapiens
cagagagaaaaatat

SEQ ID NO: 1702701 - DNA, 15 bp, Homo sapiens
agagagaaaaatatt

SEQ ID NO: 1702702 - DNA, 15 bp, Homo sapiens
gagagaaaaatattt

SEQ ID NO: 1702703 - DNA, 15 bp, Homo sapiens
agagaaaaatatttc

SEQ ID NO: 1702704 - DNA, 15 bp, Homo sapiens
gagaaaaatatttct

SEQ ID NO: 1702705 - DNA, 15 bp, Homo sapiens
agaaaaatatttctt

SEQ ID NO: 1702706 - DNA, 15 bp, Homo sapiens
gaaaaatatttcttt

SEQ ID NO: 1702707 - DNA, 15 bp, Homo sapiens
aaaaatatttcttta

SEQ ID NO: 1702708 - DNA, 15 bp, Homo sapiens
aaaatatttctttac

SEQ ID NO: 1702709 - DNA, 15 bp, Homo sapiens
aaatatttctttaca

SEQ ID NO: 1702710 - DNA, 15 bp, Homo sapiens
aatatttctttacag

SEQ ID NO: 1702711 - DNA, 15 bp, Homo sapiens
atatttctttacaga

SEQ ID NO: 1702712 - DNA, 15 bp, Homo sapiens
tatttctttacagaa

SEQ ID NO: 1702713 - DNA, 15 bp, Homo sapiens
atttctttacagaat

SEQ ID NO: 1702714 - DNA, 15 bp, Homo sapiens
tttctttacagaatg

SEQ ID NO: 1702715 - DNA, 15 bp, Homo sapiens
ttctttacagaatga

SEQ ID NO: 1702716 - DNA, 15 bp, Homo sapiens
tctttacagaatgac

SEQ ID NO: 1702717 - DNA, 15 bp, Homo sapiens
ctttacagaatgact

SEQ ID NO: 1702718 - DNA, 15 bp, Homo sapiens
tttacagaatgactt

SEQ ID NO: 1702719 - DNA, 15 bp, Homo sapiens
ttacagaatgacttt

SEQ ID NO: 1702720 - DNA, 15 bp, Homo sapiens
tacagaatgacttta

SEQ ID NO: 1702721 - DNA, 15 bp, Homo sapiens
acagaatgactttaa

SEQ ID NO: 1702722 - DNA, 15 bp, Homo sapiens
cagaatgactttaat

SEQ ID NO: 1702723 - DNA, 15 bp, Homo sapiens
agaatgactttaatt

SEQ ID NO: 1702724 - DNA, 15 bp, Homo sapiens
gaatgactttaatta

SEQ ID NO: 1702725 - DNA, 15 bp, Homo sapiens
aatgactttaattat

SEQ ID NO: 1702726 - DNA, 15 bp, Homo sapiens
atgactttaattatt

SEQ ID NO: 1702727 - DNA, 15 bp, Homo sapiens
tgactttaattattt

SEQ ID NO: 1702728 - DNA, 15 bp, Homo sapiens
gactttaattatttt

SEQ ID NO: 1702729 - DNA, 15 bp, Homo sapiens
actttaattattttt

SEQ ID NO: 1702730 - DNA, 15 bp, Homo sapiens
ctttaattatttttt

SEQ ID NO: 1702731 - DNA, 15 bp, Homo sapiens
tttaattattttttg

SEQ ID NO: 1702732 - DNA, 15 bp, Homo sapiens
ttaattattttttgt

SEQ ID NO: 1702733 - DNA, 15 bp, Homo sapiens
taattattttttgta

SEQ ID NO: 1702734 - DNA, 15 bp, Homo sapiens
aattattttttgtat

SEQ ID NO: 1702735 - DNA, 15 bp, Homo sapiens
attattttttgtatt

SEQ ID NO: 1702736 - DNA, 15 bp, Homo sapiens
ttattttttgtattg

SEQ ID NO: 1702737 - DNA, 15 bp, Homo sapiens
tattttttgtattgt

SEQ ID NO: 1702738 - DNA, 15 bp, Homo sapiens
attttttgtattgtt

SEQ ID NO: 1702739 - DNA, 15 bp, Homo sapiens
ttttttgtattgttt

SEQ ID NO: 1702740 - DNA, 15 bp, Homo sapiens
tttttgtattgtttt

SEQ ID NO: 1702741 - DNA, 15 bp, Homo sapiens
ttttgtattgttttc

SEQ ID NO: 1702742 - DNA, 15 bp, Homo sapiens
tttgtattgttttct

SEQ ID NO: 1702743 - DNA, 15 bp, Homo sapiens
ttgtattgttttctt

SEQ ID NO: 1702744 - DNA, 15 bp, Homo sapiens
tgtattgttttcttt

SEQ ID NO: 1702745 - DNA, 15 bp, Homo sapiens
gtattgttttctttt

SEQ ID NO: 1702746 - DNA, 15 bp, Homo sapiens
tattgttttctttta

SEQ ID NO: 1702747 - DNA, 15 bp, Homo sapiens
attgttttcttttat

SEQ ID NO: 1702748 - DNA, 15 bp, Homo sapiens
tgttttcttttattc

SEQ ID NO: 1702749 - DNA, 15 bp, Homo sapiens
gttttcttttattcc

SEQ ID NO: 1702750 - DNA, 15 bp, Homo sapiens
ttttcttttattcct

SEQ ID NO: 1702751 - DNA, 15 bp, Homo sapiens
tttcttttattcctc

SEQ ID NO: 1702752 - DNA, 15 bp, Homo sapiens
ttcttttattcctct

SEQ ID NO: 1702753 - DNA, 15 bp, Homo sapiens
tcttttattcctctc

SEQ ID NO: 1702754 - DNA, 15 bp, Homo sapiens
cttttattcctctcc

SEQ ID NO: 1702755 - DNA, 15 bp, Homo sapiens
ttttattcctctcct

SEQ ID NO: 1702756 - DNA, 15 bp, Homo sapiens
tttattcctctcctg

SEQ ID NO: 1702757 - DNA, 15 bp, Homo sapiens
ttattcctctcctgt

SEQ ID NO: 1702758 - DNA, 15 bp, Homo sapiens
tattcctctcctgtt

SEQ ID NO: 1702759 - DNA, 15 bp, Homo sapiens
attcctctcctgttc

SEQ ID NO: 1702760 - DNA, 15 bp, Homo sapiens
ttcctctcctgttct

SEQ ID NO: 1702761 - DNA, 15 bp, Homo sapiens
tcctctcctgttctt

SEQ ID NO: 1702762 - DNA, 15 bp, Homo sapiens
cctctcctgttcttt

SEQ ID NO: 1702763 - DNA, 15 bp, Homo sapiens
ctctcctgttctttt

SEQ ID NO: 1702764 - DNA, 15 bp, Homo sapiens
tctcctgttctttta

SEQ ID NO: 1702765 - DNA, 15 bp, Homo sapiens
ctcctgttcttttag

SEQ ID NO: 1702766 - DNA, 15 bp, Homo sapiens
tcctgttcttttagt

SEQ ID NO: 1702767 - DNA, 15 bp, Homo sapiens
cctgttcttttagtg

SEQ ID NO: 1702768 - DNA, 15 bp, Homo sapiens
ctgttcttttagtgg

SEQ ID NO: 1702769 - DNA, 15 bp, Homo sapiens
tgttcttttagtgga

SEQ ID NO: 1702770 - DNA, 15 bp, Homo sapiens
gttcttttagtggag

SEQ ID NO: 1702771 - DNA, 15 bp, Homo sapiens
ttcttttagtggaga

SEQ ID NO: 1702772 - DNA, 15 bp, Homo sapiens
tcttttagtggagat

SEQ ID NO: 1702773 - DNA, 15 bp, Homo sapiens
cttttagtggagata

SEQ ID NO: 1702774 - DNA, 15 bp, Homo sapiens
ttttagtggagatat

SEQ ID NO: 1702775 - DNA, 15 bp, Homo sapiens
tttagtggagatatc

SEQ ID NO: 1702776 - DNA, 15 bp, Homo sapiens
ttagtggagatatca

SEQ ID NO: 1702777 - DNA, 15 bp, Homo sapiens
tagtggagatatcaa

SEQ ID NO: 1702778 - DNA, 15 bp, Homo sapiens
agtggagatatcaaa

SEQ ID NO: 1702779 - DNA, 15 bp, Homo sapiens
gtggagatatcaaat

SEQ ID NO: 1702780 - DNA, 15 bp, Homo sapiens
tggagatatcaaata

SEQ ID NO: 1702781 - DNA, 15 bp, Homo sapiens
ggagatatcaaataa

SEQ ID NO: 1702782 - DNA, 15 bp, Homo sapiens
gagatatcaaataaa

SEQ ID NO: 1702783 - DNA, 15 bp, Homo sapiens
agatatcaaataaaa

SEQ ID NO: 1702784 - DNA, 15 bp, Homo sapiens
gatatcaaataaaat

SEQ ID NO: 1702785 - DNA, 15 bp, Homo sapiens
atatcaaataaaatg

SEQ ID NO: 1702786 - DNA, 15 bp, Homo sapiens
tatcaaataaaatgc

SEQ ID NO: 1702787 - DNA, 15 bp, Homo sapiens
atcaaataaaatgca

SEQ ID NO: 1702788 - DNA, 15 bp, Homo sapiens
tcaaataaaatgcaa

SEQ ID NO: 1702789 - DNA, 15 bp, Homo sapiens
caaataaaatgcaat

SEQ ID NO: 1702790 - DNA, 15 bp, Homo sapiens
aaataaaatgcaata

SEQ ID NO: 1702791 - DNA, 15 bp, Homo sapiens
aataaaatgcaataa

SEQ ID NO: 1702792 - DNA, 15 bp, Homo sapiens
ataaaatgcaataaa

SEQ ID NO: 1702793 - DNA, 15 bp, Homo sapiens
taaaatgcaataaaa

SEQ ID NO: 1702794 - DNA, 15 bp, Homo sapiens
aaaatgcaataaaaa

SEQ ID NO: 1702795 - DNA, 15 bp, Homo sapiens
aaatgcaataaaaag

SEQ ID NO: 1702796 - DNA, 15 bp, Homo sapiens
aatgcaataaaaagt

SEQ ID NO: 1702797 - DNA, 15 bp, Homo sapiens
atgcaataaaaagtc

SEQ ID NO: 1702798 - DNA, 15 bp, Homo sapiens
tgcaataaaaagtcc

SEQ ID NO: 1702799 - DNA, 15 bp, Homo sapiens
gcaataaaaagtcca

SEQ ID NO: 1702800 - DNA, 15 bp, Homo sapiens
caataaaaagtccaa

SEQ ID NO: 1702801 - DNA, 15 bp, Homo sapiens
aataaaaagtccaat

SEQ ID NO: 1702802 - DNA, 15 bp, Homo sapiens
ataaaaagtccaata

SEQ ID NO: 1702803 - DNA, 15 bp, Homo sapiens
taaaaagtccaatat

SEQ ID NO: 1702804 - DNA, 15 bp, Homo sapiens
aaaaagtccaatatt

SEQ ID NO: 1702805 - DNA, 15 bp, Homo sapiens
aaaagtccaatattt

SEQ ID NO: 1702806 - DNA, 15 bp, Homo sapiens
aaagtccaatattta

SEQ ID NO: 1702807 - DNA, 15 bp, Homo sapiens
aagtccaatatttag

SEQ ID NO: 1702808 - DNA, 15 bp, Homo sapiens
agtccaatatttagg

SEQ ID NO: 1702809 - DNA, 15 bp, Homo sapiens
gtccaatatttaggg

SEQ ID NO: 1702810 - DNA, 15 bp, Homo sapiens
tccaatatttaggga

SEQ ID NO: 1702811 - DNA, 15 bp, Homo sapiens
ccaatatttagggac

SEQ ID NO: 1702812 - DNA, 15 bp, Homo sapiens
caatatttagggaca

SEQ ID NO: 1702813 - DNA, 15 bp, Homo sapiens
aatatttagggacag

SEQ ID NO: 1702814 - DNA, 15 bp, Homo sapiens
atatttagggacaga

SEQ ID NO: 1702815 - DNA, 15 bp, Homo sapiens
tatttagggacagat

SEQ ID NO: 1702816 - DNA, 15 bp, Homo sapiens
atttagggacagatt

SEQ ID NO: 1702817 - DNA, 15 bp, Homo sapiens
tttagggacagattt

SEQ ID NO: 1702818 - DNA, 15 bp, Homo sapiens
ttagggacagatttt

SEQ ID NO: 1702819 - DNA, 15 bp, Homo sapiens
tagggacagattttc

SEQ ID NO: 1702820 - DNA, 15 bp, Homo sapiens
agggacagattttct

SEQ ID NO: 1702821 - DNA, 15 bp, Homo sapiens
gggacagattttcta

SEQ ID NO: 1702822 - DNA, 15 bp, Homo sapiens
ggacagattttctag

SEQ ID NO: 1702823 - DNA, 15 bp, Homo sapiens
gacagattttctagt

SEQ ID NO: 1702824 - DNA, 15 bp, Homo sapiens
acagattttctagtt

SEQ ID NO: 1702825 - DNA, 15 bp, Homo sapiens
cagattttctagttt

SEQ ID NO: 1702826 - DNA, 15 bp, Homo sapiens
agattttctagtttt

SEQ ID NO: 1702827 - DNA, 15 bp, Homo sapiens
gattttctagttttt

SEQ ID NO: 1702828 - DNA, 15 bp, Homo sapiens
attttctagtttttg

SEQ ID NO: 1702829 - DNA, 15 bp, Homo sapiens
ttttctagtttttgc

SEQ ID NO: 1702830 - DNA, 15 bp, Homo sapiens
tttctagtttttgca

SEQ ID NO: 1702831 - DNA, 15 bp, Homo sapiens
ttctagtttttgcat

SEQ ID NO: 1702832 - DNA, 15 bp, Homo sapiens
tctagtttttgcatc

SEQ ID NO: 1702833 - DNA, 15 bp, Homo sapiens
ctagtttttgcatca

SEQ ID NO: 1702834 - DNA, 15 bp, Homo sapiens
tagtttttgcatcat

SEQ ID NO: 1702835 - DNA, 15 bp, Homo sapiens
agtttttgcatcatt

SEQ ID NO: 1702836 - DNA, 15 bp, Homo sapiens
gtttttgcatcattc

SEQ ID NO: 1702837 - DNA, 15 bp, Homo sapiens
tttttgcatcattca

SEQ ID NO: 1702838 - DNA, 15 bp, Homo sapiens
ttttgcatcattcaa

SEQ ID NO: 1702839 - DNA, 15 bp, Homo sapiens
tttgcatcattcaag

SEQ ID NO: 1702840 - DNA, 15 bp, Homo sapiens
ttgcatcattcaagc

SEQ ID NO: 1702841 - DNA, 15 bp, Homo sapiens
tgcatcattcaagct

SEQ ID NO: 1702842 - DNA, 15 bp, Homo sapiens
gcatcattcaagctg

SEQ ID NO: 1702843 - DNA, 15 bp, Homo sapiens
catcattcaagctgg

SEQ ID NO: 1702844 - DNA, 15 bp, Homo sapiens
atcattcaagctgga

SEQ ID NO: 1702845 - DNA, 15 bp, Homo sapiens
tcattcaagctggac

SEQ ID NO: 1702846 - DNA, 15 bp, Homo sapiens
cattcaagctggaca

SEQ ID NO: 1702847 - DNA, 15 bp, Homo sapiens
attcaagctggacag

SEQ ID NO: 1702848 - DNA, 15 bp, Homo sapiens
ttcaagctggacagt

SEQ ID NO: 1702849 - DNA, 15 bp, Homo sapiens
tcaagctggacagtt

SEQ ID NO: 1702850 - DNA, 15 bp, Homo sapiens
caagctggacagttg

SEQ ID NO: 1702851 - DNA, 15 bp, Homo sapiens
aagctggacagttgc

SEQ ID NO: 1702852 - DNA, 15 bp, Homo sapiens
agctggacagttgca

SEQ ID NO: 1702853 - DNA, 15 bp, Homo sapiens
gctggacagttgcat

SEQ ID NO: 1702854 - DNA, 15 bp, Homo sapiens
ctggacagttgcatt

SEQ ID NO: 1702855 - DNA, 15 bp, Homo sapiens
tggacagttgcattt

SEQ ID NO: 1702856 - DNA, 15 bp, Homo sapiens
ggacagttgcatttt

SEQ ID NO: 1702857 - DNA, 15 bp, Homo sapiens
gacagttgcattttt

SEQ ID NO: 1702858 - DNA, 15 bp, Homo sapiens
acagttgcatttttt

SEQ ID NO: 1702859 - DNA, 15 bp, Homo sapiens
cagttgcattttttc

SEQ ID NO: 1702860 - DNA, 15 bp, Homo sapiens
agttgcattttttcg

SEQ ID NO: 1702861 - DNA, 15 bp, Homo sapiens
gttgcattttttcgg

SEQ ID NO: 1702862 - DNA, 15 bp, Homo sapiens
ttgcattttttcggg

SEQ ID NO: 1702863 - DNA, 15 bp, Homo sapiens
tgcattttttcgggg

SEQ ID NO: 1702864 - DNA, 15 bp, Homo sapiens
gcattttttcggggg

SEQ ID NO: 1702865 - DNA, 15 bp, Homo sapiens
cattttttcgggggg

SEQ ID NO: 1702866 - DNA, 15 bp, Homo sapiens
attttttcggggggg

SEQ ID NO: 1702867 - DNA, 15 bp, Homo sapiens
ttttttcgggggggt

SEQ ID NO: 1702868 - DNA, 15 bp, Homo sapiens
tttttcgggggggtc

SEQ ID NO: 1702869 - DNA, 15 bp, Homo sapiens
ttttcgggggggtca

SEQ ID NO: 1702870 - DNA, 15 bp, Homo sapiens
tttcgggggggtcaa

SEQ ID NO: 1702871 - DNA, 15 bp, Homo sapiens
ttcgggggggtcaaa

SEQ ID NO: 1702872 - DNA, 15 bp, Homo sapiens
tcgggggggtcaaac

SEQ ID NO: 1702873 - DNA, 15 bp, Homo sapiens
cgggggggtcaaact

SEQ ID NO: 1702874 - DNA, 15 bp, Homo sapiens
gggggggtcaaactt

SEQ ID NO: 1702875 - DNA, 15 bp, Homo sapiens
ggggggtcaaacttt

SEQ ID NO: 1702876 - DNA, 15 bp, Homo sapiens
gggggtcaaacttta

SEQ ID NO: 1702877 - DNA, 15 bp, Homo sapiens
ggggtcaaactttaa

SEQ ID NO: 1702878 - DNA, 15 bp, Homo sapiens
gggtcaaactttaaa

SEQ ID NO: 1702879 - DNA, 15 bp, Homo sapiens
ggtcaaactttaaag

SEQ ID NO: 1702880 - DNA, 15 bp, Homo sapiens
gtcaaactttaaagt

SEQ ID NO: 1702881 - DNA, 15 bp, Homo sapiens
tcaaactttaaagtc

SEQ ID NO: 1702882 - DNA, 15 bp, Homo sapiens
caaactttaaagtca

SEQ ID NO: 1702883 - DNA, 15 bp, Homo sapiens
aaactttaaagtcaa

SEQ ID NO: 1702884 - DNA, 15 bp, Homo sapiens
aactttaaagtcaaa

SEQ ID NO: 1702885 - DNA, 15 bp, Homo sapiens
actttaaagtcaaac

SEQ ID NO: 1702886 - DNA, 15 bp, Homo sapiens
ctttaaagtcaaact

SEQ ID NO: 1702887 - DNA, 15 bp, Homo sapiens
tttaaagtcaaactt

SEQ ID NO: 1702888 - DNA, 15 bp, Homo sapiens
ttaaagtcaaacttt

SEQ ID NO: 1702889 - DNA, 15 bp, Homo sapiens
taaagtcaaactttt

SEQ ID NO: 1702890 - DNA, 15 bp, Homo sapiens
aaagtcaaactttta

SEQ ID NO: 1702891 - DNA, 15 bp, Homo sapiens
aagtcaaacttttag

SEQ ID NO: 1702892 - DNA, 15 bp, Homo sapiens
agtcaaacttttagt

SEQ ID NO: 1702893 - DNA, 15 bp, Homo sapiens
gtcaaacttttagta

SEQ ID NO: 1702894 - DNA, 15 bp, Homo sapiens
tcaaacttttagtat

SEQ ID NO: 1702895 - DNA, 15 bp, Homo sapiens
caaacttttagtata

SEQ ID NO: 1702896 - DNA, 15 bp, Homo sapiens
aaacttttagtatag

SEQ ID NO: 1702897 - DNA, 15 bp, Homo sapiens
aacttttagtataga

SEQ ID NO: 1702898 - DNA, 15 bp, Homo sapiens
acttttagtatagag

SEQ ID NO: 1702899 - DNA, 15 bp, Homo sapiens
cttttagtatagagg

SEQ ID NO: 1702900 - DNA, 15 bp, Homo sapiens
ttttagtatagagga

SEQ ID NO: 1702901 - DNA, 15 bp, Homo sapiens
tttagtatagaggaa

SEQ ID NO: 1702902 - DNA, 15 bp, Homo sapiens
ttagtatagaggaac

SEQ ID NO: 1702903 - DNA, 15 bp, Homo sapiens
tagtatagaggaacc

SEQ ID NO: 1702904 - DNA, 15 bp, Homo sapiens
agtatagaggaacca

SEQ ID NO: 1702905 - DNA, 15 bp, Homo sapiens
gtatagaggaaccaa

SEQ ID NO: 1702906 - DNA, 15 bp, Homo sapiens
tatagaggaaccaaa

SEQ ID NO: 1702907 - DNA, 15 bp, Homo sapiens
atagaggaaccaaag

SEQ ID NO: 1702908 - DNA, 15 bp, Homo sapiens
tagaggaaccaaaga

SEQ ID NO: 1702909 - DNA, 15 bp, Homo sapiens
agaggaaccaaagaa

SEQ ID NO: 1702910 - DNA, 15 bp, Homo sapiens
gaggaaccaaagaaa

SEQ ID NO: 1702911 - DNA, 15 bp, Homo sapiens
aggaaccaaagaaaa

SEQ ID NO: 1702912 - DNA, 15 bp, Homo sapiens
ggaaccaaagaaaat

SEQ ID NO: 1702913 - DNA, 15 bp, Homo sapiens
gaaccaaagaaaatt

SEQ ID NO: 1702914 - DNA, 15 bp, Homo sapiens
aaccaaagaaaatta

SEQ ID NO: 1702915 - DNA, 15 bp, Homo sapiens
accaaagaaaattat

SEQ ID NO: 1702916 - DNA, 15 bp, Homo sapiens
ccaaagaaaattatt

SEQ ID NO: 1702917 - DNA, 15 bp, Homo sapiens
caaagaaaattattt

SEQ ID NO: 1702918 - DNA, 15 bp, Homo sapiens
aaagaaaattatttt

SEQ ID NO: 1702919 - DNA, 15 bp, Homo sapiens
aagaaaattatttta

SEQ ID NO: 1702920 - DNA, 15 bp, Homo sapiens
agaaaattattttaa

SEQ ID NO: 1702921 - DNA, 15 bp, Homo sapiens
gaaaattattttaat

SEQ ID NO: 1702922 - DNA, 15 bp, Homo sapiens
aaaattattttaatt

SEQ ID NO: 1702923 - DNA, 15 bp, Homo sapiens
aaattattttaatta

SEQ ID NO: 1702924 - DNA, 15 bp, Homo sapiens
aattattttaattaa

SEQ ID NO: 1702925 - DNA, 15 bp, Homo sapiens
attattttaattaat

SEQ ID NO: 1702926 - DNA, 15 bp, Homo sapiens
ttattttaattaatt

SEQ ID NO: 1702927 - DNA, 15 bp, Homo sapiens
tattttaattaattc

SEQ ID NO: 1702928 - DNA, 15 bp, Homo sapiens
attttaattaattcg

SEQ ID NO: 1702929 - DNA, 15 bp, Homo sapiens
ttttaattaattcgt

SEQ ID NO: 1702930 - DNA, 15 bp, Homo sapiens
tttaattaattcgta

SEQ ID NO: 1702931 - DNA, 15 bp, Homo sapiens
ttaattaattcgtat

SEQ ID NO: 1702932 - DNA, 15 bp, Homo sapiens
taattaattcgtatt

SEQ ID NO: 1702933 - DNA, 15 bp, Homo sapiens
aattaattcgtattt

SEQ ID NO: 1702934 - DNA, 15 bp, Homo sapiens
attaattcgtatttc

SEQ ID NO: 1702935 - DNA, 15 bp, Homo sapiens
ttaattcgtatttct

SEQ ID NO: 1702936 - DNA, 15 bp, Homo sapiens
taattcgtatttctt

SEQ ID NO: 1702937 - DNA, 15 bp, Homo sapiens
aattcgtatttcttg

SEQ ID NO: 1702938 - DNA, 15 bp, Homo sapiens
attcgtatttcttgt

SEQ ID NO: 1702939 - DNA, 15 bp, Homo sapiens
ttcgtatttcttgtt

SEQ ID NO: 1702940 - DNA, 15 bp, Homo sapiens
tcgtatttcttgtta

SEQ ID NO: 1702941 - DNA, 15 bp, Homo sapiens
cgtatttcttgttag

SEQ ID NO: 1702942 - DNA, 15 bp, Homo sapiens
gtatttcttgttagt

SEQ ID NO: 1702943 - DNA, 15 bp, Homo sapiens
tatttcttgttagtg

SEQ ID NO: 1702944 - DNA, 15 bp, Homo sapiens
atttcttgttagtgt

SEQ ID NO: 1702945 - DNA, 15 bp, Homo sapiens
tttcttgttagtgtc

SEQ ID NO: 1702946 - DNA, 15 bp, Homo sapiens
ttcttgttagtgtct

SEQ ID NO: 1702947 - DNA, 15 bp, Homo sapiens
tcttgttagtgtctc

SEQ ID NO: 1702948 - DNA, 15 bp, Homo sapiens
cttgttagtgtctct

SEQ ID NO: 1702949 - DNA, 15 bp, Homo sapiens
ttgttagtgtctctt

SEQ ID NO: 1702950 - DNA, 15 bp, Homo sapiens
tgttagtgtctcttg

SEQ ID NO: 1702951 - DNA, 15 bp, Homo sapiens
gttagtgtctcttgg

SEQ ID NO: 1702952 - DNA, 15 bp, Homo sapiens
ttagtgtctcttgga

SEQ ID NO: 1702953 - DNA, 15 bp, Homo sapiens
tagtgtctcttggaa

SEQ ID NO: 1702954 - DNA, 15 bp, Homo sapiens
agtgtctcttggaat

SEQ ID NO: 1702955 - DNA, 15 bp, Homo sapiens
gtgtctcttggaatg

SEQ ID NO: 1702956 - DNA, 15 bp, Homo sapiens
tgtctcttggaatga

SEQ ID NO: 1702957 - DNA, 15 bp, Homo sapiens
gtctcttggaatgaa

SEQ ID NO: 1702958 - DNA, 15 bp, Homo sapiens
tctcttggaatgaaa

SEQ ID NO: 1702959 - DNA, 15 bp, Homo sapiens
ctcttggaatgaaaa

SEQ ID NO: 1702960 - DNA, 15 bp, Homo sapiens
tcttggaatgaaaac

SEQ ID NO: 1702961 - DNA, 15 bp, Homo sapiens
cttggaatgaaaacc

SEQ ID NO: 1702962 - DNA, 15 bp, Homo sapiens
ttggaatgaaaacca

SEQ ID NO: 1702963 - DNA, 15 bp, Homo sapiens
tggaatgaaaaccac

SEQ ID NO: 1702964 - DNA, 15 bp, Homo sapiens
ggaatgaaaaccact

SEQ ID NO: 1702965 - DNA, 15 bp, Homo sapiens
gaatgaaaaccacta

SEQ ID NO: 1702966 - DNA, 15 bp, Homo sapiens
aatgaaaaccactag

SEQ ID NO: 1702967 - DNA, 15 bp, Homo sapiens
atgaaaaccactaga

SEQ ID NO: 1702968 - DNA, 15 bp, Homo sapiens
tgaaaaccactagac

SEQ ID NO: 1702969 - DNA, 15 bp, Homo sapiens
gaaaaccactagaca

SEQ ID NO: 1702970 - DNA, 15 bp, Homo sapiens
aaaaccactagacaa

SEQ ID NO: 1702971 - DNA, 15 bp, Homo sapiens
aaaccactagacaag

SEQ ID NO: 1702972 - DNA, 15 bp, Homo sapiens
aaccactagacaaga

SEQ ID NO: 1702973 - DNA, 15 bp, Homo sapiens
accactagacaagaa

SEQ ID NO: 1702974 - DNA, 15 bp, Homo sapiens
ccactagacaagaat

SEQ ID NO: 1702975 - DNA, 15 bp, Homo sapiens
cactagacaagaatt

SEQ ID NO: 1702976 - DNA, 15 bp, Homo sapiens
actagacaagaatta

SEQ ID NO: 1702977 - DNA, 15 bp, Homo sapiens
ctagacaagaattac

SEQ ID NO: 1702978 - DNA, 15 bp, Homo sapiens
tagacaagaattact

SEQ ID NO: 1702979 - DNA, 15 bp, Homo sapiens
agacaagaattactt

SEQ ID NO: 1702980 - DNA, 15 bp, Homo sapiens
gacaagaattacttt

SEQ ID NO: 1702981 - DNA, 15 bp, Homo sapiens
acaagaattactttg

SEQ ID NO: 1702982 - DNA, 15 bp, Homo sapiens
caagaattactttgt

SEQ ID NO: 1702983 - DNA, 15 bp, Homo sapiens
aagaattactttgta

SEQ ID NO: 1702984 - DNA, 15 bp, Homo sapiens
agaattactttgtat

SEQ ID NO: 1702985 - DNA, 15 bp, Homo sapiens
gaattactttgtatc

SEQ ID NO: 1702986 - DNA, 15 bp, Homo sapiens
aattactttgtatcg

SEQ ID NO: 1702987 - DNA, 15 bp, Homo sapiens
attactttgtatcgc

SEQ ID NO: 1702988 - DNA, 15 bp, Homo sapiens
ttactttgtatcgct

SEQ ID NO: 1702989 - DNA, 15 bp, Homo sapiens
tactttgtatcgctt

SEQ ID NO: 1702990 - DNA, 15 bp, Homo sapiens
actttgtatcgcttt

SEQ ID NO: 1702991 - DNA, 15 bp, Homo sapiens
ctttgtatcgctttg

SEQ ID NO: 1702992 - DNA, 15 bp, Homo sapiens
tttgtatcgctttga

SEQ ID NO: 1702993 - DNA, 15 bp, Homo sapiens
ttgtatcgctttgaa

SEQ ID NO: 1702994 - DNA, 15 bp, Homo sapiens
tgtatcgctttgaaa

SEQ ID NO: 1702995 - DNA, 15 bp, Homo sapiens
gtatcgctttgaaat

SEQ ID NO: 1702996 - DNA, 15 bp, Homo sapiens
tatcgctttgaaatg

SEQ ID NO: 1702997 - DNA, 15 bp, Homo sapiens
atcgctttgaaatgt

SEQ ID NO: 1702998 - DNA, 15 bp, Homo sapiens
tcgctttgaaatgtc

SEQ ID NO: 1702999 - DNA, 15 bp, Homo sapiens
cgctttgaaatgtcc

SEQ ID NO: 1703000 - DNA, 15 bp, Homo sapiens
gctttgaaatgtcct

SEQ ID NO: 1703001 - DNA, 15 bp, Homo sapiens
ctttgaaatgtccta

SEQ ID NO: 1703002 - DNA, 15 bp, Homo sapiens
tttgaaatgtcctaa

SEQ ID NO: 1703003 - DNA, 15 bp, Homo sapiens
ttgaaatgtcctaag

SEQ ID NO: 1703004 - DNA, 15 bp, Homo sapiens
tgaaatgtcctaagt

SEQ ID NO: 1703005 - DNA, 15 bp, Homo sapiens
gaaatgtcctaagtg

SEQ ID NO: 1703006 - DNA, 15 bp, Homo sapiens
aaatgtcctaagtgt

SEQ ID NO: 1703007 - DNA, 15 bp, Homo sapiens
aatgtcctaagtgtt

SEQ ID NO: 1703008 - DNA, 15 bp, Homo sapiens
atgtcctaagtgttg

SEQ ID NO: 1703009 - DNA, 15 bp, Homo sapiens
tgtcctaagtgttgt

SEQ ID NO: 1703010 - DNA, 15 bp, Homo sapiens
gtcctaagtgttgtt

SEQ ID NO: 1703011 - DNA, 15 bp, Homo sapiens
tcctaagtgttgttg

SEQ ID NO: 1703012 - DNA, 15 bp, Homo sapiens
cctaagtgttgttgt

SEQ ID NO: 1703013 - DNA, 15 bp, Homo sapiens
ctaagtgttgttgtt

SEQ ID NO: 1703014 - DNA, 15 bp, Homo sapiens
taagtgttgttgttt

SEQ ID NO: 1703015 - DNA, 15 bp, Homo sapiens
aagtgttgttgttta

SEQ ID NO: 1703016 - DNA, 15 bp, Homo sapiens
agtgttgttgtttag

SEQ ID NO: 1703017 - DNA, 15 bp, Homo sapiens
gtgttgttgtttaga

SEQ ID NO: 1703018 - DNA, 15 bp, Homo sapiens
tgttgttgtttagag

SEQ ID NO: 1703019 - DNA, 15 bp, Homo sapiens
gttgttgtttagagt

SEQ ID NO: 1703020 - DNA, 15 bp, Homo sapiens
ttgttgtttagagtt

SEQ ID NO: 1703021 - DNA, 15 bp, Homo sapiens
tgttgtttagagtta

SEQ ID NO: 1703022 - DNA, 15 bp, Homo sapiens
gttgtttagagttaa

SEQ ID NO: 1703023 - DNA, 15 bp, Homo sapiens
ttgtttagagttaag

SEQ ID NO: 1703024 - DNA, 15 bp, Homo sapiens
tgtttagagttaagg

SEQ ID NO: 1703025 - DNA, 15 bp, Homo sapiens
gtttagagttaagga

SEQ ID NO: 1703026 - DNA, 15 bp, Homo sapiens
tttagagttaaggat

SEQ ID NO: 1703027 - DNA, 15 bp, Homo sapiens
ttagagttaaggata

SEQ ID NO: 1703028 - DNA, 15 bp, Homo sapiens
tagagttaaggataa

SEQ ID NO: 1703029 - DNA, 15 bp, Homo sapiens
agagttaaggataac

SEQ ID NO: 1703030 - DNA, 15 bp, Homo sapiens
gagttaaggataact

SEQ ID NO: 1703031 - DNA, 15 bp, Homo sapiens
agttaaggataactt

SEQ ID NO: 1703032 - DNA, 15 bp, Homo sapiens
gttaaggataacttc

SEQ ID NO: 1703033 - DNA, 15 bp, Homo sapiens
ttaaggataacttca

SEQ ID NO: 1703034 - DNA, 15 bp, Homo sapiens
taaggataacttcag

SEQ ID NO: 1703035 - DNA, 15 bp, Homo sapiens
aaggataacttcagg

SEQ ID NO: 1703036 - DNA, 15 bp, Homo sapiens
aggataacttcaggt

SEQ ID NO: 1703037 - DNA, 15 bp, Homo sapiens
ggataacttcaggta

SEQ ID NO: 1703038 - DNA, 15 bp, Homo sapiens
gataacttcaggtat

SEQ ID NO: 1703039 - DNA, 15 bp, Homo sapiens
ataacttcaggtatc

SEQ ID NO: 1703040 - DNA, 15 bp, Homo sapiens
taacttcaggtatca

SEQ ID NO: 1703041 - DNA, 15 bp, Homo sapiens
aacttcaggtatcag

SEQ ID NO: 1703042 - DNA, 15 bp, Homo sapiens
acttcaggtatcaga

SEQ ID NO: 1703043 - DNA, 15 bp, Homo sapiens
cttcaggtatcagaa

SEQ ID NO: 1703044 - DNA, 15 bp, Homo sapiens
ttcaggtatcagaag

SEQ ID NO: 1703045 - DNA, 15 bp, Homo sapiens
tcaggtatcagaagg

SEQ ID NO: 1703046 - DNA, 15 bp, Homo sapiens
caggtatcagaaggt

SEQ ID NO: 1703047 - DNA, 15 bp, Homo sapiens
aggtatcagaaggtt

SEQ ID NO: 1703048 - DNA, 15 bp, Homo sapiens
ggtatcagaaggttg

SEQ ID NO: 1703049 - DNA, 15 bp, Homo sapiens
gtatcagaaggttgg

SEQ ID NO: 1703050 - DNA, 15 bp, Homo sapiens
tatcagaaggttggg

SEQ ID NO: 1703051 - DNA, 15 bp, Homo sapiens
atcagaaggttggga

SEQ ID NO: 1703052 - DNA, 15 bp, Homo sapiens
tcagaaggttgggaa

SEQ ID NO: 1703053 - DNA, 15 bp, Homo sapiens
cagaaggttgggaaa

SEQ ID NO: 1703054 - DNA, 15 bp, Homo sapiens
agaaggttgggaaaa

SEQ ID NO: 1703055 - DNA, 15 bp, Homo sapiens
gaaggttgggaaaat

SEQ ID NO: 1703056 - DNA, 15 bp, Homo sapiens
aaggttgggaaaatt

SEQ ID NO: 1703057 - DNA, 15 bp, Homo sapiens
aggttgggaaaattt

SEQ ID NO: 1703058 - DNA, 15 bp, Homo sapiens
ggttgggaaaatttc

SEQ ID NO: 1703059 - DNA, 15 bp, Homo sapiens
gttgggaaaatttct

SEQ ID NO: 1703060 - DNA, 15 bp, Homo sapiens
ttgggaaaatttcta

SEQ ID NO: 1703061 - DNA, 15 bp, Homo sapiens
tgggaaaatttctat

SEQ ID NO: 1703062 - DNA, 15 bp, Homo sapiens
gggaaaatttctatc

SEQ ID NO: 1703063 - DNA, 15 bp, Homo sapiens
ggaaaatttctatca

SEQ ID NO: 1703064 - DNA, 15 bp, Homo sapiens
gaaaatttctatcat

SEQ ID NO: 1703065 - DNA, 15 bp, Homo sapiens
aaaatttctatcatg

SEQ ID NO: 1703066 - DNA, 15 bp, Homo sapiens
aaatttctatcatgt

SEQ ID NO: 1703067 - DNA, 15 bp, Homo sapiens
aatttctatcatgtc

SEQ ID NO: 1703068 - DNA, 15 bp, Homo sapiens
atttctatcatgtca

SEQ ID NO: 1703069 - DNA, 15 bp, Homo sapiens
tttctatcatgtcag

SEQ ID NO: 1703070 - DNA, 15 bp, Homo sapiens
ttctatcatgtcagg

SEQ ID NO: 1703071 - DNA, 15 bp, Homo sapiens
tctatcatgtcaggc

SEQ ID NO: 1703072 - DNA, 15 bp, Homo sapiens
ctatcatgtcaggct

SEQ ID NO: 1703073 - DNA, 15 bp, Homo sapiens
tatcatgtcaggctg

SEQ ID NO: 1703074 - DNA, 15 bp, Homo sapiens
atcatgtcaggctgt

SEQ ID NO: 1703075 - DNA, 15 bp, Homo sapiens
tcatgtcaggctgtg

SEQ ID NO: 1703076 - DNA, 15 bp, Homo sapiens
catgtcaggctgtgg

SEQ ID NO: 1703077 - DNA, 15 bp, Homo sapiens
atgtcaggctgtggg

SEQ ID NO: 1703078 - DNA, 15 bp, Homo sapiens
tgtcaggctgtgggt

SEQ ID NO: 1703079 - DNA, 15 bp, Homo sapiens
gtcaggctgtgggtg

SEQ ID NO: 1703080 - DNA, 15 bp, Homo sapiens
tcaggctgtgggtgg

SEQ ID NO: 1703081 - DNA, 15 bp, Homo sapiens
caggctgtgggtgga

SEQ ID NO: 1703082 - DNA, 15 bp, Homo sapiens
aggctgtgggtggac

SEQ ID NO: 1703083 - DNA, 15 bp, Homo sapiens
ggctgtgggtggacc

SEQ ID NO: 1703084 - DNA, 15 bp, Homo sapiens
gctgtgggtggacca

SEQ ID NO: 1703085 - DNA, 15 bp, Homo sapiens
ctgtgggtggaccat

SEQ ID NO: 1703086 - DNA, 15 bp, Homo sapiens
tgtgggtggaccatc

SEQ ID NO: 1703087 - DNA, 15 bp, Homo sapiens
gtgggtggaccatcc

SEQ ID NO: 1703088 - DNA, 15 bp, Homo sapiens
tgggtggaccatcct

SEQ ID NO: 1703089 - DNA, 15 bp, Homo sapiens
gggtggaccatcctg

SEQ ID NO: 1703090 - DNA, 15 bp, Homo sapiens
ggtggaccatcctgt

SEQ ID NO: 1703091 - DNA, 15 bp, Homo sapiens
gtggaccatcctgtg

SEQ ID NO: 1703092 - DNA, 15 bp, Homo sapiens
tggaccatcctgtgg

SEQ ID NO: 1703093 - DNA, 15 bp, Homo sapiens
ggaccatcctgtggg

SEQ ID NO: 1703094 - DNA, 15 bp, Homo sapiens
gaccatcctgtgggg

SEQ ID NO: 1703095 - DNA, 15 bp, Homo sapiens
accatcctgtggggc

SEQ ID NO: 1703096 - DNA, 15 bp, Homo sapiens
ccatcctgtggggca

SEQ ID NO: 1703097 - DNA, 15 bp, Homo sapiens
catcctgtggggcaa

SEQ ID NO: 1703098 - DNA, 15 bp, Homo sapiens
atcctgtggggcaat

SEQ ID NO: 1703099 - DNA, 15 bp, Homo sapiens
tcctgtggggcaatc

SEQ ID NO: 1703100 - DNA, 15 bp, Homo sapiens
cctgtggggcaatcg

SEQ ID NO: 1703101 - DNA, 15 bp, Homo sapiens
ctgtggggcaatcgt

SEQ ID NO: 1703102 - DNA, 15 bp, Homo sapiens
tgtggggcaatcgtt

SEQ ID NO: 1703103 - DNA, 15 bp, Homo sapiens
gtggggcaatcgttc

SEQ ID NO: 1703104 - DNA, 15 bp, Homo sapiens
tggggcaatcgttcc

SEQ ID NO: 1703105 - DNA, 15 bp, Homo sapiens
ggggcaatcgttcca

SEQ ID NO: 1703106 - DNA, 15 bp, Homo sapiens
gggcaatcgttccag

SEQ ID NO: 1703107 - DNA, 15 bp, Homo sapiens
ggcaatcgttccaga

SEQ ID NO: 1703108 - DNA, 15 bp, Homo sapiens
gcaatcgttccagaa

SEQ ID NO: 1703109 - DNA, 15 bp, Homo sapiens
caatcgttccagaaa

SEQ ID NO: 1703110 - DNA, 15 bp, Homo sapiens
aatcgttccagaaaa

SEQ ID NO: 1703111 - DNA, 15 bp, Homo sapiens
atcgttccagaaaat

SEQ ID NO: 1703112 - DNA, 15 bp, Homo sapiens
tcgttccagaaaatg

SEQ ID NO: 1703113 - DNA, 15 bp, Homo sapiens
cgttccagaaaatgc

SEQ ID NO: 1703114 - DNA, 15 bp, Homo sapiens
gttccagaaaatgct

SEQ ID NO: 1703115 - DNA, 15 bp, Homo sapiens
ttccagaaaatgctg

SEQ ID NO: 1703116 - DNA, 15 bp, Homo sapiens
tccagaaaatgctgg

SEQ ID NO: 1703117 - DNA, 15 bp, Homo sapiens
ccagaaaatgctggt

SEQ ID NO: 1703118 - DNA, 15 bp, Homo sapiens
cagaaaatgctggta

SEQ ID NO: 1703119 - DNA, 15 bp, Homo sapiens
agaaaatgctggtat

SEQ ID NO: 1703120 - DNA, 15 bp, Homo sapiens
gaaaatgctggtatt

SEQ ID NO: 1703121 - DNA, 15 bp, Homo sapiens
aaaatgctggtattt

SEQ ID NO: 1703122 - DNA, 15 bp, Homo sapiens
aaatgctggtattta

SEQ ID NO: 1703123 - DNA, 15 bp, Homo sapiens
aatgctggtatttaa

SEQ ID NO: 1703124 - DNA, 15 bp, Homo sapiens
atgctggtatttaat

SEQ ID NO: 1703125 - DNA, 15 bp, Homo sapiens
tgctggtatttaatg

SEQ ID NO: 1703126 - DNA, 15 bp, Homo sapiens
gctggtatttaatgt

SEQ ID NO: 1703127 - DNA, 15 bp, Homo sapiens
ctggtatttaatgtc

SEQ ID NO: 1703128 - DNA, 15 bp, Homo sapiens
tggtatttaatgtca

SEQ ID NO: 1703129 - DNA, 15 bp, Homo sapiens
ggtatttaatgtcac

SEQ ID NO: 1703130 - DNA, 15 bp, Homo sapiens
gtatttaatgtcaca

SEQ ID NO: 1703131 - DNA, 15 bp, Homo sapiens
tatttaatgtcacaa

SEQ ID NO: 1703132 - DNA, 15 bp, Homo sapiens
atttaatgtcacaag

SEQ ID NO: 1703133 - DNA, 15 bp, Homo sapiens
tttaatgtcacaagg

SEQ ID NO: 1703134 - DNA, 15 bp, Homo sapiens
ttaatgtcacaagga

SEQ ID NO: 1703135 - DNA, 15 bp, Homo sapiens
taatgtcacaaggaa

SEQ ID NO: 1703136 - DNA, 15 bp, Homo sapiens
aatgtcacaaggaag

SEQ ID NO: 1703137 - DNA, 15 bp, Homo sapiens
atgtcacaaggaagc

SEQ ID NO: 1703138 - DNA, 15 bp, Homo sapiens
tgtcacaaggaagct

SEQ ID NO: 1703139 - DNA, 15 bp, Homo sapiens
gtcacaaggaagctg

SEQ ID NO: 1703140 - DNA, 15 bp, Homo sapiens
tcacaaggaagctgg

SEQ ID NO: 1703141 - DNA, 15 bp, Homo sapiens
cacaaggaagctggc

SEQ ID NO: 1703142 - DNA, 15 bp, Homo sapiens
acaaggaagctggca

SEQ ID NO: 1703143 - DNA, 15 bp, Homo sapiens
caaggaagctggcag

SEQ ID NO: 1703144 - DNA, 15 bp, Homo sapiens
aaggaagctggcaga

SEQ ID NO: 1703145 - DNA, 15 bp, Homo sapiens
aggaagctggcagaa

SEQ ID NO: 1703146 - DNA, 15 bp, Homo sapiens
ggaagctggcagaat

SEQ ID NO: 1703147 - DNA, 15 bp, Homo sapiens
gaagctggcagaatt

SEQ ID NO: 1703148 - DNA, 15 bp, Homo sapiens
aagctggcagaattt

SEQ ID NO: 1703149 - DNA, 15 bp, Homo sapiens
agctggcagaattta

SEQ ID NO: 1703150 - DNA, 15 bp, Homo sapiens
gctggcagaatttag

SEQ ID NO: 1703151 - DNA, 15 bp, Homo sapiens
ctggcagaatttagt

SEQ ID NO: 1703152 - DNA, 15 bp, Homo sapiens
tggcagaatttagtg

SEQ ID NO: 1703153 - DNA, 15 bp, Homo sapiens
ggcagaatttagtga

SEQ ID NO: 1703154 - DNA, 15 bp, Homo sapiens
gcagaatttagtgag

SEQ ID NO: 1703155 - DNA, 15 bp, Homo sapiens
cagaatttagtgagt

SEQ ID NO: 1703156 - DNA, 15 bp, Homo sapiens
agaatttagtgagtg

SEQ ID NO: 1703157 - DNA, 15 bp, Homo sapiens
gaatttagtgagtgc

SEQ ID NO: 1703158 - DNA, 15 bp, Homo sapiens
aatttagtgagtgct

SEQ ID NO: 1703159 - DNA, 15 bp, Homo sapiens
atttagtgagtgcta

SEQ ID NO: 1703160 - DNA, 15 bp, Homo sapiens
tttagtgagtgctaa

SEQ ID NO: 1703161 - DNA, 15 bp, Homo sapiens
ttagtgagtgctaat

SEQ ID NO: 1703162 - DNA, 15 bp, Homo sapiens
tagtgagtgctaata

SEQ ID NO: 1703163 - DNA, 15 bp, Homo sapiens
agtgagtgctaatag

SEQ ID NO: 1703164 - DNA, 15 bp, Homo sapiens
gtgagtgctaatagt

SEQ ID NO: 1703165 - DNA, 15 bp, Homo sapiens
tgagtgctaatagtc

SEQ ID NO: 1703166 - DNA, 15 bp, Homo sapiens
gagtgctaatagtct

SEQ ID NO: 1703167 - DNA, 15 bp, Homo sapiens
agtgctaatagtctt

SEQ ID NO: 1703168 - DNA, 15 bp, Homo sapiens
gtgctaatagtcttc

SEQ ID NO: 1703169 - DNA, 15 bp, Homo sapiens
tgctaatagtcttca

SEQ ID NO: 1703170 - DNA, 15 bp, Homo sapiens
gctaatagtcttcac

SEQ ID NO: 1703171 - DNA, 15 bp, Homo sapiens
ctaatagtcttcaca

SEQ ID NO: 1703172 - DNA, 15 bp, Homo sapiens
taatagtcttcacaa

SEQ ID NO: 1703173 - DNA, 15 bp, Homo sapiens
aatagtcttcacaag

SEQ ID NO: 1703174 - DNA, 15 bp, Homo sapiens
atagtcttcacaagt

SEQ ID NO: 1703175 - DNA, 15 bp, Homo sapiens
tagtcttcacaagtt

SEQ ID NO: 1703176 - DNA, 15 bp, Homo sapiens
agtcttcacaagttc

SEQ ID NO: 1703177 - DNA, 15 bp, Homo sapiens
gtcttcacaagttcc

SEQ ID NO: 1703178 - DNA, 15 bp, Homo sapiens
tcttcacaagttcca

SEQ ID NO: 1703179 - DNA, 15 bp, Homo sapiens
cttcacaagttccaa

SEQ ID NO: 1703180 - DNA, 15 bp, Homo sapiens
ttcacaagttccaaa

SEQ ID NO: 1703181 - DNA, 15 bp, Homo sapiens
tcacaagttccaaag

SEQ ID NO: 1703182 - DNA, 15 bp, Homo sapiens
cacaagttccaaagc

SEQ ID NO: 1703183 - DNA, 15 bp, Homo sapiens
acaagttccaaagcc

SEQ ID NO: 1703184 - DNA, 15 bp, Homo sapiens
caagttccaaagcct

SEQ ID NO: 1703185 - DNA, 15 bp, Homo sapiens
aagttccaaagccta

SEQ ID NO: 1703186 - DNA, 15 bp, Homo sapiens
agttccaaagcctac

SEQ ID NO: 1703187 - DNA, 15 bp, Homo sapiens
gttccaaagcctacc

SEQ ID NO: 1703188 - DNA, 15 bp, Homo sapiens
ttccaaagcctaccc

SEQ ID NO: 1703189 - DNA, 15 bp, Homo sapiens
tccaaagcctaccct

SEQ ID NO: 1703190 - DNA, 15 bp, Homo sapiens
ccaaagcctaccctt

SEQ ID NO: 1703191 - DNA, 15 bp, Homo sapiens
caaagcctacccttt

SEQ ID NO: 1703192 - DNA, 15 bp, Homo sapiens
aaagcctaccctttg

SEQ ID NO: 1703193 - DNA, 15 bp, Homo sapiens
aagcctaccctttga

SEQ ID NO: 1703194 - DNA, 15 bp, Homo sapiens
agcctaccctttgat

SEQ ID NO: 1703195 - DNA, 15 bp, Homo sapiens
gcctaccctttgatg

SEQ ID NO: 1703196 - DNA, 15 bp, Homo sapiens
cctaccctttgatgg

SEQ ID NO: 1703197 - DNA, 15 bp, Homo sapiens
ctaccctttgatggt

SEQ ID NO: 1703198 - DNA, 15 bp, Homo sapiens
taccctttgatggta

SEQ ID NO: 1703199 - DNA, 15 bp, Homo sapiens
accctttgatggtac

SEQ ID NO: 1703200 - DNA, 15 bp, Homo sapiens
ccctttgatggtacg

SEQ ID NO: 1703201 - DNA, 15 bp, Homo sapiens
cctttgatggtacgt

SEQ ID NO: 1703202 - DNA, 15 bp, Homo sapiens
ctttgatggtacgta

SEQ ID NO: 1703203 - DNA, 15 bp, Homo sapiens
tttgatggtacgtac

SEQ ID NO: 1703204 - DNA, 15 bp, Homo sapiens
ttgatggtacgtaca

SEQ ID NO: 1703205 - DNA, 15 bp, Homo sapiens
tgatggtacgtacag

SEQ ID NO: 1703206 - DNA, 15 bp, Homo sapiens
gatggtacgtacagc

SEQ ID NO: 1703207 - DNA, 15 bp, Homo sapiens
atggtacgtacagca

SEQ ID NO: 1703208 - DNA, 15 bp, Homo sapiens
tggtacgtacagcac

SEQ ID NO: 1703209 - DNA, 15 bp, Homo sapiens
ggtacgtacagcaca

SEQ ID NO: 1703210 - DNA, 15 bp, Homo sapiens
gtacgtacagcacag

SEQ ID NO: 1703211 - DNA, 15 bp, Homo sapiens
tacgtacagcacagc

SEQ ID NO: 1703212 - DNA, 15 bp, Homo sapiens
acgtacagcacagct

SEQ ID NO: 1703213 - DNA, 15 bp, Homo sapiens
cgtacagcacagctg

SEQ ID NO: 1703214 - DNA, 15 bp, Homo sapiens
gtacagcacagctga

SEQ ID NO: 1703215 - DNA, 15 bp, Homo sapiens
tacagcacagctgac

SEQ ID NO: 1703216 - DNA, 15 bp, Homo sapiens
acagcacagctgaca

SEQ ID NO: 1703217 - DNA, 15 bp, Homo sapiens
cagcacagctgacac

SEQ ID NO: 1703218 - DNA, 15 bp, Homo sapiens
agcacagctgacaca

SEQ ID NO: 1703219 - DNA, 15 bp, Homo sapiens
gcacagctgacacat

SEQ ID NO: 1703220 - DNA, 15 bp, Homo sapiens
cacagctgacacatc

SEQ ID NO: 1703221 - DNA, 15 bp, Homo sapiens
acagctgacacatct

SEQ ID NO: 1703222 - DNA, 15 bp, Homo sapiens
cagctgacacatcta

SEQ ID NO: 1703223 - DNA, 15 bp, Homo sapiens
agctgacacatctaa

SEQ ID NO: 1703224 - DNA, 15 bp, Homo sapiens
gctgacacatctaaa

SEQ ID NO: 1703225 - DNA, 15 bp, Homo sapiens
ctgacacatctaaaa

SEQ ID NO: 1703226 - DNA, 15 bp, Homo sapiens
tgacacatctaaaac

SEQ ID NO: 1703227 - DNA, 15 bp, Homo sapiens
gacacatctaaaaca

SEQ ID NO: 1703228 - DNA, 15 bp, Homo sapiens
acacatctaaaacat

SEQ ID NO: 1703229 - DNA, 15 bp, Homo sapiens
cacatctaaaacata

SEQ ID NO: 1703230 - DNA, 15 bp, Homo sapiens
acatctaaaacatac

SEQ ID NO: 1703231 - DNA, 15 bp, Homo sapiens
catctaaaacataca

SEQ ID NO: 1703232 - DNA, 15 bp, Homo sapiens
atctaaaacatacat

SEQ ID NO: 1703233 - DNA, 15 bp, Homo sapiens
tctaaaacatacatt

SEQ ID NO: 1703234 - DNA, 15 bp, Homo sapiens
ctaaaacatacatta

SEQ ID NO: 1703235 - DNA, 15 bp, Homo sapiens
taaaacatacattat

SEQ ID NO: 1703236 - DNA, 15 bp, Homo sapiens
aaaacatacattata

SEQ ID NO: 1703237 - DNA, 15 bp, Homo sapiens
aaacatacattatag

SEQ ID NO: 1703238 - DNA, 15 bp, Homo sapiens
aacatacattataga

SEQ ID NO: 1703239 - DNA, 15 bp, Homo sapiens
acatacattatagaa

SEQ ID NO: 1703240 - DNA, 15 bp, Homo sapiens
catacattatagaat

SEQ ID NO: 1703241 - DNA, 15 bp, Homo sapiens
atacattatagaatc

SEQ ID NO: 1703242 - DNA, 15 bp, Homo sapiens
tacattatagaatcc

SEQ ID NO: 1703243 - DNA, 15 bp, Homo sapiens
acattatagaatcct

SEQ ID NO: 1703244 - DNA, 15 bp, Homo sapiens
cattatagaatccta

SEQ ID NO: 1703245 - DNA, 15 bp, Homo sapiens
attatagaatcctag

SEQ ID NO: 1703246 - DNA, 15 bp, Homo sapiens
ttatagaatcctagc

SEQ ID NO: 1703247 - DNA, 15 bp, Homo sapiens
tatagaatcctagcc

SEQ ID NO: 1703248 - DNA, 15 bp, Homo sapiens
atagaatcctagcca

SEQ ID NO: 1703249 - DNA, 15 bp, Homo sapiens
tagaatcctagccat

SEQ ID NO: 1703250 - DNA, 15 bp, Homo sapiens
agaatcctagccatt

SEQ ID NO: 1703251 - DNA, 15 bp, Homo sapiens
gaatcctagccattt

SEQ ID NO: 1703252 - DNA, 15 bp, Homo sapiens
aatcctagccattta

SEQ ID NO: 1703253 - DNA, 15 bp, Homo sapiens
atcctagccatttag

SEQ ID NO: 1703254 - DNA, 15 bp, Homo sapiens
tcctagccatttagt

SEQ ID NO: 1703255 - DNA, 15 bp, Homo sapiens
cctagccatttagtg

SEQ ID NO: 1703256 - DNA, 15 bp, Homo sapiens
ctagccatttagtgg

SEQ ID NO: 1703257 - DNA, 15 bp, Homo sapiens
tagccatttagtggt

SEQ ID NO: 1703258 - DNA, 15 bp, Homo sapiens
agccatttagtggtg

SEQ ID NO: 1703259 - DNA, 15 bp, Homo sapiens
gccatttagtggtga

SEQ ID NO: 1703260 - DNA, 15 bp, Homo sapiens
ccatttagtggtgag

SEQ ID NO: 1703261 - DNA, 15 bp, Homo sapiens
catttagtggtgaga

SEQ ID NO: 1703262 - DNA, 15 bp, Homo sapiens
atttagtggtgagag

SEQ ID NO: 1703263 - DNA, 15 bp, Homo sapiens
tttagtggtgagagg

SEQ ID NO: 1703264 - DNA, 15 bp, Homo sapiens
ttagtggtgagagga

SEQ ID NO: 1703265 - DNA, 15 bp, Homo sapiens
tagtggtgagaggag

SEQ ID NO: 1703266 - DNA, 15 bp, Homo sapiens
agtggtgagaggagc

SEQ ID NO: 1703267 - DNA, 15 bp, Homo sapiens
gtggtgagaggagcc

SEQ ID NO: 1703268 - DNA, 15 bp, Homo sapiens
tggtgagaggagcct

SEQ ID NO: 1703269 - DNA, 15 bp, Homo sapiens
ggtgagaggagcctt

SEQ ID NO: 1703270 - DNA, 15 bp, Homo sapiens
gtgagaggagccttg

SEQ ID NO: 1703271 - DNA, 15 bp, Homo sapiens
tgagaggagccttgg

SEQ ID NO: 1703272 - DNA, 15 bp, Homo sapiens
gagaggagccttgga

SEQ ID NO: 1703273 - DNA, 15 bp, Homo sapiens
agaggagccttggag

SEQ ID NO: 1703274 - DNA, 15 bp, Homo sapiens
gaggagccttggagt

SEQ ID NO: 1703275 - DNA, 15 bp, Homo sapiens
aggagccttggagtt

SEQ ID NO: 1703276 - DNA, 15 bp, Homo sapiens
ggagccttggagttc

SEQ ID NO: 1703277 - DNA, 15 bp, Homo sapiens
gagccttggagttct

SEQ ID NO: 1703278 - DNA, 15 bp, Homo sapiens
agccttggagttctc

SEQ ID NO: 1703279 - DNA, 15 bp, Homo sapiens
gccttggagttctca

SEQ ID NO: 1703280 - DNA, 15 bp, Homo sapiens
ccttggagttctcac

SEQ ID NO: 1703281 - DNA, 15 bp, Homo sapiens
cttggagttctcaca

SEQ ID NO: 1703282 - DNA, 15 bp, Homo sapiens
ttggagttctcacat

SEQ ID NO: 1703283 - DNA, 15 bp, Homo sapiens
tggagttctcacata

SEQ ID NO: 1703284 - DNA, 15 bp, Homo sapiens
ggagttctcacatac

SEQ ID NO: 1703285 - DNA, 15 bp, Homo sapiens
gagttctcacatact

SEQ ID NO: 1703286 - DNA, 15 bp, Homo sapiens
agttctcacatactg

SEQ ID NO: 1703287 - DNA, 15 bp, Homo sapiens
gttctcacatactga

SEQ ID NO: 1703288 - DNA, 15 bp, Homo sapiens
ttctcacatactgaa

SEQ ID NO: 1703289 - DNA, 15 bp, Homo sapiens
tctcacatactgaac

SEQ ID NO: 1703290 - DNA, 15 bp, Homo sapiens
ctcacatactgaact

SEQ ID NO: 1703291 - DNA, 15 bp, Homo sapiens
tcacatactgaactt

SEQ ID NO: 1703292 - DNA, 15 bp, Homo sapiens
cacatactgaacttt

SEQ ID NO: 1703293 - DNA, 15 bp, Homo sapiens
acatactgaactttg

SEQ ID NO: 1703294 - DNA, 15 bp, Homo sapiens
catactgaactttgg

SEQ ID NO: 1703295 - DNA, 15 bp, Homo sapiens
atactgaactttggt

SEQ ID NO: 1703296 - DNA, 15 bp, Homo sapiens
tactgaactttggtt

SEQ ID NO: 1703297 - DNA, 15 bp, Homo sapiens
actgaactttggtta

SEQ ID NO: 1703298 - DNA, 15 bp, Homo sapiens
ctgaactttggttac

SEQ ID NO: 1703299 - DNA, 15 bp, Homo sapiens
tgaactttggttacc

SEQ ID NO: 1703300 - DNA, 15 bp, Homo sapiens
gaactttggttacca

SEQ ID NO: 1703301 - DNA, 15 bp, Homo sapiens
aactttggttaccag

SEQ ID NO: 1703302 - DNA, 15 bp, Homo sapiens
actttggttaccaga

SEQ ID NO: 1703303 - DNA, 15 bp, Homo sapiens
ctttggttaccagaa

SEQ ID NO: 1703304 - DNA, 15 bp, Homo sapiens
tttggttaccagaat

SEQ ID NO: 1703305 - DNA, 15 bp, Homo sapiens
ttggttaccagaatt

SEQ ID NO: 1703306 - DNA, 15 bp, Homo sapiens
tggttaccagaatta

SEQ ID NO: 1703307 - DNA, 15 bp, Homo sapiens
ggttaccagaattac

SEQ ID NO: 1703308 - DNA, 15 bp, Homo sapiens
gttaccagaattacc

SEQ ID NO: 1703309 - DNA, 15 bp, Homo sapiens
ttaccagaattacct

SEQ ID NO: 1703310 - DNA, 15 bp, Homo sapiens
taccagaattacctg

SEQ ID NO: 1703311 - DNA, 15 bp, Homo sapiens
accagaattacctga

SEQ ID NO: 1703312 - DNA, 15 bp, Homo sapiens
ccagaattacctgat

SEQ ID NO: 1703313 - DNA, 15 bp, Homo sapiens
cagaattacctgatg

SEQ ID NO: 1703314 - DNA, 15 bp, Homo sapiens
agaattacctgatga

SEQ ID NO: 1703315 - DNA, 15 bp, Homo sapiens
gaattacctgatgag

SEQ ID NO: 1703316 - DNA, 15 bp, Homo sapiens
aattacctgatgagt

SEQ ID NO: 1703317 - DNA, 15 bp, Homo sapiens
attacctgatgagta

SEQ ID NO: 1703318 - DNA, 15 bp, Homo sapiens
ttacctgatgagtat

SEQ ID NO: 1703319 - DNA, 15 bp, Homo sapiens
tacctgatgagtatt

SEQ ID NO: 1703320 - DNA, 15 bp, Homo sapiens
acctgatgagtattt

SEQ ID NO: 1703321 - DNA, 15 bp, Homo sapiens
cctgatgagtatttt

SEQ ID NO: 1703322 - DNA, 15 bp, Homo sapiens
ctgatgagtattttt

SEQ ID NO: 1703323 - DNA, 15 bp, Homo sapiens
tgatgagtatttttt

SEQ ID NO: 1703324 - DNA, 15 bp, Homo sapiens
gatgagtatttttta

SEQ ID NO: 1703325 - DNA, 15 bp, Homo sapiens
atgagtattttttaa

SEQ ID NO: 1703326 - DNA, 15 bp, Homo sapiens
tgagtattttttaag

SEQ ID NO: 1703327 - DNA, 15 bp, Homo sapiens
gagtattttttaaga

SEQ ID NO: 1703328 - DNA, 15 bp, Homo sapiens
agtattttttaagac

SEQ ID NO: 1703329 - DNA, 15 bp, Homo sapiens
gtattttttaagaca

SEQ ID NO: 1703330 - DNA, 15 bp, Homo sapiens
tattttttaagacag

SEQ ID NO: 1703331 - DNA, 15 bp, Homo sapiens
attttttaagacaga

SEQ ID NO: 1703332 - DNA, 15 bp, Homo sapiens
tttttaagacagaga

SEQ ID NO: 1703333 - DNA, 15 bp, Homo sapiens
ttttaagacagagat

SEQ ID NO: 1703334 - DNA, 15 bp, Homo sapiens
tttaagacagagatt

SEQ ID NO: 1703335 - DNA, 15 bp, Homo sapiens
ttaagacagagattc

SEQ ID NO: 1703336 - DNA, 15 bp, Homo sapiens
taagacagagattca

SEQ ID NO: 1703337 - DNA, 15 bp, Homo sapiens
aagacagagattcac

SEQ ID NO: 1703338 - DNA, 15 bp, Homo sapiens
agacagagattcaca

SEQ ID NO: 1703339 - DNA, 15 bp, Homo sapiens
gacagagattcacag

SEQ ID NO: 1703340 - DNA, 15 bp, Homo sapiens
acagagattcacagt

SEQ ID NO: 1703341 - DNA, 15 bp, Homo sapiens
cagagattcacagtt

SEQ ID NO: 1703342 - DNA, 15 bp, Homo sapiens
agagattcacagtta

SEQ ID NO: 1703343 - DNA, 15 bp, Homo sapiens
gagattcacagttag

SEQ ID NO: 1703344 - DNA, 15 bp, Homo sapiens
agattcacagttagg

SEQ ID NO: 1703345 - DNA, 15 bp, Homo sapiens
gattcacagttaggc

SEQ ID NO: 1703346 - DNA, 15 bp, Homo sapiens
attcacagttaggcc

SEQ ID NO: 1703347 - DNA, 15 bp, Homo sapiens
ttcacagttaggcct

SEQ ID NO: 1703348 - DNA, 15 bp, Homo sapiens
tcacagttaggccta

SEQ ID NO: 1703349 - DNA, 15 bp, Homo sapiens
cacagttaggcctac

SEQ ID NO: 1703350 - DNA, 15 bp, Homo sapiens
acagttaggcctact

SEQ ID NO: 1703351 - DNA, 15 bp, Homo sapiens
cagttaggcctacta

SEQ ID NO: 1703352 - DNA, 15 bp, Homo sapiens
agttaggcctactaa

SEQ ID NO: 1703353 - DNA, 15 bp, Homo sapiens
gttaggcctactaaa

SEQ ID NO: 1703354 - DNA, 15 bp, Homo sapiens
ttaggcctactaaat

SEQ ID NO: 1703355 - DNA, 15 bp, Homo sapiens
taggcctactaaatt

SEQ ID NO: 1703356 - DNA, 15 bp, Homo sapiens
aggcctactaaattg

SEQ ID NO: 1703357 - DNA, 15 bp, Homo sapiens
ggcctactaaattgg

SEQ ID NO: 1703358 - DNA, 15 bp, Homo sapiens
gcctactaaattgga

SEQ ID NO: 1703359 - DNA, 15 bp, Homo sapiens
cctactaaattggaa

SEQ ID NO: 1703360 - DNA, 15 bp, Homo sapiens
ctactaaattggaat

SEQ ID NO: 1703361 - DNA, 15 bp, Homo sapiens
tactaaattggaatt

SEQ ID NO: 1703362 - DNA, 15 bp, Homo sapiens
actaaattggaattc

SEQ ID NO: 1703363 - DNA, 15 bp, Homo sapiens
ctaaattggaattct

SEQ ID NO: 1703364 - DNA, 15 bp, Homo sapiens
taaattggaattctc

SEQ ID NO: 1703365 - DNA, 15 bp, Homo sapiens
aaattggaattctcg

SEQ ID NO: 1703366 - DNA, 15 bp, Homo sapiens
aattggaattctcgt

SEQ ID NO: 1703367 - DNA, 15 bp, Homo sapiens
attggaattctcgtg

SEQ ID NO: 1703368 - DNA, 15 bp, Homo sapiens
ttggaattctcgtga

SEQ ID NO: 1703369 - DNA, 15 bp, Homo sapiens
tggaattctcgtgac

SEQ ID NO: 1703370 - DNA, 15 bp, Homo sapiens
ggaattctcgtgaca

SEQ ID NO: 1703371 - DNA, 15 bp, Homo sapiens
gaattctcgtgacag

SEQ ID NO: 1703372 - DNA, 15 bp, Homo sapiens
aattctcgtgacagg

SEQ ID NO: 1703373 - DNA, 15 bp, Homo sapiens
attctcgtgacagga

SEQ ID NO: 1703374 - DNA, 15 bp, Homo sapiens
ttctcgtgacaggat

SEQ ID NO: 1703375 - DNA, 15 bp, Homo sapiens
tctcgtgacaggata

SEQ ID NO: 1703376 - DNA, 15 bp, Homo sapiens
ctcgtgacaggatac

SEQ ID NO: 1703377 - DNA, 15 bp, Homo sapiens
tcgtgacaggataca

SEQ ID NO: 1703378 - DNA, 15 bp, Homo sapiens
cgtgacaggatacag

SEQ ID NO: 1703379 - DNA, 15 bp, Homo sapiens
gtgacaggatacagg

SEQ ID NO: 1703380 - DNA, 15 bp, Homo sapiens
tgacaggatacagga

SEQ ID NO: 1703381 - DNA, 15 bp, Homo sapiens
gacaggatacaggaa

SEQ ID NO: 1703382 - DNA, 15 bp, Homo sapiens
acaggatacaggaat

SEQ ID NO: 1703383 - DNA, 15 bp, Homo sapiens
caggatacaggaatc

SEQ ID NO: 1703384 - DNA, 15 bp, Homo sapiens
aggatacaggaatct

SEQ ID NO: 1703385 - DNA, 15 bp, Homo sapiens
ggatacaggaatctg

SEQ ID NO: 1703386 - DNA, 15 bp, Homo sapiens
gatacaggaatctgg

SEQ ID NO: 1703387 - DNA, 15 bp, Homo sapiens
atacaggaatctggt

SEQ ID NO: 1703388 - DNA, 15 bp, Homo sapiens
tacaggaatctggtt

SEQ ID NO: 1703389 - DNA, 15 bp, Homo sapiens
acaggaatctggttt

SEQ ID NO: 1703390 - DNA, 15 bp, Homo sapiens
caggaatctggtttt

SEQ ID NO: 1703391 - DNA, 15 bp, Homo sapiens
aggaatctggttttt

SEQ ID NO: 1703392 - DNA, 15 bp, Homo sapiens
ggaatctggtttttt

SEQ ID NO: 1703393 - DNA, 15 bp, Homo sapiens
gaatctggtttttta

SEQ ID NO: 1703394 - DNA, 15 bp, Homo sapiens
aatctggttttttaa

SEQ ID NO: 1703395 - DNA, 15 bp, Homo sapiens
atctggttttttaat

SEQ ID NO: 1703396 - DNA, 15 bp, Homo sapiens
tctggttttttaatc

SEQ ID NO: 1703397 - DNA, 15 bp, Homo sapiens
ctggttttttaatca

SEQ ID NO: 1703398 - DNA, 15 bp, Homo sapiens
tggttttttaatcat

SEQ ID NO: 1703399 - DNA, 15 bp, Homo sapiens
ggttttttaatcatc

SEQ ID NO: 1703400 - DNA, 15 bp, Homo sapiens
gttttttaatcatca

SEQ ID NO: 1703401 - DNA, 15 bp, Homo sapiens
ttttttaatcatcaa

SEQ ID NO: 1703402 - DNA, 15 bp, Homo sapiens
tttttaatcatcaac

SEQ ID NO: 1703403 - DNA, 15 bp, Homo sapiens
ttttaatcatcaacc

SEQ ID NO: 1703404 - DNA, 15 bp, Homo sapiens
tttaatcatcaaccc

SEQ ID NO: 1703405 - DNA, 15 bp, Homo sapiens
ttaatcatcaaccca

SEQ ID NO: 1703406 - DNA, 15 bp, Homo sapiens
taatcatcaacccac

SEQ ID NO: 1703407 - DNA, 15 bp, Homo sapiens
aatcatcaacccaca

SEQ ID NO: 1703408 - DNA, 15 bp, Homo sapiens
atcatcaacccacat

SEQ ID NO: 1703409 - DNA, 15 bp, Homo sapiens
tcatcaacccacatg

SEQ ID NO: 1703410 - DNA, 15 bp, Homo sapiens
catcaacccacatga

SEQ ID NO: 1703411 - DNA, 15 bp, Homo sapiens
atcaacccacatgaa

SEQ ID NO: 1703412 - DNA, 15 bp, Homo sapiens
tcaacccacatgaat

SEQ ID NO: 1703413 - DNA, 15 bp, Homo sapiens
caacccacatgaatc

SEQ ID NO: 1703414 - DNA, 15 bp, Homo sapiens
aacccacatgaatct

SEQ ID NO: 1703415 - DNA, 15 bp, Homo sapiens
acccacatgaatctg

SEQ ID NO: 1703416 - DNA, 15 bp, Homo sapiens
cccacatgaatctga

SEQ ID NO: 1703417 - DNA, 15 bp, Homo sapiens
ccacatgaatctgag

SEQ ID NO: 1703418 - DNA, 15 bp, Homo sapiens
cacatgaatctgaga

SEQ ID NO: 1703419 - DNA, 15 bp, Homo sapiens
acatgaatctgagag

SEQ ID NO: 1703420 - DNA, 15 bp, Homo sapiens
catgaatctgagagc

SEQ ID NO: 1703421 - DNA, 15 bp, Homo sapiens
atgaatctgagagca

SEQ ID NO: 1703422 - DNA, 15 bp, Homo sapiens
tgaatctgagagcat

SEQ ID NO: 1703423 - DNA, 15 bp, Homo sapiens
gaatctgagagcatc

SEQ ID NO: 1703424 - DNA, 15 bp, Homo sapiens
aatctgagagcatcc

SEQ ID NO: 1703425 - DNA, 15 bp, Homo sapiens
atctgagagcatcca

SEQ ID NO: 1703426 - DNA, 15 bp, Homo sapiens
tctgagagcatccag

SEQ ID NO: 1703427 - DNA, 15 bp, Homo sapiens
ctgagagcatccaga

SEQ ID NO: 1703428 - DNA, 15 bp, Homo sapiens
tgagagcatccagat

SEQ ID NO: 1703429 - DNA, 15 bp, Homo sapiens
gagagcatccagatc

SEQ ID NO: 1703430 - DNA, 15 bp, Homo sapiens
agagcatccagatct

SEQ ID NO: 1703431 - DNA, 15 bp, Homo sapiens
gagcatccagatctg

SEQ ID NO: 1703432 - DNA, 15 bp, Homo sapiens
agcatccagatctgg

SEQ ID NO: 1703433 - DNA, 15 bp, Homo sapiens
gcatccagatctgga

SEQ ID NO: 1703434 - DNA, 15 bp, Homo sapiens
catccagatctggat

SEQ ID NO: 1703435 - DNA, 15 bp, Homo sapiens
atccagatctggata

SEQ ID NO: 1703436 - DNA, 15 bp, Homo sapiens
tccagatctggatac

SEQ ID NO: 1703437 - DNA, 15 bp, Homo sapiens
ccagatctggatacc

SEQ ID NO: 1703438 - DNA, 15 bp, Homo sapiens
cagatctggatacca

SEQ ID NO: 1703439 - DNA, 15 bp, Homo sapiens
agatctggataccaa

SEQ ID NO: 1703440 - DNA, 15 bp, Homo sapiens
gatctggataccaac

SEQ ID NO: 1703441 - DNA, 15 bp, Homo sapiens
atctggataccaacc

SEQ ID NO: 1703442 - DNA, 15 bp, Homo sapiens
tctggataccaacca

SEQ ID NO: 1703443 - DNA, 15 bp, Homo sapiens
ctggataccaaccac

SEQ ID NO: 1703444 - DNA, 15 bp, Homo sapiens
tggataccaaccact

SEQ ID NO: 1703445 - DNA, 15 bp, Homo sapiens
ggataccaaccactc

SEQ ID NO: 1703446 - DNA, 15 bp, Homo sapiens
gataccaaccactct

SEQ ID NO: 1703447 - DNA, 15 bp, Homo sapiens
ataccaaccactctc

SEQ ID NO: 1703448 - DNA, 15 bp, Homo sapiens
taccaaccactctct

SEQ ID NO: 1703449 - DNA, 15 bp, Homo sapiens
accaaccactctcta

SEQ ID NO: 1703450 - DNA, 15 bp, Homo sapiens
ccaaccactctctag

SEQ ID NO: 1703451 - DNA, 15 bp, Homo sapiens
caaccactctctaga

SEQ ID NO: 1703452 - DNA, 15 bp, Homo sapiens
aaccactctctagaa

SEQ ID NO: 1703453 - DNA, 15 bp, Homo sapiens
accactctctagaac

SEQ ID NO: 1703454 - DNA, 15 bp, Homo sapiens
ccactctctagaaca

SEQ ID NO: 1703455 - DNA, 15 bp, Homo sapiens
cactctctagaacag

SEQ ID NO: 1703456 - DNA, 15 bp, Homo sapiens
actctctagaacaga

SEQ ID NO: 1703457 - DNA, 15 bp, Homo sapiens
ctctctagaacagag

SEQ ID NO: 1703458 - DNA, 15 bp, Homo sapiens
tctctagaacagaga

SEQ ID NO: 1703459 - DNA, 15 bp, Homo sapiens
ctctagaacagagaa

SEQ ID NO: 1703460 - DNA, 15 bp, Homo sapiens
tctagaacagagaag

SEQ ID NO: 1703461 - DNA, 15 bp, Homo sapiens
ctagaacagagaagg

SEQ ID NO: 1703462 - DNA, 15 bp, Homo sapiens
tagaacagagaaggg

SEQ ID NO: 1703463 - DNA, 15 bp, Homo sapiens
agaacagagaagggg

SEQ ID NO: 1703464 - DNA, 15 bp, Homo sapiens
gaacagagaaggggt

SEQ ID NO: 1703465 - DNA, 15 bp, Homo sapiens
aacagagaaggggtg

SEQ ID NO: 1703466 - DNA, 15 bp, Homo sapiens
acagagaaggggtga

SEQ ID NO: 1703467 - DNA, 15 bp, Homo sapiens
cagagaaggggtgaa

SEQ ID NO: 1703468 - DNA, 15 bp, Homo sapiens
agagaaggggtgaaa

SEQ ID NO: 1703469 - DNA, 15 bp, Homo sapiens
gagaaggggtgaaat

SEQ ID NO: 1703470 - DNA, 15 bp, Homo sapiens
agaaggggtgaaata

SEQ ID NO: 1703471 - DNA, 15 bp, Homo sapiens
gaaggggtgaaatat

SEQ ID NO: 1703472 - DNA, 15 bp, Homo sapiens
aaggggtgaaatatt

SEQ ID NO: 1703473 - DNA, 15 bp, Homo sapiens
aggggtgaaatattt

SEQ ID NO: 1703474 - DNA, 15 bp, Homo sapiens
ggggtgaaatatttt

SEQ ID NO: 1703475 - DNA, 15 bp, Homo sapiens
gggtgaaatattttg

SEQ ID NO: 1703476 - DNA, 15 bp, Homo sapiens
ggtgaaatattttgc

SEQ ID NO: 1703477 - DNA, 15 bp, Homo sapiens
gtgaaatattttgct

SEQ ID NO: 1703478 - DNA, 15 bp, Homo sapiens
tgaaatattttgctc

SEQ ID NO: 1703479 - DNA, 15 bp, Homo sapiens
gaaatattttgctct

SEQ ID NO: 1703480 - DNA, 15 bp, Homo sapiens
aaatattttgctcta

SEQ ID NO: 1703481 - DNA, 15 bp, Homo sapiens
aatattttgctctat

SEQ ID NO: 1703482 - DNA, 15 bp, Homo sapiens
atattttgctctatt

SEQ ID NO: 1703483 - DNA, 15 bp, Homo sapiens
tattttgctctattg

SEQ ID NO: 1703484 - DNA, 15 bp, Homo sapiens
attttgctctattgc

SEQ ID NO: 1703485 - DNA, 15 bp, Homo sapiens
ttttgctctattgca

SEQ ID NO: 1703486 - DNA, 15 bp, Homo sapiens
tttgctctattgcaa

SEQ ID NO: 1703487 - DNA, 15 bp, Homo sapiens
ttgctctattgcaag

SEQ ID NO: 1703488 - DNA, 15 bp, Homo sapiens
tgctctattgcaagc

SEQ ID NO: 1703489 - DNA, 15 bp, Homo sapiens
gctctattgcaagca

SEQ ID NO: 1703490 - DNA, 15 bp, Homo sapiens
ctctattgcaagcat

SEQ ID NO: 1703491 - DNA, 15 bp, Homo sapiens
tctattgcaagcatt

SEQ ID NO: 1703492 - DNA, 15 bp, Homo sapiens
ctattgcaagcattc

SEQ ID NO: 1703493 - DNA, 15 bp, Homo sapiens
tattgcaagcattca

SEQ ID NO: 1703494 - DNA, 15 bp, Homo sapiens
attgcaagcattcag

SEQ ID NO: 1703495 - DNA, 15 bp, Homo sapiens
ttgcaagcattcagt

SEQ ID NO: 1703496 - DNA, 15 bp, Homo sapiens
tgcaagcattcagtt

SEQ ID NO: 1703497 - DNA, 15 bp, Homo sapiens
gcaagcattcagtta

SEQ ID NO: 1703498 - DNA, 15 bp, Homo sapiens
caagcattcagttag

SEQ ID NO: 1703499 - DNA, 15 bp, Homo sapiens
aagcattcagttagt

SEQ ID NO: 1703500 - DNA, 15 bp, Homo sapiens
agcattcagttagtc

SEQ ID NO: 1703501 - DNA, 15 bp, Homo sapiens
gcattcagttagtct

SEQ ID NO: 1703502 - DNA, 15 bp, Homo sapiens
cattcagttagtctc

SEQ ID NO: 1703503 - DNA, 15 bp, Homo sapiens
attcagttagtctca

SEQ ID NO: 1703504 - DNA, 15 bp, Homo sapiens
ttcagttagtctcac

SEQ ID NO: 1703505 - DNA, 15 bp, Homo sapiens
tcagttagtctcaca

SEQ ID NO: 1703506 - DNA, 15 bp, Homo sapiens
cagttagtctcacac

SEQ ID NO: 1703507 - DNA, 15 bp, Homo sapiens
agttagtctcacaca

SEQ ID NO: 1703508 - DNA, 15 bp, Homo sapiens
gttagtctcacacaa

SEQ ID NO: 1703509 - DNA, 15 bp, Homo sapiens
ttagtctcacacaat

SEQ ID NO: 1703510 - DNA, 15 bp, Homo sapiens
tagtctcacacaatt

SEQ ID NO: 1703511 - DNA, 15 bp, Homo sapiens
agtctcacacaattt

SEQ ID NO: 1703512 - DNA, 15 bp, Homo sapiens
gtctcacacaatttc

SEQ ID NO: 1703513 - DNA, 15 bp, Homo sapiens
tctcacacaatttca

SEQ ID NO: 1703514 - DNA, 15 bp, Homo sapiens
ctcacacaatttcat

SEQ ID NO: 1703515 - DNA, 15 bp, Homo sapiens
tcacacaatttcatg

SEQ ID NO: 1703516 - DNA, 15 bp, Homo sapiens
cacacaatttcatga

SEQ ID NO: 1703517 - DNA, 15 bp, Homo sapiens
acacaatttcatgat

SEQ ID NO: 1703518 - DNA, 15 bp, Homo sapiens
cacaatttcatgatg

SEQ ID NO: 1703519 - DNA, 15 bp, Homo sapiens
acaatttcatgatgc

SEQ ID NO: 1703520 - DNA, 15 bp, Homo sapiens
caatttcatgatgct

SEQ ID NO: 1703521 - DNA, 15 bp, Homo sapiens
aatttcatgatgctg

SEQ ID NO: 1703522 - DNA, 15 bp, Homo sapiens
atttcatgatgctgg

SEQ ID NO: 1703523 - DNA, 15 bp, Homo sapiens
tttcatgatgctggc

SEQ ID NO: 1703524 - DNA, 15 bp, Homo sapiens
ttcatgatgctggca

SEQ ID NO: 1703525 - DNA, 15 bp, Homo sapiens
tcatgatgctggcag

SEQ ID NO: 1703526 - DNA, 15 bp, Homo sapiens
catgatgctggcaga

SEQ ID NO: 1703527 - DNA, 15 bp, Homo sapiens
atgatgctggcagaa

SEQ ID NO: 1703528 - DNA, 15 bp, Homo sapiens
tgatgctggcagaat

SEQ ID NO: 1703529 - DNA, 15 bp, Homo sapiens
gatgctggcagaata

SEQ ID NO: 1703530 - DNA, 15 bp, Homo sapiens
atgctggcagaatac

SEQ ID NO: 1703531 - DNA, 15 bp, Homo sapiens
tgctggcagaataca

SEQ ID NO: 1703532 - DNA, 15 bp, Homo sapiens
gctggcagaatacat

SEQ ID NO: 1703533 - DNA, 15 bp, Homo sapiens
ctggcagaatacatg

SEQ ID NO: 1703534 - DNA, 15 bp, Homo sapiens
tggcagaatacatga

SEQ ID NO: 1703535 - DNA, 15 bp, Homo sapiens
ggcagaatacatgag

SEQ ID NO: 1703536 - DNA, 15 bp, Homo sapiens
gcagaatacatgagc

SEQ ID NO: 1703537 - DNA, 15 bp, Homo sapiens
cagaatacatgagca

SEQ ID NO: 1703538 - DNA, 15 bp, Homo sapiens
agaatacatgagcat

SEQ ID NO: 1703539 - DNA, 15 bp, Homo sapiens
gaatacatgagcatc

SEQ ID NO: 1703540 - DNA, 15 bp, Homo sapiens
aatacatgagcatcc

SEQ ID NO: 1703541 - DNA, 15 bp, Homo sapiens
atacatgagcatcct

SEQ ID NO: 1703542 - DNA, 15 bp, Homo sapiens
tacatgagcatcctg

SEQ ID NO: 1703543 - DNA, 15 bp, Homo sapiens
acatgagcatcctga

SEQ ID NO: 1703544 - DNA, 15 bp, Homo sapiens
catgagcatcctgaa

SEQ ID NO: 1703545 - DNA, 15 bp, Homo sapiens
atgagcatcctgaat

SEQ ID NO: 1703546 - DNA, 15 bp, Homo sapiens
tgagcatcctgaatc

SEQ ID NO: 1703547 - DNA, 15 bp, Homo sapiens
gagcatcctgaatca

SEQ ID NO: 1703548 - DNA, 15 bp, Homo sapiens
agcatcctgaatcac

SEQ ID NO: 1703549 - DNA, 15 bp, Homo sapiens
gcatcctgaatcaca

SEQ ID NO: 1703550 - DNA, 15 bp, Homo sapiens
catcctgaatcacag

SEQ ID NO: 1703551 - DNA, 15 bp, Homo sapiens
atcctgaatcacagt

SEQ ID NO: 1703552 - DNA, 15 bp, Homo sapiens
tcctgaatcacagtg

SEQ ID NO: 1703553 - DNA, 15 bp, Homo sapiens
cctgaatcacagtgt

SEQ ID NO: 1703554 - DNA, 15 bp, Homo sapiens
ctgaatcacagtgtt

SEQ ID NO: 1703555 - DNA, 15 bp, Homo sapiens
tgaatcacagtgttc

SEQ ID NO: 1703556 - DNA, 15 bp, Homo sapiens
gaatcacagtgttca

SEQ ID NO: 1703557 - DNA, 15 bp, Homo sapiens
aatcacagtgttcat

SEQ ID NO: 1703558 - DNA, 15 bp, Homo sapiens
atcacagtgttcata

SEQ ID NO: 1703559 - DNA, 15 bp, Homo sapiens
tcacagtgttcatat

SEQ ID NO: 1703560 - DNA, 15 bp, Homo sapiens
cacagtgttcatatt

SEQ ID NO: 1703561 - DNA, 15 bp, Homo sapiens
acagtgttcatattc

SEQ ID NO: 1703562 - DNA, 15 bp, Homo sapiens
cagtgttcatattcg

SEQ ID NO: 1703563 - DNA, 15 bp, Homo sapiens
agtgttcatattcgg

SEQ ID NO: 1703564 - DNA, 15 bp, Homo sapiens
gtgttcatattcggg

SEQ ID NO: 1703565 - DNA, 15 bp, Homo sapiens
tgttcatattcgggt

SEQ ID NO: 1703566 - DNA, 15 bp, Homo sapiens
gttcatattcgggtt

SEQ ID NO: 1703567 - DNA, 15 bp, Homo sapiens
ttcatattcgggttt

SEQ ID NO: 1703568 - DNA, 15 bp, Homo sapiens
tcatattcgggtttt

SEQ ID NO: 1703569 - DNA, 15 bp, Homo sapiens
catattcgggttttt

SEQ ID NO: 1703570 - DNA, 15 bp, Homo sapiens
atattcgggtttttt

SEQ ID NO: 1703571 - DNA, 15 bp, Homo sapiens
tattcgggttttttt

SEQ ID NO: 1703572 - DNA, 15 bp, Homo sapiens
attcgggtttttttt

SEQ ID NO: 1703573 - DNA, 15 bp, Homo sapiens
ttcgggttttttttt

SEQ ID NO: 1703574 - DNA, 15 bp, Homo sapiens
tcgggtttttttttt

SEQ ID NO: 1703575 - DNA, 15 bp, Homo sapiens
cgggttttttttttt

SEQ ID NO: 1703576 - DNA, 15 bp, Homo sapiens
tttttttttggagat

SEQ ID NO: 1703577 - DNA, 15 bp, Homo sapiens
ttttttttggagatg

SEQ ID NO: 1703578 - DNA, 15 bp, Homo sapiens
tttttttggagatgc

SEQ ID NO: 1703579 - DNA, 15 bp, Homo sapiens
ttttttggagatgca

SEQ ID NO: 1703580 - DNA, 15 bp, Homo sapiens
tttttggagatgcag

SEQ ID NO: 1703581 - DNA, 15 bp, Homo sapiens
ttttggagatgcagt

SEQ ID NO: 1703582 - DNA, 15 bp, Homo sapiens
tttggagatgcagtc

SEQ ID NO: 1703583 - DNA, 15 bp, Homo sapiens
ttggagatgcagtct

SEQ ID NO: 1703584 - DNA, 15 bp, Homo sapiens
tggagatgcagtctt

SEQ ID NO: 1703585 - DNA, 15 bp, Homo sapiens
ggagatgcagtcttg

SEQ ID NO: 1703586 - DNA, 15 bp, Homo sapiens
gagatgcagtcttgc

SEQ ID NO: 1703587 - DNA, 15 bp, Homo sapiens
agatgcagtcttgct

SEQ ID NO: 1703588 - DNA, 15 bp, Homo sapiens
gatgcagtcttgctc

SEQ ID NO: 1703589 - DNA, 15 bp, Homo sapiens
atgcagtcttgctct

SEQ ID NO: 1703590 - DNA, 15 bp, Homo sapiens
tgcagtcttgctctg

SEQ ID NO: 1703591 - DNA, 15 bp, Homo sapiens
gcagtcttgctctgt

SEQ ID NO: 1703592 - DNA, 15 bp, Homo sapiens
cagtcttgctctgtc

SEQ ID NO: 1703593 - DNA, 15 bp, Homo sapiens
tcttgctctgtcaca

SEQ ID NO: 1703594 - DNA, 15 bp, Homo sapiens
cttgctctgtcacac

SEQ ID NO: 1703595 - DNA, 15 bp, Homo sapiens
ttgctctgtcacacg

SEQ ID NO: 1703596 - DNA, 15 bp, Homo sapiens
tgctctgtcacacga

SEQ ID NO: 1703597 - DNA, 15 bp, Homo sapiens
gctctgtcacacgag

SEQ ID NO: 1703598 - DNA, 15 bp, Homo sapiens
ctctgtcacacgagt

SEQ ID NO: 1703599 - DNA, 15 bp, Homo sapiens
tctgtcacacgagta

SEQ ID NO: 1703600 - DNA, 15 bp, Homo sapiens
ctgtcacacgagtac

SEQ ID NO: 1703601 - DNA, 15 bp, Homo sapiens
tgtcacacgagtacc

SEQ ID NO: 1703602 - DNA, 15 bp, Homo sapiens
gtcacacgagtaccc

SEQ ID NO: 1703603 - DNA, 15 bp, Homo sapiens
tcacacgagtaccct

SEQ ID NO: 1703604 - DNA, 15 bp, Homo sapiens
cacacgagtaccctg

SEQ ID NO: 1703605 - DNA, 15 bp, Homo sapiens
acacgagtaccctga

SEQ ID NO: 1703606 - DNA, 15 bp, Homo sapiens
cacgagtaccctgaa

SEQ ID NO: 1703607 - DNA, 15 bp, Homo sapiens
acgagtaccctgaac

SEQ ID NO: 1703608 - DNA, 15 bp, Homo sapiens
cgagtaccctgaacc

SEQ ID NO: 1703609 - DNA, 15 bp, Homo sapiens
gagtaccctgaacca

SEQ ID NO: 1703610 - DNA, 15 bp, Homo sapiens
agtaccctgaaccag

SEQ ID NO: 1703611 - DNA, 15 bp, Homo sapiens
gtaccctgaaccaga

SEQ ID NO: 1703612 - DNA, 15 bp, Homo sapiens
taccctgaaccagag

SEQ ID NO: 1703613 - DNA, 15 bp, Homo sapiens
accctgaaccagaga

SEQ ID NO: 1703614 - DNA, 15 bp, Homo sapiens
ccctgaaccagagac

SEQ ID NO: 1703615 - DNA, 15 bp, Homo sapiens
cctgaaccagagaca

SEQ ID NO: 1703616 - DNA, 15 bp, Homo sapiens
ctgaaccagagacaa

SEQ ID NO: 1703617 - DNA, 15 bp, Homo sapiens
tgaaccagagacaaa

SEQ ID NO: 1703618 - DNA, 15 bp, Homo sapiens
gaaccagagacaaag

SEQ ID NO: 1703619 - DNA, 15 bp, Homo sapiens
aaccagagacaaagg

SEQ ID NO: 1703620 - DNA, 15 bp, Homo sapiens
accagagacaaagga

SEQ ID NO: 1703621 - DNA, 15 bp, Homo sapiens
ccagagacaaaggac

SEQ ID NO: 1703622 - DNA, 15 bp, Homo sapiens
cagagacaaaggact

SEQ ID NO: 1703623 - DNA, 15 bp, Homo sapiens
agagacaaaggactt

SEQ ID NO: 1703624 - DNA, 15 bp, Homo sapiens
gagacaaaggacttt

SEQ ID NO: 1703625 - DNA, 15 bp, Homo sapiens
agacaaaggacttta

SEQ ID NO: 1703626 - DNA, 15 bp, Homo sapiens
gacaaaggactttat

SEQ ID NO: 1703627 - DNA, 15 bp, Homo sapiens
acaaaggactttatt

SEQ ID NO: 1703628 - DNA, 15 bp, Homo sapiens
caaaggactttatta

SEQ ID NO: 1703629 - DNA, 15 bp, Homo sapiens
aaaggactttattat

SEQ ID NO: 1703630 - DNA, 15 bp, Homo sapiens
aaggactttattatt

SEQ ID NO: 1703631 - DNA, 15 bp, Homo sapiens
aggactttattattc

SEQ ID NO: 1703632 - DNA, 15 bp, Homo sapiens
ggactttattattca

SEQ ID NO: 1703633 - DNA, 15 bp, Homo sapiens
gactttattattcat

SEQ ID NO: 1703634 - DNA, 15 bp, Homo sapiens
actttattattcata

SEQ ID NO: 1703635 - DNA, 15 bp, Homo sapiens
ctttattattcatag

SEQ ID NO: 1703636 - DNA, 15 bp, Homo sapiens
tttattattcatagc

SEQ ID NO: 1703637 - DNA, 15 bp, Homo sapiens
ttattattcatagca

SEQ ID NO: 1703638 - DNA, 15 bp, Homo sapiens
tattattcatagcaa

SEQ ID NO: 1703639 - DNA, 15 bp, Homo sapiens
attattcatagcaat

SEQ ID NO: 1703640 - DNA, 15 bp, Homo sapiens
ttattcatagcaata

SEQ ID NO: 1703641 - DNA, 15 bp, Homo sapiens
tattcatagcaatag

SEQ ID NO: 1703642 - DNA, 15 bp, Homo sapiens
attcatagcaatagc

SEQ ID NO: 1703643 - DNA, 15 bp, Homo sapiens
ttcatagcaatagca

SEQ ID NO: 1703644 - DNA, 15 bp, Homo sapiens
tcatagcaatagcag

SEQ ID NO: 1703645 - DNA, 15 bp, Homo sapiens
catagcaatagcagt

SEQ ID NO: 1703646 - DNA, 15 bp, Homo sapiens
atagcaatagcagta

SEQ ID NO: 1703647 - DNA, 15 bp, Homo sapiens
tagcaatagcagtag

SEQ ID NO: 1703648 - DNA, 15 bp, Homo sapiens
agcaatagcagtagc

SEQ ID NO: 1703649 - DNA, 15 bp, Homo sapiens
gcaatagcagtagcc

SEQ ID NO: 1703650 - DNA, 15 bp, Homo sapiens
caatagcagtagcca

SEQ ID NO: 1703651 - DNA, 15 bp, Homo sapiens
aatagcagtagccag

SEQ ID NO: 1703652 - DNA, 15 bp, Homo sapiens
atagcagtagccagt

SEQ ID NO: 1703653 - DNA, 15 bp, Homo sapiens
tagcagtagccagtg

SEQ ID NO: 1703654 - DNA, 15 bp, Homo sapiens
agcagtagccagtgt

SEQ ID NO: 1703655 - DNA, 15 bp, Homo sapiens
gcagtagccagtgtt

SEQ ID NO: 1703656 - DNA, 15 bp, Homo sapiens
cagtagccagtgttc

SEQ ID NO: 1703657 - DNA, 15 bp, Homo sapiens
agtagccagtgttca

SEQ ID NO: 1703658 - DNA, 15 bp, Homo sapiens
gtagccagtgttcag

SEQ ID NO: 1703659 - DNA, 15 bp, Homo sapiens
tagccagtgttcagc

SEQ ID NO: 1703660 - DNA, 15 bp, Homo sapiens
agccagtgttcagca

SEQ ID NO: 1703661 - DNA, 15 bp, Homo sapiens
gccagtgttcagcat

SEQ ID NO: 1703662 - DNA, 15 bp, Homo sapiens
ccagtgttcagcatt

SEQ ID NO: 1703663 - DNA, 15 bp, Homo sapiens
cagtgttcagcattt

SEQ ID NO: 1703664 - DNA, 15 bp, Homo sapiens
agtgttcagcatttg

SEQ ID NO: 1703665 - DNA, 15 bp, Homo sapiens
gtgttcagcatttgc

SEQ ID NO: 1703666 - DNA, 15 bp, Homo sapiens
tgttcagcatttgca

SEQ ID NO: 1703667 - DNA, 15 bp, Homo sapiens
gttcagcatttgcac

SEQ ID NO: 1703668 - DNA, 15 bp, Homo sapiens
ttcagcatttgcact

SEQ ID NO: 1703669 - DNA, 15 bp, Homo sapiens
tcagcatttgcactg

SEQ ID NO: 1703670 - DNA, 15 bp, Homo sapiens
cagcatttgcactgg

SEQ ID NO: 1703671 - DNA, 15 bp, Homo sapiens
agcatttgcactggc

SEQ ID NO: 1703672 - DNA, 15 bp, Homo sapiens
gcatttgcactggct

SEQ ID NO: 1703673 - DNA, 15 bp, Homo sapiens
catttgcactggctc

SEQ ID NO: 1703674 - DNA, 15 bp, Homo sapiens
atttgcactggctcc

SEQ ID NO: 1703675 - DNA, 15 bp, Homo sapiens
tttgcactggctccc

SEQ ID NO: 1703676 - DNA, 15 bp, Homo sapiens
ttgcactggctcccc

SEQ ID NO: 1703677 - DNA, 15 bp, Homo sapiens
tgcactggctcccca

SEQ ID NO: 1703678 - DNA, 15 bp, Homo sapiens
gcactggctccccaa

SEQ ID NO: 1703679 - DNA, 15 bp, Homo sapiens
cactggctccccaac

SEQ ID NO: 1703680 - DNA, 15 bp, Homo sapiens
actggctccccaacc

SEQ ID NO: 1703681 - DNA, 15 bp, Homo sapiens
ctggctccccaaccc

SEQ ID NO: 1703682 - DNA, 15 bp, Homo sapiens
tggctccccaaccca

SEQ ID NO: 1703683 - DNA, 15 bp, Homo sapiens
ggctccccaacccaa

SEQ ID NO: 1703684 - DNA, 15 bp, Homo sapiens
gctccccaacccaac

SEQ ID NO: 1703685 - DNA, 15 bp, Homo sapiens
ctccccaacccaacc

SEQ ID NO: 1703686 - DNA, 15 bp, Homo sapiens
tccccaacccaaccc

SEQ ID NO: 1703687 - DNA, 15 bp, Homo sapiens
ccccaacccaacccc

SEQ ID NO: 1703688 - DNA, 15 bp, Homo sapiens
cccaacccaaccccc

SEQ ID NO: 1703689 - DNA, 15 bp, Homo sapiens
ccaacccaaccccca

SEQ ID NO: 1703690 - DNA, 15 bp, Homo sapiens
caacccaacccccag

SEQ ID NO: 1703691 - DNA, 15 bp, Homo sapiens
aacccaacccccagt

SEQ ID NO: 1703692 - DNA, 15 bp, Homo sapiens
acccaacccccagtt

SEQ ID NO: 1703693 - DNA, 15 bp, Homo sapiens
cccaacccccagttc

SEQ ID NO: 1703694 - DNA, 15 bp, Homo sapiens
ccaacccccagttcc

SEQ ID NO: 1703695 - DNA, 15 bp, Homo sapiens
caacccccagttccc

SEQ ID NO: 1703696 - DNA, 15 bp, Homo sapiens
aacccccagttccca

SEQ ID NO: 1703697 - DNA, 15 bp, Homo sapiens
acccccagttcccac

SEQ ID NO: 1703698 - DNA, 15 bp, Homo sapiens
cccccagttcccaca

SEQ ID NO: 1703699 - DNA, 15 bp, Homo sapiens
ccccagttcccacaa

SEQ ID NO: 1703700 - DNA, 15 bp, Homo sapiens
cccagttcccacaag

SEQ ID NO: 1703701 - DNA, 15 bp, Homo sapiens
ccagttcccacaagg

SEQ ID NO: 1703702 - DNA, 15 bp, Homo sapiens
cagttcccacaaggc

SEQ ID NO: 1703703 - DNA, 15 bp, Homo sapiens
agttcccacaaggca

SEQ ID NO: 1703704 - DNA, 15 bp, Homo sapiens
gttcccacaaggcaa

SEQ ID NO: 1703705 - DNA, 15 bp, Homo sapiens
ttcccacaaggcaat

SEQ ID NO: 1703706 - DNA, 15 bp, Homo sapiens
tcccacaaggcaatg

SEQ ID NO: 1703707 - DNA, 15 bp, Homo sapiens
cccacaaggcaatgc

SEQ ID NO: 1703708 - DNA, 15 bp, Homo sapiens
ccacaaggcaatgca

SEQ ID NO: 1703709 - DNA, 15 bp, Homo sapiens
cacaaggcaatgcaa

SEQ ID NO: 1703710 - DNA, 15 bp, Homo sapiens
acaaggcaatgcaaa

SEQ ID NO: 1703711 - DNA, 15 bp, Homo sapiens
caaggcaatgcaaag

SEQ ID NO: 1703712 - DNA, 15 bp, Homo sapiens
aaggcaatgcaaaga

SEQ ID NO: 1703713 - DNA, 15 bp, Homo sapiens
aggcaatgcaaagag

SEQ ID NO: 1703714 - DNA, 15 bp, Homo sapiens
ggcaatgcaaagagg

SEQ ID NO: 1703715 - DNA, 15 bp, Homo sapiens
gcaatgcaaagaggg

SEQ ID NO: 1703716 - DNA, 15 bp, Homo sapiens
caatgcaaagagggc

SEQ ID NO: 1703717 - DNA, 15 bp, Homo sapiens
aatgcaaagagggcc

SEQ ID NO: 1703718 - DNA, 15 bp, Homo sapiens
atgcaaagagggcca

SEQ ID NO: 1703719 - DNA, 15 bp, Homo sapiens
tgcaaagagggccag

SEQ ID NO: 1703720 - DNA, 15 bp, Homo sapiens
gcaaagagggccaga

SEQ ID NO: 1703721 - DNA, 15 bp, Homo sapiens
caaagagggccagat

SEQ ID NO: 1703722 - DNA, 15 bp, Homo sapiens
aaagagggccagatg

SEQ ID NO: 1703723 - DNA, 15 bp, Homo sapiens
aagagggccagatga

SEQ ID NO: 1703724 - DNA, 15 bp, Homo sapiens
agagggccagatgat

SEQ ID NO: 1703725 - DNA, 15 bp, Homo sapiens
gagggccagatgata

SEQ ID NO: 1703726 - DNA, 15 bp, Homo sapiens
agggccagatgatac

SEQ ID NO: 1703727 - DNA, 15 bp, Homo sapiens
gggccagatgatacc

SEQ ID NO: 1703728 - DNA, 15 bp, Homo sapiens
ggccagatgatacca

SEQ ID NO: 1703729 - DNA, 15 bp, Homo sapiens
gccagatgataccaa

SEQ ID NO: 1703730 - DNA, 15 bp, Homo sapiens
ccagatgataccaac

SEQ ID NO: 1703731 - DNA, 15 bp, Homo sapiens
cagatgataccaaca

SEQ ID NO: 1703732 - DNA, 15 bp, Homo sapiens
agatgataccaacaa

SEQ ID NO: 1703733 - DNA, 15 bp, Homo sapiens
gatgataccaacaaa

SEQ ID NO: 1703734 - DNA, 15 bp, Homo sapiens
atgataccaacaaat

SEQ ID NO: 1703735 - DNA, 15 bp, Homo sapiens
tgataccaacaaatg

SEQ ID NO: 1703736 - DNA, 15 bp, Homo sapiens
gataccaacaaatga

SEQ ID NO: 1703737 - DNA, 15 bp, Homo sapiens
ataccaacaaatgaa

SEQ ID NO: 1703738 - DNA, 15 bp, Homo sapiens
taccaacaaatgaag

SEQ ID NO: 1703739 - DNA, 15 bp, Homo sapiens
accaacaaatgaagt

SEQ ID NO: 1703740 - DNA, 15 bp, Homo sapiens
ccaacaaatgaagtg

SEQ ID NO: 1703741 - DNA, 15 bp, Homo sapiens
caacaaatgaagtgg

SEQ ID NO: 1703742 - DNA, 15 bp, Homo sapiens
aacaaatgaagtggg

SEQ ID NO: 1703743 - DNA, 15 bp, Homo sapiens
acaaatgaagtgggt

SEQ ID NO: 1703744 - DNA, 15 bp, Homo sapiens
caaatgaagtgggtg

SEQ ID NO: 1703745 - DNA, 15 bp, Homo sapiens
aaatgaagtgggtgt

SEQ ID NO: 1703746 - DNA, 15 bp, Homo sapiens
aatgaagtgggtgtt

SEQ ID NO: 1703747 - DNA, 15 bp, Homo sapiens
atgaagtgggtgttt

SEQ ID NO: 1703748 - DNA, 15 bp, Homo sapiens
tgaagtgggtgtttt

SEQ ID NO: 1703749 - DNA, 15 bp, Homo sapiens
gaagtgggtgtttta

SEQ ID NO: 1703750 - DNA, 15 bp, Homo sapiens
aagtgggtgttttaa

SEQ ID NO: 1703751 - DNA, 15 bp, Homo sapiens
agtgggtgttttaaa

SEQ ID NO: 1703752 - DNA, 15 bp, Homo sapiens
gtgggtgttttaaac

SEQ ID NO: 1703753 - DNA, 15 bp, Homo sapiens
tgggtgttttaaacg

SEQ ID NO: 1703754 - DNA, 15 bp, Homo sapiens
gggtgttttaaacga

SEQ ID NO: 1703755 - DNA, 15 bp, Homo sapiens
ggtgttttaaacgag

SEQ ID NO: 1703756 - DNA, 15 bp, Homo sapiens
gtgttttaaacgaga

SEQ ID NO: 1703757 - DNA, 15 bp, Homo sapiens
tgttttaaacgagag

SEQ ID NO: 1703758 - DNA, 15 bp, Homo sapiens
gttttaaacgagagg

SEQ ID NO: 1703759 - DNA, 15 bp, Homo sapiens
ttttaaacgagagga

SEQ ID NO: 1703760 - DNA, 15 bp, Homo sapiens
tttaaacgagaggaa

SEQ ID NO: 1703761 - DNA, 15 bp, Homo sapiens
ttaaacgagaggaaa

SEQ ID NO: 1703762 - DNA, 15 bp, Homo sapiens
taaacgagaggaaac

SEQ ID NO: 1703763 - DNA, 15 bp, Homo sapiens
aaacgagaggaaacc

SEQ ID NO: 1703764 - DNA, 15 bp, Homo sapiens
aacgagaggaaacct

SEQ ID NO: 1703765 - DNA, 15 bp, Homo sapiens
acgagaggaaacctg

SEQ ID NO: 1703766 - DNA, 15 bp, Homo sapiens
cgagaggaaacctgg

SEQ ID NO: 1703767 - DNA, 15 bp, Homo sapiens
gagaggaaacctggg

SEQ ID NO: 1703768 - DNA, 15 bp, Homo sapiens
agaggaaacctgggc

SEQ ID NO: 1703769 - DNA, 15 bp, Homo sapiens
gaggaaacctgggct

SEQ ID NO: 1703770 - DNA, 15 bp, Homo sapiens
aggaaacctgggctt

SEQ ID NO: 1703771 - DNA, 15 bp, Homo sapiens
ggaaacctgggcttg

SEQ ID NO: 1703772 - DNA, 15 bp, Homo sapiens
gaaacctgggcttga

SEQ ID NO: 1703773 - DNA, 15 bp, Homo sapiens
aaacctgggcttgag

SEQ ID NO: 1703774 - DNA, 15 bp, Homo sapiens
aacctgggcttgagg

SEQ ID NO: 1703775 - DNA, 15 bp, Homo sapiens
acctgggcttgagga

SEQ ID NO: 1703776 - DNA, 15 bp, Homo sapiens
cctgggcttgaggag

SEQ ID NO: 1703777 - DNA, 15 bp, Homo sapiens
ctgggcttgaggagc

SEQ ID NO: 1703778 - DNA, 15 bp, Homo sapiens
tgggcttgaggagcc

SEQ ID NO: 1703779 - DNA, 15 bp, Homo sapiens
gggcttgaggagcct

SEQ ID NO: 1703780 - DNA, 15 bp, Homo sapiens
ggcttgaggagcctg

SEQ ID NO: 1703781 - DNA, 15 bp, Homo sapiens
gcttgaggagcctga

SEQ ID NO: 1703782 - DNA, 15 bp, Homo sapiens
cttgaggagcctgac

SEQ ID NO: 1703783 - DNA, 15 bp, Homo sapiens
ttgaggagcctgact

SEQ ID NO: 1703784 - DNA, 15 bp, Homo sapiens
tgaggagcctgactc

SEQ ID NO: 1703785 - DNA, 15 bp, Homo sapiens
gaggagcctgactct

SEQ ID NO: 1703786 - DNA, 15 bp, Homo sapiens
aggagcctgactctt

SEQ ID NO: 1703787 - DNA, 15 bp, Homo sapiens
ggagcctgactcttt

SEQ ID NO: 1703788 - DNA, 15 bp, Homo sapiens
gagcctgactctttc

SEQ ID NO: 1703789 - DNA, 15 bp, Homo sapiens
agcctgactctttca

SEQ ID NO: 1703790 - DNA, 15 bp, Homo sapiens
gcctgactctttcat

SEQ ID NO: 1703791 - DNA, 15 bp, Homo sapiens
cctgactctttcata

SEQ ID NO: 1703792 - DNA, 15 bp, Homo sapiens
ctgactctttcataa

SEQ ID NO: 1703793 - DNA, 15 bp, Homo sapiens
tgactctttcataat

SEQ ID NO: 1703794 - DNA, 15 bp, Homo sapiens
gactctttcataatg

SEQ ID NO: 1703795 - DNA, 15 bp, Homo sapiens
actctttcataatgg

SEQ ID NO: 1703796 - DNA, 15 bp, Homo sapiens
ctctttcataatggg

SEQ ID NO: 1703797 - DNA, 15 bp, Homo sapiens
tctttcataatgggc

SEQ ID NO: 1703798 - DNA, 15 bp, Homo sapiens
ctttcataatgggca

SEQ ID NO: 1703799 - DNA, 15 bp, Homo sapiens
tttcataatgggcag

SEQ ID NO: 1703800 - DNA, 15 bp, Homo sapiens
ttcataatgggcaga

SEQ ID NO: 1703801 - DNA, 15 bp, Homo sapiens
tcataatgggcagat

SEQ ID NO: 1703802 - DNA, 15 bp, Homo sapiens
cataatgggcagatg

SEQ ID NO: 1703803 - DNA, 15 bp, Homo sapiens
ataatgggcagatgg

SEQ ID NO: 1703804 - DNA, 15 bp, Homo sapiens
taatgggcagatggg

SEQ ID NO: 1703805 - DNA, 15 bp, Homo sapiens
aatgggcagatgggg

SEQ ID NO: 1703806 - DNA, 15 bp, Homo sapiens
atgggcagatggggg

SEQ ID NO: 1703807 - DNA, 15 bp, Homo sapiens
tgggcagatgggggc

SEQ ID NO: 1703808 - DNA, 15 bp, Homo sapiens
gggcagatgggggca

SEQ ID NO: 1703809 - DNA, 15 bp, Homo sapiens
ggcagatgggggcag

SEQ ID NO: 1703810 - DNA, 15 bp, Homo sapiens
gcagatgggggcagt

SEQ ID NO: 1703811 - DNA, 15 bp, Homo sapiens
cagatgggggcagta

SEQ ID NO: 1703812 - DNA, 15 bp, Homo sapiens
agatgggggcagtaa

SEQ ID NO: 1703813 - DNA, 15 bp, Homo sapiens
gatgggggcagtaag

SEQ ID NO: 1703814 - DNA, 15 bp, Homo sapiens
atgggggcagtaagg

SEQ ID NO: 1703815 - DNA, 15 bp, Homo sapiens
tgggggcagtaaggt

SEQ ID NO: 1703816 - DNA, 15 bp, Homo sapiens
gggggcagtaaggtt

SEQ ID NO: 1703817 - DNA, 15 bp, Homo sapiens
ggggcagtaaggttt

SEQ ID NO: 1703818 - DNA, 15 bp, Homo sapiens
gggcagtaaggtttg

SEQ ID NO: 1703819 - DNA, 15 bp, Homo sapiens
ggcagtaaggtttgc

SEQ ID NO: 1703820 - DNA, 15 bp, Homo sapiens
gcagtaaggtttgca

SEQ ID NO: 1703821 - DNA, 15 bp, Homo sapiens
cagtaaggtttgcac

SEQ ID NO: 1703822 - DNA, 15 bp, Homo sapiens
agtaaggtttgcact

SEQ ID NO: 1703823 - DNA, 15 bp, Homo sapiens
gtaaggtttgcactt

SEQ ID NO: 1703824 - DNA, 15 bp, Homo sapiens
taaggtttgcacttc

SEQ ID NO: 1703825 - DNA, 15 bp, Homo sapiens
aaggtttgcacttca

SEQ ID NO: 1703826 - DNA, 15 bp, Homo sapiens
aggtttgcacttcac

SEQ ID NO: 1703827 - DNA, 15 bp, Homo sapiens
ggtttgcacttcact

SEQ ID NO: 1703828 - DNA, 15 bp, Homo sapiens
gtttgcacttcactt

SEQ ID NO: 1703829 - DNA, 15 bp, Homo sapiens
tttgcacttcacttg

SEQ ID NO: 1703830 - DNA, 15 bp, Homo sapiens
ttgcacttcacttgg

SEQ ID NO: 1703831 - DNA, 15 bp, Homo sapiens
tgcacttcacttggg

SEQ ID NO: 1703832 - DNA, 15 bp, Homo sapiens
gcacttcacttggga

SEQ ID NO: 1703833 - DNA, 15 bp, Homo sapiens
cacttcacttgggat

SEQ ID NO: 1703834 - DNA, 15 bp, Homo sapiens
acttcacttgggatg

SEQ ID NO: 1703835 - DNA, 15 bp, Homo sapiens
cttcacttgggatga

SEQ ID NO: 1703836 - DNA, 15 bp, Homo sapiens
ttcacttgggatgaa

SEQ ID NO: 1703837 - DNA, 15 bp, Homo sapiens
tcacttgggatgaag

SEQ ID NO: 1703838 - DNA, 15 bp, Homo sapiens
cacttgggatgaaga

SEQ ID NO: 1703839 - DNA, 15 bp, Homo sapiens
acttgggatgaagac

SEQ ID NO: 1703840 - DNA, 15 bp, Homo sapiens
cttgggatgaagaca

SEQ ID NO: 1703841 - DNA, 15 bp, Homo sapiens
ttgggatgaagacat

SEQ ID NO: 1703842 - DNA, 15 bp, Homo sapiens
tgggatgaagacatc

SEQ ID NO: 1703843 - DNA, 15 bp, Homo sapiens
gggatgaagacatct

SEQ ID NO: 1703844 - DNA, 15 bp, Homo sapiens
ggatgaagacatctt

SEQ ID NO: 1703845 - DNA, 15 bp, Homo sapiens
gatgaagacatcttc

SEQ ID NO: 1703846 - DNA, 15 bp, Homo sapiens
atgaagacatcttct

SEQ ID NO: 1703847 - DNA, 15 bp, Homo sapiens
tgaagacatcttctt

SEQ ID NO: 1703848 - DNA, 15 bp, Homo sapiens
gaagacatcttcttt

SEQ ID NO: 1703849 - DNA, 15 bp, Homo sapiens
aagacatcttctttg

SEQ ID NO: 1703850 - DNA, 15 bp, Homo sapiens
agacatcttctttgt

SEQ ID NO: 1703851 - DNA, 15 bp, Homo sapiens
gacatcttctttgtc

SEQ ID NO: 1703852 - DNA, 15 bp, Homo sapiens
acatcttctttgtcc

SEQ ID NO: 1703853 - DNA, 15 bp, Homo sapiens
catcttctttgtcct

SEQ ID NO: 1703854 - DNA, 15 bp, Homo sapiens
atcttctttgtcctc

SEQ ID NO: 1703855 - DNA, 15 bp, Homo sapiens
tcttctttgtcctcc

SEQ ID NO: 1703856 - DNA, 15 bp, Homo sapiens
cttctttgtcctcca

SEQ ID NO: 1703857 - DNA, 15 bp, Homo sapiens
ttctttgtcctccaa

SEQ ID NO: 1703858 - DNA, 15 bp, Homo sapiens
tctttgtcctccaaa

SEQ ID NO: 1703859 - DNA, 15 bp, Homo sapiens
ctttgtcctccaaaa

SEQ ID NO: 1703860 - DNA, 15 bp, Homo sapiens
tttgtcctccaaaac

SEQ ID NO: 1703861 - DNA, 15 bp, Homo sapiens
ttgtcctccaaaact

SEQ ID NO: 1703862 - DNA, 15 bp, Homo sapiens
tgtcctccaaaactg

SEQ ID NO: 1703863 - DNA, 15 bp, Homo sapiens
gtcctccaaaactgt

SEQ ID NO: 1703864 - DNA, 15 bp, Homo sapiens
tcctccaaaactgtt

SEQ ID NO: 1703865 - DNA, 15 bp, Homo sapiens
cctccaaaactgttt

SEQ ID NO: 1703866 - DNA, 15 bp, Homo sapiens
ctccaaaactgtttg

SEQ ID NO: 1703867 - DNA, 15 bp, Homo sapiens
tccaaaactgtttgc

SEQ ID NO: 1703868 - DNA, 15 bp, Homo sapiens
ccaaaactgtttgct

SEQ ID NO: 1703869 - DNA, 15 bp, Homo sapiens
caaaactgtttgcta

SEQ ID NO: 1703870 - DNA, 15 bp, Homo sapiens
aaaactgtttgctat

SEQ ID NO: 1703871 - DNA, 15 bp, Homo sapiens
aaactgtttgctata

SEQ ID NO: 1703872 - DNA, 15 bp, Homo sapiens
aactgtttgctatac

SEQ ID NO: 1703873 - DNA, 15 bp, Homo sapiens
actgtttgctataca

SEQ ID NO: 1703874 - DNA, 15 bp, Homo sapiens
ctgtttgctatacaa

SEQ ID NO: 1703875 - DNA, 15 bp, Homo sapiens
tgtttgctatacaaa

SEQ ID NO: 1703876 - DNA, 15 bp, Homo sapiens
gtttgctatacaaat

SEQ ID NO: 1703877 - DNA, 15 bp, Homo sapiens
tttgctatacaaata

SEQ ID NO: 1703878 - DNA, 15 bp, Homo sapiens
ttgctatacaaatac

SEQ ID NO: 1703879 - DNA, 15 bp, Homo sapiens
tgctatacaaatacc

SEQ ID NO: 1703880 - DNA, 15 bp, Homo sapiens
gctatacaaataccc

SEQ ID NO: 1703881 - DNA, 15 bp, Homo sapiens
ctatacaaataccct

SEQ ID NO: 1703882 - DNA, 15 bp, Homo sapiens
tatacaaataccctt

SEQ ID NO: 1703883 - DNA, 15 bp, Homo sapiens
atacaaatacccttg

SEQ ID NO: 1703884 - DNA, 15 bp, Homo sapiens
tacaaatacccttga

SEQ ID NO: 1703885 - DNA, 15 bp, Homo sapiens
acaaatacccttgaa

SEQ ID NO: 1703886 - DNA, 15 bp, Homo sapiens
caaatacccttgaaa

SEQ ID NO: 1703887 - DNA, 15 bp, Homo sapiens
aaatacccttgaaaa

SEQ ID NO: 1703888 - DNA, 15 bp, Homo sapiens
aatacccttgaaaaa

SEQ ID NO: 1703889 - DNA, 15 bp, Homo sapiens
atacccttgaaaaaa

SEQ ID NO: 1703890 - DNA, 15 bp, Homo sapiens
tacccttgaaaaaat

SEQ ID NO: 1703891 - DNA, 15 bp, Homo sapiens
acccttgaaaaaata

SEQ ID NO: 1703892 - DNA, 15 bp, Homo sapiens
cccttgaaaaaataa

SEQ ID NO: 1703893 - DNA, 15 bp, Homo sapiens
ccttgaaaaaataac

SEQ ID NO: 1703894 - DNA, 15 bp, Homo sapiens
cttgaaaaaataacc

SEQ ID NO: 1703895 - DNA, 15 bp, Homo sapiens
ttgaaaaaataaccc

SEQ ID NO: 1703896 - DNA, 15 bp, Homo sapiens
tgaaaaaataacccg

SEQ ID NO: 1703897 - DNA, 15 bp, Homo sapiens
gaaaaaataacccga

SEQ ID NO: 1703898 - DNA, 15 bp, Homo sapiens
aaaaaataacccgaa

SEQ ID NO: 1703899 - DNA, 15 bp, Homo sapiens
aaaaataacccgaat

SEQ ID NO: 1703900 - DNA, 15 bp, Homo sapiens
aaaataacccgaatg

SEQ ID NO: 1703901 - DNA, 15 bp, Homo sapiens
aaataacccgaatga

SEQ ID NO: 1703902 - DNA, 15 bp, Homo sapiens
aataacccgaatgaa

SEQ ID NO: 1703903 - DNA, 15 bp, Homo sapiens
ataacccgaatgaag

SEQ ID NO: 1703904 - DNA, 15 bp, Homo sapiens
taacccgaatgaagg

SEQ ID NO: 1703905 - DNA, 15 bp, Homo sapiens
aacccgaatgaaggt

SEQ ID NO: 1703906 - DNA, 15 bp, Homo sapiens
acccgaatgaaggta

SEQ ID NO: 1703907 - DNA, 15 bp, Homo sapiens
cccgaatgaaggtaa

SEQ ID NO: 1703908 - DNA, 15 bp, Homo sapiens
ccgaatgaaggtaat

SEQ ID NO: 1703909 - DNA, 15 bp, Homo sapiens
cgaatgaaggtaatc

SEQ ID NO: 1703910 - DNA, 15 bp, Homo sapiens
gaatgaaggtaatca

SEQ ID NO: 1703911 - DNA, 15 bp, Homo sapiens
aatgaaggtaatcaa

SEQ ID NO: 1703912 - DNA, 15 bp, Homo sapiens
atgaaggtaatcaat

SEQ ID NO: 1703913 - DNA, 15 bp, Homo sapiens
tgaaggtaatcaatg

SEQ ID NO: 1703914 - DNA, 15 bp, Homo sapiens
gaaggtaatcaatgc

SEQ ID NO: 1703915 - DNA, 15 bp, Homo sapiens
aaggtaatcaatgcc

SEQ ID NO: 1703916 - DNA, 15 bp, Homo sapiens
aggtaatcaatgcct

SEQ ID NO: 1703917 - DNA, 15 bp, Homo sapiens
ggtaatcaatgcctc

SEQ ID NO: 1703918 - DNA, 15 bp, Homo sapiens
gtaatcaatgcctct

SEQ ID NO: 1703919 - DNA, 15 bp, Homo sapiens
taatcaatgcctctg

SEQ ID NO: 1703920 - DNA, 15 bp, Homo sapiens
aatcaatgcctctgt

SEQ ID NO: 1703921 - DNA, 15 bp, Homo sapiens
atcaatgcctctgtt

SEQ ID NO: 1703922 - DNA, 15 bp, Homo sapiens
tcaatgcctctgttc

SEQ ID NO: 1703923 - DNA, 15 bp, Homo sapiens
caatgcctctgttca

SEQ ID NO: 1703924 - DNA, 15 bp, Homo sapiens
aatgcctctgttcac

SEQ ID NO: 1703925 - DNA, 15 bp, Homo sapiens
atgcctctgttcaca

SEQ ID NO: 1703926 - DNA, 15 bp, Homo sapiens
tgcctctgttcacaa

SEQ ID NO: 1703927 - DNA, 15 bp, Homo sapiens
gcctctgttcacaag

SEQ ID NO: 1703928 - DNA, 15 bp, Homo sapiens
cctctgttcacaaga

SEQ ID NO: 1703929 - DNA, 15 bp, Homo sapiens
ctctgttcacaagat

SEQ ID NO: 1703930 - DNA, 15 bp, Homo sapiens
tctgttcacaagatg

SEQ ID NO: 1703931 - DNA, 15 bp, Homo sapiens
ctgttcacaagatgt

SEQ ID NO: 1703932 - DNA, 15 bp, Homo sapiens
tgttcacaagatgtg

SEQ ID NO: 1703933 - DNA, 15 bp, Homo sapiens
gttcacaagatgtgc

SEQ ID NO: 1703934 - DNA, 15 bp, Homo sapiens
ttcacaagatgtgca

SEQ ID NO: 1703935 - DNA, 15 bp, Homo sapiens
tcacaagatgtgcat

SEQ ID NO: 1703936 - DNA, 15 bp, Homo sapiens
cacaagatgtgcata

SEQ ID NO: 1703937 - DNA, 15 bp, Homo sapiens
acaagatgtgcataa

SEQ ID NO: 1703938 - DNA, 15 bp, Homo sapiens
caagatgtgcataaa

SEQ ID NO: 1703939 - DNA, 15 bp, Homo sapiens
aagatgtgcataaac

SEQ ID NO: 1703940 - DNA, 15 bp, Homo sapiens
agatgtgcataaaca

SEQ ID NO: 1703941 - DNA, 15 bp, Homo sapiens
gatgtgcataaacat

SEQ ID NO: 1703942 - DNA, 15 bp, Homo sapiens
atgtgcataaacatg

SEQ ID NO: 1703943 - DNA, 15 bp, Homo sapiens
tgtgcataaacatgg

SEQ ID NO: 1703944 - DNA, 15 bp, Homo sapiens
gtgcataaacatggg

SEQ ID NO: 1703945 - DNA, 15 bp, Homo sapiens
tgcataaacatggga

SEQ ID NO: 1703946 - DNA, 15 bp, Homo sapiens
gcataaacatgggag

SEQ ID NO: 1703947 - DNA, 15 bp, Homo sapiens
cataaacatgggaga

SEQ ID NO: 1703948 - DNA, 15 bp, Homo sapiens
ataaacatgggagac

SEQ ID NO: 1703949 - DNA, 15 bp, Homo sapiens
taaacatgggagact

SEQ ID NO: 1703950 - DNA, 15 bp, Homo sapiens
aaacatgggagactc

SEQ ID NO: 1703951 - DNA, 15 bp, Homo sapiens
aacatgggagactca

SEQ ID NO: 1703952 - DNA, 15 bp, Homo sapiens
acatgggagactcag

SEQ ID NO: 1703953 - DNA, 15 bp, Homo sapiens
catgggagactcaga

SEQ ID NO: 1703954 - DNA, 15 bp, Homo sapiens
atgggagactcagag

SEQ ID NO: 1703955 - DNA, 15 bp, Homo sapiens
tgggagactcagaga

SEQ ID NO: 1703956 - DNA, 15 bp, Homo sapiens
gggagactcagagag

SEQ ID NO: 1703957 - DNA, 15 bp, Homo sapiens
ggagactcagagaga

SEQ ID NO: 1703958 - DNA, 15 bp, Homo sapiens
gagactcagagagat

SEQ ID NO: 1703959 - DNA, 15 bp, Homo sapiens
agactcagagagatt

SEQ ID NO: 1703960 - DNA, 15 bp, Homo sapiens
gactcagagagattg

SEQ ID NO: 1703961 - DNA, 15 bp, Homo sapiens
actcagagagattgt

SEQ ID NO: 1703962 - DNA, 15 bp, Homo sapiens
ctcagagagattgtt

SEQ ID NO: 1703963 - DNA, 15 bp, Homo sapiens
tcagagagattgttt

SEQ ID NO: 1703964 - DNA, 15 bp, Homo sapiens
cagagagattgtttc

SEQ ID NO: 1703965 - DNA, 15 bp, Homo sapiens
agagagattgtttcc

SEQ ID NO: 1703966 - DNA, 15 bp, Homo sapiens
gagagattgtttccc

SEQ ID NO: 1703967 - DNA, 15 bp, Homo sapiens
agagattgtttcccc

SEQ ID NO: 1703968 - DNA, 15 bp, Homo sapiens
gagattgtttcccca

SEQ ID NO: 1703969 - DNA, 15 bp, Homo sapiens
agattgtttccccag

SEQ ID NO: 1703970 - DNA, 15 bp, Homo sapiens
gattgtttccccaga

SEQ ID NO: 1703971 - DNA, 15 bp, Homo sapiens
attgtttccccagaa

SEQ ID NO: 1703972 - DNA, 15 bp, Homo sapiens
ttgtttccccagaat

SEQ ID NO: 1703973 - DNA, 15 bp, Homo sapiens
tgtttccccagaatt

SEQ ID NO: 1703974 - DNA, 15 bp, Homo sapiens
gtttccccagaatta

SEQ ID NO: 1703975 - DNA, 15 bp, Homo sapiens
tttccccagaattac

SEQ ID NO: 1703976 - DNA, 15 bp, Homo sapiens
ttccccagaattact

SEQ ID NO: 1703977 - DNA, 15 bp, Homo sapiens
tccccagaattactt

SEQ ID NO: 1703978 - DNA, 15 bp, Homo sapiens
ccccagaattactta

SEQ ID NO: 1703979 - DNA, 15 bp, Homo sapiens
cccagaattacttag

SEQ ID NO: 1703980 - DNA, 15 bp, Homo sapiens
ccagaattacttagt

SEQ ID NO: 1703981 - DNA, 15 bp, Homo sapiens
cagaattacttagtc

SEQ ID NO: 1703982 - DNA, 15 bp, Homo sapiens
agaattacttagtcc

SEQ ID NO: 1703983 - DNA, 15 bp, Homo sapiens
gaattacttagtcca

SEQ ID NO: 1703984 - DNA, 15 bp, Homo sapiens
aattacttagtccaa

SEQ ID NO: 1703985 - DNA, 15 bp, Homo sapiens
attacttagtccaag

SEQ ID NO: 1703986 - DNA, 15 bp, Homo sapiens
ttacttagtccaagt

SEQ ID NO: 1703987 - DNA, 15 bp, Homo sapiens
tacttagtccaagtc

SEQ ID NO: 1703988 - DNA, 15 bp, Homo sapiens
acttagtccaagtct

SEQ ID NO: 1703989 - DNA, 15 bp, Homo sapiens
cttagtccaagtctc

SEQ ID NO: 1703990 - DNA, 15 bp, Homo sapiens
ttagtccaagtctct

SEQ ID NO: 1703991 - DNA, 15 bp, Homo sapiens
tagtccaagtctctc

SEQ ID NO: 1703992 - DNA, 15 bp, Homo sapiens
agtccaagtctctcg

SEQ ID NO: 1703993 - DNA, 15 bp, Homo sapiens
gtccaagtctctcgt

SEQ ID NO: 1703994 - DNA, 15 bp, Homo sapiens
tccaagtctctcgtt

SEQ ID NO: 1703995 - DNA, 15 bp, Homo sapiens
ccaagtctctcgttt

SEQ ID NO: 1703996 - DNA, 15 bp, Homo sapiens
caagtctctcgtttt

SEQ ID NO: 1703997 - DNA, 15 bp, Homo sapiens
aagtctctcgtttta

SEQ ID NO: 1703998 - DNA, 15 bp, Homo sapiens
agtctctcgttttaa

SEQ ID NO: 1703999 - DNA, 15 bp, Homo sapiens
gtctctcgttttaag

SEQ ID NO: 1704000 - DNA, 15 bp, Homo sapiens
tctctcgttttaagg

SEQ ID NO: 1704001 - DNA, 15 bp, Homo sapiens
ctctcgttttaagga

SEQ ID NO: 1704002 - DNA, 15 bp, Homo sapiens
tctcgttttaaggat

SEQ ID NO: 1704003 - DNA, 15 bp, Homo sapiens
ctcgttttaaggatg

SEQ ID NO: 1704004 - DNA, 15 bp, Homo sapiens
tcgttttaaggatga

SEQ ID NO: 1704005 - DNA, 15 bp, Homo sapiens
cgttttaaggatgaa

SEQ ID NO: 1704006 - DNA, 15 bp, Homo sapiens
gttttaaggatgaaa

SEQ ID NO: 1704007 - DNA, 15 bp, Homo sapiens
ttttaaggatgaaat

SEQ ID NO: 1704008 - DNA, 15 bp, Homo sapiens
tttaaggatgaaata

SEQ ID NO: 1704009 - DNA, 15 bp, Homo sapiens
ttaaggatgaaataa

SEQ ID NO: 1704010 - DNA, 15 bp, Homo sapiens
taaggatgaaataac

SEQ ID NO: 1704011 - DNA, 15 bp, Homo sapiens
aaggatgaaataact

SEQ ID NO: 1704012 - DNA, 15 bp, Homo sapiens
aggatgaaataactg

SEQ ID NO: 1704013 - DNA, 15 bp, Homo sapiens
ggatgaaataactga

SEQ ID NO: 1704014 - DNA, 15 bp, Homo sapiens
gatgaaataactgag

SEQ ID NO: 1704015 - DNA, 15 bp, Homo sapiens
atgaaataactgagg

SEQ ID NO: 1704016 - DNA, 15 bp, Homo sapiens
tgaaataactgaggt

SEQ ID NO: 1704017 - DNA, 15 bp, Homo sapiens
gaaataactgaggtc

SEQ ID NO: 1704018 - DNA, 15 bp, Homo sapiens
aaataactgaggtcc

SEQ ID NO: 1704019 - DNA, 15 bp, Homo sapiens
aataactgaggtcca

SEQ ID NO: 1704020 - DNA, 15 bp, Homo sapiens
ataactgaggtccag

SEQ ID NO: 1704021 - DNA, 15 bp, Homo sapiens
taactgaggtccaga

SEQ ID NO: 1704022 - DNA, 15 bp, Homo sapiens
aactgaggtccagag

SEQ ID NO: 1704023 - DNA, 15 bp, Homo sapiens
actgaggtccagaga

SEQ ID NO: 1704024 - DNA, 15 bp, Homo sapiens
ctgaggtccagagag

SEQ ID NO: 1704025 - DNA, 15 bp, Homo sapiens
tgaggtccagagagc

SEQ ID NO: 1704026 - DNA, 15 bp, Homo sapiens
gaggtccagagagct

SEQ ID NO: 1704027 - DNA, 15 bp, Homo sapiens
aggtccagagagcta

SEQ ID NO: 1704028 - DNA, 15 bp, Homo sapiens
ggtccagagagctag

SEQ ID NO: 1704029 - DNA, 15 bp, Homo sapiens
gtccagagagctaga

SEQ ID NO: 1704030 - DNA, 15 bp, Homo sapiens
tccagagagctagag

SEQ ID NO: 1704031 - DNA, 15 bp, Homo sapiens
ccagagagctagagc

SEQ ID NO: 1704032 - DNA, 15 bp, Homo sapiens
cagagagctagagca

SEQ ID NO: 1704033 - DNA, 15 bp, Homo sapiens
agagagctagagcac

SEQ ID NO: 1704034 - DNA, 15 bp, Homo sapiens
gagagctagagcact

SEQ ID NO: 1704035 - DNA, 15 bp, Homo sapiens
agagctagagcactt

SEQ ID NO: 1704036 - DNA, 15 bp, Homo sapiens
gagctagagcactta

SEQ ID NO: 1704037 - DNA, 15 bp, Homo sapiens
agctagagcacttag

SEQ ID NO: 1704038 - DNA, 15 bp, Homo sapiens
gctagagcacttagt

SEQ ID NO: 1704039 - DNA, 15 bp, Homo sapiens
ctagagcacttagta

SEQ ID NO: 1704040 - DNA, 15 bp, Homo sapiens
tagagcacttagtaa

SEQ ID NO: 1704041 - DNA, 15 bp, Homo sapiens
agagcacttagtaat

SEQ ID NO: 1704042 - DNA, 15 bp, Homo sapiens
gagcacttagtaata

SEQ ID NO: 1704043 - DNA, 15 bp, Homo sapiens
agcacttagtaatac

SEQ ID NO: 1704044 - DNA, 15 bp, Homo sapiens
gcacttagtaataca

SEQ ID NO: 1704045 - DNA, 15 bp, Homo sapiens
cacttagtaatacac

SEQ ID NO: 1704046 - DNA, 15 bp, Homo sapiens
acttagtaatacact

SEQ ID NO: 1704047 - DNA, 15 bp, Homo sapiens
cttagtaatacactt

SEQ ID NO: 1704048 - DNA, 15 bp, Homo sapiens
ttagtaatacacttt

SEQ ID NO: 1704049 - DNA, 15 bp, Homo sapiens
tagtaatacacttta

SEQ ID NO: 1704050 - DNA, 15 bp, Homo sapiens
agtaatacactttac

SEQ ID NO: 1704051 - DNA, 15 bp, Homo sapiens
gtaatacactttacg

SEQ ID NO: 1704052 - DNA, 15 bp, Homo sapiens
taatacactttacgg

SEQ ID NO: 1704053 - DNA, 15 bp, Homo sapiens
aatacactttacggg

SEQ ID NO: 1704054 - DNA, 15 bp, Homo sapiens
atacactttacgggt

SEQ ID NO: 1704055 - DNA, 15 bp, Homo sapiens
tacactttacgggtg

SEQ ID NO: 1704056 - DNA, 15 bp, Homo sapiens
acactttacgggtgg

SEQ ID NO: 1704057 - DNA, 15 bp, Homo sapiens
cactttacgggtggc

SEQ ID NO: 1704058 - DNA, 15 bp, Homo sapiens
actttacgggtggcc

SEQ ID NO: 1704059 - DNA, 15 bp, Homo sapiens
ctttacgggtggcca

SEQ ID NO: 1704060 - DNA, 15 bp, Homo sapiens
tttacgggtggccac

SEQ ID NO: 1704061 - DNA, 15 bp, Homo sapiens
ttacgggtggccacg

SEQ ID NO: 1704062 - DNA, 15 bp, Homo sapiens
tacgggtggccacgt

SEQ ID NO: 1704063 - DNA, 15 bp, Homo sapiens
acgggtggccacgtt

SEQ ID NO: 1704064 - DNA, 15 bp, Homo sapiens
cgggtggccacgttg

SEQ ID NO: 1704065 - DNA, 15 bp, Homo sapiens
gggtggccacgttgg

SEQ ID NO: 1704066 - DNA, 15 bp, Homo sapiens
ggtggccacgttggg

SEQ ID NO: 1704067 - DNA, 15 bp, Homo sapiens
gtggccacgttgggc

SEQ ID NO: 1704068 - DNA, 15 bp, Homo sapiens
tggccacgttgggct

SEQ ID NO: 1704069 - DNA, 15 bp, Homo sapiens
ggccacgttgggctt

SEQ ID NO: 1704070 - DNA, 15 bp, Homo sapiens
gccacgttgggcttt

SEQ ID NO: 1704071 - DNA, 15 bp, Homo sapiens
ccacgttgggctttt

SEQ ID NO: 1704072 - DNA, 15 bp, Homo sapiens
cacgttgggcttttc

SEQ ID NO: 1704073 - DNA, 15 bp, Homo sapiens
acgttgggcttttcc

SEQ ID NO: 1704074 - DNA, 15 bp, Homo sapiens
cgttgggcttttcca

SEQ ID NO: 1704075 - DNA, 15 bp, Homo sapiens
gttgggcttttccaa

SEQ ID NO: 1704076 - DNA, 15 bp, Homo sapiens
ttgggcttttccaag

SEQ ID NO: 1704077 - DNA, 15 bp, Homo sapiens
tgggcttttccaaga

SEQ ID NO: 1704078 - DNA, 15 bp, Homo sapiens
gggcttttccaagag

SEQ ID NO: 1704079 - DNA, 15 bp, Homo sapiens
ggcttttccaagagc

SEQ ID NO: 1704080 - DNA, 15 bp, Homo sapiens
gcttttccaagagct

SEQ ID NO: 1704081 - DNA, 15 bp, Homo sapiens
cttttccaagagctc

SEQ ID NO: 1704082 - DNA, 15 bp, Homo sapiens
ttttccaagagctcc

SEQ ID NO: 1704083 - DNA, 15 bp, Homo sapiens
tttccaagagctcca

SEQ ID NO: 1704084 - DNA, 15 bp, Homo sapiens
ttccaagagctccat

SEQ ID NO: 1704085 - DNA, 15 bp, Homo sapiens
tccaagagctccatt

SEQ ID NO: 1704086 - DNA, 15 bp, Homo sapiens
ccaagagctccattt

SEQ ID NO: 1704087 - DNA, 15 bp, Homo sapiens
caagagctccatttt

SEQ ID NO: 1704088 - DNA, 15 bp, Homo sapiens
aagagctccattttt

SEQ ID NO: 1704089 - DNA, 15 bp, Homo sapiens
agagctccatttttt

SEQ ID NO: 1704090 - DNA, 15 bp, Homo sapiens
gagctccattttttc

SEQ ID NO: 1704091 - DNA, 15 bp, Homo sapiens
agctccattttttct

SEQ ID NO: 1704092 - DNA, 15 bp, Homo sapiens
gctccattttttcta

SEQ ID NO: 1704093 - DNA, 15 bp, Homo sapiens
ctccattttttctat

SEQ ID NO: 1704094 - DNA, 15 bp, Homo sapiens
tccattttttctatg

SEQ ID NO: 1704095 - DNA, 15 bp, Homo sapiens
ccattttttctatgc

SEQ ID NO: 1704096 - DNA, 15 bp, Homo sapiens
cattttttctatgcc

SEQ ID NO: 1704097 - DNA, 15 bp, Homo sapiens
attttttctatgcct

SEQ ID NO: 1704098 - DNA, 15 bp, Homo sapiens
ttttttctatgccta

SEQ ID NO: 1704099 - DNA, 15 bp, Homo sapiens
tttttctatgcctat

SEQ ID NO: 1704100 - DNA, 15 bp, Homo sapiens
ttttctatgcctatt

SEQ ID NO: 1704101 - DNA, 15 bp, Homo sapiens
tttctatgcctatta

SEQ ID NO: 1704102 - DNA, 15 bp, Homo sapiens
ttctatgcctattac

SEQ ID NO: 1704103 - DNA, 15 bp, Homo sapiens
tctatgcctattaca

SEQ ID NO: 1704104 - DNA, 15 bp, Homo sapiens
ctatgcctattacac

SEQ ID NO: 1704105 - DNA, 15 bp, Homo sapiens
tatgcctattacact

SEQ ID NO: 1704106 - DNA, 15 bp, Homo sapiens
atgcctattacactc

SEQ ID NO: 1704107 - DNA, 15 bp, Homo sapiens
tgcctattacactca

SEQ ID NO: 1704108 - DNA, 15 bp, Homo sapiens
gcctattacactcat

SEQ ID NO: 1704109 - DNA, 15 bp, Homo sapiens
cctattacactcatg

SEQ ID NO: 1704110 - DNA, 15 bp, Homo sapiens
ctattacactcatgc

SEQ ID NO: 1704111 - DNA, 15 bp, Homo sapiens
tattacactcatgct

SEQ ID NO: 1704112 - DNA, 15 bp, Homo sapiens
attacactcatgctt

SEQ ID NO: 1704113 - DNA, 15 bp, Homo sapiens
ttacactcatgcttt

SEQ ID NO: 1704114 - DNA, 15 bp, Homo sapiens
tacactcatgctttc

SEQ ID NO: 1704115 - DNA, 15 bp, Homo sapiens
acactcatgctttcc

SEQ ID NO: 1704116 - DNA, 15 bp, Homo sapiens
cactcatgctttccc

SEQ ID NO: 1704117 - DNA, 15 bp, Homo sapiens
actcatgctttccca

SEQ ID NO: 1704118 - DNA, 15 bp, Homo sapiens
ctcatgctttcccag

SEQ ID NO: 1704119 - DNA, 15 bp, Homo sapiens
tcatgctttcccagg

SEQ ID NO: 1704120 - DNA, 15 bp, Homo sapiens
catgctttcccaggt

SEQ ID NO: 1704121 - DNA, 15 bp, Homo sapiens
atgctttcccaggta

SEQ ID NO: 1704122 - DNA, 15 bp, Homo sapiens
tgctttcccaggtac

SEQ ID NO: 1704123 - DNA, 15 bp, Homo sapiens
gctttcccaggtacc

SEQ ID NO: 1704124 - DNA, 15 bp, Homo sapiens
ctttcccaggtaccc

SEQ ID NO: 1704125 - DNA, 15 bp, Homo sapiens
tttcccaggtaccct

SEQ ID NO: 1704126 - DNA, 15 bp, Homo sapiens
ttcccaggtaccctt

SEQ ID NO: 1704127 - DNA, 15 bp, Homo sapiens
tcccaggtaccctta

SEQ ID NO: 1704128 - DNA, 15 bp, Homo sapiens
cccaggtacccttat

SEQ ID NO: 1704129 - DNA, 15 bp, Homo sapiens
ccaggtacccttatt

SEQ ID NO: 1704130 - DNA, 15 bp, Homo sapiens
caggtacccttattc

SEQ ID NO: 1704131 - DNA, 15 bp, Homo sapiens
aggtacccttattcc

SEQ ID NO: 1704132 - DNA, 15 bp, Homo sapiens
ggtacccttattcct

SEQ ID NO: 1704133 - DNA, 15 bp, Homo sapiens
gtacccttattcctt

SEQ ID NO: 1704134 - DNA, 15 bp, Homo sapiens
tacccttattccttt

SEQ ID NO: 1704135 - DNA, 15 bp, Homo sapiens
acccttattcctttc

SEQ ID NO: 1704136 - DNA, 15 bp, Homo sapiens
cccttattcctttct

SEQ ID NO: 1704137 - DNA, 15 bp, Homo sapiens
ccttattcctttctg

SEQ ID NO: 1704138 - DNA, 15 bp, Homo sapiens
cttattcctttctgg

SEQ ID NO: 1704139 - DNA, 15 bp, Homo sapiens
ttattcctttctggc

SEQ ID NO: 1704140 - DNA, 15 bp, Homo sapiens
tattcctttctggca

SEQ ID NO: 1704141 - DNA, 15 bp, Homo sapiens
attcctttctggcat

SEQ ID NO: 1704142 - DNA, 15 bp, Homo sapiens
ttcctttctggcata

SEQ ID NO: 1704143 - DNA, 15 bp, Homo sapiens
tcctttctggcatag

SEQ ID NO: 1704144 - DNA, 15 bp, Homo sapiens
cctttctggcatagg

SEQ ID NO: 1704145 - DNA, 15 bp, Homo sapiens
ctttctggcataggt

SEQ ID NO: 1704146 - DNA, 15 bp, Homo sapiens
tttctggcataggtt

SEQ ID NO: 1704147 - DNA, 15 bp, Homo sapiens
ttctggcataggttg

SEQ ID NO: 1704148 - DNA, 15 bp, Homo sapiens
tctggcataggttgc

SEQ ID NO: 1704149 - DNA, 15 bp, Homo sapiens
ctggcataggttgcc

SEQ ID NO: 1704150 - DNA, 15 bp, Homo sapiens
tggcataggttgcct

SEQ ID NO: 1704151 - DNA, 15 bp, Homo sapiens
ggcataggttgccta

SEQ ID NO: 1704152 - DNA, 15 bp, Homo sapiens
gcataggttgcctag

SEQ ID NO: 1704153 - DNA, 15 bp, Homo sapiens
cataggttgcctaga

SEQ ID NO: 1704154 - DNA, 15 bp, Homo sapiens
ataggttgcctagag

SEQ ID NO: 1704155 - DNA, 15 bp, Homo sapiens
taggttgcctagagc

SEQ ID NO: 1704156 - DNA, 15 bp, Homo sapiens
aggttgcctagagct

SEQ ID NO: 1704157 - DNA, 15 bp, Homo sapiens
ggttgcctagagcta

SEQ ID NO: 1704158 - DNA, 15 bp, Homo sapiens
gttgcctagagctag

SEQ ID NO: 1704159 - DNA, 15 bp, Homo sapiens
ttgcctagagctagt

SEQ ID NO: 1704160 - DNA, 15 bp, Homo sapiens
tgcctagagctagta

SEQ ID NO: 1704161 - DNA, 15 bp, Homo sapiens
gcctagagctagtaa

SEQ ID NO: 1704162 - DNA, 15 bp, Homo sapiens
cctagagctagtaag

SEQ ID NO: 1704163 - DNA, 15 bp, Homo sapiens
ctagagctagtaagc

SEQ ID NO: 1704164 - DNA, 15 bp, Homo sapiens
tagagctagtaagct

SEQ ID NO: 1704165 - DNA, 15 bp, Homo sapiens
agagctagtaagctg

SEQ ID NO: 1704166 - DNA, 15 bp, Homo sapiens
gagctagtaagctgt

SEQ ID NO: 1704167 - DNA, 15 bp, Homo sapiens
agctagtaagctgtc

SEQ ID NO: 1704168 - DNA, 15 bp, Homo sapiens
gctagtaagctgtca

SEQ ID NO: 1704169 - DNA, 15 bp, Homo sapiens
ctagtaagctgtcac

SEQ ID NO: 1704170 - DNA, 15 bp, Homo sapiens
tagtaagctgtcaca

SEQ ID NO: 1704171 - DNA, 15 bp, Homo sapiens
agtaagctgtcacag

SEQ ID NO: 1704172 - DNA, 15 bp, Homo sapiens
gtaagctgtcacagg

SEQ ID NO: 1704173 - DNA, 15 bp, Homo sapiens
taagctgtcacaggt

SEQ ID NO: 1704174 - DNA, 15 bp, Homo sapiens
aagctgtcacaggtg

SEQ ID NO: 1704175 - DNA, 15 bp, Homo sapiens
agctgtcacaggtga

SEQ ID NO: 1704176 - DNA, 15 bp, Homo sapiens
gctgtcacaggtgaa

SEQ ID NO: 1704177 - DNA, 15 bp, Homo sapiens
ctgtcacaggtgaaa

SEQ ID NO: 1704178 - DNA, 15 bp, Homo sapiens
tgtcacaggtgaaat

SEQ ID NO: 1704179 - DNA, 15 bp, Homo sapiens
gtcacaggtgaaata

SEQ ID NO: 1704180 - DNA, 15 bp, Homo sapiens
tcacaggtgaaataa

SEQ ID NO: 1704181 - DNA, 15 bp, Homo sapiens
cacaggtgaaataat

SEQ ID NO: 1704182 - DNA, 15 bp, Homo sapiens
acaggtgaaataatt

SEQ ID NO: 1704183 - DNA, 15 bp, Homo sapiens
caggtgaaataattg

SEQ ID NO: 1704184 - DNA, 15 bp, Homo sapiens
aggtgaaataattga

SEQ ID NO: 1704185 - DNA, 15 bp, Homo sapiens
ggtgaaataattgaa

SEQ ID NO: 1704186 - DNA, 15 bp, Homo sapiens
gtgaaataattgaac

SEQ ID NO: 1704187 - DNA, 15 bp, Homo sapiens
tgaaataattgaaca

SEQ ID NO: 1704188 - DNA, 15 bp, Homo sapiens
gaaataattgaacag

SEQ ID NO: 1704189 - DNA, 15 bp, Homo sapiens
aaataattgaacaga

SEQ ID NO: 1704190 - DNA, 15 bp, Homo sapiens
aataattgaacagaa

SEQ ID NO: 1704191 - DNA, 15 bp, Homo sapiens
ataattgaacagaag

SEQ ID NO: 1704192 - DNA, 15 bp, Homo sapiens
taattgaacagaagg

SEQ ID NO: 1704193 - DNA, 15 bp, Homo sapiens
aattgaacagaagga

SEQ ID NO: 1704194 - DNA, 15 bp, Homo sapiens
attgaacagaaggac

SEQ ID NO: 1704195 - DNA, 15 bp, Homo sapiens
ttgaacagaaggacc

SEQ ID NO: 1704196 - DNA, 15 bp, Homo sapiens
tgaacagaaggacct

SEQ ID NO: 1704197 - DNA, 15 bp, Homo sapiens
gaacagaaggacctg

SEQ ID NO: 1704198 - DNA, 15 bp, Homo sapiens
aacagaaggacctgc

SEQ ID NO: 1704199 - DNA, 15 bp, Homo sapiens
acagaaggacctgct

SEQ ID NO: 1704200 - DNA, 15 bp, Homo sapiens
cagaaggacctgctg

SEQ ID NO: 1704201 - DNA, 15 bp, Homo sapiens
agaaggacctgctgc

SEQ ID NO: 1704202 - DNA, 15 bp, Homo sapiens
gaaggacctgctgca

SEQ ID NO: 1704203 - DNA, 15 bp, Homo sapiens
aaggacctgctgcat

SEQ ID NO: 1704204 - DNA, 15 bp, Homo sapiens
aggacctgctgcatg

SEQ ID NO: 1704205 - DNA, 15 bp, Homo sapiens
ggacctgctgcatga

SEQ ID NO: 1704206 - DNA, 15 bp, Homo sapiens
gacctgctgcatgag

SEQ ID NO: 1704207 - DNA, 15 bp, Homo sapiens
acctgctgcatgagt

SEQ ID NO: 1704208 - DNA, 15 bp, Homo sapiens
cctgctgcatgagtg

SEQ ID NO: 1704209 - DNA, 15 bp, Homo sapiens
ctgctgcatgagtga

SEQ ID NO: 1704210 - DNA, 15 bp, Homo sapiens
tgctgcatgagtgag

SEQ ID NO: 1704211 - DNA, 15 bp, Homo sapiens
gctgcatgagtgagc

SEQ ID NO: 1704212 - DNA, 15 bp, Homo sapiens
ctgcatgagtgagca

SEQ ID NO: 1704213 - DNA, 15 bp, Homo sapiens
tgcatgagtgagcag

SEQ ID NO: 1704214 - DNA, 15 bp, Homo sapiens
gcatgagtgagcagt

SEQ ID NO: 1704215 - DNA, 15 bp, Homo sapiens
catgagtgagcagta

SEQ ID NO: 1704216 - DNA, 15 bp, Homo sapiens
atgagtgagcagtaa

SEQ ID NO: 1704217 - DNA, 15 bp, Homo sapiens
tgagtgagcagtaat

SEQ ID NO: 1704218 - DNA, 15 bp, Homo sapiens
gagtgagcagtaatg

SEQ ID NO: 1704219 - DNA, 15 bp, Homo sapiens
agtgagcagtaatga

SEQ ID NO: 1704220 - DNA, 15 bp, Homo sapiens
gtgagcagtaatgac

SEQ ID NO: 1704221 - DNA, 15 bp, Homo sapiens
tgagcagtaatgaca

SEQ ID NO: 1704222 - DNA, 15 bp, Homo sapiens
gagcagtaatgacaa

SEQ ID NO: 1704223 - DNA, 15 bp, Homo sapiens
agcagtaatgacaaa

SEQ ID NO: 1704224 - DNA, 15 bp, Homo sapiens
gcagtaatgacaaag

SEQ ID NO: 1704225 - DNA, 15 bp, Homo sapiens
cagtaatgacaaagt

SEQ ID NO: 1704226 - DNA, 15 bp, Homo sapiens
agtaatgacaaagta

SEQ ID NO: 1704227 - DNA, 15 bp, Homo sapiens
gtaatgacaaagtac

SEQ ID NO: 1704228 - DNA, 15 bp, Homo sapiens
taatgacaaagtaca

SEQ ID NO: 1704229 - DNA, 15 bp, Homo sapiens
aatgacaaagtacaa

SEQ ID NO: 1704230 - DNA, 15 bp, Homo sapiens
atgacaaagtacaaa

SEQ ID NO: 1704231 - DNA, 15 bp, Homo sapiens
tgacaaagtacaaat

SEQ ID NO: 1704232 - DNA, 15 bp, Homo sapiens
gacaaagtacaaatg

SEQ ID NO: 1704233 - DNA, 15 bp, Homo sapiens
acaaagtacaaatgg

SEQ ID NO: 1704234 - DNA, 15 bp, Homo sapiens
caaagtacaaatggt

SEQ ID NO: 1704235 - DNA, 15 bp, Homo sapiens
aaagtacaaatggtg

SEQ ID NO: 1704236 - DNA, 15 bp, Homo sapiens
aagtacaaatggtga

SEQ ID NO: 1704237 - DNA, 15 bp, Homo sapiens
agtacaaatggtgag

SEQ ID NO: 1704238 - DNA, 15 bp, Homo sapiens
gtacaaatggtgaga

SEQ ID NO: 1704239 - DNA, 15 bp, Homo sapiens
tacaaatggtgagag

SEQ ID NO: 1704240 - DNA, 15 bp, Homo sapiens
acaaatggtgagagc

SEQ ID NO: 1704241 - DNA, 15 bp, Homo sapiens
caaatggtgagagca

SEQ ID NO: 1704242 - DNA, 15 bp, Homo sapiens
aaatggtgagagcag

SEQ ID NO: 1704243 - DNA, 15 bp, Homo sapiens
aatggtgagagcagg

SEQ ID NO: 1704244 - DNA, 15 bp, Homo sapiens
atggtgagagcaggc

SEQ ID NO: 1704245 - DNA, 15 bp, Homo sapiens
tggtgagagcaggcc

SEQ ID NO: 1704246 - DNA, 15 bp, Homo sapiens
ggtgagagcaggcca

SEQ ID NO: 1704247 - DNA, 15 bp, Homo sapiens
gtgagagcaggccaa

SEQ ID NO: 1704248 - DNA, 15 bp, Homo sapiens
tgagagcaggccaag

SEQ ID NO: 1704249 - DNA, 15 bp, Homo sapiens
gagagcaggccaaga

SEQ ID NO: 1704250 - DNA, 15 bp, Homo sapiens
agagcaggccaagag

SEQ ID NO: 1704251 - DNA, 15 bp, Homo sapiens
gagcaggccaagaga

SEQ ID NO: 1704252 - DNA, 15 bp, Homo sapiens
agcaggccaagagag

SEQ ID NO: 1704253 - DNA, 15 bp, Homo sapiens
gcaggccaagagaga

SEQ ID NO: 1704254 - DNA, 15 bp, Homo sapiens
caggccaagagagaa

SEQ ID NO: 1704255 - DNA, 15 bp, Homo sapiens
aggccaagagagaac

SEQ ID NO: 1704256 - DNA, 15 bp, Homo sapiens
ggccaagagagaact

SEQ ID NO: 1704257 - DNA, 15 bp, Homo sapiens
gccaagagagaactt

SEQ ID NO: 1704258 - DNA, 15 bp, Homo sapiens
ccaagagagaacttg

SEQ ID NO: 1704259 - DNA, 15 bp, Homo sapiens
caagagagaacttga

SEQ ID NO: 1704260 - DNA, 15 bp, Homo sapiens
aagagagaacttgaa

SEQ ID NO: 1704261 - DNA, 15 bp, Homo sapiens
agagagaacttgaag

SEQ ID NO: 1704262 - DNA, 15 bp, Homo sapiens
gagagaacttgaagt

SEQ ID NO: 1704263 - DNA, 15 bp, Homo sapiens
agagaacttgaagtg

SEQ ID NO: 1704264 - DNA, 15 bp, Homo sapiens
gagaacttgaagtgg

SEQ ID NO: 1704265 - DNA, 15 bp, Homo sapiens
agaacttgaagtgga

SEQ ID NO: 1704266 - DNA, 15 bp, Homo sapiens
gaacttgaagtggag

SEQ ID NO: 1704267 - DNA, 15 bp, Homo sapiens
aacttgaagtggagg

SEQ ID NO: 1704268 - DNA, 15 bp, Homo sapiens
acttgaagtggaggt

SEQ ID NO: 1704269 - DNA, 15 bp, Homo sapiens
cttgaagtggaggta

SEQ ID NO: 1704270 - DNA, 15 bp, Homo sapiens
ttgaagtggaggtag

SEQ ID NO: 1704271 - DNA, 15 bp, Homo sapiens
tgaagtggaggtagt

SEQ ID NO: 1704272 - DNA, 15 bp, Homo sapiens
gaagtggaggtagta

SEQ ID NO: 1704273 - DNA, 15 bp, Homo sapiens
aagtggaggtagtac

SEQ ID NO: 1704274 - DNA, 15 bp, Homo sapiens
agtggaggtagtacc

SEQ ID NO: 1704275 - DNA, 15 bp, Homo sapiens
gtggaggtagtacca

SEQ ID NO: 1704276 - DNA, 15 bp, Homo sapiens
tggaggtagtaccaa

SEQ ID NO: 1704277 - DNA, 15 bp, Homo sapiens
ggaggtagtaccaaa

SEQ ID NO: 1704278 - DNA, 15 bp, Homo sapiens
gaggtagtaccaaat

SEQ ID NO: 1704279 - DNA, 15 bp, Homo sapiens
aggtagtaccaaatt

SEQ ID NO: 1704280 - DNA, 15 bp, Homo sapiens
ggtagtaccaaattc

SEQ ID NO: 1704281 - DNA, 15 bp, Homo sapiens
gtagtaccaaattca

SEQ ID NO: 1704282 - DNA, 15 bp, Homo sapiens
tagtaccaaattcat

SEQ ID NO: 1704283 - DNA, 15 bp, Homo sapiens
agtaccaaattcatc

SEQ ID NO: 1704284 - DNA, 15 bp, Homo sapiens
gtaccaaattcatca

SEQ ID NO: 1704285 - DNA, 15 bp, Homo sapiens
taccaaattcatcac

SEQ ID NO: 1704286 - DNA, 15 bp, Homo sapiens
accaaattcatcacc

SEQ ID NO: 1704287 - DNA, 15 bp, Homo sapiens
ccaaattcatcacca

SEQ ID NO: 1704288 - DNA, 15 bp, Homo sapiens
caaattcatcaccag

SEQ ID NO: 1704289 - DNA, 15 bp, Homo sapiens
aaattcatcaccagt

SEQ ID NO: 1704290 - DNA, 15 bp, Homo sapiens
aattcatcaccagtc

SEQ ID NO: 1704291 - DNA, 15 bp, Homo sapiens
attcatcaccagtcc

SEQ ID NO: 1704292 - DNA, 15 bp, Homo sapiens
ttcatcaccagtcca

SEQ ID NO: 1704293 - DNA, 15 bp, Homo sapiens
tcatcaccagtccaa

SEQ ID NO: 1704294 - DNA, 15 bp, Homo sapiens
catcaccagtccaag

SEQ ID NO: 1704295 - DNA, 15 bp, Homo sapiens
atcaccagtccaagt

SEQ ID NO: 1704296 - DNA, 15 bp, Homo sapiens
tcaccagtccaagtt

SEQ ID NO: 1704297 - DNA, 15 bp, Homo sapiens
caccagtccaagttg

SEQ ID NO: 1704298 - DNA, 15 bp, Homo sapiens
accagtccaagttgc

SEQ ID NO: 1704299 - DNA, 15 bp, Homo sapiens
ccagtccaagttgcc

SEQ ID NO: 1704300 - DNA, 15 bp, Homo sapiens
cagtccaagttgcct

SEQ ID NO: 1704301 - DNA, 15 bp, Homo sapiens
agtccaagttgcctt

SEQ ID NO: 1704302 - DNA, 15 bp, Homo sapiens
gtccaagttgccttc

SEQ ID NO: 1704303 - DNA, 15 bp, Homo sapiens
tccaagttgccttcc

SEQ ID NO: 1704304 - DNA, 15 bp, Homo sapiens
ccaagttgccttccc

SEQ ID NO: 1704305 - DNA, 15 bp, Homo sapiens
caagttgccttccct

SEQ ID NO: 1704306 - DNA, 15 bp, Homo sapiens
aagttgccttccctc

SEQ ID NO: 1704307 - DNA, 15 bp, Homo sapiens
agttgccttccctca

SEQ ID NO: 1704308 - DNA, 15 bp, Homo sapiens
gttgccttccctcat

SEQ ID NO: 1704309 - DNA, 15 bp, Homo sapiens
ttgccttccctcatt

SEQ ID NO: 1704310 - DNA, 15 bp, Homo sapiens
tgccttccctcattt

SEQ ID NO: 1704311 - DNA, 15 bp, Homo sapiens
gccttccctcatttt

SEQ ID NO: 1704312 - DNA, 15 bp, Homo sapiens
ccttccctcatttta

SEQ ID NO: 1704313 - DNA, 15 bp, Homo sapiens
cttccctcattttat

SEQ ID NO: 1704314 - DNA, 15 bp, Homo sapiens
ttccctcattttatt

SEQ ID NO: 1704315 - DNA, 15 bp, Homo sapiens
tccctcattttattt

SEQ ID NO: 1704316 - DNA, 15 bp, Homo sapiens
ccctcattttatttg

SEQ ID NO: 1704317 - DNA, 15 bp, Homo sapiens
cctcattttatttga

SEQ ID NO: 1704318 - DNA, 15 bp, Homo sapiens
ctcattttatttgac

SEQ ID NO: 1704319 - DNA, 15 bp, Homo sapiens
tcattttatttgact

SEQ ID NO: 1704320 - DNA, 15 bp, Homo sapiens
cattttatttgactt

SEQ ID NO: 1704321 - DNA, 15 bp, Homo sapiens
attttatttgacttg

SEQ ID NO: 1704322 - DNA, 15 bp, Homo sapiens
ttttatttgacttgc

SEQ ID NO: 1704323 - DNA, 15 bp, Homo sapiens
tttatttgacttgca

SEQ ID NO: 1704324 - DNA, 15 bp, Homo sapiens
ttatttgacttgcaa

SEQ ID NO: 1704325 - DNA, 15 bp, Homo sapiens
tatttgacttgcaac

SEQ ID NO: 1704326 - DNA, 15 bp, Homo sapiens
atttgacttgcaact

SEQ ID NO: 1704327 - DNA, 15 bp, Homo sapiens
tttgacttgcaactg

SEQ ID NO: 1704328 - DNA, 15 bp, Homo sapiens
ttgacttgcaactgt

SEQ ID NO: 1704329 - DNA, 15 bp, Homo sapiens
tgacttgcaactgta

SEQ ID NO: 1704330 - DNA, 15 bp, Homo sapiens
gacttgcaactgtaa

SEQ ID NO: 1704331 - DNA, 15 bp, Homo sapiens
acttgcaactgtaat

SEQ ID NO: 1704332 - DNA, 15 bp, Homo sapiens
cttgcaactgtaatg

SEQ ID NO: 1704333 - DNA, 15 bp, Homo sapiens
ttgcaactgtaatga

SEQ ID NO: 1704334 - DNA, 15 bp, Homo sapiens
tgcaactgtaatgaa

SEQ ID NO: 1704335 - DNA, 15 bp, Homo sapiens
gcaactgtaatgaaa

SEQ ID NO: 1704336 - DNA, 15 bp, Homo sapiens
caactgtaatgaaat

SEQ ID NO: 1704337 - DNA, 15 bp, Homo sapiens
aactgtaatgaaatg

SEQ ID NO: 1704338 - DNA, 15 bp, Homo sapiens
actgtaatgaaatgg

SEQ ID NO: 1704339 - DNA, 15 bp, Homo sapiens
ctgtaatgaaatgga

SEQ ID NO: 1704340 - DNA, 15 bp, Homo sapiens
tgtaatgaaatggac

SEQ ID NO: 1704341 - DNA, 15 bp, Homo sapiens
gtaatgaaatggaca

SEQ ID NO: 1704342 - DNA, 15 bp, Homo sapiens
taatgaaatggacat

SEQ ID NO: 1704343 - DNA, 15 bp, Homo sapiens
aatgaaatggacatg

SEQ ID NO: 1704344 - DNA, 15 bp, Homo sapiens
atgaaatggacatga

SEQ ID NO: 1704345 - DNA, 15 bp, Homo sapiens
tgaaatggacatgac

SEQ ID NO: 1704346 - DNA, 15 bp, Homo sapiens
gaaatggacatgaca

SEQ ID NO: 1704347 - DNA, 15 bp, Homo sapiens
aaatggacatgacac

SEQ ID NO: 1704348 - DNA, 15 bp, Homo sapiens
aatggacatgacaca

SEQ ID NO: 1704349 - DNA, 15 bp, Homo sapiens
atggacatgacacag

SEQ ID NO: 1704350 - DNA, 15 bp, Homo sapiens
tggacatgacacaga

SEQ ID NO: 1704351 - DNA, 15 bp, Homo sapiens
ggacatgacacagac

SEQ ID NO: 1704352 - DNA, 15 bp, Homo sapiens
gacatgacacagact

SEQ ID NO: 1704353 - DNA, 15 bp, Homo sapiens
acatgacacagactt

SEQ ID NO: 1704354 - DNA, 15 bp, Homo sapiens
catgacacagacttt

SEQ ID NO: 1704355 - DNA, 15 bp, Homo sapiens
atgacacagactttc

SEQ ID NO: 1704356 - DNA, 15 bp, Homo sapiens
tgacacagactttca

SEQ ID NO: 1704357 - DNA, 15 bp, Homo sapiens
gacacagactttcat

SEQ ID NO: 1704358 - DNA, 15 bp, Homo sapiens
acacagactttcatt

SEQ ID NO: 1704359 - DNA, 15 bp, Homo sapiens
cacagactttcattt

SEQ ID NO: 1704360 - DNA, 15 bp, Homo sapiens
acagactttcattta

SEQ ID NO: 1704361 - DNA, 15 bp, Homo sapiens
cagactttcatttaa

SEQ ID NO: 1704362 - DNA, 15 bp, Homo sapiens
agactttcatttaaa

SEQ ID NO: 1704363 - DNA, 15 bp, Homo sapiens
gactttcatttaaaa

SEQ ID NO: 1704364 - DNA, 15 bp, Homo sapiens
actttcatttaaaat

SEQ ID NO: 1704365 - DNA, 15 bp, Homo sapiens
ctttcatttaaaatg

SEQ ID NO: 1704366 - DNA, 15 bp, Homo sapiens
tttcatttaaaatga

SEQ ID NO: 1704367 - DNA, 15 bp, Homo sapiens
ttcatttaaaatgaa

SEQ ID NO: 1704368 - DNA, 15 bp, Homo sapiens
tcatttaaaatgaat

SEQ ID NO: 1704369 - DNA, 15 bp, Homo sapiens
catttaaaatgaatg

SEQ ID NO: 1704370 - DNA, 15 bp, Homo sapiens
atttaaaatgaatgt

SEQ ID NO: 1704371 - DNA, 15 bp, Homo sapiens
tttaaaatgaatgtg

SEQ ID NO: 1704372 - DNA, 15 bp, Homo sapiens
ttaaaatgaatgtgg

SEQ ID NO: 1704373 - DNA, 15 bp, Homo sapiens
taaaatgaatgtggt

SEQ ID NO: 1704374 - DNA, 15 bp, Homo sapiens
aaaatgaatgtggtc

SEQ ID NO: 1704375 - DNA, 15 bp, Homo sapiens
aaatgaatgtggtct

SEQ ID NO: 1704376 - DNA, 15 bp, Homo sapiens
aatgaatgtggtctt

SEQ ID NO: 1704377 - DNA, 15 bp, Homo sapiens
atgaatgtggtcttt

SEQ ID NO: 1704378 - DNA, 15 bp, Homo sapiens
tgaatgtggtctttg

SEQ ID NO: 1704379 - DNA, 15 bp, Homo sapiens
gaatgtggtctttga

SEQ ID NO: 1704380 - DNA, 15 bp, Homo sapiens
aatgtggtctttgac

SEQ ID NO: 1704381 - DNA, 15 bp, Homo sapiens
atgtggtctttgact

SEQ ID NO: 1704382 - DNA, 15 bp, Homo sapiens
tgtggtctttgactt

SEQ ID NO: 1704383 - DNA, 15 bp, Homo sapiens
gtggtctttgacttt

SEQ ID NO: 1704384 - DNA, 15 bp, Homo sapiens
tggtctttgactttg

SEQ ID NO: 1704385 - DNA, 15 bp, Homo sapiens
ggtctttgactttgt

SEQ ID NO: 1704386 - DNA, 15 bp, Homo sapiens
gtctttgactttgta

SEQ ID NO: 1704387 - DNA, 15 bp, Homo sapiens
tctttgactttgtaa

SEQ ID NO: 1704388 - DNA, 15 bp, Homo sapiens
ctttgactttgtaag

SEQ ID NO: 1704389 - DNA, 15 bp, Homo sapiens
tttgactttgtaagc

SEQ ID NO: 1704390 - DNA, 15 bp, Homo sapiens
ttgactttgtaagca

SEQ ID NO: 1704391 - DNA, 15 bp, Homo sapiens
tgactttgtaagcaa

SEQ ID NO: 1704392 - DNA, 15 bp, Homo sapiens
gactttgtaagcaaa

SEQ ID NO: 1704393 - DNA, 15 bp, Homo sapiens
actttgtaagcaaag

SEQ ID NO: 1704394 - DNA, 15 bp, Homo sapiens
ctttgtaagcaaagg

SEQ ID NO: 1704395 - DNA, 15 bp, Homo sapiens
tttgtaagcaaaggg

SEQ ID NO: 1704396 - DNA, 15 bp, Homo sapiens
ttgtaagcaaaggga

SEQ ID NO: 1704397 - DNA, 15 bp, Homo sapiens
tgtaagcaaagggaa

SEQ ID NO: 1704398 - DNA, 15 bp, Homo sapiens
gtaagcaaagggaaa

SEQ ID NO: 1704399 - DNA, 15 bp, Homo sapiens
taagcaaagggaaaa

SEQ ID NO: 1704400 - DNA, 15 bp, Homo sapiens
aagcaaagggaaaat

SEQ ID NO: 1704401 - DNA, 15 bp, Homo sapiens
agcaaagggaaaatt

SEQ ID NO: 1704402 - DNA, 15 bp, Homo sapiens
gcaaagggaaaattt

SEQ ID NO: 1704403 - DNA, 15 bp, Homo sapiens
caaagggaaaatttt

SEQ ID NO: 1704404 - DNA, 15 bp, Homo sapiens
aaagggaaaattttt

SEQ ID NO: 1704405 - DNA, 15 bp, Homo sapiens
aagggaaaatttttg

SEQ ID NO: 1704406 - DNA, 15 bp, Homo sapiens
agggaaaatttttga

SEQ ID NO: 1704407 - DNA, 15 bp, Homo sapiens
gggaaaatttttgaa

SEQ ID NO: 1704408 - DNA, 15 bp, Homo sapiens
ggaaaatttttgaag

SEQ ID NO: 1704409 - DNA, 15 bp, Homo sapiens
gaaaatttttgaaga

SEQ ID NO: 1704410 - DNA, 15 bp, Homo sapiens
aaaatttttgaagat

SEQ ID NO: 1704411 - DNA, 15 bp, Homo sapiens
aaatttttgaagatc

SEQ ID NO: 1704412 - DNA, 15 bp, Homo sapiens
aatttttgaagatcc

SEQ ID NO: 1704413 - DNA, 15 bp, Homo sapiens
atttttgaagatcct

SEQ ID NO: 1704414 - DNA, 15 bp, Homo sapiens
tttttgaagatcctt

SEQ ID NO: 1704415 - DNA, 15 bp, Homo sapiens
ttttgaagatccttg

SEQ ID NO: 1704416 - DNA, 15 bp, Homo sapiens
tttgaagatccttgc

SEQ ID NO: 1704417 - DNA, 15 bp, Homo sapiens
ttgaagatccttgct

SEQ ID NO: 1704418 - DNA, 15 bp, Homo sapiens
tgaagatccttgctg

SEQ ID NO: 1704419 - DNA, 15 bp, Homo sapiens
gaagatccttgctgt

SEQ ID NO: 1704420 - DNA, 15 bp, Homo sapiens
aagatccttgctgtt

SEQ ID NO: 1704421 - DNA, 15 bp, Homo sapiens
agatccttgctgttg

SEQ ID NO: 1704422 - DNA, 15 bp, Homo sapiens
gatccttgctgttgt

SEQ ID NO: 1704423 - DNA, 15 bp, Homo sapiens
atccttgctgttgtc

SEQ ID NO: 1704424 - DNA, 15 bp, Homo sapiens
tccttgctgttgtct

SEQ ID NO: 1704425 - DNA, 15 bp, Homo sapiens
ccttgctgttgtcta

SEQ ID NO: 1704426 - DNA, 15 bp, Homo sapiens
cttgctgttgtctat

SEQ ID NO: 1704427 - DNA, 15 bp, Homo sapiens
ttgctgttgtctatc

SEQ ID NO: 1704428 - DNA, 15 bp, Homo sapiens
tgctgttgtctatcc

SEQ ID NO: 1704429 - DNA, 15 bp, Homo sapiens
gctgttgtctatccc

SEQ ID NO: 1704430 - DNA, 15 bp, Homo sapiens
ctgttgtctatccct

SEQ ID NO: 1704431 - DNA, 15 bp, Homo sapiens
tgttgtctatccctg

SEQ ID NO: 1704432 - DNA, 15 bp, Homo sapiens
gttgtctatccctgc

SEQ ID NO: 1704433 - DNA, 15 bp, Homo sapiens
ttgtctatccctgcc

SEQ ID NO: 1704434 - DNA, 15 bp, Homo sapiens
tgtctatccctgcca

SEQ ID NO: 1704435 - DNA, 15 bp, Homo sapiens
gtctatccctgccat

SEQ ID NO: 1704436 - DNA, 15 bp, Homo sapiens
tctatccctgccatc

SEQ ID NO: 1704437 - DNA, 15 bp, Homo sapiens
ctatccctgccatcc

SEQ ID NO: 1704438 - DNA, 15 bp, Homo sapiens
tatccctgccatcct

SEQ ID NO: 1704439 - DNA, 15 bp, Homo sapiens
atccctgccatcctg

SEQ ID NO: 1704440 - DNA, 15 bp, Homo sapiens
tccctgccatcctgc

SEQ ID NO: 1704441 - DNA, 15 bp, Homo sapiens
ccctgccatcctgct

SEQ ID NO: 1704442 - DNA, 15 bp, Homo sapiens
cctgccatcctgctc

SEQ ID NO: 1704443 - DNA, 15 bp, Homo sapiens
ctgccatcctgctcc

SEQ ID NO: 1704444 - DNA, 15 bp, Homo sapiens
tgccatcctgctccc

SEQ ID NO: 1704445 - DNA, 15 bp, Homo sapiens
gccatcctgctccct

SEQ ID NO: 1704446 - DNA, 15 bp, Homo sapiens
ccatcctgctcccta

SEQ ID NO: 1704447 - DNA, 15 bp, Homo sapiens
catcctgctccctaa

SEQ ID NO: 1704448 - DNA, 15 bp, Homo sapiens
atcctgctccctaaa

SEQ ID NO: 1704449 - DNA, 15 bp, Homo sapiens
tcctgctccctaaaa

SEQ ID NO: 1704450 - DNA, 15 bp, Homo sapiens
cctgctccctaaaag

SEQ ID NO: 1704451 - DNA, 15 bp, Homo sapiens
ctgctccctaaaaga

SEQ ID NO: 1704452 - DNA, 15 bp, Homo sapiens
tgctccctaaaagat

SEQ ID NO: 1704453 - DNA, 15 bp, Homo sapiens
gctccctaaaagata

SEQ ID NO: 1704454 - DNA, 15 bp, Homo sapiens
ctccctaaaagataa

SEQ ID NO: 1704455 - DNA, 15 bp, Homo sapiens
tccctaaaagataaa

SEQ ID NO: 1704456 - DNA, 15 bp, Homo sapiens
ccctaaaagataaat

SEQ ID NO: 1704457 - DNA, 15 bp, Homo sapiens
cctaaaagataaatt

SEQ ID NO: 1704458 - DNA, 15 bp, Homo sapiens
ctaaaagataaatta

SEQ ID NO: 1704459 - DNA, 15 bp, Homo sapiens
taaaagataaattac

SEQ ID NO: 1704460 - DNA, 15 bp, Homo sapiens
aaaagataaattact

SEQ ID NO: 1704461 - DNA, 15 bp, Homo sapiens
aaagataaattactg

SEQ ID NO: 1704462 - DNA, 15 bp, Homo sapiens
aagataaattactgt

SEQ ID NO: 1704463 - DNA, 15 bp, Homo sapiens
agataaattactgtg

SEQ ID NO: 1704464 - DNA, 15 bp, Homo sapiens
gataaattactgtgt

SEQ ID NO: 1704465 - DNA, 15 bp, Homo sapiens
ataaattactgtgtt

SEQ ID NO: 1704466 - DNA, 15 bp, Homo sapiens
taaattactgtgtta

SEQ ID NO: 1704467 - DNA, 15 bp, Homo sapiens
aaattactgtgttaa

SEQ ID NO: 1704468 - DNA, 15 bp, Homo sapiens
aattactgtgttaat

SEQ ID NO: 1704469 - DNA, 15 bp, Homo sapiens
attactgtgttaatg

SEQ ID NO: 1704470 - DNA, 15 bp, Homo sapiens
ttactgtgttaatga

SEQ ID NO: 1704471 - DNA, 15 bp, Homo sapiens
tactgtgttaatgaa

SEQ ID NO: 1704472 - DNA, 15 bp, Homo sapiens
actgtgttaatgaaa

SEQ ID NO: 1704473 - DNA, 15 bp, Homo sapiens
ctgtgttaatgaaag

SEQ ID NO: 1704474 - DNA, 15 bp, Homo sapiens
tgtgttaatgaaaga

SEQ ID NO: 1704475 - DNA, 15 bp, Homo sapiens
gtgttaatgaaagag

SEQ ID NO: 1704476 - DNA, 15 bp, Homo sapiens
tgttaatgaaagaga

SEQ ID NO: 1704477 - DNA, 15 bp, Homo sapiens
gttaatgaaagagag

SEQ ID NO: 1704478 - DNA, 15 bp, Homo sapiens
ttaatgaaagagagc

SEQ ID NO: 1704479 - DNA, 15 bp, Homo sapiens
taatgaaagagagca

SEQ ID NO: 1704480 - DNA, 15 bp, Homo sapiens
aatgaaagagagcac

SEQ ID NO: 1704481 - DNA, 15 bp, Homo sapiens
atgaaagagagcact

SEQ ID NO: 1704482 - DNA, 15 bp, Homo sapiens
tgaaagagagcacta

SEQ ID NO: 1704483 - DNA, 15 bp, Homo sapiens
gaaagagagcactaa

SEQ ID NO: 1704484 - DNA, 15 bp, Homo sapiens
aaagagagcactaat

SEQ ID NO: 1704485 - DNA, 15 bp, Homo sapiens
aagagagcactaatt

SEQ ID NO: 1704486 - DNA, 15 bp, Homo sapiens
agagagcactaatta

SEQ ID NO: 1704487 - DNA, 15 bp, Homo sapiens
gagagcactaattaa

SEQ ID NO: 1704488 - DNA, 15 bp, Homo sapiens
agagcactaattaag

SEQ ID NO: 1704489 - DNA, 15 bp, Homo sapiens
gagcactaattaagc

SEQ ID NO: 1704490 - DNA, 15 bp, Homo sapiens
agcactaattaagct

SEQ ID NO: 1704491 - DNA, 15 bp, Homo sapiens
gcactaattaagctt

SEQ ID NO: 1704492 - DNA, 15 bp, Homo sapiens
cactaattaagcttt

SEQ ID NO: 1704493 - DNA, 15 bp, Homo sapiens
actaattaagcttta

SEQ ID NO: 1704494 - DNA, 15 bp, Homo sapiens
ctaattaagctttat

SEQ ID NO: 1704495 - DNA, 15 bp, Homo sapiens
taattaagctttata

SEQ ID NO: 1704496 - DNA, 15 bp, Homo sapiens
aattaagctttatag

SEQ ID NO: 1704497 - DNA, 15 bp, Homo sapiens
attaagctttatagt

SEQ ID NO: 1704498 - DNA, 15 bp, Homo sapiens
ttaagctttatagtc

SEQ ID NO: 1704499 - DNA, 15 bp, Homo sapiens
taagctttatagtcg

SEQ ID NO: 1704500 - DNA, 15 bp, Homo sapiens
aagctttatagtcga

SEQ ID NO: 1704501 - DNA, 15 bp, Homo sapiens
agctttatagtcgat

SEQ ID NO: 1704502 - DNA, 15 bp, Homo sapiens
gctttatagtcgatt

SEQ ID NO: 1704503 - DNA, 15 bp, Homo sapiens
ctttatagtcgattt

SEQ ID NO: 1704504 - DNA, 15 bp, Homo sapiens
tttatagtcgatttg

SEQ ID NO: 1704505 - DNA, 15 bp, Homo sapiens
ttatagtcgatttgc

SEQ ID NO: 1704506 - DNA, 15 bp, Homo sapiens
tatagtcgatttgct

SEQ ID NO: 1704507 - DNA, 15 bp, Homo sapiens
atagtcgatttgctg

SEQ ID NO: 1704508 - DNA, 15 bp, Homo sapiens
tagtcgatttgctgt

SEQ ID NO: 1704509 - DNA, 15 bp, Homo sapiens
agtcgatttgctgta

SEQ ID NO: 1704510 - DNA, 15 bp, Homo sapiens
gtcgatttgctgtat

SEQ ID NO: 1704511 - DNA, 15 bp, Homo sapiens
tcgatttgctgtata

SEQ ID NO: 1704512 - DNA, 15 bp, Homo sapiens
cgatttgctgtatat

SEQ ID NO: 1704513 - DNA, 15 bp, Homo sapiens
gatttgctgtatata

SEQ ID NO: 1704514 - DNA, 15 bp, Homo sapiens
atttgctgtatatat

SEQ ID NO: 1704515 - DNA, 15 bp, Homo sapiens
tttgctgtatatatt

SEQ ID NO: 1704516 - DNA, 15 bp, Homo sapiens
ttgctgtatatattt

SEQ ID NO: 1704517 - DNA, 15 bp, Homo sapiens
tgctgtatatatttt

SEQ ID NO: 1704518 - DNA, 15 bp, Homo sapiens
gctgtatatattttt

SEQ ID NO: 1704519 - DNA, 15 bp, Homo sapiens
ctgtatatatttttg

SEQ ID NO: 1704520 - DNA, 15 bp, Homo sapiens
tgtatatatttttgg

SEQ ID NO: 1704521 - DNA, 15 bp, Homo sapiens
gtatatatttttggt

SEQ ID NO: 1704522 - DNA, 15 bp, Homo sapiens
tatatatttttggta

SEQ ID NO: 1704523 - DNA, 15 bp, Homo sapiens
atatatttttggtaa

SEQ ID NO: 1704524 - DNA, 15 bp, Homo sapiens
tatatttttggtaaa

SEQ ID NO: 1704525 - DNA, 15 bp, Homo sapiens
atatttttggtaaat

SEQ ID NO: 1704526 - DNA, 15 bp, Homo sapiens
tatttttggtaaatg

SEQ ID NO: 1704527 - DNA, 15 bp, Homo sapiens
atttttggtaaatgt

SEQ ID NO: 1704528 - DNA, 15 bp, Homo sapiens
tttttggtaaatgtc

SEQ ID NO: 1704529 - DNA, 15 bp, Homo sapiens
ttttggtaaatgtca

SEQ ID NO: 1704530 - DNA, 15 bp, Homo sapiens
tttggtaaatgtcaa

SEQ ID NO: 1704531 - DNA, 15 bp, Homo sapiens
ttggtaaatgtcaat

SEQ ID NO: 1704532 - DNA, 15 bp, Homo sapiens
tggtaaatgtcaata

SEQ ID NO: 1704533 - DNA, 15 bp, Homo sapiens
ggtaaatgtcaatag

SEQ ID NO: 1704534 - DNA, 15 bp, Homo sapiens
gtaaatgtcaataga

SEQ ID NO: 1704535 - DNA, 15 bp, Homo sapiens
taaatgtcaatagaa

SEQ ID NO: 1704536 - DNA, 15 bp, Homo sapiens
aaatgtcaatagaaa

SEQ ID NO: 1704537 - DNA, 15 bp, Homo sapiens
aatgtcaatagaaaa

SEQ ID NO: 1704538 - DNA, 15 bp, Homo sapiens
atgtcaatagaaaag

SEQ ID NO: 1704539 - DNA, 15 bp, Homo sapiens
tgtcaatagaaaagc

SEQ ID NO: 1704540 - DNA, 15 bp, Homo sapiens
gtcaatagaaaagct

SEQ ID NO: 1704541 - DNA, 15 bp, Homo sapiens
tcaatagaaaagctt

SEQ ID NO: 1704542 - DNA, 15 bp, Homo sapiens
caatagaaaagcttt

SEQ ID NO: 1704543 - DNA, 15 bp, Homo sapiens
aatagaaaagctttt

SEQ ID NO: 1704544 - DNA, 15 bp, Homo sapiens
atagaaaagctttta

SEQ ID NO: 1704545 - DNA, 15 bp, Homo sapiens
tagaaaagcttttaa

SEQ ID NO: 1704546 - DNA, 15 bp, Homo sapiens
agaaaagcttttaaa

SEQ ID NO: 1704547 - DNA, 15 bp, Homo sapiens
gaaaagcttttaaaa

SEQ ID NO: 1704548 - DNA, 15 bp, Homo sapiens
aaaagcttttaaaaa

SEQ ID NO: 1704549 - DNA, 15 bp, Homo sapiens
aaagcttttaaaaat

SEQ ID NO: 1704550 - DNA, 15 bp, Homo sapiens
aagcttttaaaaatc

SEQ ID NO: 1704551 - DNA, 15 bp, Homo sapiens
agcttttaaaaatca

SEQ ID NO: 1704552 - DNA, 15 bp, Homo sapiens
gcttttaaaaatcaa

SEQ ID NO: 1704553 - DNA, 15 bp, Homo sapiens
cttttaaaaatcaat

SEQ ID NO: 1704554 - DNA, 15 bp, Homo sapiens
ttttaaaaatcaata

SEQ ID NO: 1704555 - DNA, 15 bp, Homo sapiens
tttaaaaatcaatac

SEQ ID NO: 1704556 - DNA, 15 bp, Homo sapiens
ttaaaaatcaataca

SEQ ID NO: 1704557 - DNA, 15 bp, Homo sapiens
taaaaatcaatacaa

SEQ ID NO: 1704558 - DNA, 15 bp, Homo sapiens
aaaaatcaatacaaa

SEQ ID NO: 1704559 - DNA, 15 bp, Homo sapiens
aaaatcaatacaaat

SEQ ID NO: 1704560 - DNA, 15 bp, Homo sapiens
aaatcaatacaaatc

SEQ ID NO: 1704561 - DNA, 15 bp, Homo sapiens
aatcaatacaaatct

SEQ ID NO: 1704562 - DNA, 15 bp, Homo sapiens
atcaatacaaatcta

SEQ ID NO: 1704563 - DNA, 15 bp, Homo sapiens
tcaatacaaatctat

SEQ ID NO: 1704564 - DNA, 15 bp, Homo sapiens
caatacaaatctata

SEQ ID NO: 1704565 - DNA, 15 bp, Homo sapiens
aatacaaatctatat

SEQ ID NO: 1704566 - DNA, 15 bp, Homo sapiens
atacaaatctatata

SEQ ID NO: 1704567 - DNA, 15 bp, Homo sapiens
tacaaatctatataa

SEQ ID NO: 1704568 - DNA, 15 bp, Homo sapiens
acaaatctatataag

SEQ ID NO: 1704569 - DNA, 15 bp, Homo sapiens
caaatctatataagc

SEQ ID NO: 1704570 - DNA, 15 bp, Homo sapiens
aaatctatataagct

SEQ ID NO: 1704571 - DNA, 15 bp, Homo sapiens
aatctatataagcta

SEQ ID NO: 1704572 - DNA, 15 bp, Homo sapiens
atctatataagctac

SEQ ID NO: 1704573 - DNA, 15 bp, Homo sapiens
tctatataagctacc

SEQ ID NO: 1704574 - DNA, 15 bp, Homo sapiens
ctatataagctacct

SEQ ID NO: 1704575 - DNA, 15 bp, Homo sapiens
tatataagctaccta

SEQ ID NO: 1704576 - DNA, 15 bp, Homo sapiens
atataagctacctaa

SEQ ID NO: 1704577 - DNA, 15 bp, Homo sapiens
tataagctacctaaa

SEQ ID NO: 1704578 - DNA, 15 bp, Homo sapiens
ataagctacctaaaa

SEQ ID NO: 1704579 - DNA, 15 bp, Homo sapiens
taagctacctaaaat

SEQ ID NO: 1704580 - DNA, 15 bp, Homo sapiens
aagctacctaaaatc

SEQ ID NO: 1704581 - DNA, 15 bp, Homo sapiens
agctacctaaaatcc

SEQ ID NO: 1704582 - DNA, 15 bp, Homo sapiens
gctacctaaaatcct

SEQ ID NO: 1704583 - DNA, 15 bp, Homo sapiens
ctacctaaaatcctt

SEQ ID NO: 1704584 - DNA, 15 bp, Homo sapiens
tacctaaaatccttt

SEQ ID NO: 1704585 - DNA, 15 bp, Homo sapiens
acctaaaatcctttc

SEQ ID NO: 1704586 - DNA, 15 bp, Homo sapiens
cctaaaatcctttct

SEQ ID NO: 1704587 - DNA, 15 bp, Homo sapiens
ctaaaatcctttctc

SEQ ID NO: 1704588 - DNA, 15 bp, Homo sapiens
taaaatcctttctca

SEQ ID NO: 1704589 - DNA, 15 bp, Homo sapiens
aaaatcctttctcaa

SEQ ID NO: 1704590 - DNA, 15 bp, Homo sapiens
aaatcctttctcaaa

SEQ ID NO: 1704591 - DNA, 15 bp, Homo sapiens
aatcctttctcaaag

SEQ ID NO: 1704592 - DNA, 15 bp, Homo sapiens
atcctttctcaaagt

SEQ ID NO: 1704593 - DNA, 15 bp, Homo sapiens
tcctttctcaaagtg

SEQ ID NO: 1704594 - DNA, 15 bp, Homo sapiens
cctttctcaaagtgg

SEQ ID NO: 1704595 - DNA, 15 bp, Homo sapiens
ctttctcaaagtggg

SEQ ID NO: 1704596 - DNA, 15 bp, Homo sapiens
tttctcaaagtgggt

SEQ ID NO: 1704597 - DNA, 15 bp, Homo sapiens
ttctcaaagtgggta

SEQ ID NO: 1704598 - DNA, 15 bp, Homo sapiens
tctcaaagtgggtaa

SEQ ID NO: 1704599 - DNA, 15 bp, Homo sapiens
ctcaaagtgggtaat

SEQ ID NO: 1704600 - DNA, 15 bp, Homo sapiens
tcaaagtgggtaata

SEQ ID NO: 1704601 - DNA, 15 bp, Homo sapiens
caaagtgggtaataa

SEQ ID NO: 1704602 - DNA, 15 bp, Homo sapiens
aaagtgggtaataaa

SEQ ID NO: 1704603 - DNA, 15 bp, Homo sapiens
aagtgggtaataaat

SEQ ID NO: 1704604 - DNA, 15 bp, Homo sapiens
agtgggtaataaatt

SEQ ID NO: 1704605 - DNA, 15 bp, Homo sapiens
gtgggtaataaattt

SEQ ID NO: 1704606 - DNA, 15 bp, Homo sapiens
tgggtaataaattta

SEQ ID NO: 1704607 - DNA, 15 bp, Homo sapiens
gggtaataaatttaa

SEQ ID NO: 1704608 - DNA, 15 bp, Homo sapiens
ggtaataaatttaac

SEQ ID NO: 1704609 - DNA, 15 bp, Homo sapiens
gtaataaatttaaca

SEQ ID NO: 1704610 - DNA, 15 bp, Homo sapiens
taataaatttaacaa

SEQ ID NO: 1704611 - DNA, 15 bp, Homo sapiens
aataaatttaacaaa

SEQ ID NO: 1704612 - DNA, 15 bp, Homo sapiens
ataaatttaacaaat

SEQ ID NO: 1704613 - DNA, 15 bp, Homo sapiens
taaatttaacaaatt

SEQ ID NO: 1704614 - DNA, 15 bp, Homo sapiens
aaatttaacaaatta

SEQ ID NO: 1704615 - DNA, 15 bp, Homo sapiens
aatttaacaaattaa

SEQ ID NO: 1704616 - DNA, 15 bp, Homo sapiens
atttaacaaattaat

SEQ ID NO: 1704617 - DNA, 15 bp, Homo sapiens
tttaacaaattaatg

SEQ ID NO: 1704618 - DNA, 15 bp, Homo sapiens
ttaacaaattaatga

SEQ ID NO: 1704619 - DNA, 15 bp, Homo sapiens
taacaaattaatgaa

SEQ ID NO: 1704620 - DNA, 15 bp, Homo sapiens
aacaaattaatgaat

SEQ ID NO: 1704621 - DNA, 15 bp, Homo sapiens
acaaattaatgaatt

SEQ ID NO: 1704622 - DNA, 15 bp, Homo sapiens
caaattaatgaatta

SEQ ID NO: 1704623 - DNA, 15 bp, Homo sapiens
aaattaatgaattaa

SEQ ID NO: 1704624 - DNA, 15 bp, Homo sapiens
aattaatgaattaat

SEQ ID NO: 1704625 - DNA, 15 bp, Homo sapiens
attaatgaattaatt

SEQ ID NO: 1704626 - DNA, 15 bp, Homo sapiens
ttaatgaattaatta

SEQ ID NO: 1704627 - DNA, 15 bp, Homo sapiens
taatgaattaattac

SEQ ID NO: 1704628 - DNA, 15 bp, Homo sapiens
aatgaattaattacg

SEQ ID NO: 1704629 - DNA, 15 bp, Homo sapiens
atgaattaattacgc

SEQ ID NO: 1704630 - DNA, 15 bp, Homo sapiens
tgaattaattacgct

SEQ ID NO: 1704631 - DNA, 15 bp, Homo sapiens
gaattaattacgctt

SEQ ID NO: 1704632 - DNA, 15 bp, Homo sapiens
aattaattacgctta

SEQ ID NO: 1704633 - DNA, 15 bp, Homo sapiens
attaattacgcttaa

SEQ ID NO: 1704634 - DNA, 15 bp, Homo sapiens
ttaattacgcttaag

SEQ ID NO: 1704635 - DNA, 15 bp, Homo sapiens
taattacgcttaaga

SEQ ID NO: 1704636 - DNA, 15 bp, Homo sapiens
aattacgcttaagac

SEQ ID NO: 1704637 - DNA, 15 bp, Homo sapiens
attacgcttaagacc

SEQ ID NO: 1704638 - DNA, 15 bp, Homo sapiens
ttacgcttaagacca

SEQ ID NO: 1704639 - DNA, 15 bp, Homo sapiens
tacgcttaagaccaa

SEQ ID NO: 1704640 - DNA, 15 bp, Homo sapiens
acgcttaagaccaaa

SEQ ID NO: 1704641 - DNA, 15 bp, Homo sapiens
cgcttaagaccaaac

SEQ ID NO: 1704642 - DNA, 15 bp, Homo sapiens
gcttaagaccaaact

SEQ ID NO: 1704643 - DNA, 15 bp, Homo sapiens
cttaagaccaaactt

SEQ ID NO: 1704644 - DNA, 15 bp, Homo sapiens
ttaagaccaaacttg

SEQ ID NO: 1704645 - DNA, 15 bp, Homo sapiens
taagaccaaacttga

SEQ ID NO: 1704646 - DNA, 15 bp, Homo sapiens
aagaccaaacttgag

SEQ ID NO: 1704647 - DNA, 15 bp, Homo sapiens
agaccaaacttgagt

SEQ ID NO: 1704648 - DNA, 15 bp, Homo sapiens
gaccaaacttgagta

SEQ ID NO: 1704649 - DNA, 15 bp, Homo sapiens
accaaacttgagtag

SEQ ID NO: 1704650 - DNA, 15 bp, Homo sapiens
ccaaacttgagtagt

SEQ ID NO: 1704651 - DNA, 15 bp, Homo sapiens
caaacttgagtagta

SEQ ID NO: 1704652 - DNA, 15 bp, Homo sapiens
aaacttgagtagtat

SEQ ID NO: 1704653 - DNA, 15 bp, Homo sapiens
aacttgagtagtatc

SEQ ID NO: 1704654 - DNA, 15 bp, Homo sapiens
acttgagtagtatcc

SEQ ID NO: 1704655 - DNA, 15 bp, Homo sapiens
cttgagtagtatcca

SEQ ID NO: 1704656 - DNA, 15 bp, Homo sapiens
ttgagtagtatccat

SEQ ID NO: 1704657 - DNA, 15 bp, Homo sapiens
tgagtagtatccata

SEQ ID NO: 1704658 - DNA, 15 bp, Homo sapiens
gagtagtatccatag

SEQ ID NO: 1704659 - DNA, 15 bp, Homo sapiens
agtagtatccatagc

SEQ ID NO: 1704660 - DNA, 15 bp, Homo sapiens
gtagtatccatagca

SEQ ID NO: 1704661 - DNA, 15 bp, Homo sapiens
tagtatccatagcaa

SEQ ID NO: 1704662 - DNA, 15 bp, Homo sapiens
agtatccatagcaag

SEQ ID NO: 1704663 - DNA, 15 bp, Homo sapiens
gtatccatagcaagg

SEQ ID NO: 1704664 - DNA, 15 bp, Homo sapiens
tatccatagcaagga

SEQ ID NO: 1704665 - DNA, 15 bp, Homo sapiens
atccatagcaaggaa

SEQ ID NO: 1704666 - DNA, 15 bp, Homo sapiens
tccatagcaaggaaa

SEQ ID NO: 1704667 - DNA, 15 bp, Homo sapiens
ccatagcaaggaaaa

SEQ ID NO: 1704668 - DNA, 15 bp, Homo sapiens
catagcaaggaaaaa

SEQ ID NO: 1704669 - DNA, 15 bp, Homo sapiens
atagcaaggaaaaac

SEQ ID NO: 1704670 - DNA, 15 bp, Homo sapiens
tagcaaggaaaaacg

SEQ ID NO: 1704671 - DNA, 15 bp, Homo sapiens
agcaaggaaaaacga

SEQ ID NO: 1704672 - DNA, 15 bp, Homo sapiens
gcaaggaaaaacgat

SEQ ID NO: 1704673 - DNA, 15 bp, Homo sapiens
caaggaaaaacgatg

SEQ ID NO: 1704674 - DNA, 15 bp, Homo sapiens
aaggaaaaacgatgg

SEQ ID NO: 1704675 - DNA, 15 bp, Homo sapiens
aggaaaaacgatggc

SEQ ID NO: 1704676 - DNA, 15 bp, Homo sapiens
ggaaaaacgatggcc

SEQ ID NO: 1704677 - DNA, 15 bp, Homo sapiens
gaaaaacgatggcca

SEQ ID NO: 1704678 - DNA, 15 bp, Homo sapiens
aaaaacgatggccaa

SEQ ID NO: 1704679 - DNA, 15 bp, Homo sapiens
aaaacgatggccaaa

SEQ ID NO: 1704680 - DNA, 15 bp, Homo sapiens
aaacgatggccaaaa

SEQ ID NO: 1704681 - DNA, 15 bp, Homo sapiens
aacgatggccaaaaa

SEQ ID NO: 1704682 - DNA, 15 bp, Homo sapiens
acgatggccaaaaaa

SEQ ID NO: 1704683 - DNA, 15 bp, Homo sapiens
cgatggccaaaaaag

SEQ ID NO: 1704684 - DNA, 15 bp, Homo sapiens
gatggccaaaaaaga

SEQ ID NO: 1704685 - DNA, 15 bp, Homo sapiens
atggccaaaaaagac

SEQ ID NO: 1704686 - DNA, 15 bp, Homo sapiens
tggccaaaaaagaca

SEQ ID NO: 1704687 - DNA, 15 bp, Homo sapiens
ggccaaaaaagacaa

SEQ ID NO: 1704688 - DNA, 15 bp, Homo sapiens
gccaaaaaagacaac

SEQ ID NO: 1704689 - DNA, 15 bp, Homo sapiens
ccaaaaaagacaacg

SEQ ID NO: 1704690 - DNA, 15 bp, Homo sapiens
caaaaaagacaacgg

SEQ ID NO: 1704691 - DNA, 15 bp, Homo sapiens
aaaaaagacaacgga

SEQ ID NO: 1704692 - DNA, 15 bp, Homo sapiens
aaaaagacaacggag

SEQ ID NO: 1704693 - DNA, 15 bp, Homo sapiens
aaaagacaacggagg

SEQ ID NO: 1704694 - DNA, 15 bp, Homo sapiens
aaagacaacggaggt

SEQ ID NO: 1704695 - DNA, 15 bp, Homo sapiens
aagacaacggaggtc

SEQ ID NO: 1704696 - DNA, 15 bp, Homo sapiens
agacaacggaggtcc

SEQ ID NO: 1704697 - DNA, 15 bp, Homo sapiens
gacaacggaggtcca

SEQ ID NO: 1704698 - DNA, 15 bp, Homo sapiens
acaacggaggtccat

SEQ ID NO: 1704699 - DNA, 15 bp, Homo sapiens
caacggaggtccatg

SEQ ID NO: 1704700 - DNA, 15 bp, Homo sapiens
aacggaggtccatgt

SEQ ID NO: 1704701 - DNA, 15 bp, Homo sapiens
acggaggtccatgta

SEQ ID NO: 1704702 - DNA, 15 bp, Homo sapiens
cggaggtccatgtat

SEQ ID NO: 1704703 - DNA, 15 bp, Homo sapiens
ggaggtccatgtata

SEQ ID NO: 1704704 - DNA, 15 bp, Homo sapiens
gaggtccatgtataa

SEQ ID NO: 1704705 - DNA, 15 bp, Homo sapiens
aggtccatgtataat

SEQ ID NO: 1704706 - DNA, 15 bp, Homo sapiens
ggtccatgtataata

SEQ ID NO: 1704707 - DNA, 15 bp, Homo sapiens
gtccatgtataatat

SEQ ID NO: 1704708 - DNA, 15 bp, Homo sapiens
tccatgtataatatt

SEQ ID NO: 1704709 - DNA, 15 bp, Homo sapiens
ccatgtataatattt

SEQ ID NO: 1704710 - DNA, 15 bp, Homo sapiens
catgtataatatttg

SEQ ID NO: 1704711 - DNA, 15 bp, Homo sapiens
atgtataatatttgc

SEQ ID NO: 1704712 - DNA, 15 bp, Homo sapiens
tgtataatatttgcc

SEQ ID NO: 1704713 - DNA, 15 bp, Homo sapiens
gtataatatttgcct

SEQ ID NO: 1704714 - DNA, 15 bp, Homo sapiens
tataatatttgcctt

SEQ ID NO: 1704715 - DNA, 15 bp, Homo sapiens
taatatttgcctttg

SEQ ID NO: 1704716 - DNA, 15 bp, Homo sapiens
aatatttgcctttga

SEQ ID NO: 1704717 - DNA, 15 bp, Homo sapiens
atatttgcctttgag

SEQ ID NO: 1704718 - DNA, 15 bp, Homo sapiens
tatttgcctttgaga

SEQ ID NO: 1704719 - DNA, 15 bp, Homo sapiens
atttgcctttgagaa

SEQ ID NO: 1704720 - DNA, 15 bp, Homo sapiens
tttgcctttgagaag

SEQ ID NO: 1704721 - DNA, 15 bp, Homo sapiens
ttgcctttgagaaga

SEQ ID NO: 1704722 - DNA, 15 bp, Homo sapiens
tgcctttgagaagat

SEQ ID NO: 1704723 - DNA, 15 bp, Homo sapiens
gcctttgagaagata

SEQ ID NO: 1704724 - DNA, 15 bp, Homo sapiens
cctttgagaagataa

SEQ ID NO: 1704725 - DNA, 15 bp, Homo sapiens
ctttgagaagataaa

SEQ ID NO: 1704726 - DNA, 15 bp, Homo sapiens
tttgagaagataaaa

SEQ ID NO: 1704727 - DNA, 15 bp, Homo sapiens
ttgagaagataaaaa

SEQ ID NO: 1704728 - DNA, 15 bp, Homo sapiens
tgagaagataaaaaa

SEQ ID NO: 1704729 - DNA, 15 bp, Homo sapiens
gagaagataaaaaac

SEQ ID NO: 1704730 - DNA, 15 bp, Homo sapiens
agaagataaaaaact

SEQ ID NO: 1704731 - DNA, 15 bp, Homo sapiens
gaagataaaaaactg

SEQ ID NO: 1704732 - DNA, 15 bp, Homo sapiens
aagataaaaaactgc

SEQ ID NO: 1704733 - DNA, 15 bp, Homo sapiens
agataaaaaactgct

SEQ ID NO: 1704734 - DNA, 15 bp, Homo sapiens
gataaaaaactgcta

SEQ ID NO: 1704735 - DNA, 15 bp, Homo sapiens
ataaaaaactgctag

SEQ ID NO: 1704736 - DNA, 15 bp, Homo sapiens
taaaaaactgctagc

SEQ ID NO: 1704737 - DNA, 15 bp, Homo sapiens
aaaaaactgctagct

SEQ ID NO: 1704738 - DNA, 15 bp, Homo sapiens
aaaaactgctagctc

SEQ ID NO: 1704739 - DNA, 15 bp, Homo sapiens
aaaactgctagctct

SEQ ID NO: 1704740 - DNA, 15 bp, Homo sapiens
aaactgctagctctg

SEQ ID NO: 1704741 - DNA, 15 bp, Homo sapiens
aactgctagctctga

SEQ ID NO: 1704742 - DNA, 15 bp, Homo sapiens
actgctagctctgac

SEQ ID NO: 1704743 - DNA, 15 bp, Homo sapiens
ctgctagctctgact

SEQ ID NO: 1704744 - DNA, 15 bp, Homo sapiens
tgctagctctgactt

SEQ ID NO: 1704745 - DNA, 15 bp, Homo sapiens
gctagctctgactta

SEQ ID NO: 1704746 - DNA, 15 bp, Homo sapiens
ctagctctgacttaa

SEQ ID NO: 1704747 - DNA, 15 bp, Homo sapiens
tagctctgacttaat

SEQ ID NO: 1704748 - DNA, 15 bp, Homo sapiens
agctctgacttaatg

SEQ ID NO: 1704749 - DNA, 15 bp, Homo sapiens
gctctgacttaatgg

SEQ ID NO: 1704750 - DNA, 15 bp, Homo sapiens
ctctgacttaatggc

SEQ ID NO: 1704751 - DNA, 15 bp, Homo sapiens
tctgacttaatggca

SEQ ID NO: 1704752 - DNA, 15 bp, Homo sapiens
ctgacttaatggcaa

SEQ ID NO: 1704753 - DNA, 15 bp, Homo sapiens
tgacttaatggcaac

SEQ ID NO: 1704754 - DNA, 15 bp, Homo sapiens
gacttaatggcaact

SEQ ID NO: 1704755 - DNA, 15 bp, Homo sapiens
acttaatggcaacta

SEQ ID NO: 1704756 - DNA, 15 bp, Homo sapiens
cttaatggcaactaa

SEQ ID NO: 1704757 - DNA, 15 bp, Homo sapiens
ttaatggcaactaaa

SEQ ID NO: 1704758 - DNA, 15 bp, Homo sapiens
taatggcaactaaag

SEQ ID NO: 1704759 - DNA, 15 bp, Homo sapiens
aatggcaactaaaga

SEQ ID NO: 1704760 - DNA, 15 bp, Homo sapiens
atggcaactaaagag

SEQ ID NO: 1704761 - DNA, 15 bp, Homo sapiens
tggcaactaaagaga

SEQ ID NO: 1704762 - DNA, 15 bp, Homo sapiens
ggcaactaaagagaa

SEQ ID NO: 1704763 - DNA, 15 bp, Homo sapiens
gcaactaaagagaaa

SEQ ID NO: 1704764 - DNA, 15 bp, Homo sapiens
caactaaagagaaat

SEQ ID NO: 1704765 - DNA, 15 bp, Homo sapiens
aactaaagagaaatg

SEQ ID NO: 1704766 - DNA, 15 bp, Homo sapiens
actaaagagaaatgc

SEQ ID NO: 1704767 - DNA, 15 bp, Homo sapiens
ctaaagagaaatgct

SEQ ID NO: 1704768 - DNA, 15 bp, Homo sapiens
taaagagaaatgctg

SEQ ID NO: 1704769 - DNA, 15 bp, Homo sapiens
aaagagaaatgctga

SEQ ID NO: 1704770 - DNA, 15 bp, Homo sapiens
aagagaaatgctgat

SEQ ID NO: 1704771 - DNA, 15 bp, Homo sapiens
agagaaatgctgatt

SEQ ID NO: 1704772 - DNA, 15 bp, Homo sapiens
gagaaatgctgatta

SEQ ID NO: 1704773 - DNA, 15 bp, Homo sapiens
agaaatgctgattaa

SEQ ID NO: 1704774 - DNA, 15 bp, Homo sapiens
gaaatgctgattaat

SEQ ID NO: 1704775 - DNA, 15 bp, Homo sapiens
aaatgctgattaatg

SEQ ID NO: 1704776 - DNA, 15 bp, Homo sapiens
aatgctgattaatgt

SEQ ID NO: 1704777 - DNA, 15 bp, Homo sapiens
atgctgattaatgtc

SEQ ID NO: 1704778 - DNA, 15 bp, Homo sapiens
tgctgattaatgtcc

SEQ ID NO: 1704779 - DNA, 15 bp, Homo sapiens
gctgattaatgtcca

SEQ ID NO: 1704780 - DNA, 15 bp, Homo sapiens
ctgattaatgtccac

SEQ ID NO: 1704781 - DNA, 15 bp, Homo sapiens
tgattaatgtccact

SEQ ID NO: 1704782 - DNA, 15 bp, Homo sapiens
gattaatgtccactc

SEQ ID NO: 1704783 - DNA, 15 bp, Homo sapiens
attaatgtccactct

SEQ ID NO: 1704784 - DNA, 15 bp, Homo sapiens
ttaatgtccactctg

SEQ ID NO: 1704785 - DNA, 15 bp, Homo sapiens
taatgtccactctgt

SEQ ID NO: 1704786 - DNA, 15 bp, Homo sapiens
aatgtccactctgtg

SEQ ID NO: 1704787 - DNA, 15 bp, Homo sapiens
atgtccactctgtgt

SEQ ID NO: 1704788 - DNA, 15 bp, Homo sapiens
tgtccactctgtgtg

SEQ ID NO: 1704789 - DNA, 15 bp, Homo sapiens
gtccactctgtgtga

SEQ ID NO: 1704790 - DNA, 15 bp, Homo sapiens
tccactctgtgtgat

SEQ ID NO: 1704791 - DNA, 15 bp, Homo sapiens
ccactctgtgtgatg

SEQ ID NO: 1704792 - DNA, 15 bp, Homo sapiens
cactctgtgtgatga

SEQ ID NO: 1704793 - DNA, 15 bp, Homo sapiens
actctgtgtgatgaa

SEQ ID NO: 1704794 - DNA, 15 bp, Homo sapiens
ctctgtgtgatgaaa

SEQ ID NO: 1704795 - DNA, 15 bp, Homo sapiens
tctgtgtgatgaaaa

SEQ ID NO: 1704796 - DNA, 15 bp, Homo sapiens
ctgtgtgatgaaaat

SEQ ID NO: 1704797 - DNA, 15 bp, Homo sapiens
tgtgtgatgaaaatg

SEQ ID NO: 1704798 - DNA, 15 bp, Homo sapiens
gtgtgatgaaaatgt

SEQ ID NO: 1704799 - DNA, 15 bp, Homo sapiens
tgtgatgaaaatgtg

SEQ ID NO: 1704800 - DNA, 15 bp, Homo sapiens
gtgatgaaaatgtgc

SEQ ID NO: 1704801 - DNA, 15 bp, Homo sapiens
tgatgaaaatgtgca

SEQ ID NO: 1704802 - DNA, 15 bp, Homo sapiens
gatgaaaatgtgcaa

SEQ ID NO: 1704803 - DNA, 15 bp, Homo sapiens
atgaaaatgtgcaat

SEQ ID NO: 1704804 - DNA, 15 bp, Homo sapiens
tgaaaatgtgcaatt

SEQ ID NO: 1704805 - DNA, 15 bp, Homo sapiens
gaaaatgtgcaattt

SEQ ID NO: 1704806 - DNA, 15 bp, Homo sapiens
aaaatgtgcaattta

SEQ ID NO: 1704807 - DNA, 15 bp, Homo sapiens
aaatgtgcaatttag

SEQ ID NO: 1704808 - DNA, 15 bp, Homo sapiens
aatgtgcaatttaga

SEQ ID NO: 1704809 - DNA, 15 bp, Homo sapiens
atgtgcaatttagaa

SEQ ID NO: 1704810 - DNA, 15 bp, Homo sapiens
tgtgcaatttagaaa

SEQ ID NO: 1704811 - DNA, 15 bp, Homo sapiens
gtgcaatttagaaat

SEQ ID NO: 1704812 - DNA, 15 bp, Homo sapiens
tgcaatttagaaatc

SEQ ID NO: 1704813 - DNA, 15 bp, Homo sapiens
gcaatttagaaatcc

SEQ ID NO: 1704814 - DNA, 15 bp, Homo sapiens
caatttagaaatcca

SEQ ID NO: 1704815 - DNA, 15 bp, Homo sapiens
aatttagaaatccaa

SEQ ID NO: 1704816 - DNA, 15 bp, Homo sapiens
atttagaaatccaaa

SEQ ID NO: 1704817 - DNA, 15 bp, Homo sapiens
tttagaaatccaaat

SEQ ID NO: 1704818 - DNA, 15 bp, Homo sapiens
ttagaaatccaaatg

SEQ ID NO: 1704819 - DNA, 15 bp, Homo sapiens
tagaaatccaaatgc

SEQ ID NO: 1704820 - DNA, 15 bp, Homo sapiens
agaaatccaaatgca

SEQ ID NO: 1704821 - DNA, 15 bp, Homo sapiens
gaaatccaaatgcag

SEQ ID NO: 1704822 - DNA, 15 bp, Homo sapiens
aaatccaaatgcagt

SEQ ID NO: 1704823 - DNA, 15 bp, Homo sapiens
aatccaaatgcagta

SEQ ID NO: 1704824 - DNA, 15 bp, Homo sapiens
atccaaatgcagtac

SEQ ID NO: 1704825 - DNA, 15 bp, Homo sapiens
tccaaatgcagtact

SEQ ID NO: 1704826 - DNA, 15 bp, Homo sapiens
ccaaatgcagtacta

SEQ ID NO: 1704827 - DNA, 15 bp, Homo sapiens
caaatgcagtactac

SEQ ID NO: 1704828 - DNA, 15 bp, Homo sapiens
aaatgcagtactact

SEQ ID NO: 1704829 - DNA, 15 bp, Homo sapiens
aatgcagtactactt

SEQ ID NO: 1704830 - DNA, 15 bp, Homo sapiens
atgcagtactactta

SEQ ID NO: 1704831 - DNA, 15 bp, Homo sapiens
tgcagtactacttac

SEQ ID NO: 1704832 - DNA, 15 bp, Homo sapiens
gcagtactacttacc

SEQ ID NO: 1704833 - DNA, 15 bp, Homo sapiens
cagtactacttacct

SEQ ID NO: 1704834 - DNA, 15 bp, Homo sapiens
agtactacttacctc

SEQ ID NO: 1704835 - DNA, 15 bp, Homo sapiens
gtactacttacctct

SEQ ID NO: 1704836 - DNA, 15 bp, Homo sapiens
tactacttacctctg

SEQ ID NO: 1704837 - DNA, 15 bp, Homo sapiens
actacttacctctgg

SEQ ID NO: 1704838 - DNA, 15 bp, Homo sapiens
ctacttacctctggg

SEQ ID NO: 1704839 - DNA, 15 bp, Homo sapiens
tacttacctctgggt

SEQ ID NO: 1704840 - DNA, 15 bp, Homo sapiens
acttacctctgggta

SEQ ID NO: 1704841 - DNA, 15 bp, Homo sapiens
cttacctctgggtac

SEQ ID NO: 1704842 - DNA, 15 bp, Homo sapiens
ttacctctgggtact

SEQ ID NO: 1704843 - DNA, 15 bp, Homo sapiens
tacctctgggtactg

SEQ ID NO: 1704844 - DNA, 15 bp, Homo sapiens
acctctgggtactga

SEQ ID NO: 1704845 - DNA, 15 bp, Homo sapiens
cctctgggtactgat

SEQ ID NO: 1704846 - DNA, 15 bp, Homo sapiens
ctctgggtactgatt

SEQ ID NO: 1704847 - DNA, 15 bp, Homo sapiens
tctgggtactgatta

SEQ ID NO: 1704848 - DNA, 15 bp, Homo sapiens
ctgggtactgattaa

SEQ ID NO: 1704849 - DNA, 15 bp, Homo sapiens
tgggtactgattaag

SEQ ID NO: 1704850 - DNA, 15 bp, Homo sapiens
gggtactgattaagg

SEQ ID NO: 1704851 - DNA, 15 bp, Homo sapiens
ggtactgattaagga

SEQ ID NO: 1704852 - DNA, 15 bp, Homo sapiens
gtactgattaaggaa

SEQ ID NO: 1704853 - DNA, 15 bp, Homo sapiens
tactgattaaggaaa

SEQ ID NO: 1704854 - DNA, 15 bp, Homo sapiens
actgattaaggaaaa

SEQ ID NO: 1704855 - DNA, 15 bp, Homo sapiens
ctgattaaggaaaac

SEQ ID NO: 1704856 - DNA, 15 bp, Homo sapiens
tgattaaggaaaacc

SEQ ID NO: 1704857 - DNA, 15 bp, Homo sapiens
gattaaggaaaacct

SEQ ID NO: 1704858 - DNA, 15 bp, Homo sapiens
attaaggaaaacctt

SEQ ID NO: 1704859 - DNA, 15 bp, Homo sapiens
ttaaggaaaacctta

SEQ ID NO: 1704860 - DNA, 15 bp, Homo sapiens
taaggaaaaccttac

SEQ ID NO: 1704861 - DNA, 15 bp, Homo sapiens
aaggaaaaccttact

SEQ ID NO: 1704862 - DNA, 15 bp, Homo sapiens
aggaaaaccttactg

SEQ ID NO: 1704863 - DNA, 15 bp, Homo sapiens
ggaaaaccttactga

SEQ ID NO: 1704864 - DNA, 15 bp, Homo sapiens
gaaaaccttactgaa

SEQ ID NO: 1704865 - DNA, 15 bp, Homo sapiens
aaaaccttactgaaa

SEQ ID NO: 1704866 - DNA, 15 bp, Homo sapiens
aaaccttactgaaaa

SEQ ID NO: 1704867 - DNA, 15 bp, Homo sapiens
aaccttactgaaaac

SEQ ID NO: 1704868 - DNA, 15 bp, Homo sapiens
accttactgaaaaca

SEQ ID NO: 1704869 - DNA, 15 bp, Homo sapiens
ccttactgaaaacat

SEQ ID NO: 1704870 - DNA, 15 bp, Homo sapiens
cttactgaaaacatc

SEQ ID NO: 1704871 - DNA, 15 bp, Homo sapiens
ttactgaaaacatct

SEQ ID NO: 1704872 - DNA, 15 bp, Homo sapiens
tactgaaaacatctc

SEQ ID NO: 1704873 - DNA, 15 bp, Homo sapiens
actgaaaacatctca

SEQ ID NO: 1704874 - DNA, 15 bp, Homo sapiens
ctgaaaacatctcaa

SEQ ID NO: 1704875 - DNA, 15 bp, Homo sapiens
tgaaaacatctcaat

SEQ ID NO: 1704876 - DNA, 15 bp, Homo sapiens
gaaaacatctcaatg

SEQ ID NO: 1704877 - DNA, 15 bp, Homo sapiens
aaaacatctcaatga

SEQ ID NO: 1704878 - DNA, 15 bp, Homo sapiens
aaacatctcaatgat

SEQ ID NO: 1704879 - DNA, 15 bp, Homo sapiens
aacatctcaatgata

SEQ ID NO: 1704880 - DNA, 15 bp, Homo sapiens
acatctcaatgataa

SEQ ID NO: 1704881 - DNA, 15 bp, Homo sapiens
catctcaatgataac

SEQ ID NO: 1704882 - DNA, 15 bp, Homo sapiens
atctcaatgataact

SEQ ID NO: 1704883 - DNA, 15 bp, Homo sapiens
tctcaatgataactg

SEQ ID NO: 1704884 - DNA, 15 bp, Homo sapiens
ctcaatgataactgt

SEQ ID NO: 1704885 - DNA, 15 bp, Homo sapiens
tcaatgataactgtt

SEQ ID NO: 1704886 - DNA, 15 bp, Homo sapiens
caatgataactgttg

SEQ ID NO: 1704887 - DNA, 15 bp, Homo sapiens
aatgataactgttga

SEQ ID NO: 1704888 - DNA, 15 bp, Homo sapiens
atgataactgttgac

SEQ ID NO: 1704889 - DNA, 15 bp, Homo sapiens
tgataactgttgaca

SEQ ID NO: 1704890 - DNA, 15 bp, Homo sapiens
gataactgttgacac

SEQ ID NO: 1704891 - DNA, 15 bp, Homo sapiens
ataactgttgacacc

SEQ ID NO: 1704892 - DNA, 15 bp, Homo sapiens
taactgttgacacca

SEQ ID NO: 1704893 - DNA, 15 bp, Homo sapiens
aactgttgacaccac

SEQ ID NO: 1704894 - DNA, 15 bp, Homo sapiens
actgttgacaccact

SEQ ID NO: 1704895 - DNA, 15 bp, Homo sapiens
ctgttgacaccactt

SEQ ID NO: 1704896 - DNA, 15 bp, Homo sapiens
tgttgacaccactta

SEQ ID NO: 1704897 - DNA, 15 bp, Homo sapiens
gttgacaccacttaa

SEQ ID NO: 1704898 - DNA, 15 bp, Homo sapiens
ttgacaccacttaat

SEQ ID NO: 1704899 - DNA, 15 bp, Homo sapiens
tgacaccacttaatg

SEQ ID NO: 1704900 - DNA, 15 bp, Homo sapiens
gacaccacttaatgt

SEQ ID NO: 1704901 - DNA, 15 bp, Homo sapiens
acaccacttaatgta

SEQ ID NO: 1704902 - DNA, 15 bp, Homo sapiens
caccacttaatgtat

SEQ ID NO: 1704903 - DNA, 15 bp, Homo sapiens
accacttaatgtatt

SEQ ID NO: 1704904 - DNA, 15 bp, Homo sapiens
ccacttaatgtattt

SEQ ID NO: 1704905 - DNA, 15 bp, Homo sapiens
cacttaatgtatttt

SEQ ID NO: 1704906 - DNA, 15 bp, Homo sapiens
acttaatgtatttta

SEQ ID NO: 1704907 - DNA, 15 bp, Homo sapiens
cttaatgtattttaa

SEQ ID NO: 1704908 - DNA, 15 bp, Homo sapiens
ttaatgtattttaaa

SEQ ID NO: 1704909 - DNA, 15 bp, Homo sapiens
taatgtattttaaaa

SEQ ID NO: 1704910 - DNA, 15 bp, Homo sapiens
aatgtattttaaaaa

SEQ ID NO: 1704911 - DNA, 15 bp, Homo sapiens
atgtattttaaaaat

SEQ ID NO: 1704912 - DNA, 15 bp, Homo sapiens
tttaaaaattatttt

SEQ ID NO: 1704913 - DNA, 15 bp, Homo sapiens
ttaaaaattattttg

SEQ ID NO: 1704914 - DNA, 15 bp, Homo sapiens
taaaaattattttgt

SEQ ID NO: 1704915 - DNA, 15 bp, Homo sapiens
aaaaattattttgtc

SEQ ID NO: 1704916 - DNA, 15 bp, Homo sapiens
aaaattattttgtct

SEQ ID NO: 1704917 - DNA, 15 bp, Homo sapiens
aaattattttgtctt

SEQ ID NO: 1704918 - DNA, 15 bp, Homo sapiens
aattattttgtctta

SEQ ID NO: 1704919 - DNA, 15 bp, Homo sapiens
attattttgtcttat

SEQ ID NO: 1704920 - DNA, 15 bp, Homo sapiens
ttattttgtcttatt

SEQ ID NO: 1704921 - DNA, 15 bp, Homo sapiens
tattttgtcttattt

SEQ ID NO: 1704922 - DNA, 15 bp, Homo sapiens
attttgtcttatttc

SEQ ID NO: 1704923 - DNA, 15 bp, Homo sapiens
ttttgtcttatttca

SEQ ID NO: 1704924 - DNA, 15 bp, Homo sapiens
tttgtcttatttcat

SEQ ID NO: 1704925 - DNA, 15 bp, Homo sapiens
ttgtcttatttcata

SEQ ID NO: 1704926 - DNA, 15 bp, Homo sapiens
tgtcttatttcatat

SEQ ID NO: 1704927 - DNA, 15 bp, Homo sapiens
gtcttatttcatata

SEQ ID NO: 1704928 - DNA, 15 bp, Homo sapiens
tcttatttcatatat

SEQ ID NO: 1704929 - DNA, 15 bp, Homo sapiens
cttatttcatatata

SEQ ID NO: 1704930 - DNA, 15 bp, Homo sapiens
ttatttcatatatac

SEQ ID NO: 1704931 - DNA, 15 bp, Homo sapiens
tatttcatatatact

SEQ ID NO: 1704932 - DNA, 15 bp, Homo sapiens
atttcatatatactg

SEQ ID NO: 1704933 - DNA, 15 bp, Homo sapiens
tttcatatatactgg

SEQ ID NO: 1704934 - DNA, 15 bp, Homo sapiens
ttcatatatactggc

SEQ ID NO: 1704935 - DNA, 15 bp, Homo sapiens
tcatatatactggcc

SEQ ID NO: 1704936 - DNA, 15 bp, Homo sapiens
catatatactggcct

SEQ ID NO: 1704937 - DNA, 15 bp, Homo sapiens
atatatactggccta

SEQ ID NO: 1704938 - DNA, 15 bp, Homo sapiens
tatatactggcctac

SEQ ID NO: 1704939 - DNA, 15 bp, Homo sapiens
atatactggcctacc

SEQ ID NO: 1704940 - DNA, 15 bp, Homo sapiens
tatactggcctacct

SEQ ID NO: 1704941 - DNA, 15 bp, Homo sapiens
atactggcctacctt

SEQ ID NO: 1704942 - DNA, 15 bp, Homo sapiens
tactggcctacctta

SEQ ID NO: 1704943 - DNA, 15 bp, Homo sapiens
actggcctaccttac

SEQ ID NO: 1704944 - DNA, 15 bp, Homo sapiens
ctggcctaccttaca

SEQ ID NO: 1704945 - DNA, 15 bp, Homo sapiens
tggcctaccttacag

SEQ ID NO: 1704946 - DNA, 15 bp, Homo sapiens
ggcctaccttacagc

SEQ ID NO: 1704947 - DNA, 15 bp, Homo sapiens
gcctaccttacagct

SEQ ID NO: 1704948 - DNA, 15 bp, Homo sapiens
cctaccttacagctt

SEQ ID NO: 1704949 - DNA, 15 bp, Homo sapiens
ctaccttacagcttt

SEQ ID NO: 1704950 - DNA, 15 bp, Homo sapiens
taccttacagcttta

SEQ ID NO: 1704951 - DNA, 15 bp, Homo sapiens
accttacagctttag

SEQ ID NO: 1704952 - DNA, 15 bp, Homo sapiens
ccttacagctttagc

SEQ ID NO: 1704953 - DNA, 15 bp, Homo sapiens
cttacagctttagcc

SEQ ID NO: 1704954 - DNA, 15 bp, Homo sapiens
ttacagctttagcca

SEQ ID NO: 1704955 - DNA, 15 bp, Homo sapiens
tacagctttagccag

SEQ ID NO: 1704956 - DNA, 15 bp, Homo sapiens
acagctttagccagt

SEQ ID NO: 1704957 - DNA, 15 bp, Homo sapiens
cagctttagccagtt

SEQ ID NO: 1704958 - DNA, 15 bp, Homo sapiens
agctttagccagtta

SEQ ID NO: 1704959 - DNA, 15 bp, Homo sapiens
gctttagccagttac

SEQ ID NO: 1704960 - DNA, 15 bp, Homo sapiens
ctttagccagttact

SEQ ID NO: 1704961 - DNA, 15 bp, Homo sapiens
tttagccagttacta

SEQ ID NO: 1704962 - DNA, 15 bp, Homo sapiens
ttagccagttactat

SEQ ID NO: 1704963 - DNA, 15 bp, Homo sapiens
tagccagttactata

SEQ ID NO: 1704964 - DNA, 15 bp, Homo sapiens
agccagttactatat

SEQ ID NO: 1704965 - DNA, 15 bp, Homo sapiens
gccagttactatatt

SEQ ID NO: 1704966 - DNA, 15 bp, Homo sapiens
ccagttactatatta

SEQ ID NO: 1704967 - DNA, 15 bp, Homo sapiens
cagttactatattat

SEQ ID NO: 1704968 - DNA, 15 bp, Homo sapiens
agttactatattata

SEQ ID NO: 1704969 - DNA, 15 bp, Homo sapiens
gttactatattatag

SEQ ID NO: 1704970 - DNA, 15 bp, Homo sapiens
ttactatattataga

SEQ ID NO: 1704971 - DNA, 15 bp, Homo sapiens
tactatattatagaa

SEQ ID NO: 1704972 - DNA, 15 bp, Homo sapiens
actatattatagaac

SEQ ID NO: 1704973 - DNA, 15 bp, Homo sapiens
ctatattatagaacc

SEQ ID NO: 1704974 - DNA, 15 bp, Homo sapiens
tatattatagaacct

SEQ ID NO: 1704975 - DNA, 15 bp, Homo sapiens
atattatagaacctt

SEQ ID NO: 1704976 - DNA, 15 bp, Homo sapiens
tattatagaaccttg

SEQ ID NO: 1704977 - DNA, 15 bp, Homo sapiens
attatagaaccttga

SEQ ID NO: 1704978 - DNA, 15 bp, Homo sapiens
ttatagaaccttgac

SEQ ID NO: 1704979 - DNA, 15 bp, Homo sapiens
tatagaaccttgaca

SEQ ID NO: 1704980 - DNA, 15 bp, Homo sapiens
atagaaccttgacat

SEQ ID NO: 1704981 - DNA, 15 bp, Homo sapiens
tagaaccttgacatt

SEQ ID NO: 1704982 - DNA, 15 bp, Homo sapiens
agaaccttgacattt

SEQ ID NO: 1704983 - DNA, 15 bp, Homo sapiens
gaaccttgacattta

SEQ ID NO: 1704984 - DNA, 15 bp, Homo sapiens
aaccttgacatttat

SEQ ID NO: 1704985 - DNA, 15 bp, Homo sapiens
accttgacatttatt

SEQ ID NO: 1704986 - DNA, 15 bp, Homo sapiens
ccttgacatttattt

SEQ ID NO: 1704987 - DNA, 15 bp, Homo sapiens
cttgacatttatttt

SEQ ID NO: 1704988 - DNA, 15 bp, Homo sapiens
ttgacatttatttta

SEQ ID NO: 1704989 - DNA, 15 bp, Homo sapiens
tgacatttattttaa

SEQ ID NO: 1704990 - DNA, 15 bp, Homo sapiens
aattctccacggatt

SEQ ID NO: 1704991 - DNA, 15 bp, Homo sapiens
attctccacggattg

SEQ ID NO: 1704992 - DNA, 15 bp, Homo sapiens
ttctccacggattgc

SEQ ID NO: 1704993 - DNA, 15 bp, Homo sapiens
tctccacggattgca

SEQ ID NO: 1704994 - DNA, 15 bp, Homo sapiens
ctccacggattgcac

SEQ ID NO: 1704995 - DNA, 15 bp, Homo sapiens
tccacggattgcact

SEQ ID NO: 1704996 - DNA, 15 bp, Homo sapiens
ccacggattgcacta

SEQ ID NO: 1704997 - DNA, 15 bp, Homo sapiens
cacggattgcactat

SEQ ID NO: 1704998 - DNA, 15 bp, Homo sapiens
acggattgcactatt

SEQ ID NO: 1704999 - DNA, 15 bp, Homo sapiens
cggattgcactattg

SEQ ID NO: 1705000 - DNA, 15 bp, Homo sapiens
ggattgcactattga

SEQ ID NO: 1705001 - DNA, 15 bp, Homo sapiens
gattgcactattgaa

SEQ ID NO: 1705002 - DNA, 15 bp, Homo sapiens
attgcactattgaaa

SEQ ID NO: 1705003 - DNA, 15 bp, Homo sapiens
ttgcactattgaaat

SEQ ID NO: 1705004 - DNA, 15 bp, Homo sapiens
tgcactattgaaata

SEQ ID NO: 1705005 - DNA, 15 bp, Homo sapiens
gcactattgaaatag

SEQ ID NO: 1705006 - DNA, 15 bp, Homo sapiens
cactattgaaatagt

SEQ ID NO: 1705007 - DNA, 15 bp, Homo sapiens
actattgaaatagta

SEQ ID NO: 1705008 - DNA, 15 bp, Homo sapiens
ctattgaaatagtaa

SEQ ID NO: 1705009 - DNA, 15 bp, Homo sapiens
tattgaaatagtaat

SEQ ID NO: 1705010 - DNA, 15 bp, Homo sapiens
attgaaatagtaatg

SEQ ID NO: 1705011 - DNA, 15 bp, Homo sapiens
ttgaaatagtaatgt

SEQ ID NO: 1705012 - DNA, 15 bp, Homo sapiens
tgaaatagtaatgtg

SEQ ID NO: 1705013 - DNA, 15 bp, Homo sapiens
gaaatagtaatgtgg

SEQ ID NO: 1705014 - DNA, 15 bp, Homo sapiens
aaatagtaatgtgga

SEQ ID NO: 1705015 - DNA, 15 bp, Homo sapiens
aatagtaatgtggat

SEQ ID NO: 1705016 - DNA, 15 bp, Homo sapiens
atagtaatgtggata

SEQ ID NO: 1705017 - DNA, 15 bp, Homo sapiens
tagtaatgtggatag

SEQ ID NO: 1705018 - DNA, 15 bp, Homo sapiens
agtaatgtggatagg

SEQ ID NO: 1705019 - DNA, 15 bp, Homo sapiens
gtaatgtggatagga

SEQ ID NO: 1705020 - DNA, 15 bp, Homo sapiens
taatgtggataggaa

SEQ ID NO: 1705021 - DNA, 15 bp, Homo sapiens
aatgtggataggaag

SEQ ID NO: 1705022 - DNA, 15 bp, Homo sapiens
atgtggataggaagc

SEQ ID NO: 1705023 - DNA, 15 bp, Homo sapiens
tgtggataggaagca

SEQ ID NO: 1705024 - DNA, 15 bp, Homo sapiens
gtggataggaagcag

SEQ ID NO: 1705025 - DNA, 15 bp, Homo sapiens
tggataggaagcaga

SEQ ID NO: 1705026 - DNA, 15 bp, Homo sapiens
ggataggaagcagaa

SEQ ID NO: 1705027 - DNA, 15 bp, Homo sapiens
gataggaagcagaaa

SEQ ID NO: 1705028 - DNA, 15 bp, Homo sapiens
ataggaagcagaaaa

SEQ ID NO: 1705029 - DNA, 15 bp, Homo sapiens
taggaagcagaaaaa

SEQ ID NO: 1705030 - DNA, 15 bp, Homo sapiens
aggaagcagaaaaag

SEQ ID NO: 1705031 - DNA, 15 bp, Homo sapiens
ggaagcagaaaaaga

SEQ ID NO: 1705032 - DNA, 15 bp, Homo sapiens
gaagcagaaaaagaa

SEQ ID NO: 1705033 - DNA, 15 bp, Homo sapiens
aagcagaaaaagaaa

SEQ ID NO: 1705034 - DNA, 15 bp, Homo sapiens
agcagaaaaagaaag

SEQ ID NO: 1705035 - DNA, 15 bp, Homo sapiens
gcagaaaaagaaaga

SEQ ID NO: 1705036 - DNA, 15 bp, Homo sapiens
cagaaaaagaaagac

SEQ ID NO: 1705037 - DNA, 15 bp, Homo sapiens
agaaaaagaaagaca

SEQ ID NO: 1705038 - DNA, 15 bp, Homo sapiens
gaaaaagaaagacag

SEQ ID NO: 1705039 - DNA, 15 bp, Homo sapiens
aaaaagaaagacaga

SEQ ID NO: 1705040 - DNA, 15 bp, Homo sapiens
aaaagaaagacagaa

SEQ ID NO: 1705041 - DNA, 15 bp, Homo sapiens
aaagaaagacagaag

SEQ ID NO: 1705042 - DNA, 15 bp, Homo sapiens
aagaaagacagaagt

SEQ ID NO: 1705043 - DNA, 15 bp, Homo sapiens
agaaagacagaagta

SEQ ID NO: 1705044 - DNA, 15 bp, Homo sapiens
gaaagacagaagtaa

SEQ ID NO: 1705045 - DNA, 15 bp, Homo sapiens
aaagacagaagtaaa

SEQ ID NO: 1705046 - DNA, 15 bp, Homo sapiens
aagacagaagtaaaa

SEQ ID NO: 1705047 - DNA, 15 bp, Homo sapiens
agacagaagtaaaat

SEQ ID NO: 1705048 - DNA, 15 bp, Homo sapiens
gacagaagtaaaata

SEQ ID NO: 1705049 - DNA, 15 bp, Homo sapiens
acagaagtaaaataa

SEQ ID NO: 1705050 - DNA, 15 bp, Homo sapiens
cagaagtaaaataag

SEQ ID NO: 1705051 - DNA, 15 bp, Homo sapiens
agaagtaaaataagg

SEQ ID NO: 1705052 - DNA, 15 bp, Homo sapiens
gaagtaaaataaggc

SEQ ID NO: 1705053 - DNA, 15 bp, Homo sapiens
aagtaaaataaggca

SEQ ID NO: 1705054 - DNA, 15 bp, Homo sapiens
agtaaaataaggcat

SEQ ID NO: 1705055 - DNA, 15 bp, Homo sapiens
gtaaaataaggcatg

SEQ ID NO: 1705056 - DNA, 15 bp, Homo sapiens
taaaataaggcatga

SEQ ID NO: 1705057 - DNA, 15 bp, Homo sapiens
aaaataaggcatgat

SEQ ID NO: 1705058 - DNA, 15 bp, Homo sapiens
aaataaggcatgatt

SEQ ID NO: 1705059 - DNA, 15 bp, Homo sapiens
aataaggcatgattg

SEQ ID NO: 1705060 - DNA, 15 bp, Homo sapiens
ataaggcatgattga

SEQ ID NO: 1705061 - DNA, 15 bp, Homo sapiens
taaggcatgattgaa

SEQ ID NO: 1705062 - DNA, 15 bp, Homo sapiens
aaggcatgattgaaa

SEQ ID NO: 1705063 - DNA, 15 bp, Homo sapiens
aggcatgattgaaaa

SEQ ID NO: 1705064 - DNA, 15 bp, Homo sapiens
ggcatgattgaaaac

SEQ ID NO: 1705065 - DNA, 15 bp, Homo sapiens
gcatgattgaaaact

SEQ ID NO: 1705066 - DNA, 15 bp, Homo sapiens
catgattgaaaacta

SEQ ID NO: 1705067 - DNA, 15 bp, Homo sapiens
atgattgaaaactaa

SEQ ID NO: 1705068 - DNA, 15 bp, Homo sapiens
tgattgaaaactaag

SEQ ID NO: 1705069 - DNA, 15 bp, Homo sapiens
gattgaaaactaagc

SEQ ID NO: 1705070 - DNA, 15 bp, Homo sapiens
attgaaaactaagct

SEQ ID NO: 1705071 - DNA, 15 bp, Homo sapiens
ttgaaaactaagctt

SEQ ID NO: 1705072 - DNA, 15 bp, Homo sapiens
tgaaaactaagctta

SEQ ID NO: 1705073 - DNA, 15 bp, Homo sapiens
gaaaactaagcttat

SEQ ID NO: 1705074 - DNA, 15 bp, Homo sapiens
aaaactaagcttatt

SEQ ID NO: 1705075 - DNA, 15 bp, Homo sapiens
aaactaagcttattc

SEQ ID NO: 1705076 - DNA, 15 bp, Homo sapiens
aactaagcttattcc

SEQ ID NO: 1705077 - DNA, 15 bp, Homo sapiens
actaagcttattcca

SEQ ID NO: 1705078 - DNA, 15 bp, Homo sapiens
ctaagcttattccaa

SEQ ID NO: 1705079 - DNA, 15 bp, Homo sapiens
taagcttattccaat

SEQ ID NO: 1705080 - DNA, 15 bp, Homo sapiens
aagcttattccaatt

SEQ ID NO: 1705081 - DNA, 15 bp, Homo sapiens
agcttattccaattt

SEQ ID NO: 1705082 - DNA, 15 bp, Homo sapiens
gcttattccaatttt

SEQ ID NO: 1705083 - DNA, 15 bp, Homo sapiens
cttattccaattttt

SEQ ID NO: 1705084 - DNA, 15 bp, Homo sapiens
ttattccaatttttc

SEQ ID NO: 1705085 - DNA, 15 bp, Homo sapiens
tattccaatttttca

SEQ ID NO: 1705086 - DNA, 15 bp, Homo sapiens
attccaatttttcac

SEQ ID NO: 1705087 - DNA, 15 bp, Homo sapiens
ttccaatttttcact

SEQ ID NO: 1705088 - DNA, 15 bp, Homo sapiens
tccaatttttcactt

SEQ ID NO: 1705089 - DNA, 15 bp, Homo sapiens
ccaatttttcacttc

SEQ ID NO: 1705090 - DNA, 15 bp, Homo sapiens
caatttttcacttcc

SEQ ID NO: 1705091 - DNA, 15 bp, Homo sapiens
aatttttcacttcct

SEQ ID NO: 1705092 - DNA, 15 bp, Homo sapiens
atttttcacttccta

SEQ ID NO: 1705093 - DNA, 15 bp, Homo sapiens
tttttcacttcctag

SEQ ID NO: 1705094 - DNA, 15 bp, Homo sapiens
ttttcacttcctaga

SEQ ID NO: 1705095 - DNA, 15 bp, Homo sapiens
tttcacttcctagaa

SEQ ID NO: 1705096 - DNA, 15 bp, Homo sapiens
ttcacttcctagaat

SEQ ID NO: 1705097 - DNA, 15 bp, Homo sapiens
tcacttcctagaatt

SEQ ID NO: 1705098 - DNA, 15 bp, Homo sapiens
cacttcctagaattt

SEQ ID NO: 1705099 - DNA, 15 bp, Homo sapiens
acttcctagaatttc

SEQ ID NO: 1705100 - DNA, 15 bp, Homo sapiens
cttcctagaatttct

SEQ ID NO: 1705101 - DNA, 15 bp, Homo sapiens
ttcctagaatttctt

SEQ ID NO: 1705102 - DNA, 15 bp, Homo sapiens
tcctagaatttctta

SEQ ID NO: 1705103 - DNA, 15 bp, Homo sapiens
cctagaatttcttat

SEQ ID NO: 1705104 - DNA, 15 bp, Homo sapiens
ctagaatttcttatg

SEQ ID NO: 1705105 - DNA, 15 bp, Homo sapiens
tagaatttcttatgt

SEQ ID NO: 1705106 - DNA, 15 bp, Homo sapiens
agaatttcttatgtt

SEQ ID NO: 1705107 - DNA, 15 bp, Homo sapiens
gaatttcttatgttc

SEQ ID NO: 1705108 - DNA, 15 bp, Homo sapiens
aatttcttatgttct

SEQ ID NO: 1705109 - DNA, 15 bp, Homo sapiens
atttcttatgttctc

SEQ ID NO: 1705110 - DNA, 15 bp, Homo sapiens
tttcttatgttctct

SEQ ID NO: 1705111 - DNA, 15 bp, Homo sapiens
ttcttatgttctcta

SEQ ID NO: 1705112 - DNA, 15 bp, Homo sapiens
tcttatgttctctat

SEQ ID NO: 1705113 - DNA, 15 bp, Homo sapiens
cttatgttctctatc

SEQ ID NO: 1705114 - DNA, 15 bp, Homo sapiens
ttatgttctctatct

SEQ ID NO: 1705115 - DNA, 15 bp, Homo sapiens
tatgttctctatctg

SEQ ID NO: 1705116 - DNA, 15 bp, Homo sapiens
atgttctctatctga

SEQ ID NO: 1705117 - DNA, 15 bp, Homo sapiens
tgttctctatctgac

SEQ ID NO: 1705118 - DNA, 15 bp, Homo sapiens
gttctctatctgact

SEQ ID NO: 1705119 - DNA, 15 bp, Homo sapiens
ttctctatctgactt

SEQ ID NO: 1705120 - DNA, 15 bp, Homo sapiens
tctctatctgacttg

SEQ ID NO: 1705121 - DNA, 15 bp, Homo sapiens
ctctatctgacttga

SEQ ID NO: 1705122 - DNA, 15 bp, Homo sapiens
tctatctgacttgat

SEQ ID NO: 1705123 - DNA, 15 bp, Homo sapiens
ctatctgacttgatt

SEQ ID NO: 1705124 - DNA, 15 bp, Homo sapiens
tatctgacttgattg

SEQ ID NO: 1705125 - DNA, 15 bp, Homo sapiens
atctgacttgattgc

SEQ ID NO: 1705126 - DNA, 15 bp, Homo sapiens
tctgacttgattgct

SEQ ID NO: 1705127 - DNA, 15 bp, Homo sapiens
ctgacttgattgctg

SEQ ID NO: 1705128 - DNA, 15 bp, Homo sapiens
tgacttgattgctgt

SEQ ID NO: 1705129 - DNA, 15 bp, Homo sapiens
gacttgattgctgta

SEQ ID NO: 1705130 - DNA, 15 bp, Homo sapiens
acttgattgctgtaa

SEQ ID NO: 1705131 - DNA, 15 bp, Homo sapiens
cttgattgctgtaat

SEQ ID NO: 1705132 - DNA, 15 bp, Homo sapiens
ttgattgctgtaatc

SEQ ID NO: 1705133 - DNA, 15 bp, Homo sapiens
tgattgctgtaatca

SEQ ID NO: 1705134 - DNA, 15 bp, Homo sapiens
gattgctgtaatcat

SEQ ID NO: 1705135 - DNA, 15 bp, Homo sapiens
attgctgtaatcatc

SEQ ID NO: 1705136 - DNA, 15 bp, Homo sapiens
ttgctgtaatcatca

SEQ ID NO: 1705137 - DNA, 15 bp, Homo sapiens
tgctgtaatcatcat

SEQ ID NO: 1705138 - DNA, 15 bp, Homo sapiens
gctgtaatcatcata

SEQ ID NO: 1705139 - DNA, 15 bp, Homo sapiens
ctgtaatcatcataa

SEQ ID NO: 1705140 - DNA, 15 bp, Homo sapiens
tgtaatcatcataat

SEQ ID NO: 1705141 - DNA, 15 bp, Homo sapiens
gtaatcatcataata

SEQ ID NO: 1705142 - DNA, 15 bp, Homo sapiens
taatcatcataataa

SEQ ID NO: 1705143 - DNA, 15 bp, Homo sapiens
aatcatcataataac

SEQ ID NO: 1705144 - DNA, 15 bp, Homo sapiens
atcatcataataact

SEQ ID NO: 1705145 - DNA, 15 bp, Homo sapiens
tcatcataataacta

SEQ ID NO: 1705146 - DNA, 15 bp, Homo sapiens
catcataataactat

SEQ ID NO: 1705147 - DNA, 15 bp, Homo sapiens
atcataataactatg

SEQ ID NO: 1705148 - DNA, 15 bp, Homo sapiens
tcataataactatga

SEQ ID NO: 1705149 - DNA, 15 bp, Homo sapiens
cataataactatgaa

SEQ ID NO: 1705150 - DNA, 15 bp, Homo sapiens
ataataactatgaac

SEQ ID NO: 1705151 - DNA, 15 bp, Homo sapiens
taataactatgaaca

SEQ ID NO: 1705152 - DNA, 15 bp, Homo sapiens
aataactatgaacat

SEQ ID NO: 1705153 - DNA, 15 bp, Homo sapiens
ataactatgaacatg

SEQ ID NO: 1705154 - DNA, 15 bp, Homo sapiens
taactatgaacatgt

SEQ ID NO: 1705155 - DNA, 15 bp, Homo sapiens
aactatgaacatgta

SEQ ID NO: 1705156 - DNA, 15 bp, Homo sapiens
actatgaacatgtat

SEQ ID NO: 1705157 - DNA, 15 bp, Homo sapiens
ctatgaacatgtatc

SEQ ID NO: 1705158 - DNA, 15 bp, Homo sapiens
tatgaacatgtatca

SEQ ID NO: 1705159 - DNA, 15 bp, Homo sapiens
atgaacatgtatcag

SEQ ID NO: 1705160 - DNA, 15 bp, Homo sapiens
tgaacatgtatcagg

SEQ ID NO: 1705161 - DNA, 15 bp, Homo sapiens
gaacatgtatcaggc

SEQ ID NO: 1705162 - DNA, 15 bp, Homo sapiens
aacatgtatcaggca

SEQ ID NO: 1705163 - DNA, 15 bp, Homo sapiens
acatgtatcaggcaa

SEQ ID NO: 1705164 - DNA, 15 bp, Homo sapiens
catgtatcaggcaat

SEQ ID NO: 1705165 - DNA, 15 bp, Homo sapiens
atgtatcaggcaata

SEQ ID NO: 1705166 - DNA, 15 bp, Homo sapiens
tgtatcaggcaatat

SEQ ID NO: 1705167 - DNA, 15 bp, Homo sapiens
gtatcaggcaatatc

SEQ ID NO: 1705168 - DNA, 15 bp, Homo sapiens
tatcaggcaatatct

SEQ ID NO: 1705169 - DNA, 15 bp, Homo sapiens
atcaggcaatatcta

SEQ ID NO: 1705170 - DNA, 15 bp, Homo sapiens
tcaggcaatatctaa

SEQ ID NO: 1705171 - DNA, 15 bp, Homo sapiens
caggcaatatctaag

SEQ ID NO: 1705172 - DNA, 15 bp, Homo sapiens
aggcaatatctaagc

SEQ ID NO: 1705173 - DNA, 15 bp, Homo sapiens
ggcaatatctaagca

SEQ ID NO: 1705174 - DNA, 15 bp, Homo sapiens
gcaatatctaagcat

SEQ ID NO: 1705175 - DNA, 15 bp, Homo sapiens
caatatctaagcatt

SEQ ID NO: 1705176 - DNA, 15 bp, Homo sapiens
aatatctaagcattt

SEQ ID NO: 1705177 - DNA, 15 bp, Homo sapiens
atatctaagcatttt

SEQ ID NO: 1705178 - DNA, 15 bp, Homo sapiens
tatctaagcatttta

SEQ ID NO: 1705179 - DNA, 15 bp, Homo sapiens
atctaagcattttat

SEQ ID NO: 1705180 - DNA, 15 bp, Homo sapiens
tctaagcattttatg

SEQ ID NO: 1705181 - DNA, 15 bp, Homo sapiens
ctaagcattttatgt

SEQ ID NO: 1705182 - DNA, 15 bp, Homo sapiens
taagcattttatgta

SEQ ID NO: 1705183 - DNA, 15 bp, Homo sapiens
aagcattttatgtac

SEQ ID NO: 1705184 - DNA, 15 bp, Homo sapiens
agcattttatgtaca

SEQ ID NO: 1705185 - DNA, 15 bp, Homo sapiens
gcattttatgtacaa

SEQ ID NO: 1705186 - DNA, 15 bp, Homo sapiens
cattttatgtacaat

SEQ ID NO: 1705187 - DNA, 15 bp, Homo sapiens
attttatgtacaata

SEQ ID NO: 1705188 - DNA, 15 bp, Homo sapiens
ttttatgtacaatag

SEQ ID NO: 1705189 - DNA, 15 bp, Homo sapiens
tttatgtacaatagt

SEQ ID NO: 1705190 - DNA, 15 bp, Homo sapiens
ttatgtacaatagtt

SEQ ID NO: 1705191 - DNA, 15 bp, Homo sapiens
tatgtacaatagttc

SEQ ID NO: 1705192 - DNA, 15 bp, Homo sapiens
atgtacaatagttca

SEQ ID NO: 1705193 - DNA, 15 bp, Homo sapiens
tgtacaatagttcat

SEQ ID NO: 1705194 - DNA, 15 bp, Homo sapiens
gtacaatagttcatt

SEQ ID NO: 1705195 - DNA, 15 bp, Homo sapiens
tacaatagttcattt

SEQ ID NO: 1705196 - DNA, 15 bp, Homo sapiens
acaatagttcattta

SEQ ID NO: 1705197 - DNA, 15 bp, Homo sapiens
caatagttcatttaa

SEQ ID NO: 1705198 - DNA, 15 bp, Homo sapiens
aatagttcatttaag

SEQ ID NO: 1705199 - DNA, 15 bp, Homo sapiens
atagttcatttaagt

SEQ ID NO: 1705200 - DNA, 15 bp, Homo sapiens
tagttcatttaagtt

SEQ ID NO: 1705201 - DNA, 15 bp, Homo sapiens
agttcatttaagttt

SEQ ID NO: 1705202 - DNA, 15 bp, Homo sapiens
gttcatttaagttta

SEQ ID NO: 1705203 - DNA, 15 bp, Homo sapiens
ttcatttaagtttac

SEQ ID NO: 1705204 - DNA, 15 bp, Homo sapiens
tcatttaagtttact

SEQ ID NO: 1705205 - DNA, 15 bp, Homo sapiens
catttaagtttacta

SEQ ID NO: 1705206 - DNA, 15 bp, Homo sapiens
atttaagtttactaa

SEQ ID NO: 1705207 - DNA, 15 bp, Homo sapiens
tttaagtttactaac

SEQ ID NO: 1705208 - DNA, 15 bp, Homo sapiens
ttaagtttactaaca

SEQ ID NO: 1705209 - DNA, 15 bp, Homo sapiens
taagtttactaacaa

SEQ ID NO: 1705210 - DNA, 15 bp, Homo sapiens
aagtttactaacaac

SEQ ID NO: 1705211 - DNA, 15 bp, Homo sapiens
agtttactaacaacc

SEQ ID NO: 1705212 - DNA, 15 bp, Homo sapiens
gtttactaacaaccg

SEQ ID NO: 1705213 - DNA, 15 bp, Homo sapiens
tttactaacaaccgt

SEQ ID NO: 1705214 - DNA, 15 bp, Homo sapiens
ttactaacaaccgtc

SEQ ID NO: 1705215 - DNA, 15 bp, Homo sapiens
tactaacaaccgtct

SEQ ID NO: 1705216 - DNA, 15 bp, Homo sapiens
actaacaaccgtcta

SEQ ID NO: 1705217 - DNA, 15 bp, Homo sapiens
ctaacaaccgtctaa

SEQ ID NO: 1705218 - DNA, 15 bp, Homo sapiens
taacaaccgtctaag

SEQ ID NO: 1705219 - DNA, 15 bp, Homo sapiens
aacaaccgtctaagg

SEQ ID NO: 1705220 - DNA, 15 bp, Homo sapiens
acaaccgtctaaggt

SEQ ID NO: 1705221 - DNA, 15 bp, Homo sapiens
caaccgtctaaggta

SEQ ID NO: 1705222 - DNA, 15 bp, Homo sapiens
aaccgtctaaggtag

SEQ ID NO: 1705223 - DNA, 15 bp, Homo sapiens
accgtctaaggtagg

SEQ ID NO: 1705224 - DNA, 15 bp, Homo sapiens
ccgtctaaggtaggt

SEQ ID NO: 1705225 - DNA, 15 bp, Homo sapiens
cgtctaaggtaggta

SEQ ID NO: 1705226 - DNA, 15 bp, Homo sapiens
gtctaaggtaggtat

SEQ ID NO: 1705227 - DNA, 15 bp, Homo sapiens
tctaaggtaggtatt

SEQ ID NO: 1705228 - DNA, 15 bp, Homo sapiens
ctaaggtaggtattc

SEQ ID NO: 1705229 - DNA, 15 bp, Homo sapiens
taaggtaggtattct

SEQ ID NO: 1705230 - DNA, 15 bp, Homo sapiens
aaggtaggtattctt

SEQ ID NO: 1705231 - DNA, 15 bp, Homo sapiens
aggtaggtattcttg

SEQ ID NO: 1705232 - DNA, 15 bp, Homo sapiens
ggtaggtattcttgt

SEQ ID NO: 1705233 - DNA, 15 bp, Homo sapiens
gtaggtattcttgtt

SEQ ID NO: 1705234 - DNA, 15 bp, Homo sapiens
taggtattcttgtta

SEQ ID NO: 1705235 - DNA, 15 bp, Homo sapiens
aggtattcttgttat

SEQ ID NO: 1705236 - DNA, 15 bp, Homo sapiens
ggtattcttgttatt

SEQ ID NO: 1705237 - DNA, 15 bp, Homo sapiens
gtattcttgttattt

SEQ ID NO: 1705238 - DNA, 15 bp, Homo sapiens
tattcttgttatttc

SEQ ID NO: 1705239 - DNA, 15 bp, Homo sapiens
attcttgttatttct

SEQ ID NO: 1705240 - DNA, 15 bp, Homo sapiens
ttcttgttatttcta

SEQ ID NO: 1705241 - DNA, 15 bp, Homo sapiens
tcttgttatttctat

SEQ ID NO: 1705242 - DNA, 15 bp, Homo sapiens
cttgttatttctatt

SEQ ID NO: 1705243 - DNA, 15 bp, Homo sapiens
ttgttatttctattt

SEQ ID NO: 1705244 - DNA, 15 bp, Homo sapiens
tgttatttctatttt

SEQ ID NO: 1705245 - DNA, 15 bp, Homo sapiens
gttatttctatttta

SEQ ID NO: 1705246 - DNA, 15 bp, Homo sapiens
ttatttctattttac

SEQ ID NO: 1705247 - DNA, 15 bp, Homo sapiens
tatttctattttaca

SEQ ID NO: 1705248 - DNA, 15 bp, Homo sapiens
atttctattttacaa

SEQ ID NO: 1705249 - DNA, 15 bp, Homo sapiens
tttctattttacaaa

SEQ ID NO: 1705250 - DNA, 15 bp, Homo sapiens
ttctattttacaaag

SEQ ID NO: 1705251 - DNA, 15 bp, Homo sapiens
tctattttacaaagg

SEQ ID NO: 1705252 - DNA, 15 bp, Homo sapiens
ctattttacaaagga

SEQ ID NO: 1705253 - DNA, 15 bp, Homo sapiens
tattttacaaaggag

SEQ ID NO: 1705254 - DNA, 15 bp, Homo sapiens
attttacaaaggagc

SEQ ID NO: 1705255 - DNA, 15 bp, Homo sapiens
ttttacaaaggagca

SEQ ID NO: 1705256 - DNA, 15 bp, Homo sapiens
tttacaaaggagcaa

SEQ ID NO: 1705257 - DNA, 15 bp, Homo sapiens
ttacaaaggagcaaa

SEQ ID NO: 1705258 - DNA, 15 bp, Homo sapiens
tacaaaggagcaaac

SEQ ID NO: 1705259 - DNA, 15 bp, Homo sapiens
acaaaggagcaaacc

SEQ ID NO: 1705260 - DNA, 15 bp, Homo sapiens
caaaggagcaaacca

SEQ ID NO: 1705261 - DNA, 15 bp, Homo sapiens
aaaggagcaaaccaa

SEQ ID NO: 1705262 - DNA, 15 bp, Homo sapiens
aaggagcaaaccaag

SEQ ID NO: 1705263 - DNA, 15 bp, Homo sapiens
aggagcaaaccaagg

SEQ ID NO: 1705264 - DNA, 15 bp, Homo sapiens
ggagcaaaccaaggc

SEQ ID NO: 1705265 - DNA, 15 bp, Homo sapiens
gagcaaaccaaggca

SEQ ID NO: 1705266 - DNA, 15 bp, Homo sapiens
agcaaaccaaggcac

SEQ ID NO: 1705267 - DNA, 15 bp, Homo sapiens
gcaaaccaaggcaca

SEQ ID NO: 1705268 - DNA, 15 bp, Homo sapiens
caaaccaaggcacag

SEQ ID NO: 1705269 - DNA, 15 bp, Homo sapiens
aaaccaaggcacaga

SEQ ID NO: 1705270 - DNA, 15 bp, Homo sapiens
aaccaaggcacagag

SEQ ID NO: 1705271 - DNA, 15 bp, Homo sapiens
caaggcacagagagc

SEQ ID NO: 1705272 - DNA, 15 bp, Homo sapiens
aaggcacagagagct

SEQ ID NO: 1705273 - DNA, 15 bp, Homo sapiens
aggcacagagagctt

SEQ ID NO: 1705274 - DNA, 15 bp, Homo sapiens
ggcacagagagctta

SEQ ID NO: 1705275 - DNA, 15 bp, Homo sapiens
gcacagagagcttag

SEQ ID NO: 1705276 - DNA, 15 bp, Homo sapiens
cacagagagcttagg

SEQ ID NO: 1705277 - DNA, 15 bp, Homo sapiens
acagagagcttaggc

SEQ ID NO: 1705278 - DNA, 15 bp, Homo sapiens
cagagagcttaggct

SEQ ID NO: 1705279 - DNA, 15 bp, Homo sapiens
agagagcttaggcta

SEQ ID NO: 1705280 - DNA, 15 bp, Homo sapiens
gagagcttaggctag

SEQ ID NO: 1705281 - DNA, 15 bp, Homo sapiens
agagcttaggctagc

SEQ ID NO: 1705282 - DNA, 15 bp, Homo sapiens
gagcttaggctagca

SEQ ID NO: 1705283 - DNA, 15 bp, Homo sapiens
agcttaggctagcaa

SEQ ID NO: 1705284 - DNA, 15 bp, Homo sapiens
gcttaggctagcaag

SEQ ID NO: 1705285 - DNA, 15 bp, Homo sapiens
cttaggctagcaagt

SEQ ID NO: 1705286 - DNA, 15 bp, Homo sapiens
ttaggctagcaagtg

SEQ ID NO: 1705287 - DNA, 15 bp, Homo sapiens
taggctagcaagtgg

SEQ ID NO: 1705288 - DNA, 15 bp, Homo sapiens
aggctagcaagtggt

SEQ ID NO: 1705289 - DNA, 15 bp, Homo sapiens
ggctagcaagtggtg

SEQ ID NO: 1705290 - DNA, 15 bp, Homo sapiens
gctagcaagtggtgg

SEQ ID NO: 1705291 - DNA, 15 bp, Homo sapiens
ctagcaagtggtgga

SEQ ID NO: 1705292 - DNA, 15 bp, Homo sapiens
tagcaagtggtggag

SEQ ID NO: 1705293 - DNA, 15 bp, Homo sapiens
agcaagtggtggagt

SEQ ID NO: 1705294 - DNA, 15 bp, Homo sapiens
gcaagtggtggagtt

SEQ ID NO: 1705295 - DNA, 15 bp, Homo sapiens
caagtggtggagttg

SEQ ID NO: 1705296 - DNA, 15 bp, Homo sapiens
aagtggtggagttgg

SEQ ID NO: 1705297 - DNA, 15 bp, Homo sapiens
agtggtggagttggg

SEQ ID NO: 1705298 - DNA, 15 bp, Homo sapiens
gtggtggagttggga

SEQ ID NO: 1705299 - DNA, 15 bp, Homo sapiens
tggtggagttgggat

SEQ ID NO: 1705300 - DNA, 15 bp, Homo sapiens
ggtggagttgggatt

SEQ ID NO: 1705301 - DNA, 15 bp, Homo sapiens
gtggagttgggattc

SEQ ID NO: 1705302 - DNA, 15 bp, Homo sapiens
tggagttgggattca

SEQ ID NO: 1705303 - DNA, 15 bp, Homo sapiens
ggagttgggattcaa

SEQ ID NO: 1705304 - DNA, 15 bp, Homo sapiens
gagttgggattcaaa

SEQ ID NO: 1705305 - DNA, 15 bp, Homo sapiens
agttgggattcaaat

SEQ ID NO: 1705306 - DNA, 15 bp, Homo sapiens
gttgggattcaaatc

SEQ ID NO: 1705307 - DNA, 15 bp, Homo sapiens
ttgggattcaaatcc

SEQ ID NO: 1705308 - DNA, 15 bp, Homo sapiens
tgggattcaaatcca

SEQ ID NO: 1705309 - DNA, 15 bp, Homo sapiens
gggattcaaatccag

SEQ ID NO: 1705310 - DNA, 15 bp, Homo sapiens
ggattcaaatccagc

SEQ ID NO: 1705311 - DNA, 15 bp, Homo sapiens
gattcaaatccagcc

SEQ ID NO: 1705312 - DNA, 15 bp, Homo sapiens
attcaaatccagcca

SEQ ID NO: 1705313 - DNA, 15 bp, Homo sapiens
ttcaaatccagccag

SEQ ID NO: 1705314 - DNA, 15 bp, Homo sapiens
tcaaatccagccagt

SEQ ID NO: 1705315 - DNA, 15 bp, Homo sapiens
caaatccagccagtg

SEQ ID NO: 1705316 - DNA, 15 bp, Homo sapiens
aaatccagccagtgt

SEQ ID NO: 1705317 - DNA, 15 bp, Homo sapiens
aatccagccagtgta

SEQ ID NO: 1705318 - DNA, 15 bp, Homo sapiens
atccagccagtgtaa

SEQ ID NO: 1705319 - DNA, 15 bp, Homo sapiens
tccagccagtgtaac

SEQ ID NO: 1705320 - DNA, 15 bp, Homo sapiens
ccagccagtgtaact

SEQ ID NO: 1705321 - DNA, 15 bp, Homo sapiens
cagccagtgtaactg

SEQ ID NO: 1705322 - DNA, 15 bp, Homo sapiens
agccagtgtaactgt

SEQ ID NO: 1705323 - DNA, 15 bp, Homo sapiens
gccagtgtaactgta

SEQ ID NO: 1705324 - DNA, 15 bp, Homo sapiens
ccagtgtaactgtag

SEQ ID NO: 1705325 - DNA, 15 bp, Homo sapiens
cagtgtaactgtaga

SEQ ID NO: 1705326 - DNA, 15 bp, Homo sapiens
agtgtaactgtagag

SEQ ID NO: 1705327 - DNA, 15 bp, Homo sapiens
gtgtaactgtagagc

SEQ ID NO: 1705328 - DNA, 15 bp, Homo sapiens
tgtaactgtagagcc

SEQ ID NO: 1705329 - DNA, 15 bp, Homo sapiens
gtaactgtagagcca

SEQ ID NO: 1705330 - DNA, 15 bp, Homo sapiens
taactgtagagccag

SEQ ID NO: 1705331 - DNA, 15 bp, Homo sapiens
aactgtagagccagg

SEQ ID NO: 1705332 - DNA, 15 bp, Homo sapiens
actgtagagccaggt

SEQ ID NO: 1705333 - DNA, 15 bp, Homo sapiens
ctgtagagccaggtt

SEQ ID NO: 1705334 - DNA, 15 bp, Homo sapiens
tgtagagccaggttc

SEQ ID NO: 1705335 - DNA, 15 bp, Homo sapiens
gtagagccaggttct

SEQ ID NO: 1705336 - DNA, 15 bp, Homo sapiens
tagagccaggttcta

SEQ ID NO: 1705337 - DNA, 15 bp, Homo sapiens
agagccaggttctag

SEQ ID NO: 1705338 - DNA, 15 bp, Homo sapiens
gagccaggttctagt

SEQ ID NO: 1705339 - DNA, 15 bp, Homo sapiens
agccaggttctagta

SEQ ID NO: 1705340 - DNA, 15 bp, Homo sapiens
gccaggttctagtaa

SEQ ID NO: 1705341 - DNA, 15 bp, Homo sapiens
ccaggttctagtaaa

SEQ ID NO: 1705342 - DNA, 15 bp, Homo sapiens
caggttctagtaaaa

SEQ ID NO: 1705343 - DNA, 15 bp, Homo sapiens
aggttctagtaaaat

SEQ ID NO: 1705344 - DNA, 15 bp, Homo sapiens
ggttctagtaaaatc

SEQ ID NO: 1705345 - DNA, 15 bp, Homo sapiens
gttctagtaaaatct

SEQ ID NO: 1705346 - DNA, 15 bp, Homo sapiens
ttctagtaaaatctt

SEQ ID NO: 1705347 - DNA, 15 bp, Homo sapiens
tctagtaaaatcttg

SEQ ID NO: 1705348 - DNA, 15 bp, Homo sapiens
ctagtaaaatcttgt

SEQ ID NO: 1705349 - DNA, 15 bp, Homo sapiens
tagtaaaatcttgtc

SEQ ID NO: 1705350 - DNA, 15 bp, Homo sapiens
agtaaaatcttgtca

SEQ ID NO: 1705351 - DNA, 15 bp, Homo sapiens
gtaaaatcttgtcat

SEQ ID NO: 1705352 - DNA, 15 bp, Homo sapiens
taaaatcttgtcatt

SEQ ID NO: 1705353 - DNA, 15 bp, Homo sapiens
aaaatcttgtcattg

SEQ ID NO: 1705354 - DNA, 15 bp, Homo sapiens
aaatcttgtcattgc

SEQ ID NO: 1705355 - DNA, 15 bp, Homo sapiens
aatcttgtcattgca

SEQ ID NO: 1705356 - DNA, 15 bp, Homo sapiens
atcttgtcattgcaa

SEQ ID NO: 1705357 - DNA, 15 bp, Homo sapiens
tcttgtcattgcaag

SEQ ID NO: 1705358 - DNA, 15 bp, Homo sapiens
cttgtcattgcaaga

SEQ ID NO: 1705359 - DNA, 15 bp, Homo sapiens
ttgtcattgcaagat

SEQ ID NO: 1705360 - DNA, 15 bp, Homo sapiens
tgtcattgcaagatt

SEQ ID NO: 1705361 - DNA, 15 bp, Homo sapiens
gtcattgcaagatta

SEQ ID NO: 1705362 - DNA, 15 bp, Homo sapiens
tcattgcaagattag

SEQ ID NO: 1705363 - DNA, 15 bp, Homo sapiens
cattgcaagattagt

SEQ ID NO: 1705364 - DNA, 15 bp, Homo sapiens
attgcaagattagtt

SEQ ID NO: 1705365 - DNA, 15 bp, Homo sapiens
ttgcaagattagtta

SEQ ID NO: 1705366 - DNA, 15 bp, Homo sapiens
tgcaagattagttat

SEQ ID NO: 1705367 - DNA, 15 bp, Homo sapiens
gcaagattagttatc

SEQ ID NO: 1705368 - DNA, 15 bp, Homo sapiens
caagattagttatca

SEQ ID NO: 1705369 - DNA, 15 bp, Homo sapiens
aagattagttatcaa

SEQ ID NO: 1705370 - DNA, 15 bp, Homo sapiens
agattagttatcaaa

SEQ ID NO: 1705371 - DNA, 15 bp, Homo sapiens
gattagttatcaaaa

SEQ ID NO: 1705372 - DNA, 15 bp, Homo sapiens
attagttatcaaaat

SEQ ID NO: 1705373 - DNA, 15 bp, Homo sapiens
ttagttatcaaaatt

SEQ ID NO: 1705374 - DNA, 15 bp, Homo sapiens
tagttatcaaaattt

SEQ ID NO: 1705375 - DNA, 15 bp, Homo sapiens
agttatcaaaatttg

SEQ ID NO: 1705376 - DNA, 15 bp, Homo sapiens
gttatcaaaatttga

SEQ ID NO: 1705377 - DNA, 15 bp, Homo sapiens
ttatcaaaatttgat

SEQ ID NO: 1705378 - DNA, 15 bp, Homo sapiens
tatcaaaatttgatc

SEQ ID NO: 1705379 - DNA, 15 bp, Homo sapiens
atcaaaatttgatca

SEQ ID NO: 1705380 - DNA, 15 bp, Homo sapiens
tcaaaatttgatcat

SEQ ID NO: 1705381 - DNA, 15 bp, Homo sapiens
caaaatttgatcatg

SEQ ID NO: 1705382 - DNA, 15 bp, Homo sapiens
aaaatttgatcatgg

SEQ ID NO: 1705383 - DNA, 15 bp, Homo sapiens
aaatttgatcatgga

SEQ ID NO: 1705384 - DNA, 15 bp, Homo sapiens
aatttgatcatggaa

SEQ ID NO: 1705385 - DNA, 15 bp, Homo sapiens
atttgatcatggaaa

SEQ ID NO: 1705386 - DNA, 15 bp, Homo sapiens
tttgatcatggaaac

SEQ ID NO: 1705387 - DNA, 15 bp, Homo sapiens
ttgatcatggaaaca

SEQ ID NO: 1705388 - DNA, 15 bp, Homo sapiens
tgatcatggaaacag

SEQ ID NO: 1705389 - DNA, 15 bp, Homo sapiens
gatcatggaaacagt

SEQ ID NO: 1705390 - DNA, 15 bp, Homo sapiens
atcatggaaacagta

SEQ ID NO: 1705391 - DNA, 15 bp, Homo sapiens
tcatggaaacagtac

SEQ ID NO: 1705392 - DNA, 15 bp, Homo sapiens
catggaaacagtact

SEQ ID NO: 1705393 - DNA, 15 bp, Homo sapiens
atggaaacagtactg

SEQ ID NO: 1705394 - DNA, 15 bp, Homo sapiens
tggaaacagtactga

SEQ ID NO: 1705395 - DNA, 15 bp, Homo sapiens
ggaaacagtactgaa

SEQ ID NO: 1705396 - DNA, 15 bp, Homo sapiens
gaaacagtactgaaa

SEQ ID NO: 1705397 - DNA, 15 bp, Homo sapiens
aaacagtactgaaag

SEQ ID NO: 1705398 - DNA, 15 bp, Homo sapiens
aacagtactgaaaga

SEQ ID NO: 1705399 - DNA, 15 bp, Homo sapiens
acagtactgaaagac

SEQ ID NO: 1705400 - DNA, 15 bp, Homo sapiens
cagtactgaaagaca

SEQ ID NO: 1705401 - DNA, 15 bp, Homo sapiens
agtactgaaagacag

SEQ ID NO: 1705402 - DNA, 15 bp, Homo sapiens
gtactgaaagacagc

SEQ ID NO: 1705403 - DNA, 15 bp, Homo sapiens
tactgaaagacagct

SEQ ID NO: 1705404 - DNA, 15 bp, Homo sapiens
actgaaagacagctg

SEQ ID NO: 1705405 - DNA, 15 bp, Homo sapiens
ctgaaagacagctga

SEQ ID NO: 1705406 - DNA, 15 bp, Homo sapiens
tgaaagacagctgac

SEQ ID NO: 1705407 - DNA, 15 bp, Homo sapiens
gaaagacagctgact

SEQ ID NO: 1705408 - DNA, 15 bp, Homo sapiens
aaagacagctgacta

SEQ ID NO: 1705409 - DNA, 15 bp, Homo sapiens
aagacagctgactag

SEQ ID NO: 1705410 - DNA, 15 bp, Homo sapiens
agacagctgactaga

SEQ ID NO: 1705411 - DNA, 15 bp, Homo sapiens
gacagctgactagat

SEQ ID NO: 1705412 - DNA, 15 bp, Homo sapiens
acagctgactagatg

SEQ ID NO: 1705413 - DNA, 15 bp, Homo sapiens
cagctgactagatgc

SEQ ID NO: 1705414 - DNA, 15 bp, Homo sapiens
agctgactagatgca

SEQ ID NO: 1705415 - DNA, 15 bp, Homo sapiens
gctgactagatgcag

SEQ ID NO: 1705416 - DNA, 15 bp, Homo sapiens
ctgactagatgcagg

SEQ ID NO: 1705417 - DNA, 15 bp, Homo sapiens
tgactagatgcaggt

SEQ ID NO: 1705418 - DNA, 15 bp, Homo sapiens
gactagatgcaggta

SEQ ID NO: 1705419 - DNA, 15 bp, Homo sapiens
actagatgcaggtag

SEQ ID NO: 1705420 - DNA, 15 bp, Homo sapiens
ctagatgcaggtagt

SEQ ID NO: 1705421 - DNA, 15 bp, Homo sapiens
tagatgcaggtagta

SEQ ID NO: 1705422 - DNA, 15 bp, Homo sapiens
agatgcaggtagtat

SEQ ID NO: 1705423 - DNA, 15 bp, Homo sapiens
gatgcaggtagtatg

SEQ ID NO: 1705424 - DNA, 15 bp, Homo sapiens
atgcaggtagtatgt

SEQ ID NO: 1705425 - DNA, 15 bp, Homo sapiens
tgcaggtagtatgtg

SEQ ID NO: 1705426 - DNA, 15 bp, Homo sapiens
gcaggtagtatgtgc

SEQ ID NO: 1705427 - DNA, 15 bp, Homo sapiens
caggtagtatgtgcc

SEQ ID NO: 1705428 - DNA, 15 bp, Homo sapiens
aggtagtatgtgcct

SEQ ID NO: 1705429 - DNA, 15 bp, Homo sapiens
ggtagtatgtgcctt

SEQ ID NO: 1705430 - DNA, 15 bp, Homo sapiens
gtagtatgtgccttc

SEQ ID NO: 1705431 - DNA, 15 bp, Homo sapiens
tagtatgtgccttct

SEQ ID NO: 1705432 - DNA, 15 bp, Homo sapiens
agtatgtgccttctc

SEQ ID NO: 1705433 - DNA, 15 bp, Homo sapiens
gtatgtgccttctcc

SEQ ID NO: 1705434 - DNA, 15 bp, Homo sapiens
tatgtgccttctcca

SEQ ID NO: 1705435 - DNA, 15 bp, Homo sapiens
atgtgccttctccat

SEQ ID NO: 1705436 - DNA, 15 bp, Homo sapiens
tgtgccttctccatg

SEQ ID NO: 1705437 - DNA, 15 bp, Homo sapiens
gtgccttctccatga

SEQ ID NO: 1705438 - DNA, 15 bp, Homo sapiens
tgccttctccatgaa

SEQ ID NO: 1705439 - DNA, 15 bp, Homo sapiens
gccttctccatgaag

SEQ ID NO: 1705440 - DNA, 15 bp, Homo sapiens
ccttctccatgaaga

SEQ ID NO: 1705441 - DNA, 15 bp, Homo sapiens
cttctccatgaagag

SEQ ID NO: 1705442 - DNA, 15 bp, Homo sapiens
ttctccatgaagagg

SEQ ID NO: 1705443 - DNA, 15 bp, Homo sapiens
tctccatgaagagga

SEQ ID NO: 1705444 - DNA, 15 bp, Homo sapiens
ctccatgaagaggaa

SEQ ID NO: 1705445 - DNA, 15 bp, Homo sapiens
tccatgaagaggaat

SEQ ID NO: 1705446 - DNA, 15 bp, Homo sapiens
ccatgaagaggaatc

SEQ ID NO: 1705447 - DNA, 15 bp, Homo sapiens
catgaagaggaatca

SEQ ID NO: 1705448 - DNA, 15 bp, Homo sapiens
atgaagaggaatcag

SEQ ID NO: 1705449 - DNA, 15 bp, Homo sapiens
tgaagaggaatcaga

SEQ ID NO: 1705450 - DNA, 15 bp, Homo sapiens
gaagaggaatcagaa

SEQ ID NO: 1705451 - DNA, 15 bp, Homo sapiens
aagaggaatcagaat

SEQ ID NO: 1705452 - DNA, 15 bp, Homo sapiens
agaggaatcagaata

SEQ ID NO: 1705453 - DNA, 15 bp, Homo sapiens
gaggaatcagaatag

SEQ ID NO: 1705454 - DNA, 15 bp, Homo sapiens
aggaatcagaatagt

SEQ ID NO: 1705455 - DNA, 15 bp, Homo sapiens
ggaatcagaatagta

SEQ ID NO: 1705456 - DNA, 15 bp, Homo sapiens
gaatcagaatagtag

SEQ ID NO: 1705457 - DNA, 15 bp, Homo sapiens
aatcagaatagtagg

SEQ ID NO: 1705458 - DNA, 15 bp, Homo sapiens
atcagaatagtaggt

SEQ ID NO: 1705459 - DNA, 15 bp, Homo sapiens
tcagaatagtaggta

SEQ ID NO: 1705460 - DNA, 15 bp, Homo sapiens
cagaatagtaggtag

SEQ ID NO: 1705461 - DNA, 15 bp, Homo sapiens
agaatagtaggtaga

SEQ ID NO: 1705462 - DNA, 15 bp, Homo sapiens
gaatagtaggtagat

SEQ ID NO: 1705463 - DNA, 15 bp, Homo sapiens
aatagtaggtagata

SEQ ID NO: 1705464 - DNA, 15 bp, Homo sapiens
atagtaggtagatac

SEQ ID NO: 1705465 - DNA, 15 bp, Homo sapiens
tagtaggtagatact

SEQ ID NO: 1705466 - DNA, 15 bp, Homo sapiens
agtaggtagatactt

SEQ ID NO: 1705467 - DNA, 15 bp, Homo sapiens
gtaggtagatactta

SEQ ID NO: 1705468 - DNA, 15 bp, Homo sapiens
taggtagatacttac

SEQ ID NO: 1705469 - DNA, 15 bp, Homo sapiens
aggtagatacttaca

SEQ ID NO: 1705470 - DNA, 15 bp, Homo sapiens
ggtagatacttacat

SEQ ID NO: 1705471 - DNA, 15 bp, Homo sapiens
gtagatacttacatt

SEQ ID NO: 1705472 - DNA, 15 bp, Homo sapiens
tagatacttacattt

SEQ ID NO: 1705473 - DNA, 15 bp, Homo sapiens
agatacttacatttg

SEQ ID NO: 1705474 - DNA, 15 bp, Homo sapiens
gatacttacatttgg

SEQ ID NO: 1705475 - DNA, 15 bp, Homo sapiens
atacttacatttgga

SEQ ID NO: 1705476 - DNA, 15 bp, Homo sapiens
tacttacatttggaa

SEQ ID NO: 1705477 - DNA, 15 bp, Homo sapiens
acttacatttggaac

SEQ ID NO: 1705478 - DNA, 15 bp, Homo sapiens
cttacatttggaaca

SEQ ID NO: 1705479 - DNA, 15 bp, Homo sapiens
ttacatttggaacag

SEQ ID NO: 1705480 - DNA, 15 bp, Homo sapiens
tacatttggaacaga

SEQ ID NO: 1705481 - DNA, 15 bp, Homo sapiens
acatttggaacagat

SEQ ID NO: 1705482 - DNA, 15 bp, Homo sapiens
catttggaacagatt

SEQ ID NO: 1705483 - DNA, 15 bp, Homo sapiens
atttggaacagatta

SEQ ID NO: 1705484 - DNA, 15 bp, Homo sapiens
tttggaacagattat

SEQ ID NO: 1705485 - DNA, 15 bp, Homo sapiens
ttggaacagattatc

SEQ ID NO: 1705486 - DNA, 15 bp, Homo sapiens
tggaacagattatct

SEQ ID NO: 1705487 - DNA, 15 bp, Homo sapiens
ggaacagattatctg

SEQ ID NO: 1705488 - DNA, 15 bp, Homo sapiens
gaacagattatctgg

SEQ ID NO: 1705489 - DNA, 15 bp, Homo sapiens
aacagattatctggg

SEQ ID NO: 1705490 - DNA, 15 bp, Homo sapiens
acagattatctgggc

SEQ ID NO: 1705491 - DNA, 15 bp, Homo sapiens
cagattatctgggct

SEQ ID NO: 1705492 - DNA, 15 bp, Homo sapiens
agattatctgggcta

SEQ ID NO: 1705493 - DNA, 15 bp, Homo sapiens
gattatctgggctag

SEQ ID NO: 1705494 - DNA, 15 bp, Homo sapiens
attatctgggctaga

SEQ ID NO: 1705495 - DNA, 15 bp, Homo sapiens
ttatctgggctagaa

SEQ ID NO: 1705496 - DNA, 15 bp, Homo sapiens
tatctgggctagaac

SEQ ID NO: 1705497 - DNA, 15 bp, Homo sapiens
atctgggctagaaca

SEQ ID NO: 1705498 - DNA, 15 bp, Homo sapiens
tctgggctagaacat

SEQ ID NO: 1705499 - DNA, 15 bp, Homo sapiens
ctgggctagaacatt

SEQ ID NO: 1705500 - DNA, 15 bp, Homo sapiens
tgggctagaacatta

SEQ ID NO: 1705501 - DNA, 15 bp, Homo sapiens
gggctagaacattag

SEQ ID NO: 1705502 - DNA, 15 bp, Homo sapiens
ggctagaacattagg

SEQ ID NO: 1705503 - DNA, 15 bp, Homo sapiens
gctagaacattagga

SEQ ID NO: 1705504 - DNA, 15 bp, Homo sapiens
ctagaacattaggat

SEQ ID NO: 1705505 - DNA, 15 bp, Homo sapiens
tagaacattaggatt

SEQ ID NO: 1705506 - DNA, 15 bp, Homo sapiens
agaacattaggattc

SEQ ID NO: 1705507 - DNA, 15 bp, Homo sapiens
gaacattaggattca

SEQ ID NO: 1705508 - DNA, 15 bp, Homo sapiens
aacattaggattcat

SEQ ID NO: 1705509 - DNA, 15 bp, Homo sapiens
acattaggattcatc

SEQ ID NO: 1705510 - DNA, 15 bp, Homo sapiens
cattaggattcatca

SEQ ID NO: 1705511 - DNA, 15 bp, Homo sapiens
attaggattcatcaa

SEQ ID NO: 1705512 - DNA, 15 bp, Homo sapiens
ttaggattcatcaaa

SEQ ID NO: 1705513 - DNA, 15 bp, Homo sapiens
taggattcatcaaac

SEQ ID NO: 1705514 - DNA, 15 bp, Homo sapiens
aggattcatcaaaca

SEQ ID NO: 1705515 - DNA, 15 bp, Homo sapiens
ggattcatcaaacaa

SEQ ID NO: 1705516 - DNA, 15 bp, Homo sapiens
gattcatcaaacaag

SEQ ID NO: 1705517 - DNA, 15 bp, Homo sapiens
attcatcaaacaagg

SEQ ID NO: 1705518 - DNA, 15 bp, Homo sapiens
ttcatcaaacaaggg

SEQ ID NO: 1705519 - DNA, 15 bp, Homo sapiens
tcatcaaacaaggga

SEQ ID NO: 1705520 - DNA, 15 bp, Homo sapiens
catcaaacaagggat

SEQ ID NO: 1705521 - DNA, 15 bp, Homo sapiens
atcaaacaagggatg

SEQ ID NO: 1705522 - DNA, 15 bp, Homo sapiens
tcaaacaagggatgg

SEQ ID NO: 1705523 - DNA, 15 bp, Homo sapiens
caaacaagggatggg

SEQ ID NO: 1705524 - DNA, 15 bp, Homo sapiens
aaacaagggatggga

SEQ ID NO: 1705525 - DNA, 15 bp, Homo sapiens
aacaagggatgggaa

SEQ ID NO: 1705526 - DNA, 15 bp, Homo sapiens
acaagggatgggaag

SEQ ID NO: 1705527 - DNA, 15 bp, Homo sapiens
caagggatgggaagc

SEQ ID NO: 1705528 - DNA, 15 bp, Homo sapiens
aagggatgggaagca

SEQ ID NO: 1705529 - DNA, 15 bp, Homo sapiens
agggatgggaagcac

SEQ ID NO: 1705530 - DNA, 15 bp, Homo sapiens
gggatgggaagcacc

SEQ ID NO: 1705531 - DNA, 15 bp, Homo sapiens
ggatgggaagcacca

SEQ ID NO: 1705532 - DNA, 15 bp, Homo sapiens
gatgggaagcaccag

SEQ ID NO: 1705533 - DNA, 15 bp, Homo sapiens
atgggaagcaccaga

SEQ ID NO: 1705534 - DNA, 15 bp, Homo sapiens
tgggaagcaccagaa

SEQ ID NO: 1705535 - DNA, 15 bp, Homo sapiens
gggaagcaccagaaa

SEQ ID NO: 1705536 - DNA, 15 bp, Homo sapiens
ggaagcaccagaaat

SEQ ID NO: 1705537 - DNA, 15 bp, Homo sapiens
gaagcaccagaaata

SEQ ID NO: 1705538 - DNA, 15 bp, Homo sapiens
aagcaccagaaataa

SEQ ID NO: 1705539 - DNA, 15 bp, Homo sapiens
agcaccagaaataag

SEQ ID NO: 1705540 - DNA, 15 bp, Homo sapiens
gcaccagaaataaga

SEQ ID NO: 1705541 - DNA, 15 bp, Homo sapiens
caccagaaataagaa

SEQ ID NO: 1705542 - DNA, 15 bp, Homo sapiens
accagaaataagaaa

SEQ ID NO: 1705543 - DNA, 15 bp, Homo sapiens
ccagaaataagaaag

SEQ ID NO: 1705544 - DNA, 15 bp, Homo sapiens
cagaaataagaaagg

SEQ ID NO: 1705545 - DNA, 15 bp, Homo sapiens
agaaataagaaagga

SEQ ID NO: 1705546 - DNA, 15 bp, Homo sapiens
gaaataagaaaggag

SEQ ID NO: 1705547 - DNA, 15 bp, Homo sapiens
aaataagaaaggaga

SEQ ID NO: 1705548 - DNA, 15 bp, Homo sapiens
aataagaaaggagag

SEQ ID NO: 1705549 - DNA, 15 bp, Homo sapiens
ataagaaaggagagg

SEQ ID NO: 1705550 - DNA, 15 bp, Homo sapiens
taagaaaggagagga

SEQ ID NO: 1705551 - DNA, 15 bp, Homo sapiens
aagaaaggagaggat

SEQ ID NO: 1705552 - DNA, 15 bp, Homo sapiens
agaaaggagaggatc

SEQ ID NO: 1705553 - DNA, 15 bp, Homo sapiens
gaaaggagaggatct

SEQ ID NO: 1705554 - DNA, 15 bp, Homo sapiens
aaaggagaggatcta

SEQ ID NO: 1705555 - DNA, 15 bp, Homo sapiens
aaggagaggatctaa

SEQ ID NO: 1705556 - DNA, 15 bp, Homo sapiens
aggagaggatctaag

SEQ ID NO: 1705557 - DNA, 15 bp, Homo sapiens
ggagaggatctaagg

SEQ ID NO: 1705558 - DNA, 15 bp, Homo sapiens
gagaggatctaaggc

SEQ ID NO: 1705559 - DNA, 15 bp, Homo sapiens
agaggatctaaggca

SEQ ID NO: 1705560 - DNA, 15 bp, Homo sapiens
gaggatctaaggcag

SEQ ID NO: 1705561 - DNA, 15 bp, Homo sapiens
aggatctaaggcagc

SEQ ID NO: 1705562 - DNA, 15 bp, Homo sapiens
ggatctaaggcagct

SEQ ID NO: 1705563 - DNA, 15 bp, Homo sapiens
gatctaaggcagctt

SEQ ID NO: 1705564 - DNA, 15 bp, Homo sapiens
atctaaggcagctta

SEQ ID NO: 1705565 - DNA, 15 bp, Homo sapiens
tctaaggcagcttac

SEQ ID NO: 1705566 - DNA, 15 bp, Homo sapiens
ctaaggcagcttacc

SEQ ID NO: 1705567 - DNA, 15 bp, Homo sapiens
taaggcagcttaccc

SEQ ID NO: 1705568 - DNA, 15 bp, Homo sapiens
aaggcagcttaccca

SEQ ID NO: 1705569 - DNA, 15 bp, Homo sapiens
aggcagcttacccag

SEQ ID NO: 1705570 - DNA, 15 bp, Homo sapiens
ggcagcttacccagt

SEQ ID NO: 1705571 - DNA, 15 bp, Homo sapiens
gcagcttacccagtt

SEQ ID NO: 1705572 - DNA, 15 bp, Homo sapiens
cagcttacccagttg

SEQ ID NO: 1705573 - DNA, 15 bp, Homo sapiens
agcttacccagttgg

SEQ ID NO: 1705574 - DNA, 15 bp, Homo sapiens
gcttacccagttggg

SEQ ID NO: 1705575 - DNA, 15 bp, Homo sapiens
cttacccagttgggg

SEQ ID NO: 1705576 - DNA, 15 bp, Homo sapiens
ttacccagttgggga

SEQ ID NO: 1705577 - DNA, 15 bp, Homo sapiens
tacccagttggggac

SEQ ID NO: 1705578 - DNA, 15 bp, Homo sapiens
acccagttggggact

SEQ ID NO: 1705579 - DNA, 15 bp, Homo sapiens
cccagttggggactg

SEQ ID NO: 1705580 - DNA, 15 bp, Homo sapiens
ccagttggggactgc

SEQ ID NO: 1705581 - DNA, 15 bp, Homo sapiens
cagttggggactgcc

SEQ ID NO: 1705582 - DNA, 15 bp, Homo sapiens
agttggggactgcct

SEQ ID NO: 1705583 - DNA, 15 bp, Homo sapiens
gttggggactgcctg

SEQ ID NO: 1705584 - DNA, 15 bp, Homo sapiens
ttggggactgcctga

SEQ ID NO: 1705585 - DNA, 15 bp, Homo sapiens
tggggactgcctgag

SEQ ID NO: 1705586 - DNA, 15 bp, Homo sapiens
ggggactgcctgaga

SEQ ID NO: 1705587 - DNA, 15 bp, Homo sapiens
gggactgcctgagag

SEQ ID NO: 1705588 - DNA, 15 bp, Homo sapiens
ggactgcctgagagc

SEQ ID NO: 1705589 - DNA, 15 bp, Homo sapiens
gactgcctgagagcc

SEQ ID NO: 1705590 - DNA, 15 bp, Homo sapiens
actgcctgagagcca

SEQ ID NO: 1705591 - DNA, 15 bp, Homo sapiens
ctgcctgagagccac

SEQ ID NO: 1705592 - DNA, 15 bp, Homo sapiens
tgcctgagagccaca

SEQ ID NO: 1705593 - DNA, 15 bp, Homo sapiens
gcctgagagccacaa

SEQ ID NO: 1705594 - DNA, 15 bp, Homo sapiens
cctgagagccacaag

SEQ ID NO: 1705595 - DNA, 15 bp, Homo sapiens
ctgagagccacaaga

SEQ ID NO: 1705596 - DNA, 15 bp, Homo sapiens
tgagagccacaagag

SEQ ID NO: 1705597 - DNA, 15 bp, Homo sapiens
gagagccacaagagg

SEQ ID NO: 1705598 - DNA, 15 bp, Homo sapiens
agagccacaagaggc

SEQ ID NO: 1705599 - DNA, 15 bp, Homo sapiens
gagccacaagaggct

SEQ ID NO: 1705600 - DNA, 15 bp, Homo sapiens
agccacaagaggctt

SEQ ID NO: 1705601 - DNA, 15 bp, Homo sapiens
gccacaagaggcttt

SEQ ID NO: 1705602 - DNA, 15 bp, Homo sapiens
ccacaagaggctttt

SEQ ID NO: 1705603 - DNA, 15 bp, Homo sapiens
cacaagaggcttttg

SEQ ID NO: 1705604 - DNA, 15 bp, Homo sapiens
acaagaggcttttgg

SEQ ID NO: 1705605 - DNA, 15 bp, Homo sapiens
caagaggcttttgga

SEQ ID NO: 1705606 - DNA, 15 bp, Homo sapiens
aagaggcttttggat

SEQ ID NO: 1705607 - DNA, 15 bp, Homo sapiens
agaggcttttggata

SEQ ID NO: 1705608 - DNA, 15 bp, Homo sapiens
gaggcttttggatat

SEQ ID NO: 1705609 - DNA, 15 bp, Homo sapiens
aggcttttggatatg

SEQ ID NO: 1705610 - DNA, 15 bp, Homo sapiens
ggcttttggatatgg

SEQ ID NO: 1705611 - DNA, 15 bp, Homo sapiens
gcttttggatatggg

SEQ ID NO: 1705612 - DNA, 15 bp, Homo sapiens
cttttggatatgggc

SEQ ID NO: 1705613 - DNA, 15 bp, Homo sapiens
ttttggatatgggca

SEQ ID NO: 1705614 - DNA, 15 bp, Homo sapiens
tttggatatgggcaa

SEQ ID NO: 1705615 - DNA, 15 bp, Homo sapiens
ttggatatgggcaaa

SEQ ID NO: 1705616 - DNA, 15 bp, Homo sapiens
tggatatgggcaaac

SEQ ID NO: 1705617 - DNA, 15 bp, Homo sapiens
ggatatgggcaaaca

SEQ ID NO: 1705618 - DNA, 15 bp, Homo sapiens
gatatgggcaaacag

SEQ ID NO: 1705619 - DNA, 15 bp, Homo sapiens
atatgggcaaacagt

SEQ ID NO: 1705620 - DNA, 15 bp, Homo sapiens
tatgggcaaacagta

SEQ ID NO: 1705621 - DNA, 15 bp, Homo sapiens
atgggcaaacagtaa

SEQ ID NO: 1705622 - DNA, 15 bp, Homo sapiens
tgggcaaacagtaag

SEQ ID NO: 1705623 - DNA, 15 bp, Homo sapiens
gggcaaacagtaaga

SEQ ID NO: 1705624 - DNA, 15 bp, Homo sapiens
ggcaaacagtaagag

SEQ ID NO: 1705625 - DNA, 15 bp, Homo sapiens
gcaaacagtaagaga

SEQ ID NO: 1705626 - DNA, 15 bp, Homo sapiens
caaacagtaagagag

SEQ ID NO: 1705627 - DNA, 15 bp, Homo sapiens
aaacagtaagagaga

SEQ ID NO: 1705628 - DNA, 15 bp, Homo sapiens
aacagtaagagagaa

SEQ ID NO: 1705629 - DNA, 15 bp, Homo sapiens
acagtaagagagaaa

SEQ ID NO: 1705630 - DNA, 15 bp, Homo sapiens
cagtaagagagaaac

SEQ ID NO: 1705631 - DNA, 15 bp, Homo sapiens
agtaagagagaaaca

SEQ ID NO: 1705632 - DNA, 15 bp, Homo sapiens
gtaagagagaaacat

SEQ ID NO: 1705633 - DNA, 15 bp, Homo sapiens
taagagagaaacatc

SEQ ID NO: 1705634 - DNA, 15 bp, Homo sapiens
aagagagaaacatcc

SEQ ID NO: 1705635 - DNA, 15 bp, Homo sapiens
agagagaaacatcca

SEQ ID NO: 1705636 - DNA, 15 bp, Homo sapiens
gagagaaacatccag

SEQ ID NO: 1705637 - DNA, 15 bp, Homo sapiens
agagaaacatccagg

SEQ ID NO: 1705638 - DNA, 15 bp, Homo sapiens
gagaaacatccaggg

SEQ ID NO: 1705639 - DNA, 15 bp, Homo sapiens
agaaacatccagggc

SEQ ID NO: 1705640 - DNA, 15 bp, Homo sapiens
gaaacatccagggct

SEQ ID NO: 1705641 - DNA, 15 bp, Homo sapiens
aaacatccagggctc

SEQ ID NO: 1705642 - DNA, 15 bp, Homo sapiens
aacatccagggctcc

SEQ ID NO: 1705643 - DNA, 15 bp, Homo sapiens
acatccagggctcca

SEQ ID NO: 1705644 - DNA, 15 bp, Homo sapiens
catccagggctccaa

SEQ ID NO: 1705645 - DNA, 15 bp, Homo sapiens
atccagggctccaaa

SEQ ID NO: 1705646 - DNA, 15 bp, Homo sapiens
tccagggctccaaaa

SEQ ID NO: 1705647 - DNA, 15 bp, Homo sapiens
ccagggctccaaaat

SEQ ID NO: 1705648 - DNA, 15 bp, Homo sapiens
cagggctccaaaatg

SEQ ID NO: 1705649 - DNA, 15 bp, Homo sapiens
agggctccaaaatgg

SEQ ID NO: 1705650 - DNA, 15 bp, Homo sapiens
gggctccaaaatggg

SEQ ID NO: 1705651 - DNA, 15 bp, Homo sapiens
ggctccaaaatgggc

SEQ ID NO: 1705652 - DNA, 15 bp, Homo sapiens
gctccaaaatgggct

SEQ ID NO: 1705653 - DNA, 15 bp, Homo sapiens
ctccaaaatgggctt

SEQ ID NO: 1705654 - DNA, 15 bp, Homo sapiens
tccaaaatgggcttt

SEQ ID NO: 1705655 - DNA, 15 bp, Homo sapiens
ccaaaatgggctttc

SEQ ID NO: 1705656 - DNA, 15 bp, Homo sapiens
caaaatgggctttca

SEQ ID NO: 1705657 - DNA, 15 bp, Homo sapiens
aaaatgggctttcac

SEQ ID NO: 1705658 - DNA, 15 bp, Homo sapiens
aaatgggctttcaca

SEQ ID NO: 1705659 - DNA, 15 bp, Homo sapiens
aatgggctttcacaa

SEQ ID NO: 1705660 - DNA, 15 bp, Homo sapiens
atgggctttcacaat

SEQ ID NO: 1705661 - DNA, 15 bp, Homo sapiens
tgggctttcacaatc

SEQ ID NO: 1705662 - DNA, 15 bp, Homo sapiens
gggctttcacaatct

SEQ ID NO: 1705663 - DNA, 15 bp, Homo sapiens
ggctttcacaatctt

SEQ ID NO: 1705664 - DNA, 15 bp, Homo sapiens
gctttcacaatcttg

SEQ ID NO: 1705665 - DNA, 15 bp, Homo sapiens
ctttcacaatcttgg

SEQ ID NO: 1705666 - DNA, 15 bp, Homo sapiens
tttcacaatcttggc

SEQ ID NO: 1705667 - DNA, 15 bp, Homo sapiens
ttcacaatcttggct

SEQ ID NO: 1705668 - DNA, 15 bp, Homo sapiens
tcacaatcttggcta

SEQ ID NO: 1705669 - DNA, 15 bp, Homo sapiens
cacaatcttggctat

SEQ ID NO: 1705670 - DNA, 15 bp, Homo sapiens
acaatcttggctatg

SEQ ID NO: 1705671 - DNA, 15 bp, Homo sapiens
caatcttggctatgg

SEQ ID NO: 1705672 - DNA, 15 bp, Homo sapiens
aatcttggctatggg

SEQ ID NO: 1705673 - DNA, 15 bp, Homo sapiens
atcttggctatgggg

SEQ ID NO: 1705674 - DNA, 15 bp, Homo sapiens
tcttggctatggggt

SEQ ID NO: 1705675 - DNA, 15 bp, Homo sapiens
cttggctatggggta

SEQ ID NO: 1705676 - DNA, 15 bp, Homo sapiens
ttggctatggggtaa

SEQ ID NO: 1705677 - DNA, 15 bp, Homo sapiens
tggctatggggtaaa

SEQ ID NO: 1705678 - DNA, 15 bp, Homo sapiens
ggctatggggtaaat

SEQ ID NO: 1705679 - DNA, 15 bp, Homo sapiens
gctatggggtaaatc

SEQ ID NO: 1705680 - DNA, 15 bp, Homo sapiens
ctatggggtaaatcc

SEQ ID NO: 1705681 - DNA, 15 bp, Homo sapiens
tatggggtaaatcct

SEQ ID NO: 1705682 - DNA, 15 bp, Homo sapiens
atggggtaaatcctt

SEQ ID NO: 1705683 - DNA, 15 bp, Homo sapiens
tggggtaaatccttg

SEQ ID NO: 1705684 - DNA, 15 bp, Homo sapiens
ggggtaaatccttga

SEQ ID NO: 1705685 - DNA, 15 bp, Homo sapiens
gggtaaatccttgac

SEQ ID NO: 1705686 - DNA, 15 bp, Homo sapiens
ggtaaatccttgacc

SEQ ID NO: 1705687 - DNA, 15 bp, Homo sapiens
gtaaatccttgaccc

SEQ ID NO: 1705688 - DNA, 15 bp, Homo sapiens
taaatccttgaccca

SEQ ID NO: 1705689 - DNA, 15 bp, Homo sapiens
aaatccttgacccac

SEQ ID NO: 1705690 - DNA, 15 bp, Homo sapiens
aatccttgacccact

SEQ ID NO: 1705691 - DNA, 15 bp, Homo sapiens
atccttgacccacta

SEQ ID NO: 1705692 - DNA, 15 bp, Homo sapiens
tccttgacccactag

SEQ ID NO: 1705693 - DNA, 15 bp, Homo sapiens
ccttgacccactagg

SEQ ID NO: 1705694 - DNA, 15 bp, Homo sapiens
cttgacccactaggg

SEQ ID NO: 1705695 - DNA, 15 bp, Homo sapiens
ttgacccactagggc

SEQ ID NO: 1705696 - DNA, 15 bp, Homo sapiens
tgacccactagggcc

SEQ ID NO: 1705697 - DNA, 15 bp, Homo sapiens
gacccactagggcct

SEQ ID NO: 1705698 - DNA, 15 bp, Homo sapiens
acccactagggcctt

SEQ ID NO: 1705699 - DNA, 15 bp, Homo sapiens
cccactagggccttt

SEQ ID NO: 1705700 - DNA, 15 bp, Homo sapiens
ccactagggcctttt

SEQ ID NO: 1705701 - DNA, 15 bp, Homo sapiens
cactagggccttttc

SEQ ID NO: 1705702 - DNA, 15 bp, Homo sapiens
actagggccttttcc

SEQ ID NO: 1705703 - DNA, 15 bp, Homo sapiens
ctagggccttttccc

SEQ ID NO: 1705704 - DNA, 15 bp, Homo sapiens
tagggccttttccct

SEQ ID NO: 1705705 - DNA, 15 bp, Homo sapiens
agggccttttccctg

SEQ ID NO: 1705706 - DNA, 15 bp, Homo sapiens
gggccttttccctga

SEQ ID NO: 1705707 - DNA, 15 bp, Homo sapiens
ggccttttccctgac

SEQ ID NO: 1705708 - DNA, 15 bp, Homo sapiens
gccttttccctgaca

SEQ ID NO: 1705709 - DNA, 15 bp, Homo sapiens
ccttttccctgacat

SEQ ID NO: 1705710 - DNA, 15 bp, Homo sapiens
cttttccctgacatg

SEQ ID NO: 1705711 - DNA, 15 bp, Homo sapiens
ttttccctgacatga

SEQ ID NO: 1705712 - DNA, 15 bp, Homo sapiens
tttccctgacatgaa

SEQ ID NO: 1705713 - DNA, 15 bp, Homo sapiens
ttccctgacatgaag

SEQ ID NO: 1705714 - DNA, 15 bp, Homo sapiens
tccctgacatgaaga

SEQ ID NO: 1705715 - DNA, 15 bp, Homo sapiens
ccctgacatgaagag

SEQ ID NO: 1705716 - DNA, 15 bp, Homo sapiens
cctgacatgaagagc

SEQ ID NO: 1705717 - DNA, 15 bp, Homo sapiens
ctgacatgaagagct

SEQ ID NO: 1705718 - DNA, 15 bp, Homo sapiens
tgacatgaagagctg

SEQ ID NO: 1705719 - DNA, 15 bp, Homo sapiens
gacatgaagagctgc

SEQ ID NO: 1705720 - DNA, 15 bp, Homo sapiens
acatgaagagctgcc

SEQ ID NO: 1705721 - DNA, 15 bp, Homo sapiens
catgaagagctgcct

SEQ ID NO: 1705722 - DNA, 15 bp, Homo sapiens
atgaagagctgccta

SEQ ID NO: 1705723 - DNA, 15 bp, Homo sapiens
tgaagagctgcctaa

SEQ ID NO: 1705724 - DNA, 15 bp, Homo sapiens
gaagagctgcctaaa

SEQ ID NO: 1705725 - DNA, 15 bp, Homo sapiens
aagagctgcctaaag

SEQ ID NO: 1705726 - DNA, 15 bp, Homo sapiens
agagctgcctaaaga

SEQ ID NO: 1705727 - DNA, 15 bp, Homo sapiens
gagctgcctaaagat

SEQ ID NO: 1705728 - DNA, 15 bp, Homo sapiens
agctgcctaaagatt

SEQ ID NO: 1705729 - DNA, 15 bp, Homo sapiens
gctgcctaaagattc

SEQ ID NO: 1705730 - DNA, 15 bp, Homo sapiens
ctgcctaaagattcc

SEQ ID NO: 1705731 - DNA, 15 bp, Homo sapiens
tgcctaaagattcca

SEQ ID NO: 1705732 - DNA, 15 bp, Homo sapiens
gcctaaagattccac

SEQ ID NO: 1705733 - DNA, 15 bp, Homo sapiens
cctaaagattccacg

SEQ ID NO: 1705734 - DNA, 15 bp, Homo sapiens
ctaaagattccacgg

SEQ ID NO: 1705735 - DNA, 15 bp, Homo sapiens
taaagattccacgga

SEQ ID NO: 1705736 - DNA, 15 bp, Homo sapiens
aaagattccacggag

SEQ ID NO: 1705737 - DNA, 15 bp, Homo sapiens
aagattccacggaga

SEQ ID NO: 1705738 - DNA, 15 bp, Homo sapiens
agattccacggagat

SEQ ID NO: 1705739 - DNA, 15 bp, Homo sapiens
gattccacggagatg

SEQ ID NO: 1705740 - DNA, 15 bp, Homo sapiens
attccacggagatgt

SEQ ID NO: 1705741 - DNA, 15 bp, Homo sapiens
ttccacggagatgtt

SEQ ID NO: 1705742 - DNA, 15 bp, Homo sapiens
tccacggagatgtta

SEQ ID NO: 1705743 - DNA, 15 bp, Homo sapiens
ccacggagatgttac

SEQ ID NO: 1705744 - DNA, 15 bp, Homo sapiens
cacggagatgttact

SEQ ID NO: 1705745 - DNA, 15 bp, Homo sapiens
acggagatgttactc

SEQ ID NO: 1705746 - DNA, 15 bp, Homo sapiens
cggagatgttactcc

SEQ ID NO: 1705747 - DNA, 15 bp, Homo sapiens
ggagatgttactcca

SEQ ID NO: 1705748 - DNA, 15 bp, Homo sapiens
gagatgttactccaa

SEQ ID NO: 1705749 - DNA, 15 bp, Homo sapiens
agatgttactccaaa

SEQ ID NO: 1705750 - DNA, 15 bp, Homo sapiens
gatgttactccaaaa

SEQ ID NO: 1705751 - DNA, 15 bp, Homo sapiens
atgttactccaaaag

SEQ ID NO: 1705752 - DNA, 15 bp, Homo sapiens
tgttactccaaaagg

SEQ ID NO: 1705753 - DNA, 15 bp, Homo sapiens
gttactccaaaaggg

SEQ ID NO: 1705754 - DNA, 15 bp, Homo sapiens
ttactccaaaaggga

SEQ ID NO: 1705755 - DNA, 15 bp, Homo sapiens
tactccaaaagggaa

SEQ ID NO: 1705756 - DNA, 15 bp, Homo sapiens
actccaaaagggaaa

SEQ ID NO: 1705757 - DNA, 15 bp, Homo sapiens
ctccaaaagggaaac

SEQ ID NO: 1705758 - DNA, 15 bp, Homo sapiens
tccaaaagggaaacc

SEQ ID NO: 1705759 - DNA, 15 bp, Homo sapiens
ccaaaagggaaaccc

SEQ ID NO: 1705760 - DNA, 15 bp, Homo sapiens
caaaagggaaaccca

SEQ ID NO: 1705761 - DNA, 15 bp, Homo sapiens
aaaagggaaacccac

SEQ ID NO: 1705762 - DNA, 15 bp, Homo sapiens
aaagggaaacccaca

SEQ ID NO: 1705763 - DNA, 15 bp, Homo sapiens
aagggaaacccacac

SEQ ID NO: 1705764 - DNA, 15 bp, Homo sapiens
agggaaacccacaca

SEQ ID NO: 1705765 - DNA, 15 bp, Homo sapiens
gggaaacccacacag

SEQ ID NO: 1705766 - DNA, 15 bp, Homo sapiens
ggaaacccacacaga

SEQ ID NO: 1705767 - DNA, 15 bp, Homo sapiens
gaaacccacacagaa

SEQ ID NO: 1705768 - DNA, 15 bp, Homo sapiens
aaacccacacagaat

SEQ ID NO: 1705769 - DNA, 15 bp, Homo sapiens
aacccacacagaatc

SEQ ID NO: 1705770 - DNA, 15 bp, Homo sapiens
acccacacagaatca

SEQ ID NO: 1705771 - DNA, 15 bp, Homo sapiens
cccacacagaatcac

SEQ ID NO: 1705772 - DNA, 15 bp, Homo sapiens
ccacacagaatcaca

SEQ ID NO: 1705773 - DNA, 15 bp, Homo sapiens
cacacagaatcacac

SEQ ID NO: 1705774 - DNA, 15 bp, Homo sapiens
acacagaatcacaca

SEQ ID NO: 1705775 - DNA, 15 bp, Homo sapiens
cacagaatcacacag

SEQ ID NO: 1705776 - DNA, 15 bp, Homo sapiens
acagaatcacacagg

SEQ ID NO: 1705777 - DNA, 15 bp, Homo sapiens
cagaatcacacaggc

SEQ ID NO: 1705778 - DNA, 15 bp, Homo sapiens
agaatcacacaggca

SEQ ID NO: 1705779 - DNA, 15 bp, Homo sapiens
gaatcacacaggcat

SEQ ID NO: 1705780 - DNA, 15 bp, Homo sapiens
aatcacacaggcatc

SEQ ID NO: 1705781 - DNA, 15 bp, Homo sapiens
atcacacaggcatcc

SEQ ID NO: 1705782 - DNA, 15 bp, Homo sapiens
tcacacaggcatcca

SEQ ID NO: 1705783 - DNA, 15 bp, Homo sapiens
cacacaggcatccaa

SEQ ID NO: 1705784 - DNA, 15 bp, Homo sapiens
acacaggcatccaat

SEQ ID NO: 1705785 - DNA, 15 bp, Homo sapiens
cacaggcatccaatc

SEQ ID NO: 1705786 - DNA, 15 bp, Homo sapiens
acaggcatccaatcc

SEQ ID NO: 1705787 - DNA, 15 bp, Homo sapiens
caggcatccaatcct

SEQ ID NO: 1705788 - DNA, 15 bp, Homo sapiens
aggcatccaatcctg

SEQ ID NO: 1705789 - DNA, 15 bp, Homo sapiens
ggcatccaatcctgg

SEQ ID NO: 1705790 - DNA, 15 bp, Homo sapiens
gcatccaatcctgga

SEQ ID NO: 1705791 - DNA, 15 bp, Homo sapiens
catccaatcctggag

SEQ ID NO: 1705792 - DNA, 15 bp, Homo sapiens
atccaatcctggagc

SEQ ID NO: 1705793 - DNA, 15 bp, Homo sapiens
tccaatcctggagca

SEQ ID NO: 1705794 - DNA, 15 bp, Homo sapiens
ccaatcctggagcag

SEQ ID NO: 1705795 - DNA, 15 bp, Homo sapiens
caatcctggagcagc

SEQ ID NO: 1705796 - DNA, 15 bp, Homo sapiens
aatcctggagcagcc

SEQ ID NO: 1705797 - DNA, 15 bp, Homo sapiens
atcctggagcagcct

SEQ ID NO: 1705798 - DNA, 15 bp, Homo sapiens
tcctggagcagcctc

SEQ ID NO: 1705799 - DNA, 15 bp, Homo sapiens
cctggagcagcctct

SEQ ID NO: 1705800 - DNA, 15 bp, Homo sapiens
ctggagcagcctctg

SEQ ID NO: 1705801 - DNA, 15 bp, Homo sapiens
tggagcagcctctgt

SEQ ID NO: 1705802 - DNA, 15 bp, Homo sapiens
ggagcagcctctgtc

SEQ ID NO: 1705803 - DNA, 15 bp, Homo sapiens
gagcagcctctgtca

SEQ ID NO: 1705804 - DNA, 15 bp, Homo sapiens
agcagcctctgtcag

SEQ ID NO: 1705805 - DNA, 15 bp, Homo sapiens
gcagcctctgtcagg

SEQ ID NO: 1705806 - DNA, 15 bp, Homo sapiens
cagcctctgtcaggc

SEQ ID NO: 1705807 - DNA, 15 bp, Homo sapiens
agcctctgtcaggca

SEQ ID NO: 1705808 - DNA, 15 bp, Homo sapiens
gcctctgtcaggcat

SEQ ID NO: 1705809 - DNA, 15 bp, Homo sapiens
cctctgtcaggcatc

SEQ ID NO: 1705810 - DNA, 15 bp, Homo sapiens
ctctgtcaggcatca

SEQ ID NO: 1705811 - DNA, 15 bp, Homo sapiens
tctgtcaggcatcat

SEQ ID NO: 1705812 - DNA, 15 bp, Homo sapiens
ctgtcaggcatcatt

SEQ ID NO: 1705813 - DNA, 15 bp, Homo sapiens
tgtcaggcatcattt

SEQ ID NO: 1705814 - DNA, 15 bp, Homo sapiens
gtcaggcatcatttt

SEQ ID NO: 1705815 - DNA, 15 bp, Homo sapiens
tcaggcatcattttg

SEQ ID NO: 1705816 - DNA, 15 bp, Homo sapiens
caggcatcattttga

SEQ ID NO: 1705817 - DNA, 15 bp, Homo sapiens
aggcatcattttgag

SEQ ID NO: 1705818 - DNA, 15 bp, Homo sapiens
ggcatcattttgagg

SEQ ID NO: 1705819 - DNA, 15 bp, Homo sapiens
gcatcattttgaggg

SEQ ID NO: 1705820 - DNA, 15 bp, Homo sapiens
catcattttgagggc

SEQ ID NO: 1705821 - DNA, 15 bp, Homo sapiens
atcattttgagggcc

SEQ ID NO: 1705822 - DNA, 15 bp, Homo sapiens
tcattttgagggcct

SEQ ID NO: 1705823 - DNA, 15 bp, Homo sapiens
cattttgagggccta

SEQ ID NO: 1705824 - DNA, 15 bp, Homo sapiens
attttgagggcctag

SEQ ID NO: 1705825 - DNA, 15 bp, Homo sapiens
ttttgagggcctaga

SEQ ID NO: 1705826 - DNA, 15 bp, Homo sapiens
tttgagggcctagat

SEQ ID NO: 1705827 - DNA, 15 bp, Homo sapiens
ttgagggcctagata

SEQ ID NO: 1705828 - DNA, 15 bp, Homo sapiens
tgagggcctagatac

SEQ ID NO: 1705829 - DNA, 15 bp, Homo sapiens
gagggcctagatacc

SEQ ID NO: 1705830 - DNA, 15 bp, Homo sapiens
agggcctagatacca

SEQ ID NO: 1705831 - DNA, 15 bp, Homo sapiens
gggcctagataccag

SEQ ID NO: 1705832 - DNA, 15 bp, Homo sapiens
ggcctagataccagg

SEQ ID NO: 1705833 - DNA, 15 bp, Homo sapiens
gcctagataccagga

SEQ ID NO: 1705834 - DNA, 15 bp, Homo sapiens
cctagataccaggaa

SEQ ID NO: 1705835 - DNA, 15 bp, Homo sapiens
ctagataccaggaat

SEQ ID NO: 1705836 - DNA, 15 bp, Homo sapiens
tagataccaggaata

SEQ ID NO: 1705837 - DNA, 15 bp, Homo sapiens
agataccaggaatat

SEQ ID NO: 1705838 - DNA, 15 bp, Homo sapiens
gataccaggaatata

SEQ ID NO: 1705839 - DNA, 15 bp, Homo sapiens
ataccaggaatatac

SEQ ID NO: 1705840 - DNA, 15 bp, Homo sapiens
taccaggaatataca

SEQ ID NO: 1705841 - DNA, 15 bp, Homo sapiens
accaggaatatacaa

SEQ ID NO: 1705842 - DNA, 15 bp, Homo sapiens
ccaggaatatacaaa

SEQ ID NO: 1705843 - DNA, 15 bp, Homo sapiens
caggaatatacaaac

SEQ ID NO: 1705844 - DNA, 15 bp, Homo sapiens
aggaatatacaaaca

SEQ ID NO: 1705845 - DNA, 15 bp, Homo sapiens
ggaatatacaaacat

SEQ ID NO: 1705846 - DNA, 15 bp, Homo sapiens
gaatatacaaacatg

SEQ ID NO: 1705847 - DNA, 15 bp, Homo sapiens
aatatacaaacatgc

SEQ ID NO: 1705848 - DNA, 15 bp, Homo sapiens
atatacaaacatgca

SEQ ID NO: 1705849 - DNA, 15 bp, Homo sapiens
tatacaaacatgcac

SEQ ID NO: 1705850 - DNA, 15 bp, Homo sapiens
atacaaacatgcact

SEQ ID NO: 1705851 - DNA, 15 bp, Homo sapiens
tacaaacatgcactg

SEQ ID NO: 1705852 - DNA, 15 bp, Homo sapiens
acaaacatgcactgc

SEQ ID NO: 1705853 - DNA, 15 bp, Homo sapiens
caaacatgcactgcc

SEQ ID NO: 1705854 - DNA, 15 bp, Homo sapiens
aaacatgcactgcct

SEQ ID NO: 1705855 - DNA, 15 bp, Homo sapiens
aacatgcactgcctc

SEQ ID NO: 1705856 - DNA, 15 bp, Homo sapiens
acatgcactgcctct

SEQ ID NO: 1705857 - DNA, 15 bp, Homo sapiens
catgcactgcctctg

SEQ ID NO: 1705858 - DNA, 15 bp, Homo sapiens
atgcactgcctctgc

SEQ ID NO: 1705859 - DNA, 15 bp, Homo sapiens
tgcactgcctctgca

SEQ ID NO: 1705860 - DNA, 15 bp, Homo sapiens
gcactgcctctgcac

SEQ ID NO: 1705861 - DNA, 15 bp, Homo sapiens
cactgcctctgcact

SEQ ID NO: 1705862 - DNA, 15 bp, Homo sapiens
actgcctctgcactg

SEQ ID NO: 1705863 - DNA, 15 bp, Homo sapiens
ctgcctctgcactgc

SEQ ID NO: 1705864 - DNA, 15 bp, Homo sapiens
tgcctctgcactgct

SEQ ID NO: 1705865 - DNA, 15 bp, Homo sapiens
gcctctgcactgctt

SEQ ID NO: 1705866 - DNA, 15 bp, Homo sapiens
cctctgcactgcttc

SEQ ID NO: 1705867 - DNA, 15 bp, Homo sapiens
ctctgcactgcttca

SEQ ID NO: 1705868 - DNA, 15 bp, Homo sapiens
tctgcactgcttcaa

SEQ ID NO: 1705869 - DNA, 15 bp, Homo sapiens
ctgcactgcttcaag

SEQ ID NO: 1705870 - DNA, 15 bp, Homo sapiens
tgcactgcttcaagg

SEQ ID NO: 1705871 - DNA, 15 bp, Homo sapiens
gcactgcttcaagga

SEQ ID NO: 1705872 - DNA, 15 bp, Homo sapiens
cactgcttcaaggag

SEQ ID NO: 1705873 - DNA, 15 bp, Homo sapiens
actgcttcaaggaga

SEQ ID NO: 1705874 - DNA, 15 bp, Homo sapiens
ctgcttcaaggagag

SEQ ID NO: 1705875 - DNA, 15 bp, Homo sapiens
tgcttcaaggagaga

SEQ ID NO: 1705876 - DNA, 15 bp, Homo sapiens
gcttcaaggagagag

SEQ ID NO: 1705877 - DNA, 15 bp, Homo sapiens
cttcaaggagagaga

SEQ ID NO: 1705878 - DNA, 15 bp, Homo sapiens
ttcaaggagagagag

SEQ ID NO: 1705879 - DNA, 15 bp, Homo sapiens
tcaaggagagagagg

SEQ ID NO: 1705880 - DNA, 15 bp, Homo sapiens
caaggagagagaggg

SEQ ID NO: 1705881 - DNA, 15 bp, Homo sapiens
aaggagagagagggg

SEQ ID NO: 1705882 - DNA, 15 bp, Homo sapiens
aggagagagagggga

SEQ ID NO: 1705883 - DNA, 15 bp, Homo sapiens
ggagagagaggggag

SEQ ID NO: 1705884 - DNA, 15 bp, Homo sapiens
gagagagaggggaga

SEQ ID NO: 1705885 - DNA, 15 bp, Homo sapiens
agagagaggggagac

SEQ ID NO: 1705886 - DNA, 15 bp, Homo sapiens
gagagaggggagact

SEQ ID NO: 1705887 - DNA, 15 bp, Homo sapiens
agagaggggagacta

SEQ ID NO: 1705888 - DNA, 15 bp, Homo sapiens
gagaggggagactag

SEQ ID NO: 1705889 - DNA, 15 bp, Homo sapiens
agaggggagactaga

SEQ ID NO: 1705890 - DNA, 15 bp, Homo sapiens
gaggggagactagat

SEQ ID NO: 1705891 - DNA, 15 bp, Homo sapiens
aggggagactagata

SEQ ID NO: 1705892 - DNA, 15 bp, Homo sapiens
ggggagactagataa

SEQ ID NO: 1705893 - DNA, 15 bp, Homo sapiens
gggagactagataat

SEQ ID NO: 1705894 - DNA, 15 bp, Homo sapiens
ggagactagataatc

SEQ ID NO: 1705895 - DNA, 15 bp, Homo sapiens
gagactagataatcc

SEQ ID NO: 1705896 - DNA, 15 bp, Homo sapiens
agactagataatccc

SEQ ID NO: 1705897 - DNA, 15 bp, Homo sapiens
gactagataatccca

SEQ ID NO: 1705898 - DNA, 15 bp, Homo sapiens
actagataatcccat

SEQ ID NO: 1705899 - DNA, 15 bp, Homo sapiens
ctagataatcccatc

SEQ ID NO: 1705900 - DNA, 15 bp, Homo sapiens
tagataatcccatca

SEQ ID NO: 1705901 - DNA, 15 bp, Homo sapiens
agataatcccatcac

SEQ ID NO: 1705902 - DNA, 15 bp, Homo sapiens
gataatcccatcacc

SEQ ID NO: 1705903 - DNA, 15 bp, Homo sapiens
ataatcccatcaccc

SEQ ID NO: 1705904 - DNA, 15 bp, Homo sapiens
taatcccatcacccc

SEQ ID NO: 1705905 - DNA, 15 bp, Homo sapiens
aatcccatcaccccc

SEQ ID NO: 1705906 - DNA, 15 bp, Homo sapiens
atcccatcacccccg

SEQ ID NO: 1705907 - DNA, 15 bp, Homo sapiens
tcccatcacccccgg

SEQ ID NO: 1705908 - DNA, 15 bp, Homo sapiens
cccatcacccccggg

SEQ ID NO: 1705909 - DNA, 15 bp, Homo sapiens
ccatcacccccggga

SEQ ID NO: 1705910 - DNA, 15 bp, Homo sapiens
catcacccccgggag

SEQ ID NO: 1705911 - DNA, 15 bp, Homo sapiens
atcacccccgggagg

SEQ ID NO: 1705912 - DNA, 15 bp, Homo sapiens
tcacccccgggagga

SEQ ID NO: 1705913 - DNA, 15 bp, Homo sapiens
cacccccgggaggat

SEQ ID NO: 1705914 - DNA, 15 bp, Homo sapiens
acccccgggaggatc

SEQ ID NO: 1705915 - DNA, 15 bp, Homo sapiens
cccccgggaggatcc

SEQ ID NO: 1705916 - DNA, 15 bp, Homo sapiens
ccccgggaggatccc

SEQ ID NO: 1705917 - DNA, 15 bp, Homo sapiens
cccgggaggatccct

SEQ ID NO: 1705918 - DNA, 15 bp, Homo sapiens
ccgggaggatccctg

SEQ ID NO: 1705919 - DNA, 15 bp, Homo sapiens
cgggaggatccctgc

SEQ ID NO: 1705920 - DNA, 15 bp, Homo sapiens
gggaggatccctgcc

SEQ ID NO: 1705921 - DNA, 15 bp, Homo sapiens
ggaggatccctgcca

SEQ ID NO: 1705922 - DNA, 15 bp, Homo sapiens
gaggatccctgccat

SEQ ID NO: 1705923 - DNA, 15 bp, Homo sapiens
aggatccctgccatg

SEQ ID NO: 1705924 - DNA, 15 bp, Homo sapiens
ggatccctgccatgc

SEQ ID NO: 1705925 - DNA, 15 bp, Homo sapiens
gatccctgccatgct

SEQ ID NO: 1705926 - DNA, 15 bp, Homo sapiens
atccctgccatgctg

SEQ ID NO: 1705927 - DNA, 15 bp, Homo sapiens
tccctgccatgctgt

SEQ ID NO: 1705928 - DNA, 15 bp, Homo sapiens
ccctgccatgctgtt

SEQ ID NO: 1705929 - DNA, 15 bp, Homo sapiens
cctgccatgctgttg

SEQ ID NO: 1705930 - DNA, 15 bp, Homo sapiens
ctgccatgctgttgt

SEQ ID NO: 1705931 - DNA, 15 bp, Homo sapiens
tgccatgctgttgtg

SEQ ID NO: 1705932 - DNA, 15 bp, Homo sapiens
gccatgctgttgtgg

SEQ ID NO: 1705933 - DNA, 15 bp, Homo sapiens
ccatgctgttgtggt

SEQ ID NO: 1705934 - DNA, 15 bp, Homo sapiens
catgctgttgtggtc

SEQ ID NO: 1705935 - DNA, 15 bp, Homo sapiens
atgctgttgtggtct

SEQ ID NO: 1705936 - DNA, 15 bp, Homo sapiens
tgctgttgtggtcta

SEQ ID NO: 1705937 - DNA, 15 bp, Homo sapiens
gctgttgtggtctac

SEQ ID NO: 1705938 - DNA, 15 bp, Homo sapiens
ctgttgtggtctact

SEQ ID NO: 1705939 - DNA, 15 bp, Homo sapiens
tgttgtggtctactg

SEQ ID NO: 1705940 - DNA, 15 bp, Homo sapiens
gttgtggtctactgt

SEQ ID NO: 1705941 - DNA, 15 bp, Homo sapiens
ttgtggtctactgtt

SEQ ID NO: 1705942 - DNA, 15 bp, Homo sapiens
tgtggtctactgttg

SEQ ID NO: 1705943 - DNA, 15 bp, Homo sapiens
gtggtctactgttga

SEQ ID NO: 1705944 - DNA, 15 bp, Homo sapiens
tggtctactgttgag

SEQ ID NO: 1705945 - DNA, 15 bp, Homo sapiens
ggtctactgttgaga

SEQ ID NO: 1705946 - DNA, 15 bp, Homo sapiens
gtctactgttgagac

SEQ ID NO: 1705947 - DNA, 15 bp, Homo sapiens
tctactgttgagact

SEQ ID NO: 1705948 - DNA, 15 bp, Homo sapiens
ctactgttgagactg

SEQ ID NO: 1705949 - DNA, 15 bp, Homo sapiens
tactgttgagactga

SEQ ID NO: 1705950 - DNA, 15 bp, Homo sapiens
actgttgagactgag

SEQ ID NO: 1705951 - DNA, 15 bp, Homo sapiens
ctgttgagactgagt

SEQ ID NO: 1705952 - DNA, 15 bp, Homo sapiens
tgttgagactgagtc

SEQ ID NO: 1705953 - DNA, 15 bp, Homo sapiens
gttgagactgagtca

SEQ ID NO: 1705954 - DNA, 15 bp, Homo sapiens
ttgagactgagtcat

SEQ ID NO: 1705955 - DNA, 15 bp, Homo sapiens
tgagactgagtcatg

SEQ ID NO: 1705956 - DNA, 15 bp, Homo sapiens
gagactgagtcatga

SEQ ID NO: 1705957 - DNA, 15 bp, Homo sapiens
agactgagtcatgaa

SEQ ID NO: 1705958 - DNA, 15 bp, Homo sapiens
gactgagtcatgaac

SEQ ID NO: 1705959 - DNA, 15 bp, Homo sapiens
actgagtcatgaaca

SEQ ID NO: 1705960 - DNA, 15 bp, Homo sapiens
ctgagtcatgaacag

SEQ ID NO: 1705961 - DNA, 15 bp, Homo sapiens
tgagtcatgaacaga

SEQ ID NO: 1705962 - DNA, 15 bp, Homo sapiens
gagtcatgaacagac

SEQ ID NO: 1705963 - DNA, 15 bp, Homo sapiens
agtcatgaacagact

SEQ ID NO: 1705964 - DNA, 15 bp, Homo sapiens
gtcatgaacagactc

SEQ ID NO: 1705965 - DNA, 15 bp, Homo sapiens
tcatgaacagactca

SEQ ID NO: 1705966 - DNA, 15 bp, Homo sapiens
catgaacagactcag

SEQ ID NO: 1705967 - DNA, 15 bp, Homo sapiens
atgaacagactcaga

SEQ ID NO: 1705968 - DNA, 15 bp, Homo sapiens
tgaacagactcagag

SEQ ID NO: 1705969 - DNA, 15 bp, Homo sapiens
gaacagactcagagt

SEQ ID NO: 1705970 - DNA, 15 bp, Homo sapiens
aacagactcagagta

SEQ ID NO: 1705971 - DNA, 15 bp, Homo sapiens
acagactcagagtag

SEQ ID NO: 1705972 - DNA, 15 bp, Homo sapiens
cagactcagagtagt

SEQ ID NO: 1705973 - DNA, 15 bp, Homo sapiens
agactcagagtagta

SEQ ID NO: 1705974 - DNA, 15 bp, Homo sapiens
gactcagagtagtat

SEQ ID NO: 1705975 - DNA, 15 bp, Homo sapiens
actcagagtagtatc

SEQ ID NO: 1705976 - DNA, 15 bp, Homo sapiens
ctcagagtagtatca

SEQ ID NO: 1705977 - DNA, 15 bp, Homo sapiens
tcagagtagtatcat

SEQ ID NO: 1705978 - DNA, 15 bp, Homo sapiens
cagagtagtatcata

SEQ ID NO: 1705979 - DNA, 15 bp, Homo sapiens
agagtagtatcatac

SEQ ID NO: 1705980 - DNA, 15 bp, Homo sapiens
gagtagtatcataca

SEQ ID NO: 1705981 - DNA, 15 bp, Homo sapiens
agtagtatcatacaa

SEQ ID NO: 1705982 - DNA, 15 bp, Homo sapiens
gtagtatcatacaaa

SEQ ID NO: 1705983 - DNA, 15 bp, Homo sapiens
tagtatcatacaaag

SEQ ID NO: 1705984 - DNA, 15 bp, Homo sapiens
agtatcatacaaaga

SEQ ID NO: 1705985 - DNA, 15 bp, Homo sapiens
gtatcatacaaagat

SEQ ID NO: 1705986 - DNA, 15 bp, Homo sapiens
tatcatacaaagatc

SEQ ID NO: 1705987 - DNA, 15 bp, Homo sapiens
atcatacaaagatca

SEQ ID NO: 1705988 - DNA, 15 bp, Homo sapiens
tcatacaaagatcac

SEQ ID NO: 1705989 - DNA, 15 bp, Homo sapiens
catacaaagatcaca

SEQ ID NO: 1705990 - DNA, 15 bp, Homo sapiens
atacaaagatcacac

SEQ ID NO: 1705991 - DNA, 15 bp, Homo sapiens
tacaaagatcacact

SEQ ID NO: 1705992 - DNA, 15 bp, Homo sapiens
acaaagatcacacta

SEQ ID NO: 1705993 - DNA, 15 bp, Homo sapiens
caaagatcacactac

SEQ ID NO: 1705994 - DNA, 15 bp, Homo sapiens
aaagatcacactact

SEQ ID NO: 1705995 - DNA, 15 bp, Homo sapiens
aagatcacactactg

SEQ ID NO: 1705996 - DNA, 15 bp, Homo sapiens
agatcacactactgc

SEQ ID NO: 1705997 - DNA, 15 bp, Homo sapiens
atcacactactgcat

SEQ ID NO: 1705998 - DNA, 15 bp, Homo sapiens
tcacactactgcatg

SEQ ID NO: 1705999 - DNA, 15 bp, Homo sapiens
cacactactgcatga

SEQ ID NO: 1706000 - DNA, 15 bp, Homo sapiens
acactactgcatgaa

SEQ ID NO: 1706001 - DNA, 15 bp, Homo sapiens
cactactgcatgaac

SEQ ID NO: 1706002 - DNA, 15 bp, Homo sapiens
actactgcatgaacc

SEQ ID NO: 1706003 - DNA, 15 bp, Homo sapiens
ctactgcatgaaccc

SEQ ID NO: 1706004 - DNA, 15 bp, Homo sapiens
tactgcatgaaccca

SEQ ID NO: 1706005 - DNA, 15 bp, Homo sapiens
actgcatgaacccaa

SEQ ID NO: 1706006 - DNA, 15 bp, Homo sapiens
ctgcatgaacccaaa

SEQ ID NO: 1706007 - DNA, 15 bp, Homo sapiens
tgcatgaacccaaaa

SEQ ID NO: 1706008 - DNA, 15 bp, Homo sapiens
gcatgaacccaaaat

SEQ ID NO: 1706009 - DNA, 15 bp, Homo sapiens
catgaacccaaaatc

SEQ ID NO: 1706010 - DNA, 15 bp, Homo sapiens
atgaacccaaaatca

SEQ ID NO: 1706011 - DNA, 15 bp, Homo sapiens
tgaacccaaaatcaa

SEQ ID NO: 1706012 - DNA, 15 bp, Homo sapiens
gaacccaaaatcaaa

SEQ ID NO: 1706013 - DNA, 15 bp, Homo sapiens
aacccaaaatcaaag

SEQ ID NO: 1706014 - DNA, 15 bp, Homo sapiens
acccaaaatcaaagc

SEQ ID NO: 1706015 - DNA, 15 bp, Homo sapiens
cccaaaatcaaagcc

SEQ ID NO: 1706016 - DNA, 15 bp, Homo sapiens
ccaaaatcaaagcca

SEQ ID NO: 1706017 - DNA, 15 bp, Homo sapiens
caaaatcaaagccaa

SEQ ID NO: 1706018 - DNA, 15 bp, Homo sapiens
aaaatcaaagccaaa

SEQ ID NO: 1706019 - DNA, 15 bp, Homo sapiens
aaatcaaagccaaag

SEQ ID NO: 1706020 - DNA, 15 bp, Homo sapiens
aatcaaagccaaagt

SEQ ID NO: 1706021 - DNA, 15 bp, Homo sapiens
atcaaagccaaagta

SEQ ID NO: 1706022 - DNA, 15 bp, Homo sapiens
tcaaagccaaagtat

SEQ ID NO: 1706023 - DNA, 15 bp, Homo sapiens
caaagccaaagtatt

SEQ ID NO: 1706024 - DNA, 15 bp, Homo sapiens
aaagccaaagtattt

SEQ ID NO: 1706025 - DNA, 15 bp, Homo sapiens
aagccaaagtatttt

SEQ ID NO: 1706026 - DNA, 15 bp, Homo sapiens
agccaaagtattttt

SEQ ID NO: 1706027 - DNA, 15 bp, Homo sapiens
gccaaagtatttttt

SEQ ID NO: 1706028 - DNA, 15 bp, Homo sapiens
ccaaagtatttttta

SEQ ID NO: 1706029 - DNA, 15 bp, Homo sapiens
caaagtattttttaa

SEQ ID NO: 1706030 - DNA, 15 bp, Homo sapiens
aaagtattttttaaa

SEQ ID NO: 1706031 - DNA, 15 bp, Homo sapiens
aagtattttttaaaa

SEQ ID NO: 1706032 - DNA, 15 bp, Homo sapiens
agtattttttaaaaa

SEQ ID NO: 1706033 - DNA, 15 bp, Homo sapiens
gtattttttaaaaat

SEQ ID NO: 1706034 - DNA, 15 bp, Homo sapiens
attttttaaaaatct

SEQ ID NO: 1706035 - DNA, 15 bp, Homo sapiens
ttttttaaaaatctc

SEQ ID NO: 1706036 - DNA, 15 bp, Homo sapiens
tttttaaaaatctcc

SEQ ID NO: 1706037 - DNA, 15 bp, Homo sapiens
ttttaaaaatctccc

SEQ ID NO: 1706038 - DNA, 15 bp, Homo sapiens
tttaaaaatctcccc

SEQ ID NO: 1706039 - DNA, 15 bp, Homo sapiens
ttaaaaatctcccct

SEQ ID NO: 1706040 - DNA, 15 bp, Homo sapiens
taaaaatctccccta

SEQ ID NO: 1706041 - DNA, 15 bp, Homo sapiens
aaaaatctcccctac

SEQ ID NO: 1706042 - DNA, 15 bp, Homo sapiens
aaatctcccctacaa

SEQ ID NO: 1706043 - DNA, 15 bp, Homo sapiens
aatctcccctacaaa

SEQ ID NO: 1706044 - DNA, 15 bp, Homo sapiens
atctcccctacaaaa

SEQ ID NO: 1706045 - DNA, 15 bp, Homo sapiens
tctcccctacaaaag

SEQ ID NO: 1706046 - DNA, 15 bp, Homo sapiens
ctcccctacaaaagc

SEQ ID NO: 1706047 - DNA, 15 bp, Homo sapiens
tcccctacaaaagca

SEQ ID NO: 1706048 - DNA, 15 bp, Homo sapiens
cccctacaaaagcaa

SEQ ID NO: 1706049 - DNA, 15 bp, Homo sapiens
ccctacaaaagcaaa

SEQ ID NO: 1706050 - DNA, 15 bp, Homo sapiens
cctacaaaagcaaat

SEQ ID NO: 1706051 - DNA, 15 bp, Homo sapiens
ctacaaaagcaaatt

SEQ ID NO: 1706052 - DNA, 15 bp, Homo sapiens
tacaaaagcaaattc

SEQ ID NO: 1706053 - DNA, 15 bp, Homo sapiens
acaaaagcaaattca

SEQ ID NO: 1706054 - DNA, 15 bp, Homo sapiens
caaaagcaaattcaa

SEQ ID NO: 1706055 - DNA, 15 bp, Homo sapiens
aaaagcaaattcaaa

SEQ ID NO: 1706056 - DNA, 15 bp, Homo sapiens
aaagcaaattcaaaa

SEQ ID NO: 1706057 - DNA, 15 bp, Homo sapiens
aagcaaattcaaaaa

SEQ ID NO: 1706058 - DNA, 15 bp, Homo sapiens
agcaaattcaaaaat

SEQ ID NO: 1706059 - DNA, 15 bp, Homo sapiens
gcaaattcaaaaatt

SEQ ID NO: 1706060 - DNA, 15 bp, Homo sapiens
caaattcaaaaattg

SEQ ID NO: 1706061 - DNA, 15 bp, Homo sapiens
aaattcaaaaattgg

SEQ ID NO: 1706062 - DNA, 15 bp, Homo sapiens
aattcaaaaattgga

SEQ ID NO: 1706063 - DNA, 15 bp, Homo sapiens
attcaaaaattggaa

SEQ ID NO: 1706064 - DNA, 15 bp, Homo sapiens
ttcaaaaattggaac

SEQ ID NO: 1706065 - DNA, 15 bp, Homo sapiens
tcaaaaattggaaca

SEQ ID NO: 1706066 - DNA, 15 bp, Homo sapiens
caaaaattggaacaa

SEQ ID NO: 1706067 - DNA, 15 bp, Homo sapiens
aaaaattggaacaag

SEQ ID NO: 1706068 - DNA, 15 bp, Homo sapiens
aaaattggaacaagc

SEQ ID NO: 1706069 - DNA, 15 bp, Homo sapiens
aaattggaacaagca

SEQ ID NO: 1706070 - DNA, 15 bp, Homo sapiens
aattggaacaagcaa

SEQ ID NO: 1706071 - DNA, 15 bp, Homo sapiens
attggaacaagcaac

SEQ ID NO: 1706072 - DNA, 15 bp, Homo sapiens
ttggaacaagcaact

SEQ ID NO: 1706073 - DNA, 15 bp, Homo sapiens
tggaacaagcaactg

SEQ ID NO: 1706074 - DNA, 15 bp, Homo sapiens
ggaacaagcaactga

SEQ ID NO: 1706075 - DNA, 15 bp, Homo sapiens
gaacaagcaactgat

SEQ ID NO: 1706076 - DNA, 15 bp, Homo sapiens
aacaagcaactgata

SEQ ID NO: 1706077 - DNA, 15 bp, Homo sapiens
acaagcaactgatac

SEQ ID NO: 1706078 - DNA, 15 bp, Homo sapiens
caagcaactgataca

SEQ ID NO: 1706079 - DNA, 15 bp, Homo sapiens
aagcaactgatacat

SEQ ID NO: 1706080 - DNA, 15 bp, Homo sapiens
agcaactgatacatc

SEQ ID NO: 1706081 - DNA, 15 bp, Homo sapiens
gcaactgatacatca

SEQ ID NO: 1706082 - DNA, 15 bp, Homo sapiens
caactgatacatcag

SEQ ID NO: 1706083 - DNA, 15 bp, Homo sapiens
aactgatacatcaga

SEQ ID NO: 1706084 - DNA, 15 bp, Homo sapiens
actgatacatcagat

SEQ ID NO: 1706085 - DNA, 15 bp, Homo sapiens
ctgatacatcagata

SEQ ID NO: 1706086 - DNA, 15 bp, Homo sapiens
tgatacatcagatat

SEQ ID NO: 1706087 - DNA, 15 bp, Homo sapiens
gatacatcagatata

SEQ ID NO: 1706088 - DNA, 15 bp, Homo sapiens
atacatcagatatac

SEQ ID NO: 1706089 - DNA, 15 bp, Homo sapiens
tacatcagatataca

SEQ ID NO: 1706090 - DNA, 15 bp, Homo sapiens
acatcagatatacag

SEQ ID NO: 1706091 - DNA, 15 bp, Homo sapiens
catcagatatacaga

SEQ ID NO: 1706092 - DNA, 15 bp, Homo sapiens
atcagatatacagat

SEQ ID NO: 1706093 - DNA, 15 bp, Homo sapiens
tcagatatacagata

SEQ ID NO: 1706094 - DNA, 15 bp, Homo sapiens
cagatatacagatat

SEQ ID NO: 1706095 - DNA, 15 bp, Homo sapiens
agatatacagatatc

SEQ ID NO: 1706096 - DNA, 15 bp, Homo sapiens
gatatacagatatca

SEQ ID NO: 1706097 - DNA, 15 bp, Homo sapiens
atatacagatatcaa

SEQ ID NO: 1706098 - DNA, 15 bp, Homo sapiens
tatacagatatcaat

SEQ ID NO: 1706099 - DNA, 15 bp, Homo sapiens
atacagatatcaatg

SEQ ID NO: 1706100 - DNA, 15 bp, Homo sapiens
tacagatatcaatgg

SEQ ID NO: 1706101 - DNA, 15 bp, Homo sapiens
acagatatcaatgga

SEQ ID NO: 1706102 - DNA, 15 bp, Homo sapiens
cagatatcaatggaa

SEQ ID NO: 1706103 - DNA, 15 bp, Homo sapiens
agatatcaatggaag

SEQ ID NO: 1706104 - DNA, 15 bp, Homo sapiens
gatatcaatggaaga

SEQ ID NO: 1706105 - DNA, 15 bp, Homo sapiens
atatcaatggaagaa

SEQ ID NO: 1706106 - DNA, 15 bp, Homo sapiens
tatcaatggaagaac

SEQ ID NO: 1706107 - DNA, 15 bp, Homo sapiens
atcaatggaagaaca

SEQ ID NO: 1706108 - DNA, 15 bp, Homo sapiens
tcaatggaagaacat

SEQ ID NO: 1706109 - DNA, 15 bp, Homo sapiens
caatggaagaacata

SEQ ID NO: 1706110 - DNA, 15 bp, Homo sapiens
aatggaagaacatag

SEQ ID NO: 1706111 - DNA, 15 bp, Homo sapiens
atggaagaacatagg

SEQ ID NO: 1706112 - DNA, 15 bp, Homo sapiens
tggaagaacatagga

SEQ ID NO: 1706113 - DNA, 15 bp, Homo sapiens
ggaagaacataggaa

SEQ ID NO: 1706114 - DNA, 15 bp, Homo sapiens
gaagaacataggaaa

SEQ ID NO: 1706115 - DNA, 15 bp, Homo sapiens
aagaacataggaaac

SEQ ID NO: 1706116 - DNA, 15 bp, Homo sapiens
agaacataggaaaca

SEQ ID NO: 1706117 - DNA, 15 bp, Homo sapiens
gaacataggaaacat

SEQ ID NO: 1706118 - DNA, 15 bp, Homo sapiens
aacataggaaacatg

SEQ ID NO: 1706119 - DNA, 15 bp, Homo sapiens
acataggaaacatga

SEQ ID NO: 1706120 - DNA, 15 bp, Homo sapiens
cataggaaacatgaa

SEQ ID NO: 1706121 - DNA, 15 bp, Homo sapiens
ataggaaacatgaaa

SEQ ID NO: 1706122 - DNA, 15 bp, Homo sapiens
taggaaacatgaaaa

SEQ ID NO: 1706123 - DNA, 15 bp, Homo sapiens
aggaaacatgaaaaa

SEQ ID NO: 1706124 - DNA, 15 bp, Homo sapiens
ggaaacatgaaaaag

SEQ ID NO: 1706125 - DNA, 15 bp, Homo sapiens
gaaacatgaaaaagc

SEQ ID NO: 1706126 - DNA, 15 bp, Homo sapiens
aaacatgaaaaagca

SEQ ID NO: 1706127 - DNA, 15 bp, Homo sapiens
aacatgaaaaagcat

SEQ ID NO: 1706128 - DNA, 15 bp, Homo sapiens
acatgaaaaagcatg

SEQ ID NO: 1706129 - DNA, 15 bp, Homo sapiens
catgaaaaagcatgg

SEQ ID NO: 1706130 - DNA, 15 bp, Homo sapiens
atgaaaaagcatgga

SEQ ID NO: 1706131 - DNA, 15 bp, Homo sapiens
tgaaaaagcatggaa

SEQ ID NO: 1706132 - DNA, 15 bp, Homo sapiens
gaaaaagcatggaaa

SEQ ID NO: 1706133 - DNA, 15 bp, Homo sapiens
aaaaagcatggaaat

SEQ ID NO: 1706134 - DNA, 15 bp, Homo sapiens
aaaagcatggaaata

SEQ ID NO: 1706135 - DNA, 15 bp, Homo sapiens
aaagcatggaaatat

SEQ ID NO: 1706136 - DNA, 15 bp, Homo sapiens
aagcatggaaatatg

SEQ ID NO: 1706137 - DNA, 15 bp, Homo sapiens
agcatggaaatatga

SEQ ID NO: 1706138 - DNA, 15 bp, Homo sapiens
gcatggaaatatgac

SEQ ID NO: 1706139 - DNA, 15 bp, Homo sapiens
catggaaatatgaca

SEQ ID NO: 1706140 - DNA, 15 bp, Homo sapiens
atggaaatatgacac

SEQ ID NO: 1706141 - DNA, 15 bp, Homo sapiens
tggaaatatgacacc

SEQ ID NO: 1706142 - DNA, 15 bp, Homo sapiens
ggaaatatgacacca

SEQ ID NO: 1706143 - DNA, 15 bp, Homo sapiens
gaaatatgacaccac

SEQ ID NO: 1706144 - DNA, 15 bp, Homo sapiens
aaatatgacaccacc

SEQ ID NO: 1706145 - DNA, 15 bp, Homo sapiens
aatatgacaccacca

SEQ ID NO: 1706146 - DNA, 15 bp, Homo sapiens
atatgacaccaccaa

SEQ ID NO: 1706147 - DNA, 15 bp, Homo sapiens
tatgacaccaccaaa

SEQ ID NO: 1706148 - DNA, 15 bp, Homo sapiens
atgacaccaccaaag

SEQ ID NO: 1706149 - DNA, 15 bp, Homo sapiens
tgacaccaccaaagg

SEQ ID NO: 1706150 - DNA, 15 bp, Homo sapiens
gacaccaccaaagga

SEQ ID NO: 1706151 - DNA, 15 bp, Homo sapiens
acaccaccaaaggac

SEQ ID NO: 1706152 - DNA, 15 bp, Homo sapiens
caccaccaaaggacc

SEQ ID NO: 1706153 - DNA, 15 bp, Homo sapiens
accaccaaaggacca

SEQ ID NO: 1706154 - DNA, 15 bp, Homo sapiens
ccaccaaaggaccac

SEQ ID NO: 1706155 - DNA, 15 bp, Homo sapiens
caccaaaggaccaca

SEQ ID NO: 1706156 - DNA, 15 bp, Homo sapiens
accaaaggaccacaa

SEQ ID NO: 1706157 - DNA, 15 bp, Homo sapiens
ccaaaggaccacaac

SEQ ID NO: 1706158 - DNA, 15 bp, Homo sapiens
caaaggaccacaaca

SEQ ID NO: 1706159 - DNA, 15 bp, Homo sapiens
aaaggaccacaacaa

SEQ ID NO: 1706160 - DNA, 15 bp, Homo sapiens
aaggaccacaacaag

SEQ ID NO: 1706161 - DNA, 15 bp, Homo sapiens
aggaccacaacaagt

SEQ ID NO: 1706162 - DNA, 15 bp, Homo sapiens
ggaccacaacaagtg

SEQ ID NO: 1706163 - DNA, 15 bp, Homo sapiens
gaccacaacaagtgt

SEQ ID NO: 1706164 - DNA, 15 bp, Homo sapiens
accacaacaagtgtc

SEQ ID NO: 1706165 - DNA, 15 bp, Homo sapiens
ccacaacaagtgtcc

SEQ ID NO: 1706166 - DNA, 15 bp, Homo sapiens
cacaacaagtgtcca

SEQ ID NO: 1706167 - DNA, 15 bp, Homo sapiens
acaacaagtgtccag

SEQ ID NO: 1706168 - DNA, 15 bp, Homo sapiens
caacaagtgtccagc

SEQ ID NO: 1706169 - DNA, 15 bp, Homo sapiens
aacaagtgtccagca

SEQ ID NO: 1706170 - DNA, 15 bp, Homo sapiens
acaagtgtccagcaa

SEQ ID NO: 1706171 - DNA, 15 bp, Homo sapiens
caagtgtccagcaac

SEQ ID NO: 1706172 - DNA, 15 bp, Homo sapiens
aagtgtccagcaacc

SEQ ID NO: 1706173 - DNA, 15 bp, Homo sapiens
agtgtccagcaacca

SEQ ID NO: 1706174 - DNA, 15 bp, Homo sapiens
gtgtccagcaaccaa

SEQ ID NO: 1706175 - DNA, 15 bp, Homo sapiens
tgtccagcaaccaat

SEQ ID NO: 1706176 - DNA, 15 bp, Homo sapiens
gtccagcaaccaata

SEQ ID NO: 1706177 - DNA, 15 bp, Homo sapiens
tccagcaaccaataa

SEQ ID NO: 1706178 - DNA, 15 bp, Homo sapiens
ccagcaaccaataat

SEQ ID NO: 1706179 - DNA, 15 bp, Homo sapiens
cagcaaccaataatg

SEQ ID NO: 1706180 - DNA, 15 bp, Homo sapiens
agcaaccaataatgg

SEQ ID NO: 1706181 - DNA, 15 bp, Homo sapiens
gcaaccaataatggt

SEQ ID NO: 1706182 - DNA, 15 bp, Homo sapiens
caaccaataatggtg

SEQ ID NO: 1706183 - DNA, 15 bp, Homo sapiens
aaccaataatggtgt

SEQ ID NO: 1706184 - DNA, 15 bp, Homo sapiens
accaataatggtgtg

SEQ ID NO: 1706185 - DNA, 15 bp, Homo sapiens
ccaataatggtgtgg

SEQ ID NO: 1706186 - DNA, 15 bp, Homo sapiens
caataatggtgtggc

SEQ ID NO: 1706187 - DNA, 15 bp, Homo sapiens
aataatggtgtggct

SEQ ID NO: 1706188 - DNA, 15 bp, Homo sapiens
ataatggtgtggctt

SEQ ID NO: 1706189 - DNA, 15 bp, Homo sapiens
taatggtgtggcttt

SEQ ID NO: 1706190 - DNA, 15 bp, Homo sapiens
aatggtgtggctttg

SEQ ID NO: 1706191 - DNA, 15 bp, Homo sapiens
atggtgtggctttgt

SEQ ID NO: 1706192 - DNA, 15 bp, Homo sapiens
tggtgtggctttgtg

SEQ ID NO: 1706193 - DNA, 15 bp, Homo sapiens
ggtgtggctttgtgt

SEQ ID NO: 1706194 - DNA, 15 bp, Homo sapiens
gtgtggctttgtgtc

SEQ ID NO: 1706195 - DNA, 15 bp, Homo sapiens
tgtggctttgtgtcc

SEQ ID NO: 1706196 - DNA, 15 bp, Homo sapiens
gtggctttgtgtccc

SEQ ID NO: 1706197 - DNA, 15 bp, Homo sapiens
tggctttgtgtcccc

SEQ ID NO: 1706198 - DNA, 15 bp, Homo sapiens
ggctttgtgtcccca

SEQ ID NO: 1706199 - DNA, 15 bp, Homo sapiens
gctttgtgtccccac

SEQ ID NO: 1706200 - DNA, 15 bp, Homo sapiens
ctttgtgtccccacc

SEQ ID NO: 1706201 - DNA, 15 bp, Homo sapiens
tttgtgtccccaccc

SEQ ID NO: 1706202 - DNA, 15 bp, Homo sapiens
ttgtgtccccaccca

SEQ ID NO: 1706203 - DNA, 15 bp, Homo sapiens
cacccaaatctcatg

SEQ ID NO: 1706204 - DNA, 15 bp, Homo sapiens
acccaaatctcatgc

SEQ ID NO: 1706205 - DNA, 15 bp, Homo sapiens
cccaaatctcatgcc

SEQ ID NO: 1706206 - DNA, 15 bp, Homo sapiens
ccaaatctcatgcca

SEQ ID NO: 1706207 - DNA, 15 bp, Homo sapiens
caaatctcatgccaa

SEQ ID NO: 1706208 - DNA, 15 bp, Homo sapiens
aaatctcatgccaaa

SEQ ID NO: 1706209 - DNA, 15 bp, Homo sapiens
aatctcatgccaaat

SEQ ID NO: 1706210 - DNA, 15 bp, Homo sapiens
atctcatgccaaatt

SEQ ID NO: 1706211 - DNA, 15 bp, Homo sapiens
tctcatgccaaattg

SEQ ID NO: 1706212 - DNA, 15 bp, Homo sapiens
ctcatgccaaattgt

SEQ ID NO: 1706213 - DNA, 15 bp, Homo sapiens
tcatgccaaattgta

SEQ ID NO: 1706214 - DNA, 15 bp, Homo sapiens
catgccaaattgtaa

SEQ ID NO: 1706215 - DNA, 15 bp, Homo sapiens
atgccaaattgtaat

SEQ ID NO: 1706216 - DNA, 15 bp, Homo sapiens
tgccaaattgtaatc

SEQ ID NO: 1706217 - DNA, 15 bp, Homo sapiens
gccaaattgtaatcc

SEQ ID NO: 1706218 - DNA, 15 bp, Homo sapiens
ccaaattgtaatccc

SEQ ID NO: 1706219 - DNA, 15 bp, Homo sapiens
caaattgtaatcccc

SEQ ID NO: 1706220 - DNA, 15 bp, Homo sapiens
aaattgtaatcccca

SEQ ID NO: 1706221 - DNA, 15 bp, Homo sapiens
aattgtaatccccac

SEQ ID NO: 1706222 - DNA, 15 bp, Homo sapiens
attgtaatccccaca

SEQ ID NO: 1706223 - DNA, 15 bp, Homo sapiens
ttgtaatccccacat

SEQ ID NO: 1706224 - DNA, 15 bp, Homo sapiens
tgtaatccccacatg

SEQ ID NO: 1706225 - DNA, 15 bp, Homo sapiens
gtaatccccacatgt

SEQ ID NO: 1706226 - DNA, 15 bp, Homo sapiens
taatccccacatgtt

SEQ ID NO: 1706227 - DNA, 15 bp, Homo sapiens
aatccccacatgttg

SEQ ID NO: 1706228 - DNA, 15 bp, Homo sapiens
atccccacatgttga

SEQ ID NO: 1706229 - DNA, 15 bp, Homo sapiens
tccccacatgttgaa

SEQ ID NO: 1706230 - DNA, 15 bp, Homo sapiens
ccccacatgttgaag

SEQ ID NO: 1706231 - DNA, 15 bp, Homo sapiens
cccacatgttgaagg

SEQ ID NO: 1706232 - DNA, 15 bp, Homo sapiens
ccacatgttgaagga

SEQ ID NO: 1706233 - DNA, 15 bp, Homo sapiens
cacatgttgaaggaa

SEQ ID NO: 1706234 - DNA, 15 bp, Homo sapiens
acatgttgaaggaag

SEQ ID NO: 1706235 - DNA, 15 bp, Homo sapiens
catgttgaaggaaga

SEQ ID NO: 1706236 - DNA, 15 bp, Homo sapiens
atgttgaaggaagaa

SEQ ID NO: 1706237 - DNA, 15 bp, Homo sapiens
tgttgaaggaagaac

SEQ ID NO: 1706238 - DNA, 15 bp, Homo sapiens
gttgaaggaagaacc

SEQ ID NO: 1706239 - DNA, 15 bp, Homo sapiens
ttgaaggaagaacct

SEQ ID NO: 1706240 - DNA, 15 bp, Homo sapiens
tgaaggaagaacctg

SEQ ID NO: 1706241 - DNA, 15 bp, Homo sapiens
gaaggaagaacctgg

SEQ ID NO: 1706242 - DNA, 15 bp, Homo sapiens
aaggaagaacctggt

SEQ ID NO: 1706243 - DNA, 15 bp, Homo sapiens
aggaagaacctggtg

SEQ ID NO: 1706244 - DNA, 15 bp, Homo sapiens
ggaagaacctggtgg

SEQ ID NO: 1706245 - DNA, 15 bp, Homo sapiens
gaagaacctggtggg

SEQ ID NO: 1706246 - DNA, 15 bp, Homo sapiens
aagaacctggtggga

SEQ ID NO: 1706247 - DNA, 15 bp, Homo sapiens
agaacctggtgggag

SEQ ID NO: 1706248 - DNA, 15 bp, Homo sapiens
gaacctggtgggagg

SEQ ID NO: 1706249 - DNA, 15 bp, Homo sapiens
aacctggtgggaggt

SEQ ID NO: 1706250 - DNA, 15 bp, Homo sapiens
acctggtgggaggta

SEQ ID NO: 1706251 - DNA, 15 bp, Homo sapiens
cctggtgggaggtaa

SEQ ID NO: 1706252 - DNA, 15 bp, Homo sapiens
ctggtgggaggtaat

SEQ ID NO: 1706253 - DNA, 15 bp, Homo sapiens
tggtgggaggtaatt

SEQ ID NO: 1706254 - DNA, 15 bp, Homo sapiens
gtgggaggtaattgg

SEQ ID NO: 1706255 - DNA, 15 bp, Homo sapiens
tgggaggtaattgga

SEQ ID NO: 1706256 - DNA, 15 bp, Homo sapiens
gggaggtaattggat

SEQ ID NO: 1706257 - DNA, 15 bp, Homo sapiens
ggaggtaattggatc

SEQ ID NO: 1706258 - DNA, 15 bp, Homo sapiens
gaggtaattggatca

SEQ ID NO: 1706259 - DNA, 15 bp, Homo sapiens
aggtaattggatcat

SEQ ID NO: 1706260 - DNA, 15 bp, Homo sapiens
ggtaattggatcatg

SEQ ID NO: 1706261 - DNA, 15 bp, Homo sapiens
gtaattggatcatgg

SEQ ID NO: 1706262 - DNA, 15 bp, Homo sapiens
taattggatcatggg

SEQ ID NO: 1706263 - DNA, 15 bp, Homo sapiens
aattggatcatgggt

SEQ ID NO: 1706264 - DNA, 15 bp, Homo sapiens
attggatcatgggtg

SEQ ID NO: 1706265 - DNA, 15 bp, Homo sapiens
ttggatcatgggtgg

SEQ ID NO: 1706266 - DNA, 15 bp, Homo sapiens
tggatcatgggtggg

SEQ ID NO: 1706267 - DNA, 15 bp, Homo sapiens
ggatcatgggtgggt

SEQ ID NO: 1706268 - DNA, 15 bp, Homo sapiens
gatcatgggtgggtg

SEQ ID NO: 1706269 - DNA, 15 bp, Homo sapiens
atcatgggtgggtgg

SEQ ID NO: 1706270 - DNA, 15 bp, Homo sapiens
tcatgggtgggtgga

SEQ ID NO: 1706271 - DNA, 15 bp, Homo sapiens
catgggtgggtggat

SEQ ID NO: 1706272 - DNA, 15 bp, Homo sapiens
atgggtgggtggatt

SEQ ID NO: 1706273 - DNA, 15 bp, Homo sapiens
tgggtgggtggattt

SEQ ID NO: 1706274 - DNA, 15 bp, Homo sapiens
gggtgggtggatttc

SEQ ID NO: 1706275 - DNA, 15 bp, Homo sapiens
ggtgggtggatttcc

SEQ ID NO: 1706276 - DNA, 15 bp, Homo sapiens
gtgggtggatttccc

SEQ ID NO: 1706277 - DNA, 15 bp, Homo sapiens
tgggtggatttcccc

SEQ ID NO: 1706278 - DNA, 15 bp, Homo sapiens
gggtggatttccccc

SEQ ID NO: 1706279 - DNA, 15 bp, Homo sapiens
ggtggatttccccct

SEQ ID NO: 1706280 - DNA, 15 bp, Homo sapiens
gtggatttccccctt

SEQ ID NO: 1706281 - DNA, 15 bp, Homo sapiens
tggatttcccccttg

SEQ ID NO: 1706282 - DNA, 15 bp, Homo sapiens
ggatttcccccttgc

SEQ ID NO: 1706283 - DNA, 15 bp, Homo sapiens
gatttcccccttgct

SEQ ID NO: 1706284 - DNA, 15 bp, Homo sapiens
atttcccccttgcta

SEQ ID NO: 1706285 - DNA, 15 bp, Homo sapiens
tttcccccttgctat

SEQ ID NO: 1706286 - DNA, 15 bp, Homo sapiens
ttcccccttgctatt

SEQ ID NO: 1706287 - DNA, 15 bp, Homo sapiens
tcccccttgctattc

SEQ ID NO: 1706288 - DNA, 15 bp, Homo sapiens
cccccttgctattct

SEQ ID NO: 1706289 - DNA, 15 bp, Homo sapiens
ccccttgctattctt

SEQ ID NO: 1706290 - DNA, 15 bp, Homo sapiens
cccttgctattcttg

SEQ ID NO: 1706291 - DNA, 15 bp, Homo sapiens
ccttgctattcttgt

SEQ ID NO: 1706292 - DNA, 15 bp, Homo sapiens
cttgctattcttgtg

SEQ ID NO: 1706293 - DNA, 15 bp, Homo sapiens
ttgctattcttgtga

SEQ ID NO: 1706294 - DNA, 15 bp, Homo sapiens
tgctattcttgtgat

SEQ ID NO: 1706295 - DNA, 15 bp, Homo sapiens
gctattcttgtgata

SEQ ID NO: 1706296 - DNA, 15 bp, Homo sapiens
ctattcttgtgatag

SEQ ID NO: 1706297 - DNA, 15 bp, Homo sapiens
tattcttgtgatagt

SEQ ID NO: 1706298 - DNA, 15 bp, Homo sapiens
attcttgtgatagtg

SEQ ID NO: 1706299 - DNA, 15 bp, Homo sapiens
cttgtgatagtgagt

SEQ ID NO: 1706300 - DNA, 15 bp, Homo sapiens
ttgtgatagtgagtg

SEQ ID NO: 1706301 - DNA, 15 bp, Homo sapiens
tgtgatagtgagtga

SEQ ID NO: 1706302 - DNA, 15 bp, Homo sapiens
gtgatagtgagtgag

SEQ ID NO: 1706303 - DNA, 15 bp, Homo sapiens
tgatagtgagtgagt

SEQ ID NO: 1706304 - DNA, 15 bp, Homo sapiens
gatagtgagtgagtt

SEQ ID NO: 1706305 - DNA, 15 bp, Homo sapiens
atagtgagtgagttc

SEQ ID NO: 1706306 - DNA, 15 bp, Homo sapiens
tagtgagtgagttct

SEQ ID NO: 1706307 - DNA, 15 bp, Homo sapiens
agtgagtgagttctc

SEQ ID NO: 1706308 - DNA, 15 bp, Homo sapiens
gtgagtgagttctca

SEQ ID NO: 1706309 - DNA, 15 bp, Homo sapiens
tgagtgagttctcac

SEQ ID NO: 1706310 - DNA, 15 bp, Homo sapiens
gagtgagttctcacg

SEQ ID NO: 1706311 - DNA, 15 bp, Homo sapiens
agtgagttctcacga

SEQ ID NO: 1706312 - DNA, 15 bp, Homo sapiens
gtgagttctcacgag

SEQ ID NO: 1706313 - DNA, 15 bp, Homo sapiens
tgagttctcacgaga

SEQ ID NO: 1706314 - DNA, 15 bp, Homo sapiens
gagttctcacgagat

SEQ ID NO: 1706315 - DNA, 15 bp, Homo sapiens
agttctcacgagatc

SEQ ID NO: 1706316 - DNA, 15 bp, Homo sapiens
gttctcacgagatct

SEQ ID NO: 1706317 - DNA, 15 bp, Homo sapiens
ttctcacgagatctg

SEQ ID NO: 1706318 - DNA, 15 bp, Homo sapiens
tctcacgagatctgg

SEQ ID NO: 1706319 - DNA, 15 bp, Homo sapiens
ctcacgagatctggt

SEQ ID NO: 1706320 - DNA, 15 bp, Homo sapiens
tcacgagatctggtt

SEQ ID NO: 1706321 - DNA, 15 bp, Homo sapiens
cacgagatctggttg

SEQ ID NO: 1706322 - DNA, 15 bp, Homo sapiens
acgagatctggttgt

SEQ ID NO: 1706323 - DNA, 15 bp, Homo sapiens
cgagatctggttgtt

SEQ ID NO: 1706324 - DNA, 15 bp, Homo sapiens
gagatctggttgttt

SEQ ID NO: 1706325 - DNA, 15 bp, Homo sapiens
agatctggttgttta

SEQ ID NO: 1706326 - DNA, 15 bp, Homo sapiens
gatctggttgtttaa

SEQ ID NO: 1706327 - DNA, 15 bp, Homo sapiens
atctggttgtttaaa

SEQ ID NO: 1706328 - DNA, 15 bp, Homo sapiens
tctggttgtttaaaa

SEQ ID NO: 1706329 - DNA, 15 bp, Homo sapiens
ctggttgtttaaaac

SEQ ID NO: 1706330 - DNA, 15 bp, Homo sapiens
tggttgtttaaaact

SEQ ID NO: 1706331 - DNA, 15 bp, Homo sapiens
ggttgtttaaaactt

SEQ ID NO: 1706332 - DNA, 15 bp, Homo sapiens
gttgtttaaaacttt

SEQ ID NO: 1706333 - DNA, 15 bp, Homo sapiens
ttgtttaaaactttg

SEQ ID NO: 1706334 - DNA, 15 bp, Homo sapiens
tgtttaaaactttgt

SEQ ID NO: 1706335 - DNA, 15 bp, Homo sapiens
gtttaaaactttgta

SEQ ID NO: 1706336 - DNA, 15 bp, Homo sapiens
tttaaaactttgtag

SEQ ID NO: 1706337 - DNA, 15 bp, Homo sapiens
ttaaaactttgtagt

SEQ ID NO: 1706338 - DNA, 15 bp, Homo sapiens
taaaactttgtagtc

SEQ ID NO: 1706339 - DNA, 15 bp, Homo sapiens
aaaactttgtagtct

SEQ ID NO: 1706340 - DNA, 15 bp, Homo sapiens
aaactttgtagtctt

SEQ ID NO: 1706341 - DNA, 15 bp, Homo sapiens
aactttgtagtcttc

SEQ ID NO: 1706342 - DNA, 15 bp, Homo sapiens
actttgtagtcttcc

SEQ ID NO: 1706343 - DNA, 15 bp, Homo sapiens
ctttgtagtcttccc

SEQ ID NO: 1706344 - DNA, 15 bp, Homo sapiens
tttgtagtcttcccc

SEQ ID NO: 1706345 - DNA, 15 bp, Homo sapiens
ttgtagtcttcccct

SEQ ID NO: 1706346 - DNA, 15 bp, Homo sapiens
tgtagtcttcccctt

SEQ ID NO: 1706347 - DNA, 15 bp, Homo sapiens
gtagtcttccccttt

SEQ ID NO: 1706348 - DNA, 15 bp, Homo sapiens
tagtcttcccctttc

SEQ ID NO: 1706349 - DNA, 15 bp, Homo sapiens
agtcttcccctttcg

SEQ ID NO: 1706350 - DNA, 15 bp, Homo sapiens
gtcttcccctttcgc

SEQ ID NO: 1706351 - DNA, 15 bp, Homo sapiens
tcttcccctttcgct

SEQ ID NO: 1706352 - DNA, 15 bp, Homo sapiens
cttcccctttcgctc

SEQ ID NO: 1706353 - DNA, 15 bp, Homo sapiens
ttcccctttcgctct

SEQ ID NO: 1706354 - DNA, 15 bp, Homo sapiens
tcccctttcgctctc

SEQ ID NO: 1706355 - DNA, 15 bp, Homo sapiens
cccctttcgctctct

SEQ ID NO: 1706356 - DNA, 15 bp, Homo sapiens
ccctttcgctctctc

SEQ ID NO: 1706357 - DNA, 15 bp, Homo sapiens
cctttcgctctctct

SEQ ID NO: 1706358 - DNA, 15 bp, Homo sapiens
ctttcgctctctctt

SEQ ID NO: 1706359 - DNA, 15 bp, Homo sapiens
tttcgctctctcttc

SEQ ID NO: 1706360 - DNA, 15 bp, Homo sapiens
ttcgctctctcttcc

SEQ ID NO: 1706361 - DNA, 15 bp, Homo sapiens
tcgctctctcttcct

SEQ ID NO: 1706362 - DNA, 15 bp, Homo sapiens
cgctctctcttcctc

SEQ ID NO: 1706363 - DNA, 15 bp, Homo sapiens
gctctctcttcctcc

SEQ ID NO: 1706364 - DNA, 15 bp, Homo sapiens
ctctctcttcctcct

SEQ ID NO: 1706365 - DNA, 15 bp, Homo sapiens
tctctcttcctcctg

SEQ ID NO: 1706366 - DNA, 15 bp, Homo sapiens
ctctcttcctcctgg

SEQ ID NO: 1706367 - DNA, 15 bp, Homo sapiens
tctcttcctcctggt

SEQ ID NO: 1706368 - DNA, 15 bp, Homo sapiens
ctcttcctcctggtt

SEQ ID NO: 1706369 - DNA, 15 bp, Homo sapiens
tcttcctcctggttt

SEQ ID NO: 1706370 - DNA, 15 bp, Homo sapiens
cttcctcctggtttg

SEQ ID NO: 1706371 - DNA, 15 bp, Homo sapiens
ttcctcctggtttgg

SEQ ID NO: 1706372 - DNA, 15 bp, Homo sapiens
tcctcctggtttggc

SEQ ID NO: 1706373 - DNA, 15 bp, Homo sapiens
cctcctggtttggcc

SEQ ID NO: 1706374 - DNA, 15 bp, Homo sapiens
ctcctggtttggcca

SEQ ID NO: 1706375 - DNA, 15 bp, Homo sapiens
tcctggtttggccat

SEQ ID NO: 1706376 - DNA, 15 bp, Homo sapiens
cctggtttggccatg

SEQ ID NO: 1706377 - DNA, 15 bp, Homo sapiens
ctggtttggccatgt

SEQ ID NO: 1706378 - DNA, 15 bp, Homo sapiens
tggtttggccatgtg

SEQ ID NO: 1706379 - DNA, 15 bp, Homo sapiens
ggtttggccatgtga

SEQ ID NO: 1706380 - DNA, 15 bp, Homo sapiens
gtttggccatgtgaa

SEQ ID NO: 1706381 - DNA, 15 bp, Homo sapiens
tttggccatgtgaag

SEQ ID NO: 1706382 - DNA, 15 bp, Homo sapiens
ttggccatgtgaaga

SEQ ID NO: 1706383 - DNA, 15 bp, Homo sapiens
tggccatgtgaagac

SEQ ID NO: 1706384 - DNA, 15 bp, Homo sapiens
ggccatgtgaagaca

SEQ ID NO: 1706385 - DNA, 15 bp, Homo sapiens
gccatgtgaagacat

SEQ ID NO: 1706386 - DNA, 15 bp, Homo sapiens
ccatgtgaagacatg

SEQ ID NO: 1706387 - DNA, 15 bp, Homo sapiens
catgtgaagacatgc

SEQ ID NO: 1706388 - DNA, 15 bp, Homo sapiens
atgtgaagacatgcc

SEQ ID NO: 1706389 - DNA, 15 bp, Homo sapiens
tgtgaagacatgcct

SEQ ID NO: 1706390 - DNA, 15 bp, Homo sapiens
gtgaagacatgcctt

SEQ ID NO: 1706391 - DNA, 15 bp, Homo sapiens
tgaagacatgccttg

SEQ ID NO: 1706392 - DNA, 15 bp, Homo sapiens
gaagacatgccttgc

SEQ ID NO: 1706393 - DNA, 15 bp, Homo sapiens
aagacatgccttgct

SEQ ID NO: 1706394 - DNA, 15 bp, Homo sapiens
agacatgccttgctt

SEQ ID NO: 1706395 - DNA, 15 bp, Homo sapiens
gacatgccttgcttc

SEQ ID NO: 1706396 - DNA, 15 bp, Homo sapiens
acatgccttgcttcc

SEQ ID NO: 1706397 - DNA, 15 bp, Homo sapiens
catgccttgcttccc

SEQ ID NO: 1706398 - DNA, 15 bp, Homo sapiens
atgccttgcttcccc

SEQ ID NO: 1706399 - DNA, 15 bp, Homo sapiens
tgccttgcttcccct

SEQ ID NO: 1706400 - DNA, 15 bp, Homo sapiens
gccttgcttcccctt

SEQ ID NO: 1706401 - DNA, 15 bp, Homo sapiens
ccttgcttccccttc

SEQ ID NO: 1706402 - DNA, 15 bp, Homo sapiens
cttgcttccccttca

SEQ ID NO: 1706403 - DNA, 15 bp, Homo sapiens
ttgcttccccttcac

SEQ ID NO: 1706404 - DNA, 15 bp, Homo sapiens
tgcttccccttcacc

SEQ ID NO: 1706405 - DNA, 15 bp, Homo sapiens
gcttccccttcacct

SEQ ID NO: 1706406 - DNA, 15 bp, Homo sapiens
cttccccttcacctt

SEQ ID NO: 1706407 - DNA, 15 bp, Homo sapiens
ttccccttcaccttc

SEQ ID NO: 1706408 - DNA, 15 bp, Homo sapiens
tccccttcaccttct

SEQ ID NO: 1706409 - DNA, 15 bp, Homo sapiens
ccccttcaccttctg

SEQ ID NO: 1706410 - DNA, 15 bp, Homo sapiens
cccttcaccttctgc

SEQ ID NO: 1706411 - DNA, 15 bp, Homo sapiens
ccttcaccttctgcc

SEQ ID NO: 1706412 - DNA, 15 bp, Homo sapiens
cttcaccttctgcca

SEQ ID NO: 1706413 - DNA, 15 bp, Homo sapiens
ttcaccttctgccat

SEQ ID NO: 1706414 - DNA, 15 bp, Homo sapiens
tcaccttctgccatg

SEQ ID NO: 1706415 - DNA, 15 bp, Homo sapiens
caccttctgccatga

SEQ ID NO: 1706416 - DNA, 15 bp, Homo sapiens
tctgccatgattgta

SEQ ID NO: 1706417 - DNA, 15 bp, Homo sapiens
ctgccatgattgtaa

SEQ ID NO: 1706418 - DNA, 15 bp, Homo sapiens
tgccatgattgtaag

SEQ ID NO: 1706419 - DNA, 15 bp, Homo sapiens
gccatgattgtaagt

SEQ ID NO: 1706420 - DNA, 15 bp, Homo sapiens
ccatgattgtaagtt

SEQ ID NO: 1706421 - DNA, 15 bp, Homo sapiens
catgattgtaagttt

SEQ ID NO: 1706422 - DNA, 15 bp, Homo sapiens
atgattgtaagtttc

SEQ ID NO: 1706423 - DNA, 15 bp, Homo sapiens
tgattgtaagtttcc

SEQ ID NO: 1706424 - DNA, 15 bp, Homo sapiens
gattgtaagtttcct

SEQ ID NO: 1706425 - DNA, 15 bp, Homo sapiens
attgtaagtttcctg

SEQ ID NO: 1706426 - DNA, 15 bp, Homo sapiens
gtaagtttcctgaga

SEQ ID NO: 1706427 - DNA, 15 bp, Homo sapiens
taagtttcctgagac

SEQ ID NO: 1706428 - DNA, 15 bp, Homo sapiens
aagtttcctgagacc

SEQ ID NO: 1706429 - DNA, 15 bp, Homo sapiens
ttcctgagacctcct

SEQ ID NO: 1706430 - DNA, 15 bp, Homo sapiens
tcctgagacctcctc

SEQ ID NO: 1706431 - DNA, 15 bp, Homo sapiens
cctgagacctcctca

SEQ ID NO: 1706432 - DNA, 15 bp, Homo sapiens
ctgagacctcctcag

SEQ ID NO: 1706433 - DNA, 15 bp, Homo sapiens
tgagacctcctcagc

SEQ ID NO: 1706434 - DNA, 15 bp, Homo sapiens
gagacctcctcagcc

SEQ ID NO: 1706435 - DNA, 15 bp, Homo sapiens
agacctcctcagcca

SEQ ID NO: 1706436 - DNA, 15 bp, Homo sapiens
gacctcctcagccat

SEQ ID NO: 1706437 - DNA, 15 bp, Homo sapiens
acctcctcagccatg

SEQ ID NO: 1706438 - DNA, 15 bp, Homo sapiens
cctcctcagccatgt

SEQ ID NO: 1706439 - DNA, 15 bp, Homo sapiens
ctcctcagccatgtg

SEQ ID NO: 1706440 - DNA, 15 bp, Homo sapiens
tcctcagccatgtgg

SEQ ID NO: 1706441 - DNA, 15 bp, Homo sapiens
cctcagccatgtgga

SEQ ID NO: 1706442 - DNA, 15 bp, Homo sapiens
ctcagccatgtggaa

SEQ ID NO: 1706443 - DNA, 15 bp, Homo sapiens
tcagccatgtggaac

SEQ ID NO: 1706444 - DNA, 15 bp, Homo sapiens
atgtggaactgtgaa

SEQ ID NO: 1706445 - DNA, 15 bp, Homo sapiens
tgtggaactgtgaac

SEQ ID NO: 1706446 - DNA, 15 bp, Homo sapiens
gtggaactgtgaacc

SEQ ID NO: 1706447 - DNA, 15 bp, Homo sapiens
tggaactgtgaacca

SEQ ID NO: 1706448 - DNA, 15 bp, Homo sapiens
ggaactgtgaaccaa

SEQ ID NO: 1706449 - DNA, 15 bp, Homo sapiens
gaactgtgaaccaat

SEQ ID NO: 1706450 - DNA, 15 bp, Homo sapiens
aactgtgaaccaatt

SEQ ID NO: 1706451 - DNA, 15 bp, Homo sapiens
actgtgaaccaatta

SEQ ID NO: 1706452 - DNA, 15 bp, Homo sapiens
ctgtgaaccaattaa

SEQ ID NO: 1706453 - DNA, 15 bp, Homo sapiens
tgtgaaccaattaaa

SEQ ID NO: 1706454 - DNA, 15 bp, Homo sapiens
gtgaaccaattaaac

SEQ ID NO: 1706455 - DNA, 15 bp, Homo sapiens
tgaaccaattaaacc

SEQ ID NO: 1706456 - DNA, 15 bp, Homo sapiens
gaaccaattaaacct

SEQ ID NO: 1706457 - DNA, 15 bp, Homo sapiens
aaccaattaaacctt

SEQ ID NO: 1706458 - DNA, 15 bp, Homo sapiens
accaattaaaccttt

SEQ ID NO: 1706459 - DNA, 15 bp, Homo sapiens
ccaattaaacctttt

SEQ ID NO: 1706460 - DNA, 15 bp, Homo sapiens
caattaaaccttttt

SEQ ID NO: 1706461 - DNA, 15 bp, Homo sapiens
aattaaacctttttt

SEQ ID NO: 1706462 - DNA, 15 bp, Homo sapiens
attaaaccttttttc

SEQ ID NO: 1706463 - DNA, 15 bp, Homo sapiens
ttaaaccttttttct

SEQ ID NO: 1706464 - DNA, 15 bp, Homo sapiens
taaaccttttttctt

SEQ ID NO: 1706465 - DNA, 15 bp, Homo sapiens
aaaccttttttcttc

SEQ ID NO: 1706466 - DNA, 15 bp, Homo sapiens
aaccttttttcttca

SEQ ID NO: 1706467 - DNA, 15 bp, Homo sapiens
accttttttcttcat

SEQ ID NO: 1706468 - DNA, 15 bp, Homo sapiens
ccttttttcttcata

SEQ ID NO: 1706469 - DNA, 15 bp, Homo sapiens
cttttttcttcataa

SEQ ID NO: 1706470 - DNA, 15 bp, Homo sapiens
ttttttcttcataaa

SEQ ID NO: 1706471 - DNA, 15 bp, Homo sapiens
tttttcttcataaat

SEQ ID NO: 1706472 - DNA, 15 bp, Homo sapiens
tcttcataaattact

SEQ ID NO: 1706473 - DNA, 15 bp, Homo sapiens
cttcataaattactc

SEQ ID NO: 1706474 - DNA, 15 bp, Homo sapiens
ttcataaattactca

SEQ ID NO: 1706475 - DNA, 15 bp, Homo sapiens
tcataaattactcaa

SEQ ID NO: 1706476 - DNA, 15 bp, Homo sapiens
cataaattactcaat

SEQ ID NO: 1706477 - DNA, 15 bp, Homo sapiens
ataaattactcaatc

SEQ ID NO: 1706478 - DNA, 15 bp, Homo sapiens
taaattactcaatct

SEQ ID NO: 1706479 - DNA, 15 bp, Homo sapiens
aaattactcaatctc

SEQ ID NO: 1706480 - DNA, 15 bp, Homo sapiens
aattactcaatctca

SEQ ID NO: 1706481 - DNA, 15 bp, Homo sapiens
attactcaatctcag

SEQ ID NO: 1706482 - DNA, 15 bp, Homo sapiens
ttactcaatctcagc

SEQ ID NO: 1706483 - DNA, 15 bp, Homo sapiens
tactcaatctcagca

SEQ ID NO: 1706484 - DNA, 15 bp, Homo sapiens
actcaatctcagcat

SEQ ID NO: 1706485 - DNA, 15 bp, Homo sapiens
ctcaatctcagcatc

SEQ ID NO: 1706486 - DNA, 15 bp, Homo sapiens
tcaatctcagcatca

SEQ ID NO: 1706487 - DNA, 15 bp, Homo sapiens
caatctcagcatcag

SEQ ID NO: 1706488 - DNA, 15 bp, Homo sapiens
aatctcagcatcagt

SEQ ID NO: 1706489 - DNA, 15 bp, Homo sapiens
atctcagcatcagtg

SEQ ID NO: 1706490 - DNA, 15 bp, Homo sapiens
tctcagcatcagtgt

SEQ ID NO: 1706491 - DNA, 15 bp, Homo sapiens
ctcagcatcagtgtg

SEQ ID NO: 1706492 - DNA, 15 bp, Homo sapiens
tcagcatcagtgtgg

SEQ ID NO: 1706493 - DNA, 15 bp, Homo sapiens
cagcatcagtgtggc

SEQ ID NO: 1706494 - DNA, 15 bp, Homo sapiens
agcatcagtgtggcc

SEQ ID NO: 1706495 - DNA, 15 bp, Homo sapiens
gcatcagtgtggcct

SEQ ID NO: 1706496 - DNA, 15 bp, Homo sapiens
catcagtgtggcctg

SEQ ID NO: 1706497 - DNA, 15 bp, Homo sapiens
atcagtgtggcctgg

SEQ ID NO: 1706498 - DNA, 15 bp, Homo sapiens
tcagtgtggcctgga

SEQ ID NO: 1706499 - DNA, 15 bp, Homo sapiens
cagtgtggcctggat

SEQ ID NO: 1706500 - DNA, 15 bp, Homo sapiens
agtgtggcctggatg

SEQ ID NO: 1706501 - DNA, 15 bp, Homo sapiens
gtgtggcctggatgt

SEQ ID NO: 1706502 - DNA, 15 bp, Homo sapiens
tgtggcctggatgtg

SEQ ID NO: 1706503 - DNA, 15 bp, Homo sapiens
gtggcctggatgtga

SEQ ID NO: 1706504 - DNA, 15 bp, Homo sapiens
tggcctggatgtgag

SEQ ID NO: 1706505 - DNA, 15 bp, Homo sapiens
ggcctggatgtgaga

SEQ ID NO: 1706506 - DNA, 15 bp, Homo sapiens
gcctggatgtgagac

SEQ ID NO: 1706507 - DNA, 15 bp, Homo sapiens
ctggatgtgagacaa

SEQ ID NO: 1706508 - DNA, 15 bp, Homo sapiens
tggatgtgagacaag

SEQ ID NO: 1706509 - DNA, 15 bp, Homo sapiens
ggatgtgagacaagg

SEQ ID NO: 1706510 - DNA, 15 bp, Homo sapiens
gatgtgagacaaggt

SEQ ID NO: 1706511 - DNA, 15 bp, Homo sapiens
atgtgagacaaggtg

SEQ ID NO: 1706512 - DNA, 15 bp, Homo sapiens
tgtgagacaaggtgt

SEQ ID NO: 1706513 - DNA, 15 bp, Homo sapiens
gtgagacaaggtgtc

SEQ ID NO: 1706514 - DNA, 15 bp, Homo sapiens
tgagacaaggtgtca

SEQ ID NO: 1706515 - DNA, 15 bp, Homo sapiens
gagacaaggtgtcaa

SEQ ID NO: 1706516 - DNA, 15 bp, Homo sapiens
agacaaggtgtcaaa

SEQ ID NO: 1706517 - DNA, 15 bp, Homo sapiens
gacaaggtgtcaaaa

SEQ ID NO: 1706518 - DNA, 15 bp, Homo sapiens
acaaggtgtcaaaaa

SEQ ID NO: 1706519 - DNA, 15 bp, Homo sapiens
caaggtgtcaaaaaa

SEQ ID NO: 1706520 - DNA, 15 bp, Homo sapiens
aaggtgtcaaaaaag

SEQ ID NO: 1706521 - DNA, 15 bp, Homo sapiens
aggtgtcaaaaaaga

SEQ ID NO: 1706522 - DNA, 15 bp, Homo sapiens
ggtgtcaaaaaagat

SEQ ID NO: 1706523 - DNA, 15 bp, Homo sapiens
gtgtcaaaaaagatt

SEQ ID NO: 1706524 - DNA, 15 bp, Homo sapiens
tgtcaaaaaagatta

SEQ ID NO: 1706525 - DNA, 15 bp, Homo sapiens
gtcaaaaaagattat

SEQ ID NO: 1706526 - DNA, 15 bp, Homo sapiens
tcaaaaaagattatt

SEQ ID NO: 1706527 - DNA, 15 bp, Homo sapiens
caaaaaagattattt

SEQ ID NO: 1706528 - DNA, 15 bp, Homo sapiens
aaaaaagattatttt

SEQ ID NO: 1706529 - DNA, 15 bp, Homo sapiens
aaaaagattattttg

SEQ ID NO: 1706530 - DNA, 15 bp, Homo sapiens
aaaagattattttgg

SEQ ID NO: 1706531 - DNA, 15 bp, Homo sapiens
aaagattattttgga

SEQ ID NO: 1706532 - DNA, 15 bp, Homo sapiens
aagattattttggag

SEQ ID NO: 1706533 - DNA, 15 bp, Homo sapiens
agattattttggagc

SEQ ID NO: 1706534 - DNA, 15 bp, Homo sapiens
gattattttggagct

SEQ ID NO: 1706535 - DNA, 15 bp, Homo sapiens
attattttggagctt

SEQ ID NO: 1706536 - DNA, 15 bp, Homo sapiens
ttattttggagcttt

SEQ ID NO: 1706537 - DNA, 15 bp, Homo sapiens
tattttggagcttta

SEQ ID NO: 1706538 - DNA, 15 bp, Homo sapiens
attttggagctttaa

SEQ ID NO: 1706539 - DNA, 15 bp, Homo sapiens
ttttggagctttaag

SEQ ID NO: 1706540 - DNA, 15 bp, Homo sapiens
tttggagctttaaga

SEQ ID NO: 1706541 - DNA, 15 bp, Homo sapiens
ttggagctttaagat

SEQ ID NO: 1706542 - DNA, 15 bp, Homo sapiens
tggagctttaagatt

SEQ ID NO: 1706543 - DNA, 15 bp, Homo sapiens
ggagctttaagattt

SEQ ID NO: 1706544 - DNA, 15 bp, Homo sapiens
gagctttaagattta

SEQ ID NO: 1706545 - DNA, 15 bp, Homo sapiens
agctttaagatttaa

SEQ ID NO: 1706546 - DNA, 15 bp, Homo sapiens
gctttaagatttaac

SEQ ID NO: 1706547 - DNA, 15 bp, Homo sapiens
ctttaagatttaacg

SEQ ID NO: 1706548 - DNA, 15 bp, Homo sapiens
tttaagatttaacga

SEQ ID NO: 1706549 - DNA, 15 bp, Homo sapiens
ttaagatttaacgac

SEQ ID NO: 1706550 - DNA, 15 bp, Homo sapiens
taagatttaacgact

SEQ ID NO: 1706551 - DNA, 15 bp, Homo sapiens
aagatttaacgactg

SEQ ID NO: 1706552 - DNA, 15 bp, Homo sapiens
agatttaacgactgc

SEQ ID NO: 1706553 - DNA, 15 bp, Homo sapiens
gatttaacgactgcc

SEQ ID NO: 1706554 - DNA, 15 bp, Homo sapiens
atttaacgactgcca

SEQ ID NO: 1706555 - DNA, 15 bp, Homo sapiens
tttaacgactgccat

SEQ ID NO: 1706556 - DNA, 15 bp, Homo sapiens
ttaacgactgccatg

SEQ ID NO: 1706557 - DNA, 15 bp, Homo sapiens
taacgactgccatgc

SEQ ID NO: 1706558 - DNA, 15 bp, Homo sapiens
aacgactgccatgct

SEQ ID NO: 1706559 - DNA, 15 bp, Homo sapiens
acgactgccatgctg

SEQ ID NO: 1706560 - DNA, 15 bp, Homo sapiens
cgactgccatgctgg

SEQ ID NO: 1706561 - DNA, 15 bp, Homo sapiens
gactgccatgctggg

SEQ ID NO: 1706562 - DNA, 15 bp, Homo sapiens
actgccatgctgggt

SEQ ID NO: 1706563 - DNA, 15 bp, Homo sapiens
ctgccatgctgggtt

SEQ ID NO: 1706564 - DNA, 15 bp, Homo sapiens
tgccatgctgggttt

SEQ ID NO: 1706565 - DNA, 15 bp, Homo sapiens
gccatgctgggtttt

SEQ ID NO: 1706566 - DNA, 15 bp, Homo sapiens
ccatgctgggttttg

SEQ ID NO: 1706567 - DNA, 15 bp, Homo sapiens
catgctgggttttgg

SEQ ID NO: 1706568 - DNA, 15 bp, Homo sapiens
atgctgggttttgga

SEQ ID NO: 1706569 - DNA, 15 bp, Homo sapiens
tgctgggttttggac

SEQ ID NO: 1706570 - DNA, 15 bp, Homo sapiens
gctgggttttggacc

SEQ ID NO: 1706571 - DNA, 15 bp, Homo sapiens
ctgggttttggacct

SEQ ID NO: 1706572 - DNA, 15 bp, Homo sapiens
tgggttttggacctg

SEQ ID NO: 1706573 - DNA, 15 bp, Homo sapiens
gggttttggacctgc

SEQ ID NO: 1706574 - DNA, 15 bp, Homo sapiens
ggttttggacctgca

SEQ ID NO: 1706575 - DNA, 15 bp, Homo sapiens
gttttggacctgcat

SEQ ID NO: 1706576 - DNA, 15 bp, Homo sapiens
ttttggacctgcatg

SEQ ID NO: 1706577 - DNA, 15 bp, Homo sapiens
tttggacctgcatgt

SEQ ID NO: 1706578 - DNA, 15 bp, Homo sapiens
ttggacctgcatgtg

SEQ ID NO: 1706579 - DNA, 15 bp, Homo sapiens
tggacctgcatgtgg

SEQ ID NO: 1706580 - DNA, 15 bp, Homo sapiens
ggacctgcatgtggc

SEQ ID NO: 1706581 - DNA, 15 bp, Homo sapiens
gacctgcatgtggcc

SEQ ID NO: 1706582 - DNA, 15 bp, Homo sapiens
acctgcatgtggcct

SEQ ID NO: 1706583 - DNA, 15 bp, Homo sapiens
cctgcatgtggcctg

SEQ ID NO: 1706584 - DNA, 15 bp, Homo sapiens
ctgcatgtggcctgg

SEQ ID NO: 1706585 - DNA, 15 bp, Homo sapiens
tgcatgtggcctgga

SEQ ID NO: 1706586 - DNA, 15 bp, Homo sapiens
gcatgtggcctggag

SEQ ID NO: 1706587 - DNA, 15 bp, Homo sapiens
catgtggcctggagc

SEQ ID NO: 1706588 - DNA, 15 bp, Homo sapiens
atgtggcctggagca

SEQ ID NO: 1706589 - DNA, 15 bp, Homo sapiens
tgtggcctggagcac

SEQ ID NO: 1706590 - DNA, 15 bp, Homo sapiens
gtggcctggagcacc

SEQ ID NO: 1706591 - DNA, 15 bp, Homo sapiens
tggcctggagcacct

SEQ ID NO: 1706592 - DNA, 15 bp, Homo sapiens
ggcctggagcacctt

SEQ ID NO: 1706593 - DNA, 15 bp, Homo sapiens
cctggagcacctttg

SEQ ID NO: 1706594 - DNA, 15 bp, Homo sapiens
ctggagcacctttgt

SEQ ID NO: 1706595 - DNA, 15 bp, Homo sapiens
tggagcacctttgtt

SEQ ID NO: 1706596 - DNA, 15 bp, Homo sapiens
ggagcacctttgttt

SEQ ID NO: 1706597 - DNA, 15 bp, Homo sapiens
gagcacctttgtttt

SEQ ID NO: 1706598 - DNA, 15 bp, Homo sapiens
agcacctttgttttg

SEQ ID NO: 1706599 - DNA, 15 bp, Homo sapiens
gcacctttgttttgg

SEQ ID NO: 1706600 - DNA, 15 bp, Homo sapiens
cacctttgttttggc

SEQ ID NO: 1706601 - DNA, 15 bp, Homo sapiens
acctttgttttggcc

SEQ ID NO: 1706602 - DNA, 15 bp, Homo sapiens
cctttgttttggcca

SEQ ID NO: 1706603 - DNA, 15 bp, Homo sapiens
ctttgttttggccaa

SEQ ID NO: 1706604 - DNA, 15 bp, Homo sapiens
tttgttttggccaat

SEQ ID NO: 1706605 - DNA, 15 bp, Homo sapiens
ttgttttggccaatt

SEQ ID NO: 1706606 - DNA, 15 bp, Homo sapiens
tgttttggccaattt

SEQ ID NO: 1706607 - DNA, 15 bp, Homo sapiens
gttttggccaatttc

SEQ ID NO: 1706608 - DNA, 15 bp, Homo sapiens
ttttggccaatttct

SEQ ID NO: 1706609 - DNA, 15 bp, Homo sapiens
tttggccaatttctc

SEQ ID NO: 1706610 - DNA, 15 bp, Homo sapiens
ttggccaatttctcc

SEQ ID NO: 1706611 - DNA, 15 bp, Homo sapiens
ggccaatttctccct

SEQ ID NO: 1706612 - DNA, 15 bp, Homo sapiens
gccaatttctccctt

SEQ ID NO: 1706613 - DNA, 15 bp, Homo sapiens
ccaatttctcccttt

SEQ ID NO: 1706614 - DNA, 15 bp, Homo sapiens
caatttctccctttt

SEQ ID NO: 1706615 - DNA, 15 bp, Homo sapiens
aatttctccctttta

SEQ ID NO: 1706616 - DNA, 15 bp, Homo sapiens
atttctcccttttag

SEQ ID NO: 1706617 - DNA, 15 bp, Homo sapiens
tttctcccttttaga

SEQ ID NO: 1706618 - DNA, 15 bp, Homo sapiens
ttctcccttttagaa

SEQ ID NO: 1706619 - DNA, 15 bp, Homo sapiens
tctcccttttagaac

SEQ ID NO: 1706620 - DNA, 15 bp, Homo sapiens
ctcccttttagaaca

SEQ ID NO: 1706621 - DNA, 15 bp, Homo sapiens
tcccttttagaacag

SEQ ID NO: 1706622 - DNA, 15 bp, Homo sapiens
cccttttagaacaga

SEQ ID NO: 1706623 - DNA, 15 bp, Homo sapiens
ccttttagaacagaa

SEQ ID NO: 1706624 - DNA, 15 bp, Homo sapiens
cttttagaacagaag

SEQ ID NO: 1706625 - DNA, 15 bp, Homo sapiens
ttttagaacagaagg

SEQ ID NO: 1706626 - DNA, 15 bp, Homo sapiens
tttagaacagaagga

SEQ ID NO: 1706627 - DNA, 15 bp, Homo sapiens
ttagaacagaaggat

SEQ ID NO: 1706628 - DNA, 15 bp, Homo sapiens
tagaacagaaggatt

SEQ ID NO: 1706629 - DNA, 15 bp, Homo sapiens
agaacagaaggattt

SEQ ID NO: 1706630 - DNA, 15 bp, Homo sapiens
gaacagaaggattta

SEQ ID NO: 1706631 - DNA, 15 bp, Homo sapiens
aacagaaggatttac

SEQ ID NO: 1706632 - DNA, 15 bp, Homo sapiens
acagaaggatttacc

SEQ ID NO: 1706633 - DNA, 15 bp, Homo sapiens
cagaaggatttaccc

SEQ ID NO: 1706634 - DNA, 15 bp, Homo sapiens
agaaggatttaccca

SEQ ID NO: 1706635 - DNA, 15 bp, Homo sapiens
gaaggatttacccaa

SEQ ID NO: 1706636 - DNA, 15 bp, Homo sapiens
aaggatttacccaat

SEQ ID NO: 1706637 - DNA, 15 bp, Homo sapiens
aggatttacccaatg

SEQ ID NO: 1706638 - DNA, 15 bp, Homo sapiens
ggatttacccaatgc

SEQ ID NO: 1706639 - DNA, 15 bp, Homo sapiens
gatttacccaatgct

SEQ ID NO: 1706640 - DNA, 15 bp, Homo sapiens
atttacccaatgctt

SEQ ID NO: 1706641 - DNA, 15 bp, Homo sapiens
tttacccaatgcttg

SEQ ID NO: 1706642 - DNA, 15 bp, Homo sapiens
ttacccaatgcttgt

SEQ ID NO: 1706643 - DNA, 15 bp, Homo sapiens
tacccaatgcttgta

SEQ ID NO: 1706644 - DNA, 15 bp, Homo sapiens
acccaatgcttgtac

SEQ ID NO: 1706645 - DNA, 15 bp, Homo sapiens
cccaatgcttgtacc

SEQ ID NO: 1706646 - DNA, 15 bp, Homo sapiens
ccaatgcttgtaccc

SEQ ID NO: 1706647 - DNA, 15 bp, Homo sapiens
caatgcttgtacccc

SEQ ID NO: 1706648 - DNA, 15 bp, Homo sapiens
aatgcttgtaccccc

SEQ ID NO: 1706649 - DNA, 15 bp, Homo sapiens
atgcttgtaccccca

SEQ ID NO: 1706650 - DNA, 15 bp, Homo sapiens
tgcttgtacccccat

SEQ ID NO: 1706651 - DNA, 15 bp, Homo sapiens
gcttgtacccccatt

SEQ ID NO: 1706652 - DNA, 15 bp, Homo sapiens
cttgtacccccattt

SEQ ID NO: 1706653 - DNA, 15 bp, Homo sapiens
ttgtacccccatttt

SEQ ID NO: 1706654 - DNA, 15 bp, Homo sapiens
tgtacccccatttta

SEQ ID NO: 1706655 - DNA, 15 bp, Homo sapiens
gtacccccattttat

SEQ ID NO: 1706656 - DNA, 15 bp, Homo sapiens
tacccccattttatc

SEQ ID NO: 1706657 - DNA, 15 bp, Homo sapiens
acccccattttatct

SEQ ID NO: 1706658 - DNA, 15 bp, Homo sapiens
cccccattttatctg

SEQ ID NO: 1706659 - DNA, 15 bp, Homo sapiens
ccccattttatctgg

SEQ ID NO: 1706660 - DNA, 15 bp, Homo sapiens
cccattttatctggg

SEQ ID NO: 1706661 - DNA, 15 bp, Homo sapiens
ccattttatctggga

SEQ ID NO: 1706662 - DNA, 15 bp, Homo sapiens
cattttatctgggaa

SEQ ID NO: 1706663 - DNA, 15 bp, Homo sapiens
attttatctgggaag

SEQ ID NO: 1706664 - DNA, 15 bp, Homo sapiens
ttttatctgggaagt

SEQ ID NO: 1706665 - DNA, 15 bp, Homo sapiens
tttatctgggaagta

SEQ ID NO: 1706666 - DNA, 15 bp, Homo sapiens
ttatctgggaagtaa

SEQ ID NO: 1706667 - DNA, 15 bp, Homo sapiens
tatctgggaagtaac

SEQ ID NO: 1706668 - DNA, 15 bp, Homo sapiens
atctgggaagtaaca

SEQ ID NO: 1706669 - DNA, 15 bp, Homo sapiens
tctgggaagtaacaa

SEQ ID NO: 1706670 - DNA, 15 bp, Homo sapiens
ctgggaagtaacaaa

SEQ ID NO: 1706671 - DNA, 15 bp, Homo sapiens
tgggaagtaacaaac

SEQ ID NO: 1706672 - DNA, 15 bp, Homo sapiens
gggaagtaacaaact

SEQ ID NO: 1706673 - DNA, 15 bp, Homo sapiens
ggaagtaacaaactt

SEQ ID NO: 1706674 - DNA, 15 bp, Homo sapiens
gaagtaacaaactta

SEQ ID NO: 1706675 - DNA, 15 bp, Homo sapiens
aagtaacaaacttat

SEQ ID NO: 1706676 - DNA, 15 bp, Homo sapiens
agtaacaaacttatt

SEQ ID NO: 1706677 - DNA, 15 bp, Homo sapiens
gtaacaaacttattt

SEQ ID NO: 1706678 - DNA, 15 bp, Homo sapiens
taacaaacttatttt

SEQ ID NO: 1706679 - DNA, 15 bp, Homo sapiens
aacaaacttattttt

SEQ ID NO: 1706680 - DNA, 15 bp, Homo sapiens
acaaacttatttttg

SEQ ID NO: 1706681 - DNA, 15 bp, Homo sapiens
caaacttatttttga

SEQ ID NO: 1706682 - DNA, 15 bp, Homo sapiens
aaacttatttttgat

SEQ ID NO: 1706683 - DNA, 15 bp, Homo sapiens
aacttatttttgatt

SEQ ID NO: 1706684 - DNA, 15 bp, Homo sapiens
acttatttttgattt

SEQ ID NO: 1706685 - DNA, 15 bp, Homo sapiens
cttatttttgatttt

SEQ ID NO: 1706686 - DNA, 15 bp, Homo sapiens
ttatttttgatttta

SEQ ID NO: 1706687 - DNA, 15 bp, Homo sapiens
tatttttgattttac

SEQ ID NO: 1706688 - DNA, 15 bp, Homo sapiens
atttttgattttaca

SEQ ID NO: 1706689 - DNA, 15 bp, Homo sapiens
tttttgattttacag

SEQ ID NO: 1706690 - DNA, 15 bp, Homo sapiens
ttttgattttacagg

SEQ ID NO: 1706691 - DNA, 15 bp, Homo sapiens
tttgattttacaggc

SEQ ID NO: 1706692 - DNA, 15 bp, Homo sapiens
ttgattttacaggct

SEQ ID NO: 1706693 - DNA, 15 bp, Homo sapiens
tgattttacaggctc

SEQ ID NO: 1706694 - DNA, 15 bp, Homo sapiens
gattttacaggctca

SEQ ID NO: 1706695 - DNA, 15 bp, Homo sapiens
attttacaggctcat

SEQ ID NO: 1706696 - DNA, 15 bp, Homo sapiens
ttttacaggctcata

SEQ ID NO: 1706697 - DNA, 15 bp, Homo sapiens
tttacaggctcatag

SEQ ID NO: 1706698 - DNA, 15 bp, Homo sapiens
ttacaggctcatagt

SEQ ID NO: 1706699 - DNA, 15 bp, Homo sapiens
tacaggctcatagtt

SEQ ID NO: 1706700 - DNA, 15 bp, Homo sapiens
acaggctcatagttg

SEQ ID NO: 1706701 - DNA, 15 bp, Homo sapiens
caggctcatagttgt

SEQ ID NO: 1706702 - DNA, 15 bp, Homo sapiens
aggctcatagttgta

SEQ ID NO: 1706703 - DNA, 15 bp, Homo sapiens
ggctcatagttgtaa

SEQ ID NO: 1706704 - DNA, 15 bp, Homo sapiens
gctcatagttgtaag

SEQ ID NO: 1706705 - DNA, 15 bp, Homo sapiens
ctcatagttgtaagg

SEQ ID NO: 1706706 - DNA, 15 bp, Homo sapiens
tcatagttgtaaggg

SEQ ID NO: 1706707 - DNA, 15 bp, Homo sapiens
catagttgtaaggga

SEQ ID NO: 1706708 - DNA, 15 bp, Homo sapiens
atagttgtaagggac

SEQ ID NO: 1706709 - DNA, 15 bp, Homo sapiens
tagttgtaagggact

SEQ ID NO: 1706710 - DNA, 15 bp, Homo sapiens
agttgtaagggactt

SEQ ID NO: 1706711 - DNA, 15 bp, Homo sapiens
gttgtaagggacttg

SEQ ID NO: 1706712 - DNA, 15 bp, Homo sapiens
ttgtaagggacttgc

SEQ ID NO: 1706713 - DNA, 15 bp, Homo sapiens
tgtaagggacttgcc

SEQ ID NO: 1706714 - DNA, 15 bp, Homo sapiens
gtaagggacttgcct

SEQ ID NO: 1706715 - DNA, 15 bp, Homo sapiens
aagggacttgccttg

SEQ ID NO: 1706716 - DNA, 15 bp, Homo sapiens
agggacttgccttgt

SEQ ID NO: 1706717 - DNA, 15 bp, Homo sapiens
gggacttgccttgtc

SEQ ID NO: 1706718 - DNA, 15 bp, Homo sapiens
ggacttgccttgtct

SEQ ID NO: 1706719 - DNA, 15 bp, Homo sapiens
gacttgccttgtctc

SEQ ID NO: 1706720 - DNA, 15 bp, Homo sapiens
acttgccttgtctca

SEQ ID NO: 1706721 - DNA, 15 bp, Homo sapiens
cttgccttgtctcat

SEQ ID NO: 1706722 - DNA, 15 bp, Homo sapiens
ttgccttgtctcata

SEQ ID NO: 1706723 - DNA, 15 bp, Homo sapiens
tgccttgtctcatat

SEQ ID NO: 1706724 - DNA, 15 bp, Homo sapiens
gccttgtctcatatg

SEQ ID NO: 1706725 - DNA, 15 bp, Homo sapiens
ccttgtctcatatga

SEQ ID NO: 1706726 - DNA, 15 bp, Homo sapiens
cttgtctcatatgag

SEQ ID NO: 1706727 - DNA, 15 bp, Homo sapiens
ttgtctcatatgaga

SEQ ID NO: 1706728 - DNA, 15 bp, Homo sapiens
tgtctcatatgagac

SEQ ID NO: 1706729 - DNA, 15 bp, Homo sapiens
gtctcatatgagact

SEQ ID NO: 1706730 - DNA, 15 bp, Homo sapiens
tctcatatgagactt

SEQ ID NO: 1706731 - DNA, 15 bp, Homo sapiens
ctcatatgagacttt

SEQ ID NO: 1706732 - DNA, 15 bp, Homo sapiens
tcatatgagactttg

SEQ ID NO: 1706733 - DNA, 15 bp, Homo sapiens
catatgagactttgg

SEQ ID NO: 1706734 - DNA, 15 bp, Homo sapiens
atatgagactttgga

SEQ ID NO: 1706735 - DNA, 15 bp, Homo sapiens
tatgagactttggac

SEQ ID NO: 1706736 - DNA, 15 bp, Homo sapiens
atgagactttggact

SEQ ID NO: 1706737 - DNA, 15 bp, Homo sapiens
tgagactttggactt

SEQ ID NO: 1706738 - DNA, 15 bp, Homo sapiens
gagactttggactta

SEQ ID NO: 1706739 - DNA, 15 bp, Homo sapiens
agactttggacttag

SEQ ID NO: 1706740 - DNA, 15 bp, Homo sapiens
gactttggacttaga

SEQ ID NO: 1706741 - DNA, 15 bp, Homo sapiens
actttggacttagac

SEQ ID NO: 1706742 - DNA, 15 bp, Homo sapiens
ctttggacttagact

SEQ ID NO: 1706743 - DNA, 15 bp, Homo sapiens
tttggacttagactt

SEQ ID NO: 1706744 - DNA, 15 bp, Homo sapiens
ttggacttagacttt

SEQ ID NO: 1706745 - DNA, 15 bp, Homo sapiens
tggacttagactttt

SEQ ID NO: 1706746 - DNA, 15 bp, Homo sapiens
ggacttagacttttg

SEQ ID NO: 1706747 - DNA, 15 bp, Homo sapiens
gacttagacttttga

SEQ ID NO: 1706748 - DNA, 15 bp, Homo sapiens
acttagacttttgag

SEQ ID NO: 1706749 - DNA, 15 bp, Homo sapiens
cttagacttttgagt

SEQ ID NO: 1706750 - DNA, 15 bp, Homo sapiens
ttagacttttgagtt

SEQ ID NO: 1706751 - DNA, 15 bp, Homo sapiens
tagacttttgagtta

SEQ ID NO: 1706752 - DNA, 15 bp, Homo sapiens
agacttttgagttaa

SEQ ID NO: 1706753 - DNA, 15 bp, Homo sapiens
gacttttgagttaat

SEQ ID NO: 1706754 - DNA, 15 bp, Homo sapiens
acttttgagttaatg

SEQ ID NO: 1706755 - DNA, 15 bp, Homo sapiens
cttttgagttaatgc

SEQ ID NO: 1706756 - DNA, 15 bp, Homo sapiens
ttttgagttaatgct

SEQ ID NO: 1706757 - DNA, 15 bp, Homo sapiens
tttgagttaatgctt

SEQ ID NO: 1706758 - DNA, 15 bp, Homo sapiens
ttgagttaatgctta

SEQ ID NO: 1706759 - DNA, 15 bp, Homo sapiens
tgagttaatgcttaa

SEQ ID NO: 1706760 - DNA, 15 bp, Homo sapiens
gagttaatgcttaaa

SEQ ID NO: 1706761 - DNA, 15 bp, Homo sapiens
agttaatgcttaaat

SEQ ID NO: 1706762 - DNA, 15 bp, Homo sapiens
gttaatgcttaaatg

SEQ ID NO: 1706763 - DNA, 15 bp, Homo sapiens
ttaatgcttaaatga

SEQ ID NO: 1706764 - DNA, 15 bp, Homo sapiens
taatgcttaaatgag

SEQ ID NO: 1706765 - DNA, 15 bp, Homo sapiens
aatgcttaaatgagt

SEQ ID NO: 1706766 - DNA, 15 bp, Homo sapiens
atgcttaaatgagtt

SEQ ID NO: 1706767 - DNA, 15 bp, Homo sapiens
tgcttaaatgagtta

SEQ ID NO: 1706768 - DNA, 15 bp, Homo sapiens
cttaaatgagttaag

SEQ ID NO: 1706769 - DNA, 15 bp, Homo sapiens
ttaaatgagttaaga

SEQ ID NO: 1706770 - DNA, 15 bp, Homo sapiens
taaatgagttaagac

SEQ ID NO: 1706771 - DNA, 15 bp, Homo sapiens
aatgagttaagactt

SEQ ID NO: 1706772 - DNA, 15 bp, Homo sapiens
atgagttaagactta

SEQ ID NO: 1706773 - DNA, 15 bp, Homo sapiens
tgagttaagacttag

SEQ ID NO: 1706774 - DNA, 15 bp, Homo sapiens
gagttaagacttagg

SEQ ID NO: 1706775 - DNA, 15 bp, Homo sapiens
agttaagacttaggg

SEQ ID NO: 1706776 - DNA, 15 bp, Homo sapiens
gttaagacttagggg

SEQ ID NO: 1706777 - DNA, 15 bp, Homo sapiens
ttaagacttagggga

SEQ ID NO: 1706778 - DNA, 15 bp, Homo sapiens
taagacttaggggac

SEQ ID NO: 1706779 - DNA, 15 bp, Homo sapiens
aagacttaggggact

SEQ ID NO: 1706780 - DNA, 15 bp, Homo sapiens
agacttaggggactg

SEQ ID NO: 1706781 - DNA, 15 bp, Homo sapiens
gacttaggggactgt

SEQ ID NO: 1706782 - DNA, 15 bp, Homo sapiens
acttaggggactgtt

SEQ ID NO: 1706783 - DNA, 15 bp, Homo sapiens
cttaggggactgttg

SEQ ID NO: 1706784 - DNA, 15 bp, Homo sapiens
ttaggggactgttga

SEQ ID NO: 1706785 - DNA, 15 bp, Homo sapiens
taggggactgttgag

SEQ ID NO: 1706786 - DNA, 15 bp, Homo sapiens
aggggactgttgaga

SEQ ID NO: 1706787 - DNA, 15 bp, Homo sapiens
ggggactgttgagaa

SEQ ID NO: 1706788 - DNA, 15 bp, Homo sapiens
gggactgttgagaag

SEQ ID NO: 1706789 - DNA, 15 bp, Homo sapiens
ggactgttgagaagg

SEQ ID NO: 1706790 - DNA, 15 bp, Homo sapiens
gactgttgagaaggc

SEQ ID NO: 1706791 - DNA, 15 bp, Homo sapiens
actgttgagaaggca

SEQ ID NO: 1706792 - DNA, 15 bp, Homo sapiens
ctgttgagaaggcat

SEQ ID NO: 1706793 - DNA, 15 bp, Homo sapiens
tgttgagaaggcatg

SEQ ID NO: 1706794 - DNA, 15 bp, Homo sapiens
gttgagaaggcatga

SEQ ID NO: 1706795 - DNA, 15 bp, Homo sapiens
ttgagaaggcatgac

SEQ ID NO: 1706796 - DNA, 15 bp, Homo sapiens
tgagaaggcatgact

SEQ ID NO: 1706797 - DNA, 15 bp, Homo sapiens
gagaaggcatgactg

SEQ ID NO: 1706798 - DNA, 15 bp, Homo sapiens
agaaggcatgactgt

SEQ ID NO: 1706799 - DNA, 15 bp, Homo sapiens
gaaggcatgactgtg

SEQ ID NO: 1706800 - DNA, 15 bp, Homo sapiens
aaggcatgactgtgt

SEQ ID NO: 1706801 - DNA, 15 bp, Homo sapiens
aggcatgactgtgtt

SEQ ID NO: 1706802 - DNA, 15 bp, Homo sapiens
ggcatgactgtgttt

SEQ ID NO: 1706803 - DNA, 15 bp, Homo sapiens
gcatgactgtgtttt

SEQ ID NO: 1706804 - DNA, 15 bp, Homo sapiens
catgactgtgttttg

SEQ ID NO: 1706805 - DNA, 15 bp, Homo sapiens
atgactgtgttttga

SEQ ID NO: 1706806 - DNA, 15 bp, Homo sapiens
tgactgtgttttgaa

SEQ ID NO: 1706807 - DNA, 15 bp, Homo sapiens
gactgtgttttgaaa

SEQ ID NO: 1706808 - DNA, 15 bp, Homo sapiens
actgtgttttgaaat

SEQ ID NO: 1706809 - DNA, 15 bp, Homo sapiens
ctgtgttttgaaatg

SEQ ID NO: 1706810 - DNA, 15 bp, Homo sapiens
tgtgttttgaaatgt

SEQ ID NO: 1706811 - DNA, 15 bp, Homo sapiens
gtgttttgaaatgta

SEQ ID NO: 1706812 - DNA, 15 bp, Homo sapiens
tgttttgaaatgtaa

SEQ ID NO: 1706813 - DNA, 15 bp, Homo sapiens
gttttgaaatgtaag

SEQ ID NO: 1706814 - DNA, 15 bp, Homo sapiens
ttttgaaatgtaaga

SEQ ID NO: 1706815 - DNA, 15 bp, Homo sapiens
tttgaaatgtaagaa

SEQ ID NO: 1706816 - DNA, 15 bp, Homo sapiens
ttgaaatgtaagaag

SEQ ID NO: 1706817 - DNA, 15 bp, Homo sapiens
tgaaatgtaagaagg

SEQ ID NO: 1706818 - DNA, 15 bp, Homo sapiens
gaaatgtaagaagga

SEQ ID NO: 1706819 - DNA, 15 bp, Homo sapiens
aaatgtaagaaggac

SEQ ID NO: 1706820 - DNA, 15 bp, Homo sapiens
aatgtaagaaggaca

SEQ ID NO: 1706821 - DNA, 15 bp, Homo sapiens
atgtaagaaggacat

SEQ ID NO: 1706822 - DNA, 15 bp, Homo sapiens
tgtaagaaggacatg

SEQ ID NO: 1706823 - DNA, 15 bp, Homo sapiens
gtaagaaggacatga

SEQ ID NO: 1706824 - DNA, 15 bp, Homo sapiens
taagaaggacatgag

SEQ ID NO: 1706825 - DNA, 15 bp, Homo sapiens
aagaaggacatgagt

SEQ ID NO: 1706826 - DNA, 15 bp, Homo sapiens
agaaggacatgagtt

SEQ ID NO: 1706827 - DNA, 15 bp, Homo sapiens
gaaggacatgagttt

SEQ ID NO: 1706828 - DNA, 15 bp, Homo sapiens
aaggacatgagtttt

SEQ ID NO: 1706829 - DNA, 15 bp, Homo sapiens
aggacatgagttttt

SEQ ID NO: 1706830 - DNA, 15 bp, Homo sapiens
ggacatgagtttttg

SEQ ID NO: 1706831 - DNA, 15 bp, Homo sapiens
gacatgagtttttgg

SEQ ID NO: 1706832 - DNA, 15 bp, Homo sapiens
acatgagtttttgga

SEQ ID NO: 1706833 - DNA, 15 bp, Homo sapiens
catgagtttttggag

SEQ ID NO: 1706834 - DNA, 15 bp, Homo sapiens
atgagtttttggagg

SEQ ID NO: 1706835 - DNA, 15 bp, Homo sapiens
tgagtttttggaggg

SEQ ID NO: 1706836 - DNA, 15 bp, Homo sapiens
gagtttttggagggg

SEQ ID NO: 1706837 - DNA, 15 bp, Homo sapiens
agtttttggaggggt

SEQ ID NO: 1706838 - DNA, 15 bp, Homo sapiens
gtttttggaggggtc

SEQ ID NO: 1706839 - DNA, 15 bp, Homo sapiens
tttttggaggggtca

SEQ ID NO: 1706840 - DNA, 15 bp, Homo sapiens
ttttggaggggtcag

SEQ ID NO: 1706841 - DNA, 15 bp, Homo sapiens
tttggaggggtcagg

SEQ ID NO: 1706842 - DNA, 15 bp, Homo sapiens
ttggaggggtcaggg

SEQ ID NO: 1706843 - DNA, 15 bp, Homo sapiens
tggaggggtcagggg

SEQ ID NO: 1706844 - DNA, 15 bp, Homo sapiens
ggaggggtcaggggc

SEQ ID NO: 1706845 - DNA, 15 bp, Homo sapiens
gaggggtcaggggcg

SEQ ID NO: 1706846 - DNA, 15 bp, Homo sapiens
aggggtcaggggcgg

SEQ ID NO: 1706847 - DNA, 15 bp, Homo sapiens
ggggtcaggggcgga

SEQ ID NO: 1706848 - DNA, 15 bp, Homo sapiens
gggtcaggggcggaa

SEQ ID NO: 1706849 - DNA, 15 bp, Homo sapiens
ggtcaggggcggaat

SEQ ID NO: 1706850 - DNA, 15 bp, Homo sapiens
gtcaggggcggaatg

SEQ ID NO: 1706851 - DNA, 15 bp, Homo sapiens
tcaggggcggaatga

SEQ ID NO: 1706852 - DNA, 15 bp, Homo sapiens
caggggcggaatgat

SEQ ID NO: 1706853 - DNA, 15 bp, Homo sapiens
aggggcggaatgata

SEQ ID NO: 1706854 - DNA, 15 bp, Homo sapiens
ggggcggaatgatat

SEQ ID NO: 1706855 - DNA, 15 bp, Homo sapiens
gggcggaatgatatg

SEQ ID NO: 1706856 - DNA, 15 bp, Homo sapiens
ggcggaatgatatgg

SEQ ID NO: 1706857 - DNA, 15 bp, Homo sapiens
gcggaatgatatggt

SEQ ID NO: 1706858 - DNA, 15 bp, Homo sapiens
cggaatgatatggtt

SEQ ID NO: 1706859 - DNA, 15 bp, Homo sapiens
cccacccaaatctcg

SEQ ID NO: 1706860 - DNA, 15 bp, Homo sapiens
ccacccaaatctcgt

SEQ ID NO: 1706861 - DNA, 15 bp, Homo sapiens
cacccaaatctcgtg

SEQ ID NO: 1706862 - DNA, 15 bp, Homo sapiens
acccaaatctcgtgt

SEQ ID NO: 1706863 - DNA, 15 bp, Homo sapiens
cccaaatctcgtgtc

SEQ ID NO: 1706864 - DNA, 15 bp, Homo sapiens
ccaaatctcgtgtca

SEQ ID NO: 1706865 - DNA, 15 bp, Homo sapiens
caaatctcgtgtcaa

SEQ ID NO: 1706866 - DNA, 15 bp, Homo sapiens
aaatctcgtgtcaaa

SEQ ID NO: 1706867 - DNA, 15 bp, Homo sapiens
aatctcgtgtcaaac

SEQ ID NO: 1706868 - DNA, 15 bp, Homo sapiens
atctcgtgtcaaact

SEQ ID NO: 1706869 - DNA, 15 bp, Homo sapiens
tctcgtgtcaaactg

SEQ ID NO: 1706870 - DNA, 15 bp, Homo sapiens
ctcgtgtcaaactgt

SEQ ID NO: 1706871 - DNA, 15 bp, Homo sapiens
tcgtgtcaaactgta

SEQ ID NO: 1706872 - DNA, 15 bp, Homo sapiens
cgtgtcaaactgtaa

SEQ ID NO: 1706873 - DNA, 15 bp, Homo sapiens
gtgtcaaactgtaat

SEQ ID NO: 1706874 - DNA, 15 bp, Homo sapiens
tgtcaaactgtaatc

SEQ ID NO: 1706875 - DNA, 15 bp, Homo sapiens
gtcaaactgtaatcc

SEQ ID NO: 1706876 - DNA, 15 bp, Homo sapiens
tcaaactgtaatccc

SEQ ID NO: 1706877 - DNA, 15 bp, Homo sapiens
caaactgtaatcccc

SEQ ID NO: 1706878 - DNA, 15 bp, Homo sapiens
aaactgtaatcccca

SEQ ID NO: 1706879 - DNA, 15 bp, Homo sapiens
aactgtaatccccac

SEQ ID NO: 1706880 - DNA, 15 bp, Homo sapiens
actgtaatccccaca

SEQ ID NO: 1706881 - DNA, 15 bp, Homo sapiens
ctgtaatccccacat

SEQ ID NO: 1706882 - DNA, 15 bp, Homo sapiens
cccacatgttgaaga

SEQ ID NO: 1706883 - DNA, 15 bp, Homo sapiens
ccacatgttgaagaa

SEQ ID NO: 1706884 - DNA, 15 bp, Homo sapiens
cacatgttgaagaag

SEQ ID NO: 1706885 - DNA, 15 bp, Homo sapiens
acatgttgaagaagg

SEQ ID NO: 1706886 - DNA, 15 bp, Homo sapiens
catgttgaagaaggg

SEQ ID NO: 1706887 - DNA, 15 bp, Homo sapiens
atgttgaagaaggga

SEQ ID NO: 1706888 - DNA, 15 bp, Homo sapiens
tgttgaagaagggaa

SEQ ID NO: 1706889 - DNA, 15 bp, Homo sapiens
gttgaagaagggaac

SEQ ID NO: 1706890 - DNA, 15 bp, Homo sapiens
ttgaagaagggaact

SEQ ID NO: 1706891 - DNA, 15 bp, Homo sapiens
tgaagaagggaactg

SEQ ID NO: 1706892 - DNA, 15 bp, Homo sapiens
gaagaagggaactgg

SEQ ID NO: 1706893 - DNA, 15 bp, Homo sapiens
aagaagggaactggt

SEQ ID NO: 1706894 - DNA, 15 bp, Homo sapiens
agaagggaactggtg

SEQ ID NO: 1706895 - DNA, 15 bp, Homo sapiens
gaagggaactggtgg

SEQ ID NO: 1706896 - DNA, 15 bp, Homo sapiens
aagggaactggtgga

SEQ ID NO: 1706897 - DNA, 15 bp, Homo sapiens
agggaactggtggaa

SEQ ID NO: 1706898 - DNA, 15 bp, Homo sapiens
gggaactggtggaag

SEQ ID NO: 1706899 - DNA, 15 bp, Homo sapiens
ggaactggtggaagg

SEQ ID NO: 1706900 - DNA, 15 bp, Homo sapiens
gaactggtggaaggt

SEQ ID NO: 1706901 - DNA, 15 bp, Homo sapiens
aactggtggaaggtg

SEQ ID NO: 1706902 - DNA, 15 bp, Homo sapiens
actggtggaaggtga

SEQ ID NO: 1706903 - DNA, 15 bp, Homo sapiens
ctggtggaaggtgac

SEQ ID NO: 1706904 - DNA, 15 bp, Homo sapiens
tggtggaaggtgact

SEQ ID NO: 1706905 - DNA, 15 bp, Homo sapiens
ggtggaaggtgacta

SEQ ID NO: 1706906 - DNA, 15 bp, Homo sapiens
gtggaaggtgactag

SEQ ID NO: 1706907 - DNA, 15 bp, Homo sapiens
tggaaggtgactaga

SEQ ID NO: 1706908 - DNA, 15 bp, Homo sapiens
ggaaggtgactagat

SEQ ID NO: 1706909 - DNA, 15 bp, Homo sapiens
gaaggtgactagatc

SEQ ID NO: 1706910 - DNA, 15 bp, Homo sapiens
aaggtgactagatca

SEQ ID NO: 1706911 - DNA, 15 bp, Homo sapiens
aggtgactagatcat

SEQ ID NO: 1706912 - DNA, 15 bp, Homo sapiens
ggtgactagatcatg

SEQ ID NO: 1706913 - DNA, 15 bp, Homo sapiens
gtgactagatcatgg

SEQ ID NO: 1706914 - DNA, 15 bp, Homo sapiens
tgactagatcatggg

SEQ ID NO: 1706915 - DNA, 15 bp, Homo sapiens
gactagatcatggga

SEQ ID NO: 1706916 - DNA, 15 bp, Homo sapiens
actagatcatgggag

SEQ ID NO: 1706917 - DNA, 15 bp, Homo sapiens
ctagatcatgggagg

SEQ ID NO: 1706918 - DNA, 15 bp, Homo sapiens
tagatcatgggagga

SEQ ID NO: 1706919 - DNA, 15 bp, Homo sapiens
agatcatgggaggag

SEQ ID NO: 1706920 - DNA, 15 bp, Homo sapiens
gatcatgggaggaga

SEQ ID NO: 1706921 - DNA, 15 bp, Homo sapiens
atcatgggaggagat

SEQ ID NO: 1706922 - DNA, 15 bp, Homo sapiens
tcatgggaggagatt

SEQ ID NO: 1706923 - DNA, 15 bp, Homo sapiens
catgggaggagattt

SEQ ID NO: 1706924 - DNA, 15 bp, Homo sapiens
atgggaggagatttc

SEQ ID NO: 1706925 - DNA, 15 bp, Homo sapiens
tgggaggagatttcc

SEQ ID NO: 1706926 - DNA, 15 bp, Homo sapiens
gggaggagatttccc

SEQ ID NO: 1706927 - DNA, 15 bp, Homo sapiens
ggaggagatttcccc

SEQ ID NO: 1706928 - DNA, 15 bp, Homo sapiens
gaggagatttccccc

SEQ ID NO: 1706929 - DNA, 15 bp, Homo sapiens
aggagatttccccct

SEQ ID NO: 1706930 - DNA, 15 bp, Homo sapiens
ggagatttccccctt

SEQ ID NO: 1706931 - DNA, 15 bp, Homo sapiens
gagatttcccccttg

SEQ ID NO: 1706932 - DNA, 15 bp, Homo sapiens
agatttcccccttgc

SEQ ID NO: 1706933 - DNA, 15 bp, Homo sapiens
atttcccccttgctg

SEQ ID NO: 1706934 - DNA, 15 bp, Homo sapiens
tttcccccttgctgt

SEQ ID NO: 1706935 - DNA, 15 bp, Homo sapiens
ttcccccttgctgtt

SEQ ID NO: 1706936 - DNA, 15 bp, Homo sapiens
tcccccttgctgttc

SEQ ID NO: 1706937 - DNA, 15 bp, Homo sapiens
cccccttgctgttct

SEQ ID NO: 1706938 - DNA, 15 bp, Homo sapiens
ccccttgctgttctc

SEQ ID NO: 1706939 - DNA, 15 bp, Homo sapiens
cccttgctgttctca

SEQ ID NO: 1706940 - DNA, 15 bp, Homo sapiens
ccttgctgttctcat

SEQ ID NO: 1706941 - DNA, 15 bp, Homo sapiens
cttgctgttctcata

SEQ ID NO: 1706942 - DNA, 15 bp, Homo sapiens
ttgctgttctcataa

SEQ ID NO: 1706943 - DNA, 15 bp, Homo sapiens
tgctgttctcataat

SEQ ID NO: 1706944 - DNA, 15 bp, Homo sapiens
gctgttctcataata

SEQ ID NO: 1706945 - DNA, 15 bp, Homo sapiens
ctgttctcataatag

SEQ ID NO: 1706946 - DNA, 15 bp, Homo sapiens
tgttctcataatagt

SEQ ID NO: 1706947 - DNA, 15 bp, Homo sapiens
gttctcataatagtg

SEQ ID NO: 1706948 - DNA, 15 bp, Homo sapiens
ttctcataatagtga

SEQ ID NO: 1706949 - DNA, 15 bp, Homo sapiens
tctcataatagtgag

SEQ ID NO: 1706950 - DNA, 15 bp, Homo sapiens
ctcataatagtgagt

SEQ ID NO: 1706951 - DNA, 15 bp, Homo sapiens
tcataatagtgagta

SEQ ID NO: 1706952 - DNA, 15 bp, Homo sapiens
cataatagtgagtaa

SEQ ID NO: 1706953 - DNA, 15 bp, Homo sapiens
ataatagtgagtaag

SEQ ID NO: 1706954 - DNA, 15 bp, Homo sapiens
taatagtgagtaagt

SEQ ID NO: 1706955 - DNA, 15 bp, Homo sapiens
aatagtgagtaagtt

SEQ ID NO: 1706956 - DNA, 15 bp, Homo sapiens
atagtgagtaagttc

SEQ ID NO: 1706957 - DNA, 15 bp, Homo sapiens
tagtgagtaagttct

SEQ ID NO: 1706958 - DNA, 15 bp, Homo sapiens
agtgagtaagttctc

SEQ ID NO: 1706959 - DNA, 15 bp, Homo sapiens
gtgagtaagttctca

SEQ ID NO: 1706960 - DNA, 15 bp, Homo sapiens
tgagtaagttctcac

SEQ ID NO: 1706961 - DNA, 15 bp, Homo sapiens
gagtaagttctcaca

SEQ ID NO: 1706962 - DNA, 15 bp, Homo sapiens
agtaagttctcacaa

SEQ ID NO: 1706963 - DNA, 15 bp, Homo sapiens
gtaagttctcacaaa

SEQ ID NO: 1706964 - DNA, 15 bp, Homo sapiens
taagttctcacaaaa

SEQ ID NO: 1706965 - DNA, 15 bp, Homo sapiens
aagttctcacaaaat

SEQ ID NO: 1706966 - DNA, 15 bp, Homo sapiens
agttctcacaaaatc

SEQ ID NO: 1706967 - DNA, 15 bp, Homo sapiens
gttctcacaaaatct

SEQ ID NO: 1706968 - DNA, 15 bp, Homo sapiens
ttctcacaaaatctg

SEQ ID NO: 1706969 - DNA, 15 bp, Homo sapiens
tctcacaaaatctga

SEQ ID NO: 1706970 - DNA, 15 bp, Homo sapiens
ctcacaaaatctgat

SEQ ID NO: 1706971 - DNA, 15 bp, Homo sapiens
tcacaaaatctgata

SEQ ID NO: 1706972 - DNA, 15 bp, Homo sapiens
cacaaaatctgataa

SEQ ID NO: 1706973 - DNA, 15 bp, Homo sapiens
acaaaatctgataaa

SEQ ID NO: 1706974 - DNA, 15 bp, Homo sapiens
caaaatctgataaaa

SEQ ID NO: 1706975 - DNA, 15 bp, Homo sapiens
aaaatctgataaaag

SEQ ID NO: 1706976 - DNA, 15 bp, Homo sapiens
aaatctgataaaagt

SEQ ID NO: 1706977 - DNA, 15 bp, Homo sapiens
aatctgataaaagtg

SEQ ID NO: 1706978 - DNA, 15 bp, Homo sapiens
atctgataaaagtgt

SEQ ID NO: 1706979 - DNA, 15 bp, Homo sapiens
tctgataaaagtgtg

SEQ ID NO: 1706980 - DNA, 15 bp, Homo sapiens
ctgataaaagtgtgt

SEQ ID NO: 1706981 - DNA, 15 bp, Homo sapiens
tgataaaagtgtgta

SEQ ID NO: 1706982 - DNA, 15 bp, Homo sapiens
gataaaagtgtgtag

SEQ ID NO: 1706983 - DNA, 15 bp, Homo sapiens
ataaaagtgtgtagc

SEQ ID NO: 1706984 - DNA, 15 bp, Homo sapiens
taaaagtgtgtagcg

SEQ ID NO: 1706985 - DNA, 15 bp, Homo sapiens
aaaagtgtgtagcgc

SEQ ID NO: 1706986 - DNA, 15 bp, Homo sapiens
aaagtgtgtagcgct

SEQ ID NO: 1706987 - DNA, 15 bp, Homo sapiens
aagtgtgtagcgctt

SEQ ID NO: 1706988 - DNA, 15 bp, Homo sapiens
agtgtgtagcgcttc

SEQ ID NO: 1706989 - DNA, 15 bp, Homo sapiens
gtgtgtagcgcttcc

SEQ ID NO: 1706990 - DNA, 15 bp, Homo sapiens
tgtgtagcgcttccc

SEQ ID NO: 1706991 - DNA, 15 bp, Homo sapiens
gtgtagcgcttcccc

SEQ ID NO: 1706992 - DNA, 15 bp, Homo sapiens
tgtagcgcttccccc

SEQ ID NO: 1706993 - DNA, 15 bp, Homo sapiens
gtagcgcttccccct

SEQ ID NO: 1706994 - DNA, 15 bp, Homo sapiens
tagcgcttccccctt

SEQ ID NO: 1706995 - DNA, 15 bp, Homo sapiens
agcgcttcccccttc

SEQ ID NO: 1706996 - DNA, 15 bp, Homo sapiens
gcgcttcccccttca

SEQ ID NO: 1706997 - DNA, 15 bp, Homo sapiens
cgcttcccccttcac

SEQ ID NO: 1706998 - DNA, 15 bp, Homo sapiens
gcttcccccttcact

SEQ ID NO: 1706999 - DNA, 15 bp, Homo sapiens
cttcccccttcactc

SEQ ID NO: 1707000 - DNA, 15 bp, Homo sapiens
ttcccccttcactct

SEQ ID NO: 1707001 - DNA, 15 bp, Homo sapiens
tcccccttcactctt

SEQ ID NO: 1707002 - DNA, 15 bp, Homo sapiens
cccccttcactcttt

SEQ ID NO: 1707003 - DNA, 15 bp, Homo sapiens
ccccttcactctttc

SEQ ID NO: 1707004 - DNA, 15 bp, Homo sapiens
cccttcactctttct

SEQ ID NO: 1707005 - DNA, 15 bp, Homo sapiens
ccttcactctttctt

SEQ ID NO: 1707006 - DNA, 15 bp, Homo sapiens
cttcactctttcttc

SEQ ID NO: 1707007 - DNA, 15 bp, Homo sapiens
ttcactctttcttcc

SEQ ID NO: 1707008 - DNA, 15 bp, Homo sapiens
tcactctttcttcct

SEQ ID NO: 1707009 - DNA, 15 bp, Homo sapiens
cactctttcttcctc

SEQ ID NO: 1707010 - DNA, 15 bp, Homo sapiens
actctttcttcctcc

SEQ ID NO: 1707011 - DNA, 15 bp, Homo sapiens
ctctttcttcctcct

SEQ ID NO: 1707012 - DNA, 15 bp, Homo sapiens
tctttcttcctcctg

SEQ ID NO: 1707013 - DNA, 15 bp, Homo sapiens
ctttcttcctcctgc

SEQ ID NO: 1707014 - DNA, 15 bp, Homo sapiens
tttcttcctcctgct

SEQ ID NO: 1707015 - DNA, 15 bp, Homo sapiens
ttcttcctcctgctt

SEQ ID NO: 1707016 - DNA, 15 bp, Homo sapiens
tcttcctcctgcttt

SEQ ID NO: 1707017 - DNA, 15 bp, Homo sapiens
cttcctcctgctttg

SEQ ID NO: 1707018 - DNA, 15 bp, Homo sapiens
ttcctcctgctttgg

SEQ ID NO: 1707019 - DNA, 15 bp, Homo sapiens
tcctcctgctttggt

SEQ ID NO: 1707020 - DNA, 15 bp, Homo sapiens
cctcctgctttggtc

SEQ ID NO: 1707021 - DNA, 15 bp, Homo sapiens
ctcctgctttggtca

SEQ ID NO: 1707022 - DNA, 15 bp, Homo sapiens
tcctgctttggtcat

SEQ ID NO: 1707023 - DNA, 15 bp, Homo sapiens
cctgctttggtcata

SEQ ID NO: 1707024 - DNA, 15 bp, Homo sapiens
ctgctttggtcatat

SEQ ID NO: 1707025 - DNA, 15 bp, Homo sapiens
tgctttggtcatatg

SEQ ID NO: 1707026 - DNA, 15 bp, Homo sapiens
gctttggtcatatga

SEQ ID NO: 1707027 - DNA, 15 bp, Homo sapiens
ctttggtcatatgaa

SEQ ID NO: 1707028 - DNA, 15 bp, Homo sapiens
tttggtcatatgaag

SEQ ID NO: 1707029 - DNA, 15 bp, Homo sapiens
ttggtcatatgaaga

SEQ ID NO: 1707030 - DNA, 15 bp, Homo sapiens
tggtcatatgaagat

SEQ ID NO: 1707031 - DNA, 15 bp, Homo sapiens
ggtcatatgaagatc

SEQ ID NO: 1707032 - DNA, 15 bp, Homo sapiens
gtcatatgaagatct

SEQ ID NO: 1707033 - DNA, 15 bp, Homo sapiens
tcatatgaagatctg

SEQ ID NO: 1707034 - DNA, 15 bp, Homo sapiens
catatgaagatctgc

SEQ ID NO: 1707035 - DNA, 15 bp, Homo sapiens
atatgaagatctgct

SEQ ID NO: 1707036 - DNA, 15 bp, Homo sapiens
tatgaagatctgctt

SEQ ID NO: 1707037 - DNA, 15 bp, Homo sapiens
atgaagatctgcttg

SEQ ID NO: 1707038 - DNA, 15 bp, Homo sapiens
tgaagatctgcttgc

SEQ ID NO: 1707039 - DNA, 15 bp, Homo sapiens
gaagatctgcttgct

SEQ ID NO: 1707040 - DNA, 15 bp, Homo sapiens
aagatctgcttgctt

SEQ ID NO: 1707041 - DNA, 15 bp, Homo sapiens
agatctgcttgcttc

SEQ ID NO: 1707042 - DNA, 15 bp, Homo sapiens
gatctgcttgcttcc

SEQ ID NO: 1707043 - DNA, 15 bp, Homo sapiens
atctgcttgcttcct

SEQ ID NO: 1707044 - DNA, 15 bp, Homo sapiens
tctgcttgcttcctc

SEQ ID NO: 1707045 - DNA, 15 bp, Homo sapiens
ctgcttgcttcctct

SEQ ID NO: 1707046 - DNA, 15 bp, Homo sapiens
tgcttgcttcctctg

SEQ ID NO: 1707047 - DNA, 15 bp, Homo sapiens
gcttgcttcctctgt

SEQ ID NO: 1707048 - DNA, 15 bp, Homo sapiens
cttgcttcctctgtt

SEQ ID NO: 1707049 - DNA, 15 bp, Homo sapiens
ttgcttcctctgttc

SEQ ID NO: 1707050 - DNA, 15 bp, Homo sapiens
tgcttcctctgttct

SEQ ID NO: 1707051 - DNA, 15 bp, Homo sapiens
gcttcctctgttctt

SEQ ID NO: 1707052 - DNA, 15 bp, Homo sapiens
cttcctctgttcttt

SEQ ID NO: 1707053 - DNA, 15 bp, Homo sapiens
ttcctctgttctttc

SEQ ID NO: 1707054 - DNA, 15 bp, Homo sapiens
tcctctgttctttcc

SEQ ID NO: 1707055 - DNA, 15 bp, Homo sapiens
cctctgttctttcca

SEQ ID NO: 1707056 - DNA, 15 bp, Homo sapiens
ctctgttctttccac

SEQ ID NO: 1707057 - DNA, 15 bp, Homo sapiens
tctgttctttccacc

SEQ ID NO: 1707058 - DNA, 15 bp, Homo sapiens
ctgttctttccaccg

SEQ ID NO: 1707059 - DNA, 15 bp, Homo sapiens
tgttctttccaccgt

SEQ ID NO: 1707060 - DNA, 15 bp, Homo sapiens
gttctttccaccgtg

SEQ ID NO: 1707061 - DNA, 15 bp, Homo sapiens
ttctttccaccgtga

SEQ ID NO: 1707062 - DNA, 15 bp, Homo sapiens
tctttccaccgtgat

SEQ ID NO: 1707063 - DNA, 15 bp, Homo sapiens
ctttccaccgtgatt

SEQ ID NO: 1707064 - DNA, 15 bp, Homo sapiens
tttccaccgtgattg

SEQ ID NO: 1707065 - DNA, 15 bp, Homo sapiens
ttccaccgtgattgt

SEQ ID NO: 1707066 - DNA, 15 bp, Homo sapiens
tccaccgtgattgta

SEQ ID NO: 1707067 - DNA, 15 bp, Homo sapiens
ccaccgtgattgtaa

SEQ ID NO: 1707068 - DNA, 15 bp, Homo sapiens
caccgtgattgtaag

SEQ ID NO: 1707069 - DNA, 15 bp, Homo sapiens
accgtgattgtaagt

SEQ ID NO: 1707070 - DNA, 15 bp, Homo sapiens
ccgtgattgtaagtt

SEQ ID NO: 1707071 - DNA, 15 bp, Homo sapiens
cgtgattgtaagttt

SEQ ID NO: 1707072 - DNA, 15 bp, Homo sapiens
gtgattgtaagtttt

SEQ ID NO: 1707073 - DNA, 15 bp, Homo sapiens
tgattgtaagttttt

SEQ ID NO: 1707074 - DNA, 15 bp, Homo sapiens
gattgtaagtttttt

SEQ ID NO: 1707075 - DNA, 15 bp, Homo sapiens
attgtaagttttttg

SEQ ID NO: 1707076 - DNA, 15 bp, Homo sapiens
ttgtaagttttttga

SEQ ID NO: 1707077 - DNA, 15 bp, Homo sapiens
tgtaagttttttgag

SEQ ID NO: 1707078 - DNA, 15 bp, Homo sapiens
gtaagttttttgaga

SEQ ID NO: 1707079 - DNA, 15 bp, Homo sapiens
taagttttttgagat

SEQ ID NO: 1707080 - DNA, 15 bp, Homo sapiens
aagttttttgagatc

SEQ ID NO: 1707081 - DNA, 15 bp, Homo sapiens
agttttttgagatct

SEQ ID NO: 1707082 - DNA, 15 bp, Homo sapiens
gttttttgagatctc

SEQ ID NO: 1707083 - DNA, 15 bp, Homo sapiens
ttttttgagatctcc

SEQ ID NO: 1707084 - DNA, 15 bp, Homo sapiens
tttttgagatctcct

SEQ ID NO: 1707085 - DNA, 15 bp, Homo sapiens
ttttgagatctcctc

SEQ ID NO: 1707086 - DNA, 15 bp, Homo sapiens
tttgagatctcctca

SEQ ID NO: 1707087 - DNA, 15 bp, Homo sapiens
ttgagatctcctcag

SEQ ID NO: 1707088 - DNA, 15 bp, Homo sapiens
tgagatctcctcagc

SEQ ID NO: 1707089 - DNA, 15 bp, Homo sapiens
gagatctcctcagcc

SEQ ID NO: 1707090 - DNA, 15 bp, Homo sapiens
agatctcctcagcca

SEQ ID NO: 1707091 - DNA, 15 bp, Homo sapiens
gatctcctcagccat

SEQ ID NO: 1707092 - DNA, 15 bp, Homo sapiens
atctcctcagccatg

SEQ ID NO: 1707093 - DNA, 15 bp, Homo sapiens
tctcctcagccatgt

SEQ ID NO: 1707094 - DNA, 15 bp, Homo sapiens
tggaactgtgagtca

SEQ ID NO: 1707095 - DNA, 15 bp, Homo sapiens
ggaactgtgagtcaa

SEQ ID NO: 1707096 - DNA, 15 bp, Homo sapiens
gaactgtgagtcaat

SEQ ID NO: 1707097 - DNA, 15 bp, Homo sapiens
aactgtgagtcaatt

SEQ ID NO: 1707098 - DNA, 15 bp, Homo sapiens
actgtgagtcaatta

SEQ ID NO: 1707099 - DNA, 15 bp, Homo sapiens
ctgtgagtcaattaa

SEQ ID NO: 1707100 - DNA, 15 bp, Homo sapiens
tgtgagtcaattaaa

SEQ ID NO: 1707101 - DNA, 15 bp, Homo sapiens
gtgagtcaattaaac

SEQ ID NO: 1707102 - DNA, 15 bp, Homo sapiens
tgagtcaattaaacc

SEQ ID NO: 1707103 - DNA, 15 bp, Homo sapiens
gagtcaattaaacct

SEQ ID NO: 1707104 - DNA, 15 bp, Homo sapiens
agtcaattaaacctc

SEQ ID NO: 1707105 - DNA, 15 bp, Homo sapiens
gtcaattaaacctct

SEQ ID NO: 1707106 - DNA, 15 bp, Homo sapiens
tcaattaaacctctt

SEQ ID NO: 1707107 - DNA, 15 bp, Homo sapiens
caattaaacctcttt

SEQ ID NO: 1707108 - DNA, 15 bp, Homo sapiens
aattaaacctctttt

SEQ ID NO: 1707109 - DNA, 15 bp, Homo sapiens
attaaacctcttttc

SEQ ID NO: 1707110 - DNA, 15 bp, Homo sapiens
ttaaacctcttttct

SEQ ID NO: 1707111 - DNA, 15 bp, Homo sapiens
aaacctcttttcttc

SEQ ID NO: 1707112 - DNA, 15 bp, Homo sapiens
aacctcttttcttca

SEQ ID NO: 1707113 - DNA, 15 bp, Homo sapiens
acctcttttcttcat

SEQ ID NO: 1707114 - DNA, 15 bp, Homo sapiens
cctcttttcttcata

SEQ ID NO: 1707115 - DNA, 15 bp, Homo sapiens
ctcttttcttcataa

SEQ ID NO: 1707116 - DNA, 15 bp, Homo sapiens
tcttttcttcataaa

SEQ ID NO: 1707117 - DNA, 15 bp, Homo sapiens
cttttcttcataaat

SEQ ID NO: 1707118 - DNA, 15 bp, Homo sapiens
ataaattacccagtg

SEQ ID NO: 1707119 - DNA, 15 bp, Homo sapiens
taaattacccagtgt

SEQ ID NO: 1707120 - DNA, 15 bp, Homo sapiens
aaattacccagtgtc

SEQ ID NO: 1707121 - DNA, 15 bp, Homo sapiens
aattacccagtgtca

SEQ ID NO: 1707122 - DNA, 15 bp, Homo sapiens
attacccagtgtcag

SEQ ID NO: 1707123 - DNA, 15 bp, Homo sapiens
ttacccagtgtcagg

SEQ ID NO: 1707124 - DNA, 15 bp, Homo sapiens
tacccagtgtcagga

SEQ ID NO: 1707125 - DNA, 15 bp, Homo sapiens
acccagtgtcaggaa

SEQ ID NO: 1707126 - DNA, 15 bp, Homo sapiens
cccagtgtcaggaat

SEQ ID NO: 1707127 - DNA, 15 bp, Homo sapiens
ccagtgtcaggaata

SEQ ID NO: 1707128 - DNA, 15 bp, Homo sapiens
cagtgtcaggaatag

SEQ ID NO: 1707129 - DNA, 15 bp, Homo sapiens
agtgtcaggaatagc

SEQ ID NO: 1707130 - DNA, 15 bp, Homo sapiens
gtgtcaggaatagca

SEQ ID NO: 1707131 - DNA, 15 bp, Homo sapiens
tgtcaggaatagcag

SEQ ID NO: 1707132 - DNA, 15 bp, Homo sapiens
gtcaggaatagcagt

SEQ ID NO: 1707133 - DNA, 15 bp, Homo sapiens
tcaggaatagcagtg

SEQ ID NO: 1707134 - DNA, 15 bp, Homo sapiens
caggaatagcagtgt

SEQ ID NO: 1707135 - DNA, 15 bp, Homo sapiens
aggaatagcagtgtg

SEQ ID NO: 1707136 - DNA, 15 bp, Homo sapiens
ggaatagcagtgtga

SEQ ID NO: 1707137 - DNA, 15 bp, Homo sapiens
gaatagcagtgtgag

SEQ ID NO: 1707138 - DNA, 15 bp, Homo sapiens
aatagcagtgtgaga

SEQ ID NO: 1707139 - DNA, 15 bp, Homo sapiens
atagcagtgtgagaa

SEQ ID NO: 1707140 - DNA, 15 bp, Homo sapiens
tagcagtgtgagaac

SEQ ID NO: 1707141 - DNA, 15 bp, Homo sapiens
agcagtgtgagaaca

SEQ ID NO: 1707142 - DNA, 15 bp, Homo sapiens
gcagtgtgagaacag

SEQ ID NO: 1707143 - DNA, 15 bp, Homo sapiens
cagtgtgagaacagt

SEQ ID NO: 1707144 - DNA, 15 bp, Homo sapiens
agtgtgagaacagtt

SEQ ID NO: 1707145 - DNA, 15 bp, Homo sapiens
gtgtgagaacagttt

SEQ ID NO: 1707146 - DNA, 15 bp, Homo sapiens
tgtgagaacagttta

SEQ ID NO: 1707147 - DNA, 15 bp, Homo sapiens
gtgagaacagtttaa

SEQ ID NO: 1707148 - DNA, 15 bp, Homo sapiens
tgagaacagtttaat

SEQ ID NO: 1707149 - DNA, 15 bp, Homo sapiens
gagaacagtttaata

SEQ ID NO: 1707150 - DNA, 15 bp, Homo sapiens
agaacagtttaatag

SEQ ID NO: 1707151 - DNA, 15 bp, Homo sapiens
gaacagtttaataga

SEQ ID NO: 1707152 - DNA, 15 bp, Homo sapiens
aacagtttaatagag

SEQ ID NO: 1707153 - DNA, 15 bp, Homo sapiens
acagtttaatagaga

SEQ ID NO: 1707154 - DNA, 15 bp, Homo sapiens
cagtttaatagagat

SEQ ID NO: 1707155 - DNA, 15 bp, Homo sapiens
agtttaatagagata

SEQ ID NO: 1707156 - DNA, 15 bp, Homo sapiens
gtttaatagagatac

SEQ ID NO: 1707157 - DNA, 15 bp, Homo sapiens
tttaatagagatacc

SEQ ID NO: 1707158 - DNA, 15 bp, Homo sapiens
ttaatagagatacca

SEQ ID NO: 1707159 - DNA, 15 bp, Homo sapiens
taatagagataccaa

SEQ ID NO: 1707160 - DNA, 15 bp, Homo sapiens
aatagagataccaat

SEQ ID NO: 1707161 - DNA, 15 bp, Homo sapiens
atagagataccaatg

SEQ ID NO: 1707162 - DNA, 15 bp, Homo sapiens
tagagataccaatga

SEQ ID NO: 1707163 - DNA, 15 bp, Homo sapiens
agagataccaatgaa

SEQ ID NO: 1707164 - DNA, 15 bp, Homo sapiens
gagataccaatgaaa

SEQ ID NO: 1707165 - DNA, 15 bp, Homo sapiens
agataccaatgaaaa

SEQ ID NO: 1707166 - DNA, 15 bp, Homo sapiens
gataccaatgaaaaa

SEQ ID NO: 1707167 - DNA, 15 bp, Homo sapiens
ataccaatgaaaaag

SEQ ID NO: 1707168 - DNA, 15 bp, Homo sapiens
taccaatgaaaaaga

SEQ ID NO: 1707169 - DNA, 15 bp, Homo sapiens
accaatgaaaaagaa

SEQ ID NO: 1707170 - DNA, 15 bp, Homo sapiens
ccaatgaaaaagaat

SEQ ID NO: 1707171 - DNA, 15 bp, Homo sapiens
caatgaaaaagaatt

SEQ ID NO: 1707172 - DNA, 15 bp, Homo sapiens
aatgaaaaagaattt

SEQ ID NO: 1707173 - DNA, 15 bp, Homo sapiens
atgaaaaagaatttc

SEQ ID NO: 1707174 - DNA, 15 bp, Homo sapiens
tgaaaaagaatttct

SEQ ID NO: 1707175 - DNA, 15 bp, Homo sapiens
gaaaaagaatttctt

SEQ ID NO: 1707176 - DNA, 15 bp, Homo sapiens
aaaaagaatttcttg

SEQ ID NO: 1707177 - DNA, 15 bp, Homo sapiens
aaaagaatttcttga

SEQ ID NO: 1707178 - DNA, 15 bp, Homo sapiens
aaagaatttcttgaa

SEQ ID NO: 1707179 - DNA, 15 bp, Homo sapiens
aagaatttcttgaaa

SEQ ID NO: 1707180 - DNA, 15 bp, Homo sapiens
agaatttcttgaaat

SEQ ID NO: 1707181 - DNA, 15 bp, Homo sapiens
gaatttcttgaaatg

SEQ ID NO: 1707182 - DNA, 15 bp, Homo sapiens
aatttcttgaaatgc

SEQ ID NO: 1707183 - DNA, 15 bp, Homo sapiens
atttcttgaaatgcc

SEQ ID NO: 1707184 - DNA, 15 bp, Homo sapiens
tttcttgaaatgccg

SEQ ID NO: 1707185 - DNA, 15 bp, Homo sapiens
ttcttgaaatgccgg

SEQ ID NO: 1707186 - DNA, 15 bp, Homo sapiens
tcttgaaatgccggg

SEQ ID NO: 1707187 - DNA, 15 bp, Homo sapiens
cttgaaatgccgggt

SEQ ID NO: 1707188 - DNA, 15 bp, Homo sapiens
ttgaaatgccgggta

SEQ ID NO: 1707189 - DNA, 15 bp, Homo sapiens
tgaaatgccgggtaa

SEQ ID NO: 1707190 - DNA, 15 bp, Homo sapiens
gaaatgccgggtaaa

SEQ ID NO: 1707191 - DNA, 15 bp, Homo sapiens
aaatgccgggtaaat

SEQ ID NO: 1707192 - DNA, 15 bp, Homo sapiens
aatgccgggtaaata

SEQ ID NO: 1707193 - DNA, 15 bp, Homo sapiens
atgccgggtaaataa

SEQ ID NO: 1707194 - DNA, 15 bp, Homo sapiens
tgccgggtaaataat

SEQ ID NO: 1707195 - DNA, 15 bp, Homo sapiens
gccgggtaaataatt

SEQ ID NO: 1707196 - DNA, 15 bp, Homo sapiens
ccgggtaaataattt

SEQ ID NO: 1707197 - DNA, 15 bp, Homo sapiens
cgggtaaataattta

SEQ ID NO: 1707198 - DNA, 15 bp, Homo sapiens
gggtaaataatttaa

SEQ ID NO: 1707199 - DNA, 15 bp, Homo sapiens
ggtaaataatttaaa

SEQ ID NO: 1707200 - DNA, 15 bp, Homo sapiens
gtaaataatttaaaa

SEQ ID NO: 1707201 - DNA, 15 bp, Homo sapiens
taaataatttaaaat

SEQ ID NO: 1707202 - DNA, 15 bp, Homo sapiens
aaataatttaaaata

SEQ ID NO: 1707203 - DNA, 15 bp, Homo sapiens
aataatttaaaatat

SEQ ID NO: 1707204 - DNA, 15 bp, Homo sapiens
ataatttaaaatatt

SEQ ID NO: 1707205 - DNA, 15 bp, Homo sapiens
taatttaaaatattg

SEQ ID NO: 1707206 - DNA, 15 bp, Homo sapiens
aatttaaaatattga

SEQ ID NO: 1707207 - DNA, 15 bp, Homo sapiens
atttaaaatattgat

SEQ ID NO: 1707208 - DNA, 15 bp, Homo sapiens
tttaaaatattgatt

SEQ ID NO: 1707209 - DNA, 15 bp, Homo sapiens
ttaaaatattgattt

SEQ ID NO: 1707210 - DNA, 15 bp, Homo sapiens
taaaatattgatttt

SEQ ID NO: 1707211 - DNA, 15 bp, Homo sapiens
aaaatattgattttt

SEQ ID NO: 1707212 - DNA, 15 bp, Homo sapiens
aaatattgattttta

SEQ ID NO: 1707213 - DNA, 15 bp, Homo sapiens
aatattgatttttaa

SEQ ID NO: 1707214 - DNA, 15 bp, Homo sapiens
atattgatttttaaa

SEQ ID NO: 1707215 - DNA, 15 bp, Homo sapiens
tattgatttttaaag

SEQ ID NO: 1707216 - DNA, 15 bp, Homo sapiens
attgatttttaaaga

SEQ ID NO: 1707217 - DNA, 15 bp, Homo sapiens
ttgatttttaaagat

SEQ ID NO: 1707218 - DNA, 15 bp, Homo sapiens
tgatttttaaagata

SEQ ID NO: 1707219 - DNA, 15 bp, Homo sapiens
gatttttaaagatag

SEQ ID NO: 1707220 - DNA, 15 bp, Homo sapiens
atttttaaagatagt

SEQ ID NO: 1707221 - DNA, 15 bp, Homo sapiens
tttttaaagatagta

SEQ ID NO: 1707222 - DNA, 15 bp, Homo sapiens
ttttaaagatagtaa

SEQ ID NO: 1707223 - DNA, 15 bp, Homo sapiens
tttaaagatagtaaa

SEQ ID NO: 1707224 - DNA, 15 bp, Homo sapiens
ttaaagatagtaaaa

SEQ ID NO: 1707225 - DNA, 15 bp, Homo sapiens
taaagatagtaaaat

SEQ ID NO: 1707226 - DNA, 15 bp, Homo sapiens
aaagatagtaaaatg

SEQ ID NO: 1707227 - DNA, 15 bp, Homo sapiens
aagatagtaaaatgc

SEQ ID NO: 1707228 - DNA, 15 bp, Homo sapiens
agatagtaaaatgca

SEQ ID NO: 1707229 - DNA, 15 bp, Homo sapiens
gatagtaaaatgcaa

SEQ ID NO: 1707230 - DNA, 15 bp, Homo sapiens
atagtaaaatgcaag

SEQ ID NO: 1707231 - DNA, 15 bp, Homo sapiens
tagtaaaatgcaaga

SEQ ID NO: 1707232 - DNA, 15 bp, Homo sapiens
agtaaaatgcaagag

SEQ ID NO: 1707233 - DNA, 15 bp, Homo sapiens
gtaaaatgcaagaga

SEQ ID NO: 1707234 - DNA, 15 bp, Homo sapiens
taaaatgcaagagaa

SEQ ID NO: 1707235 - DNA, 15 bp, Homo sapiens
aaaatgcaagagaaa

SEQ ID NO: 1707236 - DNA, 15 bp, Homo sapiens
aaatgcaagagaaat

SEQ ID NO: 1707237 - DNA, 15 bp, Homo sapiens
aatgcaagagaaatc

SEQ ID NO: 1707238 - DNA, 15 bp, Homo sapiens
atgcaagagaaatct

SEQ ID NO: 1707239 - DNA, 15 bp, Homo sapiens
tgcaagagaaatctg

SEQ ID NO: 1707240 - DNA, 15 bp, Homo sapiens
gcaagagaaatctga

SEQ ID NO: 1707241 - DNA, 15 bp, Homo sapiens
caagagaaatctgaa

SEQ ID NO: 1707242 - DNA, 15 bp, Homo sapiens
aagagaaatctgaaa

SEQ ID NO: 1707243 - DNA, 15 bp, Homo sapiens
agagaaatctgaaaa

SEQ ID NO: 1707244 - DNA, 15 bp, Homo sapiens
gagaaatctgaaaac

SEQ ID NO: 1707245 - DNA, 15 bp, Homo sapiens
agaaatctgaaaacc

SEQ ID NO: 1707246 - DNA, 15 bp, Homo sapiens
gaaatctgaaaacca

SEQ ID NO: 1707247 - DNA, 15 bp, Homo sapiens
aaatctgaaaaccaa

SEQ ID NO: 1707248 - DNA, 15 bp, Homo sapiens
aatctgaaaaccaat

SEQ ID NO: 1707249 - DNA, 15 bp, Homo sapiens
tctgaaaaccaatac

SEQ ID NO: 1707250 - DNA, 15 bp, Homo sapiens
ctgaaaaccaataca

SEQ ID NO: 1707251 - DNA, 15 bp, Homo sapiens
tgaaaaccaatacaa

SEQ ID NO: 1707252 - DNA, 15 bp, Homo sapiens
gaaaaccaatacaaa

SEQ ID NO: 1707253 - DNA, 15 bp, Homo sapiens
aaaaccaatacaaag

SEQ ID NO: 1707254 - DNA, 15 bp, Homo sapiens
aaaccaatacaaaga

SEQ ID NO: 1707255 - DNA, 15 bp, Homo sapiens
aaccaatacaaagaa

SEQ ID NO: 1707256 - DNA, 15 bp, Homo sapiens
accaatacaaagaaa

SEQ ID NO: 1707257 - DNA, 15 bp, Homo sapiens
ccaatacaaagaaat

SEQ ID NO: 1707258 - DNA, 15 bp, Homo sapiens
caatacaaagaaatc

SEQ ID NO: 1707259 - DNA, 15 bp, Homo sapiens
aatacaaagaaatca

SEQ ID NO: 1707260 - DNA, 15 bp, Homo sapiens
atacaaagaaatcag

SEQ ID NO: 1707261 - DNA, 15 bp, Homo sapiens
tacaaagaaatcaga

SEQ ID NO: 1707262 - DNA, 15 bp, Homo sapiens
acaaagaaatcagaa

SEQ ID NO: 1707263 - DNA, 15 bp, Homo sapiens
caaagaaatcagaaa

SEQ ID NO: 1707264 - DNA, 15 bp, Homo sapiens
aaagaaatcagaaat

SEQ ID NO: 1707265 - DNA, 15 bp, Homo sapiens
aagaaatcagaaatc

SEQ ID NO: 1707266 - DNA, 15 bp, Homo sapiens
agaaatcagaaatca

SEQ ID NO: 1707267 - DNA, 15 bp, Homo sapiens
gaaatcagaaatcaa

SEQ ID NO: 1707268 - DNA, 15 bp, Homo sapiens
aaatcagaaatcaat

SEQ ID NO: 1707269 - DNA, 15 bp, Homo sapiens
aatcagaaatcaatt

SEQ ID NO: 1707270 - DNA, 15 bp, Homo sapiens
atcagaaatcaattc

SEQ ID NO: 1707271 - DNA, 15 bp, Homo sapiens
tcagaaatcaattca

SEQ ID NO: 1707272 - DNA, 15 bp, Homo sapiens
cagaaatcaattcag

SEQ ID NO: 1707273 - DNA, 15 bp, Homo sapiens
agaaatcaattcagg

SEQ ID NO: 1707274 - DNA, 15 bp, Homo sapiens
gaaatcaattcagga

SEQ ID NO: 1707275 - DNA, 15 bp, Homo sapiens
aaatcaattcaggat

SEQ ID NO: 1707276 - DNA, 15 bp, Homo sapiens
aatcaattcaggata

SEQ ID NO: 1707277 - DNA, 15 bp, Homo sapiens
atcaattcaggatat

SEQ ID NO: 1707278 - DNA, 15 bp, Homo sapiens
tcaattcaggatatg

SEQ ID NO: 1707279 - DNA, 15 bp, Homo sapiens
caattcaggatatga

SEQ ID NO: 1707280 - DNA, 15 bp, Homo sapiens
aattcaggatatgaa

SEQ ID NO: 1707281 - DNA, 15 bp, Homo sapiens
attcaggatatgaat

SEQ ID NO: 1707282 - DNA, 15 bp, Homo sapiens
ttcaggatatgaatg

SEQ ID NO: 1707283 - DNA, 15 bp, Homo sapiens
tcaggatatgaatga

SEQ ID NO: 1707284 - DNA, 15 bp, Homo sapiens
caggatatgaatgag

SEQ ID NO: 1707285 - DNA, 15 bp, Homo sapiens
aggatatgaatgaga

SEQ ID NO: 1707286 - DNA, 15 bp, Homo sapiens
ggatatgaatgagaa

SEQ ID NO: 1707287 - DNA, 15 bp, Homo sapiens
gatatgaatgagaaa

SEQ ID NO: 1707288 - DNA, 15 bp, Homo sapiens
atatgaatgagaaat

SEQ ID NO: 1707289 - DNA, 15 bp, Homo sapiens
tatgaatgagaaatt

SEQ ID NO: 1707290 - DNA, 15 bp, Homo sapiens
atgaatgagaaattt

SEQ ID NO: 1707291 - DNA, 15 bp, Homo sapiens
tgaatgagaaattta

SEQ ID NO: 1707292 - DNA, 15 bp, Homo sapiens
gaatgagaaatttac

SEQ ID NO: 1707293 - DNA, 15 bp, Homo sapiens
aatgagaaatttacc

SEQ ID NO: 1707294 - DNA, 15 bp, Homo sapiens
atgagaaatttacca

SEQ ID NO: 1707295 - DNA, 15 bp, Homo sapiens
tgagaaatttaccaa

SEQ ID NO: 1707296 - DNA, 15 bp, Homo sapiens
gagaaatttaccaag

SEQ ID NO: 1707297 - DNA, 15 bp, Homo sapiens
agaaatttaccaagg

SEQ ID NO: 1707298 - DNA, 15 bp, Homo sapiens
gaaatttaccaagga

SEQ ID NO: 1707299 - DNA, 15 bp, Homo sapiens
aaatttaccaaggag

SEQ ID NO: 1707300 - DNA, 15 bp, Homo sapiens
aatttaccaaggaga

SEQ ID NO: 1707301 - DNA, 15 bp, Homo sapiens
atttaccaaggagat

SEQ ID NO: 1707302 - DNA, 15 bp, Homo sapiens
tttaccaaggagata

SEQ ID NO: 1707303 - DNA, 15 bp, Homo sapiens
ttaccaaggagataa

SEQ ID NO: 1707304 - DNA, 15 bp, Homo sapiens
taccaaggagataaa

SEQ ID NO: 1707305 - DNA, 15 bp, Homo sapiens
accaaggagataaat

SEQ ID NO: 1707306 - DNA, 15 bp, Homo sapiens
ccaaggagataaata

SEQ ID NO: 1707307 - DNA, 15 bp, Homo sapiens
caaggagataaatag

SEQ ID NO: 1707308 - DNA, 15 bp, Homo sapiens
aaggagataaatagc

SEQ ID NO: 1707309 - DNA, 15 bp, Homo sapiens
aggagataaatagca

SEQ ID NO: 1707310 - DNA, 15 bp, Homo sapiens
ggagataaatagcat

SEQ ID NO: 1707311 - DNA, 15 bp, Homo sapiens
gagataaatagcatt

SEQ ID NO: 1707312 - DNA, 15 bp, Homo sapiens
agataaatagcattt

SEQ ID NO: 1707313 - DNA, 15 bp, Homo sapiens
gataaatagcatttt

SEQ ID NO: 1707314 - DNA, 15 bp, Homo sapiens
ataaatagcatttta

SEQ ID NO: 1707315 - DNA, 15 bp, Homo sapiens
taaatagcattttaa

SEQ ID NO: 1707316 - DNA, 15 bp, Homo sapiens
aaatagcattttaaa

SEQ ID NO: 1707317 - DNA, 15 bp, Homo sapiens
aatagcattttaaaa

SEQ ID NO: 1707318 - DNA, 15 bp, Homo sapiens
atagcattttaaaaa

SEQ ID NO: 1707319 - DNA, 15 bp, Homo sapiens
tagcattttaaaaaa

SEQ ID NO: 1707320 - DNA, 15 bp, Homo sapiens
agcattttaaaaaaa

SEQ ID NO: 1707321 - DNA, 15 bp, Homo sapiens
gcattttaaaaaaat

SEQ ID NO: 1707322 - DNA, 15 bp, Homo sapiens
cattttaaaaaaata

SEQ ID NO: 1707323 - DNA, 15 bp, Homo sapiens
attttaaaaaaataa

SEQ ID NO: 1707324 - DNA, 15 bp, Homo sapiens
ttttaaaaaaataag

SEQ ID NO: 1707325 - DNA, 15 bp, Homo sapiens
tttaaaaaaataagc

SEQ ID NO: 1707326 - DNA, 15 bp, Homo sapiens
ttaaaaaaataagca

SEQ ID NO: 1707327 - DNA, 15 bp, Homo sapiens
taaaaaaataagcag

SEQ ID NO: 1707328 - DNA, 15 bp, Homo sapiens
aaaaaaataagcaga

SEQ ID NO: 1707329 - DNA, 15 bp, Homo sapiens
aaaaaataagcagaa

SEQ ID NO: 1707330 - DNA, 15 bp, Homo sapiens
aaaaataagcagaaa

SEQ ID NO: 1707331 - DNA, 15 bp, Homo sapiens
aaaataagcagaaat

SEQ ID NO: 1707332 - DNA, 15 bp, Homo sapiens
aaataagcagaaatt

SEQ ID NO: 1707333 - DNA, 15 bp, Homo sapiens
aataagcagaaattc

SEQ ID NO: 1707334 - DNA, 15 bp, Homo sapiens
ataagcagaaattct

SEQ ID NO: 1707335 - DNA, 15 bp, Homo sapiens
taagcagaaattctg

SEQ ID NO: 1707336 - DNA, 15 bp, Homo sapiens
aagcagaaattctgg

SEQ ID NO: 1707337 - DNA, 15 bp, Homo sapiens
agcagaaattctgga

SEQ ID NO: 1707338 - DNA, 15 bp, Homo sapiens
gcagaaattctggaa

SEQ ID NO: 1707339 - DNA, 15 bp, Homo sapiens
cagaaattctggaac

SEQ ID NO: 1707340 - DNA, 15 bp, Homo sapiens
gaaattctggaactc

SEQ ID NO: 1707341 - DNA, 15 bp, Homo sapiens
aaattctggaactca

SEQ ID NO: 1707342 - DNA, 15 bp, Homo sapiens
aattctggaactcaa

SEQ ID NO: 1707343 - DNA, 15 bp, Homo sapiens
attctggaactcaaa

SEQ ID NO: 1707344 - DNA, 15 bp, Homo sapiens
ttctggaactcaaaa

SEQ ID NO: 1707345 - DNA, 15 bp, Homo sapiens
tctggaactcaaaaa

SEQ ID NO: 1707346 - DNA, 15 bp, Homo sapiens
ctggaactcaaaaat

SEQ ID NO: 1707347 - DNA, 15 bp, Homo sapiens
tggaactcaaaaatt

SEQ ID NO: 1707348 - DNA, 15 bp, Homo sapiens
ggaactcaaaaattc

SEQ ID NO: 1707349 - DNA, 15 bp, Homo sapiens
gaactcaaaaattca

SEQ ID NO: 1707350 - DNA, 15 bp, Homo sapiens
aactcaaaaattcat

SEQ ID NO: 1707351 - DNA, 15 bp, Homo sapiens
actcaaaaattcatt

SEQ ID NO: 1707352 - DNA, 15 bp, Homo sapiens
ctcaaaaattcattg

SEQ ID NO: 1707353 - DNA, 15 bp, Homo sapiens
tcaaaaattcattga

SEQ ID NO: 1707354 - DNA, 15 bp, Homo sapiens
caaaaattcattgaa

SEQ ID NO: 1707355 - DNA, 15 bp, Homo sapiens
aaaaattcattgaag

SEQ ID NO: 1707356 - DNA, 15 bp, Homo sapiens
aaaattcattgaagg

SEQ ID NO: 1707357 - DNA, 15 bp, Homo sapiens
aaattcattgaagga

SEQ ID NO: 1707358 - DNA, 15 bp, Homo sapiens
aattcattgaaggaa

SEQ ID NO: 1707359 - DNA, 15 bp, Homo sapiens
attcattgaaggaaa

SEQ ID NO: 1707360 - DNA, 15 bp, Homo sapiens
ttcattgaaggaaat

SEQ ID NO: 1707361 - DNA, 15 bp, Homo sapiens
tcattgaaggaaata

SEQ ID NO: 1707362 - DNA, 15 bp, Homo sapiens
cattgaaggaaatac

SEQ ID NO: 1707363 - DNA, 15 bp, Homo sapiens
attgaaggaaataca

SEQ ID NO: 1707364 - DNA, 15 bp, Homo sapiens
ttgaaggaaatacaa

SEQ ID NO: 1707365 - DNA, 15 bp, Homo sapiens
tgaaggaaatacaac

SEQ ID NO: 1707366 - DNA, 15 bp, Homo sapiens
gaaggaaatacaaca

SEQ ID NO: 1707367 - DNA, 15 bp, Homo sapiens
aaggaaatacaacat

SEQ ID NO: 1707368 - DNA, 15 bp, Homo sapiens
aggaaatacaacata

SEQ ID NO: 1707369 - DNA, 15 bp, Homo sapiens
ggaaatacaacatac

SEQ ID NO: 1707370 - DNA, 15 bp, Homo sapiens
gaaatacaacataca

SEQ ID NO: 1707371 - DNA, 15 bp, Homo sapiens
aaatacaacatacac

SEQ ID NO: 1707372 - DNA, 15 bp, Homo sapiens
aatacaacatacact

SEQ ID NO: 1707373 - DNA, 15 bp, Homo sapiens
atacaacatacactt

SEQ ID NO: 1707374 - DNA, 15 bp, Homo sapiens
tacaacatacacttt

SEQ ID NO: 1707375 - DNA, 15 bp, Homo sapiens
acaacatacacttta

SEQ ID NO: 1707376 - DNA, 15 bp, Homo sapiens
caacatacactttaa

SEQ ID NO: 1707377 - DNA, 15 bp, Homo sapiens
aacatacactttaaa

SEQ ID NO: 1707378 - DNA, 15 bp, Homo sapiens
acatacactttaaag

SEQ ID NO: 1707379 - DNA, 15 bp, Homo sapiens
catacactttaaagc

SEQ ID NO: 1707380 - DNA, 15 bp, Homo sapiens
atacactttaaagct

SEQ ID NO: 1707381 - DNA, 15 bp, Homo sapiens
tacactttaaagctt

SEQ ID NO: 1707382 - DNA, 15 bp, Homo sapiens
acactttaaagctta

SEQ ID NO: 1707383 - DNA, 15 bp, Homo sapiens
cactttaaagcttaa

SEQ ID NO: 1707384 - DNA, 15 bp, Homo sapiens
actttaaagcttaaa

SEQ ID NO: 1707385 - DNA, 15 bp, Homo sapiens
ctttaaagcttaaat

SEQ ID NO: 1707386 - DNA, 15 bp, Homo sapiens
tttaaagcttaaatc

SEQ ID NO: 1707387 - DNA, 15 bp, Homo sapiens
ttaaagcttaaatca

SEQ ID NO: 1707388 - DNA, 15 bp, Homo sapiens
taaagcttaaatcat

SEQ ID NO: 1707389 - DNA, 15 bp, Homo sapiens
aaagcttaaatcata

SEQ ID NO: 1707390 - DNA, 15 bp, Homo sapiens
aagcttaaatcatat

SEQ ID NO: 1707391 - DNA, 15 bp, Homo sapiens
agcttaaatcatata

SEQ ID NO: 1707392 - DNA, 15 bp, Homo sapiens
gcttaaatcatatac

SEQ ID NO: 1707393 - DNA, 15 bp, Homo sapiens
cttaaatcatatact

SEQ ID NO: 1707394 - DNA, 15 bp, Homo sapiens
ttaaatcatatacta

SEQ ID NO: 1707395 - DNA, 15 bp, Homo sapiens
taaatcatatactag

SEQ ID NO: 1707396 - DNA, 15 bp, Homo sapiens
aaatcatatactaga

SEQ ID NO: 1707397 - DNA, 15 bp, Homo sapiens
aatcatatactagac

SEQ ID NO: 1707398 - DNA, 15 bp, Homo sapiens
atcatatactagacc

SEQ ID NO: 1707399 - DNA, 15 bp, Homo sapiens
tcatatactagacca

SEQ ID NO: 1707400 - DNA, 15 bp, Homo sapiens
catatactagaccaa

SEQ ID NO: 1707401 - DNA, 15 bp, Homo sapiens
atatactagaccaag

SEQ ID NO: 1707402 - DNA, 15 bp, Homo sapiens
tatactagaccaagc

SEQ ID NO: 1707403 - DNA, 15 bp, Homo sapiens
atactagaccaagca

SEQ ID NO: 1707404 - DNA, 15 bp, Homo sapiens
tactagaccaagcag

SEQ ID NO: 1707405 - DNA, 15 bp, Homo sapiens
actagaccaagcaga

SEQ ID NO: 1707406 - DNA, 15 bp, Homo sapiens
ctagaccaagcagag

SEQ ID NO: 1707407 - DNA, 15 bp, Homo sapiens
tagaccaagcagaga

SEQ ID NO: 1707408 - DNA, 15 bp, Homo sapiens
agaccaagcagagat

SEQ ID NO: 1707409 - DNA, 15 bp, Homo sapiens
gaccaagcagagata

SEQ ID NO: 1707410 - DNA, 15 bp, Homo sapiens
accaagcagagataa

SEQ ID NO: 1707411 - DNA, 15 bp, Homo sapiens
ccaagcagagataag

SEQ ID NO: 1707412 - DNA, 15 bp, Homo sapiens
caagcagagataaga

SEQ ID NO: 1707413 - DNA, 15 bp, Homo sapiens
aagcagagataagaa

SEQ ID NO: 1707414 - DNA, 15 bp, Homo sapiens
agcagagataagaat

SEQ ID NO: 1707415 - DNA, 15 bp, Homo sapiens
gcagagataagaatt

SEQ ID NO: 1707416 - DNA, 15 bp, Homo sapiens
cagagataagaattt

SEQ ID NO: 1707417 - DNA, 15 bp, Homo sapiens
agagataagaatttc

SEQ ID NO: 1707418 - DNA, 15 bp, Homo sapiens
gagataagaatttca

SEQ ID NO: 1707419 - DNA, 15 bp, Homo sapiens
agataagaatttcag

SEQ ID NO: 1707420 - DNA, 15 bp, Homo sapiens
gataagaatttcaga

SEQ ID NO: 1707421 - DNA, 15 bp, Homo sapiens
ataagaatttcagaa

SEQ ID NO: 1707422 - DNA, 15 bp, Homo sapiens
taagaatttcagaac

SEQ ID NO: 1707423 - DNA, 15 bp, Homo sapiens
aagaatttcagaact

SEQ ID NO: 1707424 - DNA, 15 bp, Homo sapiens
agaatttcagaactt

SEQ ID NO: 1707425 - DNA, 15 bp, Homo sapiens
gaatttcagaacttg

SEQ ID NO: 1707426 - DNA, 15 bp, Homo sapiens
aatttcagaacttga

SEQ ID NO: 1707427 - DNA, 15 bp, Homo sapiens
atttcagaacttgaa

SEQ ID NO: 1707428 - DNA, 15 bp, Homo sapiens
tttcagaacttgaac

SEQ ID NO: 1707429 - DNA, 15 bp, Homo sapiens
ttcagaacttgaaca

SEQ ID NO: 1707430 - DNA, 15 bp, Homo sapiens
tcagaacttgaacac

SEQ ID NO: 1707431 - DNA, 15 bp, Homo sapiens
cagaacttgaacaca

SEQ ID NO: 1707432 - DNA, 15 bp, Homo sapiens
agaacttgaacacat

SEQ ID NO: 1707433 - DNA, 15 bp, Homo sapiens
gaacttgaacacatg

SEQ ID NO: 1707434 - DNA, 15 bp, Homo sapiens
aacttgaacacatgt

SEQ ID NO: 1707435 - DNA, 15 bp, Homo sapiens
acttgaacacatgtc

SEQ ID NO: 1707436 - DNA, 15 bp, Homo sapiens
cttgaacacatgtct

SEQ ID NO: 1707437 - DNA, 15 bp, Homo sapiens
ttgaacacatgtctt

SEQ ID NO: 1707438 - DNA, 15 bp, Homo sapiens
tgaacacatgtcttt

SEQ ID NO: 1707439 - DNA, 15 bp, Homo sapiens
gaacacatgtctttt

SEQ ID NO: 1707440 - DNA, 15 bp, Homo sapiens
aacacatgtcttttg

SEQ ID NO: 1707441 - DNA, 15 bp, Homo sapiens
acacatgtcttttga

SEQ ID NO: 1707442 - DNA, 15 bp, Homo sapiens
cacatgtcttttgaa

SEQ ID NO: 1707443 - DNA, 15 bp, Homo sapiens
acatgtcttttgaaa

SEQ ID NO: 1707444 - DNA, 15 bp, Homo sapiens
catgtcttttgaaat

SEQ ID NO: 1707445 - DNA, 15 bp, Homo sapiens
atgtcttttgaaata

SEQ ID NO: 1707446 - DNA, 15 bp, Homo sapiens
tgtcttttgaaataa

SEQ ID NO: 1707447 - DNA, 15 bp, Homo sapiens
gtcttttgaaataat

SEQ ID NO: 1707448 - DNA, 15 bp, Homo sapiens
tcttttgaaataatc

SEQ ID NO: 1707449 - DNA, 15 bp, Homo sapiens
cttttgaaataatcc

SEQ ID NO: 1707450 - DNA, 15 bp, Homo sapiens
ttttgaaataatcca

SEQ ID NO: 1707451 - DNA, 15 bp, Homo sapiens
tttgaaataatccag

SEQ ID NO: 1707452 - DNA, 15 bp, Homo sapiens
ttgaaataatccagt

SEQ ID NO: 1707453 - DNA, 15 bp, Homo sapiens
tgaaataatccagtc

SEQ ID NO: 1707454 - DNA, 15 bp, Homo sapiens
gaaataatccagtca

SEQ ID NO: 1707455 - DNA, 15 bp, Homo sapiens
aaataatccagtcag

SEQ ID NO: 1707456 - DNA, 15 bp, Homo sapiens
aataatccagtcaga

SEQ ID NO: 1707457 - DNA, 15 bp, Homo sapiens
ataatccagtcagac

SEQ ID NO: 1707458 - DNA, 15 bp, Homo sapiens
taatccagtcagaca

SEQ ID NO: 1707459 - DNA, 15 bp, Homo sapiens
aatccagtcagacaa

SEQ ID NO: 1707460 - DNA, 15 bp, Homo sapiens
atccagtcagacaaa

SEQ ID NO: 1707461 - DNA, 15 bp, Homo sapiens
tccagtcagacaaaa

SEQ ID NO: 1707462 - DNA, 15 bp, Homo sapiens
ccagtcagacaaaaa

SEQ ID NO: 1707463 - DNA, 15 bp, Homo sapiens
cagtcagacaaaaat

SEQ ID NO: 1707464 - DNA, 15 bp, Homo sapiens
agtcagacaaaaata

SEQ ID NO: 1707465 - DNA, 15 bp, Homo sapiens
gtcagacaaaaataa

SEQ ID NO: 1707466 - DNA, 15 bp, Homo sapiens
tcagacaaaaataag

SEQ ID NO: 1707467 - DNA, 15 bp, Homo sapiens
cagacaaaaataagg

SEQ ID NO: 1707468 - DNA, 15 bp, Homo sapiens
agacaaaaataagga

SEQ ID NO: 1707469 - DNA, 15 bp, Homo sapiens
gacaaaaataaggaa

SEQ ID NO: 1707470 - DNA, 15 bp, Homo sapiens
acaaaaataaggaaa

SEQ ID NO: 1707471 - DNA, 15 bp, Homo sapiens
caaaaataaggaaaa

SEQ ID NO: 1707472 - DNA, 15 bp, Homo sapiens
aaaaataaggaaaaa

SEQ ID NO: 1707473 - DNA, 15 bp, Homo sapiens
aaaataaggaaaaaa

SEQ ID NO: 1707474 - DNA, 15 bp, Homo sapiens
aaataaggaaaaaag

SEQ ID NO: 1707475 - DNA, 15 bp, Homo sapiens
aataaggaaaaaaga

SEQ ID NO: 1707476 - DNA, 15 bp, Homo sapiens
ataaggaaaaaagaa

SEQ ID NO: 1707477 - DNA, 15 bp, Homo sapiens
taaggaaaaaagaat

SEQ ID NO: 1707478 - DNA, 15 bp, Homo sapiens
aaggaaaaaagaata

SEQ ID NO: 1707479 - DNA, 15 bp, Homo sapiens
aggaaaaaagaataa

SEQ ID NO: 1707480 - DNA, 15 bp, Homo sapiens
ggaaaaaagaataaa

SEQ ID NO: 1707481 - DNA, 15 bp, Homo sapiens
gaaaaaagaataaaa

SEQ ID NO: 1707482 - DNA, 15 bp, Homo sapiens
aaaaaagaataaaaa

SEQ ID NO: 1707483 - DNA, 15 bp, Homo sapiens
aaaaagaataaaaag

SEQ ID NO: 1707484 - DNA, 15 bp, Homo sapiens
aaaagaataaaaaga

SEQ ID NO: 1707485 - DNA, 15 bp, Homo sapiens
aaagaataaaaagaa

SEQ ID NO: 1707486 - DNA, 15 bp, Homo sapiens
aagaataaaaagaat

SEQ ID NO: 1707487 - DNA, 15 bp, Homo sapiens
agaataaaaagaatg

SEQ ID NO: 1707488 - DNA, 15 bp, Homo sapiens
gaataaaaagaatga

SEQ ID NO: 1707489 - DNA, 15 bp, Homo sapiens
aataaaaagaatgaa

SEQ ID NO: 1707490 - DNA, 15 bp, Homo sapiens
ataaaaagaatgaac

SEQ ID NO: 1707491 - DNA, 15 bp, Homo sapiens
taaaaagaatgaaca

SEQ ID NO: 1707492 - DNA, 15 bp, Homo sapiens
aaaaagaatgaacaa

SEQ ID NO: 1707493 - DNA, 15 bp, Homo sapiens
aaaagaatgaacaaa

SEQ ID NO: 1707494 - DNA, 15 bp, Homo sapiens
aaagaatgaacaaag

SEQ ID NO: 1707495 - DNA, 15 bp, Homo sapiens
aagaatgaacaaagc

SEQ ID NO: 1707496 - DNA, 15 bp, Homo sapiens
agaatgaacaaagcc

SEQ ID NO: 1707497 - DNA, 15 bp, Homo sapiens
gaatgaacaaagcct

SEQ ID NO: 1707498 - DNA, 15 bp, Homo sapiens
aatgaacaaagcctt

SEQ ID NO: 1707499 - DNA, 15 bp, Homo sapiens
atgaacaaagccttt

SEQ ID NO: 1707500 - DNA, 15 bp, Homo sapiens
tgaacaaagcctttg

SEQ ID NO: 1707501 - DNA, 15 bp, Homo sapiens
gaacaaagcctttga

SEQ ID NO: 1707502 - DNA, 15 bp, Homo sapiens
aacaaagcctttgag

SEQ ID NO: 1707503 - DNA, 15 bp, Homo sapiens
acaaagcctttgaga

SEQ ID NO: 1707504 - DNA, 15 bp, Homo sapiens
caaagcctttgagat

SEQ ID NO: 1707505 - DNA, 15 bp, Homo sapiens
aaagcctttgagatg

SEQ ID NO: 1707506 - DNA, 15 bp, Homo sapiens
aagcctttgagatgt

SEQ ID NO: 1707507 - DNA, 15 bp, Homo sapiens
agcctttgagatgtc

SEQ ID NO: 1707508 - DNA, 15 bp, Homo sapiens
gcctttgagatgtct

SEQ ID NO: 1707509 - DNA, 15 bp, Homo sapiens
cctttgagatgtcta

SEQ ID NO: 1707510 - DNA, 15 bp, Homo sapiens
ctttgagatgtctag

SEQ ID NO: 1707511 - DNA, 15 bp, Homo sapiens
tttgagatgtctagg

SEQ ID NO: 1707512 - DNA, 15 bp, Homo sapiens
ttgagatgtctagga

SEQ ID NO: 1707513 - DNA, 15 bp, Homo sapiens
tgagatgtctaggac

SEQ ID NO: 1707514 - DNA, 15 bp, Homo sapiens
gagatgtctaggact

SEQ ID NO: 1707515 - DNA, 15 bp, Homo sapiens
agatgtctaggacta

SEQ ID NO: 1707516 - DNA, 15 bp, Homo sapiens
gatgtctaggactaa

SEQ ID NO: 1707517 - DNA, 15 bp, Homo sapiens
atgtctaggactaag

SEQ ID NO: 1707518 - DNA, 15 bp, Homo sapiens
tgtctaggactaagt

SEQ ID NO: 1707519 - DNA, 15 bp, Homo sapiens
gtctaggactaagta

SEQ ID NO: 1707520 - DNA, 15 bp, Homo sapiens
tctaggactaagtaa

SEQ ID NO: 1707521 - DNA, 15 bp, Homo sapiens
ctaggactaagtaaa

SEQ ID NO: 1707522 - DNA, 15 bp, Homo sapiens
taggactaagtaaag

SEQ ID NO: 1707523 - DNA, 15 bp, Homo sapiens
aggactaagtaaagg

SEQ ID NO: 1707524 - DNA, 15 bp, Homo sapiens
ggactaagtaaaggg

SEQ ID NO: 1707525 - DNA, 15 bp, Homo sapiens
gactaagtaaaggga

SEQ ID NO: 1707526 - DNA, 15 bp, Homo sapiens
actaagtaaagggac

SEQ ID NO: 1707527 - DNA, 15 bp, Homo sapiens
ctaagtaaagggact

SEQ ID NO: 1707528 - DNA, 15 bp, Homo sapiens
taagtaaagggactg

SEQ ID NO: 1707529 - DNA, 15 bp, Homo sapiens
aagtaaagggactga

SEQ ID NO: 1707530 - DNA, 15 bp, Homo sapiens
agtaaagggactgaa

SEQ ID NO: 1707531 - DNA, 15 bp, Homo sapiens
gtaaagggactgaac

SEQ ID NO: 1707532 - DNA, 15 bp, Homo sapiens
taaagggactgaaca

SEQ ID NO: 1707533 - DNA, 15 bp, Homo sapiens
aaagggactgaacat

SEQ ID NO: 1707534 - DNA, 15 bp, Homo sapiens
aagggactgaacatg

SEQ ID NO: 1707535 - DNA, 15 bp, Homo sapiens
agggactgaacatgg

SEQ ID NO: 1707536 - DNA, 15 bp, Homo sapiens
gggactgaacatgga

SEQ ID NO: 1707537 - DNA, 15 bp, Homo sapiens
ggactgaacatggac

SEQ ID NO: 1707538 - DNA, 15 bp, Homo sapiens
gactgaacatggact

SEQ ID NO: 1707539 - DNA, 15 bp, Homo sapiens
actgaacatggacta

SEQ ID NO: 1707540 - DNA, 15 bp, Homo sapiens
ctgaacatggactaa

SEQ ID NO: 1707541 - DNA, 15 bp, Homo sapiens
tgaacatggactaaa

SEQ ID NO: 1707542 - DNA, 15 bp, Homo sapiens
gaacatggactaaat

SEQ ID NO: 1707543 - DNA, 15 bp, Homo sapiens
aacatggactaaata

SEQ ID NO: 1707544 - DNA, 15 bp, Homo sapiens
acatggactaaataa

SEQ ID NO: 1707545 - DNA, 15 bp, Homo sapiens
catggactaaataaa

SEQ ID NO: 1707546 - DNA, 15 bp, Homo sapiens
atggactaaataaag

SEQ ID NO: 1707547 - DNA, 15 bp, Homo sapiens
tggactaaataaagc

SEQ ID NO: 1707548 - DNA, 15 bp, Homo sapiens
ggactaaataaagca

SEQ ID NO: 1707549 - DNA, 15 bp, Homo sapiens
gactaaataaagcaa

SEQ ID NO: 1707550 - DNA, 15 bp, Homo sapiens
actaaataaagcaac

SEQ ID NO: 1707551 - DNA, 15 bp, Homo sapiens
ctaaataaagcaact

SEQ ID NO: 1707552 - DNA, 15 bp, Homo sapiens
taaataaagcaactg

SEQ ID NO: 1707553 - DNA, 15 bp, Homo sapiens
aaataaagcaactga

SEQ ID NO: 1707554 - DNA, 15 bp, Homo sapiens
aataaagcaactgaa

SEQ ID NO: 1707555 - DNA, 15 bp, Homo sapiens
ataaagcaactgaac

SEQ ID NO: 1707556 - DNA, 15 bp, Homo sapiens
taaagcaactgaact

SEQ ID NO: 1707557 - DNA, 15 bp, Homo sapiens
aaagcaactgaactt

SEQ ID NO: 1707558 - DNA, 15 bp, Homo sapiens
aagcaactgaactta

SEQ ID NO: 1707559 - DNA, 15 bp, Homo sapiens
agcaactgaacttat

SEQ ID NO: 1707560 - DNA, 15 bp, Homo sapiens
gcaactgaacttatg

SEQ ID NO: 1707561 - DNA, 15 bp, Homo sapiens
caactgaacttatga

SEQ ID NO: 1707562 - DNA, 15 bp, Homo sapiens
aactgaacttatgaa

SEQ ID NO: 1707563 - DNA, 15 bp, Homo sapiens
actgaacttatgaat

SEQ ID NO: 1707564 - DNA, 15 bp, Homo sapiens
ctgaacttatgaatt

SEQ ID NO: 1707565 - DNA, 15 bp, Homo sapiens
tgaacttatgaatta

SEQ ID NO: 1707566 - DNA, 15 bp, Homo sapiens
gaacttatgaattat

SEQ ID NO: 1707567 - DNA, 15 bp, Homo sapiens
aacttatgaattatc

SEQ ID NO: 1707568 - DNA, 15 bp, Homo sapiens
acttatgaattatca

SEQ ID NO: 1707569 - DNA, 15 bp, Homo sapiens
cttatgaattatcag

SEQ ID NO: 1707570 - DNA, 15 bp, Homo sapiens
ttatgaattatcagt

SEQ ID NO: 1707571 - DNA, 15 bp, Homo sapiens
tatgaattatcagta

SEQ ID NO: 1707572 - DNA, 15 bp, Homo sapiens
atgaattatcagtat

SEQ ID NO: 1707573 - DNA, 15 bp, Homo sapiens
tgaattatcagtatc

SEQ ID NO: 1707574 - DNA, 15 bp, Homo sapiens
gaattatcagtatcc

SEQ ID NO: 1707575 - DNA, 15 bp, Homo sapiens
aattatcagtatcct

SEQ ID NO: 1707576 - DNA, 15 bp, Homo sapiens
attatcagtatcctg

SEQ ID NO: 1707577 - DNA, 15 bp, Homo sapiens
ttatcagtatcctga

SEQ ID NO: 1707578 - DNA, 15 bp, Homo sapiens
tatcagtatcctgaa

SEQ ID NO: 1707579 - DNA, 15 bp, Homo sapiens
atcagtatcctgaaa

SEQ ID NO: 1707580 - DNA, 15 bp, Homo sapiens
tcagtatcctgaaag

SEQ ID NO: 1707581 - DNA, 15 bp, Homo sapiens
cagtatcctgaaagg

SEQ ID NO: 1707582 - DNA, 15 bp, Homo sapiens
agtatcctgaaaggg

SEQ ID NO: 1707583 - DNA, 15 bp, Homo sapiens
gtatcctgaaaggga

SEQ ID NO: 1707584 - DNA, 15 bp, Homo sapiens
tatcctgaaagggaa

SEQ ID NO: 1707585 - DNA, 15 bp, Homo sapiens
atcctgaaagggaag

SEQ ID NO: 1707586 - DNA, 15 bp, Homo sapiens
tcctgaaagggaaga

SEQ ID NO: 1707587 - DNA, 15 bp, Homo sapiens
cctgaaagggaagag

SEQ ID NO: 1707588 - DNA, 15 bp, Homo sapiens
ctgaaagggaagaga

SEQ ID NO: 1707589 - DNA, 15 bp, Homo sapiens
tgaaagggaagagag

SEQ ID NO: 1707590 - DNA, 15 bp, Homo sapiens
gaaagggaagagaga

SEQ ID NO: 1707591 - DNA, 15 bp, Homo sapiens
aaagggaagagagat

SEQ ID NO: 1707592 - DNA, 15 bp, Homo sapiens
aagggaagagagatc

SEQ ID NO: 1707593 - DNA, 15 bp, Homo sapiens
agggaagagagatca

SEQ ID NO: 1707594 - DNA, 15 bp, Homo sapiens
gggaagagagatcaa

SEQ ID NO: 1707595 - DNA, 15 bp, Homo sapiens
ggaagagagatcaaa

SEQ ID NO: 1707596 - DNA, 15 bp, Homo sapiens
gaagagagatcaaaa

SEQ ID NO: 1707597 - DNA, 15 bp, Homo sapiens
aagagagatcaaaag

SEQ ID NO: 1707598 - DNA, 15 bp, Homo sapiens
agagagatcaaaagg

SEQ ID NO: 1707599 - DNA, 15 bp, Homo sapiens
gagagatcaaaaggt

SEQ ID NO: 1707600 - DNA, 15 bp, Homo sapiens
agagatcaaaaggtt

SEQ ID NO: 1707601 - DNA, 15 bp, Homo sapiens
gagatcaaaaggttt

SEQ ID NO: 1707602 - DNA, 15 bp, Homo sapiens
agatcaaaaggttta

SEQ ID NO: 1707603 - DNA, 15 bp, Homo sapiens
gatcaaaaggtttag

SEQ ID NO: 1707604 - DNA, 15 bp, Homo sapiens
atcaaaaggtttaga

SEQ ID NO: 1707605 - DNA, 15 bp, Homo sapiens
tcaaaaggtttagaa

SEQ ID NO: 1707606 - DNA, 15 bp, Homo sapiens
caaaaggtttagaaa

SEQ ID NO: 1707607 - DNA, 15 bp, Homo sapiens
aaaaggtttagaaaa

SEQ ID NO: 1707608 - DNA, 15 bp, Homo sapiens
aaaggtttagaaaac

SEQ ID NO: 1707609 - DNA, 15 bp, Homo sapiens
aaggtttagaaaaca

SEQ ID NO: 1707610 - DNA, 15 bp, Homo sapiens
aggtttagaaaacat

SEQ ID NO: 1707611 - DNA, 15 bp, Homo sapiens
ggtttagaaaacata

SEQ ID NO: 1707612 - DNA, 15 bp, Homo sapiens
gtttagaaaacatat

SEQ ID NO: 1707613 - DNA, 15 bp, Homo sapiens
tttagaaaacatatt

SEQ ID NO: 1707614 - DNA, 15 bp, Homo sapiens
ttagaaaacatattt

SEQ ID NO: 1707615 - DNA, 15 bp, Homo sapiens
tagaaaacatatttt

SEQ ID NO: 1707616 - DNA, 15 bp, Homo sapiens
agaaaacatatttta

SEQ ID NO: 1707617 - DNA, 15 bp, Homo sapiens
gaaaacatattttaa

SEQ ID NO: 1707618 - DNA, 15 bp, Homo sapiens
aaaacatattttaaa

SEQ ID NO: 1707619 - DNA, 15 bp, Homo sapiens
aaacatattttaaaa

SEQ ID NO: 1707620 - DNA, 15 bp, Homo sapiens
aacatattttaaaaa

SEQ ID NO: 1707621 - DNA, 15 bp, Homo sapiens
acatattttaaaaaa

SEQ ID NO: 1707622 - DNA, 15 bp, Homo sapiens
catattttaaaaaat

SEQ ID NO: 1707623 - DNA, 15 bp, Homo sapiens
atattttaaaaaatc

SEQ ID NO: 1707624 - DNA, 15 bp, Homo sapiens
tattttaaaaaatca

SEQ ID NO: 1707625 - DNA, 15 bp, Homo sapiens
attttaaaaaatcat

SEQ ID NO: 1707626 - DNA, 15 bp, Homo sapiens
tttaaaaaatcatca

SEQ ID NO: 1707627 - DNA, 15 bp, Homo sapiens
ttaaaaaatcatcaa

SEQ ID NO: 1707628 - DNA, 15 bp, Homo sapiens
taaaaaatcatcaat

SEQ ID NO: 1707629 - DNA, 15 bp, Homo sapiens
aaaaaatcatcaata

SEQ ID NO: 1707630 - DNA, 15 bp, Homo sapiens
aaaaatcatcaataa

SEQ ID NO: 1707631 - DNA, 15 bp, Homo sapiens
aaaatcatcaataac

SEQ ID NO: 1707632 - DNA, 15 bp, Homo sapiens
aaatcatcaataaca

SEQ ID NO: 1707633 - DNA, 15 bp, Homo sapiens
aatcatcaataacaa

SEQ ID NO: 1707634 - DNA, 15 bp, Homo sapiens
atcatcaataacaac

SEQ ID NO: 1707635 - DNA, 15 bp, Homo sapiens
tcatcaataacaacc

SEQ ID NO: 1707636 - DNA, 15 bp, Homo sapiens
catcaataacaacct

SEQ ID NO: 1707637 - DNA, 15 bp, Homo sapiens
atcaataacaacctc

SEQ ID NO: 1707638 - DNA, 15 bp, Homo sapiens
tcaataacaacctcc

SEQ ID NO: 1707639 - DNA, 15 bp, Homo sapiens
caataacaacctccc

SEQ ID NO: 1707640 - DNA, 15 bp, Homo sapiens
aataacaacctccca

SEQ ID NO: 1707641 - DNA, 15 bp, Homo sapiens
ataacaacctcccaa

SEQ ID NO: 1707642 - DNA, 15 bp, Homo sapiens
taacaacctcccaag

SEQ ID NO: 1707643 - DNA, 15 bp, Homo sapiens
aacaacctcccaagt

SEQ ID NO: 1707644 - DNA, 15 bp, Homo sapiens
acaacctcccaagtc

SEQ ID NO: 1707645 - DNA, 15 bp, Homo sapiens
caacctcccaagtct

SEQ ID NO: 1707646 - DNA, 15 bp, Homo sapiens
aacctcccaagtctg

SEQ ID NO: 1707647 - DNA, 15 bp, Homo sapiens
acctcccaagtctgt

SEQ ID NO: 1707648 - DNA, 15 bp, Homo sapiens
cctcccaagtctgtc

SEQ ID NO: 1707649 - DNA, 15 bp, Homo sapiens
ctcccaagtctgtca

SEQ ID NO: 1707650 - DNA, 15 bp, Homo sapiens
tcccaagtctgtcaa

SEQ ID NO: 1707651 - DNA, 15 bp, Homo sapiens
cccaagtctgtcaag

SEQ ID NO: 1707652 - DNA, 15 bp, Homo sapiens
ccaagtctgtcaaga

SEQ ID NO: 1707653 - DNA, 15 bp, Homo sapiens
caagtctgtcaagac

SEQ ID NO: 1707654 - DNA, 15 bp, Homo sapiens
aagtctgtcaagact

SEQ ID NO: 1707655 - DNA, 15 bp, Homo sapiens
agtctgtcaagactg

SEQ ID NO: 1707656 - DNA, 15 bp, Homo sapiens
gtctgtcaagactgt

SEQ ID NO: 1707657 - DNA, 15 bp, Homo sapiens
tctgtcaagactgtt

SEQ ID NO: 1707658 - DNA, 15 bp, Homo sapiens
ctgtcaagactgtta

SEQ ID NO: 1707659 - DNA, 15 bp, Homo sapiens
tgtcaagactgttag

SEQ ID NO: 1707660 - DNA, 15 bp, Homo sapiens
gtcaagactgttaga

SEQ ID NO: 1707661 - DNA, 15 bp, Homo sapiens
tcaagactgttagac

SEQ ID NO: 1707662 - DNA, 15 bp, Homo sapiens
caagactgttagaca

SEQ ID NO: 1707663 - DNA, 15 bp, Homo sapiens
aagactgttagacaa

SEQ ID NO: 1707664 - DNA, 15 bp, Homo sapiens
agactgttagacaac

SEQ ID NO: 1707665 - DNA, 15 bp, Homo sapiens
gactgttagacaacc

SEQ ID NO: 1707666 - DNA, 15 bp, Homo sapiens
actgttagacaacca

SEQ ID NO: 1707667 - DNA, 15 bp, Homo sapiens
ctgttagacaaccag

SEQ ID NO: 1707668 - DNA, 15 bp, Homo sapiens
tgttagacaaccagt

SEQ ID NO: 1707669 - DNA, 15 bp, Homo sapiens
gttagacaaccagtt

SEQ ID NO: 1707670 - DNA, 15 bp, Homo sapiens
ttagacaaccagttc

SEQ ID NO: 1707671 - DNA, 15 bp, Homo sapiens
tagacaaccagttca

SEQ ID NO: 1707672 - DNA, 15 bp, Homo sapiens
agacaaccagttcag

SEQ ID NO: 1707673 - DNA, 15 bp, Homo sapiens
gacaaccagttcaga

SEQ ID NO: 1707674 - DNA, 15 bp, Homo sapiens
acaaccagttcagaa

SEQ ID NO: 1707675 - DNA, 15 bp, Homo sapiens
caaccagttcagaag

SEQ ID NO: 1707676 - DNA, 15 bp, Homo sapiens
aaccagttcagaagt

SEQ ID NO: 1707677 - DNA, 15 bp, Homo sapiens
accagttcagaagtc

SEQ ID NO: 1707678 - DNA, 15 bp, Homo sapiens
ccagttcagaagtcc

SEQ ID NO: 1707679 - DNA, 15 bp, Homo sapiens
cagttcagaagtcca

SEQ ID NO: 1707680 - DNA, 15 bp, Homo sapiens
agttcagaagtccag

SEQ ID NO: 1707681 - DNA, 15 bp, Homo sapiens
gttcagaagtccagt

SEQ ID NO: 1707682 - DNA, 15 bp, Homo sapiens
ttcagaagtccagtg

SEQ ID NO: 1707683 - DNA, 15 bp, Homo sapiens
tcagaagtccagtga

SEQ ID NO: 1707684 - DNA, 15 bp, Homo sapiens
cagaagtccagtgat

SEQ ID NO: 1707685 - DNA, 15 bp, Homo sapiens
agaagtccagtgatt

SEQ ID NO: 1707686 - DNA, 15 bp, Homo sapiens
gaagtccagtgattc

SEQ ID NO: 1707687 - DNA, 15 bp, Homo sapiens
aagtccagtgattcc

SEQ ID NO: 1707688 - DNA, 15 bp, Homo sapiens
agtccagtgattccc

SEQ ID NO: 1707689 - DNA, 15 bp, Homo sapiens
gtccagtgattcccc

SEQ ID NO: 1707690 - DNA, 15 bp, Homo sapiens
tccagtgattcccca

SEQ ID NO: 1707691 - DNA, 15 bp, Homo sapiens
ccagtgattccccag

SEQ ID NO: 1707692 - DNA, 15 bp, Homo sapiens
cagtgattccccagg

SEQ ID NO: 1707693 - DNA, 15 bp, Homo sapiens
agtgattccccaggc

SEQ ID NO: 1707694 - DNA, 15 bp, Homo sapiens
gtgattccccaggca

SEQ ID NO: 1707695 - DNA, 15 bp, Homo sapiens
tgattccccaggcaa

SEQ ID NO: 1707696 - DNA, 15 bp, Homo sapiens
gattccccaggcaaa

SEQ ID NO: 1707697 - DNA, 15 bp, Homo sapiens
attccccaggcaaac

SEQ ID NO: 1707698 - DNA, 15 bp, Homo sapiens
ttccccaggcaaaca

SEQ ID NO: 1707699 - DNA, 15 bp, Homo sapiens
tccccaggcaaacac

SEQ ID NO: 1707700 - DNA, 15 bp, Homo sapiens
ccccaggcaaacaca

SEQ ID NO: 1707701 - DNA, 15 bp, Homo sapiens
cccaggcaaacacat

SEQ ID NO: 1707702 - DNA, 15 bp, Homo sapiens
ccaggcaaacacatt

SEQ ID NO: 1707703 - DNA, 15 bp, Homo sapiens
caggcaaacacatta

SEQ ID NO: 1707704 - DNA, 15 bp, Homo sapiens
aggcaaacacattac

SEQ ID NO: 1707705 - DNA, 15 bp, Homo sapiens
ggcaaacacattaca

SEQ ID NO: 1707706 - DNA, 15 bp, Homo sapiens
gcaaacacattacaa

SEQ ID NO: 1707707 - DNA, 15 bp, Homo sapiens
caaacacattacaaa

SEQ ID NO: 1707708 - DNA, 15 bp, Homo sapiens
aaacacattacaaaa

SEQ ID NO: 1707709 - DNA, 15 bp, Homo sapiens
aacacattacaaaaa

SEQ ID NO: 1707710 - DNA, 15 bp, Homo sapiens
acacattacaaaaag

SEQ ID NO: 1707711 - DNA, 15 bp, Homo sapiens
cacattacaaaaagg

SEQ ID NO: 1707712 - DNA, 15 bp, Homo sapiens
acattacaaaaagga

SEQ ID NO: 1707713 - DNA, 15 bp, Homo sapiens
cattacaaaaaggaa

SEQ ID NO: 1707714 - DNA, 15 bp, Homo sapiens
attacaaaaaggaat

SEQ ID NO: 1707715 - DNA, 15 bp, Homo sapiens
ttacaaaaaggaatt

SEQ ID NO: 1707716 - DNA, 15 bp, Homo sapiens
tacaaaaaggaattc

SEQ ID NO: 1707717 - DNA, 15 bp, Homo sapiens
acaaaaaggaattca

SEQ ID NO: 1707718 - DNA, 15 bp, Homo sapiens
caaaaaggaattcac

SEQ ID NO: 1707719 - DNA, 15 bp, Homo sapiens
aaaaaggaattcacc

SEQ ID NO: 1707720 - DNA, 15 bp, Homo sapiens
aaaaggaattcacca

SEQ ID NO: 1707721 - DNA, 15 bp, Homo sapiens
aaaggaattcaccat

SEQ ID NO: 1707722 - DNA, 15 bp, Homo sapiens
aaggaattcaccatt

SEQ ID NO: 1707723 - DNA, 15 bp, Homo sapiens
aggaattcaccatta

SEQ ID NO: 1707724 - DNA, 15 bp, Homo sapiens
ggaattcaccattat

SEQ ID NO: 1707725 - DNA, 15 bp, Homo sapiens
gaattcaccattata

SEQ ID NO: 1707726 - DNA, 15 bp, Homo sapiens
aattcaccattatat

SEQ ID NO: 1707727 - DNA, 15 bp, Homo sapiens
attcaccattatata

SEQ ID NO: 1707728 - DNA, 15 bp, Homo sapiens
ttcaccattatatat

SEQ ID NO: 1707729 - DNA, 15 bp, Homo sapiens
tcaccattatatatt

SEQ ID NO: 1707730 - DNA, 15 bp, Homo sapiens
caccattatatatta

SEQ ID NO: 1707731 - DNA, 15 bp, Homo sapiens
accattatatattat

SEQ ID NO: 1707732 - DNA, 15 bp, Homo sapiens
ccattatatattatg

SEQ ID NO: 1707733 - DNA, 15 bp, Homo sapiens
cattatatattatgt

SEQ ID NO: 1707734 - DNA, 15 bp, Homo sapiens
attatatattatgtt

SEQ ID NO: 1707735 - DNA, 15 bp, Homo sapiens
ttatatattatgttc

SEQ ID NO: 1707736 - DNA, 15 bp, Homo sapiens
tatatattatgttca

SEQ ID NO: 1707737 - DNA, 15 bp, Homo sapiens
atatattatgttcag

SEQ ID NO: 1707738 - DNA, 15 bp, Homo sapiens
tatattatgttcaga

SEQ ID NO: 1707739 - DNA, 15 bp, Homo sapiens
atattatgttcagaa

SEQ ID NO: 1707740 - DNA, 15 bp, Homo sapiens
tattatgttcagaat

SEQ ID NO: 1707741 - DNA, 15 bp, Homo sapiens
attatgttcagaatg

SEQ ID NO: 1707742 - DNA, 15 bp, Homo sapiens
ttatgttcagaatgt

SEQ ID NO: 1707743 - DNA, 15 bp, Homo sapiens
tatgttcagaatgtc

SEQ ID NO: 1707744 - DNA, 15 bp, Homo sapiens
atgttcagaatgtct

SEQ ID NO: 1707745 - DNA, 15 bp, Homo sapiens
tgttcagaatgtcta

SEQ ID NO: 1707746 - DNA, 15 bp, Homo sapiens
gttcagaatgtctaa

SEQ ID NO: 1707747 - DNA, 15 bp, Homo sapiens
ttcagaatgtctaaa

SEQ ID NO: 1707748 - DNA, 15 bp, Homo sapiens
tcagaatgtctaaag

SEQ ID NO: 1707749 - DNA, 15 bp, Homo sapiens
cagaatgtctaaagt

SEQ ID NO: 1707750 - DNA, 15 bp, Homo sapiens
agaatgtctaaagtc

SEQ ID NO: 1707751 - DNA, 15 bp, Homo sapiens
gaatgtctaaagtca

SEQ ID NO: 1707752 - DNA, 15 bp, Homo sapiens
aatgtctaaagtcaa

SEQ ID NO: 1707753 - DNA, 15 bp, Homo sapiens
atgtctaaagtcaaa

SEQ ID NO: 1707754 - DNA, 15 bp, Homo sapiens
tgtctaaagtcaaag

SEQ ID NO: 1707755 - DNA, 15 bp, Homo sapiens
gtctaaagtcaaagt

SEQ ID NO: 1707756 - DNA, 15 bp, Homo sapiens
tctaaagtcaaagta

SEQ ID NO: 1707757 - DNA, 15 bp, Homo sapiens
ctaaagtcaaagtaa

SEQ ID NO: 1707758 - DNA, 15 bp, Homo sapiens
taaagtcaaagtaaa

SEQ ID NO: 1707759 - DNA, 15 bp, Homo sapiens
aaagtcaaagtaaaa

SEQ ID NO: 1707760 - DNA, 15 bp, Homo sapiens
aagtcaaagtaaaag

SEQ ID NO: 1707761 - DNA, 15 bp, Homo sapiens
agtcaaagtaaaaga

SEQ ID NO: 1707762 - DNA, 15 bp, Homo sapiens
gtcaaagtaaaagaa

SEQ ID NO: 1707763 - DNA, 15 bp, Homo sapiens
tcaaagtaaaagaaa

SEQ ID NO: 1707764 - DNA, 15 bp, Homo sapiens
caaagtaaaagaaag

SEQ ID NO: 1707765 - DNA, 15 bp, Homo sapiens
aaagtaaaagaaaga

SEQ ID NO: 1707766 - DNA, 15 bp, Homo sapiens
aagtaaaagaaagaa

SEQ ID NO: 1707767 - DNA, 15 bp, Homo sapiens
agtaaaagaaagaat

SEQ ID NO: 1707768 - DNA, 15 bp, Homo sapiens
gtaaaagaaagaatt

SEQ ID NO: 1707769 - DNA, 15 bp, Homo sapiens
taaaagaaagaattt

SEQ ID NO: 1707770 - DNA, 15 bp, Homo sapiens
aaaagaaagaatttt

SEQ ID NO: 1707771 - DNA, 15 bp, Homo sapiens
aaagaaagaattttt

SEQ ID NO: 1707772 - DNA, 15 bp, Homo sapiens
aagaaagaattttta

SEQ ID NO: 1707773 - DNA, 15 bp, Homo sapiens
agaaagaatttttaa

SEQ ID NO: 1707774 - DNA, 15 bp, Homo sapiens
gaaagaatttttaaa

SEQ ID NO: 1707775 - DNA, 15 bp, Homo sapiens
aaagaatttttaaat

SEQ ID NO: 1707776 - DNA, 15 bp, Homo sapiens
aagaatttttaaatt

SEQ ID NO: 1707777 - DNA, 15 bp, Homo sapiens
gaatttttaaattag

SEQ ID NO: 1707778 - DNA, 15 bp, Homo sapiens
aatttttaaattagc

SEQ ID NO: 1707779 - DNA, 15 bp, Homo sapiens
atttttaaattagca

SEQ ID NO: 1707780 - DNA, 15 bp, Homo sapiens
tttttaaattagcaa

SEQ ID NO: 1707781 - DNA, 15 bp, Homo sapiens
ttttaaattagcaag

SEQ ID NO: 1707782 - DNA, 15 bp, Homo sapiens
tttaaattagcaaga

SEQ ID NO: 1707783 - DNA, 15 bp, Homo sapiens
ttaaattagcaagag

SEQ ID NO: 1707784 - DNA, 15 bp, Homo sapiens
taaattagcaagagt

SEQ ID NO: 1707785 - DNA, 15 bp, Homo sapiens
aaattagcaagagta

SEQ ID NO: 1707786 - DNA, 15 bp, Homo sapiens
aattagcaagagtaa

SEQ ID NO: 1707787 - DNA, 15 bp, Homo sapiens
attagcaagagtaaa

SEQ ID NO: 1707788 - DNA, 15 bp, Homo sapiens
ttagcaagagtaaag

SEQ ID NO: 1707789 - DNA, 15 bp, Homo sapiens
tagcaagagtaaagc

SEQ ID NO: 1707790 - DNA, 15 bp, Homo sapiens
agcaagagtaaagca

SEQ ID NO: 1707791 - DNA, 15 bp, Homo sapiens
gcaagagtaaagcat

SEQ ID NO: 1707792 - DNA, 15 bp, Homo sapiens
caagagtaaagcatc

SEQ ID NO: 1707793 - DNA, 15 bp, Homo sapiens
aagagtaaagcatct

SEQ ID NO: 1707794 - DNA, 15 bp, Homo sapiens
agagtaaagcatcta

SEQ ID NO: 1707795 - DNA, 15 bp, Homo sapiens
gagtaaagcatctac

SEQ ID NO: 1707796 - DNA, 15 bp, Homo sapiens
agtaaagcatctact

SEQ ID NO: 1707797 - DNA, 15 bp, Homo sapiens
gtaaagcatctactc

SEQ ID NO: 1707798 - DNA, 15 bp, Homo sapiens
taaagcatctactca

SEQ ID NO: 1707799 - DNA, 15 bp, Homo sapiens
aaagcatctactcat

SEQ ID NO: 1707800 - DNA, 15 bp, Homo sapiens
aagcatctactcatc

SEQ ID NO: 1707801 - DNA, 15 bp, Homo sapiens
agcatctactcatct

SEQ ID NO: 1707802 - DNA, 15 bp, Homo sapiens
gcatctactcatcta

SEQ ID NO: 1707803 - DNA, 15 bp, Homo sapiens
catctactcatctat

SEQ ID NO: 1707804 - DNA, 15 bp, Homo sapiens
atctactcatctata

SEQ ID NO: 1707805 - DNA, 15 bp, Homo sapiens
tctactcatctataa

SEQ ID NO: 1707806 - DNA, 15 bp, Homo sapiens
ctactcatctataaa

SEQ ID NO: 1707807 - DNA, 15 bp, Homo sapiens
tactcatctataaag

SEQ ID NO: 1707808 - DNA, 15 bp, Homo sapiens
actcatctataaagg

SEQ ID NO: 1707809 - DNA, 15 bp, Homo sapiens
ctcatctataaagga

SEQ ID NO: 1707810 - DNA, 15 bp, Homo sapiens
tcatctataaaggaa

SEQ ID NO: 1707811 - DNA, 15 bp, Homo sapiens
catctataaaggaaa

SEQ ID NO: 1707812 - DNA, 15 bp, Homo sapiens
atctataaaggaaac

SEQ ID NO: 1707813 - DNA, 15 bp, Homo sapiens
tctataaaggaaacc

SEQ ID NO: 1707814 - DNA, 15 bp, Homo sapiens
ctataaaggaaaccc

SEQ ID NO: 1707815 - DNA, 15 bp, Homo sapiens
tataaaggaaacccc

SEQ ID NO: 1707816 - DNA, 15 bp, Homo sapiens
ataaaggaaacccca

SEQ ID NO: 1707817 - DNA, 15 bp, Homo sapiens
taaaggaaaccccat

SEQ ID NO: 1707818 - DNA, 15 bp, Homo sapiens
aaaggaaaccccatc

SEQ ID NO: 1707819 - DNA, 15 bp, Homo sapiens
aaggaaaccccatca

SEQ ID NO: 1707820 - DNA, 15 bp, Homo sapiens
aggaaaccccatcag

SEQ ID NO: 1707821 - DNA, 15 bp, Homo sapiens
ggaaaccccatcaga

SEQ ID NO: 1707822 - DNA, 15 bp, Homo sapiens
gaaaccccatcagac

SEQ ID NO: 1707823 - DNA, 15 bp, Homo sapiens
aaaccccatcagact

SEQ ID NO: 1707824 - DNA, 15 bp, Homo sapiens
aaccccatcagacta

SEQ ID NO: 1707825 - DNA, 15 bp, Homo sapiens
accccatcagactaa

SEQ ID NO: 1707826 - DNA, 15 bp, Homo sapiens
ccccatcagactaat

SEQ ID NO: 1707827 - DNA, 15 bp, Homo sapiens
cccatcagactaata

SEQ ID NO: 1707828 - DNA, 15 bp, Homo sapiens
ccatcagactaatag

SEQ ID NO: 1707829 - DNA, 15 bp, Homo sapiens
catcagactaatagc

SEQ ID NO: 1707830 - DNA, 15 bp, Homo sapiens
atcagactaatagca

SEQ ID NO: 1707831 - DNA, 15 bp, Homo sapiens
tcagactaatagcag

SEQ ID NO: 1707832 - DNA, 15 bp, Homo sapiens
cagactaatagcaga

SEQ ID NO: 1707833 - DNA, 15 bp, Homo sapiens
agactaatagcagac

SEQ ID NO: 1707834 - DNA, 15 bp, Homo sapiens
gactaatagcagact

SEQ ID NO: 1707835 - DNA, 15 bp, Homo sapiens
actaatagcagactt

SEQ ID NO: 1707836 - DNA, 15 bp, Homo sapiens
ctaatagcagacttt

SEQ ID NO: 1707837 - DNA, 15 bp, Homo sapiens
taatagcagactttt

SEQ ID NO: 1707838 - DNA, 15 bp, Homo sapiens
aatagcagacttttc

SEQ ID NO: 1707839 - DNA, 15 bp, Homo sapiens
atagcagacttttca

SEQ ID NO: 1707840 - DNA, 15 bp, Homo sapiens
tagcagacttttcag

SEQ ID NO: 1707841 - DNA, 15 bp, Homo sapiens
agcagacttttcagc

SEQ ID NO: 1707842 - DNA, 15 bp, Homo sapiens
gcagacttttcagca

SEQ ID NO: 1707843 - DNA, 15 bp, Homo sapiens
cagacttttcagcag

SEQ ID NO: 1707844 - DNA, 15 bp, Homo sapiens
agacttttcagcaga

SEQ ID NO: 1707845 - DNA, 15 bp, Homo sapiens
gacttttcagcagaa

SEQ ID NO: 1707846 - DNA, 15 bp, Homo sapiens
acttttcagcagaaa

SEQ ID NO: 1707847 - DNA, 15 bp, Homo sapiens
cttttcagcagaaac

SEQ ID NO: 1707848 - DNA, 15 bp, Homo sapiens
ttttcagcagaaacc

SEQ ID NO: 1707849 - DNA, 15 bp, Homo sapiens
tttcagcagaaacct

SEQ ID NO: 1707850 - DNA, 15 bp, Homo sapiens
ttcagcagaaacctt

SEQ ID NO: 1707851 - DNA, 15 bp, Homo sapiens
tcagcagaaacctta

SEQ ID NO: 1707852 - DNA, 15 bp, Homo sapiens
cagcagaaaccttac

SEQ ID NO: 1707853 - DNA, 15 bp, Homo sapiens
agcagaaaccttaca

SEQ ID NO: 1707854 - DNA, 15 bp, Homo sapiens
gcagaaaccttacag

SEQ ID NO: 1707855 - DNA, 15 bp, Homo sapiens
cagaaaccttacagg

SEQ ID NO: 1707856 - DNA, 15 bp, Homo sapiens
agaaaccttacaggc

SEQ ID NO: 1707857 - DNA, 15 bp, Homo sapiens
gaaaccttacaggcc

SEQ ID NO: 1707858 - DNA, 15 bp, Homo sapiens
aaaccttacaggcca

SEQ ID NO: 1707859 - DNA, 15 bp, Homo sapiens
aaccttacaggccag

SEQ ID NO: 1707860 - DNA, 15 bp, Homo sapiens
accttacaggccaga

SEQ ID NO: 1707861 - DNA, 15 bp, Homo sapiens
ccttacaggccagaa

SEQ ID NO: 1707862 - DNA, 15 bp, Homo sapiens
cttacaggccagaag

SEQ ID NO: 1707863 - DNA, 15 bp, Homo sapiens
ttacaggccagaaga

SEQ ID NO: 1707864 - DNA, 15 bp, Homo sapiens
tacaggccagaagag

SEQ ID NO: 1707865 - DNA, 15 bp, Homo sapiens
acaggccagaagaga

SEQ ID NO: 1707866 - DNA, 15 bp, Homo sapiens
caggccagaagagaa

SEQ ID NO: 1707867 - DNA, 15 bp, Homo sapiens
aggccagaagagaaa

SEQ ID NO: 1707868 - DNA, 15 bp, Homo sapiens
ggccagaagagaaag

SEQ ID NO: 1707869 - DNA, 15 bp, Homo sapiens
gccagaagagaaaga

SEQ ID NO: 1707870 - DNA, 15 bp, Homo sapiens
ccagaagagaaagag

SEQ ID NO: 1707871 - DNA, 15 bp, Homo sapiens
cagaagagaaagaga

SEQ ID NO: 1707872 - DNA, 15 bp, Homo sapiens
agaagagaaagagat

SEQ ID NO: 1707873 - DNA, 15 bp, Homo sapiens
gaagagaaagagatg

SEQ ID NO: 1707874 - DNA, 15 bp, Homo sapiens
aagagaaagagatgg

SEQ ID NO: 1707875 - DNA, 15 bp, Homo sapiens
agagaaagagatggc

SEQ ID NO: 1707876 - DNA, 15 bp, Homo sapiens
gagaaagagatggca

SEQ ID NO: 1707877 - DNA, 15 bp, Homo sapiens
agaaagagatggcat

SEQ ID NO: 1707878 - DNA, 15 bp, Homo sapiens
gaaagagatggcatt

SEQ ID NO: 1707879 - DNA, 15 bp, Homo sapiens
aaagagatggcattt

SEQ ID NO: 1707880 - DNA, 15 bp, Homo sapiens
aagagatggcatttt

SEQ ID NO: 1707881 - DNA, 15 bp, Homo sapiens
agagatggcattttc

SEQ ID NO: 1707882 - DNA, 15 bp, Homo sapiens
gagatggcattttca

SEQ ID NO: 1707883 - DNA, 15 bp, Homo sapiens
agatggcattttcaa

SEQ ID NO: 1707884 - DNA, 15 bp, Homo sapiens
gatggcattttcaaa

SEQ ID NO: 1707885 - DNA, 15 bp, Homo sapiens
atggcattttcaaag

SEQ ID NO: 1707886 - DNA, 15 bp, Homo sapiens
tggcattttcaaagt

SEQ ID NO: 1707887 - DNA, 15 bp, Homo sapiens
ggcattttcaaagtg

SEQ ID NO: 1707888 - DNA, 15 bp, Homo sapiens
gcattttcaaagtgc

SEQ ID NO: 1707889 - DNA, 15 bp, Homo sapiens
cattttcaaagtgct

SEQ ID NO: 1707890 - DNA, 15 bp, Homo sapiens
attttcaaagtgctg

SEQ ID NO: 1707891 - DNA, 15 bp, Homo sapiens
ttttcaaagtgctga

SEQ ID NO: 1707892 - DNA, 15 bp, Homo sapiens
tttcaaagtgctgaa

SEQ ID NO: 1707893 - DNA, 15 bp, Homo sapiens
ttcaaagtgctgaaa

SEQ ID NO: 1707894 - DNA, 15 bp, Homo sapiens
tcaaagtgctgaaag

SEQ ID NO: 1707895 - DNA, 15 bp, Homo sapiens
caaagtgctgaaagg

SEQ ID NO: 1707896 - DNA, 15 bp, Homo sapiens
aaagtgctgaaagga

SEQ ID NO: 1707897 - DNA, 15 bp, Homo sapiens
aagtgctgaaaggaa

SEQ ID NO: 1707898 - DNA, 15 bp, Homo sapiens
agtgctgaaaggaaa

SEQ ID NO: 1707899 - DNA, 15 bp, Homo sapiens
gtgctgaaaggaaaa

SEQ ID NO: 1707900 - DNA, 15 bp, Homo sapiens
tgctgaaaggaaaaa

SEQ ID NO: 1707901 - DNA, 15 bp, Homo sapiens
gctgaaaggaaaaaa

SEQ ID NO: 1707902 - DNA, 15 bp, Homo sapiens
ctgaaaggaaaaaaa

SEQ ID NO: 1707903 - DNA, 15 bp, Homo sapiens
tgaaaggaaaaaaaa

SEQ ID NO: 1707904 - DNA, 15 bp, Homo sapiens
gaaaggaaaaaaaaa

SEQ ID NO: 1707905 - DNA, 15 bp, Homo sapiens
aaggaaaaaaaaaac

SEQ ID NO: 1707906 - DNA, 15 bp, Homo sapiens
aggaaaaaaaaaact

SEQ ID NO: 1707907 - DNA, 15 bp, Homo sapiens
ggaaaaaaaaaactg

SEQ ID NO: 1707908 - DNA, 15 bp, Homo sapiens
gaaaaaaaaaactgt

SEQ ID NO: 1707909 - DNA, 15 bp, Homo sapiens
aaaaaaaaaactgtc

SEQ ID NO: 1707910 - DNA, 15 bp, Homo sapiens
aaaaaaaaactgtca

SEQ ID NO: 1707911 - DNA, 15 bp, Homo sapiens
aaaaaaaactgtcag

SEQ ID NO: 1707912 - DNA, 15 bp, Homo sapiens
aaaaaaactgtcagc

SEQ ID NO: 1707913 - DNA, 15 bp, Homo sapiens
aaaaaactgtcagcc

SEQ ID NO: 1707914 - DNA, 15 bp, Homo sapiens
aaaaactgtcagcca

SEQ ID NO: 1707915 - DNA, 15 bp, Homo sapiens
aaaactgtcagccaa

SEQ ID NO: 1707916 - DNA, 15 bp, Homo sapiens
aaactgtcagccaag

SEQ ID NO: 1707917 - DNA, 15 bp, Homo sapiens
aactgtcagccaaga

SEQ ID NO: 1707918 - DNA, 15 bp, Homo sapiens
actgtcagccaagaa

SEQ ID NO: 1707919 - DNA, 15 bp, Homo sapiens
ctgtcagccaagaat

SEQ ID NO: 1707920 - DNA, 15 bp, Homo sapiens
tgtcagccaagaatt

SEQ ID NO: 1707921 - DNA, 15 bp, Homo sapiens
gtcagccaagaattt

SEQ ID NO: 1707922 - DNA, 15 bp, Homo sapiens
gccaagaattttgtg

SEQ ID NO: 1707923 - DNA, 15 bp, Homo sapiens
ccaagaattttgtgt

SEQ ID NO: 1707924 - DNA, 15 bp, Homo sapiens
caagaattttgtgtc

SEQ ID NO: 1707925 - DNA, 15 bp, Homo sapiens
aagaattttgtgtcc

SEQ ID NO: 1707926 - DNA, 15 bp, Homo sapiens
agaattttgtgtcct

SEQ ID NO: 1707927 - DNA, 15 bp, Homo sapiens
gaattttgtgtcctg

SEQ ID NO: 1707928 - DNA, 15 bp, Homo sapiens
aattttgtgtcctgc

SEQ ID NO: 1707929 - DNA, 15 bp, Homo sapiens
attttgtgtcctgcc

SEQ ID NO: 1707930 - DNA, 15 bp, Homo sapiens
ttttgtgtcctgcca

SEQ ID NO: 1707931 - DNA, 15 bp, Homo sapiens
tttgtgtcctgccag

SEQ ID NO: 1707932 - DNA, 15 bp, Homo sapiens
ttgtgtcctgccaga

SEQ ID NO: 1707933 - DNA, 15 bp, Homo sapiens
tgtgtcctgccagaa

SEQ ID NO: 1707934 - DNA, 15 bp, Homo sapiens
gtgtcctgccagaat

SEQ ID NO: 1707935 - DNA, 15 bp, Homo sapiens
tgtcctgccagaata

SEQ ID NO: 1707936 - DNA, 15 bp, Homo sapiens
gtcctgccagaataa

SEQ ID NO: 1707937 - DNA, 15 bp, Homo sapiens
tcctgccagaataag

SEQ ID NO: 1707938 - DNA, 15 bp, Homo sapiens
cctgccagaataagc

SEQ ID NO: 1707939 - DNA, 15 bp, Homo sapiens
ctgccagaataagct

SEQ ID NO: 1707940 - DNA, 15 bp, Homo sapiens
tgccagaataagctt

SEQ ID NO: 1707941 - DNA, 15 bp, Homo sapiens
gccagaataagcttc

SEQ ID NO: 1707942 - DNA, 15 bp, Homo sapiens
ccagaataagcttca

SEQ ID NO: 1707943 - DNA, 15 bp, Homo sapiens
cagaataagcttcat

SEQ ID NO: 1707944 - DNA, 15 bp, Homo sapiens
agaataagcttcata

SEQ ID NO: 1707945 - DNA, 15 bp, Homo sapiens
gaataagcttcataa

SEQ ID NO: 1707946 - DNA, 15 bp, Homo sapiens
aataagcttcataag

SEQ ID NO: 1707947 - DNA, 15 bp, Homo sapiens
ataagcttcataagt

SEQ ID NO: 1707948 - DNA, 15 bp, Homo sapiens
taagcttcataagtg

SEQ ID NO: 1707949 - DNA, 15 bp, Homo sapiens
aagcttcataagtga

SEQ ID NO: 1707950 - DNA, 15 bp, Homo sapiens
agcttcataagtgaa

SEQ ID NO: 1707951 - DNA, 15 bp, Homo sapiens
gcttcataagtgaag

SEQ ID NO: 1707952 - DNA, 15 bp, Homo sapiens
cttcataagtgaagg

SEQ ID NO: 1707953 - DNA, 15 bp, Homo sapiens
ttcataagtgaagga

SEQ ID NO: 1707954 - DNA, 15 bp, Homo sapiens
tcataagtgaaggag

SEQ ID NO: 1707955 - DNA, 15 bp, Homo sapiens
cataagtgaaggaga

SEQ ID NO: 1707956 - DNA, 15 bp, Homo sapiens
ataagtgaaggagag

SEQ ID NO: 1707957 - DNA, 15 bp, Homo sapiens
taagtgaaggagaga

SEQ ID NO: 1707958 - DNA, 15 bp, Homo sapiens
aagtgaaggagagat

SEQ ID NO: 1707959 - DNA, 15 bp, Homo sapiens
agtgaaggagagata

SEQ ID NO: 1707960 - DNA, 15 bp, Homo sapiens
gtgaaggagagataa

SEQ ID NO: 1707961 - DNA, 15 bp, Homo sapiens
tgaaggagagataaa

SEQ ID NO: 1707962 - DNA, 15 bp, Homo sapiens
gaaggagagataaag

SEQ ID NO: 1707963 - DNA, 15 bp, Homo sapiens
aaggagagataaagt

SEQ ID NO: 1707964 - DNA, 15 bp, Homo sapiens
aggagagataaagtt

SEQ ID NO: 1707965 - DNA, 15 bp, Homo sapiens
ggagagataaagttc

SEQ ID NO: 1707966 - DNA, 15 bp, Homo sapiens
gagagataaagttct

SEQ ID NO: 1707967 - DNA, 15 bp, Homo sapiens
agagataaagttctt

SEQ ID NO: 1707968 - DNA, 15 bp, Homo sapiens
gagataaagttcttc

SEQ ID NO: 1707969 - DNA, 15 bp, Homo sapiens
agataaagttcttcc

SEQ ID NO: 1707970 - DNA, 15 bp, Homo sapiens
gataaagttcttccc

SEQ ID NO: 1707971 - DNA, 15 bp, Homo sapiens
ataaagttcttccca

SEQ ID NO: 1707972 - DNA, 15 bp, Homo sapiens
taaagttcttcccag

SEQ ID NO: 1707973 - DNA, 15 bp, Homo sapiens
aaagttcttcccaga

SEQ ID NO: 1707974 - DNA, 15 bp, Homo sapiens
aagttcttcccagac

SEQ ID NO: 1707975 - DNA, 15 bp, Homo sapiens
agttcttcccagaca

SEQ ID NO: 1707976 - DNA, 15 bp, Homo sapiens
gttcttcccagacaa

SEQ ID NO: 1707977 - DNA, 15 bp, Homo sapiens
ttcttcccagacaag

SEQ ID NO: 1707978 - DNA, 15 bp, Homo sapiens
tcttcccagacaagg

SEQ ID NO: 1707979 - DNA, 15 bp, Homo sapiens
cttcccagacaagga

SEQ ID NO: 1707980 - DNA, 15 bp, Homo sapiens
ttcccagacaaggaa

SEQ ID NO: 1707981 - DNA, 15 bp, Homo sapiens
tcccagacaaggaaa

SEQ ID NO: 1707982 - DNA, 15 bp, Homo sapiens
cccagacaaggaaac

SEQ ID NO: 1707983 - DNA, 15 bp, Homo sapiens
ccagacaaggaaaca

SEQ ID NO: 1707984 - DNA, 15 bp, Homo sapiens
cagacaaggaaacat

SEQ ID NO: 1707985 - DNA, 15 bp, Homo sapiens
agacaaggaaacatt

SEQ ID NO: 1707986 - DNA, 15 bp, Homo sapiens
gacaaggaaacattt

SEQ ID NO: 1707987 - DNA, 15 bp, Homo sapiens
acaaggaaacattta

SEQ ID NO: 1707988 - DNA, 15 bp, Homo sapiens
caaggaaacatttag

SEQ ID NO: 1707989 - DNA, 15 bp, Homo sapiens
aaggaaacatttaga

SEQ ID NO: 1707990 - DNA, 15 bp, Homo sapiens
aggaaacatttagaa

SEQ ID NO: 1707991 - DNA, 15 bp, Homo sapiens
ggaaacatttagaaa

SEQ ID NO: 1707992 - DNA, 15 bp, Homo sapiens
aaacatttagaaaaa

SEQ ID NO: 1707993 - DNA, 15 bp, Homo sapiens
aacatttagaaaaat

SEQ ID NO: 1707994 - DNA, 15 bp, Homo sapiens
acatttagaaaaatt

SEQ ID NO: 1707995 - DNA, 15 bp, Homo sapiens
catttagaaaaatta

SEQ ID NO: 1707996 - DNA, 15 bp, Homo sapiens
atttagaaaaattat

SEQ ID NO: 1707997 - DNA, 15 bp, Homo sapiens
tttagaaaaattatc

SEQ ID NO: 1707998 - DNA, 15 bp, Homo sapiens
ttagaaaaattatca

SEQ ID NO: 1707999 - DNA, 15 bp, Homo sapiens
tagaaaaattatcac

SEQ ID NO: 1708000 - DNA, 15 bp, Homo sapiens
agaaaaattatcacc

SEQ ID NO: 1708001 - DNA, 15 bp, Homo sapiens
gaaaaattatcacca

SEQ ID NO: 1708002 - DNA, 15 bp, Homo sapiens
aaaaattatcaccac

SEQ ID NO: 1708003 - DNA, 15 bp, Homo sapiens
aaaattatcaccact

SEQ ID NO: 1708004 - DNA, 15 bp, Homo sapiens
aaattatcaccacta

SEQ ID NO: 1708005 - DNA, 15 bp, Homo sapiens
aattatcaccactag

SEQ ID NO: 1708006 - DNA, 15 bp, Homo sapiens
attatcaccactaga

SEQ ID NO: 1708007 - DNA, 15 bp, Homo sapiens
ttatcaccactagat

SEQ ID NO: 1708008 - DNA, 15 bp, Homo sapiens
tatcaccactagatt

SEQ ID NO: 1708009 - DNA, 15 bp, Homo sapiens
atcaccactagattg

SEQ ID NO: 1708010 - DNA, 15 bp, Homo sapiens
tcaccactagattgg

SEQ ID NO: 1708011 - DNA, 15 bp, Homo sapiens
caccactagattgga

SEQ ID NO: 1708012 - DNA, 15 bp, Homo sapiens
accactagattggac

SEQ ID NO: 1708013 - DNA, 15 bp, Homo sapiens
ccactagattggacc

SEQ ID NO: 1708014 - DNA, 15 bp, Homo sapiens
cactagattggacct

SEQ ID NO: 1708015 - DNA, 15 bp, Homo sapiens
actagattggaccta

SEQ ID NO: 1708016 - DNA, 15 bp, Homo sapiens
ctagattggacctac

SEQ ID NO: 1708017 - DNA, 15 bp, Homo sapiens
tagattggacctaca

SEQ ID NO: 1708018 - DNA, 15 bp, Homo sapiens
agattggacctacag

SEQ ID NO: 1708019 - DNA, 15 bp, Homo sapiens
gattggacctacagg

SEQ ID NO: 1708020 - DNA, 15 bp, Homo sapiens
attggacctacagga

SEQ ID NO: 1708021 - DNA, 15 bp, Homo sapiens
ttggacctacaggaa

SEQ ID NO: 1708022 - DNA, 15 bp, Homo sapiens
tggacctacaggaaa

SEQ ID NO: 1708023 - DNA, 15 bp, Homo sapiens
ggacctacaggaaat

SEQ ID NO: 1708024 - DNA, 15 bp, Homo sapiens
gacctacaggaaatg

SEQ ID NO: 1708025 - DNA, 15 bp, Homo sapiens
acctacaggaaatgc

SEQ ID NO: 1708026 - DNA, 15 bp, Homo sapiens
cctacaggaaatgct

SEQ ID NO: 1708027 - DNA, 15 bp, Homo sapiens
ctacaggaaatgctc

SEQ ID NO: 1708028 - DNA, 15 bp, Homo sapiens
tacaggaaatgctca

SEQ ID NO: 1708029 - DNA, 15 bp, Homo sapiens
acaggaaatgctcaa

SEQ ID NO: 1708030 - DNA, 15 bp, Homo sapiens
caggaaatgctcaaa

SEQ ID NO: 1708031 - DNA, 15 bp, Homo sapiens
aggaaatgctcaaag

SEQ ID NO: 1708032 - DNA, 15 bp, Homo sapiens
ggaaatgctcaaagg

SEQ ID NO: 1708033 - DNA, 15 bp, Homo sapiens
gaaatgctcaaaggg

SEQ ID NO: 1708034 - DNA, 15 bp, Homo sapiens
aaatgctcaaagggg

SEQ ID NO: 1708035 - DNA, 15 bp, Homo sapiens
aatgctcaaaggggt

SEQ ID NO: 1708036 - DNA, 15 bp, Homo sapiens
atgctcaaaggggtc

SEQ ID NO: 1708037 - DNA, 15 bp, Homo sapiens
tgctcaaaggggtct

SEQ ID NO: 1708038 - DNA, 15 bp, Homo sapiens
gctcaaaggggtctt

SEQ ID NO: 1708039 - DNA, 15 bp, Homo sapiens
ctcaaaggggtctta

SEQ ID NO: 1708040 - DNA, 15 bp, Homo sapiens
tcaaaggggtcttaa

SEQ ID NO: 1708041 - DNA, 15 bp, Homo sapiens
caaaggggtcttaaa

SEQ ID NO: 1708042 - DNA, 15 bp, Homo sapiens
aaaggggtcttaaac

SEQ ID NO: 1708043 - DNA, 15 bp, Homo sapiens
aaggggtcttaaaca

SEQ ID NO: 1708044 - DNA, 15 bp, Homo sapiens
aggggtcttaaacat

SEQ ID NO: 1708045 - DNA, 15 bp, Homo sapiens
ggggtcttaaacatg

SEQ ID NO: 1708046 - DNA, 15 bp, Homo sapiens
gggtcttaaacatgg

SEQ ID NO: 1708047 - DNA, 15 bp, Homo sapiens
ggtcttaaacatgga

SEQ ID NO: 1708048 - DNA, 15 bp, Homo sapiens
gtcttaaacatggaa

SEQ ID NO: 1708049 - DNA, 15 bp, Homo sapiens
tcttaaacatggaaa

SEQ ID NO: 1708050 - DNA, 15 bp, Homo sapiens
cttaaacatggaaac

SEQ ID NO: 1708051 - DNA, 15 bp, Homo sapiens
ttaaacatggaaaca

SEQ ID NO: 1708052 - DNA, 15 bp, Homo sapiens
taaacatggaaacaa

SEQ ID NO: 1708053 - DNA, 15 bp, Homo sapiens
aaacatggaaacaaa

SEQ ID NO: 1708054 - DNA, 15 bp, Homo sapiens
aacatggaaacaaaa

SEQ ID NO: 1708055 - DNA, 15 bp, Homo sapiens
acatggaaacaaaag

SEQ ID NO: 1708056 - DNA, 15 bp, Homo sapiens
catggaaacaaaagg

SEQ ID NO: 1708057 - DNA, 15 bp, Homo sapiens
atggaaacaaaaggt

SEQ ID NO: 1708058 - DNA, 15 bp, Homo sapiens
tggaaacaaaaggtc

SEQ ID NO: 1708059 - DNA, 15 bp, Homo sapiens
ggaaacaaaaggtca

SEQ ID NO: 1708060 - DNA, 15 bp, Homo sapiens
gaaacaaaaggtcat

SEQ ID NO: 1708061 - DNA, 15 bp, Homo sapiens
aaacaaaaggtcatt

SEQ ID NO: 1708062 - DNA, 15 bp, Homo sapiens
aacaaaaggtcattg

SEQ ID NO: 1708063 - DNA, 15 bp, Homo sapiens
acaaaaggtcattgc

SEQ ID NO: 1708064 - DNA, 15 bp, Homo sapiens
caaaaggtcattgct

SEQ ID NO: 1708065 - DNA, 15 bp, Homo sapiens
aaaaggtcattgctc

SEQ ID NO: 1708066 - DNA, 15 bp, Homo sapiens
aaaggtcattgctca

SEQ ID NO: 1708067 - DNA, 15 bp, Homo sapiens
aaggtcattgctcac

SEQ ID NO: 1708068 - DNA, 15 bp, Homo sapiens
aggtcattgctcacc

SEQ ID NO: 1708069 - DNA, 15 bp, Homo sapiens
ggtcattgctcacca

SEQ ID NO: 1708070 - DNA, 15 bp, Homo sapiens
gtcattgctcaccat

SEQ ID NO: 1708071 - DNA, 15 bp, Homo sapiens
tcattgctcaccatc

SEQ ID NO: 1708072 - DNA, 15 bp, Homo sapiens
cattgctcaccatca

SEQ ID NO: 1708073 - DNA, 15 bp, Homo sapiens
attgctcaccatcac

SEQ ID NO: 1708074 - DNA, 15 bp, Homo sapiens
ttgctcaccatcaca

SEQ ID NO: 1708075 - DNA, 15 bp, Homo sapiens
tgctcaccatcacaa

SEQ ID NO: 1708076 - DNA, 15 bp, Homo sapiens
gctcaccatcacaac

SEQ ID NO: 1708077 - DNA, 15 bp, Homo sapiens
ctcaccatcacaaca

SEQ ID NO: 1708078 - DNA, 15 bp, Homo sapiens
tcaccatcacaacaa

SEQ ID NO: 1708079 - DNA, 15 bp, Homo sapiens
caccatcacaacaac

SEQ ID NO: 1708080 - DNA, 15 bp, Homo sapiens
accatcacaacaaca

SEQ ID NO: 1708081 - DNA, 15 bp, Homo sapiens
ccatcacaacaacac

SEQ ID NO: 1708082 - DNA, 15 bp, Homo sapiens
catcacaacaacaca

SEQ ID NO: 1708083 - DNA, 15 bp, Homo sapiens
atcacaacaacacat

SEQ ID NO: 1708084 - DNA, 15 bp, Homo sapiens
tcacaacaacacatt

SEQ ID NO: 1708085 - DNA, 15 bp, Homo sapiens
cacaacaacacattg

SEQ ID NO: 1708086 - DNA, 15 bp, Homo sapiens
acaacaacacattga

SEQ ID NO: 1708087 - DNA, 15 bp, Homo sapiens
caacaacacattgaa

SEQ ID NO: 1708088 - DNA, 15 bp, Homo sapiens
aacaacacattgaaa

SEQ ID NO: 1708089 - DNA, 15 bp, Homo sapiens
acaacacattgaaat

SEQ ID NO: 1708090 - DNA, 15 bp, Homo sapiens
caacacattgaaata

SEQ ID NO: 1708091 - DNA, 15 bp, Homo sapiens
aacacattgaaatat

SEQ ID NO: 1708092 - DNA, 15 bp, Homo sapiens
acacattgaaatata

SEQ ID NO: 1708093 - DNA, 15 bp, Homo sapiens
cacattgaaatataa

SEQ ID NO: 1708094 - DNA, 15 bp, Homo sapiens
acattgaaatataaa

SEQ ID NO: 1708095 - DNA, 15 bp, Homo sapiens
cattgaaatataaaa

SEQ ID NO: 1708096 - DNA, 15 bp, Homo sapiens
attgaaatataaaac

SEQ ID NO: 1708097 - DNA, 15 bp, Homo sapiens
ttgaaatataaaact

SEQ ID NO: 1708098 - DNA, 15 bp, Homo sapiens
tgaaatataaaactc

SEQ ID NO: 1708099 - DNA, 15 bp, Homo sapiens
gaaatataaaactca

SEQ ID NO: 1708100 - DNA, 15 bp, Homo sapiens
aaatataaaactcac

SEQ ID NO: 1708101 - DNA, 15 bp, Homo sapiens
atataaaactcacag

SEQ ID NO: 1708102 - DNA, 15 bp, Homo sapiens
tataaaactcacagt

SEQ ID NO: 1708103 - DNA, 15 bp, Homo sapiens
ataaaactcacagtt

SEQ ID NO: 1708104 - DNA, 15 bp, Homo sapiens
taaaactcacagttc

SEQ ID NO: 1708105 - DNA, 15 bp, Homo sapiens
aaaactcacagttca

SEQ ID NO: 1708106 - DNA, 15 bp, Homo sapiens
aaactcacagttcat

SEQ ID NO: 1708107 - DNA, 15 bp, Homo sapiens
aactcacagttcata

SEQ ID NO: 1708108 - DNA, 15 bp, Homo sapiens
actcacagttcatat

SEQ ID NO: 1708109 - DNA, 15 bp, Homo sapiens
ctcacagttcatata

SEQ ID NO: 1708110 - DNA, 15 bp, Homo sapiens
tcacagttcatataa

SEQ ID NO: 1708111 - DNA, 15 bp, Homo sapiens
cacagttcatataaa

SEQ ID NO: 1708112 - DNA, 15 bp, Homo sapiens
acagttcatataaaa

SEQ ID NO: 1708113 - DNA, 15 bp, Homo sapiens
cagttcatataaaat

SEQ ID NO: 1708114 - DNA, 15 bp, Homo sapiens
agttcatataaaata

SEQ ID NO: 1708115 - DNA, 15 bp, Homo sapiens
gttcatataaaataa

SEQ ID NO: 1708116 - DNA, 15 bp, Homo sapiens
tcatataaaataatc

SEQ ID NO: 1708117 - DNA, 15 bp, Homo sapiens
catataaaataatca

SEQ ID NO: 1708118 - DNA, 15 bp, Homo sapiens
atataaaataatcac

SEQ ID NO: 1708119 - DNA, 15 bp, Homo sapiens
tataaaataatcaca

SEQ ID NO: 1708120 - DNA, 15 bp, Homo sapiens
ataaaataatcacac

SEQ ID NO: 1708121 - DNA, 15 bp, Homo sapiens
taaaataatcacaca

SEQ ID NO: 1708122 - DNA, 15 bp, Homo sapiens
aaaataatcacacaa

SEQ ID NO: 1708123 - DNA, 15 bp, Homo sapiens
aaataatcacacaag

SEQ ID NO: 1708124 - DNA, 15 bp, Homo sapiens
aataatcacacaagg

SEQ ID NO: 1708125 - DNA, 15 bp, Homo sapiens
ataatcacacaagga

SEQ ID NO: 1708126 - DNA, 15 bp, Homo sapiens
taatcacacaaggaa

SEQ ID NO: 1708127 - DNA, 15 bp, Homo sapiens
aatcacacaaggaag

SEQ ID NO: 1708128 - DNA, 15 bp, Homo sapiens
atcacacaaggaaga

SEQ ID NO: 1708129 - DNA, 15 bp, Homo sapiens
tcacacaaggaagaa

SEQ ID NO: 1708130 - DNA, 15 bp, Homo sapiens
cacacaaggaagaag

SEQ ID NO: 1708131 - DNA, 15 bp, Homo sapiens
acacaaggaagaaga

SEQ ID NO: 1708132 - DNA, 15 bp, Homo sapiens
cacaaggaagaagag

SEQ ID NO: 1708133 - DNA, 15 bp, Homo sapiens
acaaggaagaagaga

SEQ ID NO: 1708134 - DNA, 15 bp, Homo sapiens
caaggaagaagagaa

SEQ ID NO: 1708135 - DNA, 15 bp, Homo sapiens
aaggaagaagagaaa

SEQ ID NO: 1708136 - DNA, 15 bp, Homo sapiens
aggaagaagagaaaa

SEQ ID NO: 1708137 - DNA, 15 bp, Homo sapiens
ggaagaagagaaaaa

SEQ ID NO: 1708138 - DNA, 15 bp, Homo sapiens
gaagaagagaaaaaa

SEQ ID NO: 1708139 - DNA, 15 bp, Homo sapiens
aagaagagaaaaaaa

SEQ ID NO: 1708140 - DNA, 15 bp, Homo sapiens
agaagagaaaaaaat

SEQ ID NO: 1708141 - DNA, 15 bp, Homo sapiens
gaagagaaaaaaata

SEQ ID NO: 1708142 - DNA, 15 bp, Homo sapiens
aagagaaaaaaataa

SEQ ID NO: 1708143 - DNA, 15 bp, Homo sapiens
agagaaaaaaataaa

SEQ ID NO: 1708144 - DNA, 15 bp, Homo sapiens
gagaaaaaaataaaa

SEQ ID NO: 1708145 - DNA, 15 bp, Homo sapiens
agaaaaaaataaaat

SEQ ID NO: 1708146 - DNA, 15 bp, Homo sapiens
gaaaaaaataaaatg

SEQ ID NO: 1708147 - DNA, 15 bp, Homo sapiens
aaaaaaataaaatgg

SEQ ID NO: 1708148 - DNA, 15 bp, Homo sapiens
aaaaaataaaatggc

SEQ ID NO: 1708149 - DNA, 15 bp, Homo sapiens
aaaaataaaatggca

SEQ ID NO: 1708150 - DNA, 15 bp, Homo sapiens
aaaataaaatggcat

SEQ ID NO: 1708151 - DNA, 15 bp, Homo sapiens
aaataaaatggcata

SEQ ID NO: 1708152 - DNA, 15 bp, Homo sapiens
aataaaatggcataa

SEQ ID NO: 1708153 - DNA, 15 bp, Homo sapiens
ataaaatggcataac

SEQ ID NO: 1708154 - DNA, 15 bp, Homo sapiens
taaaatggcataaca

SEQ ID NO: 1708155 - DNA, 15 bp, Homo sapiens
aaaatggcataacag

SEQ ID NO: 1708156 - DNA, 15 bp, Homo sapiens
aaatggcataacaga

SEQ ID NO: 1708157 - DNA, 15 bp, Homo sapiens
aatggcataacagaa

SEQ ID NO: 1708158 - DNA, 15 bp, Homo sapiens
atggcataacagaat

SEQ ID NO: 1708159 - DNA, 15 bp, Homo sapiens
tggcataacagaatt

SEQ ID NO: 1708160 - DNA, 15 bp, Homo sapiens
ggcataacagaattt

SEQ ID NO: 1708161 - DNA, 15 bp, Homo sapiens
gcataacagaatttc

SEQ ID NO: 1708162 - DNA, 15 bp, Homo sapiens
cataacagaatttca

SEQ ID NO: 1708163 - DNA, 15 bp, Homo sapiens
ataacagaatttcat

SEQ ID NO: 1708164 - DNA, 15 bp, Homo sapiens
taacagaatttcatc

SEQ ID NO: 1708165 - DNA, 15 bp, Homo sapiens
aacagaatttcatca

SEQ ID NO: 1708166 - DNA, 15 bp, Homo sapiens
acagaatttcatcaa

SEQ ID NO: 1708167 - DNA, 15 bp, Homo sapiens
cagaatttcatcaaa

SEQ ID NO: 1708168 - DNA, 15 bp, Homo sapiens
agaatttcatcaaac

SEQ ID NO: 1708169 - DNA, 15 bp, Homo sapiens
gaatttcatcaaact

SEQ ID NO: 1708170 - DNA, 15 bp, Homo sapiens
aatttcatcaaacta

SEQ ID NO: 1708171 - DNA, 15 bp, Homo sapiens
atttcatcaaactac

SEQ ID NO: 1708172 - DNA, 15 bp, Homo sapiens
tttcatcaaactaca

SEQ ID NO: 1708173 - DNA, 15 bp, Homo sapiens
ttcatcaaactacaa

SEQ ID NO: 1708174 - DNA, 15 bp, Homo sapiens
tcatcaaactacaaa

SEQ ID NO: 1708175 - DNA, 15 bp, Homo sapiens
catcaaactacaaag

SEQ ID NO: 1708176 - DNA, 15 bp, Homo sapiens
atcaaactacaaaga

SEQ ID NO: 1708177 - DNA, 15 bp, Homo sapiens
tcaaactacaaagac

SEQ ID NO: 1708178 - DNA, 15 bp, Homo sapiens
caaactacaaagaca

SEQ ID NO: 1708179 - DNA, 15 bp, Homo sapiens
aaactacaaagacaa

SEQ ID NO: 1708180 - DNA, 15 bp, Homo sapiens
aactacaaagacaaa

SEQ ID NO: 1708181 - DNA, 15 bp, Homo sapiens
actacaaagacaaaa

SEQ ID NO: 1708182 - DNA, 15 bp, Homo sapiens
ctacaaagacaaaaa

SEQ ID NO: 1708183 - DNA, 15 bp, Homo sapiens
tacaaagacaaaaaa

SEQ ID NO: 1708184 - DNA, 15 bp, Homo sapiens
acaaagacaaaaaaa

SEQ ID NO: 1708185 - DNA, 15 bp, Homo sapiens
caaagacaaaaaaaa

SEQ ID NO: 1708186 - DNA, 15 bp, Homo sapiens
aaagacaaaaaaaac

SEQ ID NO: 1708187 - DNA, 15 bp, Homo sapiens
aagacaaaaaaaaca

SEQ ID NO: 1708188 - DNA, 15 bp, Homo sapiens
agacaaaaaaaacag

SEQ ID NO: 1708189 - DNA, 15 bp, Homo sapiens
gacaaaaaaaacaga

SEQ ID NO: 1708190 - DNA, 15 bp, Homo sapiens
acaaaaaaaacagaa

SEQ ID NO: 1708191 - DNA, 15 bp, Homo sapiens
caaaaaaaacagaaa

SEQ ID NO: 1708192 - DNA, 15 bp, Homo sapiens
aaaaaaaacagaaaa

SEQ ID NO: 1708193 - DNA, 15 bp, Homo sapiens
aaaaaaacagaaaaa

SEQ ID NO: 1708194 - DNA, 15 bp, Homo sapiens
aaaaaacagaaaaag

SEQ ID NO: 1708195 - DNA, 15 bp, Homo sapiens
aaaaacagaaaaaga

SEQ ID NO: 1708196 - DNA, 15 bp, Homo sapiens
aaaacagaaaaagag

SEQ ID NO: 1708197 - DNA, 15 bp, Homo sapiens
aaacagaaaaagagg

SEQ ID NO: 1708198 - DNA, 15 bp, Homo sapiens
aacagaaaaagaggg

SEQ ID NO: 1708199 - DNA, 15 bp, Homo sapiens
acagaaaaagaggga

SEQ ID NO: 1708200 - DNA, 15 bp, Homo sapiens
cagaaaaagagggaa

SEQ ID NO: 1708201 - DNA, 15 bp, Homo sapiens
agaaaaagagggaaa

SEQ ID NO: 1708202 - DNA, 15 bp, Homo sapiens
gaaaaagagggaaac

SEQ ID NO: 1708203 - DNA, 15 bp, Homo sapiens
aaaaagagggaaaca

SEQ ID NO: 1708204 - DNA, 15 bp, Homo sapiens
aaaagagggaaacaa

SEQ ID NO: 1708205 - DNA, 15 bp, Homo sapiens
aaagagggaaacaat

SEQ ID NO: 1708206 - DNA, 15 bp, Homo sapiens
aagagggaaacaatt

SEQ ID NO: 1708207 - DNA, 15 bp, Homo sapiens
agagggaaacaattt

SEQ ID NO: 1708208 - DNA, 15 bp, Homo sapiens
gagggaaacaattta

SEQ ID NO: 1708209 - DNA, 15 bp, Homo sapiens
agggaaacaatttat

SEQ ID NO: 1708210 - DNA, 15 bp, Homo sapiens
gggaaacaatttata

SEQ ID NO: 1708211 - DNA, 15 bp, Homo sapiens
ggaaacaatttataa

SEQ ID NO: 1708212 - DNA, 15 bp, Homo sapiens
gaaacaatttataaa

SEQ ID NO: 1708213 - DNA, 15 bp, Homo sapiens
aaacaatttataaaa

SEQ ID NO: 1708214 - DNA, 15 bp, Homo sapiens
aacaatttataaaat

SEQ ID NO: 1708215 - DNA, 15 bp, Homo sapiens
acaatttataaaata

SEQ ID NO: 1708216 - DNA, 15 bp, Homo sapiens
caatttataaaataa

SEQ ID NO: 1708217 - DNA, 15 bp, Homo sapiens
aatttataaaataac

SEQ ID NO: 1708218 - DNA, 15 bp, Homo sapiens
atttataaaataact

SEQ ID NO: 1708219 - DNA, 15 bp, Homo sapiens
tttataaaataactt

SEQ ID NO: 1708220 - DNA, 15 bp, Homo sapiens
ttataaaataacttg

SEQ ID NO: 1708221 - DNA, 15 bp, Homo sapiens
tataaaataacttga

SEQ ID NO: 1708222 - DNA, 15 bp, Homo sapiens
ataaaataacttgaa

SEQ ID NO: 1708223 - DNA, 15 bp, Homo sapiens
taaaataacttgaaa

SEQ ID NO: 1708224 - DNA, 15 bp, Homo sapiens
aaaataacttgaaaa

SEQ ID NO: 1708225 - DNA, 15 bp, Homo sapiens
aaataacttgaaaac

SEQ ID NO: 1708226 - DNA, 15 bp, Homo sapiens
aataacttgaaaaca

SEQ ID NO: 1708227 - DNA, 15 bp, Homo sapiens
ataacttgaaaacaa

SEQ ID NO: 1708228 - DNA, 15 bp, Homo sapiens
taacttgaaaacaat

SEQ ID NO: 1708229 - DNA, 15 bp, Homo sapiens
aacttgaaaacaatc

SEQ ID NO: 1708230 - DNA, 15 bp, Homo sapiens
acttgaaaacaatca

SEQ ID NO: 1708231 - DNA, 15 bp, Homo sapiens
cttgaaaacaatcag

SEQ ID NO: 1708232 - DNA, 15 bp, Homo sapiens
ttgaaaacaatcagc

SEQ ID NO: 1708233 - DNA, 15 bp, Homo sapiens
tgaaaacaatcagca

SEQ ID NO: 1708234 - DNA, 15 bp, Homo sapiens
gaaaacaatcagcaa

SEQ ID NO: 1708235 - DNA, 15 bp, Homo sapiens
aaaacaatcagcaat

SEQ ID NO: 1708236 - DNA, 15 bp, Homo sapiens
aaacaatcagcaata

SEQ ID NO: 1708237 - DNA, 15 bp, Homo sapiens
aacaatcagcaatat

SEQ ID NO: 1708238 - DNA, 15 bp, Homo sapiens
acaatcagcaatatg

SEQ ID NO: 1708239 - DNA, 15 bp, Homo sapiens
caatcagcaatatga

SEQ ID NO: 1708240 - DNA, 15 bp, Homo sapiens
aatcagcaatatgac

SEQ ID NO: 1708241 - DNA, 15 bp, Homo sapiens
atcagcaatatgaca

SEQ ID NO: 1708242 - DNA, 15 bp, Homo sapiens
tcagcaatatgacag

SEQ ID NO: 1708243 - DNA, 15 bp, Homo sapiens
cagcaatatgacagg

SEQ ID NO: 1708244 - DNA, 15 bp, Homo sapiens
agcaatatgacagga

SEQ ID NO: 1708245 - DNA, 15 bp, Homo sapiens
gcaatatgacaggaa

SEQ ID NO: 1708246 - DNA, 15 bp, Homo sapiens
caatatgacaggaac

SEQ ID NO: 1708247 - DNA, 15 bp, Homo sapiens
aatatgacaggaaca

SEQ ID NO: 1708248 - DNA, 15 bp, Homo sapiens
atatgacaggaacaa

SEQ ID NO: 1708249 - DNA, 15 bp, Homo sapiens
tatgacaggaacaaa

SEQ ID NO: 1708250 - DNA, 15 bp, Homo sapiens
atgacaggaacaaag

SEQ ID NO: 1708251 - DNA, 15 bp, Homo sapiens
tgacaggaacaaagc

SEQ ID NO: 1708252 - DNA, 15 bp, Homo sapiens
gacaggaacaaagcc

SEQ ID NO: 1708253 - DNA, 15 bp, Homo sapiens
acaggaacaaagcct

SEQ ID NO: 1708254 - DNA, 15 bp, Homo sapiens
caggaacaaagcctc

SEQ ID NO: 1708255 - DNA, 15 bp, Homo sapiens
aggaacaaagcctca

SEQ ID NO: 1708256 - DNA, 15 bp, Homo sapiens
ggaacaaagcctcac

SEQ ID NO: 1708257 - DNA, 15 bp, Homo sapiens
gaacaaagcctcaca

SEQ ID NO: 1708258 - DNA, 15 bp, Homo sapiens
aacaaagcctcacat

SEQ ID NO: 1708259 - DNA, 15 bp, Homo sapiens
acaaagcctcacata

SEQ ID NO: 1708260 - DNA, 15 bp, Homo sapiens
caaagcctcacatat

SEQ ID NO: 1708261 - DNA, 15 bp, Homo sapiens
aaagcctcacatatc

SEQ ID NO: 1708262 - DNA, 15 bp, Homo sapiens
aagcctcacatatca

SEQ ID NO: 1708263 - DNA, 15 bp, Homo sapiens
agcctcacatatcaa

SEQ ID NO: 1708264 - DNA, 15 bp, Homo sapiens
gcctcacatatcaat

SEQ ID NO: 1708265 - DNA, 15 bp, Homo sapiens
cctcacatatcaata

SEQ ID NO: 1708266 - DNA, 15 bp, Homo sapiens
ctcacatatcaatat

SEQ ID NO: 1708267 - DNA, 15 bp, Homo sapiens
tcacatatcaatatt

SEQ ID NO: 1708268 - DNA, 15 bp, Homo sapiens
acatatcaatattaa

SEQ ID NO: 1708269 - DNA, 15 bp, Homo sapiens
catatcaatattaac

SEQ ID NO: 1708270 - DNA, 15 bp, Homo sapiens
atatcaatattaacc

SEQ ID NO: 1708271 - DNA, 15 bp, Homo sapiens
tatcaatattaacct

SEQ ID NO: 1708272 - DNA, 15 bp, Homo sapiens
atcaatattaacctt

SEQ ID NO: 1708273 - DNA, 15 bp, Homo sapiens
tcaatattaaccttg

SEQ ID NO: 1708274 - DNA, 15 bp, Homo sapiens
caatattaaccttga

SEQ ID NO: 1708275 - DNA, 15 bp, Homo sapiens
aatattaaccttgaa

SEQ ID NO: 1708276 - DNA, 15 bp, Homo sapiens
atattaaccttgaat

SEQ ID NO: 1708277 - DNA, 15 bp, Homo sapiens
tattaaccttgaatg

SEQ ID NO: 1708278 - DNA, 15 bp, Homo sapiens
attaaccttgaatgt

SEQ ID NO: 1708279 - DNA, 15 bp, Homo sapiens
ttaaccttgaatgtg

SEQ ID NO: 1708280 - DNA, 15 bp, Homo sapiens
taaccttgaatgtgt

SEQ ID NO: 1708281 - DNA, 15 bp, Homo sapiens
aaccttgaatgtgtg

SEQ ID NO: 1708282 - DNA, 15 bp, Homo sapiens
accttgaatgtgtga

SEQ ID NO: 1708283 - DNA, 15 bp, Homo sapiens
ccttgaatgtgtgac

SEQ ID NO: 1708284 - DNA, 15 bp, Homo sapiens
cttgaatgtgtgact

SEQ ID NO: 1708285 - DNA, 15 bp, Homo sapiens
ttgaatgtgtgactc

SEQ ID NO: 1708286 - DNA, 15 bp, Homo sapiens
tgaatgtgtgactcc

SEQ ID NO: 1708287 - DNA, 15 bp, Homo sapiens
gaatgtgtgactccc

SEQ ID NO: 1708288 - DNA, 15 bp, Homo sapiens
aatgtgtgactccca

SEQ ID NO: 1708289 - DNA, 15 bp, Homo sapiens
atgtgtgactcccaa

SEQ ID NO: 1708290 - DNA, 15 bp, Homo sapiens
tgtgtgactcccaaa

SEQ ID NO: 1708291 - DNA, 15 bp, Homo sapiens
gtgtgactcccaaaa

SEQ ID NO: 1708292 - DNA, 15 bp, Homo sapiens
tgtgactcccaaaaa

SEQ ID NO: 1708293 - DNA, 15 bp, Homo sapiens
gtgactcccaaaaat

SEQ ID NO: 1708294 - DNA, 15 bp, Homo sapiens
tgactcccaaaaatc

SEQ ID NO: 1708295 - DNA, 15 bp, Homo sapiens
gactcccaaaaatct

SEQ ID NO: 1708296 - DNA, 15 bp, Homo sapiens
actcccaaaaatctg

SEQ ID NO: 1708297 - DNA, 15 bp, Homo sapiens
ctcccaaaaatctga

SEQ ID NO: 1708298 - DNA, 15 bp, Homo sapiens
tcccaaaaatctgag

SEQ ID NO: 1708299 - DNA, 15 bp, Homo sapiens
cccaaaaatctgaga

SEQ ID NO: 1708300 - DNA, 15 bp, Homo sapiens
ccaaaaatctgagac

SEQ ID NO: 1708301 - DNA, 15 bp, Homo sapiens
caaaaatctgagaca

SEQ ID NO: 1708302 - DNA, 15 bp, Homo sapiens
aaaaatctgagacag

SEQ ID NO: 1708303 - DNA, 15 bp, Homo sapiens
aaaatctgagacagg

SEQ ID NO: 1708304 - DNA, 15 bp, Homo sapiens
aaatctgagacaggt

SEQ ID NO: 1708305 - DNA, 15 bp, Homo sapiens
aatctgagacaggtc

SEQ ID NO: 1708306 - DNA, 15 bp, Homo sapiens
atctgagacaggtcc

SEQ ID NO: 1708307 - DNA, 15 bp, Homo sapiens
tctgagacaggtccc

SEQ ID NO: 1708308 - DNA, 15 bp, Homo sapiens
ctgagacaggtccca

SEQ ID NO: 1708309 - DNA, 15 bp, Homo sapiens
tgagacaggtcccag

SEQ ID NO: 1708310 - DNA, 15 bp, Homo sapiens
gagacaggtcccagt

SEQ ID NO: 1708311 - DNA, 15 bp, Homo sapiens
agacaggtcccagtt

SEQ ID NO: 1708312 - DNA, 15 bp, Homo sapiens
gacaggtcccagtta

SEQ ID NO: 1708313 - DNA, 15 bp, Homo sapiens
acaggtcccagttaa

SEQ ID NO: 1708314 - DNA, 15 bp, Homo sapiens
caggtcccagttaat

SEQ ID NO: 1708315 - DNA, 15 bp, Homo sapiens
aggtcccagttaatt

SEQ ID NO: 1708316 - DNA, 15 bp, Homo sapiens
ggtcccagttaattt

SEQ ID NO: 1708317 - DNA, 15 bp, Homo sapiens
gtcccagttaattta

SEQ ID NO: 1708318 - DNA, 15 bp, Homo sapiens
tcccagttaatttag

SEQ ID NO: 1708319 - DNA, 15 bp, Homo sapiens
cccagttaatttaga

SEQ ID NO: 1708320 - DNA, 15 bp, Homo sapiens
ccagttaatttagaa

SEQ ID NO: 1708321 - DNA, 15 bp, Homo sapiens
cagttaatttagaaa

SEQ ID NO: 1708322 - DNA, 15 bp, Homo sapiens
agttaatttagaaag

SEQ ID NO: 1708323 - DNA, 15 bp, Homo sapiens
gttaatttagaaagt

SEQ ID NO: 1708324 - DNA, 15 bp, Homo sapiens
ttaatttagaaagtt

SEQ ID NO: 1708325 - DNA, 15 bp, Homo sapiens
taatttagaaagttt

SEQ ID NO: 1708326 - DNA, 15 bp, Homo sapiens
aatttagaaagttta

SEQ ID NO: 1708327 - DNA, 15 bp, Homo sapiens
atttagaaagtttat

SEQ ID NO: 1708328 - DNA, 15 bp, Homo sapiens
tttagaaagtttatt

SEQ ID NO: 1708329 - DNA, 15 bp, Homo sapiens
ttagaaagtttattt

SEQ ID NO: 1708330 - DNA, 15 bp, Homo sapiens
tagaaagtttatttt

SEQ ID NO: 1708331 - DNA, 15 bp, Homo sapiens
agaaagtttattttg

SEQ ID NO: 1708332 - DNA, 15 bp, Homo sapiens
gaaagtttattttgc

SEQ ID NO: 1708333 - DNA, 15 bp, Homo sapiens
aaagtttattttgcc

SEQ ID NO: 1708334 - DNA, 15 bp, Homo sapiens
aagtttattttgcca

SEQ ID NO: 1708335 - DNA, 15 bp, Homo sapiens
agtttattttgccaa

SEQ ID NO: 1708336 - DNA, 15 bp, Homo sapiens
gtttattttgccaag

SEQ ID NO: 1708337 - DNA, 15 bp, Homo sapiens
tttattttgccaagg

SEQ ID NO: 1708338 - DNA, 15 bp, Homo sapiens
ttattttgccaaggt

SEQ ID NO: 1708339 - DNA, 15 bp, Homo sapiens
tattttgccaaggtt

SEQ ID NO: 1708340 - DNA, 15 bp, Homo sapiens
attttgccaaggttg

SEQ ID NO: 1708341 - DNA, 15 bp, Homo sapiens
ttttgccaaggttga

SEQ ID NO: 1708342 - DNA, 15 bp, Homo sapiens
tttgccaaggttgag

SEQ ID NO: 1708343 - DNA, 15 bp, Homo sapiens
ttgccaaggttgagg

SEQ ID NO: 1708344 - DNA, 15 bp, Homo sapiens
tgccaaggttgagga

SEQ ID NO: 1708345 - DNA, 15 bp, Homo sapiens
gccaaggttgaggat

SEQ ID NO: 1708346 - DNA, 15 bp, Homo sapiens
ccaaggttgaggatg

SEQ ID NO: 1708347 - DNA, 15 bp, Homo sapiens
caaggttgaggatgt

SEQ ID NO: 1708348 - DNA, 15 bp, Homo sapiens
aaggttgaggatgtg

SEQ ID NO: 1708349 - DNA, 15 bp, Homo sapiens
aggttgaggatgtgc

SEQ ID NO: 1708350 - DNA, 15 bp, Homo sapiens
ggttgaggatgtgca

SEQ ID NO: 1708351 - DNA, 15 bp, Homo sapiens
gttgaggatgtgcac

SEQ ID NO: 1708352 - DNA, 15 bp, Homo sapiens
ttgaggatgtgcacc

SEQ ID NO: 1708353 - DNA, 15 bp, Homo sapiens
tgaggatgtgcaccc

SEQ ID NO: 1708354 - DNA, 15 bp, Homo sapiens
gaggatgtgcaccca

SEQ ID NO: 1708355 - DNA, 15 bp, Homo sapiens
aggatgtgcacccat

SEQ ID NO: 1708356 - DNA, 15 bp, Homo sapiens
ggatgtgcacccatg

SEQ ID NO: 1708357 - DNA, 15 bp, Homo sapiens
gatgtgcacccatga

SEQ ID NO: 1708358 - DNA, 15 bp, Homo sapiens
atgtgcacccatgac

SEQ ID NO: 1708359 - DNA, 15 bp, Homo sapiens
tgtgcacccatgaca

SEQ ID NO: 1708360 - DNA, 15 bp, Homo sapiens
gtgcacccatgacac

SEQ ID NO: 1708361 - DNA, 15 bp, Homo sapiens
tgcacccatgacaca

SEQ ID NO: 1708362 - DNA, 15 bp, Homo sapiens
gcacccatgacacag

SEQ ID NO: 1708363 - DNA, 15 bp, Homo sapiens
cacccatgacacagc

SEQ ID NO: 1708364 - DNA, 15 bp, Homo sapiens
acccatgacacagcc

SEQ ID NO: 1708365 - DNA, 15 bp, Homo sapiens
cccatgacacagcct

SEQ ID NO: 1708366 - DNA, 15 bp, Homo sapiens
ccatgacacagcctc

SEQ ID NO: 1708367 - DNA, 15 bp, Homo sapiens
catgacacagcctct

SEQ ID NO: 1708368 - DNA, 15 bp, Homo sapiens
atgacacagcctctg

SEQ ID NO: 1708369 - DNA, 15 bp, Homo sapiens
tgacacagcctctgg

SEQ ID NO: 1708370 - DNA, 15 bp, Homo sapiens
gacacagcctctgga

SEQ ID NO: 1708371 - DNA, 15 bp, Homo sapiens
acacagcctctggaa

SEQ ID NO: 1708372 - DNA, 15 bp, Homo sapiens
cacagcctctggaag

SEQ ID NO: 1708373 - DNA, 15 bp, Homo sapiens
acagcctctggaagt

SEQ ID NO: 1708374 - DNA, 15 bp, Homo sapiens
cagcctctggaagtc

SEQ ID NO: 1708375 - DNA, 15 bp, Homo sapiens
agcctctggaagtcc

SEQ ID NO: 1708376 - DNA, 15 bp, Homo sapiens
gcctctggaagtcct

SEQ ID NO: 1708377 - DNA, 15 bp, Homo sapiens
cctctggaagtcctg

SEQ ID NO: 1708378 - DNA, 15 bp, Homo sapiens
ctctggaagtcctga

SEQ ID NO: 1708379 - DNA, 15 bp, Homo sapiens
tctggaagtcctgac

SEQ ID NO: 1708380 - DNA, 15 bp, Homo sapiens
ctggaagtcctgaca

SEQ ID NO: 1708381 - DNA, 15 bp, Homo sapiens
tggaagtcctgacaa

SEQ ID NO: 1708382 - DNA, 15 bp, Homo sapiens
ggaagtcctgacaac

SEQ ID NO: 1708383 - DNA, 15 bp, Homo sapiens
gaagtcctgacaaca

SEQ ID NO: 1708384 - DNA, 15 bp, Homo sapiens
aagtcctgacaacat

SEQ ID NO: 1708385 - DNA, 15 bp, Homo sapiens
agtcctgacaacatg

SEQ ID NO: 1708386 - DNA, 15 bp, Homo sapiens
gtcctgacaacatgt

SEQ ID NO: 1708387 - DNA, 15 bp, Homo sapiens
tcctgacaacatgtg

SEQ ID NO: 1708388 - DNA, 15 bp, Homo sapiens
cctgacaacatgtgc

SEQ ID NO: 1708389 - DNA, 15 bp, Homo sapiens
ctgacaacatgtgcc

SEQ ID NO: 1708390 - DNA, 15 bp, Homo sapiens
tgacaacatgtgccc

SEQ ID NO: 1708391 - DNA, 15 bp, Homo sapiens
gacaacatgtgccca

SEQ ID NO: 1708392 - DNA, 15 bp, Homo sapiens
acaacatgtgcccaa

SEQ ID NO: 1708393 - DNA, 15 bp, Homo sapiens
caacatgtgcccaag

SEQ ID NO: 1708394 - DNA, 15 bp, Homo sapiens
aacatgtgcccaagg

SEQ ID NO: 1708395 - DNA, 15 bp, Homo sapiens
acatgtgcccaaggc

SEQ ID NO: 1708396 - DNA, 15 bp, Homo sapiens
catgtgcccaaggca

SEQ ID NO: 1708397 - DNA, 15 bp, Homo sapiens
atgtgcccaaggcag

SEQ ID NO: 1708398 - DNA, 15 bp, Homo sapiens
tgtgcccaaggcagt

SEQ ID NO: 1708399 - DNA, 15 bp, Homo sapiens
gtgcccaaggcagtc

SEQ ID NO: 1708400 - DNA, 15 bp, Homo sapiens
tgcccaaggcagtca

SEQ ID NO: 1708401 - DNA, 15 bp, Homo sapiens
gcccaaggcagtcag

SEQ ID NO: 1708402 - DNA, 15 bp, Homo sapiens
cccaaggcagtcaga

SEQ ID NO: 1708403 - DNA, 15 bp, Homo sapiens
ccaaggcagtcagag

SEQ ID NO: 1708404 - DNA, 15 bp, Homo sapiens
caaggcagtcagagc

SEQ ID NO: 1708405 - DNA, 15 bp, Homo sapiens
aaggcagtcagagca

SEQ ID NO: 1708406 - DNA, 15 bp, Homo sapiens
aggcagtcagagcac

SEQ ID NO: 1708407 - DNA, 15 bp, Homo sapiens
ggcagtcagagcaca

SEQ ID NO: 1708408 - DNA, 15 bp, Homo sapiens
gcagtcagagcacag

SEQ ID NO: 1708409 - DNA, 15 bp, Homo sapiens
cagtcagagcacagt

SEQ ID NO: 1708410 - DNA, 15 bp, Homo sapiens
agtcagagcacagtt

SEQ ID NO: 1708411 - DNA, 15 bp, Homo sapiens
gtcagagcacagttt

SEQ ID NO: 1708412 - DNA, 15 bp, Homo sapiens
tcagagcacagtttg

SEQ ID NO: 1708413 - DNA, 15 bp, Homo sapiens
cagagcacagtttgg

SEQ ID NO: 1708414 - DNA, 15 bp, Homo sapiens
agagcacagtttggt

SEQ ID NO: 1708415 - DNA, 15 bp, Homo sapiens
gagcacagtttggtt

SEQ ID NO: 1708416 - DNA, 15 bp, Homo sapiens
agcacagtttggttg

SEQ ID NO: 1708417 - DNA, 15 bp, Homo sapiens
gcacagtttggttgt

SEQ ID NO: 1708418 - DNA, 15 bp, Homo sapiens
cacagtttggttgta

SEQ ID NO: 1708419 - DNA, 15 bp, Homo sapiens
acagtttggttgtat

SEQ ID NO: 1708420 - DNA, 15 bp, Homo sapiens
cagtttggttgtata

SEQ ID NO: 1708421 - DNA, 15 bp, Homo sapiens
agtttggttgtatac

SEQ ID NO: 1708422 - DNA, 15 bp, Homo sapiens
gtttggttgtataca

SEQ ID NO: 1708423 - DNA, 15 bp, Homo sapiens
tttggttgtatacat

SEQ ID NO: 1708424 - DNA, 15 bp, Homo sapiens
ttggttgtatacatt

SEQ ID NO: 1708425 - DNA, 15 bp, Homo sapiens
tggttgtatacattt

SEQ ID NO: 1708426 - DNA, 15 bp, Homo sapiens
ggttgtatacatttt

SEQ ID NO: 1708427 - DNA, 15 bp, Homo sapiens
gttgtatacatttta

SEQ ID NO: 1708428 - DNA, 15 bp, Homo sapiens
ttgtatacattttag

SEQ ID NO: 1708429 - DNA, 15 bp, Homo sapiens
tgtatacattttagg

SEQ ID NO: 1708430 - DNA, 15 bp, Homo sapiens
gtatacattttaggg

SEQ ID NO: 1708431 - DNA, 15 bp, Homo sapiens
tatacattttaggga

SEQ ID NO: 1708432 - DNA, 15 bp, Homo sapiens
atacattttagggag

SEQ ID NO: 1708433 - DNA, 15 bp, Homo sapiens
tacattttagggaga

SEQ ID NO: 1708434 - DNA, 15 bp, Homo sapiens
acattttagggagac

SEQ ID NO: 1708435 - DNA, 15 bp, Homo sapiens
cattttagggagaca

SEQ ID NO: 1708436 - DNA, 15 bp, Homo sapiens
attttagggagacac

SEQ ID NO: 1708437 - DNA, 15 bp, Homo sapiens
ttttagggagacacg

SEQ ID NO: 1708438 - DNA, 15 bp, Homo sapiens
tttagggagacacga

SEQ ID NO: 1708439 - DNA, 15 bp, Homo sapiens
ttagggagacacgag

SEQ ID NO: 1708440 - DNA, 15 bp, Homo sapiens
tagggagacacgaga

SEQ ID NO: 1708441 - DNA, 15 bp, Homo sapiens
agggagacacgagac

SEQ ID NO: 1708442 - DNA, 15 bp, Homo sapiens
gggagacacgagaca

SEQ ID NO: 1708443 - DNA, 15 bp, Homo sapiens
ggagacacgagacat

SEQ ID NO: 1708444 - DNA, 15 bp, Homo sapiens
gagacacgagacatc

SEQ ID NO: 1708445 - DNA, 15 bp, Homo sapiens
agacacgagacatca

SEQ ID NO: 1708446 - DNA, 15 bp, Homo sapiens
gacacgagacatcaa

SEQ ID NO: 1708447 - DNA, 15 bp, Homo sapiens
acacgagacatcaat

SEQ ID NO: 1708448 - DNA, 15 bp, Homo sapiens
cacgagacatcaatc

SEQ ID NO: 1708449 - DNA, 15 bp, Homo sapiens
acgagacatcaatca

SEQ ID NO: 1708450 - DNA, 15 bp, Homo sapiens
cgagacatcaatcaa

SEQ ID NO: 1708451 - DNA, 15 bp, Homo sapiens
gagacatcaatcaac

SEQ ID NO: 1708452 - DNA, 15 bp, Homo sapiens
agacatcaatcaaca

SEQ ID NO: 1708453 - DNA, 15 bp, Homo sapiens
gacatcaatcaacat

SEQ ID NO: 1708454 - DNA, 15 bp, Homo sapiens
acatcaatcaacata

SEQ ID NO: 1708455 - DNA, 15 bp, Homo sapiens
catcaatcaacatat

SEQ ID NO: 1708456 - DNA, 15 bp, Homo sapiens
atcaatcaacatatg

SEQ ID NO: 1708457 - DNA, 15 bp, Homo sapiens
tcaatcaacatatgt

SEQ ID NO: 1708458 - DNA, 15 bp, Homo sapiens
caatcaacatatgta

SEQ ID NO: 1708459 - DNA, 15 bp, Homo sapiens
aatcaacatatgtaa

SEQ ID NO: 1708460 - DNA, 15 bp, Homo sapiens
atcaacatatgtaag

SEQ ID NO: 1708461 - DNA, 15 bp, Homo sapiens
tcaacatatgtaagg

SEQ ID NO: 1708462 - DNA, 15 bp, Homo sapiens
caacatatgtaaggt

SEQ ID NO: 1708463 - DNA, 15 bp, Homo sapiens
aacatatgtaaggtg

SEQ ID NO: 1708464 - DNA, 15 bp, Homo sapiens
acatatgtaaggtga

SEQ ID NO: 1708465 - DNA, 15 bp, Homo sapiens
catatgtaaggtgaa

SEQ ID NO: 1708466 - DNA, 15 bp, Homo sapiens
atatgtaaggtgaac

SEQ ID NO: 1708467 - DNA, 15 bp, Homo sapiens
tatgtaaggtgaaca

SEQ ID NO: 1708468 - DNA, 15 bp, Homo sapiens
atgtaaggtgaacat

SEQ ID NO: 1708469 - DNA, 15 bp, Homo sapiens
tgtaaggtgaacatt

SEQ ID NO: 1708470 - DNA, 15 bp, Homo sapiens
gtaaggtgaacattg

SEQ ID NO: 1708471 - DNA, 15 bp, Homo sapiens
taaggtgaacattgg

SEQ ID NO: 1708472 - DNA, 15 bp, Homo sapiens
aaggtgaacattggt

SEQ ID NO: 1708473 - DNA, 15 bp, Homo sapiens
aggtgaacattggtt

SEQ ID NO: 1708474 - DNA, 15 bp, Homo sapiens
ggtgaacattggttt

SEQ ID NO: 1708475 - DNA, 15 bp, Homo sapiens
gtgaacattggtttg

SEQ ID NO: 1708476 - DNA, 15 bp, Homo sapiens
tgaacattggtttgg

SEQ ID NO: 1708477 - DNA, 15 bp, Homo sapiens
gaacattggtttggt

SEQ ID NO: 1708478 - DNA, 15 bp, Homo sapiens
aacattggtttggtc

SEQ ID NO: 1708479 - DNA, 15 bp, Homo sapiens
acattggtttggtct

SEQ ID NO: 1708480 - DNA, 15 bp, Homo sapiens
cattggtttggtctg

SEQ ID NO: 1708481 - DNA, 15 bp, Homo sapiens
attggtttggtctgg

SEQ ID NO: 1708482 - DNA, 15 bp, Homo sapiens
ttggtttggtctgga

SEQ ID NO: 1708483 - DNA, 15 bp, Homo sapiens
tggtttggtctggaa

SEQ ID NO: 1708484 - DNA, 15 bp, Homo sapiens
ggtttggtctggaaa

SEQ ID NO: 1708485 - DNA, 15 bp, Homo sapiens
gtttggtctggaaag

SEQ ID NO: 1708486 - DNA, 15 bp, Homo sapiens
tttggtctggaaagg

SEQ ID NO: 1708487 - DNA, 15 bp, Homo sapiens
ttggtctggaaaggc

SEQ ID NO: 1708488 - DNA, 15 bp, Homo sapiens
tggtctggaaaggca

SEQ ID NO: 1708489 - DNA, 15 bp, Homo sapiens
ggtctggaaaggcag

SEQ ID NO: 1708490 - DNA, 15 bp, Homo sapiens
gtctggaaaggcagg

SEQ ID NO: 1708491 - DNA, 15 bp, Homo sapiens
tctggaaaggcagga

SEQ ID NO: 1708492 - DNA, 15 bp, Homo sapiens
ctggaaaggcaggac

SEQ ID NO: 1708493 - DNA, 15 bp, Homo sapiens
tggaaaggcaggaca

SEQ ID NO: 1708494 - DNA, 15 bp, Homo sapiens
ggaaaggcaggacaa

SEQ ID NO: 1708495 - DNA, 15 bp, Homo sapiens
gaaaggcaggacaag

SEQ ID NO: 1708496 - DNA, 15 bp, Homo sapiens
aaaggcaggacaagc

SEQ ID NO: 1708497 - DNA, 15 bp, Homo sapiens
aaggcaggacaagcc

SEQ ID NO: 1708498 - DNA, 15 bp, Homo sapiens
aggcaggacaagcca

SEQ ID NO: 1708499 - DNA, 15 bp, Homo sapiens
ggcaggacaagccaa

SEQ ID NO: 1708500 - DNA, 15 bp, Homo sapiens
gcaggacaagccaaa

SEQ ID NO: 1708501 - DNA, 15 bp, Homo sapiens
caggacaagccaaag

SEQ ID NO: 1708502 - DNA, 15 bp, Homo sapiens
aggacaagccaaagc

SEQ ID NO: 1708503 - DNA, 15 bp, Homo sapiens
ggacaagccaaagca

SEQ ID NO: 1708504 - DNA, 15 bp, Homo sapiens
gacaagccaaagcag

SEQ ID NO: 1708505 - DNA, 15 bp, Homo sapiens
acaagccaaagcaga

SEQ ID NO: 1708506 - DNA, 15 bp, Homo sapiens
caagccaaagcagag

SEQ ID NO: 1708507 - DNA, 15 bp, Homo sapiens
aagccaaagcagaga

SEQ ID NO: 1708508 - DNA, 15 bp, Homo sapiens
agccaaagcagagag

SEQ ID NO: 1708509 - DNA, 15 bp, Homo sapiens
gccaaagcagagagg

SEQ ID NO: 1708510 - DNA, 15 bp, Homo sapiens
ccaaagcagagaggg

SEQ ID NO: 1708511 - DNA, 15 bp, Homo sapiens
caaagcagagagggg

SEQ ID NO: 1708512 - DNA, 15 bp, Homo sapiens
aaagcagagaggggt

SEQ ID NO: 1708513 - DNA, 15 bp, Homo sapiens
aagcagagaggggtc

SEQ ID NO: 1708514 - DNA, 15 bp, Homo sapiens
agcagagaggggtct

SEQ ID NO: 1708515 - DNA, 15 bp, Homo sapiens
gcagagaggggtctt

SEQ ID NO: 1708516 - DNA, 15 bp, Homo sapiens
cagagaggggtcttc

SEQ ID NO: 1708517 - DNA, 15 bp, Homo sapiens
agagaggggtcttcc

SEQ ID NO: 1708518 - DNA, 15 bp, Homo sapiens
gagaggggtcttcca

SEQ ID NO: 1708519 - DNA, 15 bp, Homo sapiens
agaggggtcttccag

SEQ ID NO: 1708520 - DNA, 15 bp, Homo sapiens
gaggggtcttccagg

SEQ ID NO: 1708521 - DNA, 15 bp, Homo sapiens
aggggtcttccaggt

SEQ ID NO: 1708522 - DNA, 15 bp, Homo sapiens
ggggtcttccaggtc

SEQ ID NO: 1708523 - DNA, 15 bp, Homo sapiens
gggtcttccaggtca

SEQ ID NO: 1708524 - DNA, 15 bp, Homo sapiens
ggtcttccaggtcat

SEQ ID NO: 1708525 - DNA, 15 bp, Homo sapiens
gtcttccaggtcata

SEQ ID NO: 1708526 - DNA, 15 bp, Homo sapiens
tcttccaggtcatag

SEQ ID NO: 1708527 - DNA, 15 bp, Homo sapiens
cttccaggtcatagg

SEQ ID NO: 1708528 - DNA, 15 bp, Homo sapiens
ttccaggtcataggt

SEQ ID NO: 1708529 - DNA, 15 bp, Homo sapiens
tccaggtcataggta

SEQ ID NO: 1708530 - DNA, 15 bp, Homo sapiens
ccaggtcataggtag

SEQ ID NO: 1708531 - DNA, 15 bp, Homo sapiens
caggtcataggtaga

SEQ ID NO: 1708532 - DNA, 15 bp, Homo sapiens
aggtcataggtagat

SEQ ID NO: 1708533 - DNA, 15 bp, Homo sapiens
ggtcataggtagata

SEQ ID NO: 1708534 - DNA, 15 bp, Homo sapiens
gtcataggtagataa

SEQ ID NO: 1708535 - DNA, 15 bp, Homo sapiens
tcataggtagataag

SEQ ID NO: 1708536 - DNA, 15 bp, Homo sapiens
cataggtagataaga

SEQ ID NO: 1708537 - DNA, 15 bp, Homo sapiens
ataggtagataagag

SEQ ID NO: 1708538 - DNA, 15 bp, Homo sapiens
taggtagataagaga

SEQ ID NO: 1708539 - DNA, 15 bp, Homo sapiens
aggtagataagagac

SEQ ID NO: 1708540 - DNA, 15 bp, Homo sapiens
ggtagataagagaca

SEQ ID NO: 1708541 - DNA, 15 bp, Homo sapiens
gtagataagagacaa

SEQ ID NO: 1708542 - DNA, 15 bp, Homo sapiens
tagataagagacaaa

SEQ ID NO: 1708543 - DNA, 15 bp, Homo sapiens
agataagagacaaat

SEQ ID NO: 1708544 - DNA, 15 bp, Homo sapiens
gataagagacaaatg

SEQ ID NO: 1708545 - DNA, 15 bp, Homo sapiens
ataagagacaaatgg

SEQ ID NO: 1708546 - DNA, 15 bp, Homo sapiens
taagagacaaatggt

SEQ ID NO: 1708547 - DNA, 15 bp, Homo sapiens
aagagacaaatggtt

SEQ ID NO: 1708548 - DNA, 15 bp, Homo sapiens
agagacaaatggtta

SEQ ID NO: 1708549 - DNA, 15 bp, Homo sapiens
gagacaaatggttac

SEQ ID NO: 1708550 - DNA, 15 bp, Homo sapiens
agacaaatggttaca

SEQ ID NO: 1708551 - DNA, 15 bp, Homo sapiens
gacaaatggttacat

SEQ ID NO: 1708552 - DNA, 15 bp, Homo sapiens
acaaatggttacatt

SEQ ID NO: 1708553 - DNA, 15 bp, Homo sapiens
caaatggttacattc

SEQ ID NO: 1708554 - DNA, 15 bp, Homo sapiens
aaatggttacattct

SEQ ID NO: 1708555 - DNA, 15 bp, Homo sapiens
aatggttacattctt

SEQ ID NO: 1708556 - DNA, 15 bp, Homo sapiens
atggttacattcttt

SEQ ID NO: 1708557 - DNA, 15 bp, Homo sapiens
tggttacattctttt

SEQ ID NO: 1708558 - DNA, 15 bp, Homo sapiens
ggttacattcttttg

SEQ ID NO: 1708559 - DNA, 15 bp, Homo sapiens
gttacattcttttga

SEQ ID NO: 1708560 - DNA, 15 bp, Homo sapiens
ttacattcttttgag

SEQ ID NO: 1708561 - DNA, 15 bp, Homo sapiens
tacattcttttgagc

SEQ ID NO: 1708562 - DNA, 15 bp, Homo sapiens
acattcttttgagct

SEQ ID NO: 1708563 - DNA, 15 bp, Homo sapiens
cattcttttgagctt

SEQ ID NO: 1708564 - DNA, 15 bp, Homo sapiens
attcttttgagcttc

SEQ ID NO: 1708565 - DNA, 15 bp, Homo sapiens
ttcttttgagcttct

SEQ ID NO: 1708566 - DNA, 15 bp, Homo sapiens
tcttttgagcttctg

SEQ ID NO: 1708567 - DNA, 15 bp, Homo sapiens
cttttgagcttctga

SEQ ID NO: 1708568 - DNA, 15 bp, Homo sapiens
ttttgagcttctgat

SEQ ID NO: 1708569 - DNA, 15 bp, Homo sapiens
tttgagcttctgatt

SEQ ID NO: 1708570 - DNA, 15 bp, Homo sapiens
ttgagcttctgatta

SEQ ID NO: 1708571 - DNA, 15 bp, Homo sapiens
tgagcttctgattag

SEQ ID NO: 1708572 - DNA, 15 bp, Homo sapiens
gagcttctgattagc

SEQ ID NO: 1708573 - DNA, 15 bp, Homo sapiens
agcttctgattagcc

SEQ ID NO: 1708574 - DNA, 15 bp, Homo sapiens
gcttctgattagcct

SEQ ID NO: 1708575 - DNA, 15 bp, Homo sapiens
cttctgattagcctc

SEQ ID NO: 1708576 - DNA, 15 bp, Homo sapiens
ttctgattagcctct

SEQ ID NO: 1708577 - DNA, 15 bp, Homo sapiens
tctgattagcctctc

SEQ ID NO: 1708578 - DNA, 15 bp, Homo sapiens
ctgattagcctctcc

SEQ ID NO: 1708579 - DNA, 15 bp, Homo sapiens
tgattagcctctcca

SEQ ID NO: 1708580 - DNA, 15 bp, Homo sapiens
gattagcctctccaa

SEQ ID NO: 1708581 - DNA, 15 bp, Homo sapiens
attagcctctccaaa

SEQ ID NO: 1708582 - DNA, 15 bp, Homo sapiens
ttagcctctccaaag

SEQ ID NO: 1708583 - DNA, 15 bp, Homo sapiens
tagcctctccaaagg

SEQ ID NO: 1708584 - DNA, 15 bp, Homo sapiens
agcctctccaaagga

SEQ ID NO: 1708585 - DNA, 15 bp, Homo sapiens
gcctctccaaaggag

SEQ ID NO: 1708586 - DNA, 15 bp, Homo sapiens
cctctccaaaggagg

SEQ ID NO: 1708587 - DNA, 15 bp, Homo sapiens
ctctccaaaggaggc

SEQ ID NO: 1708588 - DNA, 15 bp, Homo sapiens
tctccaaaggaggca

SEQ ID NO: 1708589 - DNA, 15 bp, Homo sapiens
ctccaaaggaggcaa

SEQ ID NO: 1708590 - DNA, 15 bp, Homo sapiens
tccaaaggaggcaat

SEQ ID NO: 1708591 - DNA, 15 bp, Homo sapiens
ccaaaggaggcaatc

SEQ ID NO: 1708592 - DNA, 15 bp, Homo sapiens
caaaggaggcaatca

SEQ ID NO: 1708593 - DNA, 15 bp, Homo sapiens
aaaggaggcaatcag

SEQ ID NO: 1708594 - DNA, 15 bp, Homo sapiens
aaggaggcaatcagg

SEQ ID NO: 1708595 - DNA, 15 bp, Homo sapiens
aggaggcaatcaggc

SEQ ID NO: 1708596 - DNA, 15 bp, Homo sapiens
ggaggcaatcaggca

SEQ ID NO: 1708597 - DNA, 15 bp, Homo sapiens
gaggcaatcaggcat

SEQ ID NO: 1708598 - DNA, 15 bp, Homo sapiens
aggcaatcaggcatc

SEQ ID NO: 1708599 - DNA, 15 bp, Homo sapiens
ggcaatcaggcatcc

SEQ ID NO: 1708600 - DNA, 15 bp, Homo sapiens
gcaatcaggcatccc

SEQ ID NO: 1708601 - DNA, 15 bp, Homo sapiens
caatcaggcatccct

SEQ ID NO: 1708602 - DNA, 15 bp, Homo sapiens
aatcaggcatccctt

SEQ ID NO: 1708603 - DNA, 15 bp, Homo sapiens
atcaggcatcccttt

SEQ ID NO: 1708604 - DNA, 15 bp, Homo sapiens
tcaggcatcccttta

SEQ ID NO: 1708605 - DNA, 15 bp, Homo sapiens
caggcatccctttat

SEQ ID NO: 1708606 - DNA, 15 bp, Homo sapiens
aggcatccctttatc

SEQ ID NO: 1708607 - DNA, 15 bp, Homo sapiens
ggcatccctttatct

SEQ ID NO: 1708608 - DNA, 15 bp, Homo sapiens
gcatccctttatctc

SEQ ID NO: 1708609 - DNA, 15 bp, Homo sapiens
catccctttatctca

SEQ ID NO: 1708610 - DNA, 15 bp, Homo sapiens
atccctttatctcag

SEQ ID NO: 1708611 - DNA, 15 bp, Homo sapiens
tccctttatctcagt

SEQ ID NO: 1708612 - DNA, 15 bp, Homo sapiens
ccctttatctcagtg

SEQ ID NO: 1708613 - DNA, 15 bp, Homo sapiens
cctttatctcagtga

SEQ ID NO: 1708614 - DNA, 15 bp, Homo sapiens
ctttatctcagtgag

SEQ ID NO: 1708615 - DNA, 15 bp, Homo sapiens
tttatctcagtgagc

SEQ ID NO: 1708616 - DNA, 15 bp, Homo sapiens
ttatctcagtgagca

SEQ ID NO: 1708617 - DNA, 15 bp, Homo sapiens
tatctcagtgagcaa

SEQ ID NO: 1708618 - DNA, 15 bp, Homo sapiens
atctcagtgagcaaa

SEQ ID NO: 1708619 - DNA, 15 bp, Homo sapiens
tctcagtgagcaaag

SEQ ID NO: 1708620 - DNA, 15 bp, Homo sapiens
ctcagtgagcaaagg

SEQ ID NO: 1708621 - DNA, 15 bp, Homo sapiens
tcagtgagcaaaggg

SEQ ID NO: 1708622 - DNA, 15 bp, Homo sapiens
cagtgagcaaagggg

SEQ ID NO: 1708623 - DNA, 15 bp, Homo sapiens
agtgagcaaaggggt

SEQ ID NO: 1708624 - DNA, 15 bp, Homo sapiens
gtgagcaaaggggtg

SEQ ID NO: 1708625 - DNA, 15 bp, Homo sapiens
tgagcaaaggggtga

SEQ ID NO: 1708626 - DNA, 15 bp, Homo sapiens
gagcaaaggggtgac

SEQ ID NO: 1708627 - DNA, 15 bp, Homo sapiens
agcaaaggggtgact

SEQ ID NO: 1708628 - DNA, 15 bp, Homo sapiens
gcaaaggggtgactt

SEQ ID NO: 1708629 - DNA, 15 bp, Homo sapiens
caaaggggtgacttt

SEQ ID NO: 1708630 - DNA, 15 bp, Homo sapiens
aaaggggtgactttg

SEQ ID NO: 1708631 - DNA, 15 bp, Homo sapiens
aaggggtgactttga

SEQ ID NO: 1708632 - DNA, 15 bp, Homo sapiens
aggggtgactttgaa

SEQ ID NO: 1708633 - DNA, 15 bp, Homo sapiens
ggggtgactttgaat

SEQ ID NO: 1708634 - DNA, 15 bp, Homo sapiens
gggtgactttgaata

SEQ ID NO: 1708635 - DNA, 15 bp, Homo sapiens
ggtgactttgaatag

SEQ ID NO: 1708636 - DNA, 15 bp, Homo sapiens
gtgactttgaataga

SEQ ID NO: 1708637 - DNA, 15 bp, Homo sapiens
tgactttgaatagaa

SEQ ID NO: 1708638 - DNA, 15 bp, Homo sapiens
gactttgaatagaat

SEQ ID NO: 1708639 - DNA, 15 bp, Homo sapiens
actttgaatagaatg

SEQ ID NO: 1708640 - DNA, 15 bp, Homo sapiens
ctttgaatagaatgg

SEQ ID NO: 1708641 - DNA, 15 bp, Homo sapiens
tttgaatagaatggg

SEQ ID NO: 1708642 - DNA, 15 bp, Homo sapiens
ttgaatagaatggga

SEQ ID NO: 1708643 - DNA, 15 bp, Homo sapiens
tgaatagaatgggac

SEQ ID NO: 1708644 - DNA, 15 bp, Homo sapiens
gaatagaatgggacg

SEQ ID NO: 1708645 - DNA, 15 bp, Homo sapiens
aatagaatgggacgc

SEQ ID NO: 1708646 - DNA, 15 bp, Homo sapiens
atagaatgggacgca

SEQ ID NO: 1708647 - DNA, 15 bp, Homo sapiens
tagaatgggacgcag

SEQ ID NO: 1708648 - DNA, 15 bp, Homo sapiens
agaatgggacgcagg

SEQ ID NO: 1708649 - DNA, 15 bp, Homo sapiens
gaatgggacgcaggt

SEQ ID NO: 1708650 - DNA, 15 bp, Homo sapiens
aatgggacgcaggtt

SEQ ID NO: 1708651 - DNA, 15 bp, Homo sapiens
atgggacgcaggttt

SEQ ID NO: 1708652 - DNA, 15 bp, Homo sapiens
tgggacgcaggtttg

SEQ ID NO: 1708653 - DNA, 15 bp, Homo sapiens
gggacgcaggtttgc

SEQ ID NO: 1708654 - DNA, 15 bp, Homo sapiens
ggacgcaggtttgcc

SEQ ID NO: 1708655 - DNA, 15 bp, Homo sapiens
gacgcaggtttgccc

SEQ ID NO: 1708656 - DNA, 15 bp, Homo sapiens
acgcaggtttgccct

SEQ ID NO: 1708657 - DNA, 15 bp, Homo sapiens
cgcaggtttgcccta

SEQ ID NO: 1708658 - DNA, 15 bp, Homo sapiens
gcaggtttgccctaa

SEQ ID NO: 1708659 - DNA, 15 bp, Homo sapiens
caggtttgccctaag

SEQ ID NO: 1708660 - DNA, 15 bp, Homo sapiens
aggtttgccctaagc

SEQ ID NO: 1708661 - DNA, 15 bp, Homo sapiens
ggtttgccctaagca

SEQ ID NO: 1708662 - DNA, 15 bp, Homo sapiens
gtttgccctaagcag

SEQ ID NO: 1708663 - DNA, 15 bp, Homo sapiens
tttgccctaagcagt

SEQ ID NO: 1708664 - DNA, 15 bp, Homo sapiens
ttgccctaagcagtt

SEQ ID NO: 1708665 - DNA, 15 bp, Homo sapiens
tgccctaagcagttc

SEQ ID NO: 1708666 - DNA, 15 bp, Homo sapiens
gccctaagcagttcc

SEQ ID NO: 1708667 - DNA, 15 bp, Homo sapiens
ccctaagcagttccc

SEQ ID NO: 1708668 - DNA, 15 bp, Homo sapiens
cctaagcagttcccg

SEQ ID NO: 1708669 - DNA, 15 bp, Homo sapiens
ctaagcagttcccga

SEQ ID NO: 1708670 - DNA, 15 bp, Homo sapiens
taagcagttcccgat

SEQ ID NO: 1708671 - DNA, 15 bp, Homo sapiens
aagcagttcccgatt

SEQ ID NO: 1708672 - DNA, 15 bp, Homo sapiens
agcagttcccgattt

SEQ ID NO: 1708673 - DNA, 15 bp, Homo sapiens
gcagttcccgatttg

SEQ ID NO: 1708674 - DNA, 15 bp, Homo sapiens
cagttcccgatttga

SEQ ID NO: 1708675 - DNA, 15 bp, Homo sapiens
agttcccgatttgac

SEQ ID NO: 1708676 - DNA, 15 bp, Homo sapiens
gttcccgatttgact

SEQ ID NO: 1708677 - DNA, 15 bp, Homo sapiens
ttcccgatttgactt

SEQ ID NO: 1708678 - DNA, 15 bp, Homo sapiens
tcccgatttgacttt

SEQ ID NO: 1708679 - DNA, 15 bp, Homo sapiens
cccgatttgactttt

SEQ ID NO: 1708680 - DNA, 15 bp, Homo sapiens
ccgatttgacttttc

SEQ ID NO: 1708681 - DNA, 15 bp, Homo sapiens
cgatttgacttttct

SEQ ID NO: 1708682 - DNA, 15 bp, Homo sapiens
gatttgacttttctc

SEQ ID NO: 1708683 - DNA, 15 bp, Homo sapiens
atttgacttttctct

SEQ ID NO: 1708684 - DNA, 15 bp, Homo sapiens
tttgacttttctctt

SEQ ID NO: 1708685 - DNA, 15 bp, Homo sapiens
ttgacttttctcttt

SEQ ID NO: 1708686 - DNA, 15 bp, Homo sapiens
tgacttttctcttta

SEQ ID NO: 1708687 - DNA, 15 bp, Homo sapiens
gacttttctctttag

SEQ ID NO: 1708688 - DNA, 15 bp, Homo sapiens
acttttctctttagc

SEQ ID NO: 1708689 - DNA, 15 bp, Homo sapiens
cttttctctttagct

SEQ ID NO: 1708690 - DNA, 15 bp, Homo sapiens
ttttctctttagctt

SEQ ID NO: 1708691 - DNA, 15 bp, Homo sapiens
tttctctttagctta

SEQ ID NO: 1708692 - DNA, 15 bp, Homo sapiens
ttctctttagcttag

SEQ ID NO: 1708693 - DNA, 15 bp, Homo sapiens
tctctttagcttagt

SEQ ID NO: 1708694 - DNA, 15 bp, Homo sapiens
ctctttagcttagtg

SEQ ID NO: 1708695 - DNA, 15 bp, Homo sapiens
tctttagcttagtga

SEQ ID NO: 1708696 - DNA, 15 bp, Homo sapiens
ctttagcttagtgat

SEQ ID NO: 1708697 - DNA, 15 bp, Homo sapiens
tttagcttagtgatt

SEQ ID NO: 1708698 - DNA, 15 bp, Homo sapiens
ttagcttagtgattt

SEQ ID NO: 1708699 - DNA, 15 bp, Homo sapiens
tagcttagtgatttt

SEQ ID NO: 1708700 - DNA, 15 bp, Homo sapiens
agcttagtgattttg

SEQ ID NO: 1708701 - DNA, 15 bp, Homo sapiens
gcttagtgattttgg

SEQ ID NO: 1708702 - DNA, 15 bp, Homo sapiens
cttagtgattttggg

SEQ ID NO: 1708703 - DNA, 15 bp, Homo sapiens
ttagtgattttgggg

SEQ ID NO: 1708704 - DNA, 15 bp, Homo sapiens
tagtgattttggggg

SEQ ID NO: 1708705 - DNA, 15 bp, Homo sapiens
agtgattttgggggc

SEQ ID NO: 1708706 - DNA, 15 bp, Homo sapiens
gtgattttgggggcc

SEQ ID NO: 1708707 - DNA, 15 bp, Homo sapiens
tgattttgggggccc

SEQ ID NO: 1708708 - DNA, 15 bp, Homo sapiens
gattttgggggccca

SEQ ID NO: 1708709 - DNA, 15 bp, Homo sapiens
attttgggggcccat

SEQ ID NO: 1708710 - DNA, 15 bp, Homo sapiens
ttttgggggcccata

SEQ ID NO: 1708711 - DNA, 15 bp, Homo sapiens
tgggggcccatattt

SEQ ID NO: 1708712 - DNA, 15 bp, Homo sapiens
gggggcccatatttt

SEQ ID NO: 1708713 - DNA, 15 bp, Homo sapiens
ggggcccatattttc

SEQ ID NO: 1708714 - DNA, 15 bp, Homo sapiens
gggcccatattttcc

SEQ ID NO: 1708715 - DNA, 15 bp, Homo sapiens
ggcccatattttcct

SEQ ID NO: 1708716 - DNA, 15 bp, Homo sapiens
gcccatattttcctt

SEQ ID NO: 1708717 - DNA, 15 bp, Homo sapiens
cccatattttccttt

SEQ ID NO: 1708718 - DNA, 15 bp, Homo sapiens
ccatattttcctttc

SEQ ID NO: 1708719 - DNA, 15 bp, Homo sapiens
catattttcctttca

SEQ ID NO: 1708720 - DNA, 15 bp, Homo sapiens
atattttcctttcac

SEQ ID NO: 1708721 - DNA, 15 bp, Homo sapiens
tattttcctttcaca

SEQ ID NO: 1708722 - DNA, 15 bp, Homo sapiens
attttcctttcacaa

SEQ ID NO: 1708723 - DNA, 15 bp, Homo sapiens
tttcctttcacaaat

SEQ ID NO: 1708724 - DNA, 15 bp, Homo sapiens
ttcctttcacaaatg

SEQ ID NO: 1708725 - DNA, 15 bp, Homo sapiens
tcctttcacaaatgt

SEQ ID NO: 1708726 - DNA, 15 bp, Homo sapiens
cctttcacaaatgta

SEQ ID NO: 1708727 - DNA, 15 bp, Homo sapiens
ctttcacaaatgtaa

SEQ ID NO: 1708728 - DNA, 15 bp, Homo sapiens
tttcacaaatgtaaa

SEQ ID NO: 1708729 - DNA, 15 bp, Homo sapiens
ttcacaaatgtaaat

SEQ ID NO: 1708730 - DNA, 15 bp, Homo sapiens
tcacaaatgtaaatg

SEQ ID NO: 1708731 - DNA, 15 bp, Homo sapiens
cacaaatgtaaatgg

SEQ ID NO: 1708732 - DNA, 15 bp, Homo sapiens
acaaatgtaaatgga

SEQ ID NO: 1708733 - DNA, 15 bp, Homo sapiens
caaatgtaaatggat

SEQ ID NO: 1708734 - DNA, 15 bp, Homo sapiens
aaatgtaaatggatt

SEQ ID NO: 1708735 - DNA, 15 bp, Homo sapiens
aatgtaaatggatta

SEQ ID NO: 1708736 - DNA, 15 bp, Homo sapiens
atgtaaatggattaa

SEQ ID NO: 1708737 - DNA, 15 bp, Homo sapiens
tgtaaatggattaaa

SEQ ID NO: 1708738 - DNA, 15 bp, Homo sapiens
gtaaatggattaaat

SEQ ID NO: 1708739 - DNA, 15 bp, Homo sapiens
taaatggattaaatg

SEQ ID NO: 1708740 - DNA, 15 bp, Homo sapiens
aaatggattaaatgt

SEQ ID NO: 1708741 - DNA, 15 bp, Homo sapiens
aatggattaaatgtc

SEQ ID NO: 1708742 - DNA, 15 bp, Homo sapiens
atggattaaatgtcc

SEQ ID NO: 1708743 - DNA, 15 bp, Homo sapiens
tggattaaatgtcca

SEQ ID NO: 1708744 - DNA, 15 bp, Homo sapiens
ggattaaatgtccac

SEQ ID NO: 1708745 - DNA, 15 bp, Homo sapiens
gattaaatgtccact

SEQ ID NO: 1708746 - DNA, 15 bp, Homo sapiens
attaaatgtccacta

SEQ ID NO: 1708747 - DNA, 15 bp, Homo sapiens
ttaaatgtccactat

SEQ ID NO: 1708748 - DNA, 15 bp, Homo sapiens
taaatgtccactatt

SEQ ID NO: 1708749 - DNA, 15 bp, Homo sapiens
aaatgtccactatta

SEQ ID NO: 1708750 - DNA, 15 bp, Homo sapiens
aatgtccactattaa

SEQ ID NO: 1708751 - DNA, 15 bp, Homo sapiens
atgtccactattaaa

SEQ ID NO: 1708752 - DNA, 15 bp, Homo sapiens
tgtccactattaaat

SEQ ID NO: 1708753 - DNA, 15 bp, Homo sapiens
gtccactattaaata

SEQ ID NO: 1708754 - DNA, 15 bp, Homo sapiens
tccactattaaatac

SEQ ID NO: 1708755 - DNA, 15 bp, Homo sapiens
ccactattaaataca

SEQ ID NO: 1708756 - DNA, 15 bp, Homo sapiens
cactattaaatacat

SEQ ID NO: 1708757 - DNA, 15 bp, Homo sapiens
actattaaatacata

SEQ ID NO: 1708758 - DNA, 15 bp, Homo sapiens
ctattaaatacatat

SEQ ID NO: 1708759 - DNA, 15 bp, Homo sapiens
tattaaatacatatt

SEQ ID NO: 1708760 - DNA, 15 bp, Homo sapiens
attaaatacatattg

SEQ ID NO: 1708761 - DNA, 15 bp, Homo sapiens
ttaaatacatattgg

SEQ ID NO: 1708762 - DNA, 15 bp, Homo sapiens
taaatacatattgga

SEQ ID NO: 1708763 - DNA, 15 bp, Homo sapiens
aaatacatattggaa

SEQ ID NO: 1708764 - DNA, 15 bp, Homo sapiens
aatacatattggaag

SEQ ID NO: 1708765 - DNA, 15 bp, Homo sapiens
atacatattggaaga

SEQ ID NO: 1708766 - DNA, 15 bp, Homo sapiens
tacatattggaagaa

SEQ ID NO: 1708767 - DNA, 15 bp, Homo sapiens
acatattggaagaat

SEQ ID NO: 1708768 - DNA, 15 bp, Homo sapiens
catattggaagaatg

SEQ ID NO: 1708769 - DNA, 15 bp, Homo sapiens
atattggaagaatgg

SEQ ID NO: 1708770 - DNA, 15 bp, Homo sapiens
tattggaagaatgga

SEQ ID NO: 1708771 - DNA, 15 bp, Homo sapiens
attggaagaatggat

SEQ ID NO: 1708772 - DNA, 15 bp, Homo sapiens
ttggaagaatggatt

SEQ ID NO: 1708773 - DNA, 15 bp, Homo sapiens
tggaagaatggatta

SEQ ID NO: 1708774 - DNA, 15 bp, Homo sapiens
ggaagaatggattaa

SEQ ID NO: 1708775 - DNA, 15 bp, Homo sapiens
gaagaatggattaaa

SEQ ID NO: 1708776 - DNA, 15 bp, Homo sapiens
aagaatggattaaaa

SEQ ID NO: 1708777 - DNA, 15 bp, Homo sapiens
agaatggattaaaaa

SEQ ID NO: 1708778 - DNA, 15 bp, Homo sapiens
gaatggattaaaaaa

SEQ ID NO: 1708779 - DNA, 15 bp, Homo sapiens
aatggattaaaaaaa

SEQ ID NO: 1708780 - DNA, 15 bp, Homo sapiens
gattaaaaaaataat

SEQ ID NO: 1708781 - DNA, 15 bp, Homo sapiens
attaaaaaaataatc

SEQ ID NO: 1708782 - DNA, 15 bp, Homo sapiens
ttaaaaaaataatcc

SEQ ID NO: 1708783 - DNA, 15 bp, Homo sapiens
taaaaaaataatcca

SEQ ID NO: 1708784 - DNA, 15 bp, Homo sapiens
aaaaaaataatccaa

SEQ ID NO: 1708785 - DNA, 15 bp, Homo sapiens
aaaaaataatccaac

SEQ ID NO: 1708786 - DNA, 15 bp, Homo sapiens
aaaaataatccaact

SEQ ID NO: 1708787 - DNA, 15 bp, Homo sapiens
aaaataatccaacta

SEQ ID NO: 1708788 - DNA, 15 bp, Homo sapiens
aaataatccaactaa

SEQ ID NO: 1708789 - DNA, 15 bp, Homo sapiens
aataatccaactaaa

SEQ ID NO: 1708790 - DNA, 15 bp, Homo sapiens
ataatccaactaaat

SEQ ID NO: 1708791 - DNA, 15 bp, Homo sapiens
taatccaactaaatg

SEQ ID NO: 1708792 - DNA, 15 bp, Homo sapiens
aatccaactaaatgc

SEQ ID NO: 1708793 - DNA, 15 bp, Homo sapiens
atccaactaaatgct

SEQ ID NO: 1708794 - DNA, 15 bp, Homo sapiens
tccaactaaatgctg

SEQ ID NO: 1708795 - DNA, 15 bp, Homo sapiens
ccaactaaatgctga

SEQ ID NO: 1708796 - DNA, 15 bp, Homo sapiens
caactaaatgctgac

SEQ ID NO: 1708797 - DNA, 15 bp, Homo sapiens
aactaaatgctgact

SEQ ID NO: 1708798 - DNA, 15 bp, Homo sapiens
actaaatgctgacta

SEQ ID NO: 1708799 - DNA, 15 bp, Homo sapiens
ctaaatgctgactat

SEQ ID NO: 1708800 - DNA, 15 bp, Homo sapiens
taaatgctgactata

SEQ ID NO: 1708801 - DNA, 15 bp, Homo sapiens
aaatgctgactataa

SEQ ID NO: 1708802 - DNA, 15 bp, Homo sapiens
aatgctgactataag

SEQ ID NO: 1708803 - DNA, 15 bp, Homo sapiens
atgctgactataaga

SEQ ID NO: 1708804 - DNA, 15 bp, Homo sapiens
tgctgactataagaa

SEQ ID NO: 1708805 - DNA, 15 bp, Homo sapiens
gctgactataagaaa

SEQ ID NO: 1708806 - DNA, 15 bp, Homo sapiens
ctgactataagaaac

SEQ ID NO: 1708807 - DNA, 15 bp, Homo sapiens
tgactataagaaact

SEQ ID NO: 1708808 - DNA, 15 bp, Homo sapiens
gactataagaaactc

SEQ ID NO: 1708809 - DNA, 15 bp, Homo sapiens
actataagaaactca

SEQ ID NO: 1708810 - DNA, 15 bp, Homo sapiens
ctataagaaactcac

SEQ ID NO: 1708811 - DNA, 15 bp, Homo sapiens
tataagaaactcacc

SEQ ID NO: 1708812 - DNA, 15 bp, Homo sapiens
ataagaaactcacct

SEQ ID NO: 1708813 - DNA, 15 bp, Homo sapiens
aagaaactcacctta

SEQ ID NO: 1708814 - DNA, 15 bp, Homo sapiens
agaaactcaccttac

SEQ ID NO: 1708815 - DNA, 15 bp, Homo sapiens
gaaactcaccttacc

SEQ ID NO: 1708816 - DNA, 15 bp, Homo sapiens
aaactcaccttacct

SEQ ID NO: 1708817 - DNA, 15 bp, Homo sapiens
aactcaccttaccta

SEQ ID NO: 1708818 - DNA, 15 bp, Homo sapiens
actcaccttacctat

SEQ ID NO: 1708819 - DNA, 15 bp, Homo sapiens
ctcaccttacctata

SEQ ID NO: 1708820 - DNA, 15 bp, Homo sapiens
tcaccttacctataa

SEQ ID NO: 1708821 - DNA, 15 bp, Homo sapiens
caccttacctataaa

SEQ ID NO: 1708822 - DNA, 15 bp, Homo sapiens
accttacctataaag

SEQ ID NO: 1708823 - DNA, 15 bp, Homo sapiens
ccttacctataaaga

SEQ ID NO: 1708824 - DNA, 15 bp, Homo sapiens
cttacctataaagac

SEQ ID NO: 1708825 - DNA, 15 bp, Homo sapiens
ttacctataaagaca

SEQ ID NO: 1708826 - DNA, 15 bp, Homo sapiens
tacctataaagacac

SEQ ID NO: 1708827 - DNA, 15 bp, Homo sapiens
acctataaagacaca

SEQ ID NO: 1708828 - DNA, 15 bp, Homo sapiens
cctataaagacacat

SEQ ID NO: 1708829 - DNA, 15 bp, Homo sapiens
ctataaagacacata

SEQ ID NO: 1708830 - DNA, 15 bp, Homo sapiens
tataaagacacatat

SEQ ID NO: 1708831 - DNA, 15 bp, Homo sapiens
ataaagacacatata

SEQ ID NO: 1708832 - DNA, 15 bp, Homo sapiens
taaagacacatatag

SEQ ID NO: 1708833 - DNA, 15 bp, Homo sapiens
aaagacacatataga

SEQ ID NO: 1708834 - DNA, 15 bp, Homo sapiens
aagacacatatagac

SEQ ID NO: 1708835 - DNA, 15 bp, Homo sapiens
agacacatatagact

SEQ ID NO: 1708836 - DNA, 15 bp, Homo sapiens
gacacatatagactg

SEQ ID NO: 1708837 - DNA, 15 bp, Homo sapiens
acacatatagactga

SEQ ID NO: 1708838 - DNA, 15 bp, Homo sapiens
cacatatagactgag

SEQ ID NO: 1708839 - DNA, 15 bp, Homo sapiens
acatatagactgaga

SEQ ID NO: 1708840 - DNA, 15 bp, Homo sapiens
catatagactgagag

SEQ ID NO: 1708841 - DNA, 15 bp, Homo sapiens
atatagactgagagt

SEQ ID NO: 1708842 - DNA, 15 bp, Homo sapiens
tatagactgagagta

SEQ ID NO: 1708843 - DNA, 15 bp, Homo sapiens
atagactgagagtaa

SEQ ID NO: 1708844 - DNA, 15 bp, Homo sapiens
tagactgagagtaat

SEQ ID NO: 1708845 - DNA, 15 bp, Homo sapiens
agactgagagtaatg

SEQ ID NO: 1708846 - DNA, 15 bp, Homo sapiens
gactgagagtaatgg

SEQ ID NO: 1708847 - DNA, 15 bp, Homo sapiens
actgagagtaatggg

SEQ ID NO: 1708848 - DNA, 15 bp, Homo sapiens
ctgagagtaatgggg

SEQ ID NO: 1708849 - DNA, 15 bp, Homo sapiens
tgagagtaatggggc

SEQ ID NO: 1708850 - DNA, 15 bp, Homo sapiens
gagagtaatggggcg

SEQ ID NO: 1708851 - DNA, 15 bp, Homo sapiens
agagtaatggggcgt

SEQ ID NO: 1708852 - DNA, 15 bp, Homo sapiens
gagtaatggggcgta

SEQ ID NO: 1708853 - DNA, 15 bp, Homo sapiens
agtaatggggcgtaa

SEQ ID NO: 1708854 - DNA, 15 bp, Homo sapiens
gtaatggggcgtaaa

SEQ ID NO: 1708855 - DNA, 15 bp, Homo sapiens
taatggggcgtaaaa

SEQ ID NO: 1708856 - DNA, 15 bp, Homo sapiens
aatggggcgtaaaaa

SEQ ID NO: 1708857 - DNA, 15 bp, Homo sapiens
atggggcgtaaaaag

SEQ ID NO: 1708858 - DNA, 15 bp, Homo sapiens
tggggcgtaaaaaga

SEQ ID NO: 1708859 - DNA, 15 bp, Homo sapiens
ggggcgtaaaaagat

SEQ ID NO: 1708860 - DNA, 15 bp, Homo sapiens
gggcgtaaaaagata

SEQ ID NO: 1708861 - DNA, 15 bp, Homo sapiens
ggcgtaaaaagatat

SEQ ID NO: 1708862 - DNA, 15 bp, Homo sapiens
gcgtaaaaagatatt

SEQ ID NO: 1708863 - DNA, 15 bp, Homo sapiens
cgtaaaaagatattc

SEQ ID NO: 1708864 - DNA, 15 bp, Homo sapiens
gtaaaaagatattcc

SEQ ID NO: 1708865 - DNA, 15 bp, Homo sapiens
taaaaagatattcca

SEQ ID NO: 1708866 - DNA, 15 bp, Homo sapiens
aaaaagatattccat

SEQ ID NO: 1708867 - DNA, 15 bp, Homo sapiens
aaaagatattccatg

SEQ ID NO: 1708868 - DNA, 15 bp, Homo sapiens
aaagatattccatgc

SEQ ID NO: 1708869 - DNA, 15 bp, Homo sapiens
aagatattccatgca

SEQ ID NO: 1708870 - DNA, 15 bp, Homo sapiens
agatattccatgcaa

SEQ ID NO: 1708871 - DNA, 15 bp, Homo sapiens
gatattccatgcaaa

SEQ ID NO: 1708872 - DNA, 15 bp, Homo sapiens
atattccatgcaaat

SEQ ID NO: 1708873 - DNA, 15 bp, Homo sapiens
tattccatgcaaatg

SEQ ID NO: 1708874 - DNA, 15 bp, Homo sapiens
attccatgcaaatgg

SEQ ID NO: 1708875 - DNA, 15 bp, Homo sapiens
ttccatgcaaatgga

SEQ ID NO: 1708876 - DNA, 15 bp, Homo sapiens
tccatgcaaatggaa

SEQ ID NO: 1708877 - DNA, 15 bp, Homo sapiens
ccatgcaaatggaaa

SEQ ID NO: 1708878 - DNA, 15 bp, Homo sapiens
catgcaaatggaaac

SEQ ID NO: 1708879 - DNA, 15 bp, Homo sapiens
atgcaaatggaaacc

SEQ ID NO: 1708880 - DNA, 15 bp, Homo sapiens
tgcaaatggaaacca

SEQ ID NO: 1708881 - DNA, 15 bp, Homo sapiens
gcaaatggaaaccaa

SEQ ID NO: 1708882 - DNA, 15 bp, Homo sapiens
caaatggaaaccaaa

SEQ ID NO: 1708883 - DNA, 15 bp, Homo sapiens
aaatggaaaccaaag

SEQ ID NO: 1708884 - DNA, 15 bp, Homo sapiens
aatggaaaccaaagt

SEQ ID NO: 1708885 - DNA, 15 bp, Homo sapiens
atggaaaccaaagtt

SEQ ID NO: 1708886 - DNA, 15 bp, Homo sapiens
tggaaaccaaagttg

SEQ ID NO: 1708887 - DNA, 15 bp, Homo sapiens
ggaaaccaaagttga

SEQ ID NO: 1708888 - DNA, 15 bp, Homo sapiens
gaaaccaaagttgag

SEQ ID NO: 1708889 - DNA, 15 bp, Homo sapiens
aaaccaaagttgagc

SEQ ID NO: 1708890 - DNA, 15 bp, Homo sapiens
aaccaaagttgagca

SEQ ID NO: 1708891 - DNA, 15 bp, Homo sapiens
accaaagttgagcaa

SEQ ID NO: 1708892 - DNA, 15 bp, Homo sapiens
ccaaagttgagcaaa

SEQ ID NO: 1708893 - DNA, 15 bp, Homo sapiens
caaagttgagcaaaa

SEQ ID NO: 1708894 - DNA, 15 bp, Homo sapiens
aaagttgagcaaaag

SEQ ID NO: 1708895 - DNA, 15 bp, Homo sapiens
aagttgagcaaaagt

SEQ ID NO: 1708896 - DNA, 15 bp, Homo sapiens
agttgagcaaaagta

SEQ ID NO: 1708897 - DNA, 15 bp, Homo sapiens
gttgagcaaaagtag

SEQ ID NO: 1708898 - DNA, 15 bp, Homo sapiens
ttgagcaaaagtagc

SEQ ID NO: 1708899 - DNA, 15 bp, Homo sapiens
tgagcaaaagtagcc

SEQ ID NO: 1708900 - DNA, 15 bp, Homo sapiens
gagcaaaagtagcca

SEQ ID NO: 1708901 - DNA, 15 bp, Homo sapiens
agcaaaagtagccac

SEQ ID NO: 1708902 - DNA, 15 bp, Homo sapiens
gcaaaagtagccaca

SEQ ID NO: 1708903 - DNA, 15 bp, Homo sapiens
caaaagtagccacac

SEQ ID NO: 1708904 - DNA, 15 bp, Homo sapiens
aaaagtagccacact

SEQ ID NO: 1708905 - DNA, 15 bp, Homo sapiens
aaagtagccacactt

SEQ ID NO: 1708906 - DNA, 15 bp, Homo sapiens
aagtagccacactta

SEQ ID NO: 1708907 - DNA, 15 bp, Homo sapiens
agtagccacacttat

SEQ ID NO: 1708908 - DNA, 15 bp, Homo sapiens
gtagccacacttata

SEQ ID NO: 1708909 - DNA, 15 bp, Homo sapiens
tagccacacttatat

SEQ ID NO: 1708910 - DNA, 15 bp, Homo sapiens
agccacacttatatc

SEQ ID NO: 1708911 - DNA, 15 bp, Homo sapiens
gccacacttatatca

SEQ ID NO: 1708912 - DNA, 15 bp, Homo sapiens
ccacacttatatcag

SEQ ID NO: 1708913 - DNA, 15 bp, Homo sapiens
cacacttatatcaga

SEQ ID NO: 1708914 - DNA, 15 bp, Homo sapiens
acacttatatcagat

SEQ ID NO: 1708915 - DNA, 15 bp, Homo sapiens
cacttatatcagata

SEQ ID NO: 1708916 - DNA, 15 bp, Homo sapiens
acttatatcagataa

SEQ ID NO: 1708917 - DNA, 15 bp, Homo sapiens
cttatatcagataaa

SEQ ID NO: 1708918 - DNA, 15 bp, Homo sapiens
ttatatcagataaaa

SEQ ID NO: 1708919 - DNA, 15 bp, Homo sapiens
tatatcagataaaac

SEQ ID NO: 1708920 - DNA, 15 bp, Homo sapiens
atatcagataaaaca

SEQ ID NO: 1708921 - DNA, 15 bp, Homo sapiens
tatcagataaaacac

SEQ ID NO: 1708922 - DNA, 15 bp, Homo sapiens
atcagataaaacact

SEQ ID NO: 1708923 - DNA, 15 bp, Homo sapiens
tcagataaaacactt

SEQ ID NO: 1708924 - DNA, 15 bp, Homo sapiens
cagataaaacacttt

SEQ ID NO: 1708925 - DNA, 15 bp, Homo sapiens
agataaaacacttta

SEQ ID NO: 1708926 - DNA, 15 bp, Homo sapiens
gataaaacactttaa

SEQ ID NO: 1708927 - DNA, 15 bp, Homo sapiens
ataaaacactttaaa

SEQ ID NO: 1708928 - DNA, 15 bp, Homo sapiens
taaaacactttaaat

SEQ ID NO: 1708929 - DNA, 15 bp, Homo sapiens
aaaacactttaaatc

SEQ ID NO: 1708930 - DNA, 15 bp, Homo sapiens
aaacactttaaatca

SEQ ID NO: 1708931 - DNA, 15 bp, Homo sapiens
aacactttaaatcaa

SEQ ID NO: 1708932 - DNA, 15 bp, Homo sapiens
acactttaaatcaaa

SEQ ID NO: 1708933 - DNA, 15 bp, Homo sapiens
cactttaaatcaaaa

SEQ ID NO: 1708934 - DNA, 15 bp, Homo sapiens
actttaaatcaaaaa

SEQ ID NO: 1708935 - DNA, 15 bp, Homo sapiens
ctttaaatcaaaaat

SEQ ID NO: 1708936 - DNA, 15 bp, Homo sapiens
tttaaatcaaaaata

SEQ ID NO: 1708937 - DNA, 15 bp, Homo sapiens
ttaaatcaaaaatag

SEQ ID NO: 1708938 - DNA, 15 bp, Homo sapiens
taaatcaaaaatagt

SEQ ID NO: 1708939 - DNA, 15 bp, Homo sapiens
aaatcaaaaatagta

SEQ ID NO: 1708940 - DNA, 15 bp, Homo sapiens
aatcaaaaatagtaa

SEQ ID NO: 1708941 - DNA, 15 bp, Homo sapiens
atcaaaaatagtaaa

SEQ ID NO: 1708942 - DNA, 15 bp, Homo sapiens
tcaaaaatagtaaaa

SEQ ID NO: 1708943 - DNA, 15 bp, Homo sapiens
caaaaatagtaaaaa

SEQ ID NO: 1708944 - DNA, 15 bp, Homo sapiens
aaaaatagtaaaaaa

SEQ ID NO: 1708945 - DNA, 15 bp, Homo sapiens
gttagttttctcctt

SEQ ID NO: 1708946 - DNA, 15 bp, Homo sapiens
ttagttttctccttc

SEQ ID NO: 1708947 - DNA, 15 bp, Homo sapiens
tagttttctccttca

SEQ ID NO: 1708948 - DNA, 15 bp, Homo sapiens
agttttctccttcaa

SEQ ID NO: 1708949 - DNA, 15 bp, Homo sapiens
gttttctccttcaac

SEQ ID NO: 1708950 - DNA, 15 bp, Homo sapiens
ttttctccttcaaca

SEQ ID NO: 1708951 - DNA, 15 bp, Homo sapiens
tttctccttcaacaa

SEQ ID NO: 1708952 - DNA, 15 bp, Homo sapiens
ttctccttcaacaaa

SEQ ID NO: 1708953 - DNA, 15 bp, Homo sapiens
tctccttcaacaaac

SEQ ID NO: 1708954 - DNA, 15 bp, Homo sapiens
ctccttcaacaaact

SEQ ID NO: 1708955 - DNA, 15 bp, Homo sapiens
tccttcaacaaactt

SEQ ID NO: 1708956 - DNA, 15 bp, Homo sapiens
ccttcaacaaactta

SEQ ID NO: 1708957 - DNA, 15 bp, Homo sapiens
cttcaacaaacttac

SEQ ID NO: 1708958 - DNA, 15 bp, Homo sapiens
ttcaacaaacttacc

SEQ ID NO: 1708959 - DNA, 15 bp, Homo sapiens
tcaacaaacttacca

SEQ ID NO: 1708960 - DNA, 15 bp, Homo sapiens
caacaaacttaccat

SEQ ID NO: 1708961 - DNA, 15 bp, Homo sapiens
aacaaacttaccatt

SEQ ID NO: 1708962 - DNA, 15 bp, Homo sapiens
acaaacttaccatta

SEQ ID NO: 1708963 - DNA, 15 bp, Homo sapiens
caaacttaccattac

SEQ ID NO: 1708964 - DNA, 15 bp, Homo sapiens
aaacttaccattaca

SEQ ID NO: 1708965 - DNA, 15 bp, Homo sapiens
aacttaccattacaa

SEQ ID NO: 1708966 - DNA, 15 bp, Homo sapiens
acttaccattacaaa

SEQ ID NO: 1708967 - DNA, 15 bp, Homo sapiens
cttaccattacaaaa

SEQ ID NO: 1708968 - DNA, 15 bp, Homo sapiens
ttaccattacaaaaa

SEQ ID NO: 1708969 - DNA, 15 bp, Homo sapiens
taccattacaaaaat

SEQ ID NO: 1708970 - DNA, 15 bp, Homo sapiens
accattacaaaaata

SEQ ID NO: 1708971 - DNA, 15 bp, Homo sapiens
ccattacaaaaatag

SEQ ID NO: 1708972 - DNA, 15 bp, Homo sapiens
cattacaaaaatagc

SEQ ID NO: 1708973 - DNA, 15 bp, Homo sapiens
attacaaaaatagca

SEQ ID NO: 1708974 - DNA, 15 bp, Homo sapiens
ttacaaaaatagcaa

SEQ ID NO: 1708975 - DNA, 15 bp, Homo sapiens
tacaaaaatagcaaa

SEQ ID NO: 1708976 - DNA, 15 bp, Homo sapiens
acaaaaatagcaaag

SEQ ID NO: 1708977 - DNA, 15 bp, Homo sapiens
caaaaatagcaaaga

SEQ ID NO: 1708978 - DNA, 15 bp, Homo sapiens
aaaaatagcaaagat

SEQ ID NO: 1708979 - DNA, 15 bp, Homo sapiens
aaaatagcaaagatg

SEQ ID NO: 1708980 - DNA, 15 bp, Homo sapiens
aaatagcaaagatgt

SEQ ID NO: 1708981 - DNA, 15 bp, Homo sapiens
aatagcaaagatgtg

SEQ ID NO: 1708982 - DNA, 15 bp, Homo sapiens
atagcaaagatgtgt

SEQ ID NO: 1708983 - DNA, 15 bp, Homo sapiens
tagcaaagatgtgtg

SEQ ID NO: 1708984 - DNA, 15 bp, Homo sapiens
agcaaagatgtgtgc

SEQ ID NO: 1708985 - DNA, 15 bp, Homo sapiens
gcaaagatgtgtgcc

SEQ ID NO: 1708986 - DNA, 15 bp, Homo sapiens
caaagatgtgtgcca

SEQ ID NO: 1708987 - DNA, 15 bp, Homo sapiens
aaagatgtgtgccaa

SEQ ID NO: 1708988 - DNA, 15 bp, Homo sapiens
aagatgtgtgccaaa

SEQ ID NO: 1708989 - DNA, 15 bp, Homo sapiens
agatgtgtgccaaaa

SEQ ID NO: 1708990 - DNA, 15 bp, Homo sapiens
gatgtgtgccaaaac

SEQ ID NO: 1708991 - DNA, 15 bp, Homo sapiens
atgtgtgccaaaact

SEQ ID NO: 1708992 - DNA, 15 bp, Homo sapiens
tgtgtgccaaaacta

SEQ ID NO: 1708993 - DNA, 15 bp, Homo sapiens
gtgtgccaaaactac

SEQ ID NO: 1708994 - DNA, 15 bp, Homo sapiens
tgtgccaaaactaca

SEQ ID NO: 1708995 - DNA, 15 bp, Homo sapiens
gtgccaaaactacaa

SEQ ID NO: 1708996 - DNA, 15 bp, Homo sapiens
tgccaaaactacaac

SEQ ID NO: 1708997 - DNA, 15 bp, Homo sapiens
gccaaaactacaact

SEQ ID NO: 1708998 - DNA, 15 bp, Homo sapiens
ccaaaactacaacta

SEQ ID NO: 1708999 - DNA, 15 bp, Homo sapiens
caaaactacaactag

SEQ ID NO: 1709000 - DNA, 15 bp, Homo sapiens
aaaactacaactagt

SEQ ID NO: 1709001 - DNA, 15 bp, Homo sapiens
aaactacaactagta

SEQ ID NO: 1709002 - DNA, 15 bp, Homo sapiens
aactacaactagtaa

SEQ ID NO: 1709003 - DNA, 15 bp, Homo sapiens
actacaactagtaaa

SEQ ID NO: 1709004 - DNA, 15 bp, Homo sapiens
ctacaactagtaaag

SEQ ID NO: 1709005 - DNA, 15 bp, Homo sapiens
tacaactagtaaagg

SEQ ID NO: 1709006 - DNA, 15 bp, Homo sapiens
acaactagtaaagga

SEQ ID NO: 1709007 - DNA, 15 bp, Homo sapiens
caactagtaaaggaa

SEQ ID NO: 1709008 - DNA, 15 bp, Homo sapiens
aactagtaaaggaac

SEQ ID NO: 1709009 - DNA, 15 bp, Homo sapiens
actagtaaaggaaca

SEQ ID NO: 1709010 - DNA, 15 bp, Homo sapiens
ctagtaaaggaacag

SEQ ID NO: 1709011 - DNA, 15 bp, Homo sapiens
tagtaaaggaacaga

SEQ ID NO: 1709012 - DNA, 15 bp, Homo sapiens
agtaaaggaacagag

SEQ ID NO: 1709013 - DNA, 15 bp, Homo sapiens
gtaaaggaacagagg

SEQ ID NO: 1709014 - DNA, 15 bp, Homo sapiens
taaaggaacagagga

SEQ ID NO: 1709015 - DNA, 15 bp, Homo sapiens
aaggaacagaggaat

SEQ ID NO: 1709016 - DNA, 15 bp, Homo sapiens
aggaacagaggaatc

SEQ ID NO: 1709017 - DNA, 15 bp, Homo sapiens
ggaacagaggaatct

SEQ ID NO: 1709018 - DNA, 15 bp, Homo sapiens
gaacagaggaatcta

SEQ ID NO: 1709019 - DNA, 15 bp, Homo sapiens
aacagaggaatctat

SEQ ID NO: 1709020 - DNA, 15 bp, Homo sapiens
acagaggaatctatg

SEQ ID NO: 1709021 - DNA, 15 bp, Homo sapiens
cagaggaatctatgg

SEQ ID NO: 1709022 - DNA, 15 bp, Homo sapiens
agaggaatctatgga

SEQ ID NO: 1709023 - DNA, 15 bp, Homo sapiens
gaggaatctatggat

SEQ ID NO: 1709024 - DNA, 15 bp, Homo sapiens
aggaatctatggatg

SEQ ID NO: 1709025 - DNA, 15 bp, Homo sapiens
ggaatctatggatgg

SEQ ID NO: 1709026 - DNA, 15 bp, Homo sapiens
gaatctatggatgga

SEQ ID NO: 1709027 - DNA, 15 bp, Homo sapiens
aatctatggatggat

SEQ ID NO: 1709028 - DNA, 15 bp, Homo sapiens
atctatggatggata

SEQ ID NO: 1709029 - DNA, 15 bp, Homo sapiens
tctatggatggatag

SEQ ID NO: 1709030 - DNA, 15 bp, Homo sapiens
ctatggatggatagc

SEQ ID NO: 1709031 - DNA, 15 bp, Homo sapiens
tatggatggatagcc

SEQ ID NO: 1709032 - DNA, 15 bp, Homo sapiens
tggatggatagccct

SEQ ID NO: 1709033 - DNA, 15 bp, Homo sapiens
ggatggatagccctt

SEQ ID NO: 1709034 - DNA, 15 bp, Homo sapiens
gatggatagcccttg

SEQ ID NO: 1709035 - DNA, 15 bp, Homo sapiens
atggatagcccttgg

SEQ ID NO: 1709036 - DNA, 15 bp, Homo sapiens
tggatagcccttgga

SEQ ID NO: 1709037 - DNA, 15 bp, Homo sapiens
ggatagcccttggag

SEQ ID NO: 1709038 - DNA, 15 bp, Homo sapiens
gatagcccttggagt

SEQ ID NO: 1709039 - DNA, 15 bp, Homo sapiens
atagcccttggagtt

SEQ ID NO: 1709040 - DNA, 15 bp, Homo sapiens
tagcccttggagttg

SEQ ID NO: 1709041 - DNA, 15 bp, Homo sapiens
agcccttggagttgc

SEQ ID NO: 1709042 - DNA, 15 bp, Homo sapiens
gcccttggagttgca

SEQ ID NO: 1709043 - DNA, 15 bp, Homo sapiens
cccttggagttgcat

SEQ ID NO: 1709044 - DNA, 15 bp, Homo sapiens
ccttggagttgcatt

SEQ ID NO: 1709045 - DNA, 15 bp, Homo sapiens
cttggagttgcattt

SEQ ID NO: 1709046 - DNA, 15 bp, Homo sapiens
ttggagttgcatttc

SEQ ID NO: 1709047 - DNA, 15 bp, Homo sapiens
tggagttgcatttca

SEQ ID NO: 1709048 - DNA, 15 bp, Homo sapiens
ggagttgcatttcaa

SEQ ID NO: 1709049 - DNA, 15 bp, Homo sapiens
gagttgcatttcaac

SEQ ID NO: 1709050 - DNA, 15 bp, Homo sapiens
agttgcatttcaaca

SEQ ID NO: 1709051 - DNA, 15 bp, Homo sapiens
gttgcatttcaacaa

SEQ ID NO: 1709052 - DNA, 15 bp, Homo sapiens
ttgcatttcaacaat

SEQ ID NO: 1709053 - DNA, 15 bp, Homo sapiens
tgcatttcaacaata

SEQ ID NO: 1709054 - DNA, 15 bp, Homo sapiens
gcatttcaacaataa

SEQ ID NO: 1709055 - DNA, 15 bp, Homo sapiens
catttcaacaataag

SEQ ID NO: 1709056 - DNA, 15 bp, Homo sapiens
atttcaacaataaga

SEQ ID NO: 1709057 - DNA, 15 bp, Homo sapiens
tttcaacaataagaa

SEQ ID NO: 1709058 - DNA, 15 bp, Homo sapiens
ttcaacaataagaat

SEQ ID NO: 1709059 - DNA, 15 bp, Homo sapiens
tcaacaataagaata

SEQ ID NO: 1709060 - DNA, 15 bp, Homo sapiens
caacaataagaatat

SEQ ID NO: 1709061 - DNA, 15 bp, Homo sapiens
aacaataagaatata

SEQ ID NO: 1709062 - DNA, 15 bp, Homo sapiens
acaataagaatatac

SEQ ID NO: 1709063 - DNA, 15 bp, Homo sapiens
caataagaatataca

SEQ ID NO: 1709064 - DNA, 15 bp, Homo sapiens
aataagaatatacaa

SEQ ID NO: 1709065 - DNA, 15 bp, Homo sapiens
ataagaatatacaaa

SEQ ID NO: 1709066 - DNA, 15 bp, Homo sapiens
taagaatatacaaag

SEQ ID NO: 1709067 - DNA, 15 bp, Homo sapiens
aagaatatacaaaga

SEQ ID NO: 1709068 - DNA, 15 bp, Homo sapiens
agaatatacaaagaa

SEQ ID NO: 1709069 - DNA, 15 bp, Homo sapiens
gaatatacaaagaac

SEQ ID NO: 1709070 - DNA, 15 bp, Homo sapiens
aatatacaaagaact

SEQ ID NO: 1709071 - DNA, 15 bp, Homo sapiens
atatacaaagaactc

SEQ ID NO: 1709072 - DNA, 15 bp, Homo sapiens
tatacaaagaactcg

SEQ ID NO: 1709073 - DNA, 15 bp, Homo sapiens
atacaaagaactcgt

SEQ ID NO: 1709074 - DNA, 15 bp, Homo sapiens
tacaaagaactcgtg

SEQ ID NO: 1709075 - DNA, 15 bp, Homo sapiens
acaaagaactcgtgg

SEQ ID NO: 1709076 - DNA, 15 bp, Homo sapiens
caaagaactcgtgga

SEQ ID NO: 1709077 - DNA, 15 bp, Homo sapiens
aaagaactcgtggag

SEQ ID NO: 1709078 - DNA, 15 bp, Homo sapiens
aagaactcgtggagc

SEQ ID NO: 1709079 - DNA, 15 bp, Homo sapiens
agaactcgtggagca

SEQ ID NO: 1709080 - DNA, 15 bp, Homo sapiens
gaactcgtggagcag

SEQ ID NO: 1709081 - DNA, 15 bp, Homo sapiens
aactcgtggagcaga

SEQ ID NO: 1709082 - DNA, 15 bp, Homo sapiens
actcgtggagcagaa

SEQ ID NO: 1709083 - DNA, 15 bp, Homo sapiens
ctcgtggagcagaat

SEQ ID NO: 1709084 - DNA, 15 bp, Homo sapiens
tcgtggagcagaatt

SEQ ID NO: 1709085 - DNA, 15 bp, Homo sapiens
cgtggagcagaattt

SEQ ID NO: 1709086 - DNA, 15 bp, Homo sapiens
gtggagcagaatttt

SEQ ID NO: 1709087 - DNA, 15 bp, Homo sapiens
tggagcagaattttg

SEQ ID NO: 1709088 - DNA, 15 bp, Homo sapiens
ggagcagaattttgt

SEQ ID NO: 1709089 - DNA, 15 bp, Homo sapiens
gagcagaattttgtg

SEQ ID NO: 1709090 - DNA, 15 bp, Homo sapiens
agcagaattttgtga

SEQ ID NO: 1709091 - DNA, 15 bp, Homo sapiens
gcagaattttgtgaa

SEQ ID NO: 1709092 - DNA, 15 bp, Homo sapiens
cagaattttgtgaaa

SEQ ID NO: 1709093 - DNA, 15 bp, Homo sapiens
agaattttgtgaaaa

SEQ ID NO: 1709094 - DNA, 15 bp, Homo sapiens
gaattttgtgaaaaa

SEQ ID NO: 1709095 - DNA, 15 bp, Homo sapiens
aattttgtgaaaaaa

SEQ ID NO: 1709096 - DNA, 15 bp, Homo sapiens
attttgtgaaaaaag

SEQ ID NO: 1709097 - DNA, 15 bp, Homo sapiens
ttttgtgaaaaaaga

SEQ ID NO: 1709098 - DNA, 15 bp, Homo sapiens
tttgtgaaaaaagat

SEQ ID NO: 1709099 - DNA, 15 bp, Homo sapiens
ttgtgaaaaaagatt

SEQ ID NO: 1709100 - DNA, 15 bp, Homo sapiens
tgtgaaaaaagatta

SEQ ID NO: 1709101 - DNA, 15 bp, Homo sapiens
gtgaaaaaagattat

SEQ ID NO: 1709102 - DNA, 15 bp, Homo sapiens
tgaaaaaagattatg

SEQ ID NO: 1709103 - DNA, 15 bp, Homo sapiens
gaaaaaagattatgg

SEQ ID NO: 1709104 - DNA, 15 bp, Homo sapiens
aaaaaagattatgga

SEQ ID NO: 1709105 - DNA, 15 bp, Homo sapiens
aaaaagattatggat

SEQ ID NO: 1709106 - DNA, 15 bp, Homo sapiens
aaaagattatggata

SEQ ID NO: 1709107 - DNA, 15 bp, Homo sapiens
aaagattatggatag

SEQ ID NO: 1709108 - DNA, 15 bp, Homo sapiens
aagattatggataga

SEQ ID NO: 1709109 - DNA, 15 bp, Homo sapiens
agattatggatagag

SEQ ID NO: 1709110 - DNA, 15 bp, Homo sapiens
gattatggatagaga

SEQ ID NO: 1709111 - DNA, 15 bp, Homo sapiens
attatggatagagag

SEQ ID NO: 1709112 - DNA, 15 bp, Homo sapiens
ttatggatagagaga

SEQ ID NO: 1709113 - DNA, 15 bp, Homo sapiens
tatggatagagagat

SEQ ID NO: 1709114 - DNA, 15 bp, Homo sapiens
atggatagagagatg

SEQ ID NO: 1709115 - DNA, 15 bp, Homo sapiens
tggatagagagatgc

SEQ ID NO: 1709116 - DNA, 15 bp, Homo sapiens
ggatagagagatgcc

SEQ ID NO: 1709117 - DNA, 15 bp, Homo sapiens
gatagagagatgccc

SEQ ID NO: 1709118 - DNA, 15 bp, Homo sapiens
atagagagatgccca

SEQ ID NO: 1709119 - DNA, 15 bp, Homo sapiens
tagagagatgcccaa

SEQ ID NO: 1709120 - DNA, 15 bp, Homo sapiens
agagagatgcccaac

SEQ ID NO: 1709121 - DNA, 15 bp, Homo sapiens
gagagatgcccaacc

SEQ ID NO: 1709122 - DNA, 15 bp, Homo sapiens
agagatgcccaacct

SEQ ID NO: 1709123 - DNA, 15 bp, Homo sapiens
gagatgcccaacctt

SEQ ID NO: 1709124 - DNA, 15 bp, Homo sapiens
agatgcccaaccttg

SEQ ID NO: 1709125 - DNA, 15 bp, Homo sapiens
gatgcccaaccttga

SEQ ID NO: 1709126 - DNA, 15 bp, Homo sapiens
atgcccaaccttgaa

SEQ ID NO: 1709127 - DNA, 15 bp, Homo sapiens
tgcccaaccttgaat

SEQ ID NO: 1709128 - DNA, 15 bp, Homo sapiens
gcccaaccttgaatt

SEQ ID NO: 1709129 - DNA, 15 bp, Homo sapiens
cccaaccttgaattg

SEQ ID NO: 1709130 - DNA, 15 bp, Homo sapiens
ccaaccttgaattgg

SEQ ID NO: 1709131 - DNA, 15 bp, Homo sapiens
caaccttgaattgga

SEQ ID NO: 1709132 - DNA, 15 bp, Homo sapiens
aaccttgaattggac

SEQ ID NO: 1709133 - DNA, 15 bp, Homo sapiens
accttgaattggaca

SEQ ID NO: 1709134 - DNA, 15 bp, Homo sapiens
ccttgaattggacag

SEQ ID NO: 1709135 - DNA, 15 bp, Homo sapiens
cttgaattggacagt

SEQ ID NO: 1709136 - DNA, 15 bp, Homo sapiens
ttgaattggacagtt

SEQ ID NO: 1709137 - DNA, 15 bp, Homo sapiens
tgaattggacagttg

SEQ ID NO: 1709138 - DNA, 15 bp, Homo sapiens
gaattggacagttgt

SEQ ID NO: 1709139 - DNA, 15 bp, Homo sapiens
aattggacagttgta

SEQ ID NO: 1709140 - DNA, 15 bp, Homo sapiens
attggacagttgtat

SEQ ID NO: 1709141 - DNA, 15 bp, Homo sapiens
ttggacagttgtatg

SEQ ID NO: 1709142 - DNA, 15 bp, Homo sapiens
tggacagttgtatga

SEQ ID NO: 1709143 - DNA, 15 bp, Homo sapiens
ggacagttgtatgaa

SEQ ID NO: 1709144 - DNA, 15 bp, Homo sapiens
gacagttgtatgaat

SEQ ID NO: 1709145 - DNA, 15 bp, Homo sapiens
acagttgtatgaatt

SEQ ID NO: 1709146 - DNA, 15 bp, Homo sapiens
cagttgtatgaattt

SEQ ID NO: 1709147 - DNA, 15 bp, Homo sapiens
agttgtatgaatttt

SEQ ID NO: 1709148 - DNA, 15 bp, Homo sapiens
gttgtatgaatttta

SEQ ID NO: 1709149 - DNA, 15 bp, Homo sapiens
ttgtatgaattttaa

SEQ ID NO: 1709150 - DNA, 15 bp, Homo sapiens
tgtatgaattttaac

SEQ ID NO: 1709151 - DNA, 15 bp, Homo sapiens
gtatgaattttaaca

SEQ ID NO: 1709152 - DNA, 15 bp, Homo sapiens
tatgaattttaacat

SEQ ID NO: 1709153 - DNA, 15 bp, Homo sapiens
atgaattttaacatt

SEQ ID NO: 1709154 - DNA, 15 bp, Homo sapiens
tgaattttaacatta

SEQ ID NO: 1709155 - DNA, 15 bp, Homo sapiens
gaattttaacattag

SEQ ID NO: 1709156 - DNA, 15 bp, Homo sapiens
aattttaacattagc

SEQ ID NO: 1709157 - DNA, 15 bp, Homo sapiens
attttaacattagct

SEQ ID NO: 1709158 - DNA, 15 bp, Homo sapiens
ttttaacattagcta

SEQ ID NO: 1709159 - DNA, 15 bp, Homo sapiens
tttaacattagctaa

SEQ ID NO: 1709160 - DNA, 15 bp, Homo sapiens
ttaacattagctaaa

SEQ ID NO: 1709161 - DNA, 15 bp, Homo sapiens
taacattagctaaat

SEQ ID NO: 1709162 - DNA, 15 bp, Homo sapiens
aacattagctaaatg

SEQ ID NO: 1709163 - DNA, 15 bp, Homo sapiens
acattagctaaatgc

SEQ ID NO: 1709164 - DNA, 15 bp, Homo sapiens
cattagctaaatgct

SEQ ID NO: 1709165 - DNA, 15 bp, Homo sapiens
attagctaaatgctc

SEQ ID NO: 1709166 - DNA, 15 bp, Homo sapiens
ttagctaaatgctct

SEQ ID NO: 1709167 - DNA, 15 bp, Homo sapiens
tagctaaatgctctt

SEQ ID NO: 1709168 - DNA, 15 bp, Homo sapiens
agctaaatgctcttt

SEQ ID NO: 1709169 - DNA, 15 bp, Homo sapiens
gctaaatgctctttc

SEQ ID NO: 1709170 - DNA, 15 bp, Homo sapiens
ctaaatgctctttct

SEQ ID NO: 1709171 - DNA, 15 bp, Homo sapiens
taaatgctctttctt

SEQ ID NO: 1709172 - DNA, 15 bp, Homo sapiens
aaatgctctttcttt

SEQ ID NO: 1709173 - DNA, 15 bp, Homo sapiens
aatgctctttctttt

SEQ ID NO: 1709174 - DNA, 15 bp, Homo sapiens
atgctctttcttttt

SEQ ID NO: 1709175 - DNA, 15 bp, Homo sapiens
tgctctttctttttt

SEQ ID NO: 1709176 - DNA, 15 bp, Homo sapiens
gctctttcttttttt

SEQ ID NO: 1709177 - DNA, 15 bp, Homo sapiens
ctctttcttttttta

SEQ ID NO: 1709178 - DNA, 15 bp, Homo sapiens
tctttctttttttaa

SEQ ID NO: 1709179 - DNA, 15 bp, Homo sapiens
ctttctttttttaac

SEQ ID NO: 1709180 - DNA, 15 bp, Homo sapiens
tttctttttttaaca

SEQ ID NO: 1709181 - DNA, 15 bp, Homo sapiens
ttctttttttaacac

SEQ ID NO: 1709182 - DNA, 15 bp, Homo sapiens
tctttttttaacact

SEQ ID NO: 1709183 - DNA, 15 bp, Homo sapiens
ctttttttaacactg

SEQ ID NO: 1709184 - DNA, 15 bp, Homo sapiens
tttttttaacactga

SEQ ID NO: 1709185 - DNA, 15 bp, Homo sapiens
ttttttaacactgag

SEQ ID NO: 1709186 - DNA, 15 bp, Homo sapiens
tttttaacactgaga

SEQ ID NO: 1709187 - DNA, 15 bp, Homo sapiens
ttttaacactgagaa

SEQ ID NO: 1709188 - DNA, 15 bp, Homo sapiens
tttaacactgagaag

SEQ ID NO: 1709189 - DNA, 15 bp, Homo sapiens
ttaacactgagaagg

SEQ ID NO: 1709190 - DNA, 15 bp, Homo sapiens
taacactgagaaggt

SEQ ID NO: 1709191 - DNA, 15 bp, Homo sapiens
aacactgagaaggta

SEQ ID NO: 1709192 - DNA, 15 bp, Homo sapiens
acactgagaaggtaa

SEQ ID NO: 1709193 - DNA, 15 bp, Homo sapiens
cactgagaaggtaag

SEQ ID NO: 1709194 - DNA, 15 bp, Homo sapiens
actgagaaggtaagt

SEQ ID NO: 1709195 - DNA, 15 bp, Homo sapiens
ctgagaaggtaagta

SEQ ID NO: 1709196 - DNA, 15 bp, Homo sapiens
tgagaaggtaagtaa

SEQ ID NO: 1709197 - DNA, 15 bp, Homo sapiens
gagaaggtaagtaat

SEQ ID NO: 1709198 - DNA, 15 bp, Homo sapiens
agaaggtaagtaata

SEQ ID NO: 1709199 - DNA, 15 bp, Homo sapiens
gaaggtaagtaatac

SEQ ID NO: 1709200 - DNA, 15 bp, Homo sapiens
aaggtaagtaataca

SEQ ID NO: 1709201 - DNA, 15 bp, Homo sapiens
aggtaagtaatacaa

SEQ ID NO: 1709202 - DNA, 15 bp, Homo sapiens
ggtaagtaatacaaa

SEQ ID NO: 1709203 - DNA, 15 bp, Homo sapiens
gtaagtaatacaaaa

SEQ ID NO: 1709204 - DNA, 15 bp, Homo sapiens
taagtaatacaaaaa

SEQ ID NO: 1709205 - DNA, 15 bp, Homo sapiens
aagtaatacaaaaag

SEQ ID NO: 1709206 - DNA, 15 bp, Homo sapiens
agtaatacaaaaagc

SEQ ID NO: 1709207 - DNA, 15 bp, Homo sapiens
gtaatacaaaaagct

SEQ ID NO: 1709208 - DNA, 15 bp, Homo sapiens
taatacaaaaagcta

SEQ ID NO: 1709209 - DNA, 15 bp, Homo sapiens
aatacaaaaagctaa

SEQ ID NO: 1709210 - DNA, 15 bp, Homo sapiens
atacaaaaagctaaa

SEQ ID NO: 1709211 - DNA, 15 bp, Homo sapiens
tacaaaaagctaaaa

SEQ ID NO: 1709212 - DNA, 15 bp, Homo sapiens
acaaaaagctaaaag

SEQ ID NO: 1709213 - DNA, 15 bp, Homo sapiens
caaaaagctaaaaga

SEQ ID NO: 1709214 - DNA, 15 bp, Homo sapiens
aaaaagctaaaagag

SEQ ID NO: 1709215 - DNA, 15 bp, Homo sapiens
aaaagctaaaagagc

SEQ ID NO: 1709216 - DNA, 15 bp, Homo sapiens
aaagctaaaagagca

SEQ ID NO: 1709217 - DNA, 15 bp, Homo sapiens
aagctaaaagagcat

SEQ ID NO: 1709218 - DNA, 15 bp, Homo sapiens
agctaaaagagcata

SEQ ID NO: 1709219 - DNA, 15 bp, Homo sapiens
gctaaaagagcatac

SEQ ID NO: 1709220 - DNA, 15 bp, Homo sapiens
ctaaaagagcatacc

SEQ ID NO: 1709221 - DNA, 15 bp, Homo sapiens
taaaagagcataccc

SEQ ID NO: 1709222 - DNA, 15 bp, Homo sapiens
aaaagagcataccca

SEQ ID NO: 1709223 - DNA, 15 bp, Homo sapiens
aaagagcatacccaa

SEQ ID NO: 1709224 - DNA, 15 bp, Homo sapiens
aagagcatacccaat

SEQ ID NO: 1709225 - DNA, 15 bp, Homo sapiens
agagcatacccaata

SEQ ID NO: 1709226 - DNA, 15 bp, Homo sapiens
gagcatacccaatag

SEQ ID NO: 1709227 - DNA, 15 bp, Homo sapiens
agcatacccaataga

SEQ ID NO: 1709228 - DNA, 15 bp, Homo sapiens
gcatacccaatagaa

SEQ ID NO: 1709229 - DNA, 15 bp, Homo sapiens
catacccaatagaaa

SEQ ID NO: 1709230 - DNA, 15 bp, Homo sapiens
atacccaatagaaaa

SEQ ID NO: 1709231 - DNA, 15 bp, Homo sapiens
tacccaatagaaaac

SEQ ID NO: 1709232 - DNA, 15 bp, Homo sapiens
acccaatagaaaacc

SEQ ID NO: 1709233 - DNA, 15 bp, Homo sapiens
cccaatagaaaacca

SEQ ID NO: 1709234 - DNA, 15 bp, Homo sapiens
ccaatagaaaaccac

SEQ ID NO: 1709235 - DNA, 15 bp, Homo sapiens
caatagaaaaccact

SEQ ID NO: 1709236 - DNA, 15 bp, Homo sapiens
aatagaaaaccactg

SEQ ID NO: 1709237 - DNA, 15 bp, Homo sapiens
atagaaaaccactgc

SEQ ID NO: 1709238 - DNA, 15 bp, Homo sapiens
tagaaaaccactgca

SEQ ID NO: 1709239 - DNA, 15 bp, Homo sapiens
agaaaaccactgcac

SEQ ID NO: 1709240 - DNA, 15 bp, Homo sapiens
gaaaaccactgcacc

SEQ ID NO: 1709241 - DNA, 15 bp, Homo sapiens
aaaaccactgcacca

SEQ ID NO: 1709242 - DNA, 15 bp, Homo sapiens
aaaccactgcaccag

SEQ ID NO: 1709243 - DNA, 15 bp, Homo sapiens
aaccactgcaccaga

SEQ ID NO: 1709244 - DNA, 15 bp, Homo sapiens
accactgcaccagaa

SEQ ID NO: 1709245 - DNA, 15 bp, Homo sapiens
ccactgcaccagaag

SEQ ID NO: 1709246 - DNA, 15 bp, Homo sapiens
cactgcaccagaagc

SEQ ID NO: 1709247 - DNA, 15 bp, Homo sapiens
actgcaccagaagcc

SEQ ID NO: 1709248 - DNA, 15 bp, Homo sapiens
ctgcaccagaagcca

SEQ ID NO: 1709249 - DNA, 15 bp, Homo sapiens
tgcaccagaagccaa

SEQ ID NO: 1709250 - DNA, 15 bp, Homo sapiens
gcaccagaagccaaa

SEQ ID NO: 1709251 - DNA, 15 bp, Homo sapiens
caccagaagccaaaa

SEQ ID NO: 1709252 - DNA, 15 bp, Homo sapiens
accagaagccaaaaa

SEQ ID NO: 1709253 - DNA, 15 bp, Homo sapiens
ccagaagccaaaaaa

SEQ ID NO: 1709254 - DNA, 15 bp, Homo sapiens
cagaagccaaaaaac

SEQ ID NO: 1709255 - DNA, 15 bp, Homo sapiens
agaagccaaaaaaca

SEQ ID NO: 1709256 - DNA, 15 bp, Homo sapiens
gaagccaaaaaacag

SEQ ID NO: 1709257 - DNA, 15 bp, Homo sapiens
aagccaaaaaacagg

SEQ ID NO: 1709258 - DNA, 15 bp, Homo sapiens
ccaaaaaacaggcat

SEQ ID NO: 1709259 - DNA, 15 bp, Homo sapiens
caaaaaacaggcatt

SEQ ID NO: 1709260 - DNA, 15 bp, Homo sapiens
aaaaaacaggcattt

SEQ ID NO: 1709261 - DNA, 15 bp, Homo sapiens
aaaaacaggcatttt

SEQ ID NO: 1709262 - DNA, 15 bp, Homo sapiens
aaaacaggcattttc

SEQ ID NO: 1709263 - DNA, 15 bp, Homo sapiens
aaacaggcattttct

SEQ ID NO: 1709264 - DNA, 15 bp, Homo sapiens
aacaggcattttctt

SEQ ID NO: 1709265 - DNA, 15 bp, Homo sapiens
acaggcattttctta

SEQ ID NO: 1709266 - DNA, 15 bp, Homo sapiens
caggcattttcttat

SEQ ID NO: 1709267 - DNA, 15 bp, Homo sapiens
aggcattttcttatc

SEQ ID NO: 1709268 - DNA, 15 bp, Homo sapiens
ggcattttcttatct

SEQ ID NO: 1709269 - DNA, 15 bp, Homo sapiens
gcattttcttatcta

SEQ ID NO: 1709270 - DNA, 15 bp, Homo sapiens
cattttcttatctag

SEQ ID NO: 1709271 - DNA, 15 bp, Homo sapiens
attttcttatctagt

SEQ ID NO: 1709272 - DNA, 15 bp, Homo sapiens
ttttcttatctagta

SEQ ID NO: 1709273 - DNA, 15 bp, Homo sapiens
tttcttatctagtaa

SEQ ID NO: 1709274 - DNA, 15 bp, Homo sapiens
ttcttatctagtaat

SEQ ID NO: 1709275 - DNA, 15 bp, Homo sapiens
tcttatctagtaata

SEQ ID NO: 1709276 - DNA, 15 bp, Homo sapiens
cttatctagtaataa

SEQ ID NO: 1709277 - DNA, 15 bp, Homo sapiens
ttatctagtaataac

SEQ ID NO: 1709278 - DNA, 15 bp, Homo sapiens
tatctagtaataacc

SEQ ID NO: 1709279 - DNA, 15 bp, Homo sapiens
atctagtaataacca

SEQ ID NO: 1709280 - DNA, 15 bp, Homo sapiens
tctagtaataaccac

SEQ ID NO: 1709281 - DNA, 15 bp, Homo sapiens
ctagtaataaccact

SEQ ID NO: 1709282 - DNA, 15 bp, Homo sapiens
tagtaataaccacta

SEQ ID NO: 1709283 - DNA, 15 bp, Homo sapiens
agtaataaccactag

SEQ ID NO: 1709284 - DNA, 15 bp, Homo sapiens
gtaataaccactagc

SEQ ID NO: 1709285 - DNA, 15 bp, Homo sapiens
taataaccactagct

SEQ ID NO: 1709286 - DNA, 15 bp, Homo sapiens
aataaccactagctt

SEQ ID NO: 1709287 - DNA, 15 bp, Homo sapiens
ataaccactagctta

SEQ ID NO: 1709288 - DNA, 15 bp, Homo sapiens
taaccactagcttaa

SEQ ID NO: 1709289 - DNA, 15 bp, Homo sapiens
aaccactagcttaat

SEQ ID NO: 1709290 - DNA, 15 bp, Homo sapiens
accactagcttaatg

SEQ ID NO: 1709291 - DNA, 15 bp, Homo sapiens
ccactagcttaatga

SEQ ID NO: 1709292 - DNA, 15 bp, Homo sapiens
cactagcttaatgaa

SEQ ID NO: 1709293 - DNA, 15 bp, Homo sapiens
actagcttaatgaac

SEQ ID NO: 1709294 - DNA, 15 bp, Homo sapiens
ctagcttaatgaact

SEQ ID NO: 1709295 - DNA, 15 bp, Homo sapiens
tagcttaatgaactt

SEQ ID NO: 1709296 - DNA, 15 bp, Homo sapiens
agcttaatgaacttg

SEQ ID NO: 1709297 - DNA, 15 bp, Homo sapiens
gcttaatgaacttga

SEQ ID NO: 1709298 - DNA, 15 bp, Homo sapiens
cttaatgaacttgaa

SEQ ID NO: 1709299 - DNA, 15 bp, Homo sapiens
ttaatgaacttgaac

SEQ ID NO: 1709300 - DNA, 15 bp, Homo sapiens
taatgaacttgaaca

SEQ ID NO: 1709301 - DNA, 15 bp, Homo sapiens
aatgaacttgaacaa

SEQ ID NO: 1709302 - DNA, 15 bp, Homo sapiens
atgaacttgaacaaa

SEQ ID NO: 1709303 - DNA, 15 bp, Homo sapiens
tgaacttgaacaaac

SEQ ID NO: 1709304 - DNA, 15 bp, Homo sapiens
gaacttgaacaaaca

SEQ ID NO: 1709305 - DNA, 15 bp, Homo sapiens
aacttgaacaaacaa

SEQ ID NO: 1709306 - DNA, 15 bp, Homo sapiens
acttgaacaaacaac

SEQ ID NO: 1709307 - DNA, 15 bp, Homo sapiens
cttgaacaaacaact

SEQ ID NO: 1709308 - DNA, 15 bp, Homo sapiens
ttgaacaaacaactt

SEQ ID NO: 1709309 - DNA, 15 bp, Homo sapiens
tgaacaaacaacttg

SEQ ID NO: 1709310 - DNA, 15 bp, Homo sapiens
gaacaaacaacttga

SEQ ID NO: 1709311 - DNA, 15 bp, Homo sapiens
aacaaacaacttgat

SEQ ID NO: 1709312 - DNA, 15 bp, Homo sapiens
acaaacaacttgatg

SEQ ID NO: 1709313 - DNA, 15 bp, Homo sapiens
caaacaacttgatgt

SEQ ID NO: 1709314 - DNA, 15 bp, Homo sapiens
aaacaacttgatgtt

SEQ ID NO: 1709315 - DNA, 15 bp, Homo sapiens
aacaacttgatgttt

SEQ ID NO: 1709316 - DNA, 15 bp, Homo sapiens
acaacttgatgtttg

SEQ ID NO: 1709317 - DNA, 15 bp, Homo sapiens
caacttgatgtttgg

SEQ ID NO: 1709318 - DNA, 15 bp, Homo sapiens
aacttgatgtttggg

SEQ ID NO: 1709319 - DNA, 15 bp, Homo sapiens
acttgatgtttgggg

SEQ ID NO: 1709320 - DNA, 15 bp, Homo sapiens
cttgatgtttggggc

SEQ ID NO: 1709321 - DNA, 15 bp, Homo sapiens
ttgatgtttggggct

SEQ ID NO: 1709322 - DNA, 15 bp, Homo sapiens
tgatgtttggggctt

SEQ ID NO: 1709323 - DNA, 15 bp, Homo sapiens
gatgtttggggcttt

SEQ ID NO: 1709324 - DNA, 15 bp, Homo sapiens
atgtttggggcttta

SEQ ID NO: 1709325 - DNA, 15 bp, Homo sapiens
tgtttggggctttat

SEQ ID NO: 1709326 - DNA, 15 bp, Homo sapiens
gtttggggctttatt

SEQ ID NO: 1709327 - DNA, 15 bp, Homo sapiens
tttggggctttattt

SEQ ID NO: 1709328 - DNA, 15 bp, Homo sapiens
ttggggctttatttt

SEQ ID NO: 1709329 - DNA, 15 bp, Homo sapiens
tggggctttattttc

SEQ ID NO: 1709330 - DNA, 15 bp, Homo sapiens
ggggctttattttcc

SEQ ID NO: 1709331 - DNA, 15 bp, Homo sapiens
gggctttattttcca

SEQ ID NO: 1709332 - DNA, 15 bp, Homo sapiens
ggctttattttccat

SEQ ID NO: 1709333 - DNA, 15 bp, Homo sapiens
gctttattttccatc

SEQ ID NO: 1709334 - DNA, 15 bp, Homo sapiens
ctttattttccatct

SEQ ID NO: 1709335 - DNA, 15 bp, Homo sapiens
tttattttccatcta

SEQ ID NO: 1709336 - DNA, 15 bp, Homo sapiens
ttattttccatctat

SEQ ID NO: 1709337 - DNA, 15 bp, Homo sapiens
tattttccatctata

SEQ ID NO: 1709338 - DNA, 15 bp, Homo sapiens
attttccatctataa

SEQ ID NO: 1709339 - DNA, 15 bp, Homo sapiens
ttttccatctataag

SEQ ID NO: 1709340 - DNA, 15 bp, Homo sapiens
tttccatctataaga

SEQ ID NO: 1709341 - DNA, 15 bp, Homo sapiens
ttccatctataagag

SEQ ID NO: 1709342 - DNA, 15 bp, Homo sapiens
tccatctataagagt

SEQ ID NO: 1709343 - DNA, 15 bp, Homo sapiens
ccatctataagagtt

SEQ ID NO: 1709344 - DNA, 15 bp, Homo sapiens
catctataagagtta

SEQ ID NO: 1709345 - DNA, 15 bp, Homo sapiens
atctataagagttaa

SEQ ID NO: 1709346 - DNA, 15 bp, Homo sapiens
tctataagagttaaa

SEQ ID NO: 1709347 - DNA, 15 bp, Homo sapiens
ctataagagttaaat

SEQ ID NO: 1709348 - DNA, 15 bp, Homo sapiens
tataagagttaaatg

SEQ ID NO: 1709349 - DNA, 15 bp, Homo sapiens
ataagagttaaatgg

SEQ ID NO: 1709350 - DNA, 15 bp, Homo sapiens
taagagttaaatggg

SEQ ID NO: 1709351 - DNA, 15 bp, Homo sapiens
aagagttaaatggga

SEQ ID NO: 1709352 - DNA, 15 bp, Homo sapiens
agagttaaatgggaa

SEQ ID NO: 1709353 - DNA, 15 bp, Homo sapiens
gagttaaatgggaaa

SEQ ID NO: 1709354 - DNA, 15 bp, Homo sapiens
agttaaatgggaaaa

SEQ ID NO: 1709355 - DNA, 15 bp, Homo sapiens
gttaaatgggaaaat

SEQ ID NO: 1709356 - DNA, 15 bp, Homo sapiens
ttaaatgggaaaatc

SEQ ID NO: 1709357 - DNA, 15 bp, Homo sapiens
taaatgggaaaatct

SEQ ID NO: 1709358 - DNA, 15 bp, Homo sapiens
aaatgggaaaatctg

SEQ ID NO: 1709359 - DNA, 15 bp, Homo sapiens
aatgggaaaatctgc

SEQ ID NO: 1709360 - DNA, 15 bp, Homo sapiens
atgggaaaatctgct

SEQ ID NO: 1709361 - DNA, 15 bp, Homo sapiens
tgggaaaatctgctg

SEQ ID NO: 1709362 - DNA, 15 bp, Homo sapiens
gggaaaatctgctgt

SEQ ID NO: 1709363 - DNA, 15 bp, Homo sapiens
ggaaaatctgctgtt

SEQ ID NO: 1709364 - DNA, 15 bp, Homo sapiens
gaaaatctgctgttc

SEQ ID NO: 1709365 - DNA, 15 bp, Homo sapiens
aaaatctgctgttct

SEQ ID NO: 1709366 - DNA, 15 bp, Homo sapiens
aaatctgctgttcta

SEQ ID NO: 1709367 - DNA, 15 bp, Homo sapiens
aatctgctgttctat

SEQ ID NO: 1709368 - DNA, 15 bp, Homo sapiens
atctgctgttctata

SEQ ID NO: 1709369 - DNA, 15 bp, Homo sapiens
tctgctgttctatag

SEQ ID NO: 1709370 - DNA, 15 bp, Homo sapiens
ctgctgttctataga

SEQ ID NO: 1709371 - DNA, 15 bp, Homo sapiens
tgctgttctatagac

SEQ ID NO: 1709372 - DNA, 15 bp, Homo sapiens
gctgttctatagacc

SEQ ID NO: 1709373 - DNA, 15 bp, Homo sapiens
ctgttctatagacca

SEQ ID NO: 1709374 - DNA, 15 bp, Homo sapiens
tgttctatagaccat

SEQ ID NO: 1709375 - DNA, 15 bp, Homo sapiens
gttctatagaccatc

SEQ ID NO: 1709376 - DNA, 15 bp, Homo sapiens
ttctatagaccatca

SEQ ID NO: 1709377 - DNA, 15 bp, Homo sapiens
tctatagaccatcat

SEQ ID NO: 1709378 - DNA, 15 bp, Homo sapiens
ctatagaccatcatt

SEQ ID NO: 1709379 - DNA, 15 bp, Homo sapiens
tatagaccatcatta

SEQ ID NO: 1709380 - DNA, 15 bp, Homo sapiens
atagaccatcattat

SEQ ID NO: 1709381 - DNA, 15 bp, Homo sapiens
tagaccatcattata

SEQ ID NO: 1709382 - DNA, 15 bp, Homo sapiens
agaccatcattataa

SEQ ID NO: 1709383 - DNA, 15 bp, Homo sapiens
gaccatcattataaa

SEQ ID NO: 1709384 - DNA, 15 bp, Homo sapiens
accatcattataaaa

SEQ ID NO: 1709385 - DNA, 15 bp, Homo sapiens
ccatcattataaaag

SEQ ID NO: 1709386 - DNA, 15 bp, Homo sapiens
catcattataaaagg

SEQ ID NO: 1709387 - DNA, 15 bp, Homo sapiens
atcattataaaaggt

SEQ ID NO: 1709388 - DNA, 15 bp, Homo sapiens
tcattataaaaggtg

SEQ ID NO: 1709389 - DNA, 15 bp, Homo sapiens
cattataaaaggtga

SEQ ID NO: 1709390 - DNA, 15 bp, Homo sapiens
attataaaaggtgac

SEQ ID NO: 1709391 - DNA, 15 bp, Homo sapiens
ttataaaaggtgacc

SEQ ID NO: 1709392 - DNA, 15 bp, Homo sapiens
tataaaaggtgacct

SEQ ID NO: 1709393 - DNA, 15 bp, Homo sapiens
ataaaaggtgacctt

SEQ ID NO: 1709394 - DNA, 15 bp, Homo sapiens
taaaaggtgacctta

SEQ ID NO: 1709395 - DNA, 15 bp, Homo sapiens
aaaaggtgaccttaa

SEQ ID NO: 1709396 - DNA, 15 bp, Homo sapiens
aaaggtgaccttaag

SEQ ID NO: 1709397 - DNA, 15 bp, Homo sapiens
aaggtgaccttaagg

SEQ ID NO: 1709398 - DNA, 15 bp, Homo sapiens
aggtgaccttaagga

SEQ ID NO: 1709399 - DNA, 15 bp, Homo sapiens
ggtgaccttaaggag

SEQ ID NO: 1709400 - DNA, 15 bp, Homo sapiens
gtgaccttaaggagg

SEQ ID NO: 1709401 - DNA, 15 bp, Homo sapiens
tgaccttaaggagga

SEQ ID NO: 1709402 - DNA, 15 bp, Homo sapiens
gaccttaaggaggaa

SEQ ID NO: 1709403 - DNA, 15 bp, Homo sapiens
accttaaggaggaat

SEQ ID NO: 1709404 - DNA, 15 bp, Homo sapiens
ccttaaggaggaatg

SEQ ID NO: 1709405 - DNA, 15 bp, Homo sapiens
cttaaggaggaatgg

SEQ ID NO: 1709406 - DNA, 15 bp, Homo sapiens
ttaaggaggaatggg

SEQ ID NO: 1709407 - DNA, 15 bp, Homo sapiens
taaggaggaatggga

SEQ ID NO: 1709408 - DNA, 15 bp, Homo sapiens
aaggaggaatgggaa

SEQ ID NO: 1709409 - DNA, 15 bp, Homo sapiens
aggaggaatgggaat

SEQ ID NO: 1709410 - DNA, 15 bp, Homo sapiens
ggaggaatgggaatt

SEQ ID NO: 1709411 - DNA, 15 bp, Homo sapiens
gaggaatgggaattg

SEQ ID NO: 1709412 - DNA, 15 bp, Homo sapiens
aggaatgggaattgt

SEQ ID NO: 1709413 - DNA, 15 bp, Homo sapiens
ggaatgggaattgtg

SEQ ID NO: 1709414 - DNA, 15 bp, Homo sapiens
gaatgggaattgtgg

SEQ ID NO: 1709415 - DNA, 15 bp, Homo sapiens
aatgggaattgtggc

SEQ ID NO: 1709416 - DNA, 15 bp, Homo sapiens
atgggaattgtggca

SEQ ID NO: 1709417 - DNA, 15 bp, Homo sapiens
tgggaattgtggcat

SEQ ID NO: 1709418 - DNA, 15 bp, Homo sapiens
gggaattgtggcatc

SEQ ID NO: 1709419 - DNA, 15 bp, Homo sapiens
ggaattgtggcatcg

SEQ ID NO: 1709420 - DNA, 15 bp, Homo sapiens
gaattgtggcatcgc

SEQ ID NO: 1709421 - DNA, 15 bp, Homo sapiens
aattgtggcatcgca

SEQ ID NO: 1709422 - DNA, 15 bp, Homo sapiens
attgtggcatcgcag

SEQ ID NO: 1709423 - DNA, 15 bp, Homo sapiens
ttgtggcatcgcagt

SEQ ID NO: 1709424 - DNA, 15 bp, Homo sapiens
tgtggcatcgcagtt

SEQ ID NO: 1709425 - DNA, 15 bp, Homo sapiens
gtggcatcgcagttt

SEQ ID NO: 1709426 - DNA, 15 bp, Homo sapiens
tggcatcgcagtttg

SEQ ID NO: 1709427 - DNA, 15 bp, Homo sapiens
ggcatcgcagtttgg

SEQ ID NO: 1709428 - DNA, 15 bp, Homo sapiens
gcatcgcagtttggg

SEQ ID NO: 1709429 - DNA, 15 bp, Homo sapiens
catcgcagtttgggg

SEQ ID NO: 1709430 - DNA, 15 bp, Homo sapiens
atcgcagtttggggt

SEQ ID NO: 1709431 - DNA, 15 bp, Homo sapiens
tcgcagtttggggtt

SEQ ID NO: 1709432 - DNA, 15 bp, Homo sapiens
cgcagtttggggttt

SEQ ID NO: 1709433 - DNA, 15 bp, Homo sapiens
gcagtttggggtttc

SEQ ID NO: 1709434 - DNA, 15 bp, Homo sapiens
cagtttggggtttca

SEQ ID NO: 1709435 - DNA, 15 bp, Homo sapiens
agtttggggtttcag

SEQ ID NO: 1709436 - DNA, 15 bp, Homo sapiens
gtttggggtttcagg

SEQ ID NO: 1709437 - DNA, 15 bp, Homo sapiens
tttggggtttcaggg

SEQ ID NO: 1709438 - DNA, 15 bp, Homo sapiens
ttggggtttcagggt

SEQ ID NO: 1709439 - DNA, 15 bp, Homo sapiens
tggggtttcagggta

SEQ ID NO: 1709440 - DNA, 15 bp, Homo sapiens
ggggtttcagggtat

SEQ ID NO: 1709441 - DNA, 15 bp, Homo sapiens
gggtttcagggtatt

SEQ ID NO: 1709442 - DNA, 15 bp, Homo sapiens
ggtttcagggtattt

SEQ ID NO: 1709443 - DNA, 15 bp, Homo sapiens
gtttcagggtatttg

SEQ ID NO: 1709444 - DNA, 15 bp, Homo sapiens
tttcagggtatttgc

SEQ ID NO: 1709445 - DNA, 15 bp, Homo sapiens
ttcagggtatttgca

SEQ ID NO: 1709446 - DNA, 15 bp, Homo sapiens
tcagggtatttgcac

SEQ ID NO: 1709447 - DNA, 15 bp, Homo sapiens
cagggtatttgcaca

SEQ ID NO: 1709448 - DNA, 15 bp, Homo sapiens
agggtatttgcacag

SEQ ID NO: 1709449 - DNA, 15 bp, Homo sapiens
gggtatttgcacagt

SEQ ID NO: 1709450 - DNA, 15 bp, Homo sapiens
ggtatttgcacagta

SEQ ID NO: 1709451 - DNA, 15 bp, Homo sapiens
gtatttgcacagtaa

SEQ ID NO: 1709452 - DNA, 15 bp, Homo sapiens
tatttgcacagtaat

SEQ ID NO: 1709453 - DNA, 15 bp, Homo sapiens
atttgcacagtaatt

SEQ ID NO: 1709454 - DNA, 15 bp, Homo sapiens
tttgcacagtaattt

SEQ ID NO: 1709455 - DNA, 15 bp, Homo sapiens
ttgcacagtaatttt

SEQ ID NO: 1709456 - DNA, 15 bp, Homo sapiens
tgcacagtaatttta

SEQ ID NO: 1709457 - DNA, 15 bp, Homo sapiens
gcacagtaattttaa

SEQ ID NO: 1709458 - DNA, 15 bp, Homo sapiens
cacagtaattttaaa

SEQ ID NO: 1709459 - DNA, 15 bp, Homo sapiens
acagtaattttaaaa

SEQ ID NO: 1709460 - DNA, 15 bp, Homo sapiens
cagtaattttaaaaa

SEQ ID NO: 1709461 - DNA, 15 bp, Homo sapiens
agtaattttaaaaat

SEQ ID NO: 1709462 - DNA, 15 bp, Homo sapiens
taattttaaaaatat

SEQ ID NO: 1709463 - DNA, 15 bp, Homo sapiens
aattttaaaaatatt

SEQ ID NO: 1709464 - DNA, 15 bp, Homo sapiens
attttaaaaatattt

SEQ ID NO: 1709465 - DNA, 15 bp, Homo sapiens
ttttaaaaatattta

SEQ ID NO: 1709466 - DNA, 15 bp, Homo sapiens
tttaaaaatatttat

SEQ ID NO: 1709467 - DNA, 15 bp, Homo sapiens
ttaaaaatatttatc

SEQ ID NO: 1709468 - DNA, 15 bp, Homo sapiens
taaaaatatttatct

SEQ ID NO: 1709469 - DNA, 15 bp, Homo sapiens
aaaaatatttatctt

SEQ ID NO: 1709470 - DNA, 15 bp, Homo sapiens
aaaatatttatcttt

SEQ ID NO: 1709471 - DNA, 15 bp, Homo sapiens
aaatatttatcttta

SEQ ID NO: 1709472 - DNA, 15 bp, Homo sapiens
aatatttatctttaa

SEQ ID NO: 1709473 - DNA, 15 bp, Homo sapiens
atatttatctttaaa

SEQ ID NO: 1709474 - DNA, 15 bp, Homo sapiens
tatttatctttaaat

SEQ ID NO: 1709475 - DNA, 15 bp, Homo sapiens
atttatctttaaatt

SEQ ID NO: 1709476 - DNA, 15 bp, Homo sapiens
tttatctttaaattt

SEQ ID NO: 1709477 - DNA, 15 bp, Homo sapiens
ttatctttaaatttt

SEQ ID NO: 1709478 - DNA, 15 bp, Homo sapiens
tatctttaaattttt

SEQ ID NO: 1709479 - DNA, 15 bp, Homo sapiens
atctttaaatttttg

SEQ ID NO: 1709480 - DNA, 15 bp, Homo sapiens
tctttaaatttttga

SEQ ID NO: 1709481 - DNA, 15 bp, Homo sapiens
ctttaaatttttgaa

SEQ ID NO: 1709482 - DNA, 15 bp, Homo sapiens
tttaaatttttgaat

SEQ ID NO: 1709483 - DNA, 15 bp, Homo sapiens
ttaaatttttgaatt

SEQ ID NO: 1709484 - DNA, 15 bp, Homo sapiens
taaatttttgaattt

SEQ ID NO: 1709485 - DNA, 15 bp, Homo sapiens
aaatttttgaatttt

SEQ ID NO: 1709486 - DNA, 15 bp, Homo sapiens
aatttttgaattttt

SEQ ID NO: 1709487 - DNA, 15 bp, Homo sapiens
atttttgaattttta

SEQ ID NO: 1709488 - DNA, 15 bp, Homo sapiens
tttttgaatttttag

SEQ ID NO: 1709489 - DNA, 15 bp, Homo sapiens
ttttgaatttttaga

SEQ ID NO: 1709490 - DNA, 15 bp, Homo sapiens
tttgaatttttagac

SEQ ID NO: 1709491 - DNA, 15 bp, Homo sapiens
ttgaatttttagact

SEQ ID NO: 1709492 - DNA, 15 bp, Homo sapiens
tgaatttttagactc

SEQ ID NO: 1709493 - DNA, 15 bp, Homo sapiens
gaatttttagactct

SEQ ID NO: 1709494 - DNA, 15 bp, Homo sapiens
aatttttagactctg

SEQ ID NO: 1709495 - DNA, 15 bp, Homo sapiens
atttttagactctgt

SEQ ID NO: 1709496 - DNA, 15 bp, Homo sapiens
tttttagactctgta

SEQ ID NO: 1709497 - DNA, 15 bp, Homo sapiens
ttttagactctgtaa

SEQ ID NO: 1709498 - DNA, 15 bp, Homo sapiens
tttagactctgtaaa

SEQ ID NO: 1709499 - DNA, 15 bp, Homo sapiens
ttagactctgtaaac

SEQ ID NO: 1709500 - DNA, 15 bp, Homo sapiens
tagactctgtaaact

SEQ ID NO: 1709501 - DNA, 15 bp, Homo sapiens
agactctgtaaactt

SEQ ID NO: 1709502 - DNA, 15 bp, Homo sapiens
gactctgtaaactta

SEQ ID NO: 1709503 - DNA, 15 bp, Homo sapiens
actctgtaaacttac

SEQ ID NO: 1709504 - DNA, 15 bp, Homo sapiens
ctctgtaaacttacg

SEQ ID NO: 1709505 - DNA, 15 bp, Homo sapiens
tctgtaaacttacga

SEQ ID NO: 1709506 - DNA, 15 bp, Homo sapiens
ctgtaaacttacgag

SEQ ID NO: 1709507 - DNA, 15 bp, Homo sapiens
tgtaaacttacgagt

SEQ ID NO: 1709508 - DNA, 15 bp, Homo sapiens
gtaaacttacgagtt

SEQ ID NO: 1709509 - DNA, 15 bp, Homo sapiens
taaacttacgagtta

SEQ ID NO: 1709510 - DNA, 15 bp, Homo sapiens
aaacttacgagttat

SEQ ID NO: 1709511 - DNA, 15 bp, Homo sapiens
aacttacgagttatg

SEQ ID NO: 1709512 - DNA, 15 bp, Homo sapiens
acttacgagttatgc

SEQ ID NO: 1709513 - DNA, 15 bp, Homo sapiens
cttacgagttatgct

SEQ ID NO: 1709514 - DNA, 15 bp, Homo sapiens
ttacgagttatgcta

SEQ ID NO: 1709515 - DNA, 15 bp, Homo sapiens
tacgagttatgctat

SEQ ID NO: 1709516 - DNA, 15 bp, Homo sapiens
acgagttatgctatg

SEQ ID NO: 1709517 - DNA, 15 bp, Homo sapiens
cgagttatgctatgc

SEQ ID NO: 1709518 - DNA, 15 bp, Homo sapiens
gagttatgctatgct

SEQ ID NO: 1709519 - DNA, 15 bp, Homo sapiens
agttatgctatgctg

SEQ ID NO: 1709520 - DNA, 15 bp, Homo sapiens
gttatgctatgctgg

SEQ ID NO: 1709521 - DNA, 15 bp, Homo sapiens
ttatgctatgctggg

SEQ ID NO: 1709522 - DNA, 15 bp, Homo sapiens
tatgctatgctggga

SEQ ID NO: 1709523 - DNA, 15 bp, Homo sapiens
atgctatgctgggaa

SEQ ID NO: 1709524 - DNA, 15 bp, Homo sapiens
tgctatgctgggaag

SEQ ID NO: 1709525 - DNA, 15 bp, Homo sapiens
gctatgctgggaaga

SEQ ID NO: 1709526 - DNA, 15 bp, Homo sapiens
ctatgctgggaagaa

SEQ ID NO: 1709527 - DNA, 15 bp, Homo sapiens
tatgctgggaagaat

SEQ ID NO: 1709528 - DNA, 15 bp, Homo sapiens
atgctgggaagaatt

SEQ ID NO: 1709529 - DNA, 15 bp, Homo sapiens
tgctgggaagaatta

SEQ ID NO: 1709530 - DNA, 15 bp, Homo sapiens
gctgggaagaattac

SEQ ID NO: 1709531 - DNA, 15 bp, Homo sapiens
ctgggaagaattact

SEQ ID NO: 1709532 - DNA, 15 bp, Homo sapiens
tgggaagaattactg

SEQ ID NO: 1709533 - DNA, 15 bp, Homo sapiens
gggaagaattactgt

SEQ ID NO: 1709534 - DNA, 15 bp, Homo sapiens
ggaagaattactgtg

SEQ ID NO: 1709535 - DNA, 15 bp, Homo sapiens
gaagaattactgtgc

SEQ ID NO: 1709536 - DNA, 15 bp, Homo sapiens
aagaattactgtgct

SEQ ID NO: 1709537 - DNA, 15 bp, Homo sapiens
agaattactgtgcta

SEQ ID NO: 1709538 - DNA, 15 bp, Homo sapiens
gaattactgtgctac

SEQ ID NO: 1709539 - DNA, 15 bp, Homo sapiens
aattactgtgctact

SEQ ID NO: 1709540 - DNA, 15 bp, Homo sapiens
attactgtgctactt

SEQ ID NO: 1709541 - DNA, 15 bp, Homo sapiens
ttactgtgctacttt

SEQ ID NO: 1709542 - DNA, 15 bp, Homo sapiens
tactgtgctactttc

SEQ ID NO: 1709543 - DNA, 15 bp, Homo sapiens
actgtgctactttct

SEQ ID NO: 1709544 - DNA, 15 bp, Homo sapiens
ctgtgctactttctg

SEQ ID NO: 1709545 - DNA, 15 bp, Homo sapiens
tgtgctactttctga

SEQ ID NO: 1709546 - DNA, 15 bp, Homo sapiens
gtgctactttctgaa

SEQ ID NO: 1709547 - DNA, 15 bp, Homo sapiens
tgctactttctgaac

SEQ ID NO: 1709548 - DNA, 15 bp, Homo sapiens
gctactttctgaacc

SEQ ID NO: 1709549 - DNA, 15 bp, Homo sapiens
ctactttctgaaccc

SEQ ID NO: 1709550 - DNA, 15 bp, Homo sapiens
tactttctgaaccca

SEQ ID NO: 1709551 - DNA, 15 bp, Homo sapiens
actttctgaacccac

SEQ ID NO: 1709552 - DNA, 15 bp, Homo sapiens
ctttctgaacccact

SEQ ID NO: 1709553 - DNA, 15 bp, Homo sapiens
tttctgaacccactt

SEQ ID NO: 1709554 - DNA, 15 bp, Homo sapiens
ttctgaacccacttt

SEQ ID NO: 1709555 - DNA, 15 bp, Homo sapiens
tctgaacccactttt

SEQ ID NO: 1709556 - DNA, 15 bp, Homo sapiens
ctgaacccactttta

SEQ ID NO: 1709557 - DNA, 15 bp, Homo sapiens
tgaacccacttttac

SEQ ID NO: 1709558 - DNA, 15 bp, Homo sapiens
gaacccacttttacc

SEQ ID NO: 1709559 - DNA, 15 bp, Homo sapiens
aacccacttttacca

SEQ ID NO: 1709560 - DNA, 15 bp, Homo sapiens
acccacttttaccag

SEQ ID NO: 1709561 - DNA, 15 bp, Homo sapiens
cccacttttaccagt

SEQ ID NO: 1709562 - DNA, 15 bp, Homo sapiens
ccacttttaccagta

SEQ ID NO: 1709563 - DNA, 15 bp, Homo sapiens
cacttttaccagtat

SEQ ID NO: 1709564 - DNA, 15 bp, Homo sapiens
acttttaccagtatt

SEQ ID NO: 1709565 - DNA, 15 bp, Homo sapiens
cttttaccagtattg

SEQ ID NO: 1709566 - DNA, 15 bp, Homo sapiens
ttttaccagtattga

SEQ ID NO: 1709567 - DNA, 15 bp, Homo sapiens
tttaccagtattgag

SEQ ID NO: 1709568 - DNA, 15 bp, Homo sapiens
ttaccagtattgagc

SEQ ID NO: 1709569 - DNA, 15 bp, Homo sapiens
taccagtattgagca

SEQ ID NO: 1709570 - DNA, 15 bp, Homo sapiens
accagtattgagcac

SEQ ID NO: 1709571 - DNA, 15 bp, Homo sapiens
ccagtattgagcacc

SEQ ID NO: 1709572 - DNA, 15 bp, Homo sapiens
cagtattgagcacca

SEQ ID NO: 1709573 - DNA, 15 bp, Homo sapiens
agtattgagcaccat

SEQ ID NO: 1709574 - DNA, 15 bp, Homo sapiens
gtattgagcaccatg

SEQ ID NO: 1709575 - DNA, 15 bp, Homo sapiens
tattgagcaccatga

SEQ ID NO: 1709576 - DNA, 15 bp, Homo sapiens
attgagcaccatgaa

SEQ ID NO: 1709577 - DNA, 15 bp, Homo sapiens
ttgagcaccatgaag

SEQ ID NO: 1709578 - DNA, 15 bp, Homo sapiens
tgagcaccatgaagg

SEQ ID NO: 1709579 - DNA, 15 bp, Homo sapiens
gagcaccatgaaggc

SEQ ID NO: 1709580 - DNA, 15 bp, Homo sapiens
agcaccatgaaggcc

SEQ ID NO: 1709581 - DNA, 15 bp, Homo sapiens
gcaccatgaaggccc

SEQ ID NO: 1709582 - DNA, 15 bp, Homo sapiens
caccatgaaggccct

SEQ ID NO: 1709583 - DNA, 15 bp, Homo sapiens
accatgaaggcccta

SEQ ID NO: 1709584 - DNA, 15 bp, Homo sapiens
ccatgaaggccctag

SEQ ID NO: 1709585 - DNA, 15 bp, Homo sapiens
catgaaggccctaga

SEQ ID NO: 1709586 - DNA, 15 bp, Homo sapiens
atgaaggccctagaa

SEQ ID NO: 1709587 - DNA, 15 bp, Homo sapiens
tgaaggccctagaaa

SEQ ID NO: 1709588 - DNA, 15 bp, Homo sapiens
gaaggccctagaaac

SEQ ID NO: 1709589 - DNA, 15 bp, Homo sapiens
aaggccctagaaact

SEQ ID NO: 1709590 - DNA, 15 bp, Homo sapiens
aggccctagaaactt

SEQ ID NO: 1709591 - DNA, 15 bp, Homo sapiens
ggccctagaaacttc

SEQ ID NO: 1709592 - DNA, 15 bp, Homo sapiens
gccctagaaacttca

SEQ ID NO: 1709593 - DNA, 15 bp, Homo sapiens
ccctagaaacttcat

SEQ ID NO: 1709594 - DNA, 15 bp, Homo sapiens
cctagaaacttcatc

SEQ ID NO: 1709595 - DNA, 15 bp, Homo sapiens
ctagaaacttcatcc

SEQ ID NO: 1709596 - DNA, 15 bp, Homo sapiens
tagaaacttcatcct

SEQ ID NO: 1709597 - DNA, 15 bp, Homo sapiens
agaaacttcatccta

SEQ ID NO: 1709598 - DNA, 15 bp, Homo sapiens
gaaacttcatcctac

SEQ ID NO: 1709599 - DNA, 15 bp, Homo sapiens
aaacttcatcctaca

SEQ ID NO: 1709600 - DNA, 15 bp, Homo sapiens
aacttcatcctacaa

SEQ ID NO: 1709601 - DNA, 15 bp, Homo sapiens
acttcatcctacaaa

SEQ ID NO: 1709602 - DNA, 15 bp, Homo sapiens
cttcatcctacaaac

SEQ ID NO: 1709603 - DNA, 15 bp, Homo sapiens
ttcatcctacaaaca

SEQ ID NO: 1709604 - DNA, 15 bp, Homo sapiens
tcatcctacaaacag

SEQ ID NO: 1709605 - DNA, 15 bp, Homo sapiens
catcctacaaacagt

SEQ ID NO: 1709606 - DNA, 15 bp, Homo sapiens
atcctacaaacagta

SEQ ID NO: 1709607 - DNA, 15 bp, Homo sapiens
tcctacaaacagtaa

SEQ ID NO: 1709608 - DNA, 15 bp, Homo sapiens
cctacaaacagtaaa

SEQ ID NO: 1709609 - DNA, 15 bp, Homo sapiens
ctacaaacagtaaaa

SEQ ID NO: 1709610 - DNA, 15 bp, Homo sapiens
tacaaacagtaaaat

SEQ ID NO: 1709611 - DNA, 15 bp, Homo sapiens
acaaacagtaaaatc

SEQ ID NO: 1709612 - DNA, 15 bp, Homo sapiens
caaacagtaaaatct

SEQ ID NO: 1709613 - DNA, 15 bp, Homo sapiens
aaacagtaaaatctc

SEQ ID NO: 1709614 - DNA, 15 bp, Homo sapiens
aacagtaaaatctca

SEQ ID NO: 1709615 - DNA, 15 bp, Homo sapiens
acagtaaaatctcat

SEQ ID NO: 1709616 - DNA, 15 bp, Homo sapiens
cagtaaaatctcatt

SEQ ID NO: 1709617 - DNA, 15 bp, Homo sapiens
agtaaaatctcatta

SEQ ID NO: 1709618 - DNA, 15 bp, Homo sapiens
gtaaaatctcattaa

SEQ ID NO: 1709619 - DNA, 15 bp, Homo sapiens
taaaatctcattaat

SEQ ID NO: 1709620 - DNA, 15 bp, Homo sapiens
aaaatctcattaatt

SEQ ID NO: 1709621 - DNA, 15 bp, Homo sapiens
aaatctcattaattt

SEQ ID NO: 1709622 - DNA, 15 bp, Homo sapiens
aatctcattaattta

SEQ ID NO: 1709623 - DNA, 15 bp, Homo sapiens
atctcattaatttag

SEQ ID NO: 1709624 - DNA, 15 bp, Homo sapiens
tctcattaatttaga

SEQ ID NO: 1709625 - DNA, 15 bp, Homo sapiens
ctcattaatttagaa

SEQ ID NO: 1709626 - DNA, 15 bp, Homo sapiens
tcattaatttagaac

SEQ ID NO: 1709627 - DNA, 15 bp, Homo sapiens
cattaatttagaacc

SEQ ID NO: 1709628 - DNA, 15 bp, Homo sapiens
attaatttagaaccc

SEQ ID NO: 1709629 - DNA, 15 bp, Homo sapiens
ttaatttagaacccc

SEQ ID NO: 1709630 - DNA, 15 bp, Homo sapiens
taatttagaacccct

SEQ ID NO: 1709631 - DNA, 15 bp, Homo sapiens
aatttagaacccctc

SEQ ID NO: 1709632 - DNA, 15 bp, Homo sapiens
atttagaacccctcc

SEQ ID NO: 1709633 - DNA, 15 bp, Homo sapiens
tttagaacccctcct

SEQ ID NO: 1709634 - DNA, 15 bp, Homo sapiens
ttagaacccctccta

SEQ ID NO: 1709635 - DNA, 15 bp, Homo sapiens
tagaacccctcctac

SEQ ID NO: 1709636 - DNA, 15 bp, Homo sapiens
agaacccctcctact

SEQ ID NO: 1709637 - DNA, 15 bp, Homo sapiens
gaacccctcctactc

SEQ ID NO: 1709638 - DNA, 15 bp, Homo sapiens
aacccctcctactca

SEQ ID NO: 1709639 - DNA, 15 bp, Homo sapiens
acccctcctactcac

SEQ ID NO: 1709640 - DNA, 15 bp, Homo sapiens
cccctcctactcact

SEQ ID NO: 1709641 - DNA, 15 bp, Homo sapiens
ccctcctactcactt

SEQ ID NO: 1709642 - DNA, 15 bp, Homo sapiens
cctcctactcacttt

SEQ ID NO: 1709643 - DNA, 15 bp, Homo sapiens
ctcctactcactttg

SEQ ID NO: 1709644 - DNA, 15 bp, Homo sapiens
tcctactcactttgt

SEQ ID NO: 1709645 - DNA, 15 bp, Homo sapiens
cctactcactttgta

SEQ ID NO: 1709646 - DNA, 15 bp, Homo sapiens
ctactcactttgtaa

SEQ ID NO: 1709647 - DNA, 15 bp, Homo sapiens
tactcactttgtaat

SEQ ID NO: 1709648 - DNA, 15 bp, Homo sapiens
actcactttgtaatt

SEQ ID NO: 1709649 - DNA, 15 bp, Homo sapiens
ctcactttgtaattt

SEQ ID NO: 1709650 - DNA, 15 bp, Homo sapiens
tcactttgtaatttg

SEQ ID NO: 1709651 - DNA, 15 bp, Homo sapiens
cactttgtaatttgc

SEQ ID NO: 1709652 - DNA, 15 bp, Homo sapiens
actttgtaatttgcc

SEQ ID NO: 1709653 - DNA, 15 bp, Homo sapiens
ctttgtaatttgcca

SEQ ID NO: 1709654 - DNA, 15 bp, Homo sapiens
tttgtaatttgccat

SEQ ID NO: 1709655 - DNA, 15 bp, Homo sapiens
ttgtaatttgccata

SEQ ID NO: 1709656 - DNA, 15 bp, Homo sapiens
tgtaatttgccataa

SEQ ID NO: 1709657 - DNA, 15 bp, Homo sapiens
gtaatttgccataat

SEQ ID NO: 1709658 - DNA, 15 bp, Homo sapiens
taatttgccataatt

SEQ ID NO: 1709659 - DNA, 15 bp, Homo sapiens
aatttgccataattt

SEQ ID NO: 1709660 - DNA, 15 bp, Homo sapiens
atttgccataatttg

SEQ ID NO: 1709661 - DNA, 15 bp, Homo sapiens
tttgccataatttga

SEQ ID NO: 1709662 - DNA, 15 bp, Homo sapiens
ttgccataatttgaa

SEQ ID NO: 1709663 - DNA, 15 bp, Homo sapiens
tgccataatttgaac

SEQ ID NO: 1709664 - DNA, 15 bp, Homo sapiens
gccataatttgaacg

SEQ ID NO: 1709665 - DNA, 15 bp, Homo sapiens
ccataatttgaacgg

SEQ ID NO: 1709666 - DNA, 15 bp, Homo sapiens
cataatttgaacggg

SEQ ID NO: 1709667 - DNA, 15 bp, Homo sapiens
ataatttgaacgggt

SEQ ID NO: 1709668 - DNA, 15 bp, Homo sapiens
taatttgaacgggtt

SEQ ID NO: 1709669 - DNA, 15 bp, Homo sapiens
aatttgaacgggtta

SEQ ID NO: 1709670 - DNA, 15 bp, Homo sapiens
atttgaacgggttac

SEQ ID NO: 1709671 - DNA, 15 bp, Homo sapiens
tttgaacgggttact

SEQ ID NO: 1709672 - DNA, 15 bp, Homo sapiens
ttgaacgggttactt

SEQ ID NO: 1709673 - DNA, 15 bp, Homo sapiens
tgaacgggttacttt

SEQ ID NO: 1709674 - DNA, 15 bp, Homo sapiens
gaacgggttactttt

SEQ ID NO: 1709675 - DNA, 15 bp, Homo sapiens
aacgggttacttttg

SEQ ID NO: 1709676 - DNA, 15 bp, Homo sapiens
acgggttacttttgc

SEQ ID NO: 1709677 - DNA, 15 bp, Homo sapiens
cgggttacttttgct

SEQ ID NO: 1709678 - DNA, 15 bp, Homo sapiens
gggttacttttgctt

SEQ ID NO: 1709679 - DNA, 15 bp, Homo sapiens
ggttacttttgcttt

SEQ ID NO: 1709680 - DNA, 15 bp, Homo sapiens
gttacttttgcttta

SEQ ID NO: 1709681 - DNA, 15 bp, Homo sapiens
ttacttttgctttac

SEQ ID NO: 1709682 - DNA, 15 bp, Homo sapiens
tacttttgctttaca

SEQ ID NO: 1709683 - DNA, 15 bp, Homo sapiens
acttttgctttacaa

SEQ ID NO: 1709684 - DNA, 15 bp, Homo sapiens
cttttgctttacaaa

SEQ ID NO: 1709685 - DNA, 15 bp, Homo sapiens
ttttgctttacaaaa

SEQ ID NO: 1709686 - DNA, 15 bp, Homo sapiens
tttgctttacaaaaa

SEQ ID NO: 1709687 - DNA, 15 bp, Homo sapiens
ttgctttacaaaaaa

SEQ ID NO: 1709688 - DNA, 15 bp, Homo sapiens
tgctttacaaaaaaa

SEQ ID NO: 1709689 - DNA, 15 bp, Homo sapiens
gctttacaaaaaaaa

SEQ ID NO: 1709690 - DNA, 15 bp, Homo sapiens
ctttacaaaaaaaag

SEQ ID NO: 1709691 - DNA, 15 bp, Homo sapiens
tttacaaaaaaaagg

SEQ ID NO: 1709692 - DNA, 15 bp, Homo sapiens
ttacaaaaaaaagga

SEQ ID NO: 1709693 - DNA, 15 bp, Homo sapiens
tacaaaaaaaaggat

SEQ ID NO: 1709694 - DNA, 15 bp, Homo sapiens
acaaaaaaaaggatt

SEQ ID NO: 1709695 - DNA, 15 bp, Homo sapiens
caaaaaaaaggattt

SEQ ID NO: 1709696 - DNA, 15 bp, Homo sapiens
aaaaaaaaggatttg

SEQ ID NO: 1709697 - DNA, 15 bp, Homo sapiens
aaaaaaaggatttgt

SEQ ID NO: 1709698 - DNA, 15 bp, Homo sapiens
aaaaaaggatttgtt

SEQ ID NO: 1709699 - DNA, 15 bp, Homo sapiens
aaaaaggatttgtta

SEQ ID NO: 1709700 - DNA, 15 bp, Homo sapiens
aaaaggatttgttaa

SEQ ID NO: 1709701 - DNA, 15 bp, Homo sapiens
aaaggatttgttaat

SEQ ID NO: 1709702 - DNA, 15 bp, Homo sapiens
aaggatttgttaatg

SEQ ID NO: 1709703 - DNA, 15 bp, Homo sapiens
aggatttgttaatgg

SEQ ID NO: 1709704 - DNA, 15 bp, Homo sapiens
ggatttgttaatgga

SEQ ID NO: 1709705 - DNA, 15 bp, Homo sapiens
gatttgttaatggag

SEQ ID NO: 1709706 - DNA, 15 bp, Homo sapiens
atttgttaatggagt

SEQ ID NO: 1709707 - DNA, 15 bp, Homo sapiens
tttgttaatggagta

SEQ ID NO: 1709708 - DNA, 15 bp, Homo sapiens
ttgttaatggagtag

SEQ ID NO: 1709709 - DNA, 15 bp, Homo sapiens
tgttaatggagtagc

SEQ ID NO: 1709710 - DNA, 15 bp, Homo sapiens
gttaatggagtagca

SEQ ID NO: 1709711 - DNA, 15 bp, Homo sapiens
ttaatggagtagcac

SEQ ID NO: 1709712 - DNA, 15 bp, Homo sapiens
taatggagtagcaca

SEQ ID NO: 1709713 - DNA, 15 bp, Homo sapiens
aatggagtagcacat

SEQ ID NO: 1709714 - DNA, 15 bp, Homo sapiens
atggagtagcacata

SEQ ID NO: 1709715 - DNA, 15 bp, Homo sapiens
tggagtagcacatat

SEQ ID NO: 1709716 - DNA, 15 bp, Homo sapiens
ggagtagcacatatt

SEQ ID NO: 1709717 - DNA, 15 bp, Homo sapiens
gagtagcacatattg

SEQ ID NO: 1709718 - DNA, 15 bp, Homo sapiens
agtagcacatattgt

SEQ ID NO: 1709719 - DNA, 15 bp, Homo sapiens
gtagcacatattgtt

SEQ ID NO: 1709720 - DNA, 15 bp, Homo sapiens
tagcacatattgttt

SEQ ID NO: 1709721 - DNA, 15 bp, Homo sapiens
agcacatattgtttc

SEQ ID NO: 1709722 - DNA, 15 bp, Homo sapiens
gcacatattgtttcc

SEQ ID NO: 1709723 - DNA, 15 bp, Homo sapiens
cacatattgtttcca

SEQ ID NO: 1709724 - DNA, 15 bp, Homo sapiens
acatattgtttccaa

SEQ ID NO: 1709725 - DNA, 15 bp, Homo sapiens
catattgtttccaag

SEQ ID NO: 1709726 - DNA, 15 bp, Homo sapiens
atattgtttccaagg

SEQ ID NO: 1709727 - DNA, 15 bp, Homo sapiens
tattgtttccaagga

SEQ ID NO: 1709728 - DNA, 15 bp, Homo sapiens
attgtttccaaggag

SEQ ID NO: 1709729 - DNA, 15 bp, Homo sapiens
ttgtttccaaggaga

SEQ ID NO: 1709730 - DNA, 15 bp, Homo sapiens
tgtttccaaggagat

SEQ ID NO: 1709731 - DNA, 15 bp, Homo sapiens
gtttccaaggagatt

SEQ ID NO: 1709732 - DNA, 15 bp, Homo sapiens
tttccaaggagattt

SEQ ID NO: 1709733 - DNA, 15 bp, Homo sapiens
ttccaaggagattta

SEQ ID NO: 1709734 - DNA, 15 bp, Homo sapiens
tccaaggagatttat

SEQ ID NO: 1709735 - DNA, 15 bp, Homo sapiens
ccaaggagatttatt

SEQ ID NO: 1709736 - DNA, 15 bp, Homo sapiens
caaggagatttattt

SEQ ID NO: 1709737 - DNA, 15 bp, Homo sapiens
aaggagatttatttg

SEQ ID NO: 1709738 - DNA, 15 bp, Homo sapiens
aggagatttatttgg

SEQ ID NO: 1709739 - DNA, 15 bp, Homo sapiens
ggagatttatttggc

SEQ ID NO: 1709740 - DNA, 15 bp, Homo sapiens
gagatttatttggca

SEQ ID NO: 1709741 - DNA, 15 bp, Homo sapiens
agatttatttggcaa

SEQ ID NO: 1709742 - DNA, 15 bp, Homo sapiens
gatttatttggcaaa

SEQ ID NO: 1709743 - DNA, 15 bp, Homo sapiens
atttatttggcaaat

SEQ ID NO: 1709744 - DNA, 15 bp, Homo sapiens
tttatttggcaaata

SEQ ID NO: 1709745 - DNA, 15 bp, Homo sapiens
ttatttggcaaataa

SEQ ID NO: 1709746 - DNA, 15 bp, Homo sapiens
tatttggcaaataat

SEQ ID NO: 1709747 - DNA, 15 bp, Homo sapiens
atttggcaaataata

SEQ ID NO: 1709748 - DNA, 15 bp, Homo sapiens
tttggcaaataatag

SEQ ID NO: 1709749 - DNA, 15 bp, Homo sapiens
ttggcaaataatagc

SEQ ID NO: 1709750 - DNA, 15 bp, Homo sapiens
tggcaaataatagct

SEQ ID NO: 1709751 - DNA, 15 bp, Homo sapiens
ggcaaataatagcta

SEQ ID NO: 1709752 - DNA, 15 bp, Homo sapiens
gcaaataatagctac

SEQ ID NO: 1709753 - DNA, 15 bp, Homo sapiens
caaataatagctact

SEQ ID NO: 1709754 - DNA, 15 bp, Homo sapiens
aaataatagctactt

SEQ ID NO: 1709755 - DNA, 15 bp, Homo sapiens
aataatagctactta

SEQ ID NO: 1709756 - DNA, 15 bp, Homo sapiens
ataatagctacttag

SEQ ID NO: 1709757 - DNA, 15 bp, Homo sapiens
taatagctacttagt

SEQ ID NO: 1709758 - DNA, 15 bp, Homo sapiens
aatagctacttagta

SEQ ID NO: 1709759 - DNA, 15 bp, Homo sapiens
atagctacttagtaa

SEQ ID NO: 1709760 - DNA, 15 bp, Homo sapiens
tagctacttagtaaa

SEQ ID NO: 1709761 - DNA, 15 bp, Homo sapiens
agctacttagtaaat

SEQ ID NO: 1709762 - DNA, 15 bp, Homo sapiens
gctacttagtaaata

SEQ ID NO: 1709763 - DNA, 15 bp, Homo sapiens
ctacttagtaaatat

SEQ ID NO: 1709764 - DNA, 15 bp, Homo sapiens
tacttagtaaatatt

SEQ ID NO: 1709765 - DNA, 15 bp, Homo sapiens
acttagtaaatattt

SEQ ID NO: 1709766 - DNA, 15 bp, Homo sapiens
cttagtaaatatttt

SEQ ID NO: 1709767 - DNA, 15 bp, Homo sapiens
ttagtaaatattttt

SEQ ID NO: 1709768 - DNA, 15 bp, Homo sapiens
tagtaaatatttttg

SEQ ID NO: 1709769 - DNA, 15 bp, Homo sapiens
aaatatttttgaata

SEQ ID NO: 1709770 - DNA, 15 bp, Homo sapiens
aatatttttgaataa

SEQ ID NO: 1709771 - DNA, 15 bp, Homo sapiens
atatttttgaataaa

SEQ ID NO: 1709772 - DNA, 15 bp, Homo sapiens
tatttttgaataaat

SEQ ID NO: 1709773 - DNA, 15 bp, Homo sapiens
atttttgaataaatg

SEQ ID NO: 1709774 - DNA, 15 bp, Homo sapiens
tttttgaataaatgg

SEQ ID NO: 1709775 - DNA, 15 bp, Homo sapiens
ttttgaataaatggt

SEQ ID NO: 1709776 - DNA, 15 bp, Homo sapiens
tttgaataaatggtc

SEQ ID NO: 1709777 - DNA, 15 bp, Homo sapiens
ttgaataaatggtct

SEQ ID NO: 1709778 - DNA, 15 bp, Homo sapiens
tgaataaatggtctc

SEQ ID NO: 1709779 - DNA, 15 bp, Homo sapiens
gaataaatggtctcc

SEQ ID NO: 1709780 - DNA, 15 bp, Homo sapiens
aataaatggtctcct

SEQ ID NO: 1709781 - DNA, 15 bp, Homo sapiens
ataaatggtctcctt

SEQ ID NO: 1709782 - DNA, 15 bp, Homo sapiens
taaatggtctccttt

SEQ ID NO: 1709783 - DNA, 15 bp, Homo sapiens
aaatggtctcctttg

SEQ ID NO: 1709784 - DNA, 15 bp, Homo sapiens
aatggtctcctttga

SEQ ID NO: 1709785 - DNA, 15 bp, Homo sapiens
atggtctcctttgaa

SEQ ID NO: 1709786 - DNA, 15 bp, Homo sapiens
tggtctcctttgaac

SEQ ID NO: 1709787 - DNA, 15 bp, Homo sapiens
ggtctcctttgaaca

SEQ ID NO: 1709788 - DNA, 15 bp, Homo sapiens
gtctcctttgaacaa

SEQ ID NO: 1709789 - DNA, 15 bp, Homo sapiens
tctcctttgaacaac

SEQ ID NO: 1709790 - DNA, 15 bp, Homo sapiens
ctcctttgaacaact

SEQ ID NO: 1709791 - DNA, 15 bp, Homo sapiens
tcctttgaacaacta

SEQ ID NO: 1709792 - DNA, 15 bp, Homo sapiens
cctttgaacaactat

SEQ ID NO: 1709793 - DNA, 15 bp, Homo sapiens
ctttgaacaactatt

SEQ ID NO: 1709794 - DNA, 15 bp, Homo sapiens
tttgaacaactattt

SEQ ID NO: 1709795 - DNA, 15 bp, Homo sapiens
ttgaacaactatttg

SEQ ID NO: 1709796 - DNA, 15 bp, Homo sapiens
tgaacaactatttgt

SEQ ID NO: 1709797 - DNA, 15 bp, Homo sapiens
gaacaactatttgtt

SEQ ID NO: 1709798 - DNA, 15 bp, Homo sapiens
aacaactatttgttg

SEQ ID NO: 1709799 - DNA, 15 bp, Homo sapiens
acaactatttgttga

SEQ ID NO: 1709800 - DNA, 15 bp, Homo sapiens
caactatttgttgac

SEQ ID NO: 1709801 - DNA, 15 bp, Homo sapiens
aactatttgttgaca

SEQ ID NO: 1709802 - DNA, 15 bp, Homo sapiens
actatttgttgacac

SEQ ID NO: 1709803 - DNA, 15 bp, Homo sapiens
ctatttgttgacact

SEQ ID NO: 1709804 - DNA, 15 bp, Homo sapiens
tatttgttgacactg

SEQ ID NO: 1709805 - DNA, 15 bp, Homo sapiens
atttgttgacactgt

SEQ ID NO: 1709806 - DNA, 15 bp, Homo sapiens
tttgttgacactgtt

SEQ ID NO: 1709807 - DNA, 15 bp, Homo sapiens
ttgttgacactgttt

SEQ ID NO: 1709808 - DNA, 15 bp, Homo sapiens
tgttgacactgtttt

SEQ ID NO: 1709809 - DNA, 15 bp, Homo sapiens
gttgacactgtttta

SEQ ID NO: 1709810 - DNA, 15 bp, Homo sapiens
ttgacactgttttaa

SEQ ID NO: 1709811 - DNA, 15 bp, Homo sapiens
tgacactgttttaat

SEQ ID NO: 1709812 - DNA, 15 bp, Homo sapiens
gacactgttttaatg

SEQ ID NO: 1709813 - DNA, 15 bp, Homo sapiens
acactgttttaatga

SEQ ID NO: 1709814 - DNA, 15 bp, Homo sapiens
cactgttttaatgac

SEQ ID NO: 1709815 - DNA, 15 bp, Homo sapiens
actgttttaatgact

SEQ ID NO: 1709816 - DNA, 15 bp, Homo sapiens
ctgttttaatgactc

SEQ ID NO: 1709817 - DNA, 15 bp, Homo sapiens
tgttttaatgactca

SEQ ID NO: 1709818 - DNA, 15 bp, Homo sapiens
gttttaatgactcaa

SEQ ID NO: 1709819 - DNA, 15 bp, Homo sapiens
ttttaatgactcaaa

SEQ ID NO: 1709820 - DNA, 15 bp, Homo sapiens
tttaatgactcaaat

SEQ ID NO: 1709821 - DNA, 15 bp, Homo sapiens
ttaatgactcaaatt

SEQ ID NO: 1709822 - DNA, 15 bp, Homo sapiens
taatgactcaaatta

SEQ ID NO: 1709823 - DNA, 15 bp, Homo sapiens
aatgactcaaattaa

SEQ ID NO: 1709824 - DNA, 15 bp, Homo sapiens
atgactcaaattaat

SEQ ID NO: 1709825 - DNA, 15 bp, Homo sapiens
tgactcaaattaatt

SEQ ID NO: 1709826 - DNA, 15 bp, Homo sapiens
gactcaaattaattc

SEQ ID NO: 1709827 - DNA, 15 bp, Homo sapiens
actcaaattaattca

SEQ ID NO: 1709828 - DNA, 15 bp, Homo sapiens
ctcaaattaattcag

SEQ ID NO: 1709829 - DNA, 15 bp, Homo sapiens
tcaaattaattcagg

SEQ ID NO: 1709830 - DNA, 15 bp, Homo sapiens
caaattaattcagga

SEQ ID NO: 1709831 - DNA, 15 bp, Homo sapiens
aaattaattcaggaa

SEQ ID NO: 1709832 - DNA, 15 bp, Homo sapiens
aattaattcaggaaa

SEQ ID NO: 1709833 - DNA, 15 bp, Homo sapiens
attaattcaggaaaa

SEQ ID NO: 1709834 - DNA, 15 bp, Homo sapiens
ttaattcaggaaaat

SEQ ID NO: 1709835 - DNA, 15 bp, Homo sapiens
taattcaggaaaatg

SEQ ID NO: 1709836 - DNA, 15 bp, Homo sapiens
aattcaggaaaatga

SEQ ID NO: 1709837 - DNA, 15 bp, Homo sapiens
attcaggaaaatgaa

SEQ ID NO: 1709838 - DNA, 15 bp, Homo sapiens
ttcaggaaaatgaat

SEQ ID NO: 1709839 - DNA, 15 bp, Homo sapiens
tcaggaaaatgaata

SEQ ID NO: 1709840 - DNA, 15 bp, Homo sapiens
caggaaaatgaataa

SEQ ID NO: 1709841 - DNA, 15 bp, Homo sapiens
aggaaaatgaataaa

SEQ ID NO: 1709842 - DNA, 15 bp, Homo sapiens
ggaaaatgaataaag

SEQ ID NO: 1709843 - DNA, 15 bp, Homo sapiens
gaaaatgaataaaga

SEQ ID NO: 1709844 - DNA, 15 bp, Homo sapiens
aaaatgaataaagat

SEQ ID NO: 1709845 - DNA, 15 bp, Homo sapiens
aaatgaataaagatg

SEQ ID NO: 1709846 - DNA, 15 bp, Homo sapiens
aatgaataaagatgt

SEQ ID NO: 1709847 - DNA, 15 bp, Homo sapiens
atgaataaagatgta

SEQ ID NO: 1709848 - DNA, 15 bp, Homo sapiens
tgaataaagatgtat

SEQ ID NO: 1709849 - DNA, 15 bp, Homo sapiens
gaataaagatgtatt

SEQ ID NO: 1709850 - DNA, 15 bp, Homo sapiens
aataaagatgtattg

SEQ ID NO: 1709851 - DNA, 15 bp, Homo sapiens
ataaagatgtattgt

SEQ ID NO: 1709852 - DNA, 15 bp, Homo sapiens
taaagatgtattgta

SEQ ID NO: 1709853 - DNA, 15 bp, Homo sapiens
aaagatgtattgtat

SEQ ID NO: 1709854 - DNA, 15 bp, Homo sapiens
aagatgtattgtata

SEQ ID NO: 1709855 - DNA, 15 bp, Homo sapiens
agatgtattgtatag

SEQ ID NO: 1709856 - DNA, 15 bp, Homo sapiens
gatgtattgtatagc

SEQ ID NO: 1709857 - DNA, 15 bp, Homo sapiens
atgtattgtatagct

SEQ ID NO: 1709858 - DNA, 15 bp, Homo sapiens
tgtattgtatagctc

SEQ ID NO: 1709859 - DNA, 15 bp, Homo sapiens
gtattgtatagctct

SEQ ID NO: 1709860 - DNA, 15 bp, Homo sapiens
tattgtatagctctc

SEQ ID NO: 1709861 - DNA, 15 bp, Homo sapiens
attgtatagctctct

SEQ ID NO: 1709862 - DNA, 15 bp, Homo sapiens
ttgtatagctctcta

SEQ ID NO: 1709863 - DNA, 15 bp, Homo sapiens
tgtatagctctctaa

SEQ ID NO: 1709864 - DNA, 15 bp, Homo sapiens
gtatagctctctaat

SEQ ID NO: 1709865 - DNA, 15 bp, Homo sapiens
tatagctctctaatg

SEQ ID NO: 1709866 - DNA, 15 bp, Homo sapiens
atagctctctaatgc

SEQ ID NO: 1709867 - DNA, 15 bp, Homo sapiens
tagctctctaatgca

SEQ ID NO: 1709868 - DNA, 15 bp, Homo sapiens
agctctctaatgcat

SEQ ID NO: 1709869 - DNA, 15 bp, Homo sapiens
gctctctaatgcata

SEQ ID NO: 1709870 - DNA, 15 bp, Homo sapiens
ctctctaatgcatac

SEQ ID NO: 1709871 - DNA, 15 bp, Homo sapiens
tctctaatgcatact

SEQ ID NO: 1709872 - DNA, 15 bp, Homo sapiens
ctctaatgcatactt

SEQ ID NO: 1709873 - DNA, 15 bp, Homo sapiens
tctaatgcatacttc

SEQ ID NO: 1709874 - DNA, 15 bp, Homo sapiens
ctaatgcatacttct

SEQ ID NO: 1709875 - DNA, 15 bp, Homo sapiens
taatgcatacttctg

SEQ ID NO: 1709876 - DNA, 15 bp, Homo sapiens
aatgcatacttctga

SEQ ID NO: 1709877 - DNA, 15 bp, Homo sapiens
atgcatacttctgac

SEQ ID NO: 1709878 - DNA, 15 bp, Homo sapiens
tgcatacttctgacc

SEQ ID NO: 1709879 - DNA, 15 bp, Homo sapiens
gcatacttctgacct

SEQ ID NO: 1709880 - DNA, 15 bp, Homo sapiens
catacttctgacctt

SEQ ID NO: 1709881 - DNA, 15 bp, Homo sapiens
atacttctgaccttc

SEQ ID NO: 1709882 - DNA, 15 bp, Homo sapiens
tacttctgaccttcc

SEQ ID NO: 1709883 - DNA, 15 bp, Homo sapiens
acttctgaccttccc

SEQ ID NO: 1709884 - DNA, 15 bp, Homo sapiens
cttctgaccttccca

SEQ ID NO: 1709885 - DNA, 15 bp, Homo sapiens
ttctgaccttcccag

SEQ ID NO: 1709886 - DNA, 15 bp, Homo sapiens
tctgaccttcccagt

SEQ ID NO: 1709887 - DNA, 15 bp, Homo sapiens
ctgaccttcccagtt

SEQ ID NO: 1709888 - DNA, 15 bp, Homo sapiens
tgaccttcccagttc

SEQ ID NO: 1709889 - DNA, 15 bp, Homo sapiens
gaccttcccagttcc

SEQ ID NO: 1709890 - DNA, 15 bp, Homo sapiens
accttcccagttccc

SEQ ID NO: 1709891 - DNA, 15 bp, Homo sapiens
ccttcccagttccct

SEQ ID NO: 1709892 - DNA, 15 bp, Homo sapiens
cttcccagttccctc

SEQ ID NO: 1709893 - DNA, 15 bp, Homo sapiens
ttcccagttccctca

SEQ ID NO: 1709894 - DNA, 15 bp, Homo sapiens
tcccagttccctcac

SEQ ID NO: 1709895 - DNA, 15 bp, Homo sapiens
cccagttccctcacc

SEQ ID NO: 1709896 - DNA, 15 bp, Homo sapiens
ccagttccctcacct

SEQ ID NO: 1709897 - DNA, 15 bp, Homo sapiens
cagttccctcacctg

SEQ ID NO: 1709898 - DNA, 15 bp, Homo sapiens
agttccctcacctgg

SEQ ID NO: 1709899 - DNA, 15 bp, Homo sapiens
gttccctcacctggc

SEQ ID NO: 1709900 - DNA, 15 bp, Homo sapiens
ttccctcacctggcc

SEQ ID NO: 1709901 - DNA, 15 bp, Homo sapiens
tccctcacctggcct

SEQ ID NO: 1709902 - DNA, 15 bp, Homo sapiens
ccctcacctggccta

SEQ ID NO: 1709903 - DNA, 15 bp, Homo sapiens
cctcacctggcctaa

SEQ ID NO: 1709904 - DNA, 15 bp, Homo sapiens
ctcacctggcctaaa

SEQ ID NO: 1709905 - DNA, 15 bp, Homo sapiens
tcacctggcctaaat

SEQ ID NO: 1709906 - DNA, 15 bp, Homo sapiens
cacctggcctaaatt

SEQ ID NO: 1709907 - DNA, 15 bp, Homo sapiens
acctggcctaaatta

SEQ ID NO: 1709908 - DNA, 15 bp, Homo sapiens
cctggcctaaattac

SEQ ID NO: 1709909 - DNA, 15 bp, Homo sapiens
ctggcctaaattaca

SEQ ID NO: 1709910 - DNA, 15 bp, Homo sapiens
tggcctaaattacaa

SEQ ID NO: 1709911 - DNA, 15 bp, Homo sapiens
ggcctaaattacaaa

SEQ ID NO: 1709912 - DNA, 15 bp, Homo sapiens
gcctaaattacaaag

SEQ ID NO: 1709913 - DNA, 15 bp, Homo sapiens
cctaaattacaaagg

SEQ ID NO: 1709914 - DNA, 15 bp, Homo sapiens
ctaaattacaaaggt

SEQ ID NO: 1709915 - DNA, 15 bp, Homo sapiens
taaattacaaaggtt

SEQ ID NO: 1709916 - DNA, 15 bp, Homo sapiens
aaattacaaaggttc

SEQ ID NO: 1709917 - DNA, 15 bp, Homo sapiens
aattacaaaggttct

SEQ ID NO: 1709918 - DNA, 15 bp, Homo sapiens
attacaaaggttctg

SEQ ID NO: 1709919 - DNA, 15 bp, Homo sapiens
ttacaaaggttctgt

SEQ ID NO: 1709920 - DNA, 15 bp, Homo sapiens
tacaaaggttctgtt

SEQ ID NO: 1709921 - DNA, 15 bp, Homo sapiens
acaaaggttctgtta

SEQ ID NO: 1709922 - DNA, 15 bp, Homo sapiens
caaaggttctgttat

SEQ ID NO: 1709923 - DNA, 15 bp, Homo sapiens
aaaggttctgttatg

SEQ ID NO: 1709924 - DNA, 15 bp, Homo sapiens
aaggttctgttatgc

SEQ ID NO: 1709925 - DNA, 15 bp, Homo sapiens
aggttctgttatgca

SEQ ID NO: 1709926 - DNA, 15 bp, Homo sapiens
ggttctgttatgcac

SEQ ID NO: 1709927 - DNA, 15 bp, Homo sapiens
gttctgttatgcaca

SEQ ID NO: 1709928 - DNA, 15 bp, Homo sapiens
ttctgttatgcacaa

SEQ ID NO: 1709929 - DNA, 15 bp, Homo sapiens
tctgttatgcacaaa

SEQ ID NO: 1709930 - DNA, 15 bp, Homo sapiens
ctgttatgcacaaaa

SEQ ID NO: 1709931 - DNA, 15 bp, Homo sapiens
tgttatgcacaaaat

SEQ ID NO: 1709932 - DNA, 15 bp, Homo sapiens
gttatgcacaaaatc

SEQ ID NO: 1709933 - DNA, 15 bp, Homo sapiens
ttatgcacaaaatcc

SEQ ID NO: 1709934 - DNA, 15 bp, Homo sapiens
tatgcacaaaatcca

SEQ ID NO: 1709935 - DNA, 15 bp, Homo sapiens
atgcacaaaatccat

SEQ ID NO: 1709936 - DNA, 15 bp, Homo sapiens
tgcacaaaatccatt

SEQ ID NO: 1709937 - DNA, 15 bp, Homo sapiens
gcacaaaatccattt

SEQ ID NO: 1709938 - DNA, 15 bp, Homo sapiens
cacaaaatccatttc

SEQ ID NO: 1709939 - DNA, 15 bp, Homo sapiens
acaaaatccatttca

SEQ ID NO: 1709940 - DNA, 15 bp, Homo sapiens
caaaatccatttcac

SEQ ID NO: 1709941 - DNA, 15 bp, Homo sapiens
aaaatccatttcacc

SEQ ID NO: 1709942 - DNA, 15 bp, Homo sapiens
aaatccatttcacca

SEQ ID NO: 1709943 - DNA, 15 bp, Homo sapiens
aatccatttcaccac

SEQ ID NO: 1709944 - DNA, 15 bp, Homo sapiens
atccatttcaccaca

SEQ ID NO: 1709945 - DNA, 15 bp, Homo sapiens
tccatttcaccacaa

SEQ ID NO: 1709946 - DNA, 15 bp, Homo sapiens
ccatttcaccacaag

SEQ ID NO: 1709947 - DNA, 15 bp, Homo sapiens
catttcaccacaagg

SEQ ID NO: 1709948 - DNA, 15 bp, Homo sapiens
atttcaccacaaggc

SEQ ID NO: 1709949 - DNA, 15 bp, Homo sapiens
tttcaccacaaggca

SEQ ID NO: 1709950 - DNA, 15 bp, Homo sapiens
ttcaccacaaggcaa

SEQ ID NO: 1709951 - DNA, 15 bp, Homo sapiens
tcaccacaaggcaat

SEQ ID NO: 1709952 - DNA, 15 bp, Homo sapiens
caccacaaggcaatg

SEQ ID NO: 1709953 - DNA, 15 bp, Homo sapiens
accacaaggcaatgt

SEQ ID NO: 1709954 - DNA, 15 bp, Homo sapiens
ccacaaggcaatgtc

SEQ ID NO: 1709955 - DNA, 15 bp, Homo sapiens
cacaaggcaatgtca

SEQ ID NO: 1709956 - DNA, 15 bp, Homo sapiens
acaaggcaatgtcat

SEQ ID NO: 1709957 - DNA, 15 bp, Homo sapiens
caaggcaatgtcatt

SEQ ID NO: 1709958 - DNA, 15 bp, Homo sapiens
aaggcaatgtcattg

SEQ ID NO: 1709959 - DNA, 15 bp, Homo sapiens
aggcaatgtcattgg

SEQ ID NO: 1709960 - DNA, 15 bp, Homo sapiens
ggcaatgtcattgga

SEQ ID NO: 1709961 - DNA, 15 bp, Homo sapiens
gcaatgtcattggag

SEQ ID NO: 1709962 - DNA, 15 bp, Homo sapiens
caatgtcattggagt

SEQ ID NO: 1709963 - DNA, 15 bp, Homo sapiens
aatgtcattggagta

SEQ ID NO: 1709964 - DNA, 15 bp, Homo sapiens
atgtcattggagtat

SEQ ID NO: 1709965 - DNA, 15 bp, Homo sapiens
tgtcattggagtatg

SEQ ID NO: 1709966 - DNA, 15 bp, Homo sapiens
gtcattggagtatgt

SEQ ID NO: 1709967 - DNA, 15 bp, Homo sapiens
tcattggagtatgtt

SEQ ID NO: 1709968 - DNA, 15 bp, Homo sapiens
cattggagtatgttc

SEQ ID NO: 1709969 - DNA, 15 bp, Homo sapiens
attggagtatgttct

SEQ ID NO: 1709970 - DNA, 15 bp, Homo sapiens
ttggagtatgttctt

SEQ ID NO: 1709971 - DNA, 15 bp, Homo sapiens
tggagtatgttcttt

SEQ ID NO: 1709972 - DNA, 15 bp, Homo sapiens
ggagtatgttctttc

SEQ ID NO: 1709973 - DNA, 15 bp, Homo sapiens
gagtatgttctttca

SEQ ID NO: 1709974 - DNA, 15 bp, Homo sapiens
agtatgttctttcat

SEQ ID NO: 1709975 - DNA, 15 bp, Homo sapiens
gtatgttctttcatt

SEQ ID NO: 1709976 - DNA, 15 bp, Homo sapiens
tatgttctttcattt

SEQ ID NO: 1709977 - DNA, 15 bp, Homo sapiens
atgttctttcatttt

SEQ ID NO: 1709978 - DNA, 15 bp, Homo sapiens
tgttctttcattttt

SEQ ID NO: 1709979 - DNA, 15 bp, Homo sapiens
gttctttcatttttc

SEQ ID NO: 1709980 - DNA, 15 bp, Homo sapiens
ttctttcatttttct

SEQ ID NO: 1709981 - DNA, 15 bp, Homo sapiens
tctttcatttttctt

SEQ ID NO: 1709982 - DNA, 15 bp, Homo sapiens
ctttcatttttctta

SEQ ID NO: 1709983 - DNA, 15 bp, Homo sapiens
tttcatttttcttat

SEQ ID NO: 1709984 - DNA, 15 bp, Homo sapiens
ttcatttttcttatt

SEQ ID NO: 1709985 - DNA, 15 bp, Homo sapiens
tcatttttcttattg

SEQ ID NO: 1709986 - DNA, 15 bp, Homo sapiens
catttttcttattgt

SEQ ID NO: 1709987 - DNA, 15 bp, Homo sapiens
atttttcttattgta

SEQ ID NO: 1709988 - DNA, 15 bp, Homo sapiens
tttttcttattgtaa

SEQ ID NO: 1709989 - DNA, 15 bp, Homo sapiens
ttttcttattgtaac

SEQ ID NO: 1709990 - DNA, 15 bp, Homo sapiens
tttcttattgtaaca

SEQ ID NO: 1709991 - DNA, 15 bp, Homo sapiens
ttcttattgtaacaa

SEQ ID NO: 1709992 - DNA, 15 bp, Homo sapiens
tcttattgtaacaag

SEQ ID NO: 1709993 - DNA, 15 bp, Homo sapiens
cttattgtaacaaga

SEQ ID NO: 1709994 - DNA, 15 bp, Homo sapiens
ttattgtaacaagat

SEQ ID NO: 1709995 - DNA, 15 bp, Homo sapiens
tattgtaacaagatc

SEQ ID NO: 1709996 - DNA, 15 bp, Homo sapiens
attgtaacaagatcc

SEQ ID NO: 1709997 - DNA, 15 bp, Homo sapiens
ttgtaacaagatcct

SEQ ID NO: 1709998 - DNA, 15 bp, Homo sapiens
tgtaacaagatcctc

SEQ ID NO: 1709999 - DNA, 15 bp, Homo sapiens
gtaacaagatcctca

SEQ ID NO: 1710000 - DNA, 15 bp, Homo sapiens
taacaagatcctcag

SEQ ID NO: 1710001 - DNA, 15 bp, Homo sapiens
aacaagatcctcagt

SEQ ID NO: 1710002 - DNA, 15 bp, Homo sapiens
acaagatcctcagtt

SEQ ID NO: 1710003 - DNA, 15 bp, Homo sapiens
caagatcctcagtta

SEQ ID NO: 1710004 - DNA, 15 bp, Homo sapiens
aagatcctcagttac

SEQ ID NO: 1710005 - DNA, 15 bp, Homo sapiens
agatcctcagttact

SEQ ID NO: 1710006 - DNA, 15 bp, Homo sapiens
gatcctcagttactt

SEQ ID NO: 1710007 - DNA, 15 bp, Homo sapiens
atcctcagttacttg

SEQ ID NO: 1710008 - DNA, 15 bp, Homo sapiens
tcctcagttacttga

SEQ ID NO: 1710009 - DNA, 15 bp, Homo sapiens
cctcagttacttgaa

SEQ ID NO: 1710010 - DNA, 15 bp, Homo sapiens
ctcagttacttgaac

SEQ ID NO: 1710011 - DNA, 15 bp, Homo sapiens
tcagttacttgaaca

SEQ ID NO: 1710012 - DNA, 15 bp, Homo sapiens
cagttacttgaacag

SEQ ID NO: 1710013 - DNA, 15 bp, Homo sapiens
agttacttgaacaga

SEQ ID NO: 1710014 - DNA, 15 bp, Homo sapiens
gttacttgaacagat

SEQ ID NO: 1710015 - DNA, 15 bp, Homo sapiens
ttacttgaacagatg

SEQ ID NO: 1710016 - DNA, 15 bp, Homo sapiens
tacttgaacagatgt

SEQ ID NO: 1710017 - DNA, 15 bp, Homo sapiens
acttgaacagatgtc

SEQ ID NO: 1710018 - DNA, 15 bp, Homo sapiens
cttgaacagatgtct

SEQ ID NO: 1710019 - DNA, 15 bp, Homo sapiens
ttgaacagatgtctg

SEQ ID NO: 1710020 - DNA, 15 bp, Homo sapiens
tgaacagatgtctgt

SEQ ID NO: 1710021 - DNA, 15 bp, Homo sapiens
gaacagatgtctgta

SEQ ID NO: 1710022 - DNA, 15 bp, Homo sapiens
aacagatgtctgtaa

SEQ ID NO: 1710023 - DNA, 15 bp, Homo sapiens
acagatgtctgtaaa

SEQ ID NO: 1710024 - DNA, 15 bp, Homo sapiens
cagatgtctgtaaat

SEQ ID NO: 1710025 - DNA, 15 bp, Homo sapiens
agatgtctgtaaatt

SEQ ID NO: 1710026 - DNA, 15 bp, Homo sapiens
gatgtctgtaaattc

SEQ ID NO: 1710027 - DNA, 15 bp, Homo sapiens
atgtctgtaaattca

SEQ ID NO: 1710028 - DNA, 15 bp, Homo sapiens
tgtctgtaaattcag

SEQ ID NO: 1710029 - DNA, 15 bp, Homo sapiens
gtctgtaaattcaga

SEQ ID NO: 1710030 - DNA, 15 bp, Homo sapiens
tctgtaaattcagaa

SEQ ID NO: 1710031 - DNA, 15 bp, Homo sapiens
ctgtaaattcagaat

SEQ ID NO: 1710032 - DNA, 15 bp, Homo sapiens
tgtaaattcagaata

SEQ ID NO: 1710033 - DNA, 15 bp, Homo sapiens
gtaaattcagaatac

SEQ ID NO: 1710034 - DNA, 15 bp, Homo sapiens
taaattcagaatacg

SEQ ID NO: 1710035 - DNA, 15 bp, Homo sapiens
aaattcagaatacgt

SEQ ID NO: 1710036 - DNA, 15 bp, Homo sapiens
aattcagaatacgtt

SEQ ID NO: 1710037 - DNA, 15 bp, Homo sapiens
attcagaatacgttt

SEQ ID NO: 1710038 - DNA, 15 bp, Homo sapiens
ttcagaatacgtttg

SEQ ID NO: 1710039 - DNA, 15 bp, Homo sapiens
tcagaatacgtttga

SEQ ID NO: 1710040 - DNA, 15 bp, Homo sapiens
cagaatacgtttgag

SEQ ID NO: 1710041 - DNA, 15 bp, Homo sapiens
agaatacgtttgagt

SEQ ID NO: 1710042 - DNA, 15 bp, Homo sapiens
gaatacgtttgagtg

SEQ ID NO: 1710043 - DNA, 15 bp, Homo sapiens
aatacgtttgagtgt

SEQ ID NO: 1710044 - DNA, 15 bp, Homo sapiens
atacgtttgagtgta

SEQ ID NO: 1710045 - DNA, 15 bp, Homo sapiens
tacgtttgagtgtag

SEQ ID NO: 1710046 - DNA, 15 bp, Homo sapiens
acgtttgagtgtagt

SEQ ID NO: 1710047 - DNA, 15 bp, Homo sapiens
cgtttgagtgtagtt

SEQ ID NO: 1710048 - DNA, 15 bp, Homo sapiens
gtttgagtgtagttt

SEQ ID NO: 1710049 - DNA, 15 bp, Homo sapiens
tttgagtgtagttta

SEQ ID NO: 1710050 - DNA, 15 bp, Homo sapiens
ttgagtgtagtttac

SEQ ID NO: 1710051 - DNA, 15 bp, Homo sapiens
tgagtgtagtttact

SEQ ID NO: 1710052 - DNA, 15 bp, Homo sapiens
gagtgtagtttacta

SEQ ID NO: 1710053 - DNA, 15 bp, Homo sapiens
agtgtagtttactaa

SEQ ID NO: 1710054 - DNA, 15 bp, Homo sapiens
gtgtagtttactaag

SEQ ID NO: 1710055 - DNA, 15 bp, Homo sapiens
tgtagtttactaagc

SEQ ID NO: 1710056 - DNA, 15 bp, Homo sapiens
gtagtttactaagca

SEQ ID NO: 1710057 - DNA, 15 bp, Homo sapiens
tagtttactaagcat

SEQ ID NO: 1710058 - DNA, 15 bp, Homo sapiens
agtttactaagcatt

SEQ ID NO: 1710059 - DNA, 15 bp, Homo sapiens
gtttactaagcatta

SEQ ID NO: 1710060 - DNA, 15 bp, Homo sapiens
tttactaagcattat

SEQ ID NO: 1710061 - DNA, 15 bp, Homo sapiens
ttactaagcattata

SEQ ID NO: 1710062 - DNA, 15 bp, Homo sapiens
tactaagcattatac

SEQ ID NO: 1710063 - DNA, 15 bp, Homo sapiens
actaagcattataca

SEQ ID NO: 1710064 - DNA, 15 bp, Homo sapiens
ctaagcattatacac

SEQ ID NO: 1710065 - DNA, 15 bp, Homo sapiens
taagcattatacact

SEQ ID NO: 1710066 - DNA, 15 bp, Homo sapiens
aagcattatacacta

SEQ ID NO: 1710067 - DNA, 15 bp, Homo sapiens
agcattatacactaa

SEQ ID NO: 1710068 - DNA, 15 bp, Homo sapiens
gcattatacactaaa

SEQ ID NO: 1710069 - DNA, 15 bp, Homo sapiens
cattatacactaaaa

SEQ ID NO: 1710070 - DNA, 15 bp, Homo sapiens
attatacactaaaaa

SEQ ID NO: 1710071 - DNA, 15 bp, Homo sapiens
ttatacactaaaaac

SEQ ID NO: 1710072 - DNA, 15 bp, Homo sapiens
tatacactaaaaact

SEQ ID NO: 1710073 - DNA, 15 bp, Homo sapiens
atacactaaaaactc

SEQ ID NO: 1710074 - DNA, 15 bp, Homo sapiens
tacactaaaaactcc

SEQ ID NO: 1710075 - DNA, 15 bp, Homo sapiens
acactaaaaactccc

SEQ ID NO: 1710076 - DNA, 15 bp, Homo sapiens
cactaaaaactccca

SEQ ID NO: 1710077 - DNA, 15 bp, Homo sapiens
actaaaaactcccac

SEQ ID NO: 1710078 - DNA, 15 bp, Homo sapiens
ctaaaaactcccact

SEQ ID NO: 1710079 - DNA, 15 bp, Homo sapiens
taaaaactcccactc

SEQ ID NO: 1710080 - DNA, 15 bp, Homo sapiens
aaaaactcccactca

SEQ ID NO: 1710081 - DNA, 15 bp, Homo sapiens
aaaactcccactcac

SEQ ID NO: 1710082 - DNA, 15 bp, Homo sapiens
aaactcccactcaca

SEQ ID NO: 1710083 - DNA, 15 bp, Homo sapiens
aactcccactcacaa

SEQ ID NO: 1710084 - DNA, 15 bp, Homo sapiens
actcccactcacaat

SEQ ID NO: 1710085 - DNA, 15 bp, Homo sapiens
ctcccactcacaatg

SEQ ID NO: 1710086 - DNA, 15 bp, Homo sapiens
tcccactcacaatgg

SEQ ID NO: 1710087 - DNA, 15 bp, Homo sapiens
cccactcacaatggc

SEQ ID NO: 1710088 - DNA, 15 bp, Homo sapiens
ccactcacaatggcc

SEQ ID NO: 1710089 - DNA, 15 bp, Homo sapiens
cactcacaatggccg

SEQ ID NO: 1710090 - DNA, 15 bp, Homo sapiens
actcacaatggccgt

SEQ ID NO: 1710091 - DNA, 15 bp, Homo sapiens
ctcacaatggccgta

SEQ ID NO: 1710092 - DNA, 15 bp, Homo sapiens
tcacaatggccgtag

SEQ ID NO: 1710093 - DNA, 15 bp, Homo sapiens
cacaatggccgtagt

SEQ ID NO: 1710094 - DNA, 15 bp, Homo sapiens
acaatggccgtagtt

SEQ ID NO: 1710095 - DNA, 15 bp, Homo sapiens
caatggccgtagttt

SEQ ID NO: 1710096 - DNA, 15 bp, Homo sapiens
aatggccgtagtttt

SEQ ID NO: 1710097 - DNA, 15 bp, Homo sapiens
atggccgtagttttt

SEQ ID NO: 1710098 - DNA, 15 bp, Homo sapiens
tggccgtagtttttt

SEQ ID NO: 1710099 - DNA, 15 bp, Homo sapiens
ggccgtagtttttta

SEQ ID NO: 1710100 - DNA, 15 bp, Homo sapiens
gccgtagttttttag

SEQ ID NO: 1710101 - DNA, 15 bp, Homo sapiens
ccgtagttttttagg

SEQ ID NO: 1710102 - DNA, 15 bp, Homo sapiens
cgtagttttttaggg

SEQ ID NO: 1710103 - DNA, 15 bp, Homo sapiens
gtagttttttagggg

SEQ ID NO: 1710104 - DNA, 15 bp, Homo sapiens
tagttttttaggggg

SEQ ID NO: 1710105 - DNA, 15 bp, Homo sapiens
agttttttagggggt

SEQ ID NO: 1710106 - DNA, 15 bp, Homo sapiens
gttttttagggggtg

SEQ ID NO: 1710107 - DNA, 15 bp, Homo sapiens
ttttttagggggtgg

SEQ ID NO: 1710108 - DNA, 15 bp, Homo sapiens
tttttagggggtggg

SEQ ID NO: 1710109 - DNA, 15 bp, Homo sapiens
ttttagggggtgggg

SEQ ID NO: 1710110 - DNA, 15 bp, Homo sapiens
tttagggggtggggg

SEQ ID NO: 1710111 - DNA, 15 bp, Homo sapiens
ttagggggtggggga

SEQ ID NO: 1710112 - DNA, 15 bp, Homo sapiens
tagggggtgggggaa

SEQ ID NO: 1710113 - DNA, 15 bp, Homo sapiens
agggggtgggggaat

SEQ ID NO: 1710114 - DNA, 15 bp, Homo sapiens
gggggtgggggaatg

SEQ ID NO: 1710115 - DNA, 15 bp, Homo sapiens
ggggtgggggaatgt

SEQ ID NO: 1710116 - DNA, 15 bp, Homo sapiens
gggtgggggaatgtt

SEQ ID NO: 1710117 - DNA, 15 bp, Homo sapiens
ggtgggggaatgttt

SEQ ID NO: 1710118 - DNA, 15 bp, Homo sapiens
gtgggggaatgtttc

SEQ ID NO: 1710119 - DNA, 15 bp, Homo sapiens
tgggggaatgtttca

SEQ ID NO: 1710120 - DNA, 15 bp, Homo sapiens
gggggaatgtttcag

SEQ ID NO: 1710121 - DNA, 15 bp, Homo sapiens
ggggaatgtttcagc

SEQ ID NO: 1710122 - DNA, 15 bp, Homo sapiens
gggaatgtttcagct

SEQ ID NO: 1710123 - DNA, 15 bp, Homo sapiens
ggaatgtttcagctt

SEQ ID NO: 1710124 - DNA, 15 bp, Homo sapiens
gaatgtttcagcttc

SEQ ID NO: 1710125 - DNA, 15 bp, Homo sapiens
aatgtttcagcttct

SEQ ID NO: 1710126 - DNA, 15 bp, Homo sapiens
atgtttcagcttctg

SEQ ID NO: 1710127 - DNA, 15 bp, Homo sapiens
tgtttcagcttctgg

SEQ ID NO: 1710128 - DNA, 15 bp, Homo sapiens
gtttcagcttctggt

SEQ ID NO: 1710129 - DNA, 15 bp, Homo sapiens
tttcagcttctggtg

SEQ ID NO: 1710130 - DNA, 15 bp, Homo sapiens
ttcagcttctggtga

SEQ ID NO: 1710131 - DNA, 15 bp, Homo sapiens
tcagcttctggtgag

SEQ ID NO: 1710132 - DNA, 15 bp, Homo sapiens
cagcttctggtgagt

SEQ ID NO: 1710133 - DNA, 15 bp, Homo sapiens
agcttctggtgagtt

SEQ ID NO: 1710134 - DNA, 15 bp, Homo sapiens
gcttctggtgagtta

SEQ ID NO: 1710135 - DNA, 15 bp, Homo sapiens
cttctggtgagttag

SEQ ID NO: 1710136 - DNA, 15 bp, Homo sapiens
ttctggtgagttaga

SEQ ID NO: 1710137 - DNA, 15 bp, Homo sapiens
tctggtgagttagag

SEQ ID NO: 1710138 - DNA, 15 bp, Homo sapiens
ctggtgagttagagg

SEQ ID NO: 1710139 - DNA, 15 bp, Homo sapiens
tggtgagttagaggc

SEQ ID NO: 1710140 - DNA, 15 bp, Homo sapiens
ggtgagttagaggca

SEQ ID NO: 1710141 - DNA, 15 bp, Homo sapiens
gtgagttagaggcaa

SEQ ID NO: 1710142 - DNA, 15 bp, Homo sapiens
tgagttagaggcaac

SEQ ID NO: 1710143 - DNA, 15 bp, Homo sapiens
gagttagaggcaaca

SEQ ID NO: 1710144 - DNA, 15 bp, Homo sapiens
agttagaggcaacaa

SEQ ID NO: 1710145 - DNA, 15 bp, Homo sapiens
gttagaggcaacaac

SEQ ID NO: 1710146 - DNA, 15 bp, Homo sapiens
ttagaggcaacaacc

SEQ ID NO: 1710147 - DNA, 15 bp, Homo sapiens
tagaggcaacaacct

SEQ ID NO: 1710148 - DNA, 15 bp, Homo sapiens
agaggcaacaacctc

SEQ ID NO: 1710149 - DNA, 15 bp, Homo sapiens
gaggcaacaacctca

SEQ ID NO: 1710150 - DNA, 15 bp, Homo sapiens
aggcaacaacctcaa

SEQ ID NO: 1710151 - DNA, 15 bp, Homo sapiens
ggcaacaacctcaat

SEQ ID NO: 1710152 - DNA, 15 bp, Homo sapiens
gcaacaacctcaata

SEQ ID NO: 1710153 - DNA, 15 bp, Homo sapiens
caacaacctcaatat

SEQ ID NO: 1710154 - DNA, 15 bp, Homo sapiens
aacaacctcaatatc

SEQ ID NO: 1710155 - DNA, 15 bp, Homo sapiens
acaacctcaatatca

SEQ ID NO: 1710156 - DNA, 15 bp, Homo sapiens
caacctcaatatcag

SEQ ID NO: 1710157 - DNA, 15 bp, Homo sapiens
aacctcaatatcaga

SEQ ID NO: 1710158 - DNA, 15 bp, Homo sapiens
acctcaatatcagat

SEQ ID NO: 1710159 - DNA, 15 bp, Homo sapiens
cctcaatatcagatg

SEQ ID NO: 1710160 - DNA, 15 bp, Homo sapiens
ctcaatatcagatga

SEQ ID NO: 1710161 - DNA, 15 bp, Homo sapiens
tcaatatcagatgaa

SEQ ID NO: 1710162 - DNA, 15 bp, Homo sapiens
caatatcagatgaat

SEQ ID NO: 1710163 - DNA, 15 bp, Homo sapiens
aatatcagatgaatg

SEQ ID NO: 1710164 - DNA, 15 bp, Homo sapiens
atatcagatgaatga

SEQ ID NO: 1710165 - DNA, 15 bp, Homo sapiens
tatcagatgaatgaa

SEQ ID NO: 1710166 - DNA, 15 bp, Homo sapiens
atcagatgaatgaaa

SEQ ID NO: 1710167 - DNA, 15 bp, Homo sapiens
tcagatgaatgaaat

SEQ ID NO: 1710168 - DNA, 15 bp, Homo sapiens
cagatgaatgaaatt

SEQ ID NO: 1710169 - DNA, 15 bp, Homo sapiens
agatgaatgaaattt

SEQ ID NO: 1710170 - DNA, 15 bp, Homo sapiens
gatgaatgaaatttt

SEQ ID NO: 1710171 - DNA, 15 bp, Homo sapiens
atgaatgaaattttt

SEQ ID NO: 1710172 - DNA, 15 bp, Homo sapiens
tgaatgaaatttttt

SEQ ID NO: 1710173 - DNA, 15 bp, Homo sapiens
gaatgaaattttttt

SEQ ID NO: 1710174 - DNA, 15 bp, Homo sapiens
aatgaaatttttttc

SEQ ID NO: 1710175 - DNA, 15 bp, Homo sapiens
atgaaatttttttct

SEQ ID NO: 1710176 - DNA, 15 bp, Homo sapiens
tgaaatttttttctc

SEQ ID NO: 1710177 - DNA, 15 bp, Homo sapiens
gaaatttttttctct

SEQ ID NO: 1710178 - DNA, 15 bp, Homo sapiens
aaatttttttctctc

SEQ ID NO: 1710179 - DNA, 15 bp, Homo sapiens
aatttttttctctcc

SEQ ID NO: 1710180 - DNA, 15 bp, Homo sapiens
atttttttctctcct

SEQ ID NO: 1710181 - DNA, 15 bp, Homo sapiens
tttttttctctccta

SEQ ID NO: 1710182 - DNA, 15 bp, Homo sapiens
ttttttctctcctaa

SEQ ID NO: 1710183 - DNA, 15 bp, Homo sapiens
tttttctctcctaag

SEQ ID NO: 1710184 - DNA, 15 bp, Homo sapiens
ttttctctcctaagg

SEQ ID NO: 1710185 - DNA, 15 bp, Homo sapiens
tttctctcctaaggc

SEQ ID NO: 1710186 - DNA, 15 bp, Homo sapiens
ttctctcctaaggca

SEQ ID NO: 1710187 - DNA, 15 bp, Homo sapiens
tctctcctaaggcaa

SEQ ID NO: 1710188 - DNA, 15 bp, Homo sapiens
ctctcctaaggcaat

SEQ ID NO: 1710189 - DNA, 15 bp, Homo sapiens
tctcctaaggcaatt

SEQ ID NO: 1710190 - DNA, 15 bp, Homo sapiens
ctcctaaggcaattc

SEQ ID NO: 1710191 - DNA, 15 bp, Homo sapiens
tcctaaggcaattcc

SEQ ID NO: 1710192 - DNA, 15 bp, Homo sapiens
cctaaggcaattcca

SEQ ID NO: 1710193 - DNA, 15 bp, Homo sapiens
ctaaggcaattccag

SEQ ID NO: 1710194 - DNA, 15 bp, Homo sapiens
taaggcaattccagt

SEQ ID NO: 1710195 - DNA, 15 bp, Homo sapiens
aaggcaattccagtc

SEQ ID NO: 1710196 - DNA, 15 bp, Homo sapiens
aggcaattccagtca

SEQ ID NO: 1710197 - DNA, 15 bp, Homo sapiens
ggcaattccagtcaa

SEQ ID NO: 1710198 - DNA, 15 bp, Homo sapiens
gcaattccagtcaat

SEQ ID NO: 1710199 - DNA, 15 bp, Homo sapiens
caattccagtcaatg

SEQ ID NO: 1710200 - DNA, 15 bp, Homo sapiens
aattccagtcaatgc

SEQ ID NO: 1710201 - DNA, 15 bp, Homo sapiens
attccagtcaatgct

SEQ ID NO: 1710202 - DNA, 15 bp, Homo sapiens
ttccagtcaatgctt

SEQ ID NO: 1710203 - DNA, 15 bp, Homo sapiens
tccagtcaatgcttt

SEQ ID NO: 1710204 - DNA, 15 bp, Homo sapiens
ccagtcaatgctttg

SEQ ID NO: 1710205 - DNA, 15 bp, Homo sapiens
cagtcaatgctttga

SEQ ID NO: 1710206 - DNA, 15 bp, Homo sapiens
agtcaatgctttgat

SEQ ID NO: 1710207 - DNA, 15 bp, Homo sapiens
gtcaatgctttgata

SEQ ID NO: 1710208 - DNA, 15 bp, Homo sapiens
tcaatgctttgatag

SEQ ID NO: 1710209 - DNA, 15 bp, Homo sapiens
caatgctttgatagt

SEQ ID NO: 1710210 - DNA, 15 bp, Homo sapiens
aatgctttgatagtt

SEQ ID NO: 1710211 - DNA, 15 bp, Homo sapiens
atgctttgatagttt

SEQ ID NO: 1710212 - DNA, 15 bp, Homo sapiens
tgctttgatagtttc

SEQ ID NO: 1710213 - DNA, 15 bp, Homo sapiens
gctttgatagtttct

SEQ ID NO: 1710214 - DNA, 15 bp, Homo sapiens
ctttgatagtttctt

SEQ ID NO: 1710215 - DNA, 15 bp, Homo sapiens
tttgatagtttcttt

SEQ ID NO: 1710216 - DNA, 15 bp, Homo sapiens
ttgatagtttctttt

SEQ ID NO: 1710217 - DNA, 15 bp, Homo sapiens
tgatagtttcttttt

SEQ ID NO: 1710218 - DNA, 15 bp, Homo sapiens
gatagtttctttttt

SEQ ID NO: 1710219 - DNA, 15 bp, Homo sapiens
atagtttctttttta

SEQ ID NO: 1710220 - DNA, 15 bp, Homo sapiens
tagtttcttttttaa

SEQ ID NO: 1710221 - DNA, 15 bp, Homo sapiens
agtttcttttttaat

SEQ ID NO: 1710222 - DNA, 15 bp, Homo sapiens
gtttcttttttaatg

SEQ ID NO: 1710223 - DNA, 15 bp, Homo sapiens
tttcttttttaatgc

SEQ ID NO: 1710224 - DNA, 15 bp, Homo sapiens
ttcttttttaatgct

SEQ ID NO: 1710225 - DNA, 15 bp, Homo sapiens
tcttttttaatgctg

SEQ ID NO: 1710226 - DNA, 15 bp, Homo sapiens
cttttttaatgctgt

SEQ ID NO: 1710227 - DNA, 15 bp, Homo sapiens
ttttttaatgctgta

SEQ ID NO: 1710228 - DNA, 15 bp, Homo sapiens
tttttaatgctgtat

SEQ ID NO: 1710229 - DNA, 15 bp, Homo sapiens
ttttaatgctgtata

SEQ ID NO: 1710230 - DNA, 15 bp, Homo sapiens
tttaatgctgtatag

SEQ ID NO: 1710231 - DNA, 15 bp, Homo sapiens
ttaatgctgtatagt

SEQ ID NO: 1710232 - DNA, 15 bp, Homo sapiens
taatgctgtatagtc

SEQ ID NO: 1710233 - DNA, 15 bp, Homo sapiens
aatgctgtatagtct

SEQ ID NO: 1710234 - DNA, 15 bp, Homo sapiens
atgctgtatagtcta

SEQ ID NO: 1710235 - DNA, 15 bp, Homo sapiens
tgctgtatagtctat

SEQ ID NO: 1710236 - DNA, 15 bp, Homo sapiens
gctgtatagtctata

SEQ ID NO: 1710237 - DNA, 15 bp, Homo sapiens
ctgtatagtctataa

SEQ ID NO: 1710238 - DNA, 15 bp, Homo sapiens
tgtatagtctataaa

SEQ ID NO: 1710239 - DNA, 15 bp, Homo sapiens
gtatagtctataaaa

SEQ ID NO: 1710240 - DNA, 15 bp, Homo sapiens
tatagtctataaaac

SEQ ID NO: 1710241 - DNA, 15 bp, Homo sapiens
atagtctataaaact

SEQ ID NO: 1710242 - DNA, 15 bp, Homo sapiens
tagtctataaaacta

SEQ ID NO: 1710243 - DNA, 15 bp, Homo sapiens
agtctataaaactaa

SEQ ID NO: 1710244 - DNA, 15 bp, Homo sapiens
gtctataaaactaat

SEQ ID NO: 1710245 - DNA, 15 bp, Homo sapiens
tctataaaactaatt

SEQ ID NO: 1710246 - DNA, 15 bp, Homo sapiens
ctataaaactaatta

SEQ ID NO: 1710247 - DNA, 15 bp, Homo sapiens
tataaaactaattaa

SEQ ID NO: 1710248 - DNA, 15 bp, Homo sapiens
ataaaactaattaac

SEQ ID NO: 1710249 - DNA, 15 bp, Homo sapiens
taaaactaattaacc

SEQ ID NO: 1710250 - DNA, 15 bp, Homo sapiens
aaaactaattaaccg

SEQ ID NO: 1710251 - DNA, 15 bp, Homo sapiens
aaactaattaaccgg

SEQ ID NO: 1710252 - DNA, 15 bp, Homo sapiens
aactaattaaccggc

SEQ ID NO: 1710253 - DNA, 15 bp, Homo sapiens
actaattaaccggca

SEQ ID NO: 1710254 - DNA, 15 bp, Homo sapiens
ctaattaaccggcaa

SEQ ID NO: 1710255 - DNA, 15 bp, Homo sapiens
taattaaccggcaaa

SEQ ID NO: 1710256 - DNA, 15 bp, Homo sapiens
aattaaccggcaaat

SEQ ID NO: 1710257 - DNA, 15 bp, Homo sapiens
attaaccggcaaatt

SEQ ID NO: 1710258 - DNA, 15 bp, Homo sapiens
ttaaccggcaaatta

SEQ ID NO: 1710259 - DNA, 15 bp, Homo sapiens
taaccggcaaattac

SEQ ID NO: 1710260 - DNA, 15 bp, Homo sapiens
aaccggcaaattacc

SEQ ID NO: 1710261 - DNA, 15 bp, Homo sapiens
accggcaaattacct

SEQ ID NO: 1710262 - DNA, 15 bp, Homo sapiens
ccggcaaattacctg

SEQ ID NO: 1710263 - DNA, 15 bp, Homo sapiens
cggcaaattacctga

SEQ ID NO: 1710264 - DNA, 15 bp, Homo sapiens
ggcaaattacctgag

SEQ ID NO: 1710265 - DNA, 15 bp, Homo sapiens
gcaaattacctgagt

SEQ ID NO: 1710266 - DNA, 15 bp, Homo sapiens
caaattacctgagtg

SEQ ID NO: 1710267 - DNA, 15 bp, Homo sapiens
aaattacctgagtga

SEQ ID NO: 1710268 - DNA, 15 bp, Homo sapiens
aattacctgagtgaa

SEQ ID NO: 1710269 - DNA, 15 bp, Homo sapiens
attacctgagtgaaa

SEQ ID NO: 1710270 - DNA, 15 bp, Homo sapiens
ttacctgagtgaaag

SEQ ID NO: 1710271 - DNA, 15 bp, Homo sapiens
tacctgagtgaaagt

SEQ ID NO: 1710272 - DNA, 15 bp, Homo sapiens
acctgagtgaaagtc

SEQ ID NO: 1710273 - DNA, 15 bp, Homo sapiens
cctgagtgaaagtca

SEQ ID NO: 1710274 - DNA, 15 bp, Homo sapiens
ctgagtgaaagtcat

SEQ ID NO: 1710275 - DNA, 15 bp, Homo sapiens
tgagtgaaagtcata

SEQ ID NO: 1710276 - DNA, 15 bp, Homo sapiens
gagtgaaagtcatat

SEQ ID NO: 1710277 - DNA, 15 bp, Homo sapiens
agtgaaagtcatatt

SEQ ID NO: 1710278 - DNA, 15 bp, Homo sapiens
gtgaaagtcatattt

SEQ ID NO: 1710279 - DNA, 15 bp, Homo sapiens
tgaaagtcatatttt

SEQ ID NO: 1710280 - DNA, 15 bp, Homo sapiens
gaaagtcatattttc

SEQ ID NO: 1710281 - DNA, 15 bp, Homo sapiens
aaagtcatattttct

SEQ ID NO: 1710282 - DNA, 15 bp, Homo sapiens
aagtcatattttctt

SEQ ID NO: 1710283 - DNA, 15 bp, Homo sapiens
agtcatattttcttt

SEQ ID NO: 1710284 - DNA, 15 bp, Homo sapiens
gtcatattttctttc

SEQ ID NO: 1710285 - DNA, 15 bp, Homo sapiens
tcatattttctttca

SEQ ID NO: 1710286 - DNA, 15 bp, Homo sapiens
catattttctttcat

SEQ ID NO: 1710287 - DNA, 15 bp, Homo sapiens
atattttctttcatt

SEQ ID NO: 1710288 - DNA, 15 bp, Homo sapiens
ttttctttcatttag

SEQ ID NO: 1710289 - DNA, 15 bp, Homo sapiens
tttctttcatttagt

SEQ ID NO: 1710290 - DNA, 15 bp, Homo sapiens
ttctttcatttagta

SEQ ID NO: 1710291 - DNA, 15 bp, Homo sapiens
tctttcatttagtaa

SEQ ID NO: 1710292 - DNA, 15 bp, Homo sapiens
ctttcatttagtaat

SEQ ID NO: 1710293 - DNA, 15 bp, Homo sapiens
tttcatttagtaata

SEQ ID NO: 1710294 - DNA, 15 bp, Homo sapiens
ttcatttagtaatag

SEQ ID NO: 1710295 - DNA, 15 bp, Homo sapiens
tcatttagtaataga

SEQ ID NO: 1710296 - DNA, 15 bp, Homo sapiens
catttagtaatagag

SEQ ID NO: 1710297 - DNA, 15 bp, Homo sapiens
atttagtaatagaga

SEQ ID NO: 1710298 - DNA, 15 bp, Homo sapiens
tttagtaatagagaa

SEQ ID NO: 1710299 - DNA, 15 bp, Homo sapiens
ttagtaatagagaaa

SEQ ID NO: 1710300 - DNA, 15 bp, Homo sapiens
tagtaatagagaaag

SEQ ID NO: 1710301 - DNA, 15 bp, Homo sapiens
agtaatagagaaaga

SEQ ID NO: 1710302 - DNA, 15 bp, Homo sapiens
gtaatagagaaagat

SEQ ID NO: 1710303 - DNA, 15 bp, Homo sapiens
taatagagaaagata

SEQ ID NO: 1710304 - DNA, 15 bp, Homo sapiens
aatagagaaagatat

SEQ ID NO: 1710305 - DNA, 15 bp, Homo sapiens
atagagaaagatatc

SEQ ID NO: 1710306 - DNA, 15 bp, Homo sapiens
tagagaaagatatcg

SEQ ID NO: 1710307 - DNA, 15 bp, Homo sapiens
agagaaagatatcgg

SEQ ID NO: 1710308 - DNA, 15 bp, Homo sapiens
gagaaagatatcggt

SEQ ID NO: 1710309 - DNA, 15 bp, Homo sapiens
agaaagatatcggtc

SEQ ID NO: 1710310 - DNA, 15 bp, Homo sapiens
gaaagatatcggtca

SEQ ID NO: 1710311 - DNA, 15 bp, Homo sapiens
aaagatatcggtcaa

SEQ ID NO: 1710312 - DNA, 15 bp, Homo sapiens
aagatatcggtcaaa

SEQ ID NO: 1710313 - DNA, 15 bp, Homo sapiens
agatatcggtcaaaa

SEQ ID NO: 1710314 - DNA, 15 bp, Homo sapiens
gatatcggtcaaaat

SEQ ID NO: 1710315 - DNA, 15 bp, Homo sapiens
atatcggtcaaaata

SEQ ID NO: 1710316 - DNA, 15 bp, Homo sapiens
tatcggtcaaaatat

SEQ ID NO: 1710317 - DNA, 15 bp, Homo sapiens
atcggtcaaaatatt

SEQ ID NO: 1710318 - DNA, 15 bp, Homo sapiens
tcggtcaaaatatta

SEQ ID NO: 1710319 - DNA, 15 bp, Homo sapiens
cggtcaaaatattaa

SEQ ID NO: 1710320 - DNA, 15 bp, Homo sapiens
ggtcaaaatattaat

SEQ ID NO: 1710321 - DNA, 15 bp, Homo sapiens
gtcaaaatattaata

SEQ ID NO: 1710322 - DNA, 15 bp, Homo sapiens
tcaaaatattaatac

SEQ ID NO: 1710323 - DNA, 15 bp, Homo sapiens
caaaatattaataca

SEQ ID NO: 1710324 - DNA, 15 bp, Homo sapiens
aaaatattaatacaa

SEQ ID NO: 1710325 - DNA, 15 bp, Homo sapiens
aaatattaatacaac

SEQ ID NO: 1710326 - DNA, 15 bp, Homo sapiens
aatattaatacaact

SEQ ID NO: 1710327 - DNA, 15 bp, Homo sapiens
atattaatacaactt

SEQ ID NO: 1710328 - DNA, 15 bp, Homo sapiens
tattaatacaacttt

SEQ ID NO: 1710329 - DNA, 15 bp, Homo sapiens
attaatacaactttg

SEQ ID NO: 1710330 - DNA, 15 bp, Homo sapiens
ttaatacaactttga

SEQ ID NO: 1710331 - DNA, 15 bp, Homo sapiens
taatacaactttgag

SEQ ID NO: 1710332 - DNA, 15 bp, Homo sapiens
aatacaactttgagt

SEQ ID NO: 1710333 - DNA, 15 bp, Homo sapiens
atacaactttgagtt

SEQ ID NO: 1710334 - DNA, 15 bp, Homo sapiens
tacaactttgagttt

SEQ ID NO: 1710335 - DNA, 15 bp, Homo sapiens
acaactttgagtttt

SEQ ID NO: 1710336 - DNA, 15 bp, Homo sapiens
caactttgagttttg

SEQ ID NO: 1710337 - DNA, 15 bp, Homo sapiens
aactttgagttttgt

SEQ ID NO: 1710338 - DNA, 15 bp, Homo sapiens
actttgagttttgtc

SEQ ID NO: 1710339 - DNA, 15 bp, Homo sapiens
ctttgagttttgtcc

SEQ ID NO: 1710340 - DNA, 15 bp, Homo sapiens
tttgagttttgtccc

SEQ ID NO: 1710341 - DNA, 15 bp, Homo sapiens
ttgagttttgtccca

SEQ ID NO: 1710342 - DNA, 15 bp, Homo sapiens
tgagttttgtcccag

SEQ ID NO: 1710343 - DNA, 15 bp, Homo sapiens
gagttttgtcccaga

SEQ ID NO: 1710344 - DNA, 15 bp, Homo sapiens
agttttgtcccagac

SEQ ID NO: 1710345 - DNA, 15 bp, Homo sapiens
gttttgtcccagaca

SEQ ID NO: 1710346 - DNA, 15 bp, Homo sapiens
ttttgtcccagacaa

SEQ ID NO: 1710347 - DNA, 15 bp, Homo sapiens
tttgtcccagacaac

SEQ ID NO: 1710348 - DNA, 15 bp, Homo sapiens
ttgtcccagacaaca

SEQ ID NO: 1710349 - DNA, 15 bp, Homo sapiens
tgtcccagacaacat

SEQ ID NO: 1710350 - DNA, 15 bp, Homo sapiens
gtcccagacaacatt

SEQ ID NO: 1710351 - DNA, 15 bp, Homo sapiens
tcccagacaacattt

SEQ ID NO: 1710352 - DNA, 15 bp, Homo sapiens
cccagacaacatttc

SEQ ID NO: 1710353 - DNA, 15 bp, Homo sapiens
ccagacaacatttcc

SEQ ID NO: 1710354 - DNA, 15 bp, Homo sapiens
cagacaacatttcca

SEQ ID NO: 1710355 - DNA, 15 bp, Homo sapiens
agacaacatttccag

SEQ ID NO: 1710356 - DNA, 15 bp, Homo sapiens
gacaacatttccaga

SEQ ID NO: 1710357 - DNA, 15 bp, Homo sapiens
acaacatttccagat

SEQ ID NO: 1710358 - DNA, 15 bp, Homo sapiens
caacatttccagatc

SEQ ID NO: 1710359 - DNA, 15 bp, Homo sapiens
aacatttccagatct

SEQ ID NO: 1710360 - DNA, 15 bp, Homo sapiens
acatttccagatctc

SEQ ID NO: 1710361 - DNA, 15 bp, Homo sapiens
catttccagatctcg

SEQ ID NO: 1710362 - DNA, 15 bp, Homo sapiens
atttccagatctcga

SEQ ID NO: 1710363 - DNA, 15 bp, Homo sapiens
tttccagatctcgat

SEQ ID NO: 1710364 - DNA, 15 bp, Homo sapiens
ttccagatctcgatt

SEQ ID NO: 1710365 - DNA, 15 bp, Homo sapiens
tccagatctcgattc

SEQ ID NO: 1710366 - DNA, 15 bp, Homo sapiens
ccagatctcgattcc

SEQ ID NO: 1710367 - DNA, 15 bp, Homo sapiens
cagatctcgattccc

SEQ ID NO: 1710368 - DNA, 15 bp, Homo sapiens
agatctcgattccct

SEQ ID NO: 1710369 - DNA, 15 bp, Homo sapiens
gatctcgattccctc

SEQ ID NO: 1710370 - DNA, 15 bp, Homo sapiens
atctcgattccctcc

SEQ ID NO: 1710371 - DNA, 15 bp, Homo sapiens
tctcgattccctccc

SEQ ID NO: 1710372 - DNA, 15 bp, Homo sapiens
ctcgattccctccct

SEQ ID NO: 1710373 - DNA, 15 bp, Homo sapiens
tcgattccctccctc

SEQ ID NO: 1710374 - DNA, 15 bp, Homo sapiens
cgattccctccctcc

SEQ ID NO: 1710375 - DNA, 15 bp, Homo sapiens
gattccctccctccc

SEQ ID NO: 1710376 - DNA, 15 bp, Homo sapiens
attccctccctccct

SEQ ID NO: 1710377 - DNA, 15 bp, Homo sapiens
cctcccttccttccc

SEQ ID NO: 1710378 - DNA, 15 bp, Homo sapiens
ctcccttccttccct

SEQ ID NO: 1710379 - DNA, 15 bp, Homo sapiens
tcccttccttccctt

SEQ ID NO: 1710380 - DNA, 15 bp, Homo sapiens
cccttccttcccttt

SEQ ID NO: 1710381 - DNA, 15 bp, Homo sapiens
ccttccttccctttt

SEQ ID NO: 1710382 - DNA, 15 bp, Homo sapiens
cttccttcccttttt

SEQ ID NO: 1710383 - DNA, 15 bp, Homo sapiens
ttccttccctttttc

SEQ ID NO: 1710384 - DNA, 15 bp, Homo sapiens
tccttccctttttcc

SEQ ID NO: 1710385 - DNA, 15 bp, Homo sapiens
ccttccctttttcct

SEQ ID NO: 1710386 - DNA, 15 bp, Homo sapiens
cttccctttttcctt

SEQ ID NO: 1710387 - DNA, 15 bp, Homo sapiens
ttccctttttccttc

SEQ ID NO: 1710388 - DNA, 15 bp, Homo sapiens
tccctttttccttca

SEQ ID NO: 1710389 - DNA, 15 bp, Homo sapiens
ccctttttccttcat

SEQ ID NO: 1710390 - DNA, 15 bp, Homo sapiens
cctttttccttcata

SEQ ID NO: 1710391 - DNA, 15 bp, Homo sapiens
ctttttccttcataa

SEQ ID NO: 1710392 - DNA, 15 bp, Homo sapiens
tttttccttcataac

SEQ ID NO: 1710393 - DNA, 15 bp, Homo sapiens
ttttccttcataact

SEQ ID NO: 1710394 - DNA, 15 bp, Homo sapiens
tttccttcataactc

SEQ ID NO: 1710395 - DNA, 15 bp, Homo sapiens
ttccttcataactcc

SEQ ID NO: 1710396 - DNA, 15 bp, Homo sapiens
tccttcataactccc

SEQ ID NO: 1710397 - DNA, 15 bp, Homo sapiens
ccttcataactccct

SEQ ID NO: 1710398 - DNA, 15 bp, Homo sapiens
cttcataactccctc

SEQ ID NO: 1710399 - DNA, 15 bp, Homo sapiens
ttcataactccctct

SEQ ID NO: 1710400 - DNA, 15 bp, Homo sapiens
tcataactccctctc

SEQ ID NO: 1710401 - DNA, 15 bp, Homo sapiens
cataactccctctct

SEQ ID NO: 1710402 - DNA, 15 bp, Homo sapiens
ataactccctctctc

SEQ ID NO: 1710403 - DNA, 15 bp, Homo sapiens
taactccctctctcc

SEQ ID NO: 1710404 - DNA, 15 bp, Homo sapiens
aactccctctctcct

SEQ ID NO: 1710405 - DNA, 15 bp, Homo sapiens
actccctctctcctt

SEQ ID NO: 1710406 - DNA, 15 bp, Homo sapiens
ctccctctctccttc

SEQ ID NO: 1710407 - DNA, 15 bp, Homo sapiens
tccctctctccttcc

SEQ ID NO: 1710408 - DNA, 15 bp, Homo sapiens
ccctctctccttccc

SEQ ID NO: 1710409 - DNA, 15 bp, Homo sapiens
cctctctccttccct

SEQ ID NO: 1710410 - DNA, 15 bp, Homo sapiens
ctctctccttccctc

SEQ ID NO: 1710411 - DNA, 15 bp, Homo sapiens
tctctccttccctcc

SEQ ID NO: 1710412 - DNA, 15 bp, Homo sapiens
ctctccttccctccc

SEQ ID NO: 1710413 - DNA, 15 bp, Homo sapiens
tctccttccctccct

SEQ ID NO: 1710414 - DNA, 15 bp, Homo sapiens
ctccttccctccctc

SEQ ID NO: 1710415 - DNA, 15 bp, Homo sapiens
tccttccctccctct

SEQ ID NO: 1710416 - DNA, 15 bp, Homo sapiens
ccttccctccctctt

SEQ ID NO: 1710417 - DNA, 15 bp, Homo sapiens
cttccctccctcttt

SEQ ID NO: 1710418 - DNA, 15 bp, Homo sapiens
ttccctccctctttg

SEQ ID NO: 1710419 - DNA, 15 bp, Homo sapiens
tccctccctctttgc

SEQ ID NO: 1710420 - DNA, 15 bp, Homo sapiens
ccctccctctttgct

SEQ ID NO: 1710421 - DNA, 15 bp, Homo sapiens
cctccctctttgctt

SEQ ID NO: 1710422 - DNA, 15 bp, Homo sapiens
ctccctctttgcttc

SEQ ID NO: 1710423 - DNA, 15 bp, Homo sapiens
tccctctttgcttcc

SEQ ID NO: 1710424 - DNA, 15 bp, Homo sapiens
ccctctttgcttcct

SEQ ID NO: 1710425 - DNA, 15 bp, Homo sapiens
cctctttgcttcctt

SEQ ID NO: 1710426 - DNA, 15 bp, Homo sapiens
ctctttgcttccttt

SEQ ID NO: 1710427 - DNA, 15 bp, Homo sapiens
tctttgcttcctttc

SEQ ID NO: 1710428 - DNA, 15 bp, Homo sapiens
ctttgcttcctttct

SEQ ID NO: 1710429 - DNA, 15 bp, Homo sapiens
tttgcttcctttctt

SEQ ID NO: 1710430 - DNA, 15 bp, Homo sapiens
ttgcttcctttcttc

SEQ ID NO: 1710431 - DNA, 15 bp, Homo sapiens
tgcttcctttcttcc

SEQ ID NO: 1710432 - DNA, 15 bp, Homo sapiens
gcttcctttcttcct

SEQ ID NO: 1710433 - DNA, 15 bp, Homo sapiens
cttcctttcttcctt

SEQ ID NO: 1710434 - DNA, 15 bp, Homo sapiens
ttcctttcttccttc

SEQ ID NO: 1710435 - DNA, 15 bp, Homo sapiens
tcctttcttccttct

SEQ ID NO: 1710436 - DNA, 15 bp, Homo sapiens
cctttcttccttctt

SEQ ID NO: 1710437 - DNA, 15 bp, Homo sapiens
ctttcttccttcttc

SEQ ID NO: 1710438 - DNA, 15 bp, Homo sapiens
tttcttccttcttcc

SEQ ID NO: 1710439 - DNA, 15 bp, Homo sapiens
ttcttccttcttccc

SEQ ID NO: 1710440 - DNA, 15 bp, Homo sapiens
tcttccttcttccct

SEQ ID NO: 1710441 - DNA, 15 bp, Homo sapiens
cttccttcttccctt

SEQ ID NO: 1710442 - DNA, 15 bp, Homo sapiens
ttccttcttcccttc

SEQ ID NO: 1710443 - DNA, 15 bp, Homo sapiens
tccttcttcccttcc

SEQ ID NO: 1710444 - DNA, 15 bp, Homo sapiens
ccttcttcccttccg

SEQ ID NO: 1710445 - DNA, 15 bp, Homo sapiens
cttcttcccttccgt

SEQ ID NO: 1710446 - DNA, 15 bp, Homo sapiens
ttcttcccttccgtc

SEQ ID NO: 1710447 - DNA, 15 bp, Homo sapiens
tcttcccttccgtcc

SEQ ID NO: 1710448 - DNA, 15 bp, Homo sapiens
cttcccttccgtcct

SEQ ID NO: 1710449 - DNA, 15 bp, Homo sapiens
ttcccttccgtcctc

SEQ ID NO: 1710450 - DNA, 15 bp, Homo sapiens
tcccttccgtcctct

SEQ ID NO: 1710451 - DNA, 15 bp, Homo sapiens
cccttccgtcctctc

SEQ ID NO: 1710452 - DNA, 15 bp, Homo sapiens
ccttccgtcctctct

SEQ ID NO: 1710453 - DNA, 15 bp, Homo sapiens
cttccgtcctctctt

SEQ ID NO: 1710454 - DNA, 15 bp, Homo sapiens
ttccgtcctctcttc

SEQ ID NO: 1710455 - DNA, 15 bp, Homo sapiens
tccgtcctctcttcc

SEQ ID NO: 1710456 - DNA, 15 bp, Homo sapiens
ccgtcctctcttcct

SEQ ID NO: 1710457 - DNA, 15 bp, Homo sapiens
cgtcctctcttcctt

SEQ ID NO: 1710458 - DNA, 15 bp, Homo sapiens
gtcctctcttccttc

SEQ ID NO: 1710459 - DNA, 15 bp, Homo sapiens
tcctctcttccttct

SEQ ID NO: 1710460 - DNA, 15 bp, Homo sapiens
cctctcttccttctt

SEQ ID NO: 1710461 - DNA, 15 bp, Homo sapiens
ctctcttccttcttc

SEQ ID NO: 1710462 - DNA, 15 bp, Homo sapiens
tctcttccttcttct

SEQ ID NO: 1710463 - DNA, 15 bp, Homo sapiens
ctcttccttcttctg

SEQ ID NO: 1710464 - DNA, 15 bp, Homo sapiens
tcttccttcttctgt

SEQ ID NO: 1710465 - DNA, 15 bp, Homo sapiens
cttccttcttctgtc

SEQ ID NO: 1710466 - DNA, 15 bp, Homo sapiens
ttccttcttctgtcc

SEQ ID NO: 1710467 - DNA, 15 bp, Homo sapiens
tccttcttctgtccc

SEQ ID NO: 1710468 - DNA, 15 bp, Homo sapiens
ccttcttctgtccct

SEQ ID NO: 1710469 - DNA, 15 bp, Homo sapiens
cttcttctgtccctc

SEQ ID NO: 1710470 - DNA, 15 bp, Homo sapiens
ttcttctgtccctcc

SEQ ID NO: 1710471 - DNA, 15 bp, Homo sapiens
tcttctgtccctcct

SEQ ID NO: 1710472 - DNA, 15 bp, Homo sapiens
cttctgtccctcctt

SEQ ID NO: 1710473 - DNA, 15 bp, Homo sapiens
ttctgtccctccttc

SEQ ID NO: 1710474 - DNA, 15 bp, Homo sapiens
tctgtccctccttcc

SEQ ID NO: 1710475 - DNA, 15 bp, Homo sapiens
ctgtccctccttcct

SEQ ID NO: 1710476 - DNA, 15 bp, Homo sapiens
tgtccctccttcctt

SEQ ID NO: 1710477 - DNA, 15 bp, Homo sapiens
gtccctccttccttt

SEQ ID NO: 1710478 - DNA, 15 bp, Homo sapiens
tccctccttcctttc

SEQ ID NO: 1710479 - DNA, 15 bp, Homo sapiens
ccctccttcctttcc

SEQ ID NO: 1710480 - DNA, 15 bp, Homo sapiens
cctccttcctttcct

SEQ ID NO: 1710481 - DNA, 15 bp, Homo sapiens
ctccttcctttcctt

SEQ ID NO: 1710482 - DNA, 15 bp, Homo sapiens
tccttcctttccttc

SEQ ID NO: 1710483 - DNA, 15 bp, Homo sapiens
ccttcctttccttcc

SEQ ID NO: 1710484 - DNA, 15 bp, Homo sapiens
cttcctttccttcct

SEQ ID NO: 1710485 - DNA, 15 bp, Homo sapiens
ttcctttccttcctt

SEQ ID NO: 1710486 - DNA, 15 bp, Homo sapiens
tcctttccttccttc

SEQ ID NO: 1710487 - DNA, 15 bp, Homo sapiens
cctttccttccttcc

SEQ ID NO: 1710488 - DNA, 15 bp, Homo sapiens
ttccttccttccttt

SEQ ID NO: 1710489 - DNA, 15 bp, Homo sapiens
tccttccttcctttc

SEQ ID NO: 1710490 - DNA, 15 bp, Homo sapiens
ccttccttcctttct

SEQ ID NO: 1710491 - DNA, 15 bp, Homo sapiens
cttccttcctttctt

SEQ ID NO: 1710492 - DNA, 15 bp, Homo sapiens
ttccttcctttcttc

SEQ ID NO: 1710493 - DNA, 15 bp, Homo sapiens
tccttcctttcttcc

SEQ ID NO: 1710494 - DNA, 15 bp, Homo sapiens
ccttcctttcttcct

SEQ ID NO: 1710495 - DNA, 15 bp, Homo sapiens
ctttcttccttcttt

SEQ ID NO: 1710496 - DNA, 15 bp, Homo sapiens
tttcttccttctttc

SEQ ID NO: 1710497 - DNA, 15 bp, Homo sapiens
ttcttccttctttct

SEQ ID NO: 1710498 - DNA, 15 bp, Homo sapiens
tcttccttctttctc

SEQ ID NO: 1710499 - DNA, 15 bp, Homo sapiens
cttccttctttctca

SEQ ID NO: 1710500 - DNA, 15 bp, Homo sapiens
ttccttctttctcag

SEQ ID NO: 1710501 - DNA, 15 bp, Homo sapiens
tccttctttctcagt

SEQ ID NO: 1710502 - DNA, 15 bp, Homo sapiens
ccttctttctcagtt

SEQ ID NO: 1710503 - DNA, 15 bp, Homo sapiens
cttctttctcagttt

SEQ ID NO: 1710504 - DNA, 15 bp, Homo sapiens
ttctttctcagtttt

SEQ ID NO: 1710505 - DNA, 15 bp, Homo sapiens
tctttctcagtttta

SEQ ID NO: 1710506 - DNA, 15 bp, Homo sapiens
ctttctcagttttat

SEQ ID NO: 1710507 - DNA, 15 bp, Homo sapiens
tttctcagttttatt

SEQ ID NO: 1710508 - DNA, 15 bp, Homo sapiens
ttctcagttttatta

SEQ ID NO: 1710509 - DNA, 15 bp, Homo sapiens
tctcagttttattac

SEQ ID NO: 1710510 - DNA, 15 bp, Homo sapiens
ctcagttttattact

SEQ ID NO: 1710511 - DNA, 15 bp, Homo sapiens
tcagttttattactt

SEQ ID NO: 1710512 - DNA, 15 bp, Homo sapiens
cagttttattactta

SEQ ID NO: 1710513 - DNA, 15 bp, Homo sapiens
agttttattacttaa

SEQ ID NO: 1710514 - DNA, 15 bp, Homo sapiens
gttttattacttaaa

SEQ ID NO: 1710515 - DNA, 15 bp, Homo sapiens
ttttattacttaaat

SEQ ID NO: 1710516 - DNA, 15 bp, Homo sapiens
tttattacttaaatg

SEQ ID NO: 1710517 - DNA, 15 bp, Homo sapiens
ttattacttaaatgt

SEQ ID NO: 1710518 - DNA, 15 bp, Homo sapiens
tattacttaaatgtt

SEQ ID NO: 1710519 - DNA, 15 bp, Homo sapiens
attacttaaatgttt

SEQ ID NO: 1710520 - DNA, 15 bp, Homo sapiens
ttacttaaatgtttt

SEQ ID NO: 1710521 - DNA, 15 bp, Homo sapiens
tacttaaatgtttta

SEQ ID NO: 1710522 - DNA, 15 bp, Homo sapiens
acttaaatgttttaa

SEQ ID NO: 1710523 - DNA, 15 bp, Homo sapiens
cttaaatgttttaat

SEQ ID NO: 1710524 - DNA, 15 bp, Homo sapiens
ttaaatgttttaatc

SEQ ID NO: 1710525 - DNA, 15 bp, Homo sapiens
taaatgttttaatca

SEQ ID NO: 1710526 - DNA, 15 bp, Homo sapiens
aaatgttttaatcat

SEQ ID NO: 1710527 - DNA, 15 bp, Homo sapiens
aatgttttaatcatt

SEQ ID NO: 1710528 - DNA, 15 bp, Homo sapiens
atgttttaatcattt

SEQ ID NO: 1710529 - DNA, 15 bp, Homo sapiens
tgttttaatcatttt

SEQ ID NO: 1710530 - DNA, 15 bp, Homo sapiens
gttttaatcatttta

SEQ ID NO: 1710531 - DNA, 15 bp, Homo sapiens
ttttaatcattttat

SEQ ID NO: 1710532 - DNA, 15 bp, Homo sapiens
tttaatcattttatc

SEQ ID NO: 1710533 - DNA, 15 bp, Homo sapiens
ttaatcattttatca

SEQ ID NO: 1710534 - DNA, 15 bp, Homo sapiens
taatcattttatcat

SEQ ID NO: 1710535 - DNA, 15 bp, Homo sapiens
aatcattttatcatc

SEQ ID NO: 1710536 - DNA, 15 bp, Homo sapiens
atcattttatcatcc

SEQ ID NO: 1710537 - DNA, 15 bp, Homo sapiens
tcattttatcatcct

SEQ ID NO: 1710538 - DNA, 15 bp, Homo sapiens
cattttatcatcctt

SEQ ID NO: 1710539 - DNA, 15 bp, Homo sapiens
attttatcatccttt

SEQ ID NO: 1710540 - DNA, 15 bp, Homo sapiens
ttttatcatcctttt

SEQ ID NO: 1710541 - DNA, 15 bp, Homo sapiens
tttatcatccttttc

SEQ ID NO: 1710542 - DNA, 15 bp, Homo sapiens
ttatcatccttttca

SEQ ID NO: 1710543 - DNA, 15 bp, Homo sapiens
tatcatccttttcat

SEQ ID NO: 1710544 - DNA, 15 bp, Homo sapiens
atcatccttttcatc

SEQ ID NO: 1710545 - DNA, 15 bp, Homo sapiens
tcatccttttcatct

SEQ ID NO: 1710546 - DNA, 15 bp, Homo sapiens
catccttttcatctg

SEQ ID NO: 1710547 - DNA, 15 bp, Homo sapiens
atccttttcatctgt

SEQ ID NO: 1710548 - DNA, 15 bp, Homo sapiens
tccttttcatctgtg

SEQ ID NO: 1710549 - DNA, 15 bp, Homo sapiens
ccttttcatctgtgt

SEQ ID NO: 1710550 - DNA, 15 bp, Homo sapiens
cttttcatctgtgtt

SEQ ID NO: 1710551 - DNA, 15 bp, Homo sapiens
ttttcatctgtgttg

SEQ ID NO: 1710552 - DNA, 15 bp, Homo sapiens
tttcatctgtgttga

SEQ ID NO: 1710553 - DNA, 15 bp, Homo sapiens
ttcatctgtgttgat

SEQ ID NO: 1710554 - DNA, 15 bp, Homo sapiens
tcatctgtgttgatg

SEQ ID NO: 1710555 - DNA, 15 bp, Homo sapiens
catctgtgttgatga

SEQ ID NO: 1710556 - DNA, 15 bp, Homo sapiens
atctgtgttgatgaa

SEQ ID NO: 1710557 - DNA, 15 bp, Homo sapiens
tctgtgttgatgaaa

SEQ ID NO: 1710558 - DNA, 15 bp, Homo sapiens
ctgtgttgatgaaaa

SEQ ID NO: 1710559 - DNA, 15 bp, Homo sapiens
tgtgttgatgaaaaa

SEQ ID NO: 1710560 - DNA, 15 bp, Homo sapiens
gtgttgatgaaaaac

SEQ ID NO: 1710561 - DNA, 15 bp, Homo sapiens
tgttgatgaaaaacc

SEQ ID NO: 1710562 - DNA, 15 bp, Homo sapiens
gttgatgaaaaacca

SEQ ID NO: 1710563 - DNA, 15 bp, Homo sapiens
ttgatgaaaaaccaa

SEQ ID NO: 1710564 - DNA, 15 bp, Homo sapiens
tgatgaaaaaccaac

SEQ ID NO: 1710565 - DNA, 15 bp, Homo sapiens
gatgaaaaaccaaca

SEQ ID NO: 1710566 - DNA, 15 bp, Homo sapiens
atgaaaaaccaacac

SEQ ID NO: 1710567 - DNA, 15 bp, Homo sapiens
tgaaaaaccaacaca

SEQ ID NO: 1710568 - DNA, 15 bp, Homo sapiens
gaaaaaccaacacaa

SEQ ID NO: 1710569 - DNA, 15 bp, Homo sapiens
aaaaaccaacacaat

SEQ ID NO: 1710570 - DNA, 15 bp, Homo sapiens
aaaaccaacacaatt

SEQ ID NO: 1710571 - DNA, 15 bp, Homo sapiens
aaaccaacacaattg

SEQ ID NO: 1710572 - DNA, 15 bp, Homo sapiens
aaccaacacaattgc

SEQ ID NO: 1710573 - DNA, 15 bp, Homo sapiens
accaacacaattgcc

SEQ ID NO: 1710574 - DNA, 15 bp, Homo sapiens
ccaacacaattgcct

SEQ ID NO: 1710575 - DNA, 15 bp, Homo sapiens
caacacaattgccta

SEQ ID NO: 1710576 - DNA, 15 bp, Homo sapiens
aacacaattgcctaa

SEQ ID NO: 1710577 - DNA, 15 bp, Homo sapiens
acacaattgcctaaa

SEQ ID NO: 1710578 - DNA, 15 bp, Homo sapiens
cacaattgcctaaaa

SEQ ID NO: 1710579 - DNA, 15 bp, Homo sapiens
acaattgcctaaaaa

SEQ ID NO: 1710580 - DNA, 15 bp, Homo sapiens
caattgcctaaaaag

SEQ ID NO: 1710581 - DNA, 15 bp, Homo sapiens
aattgcctaaaaagg

SEQ ID NO: 1710582 - DNA, 15 bp, Homo sapiens
attgcctaaaaaggc

SEQ ID NO: 1710583 - DNA, 15 bp, Homo sapiens
ttgcctaaaaaggca

SEQ ID NO: 1710584 - DNA, 15 bp, Homo sapiens
tgcctaaaaaggcaa

SEQ ID NO: 1710585 - DNA, 15 bp, Homo sapiens
gcctaaaaaggcaaa

SEQ ID NO: 1710586 - DNA, 15 bp, Homo sapiens
cctaaaaaggcaaaa

SEQ ID NO: 1710587 - DNA, 15 bp, Homo sapiens
ctaaaaaggcaaaat

SEQ ID NO: 1710588 - DNA, 15 bp, Homo sapiens
taaaaaggcaaaata

SEQ ID NO: 1710589 - DNA, 15 bp, Homo sapiens
aaaaaggcaaaataa

SEQ ID NO: 1710590 - DNA, 15 bp, Homo sapiens
aaaaggcaaaataac

SEQ ID NO: 1710591 - DNA, 15 bp, Homo sapiens
aaaggcaaaataaca

SEQ ID NO: 1710592 - DNA, 15 bp, Homo sapiens
aaggcaaaataacaa

SEQ ID NO: 1710593 - DNA, 15 bp, Homo sapiens
aggcaaaataacaag

SEQ ID NO: 1710594 - DNA, 15 bp, Homo sapiens
ggcaaaataacaaga

SEQ ID NO: 1710595 - DNA, 15 bp, Homo sapiens
gcaaaataacaagac

SEQ ID NO: 1710596 - DNA, 15 bp, Homo sapiens
caaaataacaagaca

SEQ ID NO: 1710597 - DNA, 15 bp, Homo sapiens
aaaataacaagacaa

SEQ ID NO: 1710598 - DNA, 15 bp, Homo sapiens
aaataacaagacaaa

SEQ ID NO: 1710599 - DNA, 15 bp, Homo sapiens
aataacaagacaaaa

SEQ ID NO: 1710600 - DNA, 15 bp, Homo sapiens
ataacaagacaaaaa

SEQ ID NO: 1710601 - DNA, 15 bp, Homo sapiens
taacaagacaaaaat

SEQ ID NO: 1710602 - DNA, 15 bp, Homo sapiens
aacaagacaaaaatt

SEQ ID NO: 1710603 - DNA, 15 bp, Homo sapiens
acaagacaaaaattc

SEQ ID NO: 1710604 - DNA, 15 bp, Homo sapiens
caagacaaaaattct

SEQ ID NO: 1710605 - DNA, 15 bp, Homo sapiens
aagacaaaaattctg

SEQ ID NO: 1710606 - DNA, 15 bp, Homo sapiens
agacaaaaattctgt

SEQ ID NO: 1710607 - DNA, 15 bp, Homo sapiens
gacaaaaattctgta

SEQ ID NO: 1710608 - DNA, 15 bp, Homo sapiens
acaaaaattctgtaa

SEQ ID NO: 1710609 - DNA, 15 bp, Homo sapiens
caaaaattctgtaag

SEQ ID NO: 1710610 - DNA, 15 bp, Homo sapiens
aaaaattctgtaagt

SEQ ID NO: 1710611 - DNA, 15 bp, Homo sapiens
aaaattctgtaagtc

SEQ ID NO: 1710612 - DNA, 15 bp, Homo sapiens
aaattctgtaagtca

SEQ ID NO: 1710613 - DNA, 15 bp, Homo sapiens
aattctgtaagtcat

SEQ ID NO: 1710614 - DNA, 15 bp, Homo sapiens
attctgtaagtcatc

SEQ ID NO: 1710615 - DNA, 15 bp, Homo sapiens
ttctgtaagtcatca

SEQ ID NO: 1710616 - DNA, 15 bp, Homo sapiens
tctgtaagtcatcac

SEQ ID NO: 1710617 - DNA, 15 bp, Homo sapiens
ctgtaagtcatcacc

SEQ ID NO: 1710618 - DNA, 15 bp, Homo sapiens
tgtaagtcatcacca

SEQ ID NO: 1710619 - DNA, 15 bp, Homo sapiens
gtaagtcatcaccat

SEQ ID NO: 1710620 - DNA, 15 bp, Homo sapiens
taagtcatcaccatt

SEQ ID NO: 1710621 - DNA, 15 bp, Homo sapiens
aagtcatcaccattg

SEQ ID NO: 1710622 - DNA, 15 bp, Homo sapiens
agtcatcaccattgg

SEQ ID NO: 1710623 - DNA, 15 bp, Homo sapiens
gtcatcaccattggt

SEQ ID NO: 1710624 - DNA, 15 bp, Homo sapiens
tcatcaccattggtt

SEQ ID NO: 1710625 - DNA, 15 bp, Homo sapiens
catcaccattggttt

SEQ ID NO: 1710626 - DNA, 15 bp, Homo sapiens
atcaccattggtttt

SEQ ID NO: 1710627 - DNA, 15 bp, Homo sapiens
tcaccattggttttc

SEQ ID NO: 1710628 - DNA, 15 bp, Homo sapiens
caccattggttttca

SEQ ID NO: 1710629 - DNA, 15 bp, Homo sapiens
accattggttttcat

SEQ ID NO: 1710630 - DNA, 15 bp, Homo sapiens
ccattggttttcatt

SEQ ID NO: 1710631 - DNA, 15 bp, Homo sapiens
cattggttttcattc

SEQ ID NO: 1710632 - DNA, 15 bp, Homo sapiens
attggttttcattca

SEQ ID NO: 1710633 - DNA, 15 bp, Homo sapiens
ttggttttcattcac

SEQ ID NO: 1710634 - DNA, 15 bp, Homo sapiens
tggttttcattcacc

SEQ ID NO: 1710635 - DNA, 15 bp, Homo sapiens
ggttttcattcacca

SEQ ID NO: 1710636 - DNA, 15 bp, Homo sapiens
gttttcattcaccag

SEQ ID NO: 1710637 - DNA, 15 bp, Homo sapiens
ttttcattcaccagg

SEQ ID NO: 1710638 - DNA, 15 bp, Homo sapiens
tttcattcaccaggt

SEQ ID NO: 1710639 - DNA, 15 bp, Homo sapiens
ttcattcaccaggtt

SEQ ID NO: 1710640 - DNA, 15 bp, Homo sapiens
tcattcaccaggttt

SEQ ID NO: 1710641 - DNA, 15 bp, Homo sapiens
cattcaccaggtttt

SEQ ID NO: 1710642 - DNA, 15 bp, Homo sapiens
attcaccaggttttc

SEQ ID NO: 1710643 - DNA, 15 bp, Homo sapiens
ttcaccaggttttcc

SEQ ID NO: 1710644 - DNA, 15 bp, Homo sapiens
tcaccaggttttccg

SEQ ID NO: 1710645 - DNA, 15 bp, Homo sapiens
caccaggttttccgc

SEQ ID NO: 1710646 - DNA, 15 bp, Homo sapiens
accaggttttccgcc

SEQ ID NO: 1710647 - DNA, 15 bp, Homo sapiens
ccaggttttccgccc

SEQ ID NO: 1710648 - DNA, 15 bp, Homo sapiens
caggttttccgcccc

SEQ ID NO: 1710649 - DNA, 15 bp, Homo sapiens
aggttttccgcccca

SEQ ID NO: 1710650 - DNA, 15 bp, Homo sapiens
ggttttccgccccac

SEQ ID NO: 1710651 - DNA, 15 bp, Homo sapiens
gttttccgccccaca

SEQ ID NO: 1710652 - DNA, 15 bp, Homo sapiens
ttttccgccccacag

SEQ ID NO: 1710653 - DNA, 15 bp, Homo sapiens
tttccgccccacaga

SEQ ID NO: 1710654 - DNA, 15 bp, Homo sapiens
ttccgccccacagag

SEQ ID NO: 1710655 - DNA, 15 bp, Homo sapiens
tccgccccacagagg

SEQ ID NO: 1710656 - DNA, 15 bp, Homo sapiens
ccgccccacagagga

SEQ ID NO: 1710657 - DNA, 15 bp, Homo sapiens
cgccccacagaggac

SEQ ID NO: 1710658 - DNA, 15 bp, Homo sapiens
gccccacagaggact

SEQ ID NO: 1710659 - DNA, 15 bp, Homo sapiens
ccccacagaggactg

SEQ ID NO: 1710660 - DNA, 15 bp, Homo sapiens
cccacagaggactgt

SEQ ID NO: 1710661 - DNA, 15 bp, Homo sapiens
ccacagaggactgta

SEQ ID NO: 1710662 - DNA, 15 bp, Homo sapiens
cacagaggactgtag

SEQ ID NO: 1710663 - DNA, 15 bp, Homo sapiens
acagaggactgtagt

SEQ ID NO: 1710664 - DNA, 15 bp, Homo sapiens
cagaggactgtagta

SEQ ID NO: 1710665 - DNA, 15 bp, Homo sapiens
agaggactgtagtac

SEQ ID NO: 1710666 - DNA, 15 bp, Homo sapiens
gaggactgtagtaca

SEQ ID NO: 1710667 - DNA, 15 bp, Homo sapiens
aggactgtagtacat

SEQ ID NO: 1710668 - DNA, 15 bp, Homo sapiens
ggactgtagtacatc

SEQ ID NO: 1710669 - DNA, 15 bp, Homo sapiens
gactgtagtacatcg

SEQ ID NO: 1710670 - DNA, 15 bp, Homo sapiens
actgtagtacatcgt

SEQ ID NO: 1710671 - DNA, 15 bp, Homo sapiens
ctgtagtacatcgtc

SEQ ID NO: 1710672 - DNA, 15 bp, Homo sapiens
tgtagtacatcgtca

SEQ ID NO: 1710673 - DNA, 15 bp, Homo sapiens
gtagtacatcgtcat

SEQ ID NO: 1710674 - DNA, 15 bp, Homo sapiens
tagtacatcgtcatc

SEQ ID NO: 1710675 - DNA, 15 bp, Homo sapiens
agtacatcgtcatca

SEQ ID NO: 1710676 - DNA, 15 bp, Homo sapiens
gtacatcgtcatcat

SEQ ID NO: 1710677 - DNA, 15 bp, Homo sapiens
tacatcgtcatcata

SEQ ID NO: 1710678 - DNA, 15 bp, Homo sapiens
acatcgtcatcatat

SEQ ID NO: 1710679 - DNA, 15 bp, Homo sapiens
catcgtcatcatatt

SEQ ID NO: 1710680 - DNA, 15 bp, Homo sapiens
atcgtcatcatattc

SEQ ID NO: 1710681 - DNA, 15 bp, Homo sapiens
tcgtcatcatattct

SEQ ID NO: 1710682 - DNA, 15 bp, Homo sapiens
cgtcatcatattctt

SEQ ID NO: 1710683 - DNA, 15 bp, Homo sapiens
gtcatcatattctta

SEQ ID NO: 1710684 - DNA, 15 bp, Homo sapiens
tcatcatattcttag

SEQ ID NO: 1710685 - DNA, 15 bp, Homo sapiens
catcatattcttagc

SEQ ID NO: 1710686 - DNA, 15 bp, Homo sapiens
atcatattcttagct

SEQ ID NO: 1710687 - DNA, 15 bp, Homo sapiens
tcatattcttagcta

SEQ ID NO: 1710688 - DNA, 15 bp, Homo sapiens
catattcttagctaa

SEQ ID NO: 1710689 - DNA, 15 bp, Homo sapiens
atattcttagctaac

SEQ ID NO: 1710690 - DNA, 15 bp, Homo sapiens
tattcttagctaact

SEQ ID NO: 1710691 - DNA, 15 bp, Homo sapiens
attcttagctaactt

SEQ ID NO: 1710692 - DNA, 15 bp, Homo sapiens
ttcttagctaacttt

SEQ ID NO: 1710693 - DNA, 15 bp, Homo sapiens
tcttagctaactttc

SEQ ID NO: 1710694 - DNA, 15 bp, Homo sapiens
cttagctaactttcg

SEQ ID NO: 1710695 - DNA, 15 bp, Homo sapiens
ttagctaactttcgt

SEQ ID NO: 1710696 - DNA, 15 bp, Homo sapiens
tagctaactttcgtt

SEQ ID NO: 1710697 - DNA, 15 bp, Homo sapiens
agctaactttcgttt

SEQ ID NO: 1710698 - DNA, 15 bp, Homo sapiens
gctaactttcgttta

SEQ ID NO: 1710699 - DNA, 15 bp, Homo sapiens
ctaactttcgtttaa

SEQ ID NO: 1710700 - DNA, 15 bp, Homo sapiens
taactttcgtttaat

SEQ ID NO: 1710701 - DNA, 15 bp, Homo sapiens
aactttcgtttaatt

SEQ ID NO: 1710702 - DNA, 15 bp, Homo sapiens
actttcgtttaatta

SEQ ID NO: 1710703 - DNA, 15 bp, Homo sapiens
ctttcgtttaattac

SEQ ID NO: 1710704 - DNA, 15 bp, Homo sapiens
tttcgtttaattact

SEQ ID NO: 1710705 - DNA, 15 bp, Homo sapiens
ttcgtttaattacta

SEQ ID NO: 1710706 - DNA, 15 bp, Homo sapiens
tcgtttaattactag

SEQ ID NO: 1710707 - DNA, 15 bp, Homo sapiens
cgtttaattactagc

SEQ ID NO: 1710708 - DNA, 15 bp, Homo sapiens
gtttaattactagca

SEQ ID NO: 1710709 - DNA, 15 bp, Homo sapiens
tttaattactagcat

SEQ ID NO: 1710710 - DNA, 15 bp, Homo sapiens
ttaattactagcatg

SEQ ID NO: 1710711 - DNA, 15 bp, Homo sapiens
taattactagcatgt

SEQ ID NO: 1710712 - DNA, 15 bp, Homo sapiens
aattactagcatgtt

SEQ ID NO: 1710713 - DNA, 15 bp, Homo sapiens
attactagcatgttt

SEQ ID NO: 1710714 - DNA, 15 bp, Homo sapiens
ttactagcatgttta

SEQ ID NO: 1710715 - DNA, 15 bp, Homo sapiens
tactagcatgtttaa

SEQ ID NO: 1710716 - DNA, 15 bp, Homo sapiens
actagcatgtttaaa

SEQ ID NO: 1710717 - DNA, 15 bp, Homo sapiens
ctagcatgtttaaag

SEQ ID NO: 1710718 - DNA, 15 bp, Homo sapiens
tagcatgtttaaagt

SEQ ID NO: 1710719 - DNA, 15 bp, Homo sapiens
agcatgtttaaagtg

SEQ ID NO: 1710720 - DNA, 15 bp, Homo sapiens
gcatgtttaaagtgg

SEQ ID NO: 1710721 - DNA, 15 bp, Homo sapiens
catgtttaaagtgga

SEQ ID NO: 1710722 - DNA, 15 bp, Homo sapiens
atgtttaaagtggaa

SEQ ID NO: 1710723 - DNA, 15 bp, Homo sapiens
tgtttaaagtggaac

SEQ ID NO: 1710724 - DNA, 15 bp, Homo sapiens
gtttaaagtggaacc

SEQ ID NO: 1710725 - DNA, 15 bp, Homo sapiens
tttaaagtggaacca

SEQ ID NO: 1710726 - DNA, 15 bp, Homo sapiens
ttaaagtggaaccat

SEQ ID NO: 1710727 - DNA, 15 bp, Homo sapiens
taaagtggaaccatt

SEQ ID NO: 1710728 - DNA, 15 bp, Homo sapiens
aaagtggaaccatta

SEQ ID NO: 1710729 - DNA, 15 bp, Homo sapiens
aagtggaaccattat

SEQ ID NO: 1710730 - DNA, 15 bp, Homo sapiens
agtggaaccattatt

SEQ ID NO: 1710731 - DNA, 15 bp, Homo sapiens
gtggaaccattattt

SEQ ID NO: 1710732 - DNA, 15 bp, Homo sapiens
tggaaccattattta

SEQ ID NO: 1710733 - DNA, 15 bp, Homo sapiens
ggaaccattatttaa

SEQ ID NO: 1710734 - DNA, 15 bp, Homo sapiens
gaaccattatttaaa

SEQ ID NO: 1710735 - DNA, 15 bp, Homo sapiens
accattatttaaaag

SEQ ID NO: 1710736 - DNA, 15 bp, Homo sapiens
ccattatttaaaaga

SEQ ID NO: 1710737 - DNA, 15 bp, Homo sapiens
cattatttaaaagac

SEQ ID NO: 1710738 - DNA, 15 bp, Homo sapiens
attatttaaaagact

SEQ ID NO: 1710739 - DNA, 15 bp, Homo sapiens
ttatttaaaagactt

SEQ ID NO: 1710740 - DNA, 15 bp, Homo sapiens
tatttaaaagacttt

SEQ ID NO: 1710741 - DNA, 15 bp, Homo sapiens
atttaaaagacttta

SEQ ID NO: 1710742 - DNA, 15 bp, Homo sapiens
tttaaaagactttat

SEQ ID NO: 1710743 - DNA, 15 bp, Homo sapiens
ttaaaagactttatt

SEQ ID NO: 1710744 - DNA, 15 bp, Homo sapiens
taaaagactttattt

SEQ ID NO: 1710745 - DNA, 15 bp, Homo sapiens
aaaagactttatttt

SEQ ID NO: 1710746 - DNA, 15 bp, Homo sapiens
aaagactttattttt

SEQ ID NO: 1710747 - DNA, 15 bp, Homo sapiens
aagactttatttttt

SEQ ID NO: 1710748 - DNA, 15 bp, Homo sapiens
agactttatttttta

SEQ ID NO: 1710749 - DNA, 15 bp, Homo sapiens
gactttattttttag

SEQ ID NO: 1710750 - DNA, 15 bp, Homo sapiens
actttattttttaga

SEQ ID NO: 1710751 - DNA, 15 bp, Homo sapiens
ctttattttttagag

SEQ ID NO: 1710752 - DNA, 15 bp, Homo sapiens
tttattttttagagc

SEQ ID NO: 1710753 - DNA, 15 bp, Homo sapiens
ttattttttagagca

SEQ ID NO: 1710754 - DNA, 15 bp, Homo sapiens
tattttttagagcac

SEQ ID NO: 1710755 - DNA, 15 bp, Homo sapiens
attttttagagcact

SEQ ID NO: 1710756 - DNA, 15 bp, Homo sapiens
ttttttagagcactt

SEQ ID NO: 1710757 - DNA, 15 bp, Homo sapiens
tttttagagcacttt

SEQ ID NO: 1710758 - DNA, 15 bp, Homo sapiens
ttttagagcactttt

SEQ ID NO: 1710759 - DNA, 15 bp, Homo sapiens
tttagagcactttta

SEQ ID NO: 1710760 - DNA, 15 bp, Homo sapiens
ttagagcacttttag

SEQ ID NO: 1710761 - DNA, 15 bp, Homo sapiens
tagagcacttttagg

SEQ ID NO: 1710762 - DNA, 15 bp, Homo sapiens
agagcacttttaggt

SEQ ID NO: 1710763 - DNA, 15 bp, Homo sapiens
gagcacttttaggtt

SEQ ID NO: 1710764 - DNA, 15 bp, Homo sapiens
agcacttttaggttt

SEQ ID NO: 1710765 - DNA, 15 bp, Homo sapiens
gcacttttaggttta

SEQ ID NO: 1710766 - DNA, 15 bp, Homo sapiens
cacttttaggtttac

SEQ ID NO: 1710767 - DNA, 15 bp, Homo sapiens
acttttaggtttaca

SEQ ID NO: 1710768 - DNA, 15 bp, Homo sapiens
cttttaggtttacag

SEQ ID NO: 1710769 - DNA, 15 bp, Homo sapiens
ttttaggtttacagc

SEQ ID NO: 1710770 - DNA, 15 bp, Homo sapiens
tttaggtttacagca

SEQ ID NO: 1710771 - DNA, 15 bp, Homo sapiens
ttaggtttacagcaa

SEQ ID NO: 1710772 - DNA, 15 bp, Homo sapiens
taggtttacagcaaa

SEQ ID NO: 1710773 - DNA, 15 bp, Homo sapiens
aggtttacagcaaaa

SEQ ID NO: 1710774 - DNA, 15 bp, Homo sapiens
ggtttacagcaaaat

SEQ ID NO: 1710775 - DNA, 15 bp, Homo sapiens
gtttacagcaaaatt

SEQ ID NO: 1710776 - DNA, 15 bp, Homo sapiens
tttacagcaaaatta

SEQ ID NO: 1710777 - DNA, 15 bp, Homo sapiens
ttacagcaaaattag

SEQ ID NO: 1710778 - DNA, 15 bp, Homo sapiens
tacagcaaaattaga

SEQ ID NO: 1710779 - DNA, 15 bp, Homo sapiens
acagcaaaattagag

SEQ ID NO: 1710780 - DNA, 15 bp, Homo sapiens
cagcaaaattagagg

SEQ ID NO: 1710781 - DNA, 15 bp, Homo sapiens
agcaaaattagagga

SEQ ID NO: 1710782 - DNA, 15 bp, Homo sapiens
gcaaaattagaggaa

SEQ ID NO: 1710783 - DNA, 15 bp, Homo sapiens
caaaattagaggaag

SEQ ID NO: 1710784 - DNA, 15 bp, Homo sapiens
aaaattagaggaagg

SEQ ID NO: 1710785 - DNA, 15 bp, Homo sapiens
aaattagaggaaggt

SEQ ID NO: 1710786 - DNA, 15 bp, Homo sapiens
aattagaggaaggta

SEQ ID NO: 1710787 - DNA, 15 bp, Homo sapiens
attagaggaaggtac

SEQ ID NO: 1710788 - DNA, 15 bp, Homo sapiens
ttagaggaaggtaca

SEQ ID NO: 1710789 - DNA, 15 bp, Homo sapiens
tagaggaaggtacag

SEQ ID NO: 1710790 - DNA, 15 bp, Homo sapiens
agatttcccatatac

SEQ ID NO: 1710791 - DNA, 15 bp, Homo sapiens
gatttcccatatacc

SEQ ID NO: 1710792 - DNA, 15 bp, Homo sapiens
atttcccatataccc

SEQ ID NO: 1710793 - DNA, 15 bp, Homo sapiens
tttcccatatacccc

SEQ ID NO: 1710794 - DNA, 15 bp, Homo sapiens
ttcccatataccccc

SEQ ID NO: 1710795 - DNA, 15 bp, Homo sapiens
tcccatataccccct

SEQ ID NO: 1710796 - DNA, 15 bp, Homo sapiens
cccatatacccccta

SEQ ID NO: 1710797 - DNA, 15 bp, Homo sapiens
ccatataccccctac

SEQ ID NO: 1710798 - DNA, 15 bp, Homo sapiens
catataccccctacc

SEQ ID NO: 1710799 - DNA, 15 bp, Homo sapiens
atataccccctacca

SEQ ID NO: 1710800 - DNA, 15 bp, Homo sapiens
tataccccctaccac

SEQ ID NO: 1710801 - DNA, 15 bp, Homo sapiens
ataccccctaccacc

SEQ ID NO: 1710802 - DNA, 15 bp, Homo sapiens
taccccctaccaccc

SEQ ID NO: 1710803 - DNA, 15 bp, Homo sapiens
accccctaccaccct

SEQ ID NO: 1710804 - DNA, 15 bp, Homo sapiens
ccccctaccacccta

SEQ ID NO: 1710805 - DNA, 15 bp, Homo sapiens
cccctaccaccctac

SEQ ID NO: 1710806 - DNA, 15 bp, Homo sapiens
ccctaccaccctaca

SEQ ID NO: 1710807 - DNA, 15 bp, Homo sapiens
cctaccaccctacac

SEQ ID NO: 1710808 - DNA, 15 bp, Homo sapiens
ctaccaccctacacg

SEQ ID NO: 1710809 - DNA, 15 bp, Homo sapiens
taccaccctacacgc

SEQ ID NO: 1710810 - DNA, 15 bp, Homo sapiens
accaccctacacgca

SEQ ID NO: 1710811 - DNA, 15 bp, Homo sapiens
ccaccctacacgcat

SEQ ID NO: 1710812 - DNA, 15 bp, Homo sapiens
caccctacacgcata

SEQ ID NO: 1710813 - DNA, 15 bp, Homo sapiens
accctacacgcataa

SEQ ID NO: 1710814 - DNA, 15 bp, Homo sapiens
ccctacacgcataac

SEQ ID NO: 1710815 - DNA, 15 bp, Homo sapiens
cctacacgcataacc

SEQ ID NO: 1710816 - DNA, 15 bp, Homo sapiens
ctacacgcataacct

SEQ ID NO: 1710817 - DNA, 15 bp, Homo sapiens
tacacgcataacctc

SEQ ID NO: 1710818 - DNA, 15 bp, Homo sapiens
acacgcataacctcc

SEQ ID NO: 1710819 - DNA, 15 bp, Homo sapiens
cacgcataacctccc

SEQ ID NO: 1710820 - DNA, 15 bp, Homo sapiens
acgcataacctcccc

SEQ ID NO: 1710821 - DNA, 15 bp, Homo sapiens
cgcataacctccccc

SEQ ID NO: 1710822 - DNA, 15 bp, Homo sapiens
gcataacctccccca

SEQ ID NO: 1710823 - DNA, 15 bp, Homo sapiens
cataacctcccccat

SEQ ID NO: 1710824 - DNA, 15 bp, Homo sapiens
ataacctcccccatt

SEQ ID NO: 1710825 - DNA, 15 bp, Homo sapiens
taacctcccccatta

SEQ ID NO: 1710826 - DNA, 15 bp, Homo sapiens
aacctcccccattat

SEQ ID NO: 1710827 - DNA, 15 bp, Homo sapiens
acctcccccattatc

SEQ ID NO: 1710828 - DNA, 15 bp, Homo sapiens
cctcccccattatca

SEQ ID NO: 1710829 - DNA, 15 bp, Homo sapiens
ctcccccattatcaa

SEQ ID NO: 1710830 - DNA, 15 bp, Homo sapiens
tcccccattatcaac

SEQ ID NO: 1710831 - DNA, 15 bp, Homo sapiens
cccccattatcaaca

SEQ ID NO: 1710832 - DNA, 15 bp, Homo sapiens
ccccattatcaacat

SEQ ID NO: 1710833 - DNA, 15 bp, Homo sapiens
cccattatcaacatc

SEQ ID NO: 1710834 - DNA, 15 bp, Homo sapiens
ccattatcaacatct

SEQ ID NO: 1710835 - DNA, 15 bp, Homo sapiens
cattatcaacatctc

SEQ ID NO: 1710836 - DNA, 15 bp, Homo sapiens
attatcaacatctcc

SEQ ID NO: 1710837 - DNA, 15 bp, Homo sapiens
ttatcaacatctccc

SEQ ID NO: 1710838 - DNA, 15 bp, Homo sapiens
tatcaacatctccca

SEQ ID NO: 1710839 - DNA, 15 bp, Homo sapiens
atcaacatctcccac

SEQ ID NO: 1710840 - DNA, 15 bp, Homo sapiens
tcaacatctcccacc

SEQ ID NO: 1710841 - DNA, 15 bp, Homo sapiens
caacatctcccacca

SEQ ID NO: 1710842 - DNA, 15 bp, Homo sapiens
aacatctcccaccag

SEQ ID NO: 1710843 - DNA, 15 bp, Homo sapiens
acatctcccaccaga

SEQ ID NO: 1710844 - DNA, 15 bp, Homo sapiens
atctcccaccagaat

SEQ ID NO: 1710845 - DNA, 15 bp, Homo sapiens
tctcccaccagaatg

SEQ ID NO: 1710846 - DNA, 15 bp, Homo sapiens
ctcccaccagaatga

SEQ ID NO: 1710847 - DNA, 15 bp, Homo sapiens
tcccaccagaatgat

SEQ ID NO: 1710848 - DNA, 15 bp, Homo sapiens
cccaccagaatgata

SEQ ID NO: 1710849 - DNA, 15 bp, Homo sapiens
ccaccagaatgatac

SEQ ID NO: 1710850 - DNA, 15 bp, Homo sapiens
caccagaatgataca

SEQ ID NO: 1710851 - DNA, 15 bp, Homo sapiens
accagaatgatacat

SEQ ID NO: 1710852 - DNA, 15 bp, Homo sapiens
ccagaatgatacatt

SEQ ID NO: 1710853 - DNA, 15 bp, Homo sapiens
cagaatgatacattt

SEQ ID NO: 1710854 - DNA, 15 bp, Homo sapiens
agaatgatacatttc

SEQ ID NO: 1710855 - DNA, 15 bp, Homo sapiens
gaatgatacatttcc

SEQ ID NO: 1710856 - DNA, 15 bp, Homo sapiens
aatgatacatttcct

SEQ ID NO: 1710857 - DNA, 15 bp, Homo sapiens
atgatacatttccta

SEQ ID NO: 1710858 - DNA, 15 bp, Homo sapiens
tgatacatttcctac

SEQ ID NO: 1710859 - DNA, 15 bp, Homo sapiens
gatacatttcctaca

SEQ ID NO: 1710860 - DNA, 15 bp, Homo sapiens
atacatttcctacaa

SEQ ID NO: 1710861 - DNA, 15 bp, Homo sapiens
tacatttcctacaat

SEQ ID NO: 1710862 - DNA, 15 bp, Homo sapiens
acatttcctacaatt

SEQ ID NO: 1710863 - DNA, 15 bp, Homo sapiens
catttcctacaatta

SEQ ID NO: 1710864 - DNA, 15 bp, Homo sapiens
atttcctacaattaa

SEQ ID NO: 1710865 - DNA, 15 bp, Homo sapiens
tttcctacaattaat

SEQ ID NO: 1710866 - DNA, 15 bp, Homo sapiens
ttcctacaattaatg

SEQ ID NO: 1710867 - DNA, 15 bp, Homo sapiens
tcctacaattaatga

SEQ ID NO: 1710868 - DNA, 15 bp, Homo sapiens
cctacaattaatgaa

SEQ ID NO: 1710869 - DNA, 15 bp, Homo sapiens
ctacaattaatgaac

SEQ ID NO: 1710870 - DNA, 15 bp, Homo sapiens
tacaattaatgaaca

SEQ ID NO: 1710871 - DNA, 15 bp, Homo sapiens
acaattaatgaacat

SEQ ID NO: 1710872 - DNA, 15 bp, Homo sapiens
caattaatgaacata

SEQ ID NO: 1710873 - DNA, 15 bp, Homo sapiens
aattaatgaacatac

SEQ ID NO: 1710874 - DNA, 15 bp, Homo sapiens
attaatgaacataca

SEQ ID NO: 1710875 - DNA, 15 bp, Homo sapiens
ttaatgaacatacat

SEQ ID NO: 1710876 - DNA, 15 bp, Homo sapiens
taatgaacatacatt

SEQ ID NO: 1710877 - DNA, 15 bp, Homo sapiens
aatgaacatacattg

SEQ ID NO: 1710878 - DNA, 15 bp, Homo sapiens
atgaacatacattga

SEQ ID NO: 1710879 - DNA, 15 bp, Homo sapiens
tgaacatacattgac

SEQ ID NO: 1710880 - DNA, 15 bp, Homo sapiens
gaacatacattgaca

SEQ ID NO: 1710881 - DNA, 15 bp, Homo sapiens
aacatacattgacac

SEQ ID NO: 1710882 - DNA, 15 bp, Homo sapiens
acatacattgacaca

SEQ ID NO: 1710883 - DNA, 15 bp, Homo sapiens
catacattgacacat

SEQ ID NO: 1710884 - DNA, 15 bp, Homo sapiens
atacattgacacatc

SEQ ID NO: 1710885 - DNA, 15 bp, Homo sapiens
tacattgacacatca

SEQ ID NO: 1710886 - DNA, 15 bp, Homo sapiens
acattgacacatcat

SEQ ID NO: 1710887 - DNA, 15 bp, Homo sapiens
cattgacacatcatt

SEQ ID NO: 1710888 - DNA, 15 bp, Homo sapiens
attgacacatcatta

SEQ ID NO: 1710889 - DNA, 15 bp, Homo sapiens
ttgacacatcattat

SEQ ID NO: 1710890 - DNA, 15 bp, Homo sapiens
tgacacatcattatc

SEQ ID NO: 1710891 - DNA, 15 bp, Homo sapiens
gacacatcattatca

SEQ ID NO: 1710892 - DNA, 15 bp, Homo sapiens
acacatcattatcac

SEQ ID NO: 1710893 - DNA, 15 bp, Homo sapiens
cacatcattatcaca

SEQ ID NO: 1710894 - DNA, 15 bp, Homo sapiens
acatcattatcacag

SEQ ID NO: 1710895 - DNA, 15 bp, Homo sapiens
catcattatcacaga

SEQ ID NO: 1710896 - DNA, 15 bp, Homo sapiens
atcattatcacagat

SEQ ID NO: 1710897 - DNA, 15 bp, Homo sapiens
tcattatcacagatc

SEQ ID NO: 1710898 - DNA, 15 bp, Homo sapiens
cattatcacagatcc

SEQ ID NO: 1710899 - DNA, 15 bp, Homo sapiens
attatcacagatcca

SEQ ID NO: 1710900 - DNA, 15 bp, Homo sapiens
ttatcacagatccac

SEQ ID NO: 1710901 - DNA, 15 bp, Homo sapiens
tatcacagatccaca

SEQ ID NO: 1710902 - DNA, 15 bp, Homo sapiens
atcacagatccacag

SEQ ID NO: 1710903 - DNA, 15 bp, Homo sapiens
tcacagatccacagc

SEQ ID NO: 1710904 - DNA, 15 bp, Homo sapiens
cacagatccacagct

SEQ ID NO: 1710905 - DNA, 15 bp, Homo sapiens
acagatccacagctt

SEQ ID NO: 1710906 - DNA, 15 bp, Homo sapiens
cagatccacagctta

SEQ ID NO: 1710907 - DNA, 15 bp, Homo sapiens
agatccacagcttac

SEQ ID NO: 1710908 - DNA, 15 bp, Homo sapiens
gatccacagcttaca

SEQ ID NO: 1710909 - DNA, 15 bp, Homo sapiens
atccacagcttacat

SEQ ID NO: 1710910 - DNA, 15 bp, Homo sapiens
tccacagcttacatt

SEQ ID NO: 1710911 - DNA, 15 bp, Homo sapiens
ccacagcttacatta

SEQ ID NO: 1710912 - DNA, 15 bp, Homo sapiens
cacagcttacattag

SEQ ID NO: 1710913 - DNA, 15 bp, Homo sapiens
acagcttacattagg

SEQ ID NO: 1710914 - DNA, 15 bp, Homo sapiens
cagcttacattaggg

SEQ ID NO: 1710915 - DNA, 15 bp, Homo sapiens
agcttacattagggt

SEQ ID NO: 1710916 - DNA, 15 bp, Homo sapiens
gcttacattagggtt

SEQ ID NO: 1710917 - DNA, 15 bp, Homo sapiens
cttacattagggttc

SEQ ID NO: 1710918 - DNA, 15 bp, Homo sapiens
ttacattagggttca

SEQ ID NO: 1710919 - DNA, 15 bp, Homo sapiens
tacattagggttcac

SEQ ID NO: 1710920 - DNA, 15 bp, Homo sapiens
acattagggttcact

SEQ ID NO: 1710921 - DNA, 15 bp, Homo sapiens
cattagggttcactc

SEQ ID NO: 1710922 - DNA, 15 bp, Homo sapiens
attagggttcactct

SEQ ID NO: 1710923 - DNA, 15 bp, Homo sapiens
ttagggttcactctt

SEQ ID NO: 1710924 - DNA, 15 bp, Homo sapiens
tagggttcactcttg

SEQ ID NO: 1710925 - DNA, 15 bp, Homo sapiens
agggttcactcttgg

SEQ ID NO: 1710926 - DNA, 15 bp, Homo sapiens
gggttcactcttggt

SEQ ID NO: 1710927 - DNA, 15 bp, Homo sapiens
ggttcactcttggtg

SEQ ID NO: 1710928 - DNA, 15 bp, Homo sapiens
gttcactcttggtgt

SEQ ID NO: 1710929 - DNA, 15 bp, Homo sapiens
ttcactcttggtgtt

SEQ ID NO: 1710930 - DNA, 15 bp, Homo sapiens
tcactcttggtgttg

SEQ ID NO: 1710931 - DNA, 15 bp, Homo sapiens
cactcttggtgttgt

SEQ ID NO: 1710932 - DNA, 15 bp, Homo sapiens
actcttggtgttgta

SEQ ID NO: 1710933 - DNA, 15 bp, Homo sapiens
ctcttggtgttgtat

SEQ ID NO: 1710934 - DNA, 15 bp, Homo sapiens
tcttggtgttgtata

SEQ ID NO: 1710935 - DNA, 15 bp, Homo sapiens
cttggtgttgtatat

SEQ ID NO: 1710936 - DNA, 15 bp, Homo sapiens
ttggtgttgtatatt

SEQ ID NO: 1710937 - DNA, 15 bp, Homo sapiens
tggtgttgtatattt

SEQ ID NO: 1710938 - DNA, 15 bp, Homo sapiens
ggtgttgtatatttt

SEQ ID NO: 1710939 - DNA, 15 bp, Homo sapiens
gtgttgtatatttta

SEQ ID NO: 1710940 - DNA, 15 bp, Homo sapiens
tgttgtatattttat

SEQ ID NO: 1710941 - DNA, 15 bp, Homo sapiens
gttgtatattttatg

SEQ ID NO: 1710942 - DNA, 15 bp, Homo sapiens
ttgtatattttatga

SEQ ID NO: 1710943 - DNA, 15 bp, Homo sapiens
tgtatattttatgaa

SEQ ID NO: 1710944 - DNA, 15 bp, Homo sapiens
gtatattttatgaat

SEQ ID NO: 1710945 - DNA, 15 bp, Homo sapiens
tatattttatgaatt

SEQ ID NO: 1710946 - DNA, 15 bp, Homo sapiens
atattttatgaattt

SEQ ID NO: 1710947 - DNA, 15 bp, Homo sapiens
tattttatgaatttg

SEQ ID NO: 1710948 - DNA, 15 bp, Homo sapiens
attttatgaatttgg

SEQ ID NO: 1710949 - DNA, 15 bp, Homo sapiens
ttttatgaatttgga

SEQ ID NO: 1710950 - DNA, 15 bp, Homo sapiens
tttatgaatttggac

SEQ ID NO: 1710951 - DNA, 15 bp, Homo sapiens
ttatgaatttggaca

SEQ ID NO: 1710952 - DNA, 15 bp, Homo sapiens
tatgaatttggacag

SEQ ID NO: 1710953 - DNA, 15 bp, Homo sapiens
atgaatttggacaga

SEQ ID NO: 1710954 - DNA, 15 bp, Homo sapiens
tgaatttggacagat

SEQ ID NO: 1710955 - DNA, 15 bp, Homo sapiens
gaatttggacagata

SEQ ID NO: 1710956 - DNA, 15 bp, Homo sapiens
aatttggacagatat

SEQ ID NO: 1710957 - DNA, 15 bp, Homo sapiens
atttggacagatata

SEQ ID NO: 1710958 - DNA, 15 bp, Homo sapiens
tttggacagatatat

SEQ ID NO: 1710959 - DNA, 15 bp, Homo sapiens
ttggacagatatata

SEQ ID NO: 1710960 - DNA, 15 bp, Homo sapiens
tggacagatatataa

SEQ ID NO: 1710961 - DNA, 15 bp, Homo sapiens
ggacagatatataat

SEQ ID NO: 1710962 - DNA, 15 bp, Homo sapiens
gacagatatataatg

SEQ ID NO: 1710963 - DNA, 15 bp, Homo sapiens
acagatatataatga

SEQ ID NO: 1710964 - DNA, 15 bp, Homo sapiens
cagatatataatgac

SEQ ID NO: 1710965 - DNA, 15 bp, Homo sapiens
agatatataatgaca

SEQ ID NO: 1710966 - DNA, 15 bp, Homo sapiens
gatatataatgacat

SEQ ID NO: 1710967 - DNA, 15 bp, Homo sapiens
atatataatgacatg

SEQ ID NO: 1710968 - DNA, 15 bp, Homo sapiens
tatataatgacatgg

SEQ ID NO: 1710969 - DNA, 15 bp, Homo sapiens
atataatgacatggt

SEQ ID NO: 1710970 - DNA, 15 bp, Homo sapiens
tataatgacatggta

SEQ ID NO: 1710971 - DNA, 15 bp, Homo sapiens
ataatgacatggtaa

SEQ ID NO: 1710972 - DNA, 15 bp, Homo sapiens
taatgacatggtaag

SEQ ID NO: 1710973 - DNA, 15 bp, Homo sapiens
aatgacatggtaaga

SEQ ID NO: 1710974 - DNA, 15 bp, Homo sapiens
atgacatggtaagaa

SEQ ID NO: 1710975 - DNA, 15 bp, Homo sapiens
tgacatggtaagaaa

SEQ ID NO: 1710976 - DNA, 15 bp, Homo sapiens
gacatggtaagaaaa

SEQ ID NO: 1710977 - DNA, 15 bp, Homo sapiens
acatggtaagaaaaa

SEQ ID NO: 1710978 - DNA, 15 bp, Homo sapiens
catggtaagaaaaat

SEQ ID NO: 1710979 - DNA, 15 bp, Homo sapiens
atggtaagaaaaatt

SEQ ID NO: 1710980 - DNA, 15 bp, Homo sapiens
tggtaagaaaaattc

SEQ ID NO: 1710981 - DNA, 15 bp, Homo sapiens
ggtaagaaaaattca

SEQ ID NO: 1710982 - DNA, 15 bp, Homo sapiens
gtaagaaaaattcat

SEQ ID NO: 1710983 - DNA, 15 bp, Homo sapiens
taagaaaaattcatt

SEQ ID NO: 1710984 - DNA, 15 bp, Homo sapiens
aagaaaaattcattt

SEQ ID NO: 1710985 - DNA, 15 bp, Homo sapiens
agaaaaattcatttt

SEQ ID NO: 1710986 - DNA, 15 bp, Homo sapiens
gaaaaattcatttta

SEQ ID NO: 1710987 - DNA, 15 bp, Homo sapiens
aaaaattcattttaa

SEQ ID NO: 1710988 - DNA, 15 bp, Homo sapiens
aaaattcattttaaa

SEQ ID NO: 1710989 - DNA, 15 bp, Homo sapiens
aaattcattttaaac

SEQ ID NO: 1710990 - DNA, 15 bp, Homo sapiens
aattcattttaaaca

SEQ ID NO: 1710991 - DNA, 15 bp, Homo sapiens
attcattttaaacat

SEQ ID NO: 1710992 - DNA, 15 bp, Homo sapiens
ttcattttaaacatg

SEQ ID NO: 1710993 - DNA, 15 bp, Homo sapiens
tcattttaaacatgt

SEQ ID NO: 1710994 - DNA, 15 bp, Homo sapiens
cattttaaacatgta

SEQ ID NO: 1710995 - DNA, 15 bp, Homo sapiens
attttaaacatgtaa

SEQ ID NO: 1710996 - DNA, 15 bp, Homo sapiens
ttttaaacatgtaaa

SEQ ID NO: 1710997 - DNA, 15 bp, Homo sapiens
tttaaacatgtaaat

SEQ ID NO: 1710998 - DNA, 15 bp, Homo sapiens
ttaaacatgtaaata

SEQ ID NO: 1710999 - DNA, 15 bp, Homo sapiens
taaacatgtaaatag

SEQ ID NO: 1711000 - DNA, 15 bp, Homo sapiens
aaacatgtaaataga

SEQ ID NO: 1711001 - DNA, 15 bp, Homo sapiens
aacatgtaaatagat

SEQ ID NO: 1711002 - DNA, 15 bp, Homo sapiens
acatgtaaatagatt

SEQ ID NO: 1711003 - DNA, 15 bp, Homo sapiens
catgtaaatagattt

SEQ ID NO: 1711004 - DNA, 15 bp, Homo sapiens
atgtaaatagattta

SEQ ID NO: 1711005 - DNA, 15 bp, Homo sapiens
tgtaaatagatttat

SEQ ID NO: 1711006 - DNA, 15 bp, Homo sapiens
gtaaatagatttatt

SEQ ID NO: 1711007 - DNA, 15 bp, Homo sapiens
taaatagatttattt

SEQ ID NO: 1711008 - DNA, 15 bp, Homo sapiens
aaatagatttatttt

SEQ ID NO: 1711009 - DNA, 15 bp, Homo sapiens
aatagatttattttt

SEQ ID NO: 1711010 - DNA, 15 bp, Homo sapiens
atagatttatttttc

SEQ ID NO: 1711011 - DNA, 15 bp, Homo sapiens
tagatttatttttct

SEQ ID NO: 1711012 - DNA, 15 bp, Homo sapiens
agatttatttttcta

SEQ ID NO: 1711013 - DNA, 15 bp, Homo sapiens
gatttatttttctat

SEQ ID NO: 1711014 - DNA, 15 bp, Homo sapiens
atttatttttctatt

SEQ ID NO: 1711015 - DNA, 15 bp, Homo sapiens
tttatttttctattt

SEQ ID NO: 1711016 - DNA, 15 bp, Homo sapiens
ttatttttctattta

SEQ ID NO: 1711017 - DNA, 15 bp, Homo sapiens
tatttttctatttat

SEQ ID NO: 1711018 - DNA, 15 bp, Homo sapiens
atttttctatttata

SEQ ID NO: 1711019 - DNA, 15 bp, Homo sapiens
tttttctatttataa

SEQ ID NO: 1711020 - DNA, 15 bp, Homo sapiens
ttttctatttataat

SEQ ID NO: 1711021 - DNA, 15 bp, Homo sapiens
tttctatttataata

SEQ ID NO: 1711022 - DNA, 15 bp, Homo sapiens
ttctatttataataa

SEQ ID NO: 1711023 - DNA, 15 bp, Homo sapiens
tctatttataataaa

SEQ ID NO: 1711024 - DNA, 15 bp, Homo sapiens
ctatttataataaag

SEQ ID NO: 1711025 - DNA, 15 bp, Homo sapiens
tatttataataaagt

SEQ ID NO: 1711026 - DNA, 15 bp, Homo sapiens
atttataataaagtt

SEQ ID NO: 1711027 - DNA, 15 bp, Homo sapiens
tttataataaagtta

SEQ ID NO: 1711028 - DNA, 15 bp, Homo sapiens
ttataataaagttac

SEQ ID NO: 1711029 - DNA, 15 bp, Homo sapiens
tataataaagttact

SEQ ID NO: 1711030 - DNA, 15 bp, Homo sapiens
ataataaagttactt

SEQ ID NO: 1711031 - DNA, 15 bp, Homo sapiens
taataaagttacttt

SEQ ID NO: 1711032 - DNA, 15 bp, Homo sapiens
aataaagttactttc

SEQ ID NO: 1711033 - DNA, 15 bp, Homo sapiens
ataaagttactttct

SEQ ID NO: 1711034 - DNA, 15 bp, Homo sapiens
taaagttactttctt

SEQ ID NO: 1711035 - DNA, 15 bp, Homo sapiens
aaagttactttcttg

SEQ ID NO: 1711036 - DNA, 15 bp, Homo sapiens
aagttactttcttgt

SEQ ID NO: 1711037 - DNA, 15 bp, Homo sapiens
agttactttcttgtt

SEQ ID NO: 1711038 - DNA, 15 bp, Homo sapiens
gttactttcttgttt

SEQ ID NO: 1711039 - DNA, 15 bp, Homo sapiens
ttactttcttgttta

SEQ ID NO: 1711040 - DNA, 15 bp, Homo sapiens
tactttcttgtttac

SEQ ID NO: 1711041 - DNA, 15 bp, Homo sapiens
actttcttgtttact

SEQ ID NO: 1711042 - DNA, 15 bp, Homo sapiens
ctttcttgtttacta

SEQ ID NO: 1711043 - DNA, 15 bp, Homo sapiens
tttcttgtttactat

SEQ ID NO: 1711044 - DNA, 15 bp, Homo sapiens
ttcttgtttactatc

SEQ ID NO: 1711045 - DNA, 15 bp, Homo sapiens
tcttgtttactatct

SEQ ID NO: 1711046 - DNA, 15 bp, Homo sapiens
cttgtttactatctt

SEQ ID NO: 1711047 - DNA, 15 bp, Homo sapiens
ttgtttactatcttt

SEQ ID NO: 1711048 - DNA, 15 bp, Homo sapiens
tgtttactatctttc

SEQ ID NO: 1711049 - DNA, 15 bp, Homo sapiens
gtttactatctttcc

SEQ ID NO: 1711050 - DNA, 15 bp, Homo sapiens
tttactatctttcca

SEQ ID NO: 1711051 - DNA, 15 bp, Homo sapiens
ttactatctttccaa

SEQ ID NO: 1711052 - DNA, 15 bp, Homo sapiens
tactatctttccaag

SEQ ID NO: 1711053 - DNA, 15 bp, Homo sapiens
actatctttccaaga

SEQ ID NO: 1711054 - DNA, 15 bp, Homo sapiens
ctatctttccaagac

SEQ ID NO: 1711055 - DNA, 15 bp, Homo sapiens
tatctttccaagact

SEQ ID NO: 1711056 - DNA, 15 bp, Homo sapiens
atctttccaagactt

SEQ ID NO: 1711057 - DNA, 15 bp, Homo sapiens
tctttccaagacttt

SEQ ID NO: 1711058 - DNA, 15 bp, Homo sapiens
ctttccaagactttt

SEQ ID NO: 1711059 - DNA, 15 bp, Homo sapiens
tttccaagacttttt

SEQ ID NO: 1711060 - DNA, 15 bp, Homo sapiens
ttccaagactttttc

SEQ ID NO: 1711061 - DNA, 15 bp, Homo sapiens
tccaagactttttca

SEQ ID NO: 1711062 - DNA, 15 bp, Homo sapiens
ccaagactttttcaa

SEQ ID NO: 1711063 - DNA, 15 bp, Homo sapiens
caagactttttcaat

SEQ ID NO: 1711064 - DNA, 15 bp, Homo sapiens
aagactttttcaatt

SEQ ID NO: 1711065 - DNA, 15 bp, Homo sapiens
agactttttcaattc

SEQ ID NO: 1711066 - DNA, 15 bp, Homo sapiens
gactttttcaattcc

SEQ ID NO: 1711067 - DNA, 15 bp, Homo sapiens
actttttcaattcct

SEQ ID NO: 1711068 - DNA, 15 bp, Homo sapiens
ctttttcaattcctg

SEQ ID NO: 1711069 - DNA, 15 bp, Homo sapiens
tttttcaattcctga

SEQ ID NO: 1711070 - DNA, 15 bp, Homo sapiens
ttttcaattcctgat

SEQ ID NO: 1711071 - DNA, 15 bp, Homo sapiens
tttcaattcctgata

SEQ ID NO: 1711072 - DNA, 15 bp, Homo sapiens
ttcaattcctgataa

SEQ ID NO: 1711073 - DNA, 15 bp, Homo sapiens
tcaattcctgataaa

SEQ ID NO: 1711074 - DNA, 15 bp, Homo sapiens
caattcctgataaag

SEQ ID NO: 1711075 - DNA, 15 bp, Homo sapiens
aattcctgataaaga

SEQ ID NO: 1711076 - DNA, 15 bp, Homo sapiens
attcctgataaagag

SEQ ID NO: 1711077 - DNA, 15 bp, Homo sapiens
ttcctgataaagagg

SEQ ID NO: 1711078 - DNA, 15 bp, Homo sapiens
tcctgataaagagga

SEQ ID NO: 1711079 - DNA, 15 bp, Homo sapiens
cctgataaagaggaa

SEQ ID NO: 1711080 - DNA, 15 bp, Homo sapiens
ctgataaagaggaac

SEQ ID NO: 1711081 - DNA, 15 bp, Homo sapiens
tgataaagaggaaca

SEQ ID NO: 1711082 - DNA, 15 bp, Homo sapiens
gataaagaggaacaa

SEQ ID NO: 1711083 - DNA, 15 bp, Homo sapiens
ataaagaggaacaaa

SEQ ID NO: 1711084 - DNA, 15 bp, Homo sapiens
taaagaggaacaaag

SEQ ID NO: 1711085 - DNA, 15 bp, Homo sapiens
aaagaggaacaaagg

SEQ ID NO: 1711086 - DNA, 15 bp, Homo sapiens
aagaggaacaaaggt

SEQ ID NO: 1711087 - DNA, 15 bp, Homo sapiens
agaggaacaaaggtc

SEQ ID NO: 1711088 - DNA, 15 bp, Homo sapiens
gaggaacaaaggtca

SEQ ID NO: 1711089 - DNA, 15 bp, Homo sapiens
aggaacaaaggtcac

SEQ ID NO: 1711090 - DNA, 15 bp, Homo sapiens
ggaacaaaggtcaca

SEQ ID NO: 1711091 - DNA, 15 bp, Homo sapiens
gaacaaaggtcacag

SEQ ID NO: 1711092 - DNA, 15 bp, Homo sapiens
aacaaaggtcacaga

SEQ ID NO: 1711093 - DNA, 15 bp, Homo sapiens
acaaaggtcacagat

SEQ ID NO: 1711094 - DNA, 15 bp, Homo sapiens
caaaggtcacagatc

SEQ ID NO: 1711095 - DNA, 15 bp, Homo sapiens
aaaggtcacagatca

SEQ ID NO: 1711096 - DNA, 15 bp, Homo sapiens
aaggtcacagatcaa

SEQ ID NO: 1711097 - DNA, 15 bp, Homo sapiens
aggtcacagatcaat

SEQ ID NO: 1711098 - DNA, 15 bp, Homo sapiens
ggtcacagatcaatg

SEQ ID NO: 1711099 - DNA, 15 bp, Homo sapiens
gtcacagatcaatgg

SEQ ID NO: 1711100 - DNA, 15 bp, Homo sapiens
tcacagatcaatggt

SEQ ID NO: 1711101 - DNA, 15 bp, Homo sapiens
cacagatcaatggtg

SEQ ID NO: 1711102 - DNA, 15 bp, Homo sapiens
acagatcaatggtgt

SEQ ID NO: 1711103 - DNA, 15 bp, Homo sapiens
cagatcaatggtgtg

SEQ ID NO: 1711104 - DNA, 15 bp, Homo sapiens
agatcaatggtgtgt

SEQ ID NO: 1711105 - DNA, 15 bp, Homo sapiens
gatcaatggtgtgtg

SEQ ID NO: 1711106 - DNA, 15 bp, Homo sapiens
atcaatggtgtgtgc

SEQ ID NO: 1711107 - DNA, 15 bp, Homo sapiens
tcaatggtgtgtgcc

SEQ ID NO: 1711108 - DNA, 15 bp, Homo sapiens
caatggtgtgtgcct

SEQ ID NO: 1711109 - DNA, 15 bp, Homo sapiens
aatggtgtgtgccta

SEQ ID NO: 1711110 - DNA, 15 bp, Homo sapiens
atggtgtgtgcctac

SEQ ID NO: 1711111 - DNA, 15 bp, Homo sapiens
tggtgtgtgcctact

SEQ ID NO: 1711112 - DNA, 15 bp, Homo sapiens
ggtgtgtgcctactt

SEQ ID NO: 1711113 - DNA, 15 bp, Homo sapiens
gtgtgtgcctacttt

SEQ ID NO: 1711114 - DNA, 15 bp, Homo sapiens
tgtgtgcctactttt

SEQ ID NO: 1711115 - DNA, 15 bp, Homo sapiens
gtgtgcctacttttt

SEQ ID NO: 1711116 - DNA, 15 bp, Homo sapiens
tgtgcctactttttg

SEQ ID NO: 1711117 - DNA, 15 bp, Homo sapiens
gtgcctactttttgt

SEQ ID NO: 1711118 - DNA, 15 bp, Homo sapiens
tgcctactttttgta

SEQ ID NO: 1711119 - DNA, 15 bp, Homo sapiens
gcctactttttgtag

SEQ ID NO: 1711120 - DNA, 15 bp, Homo sapiens
cctactttttgtagc

SEQ ID NO: 1711121 - DNA, 15 bp, Homo sapiens
ctactttttgtagca

SEQ ID NO: 1711122 - DNA, 15 bp, Homo sapiens
tactttttgtagcaa

SEQ ID NO: 1711123 - DNA, 15 bp, Homo sapiens
actttttgtagcaat

SEQ ID NO: 1711124 - DNA, 15 bp, Homo sapiens
ctttttgtagcaatg

SEQ ID NO: 1711125 - DNA, 15 bp, Homo sapiens
tttttgtagcaatgg

SEQ ID NO: 1711126 - DNA, 15 bp, Homo sapiens
ttttgtagcaatggg

SEQ ID NO: 1711127 - DNA, 15 bp, Homo sapiens
tttgtagcaatgggc

SEQ ID NO: 1711128 - DNA, 15 bp, Homo sapiens
ttgtagcaatgggct

SEQ ID NO: 1711129 - DNA, 15 bp, Homo sapiens
tgtagcaatgggctg

SEQ ID NO: 1711130 - DNA, 15 bp, Homo sapiens
gtagcaatgggctgt

SEQ ID NO: 1711131 - DNA, 15 bp, Homo sapiens
tagcaatgggctgtg

SEQ ID NO: 1711132 - DNA, 15 bp, Homo sapiens
agcaatgggctgtgt

SEQ ID NO: 1711133 - DNA, 15 bp, Homo sapiens
gcaatgggctgtgta

SEQ ID NO: 1711134 - DNA, 15 bp, Homo sapiens
caatgggctgtgtat

SEQ ID NO: 1711135 - DNA, 15 bp, Homo sapiens
aatgggctgtgtatc

SEQ ID NO: 1711136 - DNA, 15 bp, Homo sapiens
atgggctgtgtatct

SEQ ID NO: 1711137 - DNA, 15 bp, Homo sapiens
tgggctgtgtatctc

SEQ ID NO: 1711138 - DNA, 15 bp, Homo sapiens
gggctgtgtatctct

SEQ ID NO: 1711139 - DNA, 15 bp, Homo sapiens
ggctgtgtatctctt

SEQ ID NO: 1711140 - DNA, 15 bp, Homo sapiens
gctgtgtatctcttt

SEQ ID NO: 1711141 - DNA, 15 bp, Homo sapiens
ctgtgtatctctttt

SEQ ID NO: 1711142 - DNA, 15 bp, Homo sapiens
tgtgtatctcttttc

SEQ ID NO: 1711143 - DNA, 15 bp, Homo sapiens
gtgtatctcttttca

SEQ ID NO: 1711144 - DNA, 15 bp, Homo sapiens
tgtatctcttttcac

SEQ ID NO: 1711145 - DNA, 15 bp, Homo sapiens
gtatctcttttcacc

SEQ ID NO: 1711146 - DNA, 15 bp, Homo sapiens
tatctcttttcaccc

SEQ ID NO: 1711147 - DNA, 15 bp, Homo sapiens
atctcttttcaccca

SEQ ID NO: 1711148 - DNA, 15 bp, Homo sapiens
tctcttttcacccaa

SEQ ID NO: 1711149 - DNA, 15 bp, Homo sapiens
ctcttttcacccaat

SEQ ID NO: 1711150 - DNA, 15 bp, Homo sapiens
tcttttcacccaatt

SEQ ID NO: 1711151 - DNA, 15 bp, Homo sapiens
cttttcacccaattt

SEQ ID NO: 1711152 - DNA, 15 bp, Homo sapiens
ttttcacccaatttc

SEQ ID NO: 1711153 - DNA, 15 bp, Homo sapiens
tttcacccaatttct

SEQ ID NO: 1711154 - DNA, 15 bp, Homo sapiens
ttcacccaatttcta

SEQ ID NO: 1711155 - DNA, 15 bp, Homo sapiens
tcacccaatttctac

SEQ ID NO: 1711156 - DNA, 15 bp, Homo sapiens
cacccaatttctaca

SEQ ID NO: 1711157 - DNA, 15 bp, Homo sapiens
acccaatttctacag

SEQ ID NO: 1711158 - DNA, 15 bp, Homo sapiens
cccaatttctacagg

SEQ ID NO: 1711159 - DNA, 15 bp, Homo sapiens
ccaatttctacaggt

SEQ ID NO: 1711160 - DNA, 15 bp, Homo sapiens
caatttctacaggta

SEQ ID NO: 1711161 - DNA, 15 bp, Homo sapiens
aatttctacaggtaa

SEQ ID NO: 1711162 - DNA, 15 bp, Homo sapiens
atttctacaggtaag

SEQ ID NO: 1711163 - DNA, 15 bp, Homo sapiens
tttctacaggtaaga

SEQ ID NO: 1711164 - DNA, 15 bp, Homo sapiens
ttctacaggtaagaa

SEQ ID NO: 1711165 - DNA, 15 bp, Homo sapiens
tctacaggtaagaaa

SEQ ID NO: 1711166 - DNA, 15 bp, Homo sapiens
ctacaggtaagaaat

SEQ ID NO: 1711167 - DNA, 15 bp, Homo sapiens
tacaggtaagaaatg

SEQ ID NO: 1711168 - DNA, 15 bp, Homo sapiens
acaggtaagaaatgt

SEQ ID NO: 1711169 - DNA, 15 bp, Homo sapiens
caggtaagaaatgtt

SEQ ID NO: 1711170 - DNA, 15 bp, Homo sapiens
aggtaagaaatgtta

SEQ ID NO: 1711171 - DNA, 15 bp, Homo sapiens
ggtaagaaatgttat

SEQ ID NO: 1711172 - DNA, 15 bp, Homo sapiens
gtaagaaatgttatt

SEQ ID NO: 1711173 - DNA, 15 bp, Homo sapiens
taagaaatgttattt

SEQ ID NO: 1711174 - DNA, 15 bp, Homo sapiens
aagaaatgttatttt

SEQ ID NO: 1711175 - DNA, 15 bp, Homo sapiens
agaaatgttattttt

SEQ ID NO: 1711176 - DNA, 15 bp, Homo sapiens
gaaatgttatttttc

SEQ ID NO: 1711177 - DNA, 15 bp, Homo sapiens
aaatgttatttttca

SEQ ID NO: 1711178 - DNA, 15 bp, Homo sapiens
aatgttatttttcag

SEQ ID NO: 1711179 - DNA, 15 bp, Homo sapiens
atgttatttttcagt

SEQ ID NO: 1711180 - DNA, 15 bp, Homo sapiens
tgttatttttcagta

SEQ ID NO: 1711181 - DNA, 15 bp, Homo sapiens
gttatttttcagtaa

SEQ ID NO: 1711182 - DNA, 15 bp, Homo sapiens
ttatttttcagtaag

SEQ ID NO: 1711183 - DNA, 15 bp, Homo sapiens
tatttttcagtaagt

SEQ ID NO: 1711184 - DNA, 15 bp, Homo sapiens
atttttcagtaagtg

SEQ ID NO: 1711185 - DNA, 15 bp, Homo sapiens
tttttcagtaagtga

SEQ ID NO: 1711186 - DNA, 15 bp, Homo sapiens
ttttcagtaagtgat

SEQ ID NO: 1711187 - DNA, 15 bp, Homo sapiens
tttcagtaagtgatt

SEQ ID NO: 1711188 - DNA, 15 bp, Homo sapiens
ttcagtaagtgattt

SEQ ID NO: 1711189 - DNA, 15 bp, Homo sapiens
tcagtaagtgattta

SEQ ID NO: 1711190 - DNA, 15 bp, Homo sapiens
cagtaagtgatttag

SEQ ID NO: 1711191 - DNA, 15 bp, Homo sapiens
agtaagtgatttagt

SEQ ID NO: 1711192 - DNA, 15 bp, Homo sapiens
gtaagtgatttagtt

SEQ ID NO: 1711193 - DNA, 15 bp, Homo sapiens
taagtgatttagtta

SEQ ID NO: 1711194 - DNA, 15 bp, Homo sapiens
aagtgatttagttat

SEQ ID NO: 1711195 - DNA, 15 bp, Homo sapiens
agtgatttagttatt

SEQ ID NO: 1711196 - DNA, 15 bp, Homo sapiens
gtgatttagttattt

SEQ ID NO: 1711197 - DNA, 15 bp, Homo sapiens
tgatttagttatttt

SEQ ID NO: 1711198 - DNA, 15 bp, Homo sapiens
gatttagttattttt

SEQ ID NO: 1711199 - DNA, 15 bp, Homo sapiens
atttagttatttttc

SEQ ID NO: 1711200 - DNA, 15 bp, Homo sapiens
tttagttatttttcc

SEQ ID NO: 1711201 - DNA, 15 bp, Homo sapiens
ttagttatttttcct

SEQ ID NO: 1711202 - DNA, 15 bp, Homo sapiens
tagttatttttcctt

SEQ ID NO: 1711203 - DNA, 15 bp, Homo sapiens
agttatttttccttt

SEQ ID NO: 1711204 - DNA, 15 bp, Homo sapiens
gttatttttcctttt

SEQ ID NO: 1711205 - DNA, 15 bp, Homo sapiens
ttatttttccttttt

SEQ ID NO: 1711206 - DNA, 15 bp, Homo sapiens
tatttttcctttttt

SEQ ID NO: 1711207 - DNA, 15 bp, Homo sapiens
atttttccttttttc

SEQ ID NO: 1711208 - DNA, 15 bp, Homo sapiens
tttttccttttttct

SEQ ID NO: 1711209 - DNA, 15 bp, Homo sapiens
ttttccttttttctc

SEQ ID NO: 1711210 - DNA, 15 bp, Homo sapiens
tttccttttttctca

SEQ ID NO: 1711211 - DNA, 15 bp, Homo sapiens
ttccttttttctcat

SEQ ID NO: 1711212 - DNA, 15 bp, Homo sapiens
tccttttttctcatt

SEQ ID NO: 1711213 - DNA, 15 bp, Homo sapiens
ccttttttctcatta

SEQ ID NO: 1711214 - DNA, 15 bp, Homo sapiens
cttttttctcattaa

SEQ ID NO: 1711215 - DNA, 15 bp, Homo sapiens
ttttttctcattaaa

SEQ ID NO: 1711216 - DNA, 15 bp, Homo sapiens
tttttctcattaaaa

SEQ ID NO: 1711217 - DNA, 15 bp, Homo sapiens
ttttctcattaaaat

SEQ ID NO: 1711218 - DNA, 15 bp, Homo sapiens
tttctcattaaaatt

SEQ ID NO: 1711219 - DNA, 15 bp, Homo sapiens
ttctcattaaaattt

SEQ ID NO: 1711220 - DNA, 15 bp, Homo sapiens
tctcattaaaatttc

SEQ ID NO: 1711221 - DNA, 15 bp, Homo sapiens
ctcattaaaatttct

SEQ ID NO: 1711222 - DNA, 15 bp, Homo sapiens
tcattaaaatttctc

SEQ ID NO: 1711223 - DNA, 15 bp, Homo sapiens
cattaaaatttctct

SEQ ID NO: 1711224 - DNA, 15 bp, Homo sapiens
attaaaatttctcta

SEQ ID NO: 1711225 - DNA, 15 bp, Homo sapiens
ttaaaatttctctaa

SEQ ID NO: 1711226 - DNA, 15 bp, Homo sapiens
taaaatttctctaac

SEQ ID NO: 1711227 - DNA, 15 bp, Homo sapiens
aaaatttctctaaca

SEQ ID NO: 1711228 - DNA, 15 bp, Homo sapiens
aaatttctctaacat

SEQ ID NO: 1711229 - DNA, 15 bp, Homo sapiens
aatttctctaacatc

SEQ ID NO: 1711230 - DNA, 15 bp, Homo sapiens
atttctctaacatct

SEQ ID NO: 1711231 - DNA, 15 bp, Homo sapiens
tttctctaacatctc

SEQ ID NO: 1711232 - DNA, 15 bp, Homo sapiens
ttctctaacatctcc

SEQ ID NO: 1711233 - DNA, 15 bp, Homo sapiens
tctctaacatctccc

SEQ ID NO: 1711234 - DNA, 15 bp, Homo sapiens
ctctaacatctccct

SEQ ID NO: 1711235 - DNA, 15 bp, Homo sapiens
tctaacatctccctc

SEQ ID NO: 1711236 - DNA, 15 bp, Homo sapiens
ctaacatctccctct

SEQ ID NO: 1711237 - DNA, 15 bp, Homo sapiens
taacatctccctctt

SEQ ID NO: 1711238 - DNA, 15 bp, Homo sapiens
aacatctccctcttc

SEQ ID NO: 1711239 - DNA, 15 bp, Homo sapiens
acatctccctcttca

SEQ ID NO: 1711240 - DNA, 15 bp, Homo sapiens
catctccctcttcat

SEQ ID NO: 1711241 - DNA, 15 bp, Homo sapiens
atctccctcttcatg

SEQ ID NO: 1711242 - DNA, 15 bp, Homo sapiens
tctccctcttcatgt

SEQ ID NO: 1711243 - DNA, 15 bp, Homo sapiens
ctccctcttcatgtt

SEQ ID NO: 1711244 - DNA, 15 bp, Homo sapiens
tccctcttcatgttt

SEQ ID NO: 1711245 - DNA, 15 bp, Homo sapiens
ccctcttcatgtttt

SEQ ID NO: 1711246 - DNA, 15 bp, Homo sapiens
cctcttcatgtttta

SEQ ID NO: 1711247 - DNA, 15 bp, Homo sapiens
ctcttcatgttttag

SEQ ID NO: 1711248 - DNA, 15 bp, Homo sapiens
tcttcatgttttagg

SEQ ID NO: 1711249 - DNA, 15 bp, Homo sapiens
cttcatgttttaggg

SEQ ID NO: 1711250 - DNA, 15 bp, Homo sapiens
ttcatgttttaggga

SEQ ID NO: 1711251 - DNA, 15 bp, Homo sapiens
tcatgttttagggat

SEQ ID NO: 1711252 - DNA, 15 bp, Homo sapiens
catgttttagggata

SEQ ID NO: 1711253 - DNA, 15 bp, Homo sapiens
atgttttagggatat

SEQ ID NO: 1711254 - DNA, 15 bp, Homo sapiens
tgttttagggatatg

SEQ ID NO: 1711255 - DNA, 15 bp, Homo sapiens
gttttagggatatgc

SEQ ID NO: 1711256 - DNA, 15 bp, Homo sapiens
ttttagggatatgcc

SEQ ID NO: 1711257 - DNA, 15 bp, Homo sapiens
tttagggatatgcct

SEQ ID NO: 1711258 - DNA, 15 bp, Homo sapiens
ttagggatatgcctt

SEQ ID NO: 1711259 - DNA, 15 bp, Homo sapiens
tagggatatgccttt

SEQ ID NO: 1711260 - DNA, 15 bp, Homo sapiens
agggatatgcctttg

SEQ ID NO: 1711261 - DNA, 15 bp, Homo sapiens
gggatatgcctttgc

SEQ ID NO: 1711262 - DNA, 15 bp, Homo sapiens
ggatatgcctttgct

SEQ ID NO: 1711263 - DNA, 15 bp, Homo sapiens
gatatgcctttgcta

SEQ ID NO: 1711264 - DNA, 15 bp, Homo sapiens
atatgcctttgctaa

SEQ ID NO: 1711265 - DNA, 15 bp, Homo sapiens
tatgcctttgctaaa

SEQ ID NO: 1711266 - DNA, 15 bp, Homo sapiens
atgcctttgctaaat

SEQ ID NO: 1711267 - DNA, 15 bp, Homo sapiens
tgcctttgctaaatc

SEQ ID NO: 1711268 - DNA, 15 bp, Homo sapiens
gcctttgctaaatct

SEQ ID NO: 1711269 - DNA, 15 bp, Homo sapiens
cctttgctaaatctg

SEQ ID NO: 1711270 - DNA, 15 bp, Homo sapiens
ctttgctaaatctgg

SEQ ID NO: 1711271 - DNA, 15 bp, Homo sapiens
tttgctaaatctggg

SEQ ID NO: 1711272 - DNA, 15 bp, Homo sapiens
ttgctaaatctgggg

SEQ ID NO: 1711273 - DNA, 15 bp, Homo sapiens
tgctaaatctgggga

SEQ ID NO: 1711274 - DNA, 15 bp, Homo sapiens
gctaaatctggggag

SEQ ID NO: 1711275 - DNA, 15 bp, Homo sapiens
ctaaatctggggagc

SEQ ID NO: 1711276 - DNA, 15 bp, Homo sapiens
taaatctggggagct

SEQ ID NO: 1711277 - DNA, 15 bp, Homo sapiens
aaatctggggagctc

SEQ ID NO: 1711278 - DNA, 15 bp, Homo sapiens
aatctggggagctcc

SEQ ID NO: 1711279 - DNA, 15 bp, Homo sapiens
atctggggagctcct

SEQ ID NO: 1711280 - DNA, 15 bp, Homo sapiens
tctggggagctccta

SEQ ID NO: 1711281 - DNA, 15 bp, Homo sapiens
ctggggagctcctaa

SEQ ID NO: 1711282 - DNA, 15 bp, Homo sapiens
tggggagctcctaac

SEQ ID NO: 1711283 - DNA, 15 bp, Homo sapiens
ggggagctcctaaca

SEQ ID NO: 1711284 - DNA, 15 bp, Homo sapiens
gggagctcctaacaa

SEQ ID NO: 1711285 - DNA, 15 bp, Homo sapiens
ggagctcctaacaaa

SEQ ID NO: 1711286 - DNA, 15 bp, Homo sapiens
gagctcctaacaaaa

SEQ ID NO: 1711287 - DNA, 15 bp, Homo sapiens
agctcctaacaaaaa

SEQ ID NO: 1711288 - DNA, 15 bp, Homo sapiens
gctcctaacaaaaag

SEQ ID NO: 1711289 - DNA, 15 bp, Homo sapiens
ctcctaacaaaaagg

SEQ ID NO: 1711290 - DNA, 15 bp, Homo sapiens
tcctaacaaaaaggc

SEQ ID NO: 1711291 - DNA, 15 bp, Homo sapiens
cctaacaaaaaggct

SEQ ID NO: 1711292 - DNA, 15 bp, Homo sapiens
ctaacaaaaaggcta

SEQ ID NO: 1711293 - DNA, 15 bp, Homo sapiens
taacaaaaaggctac

SEQ ID NO: 1711294 - DNA, 15 bp, Homo sapiens
aacaaaaaggctacg

SEQ ID NO: 1711295 - DNA, 15 bp, Homo sapiens
acaaaaaggctacgt

SEQ ID NO: 1711296 - DNA, 15 bp, Homo sapiens
caaaaaggctacgta

SEQ ID NO: 1711297 - DNA, 15 bp, Homo sapiens
aaaaaggctacgtaa

SEQ ID NO: 1711298 - DNA, 15 bp, Homo sapiens
aaaaggctacgtaaa

SEQ ID NO: 1711299 - DNA, 15 bp, Homo sapiens
aaaggctacgtaaat

SEQ ID NO: 1711300 - DNA, 15 bp, Homo sapiens
aaggctacgtaaatt

SEQ ID NO: 1711301 - DNA, 15 bp, Homo sapiens
aggctacgtaaattt

SEQ ID NO: 1711302 - DNA, 15 bp, Homo sapiens
ggctacgtaaatttg

SEQ ID NO: 1711303 - DNA, 15 bp, Homo sapiens
gctacgtaaatttgg

SEQ ID NO: 1711304 - DNA, 15 bp, Homo sapiens
ctacgtaaatttggt

SEQ ID NO: 1711305 - DNA, 15 bp, Homo sapiens
tacgtaaatttggtt

SEQ ID NO: 1711306 - DNA, 15 bp, Homo sapiens
acgtaaatttggttt

SEQ ID NO: 1711307 - DNA, 15 bp, Homo sapiens
cgtaaatttggtttc

SEQ ID NO: 1711308 - DNA, 15 bp, Homo sapiens
gtaaatttggtttca

SEQ ID NO: 1711309 - DNA, 15 bp, Homo sapiens
taaatttggtttcag

SEQ ID NO: 1711310 - DNA, 15 bp, Homo sapiens
aaatttggtttcagg

SEQ ID NO: 1711311 - DNA, 15 bp, Homo sapiens
aatttggtttcaggg

SEQ ID NO: 1711312 - DNA, 15 bp, Homo sapiens
atttggtttcagggc

SEQ ID NO: 1711313 - DNA, 15 bp, Homo sapiens
tttggtttcagggca

SEQ ID NO: 1711314 - DNA, 15 bp, Homo sapiens
ttggtttcagggcaa

SEQ ID NO: 1711315 - DNA, 15 bp, Homo sapiens
tggtttcagggcaat

SEQ ID NO: 1711316 - DNA, 15 bp, Homo sapiens
ggtttcagggcaatg

SEQ ID NO: 1711317 - DNA, 15 bp, Homo sapiens
gtttcagggcaatgc

SEQ ID NO: 1711318 - DNA, 15 bp, Homo sapiens
tttcagggcaatgct

SEQ ID NO: 1711319 - DNA, 15 bp, Homo sapiens
ttcagggcaatgctg

SEQ ID NO: 1711320 - DNA, 15 bp, Homo sapiens
tcagggcaatgctgg

SEQ ID NO: 1711321 - DNA, 15 bp, Homo sapiens
cagggcaatgctggg

SEQ ID NO: 1711322 - DNA, 15 bp, Homo sapiens
agggcaatgctgggg

SEQ ID NO: 1711323 - DNA, 15 bp, Homo sapiens
gggcaatgctggggc

SEQ ID NO: 1711324 - DNA, 15 bp, Homo sapiens
ggcaatgctggggca

SEQ ID NO: 1711325 - DNA, 15 bp, Homo sapiens
gcaatgctggggcaa

SEQ ID NO: 1711326 - DNA, 15 bp, Homo sapiens
caatgctggggcaag

SEQ ID NO: 1711327 - DNA, 15 bp, Homo sapiens
aatgctggggcaaga

SEQ ID NO: 1711328 - DNA, 15 bp, Homo sapiens
atgctggggcaagat

SEQ ID NO: 1711329 - DNA, 15 bp, Homo sapiens
tgctggggcaagata

SEQ ID NO: 1711330 - DNA, 15 bp, Homo sapiens
gctggggcaagatat

SEQ ID NO: 1711331 - DNA, 15 bp, Homo sapiens
ctggggcaagatatt

SEQ ID NO: 1711332 - DNA, 15 bp, Homo sapiens
tggggcaagatattg

SEQ ID NO: 1711333 - DNA, 15 bp, Homo sapiens
ggggcaagatattgc

SEQ ID NO: 1711334 - DNA, 15 bp, Homo sapiens
gggcaagatattgcc

SEQ ID NO: 1711335 - DNA, 15 bp, Homo sapiens
ggcaagatattgcct

SEQ ID NO: 1711336 - DNA, 15 bp, Homo sapiens
gcaagatattgcctg

SEQ ID NO: 1711337 - DNA, 15 bp, Homo sapiens
caagatattgcctgg

SEQ ID NO: 1711338 - DNA, 15 bp, Homo sapiens
aagatattgcctggt

SEQ ID NO: 1711339 - DNA, 15 bp, Homo sapiens
agatattgcctggtt

SEQ ID NO: 1711340 - DNA, 15 bp, Homo sapiens
gatattgcctggttt

SEQ ID NO: 1711341 - DNA, 15 bp, Homo sapiens
atattgcctggtttg

SEQ ID NO: 1711342 - DNA, 15 bp, Homo sapiens
tattgcctggtttga

SEQ ID NO: 1711343 - DNA, 15 bp, Homo sapiens
attgcctggtttgat

SEQ ID NO: 1711344 - DNA, 15 bp, Homo sapiens
ttgcctggtttgatg

SEQ ID NO: 1711345 - DNA, 15 bp, Homo sapiens
tgcctggtttgatga

SEQ ID NO: 1711346 - DNA, 15 bp, Homo sapiens
gcctggtttgatgac

SEQ ID NO: 1711347 - DNA, 15 bp, Homo sapiens
cctggtttgatgacc

SEQ ID NO: 1711348 - DNA, 15 bp, Homo sapiens
ctggtttgatgacct

SEQ ID NO: 1711349 - DNA, 15 bp, Homo sapiens
tggtttgatgacctc

SEQ ID NO: 1711350 - DNA, 15 bp, Homo sapiens
ggtttgatgacctca

SEQ ID NO: 1711351 - DNA, 15 bp, Homo sapiens
gtttgatgacctcag

SEQ ID NO: 1711352 - DNA, 15 bp, Homo sapiens
tttgatgacctcaga

SEQ ID NO: 1711353 - DNA, 15 bp, Homo sapiens
ttgatgacctcagaa

SEQ ID NO: 1711354 - DNA, 15 bp, Homo sapiens
tgatgacctcagaaa

SEQ ID NO: 1711355 - DNA, 15 bp, Homo sapiens
gatgacctcagaaat

SEQ ID NO: 1711356 - DNA, 15 bp, Homo sapiens
atgacctcagaaata

SEQ ID NO: 1711357 - DNA, 15 bp, Homo sapiens
tgacctcagaaatag

SEQ ID NO: 1711358 - DNA, 15 bp, Homo sapiens
gacctcagaaatagc

SEQ ID NO: 1711359 - DNA, 15 bp, Homo sapiens
acctcagaaatagcc

SEQ ID NO: 1711360 - DNA, 15 bp, Homo sapiens
cctcagaaatagccc

SEQ ID NO: 1711361 - DNA, 15 bp, Homo sapiens
ctcagaaatagccct

SEQ ID NO: 1711362 - DNA, 15 bp, Homo sapiens
tcagaaatagccctg

SEQ ID NO: 1711363 - DNA, 15 bp, Homo sapiens
cagaaatagccctgg

SEQ ID NO: 1711364 - DNA, 15 bp, Homo sapiens
agaaatagccctgga

SEQ ID NO: 1711365 - DNA, 15 bp, Homo sapiens
gaaatagccctggag

SEQ ID NO: 1711366 - DNA, 15 bp, Homo sapiens
aaatagccctggagc

SEQ ID NO: 1711367 - DNA, 15 bp, Homo sapiens
aatagccctggagca

SEQ ID NO: 1711368 - DNA, 15 bp, Homo sapiens
atagccctggagcat

SEQ ID NO: 1711369 - DNA, 15 bp, Homo sapiens
tagccctggagcatt

SEQ ID NO: 1711370 - DNA, 15 bp, Homo sapiens
agccctggagcattg

SEQ ID NO: 1711371 - DNA, 15 bp, Homo sapiens
gccctggagcattga

SEQ ID NO: 1711372 - DNA, 15 bp, Homo sapiens
ccctggagcattgac

SEQ ID NO: 1711373 - DNA, 15 bp, Homo sapiens
cctggagcattgaca

SEQ ID NO: 1711374 - DNA, 15 bp, Homo sapiens
ctggagcattgacaa

SEQ ID NO: 1711375 - DNA, 15 bp, Homo sapiens
tggagcattgacaac

SEQ ID NO: 1711376 - DNA, 15 bp, Homo sapiens
ggagcattgacaaca

SEQ ID NO: 1711377 - DNA, 15 bp, Homo sapiens
gagcattgacaacaa

SEQ ID NO: 1711378 - DNA, 15 bp, Homo sapiens
agcattgacaacaag

SEQ ID NO: 1711379 - DNA, 15 bp, Homo sapiens
gcattgacaacaaga

SEQ ID NO: 1711380 - DNA, 15 bp, Homo sapiens
cattgacaacaagac

SEQ ID NO: 1711381 - DNA, 15 bp, Homo sapiens
attgacaacaagact

SEQ ID NO: 1711382 - DNA, 15 bp, Homo sapiens
ttgacaacaagactt

SEQ ID NO: 1711383 - DNA, 15 bp, Homo sapiens
tgacaacaagacttg

SEQ ID NO: 1711384 - DNA, 15 bp, Homo sapiens
gacaacaagacttgc

SEQ ID NO: 1711385 - DNA, 15 bp, Homo sapiens
acaacaagacttgct

SEQ ID NO: 1711386 - DNA, 15 bp, Homo sapiens
caacaagacttgcta

SEQ ID NO: 1711387 - DNA, 15 bp, Homo sapiens
aacaagacttgctac

SEQ ID NO: 1711388 - DNA, 15 bp, Homo sapiens
acaagacttgctaca

SEQ ID NO: 1711389 - DNA, 15 bp, Homo sapiens
caagacttgctacag

SEQ ID NO: 1711390 - DNA, 15 bp, Homo sapiens
aagacttgctacaga

SEQ ID NO: 1711391 - DNA, 15 bp, Homo sapiens
agacttgctacagat

SEQ ID NO: 1711392 - DNA, 15 bp, Homo sapiens
gacttgctacagatg

SEQ ID NO: 1711393 - DNA, 15 bp, Homo sapiens
acttgctacagatgc

SEQ ID NO: 1711394 - DNA, 15 bp, Homo sapiens
cttgctacagatgct

SEQ ID NO: 1711395 - DNA, 15 bp, Homo sapiens
ttgctacagatgctt

SEQ ID NO: 1711396 - DNA, 15 bp, Homo sapiens
tgctacagatgcttc

SEQ ID NO: 1711397 - DNA, 15 bp, Homo sapiens
gctacagatgcttcc

SEQ ID NO: 1711398 - DNA, 15 bp, Homo sapiens
ctacagatgcttccc

SEQ ID NO: 1711399 - DNA, 15 bp, Homo sapiens
tacagatgcttccca

SEQ ID NO: 1711400 - DNA, 15 bp, Homo sapiens
acagatgcttcccaa

SEQ ID NO: 1711401 - DNA, 15 bp, Homo sapiens
cagatgcttcccaag

SEQ ID NO: 1711402 - DNA, 15 bp, Homo sapiens
agatgcttcccaagt

SEQ ID NO: 1711403 - DNA, 15 bp, Homo sapiens
gatgcttcccaagtt

SEQ ID NO: 1711404 - DNA, 15 bp, Homo sapiens
atgcttcccaagttc

SEQ ID NO: 1711405 - DNA, 15 bp, Homo sapiens
tgcttcccaagttca

SEQ ID NO: 1711406 - DNA, 15 bp, Homo sapiens
gcttcccaagttcaa

SEQ ID NO: 1711407 - DNA, 15 bp, Homo sapiens
cttcccaagttcaag

SEQ ID NO: 1711408 - DNA, 15 bp, Homo sapiens
ttcccaagttcaagg

SEQ ID NO: 1711409 - DNA, 15 bp, Homo sapiens
tcccaagttcaaggg

SEQ ID NO: 1711410 - DNA, 15 bp, Homo sapiens
cccaagttcaagggg

SEQ ID NO: 1711411 - DNA, 15 bp, Homo sapiens
ccaagttcaaggggt

SEQ ID NO: 1711412 - DNA, 15 bp, Homo sapiens
caagttcaaggggtg

SEQ ID NO: 1711413 - DNA, 15 bp, Homo sapiens
aagttcaaggggtga

SEQ ID NO: 1711414 - DNA, 15 bp, Homo sapiens
agttcaaggggtgag

SEQ ID NO: 1711415 - DNA, 15 bp, Homo sapiens
gttcaaggggtgagc

SEQ ID NO: 1711416 - DNA, 15 bp, Homo sapiens
ttcaaggggtgagct

SEQ ID NO: 1711417 - DNA, 15 bp, Homo sapiens
tcaaggggtgagcta

SEQ ID NO: 1711418 - DNA, 15 bp, Homo sapiens
caaggggtgagctat

SEQ ID NO: 1711419 - DNA, 15 bp, Homo sapiens
aaggggtgagctatg

SEQ ID NO: 1711420 - DNA, 15 bp, Homo sapiens
aggggtgagctatgg

SEQ ID NO: 1711421 - DNA, 15 bp, Homo sapiens
ggggtgagctatggg

SEQ ID NO: 1711422 - DNA, 15 bp, Homo sapiens
gggtgagctatggga

SEQ ID NO: 1711423 - DNA, 15 bp, Homo sapiens
ggtgagctatgggag

SEQ ID NO: 1711424 - DNA, 15 bp, Homo sapiens
gtgagctatgggagg

SEQ ID NO: 1711425 - DNA, 15 bp, Homo sapiens
tgagctatgggaggg

SEQ ID NO: 1711426 - DNA, 15 bp, Homo sapiens
gagctatgggagggg

SEQ ID NO: 1711427 - DNA, 15 bp, Homo sapiens
agctatgggagggga

SEQ ID NO: 1711428 - DNA, 15 bp, Homo sapiens
gctatgggaggggaa

SEQ ID NO: 1711429 - DNA, 15 bp, Homo sapiens
ctatgggaggggaaa

SEQ ID NO: 1711430 - DNA, 15 bp, Homo sapiens
tatgggaggggaaat

SEQ ID NO: 1711431 - DNA, 15 bp, Homo sapiens
atgggaggggaaata

SEQ ID NO: 1711432 - DNA, 15 bp, Homo sapiens
tgggaggggaaatag

SEQ ID NO: 1711433 - DNA, 15 bp, Homo sapiens
gggaggggaaataga

SEQ ID NO: 1711434 - DNA, 15 bp, Homo sapiens
ggaggggaaatagaa

SEQ ID NO: 1711435 - DNA, 15 bp, Homo sapiens
gaggggaaatagaag

SEQ ID NO: 1711436 - DNA, 15 bp, Homo sapiens
aggggaaatagaagt

SEQ ID NO: 1711437 - DNA, 15 bp, Homo sapiens
ggggaaatagaagta

SEQ ID NO: 1711438 - DNA, 15 bp, Homo sapiens
gggaaatagaagtat

SEQ ID NO: 1711439 - DNA, 15 bp, Homo sapiens
ggaaatagaagtata

SEQ ID NO: 1711440 - DNA, 15 bp, Homo sapiens
gaaatagaagtatat

SEQ ID NO: 1711441 - DNA, 15 bp, Homo sapiens
aaatagaagtatatt

SEQ ID NO: 1711442 - DNA, 15 bp, Homo sapiens
aatagaagtatatta

SEQ ID NO: 1711443 - DNA, 15 bp, Homo sapiens
atagaagtatattaa

SEQ ID NO: 1711444 - DNA, 15 bp, Homo sapiens
tagaagtatattaac

SEQ ID NO: 1711445 - DNA, 15 bp, Homo sapiens
agaagtatattaact

SEQ ID NO: 1711446 - DNA, 15 bp, Homo sapiens
gaagtatattaactg

SEQ ID NO: 1711447 - DNA, 15 bp, Homo sapiens
aagtatattaactgc

SEQ ID NO: 1711448 - DNA, 15 bp, Homo sapiens
agtatattaactgca

SEQ ID NO: 1711449 - DNA, 15 bp, Homo sapiens
gtatattaactgcat

SEQ ID NO: 1711450 - DNA, 15 bp, Homo sapiens
tatattaactgcatt

SEQ ID NO: 1711451 - DNA, 15 bp, Homo sapiens
atattaactgcattg

SEQ ID NO: 1711452 - DNA, 15 bp, Homo sapiens
tattaactgcattgg

SEQ ID NO: 1711453 - DNA, 15 bp, Homo sapiens
attaactgcattggc

SEQ ID NO: 1711454 - DNA, 15 bp, Homo sapiens
ttaactgcattggca

SEQ ID NO: 1711455 - DNA, 15 bp, Homo sapiens
taactgcattggcat

SEQ ID NO: 1711456 - DNA, 15 bp, Homo sapiens
aactgcattggcatt

SEQ ID NO: 1711457 - DNA, 15 bp, Homo sapiens
actgcattggcattc

SEQ ID NO: 1711458 - DNA, 15 bp, Homo sapiens
ctgcattggcattct

SEQ ID NO: 1711459 - DNA, 15 bp, Homo sapiens
tgcattggcattctt

SEQ ID NO: 1711460 - DNA, 15 bp, Homo sapiens
gcattggcattcttt

SEQ ID NO: 1711461 - DNA, 15 bp, Homo sapiens
cattggcattctttc

SEQ ID NO: 1711462 - DNA, 15 bp, Homo sapiens
attggcattctttca

SEQ ID NO: 1711463 - DNA, 15 bp, Homo sapiens
ttggcattctttcat

SEQ ID NO: 1711464 - DNA, 15 bp, Homo sapiens
tggcattctttcatt

SEQ ID NO: 1711465 - DNA, 15 bp, Homo sapiens
ggcattctttcatta

SEQ ID NO: 1711466 - DNA, 15 bp, Homo sapiens
gcattctttcattag

SEQ ID NO: 1711467 - DNA, 15 bp, Homo sapiens
cattctttcattaga

SEQ ID NO: 1711468 - DNA, 15 bp, Homo sapiens
attctttcattagag

SEQ ID NO: 1711469 - DNA, 15 bp, Homo sapiens
ttctttcattagagc

SEQ ID NO: 1711470 - DNA, 15 bp, Homo sapiens
tctttcattagagca

SEQ ID NO: 1711471 - DNA, 15 bp, Homo sapiens
ctttcattagagcat

SEQ ID NO: 1711472 - DNA, 15 bp, Homo sapiens
tttcattagagcatt

SEQ ID NO: 1711473 - DNA, 15 bp, Homo sapiens
ttcattagagcattc

SEQ ID NO: 1711474 - DNA, 15 bp, Homo sapiens
tcattagagcattct

SEQ ID NO: 1711475 - DNA, 15 bp, Homo sapiens
cattagagcattctg

SEQ ID NO: 1711476 - DNA, 15 bp, Homo sapiens
attagagcattctga

SEQ ID NO: 1711477 - DNA, 15 bp, Homo sapiens
ttagagcattctgac

SEQ ID NO: 1711478 - DNA, 15 bp, Homo sapiens
tagagcattctgaca

SEQ ID NO: 1711479 - DNA, 15 bp, Homo sapiens
agagcattctgacaa

SEQ ID NO: 1711480 - DNA, 15 bp, Homo sapiens
gagcattctgacaat

SEQ ID NO: 1711481 - DNA, 15 bp, Homo sapiens
agcattctgacaatc

SEQ ID NO: 1711482 - DNA, 15 bp, Homo sapiens
gcattctgacaatca

SEQ ID NO: 1711483 - DNA, 15 bp, Homo sapiens
cattctgacaatcac

SEQ ID NO: 1711484 - DNA, 15 bp, Homo sapiens
attctgacaatcacc

SEQ ID NO: 1711485 - DNA, 15 bp, Homo sapiens
ttctgacaatcacct

SEQ ID NO: 1711486 - DNA, 15 bp, Homo sapiens
tctgacaatcacctg

SEQ ID NO: 1711487 - DNA, 15 bp, Homo sapiens
ctgacaatcacctgc

SEQ ID NO: 1711488 - DNA, 15 bp, Homo sapiens
tgacaatcacctgca

SEQ ID NO: 1711489 - DNA, 15 bp, Homo sapiens
gacaatcacctgcat

SEQ ID NO: 1711490 - DNA, 15 bp, Homo sapiens
acaatcacctgcatg

SEQ ID NO: 1711491 - DNA, 15 bp, Homo sapiens
caatcacctgcatgt

SEQ ID NO: 1711492 - DNA, 15 bp, Homo sapiens
aatcacctgcatgtt

SEQ ID NO: 1711493 - DNA, 15 bp, Homo sapiens
atcacctgcatgttt

SEQ ID NO: 1711494 - DNA, 15 bp, Homo sapiens
tcacctgcatgtttt

SEQ ID NO: 1711495 - DNA, 15 bp, Homo sapiens
cacctgcatgttttc

SEQ ID NO: 1711496 - DNA, 15 bp, Homo sapiens
acctgcatgttttct

SEQ ID NO: 1711497 - DNA, 15 bp, Homo sapiens
cctgcatgttttcta

SEQ ID NO: 1711498 - DNA, 15 bp, Homo sapiens
ctgcatgttttctat

SEQ ID NO: 1711499 - DNA, 15 bp, Homo sapiens
tgcatgttttctatg

SEQ ID NO: 1711500 - DNA, 15 bp, Homo sapiens
gcatgttttctatgg

SEQ ID NO: 1711501 - DNA, 15 bp, Homo sapiens
catgttttctatgga

SEQ ID NO: 1711502 - DNA, 15 bp, Homo sapiens
atgttttctatggaa

SEQ ID NO: 1711503 - DNA, 15 bp, Homo sapiens
tgttttctatggaat

SEQ ID NO: 1711504 - DNA, 15 bp, Homo sapiens
gttttctatggaata

SEQ ID NO: 1711505 - DNA, 15 bp, Homo sapiens
ttttctatggaatag

SEQ ID NO: 1711506 - DNA, 15 bp, Homo sapiens
tttctatggaatagg

SEQ ID NO: 1711507 - DNA, 15 bp, Homo sapiens
ttctatggaataggg

SEQ ID NO: 1711508 - DNA, 15 bp, Homo sapiens
tctatggaataggga

SEQ ID NO: 1711509 - DNA, 15 bp, Homo sapiens
ctatggaatagggac

SEQ ID NO: 1711510 - DNA, 15 bp, Homo sapiens
tatggaatagggacc

SEQ ID NO: 1711511 - DNA, 15 bp, Homo sapiens
atggaatagggacca

SEQ ID NO: 1711512 - DNA, 15 bp, Homo sapiens
tggaatagggaccag

SEQ ID NO: 1711513 - DNA, 15 bp, Homo sapiens
ggaatagggaccagt

SEQ ID NO: 1711514 - DNA, 15 bp, Homo sapiens
gaatagggaccagtg

SEQ ID NO: 1711515 - DNA, 15 bp, Homo sapiens
aatagggaccagtgg

SEQ ID NO: 1711516 - DNA, 15 bp, Homo sapiens
atagggaccagtggg

SEQ ID NO: 1711517 - DNA, 15 bp, Homo sapiens
tagggaccagtggga

SEQ ID NO: 1711518 - DNA, 15 bp, Homo sapiens
agggaccagtgggat

SEQ ID NO: 1711519 - DNA, 15 bp, Homo sapiens
gggaccagtgggatt

SEQ ID NO: 1711520 - DNA, 15 bp, Homo sapiens
ggaccagtgggattg

SEQ ID NO: 1711521 - DNA, 15 bp, Homo sapiens
gaccagtgggattgg

SEQ ID NO: 1711522 - DNA, 15 bp, Homo sapiens
accagtgggattggg

SEQ ID NO: 1711523 - DNA, 15 bp, Homo sapiens
ccagtgggattggga

SEQ ID NO: 1711524 - DNA, 15 bp, Homo sapiens
cagtgggattgggat

SEQ ID NO: 1711525 - DNA, 15 bp, Homo sapiens
agtgggattgggata

SEQ ID NO: 1711526 - DNA, 15 bp, Homo sapiens
gtgggattgggatat

SEQ ID NO: 1711527 - DNA, 15 bp, Homo sapiens
tgggattgggatatc

SEQ ID NO: 1711528 - DNA, 15 bp, Homo sapiens
gggattgggatatcc

SEQ ID NO: 1711529 - DNA, 15 bp, Homo sapiens
ggattgggatatcct

SEQ ID NO: 1711530 - DNA, 15 bp, Homo sapiens
gattgggatatccta

SEQ ID NO: 1711531 - DNA, 15 bp, Homo sapiens
attgggatatcctaa

SEQ ID NO: 1711532 - DNA, 15 bp, Homo sapiens
ttgggatatcctaaa

SEQ ID NO: 1711533 - DNA, 15 bp, Homo sapiens
tgggatatcctaaag

SEQ ID NO: 1711534 - DNA, 15 bp, Homo sapiens
gggatatcctaaagc

SEQ ID NO: 1711535 - DNA, 15 bp, Homo sapiens
ggatatcctaaagcc

SEQ ID NO: 1711536 - DNA, 15 bp, Homo sapiens
gatatcctaaagcca

SEQ ID NO: 1711537 - DNA, 15 bp, Homo sapiens
atatcctaaagccac

SEQ ID NO: 1711538 - DNA, 15 bp, Homo sapiens
tatcctaaagccaca

SEQ ID NO: 1711539 - DNA, 15 bp, Homo sapiens
atcctaaagccacat

SEQ ID NO: 1711540 - DNA, 15 bp, Homo sapiens
tcctaaagccacatt

SEQ ID NO: 1711541 - DNA, 15 bp, Homo sapiens
cctaaagccacattt

SEQ ID NO: 1711542 - DNA, 15 bp, Homo sapiens
ctaaagccacatttt

SEQ ID NO: 1711543 - DNA, 15 bp, Homo sapiens
taaagccacattttc

SEQ ID NO: 1711544 - DNA, 15 bp, Homo sapiens
aaagccacattttcc

SEQ ID NO: 1711545 - DNA, 15 bp, Homo sapiens
aagccacattttcca

SEQ ID NO: 1711546 - DNA, 15 bp, Homo sapiens
agccacattttccac

SEQ ID NO: 1711547 - DNA, 15 bp, Homo sapiens
gccacattttccact

SEQ ID NO: 1711548 - DNA, 15 bp, Homo sapiens
ccacattttccactg

SEQ ID NO: 1711549 - DNA, 15 bp, Homo sapiens
cacattttccactgc

SEQ ID NO: 1711550 - DNA, 15 bp, Homo sapiens
acattttccactgct

SEQ ID NO: 1711551 - DNA, 15 bp, Homo sapiens
cattttccactgctt

SEQ ID NO: 1711552 - DNA, 15 bp, Homo sapiens
attttccactgcttc

SEQ ID NO: 1711553 - DNA, 15 bp, Homo sapiens
ttttccactgcttct

SEQ ID NO: 1711554 - DNA, 15 bp, Homo sapiens
tttccactgcttcta

SEQ ID NO: 1711555 - DNA, 15 bp, Homo sapiens
ttccactgcttctaa

SEQ ID NO: 1711556 - DNA, 15 bp, Homo sapiens
tccactgcttctaac

SEQ ID NO: 1711557 - DNA, 15 bp, Homo sapiens
ccactgcttctaaca

SEQ ID NO: 1711558 - DNA, 15 bp, Homo sapiens
cactgcttctaacac

SEQ ID NO: 1711559 - DNA, 15 bp, Homo sapiens
actgcttctaacact

SEQ ID NO: 1711560 - DNA, 15 bp, Homo sapiens
ctgcttctaacactg

SEQ ID NO: 1711561 - DNA, 15 bp, Homo sapiens
tgcttctaacactga

SEQ ID NO: 1711562 - DNA, 15 bp, Homo sapiens
gcttctaacactgac

SEQ ID NO: 1711563 - DNA, 15 bp, Homo sapiens
cttctaacactgaca

SEQ ID NO: 1711564 - DNA, 15 bp, Homo sapiens
ttctaacactgacaa

SEQ ID NO: 1711565 - DNA, 15 bp, Homo sapiens
tctaacactgacaaa

SEQ ID NO: 1711566 - DNA, 15 bp, Homo sapiens
ctaacactgacaaac

SEQ ID NO: 1711567 - DNA, 15 bp, Homo sapiens
taacactgacaaaca

SEQ ID NO: 1711568 - DNA, 15 bp, Homo sapiens
aacactgacaaacag

SEQ ID NO: 1711569 - DNA, 15 bp, Homo sapiens
acactgacaaacagc

SEQ ID NO: 1711570 - DNA, 15 bp, Homo sapiens
cactgacaaacagca

SEQ ID NO: 1711571 - DNA, 15 bp, Homo sapiens
actgacaaacagcag

SEQ ID NO: 1711572 - DNA, 15 bp, Homo sapiens
ctgacaaacagcagc

SEQ ID NO: 1711573 - DNA, 15 bp, Homo sapiens
tgacaaacagcagct

SEQ ID NO: 1711574 - DNA, 15 bp, Homo sapiens
gacaaacagcagcta

SEQ ID NO: 1711575 - DNA, 15 bp, Homo sapiens
acaaacagcagctaa

SEQ ID NO: 1711576 - DNA, 15 bp, Homo sapiens
caaacagcagctaaa

SEQ ID NO: 1711577 - DNA, 15 bp, Homo sapiens
aaacagcagctaaag

SEQ ID NO: 1711578 - DNA, 15 bp, Homo sapiens
aacagcagctaaagc

SEQ ID NO: 1711579 - DNA, 15 bp, Homo sapiens
acagcagctaaagca

SEQ ID NO: 1711580 - DNA, 15 bp, Homo sapiens
cagcagctaaagcac

SEQ ID NO: 1711581 - DNA, 15 bp, Homo sapiens
agcagctaaagcaca

SEQ ID NO: 1711582 - DNA, 15 bp, Homo sapiens
gcagctaaagcacag

SEQ ID NO: 1711583 - DNA, 15 bp, Homo sapiens
cagctaaagcacagt

SEQ ID NO: 1711584 - DNA, 15 bp, Homo sapiens
agctaaagcacagtg

SEQ ID NO: 1711585 - DNA, 15 bp, Homo sapiens
gctaaagcacagtgt

SEQ ID NO: 1711586 - DNA, 15 bp, Homo sapiens
ctaaagcacagtgtc

SEQ ID NO: 1711587 - DNA, 15 bp, Homo sapiens
taaagcacagtgtct

SEQ ID NO: 1711588 - DNA, 15 bp, Homo sapiens
aaagcacagtgtctc

SEQ ID NO: 1711589 - DNA, 15 bp, Homo sapiens
aagcacagtgtctcc

SEQ ID NO: 1711590 - DNA, 15 bp, Homo sapiens
agcacagtgtctccc

SEQ ID NO: 1711591 - DNA, 15 bp, Homo sapiens
gcacagtgtctccca

SEQ ID NO: 1711592 - DNA, 15 bp, Homo sapiens
cacagtgtctcccag

SEQ ID NO: 1711593 - DNA, 15 bp, Homo sapiens
acagtgtctcccagg

SEQ ID NO: 1711594 - DNA, 15 bp, Homo sapiens
cagtgtctcccaggc

SEQ ID NO: 1711595 - DNA, 15 bp, Homo sapiens
agtgtctcccaggca

SEQ ID NO: 1711596 - DNA, 15 bp, Homo sapiens
gtgtctcccaggcag

SEQ ID NO: 1711597 - DNA, 15 bp, Homo sapiens
tgtctcccaggcagt

SEQ ID NO: 1711598 - DNA, 15 bp, Homo sapiens
gtctcccaggcagtg

SEQ ID NO: 1711599 - DNA, 15 bp, Homo sapiens
tctcccaggcagtgc

SEQ ID NO: 1711600 - DNA, 15 bp, Homo sapiens
ctcccaggcagtgcc

SEQ ID NO: 1711601 - DNA, 15 bp, Homo sapiens
tcccaggcagtgccc

SEQ ID NO: 1711602 - DNA, 15 bp, Homo sapiens
cccaggcagtgccca

SEQ ID NO: 1711603 - DNA, 15 bp, Homo sapiens
ccaggcagtgcccag

SEQ ID NO: 1711604 - DNA, 15 bp, Homo sapiens
caggcagtgcccaga

SEQ ID NO: 1711605 - DNA, 15 bp, Homo sapiens
aggcagtgcccagaa

SEQ ID NO: 1711606 - DNA, 15 bp, Homo sapiens
ggcagtgcccagaat

SEQ ID NO: 1711607 - DNA, 15 bp, Homo sapiens
gcagtgcccagaatc

SEQ ID NO: 1711608 - DNA, 15 bp, Homo sapiens
cagtgcccagaatca

SEQ ID NO: 1711609 - DNA, 15 bp, Homo sapiens
agtgcccagaatcaa

SEQ ID NO: 1711610 - DNA, 15 bp, Homo sapiens
gtgcccagaatcaat

SEQ ID NO: 1711611 - DNA, 15 bp, Homo sapiens
tgcccagaatcaata

SEQ ID NO: 1711612 - DNA, 15 bp, Homo sapiens
gcccagaatcaatat

SEQ ID NO: 1711613 - DNA, 15 bp, Homo sapiens
cccagaatcaatata

SEQ ID NO: 1711614 - DNA, 15 bp, Homo sapiens
ccagaatcaatatat

SEQ ID NO: 1711615 - DNA, 15 bp, Homo sapiens
cagaatcaatatatg

SEQ ID NO: 1711616 - DNA, 15 bp, Homo sapiens
agaatcaatatatgg

SEQ ID NO: 1711617 - DNA, 15 bp, Homo sapiens
gaatcaatatatggc

SEQ ID NO: 1711618 - DNA, 15 bp, Homo sapiens
aatcaatatatggca

SEQ ID NO: 1711619 - DNA, 15 bp, Homo sapiens
atcaatatatggcat

SEQ ID NO: 1711620 - DNA, 15 bp, Homo sapiens
tcaatatatggcatg

SEQ ID NO: 1711621 - DNA, 15 bp, Homo sapiens
caatatatggcatgc

SEQ ID NO: 1711622 - DNA, 15 bp, Homo sapiens
aatatatggcatgca

SEQ ID NO: 1711623 - DNA, 15 bp, Homo sapiens
atatatggcatgcac

SEQ ID NO: 1711624 - DNA, 15 bp, Homo sapiens
tatatggcatgcacc

SEQ ID NO: 1711625 - DNA, 15 bp, Homo sapiens
atatggcatgcacca

SEQ ID NO: 1711626 - DNA, 15 bp, Homo sapiens
tatggcatgcaccaa

SEQ ID NO: 1711627 - DNA, 15 bp, Homo sapiens
atggcatgcaccaaa

SEQ ID NO: 1711628 - DNA, 15 bp, Homo sapiens
tggcatgcaccaaaa

SEQ ID NO: 1711629 - DNA, 15 bp, Homo sapiens
ggcatgcaccaaaat

SEQ ID NO: 1711630 - DNA, 15 bp, Homo sapiens
gcatgcaccaaaatc

SEQ ID NO: 1711631 - DNA, 15 bp, Homo sapiens
catgcaccaaaatct

SEQ ID NO: 1711632 - DNA, 15 bp, Homo sapiens
atgcaccaaaatctg

SEQ ID NO: 1711633 - DNA, 15 bp, Homo sapiens
tgcaccaaaatctgt

SEQ ID NO: 1711634 - DNA, 15 bp, Homo sapiens
gcaccaaaatctgtc

SEQ ID NO: 1711635 - DNA, 15 bp, Homo sapiens
caccaaaatctgtca

SEQ ID NO: 1711636 - DNA, 15 bp, Homo sapiens
accaaaatctgtcag

SEQ ID NO: 1711637 - DNA, 15 bp, Homo sapiens
ccaaaatctgtcagg

SEQ ID NO: 1711638 - DNA, 15 bp, Homo sapiens
caaaatctgtcaggg

SEQ ID NO: 1711639 - DNA, 15 bp, Homo sapiens
aaaatctgtcagggt

SEQ ID NO: 1711640 - DNA, 15 bp, Homo sapiens
aaatctgtcagggtt

SEQ ID NO: 1711641 - DNA, 15 bp, Homo sapiens
aatctgtcagggttt

SEQ ID NO: 1711642 - DNA, 15 bp, Homo sapiens
atctgtcagggtttt

SEQ ID NO: 1711643 - DNA, 15 bp, Homo sapiens
tctgtcagggttttg

SEQ ID NO: 1711644 - DNA, 15 bp, Homo sapiens
ctgtcagggttttgg

SEQ ID NO: 1711645 - DNA, 15 bp, Homo sapiens
tgtcagggttttgga

SEQ ID NO: 1711646 - DNA, 15 bp, Homo sapiens
gtcagggttttggat

SEQ ID NO: 1711647 - DNA, 15 bp, Homo sapiens
tcagggttttggatt

SEQ ID NO: 1711648 - DNA, 15 bp, Homo sapiens
cagggttttggattt

SEQ ID NO: 1711649 - DNA, 15 bp, Homo sapiens
agggttttggatttc

SEQ ID NO: 1711650 - DNA, 15 bp, Homo sapiens
gggttttggatttcc

SEQ ID NO: 1711651 - DNA, 15 bp, Homo sapiens
ggttttggatttcct

SEQ ID NO: 1711652 - DNA, 15 bp, Homo sapiens
gttttggatttcctc

SEQ ID NO: 1711653 - DNA, 15 bp, Homo sapiens
ttttggatttcctct

SEQ ID NO: 1711654 - DNA, 15 bp, Homo sapiens
tttggatttcctctg

SEQ ID NO: 1711655 - DNA, 15 bp, Homo sapiens
ttggatttcctctga

SEQ ID NO: 1711656 - DNA, 15 bp, Homo sapiens
tggatttcctctgag

SEQ ID NO: 1711657 - DNA, 15 bp, Homo sapiens
ggatttcctctgagt

SEQ ID NO: 1711658 - DNA, 15 bp, Homo sapiens
gatttcctctgagtc

SEQ ID NO: 1711659 - DNA, 15 bp, Homo sapiens
atttcctctgagtct

SEQ ID NO: 1711660 - DNA, 15 bp, Homo sapiens
tttcctctgagtcta

SEQ ID NO: 1711661 - DNA, 15 bp, Homo sapiens
ttcctctgagtctaa

SEQ ID NO: 1711662 - DNA, 15 bp, Homo sapiens
tcctctgagtctaac

SEQ ID NO: 1711663 - DNA, 15 bp, Homo sapiens
cctctgagtctaact

SEQ ID NO: 1711664 - DNA, 15 bp, Homo sapiens
ctctgagtctaactt

SEQ ID NO: 1711665 - DNA, 15 bp, Homo sapiens
tctgagtctaactta

SEQ ID NO: 1711666 - DNA, 15 bp, Homo sapiens
ctgagtctaacttag

SEQ ID NO: 1711667 - DNA, 15 bp, Homo sapiens
tgagtctaacttagg

SEQ ID NO: 1711668 - DNA, 15 bp, Homo sapiens
gagtctaacttagga

SEQ ID NO: 1711669 - DNA, 15 bp, Homo sapiens
agtctaacttaggaa

SEQ ID NO: 1711670 - DNA, 15 bp, Homo sapiens
gtctaacttaggaac

SEQ ID NO: 1711671 - DNA, 15 bp, Homo sapiens
tctaacttaggaaca

SEQ ID NO: 1711672 - DNA, 15 bp, Homo sapiens
ctaacttaggaacat

SEQ ID NO: 1711673 - DNA, 15 bp, Homo sapiens
taacttaggaacatt

SEQ ID NO: 1711674 - DNA, 15 bp, Homo sapiens
aacttaggaacattt

SEQ ID NO: 1711675 - DNA, 15 bp, Homo sapiens
acttaggaacatttc

SEQ ID NO: 1711676 - DNA, 15 bp, Homo sapiens
cttaggaacatttct

SEQ ID NO: 1711677 - DNA, 15 bp, Homo sapiens
ttaggaacatttctg

SEQ ID NO: 1711678 - DNA, 15 bp, Homo sapiens
taggaacatttctga

SEQ ID NO: 1711679 - DNA, 15 bp, Homo sapiens
aggaacatttctgag

SEQ ID NO: 1711680 - DNA, 15 bp, Homo sapiens
ggaacatttctgagt

SEQ ID NO: 1711681 - DNA, 15 bp, Homo sapiens
gaacatttctgagtc

SEQ ID NO: 1711682 - DNA, 15 bp, Homo sapiens
aacatttctgagtct

SEQ ID NO: 1711683 - DNA, 15 bp, Homo sapiens
acatttctgagtctg

SEQ ID NO: 1711684 - DNA, 15 bp, Homo sapiens
catttctgagtctgt

SEQ ID NO: 1711685 - DNA, 15 bp, Homo sapiens
atttctgagtctgtt

SEQ ID NO: 1711686 - DNA, 15 bp, Homo sapiens
tttctgagtctgttt

SEQ ID NO: 1711687 - DNA, 15 bp, Homo sapiens
ttctgagtctgtttt

SEQ ID NO: 1711688 - DNA, 15 bp, Homo sapiens
tctgagtctgttttc

SEQ ID NO: 1711689 - DNA, 15 bp, Homo sapiens
ctgagtctgttttca

SEQ ID NO: 1711690 - DNA, 15 bp, Homo sapiens
tgagtctgttttcag

SEQ ID NO: 1711691 - DNA, 15 bp, Homo sapiens
gagtctgttttcagg

SEQ ID NO: 1711692 - DNA, 15 bp, Homo sapiens
agtctgttttcaggc

SEQ ID NO: 1711693 - DNA, 15 bp, Homo sapiens
gtctgttttcaggcc

SEQ ID NO: 1711694 - DNA, 15 bp, Homo sapiens
tctgttttcaggccc

SEQ ID NO: 1711695 - DNA, 15 bp, Homo sapiens
ctgttttcaggccca

SEQ ID NO: 1711696 - DNA, 15 bp, Homo sapiens
tgttttcaggcccag

SEQ ID NO: 1711697 - DNA, 15 bp, Homo sapiens
gttttcaggcccaga

SEQ ID NO: 1711698 - DNA, 15 bp, Homo sapiens
ttttcaggcccagag

SEQ ID NO: 1711699 - DNA, 15 bp, Homo sapiens
tttcaggcccagaga

SEQ ID NO: 1711700 - DNA, 15 bp, Homo sapiens
ttcaggcccagagac

SEQ ID NO: 1711701 - DNA, 15 bp, Homo sapiens
tcaggcccagagact

SEQ ID NO: 1711702 - DNA, 15 bp, Homo sapiens
caggcccagagactc

SEQ ID NO: 1711703 - DNA, 15 bp, Homo sapiens
aggcccagagactca

SEQ ID NO: 1711704 - DNA, 15 bp, Homo sapiens
ggcccagagactcag

SEQ ID NO: 1711705 - DNA, 15 bp, Homo sapiens
gcccagagactcagc

SEQ ID NO: 1711706 - DNA, 15 bp, Homo sapiens
cccagagactcagct

SEQ ID NO: 1711707 - DNA, 15 bp, Homo sapiens
ccagagactcagctt

SEQ ID NO: 1711708 - DNA, 15 bp, Homo sapiens
cagagactcagcttc

SEQ ID NO: 1711709 - DNA, 15 bp, Homo sapiens
agagactcagcttca

SEQ ID NO: 1711710 - DNA, 15 bp, Homo sapiens
gagactcagcttcaa

SEQ ID NO: 1711711 - DNA, 15 bp, Homo sapiens
agactcagcttcaac

SEQ ID NO: 1711712 - DNA, 15 bp, Homo sapiens
gactcagcttcaaca

SEQ ID NO: 1711713 - DNA, 15 bp, Homo sapiens
actcagcttcaacaa

SEQ ID NO: 1711714 - DNA, 15 bp, Homo sapiens
ctcagcttcaacaag

SEQ ID NO: 1711715 - DNA, 15 bp, Homo sapiens
tcagcttcaacaaga

SEQ ID NO: 1711716 - DNA, 15 bp, Homo sapiens
cagcttcaacaagat

SEQ ID NO: 1711717 - DNA, 15 bp, Homo sapiens
agcttcaacaagatt

SEQ ID NO: 1711718 - DNA, 15 bp, Homo sapiens
gcttcaacaagattc

SEQ ID NO: 1711719 - DNA, 15 bp, Homo sapiens
cttcaacaagattca

SEQ ID NO: 1711720 - DNA, 15 bp, Homo sapiens
ttcaacaagattcaa

SEQ ID NO: 1711721 - DNA, 15 bp, Homo sapiens
tcaacaagattcaat

SEQ ID NO: 1711722 - DNA, 15 bp, Homo sapiens
caacaagattcaata

SEQ ID NO: 1711723 - DNA, 15 bp, Homo sapiens
aacaagattcaatac

SEQ ID NO: 1711724 - DNA, 15 bp, Homo sapiens
acaagattcaatact

SEQ ID NO: 1711725 - DNA, 15 bp, Homo sapiens
caagattcaatactg

SEQ ID NO: 1711726 - DNA, 15 bp, Homo sapiens
aagattcaatactgc

SEQ ID NO: 1711727 - DNA, 15 bp, Homo sapiens
agattcaatactgcc

SEQ ID NO: 1711728 - DNA, 15 bp, Homo sapiens
gattcaatactgccc

SEQ ID NO: 1711729 - DNA, 15 bp, Homo sapiens
attcaatactgcccc

SEQ ID NO: 1711730 - DNA, 15 bp, Homo sapiens
ttcaatactgccccc

SEQ ID NO: 1711731 - DNA, 15 bp, Homo sapiens
tcaatactgcccccc

SEQ ID NO: 1711732 - DNA, 15 bp, Homo sapiens
caatactgcccccca

SEQ ID NO: 1711733 - DNA, 15 bp, Homo sapiens
aatactgccccccag

SEQ ID NO: 1711734 - DNA, 15 bp, Homo sapiens
atactgccccccagg

SEQ ID NO: 1711735 - DNA, 15 bp, Homo sapiens
tactgccccccaggg

SEQ ID NO: 1711736 - DNA, 15 bp, Homo sapiens
actgccccccagggg

SEQ ID NO: 1711737 - DNA, 15 bp, Homo sapiens
ctgccccccaggggg

SEQ ID NO: 1711738 - DNA, 15 bp, Homo sapiens
tgccccccagggggt

SEQ ID NO: 1711739 - DNA, 15 bp, Homo sapiens
gccccccagggggtg

SEQ ID NO: 1711740 - DNA, 15 bp, Homo sapiens
ccccccagggggtgg

SEQ ID NO: 1711741 - DNA, 15 bp, Homo sapiens
cccccagggggtggg

SEQ ID NO: 1711742 - DNA, 15 bp, Homo sapiens
ccccagggggtgggt

SEQ ID NO: 1711743 - DNA, 15 bp, Homo sapiens
cccagggggtgggtg

SEQ ID NO: 1711744 - DNA, 15 bp, Homo sapiens
ccagggggtgggtga

SEQ ID NO: 1711745 - DNA, 15 bp, Homo sapiens
cagggggtgggtgaa

SEQ ID NO: 1711746 - DNA, 15 bp, Homo sapiens
agggggtgggtgaac

SEQ ID NO: 1711747 - DNA, 15 bp, Homo sapiens
gggggtgggtgaaca

SEQ ID NO: 1711748 - DNA, 15 bp, Homo sapiens
ggggtgggtgaacag

SEQ ID NO: 1711749 - DNA, 15 bp, Homo sapiens
gggtgggtgaacagg

SEQ ID NO: 1711750 - DNA, 15 bp, Homo sapiens
ggtgggtgaacaggg

SEQ ID NO: 1711751 - DNA, 15 bp, Homo sapiens
gtgggtgaacagggc

SEQ ID NO: 1711752 - DNA, 15 bp, Homo sapiens
tgggtgaacagggca

SEQ ID NO: 1711753 - DNA, 15 bp, Homo sapiens
gggtgaacagggcaa

SEQ ID NO: 1711754 - DNA, 15 bp, Homo sapiens
ggtgaacagggcaag

SEQ ID NO: 1711755 - DNA, 15 bp, Homo sapiens
gtgaacagggcaagg

SEQ ID NO: 1711756 - DNA, 15 bp, Homo sapiens
tgaacagggcaagga

SEQ ID NO: 1711757 - DNA, 15 bp, Homo sapiens
gaacagggcaaggaa

SEQ ID NO: 1711758 - DNA, 15 bp, Homo sapiens
aacagggcaaggaag

SEQ ID NO: 1711759 - DNA, 15 bp, Homo sapiens
acagggcaaggaagt

SEQ ID NO: 1711760 - DNA, 15 bp, Homo sapiens
cagggcaaggaagtc

SEQ ID NO: 1711761 - DNA, 15 bp, Homo sapiens
agggcaaggaagtct

SEQ ID NO: 1711762 - DNA, 15 bp, Homo sapiens
gggcaaggaagtctc

SEQ ID NO: 1711763 - DNA, 15 bp, Homo sapiens
ggcaaggaagtctcc

SEQ ID NO: 1711764 - DNA, 15 bp, Homo sapiens
gcaaggaagtctcct

SEQ ID NO: 1711765 - DNA, 15 bp, Homo sapiens
caaggaagtctcctt

SEQ ID NO: 1711766 - DNA, 15 bp, Homo sapiens
aaggaagtctcctta

SEQ ID NO: 1711767 - DNA, 15 bp, Homo sapiens
aggaagtctccttac

SEQ ID NO: 1711768 - DNA, 15 bp, Homo sapiens
ggaagtctccttact

SEQ ID NO: 1711769 - DNA, 15 bp, Homo sapiens
gaagtctccttactc

SEQ ID NO: 1711770 - DNA, 15 bp, Homo sapiens
aagtctccttactca

SEQ ID NO: 1711771 - DNA, 15 bp, Homo sapiens
agtctccttactcac

SEQ ID NO: 1711772 - DNA, 15 bp, Homo sapiens
gtctccttactcaca

SEQ ID NO: 1711773 - DNA, 15 bp, Homo sapiens
tctccttactcacac

SEQ ID NO: 1711774 - DNA, 15 bp, Homo sapiens
ctccttactcacaca

SEQ ID NO: 1711775 - DNA, 15 bp, Homo sapiens
tccttactcacacag

SEQ ID NO: 1711776 - DNA, 15 bp, Homo sapiens
ccttactcacacagg

SEQ ID NO: 1711777 - DNA, 15 bp, Homo sapiens
cttactcacacagga

SEQ ID NO: 1711778 - DNA, 15 bp, Homo sapiens
ttactcacacaggac

SEQ ID NO: 1711779 - DNA, 15 bp, Homo sapiens
tactcacacaggacc

SEQ ID NO: 1711780 - DNA, 15 bp, Homo sapiens
actcacacaggaccc

SEQ ID NO: 1711781 - DNA, 15 bp, Homo sapiens
ctcacacaggacccc

SEQ ID NO: 1711782 - DNA, 15 bp, Homo sapiens
tcacacaggacccca

SEQ ID NO: 1711783 - DNA, 15 bp, Homo sapiens
cacacaggaccccag

SEQ ID NO: 1711784 - DNA, 15 bp, Homo sapiens
acacaggaccccaga

SEQ ID NO: 1711785 - DNA, 15 bp, Homo sapiens
cacaggaccccagag

SEQ ID NO: 1711786 - DNA, 15 bp, Homo sapiens
acaggaccccagagt

SEQ ID NO: 1711787 - DNA, 15 bp, Homo sapiens
caggaccccagagtg

SEQ ID NO: 1711788 - DNA, 15 bp, Homo sapiens
aggaccccagagtgt

SEQ ID NO: 1711789 - DNA, 15 bp, Homo sapiens
ggaccccagagtgtg

SEQ ID NO: 1711790 - DNA, 15 bp, Homo sapiens
gaccccagagtgtgg

SEQ ID NO: 1711791 - DNA, 15 bp, Homo sapiens
accccagagtgtggt

SEQ ID NO: 1711792 - DNA, 15 bp, Homo sapiens
ccccagagtgtggtt

SEQ ID NO: 1711793 - DNA, 15 bp, Homo sapiens
cccagagtgtggttt

SEQ ID NO: 1711794 - DNA, 15 bp, Homo sapiens
ccagagtgtggttta

SEQ ID NO: 1711795 - DNA, 15 bp, Homo sapiens
cagagtgtggtttag

SEQ ID NO: 1711796 - DNA, 15 bp, Homo sapiens
agagtgtggtttagc

SEQ ID NO: 1711797 - DNA, 15 bp, Homo sapiens
gagtgtggtttagcc

SEQ ID NO: 1711798 - DNA, 15 bp, Homo sapiens
agtgtggtttagcct

SEQ ID NO: 1711799 - DNA, 15 bp, Homo sapiens
gtgtggtttagcctt

SEQ ID NO: 1711800 - DNA, 15 bp, Homo sapiens
tgtggtttagcctta

SEQ ID NO: 1711801 - DNA, 15 bp, Homo sapiens
gtggtttagccttat

SEQ ID NO: 1711802 - DNA, 15 bp, Homo sapiens
tggtttagccttatg

SEQ ID NO: 1711803 - DNA, 15 bp, Homo sapiens
ggtttagccttatga

SEQ ID NO: 1711804 - DNA, 15 bp, Homo sapiens
gtttagccttatgaa

SEQ ID NO: 1711805 - DNA, 15 bp, Homo sapiens
tttagccttatgaac

SEQ ID NO: 1711806 - DNA, 15 bp, Homo sapiens
ttagccttatgaaca

SEQ ID NO: 1711807 - DNA, 15 bp, Homo sapiens
tagccttatgaacag

SEQ ID NO: 1711808 - DNA, 15 bp, Homo sapiens
agccttatgaacaga

SEQ ID NO: 1711809 - DNA, 15 bp, Homo sapiens
gccttatgaacagag

SEQ ID NO: 1711810 - DNA, 15 bp, Homo sapiens
ccttatgaacagaga

SEQ ID NO: 1711811 - DNA, 15 bp, Homo sapiens
cttatgaacagagaa

SEQ ID NO: 1711812 - DNA, 15 bp, Homo sapiens
ttatgaacagagaag

SEQ ID NO: 1711813 - DNA, 15 bp, Homo sapiens
tatgaacagagaagc

SEQ ID NO: 1711814 - DNA, 15 bp, Homo sapiens
atgaacagagaagct

SEQ ID NO: 1711815 - DNA, 15 bp, Homo sapiens
tgaacagagaagctg

SEQ ID NO: 1711816 - DNA, 15 bp, Homo sapiens
gaacagagaagctgt

SEQ ID NO: 1711817 - DNA, 15 bp, Homo sapiens
aacagagaagctgtc

SEQ ID NO: 1711818 - DNA, 15 bp, Homo sapiens
acagagaagctgtcc

SEQ ID NO: 1711819 - DNA, 15 bp, Homo sapiens
cagagaagctgtcct

SEQ ID NO: 1711820 - DNA, 15 bp, Homo sapiens
agagaagctgtcctg

SEQ ID NO: 1711821 - DNA, 15 bp, Homo sapiens
gagaagctgtcctgg

SEQ ID NO: 1711822 - DNA, 15 bp, Homo sapiens
agaagctgtcctggg

SEQ ID NO: 1711823 - DNA, 15 bp, Homo sapiens
gaagctgtcctgggc

SEQ ID NO: 1711824 - DNA, 15 bp, Homo sapiens
aagctgtcctgggca

SEQ ID NO: 1711825 - DNA, 15 bp, Homo sapiens
agctgtcctgggcag

SEQ ID NO: 1711826 - DNA, 15 bp, Homo sapiens
gctgtcctgggcagc

SEQ ID NO: 1711827 - DNA, 15 bp, Homo sapiens
ctgtcctgggcagcc

SEQ ID NO: 1711828 - DNA, 15 bp, Homo sapiens
tgtcctgggcagcct

SEQ ID NO: 1711829 - DNA, 15 bp, Homo sapiens
gtcctgggcagcctc

SEQ ID NO: 1711830 - DNA, 15 bp, Homo sapiens
tcctgggcagcctct

SEQ ID NO: 1711831 - DNA, 15 bp, Homo sapiens
cctgggcagcctctg

SEQ ID NO: 1711832 - DNA, 15 bp, Homo sapiens
ctgggcagcctctgg

SEQ ID NO: 1711833 - DNA, 15 bp, Homo sapiens
tgggcagcctctgga

SEQ ID NO: 1711834 - DNA, 15 bp, Homo sapiens
gggcagcctctggag

SEQ ID NO: 1711835 - DNA, 15 bp, Homo sapiens
ggcagcctctggagg

SEQ ID NO: 1711836 - DNA, 15 bp, Homo sapiens
gcagcctctggagga

SEQ ID NO: 1711837 - DNA, 15 bp, Homo sapiens
cagcctctggaggag

SEQ ID NO: 1711838 - DNA, 15 bp, Homo sapiens
agcctctggaggagc

SEQ ID NO: 1711839 - DNA, 15 bp, Homo sapiens
gcctctggaggagcc

SEQ ID NO: 1711840 - DNA, 15 bp, Homo sapiens
cctctggaggagccc

SEQ ID NO: 1711841 - DNA, 15 bp, Homo sapiens
ctctggaggagccca

SEQ ID NO: 1711842 - DNA, 15 bp, Homo sapiens
tctggaggagcccag

SEQ ID NO: 1711843 - DNA, 15 bp, Homo sapiens
ctggaggagcccagt

SEQ ID NO: 1711844 - DNA, 15 bp, Homo sapiens
tggaggagcccagtc

SEQ ID NO: 1711845 - DNA, 15 bp, Homo sapiens
ggaggagcccagtca

SEQ ID NO: 1711846 - DNA, 15 bp, Homo sapiens
gaggagcccagtcag

SEQ ID NO: 1711847 - DNA, 15 bp, Homo sapiens
aggagcccagtcagg

SEQ ID NO: 1711848 - DNA, 15 bp, Homo sapiens
ggagcccagtcagga

SEQ ID NO: 1711849 - DNA, 15 bp, Homo sapiens
gagcccagtcaggaa

SEQ ID NO: 1711850 - DNA, 15 bp, Homo sapiens
agcccagtcaggaaa

SEQ ID NO: 1711851 - DNA, 15 bp, Homo sapiens
gcccagtcaggaaac

SEQ ID NO: 1711852 - DNA, 15 bp, Homo sapiens
cccagtcaggaaact

SEQ ID NO: 1711853 - DNA, 15 bp, Homo sapiens
ccagtcaggaaactg

SEQ ID NO: 1711854 - DNA, 15 bp, Homo sapiens
cagtcaggaaactga

SEQ ID NO: 1711855 - DNA, 15 bp, Homo sapiens
agtcaggaaactgag

SEQ ID NO: 1711856 - DNA, 15 bp, Homo sapiens
gtcaggaaactgagg

SEQ ID NO: 1711857 - DNA, 15 bp, Homo sapiens
tcaggaaactgaggg

SEQ ID NO: 1711858 - DNA, 15 bp, Homo sapiens
caggaaactgaggga

SEQ ID NO: 1711859 - DNA, 15 bp, Homo sapiens
aggaaactgagggaa

SEQ ID NO: 1711860 - DNA, 15 bp, Homo sapiens
ggaaactgagggaaa

SEQ ID NO: 1711861 - DNA, 15 bp, Homo sapiens
gaaactgagggaaag

SEQ ID NO: 1711862 - DNA, 15 bp, Homo sapiens
aaactgagggaaaga

SEQ ID NO: 1711863 - DNA, 15 bp, Homo sapiens
aactgagggaaagaa

SEQ ID NO: 1711864 - DNA, 15 bp, Homo sapiens
actgagggaaagaaa

SEQ ID NO: 1711865 - DNA, 15 bp, Homo sapiens
ctgagggaaagaaat

SEQ ID NO: 1711866 - DNA, 15 bp, Homo sapiens
tgagggaaagaaata

SEQ ID NO: 1711867 - DNA, 15 bp, Homo sapiens
gagggaaagaaataa

SEQ ID NO: 1711868 - DNA, 15 bp, Homo sapiens
agggaaagaaataaa

SEQ ID NO: 1711869 - DNA, 15 bp, Homo sapiens
gggaaagaaataaac

SEQ ID NO: 1711870 - DNA, 15 bp, Homo sapiens
ggaaagaaataaacg

SEQ ID NO: 1711871 - DNA, 15 bp, Homo sapiens
gaaagaaataaacga

SEQ ID NO: 1711872 - DNA, 15 bp, Homo sapiens
aaagaaataaacgat

SEQ ID NO: 1711873 - DNA, 15 bp, Homo sapiens
aagaaataaacgatt

SEQ ID NO: 1711874 - DNA, 15 bp, Homo sapiens
agaaataaacgattt

SEQ ID NO: 1711875 - DNA, 15 bp, Homo sapiens
gaaataaacgatttt

SEQ ID NO: 1711876 - DNA, 15 bp, Homo sapiens
aaataaacgattttt

SEQ ID NO: 1711877 - DNA, 15 bp, Homo sapiens
aataaacgattttta

SEQ ID NO: 1711878 - DNA, 15 bp, Homo sapiens
ataaacgatttttat

SEQ ID NO: 1711879 - DNA, 15 bp, Homo sapiens
taaacgatttttatc

SEQ ID NO: 1711880 - DNA, 15 bp, Homo sapiens
aaacgatttttatct

SEQ ID NO: 1711881 - DNA, 15 bp, Homo sapiens
aacgatttttatcta

SEQ ID NO: 1711882 - DNA, 15 bp, Homo sapiens
acgatttttatctag

SEQ ID NO: 1711883 - DNA, 15 bp, Homo sapiens
cgatttttatctaga

SEQ ID NO: 1711884 - DNA, 15 bp, Homo sapiens
gatttttatctagaa

SEQ ID NO: 1711885 - DNA, 15 bp, Homo sapiens
atttttatctagaat

SEQ ID NO: 1711886 - DNA, 15 bp, Homo sapiens
tttttatctagaatc

SEQ ID NO: 1711887 - DNA, 15 bp, Homo sapiens
ttttatctagaatct

SEQ ID NO: 1711888 - DNA, 15 bp, Homo sapiens
tttatctagaatctt

SEQ ID NO: 1711889 - DNA, 15 bp, Homo sapiens
ttatctagaatcttg

SEQ ID NO: 1711890 - DNA, 15 bp, Homo sapiens
tatctagaatcttga

SEQ ID NO: 1711891 - DNA, 15 bp, Homo sapiens
atctagaatcttgaa

SEQ ID NO: 1711892 - DNA, 15 bp, Homo sapiens
tctagaatcttgaag

SEQ ID NO: 1711893 - DNA, 15 bp, Homo sapiens
ctagaatcttgaagg

SEQ ID NO: 1711894 - DNA, 15 bp, Homo sapiens
tagaatcttgaaggc

SEQ ID NO: 1711895 - DNA, 15 bp, Homo sapiens
agaatcttgaaggcg

SEQ ID NO: 1711896 - DNA, 15 bp, Homo sapiens
gaatcttgaaggcgt

SEQ ID NO: 1711897 - DNA, 15 bp, Homo sapiens
aatcttgaaggcgtc

SEQ ID NO: 1711898 - DNA, 15 bp, Homo sapiens
atcttgaaggcgtcg

SEQ ID NO: 1711899 - DNA, 15 bp, Homo sapiens
tcttgaaggcgtcga

SEQ ID NO: 1711900 - DNA, 15 bp, Homo sapiens
cttgaaggcgtcgaa

SEQ ID NO: 1711901 - DNA, 15 bp, Homo sapiens
ttgaaggcgtcgaag

SEQ ID NO: 1711902 - DNA, 15 bp, Homo sapiens
tgaaggcgtcgaaga

SEQ ID NO: 1711903 - DNA, 15 bp, Homo sapiens
gaaggcgtcgaagag

SEQ ID NO: 1711904 - DNA, 15 bp, Homo sapiens
aaggcgtcgaagagc

SEQ ID NO: 1711905 - DNA, 15 bp, Homo sapiens
aggcgtcgaagagct

SEQ ID NO: 1711906 - DNA, 15 bp, Homo sapiens
ggcgtcgaagagctg

SEQ ID NO: 1711907 - DNA, 15 bp, Homo sapiens
gcgtcgaagagctga

SEQ ID NO: 1711908 - DNA, 15 bp, Homo sapiens
cgtcgaagagctgac

SEQ ID NO: 1711909 - DNA, 15 bp, Homo sapiens
gtcgaagagctgact

SEQ ID NO: 1711910 - DNA, 15 bp, Homo sapiens
tcgaagagctgactt

SEQ ID NO: 1711911 - DNA, 15 bp, Homo sapiens
cgaagagctgacttt

SEQ ID NO: 1711912 - DNA, 15 bp, Homo sapiens
gaagagctgactttc

SEQ ID NO: 1711913 - DNA, 15 bp, Homo sapiens
aagagctgactttct

SEQ ID NO: 1711914 - DNA, 15 bp, Homo sapiens
agagctgactttctg

SEQ ID NO: 1711915 - DNA, 15 bp, Homo sapiens
gagctgactttctga

SEQ ID NO: 1711916 - DNA, 15 bp, Homo sapiens
agctgactttctgat

SEQ ID NO: 1711917 - DNA, 15 bp, Homo sapiens
gctgactttctgatt

SEQ ID NO: 1711918 - DNA, 15 bp, Homo sapiens
ctgactttctgatta

SEQ ID NO: 1711919 - DNA, 15 bp, Homo sapiens
tgactttctgattaa

SEQ ID NO: 1711920 - DNA, 15 bp, Homo sapiens
gactttctgattaag

SEQ ID NO: 1711921 - DNA, 15 bp, Homo sapiens
actttctgattaagg

SEQ ID NO: 1711922 - DNA, 15 bp, Homo sapiens
ctttctgattaaggt

SEQ ID NO: 1711923 - DNA, 15 bp, Homo sapiens
tttctgattaaggta

SEQ ID NO: 1711924 - DNA, 15 bp, Homo sapiens
ttctgattaaggtag

SEQ ID NO: 1711925 - DNA, 15 bp, Homo sapiens
tctgattaaggtaga

SEQ ID NO: 1711926 - DNA, 15 bp, Homo sapiens
ctgattaaggtagac

SEQ ID NO: 1711927 - DNA, 15 bp, Homo sapiens
tgattaaggtagaca

SEQ ID NO: 1711928 - DNA, 15 bp, Homo sapiens
gattaaggtagacag

SEQ ID NO: 1711929 - DNA, 15 bp, Homo sapiens
attaaggtagacaga

SEQ ID NO: 1711930 - DNA, 15 bp, Homo sapiens
ttaaggtagacagag

SEQ ID NO: 1711931 - DNA, 15 bp, Homo sapiens
taaggtagacagagc

SEQ ID NO: 1711932 - DNA, 15 bp, Homo sapiens
aaggtagacagagct

SEQ ID NO: 1711933 - DNA, 15 bp, Homo sapiens
aggtagacagagctg

SEQ ID NO: 1711934 - DNA, 15 bp, Homo sapiens
ggtagacagagctgt

SEQ ID NO: 1711935 - DNA, 15 bp, Homo sapiens
gtagacagagctgtg

SEQ ID NO: 1711936 - DNA, 15 bp, Homo sapiens
tagacagagctgtgg

SEQ ID NO: 1711937 - DNA, 15 bp, Homo sapiens
agacagagctgtggt

SEQ ID NO: 1711938 - DNA, 15 bp, Homo sapiens
gacagagctgtggtg

SEQ ID NO: 1711939 - DNA, 15 bp, Homo sapiens
acagagctgtggtgt

SEQ ID NO: 1711940 - DNA, 15 bp, Homo sapiens
cagagctgtggtgtg

SEQ ID NO: 1711941 - DNA, 15 bp, Homo sapiens
agagctgtggtgtgt

SEQ ID NO: 1711942 - DNA, 15 bp, Homo sapiens
gagctgtggtgtgta

SEQ ID NO: 1711943 - DNA, 15 bp, Homo sapiens
agctgtggtgtgtaa

SEQ ID NO: 1711944 - DNA, 15 bp, Homo sapiens
gctgtggtgtgtaaa

SEQ ID NO: 1711945 - DNA, 15 bp, Homo sapiens
ctgtggtgtgtaaac

SEQ ID NO: 1711946 - DNA, 15 bp, Homo sapiens
tgtggtgtgtaaacc

SEQ ID NO: 1711947 - DNA, 15 bp, Homo sapiens
gtggtgtgtaaaccc

SEQ ID NO: 1711948 - DNA, 15 bp, Homo sapiens
tggtgtgtaaacccc

SEQ ID NO: 1711949 - DNA, 15 bp, Homo sapiens
ggtgtgtaaacccca

SEQ ID NO: 1711950 - DNA, 15 bp, Homo sapiens
gtgtgtaaaccccaa

SEQ ID NO: 1711951 - DNA, 15 bp, Homo sapiens
tgtgtaaaccccaaa

SEQ ID NO: 1711952 - DNA, 15 bp, Homo sapiens
gtgtaaaccccaaaa

SEQ ID NO: 1711953 - DNA, 15 bp, Homo sapiens
tgtaaaccccaaaac

SEQ ID NO: 1711954 - DNA, 15 bp, Homo sapiens
gtaaaccccaaaacc

SEQ ID NO: 1711955 - DNA, 15 bp, Homo sapiens
taaaccccaaaacct

SEQ ID NO: 1711956 - DNA, 15 bp, Homo sapiens
aaaccccaaaaccta

SEQ ID NO: 1711957 - DNA, 15 bp, Homo sapiens
aaccccaaaacctac

SEQ ID NO: 1711958 - DNA, 15 bp, Homo sapiens
accccaaaacctaca

SEQ ID NO: 1711959 - DNA, 15 bp, Homo sapiens
ccccaaaacctacag

SEQ ID NO: 1711960 - DNA, 15 bp, Homo sapiens
cccaaaacctacagc

SEQ ID NO: 1711961 - DNA, 15 bp, Homo sapiens
ccaaaacctacagcc

SEQ ID NO: 1711962 - DNA, 15 bp, Homo sapiens
caaaacctacagcct

SEQ ID NO: 1711963 - DNA, 15 bp, Homo sapiens
aaaacctacagcctt

SEQ ID NO: 1711964 - DNA, 15 bp, Homo sapiens
aaacctacagccttg

SEQ ID NO: 1711965 - DNA, 15 bp, Homo sapiens
aacctacagccttgt

SEQ ID NO: 1711966 - DNA, 15 bp, Homo sapiens
acctacagccttgtt

SEQ ID NO: 1711967 - DNA, 15 bp, Homo sapiens
cctacagccttgttc

SEQ ID NO: 1711968 - DNA, 15 bp, Homo sapiens
ctacagccttgttca

SEQ ID NO: 1711969 - DNA, 15 bp, Homo sapiens
tacagccttgttcaa

SEQ ID NO: 1711970 - DNA, 15 bp, Homo sapiens
acagccttgttcaag

SEQ ID NO: 1711971 - DNA, 15 bp, Homo sapiens
cagccttgttcaagg

SEQ ID NO: 1711972 - DNA, 15 bp, Homo sapiens
agccttgttcaaggg

SEQ ID NO: 1711973 - DNA, 15 bp, Homo sapiens
gccttgttcaagggg

SEQ ID NO: 1711974 - DNA, 15 bp, Homo sapiens
ccttgttcaaggggc

SEQ ID NO: 1711975 - DNA, 15 bp, Homo sapiens
cttgttcaaggggct

SEQ ID NO: 1711976 - DNA, 15 bp, Homo sapiens
ttgttcaaggggctt

SEQ ID NO: 1711977 - DNA, 15 bp, Homo sapiens
tgttcaaggggctta

SEQ ID NO: 1711978 - DNA, 15 bp, Homo sapiens
gttcaaggggcttac

SEQ ID NO: 1711979 - DNA, 15 bp, Homo sapiens
ttcaaggggcttaca

SEQ ID NO: 1711980 - DNA, 15 bp, Homo sapiens
tcaaggggcttacac

SEQ ID NO: 1711981 - DNA, 15 bp, Homo sapiens
caaggggcttacaca

SEQ ID NO: 1711982 - DNA, 15 bp, Homo sapiens
aaggggcttacacat

SEQ ID NO: 1711983 - DNA, 15 bp, Homo sapiens
aggggcttacacata

SEQ ID NO: 1711984 - DNA, 15 bp, Homo sapiens
ggggcttacacatat

SEQ ID NO: 1711985 - DNA, 15 bp, Homo sapiens
gggcttacacatatg

SEQ ID NO: 1711986 - DNA, 15 bp, Homo sapiens
ggcttacacatatga

SEQ ID NO: 1711987 - DNA, 15 bp, Homo sapiens
gcttacacatatgat

SEQ ID NO: 1711988 - DNA, 15 bp, Homo sapiens
cttacacatatgatg

SEQ ID NO: 1711989 - DNA, 15 bp, Homo sapiens
ttacacatatgatga

SEQ ID NO: 1711990 - DNA, 15 bp, Homo sapiens
tacacatatgatgag

SEQ ID NO: 1711991 - DNA, 15 bp, Homo sapiens
acacatatgatgagg

SEQ ID NO: 1711992 - DNA, 15 bp, Homo sapiens
cacatatgatgaggc

SEQ ID NO: 1711993 - DNA, 15 bp, Homo sapiens
acatatgatgaggct

SEQ ID NO: 1711994 - DNA, 15 bp, Homo sapiens
catatgatgaggcta

SEQ ID NO: 1711995 - DNA, 15 bp, Homo sapiens
atatgatgaggctag

SEQ ID NO: 1711996 - DNA, 15 bp, Homo sapiens
tatgatgaggctaga

SEQ ID NO: 1711997 - DNA, 15 bp, Homo sapiens
atgatgaggctagac

SEQ ID NO: 1711998 - DNA, 15 bp, Homo sapiens
tgatgaggctagact

SEQ ID NO: 1711999 - DNA, 15 bp, Homo sapiens
gatgaggctagactt

SEQ ID NO: 1712000 - DNA, 15 bp, Homo sapiens
atgaggctagacttt

SEQ ID NO: 1712001 - DNA, 15 bp, Homo sapiens
tgaggctagactttt

SEQ ID NO: 1712002 - DNA, 15 bp, Homo sapiens
gaggctagactttta

SEQ ID NO: 1712003 - DNA, 15 bp, Homo sapiens
aggctagacttttac

SEQ ID NO: 1712004 - DNA, 15 bp, Homo sapiens
ggctagacttttaca

SEQ ID NO: 1712005 - DNA, 15 bp, Homo sapiens
gctagacttttacaa

SEQ ID NO: 1712006 - DNA, 15 bp, Homo sapiens
ctagacttttacaaa

SEQ ID NO: 1712007 - DNA, 15 bp, Homo sapiens
tagacttttacaaaa

SEQ ID NO: 1712008 - DNA, 15 bp, Homo sapiens
agacttttacaaaac

SEQ ID NO: 1712009 - DNA, 15 bp, Homo sapiens
gacttttacaaaacc

SEQ ID NO: 1712010 - DNA, 15 bp, Homo sapiens
acttttacaaaacca

SEQ ID NO: 1712011 - DNA, 15 bp, Homo sapiens
cttttacaaaaccag

SEQ ID NO: 1712012 - DNA, 15 bp, Homo sapiens
ttttacaaaaccagg

SEQ ID NO: 1712013 - DNA, 15 bp, Homo sapiens
tttacaaaaccaggt

SEQ ID NO: 1712014 - DNA, 15 bp, Homo sapiens
ttacaaaaccaggtg

SEQ ID NO: 1712015 - DNA, 15 bp, Homo sapiens
tacaaaaccaggtgt

SEQ ID NO: 1712016 - DNA, 15 bp, Homo sapiens
acaaaaccaggtgtt

SEQ ID NO: 1712017 - DNA, 15 bp, Homo sapiens
caaaaccaggtgttt

SEQ ID NO: 1712018 - DNA, 15 bp, Homo sapiens
aaaaccaggtgtttg

SEQ ID NO: 1712019 - DNA, 15 bp, Homo sapiens
aaaccaggtgtttgg

SEQ ID NO: 1712020 - DNA, 15 bp, Homo sapiens
aaccaggtgtttgga

SEQ ID NO: 1712021 - DNA, 15 bp, Homo sapiens
accaggtgtttggat

SEQ ID NO: 1712022 - DNA, 15 bp, Homo sapiens
ccaggtgtttggatt

SEQ ID NO: 1712023 - DNA, 15 bp, Homo sapiens
caggtgtttggatta

SEQ ID NO: 1712024 - DNA, 15 bp, Homo sapiens
aggtgtttggattaa

SEQ ID NO: 1712025 - DNA, 15 bp, Homo sapiens
ggtgtttggattaaa

SEQ ID NO: 1712026 - DNA, 15 bp, Homo sapiens
gtgtttggattaaag

SEQ ID NO: 1712027 - DNA, 15 bp, Homo sapiens
tgtttggattaaagt

SEQ ID NO: 1712028 - DNA, 15 bp, Homo sapiens
gtttggattaaagtg

SEQ ID NO: 1712029 - DNA, 15 bp, Homo sapiens
tttggattaaagtga

SEQ ID NO: 1712030 - DNA, 15 bp, Homo sapiens
ttggattaaagtgaa

SEQ ID NO: 1712031 - DNA, 15 bp, Homo sapiens
tggattaaagtgaag

SEQ ID NO: 1712032 - DNA, 15 bp, Homo sapiens
ggattaaagtgaaga

SEQ ID NO: 1712033 - DNA, 15 bp, Homo sapiens
gattaaagtgaagag

SEQ ID NO: 1712034 - DNA, 15 bp, Homo sapiens
attaaagtgaagaga

SEQ ID NO: 1712035 - DNA, 15 bp, Homo sapiens
ttaaagtgaagagag

SEQ ID NO: 1712036 - DNA, 15 bp, Homo sapiens
taaagtgaagagagc

SEQ ID NO: 1712037 - DNA, 15 bp, Homo sapiens
aaagtgaagagagcc

SEQ ID NO: 1712038 - DNA, 15 bp, Homo sapiens
aagtgaagagagcca

SEQ ID NO: 1712039 - DNA, 15 bp, Homo sapiens
agtgaagagagccaa

SEQ ID NO: 1712040 - DNA, 15 bp, Homo sapiens
gtgaagagagccaaa

SEQ ID NO: 1712041 - DNA, 15 bp, Homo sapiens
tgaagagagccaaat

SEQ ID NO: 1712042 - DNA, 15 bp, Homo sapiens
gaagagagccaaatt

SEQ ID NO: 1712043 - DNA, 15 bp, Homo sapiens
aagagagccaaattg

SEQ ID NO: 1712044 - DNA, 15 bp, Homo sapiens
agagagccaaattgc

SEQ ID NO: 1712045 - DNA, 15 bp, Homo sapiens
gagagccaaattgcc

SEQ ID NO: 1712046 - DNA, 15 bp, Homo sapiens
agagccaaattgccc

SEQ ID NO: 1712047 - DNA, 15 bp, Homo sapiens
gagccaaattgccct

SEQ ID NO: 1712048 - DNA, 15 bp, Homo sapiens
agccaaattgccctt

SEQ ID NO: 1712049 - DNA, 15 bp, Homo sapiens
gccaaattgcccttc

SEQ ID NO: 1712050 - DNA, 15 bp, Homo sapiens
ccaaattgcccttcc

SEQ ID NO: 1712051 - DNA, 15 bp, Homo sapiens
caaattgcccttcca

SEQ ID NO: 1712052 - DNA, 15 bp, Homo sapiens
aaattgcccttccaa

SEQ ID NO: 1712053 - DNA, 15 bp, Homo sapiens
aattgcccttccaac

SEQ ID NO: 1712054 - DNA, 15 bp, Homo sapiens
attgcccttccaaca

SEQ ID NO: 1712055 - DNA, 15 bp, Homo sapiens
ttgcccttccaacat

SEQ ID NO: 1712056 - DNA, 15 bp, Homo sapiens
tgcccttccaacatc

SEQ ID NO: 1712057 - DNA, 15 bp, Homo sapiens
gcccttccaacatct

SEQ ID NO: 1712058 - DNA, 15 bp, Homo sapiens
cccttccaacatctc

SEQ ID NO: 1712059 - DNA, 15 bp, Homo sapiens
ccttccaacatctct

SEQ ID NO: 1712060 - DNA, 15 bp, Homo sapiens
cttccaacatctcta

SEQ ID NO: 1712061 - DNA, 15 bp, Homo sapiens
ttccaacatctctac

SEQ ID NO: 1712062 - DNA, 15 bp, Homo sapiens
tccaacatctctacc

SEQ ID NO: 1712063 - DNA, 15 bp, Homo sapiens
ccaacatctctaccc

SEQ ID NO: 1712064 - DNA, 15 bp, Homo sapiens
caacatctctaccca

SEQ ID NO: 1712065 - DNA, 15 bp, Homo sapiens
aacatctctacccac

SEQ ID NO: 1712066 - DNA, 15 bp, Homo sapiens
acatctctacccact

SEQ ID NO: 1712067 - DNA, 15 bp, Homo sapiens
catctctacccactt

SEQ ID NO: 1712068 - DNA, 15 bp, Homo sapiens
atctctacccacttt

SEQ ID NO: 1712069 - DNA, 15 bp, Homo sapiens
tctctacccactttc

SEQ ID NO: 1712070 - DNA, 15 bp, Homo sapiens
ctctacccactttct

SEQ ID NO: 1712071 - DNA, 15 bp, Homo sapiens
tctacccactttctg

SEQ ID NO: 1712072 - DNA, 15 bp, Homo sapiens
ctacccactttctgt

SEQ ID NO: 1712073 - DNA, 15 bp, Homo sapiens
tacccactttctgtg

SEQ ID NO: 1712074 - DNA, 15 bp, Homo sapiens
acccactttctgtga

SEQ ID NO: 1712075 - DNA, 15 bp, Homo sapiens
cccactttctgtgaa

SEQ ID NO: 1712076 - DNA, 15 bp, Homo sapiens
ccactttctgtgaaa

SEQ ID NO: 1712077 - DNA, 15 bp, Homo sapiens
cactttctgtgaaaa

SEQ ID NO: 1712078 - DNA, 15 bp, Homo sapiens
actttctgtgaaaat

SEQ ID NO: 1712079 - DNA, 15 bp, Homo sapiens
ctttctgtgaaaatt

SEQ ID NO: 1712080 - DNA, 15 bp, Homo sapiens
tttctgtgaaaattt

SEQ ID NO: 1712081 - DNA, 15 bp, Homo sapiens
ttctgtgaaaatttt

SEQ ID NO: 1712082 - DNA, 15 bp, Homo sapiens
tctgtgaaaattttt

SEQ ID NO: 1712083 - DNA, 15 bp, Homo sapiens
ctgtgaaaatttttt

SEQ ID NO: 1712084 - DNA, 15 bp, Homo sapiens
tgtgaaaatttttta

SEQ ID NO: 1712085 - DNA, 15 bp, Homo sapiens
gtgaaaattttttaa

SEQ ID NO: 1712086 - DNA, 15 bp, Homo sapiens
tgaaaattttttaaa

SEQ ID NO: 1712087 - DNA, 15 bp, Homo sapiens
gaaaattttttaaaa

SEQ ID NO: 1712088 - DNA, 15 bp, Homo sapiens
aaattttttaaaaaa

SEQ ID NO: 1712089 - DNA, 15 bp, Homo sapiens
aattttttaaaaaac

SEQ ID NO: 1712090 - DNA, 15 bp, Homo sapiens
attttttaaaaaacc

SEQ ID NO: 1712091 - DNA, 15 bp, Homo sapiens
ttttttaaaaaaccc

SEQ ID NO: 1712092 - DNA, 15 bp, Homo sapiens
tttttaaaaaaccct

SEQ ID NO: 1712093 - DNA, 15 bp, Homo sapiens
ttttaaaaaacccta

SEQ ID NO: 1712094 - DNA, 15 bp, Homo sapiens
tttaaaaaaccctaa

SEQ ID NO: 1712095 - DNA, 15 bp, Homo sapiens
ttaaaaaaccctaat

SEQ ID NO: 1712096 - DNA, 15 bp, Homo sapiens
taaaaaaccctaatt

SEQ ID NO: 1712097 - DNA, 15 bp, Homo sapiens
aaaaaaccctaattt

SEQ ID NO: 1712098 - DNA, 15 bp, Homo sapiens
aaaaaccctaattta

SEQ ID NO: 1712099 - DNA, 15 bp, Homo sapiens
aaaaccctaatttaa

SEQ ID NO: 1712100 - DNA, 15 bp, Homo sapiens
aaaccctaatttaaa

SEQ ID NO: 1712101 - DNA, 15 bp, Homo sapiens
aaccctaatttaaaa

SEQ ID NO: 1712102 - DNA, 15 bp, Homo sapiens
accctaatttaaaat

SEQ ID NO: 1712103 - DNA, 15 bp, Homo sapiens
ccctaatttaaaatt

SEQ ID NO: 1712104 - DNA, 15 bp, Homo sapiens
cctaatttaaaatta

SEQ ID NO: 1712105 - DNA, 15 bp, Homo sapiens
ctaatttaaaattat

SEQ ID NO: 1712106 - DNA, 15 bp, Homo sapiens
taatttaaaattatt

SEQ ID NO: 1712107 - DNA, 15 bp, Homo sapiens
aatttaaaattattt

SEQ ID NO: 1712108 - DNA, 15 bp, Homo sapiens
atttaaaattatttt

SEQ ID NO: 1712109 - DNA, 15 bp, Homo sapiens
tttaaaattattttt

SEQ ID NO: 1712110 - DNA, 15 bp, Homo sapiens
ttaaaattattttta

SEQ ID NO: 1712111 - DNA, 15 bp, Homo sapiens
taaaattatttttaa

SEQ ID NO: 1712112 - DNA, 15 bp, Homo sapiens
aaaattatttttaaa

SEQ ID NO: 1712113 - DNA, 15 bp, Homo sapiens
aaattatttttaaaa

SEQ ID NO: 1712114 - DNA, 15 bp, Homo sapiens
aattatttttaaaaa

SEQ ID NO: 1712115 - DNA, 15 bp, Homo sapiens
attatttttaaaaag

SEQ ID NO: 1712116 - DNA, 15 bp, Homo sapiens
ttatttttaaaaaga

SEQ ID NO: 1712117 - DNA, 15 bp, Homo sapiens
atttttaaaaagaaa

SEQ ID NO: 1712118 - DNA, 15 bp, Homo sapiens
tttttaaaaagaaat

SEQ ID NO: 1712119 - DNA, 15 bp, Homo sapiens
ttttaaaaagaaata

SEQ ID NO: 1712120 - DNA, 15 bp, Homo sapiens
tttaaaaagaaataa

SEQ ID NO: 1712121 - DNA, 15 bp, Homo sapiens
ttaaaaagaaataat

SEQ ID NO: 1712122 - DNA, 15 bp, Homo sapiens
taaaaagaaataata

SEQ ID NO: 1712123 - DNA, 15 bp, Homo sapiens
aaaaagaaataatat

SEQ ID NO: 1712124 - DNA, 15 bp, Homo sapiens
aaaagaaataatatg

SEQ ID NO: 1712125 - DNA, 15 bp, Homo sapiens
aaagaaataatatgt

SEQ ID NO: 1712126 - DNA, 15 bp, Homo sapiens
aagaaataatatgtt

SEQ ID NO: 1712127 - DNA, 15 bp, Homo sapiens
agaaataatatgtta

SEQ ID NO: 1712128 - DNA, 15 bp, Homo sapiens
gaaataatatgttaa

SEQ ID NO: 1712129 - DNA, 15 bp, Homo sapiens
aaataatatgttaat

SEQ ID NO: 1712130 - DNA, 15 bp, Homo sapiens
aataatatgttaata

SEQ ID NO: 1712131 - DNA, 15 bp, Homo sapiens
ataatatgttaataa

SEQ ID NO: 1712132 - DNA, 15 bp, Homo sapiens
taatatgttaataaa

SEQ ID NO: 1712133 - DNA, 15 bp, Homo sapiens
aatatgttaataaat

SEQ ID NO: 1712134 - DNA, 15 bp, Homo sapiens
atatgttaataaatt

SEQ ID NO: 1712135 - DNA, 15 bp, Homo sapiens
tatgttaataaattc

SEQ ID NO: 1712136 - DNA, 15 bp, Homo sapiens
atgttaataaattct

SEQ ID NO: 1712137 - DNA, 15 bp, Homo sapiens
tgttaataaattctt

SEQ ID NO: 1712138 - DNA, 15 bp, Homo sapiens
gttaataaattcttt

SEQ ID NO: 1712139 - DNA, 15 bp, Homo sapiens
ttaataaattcttta

SEQ ID NO: 1712140 - DNA, 15 bp, Homo sapiens
taataaattctttaa

SEQ ID NO: 1712141 - DNA, 15 bp, Homo sapiens
aataaattctttaaa

SEQ ID NO: 1712142 - DNA, 15 bp, Homo sapiens
ataaattctttaaaa

SEQ ID NO: 1712143 - DNA, 15 bp, Homo sapiens
taaattctttaaaaa

SEQ ID NO: 1712144 - DNA, 15 bp, Homo sapiens
aaattctttaaaaaa

SEQ ID NO: 1712145 - DNA, 15 bp, Homo sapiens
aattctttaaaaaac

SEQ ID NO: 1712146 - DNA, 15 bp, Homo sapiens
attctttaaaaaaca

SEQ ID NO: 1712147 - DNA, 15 bp, Homo sapiens
ttctttaaaaaacaa

SEQ ID NO: 1712148 - DNA, 15 bp, Homo sapiens
tctttaaaaaacaaa

SEQ ID NO: 1712149 - DNA, 15 bp, Homo sapiens
ctttaaaaaacaaaa

SEQ ID NO: 1712150 - DNA, 15 bp, Homo sapiens
tttaaaaaacaaaac

SEQ ID NO: 1712151 - DNA, 15 bp, Homo sapiens
aaacaaaaccaaagg

SEQ ID NO: 1712152 - DNA, 15 bp, Homo sapiens
aacaaaaccaaagga

SEQ ID NO: 1712153 - DNA, 15 bp, Homo sapiens
acaaaaccaaaggaa

SEQ ID NO: 1712154 - DNA, 15 bp, Homo sapiens
caaaaccaaaggaaa

SEQ ID NO: 1712155 - DNA, 15 bp, Homo sapiens
aaaaccaaaggaaaa

SEQ ID NO: 1712156 - DNA, 15 bp, Homo sapiens
aaaccaaaggaaaaa

SEQ ID NO: 1712157 - DNA, 15 bp, Homo sapiens
aaccaaaggaaaaaa

SEQ ID NO: 1712158 - DNA, 15 bp, Homo sapiens
accaaaggaaaaaaa

SEQ ID NO: 1712159 - DNA, 15 bp, Homo sapiens
ccaaaggaaaaaaat

SEQ ID NO: 1712160 - DNA, 15 bp, Homo sapiens
caaaggaaaaaaatt

SEQ ID NO: 1712161 - DNA, 15 bp, Homo sapiens
aaaggaaaaaaattt

SEQ ID NO: 1712162 - DNA, 15 bp, Homo sapiens
aaggaaaaaaatttt

SEQ ID NO: 1712163 - DNA, 15 bp, Homo sapiens
aggaaaaaaatttta

SEQ ID NO: 1712164 - DNA, 15 bp, Homo sapiens
ggaaaaaaattttaa

SEQ ID NO: 1712165 - DNA, 15 bp, Homo sapiens
gaaaaaaattttaag

SEQ ID NO: 1712166 - DNA, 15 bp, Homo sapiens
aaaaaaattttaagt

SEQ ID NO: 1712167 - DNA, 15 bp, Homo sapiens
aaaaaattttaagta

SEQ ID NO: 1712168 - DNA, 15 bp, Homo sapiens
aaaaattttaagtac

SEQ ID NO: 1712169 - DNA, 15 bp, Homo sapiens
aaaattttaagtaca

SEQ ID NO: 1712170 - DNA, 15 bp, Homo sapiens
aaattttaagtacaa

SEQ ID NO: 1712171 - DNA, 15 bp, Homo sapiens
aattttaagtacaat

SEQ ID NO: 1712172 - DNA, 15 bp, Homo sapiens
attttaagtacaatt

SEQ ID NO: 1712173 - DNA, 15 bp, Homo sapiens
ttttaagtacaattt

SEQ ID NO: 1712174 - DNA, 15 bp, Homo sapiens
tttaagtacaatttt

SEQ ID NO: 1712175 - DNA, 15 bp, Homo sapiens
ttaagtacaatttta

SEQ ID NO: 1712176 - DNA, 15 bp, Homo sapiens
taagtacaattttaa

SEQ ID NO: 1712177 - DNA, 15 bp, Homo sapiens
aagtacaattttaaa

SEQ ID NO: 1712178 - DNA, 15 bp, Homo sapiens
agtacaattttaaaa

SEQ ID NO: 1712179 - DNA, 15 bp, Homo sapiens
gtacaattttaaaac

SEQ ID NO: 1712180 - DNA, 15 bp, Homo sapiens
tacaattttaaaact

SEQ ID NO: 1712181 - DNA, 15 bp, Homo sapiens
acaattttaaaactg

SEQ ID NO: 1712182 - DNA, 15 bp, Homo sapiens
caattttaaaactga

SEQ ID NO: 1712183 - DNA, 15 bp, Homo sapiens
aattttaaaactgaa

SEQ ID NO: 1712184 - DNA, 15 bp, Homo sapiens
attttaaaactgaac

SEQ ID NO: 1712185 - DNA, 15 bp, Homo sapiens
ttttaaaactgaact

SEQ ID NO: 1712186 - DNA, 15 bp, Homo sapiens
tttaaaactgaacta

SEQ ID NO: 1712187 - DNA, 15 bp, Homo sapiens
ttaaaactgaactat

SEQ ID NO: 1712188 - DNA, 15 bp, Homo sapiens
taaaactgaactatg

SEQ ID NO: 1712189 - DNA, 15 bp, Homo sapiens
aaaactgaactatgg

SEQ ID NO: 1712190 - DNA, 15 bp, Homo sapiens
aaactgaactatggt

SEQ ID NO: 1712191 - DNA, 15 bp, Homo sapiens
aactgaactatggtc

SEQ ID NO: 1712192 - DNA, 15 bp, Homo sapiens
actgaactatggtct

SEQ ID NO: 1712193 - DNA, 15 bp, Homo sapiens
ctgaactatggtctg

SEQ ID NO: 1712194 - DNA, 15 bp, Homo sapiens
tgaactatggtctgt

SEQ ID NO: 1712195 - DNA, 15 bp, Homo sapiens
gaactatggtctgtg

SEQ ID NO: 1712196 - DNA, 15 bp, Homo sapiens
aactatggtctgtga

SEQ ID NO: 1712197 - DNA, 15 bp, Homo sapiens
actatggtctgtgag

SEQ ID NO: 1712198 - DNA, 15 bp, Homo sapiens
ctatggtctgtgagg

SEQ ID NO: 1712199 - DNA, 15 bp, Homo sapiens
tatggtctgtgaggc

SEQ ID NO: 1712200 - DNA, 15 bp, Homo sapiens
atggtctgtgaggct

SEQ ID NO: 1712201 - DNA, 15 bp, Homo sapiens
tggtctgtgaggctc

SEQ ID NO: 1712202 - DNA, 15 bp, Homo sapiens
ggtctgtgaggctct

SEQ ID NO: 1712203 - DNA, 15 bp, Homo sapiens
gtctgtgaggctctt

SEQ ID NO: 1712204 - DNA, 15 bp, Homo sapiens
tctgtgaggctctta

SEQ ID NO: 1712205 - DNA, 15 bp, Homo sapiens
ctgtgaggctcttag

SEQ ID NO: 1712206 - DNA, 15 bp, Homo sapiens
tgtgaggctcttaga

SEQ ID NO: 1712207 - DNA, 15 bp, Homo sapiens
gtgaggctcttagaa

SEQ ID NO: 1712208 - DNA, 15 bp, Homo sapiens
tgaggctcttagaag

SEQ ID NO: 1712209 - DNA, 15 bp, Homo sapiens
gaggctcttagaaga

SEQ ID NO: 1712210 - DNA, 15 bp, Homo sapiens
aggctcttagaagaa

SEQ ID NO: 1712211 - DNA, 15 bp, Homo sapiens
ggctcttagaagaaa

SEQ ID NO: 1712212 - DNA, 15 bp, Homo sapiens
gctcttagaagaaaa

SEQ ID NO: 1712213 - DNA, 15 bp, Homo sapiens
ctcttagaagaaaaa

SEQ ID NO: 1712214 - DNA, 15 bp, Homo sapiens
tcttagaagaaaaaa

SEQ ID NO: 1712215 - DNA, 15 bp, Homo sapiens
cttagaagaaaaaac

SEQ ID NO: 1712216 - DNA, 15 bp, Homo sapiens
ttagaagaaaaaact

SEQ ID NO: 1712217 - DNA, 15 bp, Homo sapiens
tagaagaaaaaactc

SEQ ID NO: 1712218 - DNA, 15 bp, Homo sapiens
agaagaaaaaactca

SEQ ID NO: 1712219 - DNA, 15 bp, Homo sapiens
gaagaaaaaactcac

SEQ ID NO: 1712220 - DNA, 15 bp, Homo sapiens
aagaaaaaactcact

SEQ ID NO: 1712221 - DNA, 15 bp, Homo sapiens
agaaaaaactcactg

SEQ ID NO: 1712222 - DNA, 15 bp, Homo sapiens
gaaaaaactcactgg

SEQ ID NO: 1712223 - DNA, 15 bp, Homo sapiens
aaaaaactcactgga

SEQ ID NO: 1712224 - DNA, 15 bp, Homo sapiens
aaaaactcactggac

SEQ ID NO: 1712225 - DNA, 15 bp, Homo sapiens
aaaactcactggact

SEQ ID NO: 1712226 - DNA, 15 bp, Homo sapiens
aaactcactggactg

SEQ ID NO: 1712227 - DNA, 15 bp, Homo sapiens
aactcactggactga

SEQ ID NO: 1712228 - DNA, 15 bp, Homo sapiens
actcactggactgat

SEQ ID NO: 1712229 - DNA, 15 bp, Homo sapiens
ctcactggactgata

SEQ ID NO: 1712230 - DNA, 15 bp, Homo sapiens
tcactggactgatag

SEQ ID NO: 1712231 - DNA, 15 bp, Homo sapiens
cactggactgatagt

SEQ ID NO: 1712232 - DNA, 15 bp, Homo sapiens
actggactgatagtg

SEQ ID NO: 1712233 - DNA, 15 bp, Homo sapiens
ctggactgatagtgc

SEQ ID NO: 1712234 - DNA, 15 bp, Homo sapiens
tggactgatagtgct

SEQ ID NO: 1712235 - DNA, 15 bp, Homo sapiens
ggactgatagtgctg

SEQ ID NO: 1712236 - DNA, 15 bp, Homo sapiens
gactgatagtgctgt

SEQ ID NO: 1712237 - DNA, 15 bp, Homo sapiens
actgatagtgctgta

SEQ ID NO: 1712238 - DNA, 15 bp, Homo sapiens
ctgatagtgctgtac

SEQ ID NO: 1712239 - DNA, 15 bp, Homo sapiens
tgatagtgctgtact

SEQ ID NO: 1712240 - DNA, 15 bp, Homo sapiens
gatagtgctgtactg

SEQ ID NO: 1712241 - DNA, 15 bp, Homo sapiens
atagtgctgtactgt

SEQ ID NO: 1712242 - DNA, 15 bp, Homo sapiens
tagtgctgtactgta

SEQ ID NO: 1712243 - DNA, 15 bp, Homo sapiens
agtgctgtactgtag

SEQ ID NO: 1712244 - DNA, 15 bp, Homo sapiens
gtgctgtactgtagt

SEQ ID NO: 1712245 - DNA, 15 bp, Homo sapiens
tgctgtactgtagtc

SEQ ID NO: 1712246 - DNA, 15 bp, Homo sapiens
gctgtactgtagtct

SEQ ID NO: 1712247 - DNA, 15 bp, Homo sapiens
ctgtactgtagtctc

SEQ ID NO: 1712248 - DNA, 15 bp, Homo sapiens
tgtactgtagtctca

SEQ ID NO: 1712249 - DNA, 15 bp, Homo sapiens
gtactgtagtctcaa

SEQ ID NO: 1712250 - DNA, 15 bp, Homo sapiens
tactgtagtctcaac

SEQ ID NO: 1712251 - DNA, 15 bp, Homo sapiens
actgtagtctcaact

SEQ ID NO: 1712252 - DNA, 15 bp, Homo sapiens
ctgtagtctcaactc

SEQ ID NO: 1712253 - DNA, 15 bp, Homo sapiens
tgtagtctcaactcc

SEQ ID NO: 1712254 - DNA, 15 bp, Homo sapiens
gtagtctcaactcct

SEQ ID NO: 1712255 - DNA, 15 bp, Homo sapiens
tagtctcaactccta

SEQ ID NO: 1712256 - DNA, 15 bp, Homo sapiens
agtctcaactcctag

SEQ ID NO: 1712257 - DNA, 15 bp, Homo sapiens
gtctcaactcctaga

SEQ ID NO: 1712258 - DNA, 15 bp, Homo sapiens
tctcaactcctagac

SEQ ID NO: 1712259 - DNA, 15 bp, Homo sapiens
ctcaactcctagaca

SEQ ID NO: 1712260 - DNA, 15 bp, Homo sapiens
tcaactcctagacag

SEQ ID NO: 1712261 - DNA, 15 bp, Homo sapiens
caactcctagacagt

SEQ ID NO: 1712262 - DNA, 15 bp, Homo sapiens
aactcctagacagtt

SEQ ID NO: 1712263 - DNA, 15 bp, Homo sapiens
actcctagacagttt

SEQ ID NO: 1712264 - DNA, 15 bp, Homo sapiens
ctcctagacagttta

SEQ ID NO: 1712265 - DNA, 15 bp, Homo sapiens
tcctagacagtttaa

SEQ ID NO: 1712266 - DNA, 15 bp, Homo sapiens
cctagacagtttaac

SEQ ID NO: 1712267 - DNA, 15 bp, Homo sapiens
ctagacagtttaacc

SEQ ID NO: 1712268 - DNA, 15 bp, Homo sapiens
tagacagtttaacca

SEQ ID NO: 1712269 - DNA, 15 bp, Homo sapiens
agacagtttaaccaa

SEQ ID NO: 1712270 - DNA, 15 bp, Homo sapiens
gacagtttaaccaaa

SEQ ID NO: 1712271 - DNA, 15 bp, Homo sapiens
acagtttaaccaaaa

SEQ ID NO: 1712272 - DNA, 15 bp, Homo sapiens
cagtttaaccaaaaa

SEQ ID NO: 1712273 - DNA, 15 bp, Homo sapiens
agtttaaccaaaaat

SEQ ID NO: 1712274 - DNA, 15 bp, Homo sapiens
gtttaaccaaaaata

SEQ ID NO: 1712275 - DNA, 15 bp, Homo sapiens
tttaaccaaaaatac

SEQ ID NO: 1712276 - DNA, 15 bp, Homo sapiens
ttaaccaaaaatacc

SEQ ID NO: 1712277 - DNA, 15 bp, Homo sapiens
taaccaaaaatacca

SEQ ID NO: 1712278 - DNA, 15 bp, Homo sapiens
aaccaaaaataccaa

SEQ ID NO: 1712279 - DNA, 15 bp, Homo sapiens
accaaaaataccaaa

SEQ ID NO: 1712280 - DNA, 15 bp, Homo sapiens
ccaaaaataccaaaa

SEQ ID NO: 1712281 - DNA, 15 bp, Homo sapiens
caaaaataccaaaaa

SEQ ID NO: 1712282 - DNA, 15 bp, Homo sapiens
aaaaataccaaaaat

SEQ ID NO: 1712283 - DNA, 15 bp, Homo sapiens
aaaataccaaaaatg

SEQ ID NO: 1712284 - DNA, 15 bp, Homo sapiens
aaataccaaaaatga

SEQ ID NO: 1712285 - DNA, 15 bp, Homo sapiens
aataccaaaaatgat

SEQ ID NO: 1712286 - DNA, 15 bp, Homo sapiens
ataccaaaaatgata

SEQ ID NO: 1712287 - DNA, 15 bp, Homo sapiens
taccaaaaatgatat

SEQ ID NO: 1712288 - DNA, 15 bp, Homo sapiens
accaaaaatgatatg

SEQ ID NO: 1712289 - DNA, 15 bp, Homo sapiens
ccaaaaatgatatgg

SEQ ID NO: 1712290 - DNA, 15 bp, Homo sapiens
caaaaatgatatggc

SEQ ID NO: 1712291 - DNA, 15 bp, Homo sapiens
aaaaatgatatggca

SEQ ID NO: 1712292 - DNA, 15 bp, Homo sapiens
aaaatgatatggcag

SEQ ID NO: 1712293 - DNA, 15 bp, Homo sapiens
aaatgatatggcaga

SEQ ID NO: 1712294 - DNA, 15 bp, Homo sapiens
aatgatatggcagaa

SEQ ID NO: 1712295 - DNA, 15 bp, Homo sapiens
atgatatggcagaat

SEQ ID NO: 1712296 - DNA, 15 bp, Homo sapiens
tgatatggcagaatt

SEQ ID NO: 1712297 - DNA, 15 bp, Homo sapiens
gatatggcagaattt

SEQ ID NO: 1712298 - DNA, 15 bp, Homo sapiens
atatggcagaatttc

SEQ ID NO: 1712299 - DNA, 15 bp, Homo sapiens
tatggcagaatttca

SEQ ID NO: 1712300 - DNA, 15 bp, Homo sapiens
atggcagaatttcaa

SEQ ID NO: 1712301 - DNA, 15 bp, Homo sapiens
tggcagaatttcaac

SEQ ID NO: 1712302 - DNA, 15 bp, Homo sapiens
ggcagaatttcaacg

SEQ ID NO: 1712303 - DNA, 15 bp, Homo sapiens
gcagaatttcaacgg

SEQ ID NO: 1712304 - DNA, 15 bp, Homo sapiens
cagaatttcaacgga

SEQ ID NO: 1712305 - DNA, 15 bp, Homo sapiens
agaatttcaacggat

SEQ ID NO: 1712306 - DNA, 15 bp, Homo sapiens
gaatttcaacggatc

SEQ ID NO: 1712307 - DNA, 15 bp, Homo sapiens
aatttcaacggatca

SEQ ID NO: 1712308 - DNA, 15 bp, Homo sapiens
atttcaacggatcat

SEQ ID NO: 1712309 - DNA, 15 bp, Homo sapiens
tttcaacggatcatg

SEQ ID NO: 1712310 - DNA, 15 bp, Homo sapiens
ttcaacggatcatgg

SEQ ID NO: 1712311 - DNA, 15 bp, Homo sapiens
tcaacggatcatgga

SEQ ID NO: 1712312 - DNA, 15 bp, Homo sapiens
caacggatcatggaa

SEQ ID NO: 1712313 - DNA, 15 bp, Homo sapiens
aacggatcatggaat

SEQ ID NO: 1712314 - DNA, 15 bp, Homo sapiens
acggatcatggaatc

SEQ ID NO: 1712315 - DNA, 15 bp, Homo sapiens
cggatcatggaatcc

SEQ ID NO: 1712316 - DNA, 15 bp, Homo sapiens
ggatcatggaatcct

SEQ ID NO: 1712317 - DNA, 15 bp, Homo sapiens
gatcatggaatcctt

SEQ ID NO: 1712318 - DNA, 15 bp, Homo sapiens
atcatggaatccttt

SEQ ID NO: 1712319 - DNA, 15 bp, Homo sapiens
tcatggaatcctttc

SEQ ID NO: 1712320 - DNA, 15 bp, Homo sapiens
catggaatcctttca

SEQ ID NO: 1712321 - DNA, 15 bp, Homo sapiens
atggaatcctttcac

SEQ ID NO: 1712322 - DNA, 15 bp, Homo sapiens
tggaatcctttcact

SEQ ID NO: 1712323 - DNA, 15 bp, Homo sapiens
ggaatcctttcactt

SEQ ID NO: 1712324 - DNA, 15 bp, Homo sapiens
gaatcctttcactta

SEQ ID NO: 1712325 - DNA, 15 bp, Homo sapiens
aatcctttcacttag

SEQ ID NO: 1712326 - DNA, 15 bp, Homo sapiens
atcctttcacttagg

SEQ ID NO: 1712327 - DNA, 15 bp, Homo sapiens
tcctttcacttaggg

SEQ ID NO: 1712328 - DNA, 15 bp, Homo sapiens
cctttcacttagggg

SEQ ID NO: 1712329 - DNA, 15 bp, Homo sapiens
ctttcacttaggggg

SEQ ID NO: 1712330 - DNA, 15 bp, Homo sapiens
tttcacttaggggga

SEQ ID NO: 1712331 - DNA, 15 bp, Homo sapiens
ttcacttagggggaa

SEQ ID NO: 1712332 - DNA, 15 bp, Homo sapiens
tcacttagggggaaa

SEQ ID NO: 1712333 - DNA, 15 bp, Homo sapiens
cacttagggggaaat

SEQ ID NO: 1712334 - DNA, 15 bp, Homo sapiens
acttagggggaaatc

SEQ ID NO: 1712335 - DNA, 15 bp, Homo sapiens
cttagggggaaatcc

SEQ ID NO: 1712336 - DNA, 15 bp, Homo sapiens
ttagggggaaatccc

SEQ ID NO: 1712337 - DNA, 15 bp, Homo sapiens
tagggggaaatccct

SEQ ID NO: 1712338 - DNA, 15 bp, Homo sapiens
agggggaaatcccta

SEQ ID NO: 1712339 - DNA, 15 bp, Homo sapiens
gggggaaatccctat

SEQ ID NO: 1712340 - DNA, 15 bp, Homo sapiens
ggggaaatccctata

SEQ ID NO: 1712341 - DNA, 15 bp, Homo sapiens
gggaaatccctataa

SEQ ID NO: 1712342 - DNA, 15 bp, Homo sapiens
ggaaatccctataaa

SEQ ID NO: 1712343 - DNA, 15 bp, Homo sapiens
gaaatccctataaat

SEQ ID NO: 1712344 - DNA, 15 bp, Homo sapiens
aaatccctataaata

SEQ ID NO: 1712345 - DNA, 15 bp, Homo sapiens
aatccctataaatag

SEQ ID NO: 1712346 - DNA, 15 bp, Homo sapiens
atccctataaatagg

SEQ ID NO: 1712347 - DNA, 15 bp, Homo sapiens
tccctataaataggc

SEQ ID NO: 1712348 - DNA, 15 bp, Homo sapiens
ccctataaataggcc

SEQ ID NO: 1712349 - DNA, 15 bp, Homo sapiens
cctataaataggcca

SEQ ID NO: 1712350 - DNA, 15 bp, Homo sapiens
ctataaataggccac

SEQ ID NO: 1712351 - DNA, 15 bp, Homo sapiens
tataaataggccact

SEQ ID NO: 1712352 - DNA, 15 bp, Homo sapiens
ataaataggccactt

SEQ ID NO: 1712353 - DNA, 15 bp, Homo sapiens
taaataggccacttt

SEQ ID NO: 1712354 - DNA, 15 bp, Homo sapiens
aaataggccactttc

SEQ ID NO: 1712355 - DNA, 15 bp, Homo sapiens
aataggccactttca

SEQ ID NO: 1712356 - DNA, 15 bp, Homo sapiens
ataggccactttcaa

SEQ ID NO: 1712357 - DNA, 15 bp, Homo sapiens
taggccactttcaat

SEQ ID NO: 1712358 - DNA, 15 bp, Homo sapiens
aggccactttcaatt

SEQ ID NO: 1712359 - DNA, 15 bp, Homo sapiens
ggccactttcaattc

SEQ ID NO: 1712360 - DNA, 15 bp, Homo sapiens
gccactttcaattca

SEQ ID NO: 1712361 - DNA, 15 bp, Homo sapiens
ccactttcaattcat

SEQ ID NO: 1712362 - DNA, 15 bp, Homo sapiens
cactttcaattcatc

SEQ ID NO: 1712363 - DNA, 15 bp, Homo sapiens
actttcaattcatct

SEQ ID NO: 1712364 - DNA, 15 bp, Homo sapiens
ctttcaattcatcta

SEQ ID NO: 1712365 - DNA, 15 bp, Homo sapiens
tttcaattcatctag

SEQ ID NO: 1712366 - DNA, 15 bp, Homo sapiens
ttcaattcatctagg

SEQ ID NO: 1712367 - DNA, 15 bp, Homo sapiens
tcaattcatctaggc

SEQ ID NO: 1712368 - DNA, 15 bp, Homo sapiens
caattcatctaggct

SEQ ID NO: 1712369 - DNA, 15 bp, Homo sapiens
aattcatctaggctt

SEQ ID NO: 1712370 - DNA, 15 bp, Homo sapiens
attcatctaggcttt

SEQ ID NO: 1712371 - DNA, 15 bp, Homo sapiens
ttcatctaggctttt

SEQ ID NO: 1712372 - DNA, 15 bp, Homo sapiens
tcatctaggcttttt

SEQ ID NO: 1712373 - DNA, 15 bp, Homo sapiens
catctaggctttttc

SEQ ID NO: 1712374 - DNA, 15 bp, Homo sapiens
atctaggctttttct

SEQ ID NO: 1712375 - DNA, 15 bp, Homo sapiens
tctaggctttttctg

SEQ ID NO: 1712376 - DNA, 15 bp, Homo sapiens
ctaggctttttctgg

SEQ ID NO: 1712377 - DNA, 15 bp, Homo sapiens
taggctttttctgga

SEQ ID NO: 1712378 - DNA, 15 bp, Homo sapiens
aggctttttctggaa

SEQ ID NO: 1712379 - DNA, 15 bp, Homo sapiens
ggctttttctggaag

SEQ ID NO: 1712380 - DNA, 15 bp, Homo sapiens
gctttttctggaagc

SEQ ID NO: 1712381 - DNA, 15 bp, Homo sapiens
ctttttctggaagca

SEQ ID NO: 1712382 - DNA, 15 bp, Homo sapiens
tttttctggaagcac

SEQ ID NO: 1712383 - DNA, 15 bp, Homo sapiens
ttttctggaagcaca

SEQ ID NO: 1712384 - DNA, 15 bp, Homo sapiens
tttctggaagcacat

SEQ ID NO: 1712385 - DNA, 15 bp, Homo sapiens
ttctggaagcacatg

SEQ ID NO: 1712386 - DNA, 15 bp, Homo sapiens
tctggaagcacatgt

SEQ ID NO: 1712387 - DNA, 15 bp, Homo sapiens
ctggaagcacatgtg

SEQ ID NO: 1712388 - DNA, 15 bp, Homo sapiens
tggaagcacatgtgt

SEQ ID NO: 1712389 - DNA, 15 bp, Homo sapiens
ggaagcacatgtgtt

SEQ ID NO: 1712390 - DNA, 15 bp, Homo sapiens
gaagcacatgtgttt

SEQ ID NO: 1712391 - DNA, 15 bp, Homo sapiens
aagcacatgtgtttc

SEQ ID NO: 1712392 - DNA, 15 bp, Homo sapiens
agcacatgtgtttcc

SEQ ID NO: 1712393 - DNA, 15 bp, Homo sapiens
gcacatgtgtttccc

SEQ ID NO: 1712394 - DNA, 15 bp, Homo sapiens
cacatgtgtttccca

SEQ ID NO: 1712395 - DNA, 15 bp, Homo sapiens
acatgtgtttcccat

SEQ ID NO: 1712396 - DNA, 15 bp, Homo sapiens
catgtgtttcccata

SEQ ID NO: 1712397 - DNA, 15 bp, Homo sapiens
atgtgtttcccatag

SEQ ID NO: 1712398 - DNA, 15 bp, Homo sapiens
tgtgtttcccataga

SEQ ID NO: 1712399 - DNA, 15 bp, Homo sapiens
gtgtttcccatagac

SEQ ID NO: 1712400 - DNA, 15 bp, Homo sapiens
tgtttcccatagact

SEQ ID NO: 1712401 - DNA, 15 bp, Homo sapiens
gtttcccatagactt

SEQ ID NO: 1712402 - DNA, 15 bp, Homo sapiens
tttcccatagactta

SEQ ID NO: 1712403 - DNA, 15 bp, Homo sapiens
ttcccatagacttag

SEQ ID NO: 1712404 - DNA, 15 bp, Homo sapiens
tcccatagacttagg

SEQ ID NO: 1712405 - DNA, 15 bp, Homo sapiens
cccatagacttaggg

SEQ ID NO: 1712406 - DNA, 15 bp, Homo sapiens
ccatagacttagggt

SEQ ID NO: 1712407 - DNA, 15 bp, Homo sapiens
catagacttagggtt

SEQ ID NO: 1712408 - DNA, 15 bp, Homo sapiens
atagacttagggtta

SEQ ID NO: 1712409 - DNA, 15 bp, Homo sapiens
tagacttagggttac

SEQ ID NO: 1712410 - DNA, 15 bp, Homo sapiens
agacttagggttaca

SEQ ID NO: 1712411 - DNA, 15 bp, Homo sapiens
gacttagggttacac

SEQ ID NO: 1712412 - DNA, 15 bp, Homo sapiens
acttagggttacact

SEQ ID NO: 1712413 - DNA, 15 bp, Homo sapiens
cttagggttacactc

SEQ ID NO: 1712414 - DNA, 15 bp, Homo sapiens
ttagggttacactct

SEQ ID NO: 1712415 - DNA, 15 bp, Homo sapiens
tagggttacactcta

SEQ ID NO: 1712416 - DNA, 15 bp, Homo sapiens
agggttacactctac

SEQ ID NO: 1712417 - DNA, 15 bp, Homo sapiens
gggttacactctaca

SEQ ID NO: 1712418 - DNA, 15 bp, Homo sapiens
ggttacactctacat

SEQ ID NO: 1712419 - DNA, 15 bp, Homo sapiens
gttacactctacata

SEQ ID NO: 1712420 - DNA, 15 bp, Homo sapiens
ttacactctacatat

SEQ ID NO: 1712421 - DNA, 15 bp, Homo sapiens
tacactctacatatg

SEQ ID NO: 1712422 - DNA, 15 bp, Homo sapiens
acactctacatatgt

SEQ ID NO: 1712423 - DNA, 15 bp, Homo sapiens
cactctacatatgtg

SEQ ID NO: 1712424 - DNA, 15 bp, Homo sapiens
actctacatatgtgt

SEQ ID NO: 1712425 - DNA, 15 bp, Homo sapiens
ctctacatatgtgtt

SEQ ID NO: 1712426 - DNA, 15 bp, Homo sapiens
tctacatatgtgttg

SEQ ID NO: 1712427 - DNA, 15 bp, Homo sapiens
ctacatatgtgttgc

SEQ ID NO: 1712428 - DNA, 15 bp, Homo sapiens
tacatatgtgttgca

SEQ ID NO: 1712429 - DNA, 15 bp, Homo sapiens
acatatgtgttgcag

SEQ ID NO: 1712430 - DNA, 15 bp, Homo sapiens
catatgtgttgcagt

SEQ ID NO: 1712431 - DNA, 15 bp, Homo sapiens
atatgtgttgcagtc

SEQ ID NO: 1712432 - DNA, 15 bp, Homo sapiens
tatgtgttgcagtct

SEQ ID NO: 1712433 - DNA, 15 bp, Homo sapiens
atgtgttgcagtctt

SEQ ID NO: 1712434 - DNA, 15 bp, Homo sapiens
tgtgttgcagtcttt

SEQ ID NO: 1712435 - DNA, 15 bp, Homo sapiens
gtgttgcagtctttc

SEQ ID NO: 1712436 - DNA, 15 bp, Homo sapiens
tgttgcagtctttct

SEQ ID NO: 1712437 - DNA, 15 bp, Homo sapiens
gttgcagtctttctt

SEQ ID NO: 1712438 - DNA, 15 bp, Homo sapiens
ttgcagtctttcttg

SEQ ID NO: 1712439 - DNA, 15 bp, Homo sapiens
tgcagtctttcttgt

SEQ ID NO: 1712440 - DNA, 15 bp, Homo sapiens
gcagtctttcttgtt

SEQ ID NO: 1712441 - DNA, 15 bp, Homo sapiens
cagtctttcttgttt

SEQ ID NO: 1712442 - DNA, 15 bp, Homo sapiens
agtctttcttgtttc

SEQ ID NO: 1712443 - DNA, 15 bp, Homo sapiens
gtctttcttgtttcc

SEQ ID NO: 1712444 - DNA, 15 bp, Homo sapiens
tctttcttgtttccc

SEQ ID NO: 1712445 - DNA, 15 bp, Homo sapiens
ctttcttgtttcccc

SEQ ID NO: 1712446 - DNA, 15 bp, Homo sapiens
tttcttgtttcccct

SEQ ID NO: 1712447 - DNA, 15 bp, Homo sapiens
ttcttgtttcccctg

SEQ ID NO: 1712448 - DNA, 15 bp, Homo sapiens
tcttgtttcccctga

SEQ ID NO: 1712449 - DNA, 15 bp, Homo sapiens
cttgtttcccctgaa

SEQ ID NO: 1712450 - DNA, 15 bp, Homo sapiens
ttgtttcccctgaaa

SEQ ID NO: 1712451 - DNA, 15 bp, Homo sapiens
tgtttcccctgaaat

SEQ ID NO: 1712452 - DNA, 15 bp, Homo sapiens
gtttcccctgaaata

SEQ ID NO: 1712453 - DNA, 15 bp, Homo sapiens
tttcccctgaaataa

SEQ ID NO: 1712454 - DNA, 15 bp, Homo sapiens
ttcccctgaaataat

SEQ ID NO: 1712455 - DNA, 15 bp, Homo sapiens
tcccctgaaataatc

SEQ ID NO: 1712456 - DNA, 15 bp, Homo sapiens
cccctgaaataatct

SEQ ID NO: 1712457 - DNA, 15 bp, Homo sapiens
ccctgaaataatcta

SEQ ID NO: 1712458 - DNA, 15 bp, Homo sapiens
cctgaaataatctaa

SEQ ID NO: 1712459 - DNA, 15 bp, Homo sapiens
ctgaaataatctaag

SEQ ID NO: 1712460 - DNA, 15 bp, Homo sapiens
tgaaataatctaagg

SEQ ID NO: 1712461 - DNA, 15 bp, Homo sapiens
gaaataatctaaggt

SEQ ID NO: 1712462 - DNA, 15 bp, Homo sapiens
aaataatctaaggtg

SEQ ID NO: 1712463 - DNA, 15 bp, Homo sapiens
aataatctaaggtga

SEQ ID NO: 1712464 - DNA, 15 bp, Homo sapiens
ataatctaaggtgaa

SEQ ID NO: 1712465 - DNA, 15 bp, Homo sapiens
taatctaaggtgaac

SEQ ID NO: 1712466 - DNA, 15 bp, Homo sapiens
aatctaaggtgaaca

SEQ ID NO: 1712467 - DNA, 15 bp, Homo sapiens
atctaaggtgaacat

SEQ ID NO: 1712468 - DNA, 15 bp, Homo sapiens
tctaaggtgaacata

SEQ ID NO: 1712469 - DNA, 15 bp, Homo sapiens
ctaaggtgaacatat

SEQ ID NO: 1712470 - DNA, 15 bp, Homo sapiens
taaggtgaacatatt

SEQ ID NO: 1712471 - DNA, 15 bp, Homo sapiens
aaggtgaacatattt

SEQ ID NO: 1712472 - DNA, 15 bp, Homo sapiens
aggtgaacatatttt

SEQ ID NO: 1712473 - DNA, 15 bp, Homo sapiens
ggtgaacatattttc

SEQ ID NO: 1712474 - DNA, 15 bp, Homo sapiens
gtgaacatattttca

SEQ ID NO: 1712475 - DNA, 15 bp, Homo sapiens
tgaacatattttcat

SEQ ID NO: 1712476 - DNA, 15 bp, Homo sapiens
gaacatattttcata

SEQ ID NO: 1712477 - DNA, 15 bp, Homo sapiens
aacatattttcataa

SEQ ID NO: 1712478 - DNA, 15 bp, Homo sapiens
acatattttcataat

SEQ ID NO: 1712479 - DNA, 15 bp, Homo sapiens
catattttcataatt

SEQ ID NO: 1712480 - DNA, 15 bp, Homo sapiens
atattttcataatta

SEQ ID NO: 1712481 - DNA, 15 bp, Homo sapiens
tattttcataattat

SEQ ID NO: 1712482 - DNA, 15 bp, Homo sapiens
attttcataattatg

SEQ ID NO: 1712483 - DNA, 15 bp, Homo sapiens
ttttcataattatgt

SEQ ID NO: 1712484 - DNA, 15 bp, Homo sapiens
tttcataattatgta

SEQ ID NO: 1712485 - DNA, 15 bp, Homo sapiens
ttcataattatgtat

SEQ ID NO: 1712486 - DNA, 15 bp, Homo sapiens
tcataattatgtatt

SEQ ID NO: 1712487 - DNA, 15 bp, Homo sapiens
cataattatgtattc

SEQ ID NO: 1712488 - DNA, 15 bp, Homo sapiens
ataattatgtattct

SEQ ID NO: 1712489 - DNA, 15 bp, Homo sapiens
taattatgtattctt

SEQ ID NO: 1712490 - DNA, 15 bp, Homo sapiens
aattatgtattcttc

SEQ ID NO: 1712491 - DNA, 15 bp, Homo sapiens
attatgtattcttct

SEQ ID NO: 1712492 - DNA, 15 bp, Homo sapiens
ttatgtattcttcta

SEQ ID NO: 1712493 - DNA, 15 bp, Homo sapiens
tatgtattcttctac

SEQ ID NO: 1712494 - DNA, 15 bp, Homo sapiens
atgtattcttctaca

SEQ ID NO: 1712495 - DNA, 15 bp, Homo sapiens
tgtattcttctacag

SEQ ID NO: 1712496 - DNA, 15 bp, Homo sapiens
gtattcttctacagt

SEQ ID NO: 1712497 - DNA, 15 bp, Homo sapiens
tattcttctacagta

SEQ ID NO: 1712498 - DNA, 15 bp, Homo sapiens
attcttctacagtag

SEQ ID NO: 1712499 - DNA, 15 bp, Homo sapiens
ttcttctacagtaga

SEQ ID NO: 1712500 - DNA, 15 bp, Homo sapiens
tcttctacagtagat

SEQ ID NO: 1712501 - DNA, 15 bp, Homo sapiens
cttctacagtagatt

SEQ ID NO: 1712502 - DNA, 15 bp, Homo sapiens
tctacagtagatttt

SEQ ID NO: 1712503 - DNA, 15 bp, Homo sapiens
ctacagtagattttt

SEQ ID NO: 1712504 - DNA, 15 bp, Homo sapiens
tacagtagattttta

SEQ ID NO: 1712505 - DNA, 15 bp, Homo sapiens
acagtagatttttaa

SEQ ID NO: 1712506 - DNA, 15 bp, Homo sapiens
cagtagatttttaat

SEQ ID NO: 1712507 - DNA, 15 bp, Homo sapiens
agtagatttttaatg

SEQ ID NO: 1712508 - DNA, 15 bp, Homo sapiens
gtagatttttaatga

SEQ ID NO: 1712509 - DNA, 15 bp, Homo sapiens
tagatttttaatgag

SEQ ID NO: 1712510 - DNA, 15 bp, Homo sapiens
agatttttaatgagt

SEQ ID NO: 1712511 - DNA, 15 bp, Homo sapiens
gatttttaatgagtg

SEQ ID NO: 1712512 - DNA, 15 bp, Homo sapiens
atttttaatgagtgc

SEQ ID NO: 1712513 - DNA, 15 bp, Homo sapiens
tttttaatgagtgca

SEQ ID NO: 1712514 - DNA, 15 bp, Homo sapiens
ttttaatgagtgcac

SEQ ID NO: 1712515 - DNA, 15 bp, Homo sapiens
tttaatgagtgcaca

SEQ ID NO: 1712516 - DNA, 15 bp, Homo sapiens
ttaatgagtgcacaa

SEQ ID NO: 1712517 - DNA, 15 bp, Homo sapiens
taatgagtgcacaat

SEQ ID NO: 1712518 - DNA, 15 bp, Homo sapiens
aatgagtgcacaata

SEQ ID NO: 1712519 - DNA, 15 bp, Homo sapiens
atgagtgcacaatac

SEQ ID NO: 1712520 - DNA, 15 bp, Homo sapiens
tgagtgcacaatact

SEQ ID NO: 1712521 - DNA, 15 bp, Homo sapiens
gagtgcacaatactt

SEQ ID NO: 1712522 - DNA, 15 bp, Homo sapiens
agtgcacaatacttc

SEQ ID NO: 1712523 - DNA, 15 bp, Homo sapiens
gtgcacaatacttca

SEQ ID NO: 1712524 - DNA, 15 bp, Homo sapiens
tgcacaatacttcat

SEQ ID NO: 1712525 - DNA, 15 bp, Homo sapiens
gcacaatacttcatt

SEQ ID NO: 1712526 - DNA, 15 bp, Homo sapiens
cacaatacttcattc

SEQ ID NO: 1712527 - DNA, 15 bp, Homo sapiens
acaatacttcattct

SEQ ID NO: 1712528 - DNA, 15 bp, Homo sapiens
caatacttcattctc

SEQ ID NO: 1712529 - DNA, 15 bp, Homo sapiens
aatacttcattctca

SEQ ID NO: 1712530 - DNA, 15 bp, Homo sapiens
atacttcattctcat

SEQ ID NO: 1712531 - DNA, 15 bp, Homo sapiens
tacttcattctcatc

SEQ ID NO: 1712532 - DNA, 15 bp, Homo sapiens
acttcattctcatct

SEQ ID NO: 1712533 - DNA, 15 bp, Homo sapiens
cttcattctcatcta

SEQ ID NO: 1712534 - DNA, 15 bp, Homo sapiens
ttcattctcatctac

SEQ ID NO: 1712535 - DNA, 15 bp, Homo sapiens
tcattctcatctact

SEQ ID NO: 1712536 - DNA, 15 bp, Homo sapiens
cattctcatctactg

SEQ ID NO: 1712537 - DNA, 15 bp, Homo sapiens
attctcatctactgt

SEQ ID NO: 1712538 - DNA, 15 bp, Homo sapiens
ttctcatctactgtc

SEQ ID NO: 1712539 - DNA, 15 bp, Homo sapiens
tctcatctactgtca

SEQ ID NO: 1712540 - DNA, 15 bp, Homo sapiens
ctcatctactgtcat

SEQ ID NO: 1712541 - DNA, 15 bp, Homo sapiens
tcatctactgtcatg

SEQ ID NO: 1712542 - DNA, 15 bp, Homo sapiens
catctactgtcatgt

SEQ ID NO: 1712543 - DNA, 15 bp, Homo sapiens
atctactgtcatgtc

SEQ ID NO: 1712544 - DNA, 15 bp, Homo sapiens
tctactgtcatgtct

SEQ ID NO: 1712545 - DNA, 15 bp, Homo sapiens
ctactgtcatgtctt

SEQ ID NO: 1712546 - DNA, 15 bp, Homo sapiens
tactgtcatgtctta

SEQ ID NO: 1712547 - DNA, 15 bp, Homo sapiens
actgtcatgtcttaa

SEQ ID NO: 1712548 - DNA, 15 bp, Homo sapiens
ctgtcatgtcttaaa

SEQ ID NO: 1712549 - DNA, 15 bp, Homo sapiens
tgtcatgtcttaaag

SEQ ID NO: 1712550 - DNA, 15 bp, Homo sapiens
gtcatgtcttaaagg

SEQ ID NO: 1712551 - DNA, 15 bp, Homo sapiens
tcatgtcttaaagga

SEQ ID NO: 1712552 - DNA, 15 bp, Homo sapiens
catgtcttaaaggat

SEQ ID NO: 1712553 - DNA, 15 bp, Homo sapiens
atgtcttaaaggatt

SEQ ID NO: 1712554 - DNA, 15 bp, Homo sapiens
tgtcttaaaggattc

SEQ ID NO: 1712555 - DNA, 15 bp, Homo sapiens
gtcttaaaggattct

SEQ ID NO: 1712556 - DNA, 15 bp, Homo sapiens
tcttaaaggattctc

SEQ ID NO: 1712557 - DNA, 15 bp, Homo sapiens
cttaaaggattctct

SEQ ID NO: 1712558 - DNA, 15 bp, Homo sapiens
ttaaaggattctcta

SEQ ID NO: 1712559 - DNA, 15 bp, Homo sapiens
taaaggattctctag

SEQ ID NO: 1712560 - DNA, 15 bp, Homo sapiens
aaaggattctctagt

SEQ ID NO: 1712561 - DNA, 15 bp, Homo sapiens
aaggattctctagtt

SEQ ID NO: 1712562 - DNA, 15 bp, Homo sapiens
aggattctctagtta

SEQ ID NO: 1712563 - DNA, 15 bp, Homo sapiens
ggattctctagttac

SEQ ID NO: 1712564 - DNA, 15 bp, Homo sapiens
gattctctagttacg

SEQ ID NO: 1712565 - DNA, 15 bp, Homo sapiens
attctctagttacgt

SEQ ID NO: 1712566 - DNA, 15 bp, Homo sapiens
ttctctagttacgtt

SEQ ID NO: 1712567 - DNA, 15 bp, Homo sapiens
tctctagttacgttt

SEQ ID NO: 1712568 - DNA, 15 bp, Homo sapiens
ctctagttacgtttt

SEQ ID NO: 1712569 - DNA, 15 bp, Homo sapiens
tctagttacgttttt

SEQ ID NO: 1712570 - DNA, 15 bp, Homo sapiens
ctagttacgtttttc

SEQ ID NO: 1712571 - DNA, 15 bp, Homo sapiens
tagttacgtttttcc

SEQ ID NO: 1712572 - DNA, 15 bp, Homo sapiens
agttacgtttttccc

SEQ ID NO: 1712573 - DNA, 15 bp, Homo sapiens
gttacgtttttcccc

SEQ ID NO: 1712574 - DNA, 15 bp, Homo sapiens
ttacgtttttcccct

SEQ ID NO: 1712575 - DNA, 15 bp, Homo sapiens
tacgtttttccccta

SEQ ID NO: 1712576 - DNA, 15 bp, Homo sapiens
acgtttttcccctag

SEQ ID NO: 1712577 - DNA, 15 bp, Homo sapiens
cgtttttcccctagg

SEQ ID NO: 1712578 - DNA, 15 bp, Homo sapiens
gtttttcccctaggt

SEQ ID NO: 1712579 - DNA, 15 bp, Homo sapiens
tttttcccctaggtt

SEQ ID NO: 1712580 - DNA, 15 bp, Homo sapiens
ttttcccctaggttt

SEQ ID NO: 1712581 - DNA, 15 bp, Homo sapiens
tttcccctaggtttt

SEQ ID NO: 1712582 - DNA, 15 bp, Homo sapiens
ttcccctaggttttt

SEQ ID NO: 1712583 - DNA, 15 bp, Homo sapiens
tcccctaggtttttc

SEQ ID NO: 1712584 - DNA, 15 bp, Homo sapiens
cccctaggtttttct

SEQ ID NO: 1712585 - DNA, 15 bp, Homo sapiens
ccctaggtttttctc

SEQ ID NO: 1712586 - DNA, 15 bp, Homo sapiens
cctaggtttttctcc

SEQ ID NO: 1712587 - DNA, 15 bp, Homo sapiens
ctaggtttttctcct

SEQ ID NO: 1712588 - DNA, 15 bp, Homo sapiens
taggtttttctcctc

SEQ ID NO: 1712589 - DNA, 15 bp, Homo sapiens
aggtttttctcctcc

SEQ ID NO: 1712590 - DNA, 15 bp, Homo sapiens
ggtttttctcctcct

SEQ ID NO: 1712591 - DNA, 15 bp, Homo sapiens
gtttttctcctcctt

SEQ ID NO: 1712592 - DNA, 15 bp, Homo sapiens
tttttctcctcctta

SEQ ID NO: 1712593 - DNA, 15 bp, Homo sapiens
ttttctcctccttat

SEQ ID NO: 1712594 - DNA, 15 bp, Homo sapiens
tttctcctccttata

SEQ ID NO: 1712595 - DNA, 15 bp, Homo sapiens
ttctcctccttataa

SEQ ID NO: 1712596 - DNA, 15 bp, Homo sapiens
tctcctccttataag

SEQ ID NO: 1712597 - DNA, 15 bp, Homo sapiens
ctcctccttataagc

SEQ ID NO: 1712598 - DNA, 15 bp, Homo sapiens
tcctccttataagca

SEQ ID NO: 1712599 - DNA, 15 bp, Homo sapiens
cctccttataagcaa

SEQ ID NO: 1712600 - DNA, 15 bp, Homo sapiens
ctccttataagcaat

SEQ ID NO: 1712601 - DNA, 15 bp, Homo sapiens
tccttataagcaatt

SEQ ID NO: 1712602 - DNA, 15 bp, Homo sapiens
ccttataagcaattt

SEQ ID NO: 1712603 - DNA, 15 bp, Homo sapiens
cttataagcaattta

SEQ ID NO: 1712604 - DNA, 15 bp, Homo sapiens
ttataagcaatttat

SEQ ID NO: 1712605 - DNA, 15 bp, Homo sapiens
tataagcaatttata

SEQ ID NO: 1712606 - DNA, 15 bp, Homo sapiens
ataagcaatttatat

SEQ ID NO: 1712607 - DNA, 15 bp, Homo sapiens
taagcaatttatatc

SEQ ID NO: 1712608 - DNA, 15 bp, Homo sapiens
aagcaatttatatca

SEQ ID NO: 1712609 - DNA, 15 bp, Homo sapiens
agcaatttatatcat

SEQ ID NO: 1712610 - DNA, 15 bp, Homo sapiens
gcaatttatatcatt

SEQ ID NO: 1712611 - DNA, 15 bp, Homo sapiens
caatttatatcattt

SEQ ID NO: 1712612 - DNA, 15 bp, Homo sapiens
aatttatatcatttt

SEQ ID NO: 1712613 - DNA, 15 bp, Homo sapiens
atttatatcatttta

SEQ ID NO: 1712614 - DNA, 15 bp, Homo sapiens
tttatatcattttat

SEQ ID NO: 1712615 - DNA, 15 bp, Homo sapiens
ttatatcattttata

SEQ ID NO: 1712616 - DNA, 15 bp, Homo sapiens
atatcattttatatc

SEQ ID NO: 1712617 - DNA, 15 bp, Homo sapiens
tatcattttatatcg

SEQ ID NO: 1712618 - DNA, 15 bp, Homo sapiens
atcattttatatcga

SEQ ID NO: 1712619 - DNA, 15 bp, Homo sapiens
tcattttatatcgag

SEQ ID NO: 1712620 - DNA, 15 bp, Homo sapiens
cattttatatcgagc

SEQ ID NO: 1712621 - DNA, 15 bp, Homo sapiens
attttatatcgagct

SEQ ID NO: 1712622 - DNA, 15 bp, Homo sapiens
ttttatatcgagctt

SEQ ID NO: 1712623 - DNA, 15 bp, Homo sapiens
tttatatcgagcttg

SEQ ID NO: 1712624 - DNA, 15 bp, Homo sapiens
ttatatcgagcttgc

SEQ ID NO: 1712625 - DNA, 15 bp, Homo sapiens
tatatcgagcttgcc

SEQ ID NO: 1712626 - DNA, 15 bp, Homo sapiens
atatcgagcttgcca

SEQ ID NO: 1712627 - DNA, 15 bp, Homo sapiens
tatcgagcttgccac

SEQ ID NO: 1712628 - DNA, 15 bp, Homo sapiens
atcgagcttgccaca

SEQ ID NO: 1712629 - DNA, 15 bp, Homo sapiens
tcgagcttgccacat

SEQ ID NO: 1712630 - DNA, 15 bp, Homo sapiens
cgagcttgccacatc

SEQ ID NO: 1712631 - DNA, 15 bp, Homo sapiens
gagcttgccacatcc

SEQ ID NO: 1712632 - DNA, 15 bp, Homo sapiens
agcttgccacatcct

SEQ ID NO: 1712633 - DNA, 15 bp, Homo sapiens
gcttgccacatcctt

SEQ ID NO: 1712634 - DNA, 15 bp, Homo sapiens
cttgccacatccttg

SEQ ID NO: 1712635 - DNA, 15 bp, Homo sapiens
ttgccacatccttga

SEQ ID NO: 1712636 - DNA, 15 bp, Homo sapiens
tgccacatccttgat

SEQ ID NO: 1712637 - DNA, 15 bp, Homo sapiens
gccacatccttgatt

SEQ ID NO: 1712638 - DNA, 15 bp, Homo sapiens
ccacatccttgatta

SEQ ID NO: 1712639 - DNA, 15 bp, Homo sapiens
cacatccttgattat

SEQ ID NO: 1712640 - DNA, 15 bp, Homo sapiens
acatccttgattatt

SEQ ID NO: 1712641 - DNA, 15 bp, Homo sapiens
catccttgattattt

SEQ ID NO: 1712642 - DNA, 15 bp, Homo sapiens
atccttgattatttt

SEQ ID NO: 1712643 - DNA, 15 bp, Homo sapiens
tccttgattattttc

SEQ ID NO: 1712644 - DNA, 15 bp, Homo sapiens
ccttgattattttct

SEQ ID NO: 1712645 - DNA, 15 bp, Homo sapiens
cttgattattttctt

SEQ ID NO: 1712646 - DNA, 15 bp, Homo sapiens
ttgattattttctta

SEQ ID NO: 1712647 - DNA, 15 bp, Homo sapiens
tgattattttcttag

SEQ ID NO: 1712648 - DNA, 15 bp, Homo sapiens
gattattttcttagt

SEQ ID NO: 1712649 - DNA, 15 bp, Homo sapiens
attattttcttagtt

SEQ ID NO: 1712650 - DNA, 15 bp, Homo sapiens
ttattttcttagttc

SEQ ID NO: 1712651 - DNA, 15 bp, Homo sapiens
tattttcttagttct

SEQ ID NO: 1712652 - DNA, 15 bp, Homo sapiens
attttcttagttctc

SEQ ID NO: 1712653 - DNA, 15 bp, Homo sapiens
ttttcttagttctca

SEQ ID NO: 1712654 - DNA, 15 bp, Homo sapiens
tttcttagttctcaa

SEQ ID NO: 1712655 - DNA, 15 bp, Homo sapiens
ttcttagttctcaaa

SEQ ID NO: 1712656 - DNA, 15 bp, Homo sapiens
tcttagttctcaaaa

SEQ ID NO: 1712657 - DNA, 15 bp, Homo sapiens
cttagttctcaaaat

SEQ ID NO: 1712658 - DNA, 15 bp, Homo sapiens
ttagttctcaaaatg

SEQ ID NO: 1712659 - DNA, 15 bp, Homo sapiens
tagttctcaaaatgt

SEQ ID NO: 1712660 - DNA, 15 bp, Homo sapiens
agttctcaaaatgta

SEQ ID NO: 1712661 - DNA, 15 bp, Homo sapiens
gttctcaaaatgtaa

SEQ ID NO: 1712662 - DNA, 15 bp, Homo sapiens
ttctcaaaatgtaat

SEQ ID NO: 1712663 - DNA, 15 bp, Homo sapiens
tctcaaaatgtaatc

SEQ ID NO: 1712664 - DNA, 15 bp, Homo sapiens
ctcaaaatgtaatca

SEQ ID NO: 1712665 - DNA, 15 bp, Homo sapiens
tcaaaatgtaatcac

SEQ ID NO: 1712666 - DNA, 15 bp, Homo sapiens
caaaatgtaatcact

SEQ ID NO: 1712667 - DNA, 15 bp, Homo sapiens
aaaatgtaatcactc

SEQ ID NO: 1712668 - DNA, 15 bp, Homo sapiens
aaatgtaatcactca

SEQ ID NO: 1712669 - DNA, 15 bp, Homo sapiens
aatgtaatcactcaa

SEQ ID NO: 1712670 - DNA, 15 bp, Homo sapiens
atgtaatcactcaat

SEQ ID NO: 1712671 - DNA, 15 bp, Homo sapiens
tgtaatcactcaatc

SEQ ID NO: 1712672 - DNA, 15 bp, Homo sapiens
gtaatcactcaatca

SEQ ID NO: 1712673 - DNA, 15 bp, Homo sapiens
taatcactcaatcag

SEQ ID NO: 1712674 - DNA, 15 bp, Homo sapiens
aatcactcaatcagt

SEQ ID NO: 1712675 - DNA, 15 bp, Homo sapiens
atcactcaatcagtg

SEQ ID NO: 1712676 - DNA, 15 bp, Homo sapiens
tcactcaatcagtgt

SEQ ID NO: 1712677 - DNA, 15 bp, Homo sapiens
cactcaatcagtgta

SEQ ID NO: 1712678 - DNA, 15 bp, Homo sapiens
actcaatcagtgtat

SEQ ID NO: 1712679 - DNA, 15 bp, Homo sapiens
ctcaatcagtgtata

SEQ ID NO: 1712680 - DNA, 15 bp, Homo sapiens
tcaatcagtgtataa

SEQ ID NO: 1712681 - DNA, 15 bp, Homo sapiens
caatcagtgtataat

SEQ ID NO: 1712682 - DNA, 15 bp, Homo sapiens
aatcagtgtataatc

SEQ ID NO: 1712683 - DNA, 15 bp, Homo sapiens
atcagtgtataatca

SEQ ID NO: 1712684 - DNA, 15 bp, Homo sapiens
tcagtgtataatcat

SEQ ID NO: 1712685 - DNA, 15 bp, Homo sapiens
cagtgtataatcatt

SEQ ID NO: 1712686 - DNA, 15 bp, Homo sapiens
agtgtataatcattt

SEQ ID NO: 1712687 - DNA, 15 bp, Homo sapiens
gtgtataatcatttt

SEQ ID NO: 1712688 - DNA, 15 bp, Homo sapiens
tgtataatcattttg

SEQ ID NO: 1712689 - DNA, 15 bp, Homo sapiens
gtataatcattttgg

SEQ ID NO: 1712690 - DNA, 15 bp, Homo sapiens
tataatcattttgga

SEQ ID NO: 1712691 - DNA, 15 bp, Homo sapiens
ataatcattttggaa

SEQ ID NO: 1712692 - DNA, 15 bp, Homo sapiens
taatcattttggaag

SEQ ID NO: 1712693 - DNA, 15 bp, Homo sapiens
aatcattttggaaga

SEQ ID NO: 1712694 - DNA, 15 bp, Homo sapiens
atcattttggaagat

SEQ ID NO: 1712695 - DNA, 15 bp, Homo sapiens
tcattttggaagatt

SEQ ID NO: 1712696 - DNA, 15 bp, Homo sapiens
cattttggaagattt

SEQ ID NO: 1712697 - DNA, 15 bp, Homo sapiens
attttggaagatttt

SEQ ID NO: 1712698 - DNA, 15 bp, Homo sapiens
ttttggaagattttg

SEQ ID NO: 1712699 - DNA, 15 bp, Homo sapiens
tttggaagattttga

SEQ ID NO: 1712700 - DNA, 15 bp, Homo sapiens
ttggaagattttgat

SEQ ID NO: 1712701 - DNA, 15 bp, Homo sapiens
tggaagattttgata

SEQ ID NO: 1712702 - DNA, 15 bp, Homo sapiens
ggaagattttgatat

SEQ ID NO: 1712703 - DNA, 15 bp, Homo sapiens
gaagattttgatatg

SEQ ID NO: 1712704 - DNA, 15 bp, Homo sapiens
aagattttgatatgc

SEQ ID NO: 1712705 - DNA, 15 bp, Homo sapiens
agattttgatatgca

SEQ ID NO: 1712706 - DNA, 15 bp, Homo sapiens
gattttgatatgcat

SEQ ID NO: 1712707 - DNA, 15 bp, Homo sapiens
attttgatatgcatt

SEQ ID NO: 1712708 - DNA, 15 bp, Homo sapiens
ttttgatatgcattg

SEQ ID NO: 1712709 - DNA, 15 bp, Homo sapiens
tttgatatgcattgc

SEQ ID NO: 1712710 - DNA, 15 bp, Homo sapiens
ttgatatgcattgca

SEQ ID NO: 1712711 - DNA, 15 bp, Homo sapiens
tgatatgcattgcat

SEQ ID NO: 1712712 - DNA, 15 bp, Homo sapiens
gatatgcattgcata

SEQ ID NO: 1712713 - DNA, 15 bp, Homo sapiens
atatgcattgcataa

SEQ ID NO: 1712714 - DNA, 15 bp, Homo sapiens
tatgcattgcataac

SEQ ID NO: 1712715 - DNA, 15 bp, Homo sapiens
atgcattgcataact

SEQ ID NO: 1712716 - DNA, 15 bp, Homo sapiens
tgcattgcataactg

SEQ ID NO: 1712717 - DNA, 15 bp, Homo sapiens
gcattgcataactgc

SEQ ID NO: 1712718 - DNA, 15 bp, Homo sapiens
cattgcataactgct

SEQ ID NO: 1712719 - DNA, 15 bp, Homo sapiens
attgcataactgctt

SEQ ID NO: 1712720 - DNA, 15 bp, Homo sapiens
ttgcataactgctta

SEQ ID NO: 1712721 - DNA, 15 bp, Homo sapiens
tgcataactgcttaa

SEQ ID NO: 1712722 - DNA, 15 bp, Homo sapiens
gcataactgcttaaa

SEQ ID NO: 1712723 - DNA, 15 bp, Homo sapiens
cataactgcttaaag

SEQ ID NO: 1712724 - DNA, 15 bp, Homo sapiens
ataactgcttaaaga

SEQ ID NO: 1712725 - DNA, 15 bp, Homo sapiens
taactgcttaaagaa

SEQ ID NO: 1712726 - DNA, 15 bp, Homo sapiens
aactgcttaaagaaa

SEQ ID NO: 1712727 - DNA, 15 bp, Homo sapiens
actgcttaaagaaac

SEQ ID NO: 1712728 - DNA, 15 bp, Homo sapiens
ctgcttaaagaaact

SEQ ID NO: 1712729 - DNA, 15 bp, Homo sapiens
tgcttaaagaaactt

SEQ ID NO: 1712730 - DNA, 15 bp, Homo sapiens
gcttaaagaaacttt

SEQ ID NO: 1712731 - DNA, 15 bp, Homo sapiens
cttaaagaaactttg

SEQ ID NO: 1712732 - DNA, 15 bp, Homo sapiens
ttaaagaaactttgt

SEQ ID NO: 1712733 - DNA, 15 bp, Homo sapiens
taaagaaactttgtt

SEQ ID NO: 1712734 - DNA, 15 bp, Homo sapiens
aaagaaactttgttc

SEQ ID NO: 1712735 - DNA, 15 bp, Homo sapiens
aagaaactttgttcc

SEQ ID NO: 1712736 - DNA, 15 bp, Homo sapiens
agaaactttgttcca

SEQ ID NO: 1712737 - DNA, 15 bp, Homo sapiens
gaaactttgttccaa

SEQ ID NO: 1712738 - DNA, 15 bp, Homo sapiens
aaactttgttccaat

SEQ ID NO: 1712739 - DNA, 15 bp, Homo sapiens
aactttgttccaatt

SEQ ID NO: 1712740 - DNA, 15 bp, Homo sapiens
actttgttccaattt

SEQ ID NO: 1712741 - DNA, 15 bp, Homo sapiens
ctttgttccaatttc

SEQ ID NO: 1712742 - DNA, 15 bp, Homo sapiens
tttgttccaatttca

SEQ ID NO: 1712743 - DNA, 15 bp, Homo sapiens
ttgttccaatttcac

SEQ ID NO: 1712744 - DNA, 15 bp, Homo sapiens
tgttccaatttcact

SEQ ID NO: 1712745 - DNA, 15 bp, Homo sapiens
gttccaatttcactc

SEQ ID NO: 1712746 - DNA, 15 bp, Homo sapiens
ttccaatttcactct

SEQ ID NO: 1712747 - DNA, 15 bp, Homo sapiens
tccaatttcactctc

SEQ ID NO: 1712748 - DNA, 15 bp, Homo sapiens
ccaatttcactctca

SEQ ID NO: 1712749 - DNA, 15 bp, Homo sapiens
caatttcactctcat

SEQ ID NO: 1712750 - DNA, 15 bp, Homo sapiens
aatttcactctcatc

SEQ ID NO: 1712751 - DNA, 15 bp, Homo sapiens
atttcactctcatca

SEQ ID NO: 1712752 - DNA, 15 bp, Homo sapiens
tttcactctcatcat

SEQ ID NO: 1712753 - DNA, 15 bp, Homo sapiens
ttcactctcatcatt

SEQ ID NO: 1712754 - DNA, 15 bp, Homo sapiens
tcactctcatcattg

SEQ ID NO: 1712755 - DNA, 15 bp, Homo sapiens
cactctcatcattgg

SEQ ID NO: 1712756 - DNA, 15 bp, Homo sapiens
actctcatcattgga

SEQ ID NO: 1712757 - DNA, 15 bp, Homo sapiens
ctctcatcattggag

SEQ ID NO: 1712758 - DNA, 15 bp, Homo sapiens
tctcatcattggagt

SEQ ID NO: 1712759 - DNA, 15 bp, Homo sapiens
ctcatcattggagta

SEQ ID NO: 1712760 - DNA, 15 bp, Homo sapiens
tcatcattggagtac

SEQ ID NO: 1712761 - DNA, 15 bp, Homo sapiens
catcattggagtact

SEQ ID NO: 1712762 - DNA, 15 bp, Homo sapiens
atcattggagtactg

SEQ ID NO: 1712763 - DNA, 15 bp, Homo sapiens
tcattggagtactgt

SEQ ID NO: 1712764 - DNA, 15 bp, Homo sapiens
cattggagtactgta

SEQ ID NO: 1712765 - DNA, 15 bp, Homo sapiens
attggagtactgtag

SEQ ID NO: 1712766 - DNA, 15 bp, Homo sapiens
ttggagtactgtagt

SEQ ID NO: 1712767 - DNA, 15 bp, Homo sapiens
tggagtactgtagtc

SEQ ID NO: 1712768 - DNA, 15 bp, Homo sapiens
ggagtactgtagtct

SEQ ID NO: 1712769 - DNA, 15 bp, Homo sapiens
gagtactgtagtcta

SEQ ID NO: 1712770 - DNA, 15 bp, Homo sapiens
agtactgtagtctac

SEQ ID NO: 1712771 - DNA, 15 bp, Homo sapiens
gtactgtagtctact

SEQ ID NO: 1712772 - DNA, 15 bp, Homo sapiens
tactgtagtctactc

SEQ ID NO: 1712773 - DNA, 15 bp, Homo sapiens
actgtagtctactcc

SEQ ID NO: 1712774 - DNA, 15 bp, Homo sapiens
ctgtagtctactccc

SEQ ID NO: 1712775 - DNA, 15 bp, Homo sapiens
tgtagtctactccct

SEQ ID NO: 1712776 - DNA, 15 bp, Homo sapiens
gtagtctactccctt

SEQ ID NO: 1712777 - DNA, 15 bp, Homo sapiens
tagtctactcccttt

SEQ ID NO: 1712778 - DNA, 15 bp, Homo sapiens
agtctactcccttta

SEQ ID NO: 1712779 - DNA, 15 bp, Homo sapiens
gtctactccctttac

SEQ ID NO: 1712780 - DNA, 15 bp, Homo sapiens
tctactccctttact

SEQ ID NO: 1712781 - DNA, 15 bp, Homo sapiens
ctactccctttactc

SEQ ID NO: 1712782 - DNA, 15 bp, Homo sapiens
tactccctttactct

SEQ ID NO: 1712783 - DNA, 15 bp, Homo sapiens
actccctttactctt

SEQ ID NO: 1712784 - DNA, 15 bp, Homo sapiens
ctccctttactcttg

SEQ ID NO: 1712785 - DNA, 15 bp, Homo sapiens
tccctttactcttga

SEQ ID NO: 1712786 - DNA, 15 bp, Homo sapiens
ccctttactcttgaa

SEQ ID NO: 1712787 - DNA, 15 bp, Homo sapiens
cctttactcttgaat

SEQ ID NO: 1712788 - DNA, 15 bp, Homo sapiens
ctttactcttgaatt

SEQ ID NO: 1712789 - DNA, 15 bp, Homo sapiens
tttactcttgaattt

SEQ ID NO: 1712790 - DNA, 15 bp, Homo sapiens
ttactcttgaattta

SEQ ID NO: 1712791 - DNA, 15 bp, Homo sapiens
tactcttgaatttag

SEQ ID NO: 1712792 - DNA, 15 bp, Homo sapiens
actcttgaatttagg

SEQ ID NO: 1712793 - DNA, 15 bp, Homo sapiens
ctcttgaatttaggc

SEQ ID NO: 1712794 - DNA, 15 bp, Homo sapiens
tcttgaatttaggct

SEQ ID NO: 1712795 - DNA, 15 bp, Homo sapiens
cttgaatttaggcta

SEQ ID NO: 1712796 - DNA, 15 bp, Homo sapiens
ttgaatttaggctaa

SEQ ID NO: 1712797 - DNA, 15 bp, Homo sapiens
tgaatttaggctaaa

SEQ ID NO: 1712798 - DNA, 15 bp, Homo sapiens
gaatttaggctaaat

SEQ ID NO: 1712799 - DNA, 15 bp, Homo sapiens
aatttaggctaaata

SEQ ID NO: 1712800 - DNA, 15 bp, Homo sapiens
atttaggctaaataa

SEQ ID NO: 1712801 - DNA, 15 bp, Homo sapiens
tttaggctaaataaa

SEQ ID NO: 1712802 - DNA, 15 bp, Homo sapiens
ttaggctaaataaat

SEQ ID NO: 1712803 - DNA, 15 bp, Homo sapiens
taggctaaataaata

SEQ ID NO: 1712804 - DNA, 15 bp, Homo sapiens
aggctaaataaataa

SEQ ID NO: 1712805 - DNA, 15 bp, Homo sapiens
ggctaaataaataag

SEQ ID NO: 1712806 - DNA, 15 bp, Homo sapiens
gctaaataaataagt

SEQ ID NO: 1712807 - DNA, 15 bp, Homo sapiens
ctaaataaataagtc

SEQ ID NO: 1712808 - DNA, 15 bp, Homo sapiens
taaataaataagtca

SEQ ID NO: 1712809 - DNA, 15 bp, Homo sapiens
aaataaataagtcat

SEQ ID NO: 1712810 - DNA, 15 bp, Homo sapiens
aataaataagtcata

SEQ ID NO: 1712811 - DNA, 15 bp, Homo sapiens
ataaataagtcataa

SEQ ID NO: 1712812 - DNA, 15 bp, Homo sapiens
taaataagtcataat

SEQ ID NO: 1712813 - DNA, 15 bp, Homo sapiens
aaataagtcataatc

SEQ ID NO: 1712814 - DNA, 15 bp, Homo sapiens
aataagtcataatct

SEQ ID NO: 1712815 - DNA, 15 bp, Homo sapiens
ataagtcataatctt

SEQ ID NO: 1712816 - DNA, 15 bp, Homo sapiens
taagtcataatctta

SEQ ID NO: 1712817 - DNA, 15 bp, Homo sapiens
aagtcataatcttat

SEQ ID NO: 1712818 - DNA, 15 bp, Homo sapiens
agtcataatcttatc

SEQ ID NO: 1712819 - DNA, 15 bp, Homo sapiens
gtcataatcttatct

SEQ ID NO: 1712820 - DNA, 15 bp, Homo sapiens
tcataatcttatctc

SEQ ID NO: 1712821 - DNA, 15 bp, Homo sapiens
cataatcttatctct

SEQ ID NO: 1712822 - DNA, 15 bp, Homo sapiens
ataatcttatctctt

SEQ ID NO: 1712823 - DNA, 15 bp, Homo sapiens
taatcttatctcttc

SEQ ID NO: 1712824 - DNA, 15 bp, Homo sapiens
aatcttatctcttct

SEQ ID NO: 1712825 - DNA, 15 bp, Homo sapiens
atcttatctcttcta

SEQ ID NO: 1712826 - DNA, 15 bp, Homo sapiens
tcttatctcttctat

SEQ ID NO: 1712827 - DNA, 15 bp, Homo sapiens
cttatctcttctatt

SEQ ID NO: 1712828 - DNA, 15 bp, Homo sapiens
ttatctcttctattt

SEQ ID NO: 1712829 - DNA, 15 bp, Homo sapiens
tatctcttctatttt

SEQ ID NO: 1712830 - DNA, 15 bp, Homo sapiens
atctcttctattttt

SEQ ID NO: 1712831 - DNA, 15 bp, Homo sapiens
tctcttctatttttg

SEQ ID NO: 1712832 - DNA, 15 bp, Homo sapiens
ctcttctatttttgt

SEQ ID NO: 1712833 - DNA, 15 bp, Homo sapiens
tcttctatttttgtg

SEQ ID NO: 1712834 - DNA, 15 bp, Homo sapiens
cttctatttttgtgg

SEQ ID NO: 1712835 - DNA, 15 bp, Homo sapiens
ttctatttttgtggc

SEQ ID NO: 1712836 - DNA, 15 bp, Homo sapiens
tctatttttgtggcc

SEQ ID NO: 1712837 - DNA, 15 bp, Homo sapiens
ctatttttgtggcct

SEQ ID NO: 1712838 - DNA, 15 bp, Homo sapiens
tatttttgtggcctt

SEQ ID NO: 1712839 - DNA, 15 bp, Homo sapiens
atttttgtggccttc

SEQ ID NO: 1712840 - DNA, 15 bp, Homo sapiens
tttttgtggccttca

SEQ ID NO: 1712841 - DNA, 15 bp, Homo sapiens
ttttgtggccttcaa

SEQ ID NO: 1712842 - DNA, 15 bp, Homo sapiens
tttgtggccttcaat

SEQ ID NO: 1712843 - DNA, 15 bp, Homo sapiens
ttgtggccttcaatc

SEQ ID NO: 1712844 - DNA, 15 bp, Homo sapiens
tgtggccttcaatct

SEQ ID NO: 1712845 - DNA, 15 bp, Homo sapiens
gtggccttcaatctg

SEQ ID NO: 1712846 - DNA, 15 bp, Homo sapiens
tggccttcaatctgc

SEQ ID NO: 1712847 - DNA, 15 bp, Homo sapiens
ggccttcaatctgca

SEQ ID NO: 1712848 - DNA, 15 bp, Homo sapiens
gccttcaatctgcaa

SEQ ID NO: 1712849 - DNA, 15 bp, Homo sapiens
ccttcaatctgcaag

SEQ ID NO: 1712850 - DNA, 15 bp, Homo sapiens
cttcaatctgcaagg

SEQ ID NO: 1712851 - DNA, 15 bp, Homo sapiens
ttcaatctgcaagga

SEQ ID NO: 1712852 - DNA, 15 bp, Homo sapiens
tcaatctgcaaggag

SEQ ID NO: 1712853 - DNA, 15 bp, Homo sapiens
caatctgcaaggagc

SEQ ID NO: 1712854 - DNA, 15 bp, Homo sapiens
aatctgcaaggagct

SEQ ID NO: 1712855 - DNA, 15 bp, Homo sapiens
atctgcaaggagctt

SEQ ID NO: 1712856 - DNA, 15 bp, Homo sapiens
tctgcaaggagcttt

SEQ ID NO: 1712857 - DNA, 15 bp, Homo sapiens
ctgcaaggagctttt

SEQ ID NO: 1712858 - DNA, 15 bp, Homo sapiens
tgcaaggagcttttg

SEQ ID NO: 1712859 - DNA, 15 bp, Homo sapiens
gcaaggagcttttga

SEQ ID NO: 1712860 - DNA, 15 bp, Homo sapiens
caaggagcttttgaa

SEQ ID NO: 1712861 - DNA, 15 bp, Homo sapiens
aaggagcttttgaag

SEQ ID NO: 1712862 - DNA, 15 bp, Homo sapiens
aggagcttttgaagg

SEQ ID NO: 1712863 - DNA, 15 bp, Homo sapiens
ggagcttttgaaggt

SEQ ID NO: 1712864 - DNA, 15 bp, Homo sapiens
gagcttttgaaggtt

SEQ ID NO: 1712865 - DNA, 15 bp, Homo sapiens
agcttttgaaggtta

SEQ ID NO: 1712866 - DNA, 15 bp, Homo sapiens
gcttttgaaggttat

SEQ ID NO: 1712867 - DNA, 15 bp, Homo sapiens
cttttgaaggttatt

SEQ ID NO: 1712868 - DNA, 15 bp, Homo sapiens
ttttgaaggttattt

SEQ ID NO: 1712869 - DNA, 15 bp, Homo sapiens
tttgaaggttatttg

SEQ ID NO: 1712870 - DNA, 15 bp, Homo sapiens
ttgaaggttatttgc

SEQ ID NO: 1712871 - DNA, 15 bp, Homo sapiens
tgaaggttatttgct

SEQ ID NO: 1712872 - DNA, 15 bp, Homo sapiens
gaaggttatttgcta

SEQ ID NO: 1712873 - DNA, 15 bp, Homo sapiens
aaggttatttgctat

SEQ ID NO: 1712874 - DNA, 15 bp, Homo sapiens
aggttatttgctatc

SEQ ID NO: 1712875 - DNA, 15 bp, Homo sapiens
ggttatttgctatca

SEQ ID NO: 1712876 - DNA, 15 bp, Homo sapiens
gttatttgctatcac

SEQ ID NO: 1712877 - DNA, 15 bp, Homo sapiens
ttatttgctatcact

SEQ ID NO: 1712878 - DNA, 15 bp, Homo sapiens
tatttgctatcacta

SEQ ID NO: 1712879 - DNA, 15 bp, Homo sapiens
atttgctatcactag

SEQ ID NO: 1712880 - DNA, 15 bp, Homo sapiens
tttgctatcactaga

SEQ ID NO: 1712881 - DNA, 15 bp, Homo sapiens
ttgctatcactagaa

SEQ ID NO: 1712882 - DNA, 15 bp, Homo sapiens
tgctatcactagaat

SEQ ID NO: 1712883 - DNA, 15 bp, Homo sapiens
gctatcactagaatt

SEQ ID NO: 1712884 - DNA, 15 bp, Homo sapiens
ctatcactagaattc

SEQ ID NO: 1712885 - DNA, 15 bp, Homo sapiens
tatcactagaattca

SEQ ID NO: 1712886 - DNA, 15 bp, Homo sapiens
atcactagaattcag

SEQ ID NO: 1712887 - DNA, 15 bp, Homo sapiens
tcactagaattcaga

SEQ ID NO: 1712888 - DNA, 15 bp, Homo sapiens
cactagaattcagag

SEQ ID NO: 1712889 - DNA, 15 bp, Homo sapiens
actagaattcagaga

SEQ ID NO: 1712890 - DNA, 15 bp, Homo sapiens
ctagaattcagagag

SEQ ID NO: 1712891 - DNA, 15 bp, Homo sapiens
tagaattcagagagt

SEQ ID NO: 1712892 - DNA, 15 bp, Homo sapiens
agaattcagagagta

SEQ ID NO: 1712893 - DNA, 15 bp, Homo sapiens
gaattcagagagtag

SEQ ID NO: 1712894 - DNA, 15 bp, Homo sapiens
aattcagagagtagc

SEQ ID NO: 1712895 - DNA, 15 bp, Homo sapiens
attcagagagtagca

SEQ ID NO: 1712896 - DNA, 15 bp, Homo sapiens
ttcagagagtagcat

SEQ ID NO: 1712897 - DNA, 15 bp, Homo sapiens
tcagagagtagcatc

SEQ ID NO: 1712898 - DNA, 15 bp, Homo sapiens
cagagagtagcatct

SEQ ID NO: 1712899 - DNA, 15 bp, Homo sapiens
agagagtagcatcta

SEQ ID NO: 1712900 - DNA, 15 bp, Homo sapiens
gagagtagcatctaa

SEQ ID NO: 1712901 - DNA, 15 bp, Homo sapiens
agagtagcatctaat

SEQ ID NO: 1712902 - DNA, 15 bp, Homo sapiens
gagtagcatctaatt

SEQ ID NO: 1712903 - DNA, 15 bp, Homo sapiens
agtagcatctaatta

SEQ ID NO: 1712904 - DNA, 15 bp, Homo sapiens
gtagcatctaattat

SEQ ID NO: 1712905 - DNA, 15 bp, Homo sapiens
tagcatctaattatc

SEQ ID NO: 1712906 - DNA, 15 bp, Homo sapiens
agcatctaattatct

SEQ ID NO: 1712907 - DNA, 15 bp, Homo sapiens
gcatctaattatctt

SEQ ID NO: 1712908 - DNA, 15 bp, Homo sapiens
catctaattatctta

SEQ ID NO: 1712909 - DNA, 15 bp, Homo sapiens
atctaattatcttaa

SEQ ID NO: 1712910 - DNA, 15 bp, Homo sapiens
tctaattatcttaaa

SEQ ID NO: 1712911 - DNA, 15 bp, Homo sapiens
ctaattatcttaaaa

SEQ ID NO: 1712912 - DNA, 15 bp, Homo sapiens
taattatcttaaaaa

SEQ ID NO: 1712913 - DNA, 15 bp, Homo sapiens
aattatcttaaaaac

SEQ ID NO: 1712914 - DNA, 15 bp, Homo sapiens
attatcttaaaaaca

SEQ ID NO: 1712915 - DNA, 15 bp, Homo sapiens
ttatcttaaaaacac

SEQ ID NO: 1712916 - DNA, 15 bp, Homo sapiens
tatcttaaaaacact

SEQ ID NO: 1712917 - DNA, 15 bp, Homo sapiens
atcttaaaaacactt

SEQ ID NO: 1712918 - DNA, 15 bp, Homo sapiens
tcttaaaaacactta

SEQ ID NO: 1712919 - DNA, 15 bp, Homo sapiens
cttaaaaacacttat

SEQ ID NO: 1712920 - DNA, 15 bp, Homo sapiens
ttaaaaacacttatc

SEQ ID NO: 1712921 - DNA, 15 bp, Homo sapiens
taaaaacacttatct

SEQ ID NO: 1712922 - DNA, 15 bp, Homo sapiens
aaaaacacttatctt

SEQ ID NO: 1712923 - DNA, 15 bp, Homo sapiens
aaaacacttatcttt

SEQ ID NO: 1712924 - DNA, 15 bp, Homo sapiens
aaacacttatctttt

SEQ ID NO: 1712925 - DNA, 15 bp, Homo sapiens
aacacttatcttttt

SEQ ID NO: 1712926 - DNA, 15 bp, Homo sapiens
acacttatcttttta

SEQ ID NO: 1712927 - DNA, 15 bp, Homo sapiens
cacttatctttttaa

SEQ ID NO: 1712928 - DNA, 15 bp, Homo sapiens
acttatctttttaaa

SEQ ID NO: 1712929 - DNA, 15 bp, Homo sapiens
cttatctttttaaaa

SEQ ID NO: 1712930 - DNA, 15 bp, Homo sapiens
ttatctttttaaaaa

SEQ ID NO: 1712931 - DNA, 15 bp, Homo sapiens
tatctttttaaaaag

SEQ ID NO: 1712932 - DNA, 15 bp, Homo sapiens
atctttttaaaaaga

SEQ ID NO: 1712933 - DNA, 15 bp, Homo sapiens
tctttttaaaaagag

SEQ ID NO: 1712934 - DNA, 15 bp, Homo sapiens
ctttttaaaaagagg

SEQ ID NO: 1712935 - DNA, 15 bp, Homo sapiens
tttttaaaaagagga

SEQ ID NO: 1712936 - DNA, 15 bp, Homo sapiens
ttttaaaaagaggat

SEQ ID NO: 1712937 - DNA, 15 bp, Homo sapiens
tttaaaaagaggatt

SEQ ID NO: 1712938 - DNA, 15 bp, Homo sapiens
ttaaaaagaggattt

SEQ ID NO: 1712939 - DNA, 15 bp, Homo sapiens
taaaaagaggatttt

SEQ ID NO: 1712940 - DNA, 15 bp, Homo sapiens
aaaaagaggattttc

SEQ ID NO: 1712941 - DNA, 15 bp, Homo sapiens
aaaagaggattttct

SEQ ID NO: 1712942 - DNA, 15 bp, Homo sapiens
aaagaggattttctc

SEQ ID NO: 1712943 - DNA, 15 bp, Homo sapiens
aagaggattttctca

SEQ ID NO: 1712944 - DNA, 15 bp, Homo sapiens
agaggattttctcag

SEQ ID NO: 1712945 - DNA, 15 bp, Homo sapiens
gaggattttctcaga

SEQ ID NO: 1712946 - DNA, 15 bp, Homo sapiens
aggattttctcagaa

SEQ ID NO: 1712947 - DNA, 15 bp, Homo sapiens
ggattttctcagaat

SEQ ID NO: 1712948 - DNA, 15 bp, Homo sapiens
gattttctcagaatt

SEQ ID NO: 1712949 - DNA, 15 bp, Homo sapiens
attttctcagaattt

SEQ ID NO: 1712950 - DNA, 15 bp, Homo sapiens
ttttctcagaatttt

SEQ ID NO: 1712951 - DNA, 15 bp, Homo sapiens
tttctcagaattttt

SEQ ID NO: 1712952 - DNA, 15 bp, Homo sapiens
ttctcagaatttttc

SEQ ID NO: 1712953 - DNA, 15 bp, Homo sapiens
tctcagaatttttct

SEQ ID NO: 1712954 - DNA, 15 bp, Homo sapiens
tcttcaatgaagagc

SEQ ID NO: 1712955 - DNA, 15 bp, Homo sapiens
cttcaatgaagagca

SEQ ID NO: 1712956 - DNA, 15 bp, Homo sapiens
ttcaatgaagagcag

SEQ ID NO: 1712957 - DNA, 15 bp, Homo sapiens
tcaatgaagagcagt

SEQ ID NO: 1712958 - DNA, 15 bp, Homo sapiens
caatgaagagcagta

SEQ ID NO: 1712959 - DNA, 15 bp, Homo sapiens
aatgaagagcagtat

SEQ ID NO: 1712960 - DNA, 15 bp, Homo sapiens
atgaagagcagtatc

SEQ ID NO: 1712961 - DNA, 15 bp, Homo sapiens
tgaagagcagtatca

SEQ ID NO: 1712962 - DNA, 15 bp, Homo sapiens
gaagagcagtatcag

SEQ ID NO: 1712963 - DNA, 15 bp, Homo sapiens
aagagcagtatcagg

SEQ ID NO: 1712964 - DNA, 15 bp, Homo sapiens
agagcagtatcagga

SEQ ID NO: 1712965 - DNA, 15 bp, Homo sapiens
gagcagtatcaggaa

SEQ ID NO: 1712966 - DNA, 15 bp, Homo sapiens
agcagtatcaggaat

SEQ ID NO: 1712967 - DNA, 15 bp, Homo sapiens
gcagtatcaggaatg

SEQ ID NO: 1712968 - DNA, 15 bp, Homo sapiens
cagtatcaggaatgg

SEQ ID NO: 1712969 - DNA, 15 bp, Homo sapiens
agtatcaggaatggc

SEQ ID NO: 1712970 - DNA, 15 bp, Homo sapiens
gtatcaggaatggcc

SEQ ID NO: 1712971 - DNA, 15 bp, Homo sapiens
tatcaggaatggcca

SEQ ID NO: 1712972 - DNA, 15 bp, Homo sapiens
atcaggaatggccac

SEQ ID NO: 1712973 - DNA, 15 bp, Homo sapiens
tcaggaatggccact

SEQ ID NO: 1712974 - DNA, 15 bp, Homo sapiens
caggaatggccactt

SEQ ID NO: 1712975 - DNA, 15 bp, Homo sapiens
aggaatggccactta

SEQ ID NO: 1712976 - DNA, 15 bp, Homo sapiens
ggaatggccacttaa

SEQ ID NO: 1712977 - DNA, 15 bp, Homo sapiens
gaatggccacttaac

SEQ ID NO: 1712978 - DNA, 15 bp, Homo sapiens
aatggccacttaact

SEQ ID NO: 1712979 - DNA, 15 bp, Homo sapiens
atggccacttaactg

SEQ ID NO: 1712980 - DNA, 15 bp, Homo sapiens
tggccacttaactgc

SEQ ID NO: 1712981 - DNA, 15 bp, Homo sapiens
ggccacttaactgct

SEQ ID NO: 1712982 - DNA, 15 bp, Homo sapiens
gccacttaactgcta

SEQ ID NO: 1712983 - DNA, 15 bp, Homo sapiens
ccacttaactgctac

SEQ ID NO: 1712984 - DNA, 15 bp, Homo sapiens
cacttaactgctacc

SEQ ID NO: 1712985 - DNA, 15 bp, Homo sapiens
acttaactgctaccc

SEQ ID NO: 1712986 - DNA, 15 bp, Homo sapiens
cttaactgctaccct

SEQ ID NO: 1712987 - DNA, 15 bp, Homo sapiens
ttaactgctaccctc

SEQ ID NO: 1712988 - DNA, 15 bp, Homo sapiens
taactgctaccctcc

SEQ ID NO: 1712989 - DNA, 15 bp, Homo sapiens
aactgctaccctccg

SEQ ID NO: 1712990 - DNA, 15 bp, Homo sapiens
actgctaccctccgt

SEQ ID NO: 1712991 - DNA, 15 bp, Homo sapiens
ctgctaccctccgtt

SEQ ID NO: 1712992 - DNA, 15 bp, Homo sapiens
tgctaccctccgttg

SEQ ID NO: 1712993 - DNA, 15 bp, Homo sapiens
gctaccctccgttgt

SEQ ID NO: 1712994 - DNA, 15 bp, Homo sapiens
ctaccctccgttgtt

SEQ ID NO: 1712995 - DNA, 15 bp, Homo sapiens
taccctccgttgttt

SEQ ID NO: 1712996 - DNA, 15 bp, Homo sapiens
accctccgttgtttt

SEQ ID NO: 1712997 - DNA, 15 bp, Homo sapiens
ccctccgttgttttc

SEQ ID NO: 1712998 - DNA, 15 bp, Homo sapiens
cctccgttgttttct

SEQ ID NO: 1712999 - DNA, 15 bp, Homo sapiens
ctccgttgttttctt

SEQ ID NO: 1713000 - DNA, 15 bp, Homo sapiens
tccgttgttttcttc

SEQ ID NO: 1713001 - DNA, 15 bp, Homo sapiens
ccgttgttttcttca

SEQ ID NO: 1713002 - DNA, 15 bp, Homo sapiens
cgttgttttcttcat

SEQ ID NO: 1713003 - DNA, 15 bp, Homo sapiens
gttgttttcttcatt

SEQ ID NO: 1713004 - DNA, 15 bp, Homo sapiens
ttgttttcttcattt

SEQ ID NO: 1713005 - DNA, 15 bp, Homo sapiens
tgttttcttcatttc

SEQ ID NO: 1713006 - DNA, 15 bp, Homo sapiens
gttttcttcatttca

SEQ ID NO: 1713007 - DNA, 15 bp, Homo sapiens
ttttcttcatttcat

SEQ ID NO: 1713008 - DNA, 15 bp, Homo sapiens
tttcttcatttcatt

SEQ ID NO: 1713009 - DNA, 15 bp, Homo sapiens
ttcttcatttcattt

SEQ ID NO: 1713010 - DNA, 15 bp, Homo sapiens
tcttcatttcatttc

SEQ ID NO: 1713011 - DNA, 15 bp, Homo sapiens
cttcatttcatttca

SEQ ID NO: 1713012 - DNA, 15 bp, Homo sapiens
ttcatttcatttcag

SEQ ID NO: 1713013 - DNA, 15 bp, Homo sapiens
tcatttcatttcagg

SEQ ID NO: 1713014 - DNA, 15 bp, Homo sapiens
catttcatttcagga

SEQ ID NO: 1713015 - DNA, 15 bp, Homo sapiens
atttcatttcaggaa

SEQ ID NO: 1713016 - DNA, 15 bp, Homo sapiens
tttcatttcaggaaa

SEQ ID NO: 1713017 - DNA, 15 bp, Homo sapiens
ttcatttcaggaaac

SEQ ID NO: 1713018 - DNA, 15 bp, Homo sapiens
tcatttcaggaaact

SEQ ID NO: 1713019 - DNA, 15 bp, Homo sapiens
catttcaggaaacta

SEQ ID NO: 1713020 - DNA, 15 bp, Homo sapiens
atttcaggaaactag

SEQ ID NO: 1713021 - DNA, 15 bp, Homo sapiens
tttcaggaaactaga

SEQ ID NO: 1713022 - DNA, 15 bp, Homo sapiens
ttcaggaaactagac

SEQ ID NO: 1713023 - DNA, 15 bp, Homo sapiens
tcaggaaactagacc

SEQ ID NO: 1713024 - DNA, 15 bp, Homo sapiens
caggaaactagacca

SEQ ID NO: 1713025 - DNA, 15 bp, Homo sapiens
aggaaactagaccat

SEQ ID NO: 1713026 - DNA, 15 bp, Homo sapiens
ggaaactagaccatc

SEQ ID NO: 1713027 - DNA, 15 bp, Homo sapiens
gaaactagaccatca

SEQ ID NO: 1713028 - DNA, 15 bp, Homo sapiens
aaactagaccatcaa

SEQ ID NO: 1713029 - DNA, 15 bp, Homo sapiens
aactagaccatcaaa

SEQ ID NO: 1713030 - DNA, 15 bp, Homo sapiens
actagaccatcaaat

SEQ ID NO: 1713031 - DNA, 15 bp, Homo sapiens
ctagaccatcaaata

SEQ ID NO: 1713032 - DNA, 15 bp, Homo sapiens
tagaccatcaaatat

SEQ ID NO: 1713033 - DNA, 15 bp, Homo sapiens
agaccatcaaatatt

SEQ ID NO: 1713034 - DNA, 15 bp, Homo sapiens
gaccatcaaatattg

SEQ ID NO: 1713035 - DNA, 15 bp, Homo sapiens
accatcaaatattgt

SEQ ID NO: 1713036 - DNA, 15 bp, Homo sapiens
ccatcaaatattgta

SEQ ID NO: 1713037 - DNA, 15 bp, Homo sapiens
catcaaatattgtaa

SEQ ID NO: 1713038 - DNA, 15 bp, Homo sapiens
atcaaatattgtaaa

SEQ ID NO: 1713039 - DNA, 15 bp, Homo sapiens
tcaaatattgtaaaa

SEQ ID NO: 1713040 - DNA, 15 bp, Homo sapiens
caaatattgtaaaat

SEQ ID NO: 1713041 - DNA, 15 bp, Homo sapiens
aaatattgtaaaatt

SEQ ID NO: 1713042 - DNA, 15 bp, Homo sapiens
aatattgtaaaatta

SEQ ID NO: 1713043 - DNA, 15 bp, Homo sapiens
atattgtaaaattat

SEQ ID NO: 1713044 - DNA, 15 bp, Homo sapiens
tattgtaaaattatg

SEQ ID NO: 1713045 - DNA, 15 bp, Homo sapiens
attgtaaaattatgt

SEQ ID NO: 1713046 - DNA, 15 bp, Homo sapiens
ttgtaaaattatgta

SEQ ID NO: 1713047 - DNA, 15 bp, Homo sapiens
tgtaaaattatgtag

SEQ ID NO: 1713048 - DNA, 15 bp, Homo sapiens
gtaaaattatgtagg

SEQ ID NO: 1713049 - DNA, 15 bp, Homo sapiens
taaaattatgtaggg

SEQ ID NO: 1713050 - DNA, 15 bp, Homo sapiens
aaaattatgtaggga

SEQ ID NO: 1713051 - DNA, 15 bp, Homo sapiens
aaattatgtagggac

SEQ ID NO: 1713052 - DNA, 15 bp, Homo sapiens
aattatgtagggact

SEQ ID NO: 1713053 - DNA, 15 bp, Homo sapiens
attatgtagggactt

SEQ ID NO: 1713054 - DNA, 15 bp, Homo sapiens
ttatgtagggacttc

SEQ ID NO: 1713055 - DNA, 15 bp, Homo sapiens
tatgtagggacttca

SEQ ID NO: 1713056 - DNA, 15 bp, Homo sapiens
atgtagggacttcat

SEQ ID NO: 1713057 - DNA, 15 bp, Homo sapiens
tgtagggacttcata

SEQ ID NO: 1713058 - DNA, 15 bp, Homo sapiens
gtagggacttcatag

SEQ ID NO: 1713059 - DNA, 15 bp, Homo sapiens
tagggacttcatagt

SEQ ID NO: 1713060 - DNA, 15 bp, Homo sapiens
agggacttcatagtt

SEQ ID NO: 1713061 - DNA, 15 bp, Homo sapiens
gggacttcatagttt

SEQ ID NO: 1713062 - DNA, 15 bp, Homo sapiens
ggacttcatagtttg

SEQ ID NO: 1713063 - DNA, 15 bp, Homo sapiens
gacttcatagtttgc

SEQ ID NO: 1713064 - DNA, 15 bp, Homo sapiens
acttcatagtttgct

SEQ ID NO: 1713065 - DNA, 15 bp, Homo sapiens
cttcatagtttgctt

SEQ ID NO: 1713066 - DNA, 15 bp, Homo sapiens
ttcatagtttgcttc

SEQ ID NO: 1713067 - DNA, 15 bp, Homo sapiens
tcatagtttgcttcc

SEQ ID NO: 1713068 - DNA, 15 bp, Homo sapiens
catagtttgcttcct

SEQ ID NO: 1713069 - DNA, 15 bp, Homo sapiens
atagtttgcttcctt

SEQ ID NO: 1713070 - DNA, 15 bp, Homo sapiens
tagtttgcttccttc

SEQ ID NO: 1713071 - DNA, 15 bp, Homo sapiens
agtttgcttccttct

SEQ ID NO: 1713072 - DNA, 15 bp, Homo sapiens
gtttgcttccttctt

SEQ ID NO: 1713073 - DNA, 15 bp, Homo sapiens
tttgcttccttcttg

SEQ ID NO: 1713074 - DNA, 15 bp, Homo sapiens
ttgcttccttcttgc

SEQ ID NO: 1713075 - DNA, 15 bp, Homo sapiens
tgcttccttcttgct

SEQ ID NO: 1713076 - DNA, 15 bp, Homo sapiens
gcttccttcttgctc

SEQ ID NO: 1713077 - DNA, 15 bp, Homo sapiens
cttccttcttgctcc

SEQ ID NO: 1713078 - DNA, 15 bp, Homo sapiens
ttccttcttgctcca

SEQ ID NO: 1713079 - DNA, 15 bp, Homo sapiens
tccttcttgctccac

SEQ ID NO: 1713080 - DNA, 15 bp, Homo sapiens
ccttcttgctccact

SEQ ID NO: 1713081 - DNA, 15 bp, Homo sapiens
cttcttgctccactg

SEQ ID NO: 1713082 - DNA, 15 bp, Homo sapiens
ttcttgctccactga

SEQ ID NO: 1713083 - DNA, 15 bp, Homo sapiens
tcttgctccactgaa

SEQ ID NO: 1713084 - DNA, 15 bp, Homo sapiens
cttgctccactgaaa

SEQ ID NO: 1713085 - DNA, 15 bp, Homo sapiens
ttgctccactgaaat

SEQ ID NO: 1713086 - DNA, 15 bp, Homo sapiens
tgctccactgaaatt

SEQ ID NO: 1713087 - DNA, 15 bp, Homo sapiens
gctccactgaaattt

SEQ ID NO: 1713088 - DNA, 15 bp, Homo sapiens
ctccactgaaatttc

SEQ ID NO: 1713089 - DNA, 15 bp, Homo sapiens
tccactgaaatttct

SEQ ID NO: 1713090 - DNA, 15 bp, Homo sapiens
ccactgaaatttctc

SEQ ID NO: 1713091 - DNA, 15 bp, Homo sapiens
cactgaaatttctca

SEQ ID NO: 1713092 - DNA, 15 bp, Homo sapiens
actgaaatttctcag

SEQ ID NO: 1713093 - DNA, 15 bp, Homo sapiens
ctgaaatttctcagc

SEQ ID NO: 1713094 - DNA, 15 bp, Homo sapiens
tgaaatttctcagcc

SEQ ID NO: 1713095 - DNA, 15 bp, Homo sapiens
gaaatttctcagcca

SEQ ID NO: 1713096 - DNA, 15 bp, Homo sapiens
aaatttctcagccag

SEQ ID NO: 1713097 - DNA, 15 bp, Homo sapiens
aatttctcagccagt

SEQ ID NO: 1713098 - DNA, 15 bp, Homo sapiens
atttctcagccagtg

SEQ ID NO: 1713099 - DNA, 15 bp, Homo sapiens
tttctcagccagtgc

SEQ ID NO: 1713100 - DNA, 15 bp, Homo sapiens
ttctcagccagtgca

SEQ ID NO: 1713101 - DNA, 15 bp, Homo sapiens
tctcagccagtgcac

SEQ ID NO: 1713102 - DNA, 15 bp, Homo sapiens
ctcagccagtgcact

SEQ ID NO: 1713103 - DNA, 15 bp, Homo sapiens
tcagccagtgcactg

SEQ ID NO: 1713104 - DNA, 15 bp, Homo sapiens
cagccagtgcactgc

SEQ ID NO: 1713105 - DNA, 15 bp, Homo sapiens
agccagtgcactgcc

SEQ ID NO: 1713106 - DNA, 15 bp, Homo sapiens
gccagtgcactgcca

SEQ ID NO: 1713107 - DNA, 15 bp, Homo sapiens
ccagtgcactgccat

SEQ ID NO: 1713108 - DNA, 15 bp, Homo sapiens
cagtgcactgccatt

SEQ ID NO: 1713109 - DNA, 15 bp, Homo sapiens
agtgcactgccattg

SEQ ID NO: 1713110 - DNA, 15 bp, Homo sapiens
gtgcactgccattga

SEQ ID NO: 1713111 - DNA, 15 bp, Homo sapiens
tgcactgccattgaa

SEQ ID NO: 1713112 - DNA, 15 bp, Homo sapiens
gcactgccattgaaa

SEQ ID NO: 1713113 - DNA, 15 bp, Homo sapiens
cactgccattgaaat

SEQ ID NO: 1713114 - DNA, 15 bp, Homo sapiens
actgccattgaaatc

SEQ ID NO: 1713115 - DNA, 15 bp, Homo sapiens
ctgccattgaaatca

SEQ ID NO: 1713116 - DNA, 15 bp, Homo sapiens
tgccattgaaatcac

SEQ ID NO: 1713117 - DNA, 15 bp, Homo sapiens
gccattgaaatcact

SEQ ID NO: 1713118 - DNA, 15 bp, Homo sapiens
ccattgaaatcactg

SEQ ID NO: 1713119 - DNA, 15 bp, Homo sapiens
cattgaaatcactga

SEQ ID NO: 1713120 - DNA, 15 bp, Homo sapiens
attgaaatcactgat

SEQ ID NO: 1713121 - DNA, 15 bp, Homo sapiens
ttgaaatcactgatg

SEQ ID NO: 1713122 - DNA, 15 bp, Homo sapiens
tgaaatcactgatgc

SEQ ID NO: 1713123 - DNA, 15 bp, Homo sapiens
gaaatcactgatgca

SEQ ID NO: 1713124 - DNA, 15 bp, Homo sapiens
aaatcactgatgcat

SEQ ID NO: 1713125 - DNA, 15 bp, Homo sapiens
aatcactgatgcatt

SEQ ID NO: 1713126 - DNA, 15 bp, Homo sapiens
atcactgatgcattg

SEQ ID NO: 1713127 - DNA, 15 bp, Homo sapiens
tcactgatgcattgc

SEQ ID NO: 1713128 - DNA, 15 bp, Homo sapiens
cactgatgcattgca

SEQ ID NO: 1713129 - DNA, 15 bp, Homo sapiens
actgatgcattgcat

SEQ ID NO: 1713130 - DNA, 15 bp, Homo sapiens
ctgatgcattgcatt

SEQ ID NO: 1713131 - DNA, 15 bp, Homo sapiens
tgatgcattgcattc

SEQ ID NO: 1713132 - DNA, 15 bp, Homo sapiens
gatgcattgcattca

SEQ ID NO: 1713133 - DNA, 15 bp, Homo sapiens
atgcattgcattcag

SEQ ID NO: 1713134 - DNA, 15 bp, Homo sapiens
tgcattgcattcagg

SEQ ID NO: 1713135 - DNA, 15 bp, Homo sapiens
gcattgcattcaggg

SEQ ID NO: 1713136 - DNA, 15 bp, Homo sapiens
cattgcattcaggga

SEQ ID NO: 1713137 - DNA, 15 bp, Homo sapiens
attgcattcagggaa

SEQ ID NO: 1713138 - DNA, 15 bp, Homo sapiens
ttgcattcagggaat

SEQ ID NO: 1713139 - DNA, 15 bp, Homo sapiens
tgcattcagggaata

SEQ ID NO: 1713140 - DNA, 15 bp, Homo sapiens
gcattcagggaatac

SEQ ID NO: 1713141 - DNA, 15 bp, Homo sapiens
cattcagggaatact

SEQ ID NO: 1713142 - DNA, 15 bp, Homo sapiens
attcagggaatactt

SEQ ID NO: 1713143 - DNA, 15 bp, Homo sapiens
ttcagggaatacttg

SEQ ID NO: 1713144 - DNA, 15 bp, Homo sapiens
tcagggaatacttgc

SEQ ID NO: 1713145 - DNA, 15 bp, Homo sapiens
cagggaatacttgct

SEQ ID NO: 1713146 - DNA, 15 bp, Homo sapiens
agggaatacttgctt

SEQ ID NO: 1713147 - DNA, 15 bp, Homo sapiens
gggaatacttgctta

SEQ ID NO: 1713148 - DNA, 15 bp, Homo sapiens
ggaatacttgcttaa

SEQ ID NO: 1713149 - DNA, 15 bp, Homo sapiens
gaatacttgcttaat

SEQ ID NO: 1713150 - DNA, 15 bp, Homo sapiens
aatacttgcttaatc

SEQ ID NO: 1713151 - DNA, 15 bp, Homo sapiens
atacttgcttaatcc

SEQ ID NO: 1713152 - DNA, 15 bp, Homo sapiens
tacttgcttaatcct

SEQ ID NO: 1713153 - DNA, 15 bp, Homo sapiens
acttgcttaatcctc

SEQ ID NO: 1713154 - DNA, 15 bp, Homo sapiens
cttgcttaatcctct

SEQ ID NO: 1713155 - DNA, 15 bp, Homo sapiens
ttgcttaatcctctc

SEQ ID NO: 1713156 - DNA, 15 bp, Homo sapiens
tgcttaatcctctct

SEQ ID NO: 1713157 - DNA, 15 bp, Homo sapiens
gcttaatcctctctt

SEQ ID NO: 1713158 - DNA, 15 bp, Homo sapiens
cttaatcctctctta

SEQ ID NO: 1713159 - DNA, 15 bp, Homo sapiens
ttaatcctctcttat

SEQ ID NO: 1713160 - DNA, 15 bp, Homo sapiens
taatcctctcttatg

SEQ ID NO: 1713161 - DNA, 15 bp, Homo sapiens
aatcctctcttatgt

SEQ ID NO: 1713162 - DNA, 15 bp, Homo sapiens
atcctctcttatgtt

SEQ ID NO: 1713163 - DNA, 15 bp, Homo sapiens
tcctctcttatgttg

SEQ ID NO: 1713164 - DNA, 15 bp, Homo sapiens
cctctcttatgttga

SEQ ID NO: 1713165 - DNA, 15 bp, Homo sapiens
ctctcttatgttgag

SEQ ID NO: 1713166 - DNA, 15 bp, Homo sapiens
tctcttatgttgagc

SEQ ID NO: 1713167 - DNA, 15 bp, Homo sapiens
ctcttatgttgagcc

SEQ ID NO: 1713168 - DNA, 15 bp, Homo sapiens
tcttatgttgagcct

SEQ ID NO: 1713169 - DNA, 15 bp, Homo sapiens
cttatgttgagcctt

SEQ ID NO: 1713170 - DNA, 15 bp, Homo sapiens
ttatgttgagccttt

SEQ ID NO: 1713171 - DNA, 15 bp, Homo sapiens
tatgttgagcctttg

SEQ ID NO: 1713172 - DNA, 15 bp, Homo sapiens
atgttgagcctttgg

SEQ ID NO: 1713173 - DNA, 15 bp, Homo sapiens
tgttgagcctttggg

SEQ ID NO: 1713174 - DNA, 15 bp, Homo sapiens
gttgagcctttgggt

SEQ ID NO: 1713175 - DNA, 15 bp, Homo sapiens
ttgagcctttgggtt

SEQ ID NO: 1713176 - DNA, 15 bp, Homo sapiens
tgagcctttgggttt

SEQ ID NO: 1713177 - DNA, 15 bp, Homo sapiens
gagcctttgggtttg

SEQ ID NO: 1713178 - DNA, 15 bp, Homo sapiens
agcctttgggtttgc

SEQ ID NO: 1713179 - DNA, 15 bp, Homo sapiens
gcctttgggtttgcc

SEQ ID NO: 1713180 - DNA, 15 bp, Homo sapiens
cctttgggtttgccg

SEQ ID NO: 1713181 - DNA, 15 bp, Homo sapiens
ctttgggtttgccgt

SEQ ID NO: 1713182 - DNA, 15 bp, Homo sapiens
tttgggtttgccgtc

SEQ ID NO: 1713183 - DNA, 15 bp, Homo sapiens
ttgggtttgccgtca

SEQ ID NO: 1713184 - DNA, 15 bp, Homo sapiens
tgggtttgccgtcaa

SEQ ID NO: 1713185 - DNA, 15 bp, Homo sapiens
gggtttgccgtcaag

SEQ ID NO: 1713186 - DNA, 15 bp, Homo sapiens
ggtttgccgtcaagt

SEQ ID NO: 1713187 - DNA, 15 bp, Homo sapiens
gtttgccgtcaagta

SEQ ID NO: 1713188 - DNA, 15 bp, Homo sapiens
tttgccgtcaagtat

SEQ ID NO: 1713189 - DNA, 15 bp, Homo sapiens
ttgccgtcaagtata

SEQ ID NO: 1713190 - DNA, 15 bp, Homo sapiens
tgccgtcaagtatag

SEQ ID NO: 1713191 - DNA, 15 bp, Homo sapiens
gccgtcaagtatagg

SEQ ID NO: 1713192 - DNA, 15 bp, Homo sapiens
ccgtcaagtatagga

SEQ ID NO: 1713193 - DNA, 15 bp, Homo sapiens
cgtcaagtataggat

SEQ ID NO: 1713194 - DNA, 15 bp, Homo sapiens
gtcaagtataggatt

SEQ ID NO: 1713195 - DNA, 15 bp, Homo sapiens
tcaagtataggattg

SEQ ID NO: 1713196 - DNA, 15 bp, Homo sapiens
caagtataggattgt

SEQ ID NO: 1713197 - DNA, 15 bp, Homo sapiens
aagtataggattgtt

SEQ ID NO: 1713198 - DNA, 15 bp, Homo sapiens
agtataggattgtta

SEQ ID NO: 1713199 - DNA, 15 bp, Homo sapiens
gtataggattgttat

SEQ ID NO: 1713200 - DNA, 15 bp, Homo sapiens
tataggattgttatt

SEQ ID NO: 1713201 - DNA, 15 bp, Homo sapiens
ataggattgttattc

SEQ ID NO: 1713202 - DNA, 15 bp, Homo sapiens
taggattgttattca

SEQ ID NO: 1713203 - DNA, 15 bp, Homo sapiens
aggattgttattcag

SEQ ID NO: 1713204 - DNA, 15 bp, Homo sapiens
ggattgttattcagg

SEQ ID NO: 1713205 - DNA, 15 bp, Homo sapiens
gattgttattcaggt

SEQ ID NO: 1713206 - DNA, 15 bp, Homo sapiens
attgttattcaggtc

SEQ ID NO: 1713207 - DNA, 15 bp, Homo sapiens
ttgttattcaggtcg

SEQ ID NO: 1713208 - DNA, 15 bp, Homo sapiens
tgttattcaggtcgt

SEQ ID NO: 1713209 - DNA, 15 bp, Homo sapiens
gttattcaggtcgtg

SEQ ID NO: 1713210 - DNA, 15 bp, Homo sapiens
ttattcaggtcgtgt

SEQ ID NO: 1713211 - DNA, 15 bp, Homo sapiens
tattcaggtcgtgtt

SEQ ID NO: 1713212 - DNA, 15 bp, Homo sapiens
attcaggtcgtgtta

SEQ ID NO: 1713213 - DNA, 15 bp, Homo sapiens
ttcaggtcgtgttaa

SEQ ID NO: 1713214 - DNA, 15 bp, Homo sapiens
tcaggtcgtgttaac

SEQ ID NO: 1713215 - DNA, 15 bp, Homo sapiens
caggtcgtgttaact

SEQ ID NO: 1713216 - DNA, 15 bp, Homo sapiens
aggtcgtgttaactg

SEQ ID NO: 1713217 - DNA, 15 bp, Homo sapiens
ggtcgtgttaactga

SEQ ID NO: 1713218 - DNA, 15 bp, Homo sapiens
gtcgtgttaactgaa

SEQ ID NO: 1713219 - DNA, 15 bp, Homo sapiens
tcgtgttaactgaac

SEQ ID NO: 1713220 - DNA, 15 bp, Homo sapiens
cgtgttaactgaact

SEQ ID NO: 1713221 - DNA, 15 bp, Homo sapiens
gtgttaactgaactc

SEQ ID NO: 1713222 - DNA, 15 bp, Homo sapiens
tgttaactgaactct

SEQ ID NO: 1713223 - DNA, 15 bp, Homo sapiens
gttaactgaactctc

SEQ ID NO: 1713224 - DNA, 15 bp, Homo sapiens
ttaactgaactctca

SEQ ID NO: 1713225 - DNA, 15 bp, Homo sapiens
taactgaactctcat

SEQ ID NO: 1713226 - DNA, 15 bp, Homo sapiens
aactgaactctcatg

SEQ ID NO: 1713227 - DNA, 15 bp, Homo sapiens
actgaactctcatga

SEQ ID NO: 1713228 - DNA, 15 bp, Homo sapiens
ctgaactctcatgat

SEQ ID NO: 1713229 - DNA, 15 bp, Homo sapiens
tgaactctcatgatg

SEQ ID NO: 1713230 - DNA, 15 bp, Homo sapiens
gaactctcatgatgg

SEQ ID NO: 1713231 - DNA, 15 bp, Homo sapiens
aactctcatgatggt

SEQ ID NO: 1713232 - DNA, 15 bp, Homo sapiens
actctcatgatggtg

SEQ ID NO: 1713233 - DNA, 15 bp, Homo sapiens
ctctcatgatggtgg

SEQ ID NO: 1713234 - DNA, 15 bp, Homo sapiens
tctcatgatggtggg

SEQ ID NO: 1713235 - DNA, 15 bp, Homo sapiens
ctcatgatggtgggc

SEQ ID NO: 1713236 - DNA, 15 bp, Homo sapiens
tcatgatggtgggct

SEQ ID NO: 1713237 - DNA, 15 bp, Homo sapiens
catgatggtgggctg

SEQ ID NO: 1713238 - DNA, 15 bp, Homo sapiens
atgatggtgggctgg

SEQ ID NO: 1713239 - DNA, 15 bp, Homo sapiens
tgatggtgggctggg

SEQ ID NO: 1713240 - DNA, 15 bp, Homo sapiens
gatggtgggctgggg

SEQ ID NO: 1713241 - DNA, 15 bp, Homo sapiens
atggtgggctgggga

SEQ ID NO: 1713242 - DNA, 15 bp, Homo sapiens
tggtgggctggggag

SEQ ID NO: 1713243 - DNA, 15 bp, Homo sapiens
ggtgggctggggagc

SEQ ID NO: 1713244 - DNA, 15 bp, Homo sapiens
gtgggctggggagca

SEQ ID NO: 1713245 - DNA, 15 bp, Homo sapiens
tgggctggggagcaa

SEQ ID NO: 1713246 - DNA, 15 bp, Homo sapiens
gggctggggagcaat

SEQ ID NO: 1713247 - DNA, 15 bp, Homo sapiens
ggctggggagcaatc

SEQ ID NO: 1713248 - DNA, 15 bp, Homo sapiens
gctggggagcaatca

SEQ ID NO: 1713249 - DNA, 15 bp, Homo sapiens
ctggggagcaatcat

SEQ ID NO: 1713250 - DNA, 15 bp, Homo sapiens
tggggagcaatcatg

SEQ ID NO: 1713251 - DNA, 15 bp, Homo sapiens
ggggagcaatcatgc

SEQ ID NO: 1713252 - DNA, 15 bp, Homo sapiens
gggagcaatcatgca

SEQ ID NO: 1713253 - DNA, 15 bp, Homo sapiens
ggagcaatcatgcat

SEQ ID NO: 1713254 - DNA, 15 bp, Homo sapiens
gagcaatcatgcatc

SEQ ID NO: 1713255 - DNA, 15 bp, Homo sapiens
agcaatcatgcatct

SEQ ID NO: 1713256 - DNA, 15 bp, Homo sapiens
gcaatcatgcatctt

SEQ ID NO: 1713257 - DNA, 15 bp, Homo sapiens
caatcatgcatcttt

SEQ ID NO: 1713258 - DNA, 15 bp, Homo sapiens
aatcatgcatctttg

SEQ ID NO: 1713259 - DNA, 15 bp, Homo sapiens
atcatgcatctttgc

SEQ ID NO: 1713260 - DNA, 15 bp, Homo sapiens
tcatgcatctttgca

SEQ ID NO: 1713261 - DNA, 15 bp, Homo sapiens
catgcatctttgcat

SEQ ID NO: 1713262 - DNA, 15 bp, Homo sapiens
atgcatctttgcatc

SEQ ID NO: 1713263 - DNA, 15 bp, Homo sapiens
tgcatctttgcatca

SEQ ID NO: 1713264 - DNA, 15 bp, Homo sapiens
gcatctttgcatcaa

SEQ ID NO: 1713265 - DNA, 15 bp, Homo sapiens
catctttgcatcaac

SEQ ID NO: 1713266 - DNA, 15 bp, Homo sapiens
atctttgcatcaact

SEQ ID NO: 1713267 - DNA, 15 bp, Homo sapiens
tctttgcatcaactt

SEQ ID NO: 1713268 - DNA, 15 bp, Homo sapiens
ctttgcatcaacttt

SEQ ID NO: 1713269 - DNA, 15 bp, Homo sapiens
tttgcatcaactttc

SEQ ID NO: 1713270 - DNA, 15 bp, Homo sapiens
ttgcatcaactttcc

SEQ ID NO: 1713271 - DNA, 15 bp, Homo sapiens
tgcatcaactttcca

SEQ ID NO: 1713272 - DNA, 15 bp, Homo sapiens
gcatcaactttccat

SEQ ID NO: 1713273 - DNA, 15 bp, Homo sapiens
catcaactttccatc

SEQ ID NO: 1713274 - DNA, 15 bp, Homo sapiens
atcaactttccatct

SEQ ID NO: 1713275 - DNA, 15 bp, Homo sapiens
tcaactttccatctt

SEQ ID NO: 1713276 - DNA, 15 bp, Homo sapiens
caactttccatcttc

SEQ ID NO: 1713277 - DNA, 15 bp, Homo sapiens
aactttccatcttct

SEQ ID NO: 1713278 - DNA, 15 bp, Homo sapiens
actttccatcttctc

SEQ ID NO: 1713279 - DNA, 15 bp, Homo sapiens
ctttccatcttctct

SEQ ID NO: 1713280 - DNA, 15 bp, Homo sapiens
tttccatcttctctt

SEQ ID NO: 1713281 - DNA, 15 bp, Homo sapiens
ttccatcttctcttt

SEQ ID NO: 1713282 - DNA, 15 bp, Homo sapiens
tccatcttctctttg

SEQ ID NO: 1713283 - DNA, 15 bp, Homo sapiens
ccatcttctctttgc

SEQ ID NO: 1713284 - DNA, 15 bp, Homo sapiens
catcttctctttgca

SEQ ID NO: 1713285 - DNA, 15 bp, Homo sapiens
atcttctctttgcag

SEQ ID NO: 1713286 - DNA, 15 bp, Homo sapiens
tcttctctttgcaga

SEQ ID NO: 1713287 - DNA, 15 bp, Homo sapiens
cttctctttgcagac

SEQ ID NO: 1713288 - DNA, 15 bp, Homo sapiens
ttctctttgcagacg

SEQ ID NO: 1713289 - DNA, 15 bp, Homo sapiens
tctctttgcagacgg

SEQ ID NO: 1713290 - DNA, 15 bp, Homo sapiens
ctctttgcagacggt

SEQ ID NO: 1713291 - DNA, 15 bp, Homo sapiens
tctttgcagacggtg

SEQ ID NO: 1713292 - DNA, 15 bp, Homo sapiens
ctttgcagacggtgc

SEQ ID NO: 1713293 - DNA, 15 bp, Homo sapiens
tttgcagacggtgca

SEQ ID NO: 1713294 - DNA, 15 bp, Homo sapiens
ttgcagacggtgcag

SEQ ID NO: 1713295 - DNA, 15 bp, Homo sapiens
tgcagacggtgcagg

SEQ ID NO: 1713296 - DNA, 15 bp, Homo sapiens
gcagacggtgcaggt

SEQ ID NO: 1713297 - DNA, 15 bp, Homo sapiens
cagacggtgcaggtt

SEQ ID NO: 1713298 - DNA, 15 bp, Homo sapiens
agacggtgcaggttg

SEQ ID NO: 1713299 - DNA, 15 bp, Homo sapiens
gacggtgcaggttgc

SEQ ID NO: 1713300 - DNA, 15 bp, Homo sapiens
acggtgcaggttgct

SEQ ID NO: 1713301 - DNA, 15 bp, Homo sapiens
cggtgcaggttgctc

SEQ ID NO: 1713302 - DNA, 15 bp, Homo sapiens
ggtgcaggttgctct

SEQ ID NO: 1713303 - DNA, 15 bp, Homo sapiens
gtgcaggttgctcta

SEQ ID NO: 1713304 - DNA, 15 bp, Homo sapiens
tgcaggttgctctag

SEQ ID NO: 1713305 - DNA, 15 bp, Homo sapiens
gcaggttgctctaga

SEQ ID NO: 1713306 - DNA, 15 bp, Homo sapiens
caggttgctctagac

SEQ ID NO: 1713307 - DNA, 15 bp, Homo sapiens
aggttgctctagaca

SEQ ID NO: 1713308 - DNA, 15 bp, Homo sapiens
ggttgctctagacaa

SEQ ID NO: 1713309 - DNA, 15 bp, Homo sapiens
gttgctctagacaaa

SEQ ID NO: 1713310 - DNA, 15 bp, Homo sapiens
ttgctctagacaaag

SEQ ID NO: 1713311 - DNA, 15 bp, Homo sapiens
tgctctagacaaagc

SEQ ID NO: 1713312 - DNA, 15 bp, Homo sapiens
gctctagacaaagcc

SEQ ID NO: 1713313 - DNA, 15 bp, Homo sapiens
ctctagacaaagcca

SEQ ID NO: 1713314 - DNA, 15 bp, Homo sapiens
tctagacaaagccag

SEQ ID NO: 1713315 - DNA, 15 bp, Homo sapiens
ctagacaaagccaga

SEQ ID NO: 1713316 - DNA, 15 bp, Homo sapiens
tagacaaagccagag

SEQ ID NO: 1713317 - DNA, 15 bp, Homo sapiens
agacaaagccagaga

SEQ ID NO: 1713318 - DNA, 15 bp, Homo sapiens
gacaaagccagagag

SEQ ID NO: 1713319 - DNA, 15 bp, Homo sapiens
acaaagccagagagg

SEQ ID NO: 1713320 - DNA, 15 bp, Homo sapiens
caaagccagagaggg

SEQ ID NO: 1713321 - DNA, 15 bp, Homo sapiens
aaagccagagagggt

SEQ ID NO: 1713322 - DNA, 15 bp, Homo sapiens
aagccagagagggtc

SEQ ID NO: 1713323 - DNA, 15 bp, Homo sapiens
agccagagagggtcg

SEQ ID NO: 1713324 - DNA, 15 bp, Homo sapiens
gccagagagggtcgg

SEQ ID NO: 1713325 - DNA, 15 bp, Homo sapiens
ccagagagggtcgga

SEQ ID NO: 1713326 - DNA, 15 bp, Homo sapiens
cagagagggtcggac

SEQ ID NO: 1713327 - DNA, 15 bp, Homo sapiens
agagagggtcggacc

SEQ ID NO: 1713328 - DNA, 15 bp, Homo sapiens
gagagggtcggacct

SEQ ID NO: 1713329 - DNA, 15 bp, Homo sapiens
agagggtcggacctg

SEQ ID NO: 1713330 - DNA, 15 bp, Homo sapiens
gagggtcggacctgc

SEQ ID NO: 1713331 - DNA, 15 bp, Homo sapiens
agggtcggacctgca

SEQ ID NO: 1713332 - DNA, 15 bp, Homo sapiens
gggtcggacctgcat

SEQ ID NO: 1713333 - DNA, 15 bp, Homo sapiens
ggtcggacctgcatt

SEQ ID NO: 1713334 - DNA, 15 bp, Homo sapiens
gtcggacctgcattg

SEQ ID NO: 1713335 - DNA, 15 bp, Homo sapiens
tcggacctgcattgt

SEQ ID NO: 1713336 - DNA, 15 bp, Homo sapiens
cggacctgcattgtc

SEQ ID NO: 1713337 - DNA, 15 bp, Homo sapiens
ggacctgcattgtca

SEQ ID NO: 1713338 - DNA, 15 bp, Homo sapiens
gacctgcattgtcat

SEQ ID NO: 1713339 - DNA, 15 bp, Homo sapiens
acctgcattgtcatt

SEQ ID NO: 1713340 - DNA, 15 bp, Homo sapiens
cctgcattgtcattg

SEQ ID NO: 1713341 - DNA, 15 bp, Homo sapiens
ctgcattgtcattgc

SEQ ID NO: 1713342 - DNA, 15 bp, Homo sapiens
tgcattgtcattgcc

SEQ ID NO: 1713343 - DNA, 15 bp, Homo sapiens
gcattgtcattgccc

SEQ ID NO: 1713344 - DNA, 15 bp, Homo sapiens
cattgtcattgccca

SEQ ID NO: 1713345 - DNA, 15 bp, Homo sapiens
attgtcattgcccat

SEQ ID NO: 1713346 - DNA, 15 bp, Homo sapiens
ttgtcattgcccatc

SEQ ID NO: 1713347 - DNA, 15 bp, Homo sapiens
tgtcattgcccatcg

SEQ ID NO: 1713348 - DNA, 15 bp, Homo sapiens
gtcattgcccatcgc

SEQ ID NO: 1713349 - DNA, 15 bp, Homo sapiens
tcattgcccatcgct

SEQ ID NO: 1713350 - DNA, 15 bp, Homo sapiens
cattgcccatcgctt

SEQ ID NO: 1713351 - DNA, 15 bp, Homo sapiens
attgcccatcgcttg

SEQ ID NO: 1713352 - DNA, 15 bp, Homo sapiens
ttgcccatcgcttgt

SEQ ID NO: 1713353 - DNA, 15 bp, Homo sapiens
tgcccatcgcttgtc

SEQ ID NO: 1713354 - DNA, 15 bp, Homo sapiens
gcccatcgcttgtcc

SEQ ID NO: 1713355 - DNA, 15 bp, Homo sapiens
cccatcgcttgtcca

SEQ ID NO: 1713356 - DNA, 15 bp, Homo sapiens
ccatcgcttgtccac

SEQ ID NO: 1713357 - DNA, 15 bp, Homo sapiens
catcgcttgtccacc

SEQ ID NO: 1713358 - DNA, 15 bp, Homo sapiens
atcgcttgtccacca

SEQ ID NO: 1713359 - DNA, 15 bp, Homo sapiens
tcgcttgtccaccat

SEQ ID NO: 1713360 - DNA, 15 bp, Homo sapiens
cgcttgtccaccatc

SEQ ID NO: 1713361 - DNA, 15 bp, Homo sapiens
gcttgtccaccatcc

SEQ ID NO: 1713362 - DNA, 15 bp, Homo sapiens
cttgtccaccatcca

SEQ ID NO: 1713363 - DNA, 15 bp, Homo sapiens
ttgtccaccatccag

SEQ ID NO: 1713364 - DNA, 15 bp, Homo sapiens
tgtccaccatccaga

SEQ ID NO: 1713365 - DNA, 15 bp, Homo sapiens
gtccaccatccagaa

SEQ ID NO: 1713366 - DNA, 15 bp, Homo sapiens
tccaccatccagaac

SEQ ID NO: 1713367 - DNA, 15 bp, Homo sapiens
ccaccatccagaacg

SEQ ID NO: 1713368 - DNA, 15 bp, Homo sapiens
caccatccagaacgc

SEQ ID NO: 1713369 - DNA, 15 bp, Homo sapiens
accatccagaacgcg

SEQ ID NO: 1713370 - DNA, 15 bp, Homo sapiens
ccatccagaacgcgg

SEQ ID NO: 1713371 - DNA, 15 bp, Homo sapiens
catccagaacgcgga

SEQ ID NO: 1713372 - DNA, 15 bp, Homo sapiens
atccagaacgcggat

SEQ ID NO: 1713373 - DNA, 15 bp, Homo sapiens
tccagaacgcggata

SEQ ID NO: 1713374 - DNA, 15 bp, Homo sapiens
ccagaacgcggatat

SEQ ID NO: 1713375 - DNA, 15 bp, Homo sapiens
cagaacgcggatatc

SEQ ID NO: 1713376 - DNA, 15 bp, Homo sapiens
agaacgcggatatca

SEQ ID NO: 1713377 - DNA, 15 bp, Homo sapiens
gaacgcggatatcat

SEQ ID NO: 1713378 - DNA, 15 bp, Homo sapiens
aacgcggatatcatt

SEQ ID NO: 1713379 - DNA, 15 bp, Homo sapiens
acgcggatatcattg

SEQ ID NO: 1713380 - DNA, 15 bp, Homo sapiens
cgcggatatcattgc

SEQ ID NO: 1713381 - DNA, 15 bp, Homo sapiens
gcggatatcattgct

SEQ ID NO: 1713382 - DNA, 15 bp, Homo sapiens
cggatatcattgctg

SEQ ID NO: 1713383 - DNA, 15 bp, Homo sapiens
ggatatcattgctgt

SEQ ID NO: 1713384 - DNA, 15 bp, Homo sapiens
gatatcattgctgtc

SEQ ID NO: 1713385 - DNA, 15 bp, Homo sapiens
atatcattgctgtca

SEQ ID NO: 1713386 - DNA, 15 bp, Homo sapiens
tatcattgctgtcat

SEQ ID NO: 1713387 - DNA, 15 bp, Homo sapiens
atcattgctgtcatg

SEQ ID NO: 1713388 - DNA, 15 bp, Homo sapiens
tcattgctgtcatgg

SEQ ID NO: 1713389 - DNA, 15 bp, Homo sapiens
cattgctgtcatggc

SEQ ID NO: 1713390 - DNA, 15 bp, Homo sapiens
attgctgtcatggca

SEQ ID NO: 1713391 - DNA, 15 bp, Homo sapiens
ttgctgtcatggcac

SEQ ID NO: 1713392 - DNA, 15 bp, Homo sapiens
tgctgtcatggcaca

SEQ ID NO: 1713393 - DNA, 15 bp, Homo sapiens
gctgtcatggcacag

SEQ ID NO: 1713394 - DNA, 15 bp, Homo sapiens
ctgtcatggcacagg

SEQ ID NO: 1713395 - DNA, 15 bp, Homo sapiens
tgtcatggcacaggg

SEQ ID NO: 1713396 - DNA, 15 bp, Homo sapiens
gtcatggcacagggg

SEQ ID NO: 1713397 - DNA, 15 bp, Homo sapiens
tcatggcacaggggg

SEQ ID NO: 1713398 - DNA, 15 bp, Homo sapiens
catggcacagggggt

SEQ ID NO: 1713399 - DNA, 15 bp, Homo sapiens
atggcacagggggtg

SEQ ID NO: 1713400 - DNA, 15 bp, Homo sapiens
tggcacagggggtgg

SEQ ID NO: 1713401 - DNA, 15 bp, Homo sapiens
ggcacagggggtggt

SEQ ID NO: 1713402 - DNA, 15 bp, Homo sapiens
gcacagggggtggtg

SEQ ID NO: 1713403 - DNA, 15 bp, Homo sapiens
cacagggggtggtga

SEQ ID NO: 1713404 - DNA, 15 bp, Homo sapiens
acagggggtggtgat

SEQ ID NO: 1713405 - DNA, 15 bp, Homo sapiens
cagggggtggtgatt

SEQ ID NO: 1713406 - DNA, 15 bp, Homo sapiens
agggggtggtgattg

SEQ ID NO: 1713407 - DNA, 15 bp, Homo sapiens
gggggtggtgattga

SEQ ID NO: 1713408 - DNA, 15 bp, Homo sapiens
ggggtggtgattgaa

SEQ ID NO: 1713409 - DNA, 15 bp, Homo sapiens
gggtggtgattgaaa

SEQ ID NO: 1713410 - DNA, 15 bp, Homo sapiens
ggtggtgattgaaaa

SEQ ID NO: 1713411 - DNA, 15 bp, Homo sapiens
gtggtgattgaaaag

SEQ ID NO: 1713412 - DNA, 15 bp, Homo sapiens
tggtgattgaaaagg

SEQ ID NO: 1713413 - DNA, 15 bp, Homo sapiens
ggtgattgaaaaggg

SEQ ID NO: 1713414 - DNA, 15 bp, Homo sapiens
gtgattgaaaagggg

SEQ ID NO: 1713415 - DNA, 15 bp, Homo sapiens
tgattgaaaagggga

SEQ ID NO: 1713416 - DNA, 15 bp, Homo sapiens
gattgaaaaggggac

SEQ ID NO: 1713417 - DNA, 15 bp, Homo sapiens
attgaaaaggggacc

SEQ ID NO: 1713418 - DNA, 15 bp, Homo sapiens
ttgaaaaggggaccc

SEQ ID NO: 1713419 - DNA, 15 bp, Homo sapiens
tgaaaaggggaccca

SEQ ID NO: 1713420 - DNA, 15 bp, Homo sapiens
gaaaaggggacccat

SEQ ID NO: 1713421 - DNA, 15 bp, Homo sapiens
aaaaggggacccatg

SEQ ID NO: 1713422 - DNA, 15 bp, Homo sapiens
aaaggggacccatga

SEQ ID NO: 1713423 - DNA, 15 bp, Homo sapiens
aaggggacccatgaa

SEQ ID NO: 1713424 - DNA, 15 bp, Homo sapiens
aggggacccatgaag

SEQ ID NO: 1713425 - DNA, 15 bp, Homo sapiens
ggggacccatgaaga

SEQ ID NO: 1713426 - DNA, 15 bp, Homo sapiens
ggacccatgaagaac

SEQ ID NO: 1713427 - DNA, 15 bp, Homo sapiens
gacccatgaagaact

SEQ ID NO: 1713428 - DNA, 15 bp, Homo sapiens
acccatgaagaactg

SEQ ID NO: 1713429 - DNA, 15 bp, Homo sapiens
cccatgaagaactga

SEQ ID NO: 1713430 - DNA, 15 bp, Homo sapiens
ccatgaagaactgat

SEQ ID NO: 1713431 - DNA, 15 bp, Homo sapiens
catgaagaactgatg

SEQ ID NO: 1713432 - DNA, 15 bp, Homo sapiens
atgaagaactgatgg

SEQ ID NO: 1713433 - DNA, 15 bp, Homo sapiens
tgaagaactgatggc

SEQ ID NO: 1713434 - DNA, 15 bp, Homo sapiens
gaagaactgatggcc

SEQ ID NO: 1713435 - DNA, 15 bp, Homo sapiens
aagaactgatggccc

SEQ ID NO: 1713436 - DNA, 15 bp, Homo sapiens
agaactgatggccca

SEQ ID NO: 1713437 - DNA, 15 bp, Homo sapiens
gaactgatggcccaa

SEQ ID NO: 1713438 - DNA, 15 bp, Homo sapiens
aactgatggcccaaa

SEQ ID NO: 1713439 - DNA, 15 bp, Homo sapiens
actgatggcccaaaa

SEQ ID NO: 1713440 - DNA, 15 bp, Homo sapiens
ctgatggcccaaaaa

SEQ ID NO: 1713441 - DNA, 15 bp, Homo sapiens
tgatggcccaaaaag

SEQ ID NO: 1713442 - DNA, 15 bp, Homo sapiens
gatggcccaaaaagg

SEQ ID NO: 1713443 - DNA, 15 bp, Homo sapiens
atggcccaaaaagga

SEQ ID NO: 1713444 - DNA, 15 bp, Homo sapiens
tggcccaaaaaggag

SEQ ID NO: 1713445 - DNA, 15 bp, Homo sapiens
ggcccaaaaaggagc

SEQ ID NO: 1713446 - DNA, 15 bp, Homo sapiens
gcccaaaaaggagcc

SEQ ID NO: 1713447 - DNA, 15 bp, Homo sapiens
cccaaaaaggagcct

SEQ ID NO: 1713448 - DNA, 15 bp, Homo sapiens
ccaaaaaggagccta

SEQ ID NO: 1713449 - DNA, 15 bp, Homo sapiens
caaaaaggagcctac

SEQ ID NO: 1713450 - DNA, 15 bp, Homo sapiens
aaaaaggagcctact

SEQ ID NO: 1713451 - DNA, 15 bp, Homo sapiens
aaaaggagcctacta

SEQ ID NO: 1713452 - DNA, 15 bp, Homo sapiens
aaaggagcctactac

SEQ ID NO: 1713453 - DNA, 15 bp, Homo sapiens
aaggagcctactaca

SEQ ID NO: 1713454 - DNA, 15 bp, Homo sapiens
aggagcctactacaa

SEQ ID NO: 1713455 - DNA, 15 bp, Homo sapiens
ggagcctactacaaa

SEQ ID NO: 1713456 - DNA, 15 bp, Homo sapiens
gagcctactacaaac

SEQ ID NO: 1713457 - DNA, 15 bp, Homo sapiens
agcctactacaaact

SEQ ID NO: 1713458 - DNA, 15 bp, Homo sapiens
gcctactacaaacta

SEQ ID NO: 1713459 - DNA, 15 bp, Homo sapiens
cctactacaaactag

SEQ ID NO: 1713460 - DNA, 15 bp, Homo sapiens
ctactacaaactagt

SEQ ID NO: 1713461 - DNA, 15 bp, Homo sapiens
tactacaaactagtc

SEQ ID NO: 1713462 - DNA, 15 bp, Homo sapiens
actacaaactagtca

SEQ ID NO: 1713463 - DNA, 15 bp, Homo sapiens
ctacaaactagtcac

SEQ ID NO: 1713464 - DNA, 15 bp, Homo sapiens
tacaaactagtcacc

SEQ ID NO: 1713465 - DNA, 15 bp, Homo sapiens
acaaactagtcacca

SEQ ID NO: 1713466 - DNA, 15 bp, Homo sapiens
caaactagtcaccac

SEQ ID NO: 1713467 - DNA, 15 bp, Homo sapiens
aaactagtcaccact

SEQ ID NO: 1713468 - DNA, 15 bp, Homo sapiens
aactagtcaccactg

SEQ ID NO: 1713469 - DNA, 15 bp, Homo sapiens
actagtcaccactgg

SEQ ID NO: 1713470 - DNA, 15 bp, Homo sapiens
ctagtcaccactgga

SEQ ID NO: 1713471 - DNA, 15 bp, Homo sapiens
tagtcaccactggat

SEQ ID NO: 1713472 - DNA, 15 bp, Homo sapiens
agtcaccactggatc

SEQ ID NO: 1713473 - DNA, 15 bp, Homo sapiens
gtcaccactggatcc

SEQ ID NO: 1713474 - DNA, 15 bp, Homo sapiens
tcaccactggatccc

SEQ ID NO: 1713475 - DNA, 15 bp, Homo sapiens
caccactggatcccc

SEQ ID NO: 1713476 - DNA, 15 bp, Homo sapiens
accactggatccccc

SEQ ID NO: 1713477 - DNA, 15 bp, Homo sapiens
ccactggatccccca

SEQ ID NO: 1713478 - DNA, 15 bp, Homo sapiens
cactggatcccccat

SEQ ID NO: 1713479 - DNA, 15 bp, Homo sapiens
actggatcccccatc

SEQ ID NO: 1713480 - DNA, 15 bp, Homo sapiens
ctggatcccccatca

SEQ ID NO: 1713481 - DNA, 15 bp, Homo sapiens
tggatcccccatcag

SEQ ID NO: 1713482 - DNA, 15 bp, Homo sapiens
ggatcccccatcagt

SEQ ID NO: 1713483 - DNA, 15 bp, Homo sapiens
gatcccccatcagtt

SEQ ID NO: 1713484 - DNA, 15 bp, Homo sapiens
atcccccatcagttg

SEQ ID NO: 1713485 - DNA, 15 bp, Homo sapiens
tcccccatcagttga

SEQ ID NO: 1713486 - DNA, 15 bp, Homo sapiens
cccccatcagttgac

SEQ ID NO: 1713487 - DNA, 15 bp, Homo sapiens
ccccatcagttgacc

SEQ ID NO: 1713488 - DNA, 15 bp, Homo sapiens
cccatcagttgaccc

SEQ ID NO: 1713489 - DNA, 15 bp, Homo sapiens
ccatcagttgaccca

SEQ ID NO: 1713490 - DNA, 15 bp, Homo sapiens
catcagttgacccaa

SEQ ID NO: 1713491 - DNA, 15 bp, Homo sapiens
atcagttgacccaat

SEQ ID NO: 1713492 - DNA, 15 bp, Homo sapiens
tcagttgacccaatg

SEQ ID NO: 1713493 - DNA, 15 bp, Homo sapiens
cagttgacccaatgc

SEQ ID NO: 1713494 - DNA, 15 bp, Homo sapiens
agttgacccaatgca

SEQ ID NO: 1713495 - DNA, 15 bp, Homo sapiens
gttgacccaatgcaa

SEQ ID NO: 1713496 - DNA, 15 bp, Homo sapiens
ttgacccaatgcaag

SEQ ID NO: 1713497 - DNA, 15 bp, Homo sapiens
tgacccaatgcaaga

SEQ ID NO: 1713498 - DNA, 15 bp, Homo sapiens
gacccaatgcaagaa

SEQ ID NO: 1713499 - DNA, 15 bp, Homo sapiens
acccaatgcaagaat

SEQ ID NO: 1713500 - DNA, 15 bp, Homo sapiens
cccaatgcaagaatc

SEQ ID NO: 1713501 - DNA, 15 bp, Homo sapiens
ccaatgcaagaatct

SEQ ID NO: 1713502 - DNA, 15 bp, Homo sapiens
caatgcaagaatctc

SEQ ID NO: 1713503 - DNA, 15 bp, Homo sapiens
aatgcaagaatctca

SEQ ID NO: 1713504 - DNA, 15 bp, Homo sapiens
atgcaagaatctcag

SEQ ID NO: 1713505 - DNA, 15 bp, Homo sapiens
tgcaagaatctcaga

SEQ ID NO: 1713506 - DNA, 15 bp, Homo sapiens
gcaagaatctcagac

SEQ ID NO: 1713507 - DNA, 15 bp, Homo sapiens
caagaatctcagaca

SEQ ID NO: 1713508 - DNA, 15 bp, Homo sapiens
aagaatctcagacac

SEQ ID NO: 1713509 - DNA, 15 bp, Homo sapiens
agaatctcagacaca

SEQ ID NO: 1713510 - DNA, 15 bp, Homo sapiens
gaatctcagacacac

SEQ ID NO: 1713511 - DNA, 15 bp, Homo sapiens
aatctcagacacaca

SEQ ID NO: 1713512 - DNA, 15 bp, Homo sapiens
atctcagacacacat

SEQ ID NO: 1713513 - DNA, 15 bp, Homo sapiens
tctcagacacacatg

SEQ ID NO: 1713514 - DNA, 15 bp, Homo sapiens
ctcagacacacatga

SEQ ID NO: 1713515 - DNA, 15 bp, Homo sapiens
tcagacacacatgac

SEQ ID NO: 1713516 - DNA, 15 bp, Homo sapiens
cagacacacatgacg

SEQ ID NO: 1713517 - DNA, 15 bp, Homo sapiens
agacacacatgacgc

SEQ ID NO: 1713518 - DNA, 15 bp, Homo sapiens
gacacacatgacgca

SEQ ID NO: 1713519 - DNA, 15 bp, Homo sapiens
acacacatgacgcac

SEQ ID NO: 1713520 - DNA, 15 bp, Homo sapiens
cacacatgacgcacc

SEQ ID NO: 1713521 - DNA, 15 bp, Homo sapiens
acacatgacgcacca

SEQ ID NO: 1713522 - DNA, 15 bp, Homo sapiens
cacatgacgcaccag

SEQ ID NO: 1713523 - DNA, 15 bp, Homo sapiens
acatgacgcaccagt

SEQ ID NO: 1713524 - DNA, 15 bp, Homo sapiens
catgacgcaccagtt

SEQ ID NO: 1713525 - DNA, 15 bp, Homo sapiens
atgacgcaccagtta

SEQ ID NO: 1713526 - DNA, 15 bp, Homo sapiens
tgacgcaccagttac

SEQ ID NO: 1713527 - DNA, 15 bp, Homo sapiens
gacgcaccagttaca

SEQ ID NO: 1713528 - DNA, 15 bp, Homo sapiens
acgcaccagttacag

SEQ ID NO: 1713529 - DNA, 15 bp, Homo sapiens
cgcaccagttacagg

SEQ ID NO: 1713530 - DNA, 15 bp, Homo sapiens
gcaccagttacaggg

SEQ ID NO: 1713531 - DNA, 15 bp, Homo sapiens
caccagttacagggg

SEQ ID NO: 1713532 - DNA, 15 bp, Homo sapiens
accagttacaggggt

SEQ ID NO: 1713533 - DNA, 15 bp, Homo sapiens
ccagttacaggggtt

SEQ ID NO: 1713534 - DNA, 15 bp, Homo sapiens
cagttacaggggttg

SEQ ID NO: 1713535 - DNA, 15 bp, Homo sapiens
agttacaggggttgt

SEQ ID NO: 1713536 - DNA, 15 bp, Homo sapiens
gttacaggggttgtt

SEQ ID NO: 1713537 - DNA, 15 bp, Homo sapiens
ttacaggggttgttt

SEQ ID NO: 1713538 - DNA, 15 bp, Homo sapiens
tacaggggttgtttt

SEQ ID NO: 1713539 - DNA, 15 bp, Homo sapiens
acaggggttgttttt

SEQ ID NO: 1713540 - DNA, 15 bp, Homo sapiens
caggggttgttttta

SEQ ID NO: 1713541 - DNA, 15 bp, Homo sapiens
aggggttgtttttaa

SEQ ID NO: 1713542 - DNA, 15 bp, Homo sapiens
ggggttgtttttaaa

SEQ ID NO: 1713543 - DNA, 15 bp, Homo sapiens
gggttgtttttaaag

SEQ ID NO: 1713544 - DNA, 15 bp, Homo sapiens
ggttgtttttaaaga

SEQ ID NO: 1713545 - DNA, 15 bp, Homo sapiens
gttgtttttaaagaa

SEQ ID NO: 1713546 - DNA, 15 bp, Homo sapiens
ttgtttttaaagaaa

SEQ ID NO: 1713547 - DNA, 15 bp, Homo sapiens
tgtttttaaagaaaa

SEQ ID NO: 1713548 - DNA, 15 bp, Homo sapiens
gtttttaaagaaaaa

SEQ ID NO: 1713549 - DNA, 15 bp, Homo sapiens
taaagaaaaaaacaa

SEQ ID NO: 1713550 - DNA, 15 bp, Homo sapiens
aaagaaaaaaacaat

SEQ ID NO: 1713551 - DNA, 15 bp, Homo sapiens
aagaaaaaaacaatc

SEQ ID NO: 1713552 - DNA, 15 bp, Homo sapiens
agaaaaaaacaatcc

SEQ ID NO: 1713553 - DNA, 15 bp, Homo sapiens
gaaaaaaacaatccc

SEQ ID NO: 1713554 - DNA, 15 bp, Homo sapiens
aaaaaaacaatccca

SEQ ID NO: 1713555 - DNA, 15 bp, Homo sapiens
aaaaaacaatcccag

SEQ ID NO: 1713556 - DNA, 15 bp, Homo sapiens
aaaaacaatcccagc

SEQ ID NO: 1713557 - DNA, 15 bp, Homo sapiens
aaaacaatcccagca

SEQ ID NO: 1713558 - DNA, 15 bp, Homo sapiens
aaacaatcccagcag

SEQ ID NO: 1713559 - DNA, 15 bp, Homo sapiens
aacaatcccagcagg

SEQ ID NO: 1713560 - DNA, 15 bp, Homo sapiens
acaatcccagcagga

SEQ ID NO: 1713561 - DNA, 15 bp, Homo sapiens
caatcccagcaggag

SEQ ID NO: 1713562 - DNA, 15 bp, Homo sapiens
aatcccagcaggagg

SEQ ID NO: 1713563 - DNA, 15 bp, Homo sapiens
atcccagcaggaggg

SEQ ID NO: 1713564 - DNA, 15 bp, Homo sapiens
tcccagcaggaggga

SEQ ID NO: 1713565 - DNA, 15 bp, Homo sapiens
cccagcaggagggat

SEQ ID NO: 1713566 - DNA, 15 bp, Homo sapiens
ccagcaggagggatt

SEQ ID NO: 1713567 - DNA, 15 bp, Homo sapiens
cagcaggagggattg

SEQ ID NO: 1713568 - DNA, 15 bp, Homo sapiens
agcaggagggattgc

SEQ ID NO: 1713569 - DNA, 15 bp, Homo sapiens
gcaggagggattgct

SEQ ID NO: 1713570 - DNA, 15 bp, Homo sapiens
caggagggattgctg

SEQ ID NO: 1713571 - DNA, 15 bp, Homo sapiens
aggagggattgctgg

SEQ ID NO: 1713572 - DNA, 15 bp, Homo sapiens
ggagggattgctggg

SEQ ID NO: 1713573 - DNA, 15 bp, Homo sapiens
gagggattgctggga

SEQ ID NO: 1713574 - DNA, 15 bp, Homo sapiens
agggattgctgggat

SEQ ID NO: 1713575 - DNA, 15 bp, Homo sapiens
gggattgctgggatt

SEQ ID NO: 1713576 - DNA, 15 bp, Homo sapiens
ggattgctgggattg

SEQ ID NO: 1713577 - DNA, 15 bp, Homo sapiens
gattgctgggattgt

SEQ ID NO: 1713578 - DNA, 15 bp, Homo sapiens
attgctgggattgtt

SEQ ID NO: 1713579 - DNA, 15 bp, Homo sapiens
ttgctgggattgttt

SEQ ID NO: 1713580 - DNA, 15 bp, Homo sapiens
tgctgggattgtttt

SEQ ID NO: 1713581 - DNA, 15 bp, Homo sapiens
gctgggattgttttt

SEQ ID NO: 1713582 - DNA, 15 bp, Homo sapiens
ctgggattgtttttt

SEQ ID NO: 1713583 - DNA, 15 bp, Homo sapiens
tgggattgttttttc

SEQ ID NO: 1713584 - DNA, 15 bp, Homo sapiens
gggattgttttttct

SEQ ID NO: 1713585 - DNA, 15 bp, Homo sapiens
ggattgttttttctt

SEQ ID NO: 1713586 - DNA, 15 bp, Homo sapiens
gattgttttttcttt

SEQ ID NO: 1713587 - DNA, 15 bp, Homo sapiens
attgttttttcttta

SEQ ID NO: 1713588 - DNA, 15 bp, Homo sapiens
ttgttttttctttaa

SEQ ID NO: 1713589 - DNA, 15 bp, Homo sapiens
tgttttttctttaaa

SEQ ID NO: 1713590 - DNA, 15 bp, Homo sapiens
gttttttctttaaag

SEQ ID NO: 1713591 - DNA, 15 bp, Homo sapiens
ttttttctttaaaga

SEQ ID NO: 1713592 - DNA, 15 bp, Homo sapiens
tttttctttaaagaa

SEQ ID NO: 1713593 - DNA, 15 bp, Homo sapiens
ttttctttaaagaag

SEQ ID NO: 1713594 - DNA, 15 bp, Homo sapiens
tttctttaaagaaga

SEQ ID NO: 1713595 - DNA, 15 bp, Homo sapiens
ttctttaaagaagaa

SEQ ID NO: 1713596 - DNA, 15 bp, Homo sapiens
tctttaaagaagaat

SEQ ID NO: 1713597 - DNA, 15 bp, Homo sapiens
ctttaaagaagaatg

SEQ ID NO: 1713598 - DNA, 15 bp, Homo sapiens
tttaaagaagaatgt

SEQ ID NO: 1713599 - DNA, 15 bp, Homo sapiens
ttaaagaagaatgtt

SEQ ID NO: 1713600 - DNA, 15 bp, Homo sapiens
taaagaagaatgtta

SEQ ID NO: 1713601 - DNA, 15 bp, Homo sapiens
aaagaagaatgttaa

SEQ ID NO: 1713602 - DNA, 15 bp, Homo sapiens
aagaagaatgttaat

SEQ ID NO: 1713603 - DNA, 15 bp, Homo sapiens
agaagaatgttaata

SEQ ID NO: 1713604 - DNA, 15 bp, Homo sapiens
gaagaatgttaatat

SEQ ID NO: 1713605 - DNA, 15 bp, Homo sapiens
aagaatgttaatatt

SEQ ID NO: 1713606 - DNA, 15 bp, Homo sapiens
agaatgttaatattt

SEQ ID NO: 1713607 - DNA, 15 bp, Homo sapiens
gaatgttaatatttt

SEQ ID NO: 1713608 - DNA, 15 bp, Homo sapiens
aatgttaatatttta

SEQ ID NO: 1713609 - DNA, 15 bp, Homo sapiens
atgttaatattttac

SEQ ID NO: 1713610 - DNA, 15 bp, Homo sapiens
tgttaatattttact

SEQ ID NO: 1713611 - DNA, 15 bp, Homo sapiens
gttaatattttactt

SEQ ID NO: 1713612 - DNA, 15 bp, Homo sapiens
ttaatattttacttt

SEQ ID NO: 1713613 - DNA, 15 bp, Homo sapiens
taatattttactttt

SEQ ID NO: 1713614 - DNA, 15 bp, Homo sapiens
aatattttactttta

SEQ ID NO: 1713615 - DNA, 15 bp, Homo sapiens
atattttacttttac

SEQ ID NO: 1713616 - DNA, 15 bp, Homo sapiens
tattttacttttaca

SEQ ID NO: 1713617 - DNA, 15 bp, Homo sapiens
attttacttttacag

SEQ ID NO: 1713618 - DNA, 15 bp, Homo sapiens
ttttacttttacagt

SEQ ID NO: 1713619 - DNA, 15 bp, Homo sapiens
tttacttttacagtc

SEQ ID NO: 1713620 - DNA, 15 bp, Homo sapiens
ttacttttacagtca

SEQ ID NO: 1713621 - DNA, 15 bp, Homo sapiens
tacttttacagtcat

SEQ ID NO: 1713622 - DNA, 15 bp, Homo sapiens
acttttacagtcatt

SEQ ID NO: 1713623 - DNA, 15 bp, Homo sapiens
cttttacagtcattt

SEQ ID NO: 1713624 - DNA, 15 bp, Homo sapiens
ttttacagtcatttt

SEQ ID NO: 1713625 - DNA, 15 bp, Homo sapiens
tttacagtcattttc

SEQ ID NO: 1713626 - DNA, 15 bp, Homo sapiens
ttacagtcattttcc

SEQ ID NO: 1713627 - DNA, 15 bp, Homo sapiens
tacagtcattttcct

SEQ ID NO: 1713628 - DNA, 15 bp, Homo sapiens
acagtcattttccta

SEQ ID NO: 1713629 - DNA, 15 bp, Homo sapiens
cagtcattttcctac

SEQ ID NO: 1713630 - DNA, 15 bp, Homo sapiens
agtcattttcctaca

SEQ ID NO: 1713631 - DNA, 15 bp, Homo sapiens
gtcattttcctacat

SEQ ID NO: 1713632 - DNA, 15 bp, Homo sapiens
tcattttcctacatc

SEQ ID NO: 1713633 - DNA, 15 bp, Homo sapiens
cattttcctacatcg

SEQ ID NO: 1713634 - DNA, 15 bp, Homo sapiens
attttcctacatcgg

SEQ ID NO: 1713635 - DNA, 15 bp, Homo sapiens
ttttcctacatcgga

SEQ ID NO: 1713636 - DNA, 15 bp, Homo sapiens
tttcctacatcggaa

SEQ ID NO: 1713637 - DNA, 15 bp, Homo sapiens
ttcctacatcggaat

SEQ ID NO: 1713638 - DNA, 15 bp, Homo sapiens
tcctacatcggaatc

SEQ ID NO: 1713639 - DNA, 15 bp, Homo sapiens
cctacatcggaatcc

SEQ ID NO: 1713640 - DNA, 15 bp, Homo sapiens
ctacatcggaatcca

SEQ ID NO: 1713641 - DNA, 15 bp, Homo sapiens
tacatcggaatccaa

SEQ ID NO: 1713642 - DNA, 15 bp, Homo sapiens
acatcggaatccaag

SEQ ID NO: 1713643 - DNA, 15 bp, Homo sapiens
catcggaatccaagc

SEQ ID NO: 1713644 - DNA, 15 bp, Homo sapiens
atcggaatccaagct

SEQ ID NO: 1713645 - DNA, 15 bp, Homo sapiens
tcggaatccaagcta

SEQ ID NO: 1713646 - DNA, 15 bp, Homo sapiens
cggaatccaagctaa

SEQ ID NO: 1713647 - DNA, 15 bp, Homo sapiens
ggaatccaagctaat

SEQ ID NO: 1713648 - DNA, 15 bp, Homo sapiens
gaatccaagctaatt

SEQ ID NO: 1713649 - DNA, 15 bp, Homo sapiens
aatccaagctaattt

SEQ ID NO: 1713650 - DNA, 15 bp, Homo sapiens
atccaagctaatttc

SEQ ID NO: 1713651 - DNA, 15 bp, Homo sapiens
tccaagctaatttct

SEQ ID NO: 1713652 - DNA, 15 bp, Homo sapiens
ccaagctaatttcta

SEQ ID NO: 1713653 - DNA, 15 bp, Homo sapiens
caagctaatttctaa

SEQ ID NO: 1713654 - DNA, 15 bp, Homo sapiens
aagctaatttctaat

SEQ ID NO: 1713655 - DNA, 15 bp, Homo sapiens
agctaatttctaatg

SEQ ID NO: 1713656 - DNA, 15 bp, Homo sapiens
gctaatttctaatgg

SEQ ID NO: 1713657 - DNA, 15 bp, Homo sapiens
ctaatttctaatggc

SEQ ID NO: 1713658 - DNA, 15 bp, Homo sapiens
taatttctaatggcc

SEQ ID NO: 1713659 - DNA, 15 bp, Homo sapiens
aatttctaatggcct

SEQ ID NO: 1713660 - DNA, 15 bp, Homo sapiens
atttctaatggcctt

SEQ ID NO: 1713661 - DNA, 15 bp, Homo sapiens
tttctaatggccttc

SEQ ID NO: 1713662 - DNA, 15 bp, Homo sapiens
ttctaatggccttcc

SEQ ID NO: 1713663 - DNA, 15 bp, Homo sapiens
tctaatggccttcca

SEQ ID NO: 1713664 - DNA, 15 bp, Homo sapiens
ctaatggccttccat

SEQ ID NO: 1713665 - DNA, 15 bp, Homo sapiens
taatggccttccata

SEQ ID NO: 1713666 - DNA, 15 bp, Homo sapiens
aatggccttccataa

SEQ ID NO: 1713667 - DNA, 15 bp, Homo sapiens
atggccttccataat

SEQ ID NO: 1713668 - DNA, 15 bp, Homo sapiens
tggccttccataata

SEQ ID NO: 1713669 - DNA, 15 bp, Homo sapiens
ggccttccataataa

SEQ ID NO: 1713670 - DNA, 15 bp, Homo sapiens
gccttccataataat

SEQ ID NO: 1713671 - DNA, 15 bp, Homo sapiens
ccttccataataatt

SEQ ID NO: 1713672 - DNA, 15 bp, Homo sapiens
cttccataataattc

SEQ ID NO: 1713673 - DNA, 15 bp, Homo sapiens
ttccataataattct

SEQ ID NO: 1713674 - DNA, 15 bp, Homo sapiens
tccataataattctg

SEQ ID NO: 1713675 - DNA, 15 bp, Homo sapiens
ccataataattctgc

SEQ ID NO: 1713676 - DNA, 15 bp, Homo sapiens
cataataattctgct

SEQ ID NO: 1713677 - DNA, 15 bp, Homo sapiens
ataataattctgctt

SEQ ID NO: 1713678 - DNA, 15 bp, Homo sapiens
taataattctgcttt

SEQ ID NO: 1713679 - DNA, 15 bp, Homo sapiens
aataattctgcttta

SEQ ID NO: 1713680 - DNA, 15 bp, Homo sapiens
ataattctgctttag

SEQ ID NO: 1713681 - DNA, 15 bp, Homo sapiens
taattctgctttaga

SEQ ID NO: 1713682 - DNA, 15 bp, Homo sapiens
aattctgctttagat

SEQ ID NO: 1713683 - DNA, 15 bp, Homo sapiens
attctgctttagatg

SEQ ID NO: 1713684 - DNA, 15 bp, Homo sapiens
ttctgctttagatgt

SEQ ID NO: 1713685 - DNA, 15 bp, Homo sapiens
tctgctttagatgtg

SEQ ID NO: 1713686 - DNA, 15 bp, Homo sapiens
ctgctttagatgtgt

SEQ ID NO: 1713687 - DNA, 15 bp, Homo sapiens
tgctttagatgtgta

SEQ ID NO: 1713688 - DNA, 15 bp, Homo sapiens
gctttagatgtgtat

SEQ ID NO: 1713689 - DNA, 15 bp, Homo sapiens
ctttagatgtgtata

SEQ ID NO: 1713690 - DNA, 15 bp, Homo sapiens
tttagatgtgtatac

SEQ ID NO: 1713691 - DNA, 15 bp, Homo sapiens
ttagatgtgtataca

SEQ ID NO: 1713692 - DNA, 15 bp, Homo sapiens
tagatgtgtatacag

SEQ ID NO: 1713693 - DNA, 15 bp, Homo sapiens
agatgtgtatacaga

SEQ ID NO: 1713694 - DNA, 15 bp, Homo sapiens
gatgtgtatacagaa

SEQ ID NO: 1713695 - DNA, 15 bp, Homo sapiens
atgtgtatacagaaa

SEQ ID NO: 1713696 - DNA, 15 bp, Homo sapiens
tgtgtatacagaaaa

SEQ ID NO: 1713697 - DNA, 15 bp, Homo sapiens
gtgtatacagaaaat

SEQ ID NO: 1713698 - DNA, 15 bp, Homo sapiens
tgtatacagaaaatg

SEQ ID NO: 1713699 - DNA, 15 bp, Homo sapiens
gtatacagaaaatga

SEQ ID NO: 1713700 - DNA, 15 bp, Homo sapiens
tatacagaaaatgaa

SEQ ID NO: 1713701 - DNA, 15 bp, Homo sapiens
atacagaaaatgaaa

SEQ ID NO: 1713702 - DNA, 15 bp, Homo sapiens
tacagaaaatgaaag

SEQ ID NO: 1713703 - DNA, 15 bp, Homo sapiens
acagaaaatgaaaga

SEQ ID NO: 1713704 - DNA, 15 bp, Homo sapiens
cagaaaatgaaagaa

SEQ ID NO: 1713705 - DNA, 15 bp, Homo sapiens
agaaaatgaaagaaa

SEQ ID NO: 1713706 - DNA, 15 bp, Homo sapiens
gaaaatgaaagaaac

SEQ ID NO: 1713707 - DNA, 15 bp, Homo sapiens
aaaatgaaagaaact

SEQ ID NO: 1713708 - DNA, 15 bp, Homo sapiens
aaatgaaagaaacta

SEQ ID NO: 1713709 - DNA, 15 bp, Homo sapiens
aatgaaagaaactag

SEQ ID NO: 1713710 - DNA, 15 bp, Homo sapiens
atgaaagaaactagg

SEQ ID NO: 1713711 - DNA, 15 bp, Homo sapiens
tgaaagaaactaggg

SEQ ID NO: 1713712 - DNA, 15 bp, Homo sapiens
gaaagaaactagggt

SEQ ID NO: 1713713 - DNA, 15 bp, Homo sapiens
aaagaaactagggtc

SEQ ID NO: 1713714 - DNA, 15 bp, Homo sapiens
aagaaactagggtcc

SEQ ID NO: 1713715 - DNA, 15 bp, Homo sapiens
agaaactagggtcca

SEQ ID NO: 1713716 - DNA, 15 bp, Homo sapiens
gaaactagggtccat

SEQ ID NO: 1713717 - DNA, 15 bp, Homo sapiens
aaactagggtccata

SEQ ID NO: 1713718 - DNA, 15 bp, Homo sapiens
aactagggtccatat

SEQ ID NO: 1713719 - DNA, 15 bp, Homo sapiens
actagggtccatatg

SEQ ID NO: 1713720 - DNA, 15 bp, Homo sapiens
ctagggtccatatga

SEQ ID NO: 1713721 - DNA, 15 bp, Homo sapiens
tagggtccatatgag

SEQ ID NO: 1713722 - DNA, 15 bp, Homo sapiens
agggtccatatgagg

SEQ ID NO: 1713723 - DNA, 15 bp, Homo sapiens
gggtccatatgaggg

SEQ ID NO: 1713724 - DNA, 15 bp, Homo sapiens
ggtccatatgaggga

SEQ ID NO: 1713725 - DNA, 15 bp, Homo sapiens
gtccatatgagggaa

SEQ ID NO: 1713726 - DNA, 15 bp, Homo sapiens
tccatatgagggaaa

SEQ ID NO: 1713727 - DNA, 15 bp, Homo sapiens
ccatatgagggaaaa

SEQ ID NO: 1713728 - DNA, 15 bp, Homo sapiens
catatgagggaaaac

SEQ ID NO: 1713729 - DNA, 15 bp, Homo sapiens
atatgagggaaaacc

SEQ ID NO: 1713730 - DNA, 15 bp, Homo sapiens
tatgagggaaaaccc

SEQ ID NO: 1713731 - DNA, 15 bp, Homo sapiens
atgagggaaaaccca

SEQ ID NO: 1713732 - DNA, 15 bp, Homo sapiens
tgagggaaaacccaa

SEQ ID NO: 1713733 - DNA, 15 bp, Homo sapiens
gagggaaaacccaat

SEQ ID NO: 1713734 - DNA, 15 bp, Homo sapiens
agggaaaacccaatg

SEQ ID NO: 1713735 - DNA, 15 bp, Homo sapiens
gggaaaacccaatgt

SEQ ID NO: 1713736 - DNA, 15 bp, Homo sapiens
ggaaaacccaatgtc

SEQ ID NO: 1713737 - DNA, 15 bp, Homo sapiens
gaaaacccaatgtca

SEQ ID NO: 1713738 - DNA, 15 bp, Homo sapiens
aaaacccaatgtcaa

SEQ ID NO: 1713739 - DNA, 15 bp, Homo sapiens
aaacccaatgtcaag

SEQ ID NO: 1713740 - DNA, 15 bp, Homo sapiens
aacccaatgtcaagt

SEQ ID NO: 1713741 - DNA, 15 bp, Homo sapiens
acccaatgtcaagtg

SEQ ID NO: 1713742 - DNA, 15 bp, Homo sapiens
cccaatgtcaagtgg

SEQ ID NO: 1713743 - DNA, 15 bp, Homo sapiens
ccaatgtcaagtggc

SEQ ID NO: 1713744 - DNA, 15 bp, Homo sapiens
caatgtcaagtggca

SEQ ID NO: 1713745 - DNA, 15 bp, Homo sapiens
aatgtcaagtggcag

SEQ ID NO: 1713746 - DNA, 15 bp, Homo sapiens
atgtcaagtggcagc

SEQ ID NO: 1713747 - DNA, 15 bp, Homo sapiens
tgtcaagtggcagct

SEQ ID NO: 1713748 - DNA, 15 bp, Homo sapiens
gtcaagtggcagctc

SEQ ID NO: 1713749 - DNA, 15 bp, Homo sapiens
tcaagtggcagctca

SEQ ID NO: 1713750 - DNA, 15 bp, Homo sapiens
caagtggcagctcag

SEQ ID NO: 1713751 - DNA, 15 bp, Homo sapiens
aagtggcagctcagc

SEQ ID NO: 1713752 - DNA, 15 bp, Homo sapiens
agtggcagctcagcc

SEQ ID NO: 1713753 - DNA, 15 bp, Homo sapiens
gtggcagctcagcca

SEQ ID NO: 1713754 - DNA, 15 bp, Homo sapiens
tggcagctcagccac

SEQ ID NO: 1713755 - DNA, 15 bp, Homo sapiens
ggcagctcagccacc

SEQ ID NO: 1713756 - DNA, 15 bp, Homo sapiens
gcagctcagccacca

SEQ ID NO: 1713757 - DNA, 15 bp, Homo sapiens
cagctcagccaccac

SEQ ID NO: 1713758 - DNA, 15 bp, Homo sapiens
agctcagccaccact

SEQ ID NO: 1713759 - DNA, 15 bp, Homo sapiens
gctcagccaccactc

SEQ ID NO: 1713760 - DNA, 15 bp, Homo sapiens
ctcagccaccactca

SEQ ID NO: 1713761 - DNA, 15 bp, Homo sapiens
tcagccaccactcag

SEQ ID NO: 1713762 - DNA, 15 bp, Homo sapiens
cagccaccactcagt

SEQ ID NO: 1713763 - DNA, 15 bp, Homo sapiens
agccaccactcagtg

SEQ ID NO: 1713764 - DNA, 15 bp, Homo sapiens
gccaccactcagtgc

SEQ ID NO: 1713765 - DNA, 15 bp, Homo sapiens
ccaccactcagtgct

SEQ ID NO: 1713766 - DNA, 15 bp, Homo sapiens
caccactcagtgctt

SEQ ID NO: 1713767 - DNA, 15 bp, Homo sapiens
accactcagtgcttc

SEQ ID NO: 1713768 - DNA, 15 bp, Homo sapiens
ccactcagtgcttct

SEQ ID NO: 1713769 - DNA, 15 bp, Homo sapiens
cactcagtgcttctc

SEQ ID NO: 1713770 - DNA, 15 bp, Homo sapiens
actcagtgcttctct

SEQ ID NO: 1713771 - DNA, 15 bp, Homo sapiens
ctcagtgcttctctg

SEQ ID NO: 1713772 - DNA, 15 bp, Homo sapiens
tcagtgcttctctgt

SEQ ID NO: 1713773 - DNA, 15 bp, Homo sapiens
cagtgcttctctgtg

SEQ ID NO: 1713774 - DNA, 15 bp, Homo sapiens
agtgcttctctgtgc

SEQ ID NO: 1713775 - DNA, 15 bp, Homo sapiens
gtgcttctctgtgca

SEQ ID NO: 1713776 - DNA, 15 bp, Homo sapiens
tgcttctctgtgcag

SEQ ID NO: 1713777 - DNA, 15 bp, Homo sapiens
gcttctctgtgcagg

SEQ ID NO: 1713778 - DNA, 15 bp, Homo sapiens
cttctctgtgcagga

SEQ ID NO: 1713779 - DNA, 15 bp, Homo sapiens
ttctctgtgcaggag

SEQ ID NO: 1713780 - DNA, 15 bp, Homo sapiens
tctctgtgcaggagc

SEQ ID NO: 1713781 - DNA, 15 bp, Homo sapiens
ctctgtgcaggagcc

SEQ ID NO: 1713782 - DNA, 15 bp, Homo sapiens
tctgtgcaggagcca

SEQ ID NO: 1713783 - DNA, 15 bp, Homo sapiens
ctgtgcaggagccag

SEQ ID NO: 1713784 - DNA, 15 bp, Homo sapiens
tgtgcaggagccagt

SEQ ID NO: 1713785 - DNA, 15 bp, Homo sapiens
gtgcaggagccagtc

SEQ ID NO: 1713786 - DNA, 15 bp, Homo sapiens
tgcaggagccagtcc

SEQ ID NO: 1713787 - DNA, 15 bp, Homo sapiens
gcaggagccagtcct

SEQ ID NO: 1713788 - DNA, 15 bp, Homo sapiens
caggagccagtcctg

SEQ ID NO: 1713789 - DNA, 15 bp, Homo sapiens
aggagccagtcctga

SEQ ID NO: 1713790 - DNA, 15 bp, Homo sapiens
ggagccagtcctgat

SEQ ID NO: 1713791 - DNA, 15 bp, Homo sapiens
gagccagtcctgatt

SEQ ID NO: 1713792 - DNA, 15 bp, Homo sapiens
agccagtcctgatta

SEQ ID NO: 1713793 - DNA, 15 bp, Homo sapiens
gccagtcctgattaa

SEQ ID NO: 1713794 - DNA, 15 bp, Homo sapiens
ccagtcctgattaat

SEQ ID NO: 1713795 - DNA, 15 bp, Homo sapiens
cagtcctgattaata

SEQ ID NO: 1713796 - DNA, 15 bp, Homo sapiens
agtcctgattaatat

SEQ ID NO: 1713797 - DNA, 15 bp, Homo sapiens
gtcctgattaatatg

SEQ ID NO: 1713798 - DNA, 15 bp, Homo sapiens
tcctgattaatatgt

SEQ ID NO: 1713799 - DNA, 15 bp, Homo sapiens
cctgattaatatgtg

SEQ ID NO: 1713800 - DNA, 15 bp, Homo sapiens
ctgattaatatgtgg

SEQ ID NO: 1713801 - DNA, 15 bp, Homo sapiens
tgattaatatgtggg

SEQ ID NO: 1713802 - DNA, 15 bp, Homo sapiens
gattaatatgtggga

SEQ ID NO: 1713803 - DNA, 15 bp, Homo sapiens
attaatatgtgggaa

SEQ ID NO: 1713804 - DNA, 15 bp, Homo sapiens
ttaatatgtgggaat

SEQ ID NO: 1713805 - DNA, 15 bp, Homo sapiens
taatatgtgggaatt

SEQ ID NO: 1713806 - DNA, 15 bp, Homo sapiens
aatatgtgggaatta

SEQ ID NO: 1713807 - DNA, 15 bp, Homo sapiens
atatgtgggaattag

SEQ ID NO: 1713808 - DNA, 15 bp, Homo sapiens
tatgtgggaattagt

SEQ ID NO: 1713809 - DNA, 15 bp, Homo sapiens
atgtgggaattagtg

SEQ ID NO: 1713810 - DNA, 15 bp, Homo sapiens
tgtgggaattagtga

SEQ ID NO: 1713811 - DNA, 15 bp, Homo sapiens
gtgggaattagtgag

SEQ ID NO: 1713812 - DNA, 15 bp, Homo sapiens
tgggaattagtgaga

SEQ ID NO: 1713813 - DNA, 15 bp, Homo sapiens
gggaattagtgagac

SEQ ID NO: 1713814 - DNA, 15 bp, Homo sapiens
ggaattagtgagaca

SEQ ID NO: 1713815 - DNA, 15 bp, Homo sapiens
gaattagtgagacat

SEQ ID NO: 1713816 - DNA, 15 bp, Homo sapiens
aattagtgagacatc

SEQ ID NO: 1713817 - DNA, 15 bp, Homo sapiens
attagtgagacatca

SEQ ID NO: 1713818 - DNA, 15 bp, Homo sapiens
ttagtgagacatcag

SEQ ID NO: 1713819 - DNA, 15 bp, Homo sapiens
tagtgagacatcagg

SEQ ID NO: 1713820 - DNA, 15 bp, Homo sapiens
agtgagacatcaggg

SEQ ID NO: 1713821 - DNA, 15 bp, Homo sapiens
gtgagacatcaggga

SEQ ID NO: 1713822 - DNA, 15 bp, Homo sapiens
tgagacatcagggag

SEQ ID NO: 1713823 - DNA, 15 bp, Homo sapiens
gagacatcagggagt

SEQ ID NO: 1713824 - DNA, 15 bp, Homo sapiens
agacatcagggagta

SEQ ID NO: 1713825 - DNA, 15 bp, Homo sapiens
gacatcagggagtaa

SEQ ID NO: 1713826 - DNA, 15 bp, Homo sapiens
acatcagggagtaag

SEQ ID NO: 1713827 - DNA, 15 bp, Homo sapiens
catcagggagtaagt

SEQ ID NO: 1713828 - DNA, 15 bp, Homo sapiens
atcagggagtaagtg

SEQ ID NO: 1713829 - DNA, 15 bp, Homo sapiens
tcagggagtaagtga

SEQ ID NO: 1713830 - DNA, 15 bp, Homo sapiens
cagggagtaagtgac

SEQ ID NO: 1713831 - DNA, 15 bp, Homo sapiens
agggagtaagtgaca

SEQ ID NO: 1713832 - DNA, 15 bp, Homo sapiens
gggagtaagtgacac

SEQ ID NO: 1713833 - DNA, 15 bp, Homo sapiens
ggagtaagtgacact

SEQ ID NO: 1713834 - DNA, 15 bp, Homo sapiens
gagtaagtgacactt

SEQ ID NO: 1713835 - DNA, 15 bp, Homo sapiens
agtaagtgacacttt

SEQ ID NO: 1713836 - DNA, 15 bp, Homo sapiens
gtaagtgacactttg

SEQ ID NO: 1713837 - DNA, 15 bp, Homo sapiens
taagtgacactttga

SEQ ID NO: 1713838 - DNA, 15 bp, Homo sapiens
aagtgacactttgaa

SEQ ID NO: 1713839 - DNA, 15 bp, Homo sapiens
agtgacactttgaac

SEQ ID NO: 1713840 - DNA, 15 bp, Homo sapiens
gtgacactttgaact

SEQ ID NO: 1713841 - DNA, 15 bp, Homo sapiens
tgacactttgaactc

SEQ ID NO: 1713842 - DNA, 15 bp, Homo sapiens
gacactttgaactcc

SEQ ID NO: 1713843 - DNA, 15 bp, Homo sapiens
acactttgaactcct

SEQ ID NO: 1713844 - DNA, 15 bp, Homo sapiens
cactttgaactcctc

SEQ ID NO: 1713845 - DNA, 15 bp, Homo sapiens
actttgaactcctca

SEQ ID NO: 1713846 - DNA, 15 bp, Homo sapiens
ctttgaactcctcaa

SEQ ID NO: 1713847 - DNA, 15 bp, Homo sapiens
tttgaactcctcaag

SEQ ID NO: 1713848 - DNA, 15 bp, Homo sapiens
ttgaactcctcaagg

SEQ ID NO: 1713849 - DNA, 15 bp, Homo sapiens
tgaactcctcaaggg

SEQ ID NO: 1713850 - DNA, 15 bp, Homo sapiens
gaactcctcaagggc

SEQ ID NO: 1713851 - DNA, 15 bp, Homo sapiens
aactcctcaagggca

SEQ ID NO: 1713852 - DNA, 15 bp, Homo sapiens
actcctcaagggcag

SEQ ID NO: 1713853 - DNA, 15 bp, Homo sapiens
ctcctcaagggcaga

SEQ ID NO: 1713854 - DNA, 15 bp, Homo sapiens
tcctcaagggcagag

SEQ ID NO: 1713855 - DNA, 15 bp, Homo sapiens
cctcaagggcagaga

SEQ ID NO: 1713856 - DNA, 15 bp, Homo sapiens
ctcaagggcagagaa

SEQ ID NO: 1713857 - DNA, 15 bp, Homo sapiens
tcaagggcagagaac

SEQ ID NO: 1713858 - DNA, 15 bp, Homo sapiens
caagggcagagaact

SEQ ID NO: 1713859 - DNA, 15 bp, Homo sapiens
aagggcagagaactg

SEQ ID NO: 1713860 - DNA, 15 bp, Homo sapiens
agggcagagaactgt

SEQ ID NO: 1713861 - DNA, 15 bp, Homo sapiens
gggcagagaactgtc

SEQ ID NO: 1713862 - DNA, 15 bp, Homo sapiens
ggcagagaactgtct

SEQ ID NO: 1713863 - DNA, 15 bp, Homo sapiens
gcagagaactgtctt

SEQ ID NO: 1713864 - DNA, 15 bp, Homo sapiens
cagagaactgtcttt

SEQ ID NO: 1713865 - DNA, 15 bp, Homo sapiens
agagaactgtctttc

SEQ ID NO: 1713866 - DNA, 15 bp, Homo sapiens
gagaactgtctttca

SEQ ID NO: 1713867 - DNA, 15 bp, Homo sapiens
agaactgtctttcat

SEQ ID NO: 1713868 - DNA, 15 bp, Homo sapiens
gaactgtctttcatt

SEQ ID NO: 1713869 - DNA, 15 bp, Homo sapiens
aactgtctttcattt

SEQ ID NO: 1713870 - DNA, 15 bp, Homo sapiens
actgtctttcatttt

SEQ ID NO: 1713871 - DNA, 15 bp, Homo sapiens
ctgtctttcattttt

SEQ ID NO: 1713872 - DNA, 15 bp, Homo sapiens
tgtctttcatttttg

SEQ ID NO: 1713873 - DNA, 15 bp, Homo sapiens
gtctttcatttttga

SEQ ID NO: 1713874 - DNA, 15 bp, Homo sapiens
tctttcatttttgaa

SEQ ID NO: 1713875 - DNA, 15 bp, Homo sapiens
ctttcatttttgaac

SEQ ID NO: 1713876 - DNA, 15 bp, Homo sapiens
tttcatttttgaacc

SEQ ID NO: 1713877 - DNA, 15 bp, Homo sapiens
ttcatttttgaaccc

SEQ ID NO: 1713878 - DNA, 15 bp, Homo sapiens
tcatttttgaaccct

SEQ ID NO: 1713879 - DNA, 15 bp, Homo sapiens
catttttgaaccctc

SEQ ID NO: 1713880 - DNA, 15 bp, Homo sapiens
atttttgaaccctcg

SEQ ID NO: 1713881 - DNA, 15 bp, Homo sapiens
tttttgaaccctcgg

SEQ ID NO: 1713882 - DNA, 15 bp, Homo sapiens
ttttgaaccctcggt

SEQ ID NO: 1713883 - DNA, 15 bp, Homo sapiens
tttgaaccctcggtg

SEQ ID NO: 1713884 - DNA, 15 bp, Homo sapiens
ttgaaccctcggtgt

SEQ ID NO: 1713885 - DNA, 15 bp, Homo sapiens
tgaaccctcggtgta

SEQ ID NO: 1713886 - DNA, 15 bp, Homo sapiens
gaaccctcggtgtac

SEQ ID NO: 1713887 - DNA, 15 bp, Homo sapiens
aaccctcggtgtaca

SEQ ID NO: 1713888 - DNA, 15 bp, Homo sapiens
accctcggtgtacac

SEQ ID NO: 1713889 - DNA, 15 bp, Homo sapiens
ccctcggtgtacaca

SEQ ID NO: 1713890 - DNA, 15 bp, Homo sapiens
cctcggtgtacacag

SEQ ID NO: 1713891 - DNA, 15 bp, Homo sapiens
ctcggtgtacacaga

SEQ ID NO: 1713892 - DNA, 15 bp, Homo sapiens
tcggtgtacacagag

SEQ ID NO: 1713893 - DNA, 15 bp, Homo sapiens
cggtgtacacagagg

SEQ ID NO: 1713894 - DNA, 15 bp, Homo sapiens
ggtgtacacagaggc

SEQ ID NO: 1713895 - DNA, 15 bp, Homo sapiens
gtgtacacagaggcg

SEQ ID NO: 1713896 - DNA, 15 bp, Homo sapiens
tgtacacagaggcgg

SEQ ID NO: 1713897 - DNA, 15 bp, Homo sapiens
gtacacagaggcggg

SEQ ID NO: 1713898 - DNA, 15 bp, Homo sapiens
tacacagaggcgggt

SEQ ID NO: 1713899 - DNA, 15 bp, Homo sapiens
acacagaggcgggtc

SEQ ID NO: 1713900 - DNA, 15 bp, Homo sapiens
cacagaggcgggtct

SEQ ID NO: 1713901 - DNA, 15 bp, Homo sapiens
acagaggcgggtcta

SEQ ID NO: 1713902 - DNA, 15 bp, Homo sapiens
cagaggcgggtctat

SEQ ID NO: 1713903 - DNA, 15 bp, Homo sapiens
agaggcgggtctata

SEQ ID NO: 1713904 - DNA, 15 bp, Homo sapiens
gaggcgggtctataa

SEQ ID NO: 1713905 - DNA, 15 bp, Homo sapiens
aggcgggtctataac

SEQ ID NO: 1713906 - DNA, 15 bp, Homo sapiens
ggcgggtctataaca

SEQ ID NO: 1713907 - DNA, 15 bp, Homo sapiens
gcgggtctataacag

SEQ ID NO: 1713908 - DNA, 15 bp, Homo sapiens
cgggtctataacagg

SEQ ID NO: 1713909 - DNA, 15 bp, Homo sapiens
gggtctataacaggc

SEQ ID NO: 1713910 - DNA, 15 bp, Homo sapiens
ggtctataacaggca

SEQ ID NO: 1713911 - DNA, 15 bp, Homo sapiens
gtctataacaggcaa

SEQ ID NO: 1713912 - DNA, 15 bp, Homo sapiens
tctataacaggcaat

SEQ ID NO: 1713913 - DNA, 15 bp, Homo sapiens
ctataacaggcaatc

SEQ ID NO: 1713914 - DNA, 15 bp, Homo sapiens
tataacaggcaatca

SEQ ID NO: 1713915 - DNA, 15 bp, Homo sapiens
ataacaggcaatcaa

SEQ ID NO: 1713916 - DNA, 15 bp, Homo sapiens
taacaggcaatcaac

SEQ ID NO: 1713917 - DNA, 15 bp, Homo sapiens
aacaggcaatcaaca

SEQ ID NO: 1713918 - DNA, 15 bp, Homo sapiens
acaggcaatcaacaa

SEQ ID NO: 1713919 - DNA, 15 bp, Homo sapiens
caggcaatcaacaaa

SEQ ID NO: 1713920 - DNA, 15 bp, Homo sapiens
aggcaatcaacaaac

SEQ ID NO: 1713921 - DNA, 15 bp, Homo sapiens
ggcaatcaacaaacg

SEQ ID NO: 1713922 - DNA, 15 bp, Homo sapiens
gcaatcaacaaacgt

SEQ ID NO: 1713923 - DNA, 15 bp, Homo sapiens
caatcaacaaacgtt

SEQ ID NO: 1713924 - DNA, 15 bp, Homo sapiens
aatcaacaaacgttt

SEQ ID NO: 1713925 - DNA, 15 bp, Homo sapiens
atcaacaaacgtttc

SEQ ID NO: 1713926 - DNA, 15 bp, Homo sapiens
tcaacaaacgtttct

SEQ ID NO: 1713927 - DNA, 15 bp, Homo sapiens
caacaaacgtttctt

SEQ ID NO: 1713928 - DNA, 15 bp, Homo sapiens
aacaaacgtttcttg

SEQ ID NO: 1713929 - DNA, 15 bp, Homo sapiens
acaaacgtttcttga

SEQ ID NO: 1713930 - DNA, 15 bp, Homo sapiens
caaacgtttcttgag

SEQ ID NO: 1713931 - DNA, 15 bp, Homo sapiens
aaacgtttcttgagc

SEQ ID NO: 1713932 - DNA, 15 bp, Homo sapiens
aacgtttcttgagct

SEQ ID NO: 1713933 - DNA, 15 bp, Homo sapiens
acgtttcttgagcta

SEQ ID NO: 1713934 - DNA, 15 bp, Homo sapiens
cgtttcttgagctag

SEQ ID NO: 1713935 - DNA, 15 bp, Homo sapiens
gtttcttgagctaga

SEQ ID NO: 1713936 - DNA, 15 bp, Homo sapiens
tttcttgagctagac

SEQ ID NO: 1713937 - DNA, 15 bp, Homo sapiens
ttcttgagctagacc

SEQ ID NO: 1713938 - DNA, 15 bp, Homo sapiens
tcttgagctagacca

SEQ ID NO: 1713939 - DNA, 15 bp, Homo sapiens
cttgagctagaccaa

SEQ ID NO: 1713940 - DNA, 15 bp, Homo sapiens
ttgagctagaccaag

SEQ ID NO: 1713941 - DNA, 15 bp, Homo sapiens
tgagctagaccaagg

SEQ ID NO: 1713942 - DNA, 15 bp, Homo sapiens
gagctagaccaaggt

SEQ ID NO: 1713943 - DNA, 15 bp, Homo sapiens
agctagaccaaggtc

SEQ ID NO: 1713944 - DNA, 15 bp, Homo sapiens
gctagaccaaggtca

SEQ ID NO: 1713945 - DNA, 15 bp, Homo sapiens
ctagaccaaggtcag

SEQ ID NO: 1713946 - DNA, 15 bp, Homo sapiens
tagaccaaggtcaga

SEQ ID NO: 1713947 - DNA, 15 bp, Homo sapiens
agaccaaggtcagat

SEQ ID NO: 1713948 - DNA, 15 bp, Homo sapiens
gaccaaggtcagatt

SEQ ID NO: 1713949 - DNA, 15 bp, Homo sapiens
accaaggtcagattt

SEQ ID NO: 1713950 - DNA, 15 bp, Homo sapiens
ccaaggtcagatttg

SEQ ID NO: 1713951 - DNA, 15 bp, Homo sapiens
caaggtcagatttga

SEQ ID NO: 1713952 - DNA, 15 bp, Homo sapiens
aaggtcagatttgaa

SEQ ID NO: 1713953 - DNA, 15 bp, Homo sapiens
aggtcagatttgaaa

SEQ ID NO: 1713954 - DNA, 15 bp, Homo sapiens
ggtcagatttgaaaa

SEQ ID NO: 1713955 - DNA, 15 bp, Homo sapiens
gtcagatttgaaaag

SEQ ID NO: 1713956 - DNA, 15 bp, Homo sapiens
tcagatttgaaaaga

SEQ ID NO: 1713957 - DNA, 15 bp, Homo sapiens
cagatttgaaaagaa

SEQ ID NO: 1713958 - DNA, 15 bp, Homo sapiens
agatttgaaaagaac

SEQ ID NO: 1713959 - DNA, 15 bp, Homo sapiens
gatttgaaaagaaca

SEQ ID NO: 1713960 - DNA, 15 bp, Homo sapiens
atttgaaaagaacag

SEQ ID NO: 1713961 - DNA, 15 bp, Homo sapiens
tttgaaaagaacaga

SEQ ID NO: 1713962 - DNA, 15 bp, Homo sapiens
ttgaaaagaacagaa

SEQ ID NO: 1713963 - DNA, 15 bp, Homo sapiens
tgaaaagaacagaag

SEQ ID NO: 1713964 - DNA, 15 bp, Homo sapiens
gaaaagaacagaagg

SEQ ID NO: 1713965 - DNA, 15 bp, Homo sapiens
aaaagaacagaagga

SEQ ID NO: 1713966 - DNA, 15 bp, Homo sapiens
aaagaacagaaggac

SEQ ID NO: 1713967 - DNA, 15 bp, Homo sapiens
aagaacagaaggact

SEQ ID NO: 1713968 - DNA, 15 bp, Homo sapiens
agaacagaaggactg

SEQ ID NO: 1713969 - DNA, 15 bp, Homo sapiens
gaacagaaggactga

SEQ ID NO: 1713970 - DNA, 15 bp, Homo sapiens
aacagaaggactgaa

SEQ ID NO: 1713971 - DNA, 15 bp, Homo sapiens
acagaaggactgaag

SEQ ID NO: 1713972 - DNA, 15 bp, Homo sapiens
cagaaggactgaaga

SEQ ID NO: 1713973 - DNA, 15 bp, Homo sapiens
agaaggactgaagac

SEQ ID NO: 1713974 - DNA, 15 bp, Homo sapiens
gaaggactgaagacc

SEQ ID NO: 1713975 - DNA, 15 bp, Homo sapiens
aaggactgaagacca

SEQ ID NO: 1713976 - DNA, 15 bp, Homo sapiens
aggactgaagaccag

SEQ ID NO: 1713977 - DNA, 15 bp, Homo sapiens
ggactgaagaccagc

SEQ ID NO: 1713978 - DNA, 15 bp, Homo sapiens
gactgaagaccagct

SEQ ID NO: 1713979 - DNA, 15 bp, Homo sapiens
actgaagaccagctg

SEQ ID NO: 1713980 - DNA, 15 bp, Homo sapiens
ctgaagaccagctgt

SEQ ID NO: 1713981 - DNA, 15 bp, Homo sapiens
tgaagaccagctgtg

SEQ ID NO: 1713982 - DNA, 15 bp, Homo sapiens
gaagaccagctgtgt

SEQ ID NO: 1713983 - DNA, 15 bp, Homo sapiens
aagaccagctgtgtt

SEQ ID NO: 1713984 - DNA, 15 bp, Homo sapiens
gaccagctgtgtttc

SEQ ID NO: 1713985 - DNA, 15 bp, Homo sapiens
accagctgtgtttct

SEQ ID NO: 1713986 - DNA, 15 bp, Homo sapiens
ccagctgtgtttctt

SEQ ID NO: 1713987 - DNA, 15 bp, Homo sapiens
cagctgtgtttctta

SEQ ID NO: 1713988 - DNA, 15 bp, Homo sapiens
agctgtgtttcttaa

SEQ ID NO: 1713989 - DNA, 15 bp, Homo sapiens
gctgtgtttcttaac

SEQ ID NO: 1713990 - DNA, 15 bp, Homo sapiens
ctgtgtttcttaact

SEQ ID NO: 1713991 - DNA, 15 bp, Homo sapiens
tgtgtttcttaacta

SEQ ID NO: 1713992 - DNA, 15 bp, Homo sapiens
gtgtttcttaactaa

SEQ ID NO: 1713993 - DNA, 15 bp, Homo sapiens
tgtttcttaactaaa

SEQ ID NO: 1713994 - DNA, 15 bp, Homo sapiens
gtttcttaactaaat

SEQ ID NO: 1713995 - DNA, 15 bp, Homo sapiens
tttcttaactaaatt

SEQ ID NO: 1713996 - DNA, 15 bp, Homo sapiens
ttcttaactaaattt

SEQ ID NO: 1713997 - DNA, 15 bp, Homo sapiens
tcttaactaaatttg

SEQ ID NO: 1713998 - DNA, 15 bp, Homo sapiens
cttaactaaatttgt

SEQ ID NO: 1713999 - DNA, 15 bp, Homo sapiens
ttaactaaatttgtc

SEQ ID NO: 1714000 - DNA, 15 bp, Homo sapiens
taactaaatttgtct

SEQ ID NO: 1714001 - DNA, 15 bp, Homo sapiens
aactaaatttgtctt

SEQ ID NO: 1714002 - DNA, 15 bp, Homo sapiens
actaaatttgtcttt

SEQ ID NO: 1714003 - DNA, 15 bp, Homo sapiens
ctaaatttgtctttc

SEQ ID NO: 1714004 - DNA, 15 bp, Homo sapiens
taaatttgtctttca

SEQ ID NO: 1714005 - DNA, 15 bp, Homo sapiens
aaatttgtctttcaa

SEQ ID NO: 1714006 - DNA, 15 bp, Homo sapiens
aatttgtctttcaag

SEQ ID NO: 1714007 - DNA, 15 bp, Homo sapiens
atttgtctttcaagt

SEQ ID NO: 1714008 - DNA, 15 bp, Homo sapiens
tttgtctttcaagtg

SEQ ID NO: 1714009 - DNA, 15 bp, Homo sapiens
ttgtctttcaagtga

SEQ ID NO: 1714010 - DNA, 15 bp, Homo sapiens
tgtctttcaagtgaa

SEQ ID NO: 1714011 - DNA, 15 bp, Homo sapiens
gtctttcaagtgaaa

SEQ ID NO: 1714012 - DNA, 15 bp, Homo sapiens
tctttcaagtgaaac

SEQ ID NO: 1714013 - DNA, 15 bp, Homo sapiens
ctttcaagtgaaacc

SEQ ID NO: 1714014 - DNA, 15 bp, Homo sapiens
tttcaagtgaaacca

SEQ ID NO: 1714015 - DNA, 15 bp, Homo sapiens
ttcaagtgaaaccag

SEQ ID NO: 1714016 - DNA, 15 bp, Homo sapiens
tcaagtgaaaccagc

SEQ ID NO: 1714017 - DNA, 15 bp, Homo sapiens
caagtgaaaccagct

SEQ ID NO: 1714018 - DNA, 15 bp, Homo sapiens
aagtgaaaccagctt

SEQ ID NO: 1714019 - DNA, 15 bp, Homo sapiens
agtgaaaccagcttc

SEQ ID NO: 1714020 - DNA, 15 bp, Homo sapiens
gtgaaaccagcttcc

SEQ ID NO: 1714021 - DNA, 15 bp, Homo sapiens
tgaaaccagcttcct

SEQ ID NO: 1714022 - DNA, 15 bp, Homo sapiens
gaaaccagcttcctt

SEQ ID NO: 1714023 - DNA, 15 bp, Homo sapiens
aaaccagcttccttc

SEQ ID NO: 1714024 - DNA, 15 bp, Homo sapiens
aaccagcttccttca

SEQ ID NO: 1714025 - DNA, 15 bp, Homo sapiens
accagcttccttcat

SEQ ID NO: 1714026 - DNA, 15 bp, Homo sapiens
ccagcttccttcatc

SEQ ID NO: 1714027 - DNA, 15 bp, Homo sapiens
cagcttccttcatct

SEQ ID NO: 1714028 - DNA, 15 bp, Homo sapiens
agcttccttcatctc

SEQ ID NO: 1714029 - DNA, 15 bp, Homo sapiens
gcttccttcatctct

SEQ ID NO: 1714030 - DNA, 15 bp, Homo sapiens
cttccttcatctcta

SEQ ID NO: 1714031 - DNA, 15 bp, Homo sapiens
ttccttcatctctaa

SEQ ID NO: 1714032 - DNA, 15 bp, Homo sapiens
tccttcatctctaag

SEQ ID NO: 1714033 - DNA, 15 bp, Homo sapiens
ccttcatctctaagg

SEQ ID NO: 1714034 - DNA, 15 bp, Homo sapiens
cttcatctctaaggc

SEQ ID NO: 1714035 - DNA, 15 bp, Homo sapiens
ttcatctctaaggct

SEQ ID NO: 1714036 - DNA, 15 bp, Homo sapiens
tcatctctaaggcta

SEQ ID NO: 1714037 - DNA, 15 bp, Homo sapiens
catctctaaggctaa

SEQ ID NO: 1714038 - DNA, 15 bp, Homo sapiens
atctctaaggctaag

SEQ ID NO: 1714039 - DNA, 15 bp, Homo sapiens
tctctaaggctaagg

SEQ ID NO: 1714040 - DNA, 15 bp, Homo sapiens
ctctaaggctaagga

SEQ ID NO: 1714041 - DNA, 15 bp, Homo sapiens
tctaaggctaaggat

SEQ ID NO: 1714042 - DNA, 15 bp, Homo sapiens
ctaaggctaaggata

SEQ ID NO: 1714043 - DNA, 15 bp, Homo sapiens
taaggctaaggatag

SEQ ID NO: 1714044 - DNA, 15 bp, Homo sapiens
aaggctaaggatagg

SEQ ID NO: 1714045 - DNA, 15 bp, Homo sapiens
aggctaaggataggg

SEQ ID NO: 1714046 - DNA, 15 bp, Homo sapiens
ggctaaggataggga

SEQ ID NO: 1714047 - DNA, 15 bp, Homo sapiens
gctaaggatagggaa

SEQ ID NO: 1714048 - DNA, 15 bp, Homo sapiens
ctaaggatagggaaa

SEQ ID NO: 1714049 - DNA, 15 bp, Homo sapiens
taaggatagggaaag

SEQ ID NO: 1714050 - DNA, 15 bp, Homo sapiens
aaggatagggaaagg

SEQ ID NO: 1714051 - DNA, 15 bp, Homo sapiens
aggatagggaaaggg

SEQ ID NO: 1714052 - DNA, 15 bp, Homo sapiens
ggatagggaaagggt

SEQ ID NO: 1714053 - DNA, 15 bp, Homo sapiens
gatagggaaagggtg

SEQ ID NO: 1714054 - DNA, 15 bp, Homo sapiens
atagggaaagggtgg

SEQ ID NO: 1714055 - DNA, 15 bp, Homo sapiens
tagggaaagggtgga

SEQ ID NO: 1714056 - DNA, 15 bp, Homo sapiens
agggaaagggtggat

SEQ ID NO: 1714057 - DNA, 15 bp, Homo sapiens
gggaaagggtggatg

SEQ ID NO: 1714058 - DNA, 15 bp, Homo sapiens
ggaaagggtggatgc

SEQ ID NO: 1714059 - DNA, 15 bp, Homo sapiens
gaaagggtggatgct

SEQ ID NO: 1714060 - DNA, 15 bp, Homo sapiens
aaagggtggatgctc

SEQ ID NO: 1714061 - DNA, 15 bp, Homo sapiens
aagggtggatgctct

SEQ ID NO: 1714062 - DNA, 15 bp, Homo sapiens
agggtggatgctctc

SEQ ID NO: 1714063 - DNA, 15 bp, Homo sapiens
gggtggatgctctca

SEQ ID NO: 1714064 - DNA, 15 bp, Homo sapiens
ggtggatgctctcag

SEQ ID NO: 1714065 - DNA, 15 bp, Homo sapiens
gtggatgctctcagg

SEQ ID NO: 1714066 - DNA, 15 bp, Homo sapiens
tggatgctctcaggc

SEQ ID NO: 1714067 - DNA, 15 bp, Homo sapiens
ggatgctctcaggct

SEQ ID NO: 1714068 - DNA, 15 bp, Homo sapiens
gatgctctcaggctg

SEQ ID NO: 1714069 - DNA, 15 bp, Homo sapiens
atgctctcaggctga

SEQ ID NO: 1714070 - DNA, 15 bp, Homo sapiens
tgctctcaggctgag

SEQ ID NO: 1714071 - DNA, 15 bp, Homo sapiens
gctctcaggctgagg

SEQ ID NO: 1714072 - DNA, 15 bp, Homo sapiens
ctctcaggctgaggg

SEQ ID NO: 1714073 - DNA, 15 bp, Homo sapiens
tctcaggctgaggga

SEQ ID NO: 1714074 - DNA, 15 bp, Homo sapiens
ctcaggctgagggag

SEQ ID NO: 1714075 - DNA, 15 bp, Homo sapiens
tcaggctgagggagg

SEQ ID NO: 1714076 - DNA, 15 bp, Homo sapiens
aggctgagggaggca

SEQ ID NO: 1714077 - DNA, 15 bp, Homo sapiens
gctgagggaggcaga

SEQ ID NO: 1714078 - DNA, 15 bp, Homo sapiens
ctgagggaggcagaa

SEQ ID NO: 1714079 - DNA, 15 bp, Homo sapiens
tgagggaggcagaaa

SEQ ID NO: 1714080 - DNA, 15 bp, Homo sapiens
gagggaggcagaaag

SEQ ID NO: 1714081 - DNA, 15 bp, Homo sapiens
agggaggcagaaagg

SEQ ID NO: 1714082 - DNA, 15 bp, Homo sapiens
gggaggcagaaaggg

SEQ ID NO: 1714083 - DNA, 15 bp, Homo sapiens
ggaggcagaaaggga

SEQ ID NO: 1714084 - DNA, 15 bp, Homo sapiens
gaggcagaaagggaa

SEQ ID NO: 1714085 - DNA, 15 bp, Homo sapiens
aggcagaaagggaaa

SEQ ID NO: 1714086 - DNA, 15 bp, Homo sapiens
ggcagaaagggaaag

SEQ ID NO: 1714087 - DNA, 15 bp, Homo sapiens
gcagaaagggaaagt

SEQ ID NO: 1714088 - DNA, 15 bp, Homo sapiens
cagaaagggaaagta

SEQ ID NO: 1714089 - DNA, 15 bp, Homo sapiens
agaaagggaaagtat

SEQ ID NO: 1714090 - DNA, 15 bp, Homo sapiens
gaaagggaaagtatt

SEQ ID NO: 1714091 - DNA, 15 bp, Homo sapiens
aaagggaaagtatta

SEQ ID NO: 1714092 - DNA, 15 bp, Homo sapiens
aagggaaagtattag

SEQ ID NO: 1714093 - DNA, 15 bp, Homo sapiens
agggaaagtattagc

SEQ ID NO: 1714094 - DNA, 15 bp, Homo sapiens
gggaaagtattagca

SEQ ID NO: 1714095 - DNA, 15 bp, Homo sapiens
ggaaagtattagcat

SEQ ID NO: 1714096 - DNA, 15 bp, Homo sapiens
gaaagtattagcatg

SEQ ID NO: 1714097 - DNA, 15 bp, Homo sapiens
aaagtattagcatga

SEQ ID NO: 1714098 - DNA, 15 bp, Homo sapiens
aagtattagcatgag

SEQ ID NO: 1714099 - DNA, 15 bp, Homo sapiens
agtattagcatgagc

SEQ ID NO: 1714100 - DNA, 15 bp, Homo sapiens
gtattagcatgagct

SEQ ID NO: 1714101 - DNA, 15 bp, Homo sapiens
tattagcatgagctt

SEQ ID NO: 1714102 - DNA, 15 bp, Homo sapiens
attagcatgagcttt

SEQ ID NO: 1714103 - DNA, 15 bp, Homo sapiens
ttagcatgagctttc

SEQ ID NO: 1714104 - DNA, 15 bp, Homo sapiens
tagcatgagctttcc

SEQ ID NO: 1714105 - DNA, 15 bp, Homo sapiens
agcatgagctttcca

SEQ ID NO: 1714106 - DNA, 15 bp, Homo sapiens
gcatgagctttccag

SEQ ID NO: 1714107 - DNA, 15 bp, Homo sapiens
catgagctttccagt

SEQ ID NO: 1714108 - DNA, 15 bp, Homo sapiens
atgagctttccagtt

SEQ ID NO: 1714109 - DNA, 15 bp, Homo sapiens
tgagctttccagtta

SEQ ID NO: 1714110 - DNA, 15 bp, Homo sapiens
gagctttccagttag

SEQ ID NO: 1714111 - DNA, 15 bp, Homo sapiens
agctttccagttagg

SEQ ID NO: 1714112 - DNA, 15 bp, Homo sapiens
gctttccagttaggg

SEQ ID NO: 1714113 - DNA, 15 bp, Homo sapiens
ctttccagttagggc

SEQ ID NO: 1714114 - DNA, 15 bp, Homo sapiens
tttccagttagggct

SEQ ID NO: 1714115 - DNA, 15 bp, Homo sapiens
ttccagttagggctg

SEQ ID NO: 1714116 - DNA, 15 bp, Homo sapiens
tccagttagggctgt

SEQ ID NO: 1714117 - DNA, 15 bp, Homo sapiens
ccagttagggctgtt

SEQ ID NO: 1714118 - DNA, 15 bp, Homo sapiens
cagttagggctgttg

SEQ ID NO: 1714119 - DNA, 15 bp, Homo sapiens
agttagggctgttga

SEQ ID NO: 1714120 - DNA, 15 bp, Homo sapiens
gttagggctgttgat

SEQ ID NO: 1714121 - DNA, 15 bp, Homo sapiens
ttagggctgttgatt

SEQ ID NO: 1714122 - DNA, 15 bp, Homo sapiens
tagggctgttgattt

SEQ ID NO: 1714123 - DNA, 15 bp, Homo sapiens
agggctgttgattta

SEQ ID NO: 1714124 - DNA, 15 bp, Homo sapiens
gggctgttgatttat

SEQ ID NO: 1714125 - DNA, 15 bp, Homo sapiens
ggctgttgatttatg

SEQ ID NO: 1714126 - DNA, 15 bp, Homo sapiens
gctgttgatttatgc

SEQ ID NO: 1714127 - DNA, 15 bp, Homo sapiens
ctgttgatttatgct

SEQ ID NO: 1714128 - DNA, 15 bp, Homo sapiens
tgttgatttatgctt

SEQ ID NO: 1714129 - DNA, 15 bp, Homo sapiens
gttgatttatgcttt

SEQ ID NO: 1714130 - DNA, 15 bp, Homo sapiens
ttgatttatgcttta

SEQ ID NO: 1714131 - DNA, 15 bp, Homo sapiens
tgatttatgctttaa

SEQ ID NO: 1714132 - DNA, 15 bp, Homo sapiens
gatttatgctttaac

SEQ ID NO: 1714133 - DNA, 15 bp, Homo sapiens
atttatgctttaact

SEQ ID NO: 1714134 - DNA, 15 bp, Homo sapiens
tttatgctttaactt

SEQ ID NO: 1714135 - DNA, 15 bp, Homo sapiens
ttatgctttaacttc

SEQ ID NO: 1714136 - DNA, 15 bp, Homo sapiens
tatgctttaacttca

SEQ ID NO: 1714137 - DNA, 15 bp, Homo sapiens
atgctttaacttcag

SEQ ID NO: 1714138 - DNA, 15 bp, Homo sapiens
tgctttaacttcaga

SEQ ID NO: 1714139 - DNA, 15 bp, Homo sapiens
gctttaacttcagag

SEQ ID NO: 1714140 - DNA, 15 bp, Homo sapiens
ctttaacttcagagt

SEQ ID NO: 1714141 - DNA, 15 bp, Homo sapiens
tttaacttcagagtg

SEQ ID NO: 1714142 - DNA, 15 bp, Homo sapiens
ttaacttcagagtga

SEQ ID NO: 1714143 - DNA, 15 bp, Homo sapiens
taacttcagagtgag

SEQ ID NO: 1714144 - DNA, 15 bp, Homo sapiens
aacttcagagtgagt

SEQ ID NO: 1714145 - DNA, 15 bp, Homo sapiens
acttcagagtgagtg

SEQ ID NO: 1714146 - DNA, 15 bp, Homo sapiens
cttcagagtgagtgt

SEQ ID NO: 1714147 - DNA, 15 bp, Homo sapiens
ttcagagtgagtgta

SEQ ID NO: 1714148 - DNA, 15 bp, Homo sapiens
tcagagtgagtgtag

SEQ ID NO: 1714149 - DNA, 15 bp, Homo sapiens
cagagtgagtgtagg

SEQ ID NO: 1714150 - DNA, 15 bp, Homo sapiens
agagtgagtgtaggg

SEQ ID NO: 1714151 - DNA, 15 bp, Homo sapiens
gagtgagtgtagggg

SEQ ID NO: 1714152 - DNA, 15 bp, Homo sapiens
agtgagtgtaggggt

SEQ ID NO: 1714153 - DNA, 15 bp, Homo sapiens
gtgagtgtaggggtg

SEQ ID NO: 1714154 - DNA, 15 bp, Homo sapiens
tgagtgtaggggtgg

SEQ ID NO: 1714155 - DNA, 15 bp, Homo sapiens
gagtgtaggggtggt

SEQ ID NO: 1714156 - DNA, 15 bp, Homo sapiens
agtgtaggggtggtg

SEQ ID NO: 1714157 - DNA, 15 bp, Homo sapiens
gtgtaggggtggtga

SEQ ID NO: 1714158 - DNA, 15 bp, Homo sapiens
tgtaggggtggtgat

SEQ ID NO: 1714159 - DNA, 15 bp, Homo sapiens
gtaggggtggtgatg

SEQ ID NO: 1714160 - DNA, 15 bp, Homo sapiens
taggggtggtgatgc

SEQ ID NO: 1714161 - DNA, 15 bp, Homo sapiens
ggggtggtgatgcta

SEQ ID NO: 1714162 - DNA, 15 bp, Homo sapiens
gggtggtgatgctac

SEQ ID NO: 1714163 - DNA, 15 bp, Homo sapiens
ggtggtgatgctacc

SEQ ID NO: 1714164 - DNA, 15 bp, Homo sapiens
gtggtgatgctacca

SEQ ID NO: 1714165 - DNA, 15 bp, Homo sapiens
tggtgatgctaccat

SEQ ID NO: 1714166 - DNA, 15 bp, Homo sapiens
ggtgatgctaccatt

SEQ ID NO: 1714167 - DNA, 15 bp, Homo sapiens
gtgatgctaccatta

SEQ ID NO: 1714168 - DNA, 15 bp, Homo sapiens
tgatgctaccattac

SEQ ID NO: 1714169 - DNA, 15 bp, Homo sapiens
gatgctaccattact

SEQ ID NO: 1714170 - DNA, 15 bp, Homo sapiens
atgctaccattactg

SEQ ID NO: 1714171 - DNA, 15 bp, Homo sapiens
tgctaccattactgt

SEQ ID NO: 1714172 - DNA, 15 bp, Homo sapiens
gctaccattactgtg

SEQ ID NO: 1714173 - DNA, 15 bp, Homo sapiens
ctaccattactgtga

SEQ ID NO: 1714174 - DNA, 15 bp, Homo sapiens
taccattactgtgag

SEQ ID NO: 1714175 - DNA, 15 bp, Homo sapiens
accattactgtgagg

SEQ ID NO: 1714176 - DNA, 15 bp, Homo sapiens
ccattactgtgagga

SEQ ID NO: 1714177 - DNA, 15 bp, Homo sapiens
cattactgtgaggac

SEQ ID NO: 1714178 - DNA, 15 bp, Homo sapiens
attactgtgaggacc

SEQ ID NO: 1714179 - DNA, 15 bp, Homo sapiens
ttactgtgaggacct

SEQ ID NO: 1714180 - DNA, 15 bp, Homo sapiens
tactgtgaggaccta

SEQ ID NO: 1714181 - DNA, 15 bp, Homo sapiens
actgtgaggacctac

SEQ ID NO: 1714182 - DNA, 15 bp, Homo sapiens
ctgtgaggacctacc

SEQ ID NO: 1714183 - DNA, 15 bp, Homo sapiens
tgtgaggacctacca

SEQ ID NO: 1714184 - DNA, 15 bp, Homo sapiens
gtgaggacctaccag

SEQ ID NO: 1714185 - DNA, 15 bp, Homo sapiens
tgaggacctaccagt

SEQ ID NO: 1714186 - DNA, 15 bp, Homo sapiens
gaggacctaccagtg

SEQ ID NO: 1714187 - DNA, 15 bp, Homo sapiens
aggacctaccagtgt

SEQ ID NO: 1714188 - DNA, 15 bp, Homo sapiens
ggacctaccagtgtg

SEQ ID NO: 1714189 - DNA, 15 bp, Homo sapiens
gacctaccagtgtgg

SEQ ID NO: 1714190 - DNA, 15 bp, Homo sapiens
acctaccagtgtggc

SEQ ID NO: 1714191 - DNA, 15 bp, Homo sapiens
cctaccagtgtggct

SEQ ID NO: 1714192 - DNA, 15 bp, Homo sapiens
ctaccagtgtggctg

SEQ ID NO: 1714193 - DNA, 15 bp, Homo sapiens
taccagtgtggctgg

SEQ ID NO: 1714194 - DNA, 15 bp, Homo sapiens
accagtgtggctgga

SEQ ID NO: 1714195 - DNA, 15 bp, Homo sapiens
ccagtgtggctggag

SEQ ID NO: 1714196 - DNA, 15 bp, Homo sapiens
cagtgtggctggagc

SEQ ID NO: 1714197 - DNA, 15 bp, Homo sapiens
agtgtggctggagca

SEQ ID NO: 1714198 - DNA, 15 bp, Homo sapiens
gtgtggctggagcag

SEQ ID NO: 1714199 - DNA, 15 bp, Homo sapiens
tgtggctggagcagg

SEQ ID NO: 1714200 - DNA, 15 bp, Homo sapiens
gtggctggagcaggg

SEQ ID NO: 1714201 - DNA, 15 bp, Homo sapiens
tggctggagcaggga

SEQ ID NO: 1714202 - DNA, 15 bp, Homo sapiens
ggctggagcagggac

SEQ ID NO: 1714203 - DNA, 15 bp, Homo sapiens
gctggagcagggact

SEQ ID NO: 1714204 - DNA, 15 bp, Homo sapiens
ctggagcagggactc

SEQ ID NO: 1714205 - DNA, 15 bp, Homo sapiens
tggagcagggactct

SEQ ID NO: 1714206 - DNA, 15 bp, Homo sapiens
ggagcagggactctc

SEQ ID NO: 1714207 - DNA, 15 bp, Homo sapiens
gagcagggactctct

SEQ ID NO: 1714208 - DNA, 15 bp, Homo sapiens
agcagggactctctc

SEQ ID NO: 1714209 - DNA, 15 bp, Homo sapiens
gcagggactctctcc

SEQ ID NO: 1714210 - DNA, 15 bp, Homo sapiens
cagggactctctccc

SEQ ID NO: 1714211 - DNA, 15 bp, Homo sapiens
agggactctctccca

SEQ ID NO: 1714212 - DNA, 15 bp, Homo sapiens
gggactctctcccag

SEQ ID NO: 1714213 - DNA, 15 bp, Homo sapiens
ggactctctcccagg

SEQ ID NO: 1714214 - DNA, 15 bp, Homo sapiens
gactctctcccaggc

SEQ ID NO: 1714215 - DNA, 15 bp, Homo sapiens
actctctcccaggcc

SEQ ID NO: 1714216 - DNA, 15 bp, Homo sapiens
ctctctcccaggcct

SEQ ID NO: 1714217 - DNA, 15 bp, Homo sapiens
tctctcccaggcctt

SEQ ID NO: 1714218 - DNA, 15 bp, Homo sapiens
ctctcccaggccttt

SEQ ID NO: 1714219 - DNA, 15 bp, Homo sapiens
tctcccaggcctttt

SEQ ID NO: 1714220 - DNA, 15 bp, Homo sapiens
ctcccaggcctttta

SEQ ID NO: 1714221 - DNA, 15 bp, Homo sapiens
tcccaggccttttac

SEQ ID NO: 1714222 - DNA, 15 bp, Homo sapiens
cccaggccttttact

SEQ ID NO: 1714223 - DNA, 15 bp, Homo sapiens
ccaggccttttactc

SEQ ID NO: 1714224 - DNA, 15 bp, Homo sapiens
caggccttttactcc

SEQ ID NO: 1714225 - DNA, 15 bp, Homo sapiens
aggccttttactcct

SEQ ID NO: 1714226 - DNA, 15 bp, Homo sapiens
ggccttttactcctc

SEQ ID NO: 1714227 - DNA, 15 bp, Homo sapiens
gccttttactcctca

SEQ ID NO: 1714228 - DNA, 15 bp, Homo sapiens
ccttttactcctcag

SEQ ID NO: 1714229 - DNA, 15 bp, Homo sapiens
cttttactcctcagc

SEQ ID NO: 1714230 - DNA, 15 bp, Homo sapiens
ttttactcctcagca

SEQ ID NO: 1714231 - DNA, 15 bp, Homo sapiens
tttactcctcagcac

SEQ ID NO: 1714232 - DNA, 15 bp, Homo sapiens
ttactcctcagcacc

SEQ ID NO: 1714233 - DNA, 15 bp, Homo sapiens
tactcctcagcacct

SEQ ID NO: 1714234 - DNA, 15 bp, Homo sapiens
actcctcagcacctc

SEQ ID NO: 1714235 - DNA, 15 bp, Homo sapiens
ctcctcagcacctcc

SEQ ID NO: 1714236 - DNA, 15 bp, Homo sapiens
tcctcagcacctccc

SEQ ID NO: 1714237 - DNA, 15 bp, Homo sapiens
cctcagcacctccct

SEQ ID NO: 1714238 - DNA, 15 bp, Homo sapiens
ctcagcacctccctg

SEQ ID NO: 1714239 - DNA, 15 bp, Homo sapiens
tcagcacctccctgc

SEQ ID NO: 1714240 - DNA, 15 bp, Homo sapiens
cagcacctccctgca

SEQ ID NO: 1714241 - DNA, 15 bp, Homo sapiens
agcacctccctgcat

SEQ ID NO: 1714242 - DNA, 15 bp, Homo sapiens
gcacctccctgcata

SEQ ID NO: 1714243 - DNA, 15 bp, Homo sapiens
cacctccctgcatac

SEQ ID NO: 1714244 - DNA, 15 bp, Homo sapiens
acctccctgcatact

SEQ ID NO: 1714245 - DNA, 15 bp, Homo sapiens
cctccctgcatactg

SEQ ID NO: 1714246 - DNA, 15 bp, Homo sapiens
ctccctgcatactga

SEQ ID NO: 1714247 - DNA, 15 bp, Homo sapiens
tccctgcatactgat

SEQ ID NO: 1714248 - DNA, 15 bp, Homo sapiens
ccctgcatactgatt

SEQ ID NO: 1714249 - DNA, 15 bp, Homo sapiens
cctgcatactgattg

SEQ ID NO: 1714250 - DNA, 15 bp, Homo sapiens
ctgcatactgattgt

SEQ ID NO: 1714251 - DNA, 15 bp, Homo sapiens
tgcatactgattgtt

SEQ ID NO: 1714252 - DNA, 15 bp, Homo sapiens
gcatactgattgttg

SEQ ID NO: 1714253 - DNA, 15 bp, Homo sapiens
catactgattgttgt

SEQ ID NO: 1714254 - DNA, 15 bp, Homo sapiens
atactgattgttgtt

SEQ ID NO: 1714255 - DNA, 15 bp, Homo sapiens
tactgattgttgttt

SEQ ID NO: 1714256 - DNA, 15 bp, Homo sapiens
actgattgttgtttt

SEQ ID NO: 1714257 - DNA, 15 bp, Homo sapiens
ctgattgttgttttt

SEQ ID NO: 1714258 - DNA, 15 bp, Homo sapiens
tgattgttgttttta

SEQ ID NO: 1714259 - DNA, 15 bp, Homo sapiens
gattgttgtttttag

SEQ ID NO: 1714260 - DNA, 15 bp, Homo sapiens
attgttgtttttagt

SEQ ID NO: 1714261 - DNA, 15 bp, Homo sapiens
ttgttgtttttagtt

SEQ ID NO: 1714262 - DNA, 15 bp, Homo sapiens
tgttgtttttagttt

SEQ ID NO: 1714263 - DNA, 15 bp, Homo sapiens
gttgtttttagtttc

SEQ ID NO: 1714264 - DNA, 15 bp, Homo sapiens
ttgtttttagtttct

SEQ ID NO: 1714265 - DNA, 15 bp, Homo sapiens
tgtttttagtttctg

SEQ ID NO: 1714266 - DNA, 15 bp, Homo sapiens
gtttttagtttctgt

SEQ ID NO: 1714267 - DNA, 15 bp, Homo sapiens
tttttagtttctgtg

SEQ ID NO: 1714268 - DNA, 15 bp, Homo sapiens
ttttagtttctgtga

SEQ ID NO: 1714269 - DNA, 15 bp, Homo sapiens
tttagtttctgtgaa

SEQ ID NO: 1714270 - DNA, 15 bp, Homo sapiens
ttagtttctgtgaaa

SEQ ID NO: 1714271 - DNA, 15 bp, Homo sapiens
tagtttctgtgaaat

SEQ ID NO: 1714272 - DNA, 15 bp, Homo sapiens
agtttctgtgaaatt

SEQ ID NO: 1714273 - DNA, 15 bp, Homo sapiens
gtttctgtgaaatta

SEQ ID NO: 1714274 - DNA, 15 bp, Homo sapiens
tttctgtgaaattat

SEQ ID NO: 1714275 - DNA, 15 bp, Homo sapiens
ttctgtgaaattata

SEQ ID NO: 1714276 - DNA, 15 bp, Homo sapiens
tctgtgaaattatat

SEQ ID NO: 1714277 - DNA, 15 bp, Homo sapiens
ctgtgaaattatatt

SEQ ID NO: 1714278 - DNA, 15 bp, Homo sapiens
tgtgaaattatattc

SEQ ID NO: 1714279 - DNA, 15 bp, Homo sapiens
gtgaaattatattca

SEQ ID NO: 1714280 - DNA, 15 bp, Homo sapiens
tgaaattatattcat

SEQ ID NO: 1714281 - DNA, 15 bp, Homo sapiens
gaaattatattcatg

SEQ ID NO: 1714282 - DNA, 15 bp, Homo sapiens
aaattatattcatga

SEQ ID NO: 1714283 - DNA, 15 bp, Homo sapiens
aattatattcatgaa

SEQ ID NO: 1714284 - DNA, 15 bp, Homo sapiens
attatattcatgaaa

SEQ ID NO: 1714285 - DNA, 15 bp, Homo sapiens
ttatattcatgaaat

SEQ ID NO: 1714286 - DNA, 15 bp, Homo sapiens
tatattcatgaaatg

SEQ ID NO: 1714287 - DNA, 15 bp, Homo sapiens
atattcatgaaatga

SEQ ID NO: 1714288 - DNA, 15 bp, Homo sapiens
tattcatgaaatgaa

SEQ ID NO: 1714289 - DNA, 15 bp, Homo sapiens
attcatgaaatgaaa

SEQ ID NO: 1714290 - DNA, 15 bp, Homo sapiens
ttcatgaaatgaaaa

SEQ ID NO: 1714291 - DNA, 15 bp, Homo sapiens
tcatgaaatgaaaat

SEQ ID NO: 1714292 - DNA, 15 bp, Homo sapiens
catgaaatgaaaata

SEQ ID NO: 1714293 - DNA, 15 bp, Homo sapiens
atgaaatgaaaatag

SEQ ID NO: 1714294 - DNA, 15 bp, Homo sapiens
tgaaatgaaaatagc

SEQ ID NO: 1714295 - DNA, 15 bp, Homo sapiens
gaaatgaaaatagcg

SEQ ID NO: 1714296 - DNA, 15 bp, Homo sapiens
aaatgaaaatagcgc

SEQ ID NO: 1714297 - DNA, 15 bp, Homo sapiens
aatgaaaatagcgca

SEQ ID NO: 1714298 - DNA, 15 bp, Homo sapiens
atgaaaatagcgcat

SEQ ID NO: 1714299 - DNA, 15 bp, Homo sapiens
tgaaaatagcgcatt

SEQ ID NO: 1714300 - DNA, 15 bp, Homo sapiens
gaaaatagcgcattt

SEQ ID NO: 1714301 - DNA, 15 bp, Homo sapiens
aaaatagcgcatttt

SEQ ID NO: 1714302 - DNA, 15 bp, Homo sapiens
aaatagcgcatttta

SEQ ID NO: 1714303 - DNA, 15 bp, Homo sapiens
aatagcgcattttac

SEQ ID NO: 1714304 - DNA, 15 bp, Homo sapiens
atagcgcattttact

SEQ ID NO: 1714305 - DNA, 15 bp, Homo sapiens
tagcgcattttactt

SEQ ID NO: 1714306 - DNA, 15 bp, Homo sapiens
agcgcattttacttt

SEQ ID NO: 1714307 - DNA, 15 bp, Homo sapiens
gcgcattttactttg

SEQ ID NO: 1714308 - DNA, 15 bp, Homo sapiens
cgcattttactttgc

SEQ ID NO: 1714309 - DNA, 15 bp, Homo sapiens
gcattttactttgct

SEQ ID NO: 1714310 - DNA, 15 bp, Homo sapiens
cattttactttgctg

SEQ ID NO: 1714311 - DNA, 15 bp, Homo sapiens
attttactttgctgt

SEQ ID NO: 1714312 - DNA, 15 bp, Homo sapiens
ttttactttgctgta

SEQ ID NO: 1714313 - DNA, 15 bp, Homo sapiens
tttactttgctgtag

SEQ ID NO: 1714314 - DNA, 15 bp, Homo sapiens
ttactttgctgtagt

SEQ ID NO: 1714315 - DNA, 15 bp, Homo sapiens
tactttgctgtagtt

SEQ ID NO: 1714316 - DNA, 15 bp, Homo sapiens
actttgctgtagttt

SEQ ID NO: 1714317 - DNA, 15 bp, Homo sapiens
ctttgctgtagtttc

SEQ ID NO: 1714318 - DNA, 15 bp, Homo sapiens
tttgctgtagtttca

SEQ ID NO: 1714319 - DNA, 15 bp, Homo sapiens
ttgctgtagtttcat

SEQ ID NO: 1714320 - DNA, 15 bp, Homo sapiens
tgctgtagtttcata

SEQ ID NO: 1714321 - DNA, 15 bp, Homo sapiens
gctgtagtttcataa

SEQ ID NO: 1714322 - DNA, 15 bp, Homo sapiens
ctgtagtttcataag

SEQ ID NO: 1714323 - DNA, 15 bp, Homo sapiens
tgtagtttcataagg

SEQ ID NO: 1714324 - DNA, 15 bp, Homo sapiens
gtagtttcataaggt

SEQ ID NO: 1714325 - DNA, 15 bp, Homo sapiens
tagtttcataaggtt

SEQ ID NO: 1714326 - DNA, 15 bp, Homo sapiens
agtttcataaggttt

SEQ ID NO: 1714327 - DNA, 15 bp, Homo sapiens
gtttcataaggtttt

SEQ ID NO: 1714328 - DNA, 15 bp, Homo sapiens
tttcataaggtttta

SEQ ID NO: 1714329 - DNA, 15 bp, Homo sapiens
ttcataaggttttat

SEQ ID NO: 1714330 - DNA, 15 bp, Homo sapiens
tcataaggttttata

SEQ ID NO: 1714331 - DNA, 15 bp, Homo sapiens
cataaggttttatac

SEQ ID NO: 1714332 - DNA, 15 bp, Homo sapiens
ataaggttttataca

SEQ ID NO: 1714333 - DNA, 15 bp, Homo sapiens
taaggttttatacaa

SEQ ID NO: 1714334 - DNA, 15 bp, Homo sapiens
aaggttttatacaaa

SEQ ID NO: 1714335 - DNA, 15 bp, Homo sapiens
aggttttatacaaaa

SEQ ID NO: 1714336 - DNA, 15 bp, Homo sapiens
ggttttatacaaaaa

SEQ ID NO: 1714337 - DNA, 15 bp, Homo sapiens
gttttatacaaaaaa

SEQ ID NO: 1714338 - DNA, 15 bp, Homo sapiens
ttttatacaaaaaag

SEQ ID NO: 1714339 - DNA, 15 bp, Homo sapiens
tttatacaaaaaagc

SEQ ID NO: 1714340 - DNA, 15 bp, Homo sapiens
ttatacaaaaaagca

SEQ ID NO: 1714341 - DNA, 15 bp, Homo sapiens
tatacaaaaaagcaa

SEQ ID NO: 1714342 - DNA, 15 bp, Homo sapiens
atacaaaaaagcaag

SEQ ID NO: 1714343 - DNA, 15 bp, Homo sapiens
tacaaaaaagcaagt

SEQ ID NO: 1714344 - DNA, 15 bp, Homo sapiens
acaaaaaagcaagta

SEQ ID NO: 1714345 - DNA, 15 bp, Homo sapiens
caaaaaagcaagtaa

SEQ ID NO: 1714346 - DNA, 15 bp, Homo sapiens
aaaaaagcaagtaaa

SEQ ID NO: 1714347 - DNA, 15 bp, Homo sapiens
aaaaagcaagtaaat

SEQ ID NO: 1714348 - DNA, 15 bp, Homo sapiens
aaaagcaagtaaata

SEQ ID NO: 1714349 - DNA, 15 bp, Homo sapiens
aaagcaagtaaatat

SEQ ID NO: 1714350 - DNA, 15 bp, Homo sapiens
aagcaagtaaatatg

SEQ ID NO: 1714351 - DNA, 15 bp, Homo sapiens
agcaagtaaatatgg

SEQ ID NO: 1714352 - DNA, 15 bp, Homo sapiens
gcaagtaaatatggc

SEQ ID NO: 1714353 - DNA, 15 bp, Homo sapiens
caagtaaatatggca

SEQ ID NO: 1714354 - DNA, 15 bp, Homo sapiens
aagtaaatatggcag

SEQ ID NO: 1714355 - DNA, 15 bp, Homo sapiens
agtaaatatggcaga

SEQ ID NO: 1714356 - DNA, 15 bp, Homo sapiens
gtaaatatggcagaa

SEQ ID NO: 1714357 - DNA, 15 bp, Homo sapiens
taaatatggcagaaa

SEQ ID NO: 1714358 - DNA, 15 bp, Homo sapiens
aaatatggcagaaaa

SEQ ID NO: 1714359 - DNA, 15 bp, Homo sapiens
aatatggcagaaaag

SEQ ID NO: 1714360 - DNA, 15 bp, Homo sapiens
atatggcagaaaagc

SEQ ID NO: 1714361 - DNA, 15 bp, Homo sapiens
tatggcagaaaagca

SEQ ID NO: 1714362 - DNA, 15 bp, Homo sapiens
atggcagaaaagcac

SEQ ID NO: 1714363 - DNA, 15 bp, Homo sapiens
tggcagaaaagcact

SEQ ID NO: 1714364 - DNA, 15 bp, Homo sapiens
ggcagaaaagcactc

SEQ ID NO: 1714365 - DNA, 15 bp, Homo sapiens
gcagaaaagcactca

SEQ ID NO: 1714366 - DNA, 15 bp, Homo sapiens
cagaaaagcactcat

SEQ ID NO: 1714367 - DNA, 15 bp, Homo sapiens
agaaaagcactcatt

SEQ ID NO: 1714368 - DNA, 15 bp, Homo sapiens
gaaaagcactcattt

SEQ ID NO: 1714369 - DNA, 15 bp, Homo sapiens
aaaagcactcatttg

SEQ ID NO: 1714370 - DNA, 15 bp, Homo sapiens
aaagcactcatttgc

SEQ ID NO: 1714371 - DNA, 15 bp, Homo sapiens
aagcactcatttgcc

SEQ ID NO: 1714372 - DNA, 15 bp, Homo sapiens
agcactcatttgccc

SEQ ID NO: 1714373 - DNA, 15 bp, Homo sapiens
gcactcatttgcccc

SEQ ID NO: 1714374 - DNA, 15 bp, Homo sapiens
actcatttgcccctg

SEQ ID NO: 1714375 - DNA, 15 bp, Homo sapiens
ctcatttgcccctgc

SEQ ID NO: 1714376 - DNA, 15 bp, Homo sapiens
tcatttgcccctgct

SEQ ID NO: 1714377 - DNA, 15 bp, Homo sapiens
catttgcccctgctc

SEQ ID NO: 1714378 - DNA, 15 bp, Homo sapiens
atttgcccctgctcc

SEQ ID NO: 1714379 - DNA, 15 bp, Homo sapiens
tttgcccctgctccc

SEQ ID NO: 1714380 - DNA, 15 bp, Homo sapiens
ttgcccctgctccct

SEQ ID NO: 1714381 - DNA, 15 bp, Homo sapiens
tgcccctgctccctc

SEQ ID NO: 1714382 - DNA, 15 bp, Homo sapiens
gcccctgctccctca

SEQ ID NO: 1714383 - DNA, 15 bp, Homo sapiens
cccctgctccctcaa

SEQ ID NO: 1714384 - DNA, 15 bp, Homo sapiens
ccctgctccctcaaa

SEQ ID NO: 1714385 - DNA, 15 bp, Homo sapiens
cctgctccctcaaaa

SEQ ID NO: 1714386 - DNA, 15 bp, Homo sapiens
ctgctccctcaaaac

SEQ ID NO: 1714387 - DNA, 15 bp, Homo sapiens
tgctccctcaaaaca

SEQ ID NO: 1714388 - DNA, 15 bp, Homo sapiens
gctccctcaaaacac

SEQ ID NO: 1714389 - DNA, 15 bp, Homo sapiens
ctccctcaaaacacc

SEQ ID NO: 1714390 - DNA, 15 bp, Homo sapiens
tccctcaaaacacca

SEQ ID NO: 1714391 - DNA, 15 bp, Homo sapiens
ccctcaaaacaccac

SEQ ID NO: 1714392 - DNA, 15 bp, Homo sapiens
cctcaaaacaccaca

SEQ ID NO: 1714393 - DNA, 15 bp, Homo sapiens
ctcaaaacaccacag

SEQ ID NO: 1714394 - DNA, 15 bp, Homo sapiens
tcaaaacaccacaga

SEQ ID NO: 1714395 - DNA, 15 bp, Homo sapiens
caaaacaccacagaa

SEQ ID NO: 1714396 - DNA, 15 bp, Homo sapiens
aaaacaccacagaat

SEQ ID NO: 1714397 - DNA, 15 bp, Homo sapiens
aaacaccacagaatg

SEQ ID NO: 1714398 - DNA, 15 bp, Homo sapiens
aacaccacagaatga

SEQ ID NO: 1714399 - DNA, 15 bp, Homo sapiens
acaccacagaatgac

SEQ ID NO: 1714400 - DNA, 15 bp, Homo sapiens
caccacagaatgaca

SEQ ID NO: 1714401 - DNA, 15 bp, Homo sapiens
accacagaatgacat

SEQ ID NO: 1714402 - DNA, 15 bp, Homo sapiens
ccacagaatgacata

SEQ ID NO: 1714403 - DNA, 15 bp, Homo sapiens
cacagaatgacatag

SEQ ID NO: 1714404 - DNA, 15 bp, Homo sapiens
acagaatgacataga

SEQ ID NO: 1714405 - DNA, 15 bp, Homo sapiens
cagaatgacatagaa

SEQ ID NO: 1714406 - DNA, 15 bp, Homo sapiens
agaatgacatagaac

SEQ ID NO: 1714407 - DNA, 15 bp, Homo sapiens
gaatgacatagaact

SEQ ID NO: 1714408 - DNA, 15 bp, Homo sapiens
aatgacatagaacta

SEQ ID NO: 1714409 - DNA, 15 bp, Homo sapiens
atgacatagaactaa

SEQ ID NO: 1714410 - DNA, 15 bp, Homo sapiens
tgacatagaactaaa

SEQ ID NO: 1714411 - DNA, 15 bp, Homo sapiens
gacatagaactaaag

SEQ ID NO: 1714412 - DNA, 15 bp, Homo sapiens
acatagaactaaagg

SEQ ID NO: 1714413 - DNA, 15 bp, Homo sapiens
catagaactaaaggc

SEQ ID NO: 1714414 - DNA, 15 bp, Homo sapiens
atagaactaaaggcg

SEQ ID NO: 1714415 - DNA, 15 bp, Homo sapiens
tagaactaaaggcgg

SEQ ID NO: 1714416 - DNA, 15 bp, Homo sapiens
agaactaaaggcggc

SEQ ID NO: 1714417 - DNA, 15 bp, Homo sapiens
gaactaaaggcggca

SEQ ID NO: 1714418 - DNA, 15 bp, Homo sapiens
aactaaaggcggcag

SEQ ID NO: 1714419 - DNA, 15 bp, Homo sapiens
actaaaggcggcagg

SEQ ID NO: 1714420 - DNA, 15 bp, Homo sapiens
ctaaaggcggcagga

SEQ ID NO: 1714421 - DNA, 15 bp, Homo sapiens
taaaggcggcaggaa

SEQ ID NO: 1714422 - DNA, 15 bp, Homo sapiens
aaaggcggcaggaat

SEQ ID NO: 1714423 - DNA, 15 bp, Homo sapiens
aaggcggcaggaatc

SEQ ID NO: 1714424 - DNA, 15 bp, Homo sapiens
aggcggcaggaatct

SEQ ID NO: 1714425 - DNA, 15 bp, Homo sapiens
ggcggcaggaatcta

SEQ ID NO: 1714426 - DNA, 15 bp, Homo sapiens
gcggcaggaatctac

SEQ ID NO: 1714427 - DNA, 15 bp, Homo sapiens
cggcaggaatctaca

SEQ ID NO: 1714428 - DNA, 15 bp, Homo sapiens
ggcaggaatctacaa

SEQ ID NO: 1714429 - DNA, 15 bp, Homo sapiens
gcaggaatctacaag

SEQ ID NO: 1714430 - DNA, 15 bp, Homo sapiens
caggaatctacaaga

SEQ ID NO: 1714431 - DNA, 15 bp, Homo sapiens
aggaatctacaagaa

SEQ ID NO: 1714432 - DNA, 15 bp, Homo sapiens
ggaatctacaagaat

SEQ ID NO: 1714433 - DNA, 15 bp, Homo sapiens
gaatctacaagaatg

SEQ ID NO: 1714434 - DNA, 15 bp, Homo sapiens
aatctacaagaatga

SEQ ID NO: 1714435 - DNA, 15 bp, Homo sapiens
atctacaagaatgaa

SEQ ID NO: 1714436 - DNA, 15 bp, Homo sapiens
tctacaagaatgaag

SEQ ID NO: 1714437 - DNA, 15 bp, Homo sapiens
ctacaagaatgaaga

SEQ ID NO: 1714438 - DNA, 15 bp, Homo sapiens
tacaagaatgaagaa

SEQ ID NO: 1714439 - DNA, 15 bp, Homo sapiens
acaagaatgaagaaa

SEQ ID NO: 1714440 - DNA, 15 bp, Homo sapiens
caagaatgaagaaaa

SEQ ID NO: 1714441 - DNA, 15 bp, Homo sapiens
aagaatgaagaaaac

SEQ ID NO: 1714442 - DNA, 15 bp, Homo sapiens
agaatgaagaaaaca

SEQ ID NO: 1714443 - DNA, 15 bp, Homo sapiens
gaatgaagaaaacac

SEQ ID NO: 1714444 - DNA, 15 bp, Homo sapiens
atgaagaaaacacag

SEQ ID NO: 1714445 - DNA, 15 bp, Homo sapiens
tgaagaaaacacagt

SEQ ID NO: 1714446 - DNA, 15 bp, Homo sapiens
gaagaaaacacagtg

SEQ ID NO: 1714447 - DNA, 15 bp, Homo sapiens
aagaaaacacagtga

SEQ ID NO: 1714448 - DNA, 15 bp, Homo sapiens
agaaaacacagtgat

SEQ ID NO: 1714449 - DNA, 15 bp, Homo sapiens
gaaaacacagtgatg

SEQ ID NO: 1714450 - DNA, 15 bp, Homo sapiens
aaaacacagtgatgc

SEQ ID NO: 1714451 - DNA, 15 bp, Homo sapiens
aaacacagtgatgcc

SEQ ID NO: 1714452 - DNA, 15 bp, Homo sapiens
aacacagtgatgcca

SEQ ID NO: 1714453 - DNA, 15 bp, Homo sapiens
acacagtgatgccac

SEQ ID NO: 1714454 - DNA, 15 bp, Homo sapiens
cacagtgatgccacc

SEQ ID NO: 1714455 - DNA, 15 bp, Homo sapiens
acagtgatgccacct

SEQ ID NO: 1714456 - DNA, 15 bp, Homo sapiens
cagtgatgccacctg

SEQ ID NO: 1714457 - DNA, 15 bp, Homo sapiens
agtgatgccacctgc

SEQ ID NO: 1714458 - DNA, 15 bp, Homo sapiens
gtgatgccacctgca

SEQ ID NO: 1714459 - DNA, 15 bp, Homo sapiens
tgatgccacctgcaa

SEQ ID NO: 1714460 - DNA, 15 bp, Homo sapiens
gatgccacctgcaaa

SEQ ID NO: 1714461 - DNA, 15 bp, Homo sapiens
atgccacctgcaaaa

SEQ ID NO: 1714462 - DNA, 15 bp, Homo sapiens
tgccacctgcaaaat

SEQ ID NO: 1714463 - DNA, 15 bp, Homo sapiens
gccacctgcaaaatc

SEQ ID NO: 1714464 - DNA, 15 bp, Homo sapiens
ccacctgcaaaatct

SEQ ID NO: 1714465 - DNA, 15 bp, Homo sapiens
cacctgcaaaatctt

SEQ ID NO: 1714466 - DNA, 15 bp, Homo sapiens
acctgcaaaatcttg

SEQ ID NO: 1714467 - DNA, 15 bp, Homo sapiens
cctgcaaaatcttgg

SEQ ID NO: 1714468 - DNA, 15 bp, Homo sapiens
ctgcaaaatcttggg

SEQ ID NO: 1714469 - DNA, 15 bp, Homo sapiens
tgcaaaatcttggga

SEQ ID NO: 1714470 - DNA, 15 bp, Homo sapiens
gcaaaatcttgggag

SEQ ID NO: 1714471 - DNA, 15 bp, Homo sapiens
caaaatcttgggagc

SEQ ID NO: 1714472 - DNA, 15 bp, Homo sapiens
aaaatcttgggagcc

SEQ ID NO: 1714473 - DNA, 15 bp, Homo sapiens
aaatcttgggagcca

SEQ ID NO: 1714474 - DNA, 15 bp, Homo sapiens
aatcttgggagccag

SEQ ID NO: 1714475 - DNA, 15 bp, Homo sapiens
atcttgggagccaga

SEQ ID NO: 1714476 - DNA, 15 bp, Homo sapiens
tcttgggagccagaa

SEQ ID NO: 1714477 - DNA, 15 bp, Homo sapiens
cttgggagccagaaa

SEQ ID NO: 1714478 - DNA, 15 bp, Homo sapiens
ttgggagccagaaag

SEQ ID NO: 1714479 - DNA, 15 bp, Homo sapiens
tgggagccagaaagc

SEQ ID NO: 1714480 - DNA, 15 bp, Homo sapiens
gggagccagaaagca

SEQ ID NO: 1714481 - DNA, 15 bp, Homo sapiens
ggagccagaaagcaa

SEQ ID NO: 1714482 - DNA, 15 bp, Homo sapiens
gagccagaaagcaaa

SEQ ID NO: 1714483 - DNA, 15 bp, Homo sapiens
agccagaaagcaaat

SEQ ID NO: 1714484 - DNA, 15 bp, Homo sapiens
gccagaaagcaaatg

SEQ ID NO: 1714485 - DNA, 15 bp, Homo sapiens
ccagaaagcaaatgg

SEQ ID NO: 1714486 - DNA, 15 bp, Homo sapiens
cagaaagcaaatgga

SEQ ID NO: 1714487 - DNA, 15 bp, Homo sapiens
agaaagcaaatggac

SEQ ID NO: 1714488 - DNA, 15 bp, Homo sapiens
gaaagcaaatggaca

SEQ ID NO: 1714489 - DNA, 15 bp, Homo sapiens
aaagcaaatggacaa

SEQ ID NO: 1714490 - DNA, 15 bp, Homo sapiens
aagcaaatggacaat

SEQ ID NO: 1714491 - DNA, 15 bp, Homo sapiens
agcaaatggacaatt

SEQ ID NO: 1714492 - DNA, 15 bp, Homo sapiens
gcaaatggacaattg

SEQ ID NO: 1714493 - DNA, 15 bp, Homo sapiens
caaatggacaattga

SEQ ID NO: 1714494 - DNA, 15 bp, Homo sapiens
aaatggacaattgat

SEQ ID NO: 1714495 - DNA, 15 bp, Homo sapiens
aatggacaattgata

SEQ ID NO: 1714496 - DNA, 15 bp, Homo sapiens
atggacaattgataa

SEQ ID NO: 1714497 - DNA, 15 bp, Homo sapiens
tggacaattgataat

SEQ ID NO: 1714498 - DNA, 15 bp, Homo sapiens
ggacaattgataata

SEQ ID NO: 1714499 - DNA, 15 bp, Homo sapiens
gacaattgataatag

SEQ ID NO: 1714500 - DNA, 15 bp, Homo sapiens
acaattgataataga

SEQ ID NO: 1714501 - DNA, 15 bp, Homo sapiens
caattgataatagag

SEQ ID NO: 1714502 - DNA, 15 bp, Homo sapiens
aattgataatagagt

SEQ ID NO: 1714503 - DNA, 15 bp, Homo sapiens
attgataatagagtt

SEQ ID NO: 1714504 - DNA, 15 bp, Homo sapiens
ttgataatagagtta

SEQ ID NO: 1714505 - DNA, 15 bp, Homo sapiens
tgataatagagttac

SEQ ID NO: 1714506 - DNA, 15 bp, Homo sapiens
gataatagagttaca

SEQ ID NO: 1714507 - DNA, 15 bp, Homo sapiens
ataatagagttacaa

SEQ ID NO: 1714508 - DNA, 15 bp, Homo sapiens
taatagagttacaag

SEQ ID NO: 1714509 - DNA, 15 bp, Homo sapiens
aatagagttacaaga

SEQ ID NO: 1714510 - DNA, 15 bp, Homo sapiens
atagagttacaagat

SEQ ID NO: 1714511 - DNA, 15 bp, Homo sapiens
tagagttacaagatg

SEQ ID NO: 1714512 - DNA, 15 bp, Homo sapiens
agagttacaagatga

SEQ ID NO: 1714513 - DNA, 15 bp, Homo sapiens
gagttacaagatgag

SEQ ID NO: 1714514 - DNA, 15 bp, Homo sapiens
agttacaagatgaga

SEQ ID NO: 1714515 - DNA, 15 bp, Homo sapiens
gttacaagatgagag

SEQ ID NO: 1714516 - DNA, 15 bp, Homo sapiens
ttacaagatgagaga

SEQ ID NO: 1714517 - DNA, 15 bp, Homo sapiens
tacaagatgagagaa

SEQ ID NO: 1714518 - DNA, 15 bp, Homo sapiens
acaagatgagagaaa

SEQ ID NO: 1714519 - DNA, 15 bp, Homo sapiens
caagatgagagaaaa

SEQ ID NO: 1714520 - DNA, 15 bp, Homo sapiens
aagatgagagaaaac

SEQ ID NO: 1714521 - DNA, 15 bp, Homo sapiens
agatgagagaaaaca

SEQ ID NO: 1714522 - DNA, 15 bp, Homo sapiens
gatgagagaaaacaa

SEQ ID NO: 1714523 - DNA, 15 bp, Homo sapiens
atgagagaaaacaaa

SEQ ID NO: 1714524 - DNA, 15 bp, Homo sapiens
tgagagaaaacaaaa

SEQ ID NO: 1714525 - DNA, 15 bp, Homo sapiens
gagagaaaacaaaaa

SEQ ID NO: 1714526 - DNA, 15 bp, Homo sapiens
agagaaaacaaaaat

SEQ ID NO: 1714527 - DNA, 15 bp, Homo sapiens
gagaaaacaaaaatg

SEQ ID NO: 1714528 - DNA, 15 bp, Homo sapiens
agaaaacaaaaatgt

SEQ ID NO: 1714529 - DNA, 15 bp, Homo sapiens
gaaaacaaaaatgta

SEQ ID NO: 1714530 - DNA, 15 bp, Homo sapiens
aaaacaaaaatgtaa

SEQ ID NO: 1714531 - DNA, 15 bp, Homo sapiens
aaacaaaaatgtaac

SEQ ID NO: 1714532 - DNA, 15 bp, Homo sapiens
aacaaaaatgtaacc

SEQ ID NO: 1714533 - DNA, 15 bp, Homo sapiens
acaaaaatgtaacct

SEQ ID NO: 1714534 - DNA, 15 bp, Homo sapiens
caaaaatgtaacctg

SEQ ID NO: 1714535 - DNA, 15 bp, Homo sapiens
aaaaatgtaacctgt

SEQ ID NO: 1714536 - DNA, 15 bp, Homo sapiens
aaaatgtaacctgtt

SEQ ID NO: 1714537 - DNA, 15 bp, Homo sapiens
aaatgtaacctgtta

SEQ ID NO: 1714538 - DNA, 15 bp, Homo sapiens
aatgtaacctgttag

SEQ ID NO: 1714539 - DNA, 15 bp, Homo sapiens
atgtaacctgttagt

SEQ ID NO: 1714540 - DNA, 15 bp, Homo sapiens
tgtaacctgttagtt

SEQ ID NO: 1714541 - DNA, 15 bp, Homo sapiens
gtaacctgttagttg

SEQ ID NO: 1714542 - DNA, 15 bp, Homo sapiens
taacctgttagttgg

SEQ ID NO: 1714543 - DNA, 15 bp, Homo sapiens
aacctgttagttggg

SEQ ID NO: 1714544 - DNA, 15 bp, Homo sapiens
acctgttagttgggg

SEQ ID NO: 1714545 - DNA, 15 bp, Homo sapiens
cctgttagttggggg

SEQ ID NO: 1714546 - DNA, 15 bp, Homo sapiens
ctgttagttggggga

SEQ ID NO: 1714547 - DNA, 15 bp, Homo sapiens
tgttagttgggggag

SEQ ID NO: 1714548 - DNA, 15 bp, Homo sapiens
gttagttgggggagc

SEQ ID NO: 1714549 - DNA, 15 bp, Homo sapiens
ttagttgggggagcc

SEQ ID NO: 1714550 - DNA, 15 bp, Homo sapiens
tagttgggggagcct

SEQ ID NO: 1714551 - DNA, 15 bp, Homo sapiens
agttgggggagccta

SEQ ID NO: 1714552 - DNA, 15 bp, Homo sapiens
gttgggggagcctag

SEQ ID NO: 1714553 - DNA, 15 bp, Homo sapiens
ttgggggagcctaga

SEQ ID NO: 1714554 - DNA, 15 bp, Homo sapiens
tgggggagcctagaa

SEQ ID NO: 1714555 - DNA, 15 bp, Homo sapiens
gggggagcctagaaa

SEQ ID NO: 1714556 - DNA, 15 bp, Homo sapiens
ggggagcctagaaac

SEQ ID NO: 1714557 - DNA, 15 bp, Homo sapiens
gggagcctagaaaca

SEQ ID NO: 1714558 - DNA, 15 bp, Homo sapiens
ggagcctagaaacat

SEQ ID NO: 1714559 - DNA, 15 bp, Homo sapiens
gagcctagaaacatc

SEQ ID NO: 1714560 - DNA, 15 bp, Homo sapiens
agcctagaaacatcc

SEQ ID NO: 1714561 - DNA, 15 bp, Homo sapiens
gcctagaaacatcct

SEQ ID NO: 1714562 - DNA, 15 bp, Homo sapiens
cctagaaacatcctg

SEQ ID NO: 1714563 - DNA, 15 bp, Homo sapiens
ctagaaacatcctgt

SEQ ID NO: 1714564 - DNA, 15 bp, Homo sapiens
tagaaacatcctgtt

SEQ ID NO: 1714565 - DNA, 15 bp, Homo sapiens
agaaacatcctgttt

SEQ ID NO: 1714566 - DNA, 15 bp, Homo sapiens
gaaacatcctgtttt

SEQ ID NO: 1714567 - DNA, 15 bp, Homo sapiens
aaacatcctgttttg

SEQ ID NO: 1714568 - DNA, 15 bp, Homo sapiens
aacatcctgttttgt

SEQ ID NO: 1714569 - DNA, 15 bp, Homo sapiens
acatcctgttttgta

SEQ ID NO: 1714570 - DNA, 15 bp, Homo sapiens
catcctgttttgtac

SEQ ID NO: 1714571 - DNA, 15 bp, Homo sapiens
atcctgttttgtacc

SEQ ID NO: 1714572 - DNA, 15 bp, Homo sapiens
tcctgttttgtacca

SEQ ID NO: 1714573 - DNA, 15 bp, Homo sapiens
cctgttttgtaccac

SEQ ID NO: 1714574 - DNA, 15 bp, Homo sapiens
ctgttttgtaccaca

SEQ ID NO: 1714575 - DNA, 15 bp, Homo sapiens
tgttttgtaccacag

SEQ ID NO: 1714576 - DNA, 15 bp, Homo sapiens
gttttgtaccacaga

SEQ ID NO: 1714577 - DNA, 15 bp, Homo sapiens
ttttgtaccacagac

SEQ ID NO: 1714578 - DNA, 15 bp, Homo sapiens
tttgtaccacagacc

SEQ ID NO: 1714579 - DNA, 15 bp, Homo sapiens
ttgtaccacagaccc

SEQ ID NO: 1714580 - DNA, 15 bp, Homo sapiens
tgtaccacagacccc

SEQ ID NO: 1714581 - DNA, 15 bp, Homo sapiens
gtaccacagacccct

SEQ ID NO: 1714582 - DNA, 15 bp, Homo sapiens
taccacagaccccta

SEQ ID NO: 1714583 - DNA, 15 bp, Homo sapiens
accacagacccctag

SEQ ID NO: 1714584 - DNA, 15 bp, Homo sapiens
ccacagacccctaga

SEQ ID NO: 1714585 - DNA, 15 bp, Homo sapiens
cacagacccctagaa

SEQ ID NO: 1714586 - DNA, 15 bp, Homo sapiens
acagacccctagaaa

SEQ ID NO: 1714587 - DNA, 15 bp, Homo sapiens
cagacccctagaaag

SEQ ID NO: 1714588 - DNA, 15 bp, Homo sapiens
agacccctagaaagt

SEQ ID NO: 1714589 - DNA, 15 bp, Homo sapiens
gacccctagaaagtt

SEQ ID NO: 1714590 - DNA, 15 bp, Homo sapiens
acccctagaaagttt

SEQ ID NO: 1714591 - DNA, 15 bp, Homo sapiens
cccctagaaagtttc

SEQ ID NO: 1714592 - DNA, 15 bp, Homo sapiens
ccctagaaagtttca

SEQ ID NO: 1714593 - DNA, 15 bp, Homo sapiens
cctagaaagtttcaa

SEQ ID NO: 1714594 - DNA, 15 bp, Homo sapiens
ctagaaagtttcaag

SEQ ID NO: 1714595 - DNA, 15 bp, Homo sapiens
tagaaagtttcaaga

SEQ ID NO: 1714596 - DNA, 15 bp, Homo sapiens
agaaagtttcaagat

SEQ ID NO: 1714597 - DNA, 15 bp, Homo sapiens
gaaagtttcaagatg

SEQ ID NO: 1714598 - DNA, 15 bp, Homo sapiens
aaagtttcaagatgt

SEQ ID NO: 1714599 - DNA, 15 bp, Homo sapiens
aagtttcaagatgta

SEQ ID NO: 1714600 - DNA, 15 bp, Homo sapiens
agtttcaagatgtaa

SEQ ID NO: 1714601 - DNA, 15 bp, Homo sapiens
gtttcaagatgtaaa

SEQ ID NO: 1714602 - DNA, 15 bp, Homo sapiens
tttcaagatgtaaaa

SEQ ID NO: 1714603 - DNA, 15 bp, Homo sapiens
ttcaagatgtaaaaa

SEQ ID NO: 1714604 - DNA, 15 bp, Homo sapiens
tcaagatgtaaaaac

SEQ ID NO: 1714605 - DNA, 15 bp, Homo sapiens
caagatgtaaaaaca

SEQ ID NO: 1714606 - DNA, 15 bp, Homo sapiens
aagatgtaaaaacac

SEQ ID NO: 1714607 - DNA, 15 bp, Homo sapiens
agatgtaaaaacact

SEQ ID NO: 1714608 - DNA, 15 bp, Homo sapiens
gatgtaaaaacactg

SEQ ID NO: 1714609 - DNA, 15 bp, Homo sapiens
atgtaaaaacactgg

SEQ ID NO: 1714610 - DNA, 15 bp, Homo sapiens
tgtaaaaacactgga

SEQ ID NO: 1714611 - DNA, 15 bp, Homo sapiens
gtaaaaacactggat

SEQ ID NO: 1714612 - DNA, 15 bp, Homo sapiens
taaaaacactggatc

SEQ ID NO: 1714613 - DNA, 15 bp, Homo sapiens
aaaaacactggatcc

SEQ ID NO: 1714614 - DNA, 15 bp, Homo sapiens
aaaacactggatcct

SEQ ID NO: 1714615 - DNA, 15 bp, Homo sapiens
aaacactggatcctt

SEQ ID NO: 1714616 - DNA, 15 bp, Homo sapiens
aacactggatccttc

SEQ ID NO: 1714617 - DNA, 15 bp, Homo sapiens
acactggatccttct

SEQ ID NO: 1714618 - DNA, 15 bp, Homo sapiens
cactggatccttctg

SEQ ID NO: 1714619 - DNA, 15 bp, Homo sapiens
actggatccttctgg

SEQ ID NO: 1714620 - DNA, 15 bp, Homo sapiens
ctggatccttctgga

SEQ ID NO: 1714621 - DNA, 15 bp, Homo sapiens
tggatccttctggaa

SEQ ID NO: 1714622 - DNA, 15 bp, Homo sapiens
ggatccttctggaag

SEQ ID NO: 1714623 - DNA, 15 bp, Homo sapiens
gatccttctggaagg

SEQ ID NO: 1714624 - DNA, 15 bp, Homo sapiens
atccttctggaagga

SEQ ID NO: 1714625 - DNA, 15 bp, Homo sapiens
tccttctggaaggag

SEQ ID NO: 1714626 - DNA, 15 bp, Homo sapiens
ccttctggaaggagg

SEQ ID NO: 1714627 - DNA, 15 bp, Homo sapiens
cttctggaaggagga

SEQ ID NO: 1714628 - DNA, 15 bp, Homo sapiens
ttctggaaggaggag

SEQ ID NO: 1714629 - DNA, 15 bp, Homo sapiens
tctggaaggaggaga

SEQ ID NO: 1714630 - DNA, 15 bp, Homo sapiens
ctggaaggaggagac

SEQ ID NO: 1714631 - DNA, 15 bp, Homo sapiens
tggaaggaggagaca

SEQ ID NO: 1714632 - DNA, 15 bp, Homo sapiens
ggaaggaggagacaa

SEQ ID NO: 1714633 - DNA, 15 bp, Homo sapiens
gaaggaggagacaag

SEQ ID NO: 1714634 - DNA, 15 bp, Homo sapiens
aaggaggagacaagg

SEQ ID NO: 1714635 - DNA, 15 bp, Homo sapiens
aggaggagacaaggg

SEQ ID NO: 1714636 - DNA, 15 bp, Homo sapiens
ggaggagacaagggg

SEQ ID NO: 1714637 - DNA, 15 bp, Homo sapiens
gaggagacaagggga

SEQ ID NO: 1714638 - DNA, 15 bp, Homo sapiens
aggagacaaggggac

SEQ ID NO: 1714639 - DNA, 15 bp, Homo sapiens
ggagacaaggggaca

SEQ ID NO: 1714640 - DNA, 15 bp, Homo sapiens
gagacaaggggacag

SEQ ID NO: 1714641 - DNA, 15 bp, Homo sapiens
agacaaggggacaga

SEQ ID NO: 1714642 - DNA, 15 bp, Homo sapiens
gacaaggggacagag

SEQ ID NO: 1714643 - DNA, 15 bp, Homo sapiens
acaaggggacagagg

SEQ ID NO: 1714644 - DNA, 15 bp, Homo sapiens
caaggggacagaggg

SEQ ID NO: 1714645 - DNA, 15 bp, Homo sapiens
aaggggacagaggga

SEQ ID NO: 1714646 - DNA, 15 bp, Homo sapiens
aggggacagagggac

SEQ ID NO: 1714647 - DNA, 15 bp, Homo sapiens
ggggacagagggact

SEQ ID NO: 1714648 - DNA, 15 bp, Homo sapiens
gggacagagggactg

SEQ ID NO: 1714649 - DNA, 15 bp, Homo sapiens
ggacagagggactga

SEQ ID NO: 1714650 - DNA, 15 bp, Homo sapiens
gacagagggactgaa

SEQ ID NO: 1714651 - DNA, 15 bp, Homo sapiens
acagagggactgaag

SEQ ID NO: 1714652 - DNA, 15 bp, Homo sapiens
cagagggactgaaga

SEQ ID NO: 1714653 - DNA, 15 bp, Homo sapiens
agagggactgaagac

SEQ ID NO: 1714654 - DNA, 15 bp, Homo sapiens
gagggactgaagaca

SEQ ID NO: 1714655 - DNA, 15 bp, Homo sapiens
agggactgaagacag

SEQ ID NO: 1714656 - DNA, 15 bp, Homo sapiens
gggactgaagacaga

SEQ ID NO: 1714657 - DNA, 15 bp, Homo sapiens
ggactgaagacagaa

SEQ ID NO: 1714658 - DNA, 15 bp, Homo sapiens
gactgaagacagaag

SEQ ID NO: 1714659 - DNA, 15 bp, Homo sapiens
actgaagacagaaga

SEQ ID NO: 1714660 - DNA, 15 bp, Homo sapiens
ctgaagacagaagaa

SEQ ID NO: 1714661 - DNA, 15 bp, Homo sapiens
tgaagacagaagaat

SEQ ID NO: 1714662 - DNA, 15 bp, Homo sapiens
gaagacagaagaatg

SEQ ID NO: 1714663 - DNA, 15 bp, Homo sapiens
aagacagaagaatgg

SEQ ID NO: 1714664 - DNA, 15 bp, Homo sapiens
agacagaagaatgga

SEQ ID NO: 1714665 - DNA, 15 bp, Homo sapiens
gacagaagaatggac

SEQ ID NO: 1714666 - DNA, 15 bp, Homo sapiens
acagaagaatggacc

SEQ ID NO: 1714667 - DNA, 15 bp, Homo sapiens
cagaagaatggacca

SEQ ID NO: 1714668 - DNA, 15 bp, Homo sapiens
agaagaatggaccaa

SEQ ID NO: 1714669 - DNA, 15 bp, Homo sapiens
gaagaatggaccaaa

SEQ ID NO: 1714670 - DNA, 15 bp, Homo sapiens
aagaatggaccaaaa

SEQ ID NO: 1714671 - DNA, 15 bp, Homo sapiens
agaatggaccaaaag

SEQ ID NO: 1714672 - DNA, 15 bp, Homo sapiens
gaatggaccaaaagc

SEQ ID NO: 1714673 - DNA, 15 bp, Homo sapiens
aatggaccaaaagcc

SEQ ID NO: 1714674 - DNA, 15 bp, Homo sapiens
atggaccaaaagcct

SEQ ID NO: 1714675 - DNA, 15 bp, Homo sapiens
tggaccaaaagcctg

SEQ ID NO: 1714676 - DNA, 15 bp, Homo sapiens
ggaccaaaagcctgt

SEQ ID NO: 1714677 - DNA, 15 bp, Homo sapiens
gaccaaaagcctgta

SEQ ID NO: 1714678 - DNA, 15 bp, Homo sapiens
accaaaagcctgtat

SEQ ID NO: 1714679 - DNA, 15 bp, Homo sapiens
ccaaaagcctgtatg

SEQ ID NO: 1714680 - DNA, 15 bp, Homo sapiens
caaaagcctgtatgg

SEQ ID NO: 1714681 - DNA, 15 bp, Homo sapiens
aaaagcctgtatgga

SEQ ID NO: 1714682 - DNA, 15 bp, Homo sapiens
aaagcctgtatggaa

SEQ ID NO: 1714683 - DNA, 15 bp, Homo sapiens
aagcctgtatggaaa

SEQ ID NO: 1714684 - DNA, 15 bp, Homo sapiens
agcctgtatggaaac

SEQ ID NO: 1714685 - DNA, 15 bp, Homo sapiens
gcctgtatggaaaca

SEQ ID NO: 1714686 - DNA, 15 bp, Homo sapiens
cctgtatggaaacag

SEQ ID NO: 1714687 - DNA, 15 bp, Homo sapiens
ctgtatggaaacaga

SEQ ID NO: 1714688 - DNA, 15 bp, Homo sapiens
tgtatggaaacagaa

SEQ ID NO: 1714689 - DNA, 15 bp, Homo sapiens
gtatggaaacagaat

SEQ ID NO: 1714690 - DNA, 15 bp, Homo sapiens
tatggaaacagaatt

SEQ ID NO: 1714691 - DNA, 15 bp, Homo sapiens
atggaaacagaattg

SEQ ID NO: 1714692 - DNA, 15 bp, Homo sapiens
tggaaacagaattgc

SEQ ID NO: 1714693 - DNA, 15 bp, Homo sapiens
ggaaacagaattgca

SEQ ID NO: 1714694 - DNA, 15 bp, Homo sapiens
gaaacagaattgcag

SEQ ID NO: 1714695 - DNA, 15 bp, Homo sapiens
aaacagaattgcaga

SEQ ID NO: 1714696 - DNA, 15 bp, Homo sapiens
aacagaattgcagag

SEQ ID NO: 1714697 - DNA, 15 bp, Homo sapiens
acagaattgcagagc

SEQ ID NO: 1714698 - DNA, 15 bp, Homo sapiens
cagaattgcagagcc

SEQ ID NO: 1714699 - DNA, 15 bp, Homo sapiens
agaattgcagagccc

SEQ ID NO: 1714700 - DNA, 15 bp, Homo sapiens
gaattgcagagcccc

SEQ ID NO: 1714701 - DNA, 15 bp, Homo sapiens
aattgcagagccccg

SEQ ID NO: 1714702 - DNA, 15 bp, Homo sapiens
attgcagagccccgc

SEQ ID NO: 1714703 - DNA, 15 bp, Homo sapiens
ttgcagagccccgcc

SEQ ID NO: 1714704 - DNA, 15 bp, Homo sapiens
tgcagagccccgcct

SEQ ID NO: 1714705 - DNA, 15 bp, Homo sapiens
gcagagccccgcctg

SEQ ID NO: 1714706 - DNA, 15 bp, Homo sapiens
cagagccccgcctgc

SEQ ID NO: 1714707 - DNA, 15 bp, Homo sapiens
agagccccgcctgca

SEQ ID NO: 1714708 - DNA, 15 bp, Homo sapiens
gagccccgcctgcag

SEQ ID NO: 1714709 - DNA, 15 bp, Homo sapiens
agccccgcctgcagc

SEQ ID NO: 1714710 - DNA, 15 bp, Homo sapiens
gccccgcctgcagca

SEQ ID NO: 1714711 - DNA, 15 bp, Homo sapiens
ccccgcctgcagcag

SEQ ID NO: 1714712 - DNA, 15 bp, Homo sapiens
cccgcctgcagcagg

SEQ ID NO: 1714713 - DNA, 15 bp, Homo sapiens
ccgcctgcagcagga

SEQ ID NO: 1714714 - DNA, 15 bp, Homo sapiens
cgcctgcagcaggat

SEQ ID NO: 1714715 - DNA, 15 bp, Homo sapiens
gcctgcagcaggatg

SEQ ID NO: 1714716 - DNA, 15 bp, Homo sapiens
cctgcagcaggatgg

SEQ ID NO: 1714717 - DNA, 15 bp, Homo sapiens
ctgcagcaggatggc

SEQ ID NO: 1714718 - DNA, 15 bp, Homo sapiens
tgcagcaggatggct

SEQ ID NO: 1714719 - DNA, 15 bp, Homo sapiens
gcagcaggatggctg

SEQ ID NO: 1714720 - DNA, 15 bp, Homo sapiens
cagcaggatggctgc

SEQ ID NO: 1714721 - DNA, 15 bp, Homo sapiens
agcaggatggctgcc

SEQ ID NO: 1714722 - DNA, 15 bp, Homo sapiens
gcaggatggctgcct

SEQ ID NO: 1714723 - DNA, 15 bp, Homo sapiens
caggatggctgcctt

SEQ ID NO: 1714724 - DNA, 15 bp, Homo sapiens
aggatggctgccttt

SEQ ID NO: 1714725 - DNA, 15 bp, Homo sapiens
ggatggctgcctttc

SEQ ID NO: 1714726 - DNA, 15 bp, Homo sapiens
gatggctgcctttcc

SEQ ID NO: 1714727 - DNA, 15 bp, Homo sapiens
atggctgcctttccc

SEQ ID NO: 1714728 - DNA, 15 bp, Homo sapiens
tggctgcctttcccc

SEQ ID NO: 1714729 - DNA, 15 bp, Homo sapiens
ggctgcctttcccca

SEQ ID NO: 1714730 - DNA, 15 bp, Homo sapiens
gctgcctttccccag

SEQ ID NO: 1714731 - DNA, 15 bp, Homo sapiens
ctgcctttccccagt

SEQ ID NO: 1714732 - DNA, 15 bp, Homo sapiens
tgcctttccccagtt

SEQ ID NO: 1714733 - DNA, 15 bp, Homo sapiens
gcctttccccagttc

SEQ ID NO: 1714734 - DNA, 15 bp, Homo sapiens
cctttccccagttcc

SEQ ID NO: 1714735 - DNA, 15 bp, Homo sapiens
ctttccccagttcca

SEQ ID NO: 1714736 - DNA, 15 bp, Homo sapiens
ttccccagttccagc

SEQ ID NO: 1714737 - DNA, 15 bp, Homo sapiens
tccccagttccagcg

SEQ ID NO: 1714738 - DNA, 15 bp, Homo sapiens
ccccagttccagcga

SEQ ID NO: 1714739 - DNA, 15 bp, Homo sapiens
cccagttccagcgag

SEQ ID NO: 1714740 - DNA, 15 bp, Homo sapiens
ccagttccagcgaga

SEQ ID NO: 1714741 - DNA, 15 bp, Homo sapiens
cagttccagcgagaa

SEQ ID NO: 1714742 - DNA, 15 bp, Homo sapiens
agttccagcgagaaa

SEQ ID NO: 1714743 - DNA, 15 bp, Homo sapiens
gttccagcgagaaac

SEQ ID NO: 1714744 - DNA, 15 bp, Homo sapiens
ttccagcgagaaact

SEQ ID NO: 1714745 - DNA, 15 bp, Homo sapiens
tccagcgagaaactg

SEQ ID NO: 1714746 - DNA, 15 bp, Homo sapiens
ccagcgagaaactgc

SEQ ID NO: 1714747 - DNA, 15 bp, Homo sapiens
cagcgagaaactgca

SEQ ID NO: 1714748 - DNA, 15 bp, Homo sapiens
agcgagaaactgcat

SEQ ID NO: 1714749 - DNA, 15 bp, Homo sapiens
gcgagaaactgcata

SEQ ID NO: 1714750 - DNA, 15 bp, Homo sapiens
cgagaaactgcatac

SEQ ID NO: 1714751 - DNA, 15 bp, Homo sapiens
gagaaactgcatact

SEQ ID NO: 1714752 - DNA, 15 bp, Homo sapiens
agaaactgcatactc

SEQ ID NO: 1714753 - DNA, 15 bp, Homo sapiens
gaaactgcatactcc

SEQ ID NO: 1714754 - DNA, 15 bp, Homo sapiens
aaactgcatactccc

SEQ ID NO: 1714755 - DNA, 15 bp, Homo sapiens
aactgcatactccct

SEQ ID NO: 1714756 - DNA, 15 bp, Homo sapiens
actgcatactccctc

SEQ ID NO: 1714757 - DNA, 15 bp, Homo sapiens
ctgcatactccctct

SEQ ID NO: 1714758 - DNA, 15 bp, Homo sapiens
tgcatactccctctc

SEQ ID NO: 1714759 - DNA, 15 bp, Homo sapiens
gcatactccctctct

SEQ ID NO: 1714760 - DNA, 15 bp, Homo sapiens
catactccctctctg

SEQ ID NO: 1714761 - DNA, 15 bp, Homo sapiens
atactccctctctga

SEQ ID NO: 1714762 - DNA, 15 bp, Homo sapiens
tactccctctctgag

SEQ ID NO: 1714763 - DNA, 15 bp, Homo sapiens
actccctctctgagg

SEQ ID NO: 1714764 - DNA, 15 bp, Homo sapiens
ctccctctctgagga

SEQ ID NO: 1714765 - DNA, 15 bp, Homo sapiens
tccctctctgaggag

SEQ ID NO: 1714766 - DNA, 15 bp, Homo sapiens
ccctctctgaggagg

SEQ ID NO: 1714767 - DNA, 15 bp, Homo sapiens
cctctctgaggaggc

SEQ ID NO: 1714768 - DNA, 15 bp, Homo sapiens
ctctctgaggaggct

SEQ ID NO: 1714769 - DNA, 15 bp, Homo sapiens
tctctgaggaggctc

SEQ ID NO: 1714770 - DNA, 15 bp, Homo sapiens
ctctgaggaggctca

SEQ ID NO: 1714771 - DNA, 15 bp, Homo sapiens
tctgaggaggctcac

SEQ ID NO: 1714772 - DNA, 15 bp, Homo sapiens
ctgaggaggctcaca

SEQ ID NO: 1714773 - DNA, 15 bp, Homo sapiens
tgaggaggctcacag

SEQ ID NO: 1714774 - DNA, 15 bp, Homo sapiens
gaggaggctcacagg

SEQ ID NO: 1714775 - DNA, 15 bp, Homo sapiens
aggaggctcacaggg

SEQ ID NO: 1714776 - DNA, 15 bp, Homo sapiens
ggaggctcacaggga

SEQ ID NO: 1714777 - DNA, 15 bp, Homo sapiens
gaggctcacagggag

SEQ ID NO: 1714778 - DNA, 15 bp, Homo sapiens
aggctcacagggagg

SEQ ID NO: 1714779 - DNA, 15 bp, Homo sapiens
ggctcacagggaggt

SEQ ID NO: 1714780 - DNA, 15 bp, Homo sapiens
gctcacagggaggtt

SEQ ID NO: 1714781 - DNA, 15 bp, Homo sapiens
ctcacagggaggttt

SEQ ID NO: 1714782 - DNA, 15 bp, Homo sapiens
tcacagggaggtttg

SEQ ID NO: 1714783 - DNA, 15 bp, Homo sapiens
cacagggaggtttgc

SEQ ID NO: 1714784 - DNA, 15 bp, Homo sapiens
acagggaggtttgca

SEQ ID NO: 1714785 - DNA, 15 bp, Homo sapiens
cagggaggtttgcac

SEQ ID NO: 1714786 - DNA, 15 bp, Homo sapiens
agggaggtttgcact

SEQ ID NO: 1714787 - DNA, 15 bp, Homo sapiens
gggaggtttgcactt

SEQ ID NO: 1714788 - DNA, 15 bp, Homo sapiens
ggaggtttgcactta

SEQ ID NO: 1714789 - DNA, 15 bp, Homo sapiens
gaggtttgcacttag

SEQ ID NO: 1714790 - DNA, 15 bp, Homo sapiens
aggtttgcacttaga

SEQ ID NO: 1714791 - DNA, 15 bp, Homo sapiens
ggtttgcacttagag

SEQ ID NO: 1714792 - DNA, 15 bp, Homo sapiens
gtttgcacttagaga

SEQ ID NO: 1714793 - DNA, 15 bp, Homo sapiens
tttgcacttagagac

SEQ ID NO: 1714794 - DNA, 15 bp, Homo sapiens
ttgcacttagagaca

SEQ ID NO: 1714795 - DNA, 15 bp, Homo sapiens
tgcacttagagacac

SEQ ID NO: 1714796 - DNA, 15 bp, Homo sapiens
gcacttagagacaca

SEQ ID NO: 1714797 - DNA, 15 bp, Homo sapiens
cacttagagacacaa

SEQ ID NO: 1714798 - DNA, 15 bp, Homo sapiens
acttagagacacaag

SEQ ID NO: 1714799 - DNA, 15 bp, Homo sapiens
cttagagacacaaga

SEQ ID NO: 1714800 - DNA, 15 bp, Homo sapiens
ttagagacacaagat

SEQ ID NO: 1714801 - DNA, 15 bp, Homo sapiens
tagagacacaagatg

SEQ ID NO: 1714802 - DNA, 15 bp, Homo sapiens
agagacacaagatga

SEQ ID NO: 1714803 - DNA, 15 bp, Homo sapiens
gagacacaagatgaa

SEQ ID NO: 1714804 - DNA, 15 bp, Homo sapiens
agacacaagatgaag

SEQ ID NO: 1714805 - DNA, 15 bp, Homo sapiens
gacacaagatgaagt

SEQ ID NO: 1714806 - DNA, 15 bp, Homo sapiens
acacaagatgaagtt

SEQ ID NO: 1714807 - DNA, 15 bp, Homo sapiens
cacaagatgaagttg

SEQ ID NO: 1714808 - DNA, 15 bp, Homo sapiens
acaagatgaagttga

SEQ ID NO: 1714809 - DNA, 15 bp, Homo sapiens
caagatgaagttgaa

SEQ ID NO: 1714810 - DNA, 15 bp, Homo sapiens
aagatgaagttgaag

SEQ ID NO: 1714811 - DNA, 15 bp, Homo sapiens
agatgaagttgaagg

SEQ ID NO: 1714812 - DNA, 15 bp, Homo sapiens
gatgaagttgaaggg

SEQ ID NO: 1714813 - DNA, 15 bp, Homo sapiens
atgaagttgaagggg

SEQ ID NO: 1714814 - DNA, 15 bp, Homo sapiens
tgaagttgaaggggc

SEQ ID NO: 1714815 - DNA, 15 bp, Homo sapiens
gaagttgaaggggca

SEQ ID NO: 1714816 - DNA, 15 bp, Homo sapiens
aagttgaaggggcag

SEQ ID NO: 1714817 - DNA, 15 bp, Homo sapiens
agttgaaggggcagc

SEQ ID NO: 1714818 - DNA, 15 bp, Homo sapiens
gttgaaggggcagct

SEQ ID NO: 1714819 - DNA, 15 bp, Homo sapiens
ttgaaggggcagcta

SEQ ID NO: 1714820 - DNA, 15 bp, Homo sapiens
tgaaggggcagctaa

SEQ ID NO: 1714821 - DNA, 15 bp, Homo sapiens
gaaggggcagctaac

SEQ ID NO: 1714822 - DNA, 15 bp, Homo sapiens
aaggggcagctaaca

SEQ ID NO: 1714823 - DNA, 15 bp, Homo sapiens
aggggcagctaacat

SEQ ID NO: 1714824 - DNA, 15 bp, Homo sapiens
ggggcagctaacata

SEQ ID NO: 1714825 - DNA, 15 bp, Homo sapiens
gggcagctaacatac

SEQ ID NO: 1714826 - DNA, 15 bp, Homo sapiens
ggcagctaacataca

SEQ ID NO: 1714827 - DNA, 15 bp, Homo sapiens
gcagctaacatacaa

SEQ ID NO: 1714828 - DNA, 15 bp, Homo sapiens
cagctaacatacaag

SEQ ID NO: 1714829 - DNA, 15 bp, Homo sapiens
agctaacatacaaga

SEQ ID NO: 1714830 - DNA, 15 bp, Homo sapiens
gctaacatacaagag

SEQ ID NO: 1714831 - DNA, 15 bp, Homo sapiens
ctaacatacaagaga

SEQ ID NO: 1714832 - DNA, 15 bp, Homo sapiens
taacatacaagagac

SEQ ID NO: 1714833 - DNA, 15 bp, Homo sapiens
aacatacaagagaca

SEQ ID NO: 1714834 - DNA, 15 bp, Homo sapiens
acatacaagagacag

SEQ ID NO: 1714835 - DNA, 15 bp, Homo sapiens
catacaagagacagg

SEQ ID NO: 1714836 - DNA, 15 bp, Homo sapiens
atacaagagacaggg

SEQ ID NO: 1714837 - DNA, 15 bp, Homo sapiens
tacaagagacagggg

SEQ ID NO: 1714838 - DNA, 15 bp, Homo sapiens
acaagagacaggggg

SEQ ID NO: 1714839 - DNA, 15 bp, Homo sapiens
caagagacaggggga

SEQ ID NO: 1714840 - DNA, 15 bp, Homo sapiens
aagagacagggggat

SEQ ID NO: 1714841 - DNA, 15 bp, Homo sapiens
agagacagggggatt

SEQ ID NO: 1714842 - DNA, 15 bp, Homo sapiens
gagacagggggattg

SEQ ID NO: 1714843 - DNA, 15 bp, Homo sapiens
agacagggggattga

SEQ ID NO: 1714844 - DNA, 15 bp, Homo sapiens
gacagggggattgaa

SEQ ID NO: 1714845 - DNA, 15 bp, Homo sapiens
acagggggattgaat

SEQ ID NO: 1714846 - DNA, 15 bp, Homo sapiens
cagggggattgaatg

SEQ ID NO: 1714847 - DNA, 15 bp, Homo sapiens
agggggattgaatgt

SEQ ID NO: 1714848 - DNA, 15 bp, Homo sapiens
gggggattgaatgta

SEQ ID NO: 1714849 - DNA, 15 bp, Homo sapiens
ggggattgaatgtaa

SEQ ID NO: 1714850 - DNA, 15 bp, Homo sapiens
gggattgaatgtaaa

SEQ ID NO: 1714851 - DNA, 15 bp, Homo sapiens
ggattgaatgtaaag

SEQ ID NO: 1714852 - DNA, 15 bp, Homo sapiens
gattgaatgtaaagc

SEQ ID NO: 1714853 - DNA, 15 bp, Homo sapiens
attgaatgtaaagct

SEQ ID NO: 1714854 - DNA, 15 bp, Homo sapiens
ttgaatgtaaagctg

SEQ ID NO: 1714855 - DNA, 15 bp, Homo sapiens
tgaatgtaaagctgt

SEQ ID NO: 1714856 - DNA, 15 bp, Homo sapiens
gaatgtaaagctgtg

SEQ ID NO: 1714857 - DNA, 15 bp, Homo sapiens
aatgtaaagctgtgt

SEQ ID NO: 1714858 - DNA, 15 bp, Homo sapiens
atgtaaagctgtgta

SEQ ID NO: 1714859 - DNA, 15 bp, Homo sapiens
tgtaaagctgtgtat

SEQ ID NO: 1714860 - DNA, 15 bp, Homo sapiens
gtaaagctgtgtatg

SEQ ID NO: 1714861 - DNA, 15 bp, Homo sapiens
taaagctgtgtatga

SEQ ID NO: 1714862 - DNA, 15 bp, Homo sapiens
aaagctgtgtatgaa

SEQ ID NO: 1714863 - DNA, 15 bp, Homo sapiens
aagctgtgtatgaac

SEQ ID NO: 1714864 - DNA, 15 bp, Homo sapiens
agctgtgtatgaaca

SEQ ID NO: 1714865 - DNA, 15 bp, Homo sapiens
gctgtgtatgaacag

SEQ ID NO: 1714866 - DNA, 15 bp, Homo sapiens
ctgtgtatgaacaga

SEQ ID NO: 1714867 - DNA, 15 bp, Homo sapiens
tgtgtatgaacagaa

SEQ ID NO: 1714868 - DNA, 15 bp, Homo sapiens
gtgtatgaacagaag

SEQ ID NO: 1714869 - DNA, 15 bp, Homo sapiens
tgtatgaacagaaga

SEQ ID NO: 1714870 - DNA, 15 bp, Homo sapiens
gtatgaacagaagaa

SEQ ID NO: 1714871 - DNA, 15 bp, Homo sapiens
tatgaacagaagaac

SEQ ID NO: 1714872 - DNA, 15 bp, Homo sapiens
atgaacagaagaact

SEQ ID NO: 1714873 - DNA, 15 bp, Homo sapiens
tgaacagaagaactc

SEQ ID NO: 1714874 - DNA, 15 bp, Homo sapiens
gaacagaagaactcc

SEQ ID NO: 1714875 - DNA, 15 bp, Homo sapiens
aacagaagaactccc

SEQ ID NO: 1714876 - DNA, 15 bp, Homo sapiens
acagaagaactccca

SEQ ID NO: 1714877 - DNA, 15 bp, Homo sapiens
cagaagaactcccag

SEQ ID NO: 1714878 - DNA, 15 bp, Homo sapiens
agaagaactcccagc

SEQ ID NO: 1714879 - DNA, 15 bp, Homo sapiens
gaagaactcccagcc

SEQ ID NO: 1714880 - DNA, 15 bp, Homo sapiens
aagaactcccagccc

SEQ ID NO: 1714881 - DNA, 15 bp, Homo sapiens
agaactcccagcccc

SEQ ID NO: 1714882 - DNA, 15 bp, Homo sapiens
gaactcccagcccct

SEQ ID NO: 1714883 - DNA, 15 bp, Homo sapiens
aactcccagcccctc

SEQ ID NO: 1714884 - DNA, 15 bp, Homo sapiens
actcccagcccctct

SEQ ID NO: 1714885 - DNA, 15 bp, Homo sapiens
ctcccagcccctctc

SEQ ID NO: 1714886 - DNA, 15 bp, Homo sapiens
tcccagcccctctct

SEQ ID NO: 1714887 - DNA, 15 bp, Homo sapiens
cccagcccctctctt

SEQ ID NO: 1714888 - DNA, 15 bp, Homo sapiens
ccagcccctctcttc

SEQ ID NO: 1714889 - DNA, 15 bp, Homo sapiens
cagcccctctcttct

SEQ ID NO: 1714890 - DNA, 15 bp, Homo sapiens
agcccctctcttctg

SEQ ID NO: 1714891 - DNA, 15 bp, Homo sapiens
gcccctctcttctgg

SEQ ID NO: 1714892 - DNA, 15 bp, Homo sapiens
cccctctcttctggc

SEQ ID NO: 1714893 - DNA, 15 bp, Homo sapiens
ccctctcttctggca

SEQ ID NO: 1714894 - DNA, 15 bp, Homo sapiens
cctctcttctggcag

SEQ ID NO: 1714895 - DNA, 15 bp, Homo sapiens
ctctcttctggcagg

SEQ ID NO: 1714896 - DNA, 15 bp, Homo sapiens
tctcttctggcagga

SEQ ID NO: 1714897 - DNA, 15 bp, Homo sapiens
ctcttctggcaggag

SEQ ID NO: 1714898 - DNA, 15 bp, Homo sapiens
tcttctggcaggaga

SEQ ID NO: 1714899 - DNA, 15 bp, Homo sapiens
cttctggcaggagat

SEQ ID NO: 1714900 - DNA, 15 bp, Homo sapiens
ttctggcaggagatt

SEQ ID NO: 1714901 - DNA, 15 bp, Homo sapiens
tctggcaggagattg

SEQ ID NO: 1714902 - DNA, 15 bp, Homo sapiens
ctggcaggagattga

SEQ ID NO: 1714903 - DNA, 15 bp, Homo sapiens
tggcaggagattgaa

SEQ ID NO: 1714904 - DNA, 15 bp, Homo sapiens
ggcaggagattgaag

SEQ ID NO: 1714905 - DNA, 15 bp, Homo sapiens
gcaggagattgaaga

SEQ ID NO: 1714906 - DNA, 15 bp, Homo sapiens
caggagattgaagaa

SEQ ID NO: 1714907 - DNA, 15 bp, Homo sapiens
aggagattgaagaat

SEQ ID NO: 1714908 - DNA, 15 bp, Homo sapiens
ggagattgaagaatg

SEQ ID NO: 1714909 - DNA, 15 bp, Homo sapiens
gagattgaagaatga

SEQ ID NO: 1714910 - DNA, 15 bp, Homo sapiens
agattgaagaatgat

SEQ ID NO: 1714911 - DNA, 15 bp, Homo sapiens
gattgaagaatgatt

SEQ ID NO: 1714912 - DNA, 15 bp, Homo sapiens
attgaagaatgattt

SEQ ID NO: 1714913 - DNA, 15 bp, Homo sapiens
ttgaagaatgatttt

SEQ ID NO: 1714914 - DNA, 15 bp, Homo sapiens
tgaagaatgattttc

SEQ ID NO: 1714915 - DNA, 15 bp, Homo sapiens
gaagaatgattttct

SEQ ID NO: 1714916 - DNA, 15 bp, Homo sapiens
aagaatgattttctg

SEQ ID NO: 1714917 - DNA, 15 bp, Homo sapiens
agaatgattttctgg

SEQ ID NO: 1714918 - DNA, 15 bp, Homo sapiens
gaatgattttctggg

SEQ ID NO: 1714919 - DNA, 15 bp, Homo sapiens
aatgattttctgggg

SEQ ID NO: 1714920 - DNA, 15 bp, Homo sapiens
atgattttctgggga

SEQ ID NO: 1714921 - DNA, 15 bp, Homo sapiens
tgattttctggggaa

SEQ ID NO: 1714922 - DNA, 15 bp, Homo sapiens
gattttctggggaaa

SEQ ID NO: 1714923 - DNA, 15 bp, Homo sapiens
attttctggggaaat

SEQ ID NO: 1714924 - DNA, 15 bp, Homo sapiens
ttttctggggaaatt

SEQ ID NO: 1714925 - DNA, 15 bp, Homo sapiens
tttctggggaaattg

SEQ ID NO: 1714926 - DNA, 15 bp, Homo sapiens
ttctggggaaattgg

SEQ ID NO: 1714927 - DNA, 15 bp, Homo sapiens
tctggggaaattggc

SEQ ID NO: 1714928 - DNA, 15 bp, Homo sapiens
ctggggaaattggcc

SEQ ID NO: 1714929 - DNA, 15 bp, Homo sapiens
tggggaaattggcca

SEQ ID NO: 1714930 - DNA, 15 bp, Homo sapiens
ggggaaattggccaa

SEQ ID NO: 1714931 - DNA, 15 bp, Homo sapiens
gggaaattggccaat

SEQ ID NO: 1714932 - DNA, 15 bp, Homo sapiens
ggaaattggccaatc

SEQ ID NO: 1714933 - DNA, 15 bp, Homo sapiens
gaaattggccaatct

SEQ ID NO: 1714934 - DNA, 15 bp, Homo sapiens
aaattggccaatctt

SEQ ID NO: 1714935 - DNA, 15 bp, Homo sapiens
aattggccaatctta

SEQ ID NO: 1714936 - DNA, 15 bp, Homo sapiens
attggccaatcttag

SEQ ID NO: 1714937 - DNA, 15 bp, Homo sapiens
ttggccaatcttaga

SEQ ID NO: 1714938 - DNA, 15 bp, Homo sapiens
tggccaatcttagaa

SEQ ID NO: 1714939 - DNA, 15 bp, Homo sapiens
ggccaatcttagaaa

SEQ ID NO: 1714940 - DNA, 15 bp, Homo sapiens
gccaatcttagaaaa

SEQ ID NO: 1714941 - DNA, 15 bp, Homo sapiens
ccaatcttagaaaag

SEQ ID NO: 1714942 - DNA, 15 bp, Homo sapiens
caatcttagaaaaga

SEQ ID NO: 1714943 - DNA, 15 bp, Homo sapiens
aatcttagaaaagag

SEQ ID NO: 1714944 - DNA, 15 bp, Homo sapiens
atcttagaaaagagg

SEQ ID NO: 1714945 - DNA, 15 bp, Homo sapiens
tcttagaaaagaggt

SEQ ID NO: 1714946 - DNA, 15 bp, Homo sapiens
cttagaaaagaggtc

SEQ ID NO: 1714947 - DNA, 15 bp, Homo sapiens
ttagaaaagaggtcg

SEQ ID NO: 1714948 - DNA, 15 bp, Homo sapiens
tagaaaagaggtcgg

SEQ ID NO: 1714949 - DNA, 15 bp, Homo sapiens
agaaaagaggtcggg

SEQ ID NO: 1714950 - DNA, 15 bp, Homo sapiens
gaaaagaggtcgggc

SEQ ID NO: 1714951 - DNA, 15 bp, Homo sapiens
aaaagaggtcgggcc

SEQ ID NO: 1714952 - DNA, 15 bp, Homo sapiens
aaagaggtcgggcca

SEQ ID NO: 1714953 - DNA, 15 bp, Homo sapiens
aagaggtcgggccag

SEQ ID NO: 1714954 - DNA, 15 bp, Homo sapiens
agaggtcgggccagg

SEQ ID NO: 1714955 - DNA, 15 bp, Homo sapiens
gaggtcgggccaggc

SEQ ID NO: 1714956 - DNA, 15 bp, Homo sapiens
aggtcgggccaggcg

SEQ ID NO: 1714957 - DNA, 15 bp, Homo sapiens
ggtcgggccaggcgc

SEQ ID NO: 1714958 - DNA, 15 bp, Homo sapiens
gtcgggccaggcgct

SEQ ID NO: 1714959 - DNA, 15 bp, Homo sapiens
tcgggccaggcgctg

SEQ ID NO: 1714960 - DNA, 15 bp, Homo sapiens
cgggccaggcgctgt

SEQ ID NO: 1714961 - DNA, 15 bp, Homo sapiens
gggccaggcgctgtg

SEQ ID NO: 1714962 - DNA, 15 bp, Homo sapiens
ggccaggcgctgtgg

SEQ ID NO: 1714963 - DNA, 15 bp, Homo sapiens
gccaggcgctgtggc

SEQ ID NO: 1714964 - DNA, 15 bp, Homo sapiens
ccaggcgctgtggct

SEQ ID NO: 1714965 - DNA, 15 bp, Homo sapiens
caggcgctgtggctc

SEQ ID NO: 1714966 - DNA, 15 bp, Homo sapiens
aggcgctgtggctca

SEQ ID NO: 1714967 - DNA, 15 bp, Homo sapiens
ggcgctgtggctcac

SEQ ID NO: 1714968 - DNA, 15 bp, Homo sapiens
gcgctgtggctcact

SEQ ID NO: 1714969 - DNA, 15 bp, Homo sapiens
cgctgtggctcactc

SEQ ID NO: 1714970 - DNA, 15 bp, Homo sapiens
gctgtggctcactcc

SEQ ID NO: 1714971 - DNA, 15 bp, Homo sapiens
ctgtggctcactcct

SEQ ID NO: 1714972 - DNA, 15 bp, Homo sapiens
tgtggctcactcctg

SEQ ID NO: 1714973 - DNA, 15 bp, Homo sapiens
aggccaaggcgggcg

SEQ ID NO: 1714974 - DNA, 15 bp, Homo sapiens
ggccaaggcgggcgg

SEQ ID NO: 1714975 - DNA, 15 bp, Homo sapiens
gccaaggcgggcgga

SEQ ID NO: 1714976 - DNA, 15 bp, Homo sapiens
ccaaggcgggcggat

SEQ ID NO: 1714977 - DNA, 15 bp, Homo sapiens
caaggcgggcggatc

SEQ ID NO: 1714978 - DNA, 15 bp, Homo sapiens
aaggcgggcggatca

SEQ ID NO: 1714979 - DNA, 15 bp, Homo sapiens
cggatcatgaggtcg

SEQ ID NO: 1714980 - DNA, 15 bp, Homo sapiens
ggatcatgaggtcga

SEQ ID NO: 1714981 - DNA, 15 bp, Homo sapiens
gatcatgaggtcgag

SEQ ID NO: 1714982 - DNA, 15 bp, Homo sapiens
atcatgaggtcgaga

SEQ ID NO: 1714983 - DNA, 15 bp, Homo sapiens
tcatgaggtcgagag

SEQ ID NO: 1714984 - DNA, 15 bp, Homo sapiens
catgaggtcgagaga

SEQ ID NO: 1714985 - DNA, 15 bp, Homo sapiens
atgaggtcgagagat

SEQ ID NO: 1714986 - DNA, 15 bp, Homo sapiens
tgaggtcgagagatt

SEQ ID NO: 1714987 - DNA, 15 bp, Homo sapiens
gaggtcgagagattg

SEQ ID NO: 1714988 - DNA, 15 bp, Homo sapiens
aggtcgagagattga

SEQ ID NO: 1714989 - DNA, 15 bp, Homo sapiens
ggtcgagagattgag

SEQ ID NO: 1714990 - DNA, 15 bp, Homo sapiens
gtcgagagattgaga

SEQ ID NO: 1714991 - DNA, 15 bp, Homo sapiens
tcgagagattgagac

SEQ ID NO: 1714992 - DNA, 15 bp, Homo sapiens
cgagagattgagacc

SEQ ID NO: 1714993 - DNA, 15 bp, Homo sapiens
gagagattgagacca

SEQ ID NO: 1714994 - DNA, 15 bp, Homo sapiens
aaaaaaattagccgg

SEQ ID NO: 1714995 - DNA, 15 bp, Homo sapiens
ccgggcgtggtggcg

SEQ ID NO: 1714996 - DNA, 15 bp, Homo sapiens
cgggcgtggtggcgg

SEQ ID NO: 1714997 - DNA, 15 bp, Homo sapiens
gggcgtggtggcggg

SEQ ID NO: 1714998 - DNA, 15 bp, Homo sapiens
ggcgtggtggcgggc

SEQ ID NO: 1714999 - DNA, 15 bp, Homo sapiens
gcgtggtggcgggcg

SEQ ID NO: 1715000 - DNA, 15 bp, Homo sapiens
gtgaacccgggaggt

SEQ ID NO: 1715001 - DNA, 15 bp, Homo sapiens
cccgggaggtggagc

SEQ ID NO: 1715002 - DNA, 15 bp, Homo sapiens
ccgggaggtggagct

SEQ ID NO: 1715003 - DNA, 15 bp, Homo sapiens
cgggaggtggagctt

SEQ ID NO: 1715004 - DNA, 15 bp, Homo sapiens
gggaggtggagcttg

SEQ ID NO: 1715005 - DNA, 15 bp, Homo sapiens
ggaggtggagcttgc

SEQ ID NO: 1715006 - DNA, 15 bp, Homo sapiens
gaggtggagcttgca

SEQ ID NO: 1715007 - DNA, 15 bp, Homo sapiens
gagatcgcgccactg

SEQ ID NO: 1715008 - DNA, 15 bp, Homo sapiens
agatcgcgccactgc

SEQ ID NO: 1715009 - DNA, 15 bp, Homo sapiens
gatcgcgccactgca

SEQ ID NO: 1715010 - DNA, 15 bp, Homo sapiens
atcgcgccactgcac

SEQ ID NO: 1715011 - DNA, 15 bp, Homo sapiens
tcgcgccactgcact

SEQ ID NO: 1715012 - DNA, 15 bp, Homo sapiens
cgcgccactgcactc

SEQ ID NO: 1715013 - DNA, 15 bp, Homo sapiens
gggcgacagagcgaa

SEQ ID NO: 1715014 - DNA, 15 bp, Homo sapiens
ggcgacagagcgaaa

SEQ ID NO: 1715015 - DNA, 15 bp, Homo sapiens
gcgacagagcgaaaa

SEQ ID NO: 1715016 - DNA, 15 bp, Homo sapiens
cgacagagcgaaaaa

SEQ ID NO: 1715017 - DNA, 15 bp, Homo sapiens
gacagagcgaaaaaa

SEQ ID NO: 1715018 - DNA, 15 bp, Homo sapiens
acagagcgaaaaaaa

SEQ ID NO: 1715019 - DNA, 15 bp, Homo sapiens
cagagcgaaaaaaaa

SEQ ID NO: 1715020 - DNA, 15 bp, Homo sapiens
agagcgaaaaaaaaa

SEQ ID NO: 1715021 - DNA, 15 bp, Homo sapiens
gagcgaaaaaaaaaa

SEQ ID NO: 1715022 - DNA, 15 bp, Homo sapiens
agcgaaaaaaaaaaa

SEQ ID NO: 1715023 - DNA, 15 bp, Homo sapiens
gcgaaaaaaaaaaaa

SEQ ID NO: 1715024 - DNA, 15 bp, Homo sapiens
aaagaaaaagaaaaa

SEQ ID NO: 1715025 - DNA, 15 bp, Homo sapiens
agaaaaagaaaagag

SEQ ID NO: 1715026 - DNA, 15 bp, Homo sapiens
gaaaaagaaaagagg

SEQ ID NO: 1715027 - DNA, 15 bp, Homo sapiens
aaaaagaaaagaggt

SEQ ID NO: 1715028 - DNA, 15 bp, Homo sapiens
aaaagaaaagaggtc

SEQ ID NO: 1715029 - DNA, 15 bp, Homo sapiens
aaagaaaagaggtca

SEQ ID NO: 1715030 - DNA, 15 bp, Homo sapiens
aagaaaagaggtcaa

SEQ ID NO: 1715031 - DNA, 15 bp, Homo sapiens
agaaaagaggtcaag

SEQ ID NO: 1715032 - DNA, 15 bp, Homo sapiens
gaaaagaggtcaagg

SEQ ID NO: 1715033 - DNA, 15 bp, Homo sapiens
aaaagaggtcaagga

SEQ ID NO: 1715034 - DNA, 15 bp, Homo sapiens
aaagaggtcaaggac

SEQ ID NO: 1715035 - DNA, 15 bp, Homo sapiens
aagaggtcaaggact

SEQ ID NO: 1715036 - DNA, 15 bp, Homo sapiens
agaggtcaaggactc

SEQ ID NO: 1715037 - DNA, 15 bp, Homo sapiens
gaggtcaaggactcc

SEQ ID NO: 1715038 - DNA, 15 bp, Homo sapiens
aggtcaaggactccg

SEQ ID NO: 1715039 - DNA, 15 bp, Homo sapiens
ggtcaaggactccgt

SEQ ID NO: 1715040 - DNA, 15 bp, Homo sapiens
gtcaaggactccgtc

SEQ ID NO: 1715041 - DNA, 15 bp, Homo sapiens
tcaaggactccgtcc

SEQ ID NO: 1715042 - DNA, 15 bp, Homo sapiens
caaggactccgtcct

SEQ ID NO: 1715043 - DNA, 15 bp, Homo sapiens
aaggactccgtcctt

SEQ ID NO: 1715044 - DNA, 15 bp, Homo sapiens
aggactccgtccttg

SEQ ID NO: 1715045 - DNA, 15 bp, Homo sapiens
ggactccgtccttgg

SEQ ID NO: 1715046 - DNA, 15 bp, Homo sapiens
gactccgtccttgga

SEQ ID NO: 1715047 - DNA, 15 bp, Homo sapiens
actccgtccttggaa

SEQ ID NO: 1715048 - DNA, 15 bp, Homo sapiens
ctccgtccttggaat

SEQ ID NO: 1715049 - DNA, 15 bp, Homo sapiens
tccgtccttggaatc

SEQ ID NO: 1715050 - DNA, 15 bp, Homo sapiens
ccgtccttggaatcc

SEQ ID NO: 1715051 - DNA, 15 bp, Homo sapiens
cgtccttggaatcct

SEQ ID NO: 1715052 - DNA, 15 bp, Homo sapiens
gtccttggaatccta

SEQ ID NO: 1715053 - DNA, 15 bp, Homo sapiens
tccttggaatcctaa

SEQ ID NO: 1715054 - DNA, 15 bp, Homo sapiens
ccttggaatcctaag

SEQ ID NO: 1715055 - DNA, 15 bp, Homo sapiens
cttggaatcctaaga

SEQ ID NO: 1715056 - DNA, 15 bp, Homo sapiens
ttggaatcctaagaa

SEQ ID NO: 1715057 - DNA, 15 bp, Homo sapiens
tggaatcctaagaaa

SEQ ID NO: 1715058 - DNA, 15 bp, Homo sapiens
ggaatcctaagaaaa

SEQ ID NO: 1715059 - DNA, 15 bp, Homo sapiens
gaatcctaagaaaat

SEQ ID NO: 1715060 - DNA, 15 bp, Homo sapiens
aatcctaagaaaatt

SEQ ID NO: 1715061 - DNA, 15 bp, Homo sapiens
atcctaagaaaattt

SEQ ID NO: 1715062 - DNA, 15 bp, Homo sapiens
tcctaagaaaatttt

SEQ ID NO: 1715063 - DNA, 15 bp, Homo sapiens
cctaagaaaattttc

SEQ ID NO: 1715064 - DNA, 15 bp, Homo sapiens
ctaagaaaattttcc

SEQ ID NO: 1715065 - DNA, 15 bp, Homo sapiens
taagaaaattttcca

SEQ ID NO: 1715066 - DNA, 15 bp, Homo sapiens
aagaaaattttccag

SEQ ID NO: 1715067 - DNA, 15 bp, Homo sapiens
agaaaattttccagc

SEQ ID NO: 1715068 - DNA, 15 bp, Homo sapiens
gaaaattttccagcc

SEQ ID NO: 1715069 - DNA, 15 bp, Homo sapiens
aaaattttccagccg

SEQ ID NO: 1715070 - DNA, 15 bp, Homo sapiens
aaattttccagccgt

SEQ ID NO: 1715071 - DNA, 15 bp, Homo sapiens
aattttccagccgta

SEQ ID NO: 1715072 - DNA, 15 bp, Homo sapiens
attttccagccgtat

SEQ ID NO: 1715073 - DNA, 15 bp, Homo sapiens
ttttccagccgtatt

SEQ ID NO: 1715074 - DNA, 15 bp, Homo sapiens
tttccagccgtatta

SEQ ID NO: 1715075 - DNA, 15 bp, Homo sapiens
ttccagccgtattac

SEQ ID NO: 1715076 - DNA, 15 bp, Homo sapiens
tccagccgtattacc

SEQ ID NO: 1715077 - DNA, 15 bp, Homo sapiens
ccagccgtattaccc

SEQ ID NO: 1715078 - DNA, 15 bp, Homo sapiens
cagccgtattaccct

SEQ ID NO: 1715079 - DNA, 15 bp, Homo sapiens
agccgtattaccctt

SEQ ID NO: 1715080 - DNA, 15 bp, Homo sapiens
gccgtattacccttc

SEQ ID NO: 1715081 - DNA, 15 bp, Homo sapiens
ccgtattacccttct

SEQ ID NO: 1715082 - DNA, 15 bp, Homo sapiens
cgtattacccttcta

SEQ ID NO: 1715083 - DNA, 15 bp, Homo sapiens
gtattacccttctat

SEQ ID NO: 1715084 - DNA, 15 bp, Homo sapiens
tattacccttctatg

SEQ ID NO: 1715085 - DNA, 15 bp, Homo sapiens
attacccttctatga

SEQ ID NO: 1715086 - DNA, 15 bp, Homo sapiens
ttacccttctatgaa

SEQ ID NO: 1715087 - DNA, 15 bp, Homo sapiens
tacccttctatgaag

SEQ ID NO: 1715088 - DNA, 15 bp, Homo sapiens
acccttctatgaagc

SEQ ID NO: 1715089 - DNA, 15 bp, Homo sapiens
cccttctatgaagcc

SEQ ID NO: 1715090 - DNA, 15 bp, Homo sapiens
ccttctatgaagccc

SEQ ID NO: 1715091 - DNA, 15 bp, Homo sapiens
cttctatgaagccca

SEQ ID NO: 1715092 - DNA, 15 bp, Homo sapiens
ttctatgaagcccac

SEQ ID NO: 1715093 - DNA, 15 bp, Homo sapiens
tctatgaagcccacc

SEQ ID NO: 1715094 - DNA, 15 bp, Homo sapiens
ctatgaagcccacct

SEQ ID NO: 1715095 - DNA, 15 bp, Homo sapiens
tatgaagcccacctg

SEQ ID NO: 1715096 - DNA, 15 bp, Homo sapiens
atgaagcccacctgt

SEQ ID NO: 1715097 - DNA, 15 bp, Homo sapiens
tgaagcccacctgtc

SEQ ID NO: 1715098 - DNA, 15 bp, Homo sapiens
gaagcccacctgtca

SEQ ID NO: 1715099 - DNA, 15 bp, Homo sapiens
aagcccacctgtcaa

SEQ ID NO: 1715100 - DNA, 15 bp, Homo sapiens
agcccacctgtcaac

SEQ ID NO: 1715101 - DNA, 15 bp, Homo sapiens
gcccacctgtcaacc

SEQ ID NO: 1715102 - DNA, 15 bp, Homo sapiens
cccacctgtcaacca

SEQ ID NO: 1715103 - DNA, 15 bp, Homo sapiens
ccacctgtcaaccaa

SEQ ID NO: 1715104 - DNA, 15 bp, Homo sapiens
cacctgtcaaccaac

SEQ ID NO: 1715105 - DNA, 15 bp, Homo sapiens
acctgtcaaccaaca

SEQ ID NO: 1715106 - DNA, 15 bp, Homo sapiens
cctgtcaaccaacaa

SEQ ID NO: 1715107 - DNA, 15 bp, Homo sapiens
ctgtcaaccaacaag

SEQ ID NO: 1715108 - DNA, 15 bp, Homo sapiens
tgtcaaccaacaagc

SEQ ID NO: 1715109 - DNA, 15 bp, Homo sapiens
gtcaaccaacaagca

SEQ ID NO: 1715110 - DNA, 15 bp, Homo sapiens
tcaaccaacaagcac

SEQ ID NO: 1715111 - DNA, 15 bp, Homo sapiens
caaccaacaagcacc

SEQ ID NO: 1715112 - DNA, 15 bp, Homo sapiens
aaccaacaagcaccc

SEQ ID NO: 1715113 - DNA, 15 bp, Homo sapiens
accaacaagcaccca

SEQ ID NO: 1715114 - DNA, 15 bp, Homo sapiens
ccaacaagcacccac

SEQ ID NO: 1715115 - DNA, 15 bp, Homo sapiens
caacaagcacccact

SEQ ID NO: 1715116 - DNA, 15 bp, Homo sapiens
aacaagcacccactc

SEQ ID NO: 1715117 - DNA, 15 bp, Homo sapiens
acaagcacccactcg

SEQ ID NO: 1715118 - DNA, 15 bp, Homo sapiens
caagcacccactcga

SEQ ID NO: 1715119 - DNA, 15 bp, Homo sapiens
aagcacccactcgat

SEQ ID NO: 1715120 - DNA, 15 bp, Homo sapiens
agcacccactcgatc

SEQ ID NO: 1715121 - DNA, 15 bp, Homo sapiens
gcacccactcgatca

SEQ ID NO: 1715122 - DNA, 15 bp, Homo sapiens
cacccactcgatcag

SEQ ID NO: 1715123 - DNA, 15 bp, Homo sapiens
acccactcgatcaga

SEQ ID NO: 1715124 - DNA, 15 bp, Homo sapiens
cccactcgatcagag

SEQ ID NO: 1715125 - DNA, 15 bp, Homo sapiens
ccactcgatcagagc

SEQ ID NO: 1715126 - DNA, 15 bp, Homo sapiens
cactcgatcagagct

SEQ ID NO: 1715127 - DNA, 15 bp, Homo sapiens
actcgatcagagctt

SEQ ID NO: 1715128 - DNA, 15 bp, Homo sapiens
ctcgatcagagcttc

SEQ ID NO: 1715129 - DNA, 15 bp, Homo sapiens
tcgatcagagcttcc

SEQ ID NO: 1715130 - DNA, 15 bp, Homo sapiens
cgatcagagcttccc

SEQ ID NO: 1715131 - DNA, 15 bp, Homo sapiens
gatcagagcttcccc

SEQ ID NO: 1715132 - DNA, 15 bp, Homo sapiens
atcagagcttcccca

SEQ ID NO: 1715133 - DNA, 15 bp, Homo sapiens
tcagagcttccccag

SEQ ID NO: 1715134 - DNA, 15 bp, Homo sapiens
cagagcttccccagg

SEQ ID NO: 1715135 - DNA, 15 bp, Homo sapiens
agagcttccccaggc

SEQ ID NO: 1715136 - DNA, 15 bp, Homo sapiens
gagcttccccaggct

SEQ ID NO: 1715137 - DNA, 15 bp, Homo sapiens
gcttccccaggcttt

SEQ ID NO: 1715138 - DNA, 15 bp, Homo sapiens
cttccccaggctttt

SEQ ID NO: 1715139 - DNA, 15 bp, Homo sapiens
ttccccaggcttttt

SEQ ID NO: 1715140 - DNA, 15 bp, Homo sapiens
tccccaggctttttg

SEQ ID NO: 1715141 - DNA, 15 bp, Homo sapiens
ccccaggctttttgg

SEQ ID NO: 1715142 - DNA, 15 bp, Homo sapiens
cccaggctttttggt

SEQ ID NO: 1715143 - DNA, 15 bp, Homo sapiens
ccaggctttttggtg

SEQ ID NO: 1715144 - DNA, 15 bp, Homo sapiens
caggctttttggtgt

SEQ ID NO: 1715145 - DNA, 15 bp, Homo sapiens
aggctttttggtgtc

SEQ ID NO: 1715146 - DNA, 15 bp, Homo sapiens
ggctttttggtgtct

SEQ ID NO: 1715147 - DNA, 15 bp, Homo sapiens
gctttttggtgtctc

SEQ ID NO: 1715148 - DNA, 15 bp, Homo sapiens
ctttttggtgtctcc

SEQ ID NO: 1715149 - DNA, 15 bp, Homo sapiens
tttttggtgtctcct

SEQ ID NO: 1715150 - DNA, 15 bp, Homo sapiens
ttttggtgtctcctc

SEQ ID NO: 1715151 - DNA, 15 bp, Homo sapiens
tttggtgtctcctcc

SEQ ID NO: 1715152 - DNA, 15 bp, Homo sapiens
ttggtgtctcctcct

SEQ ID NO: 1715153 - DNA, 15 bp, Homo sapiens
tggtgtctcctcctt

SEQ ID NO: 1715154 - DNA, 15 bp, Homo sapiens
ggtgtctcctccttg

SEQ ID NO: 1715155 - DNA, 15 bp, Homo sapiens
gtgtctcctccttgc

SEQ ID NO: 1715156 - DNA, 15 bp, Homo sapiens
tgtctcctccttgca

SEQ ID NO: 1715157 - DNA, 15 bp, Homo sapiens
gtctcctccttgcat

SEQ ID NO: 1715158 - DNA, 15 bp, Homo sapiens
tctcctccttgcatg

SEQ ID NO: 1715159 - DNA, 15 bp, Homo sapiens
ctcctccttgcatgg

SEQ ID NO: 1715160 - DNA, 15 bp, Homo sapiens
tcctccttgcatggg

SEQ ID NO: 1715161 - DNA, 15 bp, Homo sapiens
cctccttgcatggga

SEQ ID NO: 1715162 - DNA, 15 bp, Homo sapiens
ctccttgcatgggaa

SEQ ID NO: 1715163 - DNA, 15 bp, Homo sapiens
tccttgcatgggaat

SEQ ID NO: 1715164 - DNA, 15 bp, Homo sapiens
ccttgcatgggaatt

SEQ ID NO: 1715165 - DNA, 15 bp, Homo sapiens
cttgcatgggaattg

SEQ ID NO: 1715166 - DNA, 15 bp, Homo sapiens
ttgcatgggaattga

SEQ ID NO: 1715167 - DNA, 15 bp, Homo sapiens
tgcatgggaattgac

SEQ ID NO: 1715168 - DNA, 15 bp, Homo sapiens
gcatgggaattgact

SEQ ID NO: 1715169 - DNA, 15 bp, Homo sapiens
catgggaattgactt

SEQ ID NO: 1715170 - DNA, 15 bp, Homo sapiens
atgggaattgacttc

SEQ ID NO: 1715171 - DNA, 15 bp, Homo sapiens
tgggaattgacttcc

SEQ ID NO: 1715172 - DNA, 15 bp, Homo sapiens
gggaattgacttcca

SEQ ID NO: 1715173 - DNA, 15 bp, Homo sapiens
ggaattgacttccaa

SEQ ID NO: 1715174 - DNA, 15 bp, Homo sapiens
gaattgacttccaag

SEQ ID NO: 1715175 - DNA, 15 bp, Homo sapiens
aattgacttccaagg

SEQ ID NO: 1715176 - DNA, 15 bp, Homo sapiens
attgacttccaagga

SEQ ID NO: 1715177 - DNA, 15 bp, Homo sapiens
ttgacttccaaggac

SEQ ID NO: 1715178 - DNA, 15 bp, Homo sapiens
tgacttccaaggacc

SEQ ID NO: 1715179 - DNA, 15 bp, Homo sapiens
gacttccaaggacca

SEQ ID NO: 1715180 - DNA, 15 bp, Homo sapiens
acttccaaggaccac

SEQ ID NO: 1715181 - DNA, 15 bp, Homo sapiens
cttccaaggaccacc

SEQ ID NO: 1715182 - DNA, 15 bp, Homo sapiens
ttccaaggaccacca

SEQ ID NO: 1715183 - DNA, 15 bp, Homo sapiens
tccaaggaccaccag

SEQ ID NO: 1715184 - DNA, 15 bp, Homo sapiens
ccaaggaccaccaga

SEQ ID NO: 1715185 - DNA, 15 bp, Homo sapiens
caaggaccaccagac

SEQ ID NO: 1715186 - DNA, 15 bp, Homo sapiens
aaggaccaccagaca

SEQ ID NO: 1715187 - DNA, 15 bp, Homo sapiens
aggaccaccagacac

SEQ ID NO: 1715188 - DNA, 15 bp, Homo sapiens
ggaccaccagacact

SEQ ID NO: 1715189 - DNA, 15 bp, Homo sapiens
gaccaccagacactg

SEQ ID NO: 1715190 - DNA, 15 bp, Homo sapiens
accaccagacactga

SEQ ID NO: 1715191 - DNA, 15 bp, Homo sapiens
ccaccagacactgag

SEQ ID NO: 1715192 - DNA, 15 bp, Homo sapiens
caccagacactgagg

SEQ ID NO: 1715193 - DNA, 15 bp, Homo sapiens
accagacactgagga

SEQ ID NO: 1715194 - DNA, 15 bp, Homo sapiens
ccagacactgaggaa

SEQ ID NO: 1715195 - DNA, 15 bp, Homo sapiens
cagacactgaggaag

SEQ ID NO: 1715196 - DNA, 15 bp, Homo sapiens
agacactgaggaagt

SEQ ID NO: 1715197 - DNA, 15 bp, Homo sapiens
gacactgaggaagta

SEQ ID NO: 1715198 - DNA, 15 bp, Homo sapiens
acactgaggaagtat

SEQ ID NO: 1715199 - DNA, 15 bp, Homo sapiens
cactgaggaagtatt

SEQ ID NO: 1715200 - DNA, 15 bp, Homo sapiens
actgaggaagtattt

SEQ ID NO: 1715201 - DNA, 15 bp, Homo sapiens
ctgaggaagtatttt

SEQ ID NO: 1715202 - DNA, 15 bp, Homo sapiens
tgaggaagtatttta

SEQ ID NO: 1715203 - DNA, 15 bp, Homo sapiens
gaggaagtattttaa

SEQ ID NO: 1715204 - DNA, 15 bp, Homo sapiens
aggaagtattttaac

SEQ ID NO: 1715205 - DNA, 15 bp, Homo sapiens
ggaagtattttaaca

SEQ ID NO: 1715206 - DNA, 15 bp, Homo sapiens
gaagtattttaacat

SEQ ID NO: 1715207 - DNA, 15 bp, Homo sapiens
aagtattttaacata

SEQ ID NO: 1715208 - DNA, 15 bp, Homo sapiens
agtattttaacatat

SEQ ID NO: 1715209 - DNA, 15 bp, Homo sapiens
gtattttaacatata

SEQ ID NO: 1715210 - DNA, 15 bp, Homo sapiens
tattttaacatataa

SEQ ID NO: 1715211 - DNA, 15 bp, Homo sapiens
attttaacatataaa

SEQ ID NO: 1715212 - DNA, 15 bp, Homo sapiens
ttttaacatataaag

SEQ ID NO: 1715213 - DNA, 15 bp, Homo sapiens
tttaacatataaagc

SEQ ID NO: 1715214 - DNA, 15 bp, Homo sapiens
ttaacatataaagca

SEQ ID NO: 1715215 - DNA, 15 bp, Homo sapiens
taacatataaagcaa

SEQ ID NO: 1715216 - DNA, 15 bp, Homo sapiens
aacatataaagcaaa

SEQ ID NO: 1715217 - DNA, 15 bp, Homo sapiens
acatataaagcaaaa

SEQ ID NO: 1715218 - DNA, 15 bp, Homo sapiens
catataaagcaaaag

SEQ ID NO: 1715219 - DNA, 15 bp, Homo sapiens
atataaagcaaaagc

SEQ ID NO: 1715220 - DNA, 15 bp, Homo sapiens
tataaagcaaaagca

SEQ ID NO: 1715221 - DNA, 15 bp, Homo sapiens
ataaagcaaaagcaa

SEQ ID NO: 1715222 - DNA, 15 bp, Homo sapiens
taaagcaaaagcaac

SEQ ID NO: 1715223 - DNA, 15 bp, Homo sapiens
aaagcaaaagcaaca

SEQ ID NO: 1715224 - DNA, 15 bp, Homo sapiens
aagcaaaagcaacaa

SEQ ID NO: 1715225 - DNA, 15 bp, Homo sapiens
agcaaaagcaacaat

SEQ ID NO: 1715226 - DNA, 15 bp, Homo sapiens
gcaaaagcaacaata

SEQ ID NO: 1715227 - DNA, 15 bp, Homo sapiens
caaaagcaacaatag

SEQ ID NO: 1715228 - DNA, 15 bp, Homo sapiens
aaaagcaacaatagg

SEQ ID NO: 1715229 - DNA, 15 bp, Homo sapiens
aaagcaacaataggg

SEQ ID NO: 1715230 - DNA, 15 bp, Homo sapiens
aagcaacaatagggc

SEQ ID NO: 1715231 - DNA, 15 bp, Homo sapiens
agcaacaatagggca

SEQ ID NO: 1715232 - DNA, 15 bp, Homo sapiens
gcaacaatagggcag

SEQ ID NO: 1715233 - DNA, 15 bp, Homo sapiens
caacaatagggcagc

SEQ ID NO: 1715234 - DNA, 15 bp, Homo sapiens
aacaatagggcagct

SEQ ID NO: 1715235 - DNA, 15 bp, Homo sapiens
acaatagggcagctg

SEQ ID NO: 1715236 - DNA, 15 bp, Homo sapiens
caatagggcagctgg

SEQ ID NO: 1715237 - DNA, 15 bp, Homo sapiens
aatagggcagctgga

SEQ ID NO: 1715238 - DNA, 15 bp, Homo sapiens
atagggcagctggag

SEQ ID NO: 1715239 - DNA, 15 bp, Homo sapiens
tagggcagctggaga

SEQ ID NO: 1715240 - DNA, 15 bp, Homo sapiens
agggcagctggagaa

SEQ ID NO: 1715241 - DNA, 15 bp, Homo sapiens
gggcagctggagaaa

SEQ ID NO: 1715242 - DNA, 15 bp, Homo sapiens
ggcagctggagaaag

SEQ ID NO: 1715243 - DNA, 15 bp, Homo sapiens
gcagctggagaaagg

SEQ ID NO: 1715244 - DNA, 15 bp, Homo sapiens
cagctggagaaagga

SEQ ID NO: 1715245 - DNA, 15 bp, Homo sapiens
agctggagaaaggaa

SEQ ID NO: 1715246 - DNA, 15 bp, Homo sapiens
gctggagaaaggaaa

SEQ ID NO: 1715247 - DNA, 15 bp, Homo sapiens
ctggagaaaggaaat

SEQ ID NO: 1715248 - DNA, 15 bp, Homo sapiens
tggagaaaggaaatt

SEQ ID NO: 1715249 - DNA, 15 bp, Homo sapiens
ggagaaaggaaatta

SEQ ID NO: 1715250 - DNA, 15 bp, Homo sapiens
gagaaaggaaattag

SEQ ID NO: 1715251 - DNA, 15 bp, Homo sapiens
agaaaggaaattaga

SEQ ID NO: 1715252 - DNA, 15 bp, Homo sapiens
gaaaggaaattagaa

SEQ ID NO: 1715253 - DNA, 15 bp, Homo sapiens
aaaggaaattagaag

SEQ ID NO: 1715254 - DNA, 15 bp, Homo sapiens
aaggaaattagaagt

SEQ ID NO: 1715255 - DNA, 15 bp, Homo sapiens
aggaaattagaagta

SEQ ID NO: 1715256 - DNA, 15 bp, Homo sapiens
ggaaattagaagtaa

SEQ ID NO: 1715257 - DNA, 15 bp, Homo sapiens
gaaattagaagtaac

SEQ ID NO: 1715258 - DNA, 15 bp, Homo sapiens
aaattagaagtaaca

SEQ ID NO: 1715259 - DNA, 15 bp, Homo sapiens
aattagaagtaacag

SEQ ID NO: 1715260 - DNA, 15 bp, Homo sapiens
attagaagtaacaga

SEQ ID NO: 1715261 - DNA, 15 bp, Homo sapiens
ttagaagtaacagag

SEQ ID NO: 1715262 - DNA, 15 bp, Homo sapiens
tagaagtaacagagc

SEQ ID NO: 1715263 - DNA, 15 bp, Homo sapiens
agaagtaacagagcc

SEQ ID NO: 1715264 - DNA, 15 bp, Homo sapiens
gaagtaacagagcca

SEQ ID NO: 1715265 - DNA, 15 bp, Homo sapiens
aagtaacagagccaa

SEQ ID NO: 1715266 - DNA, 15 bp, Homo sapiens
agtaacagagccaat

SEQ ID NO: 1715267 - DNA, 15 bp, Homo sapiens
gtaacagagccaatg

SEQ ID NO: 1715268 - DNA, 15 bp, Homo sapiens
taacagagccaatgc

SEQ ID NO: 1715269 - DNA, 15 bp, Homo sapiens
aacagagccaatgca

SEQ ID NO: 1715270 - DNA, 15 bp, Homo sapiens
acagagccaatgcag

SEQ ID NO: 1715271 - DNA, 15 bp, Homo sapiens
cagagccaatgcagt

SEQ ID NO: 1715272 - DNA, 15 bp, Homo sapiens
gagccaatgcagtga

SEQ ID NO: 1715273 - DNA, 15 bp, Homo sapiens
agccaatgcagtgat

SEQ ID NO: 1715274 - DNA, 15 bp, Homo sapiens
gccaatgcagtgatt

SEQ ID NO: 1715275 - DNA, 15 bp, Homo sapiens
ccaatgcagtgatta

SEQ ID NO: 1715276 - DNA, 15 bp, Homo sapiens
caatgcagtgattag

SEQ ID NO: 1715277 - DNA, 15 bp, Homo sapiens
aatgcagtgattaga

SEQ ID NO: 1715278 - DNA, 15 bp, Homo sapiens
atgcagtgattagaa

SEQ ID NO: 1715279 - DNA, 15 bp, Homo sapiens
tgcagtgattagaaa

SEQ ID NO: 1715280 - DNA, 15 bp, Homo sapiens
gcagtgattagaaaa

SEQ ID NO: 1715281 - DNA, 15 bp, Homo sapiens
cagtgattagaaaaa

SEQ ID NO: 1715282 - DNA, 15 bp, Homo sapiens
agtgattagaaaaac

SEQ ID NO: 1715283 - DNA, 15 bp, Homo sapiens
gtgattagaaaaaca

SEQ ID NO: 1715284 - DNA, 15 bp, Homo sapiens
tgattagaaaaacac

SEQ ID NO: 1715285 - DNA, 15 bp, Homo sapiens
gattagaaaaacact

SEQ ID NO: 1715286 - DNA, 15 bp, Homo sapiens
attagaaaaacactc

SEQ ID NO: 1715287 - DNA, 15 bp, Homo sapiens
ttagaaaaacactca

SEQ ID NO: 1715288 - DNA, 15 bp, Homo sapiens
tagaaaaacactcaa

SEQ ID NO: 1715289 - DNA, 15 bp, Homo sapiens
agaaaaacactcaaa

SEQ ID NO: 1715290 - DNA, 15 bp, Homo sapiens
gaaaaacactcaaaa

SEQ ID NO: 1715291 - DNA, 15 bp, Homo sapiens
aaaaacactcaaaaa

SEQ ID NO: 1715292 - DNA, 15 bp, Homo sapiens
aaaacactcaaaaaa

SEQ ID NO: 1715293 - DNA, 15 bp, Homo sapiens
aaacactcaaaaaat

SEQ ID NO: 1715294 - DNA, 15 bp, Homo sapiens
aacactcaaaaaatg

SEQ ID NO: 1715295 - DNA, 15 bp, Homo sapiens
acactcaaaaaatgg

SEQ ID NO: 1715296 - DNA, 15 bp, Homo sapiens
cactcaaaaaatggt

SEQ ID NO: 1715297 - DNA, 15 bp, Homo sapiens
actcaaaaaatggta

SEQ ID NO: 1715298 - DNA, 15 bp, Homo sapiens
ctcaaaaaatggtaa

SEQ ID NO: 1715299 - DNA, 15 bp, Homo sapiens
tcaaaaaatggtaat

SEQ ID NO: 1715300 - DNA, 15 bp, Homo sapiens
caaaaaatggtaata

SEQ ID NO: 1715301 - DNA, 15 bp, Homo sapiens
aaaaaatggtaataa

SEQ ID NO: 1715302 - DNA, 15 bp, Homo sapiens
aaaaatggtaataaa

SEQ ID NO: 1715303 - DNA, 15 bp, Homo sapiens
aaaatggtaataaat

SEQ ID NO: 1715304 - DNA, 15 bp, Homo sapiens
aaatggtaataaatg

SEQ ID NO: 1715305 - DNA, 15 bp, Homo sapiens
aatggtaataaatgt

SEQ ID NO: 1715306 - DNA, 15 bp, Homo sapiens
atggtaataaatgtg

SEQ ID NO: 1715307 - DNA, 15 bp, Homo sapiens
tggtaataaatgtgt

SEQ ID NO: 1715308 - DNA, 15 bp, Homo sapiens
ggtaataaatgtgtt

SEQ ID NO: 1715309 - DNA, 15 bp, Homo sapiens
gtaataaatgtgttc

SEQ ID NO: 1715310 - DNA, 15 bp, Homo sapiens
taataaatgtgttca

SEQ ID NO: 1715311 - DNA, 15 bp, Homo sapiens
aataaatgtgttcaa

SEQ ID NO: 1715312 - DNA, 15 bp, Homo sapiens
ataaatgtgttcaat

SEQ ID NO: 1715313 - DNA, 15 bp, Homo sapiens
taaatgtgttcaatg

SEQ ID NO: 1715314 - DNA, 15 bp, Homo sapiens
aaatgtgttcaatgg

SEQ ID NO: 1715315 - DNA, 15 bp, Homo sapiens
aatgtgttcaatggg

SEQ ID NO: 1715316 - DNA, 15 bp, Homo sapiens
atgtgttcaatgggt

SEQ ID NO: 1715317 - DNA, 15 bp, Homo sapiens
tgtgttcaatgggtc

SEQ ID NO: 1715318 - DNA, 15 bp, Homo sapiens
gtgttcaatgggtca

SEQ ID NO: 1715319 - DNA, 15 bp, Homo sapiens
tgttcaatgggtcaa

SEQ ID NO: 1715320 - DNA, 15 bp, Homo sapiens
gttcaatgggtcaag

SEQ ID NO: 1715321 - DNA, 15 bp, Homo sapiens
ttcaatgggtcaaga

SEQ ID NO: 1715322 - DNA, 15 bp, Homo sapiens
tcaatgggtcaagag

SEQ ID NO: 1715323 - DNA, 15 bp, Homo sapiens
caatgggtcaagaga

SEQ ID NO: 1715324 - DNA, 15 bp, Homo sapiens
aatgggtcaagagaa

SEQ ID NO: 1715325 - DNA, 15 bp, Homo sapiens
atgggtcaagagaac

SEQ ID NO: 1715326 - DNA, 15 bp, Homo sapiens
tgggtcaagagaaca

SEQ ID NO: 1715327 - DNA, 15 bp, Homo sapiens
gggtcaagagaacat

SEQ ID NO: 1715328 - DNA, 15 bp, Homo sapiens
ggtcaagagaacata

SEQ ID NO: 1715329 - DNA, 15 bp, Homo sapiens
gtcaagagaacatat

SEQ ID NO: 1715330 - DNA, 15 bp, Homo sapiens
tcaagagaacatatt

SEQ ID NO: 1715331 - DNA, 15 bp, Homo sapiens
caagagaacatattt

SEQ ID NO: 1715332 - DNA, 15 bp, Homo sapiens
aagagaacatatttc

SEQ ID NO: 1715333 - DNA, 15 bp, Homo sapiens
agagaacatatttcc

SEQ ID NO: 1715334 - DNA, 15 bp, Homo sapiens
gagaacatatttcca

SEQ ID NO: 1715335 - DNA, 15 bp, Homo sapiens
agaacatatttccat

SEQ ID NO: 1715336 - DNA, 15 bp, Homo sapiens
gaacatatttccatc

SEQ ID NO: 1715337 - DNA, 15 bp, Homo sapiens
aacatatttccatct

SEQ ID NO: 1715338 - DNA, 15 bp, Homo sapiens
acatatttccatcta

SEQ ID NO: 1715339 - DNA, 15 bp, Homo sapiens
catatttccatctat

SEQ ID NO: 1715340 - DNA, 15 bp, Homo sapiens
atatttccatctatt

SEQ ID NO: 1715341 - DNA, 15 bp, Homo sapiens
tatttccatctattt

SEQ ID NO: 1715342 - DNA, 15 bp, Homo sapiens
atttccatctattta

SEQ ID NO: 1715343 - DNA, 15 bp, Homo sapiens
tttccatctatttaa

SEQ ID NO: 1715344 - DNA, 15 bp, Homo sapiens
ttccatctatttaaa

SEQ ID NO: 1715345 - DNA, 15 bp, Homo sapiens
tccatctatttaaat

SEQ ID NO: 1715346 - DNA, 15 bp, Homo sapiens
ccatctatttaaata

SEQ ID NO: 1715347 - DNA, 15 bp, Homo sapiens
catctatttaaataa

SEQ ID NO: 1715348 - DNA, 15 bp, Homo sapiens
atctatttaaataaa

SEQ ID NO: 1715349 - DNA, 15 bp, Homo sapiens
tctatttaaataaaa

SEQ ID NO: 1715350 - DNA, 15 bp, Homo sapiens
ctatttaaataaaaa

SEQ ID NO: 1715351 - DNA, 15 bp, Homo sapiens
tatttaaataaaaac

SEQ ID NO: 1715352 - DNA, 15 bp, Homo sapiens
atttaaataaaaaca

SEQ ID NO: 1715353 - DNA, 15 bp, Homo sapiens
tttaaataaaaacag

SEQ ID NO: 1715354 - DNA, 15 bp, Homo sapiens
ttaaataaaaacagg

SEQ ID NO: 1715355 - DNA, 15 bp, Homo sapiens
taaataaaaacagga

SEQ ID NO: 1715356 - DNA, 15 bp, Homo sapiens
aaataaaaacaggaa

SEQ ID NO: 1715357 - DNA, 15 bp, Homo sapiens
aataaaaacaggaat

SEQ ID NO: 1715358 - DNA, 15 bp, Homo sapiens
ataaaaacaggaatc

SEQ ID NO: 1715359 - DNA, 15 bp, Homo sapiens
taaaaacaggaatca

SEQ ID NO: 1715360 - DNA, 15 bp, Homo sapiens
aaaaacaggaatcaa

SEQ ID NO: 1715361 - DNA, 15 bp, Homo sapiens
aaaacaggaatcaat

SEQ ID NO: 1715362 - DNA, 15 bp, Homo sapiens
aaacaggaatcaata

SEQ ID NO: 1715363 - DNA, 15 bp, Homo sapiens
aacaggaatcaataa

SEQ ID NO: 1715364 - DNA, 15 bp, Homo sapiens
acaggaatcaataaa

SEQ ID NO: 1715365 - DNA, 15 bp, Homo sapiens
caggaatcaataaaa

SEQ ID NO: 1715366 - DNA, 15 bp, Homo sapiens
aggaatcaataaaag

SEQ ID NO: 1715367 - DNA, 15 bp, Homo sapiens
ggaatcaataaaagt

SEQ ID NO: 1715368 - DNA, 15 bp, Homo sapiens
gaatcaataaaagtg

SEQ ID NO: 1715369 - DNA, 15 bp, Homo sapiens
aatcaataaaagtga

SEQ ID NO: 1715370 - DNA, 15 bp, Homo sapiens
atcaataaaagtgaa

SEQ ID NO: 1715371 - DNA, 15 bp, Homo sapiens
tcaataaaagtgaac

SEQ ID NO: 1715372 - DNA, 15 bp, Homo sapiens
caataaaagtgaaca

SEQ ID NO: 1715373 - DNA, 15 bp, Homo sapiens
aataaaagtgaacat

SEQ ID NO: 1715374 - DNA, 15 bp, Homo sapiens
ataaaagtgaacata

SEQ ID NO: 1715375 - DNA, 15 bp, Homo sapiens
taaaagtgaacatac

SEQ ID NO: 1715376 - DNA, 15 bp, Homo sapiens
aaaagtgaacataca

SEQ ID NO: 1715377 - DNA, 15 bp, Homo sapiens
aaagtgaacatacaa

SEQ ID NO: 1715378 - DNA, 15 bp, Homo sapiens
aagtgaacatacaaa

SEQ ID NO: 1715379 - DNA, 15 bp, Homo sapiens
agtgaacatacaaaa

SEQ ID NO: 1715380 - DNA, 15 bp, Homo sapiens
gtgaacatacaaaaa

SEQ ID NO: 1715381 - DNA, 15 bp, Homo sapiens
tgaacatacaaaaaa

SEQ ID NO: 1715382 - DNA, 15 bp, Homo sapiens
gaacatacaaaaaag

SEQ ID NO: 1715383 - DNA, 15 bp, Homo sapiens
aacatacaaaaaaga

SEQ ID NO: 1715384 - DNA, 15 bp, Homo sapiens
acatacaaaaaagag

SEQ ID NO: 1715385 - DNA, 15 bp, Homo sapiens
catacaaaaaagagc

SEQ ID NO: 1715386 - DNA, 15 bp, Homo sapiens
atacaaaaaagagct

SEQ ID NO: 1715387 - DNA, 15 bp, Homo sapiens
tacaaaaaagagctc

SEQ ID NO: 1715388 - DNA, 15 bp, Homo sapiens
acaaaaaagagctct

SEQ ID NO: 1715389 - DNA, 15 bp, Homo sapiens
caaaaaagagctctt

SEQ ID NO: 1715390 - DNA, 15 bp, Homo sapiens
aaaaaagagctcttg

SEQ ID NO: 1715391 - DNA, 15 bp, Homo sapiens
aaaaagagctcttgt

SEQ ID NO: 1715392 - DNA, 15 bp, Homo sapiens
aaaagagctcttgtc

SEQ ID NO: 1715393 - DNA, 15 bp, Homo sapiens
aaagagctcttgtca

SEQ ID NO: 1715394 - DNA, 15 bp, Homo sapiens
aagagctcttgtcac

SEQ ID NO: 1715395 - DNA, 15 bp, Homo sapiens
agagctcttgtcaca

SEQ ID NO: 1715396 - DNA, 15 bp, Homo sapiens
gagctcttgtcacag

SEQ ID NO: 1715397 - DNA, 15 bp, Homo sapiens
agctcttgtcacaga

SEQ ID NO: 1715398 - DNA, 15 bp, Homo sapiens
gctcttgtcacagaa

SEQ ID NO: 1715399 - DNA, 15 bp, Homo sapiens
ctcttgtcacagaaa

SEQ ID NO: 1715400 - DNA, 15 bp, Homo sapiens
tcttgtcacagaaat

SEQ ID NO: 1715401 - DNA, 15 bp, Homo sapiens
cttgtcacagaaatg

SEQ ID NO: 1715402 - DNA, 15 bp, Homo sapiens
ttgtcacagaaatga

SEQ ID NO: 1715403 - DNA, 15 bp, Homo sapiens
tgtcacagaaatgaa

SEQ ID NO: 1715404 - DNA, 15 bp, Homo sapiens
gtcacagaaatgaaa

SEQ ID NO: 1715405 - DNA, 15 bp, Homo sapiens
tcacagaaatgaaaa

SEQ ID NO: 1715406 - DNA, 15 bp, Homo sapiens
cacagaaatgaaaac

SEQ ID NO: 1715407 - DNA, 15 bp, Homo sapiens
acagaaatgaaaacc

SEQ ID NO: 1715408 - DNA, 15 bp, Homo sapiens
cagaaatgaaaacct

SEQ ID NO: 1715409 - DNA, 15 bp, Homo sapiens
agaaatgaaaacctt

SEQ ID NO: 1715410 - DNA, 15 bp, Homo sapiens
gaaatgaaaaccttg

SEQ ID NO: 1715411 - DNA, 15 bp, Homo sapiens
aaatgaaaaccttgg

SEQ ID NO: 1715412 - DNA, 15 bp, Homo sapiens
aatgaaaaccttggg

SEQ ID NO: 1715413 - DNA, 15 bp, Homo sapiens
atgaaaaccttggga

SEQ ID NO: 1715414 - DNA, 15 bp, Homo sapiens
tgaaaaccttgggag

SEQ ID NO: 1715415 - DNA, 15 bp, Homo sapiens
gaaaaccttgggagc

SEQ ID NO: 1715416 - DNA, 15 bp, Homo sapiens
aaaaccttgggagca

SEQ ID NO: 1715417 - DNA, 15 bp, Homo sapiens
aaaccttgggagcag

SEQ ID NO: 1715418 - DNA, 15 bp, Homo sapiens
aaccttgggagcagg

SEQ ID NO: 1715419 - DNA, 15 bp, Homo sapiens
accttgggagcagga

SEQ ID NO: 1715420 - DNA, 15 bp, Homo sapiens
ccttgggagcaggac

SEQ ID NO: 1715421 - DNA, 15 bp, Homo sapiens
cttgggagcaggact

SEQ ID NO: 1715422 - DNA, 15 bp, Homo sapiens
ttgggagcaggactg

SEQ ID NO: 1715423 - DNA, 15 bp, Homo sapiens
tgggagcaggactgc

SEQ ID NO: 1715424 - DNA, 15 bp, Homo sapiens
gggagcaggactgca

SEQ ID NO: 1715425 - DNA, 15 bp, Homo sapiens
ggagcaggactgcac

SEQ ID NO: 1715426 - DNA, 15 bp, Homo sapiens
gagcaggactgcacc

SEQ ID NO: 1715427 - DNA, 15 bp, Homo sapiens
agcaggactgcaccc

SEQ ID NO: 1715428 - DNA, 15 bp, Homo sapiens
gcaggactgcaccca

SEQ ID NO: 1715429 - DNA, 15 bp, Homo sapiens
caggactgcacccac

SEQ ID NO: 1715430 - DNA, 15 bp, Homo sapiens
aggactgcacccacg

SEQ ID NO: 1715431 - DNA, 15 bp, Homo sapiens
ggactgcacccacgg

SEQ ID NO: 1715432 - DNA, 15 bp, Homo sapiens
gactgcacccacggt

SEQ ID NO: 1715433 - DNA, 15 bp, Homo sapiens
actgcacccacggtt

SEQ ID NO: 1715434 - DNA, 15 bp, Homo sapiens
ctgcacccacggttc

SEQ ID NO: 1715435 - DNA, 15 bp, Homo sapiens
tgcacccacggttcc

SEQ ID NO: 1715436 - DNA, 15 bp, Homo sapiens
gcacccacggttccc

SEQ ID NO: 1715437 - DNA, 15 bp, Homo sapiens
cacccacggttccca

SEQ ID NO: 1715438 - DNA, 15 bp, Homo sapiens
acccacggttcccac

SEQ ID NO: 1715439 - DNA, 15 bp, Homo sapiens
cccacggttcccacc

SEQ ID NO: 1715440 - DNA, 15 bp, Homo sapiens
ccacggttcccacca

SEQ ID NO: 1715441 - DNA, 15 bp, Homo sapiens
cacggttcccaccaa

SEQ ID NO: 1715442 - DNA, 15 bp, Homo sapiens
acggttcccaccaac

SEQ ID NO: 1715443 - DNA, 15 bp, Homo sapiens
cggttcccaccaacc

SEQ ID NO: 1715444 - DNA, 15 bp, Homo sapiens
ggttcccaccaacct

SEQ ID NO: 1715445 - DNA, 15 bp, Homo sapiens
gttcccaccaaccta

SEQ ID NO: 1715446 - DNA, 15 bp, Homo sapiens
ttcccaccaacctat

SEQ ID NO: 1715447 - DNA, 15 bp, Homo sapiens
tcccaccaacctatc

SEQ ID NO: 1715448 - DNA, 15 bp, Homo sapiens
cccaccaacctatcc

SEQ ID NO: 1715449 - DNA, 15 bp, Homo sapiens
ccaccaacctatcct

SEQ ID NO: 1715450 - DNA, 15 bp, Homo sapiens
caccaacctatcctg

SEQ ID NO: 1715451 - DNA, 15 bp, Homo sapiens
accaacctatcctgc

SEQ ID NO: 1715452 - DNA, 15 bp, Homo sapiens
ccaacctatcctgcc

SEQ ID NO: 1715453 - DNA, 15 bp, Homo sapiens
caacctatcctgcca

SEQ ID NO: 1715454 - DNA, 15 bp, Homo sapiens
aacctatcctgccat

SEQ ID NO: 1715455 - DNA, 15 bp, Homo sapiens
acctatcctgccatc

SEQ ID NO: 1715456 - DNA, 15 bp, Homo sapiens
cctatcctgccatca

SEQ ID NO: 1715457 - DNA, 15 bp, Homo sapiens
ctatcctgccatcat

SEQ ID NO: 1715458 - DNA, 15 bp, Homo sapiens
tatcctgccatcatg

SEQ ID NO: 1715459 - DNA, 15 bp, Homo sapiens
atcctgccatcatgt

SEQ ID NO: 1715460 - DNA, 15 bp, Homo sapiens
tcctgccatcatgtt

SEQ ID NO: 1715461 - DNA, 15 bp, Homo sapiens
cctgccatcatgttt

SEQ ID NO: 1715462 - DNA, 15 bp, Homo sapiens
ctgccatcatgtttt

SEQ ID NO: 1715463 - DNA, 15 bp, Homo sapiens
tgccatcatgttttc

SEQ ID NO: 1715464 - DNA, 15 bp, Homo sapiens
gccatcatgttttct

SEQ ID NO: 1715465 - DNA, 15 bp, Homo sapiens
ccatcatgttttctc

SEQ ID NO: 1715466 - DNA, 15 bp, Homo sapiens
catcatgttttctcc

SEQ ID NO: 1715467 - DNA, 15 bp, Homo sapiens
atcatgttttctccc

SEQ ID NO: 1715468 - DNA, 15 bp, Homo sapiens
tcatgttttctccct

SEQ ID NO: 1715469 - DNA, 15 bp, Homo sapiens
catgttttctcccta

SEQ ID NO: 1715470 - DNA, 15 bp, Homo sapiens
atgttttctccctac

SEQ ID NO: 1715471 - DNA, 15 bp, Homo sapiens
tgttttctccctact

SEQ ID NO: 1715472 - DNA, 15 bp, Homo sapiens
gttttctccctactc

SEQ ID NO: 1715473 - DNA, 15 bp, Homo sapiens
ttttctccctactcc

SEQ ID NO: 1715474 - DNA, 15 bp, Homo sapiens
tttctccctactcca

SEQ ID NO: 1715475 - DNA, 15 bp, Homo sapiens
ttctccctactccag

SEQ ID NO: 1715476 - DNA, 15 bp, Homo sapiens
tctccctactccagc

SEQ ID NO: 1715477 - DNA, 15 bp, Homo sapiens
ctccctactccagct

SEQ ID NO: 1715478 - DNA, 15 bp, Homo sapiens
tccctactccagctt

SEQ ID NO: 1715479 - DNA, 15 bp, Homo sapiens
ccctactccagcttc

SEQ ID NO: 1715480 - DNA, 15 bp, Homo sapiens
cctactccagcttcc

SEQ ID NO: 1715481 - DNA, 15 bp, Homo sapiens
ctactccagcttcct

SEQ ID NO: 1715482 - DNA, 15 bp, Homo sapiens
tactccagcttcctc

SEQ ID NO: 1715483 - DNA, 15 bp, Homo sapiens
actccagcttcctcc

SEQ ID NO: 1715484 - DNA, 15 bp, Homo sapiens
ctccagcttcctccc

SEQ ID NO: 1715485 - DNA, 15 bp, Homo sapiens
tccagcttcctccca

SEQ ID NO: 1715486 - DNA, 15 bp, Homo sapiens
ccagcttcctcccaa

SEQ ID NO: 1715487 - DNA, 15 bp, Homo sapiens
cagcttcctcccaag

SEQ ID NO: 1715488 - DNA, 15 bp, Homo sapiens
agcttcctcccaagc

SEQ ID NO: 1715489 - DNA, 15 bp, Homo sapiens
gcttcctcccaagct

SEQ ID NO: 1715490 - DNA, 15 bp, Homo sapiens
cttcctcccaagctc

SEQ ID NO: 1715491 - DNA, 15 bp, Homo sapiens
ttcctcccaagctca

SEQ ID NO: 1715492 - DNA, 15 bp, Homo sapiens
tcctcccaagctcac

SEQ ID NO: 1715493 - DNA, 15 bp, Homo sapiens
cctcccaagctcact

SEQ ID NO: 1715494 - DNA, 15 bp, Homo sapiens
ctcccaagctcactc

SEQ ID NO: 1715495 - DNA, 15 bp, Homo sapiens
tcccaagctcactct

SEQ ID NO: 1715496 - DNA, 15 bp, Homo sapiens
cccaagctcactcta

SEQ ID NO: 1715497 - DNA, 15 bp, Homo sapiens
ccaagctcactctac

SEQ ID NO: 1715498 - DNA, 15 bp, Homo sapiens
caagctcactctacg

SEQ ID NO: 1715499 - DNA, 15 bp, Homo sapiens
aagctcactctacgt

SEQ ID NO: 1715500 - DNA, 15 bp, Homo sapiens
agctcactctacgta

SEQ ID NO: 1715501 - DNA, 15 bp, Homo sapiens
gctcactctacgtag

SEQ ID NO: 1715502 - DNA, 15 bp, Homo sapiens
ctcactctacgtaga

SEQ ID NO: 1715503 - DNA, 15 bp, Homo sapiens
tcactctacgtagat

SEQ ID NO: 1715504 - DNA, 15 bp, Homo sapiens
cactctacgtagatg

SEQ ID NO: 1715505 - DNA, 15 bp, Homo sapiens
actctacgtagatgg

SEQ ID NO: 1715506 - DNA, 15 bp, Homo sapiens
ctctacgtagatggt

SEQ ID NO: 1715507 - DNA, 15 bp, Homo sapiens
tctacgtagatggtt

SEQ ID NO: 1715508 - DNA, 15 bp, Homo sapiens
ctacgtagatggttt

SEQ ID NO: 1715509 - DNA, 15 bp, Homo sapiens
tacgtagatggtttt

SEQ ID NO: 1715510 - DNA, 15 bp, Homo sapiens
acgtagatggttttt

SEQ ID NO: 1715511 - DNA, 15 bp, Homo sapiens
cgtagatggtttttc

SEQ ID NO: 1715512 - DNA, 15 bp, Homo sapiens
gtagatggtttttct

SEQ ID NO: 1715513 - DNA, 15 bp, Homo sapiens
tagatggtttttctt

SEQ ID NO: 1715514 - DNA, 15 bp, Homo sapiens
agatggtttttcttc

SEQ ID NO: 1715515 - DNA, 15 bp, Homo sapiens
gatggtttttcttcc

SEQ ID NO: 1715516 - DNA, 15 bp, Homo sapiens
atggtttttcttccc

SEQ ID NO: 1715517 - DNA, 15 bp, Homo sapiens
tggtttttcttccct

SEQ ID NO: 1715518 - DNA, 15 bp, Homo sapiens
ggtttttcttccctt

SEQ ID NO: 1715519 - DNA, 15 bp, Homo sapiens
gtttttcttccctta

SEQ ID NO: 1715520 - DNA, 15 bp, Homo sapiens
tttttcttcccttag

SEQ ID NO: 1715521 - DNA, 15 bp, Homo sapiens
ttttcttcccttagc

SEQ ID NO: 1715522 - DNA, 15 bp, Homo sapiens
tttcttcccttagcc

SEQ ID NO: 1715523 - DNA, 15 bp, Homo sapiens
ttcttcccttagcca

SEQ ID NO: 1715524 - DNA, 15 bp, Homo sapiens
tcttcccttagccaa

SEQ ID NO: 1715525 - DNA, 15 bp, Homo sapiens
cttcccttagccaac

SEQ ID NO: 1715526 - DNA, 15 bp, Homo sapiens
ttcccttagccaaca

SEQ ID NO: 1715527 - DNA, 15 bp, Homo sapiens
tcccttagccaacaa

SEQ ID NO: 1715528 - DNA, 15 bp, Homo sapiens
cccttagccaacaaa

SEQ ID NO: 1715529 - DNA, 15 bp, Homo sapiens
ccttagccaacaaac

SEQ ID NO: 1715530 - DNA, 15 bp, Homo sapiens
cttagccaacaaacg

SEQ ID NO: 1715531 - DNA, 15 bp, Homo sapiens
ttagccaacaaacga

SEQ ID NO: 1715532 - DNA, 15 bp, Homo sapiens
tagccaacaaacgaa

SEQ ID NO: 1715533 - DNA, 15 bp, Homo sapiens
agccaacaaacgaaa

SEQ ID NO: 1715534 - DNA, 15 bp, Homo sapiens
gccaacaaacgaaat

SEQ ID NO: 1715535 - DNA, 15 bp, Homo sapiens
ccaacaaacgaaatt

SEQ ID NO: 1715536 - DNA, 15 bp, Homo sapiens
caacaaacgaaattc

SEQ ID NO: 1715537 - DNA, 15 bp, Homo sapiens
aacaaacgaaattct

SEQ ID NO: 1715538 - DNA, 15 bp, Homo sapiens
acaaacgaaattctg

SEQ ID NO: 1715539 - DNA, 15 bp, Homo sapiens
caaacgaaattctgc

SEQ ID NO: 1715540 - DNA, 15 bp, Homo sapiens
aaacgaaattctgcc

SEQ ID NO: 1715541 - DNA, 15 bp, Homo sapiens
aacgaaattctgcct

SEQ ID NO: 1715542 - DNA, 15 bp, Homo sapiens
acgaaattctgccta

SEQ ID NO: 1715543 - DNA, 15 bp, Homo sapiens
cgaaattctgcctat

SEQ ID NO: 1715544 - DNA, 15 bp, Homo sapiens
gaaattctgcctata

SEQ ID NO: 1715545 - DNA, 15 bp, Homo sapiens
aaattctgcctataa

SEQ ID NO: 1715546 - DNA, 15 bp, Homo sapiens
aattctgcctataaa

SEQ ID NO: 1715547 - DNA, 15 bp, Homo sapiens
attctgcctataaat

SEQ ID NO: 1715548 - DNA, 15 bp, Homo sapiens
ttctgcctataaatt

SEQ ID NO: 1715549 - DNA, 15 bp, Homo sapiens
tctgcctataaatta

SEQ ID NO: 1715550 - DNA, 15 bp, Homo sapiens
ctgcctataaattaa

SEQ ID NO: 1715551 - DNA, 15 bp, Homo sapiens
tgcctataaattaag

SEQ ID NO: 1715552 - DNA, 15 bp, Homo sapiens
gcctataaattaagc

SEQ ID NO: 1715553 - DNA, 15 bp, Homo sapiens
cctataaattaagcc

SEQ ID NO: 1715554 - DNA, 15 bp, Homo sapiens
ctataaattaagcca

SEQ ID NO: 1715555 - DNA, 15 bp, Homo sapiens
tataaattaagccag

SEQ ID NO: 1715556 - DNA, 15 bp, Homo sapiens
ataaattaagccagg

SEQ ID NO: 1715557 - DNA, 15 bp, Homo sapiens
taaattaagccagga

SEQ ID NO: 1715558 - DNA, 15 bp, Homo sapiens
aaattaagccaggac

SEQ ID NO: 1715559 - DNA, 15 bp, Homo sapiens
aattaagccaggaca

SEQ ID NO: 1715560 - DNA, 15 bp, Homo sapiens
attaagccaggacac

SEQ ID NO: 1715561 - DNA, 15 bp, Homo sapiens
ttaagccaggacact

SEQ ID NO: 1715562 - DNA, 15 bp, Homo sapiens
taagccaggacacta

SEQ ID NO: 1715563 - DNA, 15 bp, Homo sapiens
aagccaggacactag

SEQ ID NO: 1715564 - DNA, 15 bp, Homo sapiens
agccaggacactagg

SEQ ID NO: 1715565 - DNA, 15 bp, Homo sapiens
gccaggacactagga

SEQ ID NO: 1715566 - DNA, 15 bp, Homo sapiens
ccaggacactaggat

SEQ ID NO: 1715567 - DNA, 15 bp, Homo sapiens
caggacactaggata

SEQ ID NO: 1715568 - DNA, 15 bp, Homo sapiens
aggacactaggatat

SEQ ID NO: 1715569 - DNA, 15 bp, Homo sapiens
ggacactaggatatg

SEQ ID NO: 1715570 - DNA, 15 bp, Homo sapiens
gacactaggatatgg

SEQ ID NO: 1715571 - DNA, 15 bp, Homo sapiens
acactaggatatgga

SEQ ID NO: 1715572 - DNA, 15 bp, Homo sapiens
cactaggatatggag

SEQ ID NO: 1715573 - DNA, 15 bp, Homo sapiens
actaggatatggagg

SEQ ID NO: 1715574 - DNA, 15 bp, Homo sapiens
ctaggatatggaggt

SEQ ID NO: 1715575 - DNA, 15 bp, Homo sapiens
taggatatggaggta

SEQ ID NO: 1715576 - DNA, 15 bp, Homo sapiens
aggatatggaggtat

SEQ ID NO: 1715577 - DNA, 15 bp, Homo sapiens
ggatatggaggtata

SEQ ID NO: 1715578 - DNA, 15 bp, Homo sapiens
gatatggaggtatat

SEQ ID NO: 1715579 - DNA, 15 bp, Homo sapiens
atatggaggtatatt

SEQ ID NO: 1715580 - DNA, 15 bp, Homo sapiens
tatggaggtatatta

SEQ ID NO: 1715581 - DNA, 15 bp, Homo sapiens
atggaggtatattat

SEQ ID NO: 1715582 - DNA, 15 bp, Homo sapiens
tggaggtatattatt

SEQ ID NO: 1715583 - DNA, 15 bp, Homo sapiens
ggaggtatattattt

SEQ ID NO: 1715584 - DNA, 15 bp, Homo sapiens
gaggtatattattta

SEQ ID NO: 1715585 - DNA, 15 bp, Homo sapiens
aggtatattatttat

SEQ ID NO: 1715586 - DNA, 15 bp, Homo sapiens
ggtatattatttatg

SEQ ID NO: 1715587 - DNA, 15 bp, Homo sapiens
gtatattatttatgt

SEQ ID NO: 1715588 - DNA, 15 bp, Homo sapiens
tatattatttatgtc

SEQ ID NO: 1715589 - DNA, 15 bp, Homo sapiens
atattatttatgtct

SEQ ID NO: 1715590 - DNA, 15 bp, Homo sapiens
tattatttatgtctc

SEQ ID NO: 1715591 - DNA, 15 bp, Homo sapiens
attatttatgtctct

SEQ ID NO: 1715592 - DNA, 15 bp, Homo sapiens
ttatttatgtctctt

SEQ ID NO: 1715593 - DNA, 15 bp, Homo sapiens
tatttatgtctcttt

SEQ ID NO: 1715594 - DNA, 15 bp, Homo sapiens
atttatgtctctttt

SEQ ID NO: 1715595 - DNA, 15 bp, Homo sapiens
tttatgtctcttttc

SEQ ID NO: 1715596 - DNA, 15 bp, Homo sapiens
ttatgtctcttttcc

SEQ ID NO: 1715597 - DNA, 15 bp, Homo sapiens
tatgtctcttttcca

SEQ ID NO: 1715598 - DNA, 15 bp, Homo sapiens
atgtctcttttccag

SEQ ID NO: 1715599 - DNA, 15 bp, Homo sapiens
tgtctcttttccagt

SEQ ID NO: 1715600 - DNA, 15 bp, Homo sapiens
gtctcttttccagtg

SEQ ID NO: 1715601 - DNA, 15 bp, Homo sapiens
tctcttttccagtgt

SEQ ID NO: 1715602 - DNA, 15 bp, Homo sapiens
ctcttttccagtgtt

SEQ ID NO: 1715603 - DNA, 15 bp, Homo sapiens
tcttttccagtgttt

SEQ ID NO: 1715604 - DNA, 15 bp, Homo sapiens
cttttccagtgtttc

SEQ ID NO: 1715605 - DNA, 15 bp, Homo sapiens
ttttccagtgtttcc

SEQ ID NO: 1715606 - DNA, 15 bp, Homo sapiens
tttccagtgtttcct

SEQ ID NO: 1715607 - DNA, 15 bp, Homo sapiens
ttccagtgtttcctg

SEQ ID NO: 1715608 - DNA, 15 bp, Homo sapiens
tccagtgtttcctgg

SEQ ID NO: 1715609 - DNA, 15 bp, Homo sapiens
ccagtgtttcctggt

SEQ ID NO: 1715610 - DNA, 15 bp, Homo sapiens
cagtgtttcctggta

SEQ ID NO: 1715611 - DNA, 15 bp, Homo sapiens
agtgtttcctggtat

SEQ ID NO: 1715612 - DNA, 15 bp, Homo sapiens
gtgtttcctggtata

SEQ ID NO: 1715613 - DNA, 15 bp, Homo sapiens
tgtttcctggtatat

SEQ ID NO: 1715614 - DNA, 15 bp, Homo sapiens
gtttcctggtatata

SEQ ID NO: 1715615 - DNA, 15 bp, Homo sapiens
tttcctggtatataa

SEQ ID NO: 1715616 - DNA, 15 bp, Homo sapiens
ttcctggtatataac

SEQ ID NO: 1715617 - DNA, 15 bp, Homo sapiens
tcctggtatataaca

SEQ ID NO: 1715618 - DNA, 15 bp, Homo sapiens
cctggtatataacag

SEQ ID NO: 1715619 - DNA, 15 bp, Homo sapiens
ctggtatataacagc

SEQ ID NO: 1715620 - DNA, 15 bp, Homo sapiens
tggtatataacagca

SEQ ID NO: 1715621 - DNA, 15 bp, Homo sapiens
ggtatataacagcaa

SEQ ID NO: 1715622 - DNA, 15 bp, Homo sapiens
gtatataacagcaaa

SEQ ID NO: 1715623 - DNA, 15 bp, Homo sapiens
tatataacagcaaag

SEQ ID NO: 1715624 - DNA, 15 bp, Homo sapiens
atataacagcaaaga

SEQ ID NO: 1715625 - DNA, 15 bp, Homo sapiens
tataacagcaaagat

SEQ ID NO: 1715626 - DNA, 15 bp, Homo sapiens
ataacagcaaagatg

SEQ ID NO: 1715627 - DNA, 15 bp, Homo sapiens
taacagcaaagatgg

SEQ ID NO: 1715628 - DNA, 15 bp, Homo sapiens
aacagcaaagatggt

SEQ ID NO: 1715629 - DNA, 15 bp, Homo sapiens
acagcaaagatggtt

SEQ ID NO: 1715630 - DNA, 15 bp, Homo sapiens
cagcaaagatggttt

SEQ ID NO: 1715631 - DNA, 15 bp, Homo sapiens
agcaaagatggttta

SEQ ID NO: 1715632 - DNA, 15 bp, Homo sapiens
gcaaagatggtttag

SEQ ID NO: 1715633 - DNA, 15 bp, Homo sapiens
caaagatggtttagc

SEQ ID NO: 1715634 - DNA, 15 bp, Homo sapiens
aaagatggtttagca

SEQ ID NO: 1715635 - DNA, 15 bp, Homo sapiens
aagatggtttagcaa

SEQ ID NO: 1715636 - DNA, 15 bp, Homo sapiens
agatggtttagcaag

SEQ ID NO: 1715637 - DNA, 15 bp, Homo sapiens
gatggtttagcaagt

SEQ ID NO: 1715638 - DNA, 15 bp, Homo sapiens
atggtttagcaagtt

SEQ ID NO: 1715639 - DNA, 15 bp, Homo sapiens
tggtttagcaagtta

SEQ ID NO: 1715640 - DNA, 15 bp, Homo sapiens
ggtttagcaagttaa

SEQ ID NO: 1715641 - DNA, 15 bp, Homo sapiens
gtttagcaagttaac

SEQ ID NO: 1715642 - DNA, 15 bp, Homo sapiens
tttagcaagttaact

SEQ ID NO: 1715643 - DNA, 15 bp, Homo sapiens
ttagcaagttaactg

SEQ ID NO: 1715644 - DNA, 15 bp, Homo sapiens
tagcaagttaactgg

SEQ ID NO: 1715645 - DNA, 15 bp, Homo sapiens
agcaagttaactggt

SEQ ID NO: 1715646 - DNA, 15 bp, Homo sapiens
gcaagttaactggtc

SEQ ID NO: 1715647 - DNA, 15 bp, Homo sapiens
caagttaactggtca

SEQ ID NO: 1715648 - DNA, 15 bp, Homo sapiens
aagttaactggtcag

SEQ ID NO: 1715649 - DNA, 15 bp, Homo sapiens
agttaactggtcagg

SEQ ID NO: 1715650 - DNA, 15 bp, Homo sapiens
gttaactggtcaggc

SEQ ID NO: 1715651 - DNA, 15 bp, Homo sapiens
ttaactggtcaggcc

SEQ ID NO: 1715652 - DNA, 15 bp, Homo sapiens
taactggtcaggcca

SEQ ID NO: 1715653 - DNA, 15 bp, Homo sapiens
aactggtcaggccag

SEQ ID NO: 1715654 - DNA, 15 bp, Homo sapiens
actggtcaggccaga

SEQ ID NO: 1715655 - DNA, 15 bp, Homo sapiens
ctggtcaggccagaa

SEQ ID NO: 1715656 - DNA, 15 bp, Homo sapiens
tggtcaggccagaat

SEQ ID NO: 1715657 - DNA, 15 bp, Homo sapiens
ggtcaggccagaatt

SEQ ID NO: 1715658 - DNA, 15 bp, Homo sapiens
gtcaggccagaattc

SEQ ID NO: 1715659 - DNA, 15 bp, Homo sapiens
tcaggccagaattct

SEQ ID NO: 1715660 - DNA, 15 bp, Homo sapiens
caggccagaattctt

SEQ ID NO: 1715661 - DNA, 15 bp, Homo sapiens
aggccagaattcttg

SEQ ID NO: 1715662 - DNA, 15 bp, Homo sapiens
ggccagaattcttga

SEQ ID NO: 1715663 - DNA, 15 bp, Homo sapiens
gccagaattcttgat

SEQ ID NO: 1715664 - DNA, 15 bp, Homo sapiens
ccagaattcttgatg

SEQ ID NO: 1715665 - DNA, 15 bp, Homo sapiens
cagaattcttgatgg

SEQ ID NO: 1715666 - DNA, 15 bp, Homo sapiens
agaattcttgatggt

SEQ ID NO: 1715667 - DNA, 15 bp, Homo sapiens
gaattcttgatggtt

SEQ ID NO: 1715668 - DNA, 15 bp, Homo sapiens
aattcttgatggttg

SEQ ID NO: 1715669 - DNA, 15 bp, Homo sapiens
attcttgatggttgc

SEQ ID NO: 1715670 - DNA, 15 bp, Homo sapiens
ttcttgatggttgcc

SEQ ID NO: 1715671 - DNA, 15 bp, Homo sapiens
tcttgatggttgcca

SEQ ID NO: 1715672 - DNA, 15 bp, Homo sapiens
cttgatggttgccaa

SEQ ID NO: 1715673 - DNA, 15 bp, Homo sapiens
ttgatggttgccaag

SEQ ID NO: 1715674 - DNA, 15 bp, Homo sapiens
tgatggttgccaagt

SEQ ID NO: 1715675 - DNA, 15 bp, Homo sapiens
gatggttgccaagtc

SEQ ID NO: 1715676 - DNA, 15 bp, Homo sapiens
atggttgccaagtca

SEQ ID NO: 1715677 - DNA, 15 bp, Homo sapiens
tggttgccaagtcag

SEQ ID NO: 1715678 - DNA, 15 bp, Homo sapiens
ggttgccaagtcagg

SEQ ID NO: 1715679 - DNA, 15 bp, Homo sapiens
gttgccaagtcagga

SEQ ID NO: 1715680 - DNA, 15 bp, Homo sapiens
ttgccaagtcaggag

SEQ ID NO: 1715681 - DNA, 15 bp, Homo sapiens
tgccaagtcaggagg

SEQ ID NO: 1715682 - DNA, 15 bp, Homo sapiens
gccaagtcaggaggc

SEQ ID NO: 1715683 - DNA, 15 bp, Homo sapiens
ccaagtcaggaggca

SEQ ID NO: 1715684 - DNA, 15 bp, Homo sapiens
caagtcaggaggcag

SEQ ID NO: 1715685 - DNA, 15 bp, Homo sapiens
aagtcaggaggcaga

SEQ ID NO: 1715686 - DNA, 15 bp, Homo sapiens
agtcaggaggcagac

SEQ ID NO: 1715687 - DNA, 15 bp, Homo sapiens
gtcaggaggcagacg

SEQ ID NO: 1715688 - DNA, 15 bp, Homo sapiens
tcaggaggcagacgg

SEQ ID NO: 1715689 - DNA, 15 bp, Homo sapiens
caggaggcagacggt

SEQ ID NO: 1715690 - DNA, 15 bp, Homo sapiens
aggaggcagacggtg

SEQ ID NO: 1715691 - DNA, 15 bp, Homo sapiens
ggaggcagacggtga

SEQ ID NO: 1715692 - DNA, 15 bp, Homo sapiens
gaggcagacggtgaa

SEQ ID NO: 1715693 - DNA, 15 bp, Homo sapiens
aggcagacggtgaag

SEQ ID NO: 1715694 - DNA, 15 bp, Homo sapiens
ggcagacggtgaagg

SEQ ID NO: 1715695 - DNA, 15 bp, Homo sapiens
gcagacggtgaagga

SEQ ID NO: 1715696 - DNA, 15 bp, Homo sapiens
cagacggtgaaggaa

SEQ ID NO: 1715697 - DNA, 15 bp, Homo sapiens
agacggtgaaggaat

SEQ ID NO: 1715698 - DNA, 15 bp, Homo sapiens
gacggtgaaggaatg

SEQ ID NO: 1715699 - DNA, 15 bp, Homo sapiens
acggtgaaggaatgc

SEQ ID NO: 1715700 - DNA, 15 bp, Homo sapiens
cggtgaaggaatgca

SEQ ID NO: 1715701 - DNA, 15 bp, Homo sapiens
ggtgaaggaatgcat

SEQ ID NO: 1715702 - DNA, 15 bp, Homo sapiens
gtgaaggaatgcatt

SEQ ID NO: 1715703 - DNA, 15 bp, Homo sapiens
tgaaggaatgcattc

SEQ ID NO: 1715704 - DNA, 15 bp, Homo sapiens
gaaggaatgcattct

SEQ ID NO: 1715705 - DNA, 15 bp, Homo sapiens
aaggaatgcattctg

SEQ ID NO: 1715706 - DNA, 15 bp, Homo sapiens
aggaatgcattctgg

SEQ ID NO: 1715707 - DNA, 15 bp, Homo sapiens
ggaatgcattctggt

SEQ ID NO: 1715708 - DNA, 15 bp, Homo sapiens
gaatgcattctggtt

SEQ ID NO: 1715709 - DNA, 15 bp, Homo sapiens
aatgcattctggtta

SEQ ID NO: 1715710 - DNA, 15 bp, Homo sapiens
atgcattctggttat

SEQ ID NO: 1715711 - DNA, 15 bp, Homo sapiens
tgcattctggttatg

SEQ ID NO: 1715712 - DNA, 15 bp, Homo sapiens
gcattctggttatga

SEQ ID NO: 1715713 - DNA, 15 bp, Homo sapiens
cattctggttatgaa

SEQ ID NO: 1715714 - DNA, 15 bp, Homo sapiens
attctggttatgaaa

SEQ ID NO: 1715715 - DNA, 15 bp, Homo sapiens
ttctggttatgaaaa

SEQ ID NO: 1715716 - DNA, 15 bp, Homo sapiens
tctggttatgaaaaa

SEQ ID NO: 1715717 - DNA, 15 bp, Homo sapiens
ctggttatgaaaaat

SEQ ID NO: 1715718 - DNA, 15 bp, Homo sapiens
tggttatgaaaaatg

SEQ ID NO: 1715719 - DNA, 15 bp, Homo sapiens
ggttatgaaaaatgg

SEQ ID NO: 1715720 - DNA, 15 bp, Homo sapiens
gttatgaaaaatggc

SEQ ID NO: 1715721 - DNA, 15 bp, Homo sapiens
ttatgaaaaatggca

SEQ ID NO: 1715722 - DNA, 15 bp, Homo sapiens
tatgaaaaatggcaa

SEQ ID NO: 1715723 - DNA, 15 bp, Homo sapiens
atgaaaaatggcaat

SEQ ID NO: 1715724 - DNA, 15 bp, Homo sapiens
tgaaaaatggcaatg

SEQ ID NO: 1715725 - DNA, 15 bp, Homo sapiens
gaaaaatggcaatga

SEQ ID NO: 1715726 - DNA, 15 bp, Homo sapiens
aaaaatggcaatgac

SEQ ID NO: 1715727 - DNA, 15 bp, Homo sapiens
aaaatggcaatgacg

SEQ ID NO: 1715728 - DNA, 15 bp, Homo sapiens
aaatggcaatgacga

SEQ ID NO: 1715729 - DNA, 15 bp, Homo sapiens
aatggcaatgacgag

SEQ ID NO: 1715730 - DNA, 15 bp, Homo sapiens
atggcaatgacgagt

SEQ ID NO: 1715731 - DNA, 15 bp, Homo sapiens
tggcaatgacgagta

SEQ ID NO: 1715732 - DNA, 15 bp, Homo sapiens
ggcaatgacgagtaa

SEQ ID NO: 1715733 - DNA, 15 bp, Homo sapiens
gcaatgacgagtaag

SEQ ID NO: 1715734 - DNA, 15 bp, Homo sapiens
caatgacgagtaagt

SEQ ID NO: 1715735 - DNA, 15 bp, Homo sapiens
aatgacgagtaagtt

SEQ ID NO: 1715736 - DNA, 15 bp, Homo sapiens
atgacgagtaagttg

SEQ ID NO: 1715737 - DNA, 15 bp, Homo sapiens
tgacgagtaagttgc

SEQ ID NO: 1715738 - DNA, 15 bp, Homo sapiens
gacgagtaagttgca

SEQ ID NO: 1715739 - DNA, 15 bp, Homo sapiens
acgagtaagttgcag

SEQ ID NO: 1715740 - DNA, 15 bp, Homo sapiens
cgagtaagttgcaga

SEQ ID NO: 1715741 - DNA, 15 bp, Homo sapiens
gagtaagttgcagag

SEQ ID NO: 1715742 - DNA, 15 bp, Homo sapiens
agtaagttgcagagt

SEQ ID NO: 1715743 - DNA, 15 bp, Homo sapiens
gtaagttgcagagta

SEQ ID NO: 1715744 - DNA, 15 bp, Homo sapiens
taagttgcagagtaa

SEQ ID NO: 1715745 - DNA, 15 bp, Homo sapiens
aagttgcagagtaaa

SEQ ID NO: 1715746 - DNA, 15 bp, Homo sapiens
agttgcagagtaaag

SEQ ID NO: 1715747 - DNA, 15 bp, Homo sapiens
gttgcagagtaaaga

SEQ ID NO: 1715748 - DNA, 15 bp, Homo sapiens
ttgcagagtaaagat

SEQ ID NO: 1715749 - DNA, 15 bp, Homo sapiens
tgcagagtaaagatg

SEQ ID NO: 1715750 - DNA, 15 bp, Homo sapiens
gcagagtaaagatgc

SEQ ID NO: 1715751 - DNA, 15 bp, Homo sapiens
cagagtaaagatgcc

SEQ ID NO: 1715752 - DNA, 15 bp, Homo sapiens
agagtaaagatgcct

SEQ ID NO: 1715753 - DNA, 15 bp, Homo sapiens
gagtaaagatgcctt

SEQ ID NO: 1715754 - DNA, 15 bp, Homo sapiens
agtaaagatgccttt

SEQ ID NO: 1715755 - DNA, 15 bp, Homo sapiens
gtaaagatgcctttt

SEQ ID NO: 1715756 - DNA, 15 bp, Homo sapiens
taaagatgcctttta

SEQ ID NO: 1715757 - DNA, 15 bp, Homo sapiens
aaagatgccttttag

SEQ ID NO: 1715758 - DNA, 15 bp, Homo sapiens
aagatgccttttaga

SEQ ID NO: 1715759 - DNA, 15 bp, Homo sapiens
agatgccttttagag

SEQ ID NO: 1715760 - DNA, 15 bp, Homo sapiens
gatgccttttagagg

SEQ ID NO: 1715761 - DNA, 15 bp, Homo sapiens
atgccttttagagga

SEQ ID NO: 1715762 - DNA, 15 bp, Homo sapiens
tgccttttagaggaa

SEQ ID NO: 1715763 - DNA, 15 bp, Homo sapiens
gccttttagaggaaa

SEQ ID NO: 1715764 - DNA, 15 bp, Homo sapiens
ccttttagaggaaat

SEQ ID NO: 1715765 - DNA, 15 bp, Homo sapiens
cttttagaggaaatt

SEQ ID NO: 1715766 - DNA, 15 bp, Homo sapiens
ttttagaggaaatta

SEQ ID NO: 1715767 - DNA, 15 bp, Homo sapiens
tttagaggaaattaa

SEQ ID NO: 1715768 - DNA, 15 bp, Homo sapiens
ttagaggaaattaag

SEQ ID NO: 1715769 - DNA, 15 bp, Homo sapiens
tagaggaaattaagg

SEQ ID NO: 1715770 - DNA, 15 bp, Homo sapiens
agaggaaattaaggt

SEQ ID NO: 1715771 - DNA, 15 bp, Homo sapiens
gaggaaattaaggtt

SEQ ID NO: 1715772 - DNA, 15 bp, Homo sapiens
aggaaattaaggttt

SEQ ID NO: 1715773 - DNA, 15 bp, Homo sapiens
ggaaattaaggtttg

SEQ ID NO: 1715774 - DNA, 15 bp, Homo sapiens
gaaattaaggtttgc

SEQ ID NO: 1715775 - DNA, 15 bp, Homo sapiens
aaattaaggtttgca

SEQ ID NO: 1715776 - DNA, 15 bp, Homo sapiens
aattaaggtttgcaa

SEQ ID NO: 1715777 - DNA, 15 bp, Homo sapiens
attaaggtttgcaat

SEQ ID NO: 1715778 - DNA, 15 bp, Homo sapiens
ttaaggtttgcaata

SEQ ID NO: 1715779 - DNA, 15 bp, Homo sapiens
taaggtttgcaataa

SEQ ID NO: 1715780 - DNA, 15 bp, Homo sapiens
aaggtttgcaataaa

SEQ ID NO: 1715781 - DNA, 15 bp, Homo sapiens
aggtttgcaataaat

SEQ ID NO: 1715782 - DNA, 15 bp, Homo sapiens
ggtttgcaataaatg

SEQ ID NO: 1715783 - DNA, 15 bp, Homo sapiens
gtttgcaataaatgc

SEQ ID NO: 1715784 - DNA, 15 bp, Homo sapiens
tttgcaataaatgca

SEQ ID NO: 1715785 - DNA, 15 bp, Homo sapiens
ttgcaataaatgcat

SEQ ID NO: 1715786 - DNA, 15 bp, Homo sapiens
tgcaataaatgcatg

SEQ ID NO: 1715787 - DNA, 15 bp, Homo sapiens
gcaataaatgcatgc

SEQ ID NO: 1715788 - DNA, 15 bp, Homo sapiens
caataaatgcatgct

SEQ ID NO: 1715789 - DNA, 15 bp, Homo sapiens
aataaatgcatgcta

SEQ ID NO: 1715790 - DNA, 15 bp, Homo sapiens
ataaatgcatgctaa

SEQ ID NO: 1715791 - DNA, 15 bp, Homo sapiens
taaatgcatgctaat

SEQ ID NO: 1715792 - DNA, 15 bp, Homo sapiens
aaatgcatgctaatc

SEQ ID NO: 1715793 - DNA, 15 bp, Homo sapiens
aatgcatgctaatcc

SEQ ID NO: 1715794 - DNA, 15 bp, Homo sapiens
atgcatgctaatcct

SEQ ID NO: 1715795 - DNA, 15 bp, Homo sapiens
tgcatgctaatcctc

SEQ ID NO: 1715796 - DNA, 15 bp, Homo sapiens
gcatgctaatcctct

SEQ ID NO: 1715797 - DNA, 15 bp, Homo sapiens
catgctaatcctcta

SEQ ID NO: 1715798 - DNA, 15 bp, Homo sapiens
atgctaatcctctaa

SEQ ID NO: 1715799 - DNA, 15 bp, Homo sapiens
tgctaatcctctaat

SEQ ID NO: 1715800 - DNA, 15 bp, Homo sapiens
gctaatcctctaatt

SEQ ID NO: 1715801 - DNA, 15 bp, Homo sapiens
ctaatcctctaattt

SEQ ID NO: 1715802 - DNA, 15 bp, Homo sapiens
taatcctctaatttt

SEQ ID NO: 1715803 - DNA, 15 bp, Homo sapiens
aatcctctaattttg

SEQ ID NO: 1715804 - DNA, 15 bp, Homo sapiens
atcctctaattttga

SEQ ID NO: 1715805 - DNA, 15 bp, Homo sapiens
tcctctaattttgat

SEQ ID NO: 1715806 - DNA, 15 bp, Homo sapiens
cctctaattttgatg

SEQ ID NO: 1715807 - DNA, 15 bp, Homo sapiens
ctctaattttgatga

SEQ ID NO: 1715808 - DNA, 15 bp, Homo sapiens
tctaattttgatgaa

SEQ ID NO: 1715809 - DNA, 15 bp, Homo sapiens
ctaattttgatgaaa

SEQ ID NO: 1715810 - DNA, 15 bp, Homo sapiens
taattttgatgaaag

SEQ ID NO: 1715811 - DNA, 15 bp, Homo sapiens
aattttgatgaaaga

SEQ ID NO: 1715812 - DNA, 15 bp, Homo sapiens
attttgatgaaagac

SEQ ID NO: 1715813 - DNA, 15 bp, Homo sapiens
ttttgatgaaagact

SEQ ID NO: 1715814 - DNA, 15 bp, Homo sapiens
tttgatgaaagacta

SEQ ID NO: 1715815 - DNA, 15 bp, Homo sapiens
ttgatgaaagactaa

SEQ ID NO: 1715816 - DNA, 15 bp, Homo sapiens
tgatgaaagactaaa

SEQ ID NO: 1715817 - DNA, 15 bp, Homo sapiens
gatgaaagactaaag

SEQ ID NO: 1715818 - DNA, 15 bp, Homo sapiens
atgaaagactaaagc

SEQ ID NO: 1715819 - DNA, 15 bp, Homo sapiens
tgaaagactaaagct

SEQ ID NO: 1715820 - DNA, 15 bp, Homo sapiens
gaaagactaaagctc

SEQ ID NO: 1715821 - DNA, 15 bp, Homo sapiens
aaagactaaagctct

SEQ ID NO: 1715822 - DNA, 15 bp, Homo sapiens
aagactaaagctctt

SEQ ID NO: 1715823 - DNA, 15 bp, Homo sapiens
agactaaagctcttg

SEQ ID NO: 1715824 - DNA, 15 bp, Homo sapiens
gactaaagctcttgt

SEQ ID NO: 1715825 - DNA, 15 bp, Homo sapiens
actaaagctcttgtt

SEQ ID NO: 1715826 - DNA, 15 bp, Homo sapiens
ctaaagctcttgttt

SEQ ID NO: 1715827 - DNA, 15 bp, Homo sapiens
taaagctcttgtttt

SEQ ID NO: 1715828 - DNA, 15 bp, Homo sapiens
aaagctcttgttttg

SEQ ID NO: 1715829 - DNA, 15 bp, Homo sapiens
aagctcttgttttgg

SEQ ID NO: 1715830 - DNA, 15 bp, Homo sapiens
agctcttgttttggt

SEQ ID NO: 1715831 - DNA, 15 bp, Homo sapiens
gctcttgttttggtt

SEQ ID NO: 1715832 - DNA, 15 bp, Homo sapiens
ctcttgttttggttt

SEQ ID NO: 1715833 - DNA, 15 bp, Homo sapiens
tcttgttttggtttg

SEQ ID NO: 1715834 - DNA, 15 bp, Homo sapiens
cttgttttggtttgc

SEQ ID NO: 1715835 - DNA, 15 bp, Homo sapiens
ttgttttggtttgca

SEQ ID NO: 1715836 - DNA, 15 bp, Homo sapiens
tgttttggtttgcat

SEQ ID NO: 1715837 - DNA, 15 bp, Homo sapiens
gttttggtttgcatt

SEQ ID NO: 1715838 - DNA, 15 bp, Homo sapiens
ttttggtttgcattt

SEQ ID NO: 1715839 - DNA, 15 bp, Homo sapiens
tttggtttgcatttc

SEQ ID NO: 1715840 - DNA, 15 bp, Homo sapiens
ttggtttgcatttca

SEQ ID NO: 1715841 - DNA, 15 bp, Homo sapiens
tggtttgcatttcaa

SEQ ID NO: 1715842 - DNA, 15 bp, Homo sapiens
ggtttgcatttcaaa

SEQ ID NO: 1715843 - DNA, 15 bp, Homo sapiens
gtttgcatttcaaag

SEQ ID NO: 1715844 - DNA, 15 bp, Homo sapiens
tttgcatttcaaaga

SEQ ID NO: 1715845 - DNA, 15 bp, Homo sapiens
ttgcatttcaaagag

SEQ ID NO: 1715846 - DNA, 15 bp, Homo sapiens
tgcatttcaaagagc

SEQ ID NO: 1715847 - DNA, 15 bp, Homo sapiens
tttcaaagagcaaga

SEQ ID NO: 1715848 - DNA, 15 bp, Homo sapiens
ttcaaagagcaagag

SEQ ID NO: 1715849 - DNA, 15 bp, Homo sapiens
tcaaagagcaagagc

SEQ ID NO: 1715850 - DNA, 15 bp, Homo sapiens
caaagagcaagagca

SEQ ID NO: 1715851 - DNA, 15 bp, Homo sapiens
aaagagcaagagcat

SEQ ID NO: 1715852 - DNA, 15 bp, Homo sapiens
aagagcaagagcata

SEQ ID NO: 1715853 - DNA, 15 bp, Homo sapiens
agagcaagagcatag

SEQ ID NO: 1715854 - DNA, 15 bp, Homo sapiens
gagcaagagcatagg

SEQ ID NO: 1715855 - DNA, 15 bp, Homo sapiens
agcaagagcataggc

SEQ ID NO: 1715856 - DNA, 15 bp, Homo sapiens
gcaagagcataggct

SEQ ID NO: 1715857 - DNA, 15 bp, Homo sapiens
caagagcataggctc

SEQ ID NO: 1715858 - DNA, 15 bp, Homo sapiens
aagagcataggctct

SEQ ID NO: 1715859 - DNA, 15 bp, Homo sapiens
agagcataggctctt

SEQ ID NO: 1715860 - DNA, 15 bp, Homo sapiens
gagcataggctcttg

SEQ ID NO: 1715861 - DNA, 15 bp, Homo sapiens
agcataggctcttgt

SEQ ID NO: 1715862 - DNA, 15 bp, Homo sapiens
gcataggctcttgtg

SEQ ID NO: 1715863 - DNA, 15 bp, Homo sapiens
cataggctcttgtgc

SEQ ID NO: 1715864 - DNA, 15 bp, Homo sapiens
ataggctcttgtgct

SEQ ID NO: 1715865 - DNA, 15 bp, Homo sapiens
taggctcttgtgctg

SEQ ID NO: 1715866 - DNA, 15 bp, Homo sapiens
aggctcttgtgctgg

SEQ ID NO: 1715867 - DNA, 15 bp, Homo sapiens
ggctcttgtgctggg

SEQ ID NO: 1715868 - DNA, 15 bp, Homo sapiens
gctcttgtgctggga

SEQ ID NO: 1715869 - DNA, 15 bp, Homo sapiens
ctcttgtgctgggag

SEQ ID NO: 1715870 - DNA, 15 bp, Homo sapiens
tcttgtgctgggagg

SEQ ID NO: 1715871 - DNA, 15 bp, Homo sapiens
cttgtgctgggaggt

SEQ ID NO: 1715872 - DNA, 15 bp, Homo sapiens
ttgtgctgggaggtg

SEQ ID NO: 1715873 - DNA, 15 bp, Homo sapiens
tgtgctgggaggtgg

SEQ ID NO: 1715874 - DNA, 15 bp, Homo sapiens
gtgctgggaggtggc

SEQ ID NO: 1715875 - DNA, 15 bp, Homo sapiens
tgctgggaggtggcc

SEQ ID NO: 1715876 - DNA, 15 bp, Homo sapiens
gctgggaggtggcca

SEQ ID NO: 1715877 - DNA, 15 bp, Homo sapiens
ctgggaggtggccag

SEQ ID NO: 1715878 - DNA, 15 bp, Homo sapiens
tgggaggtggccagt

SEQ ID NO: 1715879 - DNA, 15 bp, Homo sapiens
gggaggtggccagtt

SEQ ID NO: 1715880 - DNA, 15 bp, Homo sapiens
ggaggtggccagttt

SEQ ID NO: 1715881 - DNA, 15 bp, Homo sapiens
gaggtggccagtttc

SEQ ID NO: 1715882 - DNA, 15 bp, Homo sapiens
aggtggccagtttcc

SEQ ID NO: 1715883 - DNA, 15 bp, Homo sapiens
ggtggccagtttcct

SEQ ID NO: 1715884 - DNA, 15 bp, Homo sapiens
gtggccagtttcctg

SEQ ID NO: 1715885 - DNA, 15 bp, Homo sapiens
tggccagtttcctgg

SEQ ID NO: 1715886 - DNA, 15 bp, Homo sapiens
ggccagtttcctgga

SEQ ID NO: 1715887 - DNA, 15 bp, Homo sapiens
gccagtttcctggaa

SEQ ID NO: 1715888 - DNA, 15 bp, Homo sapiens
ccagtttcctggaaa

SEQ ID NO: 1715889 - DNA, 15 bp, Homo sapiens
cagtttcctggaaag

SEQ ID NO: 1715890 - DNA, 15 bp, Homo sapiens
agtttcctggaaagg

SEQ ID NO: 1715891 - DNA, 15 bp, Homo sapiens
gtttcctggaaagga

SEQ ID NO: 1715892 - DNA, 15 bp, Homo sapiens
tttcctggaaaggaa

SEQ ID NO: 1715893 - DNA, 15 bp, Homo sapiens
ttcctggaaaggaat

SEQ ID NO: 1715894 - DNA, 15 bp, Homo sapiens
tcctggaaaggaatt

SEQ ID NO: 1715895 - DNA, 15 bp, Homo sapiens
cctggaaaggaattt

SEQ ID NO: 1715896 - DNA, 15 bp, Homo sapiens
ctggaaaggaattta

SEQ ID NO: 1715897 - DNA, 15 bp, Homo sapiens
tggaaaggaatttat

SEQ ID NO: 1715898 - DNA, 15 bp, Homo sapiens
ggaaaggaatttatg

SEQ ID NO: 1715899 - DNA, 15 bp, Homo sapiens
gaaaggaatttatgg

SEQ ID NO: 1715900 - DNA, 15 bp, Homo sapiens
aaaggaatttatgga

SEQ ID NO: 1715901 - DNA, 15 bp, Homo sapiens
aaggaatttatggag

SEQ ID NO: 1715902 - DNA, 15 bp, Homo sapiens
aggaatttatggagt

SEQ ID NO: 1715903 - DNA, 15 bp, Homo sapiens
ggaatttatggagtc

SEQ ID NO: 1715904 - DNA, 15 bp, Homo sapiens
gaatttatggagtct

SEQ ID NO: 1715905 - DNA, 15 bp, Homo sapiens
aatttatggagtctg

SEQ ID NO: 1715906 - DNA, 15 bp, Homo sapiens
atttatggagtctga

SEQ ID NO: 1715907 - DNA, 15 bp, Homo sapiens
tttatggagtctgaa

SEQ ID NO: 1715908 - DNA, 15 bp, Homo sapiens
ttatggagtctgaaa

SEQ ID NO: 1715909 - DNA, 15 bp, Homo sapiens
tatggagtctgaaag

SEQ ID NO: 1715910 - DNA, 15 bp, Homo sapiens
atggagtctgaaaga

SEQ ID NO: 1715911 - DNA, 15 bp, Homo sapiens
tggagtctgaaagag

SEQ ID NO: 1715912 - DNA, 15 bp, Homo sapiens
ggagtctgaaagagg

SEQ ID NO: 1715913 - DNA, 15 bp, Homo sapiens
gagtctgaaagagga

SEQ ID NO: 1715914 - DNA, 15 bp, Homo sapiens
agtctgaaagaggaa

SEQ ID NO: 1715915 - DNA, 15 bp, Homo sapiens
gtctgaaagaggaat

SEQ ID NO: 1715916 - DNA, 15 bp, Homo sapiens
tctgaaagaggaatt

SEQ ID NO: 1715917 - DNA, 15 bp, Homo sapiens
ctgaaagaggaatta

SEQ ID NO: 1715918 - DNA, 15 bp, Homo sapiens
tgaaagaggaattag

SEQ ID NO: 1715919 - DNA, 15 bp, Homo sapiens
gaaagaggaattagt

SEQ ID NO: 1715920 - DNA, 15 bp, Homo sapiens
aaagaggaattagta

SEQ ID NO: 1715921 - DNA, 15 bp, Homo sapiens
aagaggaattagtac

SEQ ID NO: 1715922 - DNA, 15 bp, Homo sapiens
agaggaattagtaca

SEQ ID NO: 1715923 - DNA, 15 bp, Homo sapiens
gaggaattagtacaa

SEQ ID NO: 1715924 - DNA, 15 bp, Homo sapiens
aggaattagtacaaa

SEQ ID NO: 1715925 - DNA, 15 bp, Homo sapiens
ggaattagtacaaat

SEQ ID NO: 1715926 - DNA, 15 bp, Homo sapiens
gaattagtacaaatt

SEQ ID NO: 1715927 - DNA, 15 bp, Homo sapiens
aattagtacaaatta

SEQ ID NO: 1715928 - DNA, 15 bp, Homo sapiens
attagtacaaattat

SEQ ID NO: 1715929 - DNA, 15 bp, Homo sapiens
ttagtacaaattata

SEQ ID NO: 1715930 - DNA, 15 bp, Homo sapiens
tagtacaaattatat

SEQ ID NO: 1715931 - DNA, 15 bp, Homo sapiens
agtacaaattatatt

SEQ ID NO: 1715932 - DNA, 15 bp, Homo sapiens
gtacaaattatattt

SEQ ID NO: 1715933 - DNA, 15 bp, Homo sapiens
tacaaattatatttt

SEQ ID NO: 1715934 - DNA, 15 bp, Homo sapiens
acaaattatattttc

SEQ ID NO: 1715935 - DNA, 15 bp, Homo sapiens
caaattatattttca

SEQ ID NO: 1715936 - DNA, 15 bp, Homo sapiens
aaattatattttcaa

SEQ ID NO: 1715937 - DNA, 15 bp, Homo sapiens
aattatattttcaaa

SEQ ID NO: 1715938 - DNA, 15 bp, Homo sapiens
tatattttcaaataa

SEQ ID NO: 1715939 - DNA, 15 bp, Homo sapiens
atattttcaaataag

SEQ ID NO: 1715940 - DNA, 15 bp, Homo sapiens
tattttcaaataaga

SEQ ID NO: 1715941 - DNA, 15 bp, Homo sapiens
attttcaaataagat

SEQ ID NO: 1715942 - DNA, 15 bp, Homo sapiens
ttttcaaataagata

SEQ ID NO: 1715943 - DNA, 15 bp, Homo sapiens
tttcaaataagatac

SEQ ID NO: 1715944 - DNA, 15 bp, Homo sapiens
ttcaaataagatact

SEQ ID NO: 1715945 - DNA, 15 bp, Homo sapiens
tcaaataagatactt

SEQ ID NO: 1715946 - DNA, 15 bp, Homo sapiens
caaataagatacttg

SEQ ID NO: 1715947 - DNA, 15 bp, Homo sapiens
aaataagatacttga

SEQ ID NO: 1715948 - DNA, 15 bp, Homo sapiens
aataagatacttgaa

SEQ ID NO: 1715949 - DNA, 15 bp, Homo sapiens
ataagatacttgaaa

SEQ ID NO: 1715950 - DNA, 15 bp, Homo sapiens
taagatacttgaaag

SEQ ID NO: 1715951 - DNA, 15 bp, Homo sapiens
aagatacttgaaagt

SEQ ID NO: 1715952 - DNA, 15 bp, Homo sapiens
agatacttgaaagtt

SEQ ID NO: 1715953 - DNA, 15 bp, Homo sapiens
gatacttgaaagtta

SEQ ID NO: 1715954 - DNA, 15 bp, Homo sapiens
atacttgaaagttat

SEQ ID NO: 1715955 - DNA, 15 bp, Homo sapiens
tacttgaaagttatt

SEQ ID NO: 1715956 - DNA, 15 bp, Homo sapiens
acttgaaagttattg

SEQ ID NO: 1715957 - DNA, 15 bp, Homo sapiens
cttgaaagttattga

SEQ ID NO: 1715958 - DNA, 15 bp, Homo sapiens
ttgaaagttattgat

SEQ ID NO: 1715959 - DNA, 15 bp, Homo sapiens
tgaaagttattgatg

SEQ ID NO: 1715960 - DNA, 15 bp, Homo sapiens
gaaagttattgatga

SEQ ID NO: 1715961 - DNA, 15 bp, Homo sapiens
aaagttattgatgac

SEQ ID NO: 1715962 - DNA, 15 bp, Homo sapiens
aagttattgatgaca

SEQ ID NO: 1715963 - DNA, 15 bp, Homo sapiens
agttattgatgacag

SEQ ID NO: 1715964 - DNA, 15 bp, Homo sapiens
gttattgatgacagg

SEQ ID NO: 1715965 - DNA, 15 bp, Homo sapiens
ttattgatgacaggg

SEQ ID NO: 1715966 - DNA, 15 bp, Homo sapiens
tattgatgacaggga

SEQ ID NO: 1715967 - DNA, 15 bp, Homo sapiens
attgatgacagggaa

SEQ ID NO: 1715968 - DNA, 15 bp, Homo sapiens
ttgatgacagggaaa

SEQ ID NO: 1715969 - DNA, 15 bp, Homo sapiens
tgatgacagggaaaa

SEQ ID NO: 1715970 - DNA, 15 bp, Homo sapiens
gatgacagggaaaag

SEQ ID NO: 1715971 - DNA, 15 bp, Homo sapiens
atgacagggaaaaga

SEQ ID NO: 1715972 - DNA, 15 bp, Homo sapiens
tgacagggaaaagat

SEQ ID NO: 1715973 - DNA, 15 bp, Homo sapiens
gacagggaaaagatt

SEQ ID NO: 1715974 - DNA, 15 bp, Homo sapiens
acagggaaaagattg

SEQ ID NO: 1715975 - DNA, 15 bp, Homo sapiens
cagggaaaagattgt

SEQ ID NO: 1715976 - DNA, 15 bp, Homo sapiens
agggaaaagattgtc

SEQ ID NO: 1715977 - DNA, 15 bp, Homo sapiens
gggaaaagattgtct

SEQ ID NO: 1715978 - DNA, 15 bp, Homo sapiens
ggaaaagattgtcta

SEQ ID NO: 1715979 - DNA, 15 bp, Homo sapiens
gaaaagattgtctaa

SEQ ID NO: 1715980 - DNA, 15 bp, Homo sapiens
aaaagattgtctaaa

SEQ ID NO: 1715981 - DNA, 15 bp, Homo sapiens
aaagattgtctaaag

SEQ ID NO: 1715982 - DNA, 15 bp, Homo sapiens
aagattgtctaaaga

SEQ ID NO: 1715983 - DNA, 15 bp, Homo sapiens
agattgtctaaagag

SEQ ID NO: 1715984 - DNA, 15 bp, Homo sapiens
gattgtctaaagagg

SEQ ID NO: 1715985 - DNA, 15 bp, Homo sapiens
attgtctaaagaggg

SEQ ID NO: 1715986 - DNA, 15 bp, Homo sapiens
ttgtctaaagagggc

SEQ ID NO: 1715987 - DNA, 15 bp, Homo sapiens
tgtctaaagagggct

SEQ ID NO: 1715988 - DNA, 15 bp, Homo sapiens
gtctaaagagggctt

SEQ ID NO: 1715989 - DNA, 15 bp, Homo sapiens
tctaaagagggcttg

SEQ ID NO: 1715990 - DNA, 15 bp, Homo sapiens
ctaaagagggcttga

SEQ ID NO: 1715991 - DNA, 15 bp, Homo sapiens
taaagagggcttgaa

SEQ ID NO: 1715992 - DNA, 15 bp, Homo sapiens
aaagagggcttgaaa

SEQ ID NO: 1715993 - DNA, 15 bp, Homo sapiens
aagagggcttgaaat

SEQ ID NO: 1715994 - DNA, 15 bp, Homo sapiens
agagggcttgaaatt

SEQ ID NO: 1715995 - DNA, 15 bp, Homo sapiens
gagggcttgaaattg

SEQ ID NO: 1715996 - DNA, 15 bp, Homo sapiens
agggcttgaaattgg

SEQ ID NO: 1715997 - DNA, 15 bp, Homo sapiens
gggcttgaaattggg

SEQ ID NO: 1715998 - DNA, 15 bp, Homo sapiens
ggcttgaaattgggg

SEQ ID NO: 1715999 - DNA, 15 bp, Homo sapiens
gcttgaaattgggga

SEQ ID NO: 1716000 - DNA, 15 bp, Homo sapiens
cttgaaattggggaa

SEQ ID NO: 1716001 - DNA, 15 bp, Homo sapiens
ttgaaattggggaaa

SEQ ID NO: 1716002 - DNA, 15 bp, Homo sapiens
tgaaattggggaaat

SEQ ID NO: 1716003 - DNA, 15 bp, Homo sapiens
gaaattggggaaata

SEQ ID NO: 1716004 - DNA, 15 bp, Homo sapiens
aaattggggaaataa

SEQ ID NO: 1716005 - DNA, 15 bp, Homo sapiens
aattggggaaataat

SEQ ID NO: 1716006 - DNA, 15 bp, Homo sapiens
attggggaaataatt

SEQ ID NO: 1716007 - DNA, 15 bp, Homo sapiens
ttggggaaataattg

SEQ ID NO: 1716008 - DNA, 15 bp, Homo sapiens
tggggaaataattga

SEQ ID NO: 1716009 - DNA, 15 bp, Homo sapiens
ggggaaataattgag

SEQ ID NO: 1716010 - DNA, 15 bp, Homo sapiens
gggaaataattgagg

SEQ ID NO: 1716011 - DNA, 15 bp, Homo sapiens
ggaaataattgaggc

SEQ ID NO: 1716012 - DNA, 15 bp, Homo sapiens
gaaataattgaggct

SEQ ID NO: 1716013 - DNA, 15 bp, Homo sapiens
aaataattgaggctc

SEQ ID NO: 1716014 - DNA, 15 bp, Homo sapiens
aataattgaggctca

SEQ ID NO: 1716015 - DNA, 15 bp, Homo sapiens
ataattgaggctcag

SEQ ID NO: 1716016 - DNA, 15 bp, Homo sapiens
taattgaggctcagt

SEQ ID NO: 1716017 - DNA, 15 bp, Homo sapiens
aattgaggctcagtg

SEQ ID NO: 1716018 - DNA, 15 bp, Homo sapiens
attgaggctcagtga

SEQ ID NO: 1716019 - DNA, 15 bp, Homo sapiens
ttgaggctcagtgac

SEQ ID NO: 1716020 - DNA, 15 bp, Homo sapiens
tgaggctcagtgaca

SEQ ID NO: 1716021 - DNA, 15 bp, Homo sapiens
gaggctcagtgacaa

SEQ ID NO: 1716022 - DNA, 15 bp, Homo sapiens
aggctcagtgacaaa

SEQ ID NO: 1716023 - DNA, 15 bp, Homo sapiens
ggctcagtgacaaag

SEQ ID NO: 1716024 - DNA, 15 bp, Homo sapiens
gctcagtgacaaagg

SEQ ID NO: 1716025 - DNA, 15 bp, Homo sapiens
ctcagtgacaaagga

SEQ ID NO: 1716026 - DNA, 15 bp, Homo sapiens
tcagtgacaaaggag

SEQ ID NO: 1716027 - DNA, 15 bp, Homo sapiens
cagtgacaaaggaga

SEQ ID NO: 1716028 - DNA, 15 bp, Homo sapiens
agtgacaaaggagaa

SEQ ID NO: 1716029 - DNA, 15 bp, Homo sapiens
gtgacaaaggagaag

SEQ ID NO: 1716030 - DNA, 15 bp, Homo sapiens
tgacaaaggagaaga

SEQ ID NO: 1716031 - DNA, 15 bp, Homo sapiens
gacaaaggagaagat

SEQ ID NO: 1716032 - DNA, 15 bp, Homo sapiens
acaaaggagaagatt

SEQ ID NO: 1716033 - DNA, 15 bp, Homo sapiens
caaaggagaagatta

SEQ ID NO: 1716034 - DNA, 15 bp, Homo sapiens
aaaggagaagattac

SEQ ID NO: 1716035 - DNA, 15 bp, Homo sapiens
aaggagaagattaca

SEQ ID NO: 1716036 - DNA, 15 bp, Homo sapiens
aggagaagattacaa

SEQ ID NO: 1716037 - DNA, 15 bp, Homo sapiens
ggagaagattacaac

SEQ ID NO: 1716038 - DNA, 15 bp, Homo sapiens
gagaagattacaact

SEQ ID NO: 1716039 - DNA, 15 bp, Homo sapiens
agaagattacaactt

SEQ ID NO: 1716040 - DNA, 15 bp, Homo sapiens
gaagattacaacttc

SEQ ID NO: 1716041 - DNA, 15 bp, Homo sapiens
aagattacaacttca

SEQ ID NO: 1716042 - DNA, 15 bp, Homo sapiens
agattacaacttcaa

SEQ ID NO: 1716043 - DNA, 15 bp, Homo sapiens
gattacaacttcaaa

SEQ ID NO: 1716044 - DNA, 15 bp, Homo sapiens
attacaacttcaaaa

SEQ ID NO: 1716045 - DNA, 15 bp, Homo sapiens
ttacaacttcaaaaa

SEQ ID NO: 1716046 - DNA, 15 bp, Homo sapiens
tacaacttcaaaaat

SEQ ID NO: 1716047 - DNA, 15 bp, Homo sapiens
acaacttcaaaaatg

SEQ ID NO: 1716048 - DNA, 15 bp, Homo sapiens
caacttcaaaaatga

SEQ ID NO: 1716049 - DNA, 15 bp, Homo sapiens
aacttcaaaaatgaa

SEQ ID NO: 1716050 - DNA, 15 bp, Homo sapiens
acttcaaaaatgaat

SEQ ID NO: 1716051 - DNA, 15 bp, Homo sapiens
cttcaaaaatgaata

SEQ ID NO: 1716052 - DNA, 15 bp, Homo sapiens
ttcaaaaatgaataa

SEQ ID NO: 1716053 - DNA, 15 bp, Homo sapiens
tcaaaaatgaataaa

SEQ ID NO: 1716054 - DNA, 15 bp, Homo sapiens
caaaaatgaataaat

SEQ ID NO: 1716055 - DNA, 15 bp, Homo sapiens
aaaaatgaataaata

SEQ ID NO: 1716056 - DNA, 15 bp, Homo sapiens
aaaatgaataaataa

SEQ ID NO: 1716057 - DNA, 15 bp, Homo sapiens
aaatgaataaataaa

SEQ ID NO: 1716058 - DNA, 15 bp, Homo sapiens
aatgaataaataaat

SEQ ID NO: 1716059 - DNA, 15 bp, Homo sapiens
atgaataaataaata

SEQ ID NO: 1716060 - DNA, 15 bp, Homo sapiens
tgaataaataaataa

SEQ ID NO: 1716061 - DNA, 15 bp, Homo sapiens
gaataaataaataac

SEQ ID NO: 1716062 - DNA, 15 bp, Homo sapiens
aataaataaataaca

SEQ ID NO: 1716063 - DNA, 15 bp, Homo sapiens
ataaataaataacat

SEQ ID NO: 1716064 - DNA, 15 bp, Homo sapiens
taaataaataacatt

SEQ ID NO: 1716065 - DNA, 15 bp, Homo sapiens
aaataaataacattg

SEQ ID NO: 1716066 - DNA, 15 bp, Homo sapiens
aataaataacattgc

SEQ ID NO: 1716067 - DNA, 15 bp, Homo sapiens
ataaataacattgca

SEQ ID NO: 1716068 - DNA, 15 bp, Homo sapiens
taaataacattgcat

SEQ ID NO: 1716069 - DNA, 15 bp, Homo sapiens
aaataacattgcatg

SEQ ID NO: 1716070 - DNA, 15 bp, Homo sapiens
aataacattgcatgt

SEQ ID NO: 1716071 - DNA, 15 bp, Homo sapiens
ataacattgcatgtt

SEQ ID NO: 1716072 - DNA, 15 bp, Homo sapiens
taacattgcatgttt

SEQ ID NO: 1716073 - DNA, 15 bp, Homo sapiens
aacattgcatgttta

SEQ ID NO: 1716074 - DNA, 15 bp, Homo sapiens
acattgcatgtttat

SEQ ID NO: 1716075 - DNA, 15 bp, Homo sapiens
cattgcatgtttatt

SEQ ID NO: 1716076 - DNA, 15 bp, Homo sapiens
attgcatgtttattt

SEQ ID NO: 1716077 - DNA, 15 bp, Homo sapiens
ttgcatgtttatttt

SEQ ID NO: 1716078 - DNA, 15 bp, Homo sapiens
tgcatgtttatttta

SEQ ID NO: 1716079 - DNA, 15 bp, Homo sapiens
gcatgtttattttac

SEQ ID NO: 1716080 - DNA, 15 bp, Homo sapiens
catgtttattttaca

SEQ ID NO: 1716081 - DNA, 15 bp, Homo sapiens
atgtttattttacaa

SEQ ID NO: 1716082 - DNA, 15 bp, Homo sapiens
tgtttattttacaac

SEQ ID NO: 1716083 - DNA, 15 bp, Homo sapiens
gtttattttacaaca

SEQ ID NO: 1716084 - DNA, 15 bp, Homo sapiens
tttattttacaacac

SEQ ID NO: 1716085 - DNA, 15 bp, Homo sapiens
ttattttacaacacc

SEQ ID NO: 1716086 - DNA, 15 bp, Homo sapiens
tattttacaacacca

SEQ ID NO: 1716087 - DNA, 15 bp, Homo sapiens
attttacaacaccag

SEQ ID NO: 1716088 - DNA, 15 bp, Homo sapiens
ttttacaacaccagg

SEQ ID NO: 1716089 - DNA, 15 bp, Homo sapiens
tttacaacaccaggg

SEQ ID NO: 1716090 - DNA, 15 bp, Homo sapiens
ttacaacaccagggg

SEQ ID NO: 1716091 - DNA, 15 bp, Homo sapiens
tacaacaccaggggg

SEQ ID NO: 1716092 - DNA, 15 bp, Homo sapiens
acaacaccagggggc

SEQ ID NO: 1716093 - DNA, 15 bp, Homo sapiens
caacaccagggggcg

SEQ ID NO: 1716094 - DNA, 15 bp, Homo sapiens
aacaccagggggcga

SEQ ID NO: 1716095 - DNA, 15 bp, Homo sapiens
acaccagggggcgat

SEQ ID NO: 1716096 - DNA, 15 bp, Homo sapiens
caccagggggcgatg

SEQ ID NO: 1716097 - DNA, 15 bp, Homo sapiens
accagggggcgatga

SEQ ID NO: 1716098 - DNA, 15 bp, Homo sapiens
ccagggggcgatgat

SEQ ID NO: 1716099 - DNA, 15 bp, Homo sapiens
cagggggcgatgatg

SEQ ID NO: 1716100 - DNA, 15 bp, Homo sapiens
agggggcgatgatgt

SEQ ID NO: 1716101 - DNA, 15 bp, Homo sapiens
gggggcgatgatgtc

SEQ ID NO: 1716102 - DNA, 15 bp, Homo sapiens
ggggcgatgatgtct

SEQ ID NO: 1716103 - DNA, 15 bp, Homo sapiens
gggcgatgatgtcta

SEQ ID NO: 1716104 - DNA, 15 bp, Homo sapiens
ggcgatgatgtctac

SEQ ID NO: 1716105 - DNA, 15 bp, Homo sapiens
gcgatgatgtctacg

SEQ ID NO: 1716106 - DNA, 15 bp, Homo sapiens
cgatgatgtctacgt

SEQ ID NO: 1716107 - DNA, 15 bp, Homo sapiens
gatgatgtctacgtt

SEQ ID NO: 1716108 - DNA, 15 bp, Homo sapiens
atgatgtctacgttt

SEQ ID NO: 1716109 - DNA, 15 bp, Homo sapiens
tgatgtctacgtttt

SEQ ID NO: 1716110 - DNA, 15 bp, Homo sapiens
gatgtctacgttttt

SEQ ID NO: 1716111 - DNA, 15 bp, Homo sapiens
atgtctacgttttta

SEQ ID NO: 1716112 - DNA, 15 bp, Homo sapiens
tgtctacgtttttat

SEQ ID NO: 1716113 - DNA, 15 bp, Homo sapiens
gtctacgtttttatt

SEQ ID NO: 1716114 - DNA, 15 bp, Homo sapiens
tctacgtttttattc

SEQ ID NO: 1716115 - DNA, 15 bp, Homo sapiens
ctacgtttttattct

SEQ ID NO: 1716116 - DNA, 15 bp, Homo sapiens
tacgtttttattctg

SEQ ID NO: 1716117 - DNA, 15 bp, Homo sapiens
acgtttttattctgt

SEQ ID NO: 1716118 - DNA, 15 bp, Homo sapiens
cgtttttattctgta

SEQ ID NO: 1716119 - DNA, 15 bp, Homo sapiens
gtttttattctgtat

SEQ ID NO: 1716120 - DNA, 15 bp, Homo sapiens
tttttattctgtatc

SEQ ID NO: 1716121 - DNA, 15 bp, Homo sapiens
ttttattctgtatcc

SEQ ID NO: 1716122 - DNA, 15 bp, Homo sapiens
tttattctgtatcct

SEQ ID NO: 1716123 - DNA, 15 bp, Homo sapiens
ttattctgtatcctt

SEQ ID NO: 1716124 - DNA, 15 bp, Homo sapiens
tattctgtatccttt

SEQ ID NO: 1716125 - DNA, 15 bp, Homo sapiens
attctgtatccttta

SEQ ID NO: 1716126 - DNA, 15 bp, Homo sapiens
ttctgtatcctttat

SEQ ID NO: 1716127 - DNA, 15 bp, Homo sapiens
tctgtatcctttatc

SEQ ID NO: 1716128 - DNA, 15 bp, Homo sapiens
ctgtatcctttatcg

SEQ ID NO: 1716129 - DNA, 15 bp, Homo sapiens
tgtatcctttatcgc

SEQ ID NO: 1716130 - DNA, 15 bp, Homo sapiens
gtatcctttatcgct

SEQ ID NO: 1716131 - DNA, 15 bp, Homo sapiens
tatcctttatcgctg

SEQ ID NO: 1716132 - DNA, 15 bp, Homo sapiens
atcctttatcgctga

SEQ ID NO: 1716133 - DNA, 15 bp, Homo sapiens
tcctttatcgctgac

SEQ ID NO: 1716134 - DNA, 15 bp, Homo sapiens
cctttatcgctgaca

SEQ ID NO: 1716135 - DNA, 15 bp, Homo sapiens
ctttatcgctgacaa

SEQ ID NO: 1716136 - DNA, 15 bp, Homo sapiens
tttatcgctgacaaa

SEQ ID NO: 1716137 - DNA, 15 bp, Homo sapiens
ttatcgctgacaaag

SEQ ID NO: 1716138 - DNA, 15 bp, Homo sapiens
tatcgctgacaaaga

SEQ ID NO: 1716139 - DNA, 15 bp, Homo sapiens
atcgctgacaaagat

SEQ ID NO: 1716140 - DNA, 15 bp, Homo sapiens
tcgctgacaaagatt

SEQ ID NO: 1716141 - DNA, 15 bp, Homo sapiens
cgctgacaaagattt

SEQ ID NO: 1716142 - DNA, 15 bp, Homo sapiens
gctgacaaagatttg

SEQ ID NO: 1716143 - DNA, 15 bp, Homo sapiens
ctgacaaagatttgg

SEQ ID NO: 1716144 - DNA, 15 bp, Homo sapiens
tgacaaagatttggt

SEQ ID NO: 1716145 - DNA, 15 bp, Homo sapiens
gacaaagatttggtc

SEQ ID NO: 1716146 - DNA, 15 bp, Homo sapiens
acaaagatttggtct

SEQ ID NO: 1716147 - DNA, 15 bp, Homo sapiens
caaagatttggtctc

SEQ ID NO: 1716148 - DNA, 15 bp, Homo sapiens
aaagatttggtctct

SEQ ID NO: 1716149 - DNA, 15 bp, Homo sapiens
aagatttggtctctg

SEQ ID NO: 1716150 - DNA, 15 bp, Homo sapiens
agatttggtctctgc

SEQ ID NO: 1716151 - DNA, 15 bp, Homo sapiens
gatttggtctctgca

SEQ ID NO: 1716152 - DNA, 15 bp, Homo sapiens
atttggtctctgcaa

SEQ ID NO: 1716153 - DNA, 15 bp, Homo sapiens
tttggtctctgcaat

SEQ ID NO: 1716154 - DNA, 15 bp, Homo sapiens
ttggtctctgcaatt

SEQ ID NO: 1716155 - DNA, 15 bp, Homo sapiens
tggtctctgcaattt

SEQ ID NO: 1716156 - DNA, 15 bp, Homo sapiens
ggtctctgcaatttt

SEQ ID NO: 1716157 - DNA, 15 bp, Homo sapiens
gtctctgcaatttta

SEQ ID NO: 1716158 - DNA, 15 bp, Homo sapiens
tctctgcaattttac

SEQ ID NO: 1716159 - DNA, 15 bp, Homo sapiens
ctctgcaattttacc

SEQ ID NO: 1716160 - DNA, 15 bp, Homo sapiens
tctgcaattttacct

SEQ ID NO: 1716161 - DNA, 15 bp, Homo sapiens
ctgcaattttacctt

SEQ ID NO: 1716162 - DNA, 15 bp, Homo sapiens
tgcaattttacctta

SEQ ID NO: 1716163 - DNA, 15 bp, Homo sapiens
gcaattttaccttat

SEQ ID NO: 1716164 - DNA, 15 bp, Homo sapiens
caattttaccttatt

SEQ ID NO: 1716165 - DNA, 15 bp, Homo sapiens
aattttaccttattg

SEQ ID NO: 1716166 - DNA, 15 bp, Homo sapiens
attttaccttattgt
